United States Patent Application Publication US 2014/0004565 A1 - sequence listing, part 50

SEQ ID NO: 1175956 - RNA, 19 nt, Artificial Sequence
  Description of Artificial Sequence: Synthetic oligonucleotide
aaaugcauuggguugaauc

SEQ ID NO: 1175957 - RNA, 19 nt, Artificial Sequence
  Description of Artificial Sequence: Synthetic oligonucleotide
aaacaguugagccacagca

SEQ ID NO: 1175958 - RNA, 19 nt, Artificial Sequence
  Description of Artificial Sequence: Synthetic oligonucleotide
ucaaaugcagucucuagcg

SEQ ID NO: 1175959 - RNA, 19 nt, Artificial Sequence
  Description of Artificial Sequence: Synthetic oligonucleotide
aaagaucuucuuccaaacc

SEQ ID NO: 1175960 - RNA, 19 nt, Artificial Sequence
  Description of Artificial Sequence: Synthetic oligonucleotide
auugcuuacaauccccacc

SEQ ID NO: 1175961 - RNA, 19 nt, Artificial Sequence
  Description of Artificial Sequence: Synthetic oligonucleotide
uucacgguuacuauuaucu

SEQ ID NO: 1175962 - RNA, 19 nt, Artificial Sequence
  Description of Artificial Sequence: Synthetic oligonucleotide
ucuaucaucauuucgguuc

SEQ ID NO: 1175963 - RNA, 19 nt, Artificial Sequence
  Description of Artificial Sequence: Synthetic oligonucleotide
ugagccagaauccuucucg

SEQ ID NO: 1175964 - RNA, 19 nt, Artificial Sequence
  Description of Artificial Sequence: Synthetic oligonucleotide
aucauuucgguucccauac

SEQ ID NO: 1175965 - RNA, 19 nt, Artificial Sequence
  Description of Artificial Sequence: Synthetic oligonucleotide
acuauuaucucuaucauca

SEQ ID NO: 1175966 - RNA, 19 nt, Artificial Sequence
  Description of Artificial Sequence: Synthetic oligonucleotide
ugggauuuccaauagauaa

SEQ ID NO: 1175967 - RNA, 19 nt, Artificial Sequence
  Description of Artificial Sequence: Synthetic oligonucleotide
gaguuugggaugcuuaucg

SEQ ID NO: 1175968 - RNA, 19 nt, Artificial Sequence
  Description of Artificial Sequence: Synthetic oligonucleotide
ucaaauugcuuacaauccc

SEQ ID NO: 1175969 - RNA, 19 nt, Artificial Sequence
  Description of Artificial Sequence: Synthetic oligonucleotide
aaugcaucagagcugggca

SEQ ID NO: 1175970 - RNA, 19 nt, Artificial Sequence
  Description of Artificial Sequence: Synthetic oligonucleotide
aauugcuuacaauccccac

SEQ ID NO: 1175971 - RNA, 19 nt, Artificial Sequence
  Description of Artificial Sequence: Synthetic oligonucleotide
aucucuaucaucauuucgg

SEQ ID NO: 1175972 - RNA, 19 nt, Artificial Sequence
  Description of Artificial Sequence: Synthetic oligonucleotide
agugggaucaggccgggcc

SEQ ID NO: 1175973 - RNA, 19 nt, Artificial Sequence
  Description of Artificial Sequence: Synthetic oligonucleotide
aacagugucuacgucuccc

SEQ ID NO: 1175974 - RNA, 19 nt, Artificial Sequence
  Description of Artificial Sequence: Synthetic oligonucleotide
uguuaucauuucuaaacug

SEQ ID NO: 1175975 - RNA, 19 nt, Artificial Sequence
  Description of Artificial Sequence: Synthetic oligonucleotide
auacccaagugucacugcc

SEQ ID NO: 1175976 - RNA, 19 nt, Artificial Sequence
  Description of Artificial Sequence: Synthetic oligonucleotide
uucugaaacagugucuacg

SEQ ID NO: 1175977 - RNA, 19 nt, Artificial Sequence
  Description of Artificial Sequence: Synthetic oligonucleotide
auaguagaguuugggaugc

SEQ ID NO: 1175978 - RNA, 19 nt, Artificial Sequence
  Description of Artificial Sequence: Synthetic oligonucleotide
auaagucuuuuguaguguc

SEQ ID NO: 1175979 - RNA, 19 nt, Artificial Sequence
  Description of Artificial Sequence: Synthetic oligonucleotide
agggaagcaaucaaauugc

SEQ ID NO: 1175980 - RNA, 19 nt, Artificial Sequence
  Description of Artificial Sequence: Synthetic oligonucleotide
ucuaccugaauugaacugc

SEQ ID NO: 1175981 - RNA, 19 nt, Artificial Sequence
  Description of Artificial Sequence: Synthetic oligonucleotide
agauaagucuuuuguagug

SEQ ID NO: 1175982 - RNA, 19 nt, Artificial Sequence
  Description of Artificial Sequence: Synthetic oligonucleotide
uucuaaacugcugaggcug

SEQ ID NO: 1175983 - RNA, 19 nt, Artificial Sequence
  Description of Artificial Sequence: Synthetic oligonucleotide
aaugggauuuccaauagau

SEQ ID NO: 1175984 - RNA, 19 nt, Artificial Sequence
  Description of Artificial Sequence: Synthetic oligonucleotide
ucugaaacagugucuacgu

SEQ ID NO: 1175985 - RNA, 19 nt, Artificial Sequence
  Description of Artificial Sequence: Synthetic oligonucleotide
uccgccaggccuaacaaag

SEQ ID NO: 1175986 - RNA, 19 nt, Artificial Sequence
  Description of Artificial Sequence: Synthetic oligonucleotide
aggugcaacuccuugagug

SEQ ID NO: 1175987 - RNA, 19 nt, Artificial Sequence
  Description of Artificial Sequence: Synthetic oligonucleotide
aagugaaacaggcuggguu

SEQ ID NO: 1175988 - RNA, 19 nt, Artificial Sequence
  Description of Artificial Sequence: Synthetic oligonucleotide
agcucuauacccaaguguc

SEQ ID NO: 1175989 - RNA, 19 nt, Artificial Sequence
  Description of Artificial Sequence: Synthetic oligonucleotide
uagauaagucuuuuguagu

SEQ ID NO: 1175990 - RNA, 19 nt, Artificial Sequence
  Description of Artificial Sequence: Synthetic oligonucleotide
gucaaaugcagucucuagc

SEQ ID NO: 1175991 - RNA, 19 nt, Artificial Sequence
  Description of Artificial Sequence: Synthetic oligonucleotide
uuggucucuaccugaauug

SEQ ID NO: 1175992 - RNA, 19 nt, Artificial Sequence
  Description of Artificial Sequence: Synthetic oligonucleotide
cauuuuccacccuauuucc

SEQ ID NO: 1175993 - RNA, 19 nt, Artificial Sequence
  Description of Artificial Sequence: Synthetic oligonucleotide
uuucauuccaugcggugga

SEQ ID NO: 1175994 - RNA, 19 nt, Artificial Sequence
  Description of Artificial Sequence: Synthetic oligonucleotide
ucaaguucugaaacagugu

SEQ ID NO: 1175995 - RNA, 19 nt, Artificial Sequence
  Description of Artificial Sequence: Synthetic oligonucleotide
agugccaagaagugaaaca

SEQ ID NO: 1175996 - RNA, 19 nt, Artificial Sequence
  Description of Artificial Sequence: Synthetic oligonucleotide
guagugucuucauuuauac

SEQ ID NO: 1175997 - RNA, 19 nt, Artificial Sequence
  Description of Artificial Sequence: Synthetic oligonucleotide
agcgaggagccucugcugc

SEQ ID NO: 1175998 - RNA, 19 nt, Artificial Sequence
  Description of Artificial Sequence: Synthetic oligonucleotide
ugccaagaagugaaacagg

SEQ ID NO: 1175999 - RNA, 19 nt, Artificial Sequence
  Description of Artificial Sequence: Synthetic oligonucleotide
uccuucucggguucaacgg

SEQ ID NO: 1176000 - RNA, 19 nt, Artificial Sequence
  Description of Artificial Sequence: Synthetic oligonucleotide
agguuuuaccacugcggcc

SEQ ID NO: 1176001 - RNA, 19 nt, Artificial Sequence
  Description of Artificial Sequence: Synthetic oligonucleotide
cuggagcccaaucacaggg

SEQ ID NO: 1176002 - RNA, 19 nt, Artificial Sequence
  Description of Artificial Sequence: Synthetic oligonucleotide
cuuucauuccaugcggugg

SEQ ID NO: 1176003 - RNA, 19 nt, Artificial Sequence
  Description of Artificial Sequence: Synthetic oligonucleotide
ugucaaaugcagucucuag

SEQ ID NO: 1176004 - RNA, 19 nt, Artificial Sequence
  Description of Artificial Sequence: Synthetic oligonucleotide
uugggaugcuuaucggugg

SEQ ID NO: 1176005 - RNA, 19 nt, Artificial Sequence
  Description of Artificial Sequence: Synthetic oligonucleotide
uucccggucauuuuccacc

SEQ ID NO: 1176006 - RNA, 19 nt, Artificial Sequence
  Description of Artificial Sequence: Synthetic oligonucleotide
gaugcuuaucgguggagug

SEQ ID NO: 1176007 - RNA, 19 nt, Artificial Sequence
  Description of Artificial Sequence: Synthetic oligonucleotide
uuaucgguggagugugagg

SEQ ID NO: 1176008 - RNA, 19 nt, Artificial Sequence
  Description of Artificial Sequence: Synthetic oligonucleotide
gucuacgucucccacuugg

SEQ ID NO: 1176009 - RNA, 19 nt, Artificial Sequence
  Description of Artificial Sequence: Synthetic oligonucleotide
gguucaacggaugagguag

SEQ ID NO: 1176010 - RNA, 19 nt, Artificial Sequence
  Description of Artificial Sequence: Synthetic oligonucleotide
uucauuuauaccagcgaua

SEQ ID NO: 1176011 - RNA, 19 nt, Artificial Sequence
  Description of Artificial Sequence: Synthetic oligonucleotide
ucggguucaacggaugagg

SEQ ID NO: 1176012 - RNA, 19 nt, Artificial Sequence
  Description of Artificial Sequence: Synthetic oligonucleotide
uggaaugggauuuccaaua

SEQ ID NO: 1176013 - RNA, 19 nt, Artificial Sequence
  Description of Artificial Sequence: Synthetic oligonucleotide
cuaucaucauuucgguucc

SEQ ID NO: 1176014 - RNA, 19 nt, Artificial Sequence
  Description of Artificial Sequence: Synthetic oligonucleotide
uggcgguaaaugcauuggg

SEQ ID NO: 1176015 - RNA, 19 nt, Artificial Sequence
  Description of Artificial Sequence: Synthetic oligonucleotide
caaucacagggccaggugc

SEQ ID NO: 1176016 - RNA, 19 nt, Artificial Sequence
  Description of Artificial Sequence: Synthetic oligonucleotide
cucucuaucucuggaaucc

SEQ ID NO: 1176017 - RNA, 19 nt, Artificial Sequence
  Description of Artificial Sequence: Synthetic oligonucleotide
uaucgguggagugugagga

SEQ ID NO: 1176018 - RNA, 19 nt, Artificial Sequence
  Description of Artificial Sequence: Synthetic oligonucleotide
gccacauucugucaaaugc

SEQ ID NO: 1176019 - RNA, 19 nt, Artificial Sequence
  Description of Artificial Sequence: Synthetic oligonucleotide
aguuugggaugcuuaucgg

SEQ ID NO: 1176020 - RNA, 19 nt, Artificial Sequence
  Description of Artificial Sequence: Synthetic oligonucleotide
cuugaguggucugaaacag

SEQ ID NO: 1176021 - RNA, 19 nt, Artificial Sequence
  Description of Artificial Sequence: Synthetic oligonucleotide
gacgagguggcaucauagg

SEQ ID NO: 1176022 - RNA, 19 nt, Artificial Sequence
  Description of Artificial Sequence: Synthetic oligonucleotide
ugcgguggugugcugauug

SEQ ID NO: 1176023 - RNA, 19 nt, Artificial Sequence
  Description of Artificial Sequence: Synthetic oligonucleotide
cugggcgcagaaauggugg

SEQ ID NO: 1176024 - RNA, 19 nt, Artificial Sequence
  Description of Artificial Sequence: Synthetic oligonucleotide
auaggaaaccgcugcaggu

SEQ ID NO: 1176025 - RNA, 19 nt, Artificial Sequence
  Description of Artificial Sequence: Synthetic oligonucleotide
uggucugaaacaguugagc

SEQ ID NO: 1176026 - RNA, 19 nt, Artificial Sequence
  Description of Artificial Sequence: Synthetic oligonucleotide
agcgauaguagaguuuggg

SEQ ID NO: 1176027 - RNA, 19 nt, Artificial Sequence
  Description of Artificial Sequence: Synthetic oligonucleotide
uuuucgcacugucagcaga

SEQ ID NO: 1176028 - RNA, 19 nt, Artificial Sequence
  Description of Artificial Sequence: Synthetic oligonucleotide
ugggcagauucguaggugc

SEQ ID NO: 1176029 - RNA, 19 nt, Artificial Sequence
  Description of Artificial Sequence: Synthetic oligonucleotide
uaagucuuuuguagugucu

SEQ ID NO: 1176030 - RNA, 19 nt, Artificial Sequence
  Description of Artificial Sequence: Synthetic oligonucleotide
ucuacgggacucucuaucu

SEQ ID NO: 1176031 - RNA, 19 nt, Artificial Sequence
  Description of Artificial Sequence: Synthetic oligonucleotide
ucucuaucaucauuucggu

SEQ ID NO: 1176032 - RNA, 19 nt, Artificial Sequence
  Description of Artificial Sequence: Synthetic oligonucleotide
uuuguagugucuucauuua

SEQ ID NO: 1176033 - RNA, 19 nt, Artificial Sequence
  Description of Artificial Sequence: Synthetic oligonucleotide
ucgguugucuuccuucucu

SEQ ID NO: 1176034 - RNA, 19 nt, Artificial Sequence
  Description of Artificial Sequence: Synthetic oligonucleotide
gaaacaguugagccacagc

SEQ ID NO: 1176035 - RNA, 19 nt, Artificial Sequence
  Description of Artificial Sequence: Synthetic oligonucleotide
guucccauaccguucccgg

SEQ ID NO: 1176036 - RNA, 19 nt, Artificial Sequence
  Description of Artificial Sequence: Synthetic oligonucleotide
ggucugaaacaguugagcc

SEQ ID NO: 1176037 - RNA, 19 nt, Artificial Sequence
  Description of Artificial Sequence: Synthetic oligonucleotide
auagaagggaagcaaucaa

SEQ ID NO: 1176038 - RNA, 19 nt, Artificial Sequence
  Description of Artificial Sequence: Synthetic oligonucleotide
aaauugcuuacaaucccca

SEQ ID NO: 1176039 - RNA, 19 nt, Artificial Sequence
  Description of Artificial Sequence: Synthetic oligonucleotide
uuaacugagcugugauagc

SEQ ID NO: 1176040 - RNA, 19 nt, Artificial Sequence
  Description of Artificial Sequence: Synthetic oligonucleotide
uccacccuauuuccaaaag

SEQ ID NO: 1176041 - RNA, 19 nt, Artificial Sequence
  Description of Artificial Sequence: Synthetic oligonucleotide
cuugugcaaguucagaaga

SEQ ID NO: 1176042 - RNA, 19 nt, Artificial Sequence
  Description of Artificial Sequence: Synthetic oligonucleotide
ucuagccccagacaccacu

SEQ ID NO: 1176043 - RNA, 19 nt, Artificial Sequence
  Description of Artificial Sequence: Synthetic oligonucleotide
cuaaggggagguucacugg

SEQ ID NO: 1176044 - RNA, 19 nt, Artificial Sequence
  Description of Artificial Sequence: Synthetic oligonucleotide
aggcauggaguuugugggc

SEQ ID NO: 1176045 - RNA, 19 nt, Artificial Sequence
  Description of Artificial Sequence: Synthetic oligonucleotide
ggagcaaauauuauacagc

SEQ ID NO: 1176046 - RNA, 19 nt, Artificial Sequence
  Description of Artificial Sequence: Synthetic oligonucleotide
ucgguucccauaccguucc

SEQ ID NO: 1176047 - RNA, 19 nt, Artificial Sequence
  Description of Artificial Sequence: Synthetic oligonucleotide
cucuaccugaauugaacug

SEQ ID NO: 1176048 - RNA, 19 nt, Artificial Sequence
  Description of Artificial Sequence: Synthetic oligonucleotide
uucggcguuuccucuagcc

SEQ ID NO: 1176049 - RNA, 19 nt, Artificial Sequence
  Description of Artificial Sequence: Synthetic oligonucleotide
guacaccucagcucuauac

SEQ ID NO: 1176050 - RNA, 19 nt, Artificial Sequence
  Description of Artificial Sequence: Synthetic oligonucleotide
ucuacgucucccacuuggc

SEQ ID NO: 1176051 - RNA, 19 nt, Artificial Sequence
  Description of Artificial Sequence: Synthetic oligonucleotide
agcugucuuuaacugagcu

SEQ ID NO: 1176052 - RNA, 19 nt, Artificial Sequence
  Description of Artificial Sequence: Synthetic oligonucleotide
cauuggguugaauccuggg

SEQ ID NO: 1176053 - RNA, 19 nt, Artificial Sequence
  Description of Artificial Sequence: Synthetic oligonucleotide
accucugugcaucaugggu

SEQ ID NO: 1176054 - RNA, 19 nt, Artificial Sequence
  Description of Artificial Sequence: Synthetic oligonucleotide
ucggcguuuccucuagccc

SEQ ID NO: 1176055 - RNA, 19 nt, Artificial Sequence
  Description of Artificial Sequence: Synthetic oligonucleotide
uuaucucuaucaucauuuc

SEQ ID NO: 1176056 - RNA, 19 nt, Artificial Sequence
  Description of Artificial Sequence: Synthetic oligonucleotide
cucuucggaagguuuuacc

SEQ ID NO: 1176057 - RNA, 19 nt, Artificial Sequence
  Description of Artificial Sequence: Synthetic oligonucleotide
gauucggcguuuccucuag

SEQ ID NO: 1176058 - RNA, 19 nt, Artificial Sequence
  Description of Artificial Sequence: Synthetic oligonucleotide
auccugggcgcagaaaugg

SEQ ID NO: 1176059 - RNA, 19 nt, Artificial Sequence
  Description of Artificial Sequence: Synthetic oligonucleotide
uguuauuuuguggcuauuu

SEQ ID NO: 1176060 - RNA, 19 nt, Artificial Sequence
  Description of Artificial Sequence: Synthetic oligonucleotide
uagagcgucuauuucuguc

SEQ ID NO: 1176061 - RNA, 19 nt, Artificial Sequence
  Description of Artificial Sequence: Synthetic oligonucleotide
uggguugaauccugggcgc

SEQ ID NO: 1176062 - RNA, 19 nt, Artificial Sequence
  Description of Artificial Sequence: Synthetic oligonucleotide
auauuauacagcaucugua

SEQ ID NO: 1176063 - RNA, 19 nt, Artificial Sequence
  Description of Artificial Sequence: Synthetic oligonucleotide
accgcugcaggugaggcgg

SEQ ID NO: 1176064 - RNA, 19 nt, Artificial Sequence
  Description of Artificial Sequence: Synthetic oligonucleotide
cagucucuagcgaggagcc

SEQ ID NO: 1176065 - RNA, 19 nt, Artificial Sequence
  Description of Artificial Sequence: Synthetic oligonucleotide
caggugacucuucggaagg

SEQ ID NO: 1176066 - RNA, 19 nt, Artificial Sequence
  Description of Artificial Sequence: Synthetic oligonucleotide
ucgguggagugugaggagg

SEQ ID NO: 1176067 - RNA, 19 nt, Artificial Sequence
  Description of Artificial Sequence: Synthetic oligonucleotide
gaagaggcuuuuacugggg

SEQ ID NO: 1176068 - RNA, 19 nt, Artificial Sequence
  Description of Artificial Sequence: Synthetic oligonucleotide
ucucggguucaacggauga

SEQ ID NO: 1176069 - RNA, 19 nt, Artificial Sequence
  Description of Artificial Sequence: Synthetic oligonucleotide
ucuagcgaggagccucugc

SEQ ID NO: 1176070 - RNA, 19 nt, Artificial Sequence
  Description of Artificial Sequence: Synthetic oligonucleotide
gcaggagcaaauauuauac

SEQ ID NO: 1176071 - RNA, 19 nt, Artificial Sequence
  Description of Artificial Sequence: Synthetic oligonucleotide
ggaaagggcccuuucauuc

SEQ ID NO: 1176072 - RNA, 19 nt, Artificial Sequence
  Description of Artificial Sequence: Synthetic oligonucleotide
gcuaaggggagguucacug

SEQ ID NO: 1176073 - RNA, 19 nt, Artificial Sequence
  Description of Artificial Sequence: Synthetic oligonucleotide
gaugcuggcggcugcggug

SEQ ID NO: 1176074 - RNA, 19 nt, Artificial Sequence
  Description of Artificial Sequence: Synthetic oligonucleotide
ggaaugggauuuccaauag

SEQ ID NO: 1176075 - RNA, 19 nt, Artificial Sequence
  Description of Artificial Sequence: Synthetic oligonucleotide
auuuucgcacugucagcag

SEQ ID NO: 1176076 - RNA, 19 nt, Artificial Sequence
  Description of Artificial Sequence: Synthetic oligonucleotide
ugcgguggaggcauggcaa

SEQ ID NO: 1176077 - RNA, 19 nt, Artificial Sequence
  Description of Artificial Sequence: Synthetic oligonucleotide
agaguuugggaugcuuauc

SEQ ID NO: 1176078 - RNA, 19 nt, Artificial Sequence
  Description of Artificial Sequence: Synthetic oligonucleotide
ugccuguuaucauuucuaa

SEQ ID NO: 1176079 - RNA, 19 nt, Artificial Sequence
  Description of Artificial Sequence: Synthetic oligonucleotide
cuuaucgguggagugugag

SEQ ID NO: 1176080 - RNA, 19 nt, Artificial Sequence
  Description of Artificial Sequence: Synthetic oligonucleotide
gaaugggauuuccaauaga

SEQ ID NO: 1176081 - RNA, 19 nt, Artificial Sequence
  Description of Artificial Sequence: Synthetic oligonucleotide
agggagaaagccuggcggu

SEQ ID NO: 1176082 - RNA, 19 nt, Artificial Sequence
  Description of Artificial Sequence: Synthetic oligonucleotide
ugugcugauuguuguugcu

SEQ ID NO: 1176083 - RNA, 19 nt, Artificial Sequence
  Description of Artificial Sequence: Synthetic oligonucleotide
ggaguuauaggaggugggg

SEQ ID NO: 1176084 - RNA, 19 nt, Artificial Sequence
  Description of Artificial Sequence: Synthetic oligonucleotide
ucccauaccguucccgguc

SEQ ID NO: 1176085 - RNA, 19 nt, Artificial Sequence
  Description of Artificial Sequence: Synthetic oligonucleotide
aggagcugucuuuaacuga

SEQ ID NO: 1176086 - RNA, 19 nt, Artificial Sequence
  Description of Artificial Sequence: Synthetic oligonucleotide
ccaggccuaacaaaggggc

SEQ ID NO: 1176087 - RNA, 19 nt, Artificial Sequence
  Description of Artificial Sequence: Synthetic oligonucleotide
uacccaagugucacugcca

SEQ ID NO: 1176088 - RNA, 19 nt, Artificial Sequence
  Description of Artificial Sequence: Synthetic oligonucleotide
auaccagcgauaguagagu

SEQ ID NO: 1176089 - RNA, 19 nt, Artificial Sequence
  Description of Artificial Sequence: Synthetic oligonucleotide
ucacgguuacuauuaucuc

SEQ ID NO: 1176090 - RNA, 19 nt, Artificial Sequence
  Description of Artificial Sequence: Synthetic oligonucleotide
cuggcgguaaaugcauugg

SEQ ID NO: 1176091 - RNA, 19 nt, Artificial Sequence
  Description of Artificial Sequence: Synthetic oligonucleotide
ucaucauuucgguucccau

SEQ ID NO: 1176092 - RNA, 19 nt, Artificial Sequence
  Description of Artificial Sequence: Synthetic oligonucleotide
uggagcccaaucacagggc

SEQ ID NO: 1176093 - RNA, 19 nt, Artificial Sequence
  Description of Artificial Sequence: Synthetic oligonucleotide
gguuuuaccacugcggcca

SEQ ID NO: 1176094 - RNA, 19 nt, Artificial Sequence
  Description of Artificial Sequence: Synthetic oligonucleotide
aggaaaccgcugcagguga

SEQ ID NO: 1176095 - RNA, 19 nt, Artificial Sequence
  Description of Artificial Sequence: Synthetic oligonucleotide
uccaauagauaagucuuuu

SEQ ID NO: 1176096 - RNA, 19 nt, Artificial Sequence
  Description of Artificial Sequence: Synthetic oligonucleotide
ucauuucgguucccauacc

SEQ ID NO: 1176097 - RNA, 19 nt, Artificial Sequence
  Description of Artificial Sequence: Synthetic oligonucleotide
gaccucugugcaucauggg

SEQ ID NO: 1176098 - RNA, 19 nt, Artificial Sequence
  Description of Artificial Sequence: Synthetic oligonucleotide
ugucccggugcccacuaga

SEQ ID NO: 1176099 - RNA, 19 nt, Artificial Sequence
  Description of Artificial Sequence: Synthetic oligonucleotide
cuuggcuaaggggagguuc

SEQ ID NO: 1176100 - RNA, 19 nt, Artificial Sequence
  Description of Artificial Sequence: Synthetic oligonucleotide
aacugugcuacaggaggca

SEQ ID NO: 1176101 - RNA, 19 nt, Artificial Sequence
  Description of Artificial Sequence: Synthetic oligonucleotide
ucucuagcgaggagccucu

SEQ ID NO: 1176102 - RNA, 19 nt, Artificial Sequence
  Description of Artificial Sequence: Synthetic oligonucleotide
agcgucuauuucugucuuc

SEQ ID NO: 1176103 - RNA, 19 nt, Artificial Sequence
  Description of Artificial Sequence: Synthetic oligonucleotide
acucuucggaagguuuuac

SEQ ID NO: 1176104 - RNA, 19 nt, Artificial Sequence
  Description of Artificial Sequence: Synthetic oligonucleotide
ucccggucauuuuccaccc

SEQ ID NO: 1176105 - RNA, 19 nt, Artificial Sequence
  Description of Artificial Sequence: Synthetic oligonucleotide
uucucggguucaacggaug

SEQ ID NO: 1176106 - RNA, 19 nt, Artificial Sequence
  Description of Artificial Sequence: Synthetic oligonucleotide
aucaugggugguggcaugg

SEQ ID NO: 1176107 - RNA, 19 nt, Artificial Sequence
  Description of Artificial Sequence: Synthetic oligonucleotide
ucucccuucgguugucuuc

SEQ ID NO: 1176108 - RNA, 19 nt, Artificial Sequence
  Description of Artificial Sequence: Synthetic oligonucleotide
agauucguaggugcagcag

SEQ ID NO: 1176109 - RNA, 19 nt, Artificial Sequence
  Description of Artificial Sequence: Synthetic oligonucleotide
uaccugaauugaacugcug

SEQ ID NO: 1176110 - RNA, 19 nt, Artificial Sequence
  Description of Artificial Sequence: Synthetic oligonucleotide
caugggacgagguggcauc

SEQ ID NO: 1176111 - RNA, 19 nt, Artificial Sequence
  Description of Artificial Sequence: Synthetic oligonucleotide
agcagauucggcguuuccu

SEQ ID NO: 1176112 - RNA, 19 nt, Artificial Sequence
  Description of Artificial Sequence: Synthetic oligonucleotide
gauaagucuuuuguagugu

SEQ ID NO: 1176113 - RNA, 19 nt, Artificial Sequence
  Description of Artificial Sequence: Synthetic oligonucleotide
ugcaacuccuugagugcca

SEQ ID NO: 1176114 - RNA, 19 nt, Artificial Sequence
  Description of Artificial Sequence: Synthetic oligonucleotide
uucaacggaugagguagcc

SEQ ID NO: 1176115 - RNA, 19 nt, Artificial Sequence
  Description of Artificial Sequence: Synthetic oligonucleotide
gauagcaccugggccauca

SEQ ID NO: 1176116 - RNA, 19 nt, Artificial Sequence
  Description of Artificial Sequence: Synthetic oligonucleotide
guggagugugaggaggagg

SEQ ID NO: 1176117 - RNA, 19 nt, Artificial Sequence
  Description of Artificial Sequence: Synthetic oligonucleotide
auucggcguuuccucuagc

SEQ ID NO: 1176118 - RNA, 19 nt, Artificial Sequence
  Description of Artificial Sequence: Synthetic oligonucleotide
ggaugagguagccucagca

SEQ ID NO: 1176119 - RNA, 19 nt, Artificial Sequence
  Description of Artificial Sequence: Synthetic oligonucleotide
auacauuuucgcacuguca

SEQ ID NO: 1176120 - RNA, 19 nt, Artificial Sequence
  Description of Artificial Sequence: Synthetic oligonucleotide
caggccuaacaaaggggcc

SEQ ID NO: 1176121 - RNA, 19 nt, Artificial Sequence
  Description of Artificial Sequence: Synthetic oligonucleotide
ggaccucugugcaucaugg

SEQ ID NO: 1176122 - RNA, 19 nt, Artificial Sequence
  Description of Artificial Sequence: Synthetic oligonucleotide
uuccacccuauuuccaaaa

SEQ ID NO: 1176123 - RNA, 19 nt, Artificial Sequence
  Description of Artificial Sequence: Synthetic oligonucleotide
gagugccaagaagugaaac

SEQ ID NO: 1176124 - RNA, 19 nt, Artificial Sequence
  Description of Artificial Sequence: Synthetic oligonucleotide
gguaaaugcauuggguuga

SEQ ID NO: 1176125 - RNA, 19 nt, Artificial Sequence
  Description of Artificial Sequence: Synthetic oligonucleotide
cuacuguggggugaugcag

SEQ ID NO: 1176126 - RNA, 19 nt, Artificial Sequence
  Description of Artificial Sequence: Synthetic oligonucleotide
ggcgcagaaaugguggagg

SEQ ID NO: 1176127 - RNA, 19 nt, Artificial Sequence
  Description of Artificial Sequence: Synthetic oligonucleotide
cacuggcuuuguuacugcc

SEQ ID NO: 1176128 - RNA, 19 nt, Artificial Sequence
  Description of Artificial Sequence: Synthetic oligonucleotide
ucaacggaugagguagccu

SEQ ID NO: 1176129 - RNA, 19 nt, Artificial Sequence
  Description of Artificial Sequence: Synthetic oligonucleotide
aucgguggagugugaggag

SEQ ID NO: 1176130 - RNA, 19 nt, Artificial Sequence
  Description of Artificial Sequence: Synthetic oligonucleotide
ggggugggcagauucguag

SEQ ID NO: 1176131 - RNA, 19 nt, Artificial Sequence
  Description of Artificial Sequence: Synthetic oligonucleotide
uccguucacgguuacuauu

SEQ ID NO: 1176132 - RNA, 19 nt, Artificial Sequence
  Description of Artificial Sequence: Synthetic oligonucleotide
agcaaucaaauugcuuaca

SEQ ID NO: 1176133 - RNA, 19 nt, Artificial Sequence
  Description of Artificial Sequence: Synthetic oligonucleotide
ccagcgauaguagaguuug

SEQ ID NO: 1176134 - RNA, 19 nt, Artificial Sequence
  Description of Artificial Sequence: Synthetic oligonucleotide
guucacgguuacuauuauc

SEQ ID NO: 1176135 - RNA, 19 nt, Artificial Sequence
  Description of Artificial Sequence: Synthetic oligonucleotide
cacuagagcgucuauuucu

SEQ ID NO: 1176136 - RNA, 19 nt, Artificial Sequence
  Description of Artificial Sequence: Synthetic oligonucleotide
ccaauagauaagucuuuug

SEQ ID NO: 1176137 - RNA, 19 nt, Artificial Sequence
  Description of Artificial Sequence: Synthetic oligonucleotide
cacccuauuuccaaaagau

SEQ ID NO: 1176138 - RNA, 19 nt, Artificial Sequence
  Description of Artificial Sequence: Synthetic oligonucleotide
acgguuacuauuaucucua

SEQ ID NO: 1176139 - RNA, 19 nt, Artificial Sequence
  Description of Artificial Sequence: Synthetic oligonucleotide
auuccgccaggccuaacaa

SEQ ID NO: 1176140 - RNA, 19 nt, Artificial Sequence
  Description of Artificial Sequence: Synthetic oligonucleotide
acgucucccacuuggcuaa

SEQ ID NO: 1176141 - RNA, 19 nt, Artificial Sequence
  Description of Artificial Sequence: Synthetic oligonucleotide
cuuuaacugagcugugaua

SEQ ID NO: 1176142 - RNA, 19 nt, Artificial Sequence
  Description of Artificial Sequence: Synthetic oligonucleotide
uugcugcugcugcugcugc

SEQ ID NO: 1176143 - RNA, 19 nt, Artificial Sequence
  Description of Artificial Sequence: Synthetic oligonucleotide
cugugcuacaggaggcaug

SEQ ID NO: 1176144 - RNA, 19 nt, Artificial Sequence
  Description of Artificial Sequence: Synthetic oligonucleotide
ggagcccaaucacagggcc

SEQ ID NO: 1176145 - RNA, 19 nt, Artificial Sequence
  Description of Artificial Sequence: Synthetic oligonucleotide
caggagcaaauauuauaca

SEQ ID NO: 1176146 - RNA, 19 nt, Artificial Sequence
  Description of Artificial Sequence: Synthetic oligonucleotide
cacgguuacuauuaucucu

SEQ ID NO: 1176147 - RNA, 19 nt, Artificial Sequence
  Description of Artificial Sequence: Synthetic oligonucleotide
aacggaugagguagccuca

SEQ ID NO: 1176148 - RNA, 19 nt, Artificial Sequence
  Description of Artificial Sequence: Synthetic oligonucleotide
ggugccuggagcccaauca

SEQ ID NO: 1176149 - RNA, 19 nt, Artificial Sequence
  Description of Artificial Sequence: Synthetic oligonucleotide
cauuccgccaggccuaaca

SEQ ID NO: 1176150 - RNA, 19 nt, Artificial Sequence
  Description of Artificial Sequence: Synthetic oligonucleotide
gguuacuauuaucucuauc

SEQ ID NO: 1176151 - RNA, 19 nt, Artificial Sequence
  Description of Artificial Sequence: Synthetic oligonucleotide
uuccaugcgguggaggcau

SEQ ID NO: 1176152 - RNA, 19 nt, Artificial Sequence
  Description of Artificial Sequence: Synthetic oligonucleotide
cugaaacagugucuacguc

SEQ ID NO: 1176153 - RNA, 19 nt, Artificial Sequence
  Description of Artificial Sequence: Synthetic oligonucleotide
uggcauuccgccaggccua

SEQ ID NO: 1176154 - RNA, 19 nt, Artificial Sequence
  Description of Artificial Sequence: Synthetic oligonucleotide
ugggcgcagaaauggugga

SEQ ID NO: 1176155 - RNA, 19 nt, Artificial Sequence
  Description of Artificial Sequence: Synthetic oligonucleotide
ucccggugcccacuagagc

SEQ ID NO: 1176156 - RNA, 19 nt, Artificial Sequence
  Description of Artificial Sequence: Synthetic oligonucleotide
auucguaggugcagcaggu

SEQ ID NO: 1176157 - RNA, 19 nt, Artificial Sequence
  Description of Artificial Sequence: Synthetic oligonucleotide
ucuuggucucuaccugaau

SEQ ID NO: 1176158 - RNA, 19 nt, Artificial Sequence
  Description of Artificial Sequence: Synthetic oligonucleotide
augcaucagagcugggcaa

SEQ ID NO: 1176159 - RNA, 19 nt, Artificial Sequence
  Description of Artificial Sequence: Synthetic oligonucleotide
gacucucuaucucuggaau

SEQ ID NO: 1176160 - RNA, 19 nt, Artificial Sequence
  Description of Artificial Sequence: Synthetic oligonucleotide
gugcaacuccuugagugcc

SEQ ID NO: 1176161 - RNA, 19 nt, Artificial Sequence
  Description of Artificial Sequence: Synthetic oligonucleotide
uucauuccaugcgguggag

SEQ ID NO: 1176162 - RNA, 19 nt, Artificial Sequence
  Description of Artificial Sequence: Synthetic oligonucleotide
guugcugcugcugcugcug

SEQ ID NO: 1176163 - RNA, 19 nt, Artificial Sequence
  Description of Artificial Sequence: Synthetic oligonucleotide
caaaugcagucucuagcga

SEQ ID NO: 1176164 - RNA, 19 nt, Artificial Sequence
  Description of Artificial Sequence: Synthetic oligonucleotide
uaccagcgauaguagaguu

SEQ ID NO: 1176165 - RNA, 19 nt, Artificial Sequence
  Description of Artificial Sequence: Synthetic oligonucleotide
gcgauaguagaguuuggga

SEQ ID NO: 1176166 - RNA, 19 nt, Artificial Sequence
  Description of Artificial Sequence: Synthetic oligonucleotide
cucggguucaacggaugag

SEQ ID NO: 1176167 - RNA, 19 nt, Artificial Sequence
  Description of Artificial Sequence: Synthetic oligonucleotide
uccugggcgcagaaauggu

SEQ ID NO: 1176168 - RNA, 19 nt, Artificial Sequence
  Description of Artificial Sequence: Synthetic oligonucleotide
gcgucuauuucugucuucc

SEQ ID NO: 1176169 - RNA, 19 nt, Artificial Sequence
  Description of Artificial Sequence: Synthetic oligonucleotide
gaccuguggauggugccug

SEQ ID NO: 1176170 - RNA, 19 nt, Artificial Sequence
  Description of Artificial Sequence: Synthetic oligonucleotide
uucgguugucuuccuucuc

SEQ ID NO: 1176171 - RNA, 19 nt, Artificial Sequence
  Description of Artificial Sequence: Synthetic oligonucleotide
ggacgagguggcaucauag

SEQ ID NO: 1176172 - RNA, 19 nt, Artificial Sequence
  Description of Artificial Sequence: Synthetic oligonucleotide
ugaaacaggcuggguuaca

SEQ ID NO: 1176173 - RNA, 19 nt, Artificial Sequence
  Description of Artificial Sequence: Synthetic oligonucleotide
gcagauucggcguuuccuc

SEQ ID NO: 1176174 - RNA, 19 nt, Artificial Sequence
  Description of Artificial Sequence: Synthetic oligonucleotide
gguggaaagggcccuuuca

SEQ ID NO: 1176175 - RNA, 19 nt, Artificial Sequence
  Description of Artificial Sequence: Synthetic oligonucleotide
cagaauccuucucggguuc

SEQ ID NO: 1176176 - RNA, 19 nt, Artificial Sequence
  Description of Artificial Sequence: Synthetic oligonucleotide
caaaugcaucagagcuggg

SEQ ID NO: 1176177 - RNA, 19 nt, Artificial Sequence
  Description of Artificial Sequence: Synthetic oligonucleotide
ccaagaagaccuguggaug

SEQ ID NO: 1176178 - RNA, 19 nt, Artificial Sequence
  Description of Artificial Sequence: Synthetic oligonucleotide
cuacgggacucucuaucuc

SEQ ID NO: 1176179 - RNA, 19 nt, Artificial Sequence
  Description of Artificial Sequence: Synthetic oligonucleotide
ugguggaaagggcccuuuc

SEQ ID NO: 1176180 - RNA, 19 nt, Artificial Sequence
  Description of Artificial Sequence: Synthetic oligonucleotide
auaccguucccggucauuu

SEQ ID NO: 1176181 - RNA, 19 nt, Artificial Sequence
  Description of Artificial Sequence: Synthetic oligonucleotide
gguucccauaccguucccg

SEQ ID NO: 1176182 - RNA, 19 nt, Artificial Sequence
  Description of Artificial Sequence: Synthetic oligonucleotide
agggcccuuucauuccaug

SEQ ID NO: 1176183 - RNA, 19 nt, Artificial Sequence
  Description of Artificial Sequence: Synthetic oligonucleotide
ccaggugcaacuccuugag

SEQ ID NO: 1176184 - RNA, 19 nt, Artificial Sequence
  Description of Artificial Sequence: Synthetic oligonucleotide
uuccgccaggccuaacaaa

SEQ ID NO: 1176185 - RNA, 19 nt, Artificial Sequence
  Description of Artificial Sequence: Synthetic oligonucleotide
ggguccgggagggagaaag

SEQ ID NO: 1176186 - RNA, 19 nt, Artificial Sequence
  Description of Artificial Sequence: Synthetic oligonucleotide
gggcccuuucauuccaugc

SEQ ID NO: 1176187 - RNA, 19 nt, Artificial Sequence
  Description of Artificial Sequence: Synthetic oligonucleotide
agauucggcguuuccucua

SEQ ID NO: 1176188 - RNA, 19 nt, Artificial Sequence
  Description of Artificial Sequence: Synthetic oligonucleotide
uggcuuuguuacugcccgc

SEQ ID NO: 1176189 - RNA, 19 nt, Artificial Sequence
  Description of Artificial Sequence: Synthetic oligonucleotide
cuagcgaggagccucugcu

SEQ ID NO: 1176190 - RNA, 19 nt, Artificial Sequence
  Description of Artificial Sequence: Synthetic oligonucleotide
ugucuacgucucccacuug

SEQ ID NO: 1176191 - RNA, 19 nt, Artificial Sequence
  Description of Artificial Sequence: Synthetic oligonucleotide
cgguaaaugcauuggguug

SEQ ID NO: 1176192 - RNA, 19 nt, Artificial Sequence
  Description of Artificial Sequence: Synthetic oligonucleotide
cuuggucucuaccugaauu

SEQ ID NO: 1176193 - RNA, 19 nt, Artificial Sequence
  Description of Artificial Sequence: Synthetic oligonucleotide
ggcuuuguuacugcccgcc

SEQ ID NO: 1176194 - RNA, 19 nt, Artificial Sequence
  Description of Artificial Sequence: Synthetic oligonucleotide
uaucaucauuucgguuccc

SEQ ID NO: 1176195 - RNA, 19 nt, Artificial Sequence
  Description of Artificial Sequence: Synthetic oligonucleotide
acggaugagguagccucag

SEQ ID NO: 1176196 - RNA, 19 nt, Artificial Sequence
  Description of Artificial Sequence: Synthetic oligonucleotide
guucaacggaugagguagc

SEQ ID NO: 1176197 - RNA, 19 nt, Artificial Sequence
  Description of Artificial Sequence: Synthetic oligonucleotide
ugcugcugcugcugcugcc

SEQ ID NO: 1176198 - RNA, 19 nt, Artificial Sequence
  Description of Artificial Sequence: Synthetic oligonucleotide
cagauucguaggugcagca

SEQ ID NO: 1176199 - RNA, 19 nt, Artificial Sequence
  Description of Artificial Sequence: Synthetic oligonucleotide
gcagauucguaggugcagc

SEQ ID NO: 1176200 - RNA, 19 nt, Artificial Sequence
  Description of Artificial Sequence: Synthetic oligonucleotide
ccuugaguggucugaaaca

SEQ ID NO: 1176201 - RNA, 19 nt, Artificial Sequence
  Description of Artificial Sequence: Synthetic oligonucleotide
ugcuuacaauccccaccaa

SEQ ID NO: 1176202 - RNA, 19 nt, Artificial Sequence
  Description of Artificial Sequence: Synthetic oligonucleotide
ccuggcgguaaaugcauug

SEQ ID NO: 1176203 - RNA, 19 nt, Artificial Sequence
  Description of Artificial Sequence: Synthetic oligonucleotide
ucugucccggugcccacua

SEQ ID NO: 1176204 - RNA, 19 nt, Artificial Sequence
  Description of Artificial Sequence: Synthetic oligonucleotide
gugggcagauucguaggug

SEQ ID NO: 1176205 - RNA, 19 nt, Artificial Sequence
  Description of Artificial Sequence: Synthetic oligonucleotide
augggauuuccaauagaua

SEQ ID NO: 1176206 - RNA, 19 nt, Artificial Sequence
  Description of Artificial Sequence: Synthetic oligonucleotide
ucagcagauucggcguuuc

SEQ ID NO: 1176207 - RNA, 19 nt, Artificial Sequence
  Description of Artificial Sequence: Synthetic oligonucleotide
caugcgguggaggcauggc

SEQ ID NO: 1176208 - RNA, 19 nt, Artificial Sequence
  Description of Artificial Sequence: Synthetic oligonucleotide
cagcucuauacccaagugu

SEQ ID NO: 1176209 - RNA, 19 nt, Artificial Sequence
  Description of Artificial Sequence: Synthetic oligonucleotide
ggcagauucguaggugcag

SEQ ID NO: 1176210 - RNA, 19 nt, Artificial Sequence
  Description of Artificial Sequence: Synthetic oligonucleotide
cugagccagaauccuucuc

SEQ ID NO: 1176211 - RNA, 19 nt, Artificial Sequence
  Description of Artificial Sequence: Synthetic oligonucleotide
ggcaacugugcuacaggag

SEQ ID NO: 1176212 - RNA, 19 nt, Artificial Sequence
  Description of Artificial Sequence: Synthetic oligonucleotide
cauggcaaagccuccuggu

SEQ ID NO: 1176213 - RNA, 19 nt, Artificial Sequence
  Description of Artificial Sequence: Synthetic oligonucleotide
gcucgugcuucucccuucg

SEQ ID NO: 1176214 - RNA, 19 nt, Artificial Sequence
  Description of Artificial Sequence: Synthetic oligonucleotide
ggcaccaagaagaccugug

SEQ ID NO: 1176215 - RNA, 19 nt, Artificial Sequence
  Description of Artificial Sequence: Synthetic oligonucleotide
cuaucucuggaaucccugu

SEQ ID NO: 1176216 - RNA, 19 nt, Artificial Sequence
  Description of Artificial Sequence: Synthetic oligonucleotide
gcuuuguuacugcccgccc

SEQ ID NO: 1176217 - RNA, 19 nt, Artificial Sequence
  Description of Artificial Sequence: Synthetic oligonucleotide
cagcagauucggcguuucc

SEQ ID NO: 1176218 - RNA, 19 nt, Artificial Sequence
  Description of Artificial Sequence: Synthetic oligonucleotide
cugcugcugcugcugcugc

SEQ ID NO: 1176219 - RNA, 19 nt, Artificial Sequence
  Description of Artificial Sequence: Synthetic oligonucleotide
ucucuccguucacgguuac

SEQ ID NO: 1176220 - RNA, 19 nt, Artificial Sequence
  Description of Artificial Sequence: Synthetic oligonucleotide
cuuuguuacugcccgcccu

SEQ ID NO: 1176221 - RNA, 19 nt, Artificial Sequence
  Description of Artificial Sequence: Synthetic oligonucleotide
aggggagguucacuggcuu

SEQ ID NO: 1176222 - RNA, 19 nt, Artificial Sequence
  Description of Artificial Sequence: Synthetic oligonucleotide
ccgggagggagaaagccug

SEQ ID NO: 1176223 - RNA, 19 nt, Artificial Sequence
  Description of Artificial Sequence: Synthetic oligonucleotide
uucucucuacgggacucuc

SEQ ID NO: 1176224 - RNA, 19 nt, Artificial Sequence
  Description of Artificial Sequence: Synthetic oligonucleotide
ggcaucauaggaaaccgcu

SEQ ID NO: 1176225 - RNA, 19 nt, Artificial Sequence
  Description of Artificial Sequence: Synthetic oligonucleotide
gggacucucuaucucugga

SEQ ID NO: 1176226 - RNA, 19 nt, Artificial Sequence
  Description of Artificial Sequence: Synthetic oligonucleotide
guugaauccugggcgcaga

SEQ ID NO: 1176227 - RNA, 19 nt, Artificial Sequence
  Description of Artificial Sequence: Synthetic oligonucleotide
gguugaauccugggcgcag

SEQ ID NO: 1176228 - RNA, 19 nt, Artificial Sequence
  Description of Artificial Sequence: Synthetic oligonucleotide
cucgugcuucucccuucgg

SEQ ID NO: 1176229 - RNA, 19 nt, Artificial Sequence
  Description of Artificial Sequence: Synthetic oligonucleotide
ugcugcugcugcugcugcu

SEQ ID NO: 1176230 - RNA, 19 nt, Artificial Sequence
  Description of Artificial Sequence: Synthetic oligonucleotide
acgggacucucuaucucug

SEQ ID NO: 1176231 - RNA, 19 nt, Artificial Sequence
  Description of Artificial Sequence: Synthetic oligonucleotide
cugggccaucacagcauug

SEQ ID NO: 1176232 - RNA, 19 nt, Artificial Sequence
  Description of Artificial Sequence: Synthetic oligonucleotide
ggacucucuaucucuggaa

SEQ ID NO: 1176233 - RNA, 19 nt, Artificial Sequence
  Description of Artificial Sequence: Synthetic oligonucleotide
gugucuacgucucccacuu

SEQ ID NO: 1176234 - RNA, 19 nt, Artificial Sequence
  Description of Artificial Sequence: Synthetic oligonucleotide
ccugggcgcagaaauggug

SEQ ID NO: 1176235 - RNA, 19 nt, Artificial Sequence
  Description of Artificial Sequence: Synthetic oligonucleotide
uccaugcgguggaggcaug

SEQ ID NO: 1176236 - RNA, 19 nt, Artificial Sequence
  Description of Artificial Sequence: Synthetic oligonucleotide
gacucuucggaagguuuua

SEQ ID NO: 1176237 - RNA, 19 nt, Artificial Sequence
  Description of Artificial Sequence: Synthetic oligonucleotide
cugucaaaugcagucucua

SEQ ID NO: 1176238 - RNA, 19 nt, Artificial Sequence
  Description of Artificial Sequence: Synthetic oligonucleotide
uaccguucccggucauuuu

SEQ ID NO: 1176239 - RNA, 19 nt, Artificial Sequence
  Description of Artificial Sequence: Synthetic oligonucleotide
uaguagaguuugggaugcu

SEQ ID NO: 1176240 - RNA, 19 nt, Artificial Sequence
  Description of Artificial Sequence: Synthetic oligonucleotide
gaagugaaacaggcugggu

SEQ ID NO: 1176241 - RNA, 19 nt, Artificial Sequence
  Description of Artificial Sequence: Synthetic oligonucleotide
ccacccuauuuccaaaaga

SEQ ID NO: 1176242 - RNA, 19 nt, Artificial Sequence
  Description of Artificial Sequence: Synthetic oligonucleotide
auggaguuugugggcacuu

SEQ ID NO: 1176243 - RNA, 19 nt, Artificial Sequence
  Description of Artificial Sequence: Synthetic oligonucleotide
gcgguaaaugcauuggguu

SEQ ID NO: 1176244 - RNA, 19 nt, Artificial Sequence
  Description of Artificial Sequence: Synthetic oligonucleotide
accagcgauaguagaguuu

SEQ ID NO: 1176245 - RNA, 19 nt, Artificial Sequence
  Description of Artificial Sequence: Synthetic oligonucleotide
cucucuccguucacgguua

SEQ ID NO: 1176246 - RNA, 19 nt, Artificial Sequence
  Description of Artificial Sequence: Synthetic oligonucleotide
gcugcugcugcugcugccc

SEQ ID NO: 1176247 - RNA, 19 nt, Artificial Sequence
  Description of Artificial Sequence: Synthetic oligonucleotide
ccacuagagcgucuauuuc

SEQ ID NO: 1176248 - RNA, 19 nt, Artificial Sequence
  Description of Artificial Sequence: Synthetic oligonucleotide
gggccaugugguggaaagg

SEQ ID NO: 1176249 - RNA, 19 nt, Artificial Sequence
  Description of Artificial Sequence: Synthetic oligonucleotide
gggaugcuuaucgguggag

SEQ ID NO: 1176250 - RNA, 19 nt, Artificial Sequence
  Description of Artificial Sequence: Synthetic oligonucleotide
cuacgucucccacuuggcu

SEQ ID NO: 1176251 - RNA, 19 nt, Artificial Sequence
  Description of Artificial Sequence: Synthetic oligonucleotide
agucucuagcgaggagccu

SEQ ID NO: 1176252 - RNA, 19 nt, Artificial Sequence
  Description of Artificial Sequence: Synthetic oligonucleotide
cagauucggcguuuccucu

SEQ ID NO: 1176253 - RNA, 19 nt, Artificial Sequence
  Description of Artificial Sequence: Synthetic oligonucleotide
ccgccaggccuaacaaagg

SEQ ID NO: 1176254 - RNA, 19 nt, Artificial Sequence
  Description of Artificial Sequence: Synthetic oligonucleotide
cuguggggugaugcagcag

SEQ ID NO: 1176255 - RNA, 19 nt, Artificial Sequence
  Description of Artificial Sequence: Synthetic oligonucleotide
gcugcugcugcugcugcug

SEQ ID NO: 1176256 - RNA, 19 nt, Artificial Sequence
  Description of Artificial Sequence: Synthetic oligonucleotide
ccguucacgguuacuauua

SEQ ID NO: 1176257 - RNA, 19 nt, Artificial Sequence
  Description of Artificial Sequence: Synthetic oligonucleotide
cucuagccccagacaccac

SEQ ID NO: 1176258 - RNA, 19 nt, Artificial Sequence
  Description of Artificial Sequence: Synthetic oligonucleotide
ggagaaagccuggcgguaa

SEQ ID NO: 1176259 - RNA, 19 nt, Artificial Sequence
  Description of Artificial Sequence: Synthetic oligonucleotide
ucccuucgguugucuuccu

SEQ ID NO: 1176260 - RNA, 19 nt, Artificial Sequence
  Description of Artificial Sequence: Synthetic oligonucleotide
cucuaucaucauuucgguu

SEQ ID NO: 1176261 - RNA, 19 nt, Artificial Sequence
  Description of Artificial Sequence: Synthetic oligonucleotide
gguuguguaggagcugucu

SEQ ID NO: 1176262 - RNA, 19 nt, Artificial Sequence
  Description of Artificial Sequence: Synthetic oligonucleotide
ggcgguaaaugcauugggu

SEQ ID NO: 1176263 - RNA, 19 nt, Artificial Sequence
  Description of Artificial Sequence: Synthetic oligonucleotide
gaggggugggcagauucgu

SEQ ID NO: 1176264 - RNA, 19 nt, Artificial Sequence
  Description of Artificial Sequence: Synthetic oligonucleotide
ggguucaacggaugaggua

SEQ ID NO: 1176265 - RNA, 19 nt, Artificial Sequence
  Description of Artificial Sequence: Synthetic oligonucleotide
ggugggcagauucguaggu

SEQ ID NO: 1176266 - RNA, 19 nt, Artificial Sequence
  Description of Artificial Sequence: Synthetic oligonucleotide
ggaugcuuaucgguggagu

SEQ ID NO: 1176267 - RNA, 19 nt, Artificial Sequence
  Description of Artificial Sequence: Synthetic oligonucleotide
cugcuggccuugagugguc

SEQ ID NO: 1176268 - RNA, 19 nt, Artificial Sequence
  Description of Artificial Sequence: Synthetic oligonucleotide
gugacucuucggaagguuu

SEQ ID NO: 1176269 - RNA, 19 nt, Artificial Sequence
  Description of Artificial Sequence: Synthetic oligonucleotide
gguccgggagggagaaagc

SEQ ID NO: 1176270 - RNA, 19 nt, Artificial Sequence
  Description of Artificial Sequence: Synthetic oligonucleotide
ccaugcgguggaggcaugg

SEQ ID NO: 1176271 - RNA, 19 nt, Artificial Sequence
  Description of Artificial Sequence: Synthetic oligonucleotide
gucugucccggucggggcu

SEQ ID NO: 1176272 - RNA, 19 nt, Artificial Sequence
  Description of Artificial Sequence: Synthetic oligonucleotide
ggugaggcggaggcacccc

SEQ ID NO: 1176273 - RNA, 19 nt, Artificial Sequence
  Description of Artificial Sequence: Synthetic oligonucleotide
cacucucuccguucacggu

SEQ ID NO: 1176274 - RNA, 19 nt, Artificial Sequence
  Description of Artificial Sequence: Synthetic oligonucleotide
cccacuagagcgucuauuu

SEQ ID NO: 1176275 - RNA, 19 nt, Artificial Sequence
  Description of Artificial Sequence: Synthetic oligonucleotide
cucuagcgaggagccucug

SEQ ID NO: 1176276 - RNA, 19 nt, Artificial Sequence
  Description of Artificial Sequence: Synthetic oligonucleotide
ggguugaauccugggcgca

SEQ ID NO: 1176277 - RNA, 19 nt, Artificial Sequence
  Description of Artificial Sequence: Synthetic oligonucleotide
aggggccaugugguggaaa

SEQ ID NO: 1176278 - RNA, 19 nt, Artificial Sequence
  Description of Artificial Sequence: Synthetic oligonucleotide
cagugggaucaggccgggc

SEQ ID NO: 1176279 - RNA, 19 nt, Artificial Sequence
  Description of Artificial Sequence: Synthetic oligonucleotide
cuucucucuacgggacucu

SEQ ID NO: 1176280 - RNA, 19 nt, Artificial Sequence
  Description of Artificial Sequence: Synthetic oligonucleotide
guuuuaccacugcggccau

SEQ ID NO: 1176281 - RNA, 19 nt, Artificial Sequence
  Description of Artificial Sequence: Synthetic oligonucleotide
gugauagcaccugggccau

SEQ ID NO: 1176282 - RNA, 19 nt, Artificial Sequence
  Description of Artificial Sequence: Synthetic oligonucleotide
cccauaccguucccgguca

SEQ ID NO: 1176283 - RNA, 19 nt, Artificial Sequence
  Description of Artificial Sequence: Synthetic oligonucleotide
ccagaauccuucucggguu

SEQ ID NO: 1176284 - RNA, 19 nt, Artificial Sequence
  Description of Artificial Sequence: Synthetic oligonucleotide
cggaugagguagccucagc

SEQ ID NO: 1176285 - RNA, 19 nt, Artificial Sequence
  Description of Artificial Sequence: Synthetic oligonucleotide
ggugacucuucggaagguu

SEQ ID NO: 1176286 - RNA, 19 nt, Artificial Sequence
  Description of Artificial Sequence: Synthetic oligonucleotide
gcuuaucgguggaguguga

SEQ ID NO: 1176287 - RNA, 19 nt, Artificial Sequence
  Description of Artificial Sequence: Synthetic oligonucleotide
cugcggccauggccucccc

SEQ ID NO: 1176288 - RNA, 19 nt, Artificial Sequence
  Description of Artificial Sequence: Synthetic oligonucleotide
gucagcagauucggcguuu

SEQ ID NO: 1176289 - RNA, 19 nt, Artificial Sequence
  Description of Artificial Sequence: Synthetic oligonucleotide
cccuuucauuccaugcggu

SEQ ID NO: 1176290 - RNA, 19 nt, Artificial Sequence
  Description of Artificial Sequence: Synthetic oligonucleotide
cuuccccacucucuccguu

SEQ ID NO: 1176291 - RNA, 19 nt, Artificial Sequence
  Description of Artificial Sequence: Synthetic oligonucleotide
ggcuaaggggagguucacu

SEQ ID NO: 1176292 - RNA, 19 nt, Artificial Sequence
  Description of Artificial Sequence: Synthetic oligonucleotide
ggggagguucacuggcuuu

SEQ ID NO: 1176293 - RNA, 19 nt, Artificial Sequence
  Description of Artificial Sequence: Synthetic oligonucleotide
gucccggucggggcuccuc

SEQ ID NO: 1176294 - RNA, 19 nt, Artificial Sequence
  Description of Artificial Sequence: Synthetic oligonucleotide
gcgguggugugcugauugu

SEQ ID NO: 1176295 - RNA, 19 nt, Artificial Sequence
  Description of Artificial Sequence: Synthetic oligonucleotide
cauaccguucccggucauu

SEQ ID NO: 1176296 - RNA, 19 nt, Artificial Sequence
  Description of Artificial Sequence: Synthetic oligonucleotide
gcaugggacgagguggcau

SEQ ID NO: 1176297 - RNA, 19 nt, Artificial Sequence
  Description of Artificial Sequence: Synthetic oligonucleotide
gcguuuccucuagccccag

SEQ ID NO: 1176298 - RNA, 19 nt, Artificial Sequence
  Description of Artificial Sequence: Synthetic oligonucleotide
gcggcugcgguggugugcu

SEQ ID NO: 1176299 - RNA, 19 nt, Artificial Sequence
  Description of Artificial Sequence: Synthetic oligonucleotide
cggguucaacggaugaggu

SEQ ID NO: 1176300 - RNA, 19 nt, Artificial Sequence
  Description of Artificial Sequence: Synthetic oligonucleotide
ccaacuacuguggggugau

SEQ ID NO: 1176301 - RNA, 19 nt, Artificial Sequence
  Description of Artificial Sequence: Synthetic oligonucleotide
ggcauuccgccaggccuaa

SEQ ID NO: 1176302 - RNA, 19 nt, Artificial Sequence
  Description of Artificial Sequence: Synthetic oligonucleotide
gcccgcccugucugucagc

SEQ ID NO: 1176303 - RNA, 19 nt, Artificial Sequence
  Description of Artificial Sequence: Synthetic oligonucleotide
ccgggccuggcaccaagaa

SEQ ID NO: 1176304 - RNA, 19 nt, Artificial Sequence
  Description of Artificial Sequence: Synthetic oligonucleotide
cgguucccauaccguuccc

SEQ ID NO: 1176305 - RNA, 19 nt, Artificial Sequence
  Description of Artificial Sequence: Synthetic oligonucleotide
ggugcccacuagagcgucu

SEQ ID NO: 1176306 - RNA, 19 nt, Artificial Sequence
  Description of Artificial Sequence: Synthetic oligonucleotide
gcauuccgccaggccuaac

SEQ ID NO: 1176307 - RNA, 19 nt, Artificial Sequence
  Description of Artificial Sequence: Synthetic oligonucleotide
ccgcccugucugucagcuc

SEQ ID NO: 1176308 - RNA, 19 nt, Artificial Sequence
  Description of Artificial Sequence: Synthetic oligonucleotide
cggugcccacuagagcguc

SEQ ID NO: 1176309 - RNA, 19 nt, Artificial Sequence
  Description of Artificial Sequence: Synthetic oligonucleotide
cguucacgguuacuauuau

SEQ ID NO: 1176310 - RNA, 19 nt, Artificial Sequence
  Description of Artificial Sequence: Synthetic oligonucleotide
cugcgguggugugcugauu

SEQ ID NO: 1176311 - RNA, 19 nt, Artificial Sequence
  Description of Artificial Sequence: Synthetic oligonucleotide
cccggucauuuuccacccu

SEQ ID NO: 1176312 - RNA, 19 nt, Artificial Sequence
  Description of Artificial Sequence: Synthetic oligonucleotide
gccuggcgguaaaugcauu

SEQ ID NO: 1176313 - RNA, 19 nt, Artificial Sequence
  Description of Artificial Sequence: Synthetic oligonucleotide
ccauaccguucccggucau

SEQ ID NO: 1176314 - RNA, 19 nt, Artificial Sequence
  Description of Artificial Sequence: Synthetic oligonucleotide
aguuuuaaaaucuaccacc

SEQ ID NO: 1176315 - RNA, 19 nt, Artificial Sequence
  Description of Artificial Sequence: Synthetic oligonucleotide
gauaguaucacccuguucc

SEQ ID NO: 1176316 - RNA, 19 nt, Artificial Sequence
  Description of Artificial Sequence: Synthetic oligonucleotide
aacacauuguucuugugcc

SEQ ID NO: 1176317 - RNA, 19 nt, Artificial Sequence
  Description of Artificial Sequence: Synthetic oligonucleotide
aaacacauuguucuugugc

SEQ ID NO: 1176318 - RNA, 19 nt, Artificial Sequence
  Description of Artificial Sequence: Synthetic oligonucleotide
aauuaggaaauccugacca

SEQ ID NO: 1176319 - RNA, 19 nt, Artificial Sequence
  Description of Artificial Sequence: Synthetic oligonucleotide
uuuaauagaccauagugcc

SEQ ID NO: 1176320 - RNA, 19 nt, Artificial Sequence
  Description of Artificial Sequence: Synthetic oligonucleotide
aaaggcaagcuacagaauc

SEQ ID NO: 1176321 - RNA, 19 nt, Artificial Sequence
  Description of Artificial Sequence: Synthetic oligonucleotide
aauauuaaagccaucgguc

SEQ ID NO: 1176322 - RNA, 19 nt, Artificial Sequence
  Description of Artificial Sequence: Synthetic oligonucleotide
aaugaaaccucugaaggac

SEQ ID NO: 1176323 - RNA, 19 nt, Artificial Sequence
  Description of Artificial Sequence: Synthetic oligonucleotide
uuucuuaagacucucguga

SEQ ID NO: 1176324 - RNA, 19 nt, Artificial Sequence
  Description of Artificial Sequence: Synthetic oligonucleotide
uuauuacuggauuugauca

SEQ ID NO: 1176325 - RNA, 19 nt, Artificial Sequence
  Description of Artificial Sequence: Synthetic oligonucleotide
uaugacaaugucuagugag

SEQ ID NO: 1176326 - RNA, 19 nt, Artificial Sequence
  Description of Artificial Sequence: Synthetic oligonucleotide
aaggcuagaaggcuagccc

SEQ ID NO: 1176327 - RNA, 19 nt, Artificial Sequence
  Description of Artificial Sequence: Synthetic oligonucleotide
aauugauuccagcaucaac

SEQ ID NO: 1176328 - RNA, 19 nt, Artificial Sequence
  Description of Artificial Sequence: Synthetic oligonucleotide
gauuaaagcugccaaauug

SEQ ID NO: 1176329 - RNA, 19 nt, Artificial Sequence
  Description of Artificial Sequence: Synthetic oligonucleotide
uccgauuuugcucucauag

SEQ ID NO: 1176330 - RNA, 19 nt, Artificial Sequence
  Description of Artificial Sequence: Synthetic oligonucleotide
uucuuugugaaauucacca

SEQ ID NO: 1176331 - RNA, 19 nt, Artificial Sequence
  Description of Artificial Sequence: Synthetic oligonucleotide
uacaauaaugacaaggcuc

SEQ ID NO: 1176332 - RNA, 19 nt, Artificial Sequence
  Description of Artificial Sequence: Synthetic oligonucleotide
aaaucuaccaccccaggca

SEQ ID NO: 1176333 - RNA, 19 nt, Artificial Sequence
  Description of Artificial Sequence: Synthetic oligonucleotide
uuaaaaucuaccaccccag

SEQ ID NO: 1176334 - RNA, 19 nt, Artificial Sequence
  Description of Artificial Sequence: Synthetic oligonucleotide
uuauugaaugccaacuuca

SEQ ID NO: 1176335 - RNA, 19 nt, Artificial Sequence
  Description of Artificial Sequence: Synthetic oligonucleotide
uuaugugaggccaaugccc

SEQ ID NO: 1176336 - RNA, 19 nt, Artificial Sequence
  Description of Artificial Sequence: Synthetic oligonucleotide
aaaggcuagaaggcuagcc

SEQ ID NO: 1176337 - RNA, 19 nt, Artificial Sequence
  Description of Artificial Sequence: Synthetic oligonucleotide
ucuccuugaaacacaauug

SEQ ID NO: 1176338 - RNA, 19 nt, Artificial Sequence
  Description of Artificial Sequence: Synthetic oligonucleotide
caguaugauaguaucaccc

SEQ ID NO: 1176339 - RNA, 19 nt, Artificial Sequence
  Description of Artificial Sequence: Synthetic oligonucleotide
uaauagaccauagugccag

SEQ ID NO: 1176340 - RNA, 19 nt, Artificial Sequence
  Description of Artificial Sequence: Synthetic oligonucleotide
uguuguggacaguacaggg

SEQ ID NO: 1176341 - RNA, 19 nt, Artificial Sequence
  Description of Artificial Sequence: Synthetic oligonucleotide
aaucguccgauuuugcucu

SEQ ID NO: 1176342 - RNA, 19 nt, Artificial Sequence
  Description of Artificial Sequence: Synthetic oligonucleotide
ucugaaaccuaauuucggc

SEQ ID NO: 1176343 - RNA, 19 nt, Artificial Sequence
  Description of Artificial Sequence: Synthetic oligonucleotide
uuugaucauagcaacuaca

SEQ ID NO: 1176344 - RNA, 19 nt, Artificial Sequence
  Description of Artificial Sequence: Synthetic oligonucleotide
auuugaucauagcaacuac

SEQ ID NO: 1176345 - RNA, 19 nt, Artificial Sequence
  Description of Artificial Sequence: Synthetic oligonucleotide
aauguuguggacaguacag

SEQ ID NO: 1176346 - RNA, 19 nt, Artificial Sequence
  Description of Artificial Sequence: Synthetic oligonucleotide
uaugauaguaucacccugu

SEQ ID NO: 1176347 - RNA, 19 nt, Artificial Sequence
  Description of Artificial Sequence: Synthetic oligonucleotide
uuugucaacguagcuaggg

SEQ ID NO: 1176348 - RNA, 19 nt, Artificial Sequence
  Description of Artificial Sequence: Synthetic oligonucleotide
cuuaagacucucgugauag

SEQ ID NO: 1176349 - RNA, 19 nt, Artificial Sequence
  Description of Artificial Sequence: Synthetic oligonucleotide
accuuacuggggcugaucc

SEQ ID NO: 1176350 - RNA, 19 nt, Artificial Sequence
  Description of Artificial Sequence: Synthetic oligonucleotide
aacugcaacauuaauauua

SEQ ID NO: 1176351 - RNA, 19 nt, Artificial Sequence
  Description of Artificial Sequence: Synthetic oligonucleotide
aggaguggcaccaagcugc

SEQ ID NO: 1176352 - RNA, 19 nt, Artificial Sequence
  Description of Artificial Sequence: Synthetic oligonucleotide
gugaauuuccagucuaccg

SEQ ID NO: 1176353 - RNA, 19 nt, Artificial Sequence
  Description of Artificial Sequence: Synthetic oligonucleotide
uaagacucucgugauaggg

SEQ ID NO: 1176354 - RNA, 19 nt, Artificial Sequence
  Description of Artificial Sequence: Synthetic oligonucleotide
uuacaauaaugacaaggcu

SEQ ID NO: 1176355 - RNA, 19 nt, Artificial Sequence
  Description of Artificial Sequence: Synthetic oligonucleotide
uaaaaucuaccaccccagg

SEQ ID NO: 1176356 - RNA, 19 nt, Artificial Sequence
  Description of Artificial Sequence: Synthetic oligonucleotide
uuuuaaaaucuaccacccc

SEQ ID NO: 1176357 - RNA, 19 nt, Artificial Sequence
  Description of Artificial Sequence: Synthetic oligonucleotide
agacucucgugauagggac

SEQ ID NO: 1176358 - RNA, 19 nt, Artificial Sequence
  Description of Artificial Sequence: Synthetic oligonucleotide
aacggugaaauuucaaguu

SEQ ID NO: 1176359 - RNA, 19 nt, Artificial Sequence
  Description of Artificial Sequence: Synthetic oligonucleotide
ugccagauaagagaagggg

SEQ ID NO: 1176360 - RNA, 19 nt, Artificial Sequence
  Description of Artificial Sequence: Synthetic oligonucleotide
ucucccuauaccucagugg

SEQ ID NO: 1176361 - RNA, 19 nt, Artificial Sequence
  Description of Artificial Sequence: Synthetic oligonucleotide
ucuaagagucagaaagaca

SEQ ID NO: 1176362 - RNA, 19 nt, Artificial Sequence
  Description of Artificial Sequence: Synthetic oligonucleotide
agaaaacaucucccuauac

SEQ ID NO: 1176363 - RNA, 19 nt, Artificial Sequence
  Description of Artificial Sequence: Synthetic oligonucleotide
acaauaaugacaaggcuca

SEQ ID NO: 1176364 - RNA, 19 nt, Artificial Sequence
  Description of Artificial Sequence: Synthetic oligonucleotide
cuagugaggcugcacaugg

SEQ ID NO: 1176365 - RNA, 19 nt, Artificial Sequence
  Description of Artificial Sequence: Synthetic oligonucleotide
acaacaucuaaacggcaag

SEQ ID NO: 1176366 - RNA, 19 nt, Artificial Sequence
  Description of Artificial Sequence: Synthetic oligonucleotide
aauggcuuaugugaggcca

SEQ ID NO: 1176367 - RNA, 19 nt, Artificial Sequence
  Description of Artificial Sequence: Synthetic oligonucleotide
uugaaacacaauugcagcu

SEQ ID NO: 1176368 - RNA, 19 nt, Artificial Sequence
  Description of Artificial Sequence: Synthetic oligonucleotide
cuuaugugaggccaaugcc

SEQ ID NO: 1176369 - RNA, 19 nt, Artificial Sequence
  Description of Artificial Sequence: Synthetic oligonucleotide
ugcucuuaaagucauccuc

SEQ ID NO: 1176370 - RNA, 19 nt, Artificial Sequence
  Description of Artificial Sequence: Synthetic oligonucleotide
aguaugauaguaucacccu

SEQ ID NO: 1176371 - RNA, 19 nt, Artificial Sequence
  Description of Artificial Sequence: Synthetic oligonucleotide
ugccaaauugauuccagca

SEQ ID NO: 1176372 - RNA, 19 nt, Artificial Sequence
  Description of Artificial Sequence: Synthetic oligonucleotide
ugucuagugaggcugcaca

SEQ ID NO: 1176373 - RNA, 19 nt, Artificial Sequence
  Description of Artificial Sequence: Synthetic oligonucleotide
accucaagauuaaagcugc

SEQ ID NO: 1176374 - RNA, 19 nt, Artificial Sequence
  Description of Artificial Sequence: Synthetic oligonucleotide
uuacuggauuugaucauag

SEQ ID NO: 1176375 - RNA, 19 nt, Artificial Sequence
  Description of Artificial Sequence: Synthetic oligonucleotide
agaacagauaaucaugauu

SEQ ID NO: 1176376 - RNA, 19 nt, Artificial Sequence
  Description of Artificial Sequence: Synthetic oligonucleotide
cauagugccaguuaaacua

SEQ ID NO: 1176377 - RNA, 19 nt, Artificial Sequence
  Description of Artificial Sequence: Synthetic oligonucleotide
gaauuuccagucuaccgug

SEQ ID NO: 1176378 - RNA, 19 nt, Artificial Sequence
  Description of Artificial Sequence: Synthetic oligonucleotide
  modified_base (9)..(9): a, c, u, g, unknown or other
ucugaggunugcagaaccc

SEQ ID NO: 1176379 - RNA, 19 nt, Artificial Sequence
  Description of Artificial Sequence: Synthetic oligonucleotide
gauucagccaauauuacaa

SEQ ID NO: 1176380 - RNA, 19 nt, Artificial Sequence
  Description of Artificial Sequence: Synthetic oligonucleotide
acggcaaggaauuaggaaa

SEQ ID NO: 1176381 - RNA, 19 nt, Artificial Sequence
  Description of Artificial Sequence: Synthetic oligonucleotide
uuaauagaccauagugcca

SEQ ID NO: 1176382 - RNA, 19 nt, Artificial Sequence
  Description of Artificial Sequence: Synthetic oligonucleotide
aaccuaauuucggcguucc

SEQ ID NO: 1176383 - RNA, 19 nt, Artificial Sequence
  Description of Artificial Sequence: Synthetic oligonucleotide
uacaggguaacuagaggug

SEQ ID NO: 1176384 - RNA, 19 nt, Artificial Sequence
  Description of Artificial Sequence: Synthetic oligonucleotide
accauagugccaguuaaac

SEQ ID NO: 1176385 - RNA, 19 nt, Artificial Sequence
  Description of Artificial Sequence: Synthetic oligonucleotide
aacggcaaggaauuaggaa

SEQ ID NO: 1176386 - RNA, 19 nt, Artificial Sequence
  Description of Artificial Sequence: Synthetic oligonucleotide
ucugccuagaaaugucaag

SEQ ID NO: 1176387 - RNA, 19 nt, Artificial Sequence
  Description of Artificial Sequence: Synthetic oligonucleotide
gguaacuagagguggagcc

SEQ ID NO: 1176388 - RNA, 19 nt, Artificial Sequence
  Description of Artificial Sequence: Synthetic oligonucleotide
aaacacaccgacucgcaau

SEQ ID NO: 1176389 - RNA, 19 nt, Artificial Sequence
  Description of Artificial Sequence: Synthetic oligonucleotide
aaaucaaaucacagagcuc

SEQ ID NO: 1176390 - RNA, 19 nt, Artificial Sequence
  Description of Artificial Sequence: Synthetic oligonucleotide
gaaucguccgauuuugcuc

SEQ ID NO: 1176391 - RNA, 19 nt, Artificial Sequence
  Description of Artificial Sequence: Synthetic oligonucleotide
agcucuugccuacaaauga

SEQ ID NO: 1176392 - RNA, 19 nt, Artificial Sequence
  Description of Artificial Sequence: Synthetic oligonucleotide
aacaucuaaacggcaagga

SEQ ID NO: 1176393 - RNA, 19 nt, Artificial Sequence
  Description of Artificial Sequence: Synthetic oligonucleotide
guagcuagggaaguaacug

SEQ ID NO: 1176394 - RNA, 19 nt, Artificial Sequence
  Description of Artificial Sequence: Synthetic oligonucleotide
ccuugaaacacaauugcag

SEQ ID NO: 1176395 - RNA, 19 nt, Artificial Sequence
  Description of Artificial Sequence: Synthetic oligonucleotide
ugcuuacagacaccaagug

SEQ ID NO: 1176396 - RNA, 19 nt, Artificial Sequence
  Description of Artificial Sequence: Synthetic oligonucleotide
guaugauaguaucacccug

SEQ ID NO: 1176397 - RNA, 19 nt, Artificial Sequence
  Description of Artificial Sequence: Synthetic oligonucleotide
aaaccuaauuucggcguuc

SEQ ID NO: 1176398 - RNA, 19 nt, Artificial Sequence
  Description of Artificial Sequence: Synthetic oligonucleotide
cuuacuggggcugaucccc

SEQ ID NO: 1176399 - RNA, 19 nt, Artificial Sequence
  Description of Artificial Sequence: Synthetic oligonucleotide
acaggguaacuagaggugg

SEQ ID NO: 1176400 - RNA, 19 nt, Artificial Sequence
  Description of Artificial Sequence: Synthetic oligonucleotide
augacaaugucuagugagg

SEQ ID NO: 1176401 - RNA, 19 nt, Artificial Sequence
  Description of Artificial Sequence: Synthetic oligonucleotide
acgaucucuucaaacacac

SEQ ID NO: 1176402 - RNA, 19 nt, Artificial Sequence
  Description of Artificial Sequence: Synthetic oligonucleotide
uuaagacucucgugauagg

SEQ ID NO: 1176403 - RNA, 19 nt, Artificial Sequence
  Description of Artificial Sequence: Synthetic oligonucleotide
ugacaaugucuagugaggc

SEQ ID NO: 1176404 - RNA, 19 nt, Artificial Sequence
  Description of Artificial Sequence: Synthetic oligonucleotide
aauuucggcguuccuacuu

SEQ ID NO: 1176405 - RNA, 19 nt, Artificial Sequence
  Description of Artificial Sequence: Synthetic oligonucleotide
uugucaacguagcuaggga

SEQ ID NO: 1176406 - RNA, 19 nt, Artificial Sequence
  Description of Artificial Sequence: Synthetic oligonucleotide
agggaaauuccugcaacac

SEQ ID NO: 1176407 - RNA, 19 nt, Artificial Sequence
  Description of Artificial Sequence: Synthetic oligonucleotide
uuugcucucauagaaguuu

SEQ ID NO: 1176408 - RNA, 19 nt, Artificial Sequence
  Description of Artificial Sequence: Synthetic oligonucleotide
cuggauuugaucauagcaa

SEQ ID NO: 1176409 - RNA, 19 nt, Artificial Sequence
  Description of Artificial Sequence: Synthetic oligonucleotide
uuuugucaacguagcuagg

SEQ ID NO: 1176410 - RNA, 19 nt, Artificial Sequence
  Description of Artificial Sequence: Synthetic oligonucleotide
uggucuuacagagugaguu

SEQ ID NO: 1176411 - RNA, 19 nt, Artificial Sequence
  Description of Artificial Sequence: Synthetic oligonucleotide
ugucaacguagcuagggaa

SEQ ID NO: 1176412 - RNA, 19 nt, Artificial Sequence
  Description of Artificial Sequence: Synthetic oligonucleotide
aggcacgaucucuucaaac

SEQ ID NO: 1176413 - RNA, 19 nt, Artificial Sequence
  Description of Artificial Sequence: Synthetic oligonucleotide
uggggaauuauuuucccuu

SEQ ID NO: 1176414 - RNA, 19 nt, Artificial Sequence
  Description of Artificial Sequence: Synthetic oligonucleotide
acuuaugagauaaaucaaa

SEQ ID NO: 1176415 - RNA, 19 nt, Artificial Sequence
  Description of Artificial Sequence: Synthetic oligonucleotide
uucugacaagggaaauucc

SEQ ID NO: 1176416 - RNA, 19 nt, Artificial Sequence
  Description of Artificial Sequence: Synthetic oligonucleotide
aggaaauccugaccaauga

SEQ ID NO: 1176417 - RNA, 19 nt, Artificial Sequence
  Description of Artificial Sequence: Synthetic oligonucleotide
uguuuguugcuuuggggaa

SEQ ID NO: 1176418 - RNA, 19 nt, Artificial Sequence
  Description of Artificial Sequence: Synthetic oligonucleotide
gauuugaucauagcaacua

SEQ ID NO: 1176419 - RNA, 19 nt, Artificial Sequence
  Description of Artificial Sequence: Synthetic oligonucleotide
uauuacuggauuugaucau

SEQ ID NO: 1176420 - RNA, 19 nt, Artificial Sequence
  Description of Artificial Sequence: Synthetic oligonucleotide
gcuuaugugaggccaaugc

SEQ ID NO: 1176421 - RNA, 19 nt, Artificial Sequence
  Description of Artificial Sequence: Synthetic oligonucleotide
uuagggauucagccaauau

SEQ ID NO: 1176422 - RNA, 19 nt, Artificial Sequence
  Description of Artificial Sequence: Synthetic oligonucleotide
aacagauaaucaugauuuu

SEQ ID NO: 1176423 - RNA, 19 nt, Artificial Sequence
  Description of Artificial Sequence: Synthetic oligonucleotide
aacacaccgacucgcaauu

SEQ ID NO: 1176424 - RNA, 19 nt, Artificial Sequence
  Description of Artificial Sequence: Synthetic oligonucleotide
uccagcaucaaccccucuc

SEQ ID NO: 1176425 - RNA, 19 nt, Artificial Sequence
  Description of Artificial Sequence: Synthetic oligonucleotide
auuucggcguuccuacuug

SEQ ID NO: 1176426 - RNA, 19 nt, Artificial Sequence
  Description of Artificial Sequence: Synthetic oligonucleotide
accgacucgcaauucuggg

SEQ ID NO: 1176427 - RNA, 19 nt, Artificial Sequence
  Description of Artificial Sequence: Synthetic oligonucleotide
cuauuuagcauggcccugc

SEQ ID NO: 1176428 - RNA, 19 nt, Artificial Sequence
  Description of Artificial Sequence: Synthetic oligonucleotide
uucagccaauauuacaaua

SEQ ID NO: 1176429 - RNA, 19 nt, Artificial Sequence
  Description of Artificial Sequence: Synthetic oligonucleotide
agauaagagaaggggaaga

SEQ ID NO: 1176430 - RNA, 19 nt, Artificial Sequence
  Description of Artificial Sequence: Synthetic oligonucleotide
agaccauagugccaguuaa

SEQ ID NO: 1176431 - RNA, 19 nt, Artificial Sequence
  Description of Artificial Sequence: Synthetic oligonucleotide
ugaacaccugggauguacu

SEQ ID NO: 1176432 - RNA, 19 nt, Artificial Sequence
  Description of Artificial Sequence: Synthetic oligonucleotide
guacaggguaacuagaggu

SEQ ID NO: 1176433 - RNA, 19 nt, Artificial Sequence
  Description of Artificial Sequence: Synthetic oligonucleotide
aggaauuaggaaauccuga

SEQ ID NO: 1176434 - RNA, 19 nt, Artificial Sequence
  Description of Artificial Sequence: Synthetic oligonucleotide
gucaacguagcuagggaag

SEQ ID NO: 1176435 - RNA, 19 nt, Artificial Sequence
  Description of Artificial Sequence: Synthetic oligonucleotide
auguuguggacaguacagg

SEQ ID NO: 1176436 - RNA, 19 nt, Artificial Sequence
  Description of Artificial Sequence: Synthetic oligonucleotide
uuuucccuuagggauucag

SEQ ID NO: 1176437 - RNA, 19 nt, Artificial Sequence
  Description of Artificial Sequence: Synthetic oligonucleotide
agcauggcccugcuuacag

SEQ ID NO: 1176438 - RNA, 19 nt, Artificial Sequence
  Description of Artificial Sequence: Synthetic oligonucleotide
uuucggcguuccuacuugg

SEQ ID NO: 1176439 - RNA, 19 nt, Artificial Sequence
  Description of Artificial Sequence: Synthetic oligonucleotide
ugcagucagaaaccauucu

SEQ ID NO: 1176440 - RNA, 19 nt, Artificial Sequence
  Description of Artificial Sequence: Synthetic oligonucleotide
auaguaucacccuguuccu

SEQ ID NO: 1176441 - RNA, 19 nt, Artificial Sequence
  Description of Artificial Sequence: Synthetic oligonucleotide
cugccagauaagagaaggg

SEQ ID NO: 1176442 - RNA, 19 nt, Artificial Sequence
  Description of Artificial Sequence: Synthetic oligonucleotide
uagaccauagugccaguua

SEQ ID NO: 1176443 - RNA, 19 nt, Artificial Sequence
  Description of Artificial Sequence: Synthetic oligonucleotide
uucuuaagacucucgugau

SEQ ID NO: 1176444 - RNA, 19 nt, Artificial Sequence
  Description of Artificial Sequence: Synthetic oligonucleotide
gucacuuaugagauaaauc

SEQ ID NO: 1176445 - RNA, 19 nt, Artificial Sequence
  Description of Artificial Sequence: Synthetic oligonucleotide
aggcuagaaggcuagcccu

SEQ ID NO: 1176446 - RNA, 19 nt, Artificial Sequence
  Description of Artificial Sequence: Synthetic oligonucleotide
auuaggaaauccugaccaa

SEQ ID NO: 1176447 - RNA, 19 nt, Artificial Sequence
  Description of Artificial Sequence: Synthetic oligonucleotide
gcuuacagacaccaagugc

SEQ ID NO: 1176448 - RNA, 19 nt, Artificial Sequence
  Description of Artificial Sequence: Synthetic oligonucleotide
uuaggaaauccugaccaau

SEQ ID NO: 1176449 - RNA, 19 nt, Artificial Sequence
  Description of Artificial Sequence: Synthetic oligonucleotide
ucccuuagggauucagcca

SEQ ID NO: 1176450 - RNA, 19 nt, Artificial Sequence
  Description of Artificial Sequence: Synthetic oligonucleotide
auagugccaguuaaacuag

SEQ ID NO: 1176451 - RNA, 19 nt, Artificial Sequence
  Description of Artificial Sequence: Synthetic oligonucleotide
aacguagcuagggaaguaa

SEQ ID NO: 1176452 - RNA, 19 nt, Artificial Sequence
  Description of Artificial Sequence: Synthetic oligonucleotide
aagacucucgugauaggga

SEQ ID NO: 1176453 - RNA, 19 nt, Artificial Sequence
  Description of Artificial Sequence: Synthetic oligonucleotide
ugauaguaucacccuguuc

SEQ ID NO: 1176454 - RNA, 19 nt, Artificial Sequence
  Description of Artificial Sequence: Synthetic oligonucleotide
caaugucuagugaggcugc

SEQ ID NO: 1176455 - RNA, 19 nt, Artificial Sequence
  Description of Artificial Sequence: Synthetic oligonucleotide
agagucagaaagacacagg

SEQ ID NO: 1176456 - RNA, 19 nt, Artificial Sequence
  Description of Artificial Sequence: Synthetic oligonucleotide
cgugauagggacaugugcc

SEQ ID NO: 1176457 - RNA, 19 nt, Artificial Sequence
  Description of Artificial Sequence: Synthetic oligonucleotide
gauaagagaaggggaagaa

SEQ ID NO: 1176458 - RNA, 19 nt, Artificial Sequence
  Description of Artificial Sequence: Synthetic oligonucleotide
ucaacguagcuagggaagu

SEQ ID NO: 1176459 - RNA, 19 nt, Artificial Sequence
  Description of Artificial Sequence: Synthetic oligonucleotide
ggcguuccuacuuggaucc

SEQ ID NO: 1176460 - RNA, 19 nt, Artificial Sequence
  Description of Artificial Sequence: Synthetic oligonucleotide
acggugaaauuucaaguuu

SEQ ID NO: 1176461 - RNA, 19 nt, Artificial Sequence
  Description of Artificial Sequence: Synthetic oligonucleotide
uuuuaacaccaugggaguc

SEQ ID NO: 1176462 - RNA, 19 nt, Artificial Sequence
  Description of Artificial Sequence: Synthetic oligonucleotide
aggcucaagagcuguugag

SEQ ID NO: 1176463 - RNA, 19 nt, Artificial Sequence
  Description of Artificial Sequence: Synthetic oligonucleotide
auucagccaauauuacaau

SEQ ID NO: 1176464 - RNA, 19 nt, Artificial Sequence
  Description of Artificial Sequence: Synthetic oligonucleotide
auccccauaggcacgaucu

SEQ ID NO: 1176465 - RNA, 19 nt, Artificial Sequence
  Description of Artificial Sequence: Synthetic oligonucleotide
gaacuguaauguuguggac

SEQ ID NO: 1176466 - RNA, 19 nt, Artificial Sequence
  Description of Artificial Sequence: Synthetic oligonucleotide
caccgacucgcaauucugg

SEQ ID NO: 1176467 - RNA, 19 nt, Artificial Sequence
  Description of Artificial Sequence: Synthetic oligonucleotide
uggaaucguccgauuuugc

SEQ ID NO: 1176468 - RNA, 19 nt, Artificial Sequence
  Description of Artificial Sequence: Synthetic oligonucleotide
cagauaagagaaggggaag

SEQ ID NO: 1176469 - RNA, 19 nt, Artificial Sequence
  Description of Artificial Sequence: Synthetic oligonucleotide
aaacggcaaggaauuagga

SEQ ID NO: 1176470 - RNA, 19 nt, Artificial Sequence
  Description of Artificial Sequence: Synthetic oligonucleotide
agcggaugccuccagugca

SEQ ID NO: 1176471 - RNA, 19 nt, Artificial Sequence
  Description of Artificial Sequence: Synthetic oligonucleotide
ggcacgaucucuucaaaca

SEQ ID NO: 1176472 - RNA, 19 nt, Artificial Sequence
  Description of Artificial Sequence: Synthetic oligonucleotide
  modified_base (8)..(8): a, c, u, g, unknown or other
cugaggunugcagaacccc

SEQ ID NO: 1176473 - RNA, 19 nt, Artificial Sequence
  Description of Artificial Sequence: Synthetic oligonucleotide
caucuaaacggcaaggaau

SEQ ID NO: 1176474 - RNA, 19 nt, Artificial Sequence
  Description of Artificial Sequence: Synthetic oligonucleotide
ugugguuguguguguuucu

SEQ ID NO: 1176475 - RNA, 19 nt, Artificial Sequence
  Description of Artificial Sequence: Synthetic oligonucleotide
uaacccuaacuugaaacuu

SEQ ID NO: 1176476 - RNA, 19 nt, Artificial Sequence
  Description of Artificial Sequence: Synthetic oligonucleotide
cuggaaucguccgauuuug

SEQ ID NO: 1176477 - RNA, 19 nt, Artificial Sequence
  Description of Artificial Sequence: Synthetic oligonucleotide
ggaaauccugaccaaugac

SEQ ID NO: 1176478 - RNA, 19 nt, Artificial Sequence
  Description of Artificial Sequence: Synthetic oligonucleotide
ucccuauaccucagugggc

SEQ ID NO: 1176479 - RNA, 19 nt, Artificial Sequence
  Description of Artificial Sequence: Synthetic oligonucleotide
gugauagggacaugugcca

SEQ ID NO: 1176480 - RNA, 19 nt, Artificial Sequence
  Description of Artificial Sequence: Synthetic oligonucleotide
acguagcuagggaaguaac

SEQ ID NO: 1176481 - RNA, 19 nt, Artificial Sequence
  Description of Artificial Sequence: Synthetic oligonucleotide
caacagacauaccccugag

SEQ ID NO: 1176482 - RNA, 19 nt, Artificial Sequence
  Description of Artificial Sequence: Synthetic oligonucleotide
ggggcugauccccauaggc

SEQ ID NO: 1176483 - RNA, 19 nt, Artificial Sequence
  Description of Artificial Sequence: Synthetic oligonucleotide
caacggugaaauuucaagu

SEQ ID NO: 1176484 - RNA, 19 nt, Artificial Sequence
  Description of Artificial Sequence: Synthetic oligonucleotide
gacucgcaauucugggaag

SEQ ID NO: 1176485 - RNA, 19 nt, Artificial Sequence
  Description of Artificial Sequence: Synthetic oligonucleotide
gaacaccugggauguacuc

SEQ ID NO: 1176486 - RNA, 19 nt, Artificial Sequence
  Description of Artificial Sequence: Synthetic oligonucleotide
uggggcugauccccauagg

SEQ ID NO: 1176487 - RNA, 19 nt, Artificial Sequence
  Description of Artificial Sequence: Synthetic oligonucleotide
uguugcuuuggggaauuau

SEQ ID NO: 1176488 - RNA, 19 nt, Artificial Sequence
  Description of Artificial Sequence: Synthetic oligonucleotide
uuaaagccaucggucuaug

SEQ ID NO: 1176489 - RNA, 19 nt, Artificial Sequence
  Description of Artificial Sequence: Synthetic oligonucleotide
auuccuucugccagauaag

SEQ ID NO: 1176490 - RNA, 19 nt, Artificial Sequence
  Description of Artificial Sequence: Synthetic oligonucleotide
augucuagugaggcugcac

SEQ ID NO: 1176491 - RNA, 19 nt, Artificial Sequence
  Description of Artificial Sequence: Synthetic oligonucleotide
uaauuucggcguuccuacu

SEQ ID NO: 1176492 - RNA, 19 nt, Artificial Sequence
  Description of Artificial Sequence: Synthetic oligonucleotide
uucggcguuccuacuugga

SEQ ID NO: 1176493 - RNA, 19 nt, Artificial Sequence
  Description of Artificial Sequence: Synthetic oligonucleotide
augauaguaucacccuguu

SEQ ID NO: 1176494 - RNA, 19 nt, Artificial Sequence
  Description of Artificial Sequence: Synthetic oligonucleotide
aaugccccugggugaauuu

SEQ ID NO: 1176495 - RNA, 19 nt, Artificial Sequence
  Description of Artificial Sequence: Synthetic oligonucleotide
uaguaucacccuguuccug

SEQ ID NO: 1176496 - RNA, 19 nt, Artificial Sequence
  Description of Artificial Sequence: Synthetic oligonucleotide
cucaccacuaugacaaugu

SEQ ID NO: 1176497 - RNA, 19 nt, Artificial Sequence
  Description of Artificial Sequence: Synthetic oligonucleotide
acucucgugauagggacau

SEQ ID NO: 1176498 - RNA, 19 nt, Artificial Sequence
  Description of Artificial Sequence: Synthetic oligonucleotide
caaggcucaagagcuguug

SEQ ID NO: 1176499 - RNA, 19 nt, Artificial Sequence
  Description of Artificial Sequence: Synthetic oligonucleotide
accaagugccugccugguc

SEQ ID NO: 1176500 - RNA, 19 nt, Artificial Sequence
  Description of Artificial Sequence: Synthetic oligonucleotide
cuaugacaaugucuaguga

SEQ ID NO: 1176501 - RNA, 19 nt, Artificial Sequence
  Description of Artificial Sequence: Synthetic oligonucleotide
ucggucuaugugugguugu

SEQ ID NO: 1176502 - RNA, 19 nt, Artificial Sequence
  Description of Artificial Sequence: Synthetic oligonucleotide
uggacaguacaggguaacu

SEQ ID NO: 1176503 - RNA, 19 nt, Artificial Sequence
  Description of Artificial Sequence: Synthetic oligonucleotide
gauccccauaggcacgauc

SEQ ID NO: 1176504 - RNA, 19 nt, Artificial Sequence
  Description of Artificial Sequence: Synthetic oligonucleotide
cagucuaccguggcugugc

SEQ ID NO: 1176505 - RNA, 19 nt, Artificial Sequence
  Description of Artificial Sequence: Synthetic oligonucleotide
uccagucuaccguggcugu

SEQ ID NO: 1176506 - RNA, 19 nt, Artificial Sequence
  Description of Artificial Sequence: Synthetic oligonucleotide
ucgcaauucugggaagcac

SEQ ID NO: 1176507 - RNA, 19 nt, Artificial Sequence
  Description of Artificial Sequence: Synthetic oligonucleotide
gcacgaucucuucaaacac

SEQ ID NO: 1176508 - RNA, 19 nt, Artificial Sequence
  Description of Artificial Sequence: Synthetic oligonucleotide
ccaggggauaaauggauuc

SEQ ID NO: 1176509 - RNA, 19 nt, Artificial Sequence
  Description of Artificial Sequence: Synthetic oligonucleotide
cagcggaugccuccagugc

SEQ ID NO: 1176510 - RNA, 19 nt, Artificial Sequence
  Description of Artificial Sequence: Synthetic oligonucleotide
augaaaccucugaaggaca

SEQ ID NO: 1176511 - RNA, 19 nt, Artificial Sequence
  Description of Artificial Sequence: Synthetic oligonucleotide
gcaacagacauaccccuga

SEQ ID NO: 1176512 - RNA, 19 nt, Artificial Sequence
  Description of Artificial Sequence: Synthetic oligonucleotide
uaggcacgaucucuucaaa

SEQ ID NO: 1176513 - RNA, 19 nt, Artificial Sequence
  Description of Artificial Sequence: Synthetic oligonucleotide
accaaugacacaagugauu

SEQ ID NO: 1176514 - RNA, 19 nt, Artificial Sequence
  Description of Artificial Sequence: Synthetic oligonucleotide
gacggccagccccacucag

SEQ ID NO: 1176515 - RNA, 19 nt, Artificial Sequence
  Description of Artificial Sequence: Synthetic oligonucleotide
cccaagaaugaaaggcaag

SEQ ID NO: 1176516 - RNA, 19 nt, Artificial Sequence
  Description of Artificial Sequence: Synthetic oligonucleotide
ucuaaacggcaaggaauua

SEQ ID NO: 1176517 - RNA, 19 nt, Artificial Sequence
  Description of Artificial Sequence: Synthetic oligonucleotide
gcugugcuauuuagcaugg

SEQ ID NO: 1176518 - RNA, 19 nt, Artificial Sequence
  Description of Artificial Sequence: Synthetic oligonucleotide
uggucacuuaugagauaaa

SEQ ID NO: 1176519 - RNA, 19 nt, Artificial Sequence
  Description of Artificial Sequence: Synthetic oligonucleotide
agucuaccguggcugugcu

SEQ ID NO: 1176520 - RNA, 19 nt, Artificial Sequence
  Description of Artificial Sequence: Synthetic oligonucleotide
acaccgacucgcaauucug

SEQ ID NO: 1176521 - RNA, 19 nt, Artificial Sequence
  Description of Artificial Sequence: Synthetic oligonucleotide
gaaaccuaauuucggcguu

SEQ ID NO: 1176522 - RNA, 19 nt, Artificial Sequence
  Description of Artificial Sequence: Synthetic oligonucleotide
aucguccgauuuugcucuc

SEQ ID NO: 1176523 - RNA, 19 nt, Artificial Sequence
  Description of Artificial Sequence: Synthetic oligonucleotide
cuggugcuaagcagcccug

SEQ ID NO: 1176524 - RNA, 19 nt, Artificial Sequence
  Description of Artificial Sequence: Synthetic oligonucleotide
gcugccaaauugauuccag

SEQ ID NO: 1176525 - RNA, 19 nt, Artificial Sequence
  Description of Artificial Sequence: Synthetic oligonucleotide
accuaauuucggcguuccu

SEQ ID NO: 1176526 - RNA, 19 nt, Artificial Sequence
  Description of Artificial Sequence: Synthetic oligonucleotide
caaaggcuagaaggcuagc

SEQ ID NO: 1176527 - RNA, 19 nt, Artificial Sequence
  Description of Artificial Sequence: Synthetic oligonucleotide
cagucagaaaccauucuuu

SEQ ID NO: 1176528 - RNA, 19 nt, Artificial Sequence
  Description of Artificial Sequence: Synthetic oligonucleotide
ggaaucguccgauuuugcu

SEQ ID NO: 1176529 - RNA, 19 nt, Artificial Sequence
  Description of Artificial Sequence: Synthetic oligonucleotide
uaucacccuguuccugauu

SEQ ID NO: 1176530 - RNA, 19 nt, Artificial Sequence
  Description of Artificial Sequence: Synthetic oligonucleotide
ggacagaaaacaucucccu

SEQ ID NO: 1176531 - RNA, 19 nt, Artificial Sequence
  Description of Artificial Sequence: Synthetic oligonucleotide
guuguggacaguacagggu

SEQ ID NO: 1176532 - RNA, 19 nt, Artificial Sequence
  Description of Artificial Sequence: Synthetic oligonucleotide
acacaccgacucgcaauuc

SEQ ID NO: 1176533 - RNA, 19 nt, Artificial Sequence
  Description of Artificial Sequence: Synthetic oligonucleotide
ggguaacuagagguggagc

SEQ ID NO: 1176534 - RNA, 19 nt, Artificial Sequence
  Description of Artificial Sequence: Synthetic oligonucleotide
uucugcaguccaguaugau

SEQ ID NO: 1176535 - RNA, 19 nt, Artificial Sequence
  Description of Artificial Sequence: Synthetic oligonucleotide
gaauuuccugaugucuggu

SEQ ID NO: 1176536 - RNA, 19 nt, Artificial Sequence
  Description of Artificial Sequence: Synthetic oligonucleotide
gaccaaugacacaagugau

SEQ ID NO: 1176537 - RNA, 19 nt, Artificial Sequence
  Description of Artificial Sequence: Synthetic oligonucleotide
caaacacaccgacucgcaa

SEQ ID NO: 1176538 - RNA, 19 nt, Artificial Sequence
  Description of Artificial Sequence: Synthetic oligonucleotide
ccccaggcaacagacauac

SEQ ID NO: 1176539 - RNA, 19 nt, Artificial Sequence
  Description of Artificial Sequence: Synthetic oligonucleotide
gacucucgugauagggaca

SEQ ID NO: 1176540 - RNA, 19 nt, Artificial Sequence
  Description of Artificial Sequence: Synthetic oligonucleotide
ccuuacuggggcugauccc

SEQ ID NO: 1176541 - RNA, 19 nt, Artificial Sequence
  Description of Artificial Sequence: Synthetic oligonucleotide
gaccauagugccaguuaaa

SEQ ID NO: 1176542 - RNA, 19 nt, Artificial Sequence
  Description of Artificial Sequence: Synthetic oligonucleotide
ccaaugacacaagugauua

SEQ ID NO: 1176543 - RNA, 19 nt, Artificial Sequence
  Description of Artificial Sequence: Synthetic oligonucleotide
gccaucggucuaugugugg

SEQ ID NO: 1176544 - RNA, 19 nt, Artificial Sequence
  Description of Artificial Sequence: Synthetic oligonucleotide
gcuauuuagcauggcccug

SEQ ID NO: 1176545 - RNA, 19 nt, Artificial Sequence
  Description of Artificial Sequence: Synthetic oligonucleotide
caguccaguaugauaguau

SEQ ID NO: 1176546 - RNA, 19 nt, Artificial Sequence
  Description of Artificial Sequence: Synthetic oligonucleotide
acccuaacuugaaacuuua

SEQ ID NO: 1176547 - RNA, 19 nt, Artificial Sequence
  Description of Artificial Sequence: Synthetic oligonucleotide
ggugcuaagcagcccugga

SEQ ID NO: 1176548 - RNA, 19 nt, Artificial Sequence
  Description of Artificial Sequence: Synthetic oligonucleotide
ucguccgauuuugcucuca

SEQ ID NO: 1176549 - RNA, 19 nt, Artificial Sequence
  Description of Artificial Sequence: Synthetic oligonucleotide
gaccuuacuggggcugauc

SEQ ID NO: 1176550 - RNA, 19 nt, Artificial Sequence
  Description of Artificial Sequence: Synthetic oligonucleotide
ggcaacagacauaccccug

SEQ ID NO: 1176551 - RNA, 19 nt, Artificial Sequence
  Description of Artificial Sequence: Synthetic oligonucleotide
uggcuuaugugaggccaau

SEQ ID NO: 1176552 - RNA, 19 nt, Artificial Sequence
  Description of Artificial Sequence: Synthetic oligonucleotide
ggacaguacaggguaacua

SEQ ID NO: 1176553 - RNA, 19 nt, Artificial Sequence
  Description of Artificial Sequence: Synthetic oligonucleotide
auggcuuaugugaggccaa

SEQ ID NO: 1176554 - RNA, 19 nt, Artificial Sequence
  Description of Artificial Sequence: Synthetic oligonucleotide
cccuauaccucagugggca

SEQ ID NO: 1176555 - RNA, 19 nt, Artificial Sequence
  Description of Artificial Sequence: Synthetic oligonucleotide
cacaccgacucgcaauucu

SEQ ID NO: 1176556 - RNA, 19 nt, Artificial Sequence
  Description of Artificial Sequence: Synthetic oligonucleotide
ggucacuuaugagauaaau

SEQ ID NO: 1176557 - RNA, 19 nt, Artificial Sequence
  Description of Artificial Sequence: Synthetic oligonucleotide
ccgauuuugcucucauaga

SEQ ID NO: 1176558 - RNA, 19 nt, Artificial Sequence
  Description of Artificial Sequence: Synthetic oligonucleotide
cuuagggauucagccaaua

SEQ ID NO: 1176559 - RNA, 19 nt, Artificial Sequence
  Description of Artificial Sequence: Synthetic oligonucleotide
gccaguuaaacuaguauuu

SEQ ID NO: 1176560 - RNA, 19 nt, Artificial Sequence
  Description of Artificial Sequence: Synthetic oligonucleotide
aggcaacggugaaauuuca

SEQ ID NO: 1176561 - RNA, 19 nt, Artificial Sequence
  Description of Artificial Sequence: Synthetic oligonucleotide
ggcuuaugugaggccaaug

SEQ ID NO: 1176562 - RNA, 19 nt, Artificial Sequence
  Description of Artificial Sequence: Synthetic oligonucleotide
ggcaagcuacagaaucuuc

SEQ ID NO: 1176563 - RNA, 19 nt, Artificial Sequence
  Description of Artificial Sequence: Synthetic oligonucleotide
gacauaccccugagugcuc

SEQ ID NO: 1176564 - RNA, 19 nt, Artificial Sequence
  Description of Artificial Sequence: Synthetic oligonucleotide
guuuguugcuuuggggaau

SEQ ID NO: 1176565 - RNA, 19 nt, Artificial Sequence
  Description of Artificial Sequence: Synthetic oligonucleotide
caaugacacaagugauuau

SEQ ID NO: 1176566 - RNA, 19 nt, Artificial Sequence
  Description of Artificial Sequence: Synthetic oligonucleotide
guccgauuuugcucucaua

SEQ ID NO: 1176567 - RNA, 19 nt, Artificial Sequence
  Description of Artificial Sequence: Synthetic oligonucleotide
uuguugcuuuggggaauua

SEQ ID NO: 1176568 - RNA, 19 nt, Artificial Sequence
  Description of Artificial Sequence: Synthetic oligonucleotide
ccauagugccaguuaaacu

SEQ ID NO: 1176569 - RNA, 19 nt, Artificial Sequence
  Description of Artificial Sequence: Synthetic oligonucleotide
gcggaugccuccagugcag

SEQ ID NO: 1176570 - RNA, 19 nt, Artificial Sequence
  Description of Artificial Sequence: Synthetic oligonucleotide
cggcguuccuacuuggauc

SEQ ID NO: 1176571 - RNA, 19 nt, Artificial Sequence
  Description of Artificial Sequence: Synthetic oligonucleotide
gccuagaaaugucaagguu

SEQ ID NO: 1176572 - RNA, 19 nt, Artificial Sequence
  Description of Artificial Sequence: Synthetic oligonucleotide
agggacggccagccccacu

SEQ ID NO: 1176573 - RNA, 19 nt, Artificial Sequence
  Description of Artificial Sequence: Synthetic oligonucleotide
cagcccuggaaucguccga

SEQ ID NO: 1176574 - RNA, 19 nt, Artificial Sequence
  Description of Artificial Sequence: Synthetic oligonucleotide
ccgacucgcaauucuggga

SEQ ID NO: 1176575 - RNA, 19 nt, Artificial Sequence
  Description of Artificial Sequence: Synthetic oligonucleotide
ggcaacggugaaauuucaa

SEQ ID NO: 1176576 - RNA, 19 nt, Artificial Sequence
  Description of Artificial Sequence: Synthetic oligonucleotide
cgacucgcaauucugggaa

SEQ ID NO: 1176577 - RNA, 19 nt, Artificial Sequence
  Description of Artificial Sequence: Synthetic oligonucleotide
guaucacccuguuccugau

SEQ ID NO: 1176578 - RNA, 19 nt, Artificial Sequence
  Description of Artificial Sequence: Synthetic oligonucleotide
agaccuuacuggggcugau

SEQ ID NO: 1176579 - RNA, 19 nt, Artificial Sequence
  Description of Artificial Sequence: Synthetic oligonucleotide
gcaguacaucagcacccuc

SEQ ID NO: 1176580 - RNA, 19 nt, Artificial Sequence
  Description of Artificial Sequence: Synthetic oligonucleotide
caacguagcuagggaagua

SEQ ID NO: 1176581 - RNA, 19 nt, Artificial Sequence
  Description of Artificial Sequence: Synthetic oligonucleotide
cucucgugauagggacaug

SEQ ID NO: 1176582 - RNA, 19 nt, Artificial Sequence
  Description of Artificial Sequence: Synthetic oligonucleotide
gcugcacaugggcccagga

SEQ ID NO: 1176583 - RNA, 19 nt, Artificial Sequence
  Description of Artificial Sequence: Synthetic oligonucleotide
gugguuguguguguuucuu

SEQ ID NO: 1176584 - RNA, 19 nt, Artificial Sequence
  Description of Artificial Sequence: Synthetic oligonucleotide
guuccuacuuggaucccuu

SEQ ID NO: 1176585 - RNA, 19 nt, Artificial Sequence
  Description of Artificial Sequence: Synthetic oligonucleotide
ugauccccauaggcacgau

SEQ ID NO: 1176586 - RNA, 19 nt, Artificial Sequence
  Description of Artificial Sequence: Synthetic oligonucleotide
cacugcagucagaaaccau

SEQ ID NO: 1176587 - RNA, 19 nt, Artificial Sequence
  Description of Artificial Sequence: Synthetic oligonucleotide
cguagcuagggaaguaacu

SEQ ID NO: 1176588 - RNA, 19 nt, Artificial Sequence
  Description of Artificial Sequence: Synthetic oligonucleotide
cacagcggaugccuccagu

SEQ ID NO: 1176589 - RNA, 19 nt, Artificial Sequence
  Description of Artificial Sequence: Synthetic oligonucleotide
cccuaacuugaaacuuuaa

SEQ ID NO: 1176590 - RNA, 19 nt, Artificial Sequence
  Description of Artificial Sequence: Synthetic oligonucleotide
ggacggccagccccacuca

SEQ ID NO: 1176591 - RNA, 19 nt, Artificial Sequence
  Description of Artificial Sequence: Synthetic oligonucleotide
gcuagggaaguaacugaau

SEQ ID NO: 1176592 - RNA, 19 nt, Artificial Sequence
  Description of Artificial Sequence: Synthetic oligonucleotide
ccaucggucuauguguggu

SEQ ID NO: 1176593 - RNA, 19 nt, Artificial Sequence
  Description of Artificial Sequence: Synthetic oligonucleotide
  modified_base (18)..(18): a, c, u, g, unknown or other
gcccuuggcucugaggunu

SEQ ID NO: 1176594 - RNA, 19 nt, Artificial Sequence
  Description of Artificial Sequence: Synthetic oligonucleotide
ggauuccuucugccagaua

SEQ ID NO: 1176595 - RNA, 19 nt, Artificial Sequence
  Description of Artificial Sequence: Synthetic oligonucleotide
caaugccccugggugaauu

SEQ ID NO: 1176596 - RNA, 19 nt, Artificial Sequence
  Description of Artificial Sequence: Synthetic oligonucleotide
ccuggucacuuaugagaua

SEQ ID NO: 1176597 - RNA, 19 nt, Artificial Sequence
  Description of Artificial Sequence: Synthetic oligonucleotide
cagggacggccagccccac

SEQ ID NO: 1176598 - RNA, 19 nt, Artificial Sequence
  Description of Artificial Sequence: Synthetic oligonucleotide
ggcuagaaggcuagcccuu

SEQ ID NO: 1176599 - RNA, 19 nt, Artificial Sequence
  Description of Artificial Sequence: Synthetic oligonucleotide
cccuggaaucguccgauuu

SEQ ID NO: 1176600 - RNA, 19 nt, Artificial Sequence
  Description of Artificial Sequence: Synthetic oligonucleotide
cccugcuuacagacaccaa

SEQ ID NO: 1176601 - RNA, 19 nt, Artificial Sequence
  Description of Artificial Sequence: Synthetic oligonucleotide
cuaccguggcugugcuauu

SEQ ID NO: 1176602 - RNA, 19 nt, Artificial Sequence
  Description of Artificial Sequence: Synthetic oligonucleotide
ggacagcagugcacaacau

SEQ ID NO: 1176603 - RNA, 19 nt, Artificial Sequence
  Description of Artificial Sequence: Synthetic oligonucleotide
ggcuagcccuuggcucuga

SEQ ID NO: 1176604 - RNA, 19 nt, Artificial Sequence
  Description of Artificial Sequence: Synthetic oligonucleotide
cguuccuacuuggaucccu

SEQ ID NO: 1176605 - RNA, 19 nt, Artificial Sequence
  Description of Artificial Sequence: Synthetic oligonucleotide
gccucaccacuaugacaau

SEQ ID NO: 1176606 - RNA, 19 nt, Artificial Sequence
  Description of Artificial Sequence: Synthetic oligonucleotide
cguccgauuuugcucucau

SEQ ID NO: 1176607 - RNA, 19 nt, Artificial Sequence
  Description of Artificial Sequence: Synthetic oligonucleotide
gcccuggaaucguccgauu

SEQ ID NO: 1176608 - RNA, 19 nt, Artificial Sequence
  Description of Artificial Sequence: Synthetic oligonucleotide
aauauuaucgaacaaaguu

SEQ ID NO: 1176609 - RNA, 19 nt, Artificial Sequence
  Description of Artificial Sequence: Synthetic oligonucleotide
uaugugauaaaacagaauc

SEQ ID NO: 1176610 - RNA, 19 nt, Artificial Sequence
  Description of Artificial Sequence: Synthetic oligonucleotide
cauaauaguuauuaaaucc

SEQ ID NO: 1176611 - RNA, 19 nt, Artificial Sequence
  Description of Artificial Sequence: Synthetic oligonucleotide
aacaaagaaacuaauuggc

SEQ ID NO: 1176612 - RNA, 19 nt, Artificial Sequence
  Description of Artificial Sequence: Synthetic oligonucleotide
aacuugauagccuagcaag

SEQ ID NO: 1176613 - RNA, 19 nt, Artificial Sequence
  Description of Artificial Sequence: Synthetic oligonucleotide
acuauguaguaccugacgc

SEQ ID NO: 1176614 - RNA, 19 nt, Artificial Sequence
  Description of Artificial Sequence: Synthetic oligonucleotide
ugucauguacacuagaaag

SEQ ID NO: 1176615 - RNA, 19 nt, Artificial Sequence
  Description of Artificial Sequence: Synthetic oligonucleotide
aaaagacucacacuggucu

SEQ ID NO: 1176616 - RNA, 19 nt, Artificial Sequence
  Description of Artificial Sequence: Synthetic oligonucleotide
aguuauacccaguauaauc

SEQ ID NO: 1176617 - RNA, 19 nt, Artificial Sequence
  Description of Artificial Sequence: Synthetic oligonucleotide
uauaguuuugaucaccacc

SEQ ID NO: 1176618 - RNA, 19 nt, Artificial Sequence
  Description of Artificial Sequence: Synthetic oligonucleotide
uaucgaacaaaguuguagg

SEQ ID NO: 1176619 - RNA, 19 nt, Artificial Sequence
  Description of Artificial Sequence: Synthetic oligonucleotide
aaucgagacaaauacucag

SEQ ID NO: 1176620 - RNA, 19 nt, Artificial Sequence
  Description of Artificial Sequence: Synthetic oligonucleotide
aauuguucuggugauugcc

SEQ ID NO: 1176621 - RNA, 19 nt, Artificial Sequence
  Description of Artificial Sequence: Synthetic oligonucleotide
aaaggcuccaaaguauucc

SEQ ID NO: 1176622 - RNA, 19 nt, Artificial Sequence
  Description of Artificial Sequence: Synthetic oligonucleotide
aacuauguaguaccugacg

SEQ ID NO: 1176623 - RNA, 19 nt, Artificial Sequence
  Description of Artificial Sequence: Synthetic oligonucleotide
uauuaucgaacaaaguugu

SEQ ID NO: 1176624 - RNA, 19 nt, Artificial Sequence
  Description of Artificial Sequence: Synthetic oligonucleotide
uaauaauuucuuuacuggc

SEQ ID NO: 1176625 - RNA, 19 nt, Artificial Sequence
  Description of Artificial Sequence: Synthetic oligonucleotide
aguauaaucauauccgcca

SEQ ID NO: 1176626 - RNA, 19 nt, Artificial Sequence
  Description of Artificial Sequence: Synthetic oligonucleotide
agcaaguacaaauauuauc

SEQ ID NO: 1176627 - RNA, 19 nt, Artificial Sequence
  Description of Artificial Sequence: Synthetic oligonucleotide
uugagguuuaacaugaauc

SEQ ID NO: 1176628 - RNA, 19 nt, Artificial Sequence
  Description of Artificial Sequence: Synthetic oligonucleotide
gcaaguacaaauauuaucg

SEQ ID NO: 1176629 - RNA, 19 nt, Artificial Sequence
  Description of Artificial Sequence: Synthetic oligonucleotide
auaagugcucuguugaccg

SEQ ID NO: 1176630 - RNA, 19 nt, Artificial Sequence
  Description of Artificial Sequence: Synthetic oligonucleotide
uuauuugagguuuaacaug

SEQ ID NO: 1176631 - RNA, 19 nt, Artificial Sequence
  Description of Artificial Sequence: Synthetic oligonucleotide
ucaucuuaggucaacagaa

SEQ ID NO: 1176632 - RNA, 19 nt, Artificial Sequence
  Description of Artificial Sequence: Synthetic oligonucleotide
auauccuugaucauaauag

SEQ ID NO: 1176633 - RNA, 19 nt, Artificial Sequence
  Description of Artificial Sequence: Synthetic oligonucleotide
caaagaaacuaauuggcag

SEQ ID NO: 1176634 - RNA, 19 nt, Artificial Sequence
  Description of Artificial Sequence: Synthetic oligonucleotide
acaauugugucauguacac

SEQ ID NO: 1176635 - RNA, 19 nt, Artificial Sequence
  Description of Artificial Sequence: Synthetic oligonucleotide
caaaguauuccuuaauuug

SEQ ID NO: 1176636 - RNA, 19 nt, Artificial Sequence
  Description of Artificial Sequence: Synthetic oligonucleotide
uuuauagccgccccgcccg

SEQ ID NO: 1176637 - RNA, 19 nt, Artificial Sequence
  Description of Artificial Sequence: Synthetic oligonucleotide
uuaucgaacaaaguuguag

SEQ ID NO: 1176638 - RNA, 19 nt, Artificial Sequence
  Description of Artificial Sequence: Synthetic oligonucleotide
cauuuuaccgucauccugc

SEQ ID NO: 1176639 - RNA, 19 nt, Artificial Sequence
  Description of Artificial Sequence: Synthetic oligonucleotide
caaaucgagacaaauacuc

SEQ ID NO: 1176640 - RNA, 19 nt, Artificial Sequence
  Description of Artificial Sequence: Synthetic oligonucleotide
auugagucaauacacagau

SEQ ID NO: 1176641 - RNA, 19 nt, Artificial Sequence
  Description of Artificial Sequence: Synthetic oligonucleotide
aaucaucuuaggucaacag

SEQ ID NO: 1176642 - RNA, 19 nt, Artificial Sequence
  Description of Artificial Sequence: Synthetic oligonucleotide
uguaagaugguuuucuuua

SEQ ID NO: 1176643 - RNA, 19 nt, Artificial Sequence
  Description of Artificial Sequence: Synthetic oligonucleotide
aucgaacaaaguuguaggc

SEQ ID NO: 1176644 - RNA, 19 nt, Artificial Sequence
  Description of Artificial Sequence: Synthetic oligonucleotide
agaacuauguaguaccuga

SEQ ID NO: 1176645 - RNA, 19 nt, Artificial Sequence
  Description of Artificial Sequence: Synthetic oligonucleotide
ugcauuacaacuugauagc

SEQ ID NO: 1176646 - RNA, 19 nt, Artificial Sequence
  Description of Artificial Sequence: Synthetic oligonucleotide
uuccuguggaccaauaccc

SEQ ID NO: 1176647 - RNA, 19 nt, Artificial Sequence
  Description of Artificial Sequence: Synthetic oligonucleotide
uacaguuggacacaauugu

SEQ ID NO: 1176648 - RNA, 19 nt, Artificial Sequence
  Description of Artificial Sequence: Synthetic oligonucleotide
aguuccaaaaccuuaucca

SEQ ID NO: 1176649 - RNA, 19 nt, Artificial Sequence
  Description of Artificial Sequence: Synthetic oligonucleotide
uuaggucaacagaagauca

SEQ ID NO: 1176650 - RNA, 19 nt, Artificial Sequence
  Description of Artificial Sequence: Synthetic oligonucleotide
aaaguauuccuuaauuugu

SEQ ID NO: 1176651 - RNA, 19 nt, Artificial Sequence
  Description of Artificial Sequence: Synthetic oligonucleotide
auaaggaagcauuuauuug

SEQ ID NO: 1176652 - RNA, 19 nt, Artificial Sequence
  Description of Artificial Sequence: Synthetic oligonucleotide
ucugcuuucuaauaauuuc

SEQ ID NO: 1176653 - RNA, 19 nt, Artificial Sequence
  Description of Artificial Sequence: Synthetic oligonucleotide
uguccauauccauaguucc

SEQ ID NO: 1176654 - RNA, 19 nt, Artificial Sequence
  Description of Artificial Sequence: Synthetic oligonucleotide
acucaauccacccacaaaa

SEQ ID NO: 1176655 - RNA, 19 nt, Artificial Sequence
  Description of Artificial Sequence: Synthetic oligonucleotide
uugauuucacacuucccag

SEQ ID NO: 1176656 - RNA, 19 nt, Artificial Sequence
  Description of Artificial Sequence: Synthetic oligonucleotide
aaugcauuacaacuugaua

SEQ ID NO: 1176657 - RNA, 19 nt, Artificial Sequence
  Description of Artificial Sequence: Synthetic oligonucleotide
aaagguuaaaucaguauaa

SEQ ID NO: 1176658 - RNA, 19 nt, Artificial Sequence
  Description of Artificial Sequence: Synthetic oligonucleotide
uucccuuuaaagcuuuggc

SEQ ID NO: 1176659 - RNA, 19 nt, Artificial Sequence
  Description of Artificial Sequence: Synthetic oligonucleotide
gauagcaaaggacaaagua

SEQ ID NO: 1176660 - RNA, 19 nt, Artificial Sequence
  Description of Artificial Sequence: Synthetic oligonucleotide
ugugccuuaauuauugcuu

SEQ ID NO: 1176661 - RNA, 19 nt, Artificial Sequence
  Description of Artificial Sequence: Synthetic oligonucleotide
uauguaguaccugacgcag

SEQ ID NO: 1176662 - RNA, 19 nt, Artificial Sequence
  Description of Artificial Sequence: Synthetic oligonucleotide
cacacuagcagcaucuuug

SEQ ID NO: 1176663 - RNA, 19 nt, Artificial Sequence
  Description of Artificial Sequence: Synthetic oligonucleotide
uaguuauuaaauccuuggu

SEQ ID NO: 1176664 - RNA, 19 nt, Artificial Sequence
  Description of Artificial Sequence: Synthetic oligonucleotide
cuagcaaguacaaauauua

SEQ ID NO: 1176665 - RNA, 19 nt, Artificial Sequence
  Description of Artificial Sequence: Synthetic oligonucleotide
auaguuuugaucaccacca

SEQ ID NO: 1176666 - RNA, 19 nt, Artificial Sequence
  Description of Artificial Sequence: Synthetic oligonucleotide
ugugucauguacacuagaa

SEQ ID NO: 1176667 - RNA, 19 nt, Artificial Sequence
  Description of Artificial Sequence: Synthetic oligonucleotide
uauggagccggauuuaaaa

SEQ ID NO: 1176668 - RNA, 19 nt, Artificial Sequence
  Description of Artificial Sequence: Synthetic oligonucleotide
aggccaaugcauuacaacu

SEQ ID NO: 1176669 - RNA, 19 nt, Artificial Sequence
  Description of Artificial Sequence: Synthetic oligonucleotide
uaguaccugacgcagaaaa

SEQ ID NO: 1176670 - RNA, 19 nt, Artificial Sequence
  Description of Artificial Sequence: Synthetic oligonucleotide
uuaauugugcagucuacaa

SEQ ID NO: 1176671 - RNA, 19 nt, Artificial Sequence
  Description of Artificial Sequence: Synthetic oligonucleotide
uuguaucccagcucaagcc

SEQ ID NO: 1176672 - RNA, 19 nt, Artificial Sequence
  Description of Artificial Sequence: Synthetic oligonucleotide
ugauagccuagcaaguaca

SEQ ID NO: 1176673 - RNA, 19 nt, Artificial Sequence
  Description of Artificial Sequence: Synthetic oligonucleotide
uuaaaauggcggcggaaga

SEQ ID NO: 1176674 - RNA, 19 nt, Artificial Sequence
  Description of Artificial Sequence: Synthetic oligonucleotide
cuuccuguggaccaauacc

SEQ ID NO: 1176675 - RNA, 19 nt, Artificial Sequence
  Description of Artificial Sequence: Synthetic oligonucleotide
uuuuguauccauggggagc

SEQ ID NO: 1176676 - RNA, 19 nt, Artificial Sequence
  Description of Artificial Sequence: Synthetic oligonucleotide
aaucacauaaggaagcauu

SEQ ID NO: 1176677 - RNA, 19 nt, Artificial Sequence
  Description of Artificial Sequence: Synthetic oligonucleotide
uagccuagcaaguacaaau

SEQ ID NO: 1176678 - RNA, 19 nt, Artificial Sequence
  Description of Artificial Sequence: Synthetic oligonucleotide
aucaucuuaggucaacaga

SEQ ID NO: 1176679 - RNA, 19 nt, Artificial Sequence
  Description of Artificial Sequence: Synthetic oligonucleotide
caguauaaucauauccgcc

SEQ ID NO: 1176680 - RNA, 19 nt, Artificial Sequence
  Description of Artificial Sequence: Synthetic oligonucleotide
gaucuuggaucccucugcg

SEQ ID NO: 1176681 - RNA, 19 nt, Artificial Sequence
  Description of Artificial Sequence: Synthetic oligonucleotide
gcuauauacaguuggacac

SEQ ID NO: 1176682 - RNA, 19 nt, Artificial Sequence
  Description of Artificial Sequence: Synthetic oligonucleotide
uuucccauguccuccuuag

SEQ ID NO: 1176683 - RNA, 19 nt, Artificial Sequence
  Description of Artificial Sequence: Synthetic oligonucleotide
agccacuauaguuuugauc

SEQ ID NO: 1176684 - RNA, 19 nt, Artificial Sequence
  Description of Artificial Sequence: Synthetic oligonucleotide
uuuguauccauggggagcu

SEQ ID NO: 1176685 - RNA, 19 nt, Artificial Sequence
  Description of Artificial Sequence: Synthetic oligonucleotide
uggagccggauuuaaaaug

SEQ ID NO: 1176686 - RNA, 19 nt, Artificial Sequence
  Description of Artificial Sequence: Synthetic oligonucleotide
cucgcguugaucuuggauc

SEQ ID NO: 1176687 - RNA, 19 nt, Artificial Sequence
  Description of Artificial Sequence: Synthetic oligonucleotide
uccucuauguugcuguacu

SEQ ID NO: 1176688 - RNA, 19 nt, Artificial Sequence
  Description of Artificial Sequence: Synthetic oligonucleotide
aaauauuaucgaacaaagu

SEQ ID NO: 1176689 - RNA, 19 nt, Artificial Sequence
  Description of Artificial Sequence: Synthetic oligonucleotide
uugauagccuagcaaguac

SEQ ID NO: 1176690 - RNA, 19 nt, Artificial Sequence
  Description of Artificial Sequence: Synthetic oligonucleotide
uguaucccagcucaagccu

SEQ ID NO: 1176691 - RNA, 19 nt, Artificial Sequence
  Description of Artificial Sequence: Synthetic oligonucleotide
ucuucgucuguguauguga

SEQ ID NO: 1176692 - RNA, 19 nt, Artificial Sequence
  Description of Artificial Sequence: Synthetic oligonucleotide
aacuaauuggcagcuauau

SEQ ID NO: 1176693 - RNA, 19 nt, Artificial Sequence
  Description of Artificial Sequence: Synthetic oligonucleotide
uacaaauauuaucgaacaa

SEQ ID NO: 1176694 - RNA, 19 nt, Artificial Sequence
  Description of Artificial Sequence: Synthetic oligonucleotide
uuacauuuccacagaacua

SEQ ID NO: 1176695 - RNA, 19 nt, Artificial Sequence
  Description of Artificial Sequence: Synthetic oligonucleotide
aucaauuugccauccaguu

SEQ ID NO: 1176696 - RNA, 19 nt, Artificial Sequence
  Description of Artificial Sequence: Synthetic oligonucleotide
ucgaacaaaguuguaggca

SEQ ID NO: 1176697 - RNA, 19 nt, Artificial Sequence
  Description of Artificial Sequence: Synthetic oligonucleotide
ugauuucacacuucccaga

SEQ ID NO: 1176698 - RNA, 19 nt, Artificial Sequence
  Description of Artificial Sequence: Synthetic oligonucleotide
ugccuguauaccucuuugg

SEQ ID NO: 1176699 - RNA, 19 nt, Artificial Sequence
  Description of Artificial Sequence: Synthetic oligonucleotide
cuuaggucaacagaagauc

SEQ ID NO: 1176700 - RNA, 19 nt, Artificial Sequence
  Description of Artificial Sequence: Synthetic oligonucleotide
cacuggucuaguuucuucc

SEQ ID NO: 1176701 - RNA, 19 nt, Artificial Sequence
  Description of Artificial Sequence: Synthetic oligonucleotide
uauucucuaucucuccaaa

SEQ ID NO: 1176702 - RNA, 19 nt, Artificial Sequence
  Description of Artificial Sequence: Synthetic oligonucleotide
agguuaaaucaguauaaaa

SEQ ID NO: 1176703 - RNA, 19 nt, Artificial Sequence
  Description of Artificial Sequence: Synthetic oligonucleotide
uauuugaugguaucugcuu

SEQ ID NO: 1176704 - RNA, 19 nt, Artificial Sequence
  Description of Artificial Sequence: Synthetic oligonucleotide
cuguccauauccauaguuc

SEQ ID NO: 1176705 - RNA, 19 nt, Artificial Sequence
  Description of Artificial Sequence: Synthetic oligonucleotide
agucugcauaucccugucc

SEQ ID NO: 1176706 - RNA, 19 nt, Artificial Sequence
  Description of Artificial Sequence: Synthetic oligonucleotide
ucgucuguguaugugauaa

SEQ ID NO: 1176707 - RNA, 19 nt, Artificial Sequence
  Description of Artificial Sequence: Synthetic oligonucleotide
augguuuucuuuacacccc

SEQ ID NO: 1176708 - RNA, 19 nt, Artificial Sequence
  Description of Artificial Sequence: Synthetic oligonucleotide
uuacaacuugauagccuag

SEQ ID NO: 1176709 - RNA, 19 nt, Artificial Sequence
  Description of Artificial Sequence: Synthetic oligonucleotide
auaguuauacccaguauaa

SEQ ID NO: 1176710 - RNA, 19 nt, Artificial Sequence
  Description of Artificial Sequence: Synthetic oligonucleotide
auaggcacuauuauaauuu

SEQ ID NO: 1176711 - RNA, 19 nt, Artificial Sequence
  Description of Artificial Sequence: Synthetic oligonucleotide
cccaaaucgagacaaauac

SEQ ID NO: 1176712 - RNA, 19 nt, Artificial Sequence
  Description of Artificial Sequence: Synthetic oligonucleotide
uacaacuugauagccuagc

SEQ ID NO: 1176713 - RNA, 19 nt, Artificial Sequence
  Description of Artificial Sequence: Synthetic oligonucleotide
ucgcguugaucuuggaucc

SEQ ID NO: 1176714 - RNA, 19 nt, Artificial Sequence
  Description of Artificial Sequence: Synthetic oligonucleotide
aaccuauuugaugguaucu

SEQ ID NO: 1176715 - RNA, 19 nt, Artificial Sequence
  Description of Artificial Sequence: Synthetic oligonucleotide
ggauuuaaaauggcggcgg

SEQ ID NO: 1176716 - RNA, 19 nt, Artificial Sequence
  Description of Artificial Sequence: Synthetic oligonucleotide
acaaagaaacuaauuggca

SEQ ID NO: 1176717 - RNA, 19 nt, Artificial Sequence
  Description of Artificial Sequence: Synthetic oligonucleotide
auacaguuggacacaauug

SEQ ID NO: 1176718 - RNA, 19 nt, Artificial Sequence
  Description of Artificial Sequence: Synthetic oligonucleotide
ugucuggacucaauccacc

SEQ ID NO: 1176719 - RNA, 19 nt, Artificial Sequence
  Description of Artificial Sequence: Synthetic oligonucleotide
cuuuauagccgccccgccc

SEQ ID NO: 1176720 - RNA, 19 nt, Artificial Sequence
  Description of Artificial Sequence: Synthetic oligonucleotide
uuaguagggcugguaauug

SEQ ID NO: 1176721 - RNA, 19 nt, Artificial Sequence
  Description of Artificial Sequence: Synthetic oligonucleotide
gauuucacacuucccagaa

SEQ ID NO: 1176722 - RNA, 19 nt, Artificial Sequence
  Description of Artificial Sequence: Synthetic oligonucleotide
gaggccaaugcauuacaac

SEQ ID NO: 1176723 - RNA, 19 nt, Artificial Sequence
  Description of Artificial Sequence: Synthetic oligonucleotide
auuugaugguaucugcuuu

SEQ ID NO: 1176724 - RNA, 19 nt, Artificial Sequence
  Description of Artificial Sequence: Synthetic oligonucleotide
ugccauaagugcucuguug

SEQ ID NO: 1176725 - RNA, 19 nt, Artificial Sequence
  Description of Artificial Sequence: Synthetic oligonucleotide
auagccacuauaguuuuga

SEQ ID NO: 1176726 - RNA, 19 nt, Artificial Sequence
  Description of Artificial Sequence: Synthetic oligonucleotide
ucccagaaccuauuugaug

SEQ ID NO: 1176727 - RNA, 19 nt, Artificial Sequence
  Description of Artificial Sequence: Synthetic oligonucleotide
aagguuaaaucaguauaaa

SEQ ID NO: 1176728 - RNA, 19 nt, Artificial Sequence
  Description of Artificial Sequence: Synthetic oligonucleotide
ucccuuuauagccgccccg

SEQ ID NO: 1176729 - RNA, 19 nt, Artificial Sequence
  Description of Artificial Sequence: Synthetic oligonucleotide
cuggacucaauccacccac

SEQ ID NO: 1176730 - RNA, 19 nt, Artificial Sequence
  Description of Artificial Sequence: Synthetic oligonucleotide
ucaauuugccauccaguuu

SEQ ID NO: 1176731 - RNA, 19 nt, Artificial Sequence
  Description of Artificial Sequence: Synthetic oligonucleotide
aaagacucacacuggucua

SEQ ID NO: 1176732 - RNA, 19 nt, Artificial Sequence
  Description of Artificial Sequence: Synthetic oligonucleotide
uguucuggugauugccacc

SEQ ID NO: 1176733 - RNA, 19 nt, Artificial Sequence
  Description of Artificial Sequence: Synthetic oligonucleotide
ucuguugaccgcuguaguc

SEQ ID NO: 1176734 - RNA, 19 nt, Artificial Sequence
  Description of Artificial Sequence: Synthetic oligonucleotide
uggucuaguuucuuccugu

SEQ ID NO: 1176735 - RNA, 19 nt, Artificial Sequence
  Description of Artificial Sequence: Synthetic oligonucleotide
uaaucauauccgccauagc

SEQ ID NO: 1176736 - RNA, 19 nt, Artificial Sequence
  Description of Artificial Sequence: Synthetic oligonucleotide
uauaaucauauccgccaua

SEQ ID NO: 1176737 - RNA, 19 nt, Artificial Sequence
  Description of Artificial Sequence: Synthetic oligonucleotide
gaagagauccggccgccgc

SEQ ID NO: 1176738 - RNA, 19 nt, Artificial Sequence
  Description of Artificial Sequence: Synthetic oligonucleotide
cauugagucaauacacaga

SEQ ID NO: 1176739 - RNA, 19 nt, Artificial Sequence
  Description of Artificial Sequence: Synthetic oligonucleotide
uggggucuaucaauuugcc

SEQ ID NO: 1176740 - RNA, 19 nt, Artificial Sequence
  Description of Artificial Sequence: Synthetic oligonucleotide
ggagccggauuuaaaaugg

SEQ ID NO: 1176741 - RNA, 19 nt, Artificial Sequence
  Description of Artificial Sequence: Synthetic oligonucleotide
aauacucagucagaucuuu

SEQ ID NO: 1176742 - RNA, 19 nt, Artificial Sequence
  Description of Artificial Sequence: Synthetic oligonucleotide
accuauuugaugguaucug

SEQ ID NO: 1176743 - RNA, 19 nt, Artificial Sequence
  Description of Artificial Sequence: Synthetic oligonucleotide
caaaaccuuauccacacua

SEQ ID NO: 1176744 - RNA, 19 nt, Artificial Sequence
  Description of Artificial Sequence: Synthetic oligonucleotide
gccuguauaccucuuuggg

SEQ ID NO: 1176745 - RNA, 19 nt, Artificial Sequence
  Description of Artificial Sequence: Synthetic oligonucleotide
uaucccagcucaagccucc

SEQ ID NO: 1176746 - RNA, 19 nt, Artificial Sequence
  Description of Artificial Sequence: Synthetic oligonucleotide
guucuggugauugccaccc

SEQ ID NO: 1176747 - RNA, 19 nt, Artificial Sequence
  Description of Artificial Sequence: Synthetic oligonucleotide
uguugaccgcuguagucug

SEQ ID NO: 1176748 - RNA, 19 nt, Artificial Sequence
  Description of Artificial Sequence: Synthetic oligonucleotide
uccuguggaccaauacccc

SEQ ID NO: 1176749 - RNA, 19 nt, Artificial Sequence
  Description of Artificial Sequence: Synthetic oligonucleotide
cuauguaguaccugacgca

SEQ ID NO: 1176750 - RNA, 19 nt, Artificial Sequence
  Description of Artificial Sequence: Synthetic oligonucleotide
uugcucgcguugaucuugg

SEQ ID NO: 1176751 - RNA, 19 nt, Artificial Sequence
  Description of Artificial Sequence: Synthetic oligonucleotide
ccuauuugaugguaucugc

SEQ ID NO: 1176752 - RNA, 19 nt, Artificial Sequence
  Description of Artificial Sequence: Synthetic oligonucleotide
uuccacguccccucguacc

SEQ ID NO: 1176753 - RNA, 19 nt, Artificial Sequence
  Description of Artificial Sequence: Synthetic oligonucleotide
ucgggagggcugcugggcg

SEQ ID NO: 1176754 - RNA, 19 nt, Artificial Sequence
  Description of Artificial Sequence: Synthetic oligonucleotide
agccggauuuaaaauggcg

SEQ ID NO: 1176755 - RNA, 19 nt, Artificial Sequence
  Description of Artificial Sequence: Synthetic oligonucleotide
uguacacuagaaagucuuu

SEQ ID NO: 1176756 - RNA, 19 nt, Artificial Sequence
  Description of Artificial Sequence: Synthetic oligonucleotide
aguuuugaucaccaccaua

SEQ ID NO: 1176757 - RNA, 19 nt, Artificial Sequence
  Description of Artificial Sequence: Synthetic oligonucleotide
aaguauuccuuaauuuguu

SEQ ID NO: 1176758 - RNA, 19 nt, Artificial Sequence
  Description of Artificial Sequence: Synthetic oligonucleotide
ccggauuuaaaauggcggc

SEQ ID NO: 1176759 - RNA, 19 nt, Artificial Sequence
  Description of Artificial Sequence: Synthetic oligonucleotide
ugccuuaauuauugcuucu

SEQ ID NO: 1176760 - RNA, 19 nt, Artificial Sequence
  Description of Artificial Sequence: Synthetic oligonucleotide
auggagccggauuuaaaau

SEQ ID NO: 1176761 - RNA, 19 nt, Artificial Sequence
  Description of Artificial Sequence: Synthetic oligonucleotide
gucuuaauugugcagucua

SEQ ID NO: 1176762 - RNA, 19 nt, Artificial Sequence
  Description of Artificial Sequence: Synthetic oligonucleotide
auaccucuuuggguugugc

SEQ ID NO: 1176763 - RNA, 19 nt, Artificial Sequence
  Description of Artificial Sequence: Synthetic oligonucleotide
ugucuuaauugugcagucu

SEQ ID NO: 1176764 - RNA, 19 nt, Artificial Sequence
  Description of Artificial Sequence: Synthetic oligonucleotide
aagugcucuguugaccgcu

SEQ ID NO: 1176765 - RNA, 19 nt, Artificial Sequence
  Description of Artificial Sequence: Synthetic oligonucleotide
agguuuaacaugaaucaua

SEQ ID NO: 1176766 - RNA, 19 nt, Artificial Sequence
  Description of Artificial Sequence: Synthetic oligonucleotide
agugacuggaucugucuua

SEQ ID NO: 1176767 - RNA, 19 nt, Artificial Sequence
  Description of Artificial Sequence: Synthetic oligonucleotide
gaacuauguaguaccugac

SEQ ID NO: 1176768 - RNA, 19 nt, Artificial Sequence
  Description of Artificial Sequence: Synthetic oligonucleotide
uuuucccauguccuccuua

SEQ ID NO: 1176769 - RNA, 19 nt, Artificial Sequence
  Description of Artificial Sequence: Synthetic oligonucleotide
cugccuguauaccucuuug

SEQ ID NO: 1176770 - RNA, 19 nt, Artificial Sequence
  Description of Artificial Sequence: Synthetic oligonucleotide
uaguagggcugguaauugu

SEQ ID NO: 1176771 - RNA, 19 nt, Artificial Sequence
  Description of Artificial Sequence: Synthetic oligonucleotide
auuuuaccgucauccugcu

SEQ ID NO: 1176772 - RNA, 19 nt, Artificial Sequence
  Description of Artificial Sequence: Synthetic oligonucleotide
ggcggaagagauccggccg

SEQ ID NO: 1176773 - RNA, 19 nt, Artificial Sequence
  Description of Artificial Sequence: Synthetic oligonucleotide
uccagugacuggaucuguc

SEQ ID NO: 1176774 - RNA, 19 nt, Artificial Sequence
  Description of Artificial Sequence: Synthetic oligonucleotide
ugcgcccucccuuuauagc

SEQ ID NO: 1176775 - RNA, 19 nt, Artificial Sequence
  Description of Artificial Sequence: Synthetic oligonucleotide
cagcuauauacaguuggac

SEQ ID NO: 1176776 - RNA, 19 nt, Artificial Sequence
  Description of Artificial Sequence: Synthetic oligonucleotide
uuuuaccgucauccugcug

SEQ ID NO: 1176777 - RNA, 19 nt, Artificial Sequence
  Description of Artificial Sequence: Synthetic oligonucleotide
gacaaauacucagucagau

SEQ ID NO: 1176778 - RNA, 19 nt, Artificial Sequence
  Description of Artificial Sequence: Synthetic oligonucleotide
agaaccuauuugaugguau

SEQ ID NO: 1176779 - RNA, 19 nt, Artificial Sequence
  Description of Artificial Sequence: Synthetic oligonucleotide
acuugauagccuagcaagu

SEQ ID NO: 1176780 - RNA, 19 nt, Artificial Sequence
  Description of Artificial Sequence: Synthetic oligonucleotide
uggacucaauccacccaca

SEQ ID NO: 1176781 - RNA, 19 nt, Artificial Sequence
  Description of Artificial Sequence: Synthetic oligonucleotide
ucccauaguuauacccagu

SEQ ID NO: 1176782 - RNA, 19 nt, Artificial Sequence
  Description of Artificial Sequence: Synthetic oligonucleotide
gccauaagugcucuguuga

SEQ ID NO: 1176783 - RNA, 19 nt, Artificial Sequence
  Description of Artificial Sequence: Synthetic oligonucleotide
aaacuaauuggcagcuaua

SEQ ID NO: 1176784 - RNA, 19 nt, Artificial Sequence
  Description of Artificial Sequence: Synthetic oligonucleotide
ugacguggcgcuggguccg

SEQ ID NO: 1176785 - RNA, 19 nt, Artificial Sequence
  Description of Artificial Sequence: Synthetic oligonucleotide
auuuaaaauggcggcggaa

SEQ ID NO: 1176786 - RNA, 19 nt, Artificial Sequence
  Description of Artificial Sequence: Synthetic oligonucleotide
uaguucccauaguuauacc

SEQ ID NO: 1176787 - RNA, 19 nt, Artificial Sequence
  Description of Artificial Sequence: Synthetic oligonucleotide
gacucaauccacccacaaa

SEQ ID NO: 1176788 - RNA, 19 nt, Artificial Sequence
  Description of Artificial Sequence: Synthetic oligonucleotide
ucuuccacguccccucgua

SEQ ID NO: 1176789 - RNA, 19 nt, Artificial Sequence
  Description of Artificial Sequence: Synthetic oligonucleotide
caugcuggcggagccgucg

SEQ ID NO: 1176790 - RNA, 19 nt, Artificial Sequence
  Description of Artificial Sequence: Synthetic oligonucleotide
cuguauaccucuuuggguu

SEQ ID NO: 1176791 - RNA, 19 nt, Artificial Sequence
  Description of Artificial Sequence: Synthetic oligonucleotide
gucaauacacagauagcaa

SEQ ID NO: 1176792 - RNA, 19 nt, Artificial Sequence
  Description of Artificial Sequence: Synthetic oligonucleotide
uaguuauacccaguauaau

SEQ ID NO: 1176793 - RNA, 19 nt, Artificial Sequence
  Description of Artificial Sequence: Synthetic oligonucleotide
caacuugauagccuagcaa

SEQ ID NO: 1176794 - RNA, 19 nt, Artificial Sequence
  Description of Artificial Sequence: Synthetic oligonucleotide
gugacguggcgcugggucc

SEQ ID NO: 1176795 - RNA, 19 nt, Artificial Sequence
  Description of Artificial Sequence: Synthetic oligonucleotide
uuaccgucauccugcuggu

SEQ ID NO: 1176796 - RNA, 19 nt, Artificial Sequence
  Description of Artificial Sequence: Synthetic oligonucleotide
ugcuguacucguucauguc

SEQ ID NO: 1176797 - RNA, 19 nt, Artificial Sequence
  Description of Artificial Sequence: Synthetic oligonucleotide
cauuacaacuugauagccu

SEQ ID NO: 1176798 - RNA, 19 nt, Artificial Sequence
  Description of Artificial Sequence: Synthetic oligonucleotide
gauagccuagcaaguacaa

SEQ ID NO: 1176799 - RNA, 19 nt, Artificial Sequence
  Description of Artificial Sequence: Synthetic oligonucleotide
gcauuacaacuugauagcc

SEQ ID NO: 1176800 - RNA, 19 nt, Artificial Sequence
  Description of Artificial Sequence: Synthetic oligonucleotide
uacccaguauaaucauauc

SEQ ID NO: 1176801 - RNA, 19 nt, Artificial Sequence
  Description of Artificial Sequence: Synthetic oligonucleotide
gucauguacacuagaaagu

SEQ ID NO: 1176802 - RNA, 19 nt, Artificial Sequence
  Description of Artificial Sequence: Synthetic oligonucleotide
uggggagcucaauauucuc

SEQ ID NO: 1176803 - RNA, 19 nt, Artificial Sequence
  Description of Artificial Sequence: Synthetic oligonucleotide
cagaacuauguaguaccug

SEQ ID NO: 1176804 - RNA, 19 nt, Artificial Sequence
  Description of Artificial Sequence: Synthetic oligonucleotide
gcucaagccuccaauaaac

SEQ ID NO: 1176805 - RNA, 19 nt, Artificial Sequence
  Description of Artificial Sequence: Synthetic oligonucleotide
agacaaauacucagucaga

SEQ ID NO: 1176806 - RNA, 19 nt, Artificial Sequence
  Description of Artificial Sequence: Synthetic oligonucleotide
cacauaaggaagcauuuau

SEQ ID NO: 1176807 - RNA, 19 nt, Artificial Sequence
  Description of Artificial Sequence: Synthetic oligonucleotide
acagaacuauguaguaccu

SEQ ID NO: 1176808 - RNA, 19 nt, Artificial Sequence
  Description of Artificial Sequence: Synthetic oligonucleotide
uggcucuucgucuguguau

SEQ ID NO: 1176809 - RNA, 19 nt, Artificial Sequence
  Description of Artificial Sequence: Synthetic oligonucleotide
cuuccccaaaucgagacaa

SEQ ID NO: 1176810 - RNA, 19 nt, Artificial Sequence
  Description of Artificial Sequence: Synthetic oligonucleotide
ggugacguggcgcuggguc

SEQ ID NO: 1176811 - RNA, 19 nt, Artificial Sequence
  Description of Artificial Sequence: Synthetic oligonucleotide
uuauccacacuagcagcau

SEQ ID NO: 1176812 - RNA, 19 nt, Artificial Sequence
  Description of Artificial Sequence: Synthetic oligonucleotide
cucguucauguccuccaug

SEQ ID NO: 1176813 - RNA, 19 nt, Artificial Sequence
  Description of Artificial Sequence: Synthetic oligonucleotide
auauccgccauagccacua

SEQ ID NO: 1176814 - RNA, 19 nt, Artificial Sequence
  Description of Artificial Sequence: Synthetic oligonucleotide
ugcucuguugaccgcugua

SEQ ID NO: 1176815 - RNA, 19 nt, Artificial Sequence
  Description of Artificial Sequence: Synthetic oligonucleotide
gcgcccucccuuuauagcc

SEQ ID NO: 1176816 - RNA, 19 nt, Artificial Sequence
  Description of Artificial Sequence: Synthetic oligonucleotide
guaucugcuuucuaauaau

SEQ ID NO: 1176817 - RNA, 19 nt, Artificial Sequence
  Description of Artificial Sequence: Synthetic oligonucleotide
guagucugcauaucccugu

SEQ ID NO: 1176818 - RNA, 19 nt, Artificial Sequence
  Description of Artificial Sequence: Synthetic oligonucleotide
gagccggauuuaaaauggc

SEQ ID NO: 1176819 - RNA, 19 nt, Artificial Sequence
  Description of Artificial Sequence: Synthetic oligonucleotide
uuauagccgccccgcccgc

SEQ ID NO: 1176820 - RNA, 19 nt, Artificial Sequence
  Description of Artificial Sequence: Synthetic oligonucleotide
cugcgcccucccuuuauag

SEQ ID NO: 1176821 - RNA, 19 nt, Artificial Sequence
  Description of Artificial Sequence: Synthetic oligonucleotide
auaucccuguccauaucca

SEQ ID NO: 1176822 - RNA, 19 nt, Artificial Sequence
  Description of Artificial Sequence: Synthetic oligonucleotide
ccuugguuccaguuuuggc

SEQ ID NO: 1176823 - RNA, 19 nt, Artificial Sequence
  Description of Artificial Sequence: Synthetic oligonucleotide
guauaaucauauccgccau

SEQ ID NO: 1176824 - RNA, 19 nt, Artificial Sequence
  Description of Artificial Sequence: Synthetic oligonucleotide
uucccauguccuccuuagu

SEQ ID NO: 1176825 - RNA, 19 nt, Artificial Sequence
  Description of Artificial Sequence: Synthetic oligonucleotide
ggcggagcguuguauggag

SEQ ID NO: 1176826 - RNA, 19 nt, Artificial Sequence
  Description of Artificial Sequence: Synthetic oligonucleotide
uuaaagcuuuggcccuuuu

SEQ ID NO: 1176827 - RNA, 19 nt, Artificial Sequence
  Description of Artificial Sequence: Synthetic oligonucleotide
cuugauagccuagcaagua

SEQ ID NO: 1176828 - RNA, 19 nt, Artificial Sequence
  Description of Artificial Sequence: Synthetic oligonucleotide
caccauaggcacuauuaua

SEQ ID NO: 1176829 - RNA, 19 nt, Artificial Sequence
  Description of Artificial Sequence: Synthetic oligonucleotide
cacguccccucguaccacc

SEQ ID NO: 1176830 - RNA, 19 nt, Artificial Sequence
  Description of Artificial Sequence: Synthetic oligonucleotide
auagccuagcaaguacaaa

SEQ ID NO: 1176831 - RNA, 19 nt, Artificial Sequence
  Description of Artificial Sequence: Synthetic oligonucleotide
cauaggcacuauuauaauu

SEQ ID NO: 1176832 - RNA, 19 nt, Artificial Sequence
  Description of Artificial Sequence: Synthetic oligonucleotide
uuuaaagcuuuggcccuuu

SEQ ID NO: 1176833 - RNA, 19 nt, Artificial Sequence
  Description of Artificial Sequence: Synthetic oligonucleotide
agcgaagggaggagcgggg

SEQ ID NO: 1176834 - RNA, 19 nt, Artificial Sequence
  Description of Artificial Sequence: Synthetic oligonucleotide
cuuccacguccccucguac

SEQ ID NO: 1176835 - RNA, 19 nt, Artificial Sequence
  Description of Artificial Sequence: Synthetic oligonucleotide
caacuuccccaaaucgaga

SEQ ID NO: 1176836 - RNA, 19 nt, Artificial Sequence
  Description of Artificial Sequence: Synthetic oligonucleotide
guugugcaacuuugauuuc

SEQ ID NO: 1176837 - RNA, 19 nt, Artificial Sequence
  Description of Artificial Sequence: Synthetic oligonucleotide
ggagcguuguauggagccg

SEQ ID NO: 1176838 - RNA, 19 nt, Artificial Sequence
  Description of Artificial Sequence: Synthetic oligonucleotide
gaccgcuguagucugcaua

SEQ ID NO: 1176839 - RNA, 19 nt, Artificial Sequence
  Description of Artificial Sequence: Synthetic oligonucleotide
cugugccuuaauuauugcu

SEQ ID NO: 1176840 - RNA, 19 nt, Artificial Sequence
  Description of Artificial Sequence: Synthetic oligonucleotide
uggcggagccgucggcgag

SEQ ID NO: 1176841 - RNA, 19 nt, Artificial Sequence
  Description of Artificial Sequence: Synthetic oligonucleotide
guaucccagcucaagccuc

SEQ ID NO: 1176842 - RNA, 19 nt, Artificial Sequence
  Description of Artificial Sequence: Synthetic oligonucleotide
cgcuguagucugcauaucc

SEQ ID NO: 1176843 - RNA, 19 nt, Artificial Sequence
  Description of Artificial Sequence: Synthetic oligonucleotide
cggauuuaaaauggcggcg

SEQ ID NO: 1176844 - RNA, 19 nt, Artificial Sequence
  Description of Artificial Sequence: Synthetic oligonucleotide
ggcuccaaaguauuccuua

SEQ ID NO: 1176845 - RNA, 19 nt, Artificial Sequence
  Description of Artificial Sequence: Synthetic oligonucleotide
ccauaagugcucuguugac

SEQ ID NO: 1176846 - RNA, 19 nt, Artificial Sequence
  Description of Artificial Sequence: Synthetic oligonucleotide
gcggcggagcguuguaugg

SEQ ID NO: 1176847 - RNA, 19 nt, Artificial Sequence
  Description of Artificial Sequence: Synthetic oligonucleotide
gugacuggaucugucuuaa

SEQ ID NO: 1176848 - RNA, 19 nt, Artificial Sequence
  Description of Artificial Sequence: Synthetic oligonucleotide
cggagcguuguauggagcc

SEQ ID NO: 1176849 - RNA, 19 nt, Artificial Sequence
  Description of Artificial Sequence: Synthetic oligonucleotide
auuaucgaacaaaguugua

SEQ ID NO: 1176850 - RNA, 19 nt, Artificial Sequence
  Description of Artificial Sequence: Synthetic oligonucleotide
ccacagaacuauguaguac

SEQ ID NO: 1176851 - RNA, 19 nt, Artificial Sequence
  Description of Artificial Sequence: Synthetic oligonucleotide
guggcgcuggguccggcgc

SEQ ID NO: 1176852 - RNA, 19 nt, Artificial Sequence
  Description of Artificial Sequence: Synthetic oligonucleotide
cacacuucccagaaccuau

SEQ ID NO: 1176853 - RNA, 19 nt, Artificial Sequence
  Description of Artificial Sequence: Synthetic oligonucleotide
agaaacuaauuggcagcua

SEQ ID NO: 1176854 - RNA, 19 nt, Artificial Sequence
  Description of Artificial Sequence: Synthetic oligonucleotide
gagcgagcgaagggaggag

SEQ ID NO: 1176855 - RNA, 19 nt, Artificial Sequence
  Description of Artificial Sequence: Synthetic oligonucleotide
cuuaguagggcugguaauu

SEQ ID NO: 1176856 - RNA, 19 nt, Artificial Sequence
  Description of Artificial Sequence: Synthetic oligonucleotide
gcagcuauauacaguugga

SEQ ID NO: 1176857 - RNA, 19 nt, Artificial Sequence
  Description of Artificial Sequence: Synthetic oligonucleotide
uggcggcggaagagauccg

SEQ ID NO: 1176858 - RNA, 19 nt, Artificial Sequence
  Description of Artificial Sequence: Synthetic oligonucleotide
gcuggagcgagcgaaggga

SEQ ID NO: 1176859 - RNA, 19 nt, Artificial Sequence
  Description of Artificial Sequence: Synthetic oligonucleotide
ggcggcggaagagauccgg

SEQ ID NO: 1176860 - RNA, 19 nt, Artificial Sequence
  Description of Artificial Sequence: Synthetic oligonucleotide
aucccuguccauauccaua

SEQ ID NO: 1176861 - RNA, 19 nt, Artificial Sequence
  Description of Artificial Sequence: Synthetic oligonucleotide
gaucccucugcgaacuccu

SEQ ID NO: 1176862 - RNA, 19 nt, Artificial Sequence
  Description of Artificial Sequence: Synthetic oligonucleotide
cccucguaccaccucuucc

SEQ ID NO: 1176863 - RNA, 19 nt, Artificial Sequence
  Description of Artificial Sequence: Synthetic oligonucleotide
ggcggcggagcguuguaug

SEQ ID NO: 1176864 - RNA, 19 nt, Artificial Sequence
  Description of Artificial Sequence: Synthetic oligonucleotide
cccuuuauagccgccccgc

SEQ ID NO: 1176865 - RNA, 19 nt, Artificial Sequence
  Description of Artificial Sequence: Synthetic oligonucleotide
uauagccgccccgcccgcc

SEQ ID NO: 1176866 - RNA, 19 nt, Artificial Sequence
  Description of Artificial Sequence: Synthetic oligonucleotide
guacacuagaaagucuuuu

SEQ ID NO: 1176867 - RNA, 19 nt, Artificial Sequence
  Description of Artificial Sequence: Synthetic oligonucleotide
ugacuggaucugucuuaau

SEQ ID NO: 1176868 - RNA, 19 nt, Artificial Sequence
  Description of Artificial Sequence: Synthetic oligonucleotide
guugaccgcuguagucugc

SEQ ID NO: 1176869 - RNA, 19 nt, Artificial Sequence
  Description of Artificial Sequence: Synthetic oligonucleotide
auccgccauagccacuaua

SEQ ID NO: 1176870 - RNA, 19 nt, Artificial Sequence
  Description of Artificial Sequence: Synthetic oligonucleotide
ccuuuauagccgccccgcc

SEQ ID NO: 1176871 - RNA, 19 nt, Artificial Sequence
  Description of Artificial Sequence: Synthetic oligonucleotide
ggaagagauccggccgccg

SEQ ID NO: 1176872 - RNA, 19 nt, Artificial Sequence
  Description of Artificial Sequence: Synthetic oligonucleotide
guauggagccggauuuaaa

SEQ ID NO: 1176873 - RNA, 19 nt, Artificial Sequence
  Description of Artificial Sequence: Synthetic oligonucleotide
uccacacuagcagcaucuu

SEQ ID NO: 1176874 - RNA, 19 nt, Artificial Sequence
  Description of Artificial Sequence: Synthetic oligonucleotide
cgagacaaauacucaguca

SEQ ID NO: 1176875 - RNA, 19 nt, Artificial Sequence
  Description of Artificial Sequence: Synthetic oligonucleotide
ggacucaauccacccacaa

SEQ ID NO: 1176876 - RNA, 19 nt, Artificial Sequence
  Description of Artificial Sequence: Synthetic oligonucleotide
ggacacaauugugucaugu

SEQ ID NO: 1176877 - RNA, 19 nt, Artificial Sequence
  Description of Artificial Sequence: Synthetic oligonucleotide
uauccgccauagccacuau

SEQ ID NO: 1176878 - RNA, 19 nt, Artificial Sequence
  Description of Artificial Sequence: Synthetic oligonucleotide
ccaaugcauuacaacuuga

SEQ ID NO: 1176879 - RNA, 19 nt, Artificial Sequence
  Description of Artificial Sequence: Synthetic oligonucleotide
cagaaccuauuugauggua

SEQ ID NO: 1176880 - RNA, 19 nt, Artificial Sequence
  Description of Artificial Sequence: Synthetic oligonucleotide
gcagugcgggucccggcgg

SEQ ID NO: 1176881 - RNA, 19 nt, Artificial Sequence
  Description of Artificial Sequence: Synthetic oligonucleotide
ccaaaucgagacaaauacu

SEQ ID NO: 1176882 - RNA, 19 nt, Artificial Sequence
  Description of Artificial Sequence: Synthetic oligonucleotide
ccucuauguugcuguacuc

SEQ ID NO: 1176883 - RNA, 19 nt, Artificial Sequence
  Description of Artificial Sequence: Synthetic oligonucleotide
gccauagccacuauaguuu

SEQ ID NO: 1176884 - RNA, 19 nt, Artificial Sequence
  Description of Artificial Sequence: Synthetic oligonucleotide
ugcucgcguugaucuugga

SEQ ID NO: 1176885 - RNA, 19 nt, Artificial Sequence
  Description of Artificial Sequence: Synthetic oligonucleotide
agcguuguauggagccgga

SEQ ID NO: 1176886 - RNA, 19 nt, Artificial Sequence
  Description of Artificial Sequence: Synthetic oligonucleotide
gccuagcaaguacaaauau

SEQ ID NO: 1176887 - RNA, 19 nt, Artificial Sequence
  Description of Artificial Sequence: Synthetic oligonucleotide
cuauguugcuguacucguu

SEQ ID NO: 1176888 - RNA, 19 nt, Artificial Sequence
  Description of Artificial Sequence: Synthetic oligonucleotide
cuggcggagccgucggcga

SEQ ID NO: 1176889 - RNA, 19 nt, Artificial Sequence
  Description of Artificial Sequence: Synthetic oligonucleotide
ccgccaaucgggagggcug

SEQ ID NO: 1176890 - RNA, 19 nt, Artificial Sequence
  Description of Artificial Sequence: Synthetic oligonucleotide
guaguaccugacgcagaaa

SEQ ID NO: 1176891 - RNA, 19 nt, Artificial Sequence
  Description of Artificial Sequence: Synthetic oligonucleotide
caaucacauaaggaagcau

SEQ ID NO: 1176892 - RNA, 19 nt, Artificial Sequence
  Description of Artificial Sequence: Synthetic oligonucleotide
gacucacacuggucuaguu

SEQ ID NO: 1176893 - RNA, 19 nt, Artificial Sequence
  Description of Artificial Sequence: Synthetic oligonucleotide
ccuagcaaguacaaauauu

SEQ ID NO: 1176894 - RNA, 19 nt, Artificial Sequence
  Description of Artificial Sequence: Synthetic oligonucleotide
caauugugucauguacacu

SEQ ID NO: 1176895 - RNA, 19 nt, Artificial Sequence
  Description of Artificial Sequence: Synthetic oligonucleotide
gugcgggucccggcggcgg

SEQ ID NO: 1176896 - RNA, 19 nt, Artificial Sequence
  Description of Artificial Sequence: Synthetic oligonucleotide
cuggcgcgcagugcggguc

SEQ ID NO: 1176897 - RNA, 19 nt, Artificial Sequence
  Description of Artificial Sequence: Synthetic oligonucleotide
ccagcucaagccuccaaua

SEQ ID NO: 1176898 - RNA, 19 nt, Artificial Sequence
  Description of Artificial Sequence: Synthetic oligonucleotide
ccccuacaaaacaagcugu

SEQ ID NO: 1176899 - RNA, 19 nt, Artificial Sequence
  Description of Artificial Sequence: Synthetic oligonucleotide
ggagcucaauauucucuau

SEQ ID NO: 1176900 - RNA, 19 nt, Artificial Sequence
  Description of Artificial Sequence: Synthetic oligonucleotide
ggcugguaauuguucuggu

SEQ ID NO: 1176901 - RNA, 19 nt, Artificial Sequence
  Description of Artificial Sequence: Synthetic oligonucleotide
cuuuaaagcuuuggcccuu

SEQ ID NO: 1176902 - RNA, 19 nt, Artificial Sequence
  Description of Artificial Sequence: Synthetic oligonucleotide
uagccgccccgcccgccaa

SEQ ID NO: 1176903 - RNA, 19 nt, Artificial Sequence
  Description of Artificial Sequence: Synthetic oligonucleotide
ggccaaugcauuacaacuu

SEQ ID NO: 1176904 - RNA, 19 nt, Artificial Sequence
  Description of Artificial Sequence: Synthetic oligonucleotide
cgagcgaagggaggagcgg

SEQ ID NO: 1176905 - RNA, 19 nt, Artificial Sequence
  Description of Artificial Sequence: Synthetic oligonucleotide
ggcccuuuuggggucuauc

SEQ ID NO: 1176906 - RNA, 19 nt, Artificial Sequence
  Description of Artificial Sequence: Synthetic oligonucleotide
gguccggcgcgccccugcc

SEQ ID NO: 1176907 - RNA, 19 nt, Artificial Sequence
  Description of Artificial Sequence: Synthetic oligonucleotide
gccccgcccgccaaucggg

SEQ ID NO: 1176908 - RNA, 19 nt, Artificial Sequence
  Description of Artificial Sequence: Synthetic oligonucleotide
gcggagcguuguauggagc

SEQ ID NO: 1176909 - RNA, 19 nt, Artificial Sequence
  Description of Artificial Sequence: Synthetic oligonucleotide
gcucgcguugaucuuggau

SEQ ID NO: 1176910 - RNA, 19 nt, Artificial Sequence
  Description of Artificial Sequence: Synthetic oligonucleotide
cugcgaacuccucuauguu

SEQ ID NO: 1176911 - RNA, 19 nt, Artificial Sequence
  Description of Artificial Sequence: Synthetic oligonucleotide
ccauaguuauacccaguau

SEQ ID NO: 1176912 - RNA, 19 nt, Artificial Sequence
  Description of Artificial Sequence: Synthetic oligonucleotide
gguaauuguucuggugauu

SEQ ID NO: 1176913 - RNA, 19 nt, Artificial Sequence
  Description of Artificial Sequence: Synthetic oligonucleotide
uaccgucauccugcugguu

SEQ ID NO: 1176914 - RNA, 19 nt, Artificial Sequence
  Description of Artificial Sequence: Synthetic oligonucleotide
ccuuaguagggcugguaau

SEQ ID NO: 1176915 - RNA, 19 nt, Artificial Sequence
  Description of Artificial Sequence: Synthetic oligonucleotide
ccagaaccuauuugauggu

SEQ ID NO: 1176916 - RNA, 19 nt, Artificial Sequence
  Description of Artificial Sequence: Synthetic oligonucleotide
ccauagccacuauaguuuu

SEQ ID NO: 1176917 - RNA, 19 nt, Artificial Sequence
  Description of Artificial Sequence: Synthetic oligonucleotide
gcgcagugcgggucccggc

SEQ ID NO: 1176918 - RNA, 19 nt, Artificial Sequence
  Description of Artificial Sequence: Synthetic oligonucleotide
cucuuccacguccccucgu

SEQ ID NO: 1176919 - RNA, 19 nt, Artificial Sequence
  Description of Artificial Sequence: Synthetic oligonucleotide
cggaagagauccggccgcc

SEQ ID NO: 1176920 - RNA, 19 nt, Artificial Sequence
  Description of Artificial Sequence: Synthetic oligonucleotide
cgccccgcccgccaaucgg

SEQ ID NO: 1176921 - RNA, 19 nt, Artificial Sequence
  Description of Artificial Sequence: Synthetic oligonucleotide
cgcccgccaaucgggaggg

SEQ ID NO: 1176922 - RNA, 19 nt, Artificial Sequence
  Description of Artificial Sequence: Synthetic oligonucleotide
cccagcucaagccuccaau

SEQ ID NO: 1176923 - RNA, 19 nt, Artificial Sequence
  Description of Artificial Sequence: Synthetic oligonucleotide
uggguccggcgcgccccug

SEQ ID NO: 1176924 - RNA, 19 nt, Artificial Sequence
  Description of Artificial Sequence: Synthetic oligonucleotide
ccacguccccucguaccac

SEQ ID NO: 1176925 - RNA, 19 nt, Artificial Sequence
  Description of Artificial Sequence: Synthetic oligonucleotide
ccgccccgcccgccaaucg

SEQ ID NO: 1176926 - RNA, 19 nt, Artificial Sequence
  Description of Artificial Sequence: Synthetic oligonucleotide
cgucuguguaugugauaaa

SEQ ID NO: 1176927 - RNA, 19 nt, Artificial Sequence
  Description of Artificial Sequence: Synthetic oligonucleotide
ccugcgcccucccuuuaua

SEQ ID NO: 1176928 - RNA, 19 nt, Artificial Sequence
  Description of Artificial Sequence: Synthetic oligonucleotide
ccacacuagcagcaucuuu

SEQ ID NO: 1176929 - RNA, 19 nt, Artificial Sequence
  Description of Artificial Sequence: Synthetic oligonucleotide
cccgccaaucgggagggcu

SEQ ID NO: 1176930 - RNA, 19 nt, Artificial Sequence
  Description of Artificial Sequence: Synthetic oligonucleotide
ccucugcgaacuccucuau

SEQ ID NO: 1176931 - RNA, 19 nt, Artificial Sequence
  Description of Artificial Sequence: Synthetic oligonucleotide
gccugcgcccucccuuuau

SEQ ID NO: 1176932 - RNA, 19 nt, Artificial Sequence
  Description of Artificial Sequence: Synthetic oligonucleotide
cggcggagcguuguaugga

SEQ ID NO: 1176933 - RNA, 19 nt, Artificial Sequence
  Description of Artificial Sequence: Synthetic oligonucleotide
gcguuguauggagccggau

SEQ ID NO: 1176934 - RNA, 19 nt, Artificial Sequence
  Description of Artificial Sequence: Synthetic oligonucleotide
gccaaucgggagggcugcu

SEQ ID NO: 1176935 - RNA, 19 nt, Artificial Sequence
  Description of Artificial Sequence: Synthetic oligonucleotide
ccccugccgggaggagcug

SEQ ID NO: 1176936 - RNA, 19 nt, Artificial Sequence
  Description of Artificial Sequence: Synthetic oligonucleotide
ccgccugcgcccucccuuu

SEQ ID NO: 1176937 - RNA, 19 nt, Artificial Sequence
  Description of Artificial Sequence: Synthetic oligonucleotide
cgccugcgcccucccuuua

SEQ ID NO: 1176938 - RNA, 19 nt, Artificial Sequence
  Description of Artificial Sequence: Synthetic oligonucleotide
cggugacguggcgcugggu

SEQ ID NO: 1176939 - RNA, 19 nt, Artificial Sequence
  Description of Artificial Sequence: Synthetic oligonucleotide
aaauuuaagauucugaagc

SEQ ID NO: 1176940 - RNA, 19 nt, Artificial Sequence
  Description of Artificial Sequence: Synthetic oligonucleotide
aaugauuugggauuaaaac

SEQ ID NO: 1176941 - RNA, 19 nt, Artificial Sequence
  Description of Artificial Sequence: Synthetic oligonucleotide
aagaagaugaccuacauau

SEQ ID NO: 1176942 - RNA, 19 nt, Artificial Sequence
  Description of Artificial Sequence: Synthetic oligonucleotide
aauauguuauucuugaaga

SEQ ID NO: 1176943 - RNA, 19 nt, Artificial Sequence
  Description of Artificial Sequence: Synthetic oligonucleotide
uauaguauuaguuaagccu

SEQ ID NO: 1176944 - RNA, 19 nt, Artificial Sequence
  Description of Artificial Sequence: Synthetic oligonucleotide
uuagaaagagcacacuugg

SEQ ID NO: 1176945 - RNA, 19 nt, Artificial Sequence
  Description of Artificial Sequence: Synthetic oligonucleotide
aauuauguaguacucucuc

SEQ ID NO: 1176946 - RNA, 19 nt, Artificial Sequence
  Description of Artificial Sequence: Synthetic oligonucleotide
aaaacuauaguauuaguua

SEQ ID NO: 1176947 - RNA, 19 nt, Artificial Sequence
  Description of Artificial Sequence: Synthetic oligonucleotide
uuauucuugaagaaaacug

SEQ ID NO: 1176948 - RNA, 19 nt, Artificial Sequence
  Description of Artificial Sequence: Synthetic oligonucleotide
ugugcuuacguucagagca

SEQ ID NO: 1176949 - RNA, 19 nt, Artificial Sequence
  Description of Artificial Sequence: Synthetic oligonucleotide
auauauuucccucccaccc

SEQ ID NO: 1176950 - RNA, 19 nt, Artificial Sequence
  Description of Artificial Sequence: Synthetic oligonucleotide
augaccuacauauauauag

SEQ ID NO: 1176951 - RNA, 19 nt, Artificial Sequence
  Description of Artificial Sequence: Synthetic oligonucleotide
aauauuuguguccauuuug

SEQ ID NO: 1176952 - RNA, 19 nt, Artificial Sequence
  Description of Artificial Sequence: Synthetic oligonucleotide
aguaucacuauccaaaaug

SEQ ID NO: 1176953 - RNA, 19 nt, Artificial Sequence
  Description of Artificial Sequence: Synthetic oligonucleotide
acaguuaugcuacaagccc

SEQ ID NO: 1176954 - RNA, 19 nt, Artificial Sequence
  Description of Artificial Sequence: Synthetic oligonucleotide
cuuauuauguauaccaggc

SEQ ID NO: 1176955 - RNA, 19 nt, Artificial Sequence
  Description of Artificial Sequence: Synthetic oligonucleotide
guugauaagauguaauucc

SEQ ID NO: 1176956 - RNA, 19 nt, Artificial Sequence
  Description of Artificial Sequence: Synthetic oligonucleotide
aaacauuuaagaagagucc

SEQ ID NO: 1176957 - RNA, 19 nt, Artificial Sequence
  Description of Artificial Sequence: Synthetic oligonucleotide
aagaauaacacaaaauaug

SEQ ID NO: 1176958 - RNA, 19 nt, Artificial Sequence
  Description of Artificial Sequence: Synthetic oligonucleotide
acaagcuuugacuuaagac

SEQ ID NO: 1176959 - RNA, 19 nt, Artificial Sequence
  Description of Artificial Sequence: Synthetic oligonucleotide
uuuauagugucccugaaau

SEQ ID NO: 1176960 - RNA, 19 nt, Artificial Sequence
  Description of Artificial Sequence: Synthetic oligonucleotide
auccaaaaugcuuggagcc

SEQ ID NO: 1176961 - RNA, 19 nt, Artificial Sequence
  Description of Artificial Sequence: Synthetic oligonucleotide
ucaucaaugccauaugaag

SEQ ID NO: 1176962 - RNA, 19 nt, Artificial Sequence
  Description of Artificial Sequence: Synthetic oligonucleotide
aucuguauaaguuacacaa

SEQ ID NO: 1176963 - RNA, 19 nt, Artificial Sequence
  Description of Artificial Sequence: Synthetic oligonucleotide
acaguauaaacauuuaaga

SEQ ID NO: 1176964 - RNA, 19 nt, Artificial Sequence
  Description of Artificial Sequence: Synthetic oligonucleotide
agaauuaucaaacuugaaa

SEQ ID NO: 1176965 - RNA, 19 nt, Artificial Sequence
  Description of Artificial Sequence: Synthetic oligonucleotide
aauaaucccagauacuuaa

SEQ ID NO: 1176966 - RNA, 19 nt, Artificial Sequence
  Description of Artificial Sequence: Synthetic oligonucleotide
acuuauuauguauaccagg

SEQ ID NO: 1176967 - RNA, 19 nt, Artificial Sequence
  Description of Artificial Sequence: Synthetic oligonucleotide
uuuaagugaucacuaaaug

SEQ ID NO: 1176968 - RNA, 19 nt, Artificial Sequence
  Description of Artificial Sequence: Synthetic oligonucleotide
uggcuuuuaaccuugagcu

SEQ ID NO: 1176969 - RNA, 19 nt, Artificial Sequence
  Description of Artificial Sequence: Synthetic oligonucleotide
uauauauaguaaaucugcc

SEQ ID NO: 1176970 - RNA, 19 nt, Artificial Sequence
  Description of Artificial Sequence: Synthetic oligonucleotide
uuaagaagaguccugcuga

SEQ ID NO: 1176971 - RNA, 19 nt, Artificial Sequence
  Description of Artificial Sequence: Synthetic oligonucleotide
guuucaaguaguuuuauac

SEQ ID NO: 1176972 - RNA, 19 nt, Artificial Sequence
  Description of Artificial Sequence: Synthetic oligonucleotide
acuauaguauuaguuaagc

SEQ ID NO: 1176973 - RNA, 19 nt, Artificial Sequence
  Description of Artificial Sequence: Synthetic oligonucleotide
cacaguauaaacauuuaag

SEQ ID NO: 1176974 - RNA, 19 nt, Artificial Sequence
  Description of Artificial Sequence: Synthetic oligonucleotide
acuauguauacuucagugg

SEQ ID NO: 1176975 - RNA, 19 nt, Artificial Sequence
  Description of Artificial Sequence: Synthetic oligonucleotide
ugagcuacaguuaugcuac

SEQ ID NO: 1176976 - RNA, 19 nt, Artificial Sequence
  Description of Artificial Sequence: Synthetic oligonucleotide
uuuuaagugaucacuaaau

SEQ ID NO: 1176977 - RNA, 19 nt, Artificial Sequence
  Description of Artificial Sequence: Synthetic oligonucleotide
uuuagaguugcucccaccc

SEQ ID NO: 1176978 - RNA, 19 nt, Artificial Sequence
  Description of Artificial Sequence: Synthetic oligonucleotide
ucacuauccaaaaugcuug

SEQ ID NO: 1176979 - RNA, 19 nt, Artificial Sequence
  Description of Artificial Sequence: Synthetic oligonucleotide
aaacuauaguauuaguuaa

SEQ ID NO: 1176980 - RNA, 19 nt, Artificial Sequence
  Description of Artificial Sequence: Synthetic oligonucleotide
aaccuuacagaucccacuc

SEQ ID NO: 1176981 - RNA, 19 nt, Artificial Sequence
  Description of Artificial Sequence: Synthetic oligonucleotide
auacuuaauucaauaaagc

SEQ ID NO: 1176982 - RNA, 19 nt, Artificial Sequence
  Description of Artificial Sequence: Synthetic oligonucleotide
uccauuagggacaagccgc

SEQ ID NO: 1176983 - RNA, 19 nt, Artificial Sequence
  Description of Artificial Sequence: Synthetic oligonucleotide
aaaguuaguguacuggaaa

SEQ ID NO: 1176984 - RNA, 19 nt, Artificial Sequence
  Description of Artificial Sequence: Synthetic oligonucleotide
uuagauucuguuuucagau

SEQ ID NO: 1176985 - RNA, 19 nt, Artificial Sequence
  Description of Artificial Sequence: Synthetic oligonucleotide
aguuacacaagucuacuug

SEQ ID NO: 1176986 - RNA, 19 nt, Artificial Sequence
  Description of Artificial Sequence: Synthetic oligonucleotide
uaagauguaauuccuguuc

SEQ ID NO: 1176987 - RNA, 19 nt, Artificial Sequence
  Description of Artificial Sequence: Synthetic oligonucleotide
uauccaaaaugcuuggagc

SEQ ID NO: 1176988 - RNA, 19 nt, Artificial Sequence
  Description of Artificial Sequence: Synthetic oligonucleotide
uacaguuaugcuacaagcc

SEQ ID NO: 1176989 - RNA, 19 nt, Artificial Sequence
  Description of Artificial Sequence: Synthetic oligonucleotide
guuacacaagucuacuugg

SEQ ID NO: 1176990 - RNA, 19 nt, Artificial Sequence
  Description of Artificial Sequence: Synthetic oligonucleotide
acacaagucuacuuggcac

SEQ ID NO: 1176991 - RNA, 19 nt, Artificial Sequence
  Description of Artificial Sequence: Synthetic oligonucleotide
agcaaaucuuaccaucagc

SEQ ID NO: 1176992 - RNA, 19 nt, Artificial Sequence
  Description of Artificial Sequence: Synthetic oligonucleotide
uaaagaauaaucccagaua

SEQ ID NO: 1176993 - RNA, 19 nt, Artificial Sequence
  Description of Artificial Sequence: Synthetic oligonucleotide
cuacaguuaugcuacaagc

SEQ ID NO: 1176994 - RNA, 19 nt, Artificial Sequence
  Description of Artificial Sequence: Synthetic oligonucleotide
aguugauaagauguaauuc

SEQ ID NO: 1176995 - RNA, 19 nt, Artificial Sequence
  Description of Artificial Sequence: Synthetic oligonucleotide
ugaagcaucucagauaaug

SEQ ID NO: 1176996 - RNA, 19 nt, Artificial Sequence
  Description of Artificial Sequence: Synthetic oligonucleotide
ucaaaguuaguguacugga

SEQ ID NO: 1176997 - RNA, 19 nt, Artificial Sequence
  Description of Artificial Sequence: Synthetic oligonucleotide
uauagugucccugaaauuc

SEQ ID NO: 1176998 - RNA, 19 nt, Artificial Sequence
  Description of Artificial Sequence: Synthetic oligonucleotide
aaauccaguacagugguca

SEQ ID NO: 1176999 - RNA, 19 nt, Artificial Sequence
  Description of Artificial Sequence: Synthetic oligonucleotide
uugacuuaagacuacuccu

SEQ ID NO: 1177000 - RNA, 19 nt, Artificial Sequence
  Description of Artificial Sequence: Synthetic oligonucleotide
uuacuaugaacuuuuaauu

SEQ ID NO: 1177001 - RNA, 19 nt, Artificial Sequence
  Description of Artificial Sequence: Synthetic oligonucleotide
ucaauuauguaguacucuc

SEQ ID NO: 1177002 - RNA, 19 nt, Artificial Sequence
  Description of Artificial Sequence: Synthetic oligonucleotide
agauacuuaauucaauaaa

SEQ ID NO: 1177003 - RNA, 19 nt, Artificial Sequence
  Description of Artificial Sequence: Synthetic oligonucleotide
uuauguaguacucucucuc

SEQ ID NO: 1177004 - RNA, 19 nt, Artificial Sequence
  Description of Artificial Sequence: Synthetic oligonucleotide
cuauaguauuaguuaagcc

SEQ ID NO: 1177005 - RNA, 19 nt, Artificial Sequence
  Description of Artificial Sequence: Synthetic oligonucleotide
cugaagaucaucaaugcca

SEQ ID NO: 1177006 - RNA, 19 nt, Artificial Sequence
  Description of Artificial Sequence: Synthetic oligonucleotide
ucacuaaauguucaccuga

SEQ ID NO: 1177007 - RNA, 19 nt, Artificial Sequence
  Description of Artificial Sequence: Synthetic oligonucleotide
uuacguucagagcaggaug

SEQ ID NO: 1177008 - RNA, 19 nt, Artificial Sequence
  Description of Artificial Sequence: Synthetic oligonucleotide
auaaguuacacaagucuac

SEQ ID NO: 1177009 - RNA, 19 nt, Artificial Sequence
  Description of Artificial Sequence: Synthetic oligonucleotide
uugauaagauguaauuccu

SEQ ID NO: 1177010 - RNA, 19 nt, Artificial Sequence
  Description of Artificial Sequence: Synthetic oligonucleotide
agauaauggauuuuauuau

SEQ ID NO: 1177011 - RNA, 19 nt, Artificial Sequence
  Description of Artificial Sequence: Synthetic oligonucleotide
agugaaacccaguuuuauc

SEQ ID NO: 1177012 - RNA, 19 nt, Artificial Sequence
  Description of Artificial Sequence: Synthetic oligonucleotide
acacaacagguacucaccc

SEQ ID NO: 1177013 - RNA, 19 nt, Artificial Sequence
  Description of Artificial Sequence: Synthetic oligonucleotide
gaagcaucucagauaaugg

SEQ ID NO: 1177014 - RNA, 19 nt, Artificial Sequence
  Description of Artificial Sequence: Synthetic oligonucleotide
auuauguauaccaggcugg

SEQ ID NO: 1177015 - RNA, 19 nt, Artificial Sequence
  Description of Artificial Sequence: Synthetic oligonucleotide
cuaaauguucaccugaaga

SEQ ID NO: 1177016 - RNA, 19 nt, Artificial Sequence
  Description of Artificial Sequence: Synthetic oligonucleotide
aaaguacgcgugcaaagca

SEQ ID NO: 1177017 - RNA, 19 nt, Artificial Sequence
  Description of Artificial Sequence: Synthetic oligonucleotide
uuauuucauacacuuuacu

SEQ ID NO: 1177018 - RNA, 19 nt, Artificial Sequence
  Description of Artificial Sequence: Synthetic oligonucleotide
ugauaagauguaauuccug

SEQ ID NO: 1177019 - RNA, 19 nt, Artificial Sequence
  Description of Artificial Sequence: Synthetic oligonucleotide
uuaagacuacuccuuagaa

SEQ ID NO: 1177020 - RNA, 19 nt, Artificial Sequence
  Description of Artificial Sequence: Synthetic oligonucleotide
uuuuccaauucugucauac

SEQ ID NO: 1177021 - RNA, 19 nt, Artificial Sequence
  Description of Artificial Sequence: Synthetic oligonucleotide
agaaccgucucauucauaa

SEQ ID NO: 1177022 - RNA, 19 nt, Artificial Sequence
  Description of Artificial Sequence: Synthetic oligonucleotide
ucacucaaguggaaaugcg

SEQ ID NO: 1177023 - RNA, 19 nt, Artificial Sequence
  Description of Artificial Sequence: Synthetic oligonucleotide
ugacugucuggccauuugg

SEQ ID NO: 1177024 - RNA, 19 nt, Artificial Sequence
  Description of Artificial Sequence: Synthetic oligonucleotide
aagugaucacuaaauguuc

SEQ ID NO: 1177025 - RNA, 19 nt, Artificial Sequence
  Description of Artificial Sequence: Synthetic oligonucleotide
gaaacccaguuuuaucucc

SEQ ID NO: 1177026 - RNA, 19 nt, Artificial Sequence
  Description of Artificial Sequence: Synthetic oligonucleotide
cuagauggauauauuuccc

SEQ ID NO: 1177027 - RNA, 19 nt, Artificial Sequence
  Description of Artificial Sequence: Synthetic oligonucleotide
auuuguguccauuuuguaa

SEQ ID NO: 1177028 - RNA, 19 nt, Artificial Sequence
  Description of Artificial Sequence: Synthetic oligonucleotide
uauguuauucuugaagaaa

SEQ ID NO: 1177029 - RNA, 19 nt, Artificial Sequence
  Description of Artificial Sequence: Synthetic oligonucleotide
ugaguugauaagauguaau

SEQ ID NO: 1177030 - RNA, 19 nt, Artificial Sequence
  Description of Artificial Sequence: Synthetic oligonucleotide
ugauggagaucucggaggc

SEQ ID NO: 1177031 - RNA, 19 nt, Artificial Sequence
  Description of Artificial Sequence: Synthetic oligonucleotide
agaugaccuacauauauau

SEQ ID NO: 1177032 - RNA, 19 nt, Artificial Sequence
  Description of Artificial Sequence: Synthetic oligonucleotide
uacuaugaacuuuuaauuu

SEQ ID NO: 1177033 - RNA, 19 nt, Artificial Sequence
  Description of Artificial Sequence: Synthetic oligonucleotide
cauuuaagaagaguccugc

SEQ ID NO: 1177034 - RNA, 19 nt, Artificial Sequence
  Description of Artificial Sequence: Synthetic oligonucleotide
guaucacuauccaaaaugc

SEQ ID NO: 1177035 - RNA, 19 nt, Artificial Sequence
  Description of Artificial Sequence: Synthetic oligonucleotide
gauaagauguaauuccugu

SEQ ID NO: 1177036 - RNA, 19 nt, Artificial Sequence
  Description of Artificial Sequence: Synthetic oligonucleotide
ugaccuacauauauauagu

SEQ ID NO: 1177037 - RNA, 19 nt, Artificial Sequence
  Description of Artificial Sequence: Synthetic oligonucleotide
ucucauucauaauuacaca

SEQ ID NO: 1177038 - RNA, 19 nt, Artificial Sequence
  Description of Artificial Sequence: Synthetic oligonucleotide
uacguucagagcaggauga

SEQ ID NO: 1177039 - RNA, 19 nt, Artificial Sequence
  Description of Artificial Sequence: Synthetic oligonucleotide
uggaacuuauuauguauac

SEQ ID NO: 1177040 - RNA, 19 nt, Artificial Sequence
  Description of Artificial Sequence: Synthetic oligonucleotide
aguccgugugcuuacguuc

SEQ ID NO: 1177041 - RNA, 19 nt, Artificial Sequence
  Description of Artificial Sequence: Synthetic oligonucleotide
uugagcuacaguuaugcua

SEQ ID NO: 1177042 - RNA, 19 nt, Artificial Sequence
  Description of Artificial Sequence: Synthetic oligonucleotide
uuaguguacuggaaaauuu

SEQ ID NO: 1177043 - RNA, 19 nt, Artificial Sequence
  Description of Artificial Sequence: Synthetic oligonucleotide
uccaaauuucaacaaggau

SEQ ID NO: 1177044 - RNA, 19 nt, Artificial Sequence
  Description of Artificial Sequence: Synthetic oligonucleotide
cuugucccugacaaaaggc

SEQ ID NO: 1177045 - RNA, 19 nt, Artificial Sequence
  Description of Artificial Sequence: Synthetic oligonucleotide
cacucaaguggaaaugcgg

SEQ ID NO: 1177046 - RNA, 19 nt, Artificial Sequence
  Description of Artificial Sequence: Synthetic oligonucleotide
agaacuuguacugaagagu

SEQ ID NO: 1177047 - RNA, 19 nt, Artificial Sequence
  Description of Artificial Sequence: Synthetic oligonucleotide
caagcuuugacuuaagacu

SEQ ID NO: 1177048 - RNA, 19 nt, Artificial Sequence
  Description of Artificial Sequence: Synthetic oligonucleotide
ugcauuuauuucauacacu

SEQ ID NO: 1177049 - RNA, 19 nt, Artificial Sequence
  Description of Artificial Sequence: Synthetic oligonucleotide
aguaaaucugccccaagaa

SEQ ID NO: 1177050 - RNA, 19 nt, Artificial Sequence
  Description of Artificial Sequence: Synthetic oligonucleotide
uguaagccagaacuuguac

SEQ ID NO: 1177051 - RNA, 19 nt, Artificial Sequence
  Description of Artificial Sequence: Synthetic oligonucleotide
guauaaguuacacaagucu

SEQ ID NO: 1177052 - RNA, 19 nt, Artificial Sequence
  Description of Artificial Sequence: Synthetic oligonucleotide
uuaccuugugcauuuauuu

SEQ ID NO: 1177053 - RNA, 19 nt, Artificial Sequence
  Description of Artificial Sequence: Synthetic oligonucleotide
acuauuuauagugucccug

SEQ ID NO: 1177054 - RNA, 19 nt, Artificial Sequence
  Description of Artificial Sequence: Synthetic oligonucleotide
cuccauuagggacaagccg

SEQ ID NO: 1177055 - RNA, 19 nt, Artificial Sequence
  Description of Artificial Sequence: Synthetic oligonucleotide
ugaucacuaaauguucacc

SEQ ID NO: 1177056 - RNA, 19 nt, Artificial Sequence
  Description of Artificial Sequence: Synthetic oligonucleotide
uagauggauauauuucccu

SEQ ID NO: 1177057 - RNA, 19 nt, Artificial Sequence
  Description of Artificial Sequence: Synthetic oligonucleotide
gacuacuccuuagaaagag

SEQ ID NO: 1177058 - RNA, 19 nt, Artificial Sequence
  Description of Artificial Sequence: Synthetic oligonucleotide
guggucaaggcucaagacc

SEQ ID NO: 1177059 - RNA, 19 nt, Artificial Sequence
  Description of Artificial Sequence: Synthetic oligonucleotide
uaauucaauaaagcaaauc

SEQ ID NO: 1177060 - RNA, 19 nt, Artificial Sequence
  Description of Artificial Sequence: Synthetic oligonucleotide
auuauguaguacucucucu

SEQ ID NO: 1177061 - RNA, 19 nt, Artificial Sequence
  Description of Artificial Sequence: Synthetic oligonucleotide
uuagggacaagccgcagau

SEQ ID NO: 1177062 - RNA, 19 nt, Artificial Sequence
  Description of Artificial Sequence: Synthetic oligonucleotide
aucacuaaauguucaccug

SEQ ID NO: 1177063 - RNA, 19 nt, Artificial Sequence
  Description of Artificial Sequence: Synthetic oligonucleotide
agaaaacuauaguauuagu

SEQ ID NO: 1177064 - RNA, 19 nt, Artificial Sequence
  Description of Artificial Sequence: Synthetic oligonucleotide
cuggccauuuggcaaaucc

SEQ ID NO: 1177065 - RNA, 19 nt, Artificial Sequence
  Description of Artificial Sequence: Synthetic oligonucleotide
uauacuucagugguucugu

SEQ ID NO: 1177066 - RNA, 19 nt, Artificial Sequence
  Description of Artificial Sequence: Synthetic oligonucleotide
gaucacuaaauguucaccu

SEQ ID NO: 1177067 - RNA, 19 nt, Artificial Sequence
  Description of Artificial Sequence: Synthetic oligonucleotide
gaagaguuuuaagaagaug

SEQ ID NO: 1177068 - RNA, 19 nt, Artificial Sequence
  Description of Artificial Sequence: Synthetic oligonucleotide
cugagguccaaauuucaac

SEQ ID NO: 1177069 - RNA, 19 nt, Artificial Sequence
  Description of Artificial Sequence: Synthetic oligonucleotide
ugaaccuuacagaucccac

SEQ ID NO: 1177070 - RNA, 19 nt, Artificial Sequence
  Description of Artificial Sequence: Synthetic oligonucleotide
uaaucccagauacuuaauu

SEQ ID NO: 1177071 - RNA, 19 nt, Artificial Sequence
  Description of Artificial Sequence: Synthetic oligonucleotide
aguacucucucucuuuaga

SEQ ID NO: 1177072 - RNA, 19 nt, Artificial Sequence
  Description of Artificial Sequence: Synthetic oligonucleotide
auaguauuaguuaagccua

SEQ ID NO: 1177073 - RNA, 19 nt, Artificial Sequence
  Description of Artificial Sequence: Synthetic oligonucleotide
auauguuauucuugaagaa

SEQ ID NO: 1177074 - RNA, 19 nt, Artificial Sequence
  Description of Artificial Sequence: Synthetic oligonucleotide
gguccaaauuucaacaagg

SEQ ID NO: 1177075 - RNA, 19 nt, Artificial Sequence
  Description of Artificial Sequence: Synthetic oligonucleotide
uacucaguaguuucaagua

SEQ ID NO: 1177076 - RNA, 19 nt, Artificial Sequence
  Description of Artificial Sequence: Synthetic oligonucleotide
gugcaaagcaucuggauga

SEQ ID NO: 1177077 - RNA, 19 nt, Artificial Sequence
  Description of Artificial Sequence: Synthetic oligonucleotide
ugacuuaagacuacuccuu

SEQ ID NO: 1177078 - RNA, 19 nt, Artificial Sequence
  Description of Artificial Sequence: Synthetic oligonucleotide
gaagaugaccuacauauau

SEQ ID NO: 1177079 - RNA, 19 nt, Artificial Sequence
  Description of Artificial Sequence: Synthetic oligonucleotide
cuacuccuuagaaagagca

SEQ ID NO: 1177080 - RNA, 19 nt, Artificial Sequence
  Description of Artificial Sequence: Synthetic oligonucleotide
uuacagguugaguaucacu

SEQ ID NO: 1177081 - RNA, 19 nt, Artificial Sequence
  Description of Artificial Sequence: Synthetic oligonucleotide
uaguguacuggaaaauuuu

SEQ ID NO: 1177082 - RNA, 19 nt, Artificial Sequence
  Description of Artificial Sequence: Synthetic oligonucleotide
auuuaagaagaguccugcu

SEQ ID NO: 1177083 - RNA, 19 nt, Artificial Sequence
  Description of Artificial Sequence: Synthetic oligonucleotide
cuauuuauagugucccuga

SEQ ID NO: 1177084 - RNA, 19 nt, Artificial Sequence
  Description of Artificial Sequence: Synthetic oligonucleotide
agguacucacccaagggac

SEQ ID NO: 1177085 - RNA, 19 nt, Artificial Sequence
  Description of Artificial Sequence: Synthetic oligonucleotide
uggaaaugcggacacucuc

SEQ ID NO: 1177086 - RNA, 19 nt, Artificial Sequence
  Description of Artificial Sequence: Synthetic oligonucleotide
caaaguacgcgugcaaagc

SEQ ID NO: 1177087 - RNA, 19 nt, Artificial Sequence
  Description of Artificial Sequence: Synthetic oligonucleotide
gaucccaaaguacgcgugc

SEQ ID NO: 1177088 - RNA, 19 nt, Artificial Sequence
  Description of Artificial Sequence: Synthetic oligonucleotide
acgcgugcaaagcaucugg

SEQ ID NO: 1177089 - RNA, 19 nt, Artificial Sequence
  Description of Artificial Sequence: Synthetic oligonucleotide
uuagaguugcucccaccca

SEQ ID NO: 1177090 - RNA, 19 nt, Artificial Sequence
  Description of Artificial Sequence: Synthetic oligonucleotide
uauuuauagugucccugaa

SEQ ID NO: 1177091 - RNA, 19 nt, Artificial Sequence
  Description of Artificial Sequence: Synthetic oligonucleotide
cuuaagacuacuccuuaga

SEQ ID NO: 1177092 - RNA, 19 nt, Artificial Sequence
  Description of Artificial Sequence: Synthetic oligonucleotide
agaacagguucucucuaug

SEQ ID NO: 1177093 - RNA, 19 nt, Artificial Sequence
  Description of Artificial Sequence: Synthetic oligonucleotide
guaauguuucagauuuuag

SEQ ID NO: 1177094 - RNA, 19 nt, Artificial Sequence
  Description of Artificial Sequence: Synthetic oligonucleotide
caaauuucaacaaggauuu

SEQ ID NO: 1177095 - RNA, 19 nt, Artificial Sequence
  Description of Artificial Sequence: Synthetic oligonucleotide
ucuccgggaacucuucaga

SEQ ID NO: 1177096 - RNA, 19 nt, Artificial Sequence
  Description of Artificial Sequence: Synthetic oligonucleotide
acuacuccuuagaaagagc

SEQ ID NO: 1177097 - RNA, 19 nt, Artificial Sequence
  Description of Artificial Sequence: Synthetic oligonucleotide
auaugaaguguaaacuuga

SEQ ID NO: 1177098 - RNA, 19 nt, Artificial Sequence
  Description of Artificial Sequence: Synthetic oligonucleotide
auuagggacaagccgcaga

SEQ ID NO: 1177099 - RNA, 19 nt, Artificial Sequence
  Description of Artificial Sequence: Synthetic oligonucleotide
aagcuuugacuuaagacua

SEQ ID NO: 1177100 - RNA, 19 nt, Artificial Sequence
  Description of Artificial Sequence: Synthetic oligonucleotide
caaguggaaaugcggacac

SEQ ID NO: 1177101 - RNA, 19 nt, Artificial Sequence
  Description of Artificial Sequence: Synthetic oligonucleotide
gugaaacccaguuuuaucu

SEQ ID NO: 1177102 - RNA, 19 nt, Artificial Sequence
  Description of Artificial Sequence: Synthetic oligonucleotide
aaguuacacaagucuacuu

SEQ ID NO: 1177103 - RNA, 19 nt, Artificial Sequence
  Description of Artificial Sequence: Synthetic oligonucleotide
aagaauaaucccagauacu

SEQ ID NO: 1177104 - RNA, 19 nt, Artificial Sequence
  Description of Artificial Sequence: Synthetic oligonucleotide
cuauguauacuucaguggu

SEQ ID NO: 1177105 - RNA, 19 nt, Artificial Sequence
  Description of Artificial Sequence: Synthetic oligonucleotide
aguacaagcuuugacuuaa

SEQ ID NO: 1177106 - RNA, 19 nt, Artificial Sequence
  Description of Artificial Sequence: Synthetic oligonucleotide
ucuagauagcaaagauuau

SEQ ID NO: 1177107 - RNA, 19 nt, Artificial Sequence
  Description of Artificial Sequence: Synthetic oligonucleotide
uacuccuuagaaagagcac

SEQ ID NO: 1177108 - RNA, 19 nt, Artificial Sequence
  Description of Artificial Sequence: Synthetic oligonucleotide
gcuacaguuaugcuacaag

SEQ ID NO: 1177109 - RNA, 19 nt, Artificial Sequence
  Description of Artificial Sequence: Synthetic oligonucleotide
cucaaguggaaaugcggac

SEQ ID NO: 1177110 - RNA, 19 nt, Artificial Sequence
  Description of Artificial Sequence: Synthetic oligonucleotide
ugcuuggagccaaaaguaa

SEQ ID NO: 1177111 - RNA, 19 nt, Artificial Sequence
  Description of Artificial Sequence: Synthetic oligonucleotide
gaaaacugagaccaucuau

SEQ ID NO: 1177112 - RNA, 19 nt, Artificial Sequence
  Description of Artificial Sequence: Synthetic oligonucleotide
aucacuauccaaaaugcuu

SEQ ID NO: 1177113 - RNA, 19 nt, Artificial Sequence
  Description of Artificial Sequence: Synthetic oligonucleotide
gucacucaaguggaaaugc

SEQ ID NO: 1177114 - RNA, 19 nt, Artificial Sequence
  Description of Artificial Sequence: Synthetic oligonucleotide
guaauuccuguucuucuca

SEQ ID NO: 1177115 - RNA, 19 nt, Artificial Sequence
  Description of Artificial Sequence: Synthetic oligonucleotide
caaugauuugggauuaaaa

SEQ ID NO: 1177116 - RNA, 19 nt, Artificial Sequence
  Description of Artificial Sequence: Synthetic oligonucleotide
auuacacaguucaauuucu

SEQ ID NO: 1177117 - RNA, 19 nt, Artificial Sequence
  Description of Artificial Sequence: Synthetic oligonucleotide
cauccugcauuguuagcag

SEQ ID NO: 1177118 - RNA, 19 nt, Artificial Sequence
  Description of Artificial Sequence: Synthetic oligonucleotide
aauccaguacaguggucaa

SEQ ID NO: 1177119 - RNA, 19 nt, Artificial Sequence
  Description of Artificial Sequence: Synthetic oligonucleotide
guggaauuuuccaauucug

SEQ ID NO: 1177120 - RNA, 19 nt, Artificial Sequence
  Description of Artificial Sequence: Synthetic oligonucleotide
ugguggaauuuuccaauuc

SEQ ID NO: 1177121 - RNA, 19 nt, Artificial Sequence
  Description of Artificial Sequence: Synthetic oligonucleotide
ucuuaccaucagcaguaga

SEQ ID NO: 1177122 - RNA, 19 nt, Artificial Sequence
  Description of Artificial Sequence: Synthetic oligonucleotide
uugaauauuuguguccauu

SEQ ID NO: 1177123 - RNA, 19 nt, Artificial Sequence
  Description of Artificial Sequence: Synthetic oligonucleotide
cagauacuuaauucaauaa

SEQ ID NO: 1177124 - RNA, 19 nt, Artificial Sequence
  Description of Artificial Sequence: Synthetic oligonucleotide
uccugcauuguuagcagua

SEQ ID NO: 1177125 - RNA, 19 nt, Artificial Sequence
  Description of Artificial Sequence: Synthetic oligonucleotide
acucaaguggaaaugcgga

SEQ ID NO: 1177126 - RNA, 19 nt, Artificial Sequence
  Description of Artificial Sequence: Synthetic oligonucleotide
gcuuuuaaccuugagcuac

SEQ ID NO: 1177127 - RNA, 19 nt, Artificial Sequence
  Description of Artificial Sequence: Synthetic oligonucleotide
ucagaaguccgugugcuua

SEQ ID NO: 1177128 - RNA, 19 nt, Artificial Sequence
  Description of Artificial Sequence: Synthetic oligonucleotide
uaauuccuguucuucucaa

SEQ ID NO: 1177129 - RNA, 19 nt, Artificial Sequence
  Description of Artificial Sequence: Synthetic oligonucleotide
uaguauuaguuaagccuau

SEQ ID NO: 1177130 - RNA, 19 nt, Artificial Sequence
  Description of Artificial Sequence: Synthetic oligonucleotide
ccuacauauauauaguaaa

SEQ ID NO: 1177131 - RNA, 19 nt, Artificial Sequence
  Description of Artificial Sequence: Synthetic oligonucleotide
caaaaguaauguuucagau

SEQ ID NO: 1177132 - RNA, 19 nt, Artificial Sequence
  Description of Artificial Sequence: Synthetic oligonucleotide
uuagcaguacaagcuuuga

SEQ ID NO: 1177133 - RNA, 19 nt, Artificial Sequence
  Description of Artificial Sequence: Synthetic oligonucleotide
ucagaacagguucucucua

SEQ ID NO: 1177134 - RNA, 19 nt, Artificial Sequence
  Description of Artificial Sequence: Synthetic oligonucleotide
aagaugaccuacauauaua

SEQ ID NO: 1177135 - RNA, 19 nt, Artificial Sequence
  Description of Artificial Sequence: Synthetic oligonucleotide
cacaagucuacuuggcaca

SEQ ID NO: 1177136 - RNA, 19 nt, Artificial Sequence
  Description of Artificial Sequence: Synthetic oligonucleotide
aaguccgugugcuuacguu

SEQ ID NO: 1177137 - RNA, 19 nt, Artificial Sequence
  Description of Artificial Sequence: Synthetic oligonucleotide
uuauagugucccugaaauu

SEQ ID NO: 1177138 - RNA, 19 nt, Artificial Sequence
  Description of Artificial Sequence: Synthetic oligonucleotide
aguacgcgugcaaagcauc

SEQ ID NO: 1177139 - RNA, 19 nt, Artificial Sequence
  Description of Artificial Sequence: Synthetic oligonucleotide
accuacauauauauaguaa

SEQ ID NO: 1177140 - RNA, 19 nt, Artificial Sequence
  Description of Artificial Sequence: Synthetic oligonucleotide
augacugucuggccauuug

SEQ ID NO: 1177141 - RNA, 19 nt, Artificial Sequence
  Description of Artificial Sequence: Synthetic oligonucleotide
guugaguaucacuauccaa

SEQ ID NO: 1177142 - RNA, 19 nt, Artificial Sequence
  Description of Artificial Sequence: Synthetic oligonucleotide
uuuacagguugaguaucac

SEQ ID NO: 1177143 - RNA, 19 nt, Artificial Sequence
  Description of Artificial Sequence: Synthetic oligonucleotide
caguuaugcuacaagccca

SEQ ID NO: 1177144 - RNA, 19 nt, Artificial Sequence
  Description of Artificial Sequence: Synthetic oligonucleotide
ggaacuuauuauguauacc

SEQ ID NO: 1177145 - RNA, 19 nt, Artificial Sequence
  Description of Artificial Sequence: Synthetic oligonucleotide
auuuacagguugaguauca

SEQ ID NO: 1177146 - RNA, 19 nt, Artificial Sequence
  Description of Artificial Sequence: Synthetic oligonucleotide
ggaccucuuacaaugacac

SEQ ID NO: 1177147 - RNA, 19 nt, Artificial Sequence
  Description of Artificial Sequence: Synthetic oligonucleotide
agcaucucagauaauggau

SEQ ID NO: 1177148 - RNA, 19 nt, Artificial Sequence
  Description of Artificial Sequence: Synthetic oligonucleotide
caucuguauaaguuacaca

SEQ ID NO: 1177149 - RNA, 19 nt, Artificial Sequence
  Description of Artificial Sequence: Synthetic oligonucleotide
ccaaauuucaacaaggauu

SEQ ID NO: 1177150 - RNA, 19 nt, Artificial Sequence
  Description of Artificial Sequence: Synthetic oligonucleotide
augaaccuuacagauccca

SEQ ID NO: 1177151 - RNA, 19 nt, Artificial Sequence
  Description of Artificial Sequence: Synthetic oligonucleotide
gaaccuuacagaucccacu

SEQ ID NO: 1177152 - RNA, 19 nt, Artificial Sequence
  Description of Artificial Sequence: Synthetic oligonucleotide
ccgcagaucccaaaguacg

SEQ ID NO: 1177153 - RNA, 19 nt, Artificial Sequence
  Description of Artificial Sequence: Synthetic oligonucleotide
aguuaguguacuggaaaau

SEQ ID NO: 1177154 - RNA, 19 nt, Artificial Sequence
  Description of Artificial Sequence: Synthetic oligonucleotide
ugcuuacguucagagcagg

SEQ ID NO: 1177155 - RNA, 19 nt, Artificial Sequence
  Description of Artificial Sequence: Synthetic oligonucleotide
uccgggaacucuucagagu

SEQ ID NO: 1177156 - RNA, 19 nt, Artificial Sequence
  Description of Artificial Sequence: Synthetic oligonucleotide
cagguacucacccaaggga

SEQ ID NO: 1177157 - RNA, 19 nt, Artificial Sequence
  Description of Artificial Sequence: Synthetic oligonucleotide
ggaaaugcggacacucucc

SEQ ID NO: 1177158 - RNA, 19 nt, Artificial Sequence
  Description of Artificial Sequence: Synthetic oligonucleotide
auagugucccugaaauuca

SEQ ID NO: 1177159 - RNA, 19 nt, Artificial Sequence
  Description of Artificial Sequence: Synthetic oligonucleotide
aucucggaggcgcucagaa

SEQ ID NO: 1177160 - RNA, 19 nt, Artificial Sequence
  Description of Artificial Sequence: Synthetic oligonucleotide
acuuuacucaguaguuuca

SEQ ID NO: 1177161 - RNA, 19 nt, Artificial Sequence
  Description of Artificial Sequence: Synthetic oligonucleotide
agcuuugacuuaagacuac

SEQ ID NO: 1177162 - RNA, 19 nt, Artificial Sequence
  Description of Artificial Sequence: Synthetic oligonucleotide
caaaguuaguguacuggaa

SEQ ID NO: 1177163 - RNA, 19 nt, Artificial Sequence
  Description of Artificial Sequence: Synthetic oligonucleotide
ccaaaguacgcgugcaaag

SEQ ID NO: 1177164 - RNA, 19 nt, Artificial Sequence
  Description of Artificial Sequence: Synthetic oligonucleotide
uagauucuguuuucagauu

SEQ ID NO: 1177165 - RNA, 19 nt, Artificial Sequence
  Description of Artificial Sequence: Synthetic oligonucleotide
cucaguaguuucaaguagu

SEQ ID NO: 1177166 - RNA, 19 nt, Artificial Sequence
  Description of Artificial Sequence: Synthetic oligonucleotide
aaguaguuuuauacacuau

SEQ ID NO: 1177167 - RNA, 19 nt, Artificial Sequence
  Description of Artificial Sequence: Synthetic oligonucleotide
gaacagguucucucuaugu

SEQ ID NO: 1177168 - RNA, 19 nt, Artificial Sequence
  Description of Artificial Sequence: Synthetic oligonucleotide
gaauaaucccagauacuua

SEQ ID NO: 1177169 - RNA, 19 nt, Artificial Sequence
  Description of Artificial Sequence: Synthetic oligonucleotide
aaguacgcgugcaaagcau

SEQ ID NO: 1177170 - RNA, 19 nt, Artificial Sequence
  Description of Artificial Sequence: Synthetic oligonucleotide
accuuacagaucccacucu

SEQ ID NO: 1177171 - RNA, 19 nt, Artificial Sequence
  Description of Artificial Sequence: Synthetic oligonucleotide
cagaaguccgugugcuuac

SEQ ID NO: 1177172 - RNA, 19 nt, Artificial Sequence
  Description of Artificial Sequence: Synthetic oligonucleotide
ucccucaauuauguaguac

SEQ ID NO: 1177173 - RNA, 19 nt, Artificial Sequence
  Description of Artificial Sequence: Synthetic oligonucleotide
acccaagggaccucuuaca

SEQ ID NO: 1177174 - RNA, 19 nt, Artificial Sequence
  Description of Artificial Sequence: Synthetic oligonucleotide
agccagaacuuguacugaa

SEQ ID NO: 1177175 - RNA, 19 nt, Artificial Sequence
  Description of Artificial Sequence: Synthetic oligonucleotide
acaguggucaaggcucaag

SEQ ID NO: 1177176 - RNA, 19 nt, Artificial Sequence
  Description of Artificial Sequence: Synthetic oligonucleotide
ccuccauuagggacaagcc

SEQ ID NO: 1177177 - RNA, 19 nt, Artificial Sequence
  Description of Artificial Sequence: Synthetic oligonucleotide
gcagaucccaaaguacgcg

SEQ ID NO: 1177178 - RNA, 19 nt, Artificial Sequence
  Description of Artificial Sequence: Synthetic oligonucleotide
gguggaauuuuccaauucu

SEQ ID NO: 1177179 - RNA, 19 nt, Artificial Sequence
  Description of Artificial Sequence: Synthetic oligonucleotide
agccgcagaucccaaagua

SEQ ID NO: 1177180 - RNA, 19 nt, Artificial Sequence
  Description of Artificial Sequence: Synthetic oligonucleotide
cacuaaauguucaccugaa

SEQ ID NO: 1177181 - RNA, 19 nt, Artificial Sequence
  Description of Artificial Sequence: Synthetic oligonucleotide
ucccaaaguacgcgugcaa

SEQ ID NO: 1177182 - RNA, 19 nt, Artificial Sequence
  Description of Artificial Sequence: Synthetic oligonucleotide
caguggucaaggcucaaga

SEQ ID NO: 1177183 - RNA, 19 nt, Artificial Sequence
  Description of Artificial Sequence: Synthetic oligonucleotide
acuauccaaaaugcuugga

SEQ ID NO: 1177184 - RNA, 19 nt, Artificial Sequence
  Description of Artificial Sequence: Synthetic oligonucleotide
acacacaacccagaaccgu

SEQ ID NO: 1177185 - RNA, 19 nt, Artificial Sequence
  Description of Artificial Sequence: Synthetic oligonucleotide
augcuuggagccaaaagua

SEQ ID NO: 1177186 - RNA, 19 nt, Artificial Sequence
  Description of Artificial Sequence: Synthetic oligonucleotide
caauuauguaguacucucu

SEQ ID NO: 1177187 - RNA, 19 nt, Artificial Sequence
  Description of Artificial Sequence: Synthetic oligonucleotide
uccgugugcuuacguucag

SEQ ID NO: 1177188 - RNA, 19 nt, Artificial Sequence
  Description of Artificial Sequence: Synthetic oligonucleotide
aaucugccccaagaaacuu

SEQ ID NO: 1177189 - RNA, 19 nt, Artificial Sequence
  Description of Artificial Sequence: Synthetic oligonucleotide
cuuccagcuuugauggaga

SEQ ID NO: 1177190 - RNA, 19 nt, Artificial Sequence
  Description of Artificial Sequence: Synthetic oligonucleotide
cuagccuggaacuuauuau

SEQ ID NO: 1177191 - RNA, 19 nt, Artificial Sequence
  Description of Artificial Sequence: Synthetic oligonucleotide
gaugaaccuuacagauccc

SEQ ID NO: 1177192 - RNA, 19 nt, Artificial Sequence
  Description of Artificial Sequence: Synthetic oligonucleotide
agaucccaaaguacgcgug

SEQ ID NO: 1177193 - RNA, 19 nt, Artificial Sequence
  Description of Artificial Sequence: Synthetic oligonucleotide
cugucuggccauuuggcaa

SEQ ID NO: 1177194 - RNA, 19 nt, Artificial Sequence
  Description of Artificial Sequence: Synthetic oligonucleotide
cacaaggcgauccugaguu

SEQ ID NO: 1177195 - RNA, 19 nt, Artificial Sequence
  Description of Artificial Sequence: Synthetic oligonucleotide
acacuuuacucaguaguuu

SEQ ID NO: 1177196 - RNA, 19 nt, Artificial Sequence
  Description of Artificial Sequence: Synthetic oligonucleotide
uacgcgugcaaagcaucug

SEQ ID NO: 1177197 - RNA, 19 nt, Artificial Sequence
  Description of Artificial Sequence: Synthetic oligonucleotide
auccugcauuguuagcagu

SEQ ID NO: 1177198 - RNA, 19 nt, Artificial Sequence
  Description of Artificial Sequence: Synthetic oligonucleotide
ucggaggcgcucagaaguc

SEQ ID NO: 1177199 - RNA, 19 nt, Artificial Sequence
  Description of Artificial Sequence: Synthetic oligonucleotide
agaucucggaggcgcucag

SEQ ID NO: 1177200 - RNA, 19 nt, Artificial Sequence
  Description of Artificial Sequence: Synthetic oligonucleotide
ggucacucaaguggaaaug

SEQ ID NO: 1177201 - RNA, 19 nt, Artificial Sequence
  Description of Artificial Sequence: Synthetic oligonucleotide
gaccucuuacaaugacaca

SEQ ID NO: 1177202 - RNA, 19 nt, Artificial Sequence
  Description of Artificial Sequence: Synthetic oligonucleotide
ccagauacuuaauucaaua

SEQ ID NO: 1177203 - RNA, 19 nt, Artificial Sequence
  Description of Artificial Sequence: Synthetic oligonucleotide
accgucucauucauaauua

SEQ ID NO: 1177204 - RNA, 19 nt, Artificial Sequence
  Description of Artificial Sequence: Synthetic oligonucleotide
cacaacagguacucaccca

SEQ ID NO: 1177205 - RNA, 19 nt, Artificial Sequence
  Description of Artificial Sequence: Synthetic oligonucleotide
ccgggaacucuucagaguc

SEQ ID NO: 1177206 - RNA, 19 nt, Artificial Sequence
  Description of Artificial Sequence: Synthetic oligonucleotide
gugcuuacguucagagcag

SEQ ID NO: 1177207 - RNA, 19 nt, Artificial Sequence
  Description of Artificial Sequence: Synthetic oligonucleotide
cugaguugauaagauguaa

SEQ ID NO: 1177208 - RNA, 19 nt, Artificial Sequence
  Description of Artificial Sequence: Synthetic oligonucleotide
aguauuaguuaagccuauu

SEQ ID NO: 1177209 - RNA, 19 nt, Artificial Sequence
  Description of Artificial Sequence: Synthetic oligonucleotide
cucaauuauguaguacucu

SEQ ID NO: 1177210 - RNA, 19 nt, Artificial Sequence
  Description of Artificial Sequence: Synthetic oligonucleotide
ugcggacacucuccgggaa

SEQ ID NO: 1177211 - RNA, 19 nt, Artificial Sequence
  Description of Artificial Sequence: Synthetic oligonucleotide
accacauccugcauuguua

SEQ ID NO: 1177212 - RNA, 19 nt, Artificial Sequence
  Description of Artificial Sequence: Synthetic oligonucleotide
ugcucccacccagaaugag

SEQ ID NO: 1177213 - RNA, 19 nt, Artificial Sequence
  Description of Artificial Sequence: Synthetic oligonucleotide
aucuuaccaucagcaguag

SEQ ID NO: 1177214 - RNA, 19 nt, Artificial Sequence
  Description of Artificial Sequence: Synthetic oligonucleotide
gaaauccaguacagugguc

SEQ ID NO: 1177215 - RNA, 19 nt, Artificial Sequence
  Description of Artificial Sequence: Synthetic oligonucleotide
ccuuacagaucccacucuc

SEQ ID NO: 1177216 - RNA, 19 nt, Artificial Sequence
  Description of Artificial Sequence: Synthetic oligonucleotide
gguacucacccaagggacc

SEQ ID NO: 1177217 - RNA, 19 nt, Artificial Sequence
  Description of Artificial Sequence: Synthetic oligonucleotide
agacuacuccuuagaaaga

SEQ ID NO: 1177218 - RNA, 19 nt, Artificial Sequence
  Description of Artificial Sequence: Synthetic oligonucleotide
caaggcgauccugaguuga

SEQ ID NO: 1177219 - RNA, 19 nt, Artificial Sequence
  Description of Artificial Sequence: Synthetic oligonucleotide
ggagccaaaaguaauguuu

SEQ ID NO: 1177220 - RNA, 19 nt, Artificial Sequence
  Description of Artificial Sequence: Synthetic oligonucleotide
gcuagccuggaacuuauua

SEQ ID NO: 1177221 - RNA, 19 nt, Artificial Sequence
  Description of Artificial Sequence: Synthetic oligonucleotide
gaguaucacuauccaaaau

SEQ ID NO: 1177222 - RNA, 19 nt, Artificial Sequence
  Description of Artificial Sequence: Synthetic oligonucleotide
cauuagggacaagccgcag

SEQ ID NO: 1177223 - RNA, 19 nt, Artificial Sequence
  Description of Artificial Sequence: Synthetic oligonucleotide
gcucaagaccacauccugc

SEQ ID NO: 1177224 - RNA, 19 nt, Artificial Sequence
  Description of Artificial Sequence: Synthetic oligonucleotide
auacuucagugguucuguu

SEQ ID NO: 1177225 - RNA, 19 nt, Artificial Sequence
  Description of Artificial Sequence: Synthetic oligonucleotide
gcgauccugaguugauaag

SEQ ID NO: 1177226 - RNA, 19 nt, Artificial Sequence
  Description of Artificial Sequence: Synthetic oligonucleotide
auaaucccagauacuuaau

SEQ ID NO: 1177227 - RNA, 19 nt, Artificial Sequence
  Description of Artificial Sequence: Synthetic oligonucleotide
agcuacaguuaugcuacaa

SEQ ID NO: 1177228 - RNA, 19 nt, Artificial Sequence
  Description of Artificial Sequence: Synthetic oligonucleotide
gaguugcucccacccagaa

SEQ ID NO: 1177229 - RNA, 19 nt, Artificial Sequence
  Description of Artificial Sequence: Synthetic oligonucleotide
caguacaguggucaaggcu

SEQ ID NO: 1177230 - RNA, 19 nt, Artificial Sequence
  Description of Artificial Sequence: Synthetic oligonucleotide
cagccaaugauuugggauu

SEQ ID NO: 1177231 - RNA, 19 nt, Artificial Sequence
  Description of Artificial Sequence: Synthetic oligonucleotide
aaggcgauccugaguugau

SEQ ID NO: 1177232 - RNA, 19 nt, Artificial Sequence
  Description of Artificial Sequence: Synthetic oligonucleotide
agccaaugauuugggauua

SEQ ID NO: 1177233 - RNA, 19 nt, Artificial Sequence
  Description of Artificial Sequence: Synthetic oligonucleotide
gaaguccgugugcuuacgu

SEQ ID NO: 1177234 - RNA, 19 nt, Artificial Sequence
  Description of Artificial Sequence: Synthetic oligonucleotide
gcuuuagaguugcucccac

SEQ ID NO: 1177235 - RNA, 19 nt, Artificial Sequence
  Description of Artificial Sequence: Synthetic oligonucleotide
caacaaggauuuucuugaa

SEQ ID NO: 1177236 - RNA, 19 nt, Artificial Sequence
  Description of Artificial Sequence: Synthetic oligonucleotide
cacacuuuaccuugugcau

SEQ ID NO: 1177237 - RNA, 19 nt, Artificial Sequence
  Description of Artificial Sequence: Synthetic oligonucleotide
cacucuccgggaacucuuc

SEQ ID NO: 1177238 - RNA, 19 nt, Artificial Sequence
  Description of Artificial Sequence: Synthetic oligonucleotide
gucaaggcucaagaccaca

SEQ ID NO: 1177239 - RNA, 19 nt, Artificial Sequence
  Description of Artificial Sequence: Synthetic oligonucleotide
cauacacacuuuaccuugu

SEQ ID NO: 1177240 - RNA, 19 nt, Artificial Sequence
  Description of Artificial Sequence: Synthetic oligonucleotide
agaguugcucccacccaga

SEQ ID NO: 1177241 - RNA, 19 nt, Artificial Sequence
  Description of Artificial Sequence: Synthetic oligonucleotide
cuuacguucagagcaggau

SEQ ID NO: 1177242 - RNA, 19 nt, Artificial Sequence
  Description of Artificial Sequence: Synthetic oligonucleotide
cucagauaauggauuuuau

SEQ ID NO: 1177243 - RNA, 19 nt, Artificial Sequence
  Description of Artificial Sequence: Synthetic oligonucleotide
cagaucccaaaguacgcgu

SEQ ID NO: 1177244 - RNA, 19 nt, Artificial Sequence
  Description of Artificial Sequence: Synthetic oligonucleotide
guacaguggucaaggcuca

SEQ ID NO: 1177245 - RNA, 19 nt, Artificial Sequence
  Description of Artificial Sequence: Synthetic oligonucleotide
cuugagcuacaguuaugcu

SEQ ID NO: 1177246 - RNA, 19 nt, Artificial Sequence
  Description of Artificial Sequence: Synthetic oligonucleotide
gcgcucagaaguccgugug

SEQ ID NO: 1177247 - RNA, 19 nt, Artificial Sequence
  Description of Artificial Sequence: Synthetic oligonucleotide
accuugagcuacaguuaug

SEQ ID NO: 1177248 - RNA, 19 nt, Artificial Sequence
  Description of Artificial Sequence: Synthetic oligonucleotide
ccgucucauucauaauuac

SEQ ID NO: 1177249 - RNA, 19 nt, Artificial Sequence
  Description of Artificial Sequence: Synthetic oligonucleotide
cacuauuuauagugucccu

SEQ ID NO: 1177250 - RNA, 19 nt, Artificial Sequence
  Description of Artificial Sequence: Synthetic oligonucleotide
cgcagaucccaaaguacgc

SEQ ID NO: 1177251 - RNA, 19 nt, Artificial Sequence
  Description of Artificial Sequence: Synthetic oligonucleotide
ggacaagccgcagauccca

SEQ ID NO: 1177252 - RNA, 19 nt, Artificial Sequence
  Description of Artificial Sequence: Synthetic oligonucleotide
cacuuuaccuugugcauuu

SEQ ID NO: 1177253 - RNA, 19 nt, Artificial Sequence
  Description of Artificial Sequence: Synthetic oligonucleotide
cuuuaccuugugcauuuau

SEQ ID NO: 1177254 - RNA, 19 nt, Artificial Sequence
  Description of Artificial Sequence: Synthetic oligonucleotide
gagcuacaguuaugcuaca

SEQ ID NO: 1177255 - RNA, 19 nt, Artificial Sequence
  Description of Artificial Sequence: Synthetic oligonucleotide
aggcgcucagaaguccgug

SEQ ID NO: 1177256 - RNA, 19 nt, Artificial Sequence
  Description of Artificial Sequence: Synthetic oligonucleotide
guacucacccaagggaccu

SEQ ID NO: 1177257 - RNA, 19 nt, Artificial Sequence
  Description of Artificial Sequence: Synthetic oligonucleotide
gaaccgucucauucauaau

SEQ ID NO: 1177258 - RNA, 19 nt, Artificial Sequence
  Description of Artificial Sequence: Synthetic oligonucleotide
ccauuagggacaagccgca

SEQ ID NO: 1177259 - RNA, 19 nt, Artificial Sequence
  Description of Artificial Sequence: Synthetic oligonucleotide
gaucucggaggcgcucaga

SEQ ID NO: 1177260 - RNA, 19 nt, Artificial Sequence
  Description of Artificial Sequence: Synthetic oligonucleotide
cuucagugguucuguuugu

SEQ ID NO: 1177261 - RNA, 19 nt, Artificial Sequence
  Description of Artificial Sequence: Synthetic oligonucleotide
ucuggccauuuggcaaauc

SEQ ID NO: 1177262 - RNA, 19 nt, Artificial Sequence
  Description of Artificial Sequence: Synthetic oligonucleotide
acguucagagcaggaugaa

SEQ ID NO: 1177263 - RNA, 19 nt, Artificial Sequence
  Description of Artificial Sequence: Synthetic oligonucleotide
uacucacccaagggaccuc

SEQ ID NO: 1177264 - RNA, 19 nt, Artificial Sequence
  Description of Artificial Sequence: Synthetic oligonucleotide
guacgcgugcaaagcaucu

SEQ ID NO: 1177265 - RNA, 19 nt, Artificial Sequence
  Description of Artificial Sequence: Synthetic oligonucleotide
ccucuagauggauauauuu

SEQ ID NO: 1177266 - RNA, 19 nt, Artificial Sequence
  Description of Artificial Sequence: Synthetic oligonucleotide
gacaagccgcagaucccaa

SEQ ID NO: 1177267 - RNA, 19 nt, Artificial Sequence
  Description of Artificial Sequence: Synthetic oligonucleotide
gcuuacguucagagcagga

SEQ ID NO: 1177268 - RNA, 19 nt, Artificial Sequence
  Description of Artificial Sequence: Synthetic oligonucleotide
aggcgauccugaguugaua

SEQ ID NO: 1177269 - RNA, 19 nt, Artificial Sequence
  Description of Artificial Sequence: Synthetic oligonucleotide
gcuuugacuuaagacuacu

SEQ ID NO: 1177270 - RNA, 19 nt, Artificial Sequence
  Description of Artificial Sequence: Synthetic oligonucleotide
acuuuaccuugugcauuua

SEQ ID NO: 1177271 - RNA, 19 nt, Artificial Sequence
  Description of Artificial Sequence: Synthetic oligonucleotide
gaugacugucuggccauuu

SEQ ID NO: 1177272 - RNA, 19 nt, Artificial Sequence
  Description of Artificial Sequence: Synthetic oligonucleotide
ccaaugauuugggauuaaa

SEQ ID NO: 1177273 - RNA, 19 nt, Artificial Sequence
  Description of Artificial Sequence: Synthetic oligonucleotide
ccccacaaggcgauccuga

SEQ ID NO: 1177274 - RNA, 19 nt, Artificial Sequence
  Description of Artificial Sequence: Synthetic oligonucleotide
gcuuggagccaaaaguaau

SEQ ID NO: 1177275 - RNA, 19 nt, Artificial Sequence
  Description of Artificial Sequence: Synthetic oligonucleotide
cagaaccgucucauucaua

SEQ ID NO: 1177276 - RNA, 19 nt, Artificial Sequence
  Description of Artificial Sequence: Synthetic oligonucleotide
cagggucacucaaguggaa

SEQ ID NO: 1177277 - RNA, 19 nt, Artificial Sequence
  Description of Artificial Sequence: Synthetic oligonucleotide
cccaaaguacgcgugcaaa

SEQ ID NO: 1177278 - RNA, 19 nt, Artificial Sequence
  Description of Artificial Sequence: Synthetic oligonucleotide
ggcgcucagaaguccgugu

SEQ ID NO: 1177279 - RNA, 19 nt, Artificial Sequence
  Description of Artificial Sequence: Synthetic oligonucleotide
ccccagggucacucaagug

SEQ ID NO: 1177280 - RNA, 19 nt, Artificial Sequence
  Description of Artificial Sequence: Synthetic oligonucleotide
ccaagggaccucuuacaau

SEQ ID NO: 1177281 - RNA, 19 nt, Artificial Sequence
  Description of Artificial Sequence: Synthetic oligonucleotide
cugaagcaucucagauaau

SEQ ID NO: 1177282 - RNA, 19 nt, Artificial Sequence
  Description of Artificial Sequence: Synthetic oligonucleotide
cuccuccauuagggacaag

SEQ ID NO: 1177283 - RNA, 19 nt, Artificial Sequence
  Description of Artificial Sequence: Synthetic oligonucleotide
ccagaaccgucucauucau

SEQ ID NO: 1177284 - RNA, 19 nt, Artificial Sequence
  Description of Artificial Sequence: Synthetic oligonucleotide
ccgugugcuuacguucaga

SEQ ID NO: 1177285 - RNA, 19 nt, Artificial Sequence
  Description of Artificial Sequence: Synthetic oligonucleotide
gucuggccauuuggcaaau

SEQ ID NO: 1177286 - RNA, 19 nt, Artificial Sequence
  Description of Artificial Sequence: Synthetic oligonucleotide
uguaaucccacacauaucg

SEQ ID NO: 1177287 - RNA, 19 nt, Artificial Sequence
  Description of Artificial Sequence: Synthetic oligonucleotide
ugaacugccaacuagaugc

SEQ ID NO: 1177288 - RNA, 19 nt, Artificial Sequence
  Description of Artificial Sequence: Synthetic oligonucleotide
aauaucuuaugccaaaguc

SEQ ID NO: 1177289 - RNA, 19 nt, Artificial Sequence
  Description of Artificial Sequence: Synthetic oligonucleotide
uuuaaugaggauuacauga

SEQ ID NO: 1177290 - RNA, 19 nt, Artificial Sequence
  Description of Artificial Sequence: Synthetic oligonucleotide
gauuuuaucagucaugagc

SEQ ID NO: 1177291 - RNA, 19 nt, Artificial Sequence
  Description of Artificial Sequence: Synthetic oligonucleotide
aaacaauuggcccacucgc

SEQ ID NO: 1177292 - RNA, 19 nt, Artificial Sequence
  Description of Artificial Sequence: Synthetic oligonucleotide
ucuauaauuaucuccaagc

SEQ ID NO: 1177293 - RNA, 19 nt, Artificial Sequence
  Description of Artificial Sequence: Synthetic oligonucleotide
uuucuuaugguccauacca

SEQ ID NO: 1177294 - RNA, 19 nt, Artificial Sequence
  Description of Artificial Sequence: Synthetic oligonucleotide
ugaagauauauuuuaauga

SEQ ID NO: 1177295 - RNA, 19 nt, Artificial Sequence
  Description of Artificial Sequence: Synthetic oligonucleotide
uuagauuagaauuucauau

SEQ ID NO: 1177296 - RNA, 19 nt, Artificial Sequence
  Description of Artificial Sequence: Synthetic oligonucleotide
uuuacaacccuacuaacag

SEQ ID NO: 1177297 - RNA, 19 nt, Artificial Sequence
  Description of Artificial Sequence: Synthetic oligonucleotide
agauauaaauucaacaagc

SEQ ID NO: 1177298 - RNA, 19 nt, Artificial Sequence
  Description of Artificial Sequence: Synthetic oligonucleotide
aaaacaauuggcccacucg

SEQ ID NO: 1177299 - RNA, 19 nt, Artificial Sequence
  Description of Artificial Sequence: Synthetic oligonucleotide
uccuauuucauaaaggaga

SEQ ID NO: 1177300 - RNA, 19 nt, Artificial Sequence
  Description of Artificial Sequence: Synthetic oligonucleotide
uuaaucaugaauaccauua

SEQ ID NO: 1177301 - RNA, 19 nt, Artificial Sequence
  Description of Artificial Sequence: Synthetic oligonucleotide
uaugccaaauaucuuaugc

SEQ ID NO: 1177302 - RNA, 19 nt, Artificial Sequence
  Description of Artificial Sequence: Synthetic oligonucleotide
uuagagaaugcuaugauau

SEQ ID NO: 1177303 - RNA, 19 nt, Artificial Sequence
  Description of Artificial Sequence: Synthetic oligonucleotide
acuacuggaggcuauggcc

SEQ ID NO: 1177304 - RNA, 19 nt, Artificial Sequence
  Description of Artificial Sequence: Synthetic oligonucleotide
uaugauauaggaaagcuuu

SEQ ID NO: 1177305 - RNA, 19 nt, Artificial Sequence
  Description of Artificial Sequence: Synthetic oligonucleotide
uuaggcuuugccuaaacag

SEQ ID NO: 1177306 - RNA, 19 nt, Artificial Sequence
  Description of Artificial Sequence: Synthetic oligonucleotide
gagauauaaauucaacaag

SEQ ID NO: 1177307 - RNA, 19 nt, Artificial Sequence
  Description of Artificial Sequence: Synthetic oligonucleotide
uguguaaucccacacauau

SEQ ID NO: 1177308 - RNA, 19 nt, Artificial Sequence
  Description of Artificial Sequence: Synthetic oligonucleotide
aucacaauaaugauccucc

SEQ ID NO: 1177309 - RNA, 19 nt, Artificial Sequence
  Description of Artificial Sequence: Synthetic oligonucleotide
ucuuuuacaacccuacuaa

SEQ ID NO: 1177310 - RNA, 19 nt, Artificial Sequence
  Description of Artificial Sequence: Synthetic oligonucleotide
augccaaauaucuuaugcc

SEQ ID NO: 1177311 - RNA, 19 nt, Artificial Sequence
  Description of Artificial Sequence: Synthetic oligonucleotide
uccaacguaacuucugugg

SEQ ID NO: 1177312 - RNA, 19 nt, Artificial Sequence
  Description of Artificial Sequence: Synthetic oligonucleotide
uucauaugguuauuuaugc

SEQ ID NO: 1177313 - RNA, 19 nt, Artificial Sequence
  Description of Artificial Sequence: Synthetic oligonucleotide
acuaacaguguuuagauua

SEQ ID NO: 1177314 - RNA, 19 nt, Artificial Sequence
  Description of Artificial Sequence: Synthetic oligonucleotide
ucuaaucagaaaauguuaa

SEQ ID NO: 1177315 - RNA, 19 nt, Artificial Sequence
  Description of Artificial Sequence: Synthetic oligonucleotide
uuuuacaacccuacuaaca

SEQ ID NO: 1177316 - RNA, 19 nt, Artificial Sequence
  Description of Artificial Sequence: Synthetic oligonucleotide
aaucauuauaggaacguag

SEQ ID NO: 1177317 - RNA, 19 nt, Artificial Sequence
  Description of Artificial Sequence: Synthetic oligonucleotide
auaucgagcuucaaaaccc

SEQ ID NO: 1177318 - RNA, 19 nt, Artificial Sequence
  Description of Artificial Sequence: Synthetic oligonucleotide
agagguuugucacagacgu

SEQ ID NO: 1177319 - RNA, 19 nt, Artificial Sequence
  Description of Artificial Sequence: Synthetic oligonucleotide
caugcauauacuuaaaaga

SEQ ID NO: 1177320 - RNA, 19 nt, Artificial Sequence
  Description of Artificial Sequence: Synthetic oligonucleotide
aaaucuaaucagaaaaugu

SEQ ID NO: 1177321 - RNA, 19 nt, Artificial Sequence
  Description of Artificial Sequence: Synthetic oligonucleotide
uuaucuauuuucaggccag

SEQ ID NO: 1177322 - RNA, 19 nt, Artificial Sequence
  Description of Artificial Sequence: Synthetic oligonucleotide
aaaaucauuauaggaacgu

SEQ ID NO: 1177323 - RNA, 19 nt, Artificial Sequence
  Description of Artificial Sequence: Synthetic oligonucleotide
uacaacccuacuaacagug

SEQ ID NO: 1177324 - RNA, 19 nt, Artificial Sequence
  Description of Artificial Sequence: Synthetic oligonucleotide
ugagaagaagaauagacuu

SEQ ID NO: 1177325 - RNA, 19 nt, Artificial Sequence
  Description of Artificial Sequence: Synthetic oligonucleotide
aucauaacggaggugaaac

SEQ ID NO: 1177326 - RNA, 19 nt, Artificial Sequence
  Description of Artificial Sequence: Synthetic oligonucleotide
aagaguaucgccaggugac

SEQ ID NO: 1177327 - RNA, 19 nt, Artificial Sequence
  Description of Artificial Sequence: Synthetic oligonucleotide
aaaacccuaaugcacggca

SEQ ID NO: 1177328 - RNA, 19 nt, Artificial Sequence
  Description of Artificial Sequence: Synthetic oligonucleotide
gaacuuucauauuuaauuc

SEQ ID NO: 1177329 - RNA, 19 nt, Artificial Sequence
  Description of Artificial Sequence: Synthetic oligonucleotide
uggcuacucguucugaugg

SEQ ID NO: 1177330 - RNA, 19 nt, Artificial Sequence
  Description of Artificial Sequence: Synthetic oligonucleotide
acuagaugcgcacugagcu

SEQ ID NO: 1177331 - RNA, 19 nt, Artificial Sequence
  Description of Artificial Sequence: Synthetic oligonucleotide
auuuaugccaaauaucuua

SEQ ID NO: 1177332 - RNA, 19 nt, Artificial Sequence
  Description of Artificial Sequence: Synthetic oligonucleotide
cauaucgagcuucaaaacc

SEQ ID NO: 1177333 - RNA, 19 nt, Artificial Sequence
  Description of Artificial Sequence: Synthetic oligonucleotide
aaauaucuuaugccaaagu

SEQ ID NO: 1177334 - RNA, 19 nt, Artificial Sequence
  Description of Artificial Sequence: Synthetic oligonucleotide
uuucgggccaaauacacca

SEQ ID NO: 1177335 - RNA, 19 nt, Artificial Sequence
  Description of Artificial Sequence: Synthetic oligonucleotide
aaucccacacauaucgagc

SEQ ID NO: 1177336 - RNA, 19 nt, Artificial Sequence
  Description of Artificial Sequence: Synthetic oligonucleotide
gauauaacgguccuuuaca

SEQ ID NO: 1177337 - RNA, 19 nt, Artificial Sequence
  Description of Artificial Sequence: Synthetic oligonucleotide
cugagacucggauauaacg

SEQ ID NO: 1177338 - RNA, 19 nt, Artificial Sequence
  Description of Artificial Sequence: Synthetic oligonucleotide
auuuuaucagucaugagca

SEQ ID NO: 1177339 - RNA, 19 nt, Artificial Sequence
  Description of Artificial Sequence: Synthetic oligonucleotide
uaucuuaugccaaagucua

SEQ ID NO: 1177340 - RNA, 19 nt, Artificial Sequence
  Description of Artificial Sequence: Synthetic oligonucleotide
uguuauaucuugggaaccg

SEQ ID NO: 1177341 - RNA, 19 nt, Artificial Sequence
  Description of Artificial Sequence: Synthetic oligonucleotide
ugcauauacuuaaaagaga

SEQ ID NO: 1177342 - RNA, 19 nt, Artificial Sequence
  Description of Artificial Sequence: Synthetic oligonucleotide
ugccaaauaucuuaugcca

SEQ ID NO: 1177343 - RNA, 19 nt, Artificial Sequence
  Description of Artificial Sequence: Synthetic oligonucleotide
aguucuauaauuaucucca

SEQ ID NO: 1177344 - RNA, 19 nt, Artificial Sequence
  Description of Artificial Sequence: Synthetic oligonucleotide
aggauuacaugauguauag

SEQ ID NO: 1177345 - RNA, 19 nt, Artificial Sequence
  Description of Artificial Sequence: Synthetic oligonucleotide
ucauuaaugguuucucgga

SEQ ID NO: 1177346 - RNA, 19 nt, Artificial Sequence
  Description of Artificial Sequence: Synthetic oligonucleotide
auguuagggaaaucuaauc

SEQ ID NO: 1177347 - RNA, 19 nt, Artificial Sequence
  Description of Artificial Sequence: Synthetic oligonucleotide
cauaugguuauuuaugcca

SEQ ID NO: 1177348 - RNA, 19 nt, Artificial Sequence
  Description of Artificial Sequence: Synthetic oligonucleotide
aacccuaaugcacggcaac

SEQ ID NO: 1177349 - RNA, 19 nt, Artificial Sequence
  Description of Artificial Sequence: Synthetic oligonucleotide
auuucauaugguuauuuau

SEQ ID NO: 1177350 - RNA, 19 nt, Artificial Sequence
  Description of Artificial Sequence: Synthetic oligonucleotide
aaaccuguuggucaggguu

SEQ ID NO: 1177351 - RNA, 19 nt, Artificial Sequence
  Description of Artificial Sequence: Synthetic oligonucleotide
aaaagaugauccuuccuuu

SEQ ID NO: 1177352 - RNA, 19 nt, Artificial Sequence
  Description of Artificial Sequence: Synthetic oligonucleotide
uuaaugaggauuacaugau

SEQ ID NO: 1177353 - RNA, 19 nt, Artificial Sequence
  Description of Artificial Sequence: Synthetic oligonucleotide
uguaucagaccguaguuuc

SEQ ID NO: 1177354 - RNA, 19 nt, Artificial Sequence
  Description of Artificial Sequence: Synthetic oligonucleotide
cauccuauuucauaaagga

SEQ ID NO: 1177355 - RNA, 19 nt, Artificial Sequence
  Description of Artificial Sequence: Synthetic oligonucleotide
ucauaugguuauuuaugcc

SEQ ID NO: 1177356 - RNA, 19 nt, Artificial Sequence
  Description of Artificial Sequence: Synthetic oligonucleotide
gagaaugcuaugauauagg

SEQ ID NO: 1177357 - RNA, 19 nt, Artificial Sequence
  Description of Artificial Sequence: Synthetic oligonucleotide
uggauaucaccucaucaug

SEQ ID NO: 1177358 - RNA, 19 nt, Artificial Sequence
  Description of Artificial Sequence: Synthetic oligonucleotide
ucaggguuguuauaucuug

SEQ ID NO: 1177359 - RNA, 19 nt, Artificial Sequence
  Description of Artificial Sequence: Synthetic oligonucleotide
agaaugcuaugauauagga

SEQ ID NO: 1177360 - RNA, 19 nt, Artificial Sequence
  Description of Artificial Sequence: Synthetic oligonucleotide
ucaacaagcuccacaauua

SEQ ID NO: 1177361 - RNA, 19 nt, Artificial Sequence
  Description of Artificial Sequence: Synthetic oligonucleotide
aacaauuggcccacucgcc

SEQ ID NO: 1177362 - RNA, 19 nt, Artificial Sequence
  Description of Artificial Sequence: Synthetic oligonucleotide
uugugaacugccaacuaga

SEQ ID NO: 1177363 - RNA, 19 nt, Artificial Sequence
  Description of Artificial Sequence: Synthetic oligonucleotide
uuuagagaaugcuaugaua

SEQ ID NO: 1177364 - RNA, 19 nt, Artificial Sequence
  Description of Artificial Sequence: Synthetic oligonucleotide
ggagauauaaauucaacaa

SEQ ID NO: 1177365 - RNA, 19 nt, Artificial Sequence
  Description of Artificial Sequence: Synthetic oligonucleotide
accccauuucagcucaucc

SEQ ID NO: 1177366 - RNA, 19 nt, Artificial Sequence
  Description of Artificial Sequence: Synthetic oligonucleotide
uguuaucuauuuucaggcc

SEQ ID NO: 1177367 - RNA, 19 nt, Artificial Sequence
  Description of Artificial Sequence: Synthetic oligonucleotide
auaucuugggaaccgguug

SEQ ID NO: 1177368 - RNA, 19 nt, Artificial Sequence
  Description of Artificial Sequence: Synthetic oligonucleotide
aaucaugaauaccauuauu

SEQ ID NO: 1177369 - RNA, 19 nt, Artificial Sequence
  Description of Artificial Sequence: Synthetic oligonucleotide
uguuaagcucauuaauggu

SEQ ID NO: 1177370 - RNA, 19 nt, Artificial Sequence
  Description of Artificial Sequence: Synthetic oligonucleotide
agauacuugaacuuucaua

SEQ ID NO: 1177371 - RNA, 19 nt, Artificial Sequence
  Description of Artificial Sequence: Synthetic oligonucleotide
cuaacacacuacuggaggc

SEQ ID NO: 1177372 - RNA, 19 nt, Artificial Sequence
  Description of Artificial Sequence: Synthetic oligonucleotide
guuaucuauuuucaggcca

SEQ ID NO: 1177373 - RNA, 19 nt, Artificial Sequence
  Description of Artificial Sequence: Synthetic oligonucleotide
uguuuacaagaguaucgcc

SEQ ID NO: 1177374 - RNA, 19 nt, Artificial Sequence
  Description of Artificial Sequence: Synthetic oligonucleotide
uaagugacuaauagcccca

SEQ ID NO: 1177375 - RNA, 19 nt, Artificial Sequence
  Description of Artificial Sequence: Synthetic oligonucleotide
aggguugugaacugccaac

SEQ ID NO: 1177376 - RNA, 19 nt, Artificial Sequence
  Description of Artificial Sequence: Synthetic oligonucleotide
ucuuaugguccauaccaug

SEQ ID NO: 1177377 - RNA, 19 nt, Artificial Sequence
  Description of Artificial Sequence: Synthetic oligonucleotide
aaagagauacuugaacuuu

SEQ ID NO: 1177378 - RNA, 19 nt, Artificial Sequence
  Description of Artificial Sequence: Synthetic oligonucleotide
acugaguucuauaauuauc

SEQ ID NO: 1177379 - RNA, 19 nt, Artificial Sequence
  Description of Artificial Sequence: Synthetic oligonucleotide
uauguuuaaacuguccaua

SEQ ID NO: 1177380 - RNA, 19 nt, Artificial Sequence
  Description of Artificial Sequence: Synthetic oligonucleotide
auauguuuaaacuguccau

SEQ ID NO: 1177381 - RNA, 19 nt, Artificial Sequence
  Description of Artificial Sequence: Synthetic oligonucleotide
cauuaaugguuucucggag

SEQ ID NO: 1177382 - RNA, 19 nt, Artificial Sequence
  Description of Artificial Sequence: Synthetic oligonucleotide
agcguccacaucuuguuuc

SEQ ID NO: 1177383 - RNA, 19 nt, Artificial Sequence
  Description of Artificial Sequence: Synthetic oligonucleotide
uacaugauguauagccagc

SEQ ID NO: 1177384 - RNA, 19 nt, Artificial Sequence
  Description of Artificial Sequence: Synthetic oligonucleotide
gaaaauguuaagugacuaa

SEQ ID NO: 1177385 - RNA, 19 nt, Artificial Sequence
  Description of Artificial Sequence: Synthetic oligonucleotide
ucaauucugcuuccaacgu

SEQ ID NO: 1177386 - RNA, 19 nt, Artificial Sequence
  Description of Artificial Sequence: Synthetic oligonucleotide
uuuaaucaugaauaccauu

SEQ ID NO: 1177387 - RNA, 19 nt, Artificial Sequence
  Description of Artificial Sequence: Synthetic oligonucleotide
agucuagucacagauagaa

SEQ ID NO: 1177388 - RNA, 19 nt, Artificial Sequence
  Description of Artificial Sequence: Synthetic oligonucleotide
acaguguuuagauuagaau

SEQ ID NO: 1177389 - RNA, 19 nt, Artificial Sequence
  Description of Artificial Sequence: Synthetic oligonucleotide
ucuuaugccaaagucuagu

SEQ ID NO: 1177390 - RNA, 19 nt, Artificial Sequence
  Description of Artificial Sequence: Synthetic oligonucleotide
ucucaggguuguuauaucu

SEQ ID NO: 1177391 - RNA, 19 nt, Artificial Sequence
  Description of Artificial Sequence: Synthetic oligonucleotide
uugacuugagcuguaucag

SEQ ID NO: 1177392 - RNA, 19 nt, Artificial Sequence
  Description of Artificial Sequence: Synthetic oligonucleotide
guuuacaagaguaucgcca

SEQ ID NO: 1177393 - RNA, 19 nt, Artificial Sequence
  Description of Artificial Sequence: Synthetic oligonucleotide
acugagcuaacacacuacu

SEQ ID NO: 1177394 - RNA, 19 nt, Artificial Sequence
  Description of Artificial Sequence: Synthetic oligonucleotide
uauggccggucccugauug

SEQ ID NO: 1177395 - RNA, 19 nt, Artificial Sequence
  Description of Artificial Sequence: Synthetic oligonucleotide
cacauaucgagcuucaaaa

SEQ ID NO: 1177396 - RNA, 19 nt, Artificial Sequence
  Description of Artificial Sequence: Synthetic oligonucleotide
acccagacacccuuccacc

SEQ ID NO: 1177397 - RNA, 19 nt, Artificial Sequence
  Description of Artificial Sequence: Synthetic oligonucleotide
aacgguccuuuacaauauc

SEQ ID NO: 1177398 - RNA, 19 nt, Artificial Sequence
  Description of Artificial Sequence: Synthetic oligonucleotide
uacucuccaagccaaugac

SEQ ID NO: 1177399 - RNA, 19 nt, Artificial Sequence
  Description of Artificial Sequence: Synthetic oligonucleotide
cuuaugguccauaccauga

SEQ ID NO: 1177400 - RNA, 19 nt, Artificial Sequence
  Description of Artificial Sequence: Synthetic oligonucleotide
auaugcauuccacuuucca

SEQ ID NO: 1177401 - RNA, 19 nt, Artificial Sequence
  Description of Artificial Sequence: Synthetic oligonucleotide
aaccuucaugcauauacuu

SEQ ID NO: 1177402 - RNA, 19 nt, Artificial Sequence
  Description of Artificial Sequence: Synthetic oligonucleotide
cuuuuacaacccuacuaac

SEQ ID NO: 1177403 - RNA, 19 nt, Artificial Sequence
  Description of Artificial Sequence: Synthetic oligonucleotide
auaacggaggugaaacuuc

SEQ ID NO: 1177404 - RNA, 19 nt, Artificial Sequence
  Description of Artificial Sequence: Synthetic oligonucleotide
uauaucuugggaaccgguu

SEQ ID NO: 1177405 - RNA, 19 nt, Artificial Sequence
  Description of Artificial Sequence: Synthetic oligonucleotide
uuuaaccuugguucuccug

SEQ ID NO: 1177406 - RNA, 19 nt, Artificial Sequence
  Description of Artificial Sequence: Synthetic oligonucleotide
aucauuauaggaacguaga

SEQ ID NO: 1177407 - RNA, 19 nt, Artificial Sequence
  Description of Artificial Sequence: Synthetic oligonucleotide
aguaucgccaggugacauc

SEQ ID NO: 1177408 - RNA, 19 nt, Artificial Sequence
  Description of Artificial Sequence: Synthetic oligonucleotide
ugcuaugauauaggaaagc

SEQ ID NO: 1177409 - RNA, 19 nt, Artificial Sequence
  Description of Artificial Sequence: Synthetic oligonucleotide
augcgcacugagcuaacac

SEQ ID NO: 1177410 - RNA, 19 nt, Artificial Sequence
  Description of Artificial Sequence: Synthetic oligonucleotide
cuagacccauuucaccucg

SEQ ID NO: 1177411 - RNA, 19 nt, Artificial Sequence
  Description of Artificial Sequence: Synthetic oligonucleotide
cugcugagaagaagaauag

SEQ ID NO: 1177412 - RNA, 19 nt, Artificial Sequence
  Description of Artificial Sequence: Synthetic oligonucleotide
uuaugguccauaccaugaa

SEQ ID NO: 1177413 - RNA, 19 nt, Artificial Sequence
  Description of Artificial Sequence: Synthetic oligonucleotide
uuucccugaaguucaggcu

SEQ ID NO: 1177414 - RNA, 19 nt, Artificial Sequence
  Description of Artificial Sequence: Synthetic oligonucleotide
acuuaggcuuugccuaaac

SEQ ID NO: 1177415 - RNA, 19 nt, Artificial Sequence
  Description of Artificial Sequence: Synthetic oligonucleotide
uuguuauaucuugggaacc

SEQ ID NO: 1177416 - RNA, 19 nt, Artificial Sequence
  Description of Artificial Sequence: Synthetic oligonucleotide
aguguuuagauuagaauuu

SEQ ID NO: 1177417 - RNA, 19 nt, Artificial Sequence
  Description of Artificial Sequence: Synthetic oligonucleotide
ugccuaaacagcuggguau

SEQ ID NO: 1177418 - RNA, 19 nt, Artificial Sequence
  Description of Artificial Sequence: Synthetic oligonucleotide
ugacccacacucaaacuuc

SEQ ID NO: 1177419 - RNA, 19 nt, Artificial Sequence
  Description of Artificial Sequence: Synthetic oligonucleotide
cuuaugccaaagucuaguc

SEQ ID NO: 1177420 - RNA, 19 nt, Artificial Sequence
  Description of Artificial Sequence: Synthetic oligonucleotide
gguuguuauaucuugggaa

SEQ ID NO: 1177421 - RNA, 19 nt, Artificial Sequence
  Description of Artificial Sequence: Synthetic oligonucleotide
acacauaucgagcuucaaa

SEQ ID NO: 1177422 - RNA, 19 nt, Artificial Sequence
  Description of Artificial Sequence: Synthetic oligonucleotide
agauuuuaucagucaugag

SEQ ID NO: 1177423 - RNA, 19 nt, Artificial Sequence
  Description of Artificial Sequence: Synthetic oligonucleotide
uuaugccaaauaucuuaug

SEQ ID NO: 1177424 - RNA, 19 nt, Artificial Sequence
  Description of Artificial Sequence: Synthetic oligonucleotide
uaucgagcuucaaaacccu

SEQ ID NO: 1177425 - RNA, 19 nt, Artificial Sequence
  Description of Artificial Sequence: Synthetic oligonucleotide
uauaacgguccuuuacaau

SEQ ID NO: 1177426 - RNA, 19 nt, Artificial Sequence
  Description of Artificial Sequence: Synthetic oligonucleotide
ucuuagagaccuuuucauu

SEQ ID NO: 1177427 - RNA, 19 nt, Artificial Sequence
  Description of Artificial Sequence: Synthetic oligonucleotide
aacugccaacuagaugcgc

SEQ ID NO: 1177428 - RNA, 19 nt, Artificial Sequence
  Description of Artificial Sequence: Synthetic oligonucleotide
ugugaacugccaacuagau

SEQ ID NO: 1177429 - RNA, 19 nt, Artificial Sequence
  Description of Artificial Sequence: Synthetic oligonucleotide
cagauuuuaucagucauga

SEQ ID NO: 1177430 - RNA, 19 nt, Artificial Sequence
  Description of Artificial Sequence: Synthetic oligonucleotide
gcaugcaucacaauaauga

SEQ ID NO: 1177431 - RNA, 19 nt, Artificial Sequence
  Description of Artificial Sequence: Synthetic oligonucleotide
uuugccuaaacagcugggu

SEQ ID NO: 1177432 - RNA, 19 nt, Artificial Sequence
  Description of Artificial Sequence: Synthetic oligonucleotide
uuagagaccuuuucauuuu

SEQ ID NO: 1177433 - RNA, 19 nt, Artificial Sequence
  Description of Artificial Sequence: Synthetic oligonucleotide
gacucggauauaacggucc

SEQ ID NO: 1177434 - RNA, 19 nt, Artificial Sequence
  Description of Artificial Sequence: Synthetic oligonucleotide
uaucagaccguaguuucca

SEQ ID NO: 1177435 - RNA, 19 nt, Artificial Sequence
  Description of Artificial Sequence: Synthetic oligonucleotide
uuggcuacucguucugaug

SEQ ID NO: 1177436 - RNA, 19 nt, Artificial Sequence
  Description of Artificial Sequence: Synthetic oligonucleotide
uuacaacccuacuaacagu

SEQ ID NO: 1177437 - RNA, 19 nt, Artificial Sequence
  Description of Artificial Sequence: Synthetic oligonucleotide
gguuucucggaguaacucc

SEQ ID NO: 1177438 - RNA, 19 nt, Artificial Sequence
  Description of Artificial Sequence: Synthetic oligonucleotide
auccuauuucauaaaggag

SEQ ID NO: 1177439 - RNA, 19 nt, Artificial Sequence
  Description of Artificial Sequence: Synthetic oligonucleotide
cuuucgggccaaauacacc

SEQ ID NO: 1177440 - RNA, 19 nt, Artificial Sequence
  Description of Artificial Sequence: Synthetic oligonucleotide
ucgggcuacucuccaagcc

SEQ ID NO: 1177441 - RNA, 19 nt, Artificial Sequence
  Description of Artificial Sequence: Synthetic oligonucleotide
uacucguucugauggaaau

SEQ ID NO: 1177442 - RNA, 19 nt, Artificial Sequence
  Description of Artificial Sequence: Synthetic oligonucleotide
uaacgguccuuuacaauau

SEQ ID NO: 1177443 - RNA, 19 nt, Artificial Sequence
  Description of Artificial Sequence: Synthetic oligonucleotide
caugaaaccuucaugcaua

SEQ ID NO: 1177444 - RNA, 19 nt, Artificial Sequence
  Description of Artificial Sequence: Synthetic oligonucleotide
ucauaacggaggugaaacu

SEQ ID NO: 1177445 - RNA, 19 nt, Artificial Sequence
  Description of Artificial Sequence: Synthetic oligonucleotide
gcuuugccuaaacagcugg

SEQ ID NO: 1177446 - RNA, 19 nt, Artificial Sequence
  Description of Artificial Sequence: Synthetic oligonucleotide
gacccauuucaccucgggc

SEQ ID NO: 1177447 - RNA, 19 nt, Artificial Sequence
  Description of Artificial Sequence: Synthetic oligonucleotide
ggauauaacgguccuuuac

SEQ ID NO: 1177448 - RNA, 19 nt, Artificial Sequence
  Description of Artificial Sequence: Synthetic oligonucleotide
uucuuaugguccauaccau

SEQ ID NO: 1177449 - RNA, 19 nt, Artificial Sequence
  Description of Artificial Sequence: Synthetic oligonucleotide
aaugacccagacacccuuc

SEQ ID NO: 1177450 - RNA, 19 nt, Artificial Sequence
  Description of Artificial Sequence: Synthetic oligonucleotide
ucuagacccauuucaccuc

SEQ ID NO: 1177451 - RNA, 19 nt, Artificial Sequence
  Description of Artificial Sequence: Synthetic oligonucleotide
aucagaccguaguuuccac

SEQ ID NO: 1177452 - RNA, 19 nt, Artificial Sequence
  Description of Artificial Sequence: Synthetic oligonucleotide
cugagcuaacacacuacug

SEQ ID NO: 1177453 - RNA, 19 nt, Artificial Sequence
  Description of Artificial Sequence: Synthetic oligonucleotide
aaccuguuggucaggguug

SEQ ID NO: 1177454 - RNA, 19 nt, Artificial Sequence
  Description of Artificial Sequence: Synthetic oligonucleotide
gaggauuacaugauguaua

SEQ ID NO: 1177455 - RNA, 19 nt, Artificial Sequence
  Description of Artificial Sequence: Synthetic oligonucleotide
guccauaccaugaagauau

SEQ ID NO: 1177456 - RNA, 19 nt, Artificial Sequence
  Description of Artificial Sequence: Synthetic oligonucleotide
aacuuccaggaaauauaag

SEQ ID NO: 1177457 - RNA, 19 nt, Artificial Sequence
  Description of Artificial Sequence: Synthetic oligonucleotide
uuuggcuacucguucugau

SEQ ID NO: 1177458 - RNA, 19 nt, Artificial Sequence
  Description of Artificial Sequence: Synthetic oligonucleotide
uccuccacauuguuugcac

SEQ ID NO: 1177459 - RNA, 19 nt, Artificial Sequence
  Description of Artificial Sequence: Synthetic oligonucleotide
uccaaacauggucugugua

SEQ ID NO: 1177460 - RNA, 19 nt, Artificial Sequence
  Description of Artificial Sequence: Synthetic oligonucleotide
caacuagaugcgcacugag

SEQ ID NO: 1177461 - RNA, 19 nt, Artificial Sequence
  Description of Artificial Sequence: Synthetic oligonucleotide
ucgggccaaauacaccaug

SEQ ID NO: 1177462 - RNA, 19 nt, Artificial Sequence
  Description of Artificial Sequence: Synthetic oligonucleotide
uuucaccucgggcuacucu

SEQ ID NO: 1177463 - RNA, 19 nt, Artificial Sequence
  Description of Artificial Sequence: Synthetic oligonucleotide
gauauauuuuaaugaggau

SEQ ID NO: 1177464 - RNA, 19 nt, Artificial Sequence
  Description of Artificial Sequence: Synthetic oligonucleotide
uaugguuauuuaugccaaa

SEQ ID NO: 1177465 - RNA, 19 nt, Artificial Sequence
  Description of Artificial Sequence: Synthetic oligonucleotide
uagaugcgcacugagcuaa

SEQ ID NO: 1177466 - RNA, 19 nt, Artificial Sequence
  Description of Artificial Sequence: Synthetic oligonucleotide
ccacacucaaacuuccagg

SEQ ID NO: 1177467 - RNA, 19 nt, Artificial Sequence
  Description of Artificial Sequence: Synthetic oligonucleotide
uagagaaugcuaugauaua

SEQ ID NO: 1177468 - RNA, 19 nt, Artificial Sequence
  Description of Artificial Sequence: Synthetic oligonucleotide
auaugguuauuuaugccaa

SEQ ID NO: 1177469 - RNA, 19 nt, Artificial Sequence
  Description of Artificial Sequence: Synthetic oligonucleotide
uugggaaccgguugcuuaa

SEQ ID NO: 1177470 - RNA, 19 nt, Artificial Sequence
  Description of Artificial Sequence: Synthetic oligonucleotide
cguaguuuccaccucacag

SEQ ID NO: 1177471 - RNA, 19 nt, Artificial Sequence
  Description of Artificial Sequence: Synthetic oligonucleotide
ugauuguggucaacuuuuc

SEQ ID NO: 1177472 - RNA, 19 nt, Artificial Sequence
  Description of Artificial Sequence: Synthetic oligonucleotide
cacuacuggaggcuauggc

SEQ ID NO: 1177473 - RNA, 19 nt, Artificial Sequence
  Description of Artificial Sequence: Synthetic oligonucleotide
cugagaagaagaauagacu

SEQ ID NO: 1177474 - RNA, 19 nt, Artificial Sequence
  Description of Artificial Sequence: Synthetic oligonucleotide
acaugauguauagccagca

SEQ ID NO: 1177475 - RNA, 19 nt, Artificial Sequence
  Description of Artificial Sequence: Synthetic oligonucleotide
gaacugccaacuagaugcg

SEQ ID NO: 1177476 - RNA, 19 nt, Artificial Sequence
  Description of Artificial Sequence: Synthetic oligonucleotide
cauucucccauccagagau

SEQ ID NO: 1177477 - RNA, 19 nt, Artificial Sequence
  Description of Artificial Sequence: Synthetic oligonucleotide
agucacugaguucuauaau

SEQ ID NO: 1177478 - RNA, 19 nt, Artificial Sequence
  Description of Artificial Sequence: Synthetic oligonucleotide
ugagcuguaucagaccgua

SEQ ID NO: 1177479 - RNA, 19 nt, Artificial Sequence
  Description of Artificial Sequence: Synthetic oligonucleotide
auuuaaucaugaauaccau

SEQ ID NO: 1177480 - RNA, 19 nt, Artificial Sequence
  Description of Artificial Sequence: Synthetic oligonucleotide
cuuagagaccuuuucauuu

SEQ ID NO: 1177481 - RNA, 19 nt, Artificial Sequence
  Description of Artificial Sequence: Synthetic oligonucleotide
augcuaugauauaggaaag

SEQ ID NO: 1177482 - RNA, 19 nt, Artificial Sequence
  Description of Artificial Sequence: Synthetic oligonucleotide
gaccguaguuuccaccuca

SEQ ID NO: 1177483 - RNA, 19 nt, Artificial Sequence
  Description of Artificial Sequence: Synthetic oligonucleotide
ggccaaauacaccauguuc

SEQ ID NO: 1177484 - RNA, 19 nt, Artificial Sequence
  Description of Artificial Sequence: Synthetic oligonucleotide
agacucggauauaacgguc

SEQ ID NO: 1177485 - RNA, 19 nt, Artificial Sequence
  Description of Artificial Sequence: Synthetic oligonucleotide
agcuaacacacuacuggag

SEQ ID NO: 1177486 - RNA, 19 nt, Artificial Sequence
  Description of Artificial Sequence: Synthetic oligonucleotide
cuacucuccaagccaauga

SEQ ID NO: 1177487 - RNA, 19 nt, Artificial Sequence
  Description of Artificial Sequence: Synthetic oligonucleotide
agagauacuugaacuuuca

SEQ ID NO: 1177488 - RNA, 19 nt, Artificial Sequence
  Description of Artificial Sequence: Synthetic oligonucleotide
ccaacguaacuucuguggc

SEQ ID NO: 1177489 - RNA, 19 nt, Artificial Sequence
  Description of Artificial Sequence: Synthetic oligonucleotide
uagacccauuucaccucgg

SEQ ID NO: 1177490 - RNA, 19 nt, Artificial Sequence
  Description of Artificial Sequence: Synthetic oligonucleotide
ucggaguaacuccucuuua

SEQ ID NO: 1177491 - RNA, 19 nt, Artificial Sequence
  Description of Artificial Sequence: Synthetic oligonucleotide
aacccuacuaacaguguuu

SEQ ID NO: 1177492 - RNA, 19 nt, Artificial Sequence
  Description of Artificial Sequence: Synthetic oligonucleotide
cuuaggcuuugccuaaaca

SEQ ID NO: 1177493 - RNA, 19 nt, Artificial Sequence
  Description of Artificial Sequence: Synthetic oligonucleotide
uaucuauuuucaggccagc

SEQ ID NO: 1177494 - RNA, 19 nt, Artificial Sequence
  Description of Artificial Sequence: Synthetic oligonucleotide
agaccguaguuuccaccuc

SEQ ID NO: 1177495 - RNA, 19 nt, Artificial Sequence
  Description of Artificial Sequence: Synthetic oligonucleotide
ccagauuuuaucagucaug

SEQ ID NO: 1177496 - RNA, 19 nt, Artificial Sequence
  Description of Artificial Sequence: Synthetic oligonucleotide
cauaccaugaagauauauu

SEQ ID NO: 1177497 - RNA, 19 nt, Artificial Sequence
  Description of Artificial Sequence: Synthetic oligonucleotide
gugacuaauagccccagau

SEQ ID NO: 1177498 - RNA, 19 nt, Artificial Sequence
  Description of Artificial Sequence: Synthetic oligonucleotide
acacuacuggaggcuaugg

SEQ ID NO: 1177499 - RNA, 19 nt, Artificial Sequence
  Description of Artificial Sequence: Synthetic oligonucleotide
ggguauguugccaagcaac

SEQ ID NO: 1177500 - RNA, 19 nt, Artificial Sequence
  Description of Artificial Sequence: Synthetic oligonucleotide
cugccaacuagaugcgcac

SEQ ID NO: 1177501 - RNA, 19 nt, Artificial Sequence
  Description of Artificial Sequence: Synthetic oligonucleotide
aacacacuacuggaggcua

SEQ ID NO: 1177502 - RNA, 19 nt, Artificial Sequence
  Description of Artificial Sequence: Synthetic oligonucleotide
uucucaggguuguuauauc

SEQ ID NO: 1177503 - RNA, 19 nt, Artificial Sequence
  Description of Artificial Sequence: Synthetic oligonucleotide
acucguucugauggaaaug

SEQ ID NO: 1177504 - RNA, 19 nt, Artificial Sequence
  Description of Artificial Sequence: Synthetic oligonucleotide
cuggauaucaccucaucau

SEQ ID NO: 1177505 - RNA, 19 nt, Artificial Sequence
  Description of Artificial Sequence: Synthetic oligonucleotide
guaucgccaggugacauca

SEQ ID NO: 1177506 - RNA, 19 nt, Artificial Sequence
  Description of Artificial Sequence: Synthetic oligonucleotide
cauauacuuaaaagagaua

SEQ ID NO: 1177507 - RNA, 19 nt, Artificial Sequence
  Description of Artificial Sequence: Synthetic oligonucleotide
auggucacuuaggcuuugc

SEQ ID NO: 1177508 - RNA, 19 nt, Artificial Sequence
  Description of Artificial Sequence: Synthetic oligonucleotide
caacguaacuucuguggca

SEQ ID NO: 1177509 - RNA, 19 nt, Artificial Sequence
  Description of Artificial Sequence: Synthetic oligonucleotide
gcuuaacuggcaugcauca

SEQ ID NO: 1177510 - RNA, 19 nt, Artificial Sequence
  Description of Artificial Sequence: Synthetic oligonucleotide
cucgggcuacucuccaagc

SEQ ID NO: 1177511 - RNA, 19 nt, Artificial Sequence
  Description of Artificial Sequence: Synthetic oligonucleotide
aaacccuaaugcacggcaa

SEQ ID NO: 1177512 - RNA, 19 nt, Artificial Sequence
  Description of Artificial Sequence: Synthetic oligonucleotide
acacucaaacuuccaggaa

SEQ ID NO: 1177513 - RNA, 19 nt, Artificial Sequence
  Description of Artificial Sequence: Synthetic oligonucleotide
ccuuucgggccaaauacac

SEQ ID NO: 1177514 - RNA, 19 nt, Artificial Sequence
  Description of Artificial Sequence: Synthetic oligonucleotide
ggucuguguaaucccacac

SEQ ID NO: 1177515 - RNA, 19 nt, Artificial Sequence
  Description of Artificial Sequence: Synthetic oligonucleotide
gcauauacuuaaaagagau

SEQ ID NO: 1177516 - RNA, 19 nt, Artificial Sequence
  Description of Artificial Sequence: Synthetic oligonucleotide
gggguuuugggagauauaa

SEQ ID NO: 1177517 - RNA, 19 nt, Artificial Sequence
  Description of Artificial Sequence: Synthetic oligonucleotide
acgguccuuuacaauauca

SEQ ID NO: 1177518 - RNA, 19 nt, Artificial Sequence
  Description of Artificial Sequence: Synthetic oligonucleotide
cuuaacuggcaugcaucac

SEQ ID NO: 1177519 - RNA, 19 nt, Artificial Sequence
  Description of Artificial Sequence: Synthetic oligonucleotide
cauguuccagucuguuuca

SEQ ID NO: 1177520 - RNA, 19 nt, Artificial Sequence
  Description of Artificial Sequence: Synthetic oligonucleotide
cuugggaaccgguugcuua

SEQ ID NO: 1177521 - RNA, 19 nt, Artificial Sequence
  Description of Artificial Sequence: Synthetic oligonucleotide
aucaacuaccucaucuuua

SEQ ID NO: 1177522 - RNA, 19 nt, Artificial Sequence
  Description of Artificial Sequence: Synthetic oligonucleotide
gguauguugccaagcaaca

SEQ ID NO: 1177523 - RNA, 19 nt, Artificial Sequence
  Description of Artificial Sequence: Synthetic oligonucleotide
gccaacuagaugcgcacug

SEQ ID NO: 1177524 - RNA, 19 nt, Artificial Sequence
  Description of Artificial Sequence: Synthetic oligonucleotide
caugcaucacaauaaugau

SEQ ID NO: 1177525 - RNA, 19 nt, Artificial Sequence
  Description of Artificial Sequence: Synthetic oligonucleotide
cuaugauauaggaaagcuu

SEQ ID NO: 1177526 - RNA, 19 nt, Artificial Sequence
  Description of Artificial Sequence: Synthetic oligonucleotide
caaagucuagucacagaua

SEQ ID NO: 1177527 - RNA, 19 nt, Artificial Sequence
  Description of Artificial Sequence: Synthetic oligonucleotide
ggguuguuauaucuuggga

SEQ ID NO: 1177528 - RNA, 19 nt, Artificial Sequence
  Description of Artificial Sequence: Synthetic oligonucleotide
cagaccguaguuuccaccu

SEQ ID NO: 1177529 - RNA, 19 nt, Artificial Sequence
  Description of Artificial Sequence: Synthetic oligonucleotide
acggcaacacagcguaaaa

SEQ ID NO: 1177530 - RNA, 19 nt, Artificial Sequence
  Description of Artificial Sequence: Synthetic oligonucleotide
ucguucugauggaaauguu

SEQ ID NO: 1177531 - RNA, 19 nt, Artificial Sequence
  Description of Artificial Sequence: Synthetic oligonucleotide
acccuaaugcacggcaaca

SEQ ID NO: 1177532 - RNA, 19 nt, Artificial Sequence
  Description of Artificial Sequence: Synthetic oligonucleotide
uucgggccaaauacaccau

SEQ ID NO: 1177533 - RNA, 19 nt, Artificial Sequence
  Description of Artificial Sequence: Synthetic oligonucleotide
uggccggucccugauugug

SEQ ID NO: 1177534 - RNA, 19 nt, Artificial Sequence
  Description of Artificial Sequence: Synthetic oligonucleotide
cuuccaacguaacuucugu

SEQ ID NO: 1177535 - RNA, 19 nt, Artificial Sequence
  Description of Artificial Sequence: Synthetic oligonucleotide
cuacucguucugauggaaa

SEQ ID NO: 1177536 - RNA, 19 nt, Artificial Sequence
  Description of Artificial Sequence: Synthetic oligonucleotide
augauauaggaaagcuuuu

SEQ ID NO: 1177537 - RNA, 19 nt, Artificial Sequence
  Description of Artificial Sequence: Synthetic oligonucleotide
agaguaucgccaggugaca

SEQ ID NO: 1177538 - RNA, 19 nt, Artificial Sequence
  Description of Artificial Sequence: Synthetic oligonucleotide
gagauacuugaacuuucau

SEQ ID NO: 1177539 - RNA, 19 nt, Artificial Sequence
  Description of Artificial Sequence: Synthetic oligonucleotide
ggauuacaugauguauagc

SEQ ID NO: 1177540 - RNA, 19 nt, Artificial Sequence
  Description of Artificial Sequence: Synthetic oligonucleotide
caauucugcuuccaacgua

SEQ ID NO: 1177541 - RNA, 19 nt, Artificial Sequence
  Description of Artificial Sequence: Synthetic oligonucleotide
ugccaacuagaugcgcacu

SEQ ID NO: 1177542 - RNA, 19 nt, Artificial Sequence
  Description of Artificial Sequence: Synthetic oligonucleotide
guaaucccacacauaucga

SEQ ID NO: 1177543 - RNA, 19 nt, Artificial Sequence
  Description of Artificial Sequence: Synthetic oligonucleotide
gcguccacaucuuguuucc

SEQ ID NO: 1177544 - RNA, 19 nt, Artificial Sequence
  Description of Artificial Sequence: Synthetic oligonucleotide
ggucaacuuuucccugaag

SEQ ID NO: 1177545 - RNA, 19 nt, Artificial Sequence
  Description of Artificial Sequence: Synthetic oligonucleotide
cugacccacacucaaacuu

SEQ ID NO: 1177546 - RNA, 19 nt, Artificial Sequence
  Description of Artificial Sequence: Synthetic oligonucleotide
cuagaugcgcacugagcua

SEQ ID NO: 1177547 - RNA, 19 nt, Artificial Sequence
  Description of Artificial Sequence: Synthetic oligonucleotide
guguaaucccacacauauc

SEQ ID NO: 1177548 - RNA, 19 nt, Artificial Sequence
  Description of Artificial Sequence: Synthetic oligonucleotide
uccauaccaugaagauaua

SEQ ID NO: 1177549 - RNA, 19 nt, Artificial Sequence
  Description of Artificial Sequence: Synthetic oligonucleotide
gaugcgcacugagcuaaca

SEQ ID NO: 1177550 - RNA, 19 nt, Artificial Sequence
  Description of Artificial Sequence: Synthetic oligonucleotide
gccuaaacagcuggguaug

SEQ ID NO: 1177551 - RNA, 19 nt, Artificial Sequence
  Description of Artificial Sequence: Synthetic oligonucleotide
gcuacucuccaagccaaug

SEQ ID NO: 1177552 - RNA, 19 nt, Artificial Sequence
  Description of Artificial Sequence: Synthetic oligonucleotide
caggguugugaacugccaa

SEQ ID NO: 1177553 - RNA, 19 nt, Artificial Sequence
  Description of Artificial Sequence: Synthetic oligonucleotide
agaugcgcacugagcuaac

SEQ ID NO: 1177554 - RNA, 19 nt, Artificial Sequence
  Description of Artificial Sequence: Synthetic oligonucleotide
ugaaaccuucaugcauaua

SEQ ID NO: 1177555 - RNA, 19 nt, Artificial Sequence
  Description of Artificial Sequence: Synthetic oligonucleotide
uaucgccaggugacaucaa

SEQ ID NO: 1177556 - RNA, 19 nt, Artificial Sequence
  Description of Artificial Sequence: Synthetic oligonucleotide
gagguuugucacagacguc

SEQ ID NO: 1177557 - RNA, 19 nt, Artificial Sequence
  Description of Artificial Sequence: Synthetic oligonucleotide
auggccggucccugauugu

SEQ ID NO: 1177558 - RNA, 19 nt, Artificial Sequence
  Description of Artificial Sequence: Synthetic oligonucleotide
cacggcaacacagcguaaa

SEQ ID NO: 1177559 - RNA, 19 nt, Artificial Sequence
  Description of Artificial Sequence: Synthetic oligonucleotide
ugggaaccgguugcuuaac

SEQ ID NO: 1177560 - RNA, 19 nt, Artificial Sequence
  Description of Artificial Sequence: Synthetic oligonucleotide
cccacacauaucgagcuuc

SEQ ID NO: 1177561 - RNA, 19 nt, Artificial Sequence
  Description of Artificial Sequence: Synthetic oligonucleotide
gcaaaagaugauccuuccu

SEQ ID NO: 1177562 - RNA, 19 nt, Artificial Sequence
  Description of Artificial Sequence: Synthetic oligonucleotide
caacaagcuccacaauuau

SEQ ID NO: 1177563 - RNA, 19 nt, Artificial Sequence
  Description of Artificial Sequence: Synthetic oligonucleotide
ccaagcaacaucucccugu

SEQ ID NO: 1177564 - RNA, 19 nt, Artificial Sequence
  Description of Artificial Sequence: Synthetic oligonucleotide
cucaggguuguuauaucuu

SEQ ID NO: 1177565 - RNA, 19 nt, Artificial Sequence
  Description of Artificial Sequence: Synthetic oligonucleotide
caacccuacuaacaguguu

SEQ ID NO: 1177566 - RNA, 19 nt, Artificial Sequence
  Description of Artificial Sequence: Synthetic oligonucleotide
ccauuucagcucauccuca

SEQ ID NO: 1177567 - RNA, 19 nt, Artificial Sequence
  Description of Artificial Sequence: Synthetic oligonucleotide
gguccauaccaugaagaua

SEQ ID NO: 1177568 - RNA, 19 nt, Artificial Sequence
  Description of Artificial Sequence: Synthetic oligonucleotide
ggccggucccugauugugg

SEQ ID NO: 1177569 - RNA, 19 nt, Artificial Sequence
  Description of Artificial Sequence: Synthetic oligonucleotide
guauguugccaagcaacau

SEQ ID NO: 1177570 - RNA, 19 nt, Artificial Sequence
  Description of Artificial Sequence: Synthetic oligonucleotide
ggcuacucguucugaugga

SEQ ID NO: 1177571 - RNA, 19 nt, Artificial Sequence
  Description of Artificial Sequence: Synthetic oligonucleotide
gaguaucgccaggugacau

SEQ ID NO: 1177572 - RNA, 19 nt, Artificial Sequence
  Description of Artificial Sequence: Synthetic oligonucleotide
gcuguaucagaccguaguu

SEQ ID NO: 1177573 - RNA, 19 nt, Artificial Sequence
  Description of Artificial Sequence: Synthetic oligonucleotide
cuguaucagaccguaguuu

SEQ ID NO: 1177574 - RNA, 19 nt, Artificial Sequence
  Description of Artificial Sequence: Synthetic oligonucleotide
gcccacucgccacagcguc

SEQ ID NO: 1177575 - RNA, 19 nt, Artificial Sequence
  Description of Artificial Sequence: Synthetic oligonucleotide
cacauuguuugcaccccau

SEQ ID NO: 1177576 - RNA, 19 nt, Artificial Sequence
  Description of Artificial Sequence: Synthetic oligonucleotide
ccacacauaucgagcuuca

SEQ ID NO: 1177577 - RNA, 19 nt, Artificial Sequence
  Description of Artificial Sequence: Synthetic oligonucleotide
ggguugugaacugccaacu

SEQ ID NO: 1177578 - RNA, 19 nt, Artificial Sequence
  Description of Artificial Sequence: Synthetic oligonucleotide
gcuacucguucugauggaa

SEQ ID NO: 1177579 - RNA, 19 nt, Artificial Sequence
  Description of Artificial Sequence: Synthetic oligonucleotide
ccaacuagaugcgcacuga

SEQ ID NO: 1177580 - RNA, 19 nt, Artificial Sequence
  Description of Artificial Sequence: Synthetic oligonucleotide
caccucgggcuacucucca

SEQ ID NO: 1177581 - RNA, 19 nt, Artificial Sequence
  Description of Artificial Sequence: Synthetic oligonucleotide
gucccugauuguggucaac

SEQ ID NO: 1177582 - RNA, 19 nt, Artificial Sequence
  Description of Artificial Sequence: Synthetic oligonucleotide
cuccuggauaucaccucau

SEQ ID NO: 1177583 - RNA, 19 nt, Artificial Sequence
  Description of Artificial Sequence: Synthetic oligonucleotide
ggucccugauuguggucaa

SEQ ID NO: 1177584 - RNA, 19 nt, Artificial Sequence
  Description of Artificial Sequence: Synthetic oligonucleotide
cauuucaccucgggcuacu

SEQ ID NO: 1177585 - RNA, 19 nt, Artificial Sequence
  Description of Artificial Sequence: Synthetic oligonucleotide
ccagacacccuuccaccaa

SEQ ID NO: 1177586 - RNA, 19 nt, Artificial Sequence
  Description of Artificial Sequence: Synthetic oligonucleotide
gcuauggccggucccugau

SEQ ID NO: 1177587 - RNA, 19 nt, Artificial Sequence
  Description of Artificial Sequence: Synthetic oligonucleotide
ccguaguuuccaccucaca

SEQ ID NO: 1177588 - RNA, 19 nt, Artificial Sequence
  Description of Artificial Sequence: Synthetic oligonucleotide
ccauaccaugaagauauau

SEQ ID NO: 1177589 - RNA, 19 nt, Artificial Sequence
  Description of Artificial Sequence: Synthetic oligonucleotide
ccagucuguuucaacuuuu

SEQ ID NO: 1177590 - RNA, 19 nt, Artificial Sequence
  Description of Artificial Sequence: Synthetic oligonucleotide
cucggauauaacgguccuu

SEQ ID NO: 1177591 - RNA, 19 nt, Artificial Sequence
  Description of Artificial Sequence: Synthetic oligonucleotide
cgagcuucaaaacccuaau

SEQ ID NO: 1177592 - RNA, 19 nt, Artificial Sequence
  Description of Artificial Sequence: Synthetic oligonucleotide
cagcguccacaucuuguuu

SEQ ID NO: 1177593 - RNA, 19 nt, Artificial Sequence
  Description of Artificial Sequence: Synthetic oligonucleotide
cggauauaacgguccuuua

SEQ ID NO: 1177594 - RNA, 19 nt, Artificial Sequence
  Description of Artificial Sequence: Synthetic oligonucleotide
ccuaaacagcuggguaugu

SEQ ID NO: 1177595 - RNA, 19 nt, Artificial Sequence
  Description of Artificial Sequence: Synthetic oligonucleotide
ccaccgcugcugagaagaa

SEQ ID NO: 1177596 - RNA, 19 nt, Artificial Sequence
  Description of Artificial Sequence: Synthetic oligonucleotide
gcacggcaacacagcguaa

SEQ ID NO: 1177597 - RNA, 19 nt, Artificial Sequence
  Description of Artificial Sequence: Synthetic oligonucleotide
uaauuuaucaguuaagucg

SEQ ID NO: 1177598 - RNA, 19 nt, Artificial Sequence
  Description of Artificial Sequence: Synthetic oligonucleotide
aauaaugagaauuugguau

SEQ ID NO: 1177599 - RNA, 19 nt, Artificial Sequence
  Description of Artificial Sequence: Synthetic oligonucleotide
auaggugcaacccagaggg

SEQ ID NO: 1177600 - RNA, 19 nt, Artificial Sequence
  Description of Artificial Sequence: Synthetic oligonucleotide
aacuagauaaccucucuag

SEQ ID NO: 1177601 - RNA, 19 nt, Artificial Sequence
  Description of Artificial Sequence: Synthetic oligonucleotide
ucucuguucaaucaaacug

SEQ ID NO: 1177602 - RNA, 19 nt, Artificial Sequence
  Description of Artificial Sequence: Synthetic oligonucleotide
aaagcagucaaguauggga

SEQ ID NO: 1177603 - RNA, 19 nt, Artificial Sequence
  Description of Artificial Sequence: Synthetic oligonucleotide
ugagcgugaauucacgucg

SEQ ID NO: 1177604 - RNA, 19 nt, Artificial Sequence
  Description of Artificial Sequence: Synthetic oligonucleotide
gauuacuuggagcugaagc

SEQ ID NO: 1177605 - RNA, 19 nt, Artificial Sequence
  Description of Artificial Sequence: Synthetic oligonucleotide
aaaccuauggaugacacug

SEQ ID NO: 1177606 - RNA, 19 nt, Artificial Sequence
  Description of Artificial Sequence: Synthetic oligonucleotide
aaaaguacaugcaauaggu

SEQ ID NO: 1177607 - RNA, 19 nt, Artificial Sequence
  Description of Artificial Sequence: Synthetic oligonucleotide
auaaugagaauuugguauc

SEQ ID NO: 1177608 - RNA, 19 nt, Artificial Sequence
  Description of Artificial Sequence: Synthetic oligonucleotide
aagaagguggugcauggac

SEQ ID NO: 1177609 - RNA, 19 nt, Artificial Sequence
  Description of Artificial Sequence: Synthetic oligonucleotide
uguggaguguuaauuaucc

SEQ ID NO: 1177610 - RNA, 19 nt, Artificial Sequence
  Description of Artificial Sequence: Synthetic oligonucleotide
acaaguguauguuuugggg

SEQ ID NO: 1177611 - RNA, 19 nt, Artificial Sequence
  Description of Artificial Sequence: Synthetic oligonucleotide
uggcaugccauucaugugg

SEQ ID NO: 1177612 - RNA, 19 nt, Artificial Sequence
  Description of Artificial Sequence: Synthetic oligonucleotide
auuccaacuagauaaccuc

SEQ ID NO: 1177613 - RNA, 19 nt, Artificial Sequence
  Description of Artificial Sequence: Synthetic oligonucleotide
uauaaaaguauguguggag

SEQ ID NO: 1177614 - RNA, 19 nt, Artificial Sequence
  Description of Artificial Sequence: Synthetic oligonucleotide
aggauaucaaaguaaacca

SEQ ID NO: 1177615 - RNA, 19 nt, Artificial Sequence
  Description of Artificial Sequence: Synthetic oligonucleotide
aauuuaucaguuaagucga

SEQ ID NO: 1177616 - RNA, 19 nt, Artificial Sequence
  Description of Artificial Sequence: Synthetic oligonucleotide
ugaaggauaucaaaguaaa

SEQ ID NO: 1177617 - RNA, 19 nt, Artificial Sequence
  Description of Artificial Sequence: Synthetic oligonucleotide
caaaaguacaugcaauagg

SEQ ID NO: 1177618 - RNA, 19 nt, Artificial Sequence
  Description of Artificial Sequence: Synthetic oligonucleotide
gaaguuuugcuauccaagc

SEQ ID NO: 1177619 - RNA, 19 nt, Artificial Sequence
  Description of Artificial Sequence: Synthetic oligonucleotide
uaugggauggagaaguugu

SEQ ID NO: 1177620 - RNA, 19 nt, Artificial Sequence
  Description of Artificial Sequence: Synthetic oligonucleotide
uccaaagguccccagaugc

SEQ ID NO: 1177621 - RNA, 19 nt, Artificial Sequence
  Description of Artificial Sequence: Synthetic oligonucleotide
agguugcuaaagcuaaucc

SEQ ID NO: 1177622 - RNA, 19 nt, Artificial Sequence
  Description of Artificial Sequence: Synthetic oligonucleotide
aaauaaugagaauuuggua

SEQ ID NO: 1177623 - RNA, 19 nt, Artificial Sequence
  Description of Artificial Sequence: Synthetic oligonucleotide
uguccgugggaccacaagg

SEQ ID NO: 1177624 - RNA, 19 nt, Artificial Sequence
  Description of Artificial Sequence: Synthetic oligonucleotide
ucccauugaaaauaaugag

SEQ ID NO: 1177625 - RNA, 19 nt, Artificial Sequence
  Description of Artificial Sequence: Synthetic oligonucleotide
uugaaggauaucaaaguaa

SEQ ID NO: 1177626 - RNA, 19 nt, Artificial Sequence
  Description of Artificial Sequence: Synthetic oligonucleotide
gaugcuucagucucuagac

SEQ ID NO: 1177627 - RNA, 19 nt, Artificial Sequence
  Description of Artificial Sequence: Synthetic oligonucleotide
cuagauaaccucucuagac

SEQ ID NO: 1177628 - RNA, 19 nt, Artificial Sequence
  Description of Artificial Sequence: Synthetic oligonucleotide
cagauugguauuaaucugc

SEQ ID NO: 1177629 - RNA, 19 nt, Artificial Sequence
  Description of Artificial Sequence: Synthetic oligonucleotide
uggaguguuaauuaucccu

SEQ ID NO: 1177630 - RNA, 19 nt, Artificial Sequence
  Description of Artificial Sequence: Synthetic oligonucleotide
ugcaauaggugcaacccag

SEQ ID NO: 1177631 - RNA, 19 nt, Artificial Sequence
  Description of Artificial Sequence: Synthetic oligonucleotide
uagauaaccucucuagacu

SEQ ID NO: 1177632 - RNA, 19 nt, Artificial Sequence
  Description of Artificial Sequence: Synthetic oligonucleotide
aaguaugggauggagaagu

SEQ ID NO: 1177633 - RNA, 19 nt, Artificial Sequence
  Description of Artificial Sequence: Synthetic oligonucleotide
aggacauggaagcugagug

SEQ ID NO: 1177634 - RNA, 19 nt, Artificial Sequence
  Description of Artificial Sequence: Synthetic oligonucleotide
ugauccaacaccagaaauc

SEQ ID NO: 1177635 - RNA, 19 nt, Artificial Sequence
  Description of Artificial Sequence: Synthetic oligonucleotide
ucugucaauucaguuauag

SEQ ID NO: 1177636 - RNA, 19 nt, Artificial Sequence
  Description of Artificial Sequence: Synthetic oligonucleotide
ucgacaucugucaauucag

SEQ ID NO: 1177637 - RNA, 19 nt, Artificial Sequence
  Description of Artificial Sequence: Synthetic oligonucleotide
aacaagcccagauugguau

SEQ ID NO: 1177638 - RNA, 19 nt, Artificial Sequence
  Description of Artificial Sequence: Synthetic oligonucleotide
ccagaugccagacagaacg

SEQ ID NO: 1177639 - RNA, 19 nt, Artificial Sequence
  Description of Artificial Sequence: Synthetic oligonucleotide
ucaauucaguuauaguaac

SEQ ID NO: 1177640 - RNA, 19 nt, Artificial Sequence
  Description of Artificial Sequence: Synthetic oligonucleotide
aauuccaacuagauaaccu

SEQ ID NO: 1177641 - RNA, 19 nt, Artificial Sequence
  Description of Artificial Sequence: Synthetic oligonucleotide
uagacuaccugauccaaca

SEQ ID NO: 1177642 - RNA, 19 nt, Artificial Sequence
  Description of Artificial Sequence: Synthetic oligonucleotide
uccacuuuauuuuaccaaa

SEQ ID NO: 1177643 - RNA, 19 nt, Artificial Sequence
  Description of Artificial Sequence: Synthetic oligonucleotide
uccaaauagaaagugcaga

SEQ ID NO: 1177644 - RNA, 19 nt, Artificial Sequence
  Description of Artificial Sequence: Synthetic oligonucleotide
uuucucauuagggccaagg

SEQ ID NO: 1177645 - RNA, 19 nt, Artificial Sequence
  Description of Artificial Sequence: Synthetic oligonucleotide
ugauugucucaaaagucca

SEQ ID NO: 1177646 - RNA, 19 nt, Artificial Sequence
  Description of Artificial Sequence: Synthetic oligonucleotide
ucugcgauguacaggagaa

SEQ ID NO: 1177647 - RNA, 19 nt, Artificial Sequence
  Description of Artificial Sequence: Synthetic oligonucleotide
aaaaguauguguggagugu

SEQ ID NO: 1177648 - RNA, 19 nt, Artificial Sequence
  Description of Artificial Sequence: Synthetic oligonucleotide
ugaguggcuaagcuagucc

SEQ ID NO: 1177649 - RNA, 19 nt, Artificial Sequence
  Description of Artificial Sequence: Synthetic oligonucleotide
uaguaacuauaaauaauuc

SEQ ID NO: 1177650 - RNA, 19 nt, Artificial Sequence
  Description of Artificial Sequence: Synthetic oligonucleotide
guuaagucgacaucuguca

SEQ ID NO: 1177651 - RNA, 19 nt, Artificial Sequence
  Description of Artificial Sequence: Synthetic oligonucleotide
uuugggguggaguuaggcc

SEQ ID NO: 1177652 - RNA, 19 nt, Artificial Sequence
  Description of Artificial Sequence: Synthetic oligonucleotide
uucuggucaggccaaaagu

SEQ ID NO: 1177653 - RNA, 19 nt, Artificial Sequence
  Description of Artificial Sequence: Synthetic oligonucleotide
uuuucgaaauaaacuucca

SEQ ID NO: 1177654 - RNA, 19 nt, Artificial Sequence
  Description of Artificial Sequence: Synthetic oligonucleotide
ucccucaucucucuguuca

SEQ ID NO: 1177655 - RNA, 19 nt, Artificial Sequence
  Description of Artificial Sequence: Synthetic oligonucleotide
guagaagauaaugaagaug

SEQ ID NO: 1177656 - RNA, 19 nt, Artificial Sequence
  Description of Artificial Sequence: Synthetic oligonucleotide
aagcaaucaggcgauuggg

SEQ ID NO: 1177657 - RNA, 19 nt, Artificial Sequence
  Description of Artificial Sequence: Synthetic oligonucleotide
uuuugcuauccaagcuugg

SEQ ID NO: 1177658 - RNA, 19 nt, Artificial Sequence
  Description of Artificial Sequence: Synthetic oligonucleotide
gauccaacaccagaaauca

SEQ ID NO: 1177659 - RNA, 19 nt, Artificial Sequence
  Description of Artificial Sequence: Synthetic oligonucleotide
guaucaaaagugaaacccc

SEQ ID NO: 1177660 - RNA, 19 nt, Artificial Sequence
  Description of Artificial Sequence: Synthetic oligonucleotide
uauuucaguccaccugucc

SEQ ID NO: 1177661 - RNA, 19 nt, Artificial Sequence
  Description of Artificial Sequence: Synthetic oligonucleotide
cuggaaagcaaucaggcga

SEQ ID NO: 1177662 - RNA, 19 nt, Artificial Sequence
  Description of Artificial Sequence: Synthetic oligonucleotide
uuccaacuagauaaccucu

SEQ ID NO: 1177663 - RNA, 19 nt, Artificial Sequence
  Description of Artificial Sequence: Synthetic oligonucleotide
ugaauucacgucgagggcu

SEQ ID NO: 1177664 - RNA, 19 nt, Artificial Sequence
  Description of Artificial Sequence: Synthetic oligonucleotide
uagaggaacaccagguguc

SEQ ID NO: 1177665 - RNA, 19 nt, Artificial Sequence
  Description of Artificial Sequence: Synthetic oligonucleotide
cucuguucaaucaaacuga

SEQ ID NO: 1177666 - RNA, 19 nt, Artificial Sequence
  Description of Artificial Sequence: Synthetic oligonucleotide
augccauucauguggagga

SEQ ID NO: 1177667 - RNA, 19 nt, Artificial Sequence
  Description of Artificial Sequence: Synthetic oligonucleotide
uggacuguuggaaaccuau

SEQ ID NO: 1177668 - RNA, 19 nt, Artificial Sequence
  Description of Artificial Sequence: Synthetic oligonucleotide
cgugaauucacgucgaggg

SEQ ID NO: 1177669 - RNA, 19 nt, Artificial Sequence
  Description of Artificial Sequence: Synthetic oligonucleotide
uuccacuuuauuuuaccaa

SEQ ID NO: 1177670 - RNA, 19 nt, Artificial Sequence
  Description of Artificial Sequence: Synthetic oligonucleotide
aaagacucgggaguguagu

SEQ ID NO: 1177671 - RNA, 19 nt, Artificial Sequence
  Description of Artificial Sequence: Synthetic oligonucleotide
uuuaucaguuaagucgaca

SEQ ID NO: 1177672 - RNA, 19 nt, Artificial Sequence
  Description of Artificial Sequence: Synthetic oligonucleotide
ccaaauagaaagugcagag

SEQ ID NO: 1177673 - RNA, 19 nt, Artificial Sequence
  Description of Artificial Sequence: Synthetic oligonucleotide
aauagaaagugcagagggu

SEQ ID NO: 1177674 - RNA, 19 nt, Artificial Sequence
  Description of Artificial Sequence: Synthetic oligonucleotide
aggcgauugggcaaggcgc

SEQ ID NO: 1177675 - RNA, 19 nt, Artificial Sequence
  Description of Artificial Sequence: Synthetic oligonucleotide
ucucaaaaguccacuuuaa

SEQ ID NO: 1177676 - RNA, 19 nt, Artificial Sequence
  Description of Artificial Sequence: Synthetic oligonucleotide
auucaguuauaguaacuau

SEQ ID NO: 1177677 - RNA, 19 nt, Artificial Sequence
  Description of Artificial Sequence: Synthetic oligonucleotide
ucuguucaaucaaacugaa

SEQ ID NO: 1177678 - RNA, 19 nt, Artificial Sequence
  Description of Artificial Sequence: Synthetic oligonucleotide
caugugcacagacagaaca

SEQ ID NO: 1177679 - RNA, 19 nt, Artificial Sequence
  Description of Artificial Sequence: Synthetic oligonucleotide
aaucaggcgauugggcaag

SEQ ID NO: 1177680 - RNA, 19 nt, Artificial Sequence
  Description of Artificial Sequence: Synthetic oligonucleotide
agucaguucacccgauucu

SEQ ID NO: 1177681 - RNA, 19 nt, Artificial Sequence
  Description of Artificial Sequence: Synthetic oligonucleotide
uuaagucgacaucugucaa

SEQ ID NO: 1177682 - RNA, 19 nt, Artificial Sequence
  Description of Artificial Sequence: Synthetic oligonucleotide
uggaaagcaaucaggcgau

SEQ ID NO: 1177683 - RNA, 19 nt, Artificial Sequence
  Description of Artificial Sequence: Synthetic oligonucleotide
cauguggacuguuggaaac

SEQ ID NO: 1177684 - RNA, 19 nt, Artificial Sequence
  Description of Artificial Sequence: Synthetic oligonucleotide
agaaacaagcccagauugg

SEQ ID NO: 1177685 - RNA, 19 nt, Artificial Sequence
  Description of Artificial Sequence: Synthetic oligonucleotide
agcuaauccaaaggucccc

SEQ ID NO: 1177686 - RNA, 19 nt, Artificial Sequence
  Description of Artificial Sequence: Synthetic oligonucleotide
cacaaggaggaagaggacc

SEQ ID NO: 1177687 - RNA, 19 nt, Artificial Sequence
  Description of Artificial Sequence: Synthetic oligonucleotide
aagucucgggugugaugcc

SEQ ID NO: 1177688 - RNA, 19 nt, Artificial Sequence
  Description of Artificial Sequence: Synthetic oligonucleotide
aagacucgggaguguagug

SEQ ID NO: 1177689 - RNA, 19 nt, Artificial Sequence
  Description of Artificial Sequence: Synthetic oligonucleotide
uccaacuagauaaccucuc

SEQ ID NO: 1177690 - RNA, 19 nt, Artificial Sequence
  Description of Artificial Sequence: Synthetic oligonucleotide
ugcgauguacaggagaauc

SEQ ID NO: 1177691 - RNA, 19 nt, Artificial Sequence
  Description of Artificial Sequence: Synthetic oligonucleotide
gucgacaucugucaauuca

SEQ ID NO: 1177692 - RNA, 19 nt, Artificial Sequence
  Description of Artificial Sequence: Synthetic oligonucleotide
caauaggugcaacccagag

SEQ ID NO: 1177693 - RNA, 19 nt, Artificial Sequence
  Description of Artificial Sequence: Synthetic oligonucleotide
auguggacuguuggaaacc

SEQ ID NO: 1177694 - RNA, 19 nt, Artificial Sequence
  Description of Artificial Sequence: Synthetic oligonucleotide
agcaacuuucuccugccca

SEQ ID NO: 1177695 - RNA, 19 nt, Artificial Sequence
  Description of Artificial Sequence: Synthetic oligonucleotide
agacuaccugauccaacac

SEQ ID NO: 1177696 - RNA, 19 nt, Artificial Sequence
  Description of Artificial Sequence: Synthetic oligonucleotide
auugucucaaaaguccacu

SEQ ID NO: 1177697 - RNA, 19 nt, Artificial Sequence
  Description of Artificial Sequence: Synthetic oligonucleotide
ucgggaguguaguguaggg

SEQ ID NO: 1177698 - RNA, 19 nt, Artificial Sequence
  Description of Artificial Sequence: Synthetic oligonucleotide
agcaaucaggcgauugggc

SEQ ID NO: 1177699 - RNA, 19 nt, Artificial Sequence
  Description of Artificial Sequence: Synthetic oligonucleotide
gggaguguaguguagggug

SEQ ID NO: 1177700 - RNA, 19 nt, Artificial Sequence
  Description of Artificial Sequence: Synthetic oligonucleotide
aaguugguccauuucuaua

SEQ ID NO: 1177701 - RNA, 19 nt, Artificial Sequence
  Description of Artificial Sequence: Synthetic oligonucleotide
cuggucaggccaaaaguac

SEQ ID NO: 1177702 - RNA, 19 nt, Artificial Sequence
  Description of Artificial Sequence: Synthetic oligonucleotide
caggcgauugggcaaggcg

SEQ ID NO: 1177703 - RNA, 19 nt, Artificial Sequence
  Description of Artificial Sequence: Synthetic oligonucleotide
uuuugggguggaguuaggc

SEQ ID NO: 1177704 - RNA, 19 nt, Artificial Sequence
  Description of Artificial Sequence: Synthetic oligonucleotide
gucaauucaguuauaguaa

SEQ ID NO: 1177705 - RNA, 19 nt, Artificial Sequence
  Description of Artificial Sequence: Synthetic oligonucleotide
uucagucucuagacuaccu

SEQ ID NO: 1177706 - RNA, 19 nt, Artificial Sequence
  Description of Artificial Sequence: Synthetic oligonucleotide
ugcuugacacaauuccaac

SEQ ID NO: 1177707 - RNA, 19 nt, Artificial Sequence
  Description of Artificial Sequence: Synthetic oligonucleotide
acagacagaacagucaguu

SEQ ID NO: 1177708 - RNA, 19 nt, Artificial Sequence
  Description of Artificial Sequence: Synthetic oligonucleotide
ugcuuauuucaguccaccu

SEQ ID NO: 1177709 - RNA, 19 nt, Artificial Sequence
  Description of Artificial Sequence: Synthetic oligonucleotide
ugcauacagcugauggugu

SEQ ID NO: 1177710 - RNA, 19 nt, Artificial Sequence
  Description of Artificial Sequence: Synthetic oligonucleotide
guucacccgauucugugug

SEQ ID NO: 1177711 - RNA, 19 nt, Artificial Sequence
  Description of Artificial Sequence: Synthetic oligonucleotide
ucauuagggccaaggcuga

SEQ ID NO: 1177712 - RNA, 19 nt, Artificial Sequence
  Description of Artificial Sequence: Synthetic oligonucleotide
uccgugggaccacaaggag

SEQ ID NO: 1177713 - RNA, 19 nt, Artificial Sequence
  Description of Artificial Sequence: Synthetic oligonucleotide
aagucgacaucugucaauu

SEQ ID NO: 1177714 - RNA, 19 nt, Artificial Sequence
  Description of Artificial Sequence: Synthetic oligonucleotide
uaaccucucuagacucagg

SEQ ID NO: 1177715 - RNA, 19 nt, Artificial Sequence
  Description of Artificial Sequence: Synthetic oligonucleotide
gaaagugcagagggugggg

SEQ ID NO: 1177716 - RNA, 19 nt, Artificial Sequence
  Description of Artificial Sequence: Synthetic oligonucleotide
aguggcuaagcuagucccc

SEQ ID NO: 1177717 - RNA, 19 nt, Artificial Sequence
  Description of Artificial Sequence: Synthetic oligonucleotide
aaaguauguguggaguguu

SEQ ID NO: 1177718 - RNA, 19 nt, Artificial Sequence
  Description of Artificial Sequence: Synthetic oligonucleotide
gauaucaaaguaaaccaau

SEQ ID NO: 1177719 - RNA, 19 nt, Artificial Sequence
  Description of Artificial Sequence: Synthetic oligonucleotide
uaagucgacaucugucaau

SEQ ID NO: 1177720 - RNA, 19 nt, Artificial Sequence
  Description of Artificial Sequence: Synthetic oligonucleotide
aacgccgaggucccagucu

SEQ ID NO: 1177721 - RNA, 19 nt, Artificial Sequence
  Description of Artificial Sequence: Synthetic oligonucleotide
cuagacuaccugauccaac

SEQ ID NO: 1177722 - RNA, 19 nt, Artificial Sequence
  Description of Artificial Sequence: Synthetic oligonucleotide
uggggucaaagucucgggu

SEQ ID NO: 1177723 - RNA, 19 nt, Artificial Sequence
  Description of Artificial Sequence: Synthetic oligonucleotide
uauggaugacacugaucca

SEQ ID NO: 1177724 - RNA, 19 nt, Artificial Sequence
  Description of Artificial Sequence: Synthetic oligonucleotide
aggccaaaaguacaugcaa

SEQ ID NO: 1177725 - RNA, 19 nt, Artificial Sequence
  Description of Artificial Sequence: Synthetic oligonucleotide
aguguuaauuaucccucau

SEQ ID NO: 1177726 - RNA, 19 nt, Artificial Sequence
  Description of Artificial Sequence: Synthetic oligonucleotide
aauucucuuaagacacagu

SEQ ID NO: 1177727 - RNA, 19 nt, Artificial Sequence
  Description of Artificial Sequence: Synthetic oligonucleotide
agcggcgaggaguuggcuc

SEQ ID NO: 1177728 - RNA, 19 nt, Artificial Sequence
  Description of Artificial Sequence: Synthetic oligonucleotide
gaaggauaucaaaguaaac

SEQ ID NO: 1177729 - RNA, 19 nt, Artificial Sequence
  Description of Artificial Sequence: Synthetic oligonucleotide
aguucacccgauucugugu

SEQ ID NO: 1177730 - RNA, 19 nt, Artificial Sequence
  Description of Artificial Sequence: Synthetic oligonucleotide
ucacgucgagggcugaaga

SEQ ID NO: 1177731 - RNA, 19 nt, Artificial Sequence
  Description of Artificial Sequence: Synthetic oligonucleotide
guuguccggguccaggccc

SEQ ID NO: 1177732 - RNA, 19 nt, Artificial Sequence
  Description of Artificial Sequence: Synthetic oligonucleotide
ucaguucacccgauucugu

SEQ ID NO: 1177733 - RNA, 19 nt, Artificial Sequence
  Description of Artificial Sequence: Synthetic oligonucleotide
gugcuaggagcccagugcc

SEQ ID NO: 1177734 - RNA, 19 nt, Artificial Sequence
  Description of Artificial Sequence: Synthetic oligonucleotide
agaugacucuucuacugaa

SEQ ID NO: 1177735 - RNA, 19 nt, Artificial Sequence
  Description of Artificial Sequence: Synthetic oligonucleotide
cugagcgugaauucacguc

SEQ ID NO: 1177736 - RNA, 19 nt, Artificial Sequence
  Description of Artificial Sequence: Synthetic oligonucleotide
ggcugaguggcuaagcuag

SEQ ID NO: 1177737 - RNA, 19 nt, Artificial Sequence
  Description of Artificial Sequence: Synthetic oligonucleotide
auuaucccucaucucucug

SEQ ID NO: 1177738 - RNA, 19 nt, Artificial Sequence
  Description of Artificial Sequence: Synthetic oligonucleotide
cauggacuggggcagcggc

SEQ ID NO: 1177739 - RNA, 19 nt, Artificial Sequence
  Description of Artificial Sequence: Synthetic oligonucleotide
ugggguggaguuaggccag

SEQ ID NO: 1177740 - RNA, 19 nt, Artificial Sequence
  Description of Artificial Sequence: Synthetic oligonucleotide
uccacuuuaacugcuuauu

SEQ ID NO: 1177741 - RNA, 19 nt, Artificial Sequence
  Description of Artificial Sequence: Synthetic oligonucleotide
ugcaccauccagucugcga

SEQ ID NO: 1177742 - RNA, 19 nt, Artificial Sequence
  Description of Artificial Sequence: Synthetic oligonucleotide
gauugucucaaaaguccac

SEQ ID NO: 1177743 - RNA, 19 nt, Artificial Sequence
  Description of Artificial Sequence: Synthetic oligonucleotide
caaagcagucaaguauggg

SEQ ID NO: 1177744 - RNA, 19 nt, Artificial Sequence
  Description of Artificial Sequence: Synthetic oligonucleotide
ugaugccugcacaagugua

SEQ ID NO: 1177745 - RNA, 19 nt, Artificial Sequence
  Description of Artificial Sequence: Synthetic oligonucleotide
ccauucauguggaggaagg

SEQ ID NO: 1177746 - RNA, 19 nt, Artificial Sequence
  Description of Artificial Sequence: Synthetic oligonucleotide
cugagguugcuaaagcuaa

SEQ ID NO: 1177747 - RNA, 19 nt, Artificial Sequence
  Description of Artificial Sequence: Synthetic oligonucleotide
uguggacuguuggaaaccu

SEQ ID NO: 1177748 - RNA, 19 nt, Artificial Sequence
  Description of Artificial Sequence: Synthetic oligonucleotide
gaauucacgucgagggcug

SEQ ID NO: 1177749 - RNA, 19 nt, Artificial Sequence
  Description of Artificial Sequence: Synthetic oligonucleotide
cccauugaaaauaaugaga

SEQ ID NO: 1177750 - RNA, 19 nt, Artificial Sequence
  Description of Artificial Sequence: Synthetic oligonucleotide
aggagaaucagcaccugga

SEQ ID NO: 1177751 - RNA, 19 nt, Artificial Sequence
  Description of Artificial Sequence: Synthetic oligonucleotide
ucuagacuaccugauccaa

SEQ ID NO: 1177752 - RNA, 19 nt, Artificial Sequence
  Description of Artificial Sequence: Synthetic oligonucleotide
gagguugcuaaagcuaauc

SEQ ID NO: 1177753 - RNA, 19 nt, Artificial Sequence
  Description of Artificial Sequence: Synthetic oligonucleotide
caguucacccgauucugug

SEQ ID NO: 1177754 - RNA, 19 nt, Artificial Sequence
  Description of Artificial Sequence: Synthetic oligonucleotide
ugccagacagaacgccgag

SEQ ID NO: 1177755 - RNA, 19 nt, Artificial Sequence
  Description of Artificial Sequence: Synthetic oligonucleotide
gagugcuaggagcccagug

SEQ ID NO: 1177756 - RNA, 19 nt, Artificial Sequence
  Description of Artificial Sequence: Synthetic oligonucleotide
uucacgucgagggcugaag

SEQ ID NO: 1177757 - RNA, 19 nt, Artificial Sequence
  Description of Artificial Sequence: Synthetic oligonucleotide
uugucucaaaaguccacuu

SEQ ID NO: 1177758 - RNA, 19 nt, Artificial Sequence
  Description of Artificial Sequence: Synthetic oligonucleotide
cuuggugauugucucaaaa

SEQ ID NO: 1177759 - RNA, 19 nt, Artificial Sequence
  Description of Artificial Sequence: Synthetic oligonucleotide
agucgacaucugucaauuc

SEQ ID NO: 1177760 - RNA, 19 nt, Artificial Sequence
  Description of Artificial Sequence: Synthetic oligonucleotide
auccaaagguccccagaug

SEQ ID NO: 1177761 - RNA, 19 nt, Artificial Sequence
  Description of Artificial Sequence: Synthetic oligonucleotide
ggcugugauuacuuggagc

SEQ ID NO: 1177762 - RNA, 19 nt, Artificial Sequence
  Description of Artificial Sequence: Synthetic oligonucleotide
cagucucuagacuaccuga

SEQ ID NO: 1177763 - RNA, 19 nt, Artificial Sequence
  Description of Artificial Sequence: Synthetic oligonucleotide
acccgauucugugugcagg

SEQ ID NO: 1177764 - RNA, 19 nt, Artificial Sequence
  Description of Artificial Sequence: Synthetic oligonucleotide
guaugggauggagaaguug

SEQ ID NO: 1177765 - RNA, 19 nt, Artificial Sequence
  Description of Artificial Sequence: Synthetic oligonucleotide
gaguuaggccagaggagag

SEQ ID NO: 1177766 - RNA, 19 nt, Artificial Sequence
  Description of Artificial Sequence: Synthetic oligonucleotide
gcugucauguagaagauaa

SEQ ID NO: 1177767 - RNA, 19 nt, Artificial Sequence
  Description of Artificial Sequence: Synthetic oligonucleotide
acugauccaugcagagccc

SEQ ID NO: 1177768 - RNA, 19 nt, Artificial Sequence
  Description of Artificial Sequence: Synthetic oligonucleotide
cucgggaguguaguguagg

SEQ ID NO: 1177769 - RNA, 19 nt, Artificial Sequence
  Description of Artificial Sequence: Synthetic oligonucleotide
cucuagacuaccugaucca

SEQ ID NO: 1177770 - RNA, 19 nt, Artificial Sequence
  Description of Artificial Sequence: Synthetic oligonucleotide
ugguauuaaucugcuugac

SEQ ID NO: 1177771 - RNA, 19 nt, Artificial Sequence
  Description of Artificial Sequence: Synthetic oligonucleotide
gacagaacgccgagguccc

SEQ ID NO: 1177772 - RNA, 19 nt, Artificial Sequence
  Description of Artificial Sequence: Synthetic oligonucleotide
gucugcgauguacaggaga

SEQ ID NO: 1177773 - RNA, 19 nt, Artificial Sequence
  Description of Artificial Sequence: Synthetic oligonucleotide
caaguaugggauggagaag

SEQ ID NO: 1177774 - RNA, 19 nt, Artificial Sequence
  Description of Artificial Sequence: Synthetic oligonucleotide
caggccaaaaguacaugca

SEQ ID NO: 1177775 - RNA, 19 nt, Artificial Sequence
  Description of Artificial Sequence: Synthetic oligonucleotide
gcaaucaggcgauugggca

SEQ ID NO: 1177776 - RNA, 19 nt, Artificial Sequence
  Description of Artificial Sequence: Synthetic oligonucleotide
accuauggaugacacugau

SEQ ID NO: 1177777 - RNA, 19 nt, Artificial Sequence
  Description of Artificial Sequence: Synthetic oligonucleotide
aaccuauggaugacacuga

SEQ ID NO: 1177778 - RNA, 19 nt, Artificial Sequence
  Description of Artificial Sequence: Synthetic oligonucleotide
agcgugaauucacgucgag

SEQ ID NO: 1177779 - RNA, 19 nt, Artificial Sequence
  Description of Artificial Sequence: Synthetic oligonucleotide
ugcauggacuggggcagcg

SEQ ID NO: 1177780 - RNA, 19 nt, Artificial Sequence
  Description of Artificial Sequence: Synthetic oligonucleotide
uucacccgauucugugugc

SEQ ID NO: 1177781 - RNA, 19 nt, Artificial Sequence
  Description of Artificial Sequence: Synthetic oligonucleotide
auaauucucuuaagacaca

SEQ ID NO: 1177782 - RNA, 19 nt, Artificial Sequence
  Description of Artificial Sequence: Synthetic oligonucleotide
ugcuaggagcccagugcca

SEQ ID NO: 1177783 - RNA, 19 nt, Artificial Sequence
  Description of Artificial Sequence: Synthetic oligonucleotide
auacagcugaugguguaga

SEQ ID NO: 1177784 - RNA, 19 nt, Artificial Sequence
  Description of Artificial Sequence: Synthetic oligonucleotide
ggaaaccuauggaugacac

SEQ ID NO: 1177785 - RNA, 19 nt, Artificial Sequence
  Description of Artificial Sequence: Synthetic oligonucleotide
aggagagagcagaaacaag

SEQ ID NO: 1177786 - RNA, 19 nt, Artificial Sequence
  Description of Artificial Sequence: Synthetic oligonucleotide
agacucgggaguguagugu

SEQ ID NO: 1177787 - RNA, 19 nt, Artificial Sequence
  Description of Artificial Sequence: Synthetic oligonucleotide
ucucgggugugaugccugc

SEQ ID NO: 1177788 - RNA, 19 nt, Artificial Sequence
  Description of Artificial Sequence: Synthetic oligonucleotide
cugggugugccuaccuuuc

SEQ ID NO: 1177789 - RNA, 19 nt, Artificial Sequence
  Description of Artificial Sequence: Synthetic oligonucleotide
cuggcaugccauucaugug

SEQ ID NO: 1177790 - RNA, 19 nt, Artificial Sequence
  Description of Artificial Sequence: Synthetic oligonucleotide
ggaguuaggccagaggaga

SEQ ID NO: 1177791 - RNA, 19 nt, Artificial Sequence
  Description of Artificial Sequence: Synthetic oligonucleotide
agaaagacucgggagugua

SEQ ID NO: 1177792 - RNA, 19 nt, Artificial Sequence
  Description of Artificial Sequence: Synthetic oligonucleotide
caaucaggcgauugggcaa

SEQ ID NO: 1177793 - RNA, 19 nt, Artificial Sequence
  Description of Artificial Sequence: Synthetic oligonucleotide
ggacccuggggucaaaguc

SEQ ID NO: 1177794 - RNA, 19 nt, Artificial Sequence
  Description of Artificial Sequence: Synthetic oligonucleotide
gcucauucagcuggaaagc

SEQ ID NO: 1177795 - RNA, 19 nt, Artificial Sequence
  Description of Artificial Sequence: Synthetic oligonucleotide
ggauaucaaaguaaaccaa

SEQ ID NO: 1177796 - RNA, 19 nt, Artificial Sequence
  Description of Artificial Sequence: Synthetic oligonucleotide
agcuuggcucaauguauaa

SEQ ID NO: 1177797 - RNA, 19 nt, Artificial Sequence
  Description of Artificial Sequence: Synthetic oligonucleotide
agacacaguucuguaacuu

SEQ ID NO: 1177798 - RNA, 19 nt, Artificial Sequence
  Description of Artificial Sequence: Synthetic oligonucleotide
caagcuuggcucaauguau

SEQ ID NO: 1177799 - RNA, 19 nt, Artificial Sequence
  Description of Artificial Sequence: Synthetic oligonucleotide
gcugaugguguagaggaac

SEQ ID NO: 1177800 - RNA, 19 nt, Artificial Sequence
  Description of Artificial Sequence: Synthetic oligonucleotide
guguccgugggaccacaag

SEQ ID NO: 1177801 - RNA, 19 nt, Artificial Sequence
  Description of Artificial Sequence: Synthetic oligonucleotide
cuaggagcccagugccaag

SEQ ID NO: 1177802 - RNA, 19 nt, Artificial Sequence
  Description of Artificial Sequence: Synthetic oligonucleotide
aguucuccccuggcaugcc

SEQ ID NO: 1177803 - RNA, 19 nt, Artificial Sequence
  Description of Artificial Sequence: Synthetic oligonucleotide
guguggaguguuaauuauc

SEQ ID NO: 1177804 - RNA, 19 nt, Artificial Sequence
  Description of Artificial Sequence: Synthetic oligonucleotide
gcuaagcuaguccccaaca

SEQ ID NO: 1177805 - RNA, 19 nt, Artificial Sequence
  Description of Artificial Sequence: Synthetic oligonucleotide
agaacgccgaggucccagu

SEQ ID NO: 1177806 - RNA, 19 nt, Artificial Sequence
  Description of Artificial Sequence: Synthetic oligonucleotide
aaguauguguggaguguua

SEQ ID NO: 1177807 - RNA, 19 nt, Artificial Sequence
  Description of Artificial Sequence: Synthetic oligonucleotide
aggcugaguggcuaagcua

SEQ ID NO: 1177808 - RNA, 19 nt, Artificial Sequence
  Description of Artificial Sequence: Synthetic oligonucleotide
ccaaagguccccagaugcc

SEQ ID NO: 1177809 - RNA, 19 nt, Artificial Sequence
  Description of Artificial Sequence: Synthetic oligonucleotide
ccgugggaccacaaggagg

SEQ ID NO: 1177810 - RNA, 19 nt, Artificial Sequence
  Description of Artificial Sequence: Synthetic oligonucleotide
gcgugaauucacgucgagg

SEQ ID NO: 1177811 - RNA, 19 nt, Artificial Sequence
  Description of Artificial Sequence: Synthetic oligonucleotide
cagugcuuugaaguugguc

SEQ ID NO: 1177812 - RNA, 19 nt, Artificial Sequence
  Description of Artificial Sequence: Synthetic oligonucleotide
acaagcccagauugguauu

SEQ ID NO: 1177813 - RNA, 19 nt, Artificial Sequence
  Description of Artificial Sequence: Synthetic oligonucleotide
guguguccgcccugcauac

SEQ ID NO: 1177814 - RNA, 19 nt, Artificial Sequence
  Description of Artificial Sequence: Synthetic oligonucleotide
cugaguggcuaagcuaguc

SEQ ID NO: 1177815 - RNA, 19 nt, Artificial Sequence
  Description of Artificial Sequence: Synthetic oligonucleotide
aauucacgucgagggcuga

SEQ ID NO: 1177816 - RNA, 19 nt, Artificial Sequence
  Description of Artificial Sequence: Synthetic oligonucleotide
cugucaauucaguuauagu

SEQ ID NO: 1177817 - RNA, 19 nt, Artificial Sequence
  Description of Artificial Sequence: Synthetic oligonucleotide
ucaggcgauugggcaaggc

SEQ ID NO: 1177818 - RNA, 19 nt, Artificial Sequence
  Description of Artificial Sequence: Synthetic oligonucleotide
acagucaguucacccgauu

SEQ ID NO: 1177819 - RNA, 19 nt, Artificial Sequence
  Description of Artificial Sequence: Synthetic oligonucleotide
guggcuaagcuagucccca

SEQ ID NO: 1177820 - RNA, 19 nt, Artificial Sequence
  Description of Artificial Sequence: Synthetic oligonucleotide
gaugccugcacaaguguau

SEQ ID NO: 1177821 - RNA, 19 nt, Artificial Sequence
  Description of Artificial Sequence: Synthetic oligonucleotide
guccgugggaccacaagga

SEQ ID NO: 1177822 - RNA, 19 nt, Artificial Sequence
  Description of Artificial Sequence: Synthetic oligonucleotide
cacccgauucugugugcag

SEQ ID NO: 1177823 - RNA, 19 nt, Artificial Sequence
  Description of Artificial Sequence: Synthetic oligonucleotide
augccagacagaacgccga

SEQ ID NO: 1177824 - RNA, 19 nt, Artificial Sequence
  Description of Artificial Sequence: Synthetic oligonucleotide
ggaggcacccaccauggaa

SEQ ID NO: 1177825 - RNA, 19 nt, Artificial Sequence
  Description of Artificial Sequence: Synthetic oligonucleotide
agucucgggugugaugccu

SEQ ID NO: 1177826 - RNA, 19 nt, Artificial Sequence
  Description of Artificial Sequence: Synthetic oligonucleotide
ggcugagcgugaauucacg

SEQ ID NO: 1177827 - RNA, 19 nt, Artificial Sequence
  Description of Artificial Sequence: Synthetic oligonucleotide
guuuugggguggaguuagg

SEQ ID NO: 1177828 - RNA, 19 nt, Artificial Sequence
  Description of Artificial Sequence: Synthetic oligonucleotide
guacaugcaauaggugcaa

SEQ ID NO: 1177829 - RNA, 19 nt, Artificial Sequence
  Description of Artificial Sequence: Synthetic oligonucleotide
gugugaugccugcacaagu

SEQ ID NO: 1177830 - RNA, 19 nt, Artificial Sequence
  Description of Artificial Sequence: Synthetic oligonucleotide
acuuggugauugucucaaa

SEQ ID NO: 1177831 - RNA, 19 nt, Artificial Sequence
  Description of Artificial Sequence: Synthetic oligonucleotide
ggcuaagcuaguccccaac

SEQ ID NO: 1177832 - RNA, 19 nt, Artificial Sequence
  Description of Artificial Sequence: Synthetic oligonucleotide
acgccgaggucccagucua

SEQ ID NO: 1177833 - RNA, 19 nt, Artificial Sequence
  Description of Artificial Sequence: Synthetic oligonucleotide
gaacgccgaggucccaguc

SEQ ID NO: 1177834 - RNA, 19 nt, Artificial Sequence
  Description of Artificial Sequence: Synthetic oligonucleotide
gggcugugauuacuuggag

SEQ ID NO: 1177835 - RNA, 19 nt, Artificial Sequence
  Description of Artificial Sequence: Synthetic oligonucleotide
cuaagcuaguccccaacau

SEQ ID NO: 1177836 - RNA, 19 nt, Artificial Sequence
  Description of Artificial Sequence: Synthetic oligonucleotide
ccagucugcgauguacagg

SEQ ID NO: 1177837 - RNA, 19 nt, Artificial Sequence
  Description of Artificial Sequence: Synthetic oligonucleotide
uggaggcacccaccaugga

SEQ ID NO: 1177838 - RNA, 19 nt, Artificial Sequence
  Description of Artificial Sequence: Synthetic oligonucleotide
cacgucgagggcugaagaa

SEQ ID NO: 1177839 - RNA, 19 nt, Artificial Sequence
  Description of Artificial Sequence: Synthetic oligonucleotide
ggaacaccagguguccgug

SEQ ID NO: 1177840 - RNA, 19 nt, Artificial Sequence
  Description of Artificial Sequence: Synthetic oligonucleotide
gagcgugaauucacgucga

SEQ ID NO: 1177841 - RNA, 19 nt, Artificial Sequence
  Description of Artificial Sequence: Synthetic oligonucleotide
cgauucugugugcagguug

SEQ ID NO: 1177842 - RNA, 19 nt, Artificial Sequence
  Description of Artificial Sequence: Synthetic oligonucleotide
ggacuguuggaaaccuaug

SEQ ID NO: 1177843 - RNA, 19 nt, Artificial Sequence
  Description of Artificial Sequence: Synthetic oligonucleotide
uauccaagcuuggcucaau

SEQ ID NO: 1177844 - RNA, 19 nt, Artificial Sequence
  Description of Artificial Sequence: Synthetic oligonucleotide
cauuagggccaaggcugag

SEQ ID NO: 1177845 - RNA, 19 nt, Artificial Sequence
  Description of Artificial Sequence: Synthetic oligonucleotide
gucucgggugugaugccug

SEQ ID NO: 1177846 - RNA, 19 nt, Artificial Sequence
  Description of Artificial Sequence: Synthetic oligonucleotide
ugagugcuaggagcccagu

SEQ ID NO: 1177847 - RNA, 19 nt, Artificial Sequence
  Description of Artificial Sequence: Synthetic oligonucleotide
cagagcccacuuacaaaga

SEQ ID NO: 1177848 - RNA, 19 nt, Artificial Sequence
  Description of Artificial Sequence: Synthetic oligonucleotide
guauguguggaguguuaau

SEQ ID NO: 1177849 - RNA, 19 nt, Artificial Sequence
  Description of Artificial Sequence: Synthetic oligonucleotide
caguuaagucgacaucugu

SEQ ID NO: 1177850 - RNA, 19 nt, Artificial Sequence
  Description of Artificial Sequence: Synthetic oligonucleotide
gagcccacuuacaaagagu

SEQ ID NO: 1177851 - RNA, 19 nt, Artificial Sequence
  Description of Artificial Sequence: Synthetic oligonucleotide
ggaagagaugacucuucua

SEQ ID NO: 1177852 - RNA, 19 nt, Artificial Sequence
  Description of Artificial Sequence: Synthetic oligonucleotide
aucaggcgauugggcaagg

SEQ ID NO: 1177853 - RNA, 19 nt, Artificial Sequence
  Description of Artificial Sequence: Synthetic oligonucleotide
gcggcgaggaguuggcuca

SEQ ID NO: 1177854 - RNA, 19 nt, Artificial Sequence
  Description of Artificial Sequence: Synthetic oligonucleotide
agccugggugugccuaccu

SEQ ID NO: 1177855 - RNA, 19 nt, Artificial Sequence
  Description of Artificial Sequence: Synthetic oligonucleotide
aguaugggauggagaaguu

SEQ ID NO: 1177856 - RNA, 19 nt, Artificial Sequence
  Description of Artificial Sequence: Synthetic oligonucleotide
aggucccagucuaccucac

SEQ ID NO: 1177857 - RNA, 19 nt, Artificial Sequence
  Description of Artificial Sequence: Synthetic oligonucleotide
gccagacagaacgccgagg

SEQ ID NO: 1177858 - RNA, 19 nt, Artificial Sequence
  Description of Artificial Sequence: Synthetic oligonucleotide
guuucucauuagggccaag

SEQ ID NO: 1177859 - RNA, 19 nt, Artificial Sequence
  Description of Artificial Sequence: Synthetic oligonucleotide
ggucaaagucucgggugug

SEQ ID NO: 1177860 - RNA, 19 nt, Artificial Sequence
  Description of Artificial Sequence: Synthetic oligonucleotide
aggcacccaccauggaauu

SEQ ID NO: 1177861 - RNA, 19 nt, Artificial Sequence
  Description of Artificial Sequence: Synthetic oligonucleotide
uguccggguccaggccccg

SEQ ID NO: 1177862 - RNA, 19 nt, Artificial Sequence
  Description of Artificial Sequence: Synthetic oligonucleotide
auucacgucgagggcugaa

SEQ ID NO: 1177863 - RNA, 19 nt, Artificial Sequence
  Description of Artificial Sequence: Synthetic oligonucleotide
guccgcccugcauacagcu

SEQ ID NO: 1177864 - RNA, 19 nt, Artificial Sequence
  Description of Artificial Sequence: Synthetic oligonucleotide
gugugccuaccuuucugcu

SEQ ID NO: 1177865 - RNA, 19 nt, Artificial Sequence
  Description of Artificial Sequence: Synthetic oligonucleotide
ccagacagaacgccgaggu

SEQ ID NO: 1177866 - RNA, 19 nt, Artificial Sequence
  Description of Artificial Sequence: Synthetic oligonucleotide
ggugggguagggaaacaaa

SEQ ID NO: 1177867 - RNA, 19 nt, Artificial Sequence
  Description of Artificial Sequence: Synthetic oligonucleotide
ggcgauugggcaaggcgca

SEQ ID NO: 1177868 - RNA, 19 nt, Artificial Sequence
  Description of Artificial Sequence: Synthetic oligonucleotide
gcuaguccccaacaucugu

SEQ ID NO: 1177869 - RNA, 19 nt, Artificial Sequence
  Description of Artificial Sequence: Synthetic oligonucleotide
cuauccaagcuuggcucaa

SEQ ID NO: 1177870 - RNA, 19 nt, Artificial Sequence
  Description of Artificial Sequence: Synthetic oligonucleotide
gggcugagcgugaauucac

SEQ ID NO: 1177871 - RNA, 19 nt, Artificial Sequence
  Description of Artificial Sequence: Synthetic oligonucleotide
gcugagcgugaauucacgu

SEQ ID NO: 1177872 - RNA, 19 nt, Artificial Sequence
  Description of Artificial Sequence: Synthetic oligonucleotide
ggcaugccauucaugugga

SEQ ID NO: 1177873 - RNA, 19 nt, Artificial Sequence
  Description of Artificial Sequence: Synthetic oligonucleotide
gcaauaggugcaacccaga

SEQ ID NO: 1177874 - RNA, 19 nt, Artificial Sequence
  Description of Artificial Sequence: Synthetic oligonucleotide
gcuaggagcccagugccaa

SEQ ID NO: 1177875 - RNA, 19 nt, Artificial Sequence
  Description of Artificial Sequence: Synthetic oligonucleotide
cuguccccaaugagccaga

SEQ ID NO: 1177876 - RNA, 19 nt, Artificial Sequence
  Description of Artificial Sequence: Synthetic oligonucleotide
agguguccgugggaccaca

SEQ ID NO: 1177877 - RNA, 19 nt, Artificial Sequence
  Description of Artificial Sequence: Synthetic oligonucleotide
ggucaggccaaaaguacau

SEQ ID NO: 1177878 - RNA, 19 nt, Artificial Sequence
  Description of Artificial Sequence: Synthetic oligonucleotide
ccgggcugagcgugaauuc

SEQ ID NO: 1177879 - RNA, 19 nt, Artificial Sequence
  Description of Artificial Sequence: Synthetic oligonucleotide
cagguguccgugggaccac

SEQ ID NO: 1177880 - RNA, 19 nt, Artificial Sequence
  Description of Artificial Sequence: Synthetic oligonucleotide
gcagcggcgaggaguuggc

SEQ ID NO: 1177881 - RNA, 19 nt, Artificial Sequence
  Description of Artificial Sequence: Synthetic oligonucleotide
cuuggagcugaagcaacuu

SEQ ID NO: 1177882 - RNA, 19 nt, Artificial Sequence
  Description of Artificial Sequence: Synthetic oligonucleotide
caaggcgcaugugcacaga

SEQ ID NO: 1177883 - RNA, 19 nt, Artificial Sequence
  Description of Artificial Sequence: Synthetic oligonucleotide
guggacuguuggaaaccua

SEQ ID NO: 1177884 - RNA, 19 nt, Artificial Sequence
  Description of Artificial Sequence: Synthetic oligonucleotide
cccuggggucaaagucucg

SEQ ID NO: 1177885 - RNA, 19 nt, Artificial Sequence
  Description of Artificial Sequence: Synthetic oligonucleotide
ccacuuuaacugcuuauuu

SEQ ID NO: 1177886 - RNA, 19 nt, Artificial Sequence
  Description of Artificial Sequence: Synthetic oligonucleotide
caacuuucuccugcccagu

SEQ ID NO: 1177887 - RNA, 19 nt, Artificial Sequence
  Description of Artificial Sequence: Synthetic oligonucleotide
ccugcacaaguguauguuu

SEQ ID NO: 1177888 - RNA, 19 nt, Artificial Sequence
  Description of Artificial Sequence: Synthetic oligonucleotide
cccgauucugugugcaggu

SEQ ID NO: 1177889 - RNA, 19 nt, Artificial Sequence
  Description of Artificial Sequence: Synthetic oligonucleotide
ggaauugcacuuggugauu

SEQ ID NO: 1177890 - RNA, 19 nt, Artificial Sequence
  Description of Artificial Sequence: Synthetic oligonucleotide
guccggguccaggccccgc

SEQ ID NO: 1177891 - RNA, 19 nt, Artificial Sequence
  Description of Artificial Sequence: Synthetic oligonucleotide
gcgcaugugcacagacaga

SEQ ID NO: 1177892 - RNA, 19 nt, Artificial Sequence
  Description of Artificial Sequence: Synthetic oligonucleotide
cgggcugagcgugaauuca

SEQ ID NO: 1177893 - RNA, 19 nt, Artificial Sequence
  Description of Artificial Sequence: Synthetic oligonucleotide
gguguccgugggaccacaa

SEQ ID NO: 1177894 - RNA, 19 nt, Artificial Sequence
  Description of Artificial Sequence: Synthetic oligonucleotide
cugcgauguacaggagaau

SEQ ID NO: 1177895 - RNA, 19 nt, Artificial Sequence
  Description of Artificial Sequence: Synthetic oligonucleotide
ccgaggucccagucuaccu

SEQ ID NO: 1177896 - RNA, 19 nt, Artificial Sequence
  Description of Artificial Sequence: Synthetic oligonucleotide
ggcgaggaguuggcucaga

SEQ ID NO: 1177897 - RNA, 19 nt, Artificial Sequence
  Description of Artificial Sequence: Synthetic oligonucleotide
cgccgaggucccagucuac

SEQ ID NO: 1177898 - RNA, 19 nt, Artificial Sequence
  Description of Artificial Sequence: Synthetic oligonucleotide
ccauccagucugcgaugua

SEQ ID NO: 1177899 - RNA, 19 nt, Artificial Sequence
  Description of Artificial Sequence: Synthetic oligonucleotide
cgggaguguaguguagggu

SEQ ID NO: 1177900 - RNA, 19 nt, Artificial Sequence
  Description of Artificial Sequence: Synthetic oligonucleotide
cagcggcgaggaguuggcu

SEQ ID NO: 1177901 - RNA, 19 nt, Artificial Sequence
  Description of Artificial Sequence: Synthetic oligonucleotide
gggcagcggcgaggaguug

SEQ ID NO: 1177902 - RNA, 19 nt, Artificial Sequence
  Description of Artificial Sequence: Synthetic oligonucleotide
gcgauugggcaaggcgcau

SEQ ID NO: 1177903 - RNA, 19 nt, Artificial Sequence
  Description of Artificial Sequence: Synthetic oligonucleotide
aauguagucauacagggac

SEQ ID NO: 1177904 - RNA, 19 nt, Artificial Sequence
  Description of Artificial Sequence: Synthetic oligonucleotide
uuaauguagucauacaggg

SEQ ID NO: 1177905 - RNA, 19 nt, Artificial Sequence
  Description of Artificial Sequence: Synthetic oligonucleotide
uguuaauguagucauacag

SEQ ID NO: 1177906 - RNA, 19 nt, Artificial Sequence
  Description of Artificial Sequence: Synthetic oligonucleotide
aaacccaucugacucaagc

SEQ ID NO: 1177907 - RNA, 19 nt, Artificial Sequence
  Description of Artificial Sequence: Synthetic oligonucleotide
uuaaaauggaugaugugcc

SEQ ID NO: 1177908 - RNA, 19 nt, Artificial Sequence
  Description of Artificial Sequence: Synthetic oligonucleotide
aacacaucgucuucagucc

SEQ ID NO: 1177909 - RNA, 19 nt, Artificial Sequence
  Description of Artificial Sequence: Synthetic oligonucleotide
uaaacaagcuugcauaccc

SEQ ID NO: 1177910 - RNA, 19 nt, Artificial Sequence
  Description of Artificial Sequence: Synthetic oligonucleotide
gauagcugacuuaaaaugg

SEQ ID NO: 1177911 - RNA, 19 nt, Artificial Sequence
  Description of Artificial Sequence: Synthetic oligonucleotide
agaugagugaggcacuugc

SEQ ID NO: 1177912 - RNA, 19 nt, Artificial Sequence
  Description of Artificial Sequence: Synthetic oligonucleotide
ugugauauccauuuggcuc

SEQ ID NO: 1177913 - RNA, 19 nt, Artificial Sequence
  Description of Artificial Sequence: Synthetic oligonucleotide
aauccuuaauuaguggugg

SEQ ID NO: 1177914 - RNA, 19 nt, Artificial Sequence
  Description of Artificial Sequence: Synthetic oligonucleotide
ucuauuuugaguagcuucu

SEQ ID NO: 1177915 - RNA, 19 nt, Artificial Sequence
  Description of Artificial Sequence: Synthetic oligonucleotide
augauauuuuaucacaaug

SEQ ID NO: 1177916 - RNA, 19 nt, Artificial Sequence
  Description of Artificial Sequence: Synthetic oligonucleotide
agaaucaccccauaaaacu

SEQ ID NO: 1177917 - RNA, 19 nt, Artificial Sequence
  Description of Artificial Sequence: Synthetic oligonucleotide
aacgcuguagaguagugug

SEQ ID NO: 1177918 - RNA, 19 nt, Artificial Sequence
  Description of Artificial Sequence: Synthetic oligonucleotide
uauccuaaaguccauugca

SEQ ID NO: 1177919 - RNA, 19 nt, Artificial Sequence
  Description of Artificial Sequence: Synthetic oligonucleotide
uuuggcucgauaaacacuc

SEQ ID NO: 1177920 - RNA, 19 nt, Artificial Sequence
  Description of Artificial Sequence: Synthetic oligonucleotide
guuaauguagucauacagg

SEQ ID NO: 1177921 - RNA, 19 nt, Artificial Sequence
  Description of Artificial Sequence: Synthetic oligonucleotide
aguagugcaucccuuuggc

SEQ ID NO: 1177922 - RNA, 19 nt, Artificial Sequence
  Description of Artificial Sequence: Synthetic oligonucleotide
aaauaaagggucacgccac

SEQ ID NO: 1177923 - RNA, 19 nt, Artificial Sequence
  Description of Artificial Sequence: Synthetic oligonucleotide
uggaaaacccaucugacuc

SEQ ID NO: 1177924 - RNA, 19 nt, Artificial Sequence
  Description of Artificial Sequence: Synthetic oligonucleotide
uuuauccuaaaguccauug

SEQ ID NO: 1177925 - RNA, 19 nt, Artificial Sequence
  Description of Artificial Sequence: Synthetic oligonucleotide
ucgauaaacacucccaaaa

SEQ ID NO: 1177926 - RNA, 19 nt, Artificial Sequence
  Description of Artificial Sequence: Synthetic oligonucleotide
auggacaaaucccaaauug

SEQ ID NO: 1177927 - RNA, 19 nt, Artificial Sequence
  Description of Artificial Sequence: Synthetic oligonucleotide
ugaauccuuaauuaguggu

SEQ ID NO: 1177928 - RNA, 19 nt, Artificial Sequence
  Description of Artificial Sequence: Synthetic oligonucleotide
aguagugugggaugcaauc

SEQ ID NO: 1177929 - RNA, 19 nt, Artificial Sequence
  Description of Artificial Sequence: Synthetic oligonucleotide
ucuagaauggccugugggc

SEQ ID NO: 1177930 - RNA, 19 nt, Artificial Sequence
  Description of Artificial Sequence: Synthetic oligonucleotide
acuaacaggguugagauga

SEQ ID NO: 1177931 - RNA, 19 nt, Artificial Sequence
  Description of Artificial Sequence: Synthetic oligonucleotide
aauaaagggucacgccacg

SEQ ID NO: 1177932 - RNA, 19 nt, Artificial Sequence
  Description of Artificial Sequence: Synthetic oligonucleotide
uuauccuaaaguccauugc

SEQ ID NO: 1177933 - RNA, 19 nt, Artificial Sequence
  Description of Artificial Sequence: Synthetic oligonucleotide
aagagucaccuuuucugac

SEQ ID NO: 1177934 - RNA, 19 nt, Artificial Sequence
  Description of Artificial Sequence: Synthetic oligonucleotide
cuugagucagaucugcugc

SEQ ID NO: 1177935 - RNA, 19 nt, Artificial Sequence
  Description of Artificial Sequence: Synthetic oligonucleotide
gaugcaaucugccgcaggc

SEQ ID NO: 1177936 - RNA, 19 nt, Artificial Sequence
  Description of Artificial Sequence: Synthetic oligonucleotide
aauuguaaauaaaggguca

SEQ ID NO: 1177937 - RNA, 19 nt, Artificial Sequence
  Description of Artificial Sequence: Synthetic oligonucleotide
auaacgacauuucuugacu

SEQ ID NO: 1177938 - RNA, 19 nt, Artificial Sequence
  Description of Artificial Sequence: Synthetic oligonucleotide
ucugacgagcugcugaacc

SEQ ID NO: 1177939 - RNA, 19 nt, Artificial Sequence
  Description of Artificial Sequence: Synthetic oligonucleotide
aaacagguucagguaaucg

SEQ ID NO: 1177940 - RNA, 19 nt, Artificial Sequence
  Description of Artificial Sequence: Synthetic oligonucleotide
uccuugcuaguuuuggccg

SEQ ID NO: 1177941 - RNA, 19 nt, Artificial Sequence
  Description of Artificial Sequence: Synthetic oligonucleotide
gcaauaacgacauuucuug

SEQ ID NO: 1177942 - RNA, 19 nt, Artificial Sequence
  Description of Artificial Sequence: Synthetic oligonucleotide
aaauggaugaugugccccu

SEQ ID NO: 1177943 - RNA, 19 nt, Artificial Sequence
  Description of Artificial Sequence: Synthetic oligonucleotide
ucugacucaagccaucaaa

SEQ ID NO: 1177944 - RNA, 19 nt, Artificial Sequence
  Description of Artificial Sequence: Synthetic oligonucleotide
cucuauuuugaguagcuuc

SEQ ID NO: 1177945 - RNA, 19 nt, Artificial Sequence
  Description of Artificial Sequence: Synthetic oligonucleotide
aacgacauuucuugacuug

SEQ ID NO: 1177946 - RNA, 19 nt, Artificial Sequence
  Description of Artificial Sequence: Synthetic oligonucleotide
uuaauuaguggugggaagu

SEQ ID NO: 1177947 - RNA, 19 nt, Artificial Sequence
  Description of Artificial Sequence: Synthetic oligonucleotide
aaaucccucagcaaucaag

SEQ ID NO: 1177948 - RNA, 19 nt, Artificial Sequence
  Description of Artificial Sequence: Synthetic oligonucleotide
ugugggaugcaaucugccg

SEQ ID NO: 1177949 - RNA, 19 nt, Artificial Sequence
  Description of Artificial Sequence: Synthetic oligonucleotide
ugcauacccacucaucucu

SEQ ID NO: 1177950 - RNA, 19 nt, Artificial Sequence
  Description of Artificial Sequence: Synthetic oligonucleotide
cuuaauuaguggugggaag

SEQ ID NO: 1177951 - RNA, 19 nt, Artificial Sequence
  Description of Artificial Sequence: Synthetic oligonucleotide
acaucgguggcccagguca

SEQ ID NO: 1177952 - RNA, 19 nt, Artificial Sequence
  Description of Artificial Sequence: Synthetic oligonucleotide
uccauguguaaguagugca

SEQ ID NO: 1177953 - RNA, 19 nt, Artificial Sequence
  Description of Artificial Sequence: Synthetic oligonucleotide
uguagaguagugugggaug

SEQ ID NO: 1177954 - RNA, 19 nt, Artificial Sequence
  Description of Artificial Sequence: Synthetic oligonucleotide
aguccaugcacacuccauc

SEQ ID NO: 1177955 - RNA, 19 nt, Artificial Sequence
  Description of Artificial Sequence: Synthetic oligonucleotide
gucuagaauggccuguggg

SEQ ID NO: 1177956 - RNA, 19 nt, Artificial Sequence
  Description of Artificial Sequence: Synthetic oligonucleotide
uaaaauggaugaugugccc

SEQ ID NO: 1177957 - RNA, 19 nt, Artificial Sequence
  Description of Artificial Sequence: Synthetic oligonucleotide
gaauccuuaauuaguggug

SEQ ID NO: 1177958 - RNA, 19 nt, Artificial Sequence
  Description of Artificial Sequence: Synthetic oligonucleotide
cccaaauuguaaauaaagg

SEQ ID NO: 1177959 - RNA, 19 nt, Artificial Sequence
  Description of Artificial Sequence: Synthetic oligonucleotide
agaaccggcuuggaaaacc

SEQ ID NO: 1177960 - RNA, 19 nt, Artificial Sequence
  Description of Artificial Sequence: Synthetic oligonucleotide
ugguccugggcacacgacg

SEQ ID NO: 1177961 - RNA, 19 nt, Artificial Sequence
  Description of Artificial Sequence: Synthetic oligonucleotide
ucgucuucaguccaugcac

SEQ ID NO: 1177962 - RNA, 19 nt, Artificial Sequence
  Description of Artificial Sequence: Synthetic oligonucleotide
accccauaaaacuggauga

SEQ ID NO: 1177963 - RNA, 19 nt, Artificial Sequence
  Description of Artificial Sequence: Synthetic oligonucleotide
guaaucgugggccagcuuc

SEQ ID NO: 1177964 - RNA, 19 nt, Artificial Sequence
  Description of Artificial Sequence: Synthetic oligonucleotide
uaaauacuaacaggguuga

SEQ ID NO: 1177965 - RNA, 19 nt, Artificial Sequence
  Description of Artificial Sequence: Synthetic oligonucleotide
aaaacaaguucaagguuca

SEQ ID NO: 1177966 - RNA, 19 nt, Artificial Sequence
  Description of Artificial Sequence: Synthetic oligonucleotide
uccuaaaguccauugcaca

SEQ ID NO: 1177967 - RNA, 19 nt, Artificial Sequence
  Description of Artificial Sequence: Synthetic oligonucleotide
cuccuugcuaguuuuggcc

SEQ ID NO: 1177968 - RNA, 19 nt, Artificial Sequence
  Description of Artificial Sequence: Synthetic oligonucleotide
guucagguaaucgugggcc

SEQ ID NO: 1177969 - RNA, 19 nt, Artificial Sequence
  Description of Artificial Sequence: Synthetic oligonucleotide
gaaucaccccauaaaacug

SEQ ID NO: 1177970 - RNA, 19 nt, Artificial Sequence
  Description of Artificial Sequence: Synthetic oligonucleotide
cauccaaaagcagcaaccg

SEQ ID NO: 1177971 - RNA, 19 nt, Artificial Sequence
  Description of Artificial Sequence: Synthetic oligonucleotide
ucaccuuuucugacgagcu

SEQ ID NO: 1177972 - RNA, 19 nt, Artificial Sequence
  Description of Artificial Sequence: Synthetic oligonucleotide
uagugugggaugcaaucug

SEQ ID NO: 1177973 - RNA, 19 nt, Artificial Sequence
  Description of Artificial Sequence: Synthetic oligonucleotide
uuggaaaacccaucugacu

SEQ ID NO: 1177974 - RNA, 19 nt, Artificial Sequence
  Description of Artificial Sequence: Synthetic oligonucleotide
uucucgauagcugacuuaa

SEQ ID NO: 1177975 - RNA, 19 nt, Artificial Sequence
  Description of Artificial Sequence: Synthetic oligonucleotide
uccauuuggcucgauaaac

SEQ ID NO: 1177976 - RNA, 19 nt, Artificial Sequence
  Description of Artificial Sequence: Synthetic oligonucleotide
guccauugcacaaccaccg

SEQ ID NO: 1177977 - RNA, 19 nt, Artificial Sequence
  Description of Artificial Sequence: Synthetic oligonucleotide
acggucaucggucugagua

SEQ ID NO: 1177978 - RNA, 19 nt, Artificial Sequence
  Description of Artificial Sequence: Synthetic oligonucleotide
cuagaauggccugugggcc

SEQ ID NO: 1177979 - RNA, 19 nt, Artificial Sequence
  Description of Artificial Sequence: Synthetic oligonucleotide
aguccagccuccuucgcuc

SEQ ID NO: 1177980 - RNA, 19 nt, Artificial Sequence
  Description of Artificial Sequence: Synthetic oligonucleotide
uccgauacuccacuuuagu

SEQ ID NO: 1177981 - RNA, 19 nt, Artificial Sequence
  Description of Artificial Sequence: Synthetic oligonucleotide
accuuuauccuaaagucca

SEQ ID NO: 1177982 - RNA, 19 nt, Artificial Sequence
  Description of Artificial Sequence: Synthetic oligonucleotide
uaauuaguggugggaagug

SEQ ID NO: 1177983 - RNA, 19 nt, Artificial Sequence
  Description of Artificial Sequence: Synthetic oligonucleotide
caucuuggaaccucagaug

SEQ ID NO: 1177984 - RNA, 19 nt, Artificial Sequence
  Description of Artificial Sequence: Synthetic oligonucleotide
auccuuaauuagugguggg

SEQ ID NO: 1177985 - RNA, 19 nt, Artificial Sequence
  Description of Artificial Sequence: Synthetic oligonucleotide
gagggugucuaaccacugg

SEQ ID NO: 1177986 - RNA, 19 nt, Artificial Sequence
  Description of Artificial Sequence: Synthetic oligonucleotide
aauuaguggugggaaguga

SEQ ID NO: 1177987 - RNA, 19 nt, Artificial Sequence
  Description of Artificial Sequence: Synthetic oligonucleotide
ccgaguuaggaaaauacag

SEQ ID NO: 1177988 - RNA, 19 nt, Artificial Sequence
  Description of Artificial Sequence: Synthetic oligonucleotide
uggcucgauaaacacuccc

SEQ ID NO: 1177989 - RNA, 19 nt, Artificial Sequence
  Description of Artificial Sequence: Synthetic oligonucleotide
uugaccggagccuccaugu

SEQ ID NO: 1177990 - RNA, 19 nt, Artificial Sequence
  Description of Artificial Sequence: Synthetic oligonucleotide
acugaggacgcucaguauu

SEQ ID NO: 1177991 - RNA, 19 nt, Artificial Sequence
  Description of Artificial Sequence: Synthetic oligonucleotide
ucaucggucugaguagcgg

SEQ ID NO: 1177992 - RNA, 19 nt, Artificial Sequence
  Description of Artificial Sequence: Synthetic oligonucleotide
aaacaaguucaagguucac

SEQ ID NO: 1177993 - RNA, 19 nt, Artificial Sequence
  Description of Artificial Sequence: Synthetic oligonucleotide
aucgucuucaguccaugca

SEQ ID NO: 1177994 - RNA, 19 nt, Artificial Sequence
  Description of Artificial Sequence: Synthetic oligonucleotide
acucaagccaucaaaaguu

SEQ ID NO: 1177995 - RNA, 19 nt, Artificial Sequence
  Description of Artificial Sequence: Synthetic oligonucleotide
uuuggccggaaguugccug

SEQ ID NO: 1177996 - RNA, 19 nt, Artificial Sequence
  Description of Artificial Sequence: Synthetic oligonucleotide
cugacgagcugcugaaccc

SEQ ID NO: 1177997 - RNA, 19 nt, Artificial Sequence
  Description of Artificial Sequence: Synthetic oligonucleotide
cuaaccacuggcaguccgc

SEQ ID NO: 1177998 - RNA, 19 nt, Artificial Sequence
  Description of Artificial Sequence: Synthetic oligonucleotide
ugggaugcaaucugccgca

SEQ ID NO: 1177999 - RNA, 19 nt, Artificial Sequence
  Description of Artificial Sequence: Synthetic oligonucleotide
agggucacgccacggugcc

SEQ ID NO: 1178000 - RNA, 19 nt, Artificial Sequence
  Description of Artificial Sequence: Synthetic oligonucleotide
uccuuaauuagugguggga

SEQ ID NO: 1178001 - RNA, 19 nt, Artificial Sequence
  Description of Artificial Sequence: Synthetic oligonucleotide
caucggucugaguagcggc

SEQ ID NO: 1178002 - RNA, 19 nt, Artificial Sequence
  Description of Artificial Sequence: Synthetic oligonucleotide
uuucugacgagcugcugaa

SEQ ID NO: 1178003 - RNA, 19 nt, Artificial Sequence
  Description of Artificial Sequence: Synthetic oligonucleotide
cacacgacggucaucgguc

SEQ ID NO: 1178004 - RNA, 19 nt, Artificial Sequence
  Description of Artificial Sequence: Synthetic oligonucleotide
guagaguagugugggaugc

SEQ ID NO: 1178005 - RNA, 19 nt, Artificial Sequence
  Description of Artificial Sequence: Synthetic oligonucleotide
uuaguggugggaagugaaa

SEQ ID NO: 1178006 - RNA, 19 nt, Artificial Sequence
  Description of Artificial Sequence: Synthetic oligonucleotide
uaaucgugggccagcuucu

SEQ ID NO: 1178007 - RNA, 19 nt, Artificial Sequence
  Description of Artificial Sequence: Synthetic oligonucleotide
ugcuaguuuuggccggaag

SEQ ID NO: 1178008 - RNA, 19 nt, Artificial Sequence
  Description of Artificial Sequence: Synthetic oligonucleotide
ucucuacugaagagucacc

SEQ ID NO: 1178009 - RNA, 19 nt, Artificial Sequence
  Description of Artificial Sequence: Synthetic oligonucleotide
uagucauacagggacccca

SEQ ID NO: 1178010 - RNA, 19 nt, Artificial Sequence
  Description of Artificial Sequence: Synthetic oligonucleotide
agucuagaauggccugugg

SEQ ID NO: 1178011 - RNA, 19 nt, Artificial Sequence
  Description of Artificial Sequence: Synthetic oligonucleotide
ugccuugggcacaaaauuu

SEQ ID NO: 1178012 - RNA, 19 nt, Artificial Sequence
  Description of Artificial Sequence: Synthetic oligonucleotide
guccgaguuaggaaaauac

SEQ ID NO: 1178013 - RNA, 19 nt, Artificial Sequence
  Description of Artificial Sequence: Synthetic oligonucleotide
uucagguaaucgugggcca

SEQ ID NO: 1178014 - RNA, 19 nt, Artificial Sequence
  Description of Artificial Sequence: Synthetic oligonucleotide
aagcuugcauacccacuca

SEQ ID NO: 1178015 - RNA, 19 nt, Artificial Sequence
  Description of Artificial Sequence: Synthetic oligonucleotide
cgauagcugacuuaaaaug

SEQ ID NO: 1178016 - RNA, 19 nt, Artificial Sequence
  Description of Artificial Sequence: Synthetic oligonucleotide
gaugagugaggcacuugcc

SEQ ID NO: 1178017 - RNA, 19 nt, Artificial Sequence
  Description of Artificial Sequence: Synthetic oligonucleotide
gucaccuuuucugacgagc

SEQ ID NO: 1178018 - RNA, 19 nt, Artificial Sequence
  Description of Artificial Sequence: Synthetic oligonucleotide
aucggucugaguagcggcc

SEQ ID NO: 1178019 - RNA, 19 nt, Artificial Sequence
  Description of Artificial Sequence: Synthetic oligonucleotide
cauauucugugacgaugcc

SEQ ID NO: 1178020 - RNA, 19 nt, Artificial Sequence
  Description of Artificial Sequence: Synthetic oligonucleotide
agcaauaacgacauuucuu

SEQ ID NO: 1178021 - RNA, 19 nt, Artificial Sequence
  Description of Artificial Sequence: Synthetic oligonucleotide
ucuuccgauacuccacuuu

SEQ ID NO: 1178022 - RNA, 19 nt, Artificial Sequence
  Description of Artificial Sequence: Synthetic oligonucleotide
aggugcaaggaggagaagu

SEQ ID NO: 1178023 - RNA, 19 nt, Artificial Sequence
  Description of Artificial Sequence: Synthetic oligonucleotide
aaaaucccucagcaaucaa

SEQ ID NO: 1178024 - RNA, 19 nt, Artificial Sequence
  Description of Artificial Sequence: Synthetic oligonucleotide
uaguccagccuccuucgcu

SEQ ID NO: 1178025 - RNA, 19 nt, Artificial Sequence
  Description of Artificial Sequence: Synthetic oligonucleotide
uaacgacauuucuugacuu

SEQ ID NO: 1178026 - RNA, 19 nt, Artificial Sequence
  Description of Artificial Sequence: Synthetic oligonucleotide
agggaagcauauucuguga

SEQ ID NO: 1178027 - RNA, 19 nt, Artificial Sequence
  Description of Artificial Sequence: Synthetic oligonucleotide
ucucaccgcggcagcauag

SEQ ID NO: 1178028 - RNA, 19 nt, Artificial Sequence
  Description of Artificial Sequence: Synthetic oligonucleotide
uggcaguccgcacuugagu

SEQ ID NO: 1178029 - RNA, 19 nt, Artificial Sequence
  Description of Artificial Sequence: Synthetic oligonucleotide
cucgauagcugacuuaaaa

SEQ ID NO: 1178030 - RNA, 19 nt, Artificial Sequence
  Description of Artificial Sequence: Synthetic oligonucleotide
ucgugggccagcuucucga

SEQ ID NO: 1178031 - RNA, 19 nt, Artificial Sequence
  Description of Artificial Sequence: Synthetic oligonucleotide
acgacauuucuugacuuga

SEQ ID NO: 1178032 - RNA, 19 nt, Artificial Sequence
  Description of Artificial Sequence: Synthetic oligonucleotide
gaaccggcuuggaaaaccc

SEQ ID NO: 1178033 - RNA, 19 nt, Artificial Sequence
  Description of Artificial Sequence: Synthetic oligonucleotide
uuccugugacugaggacgc

SEQ ID NO: 1178034 - RNA, 19 nt, Artificial Sequence
  Description of Artificial Sequence: Synthetic oligonucleotide
uucgccguccgaguuagga

SEQ ID NO: 1178035 - RNA, 19 nt, Artificial Sequence
  Description of Artificial Sequence: Synthetic oligonucleotide
caucgucuucaguccaugc

SEQ ID NO: 1178036 - RNA, 19 nt, Artificial Sequence
  Description of Artificial Sequence: Synthetic oligonucleotide
gggcacacgacggucaucg

SEQ ID NO: 1178037 - RNA, 19 nt, Artificial Sequence
  Description of Artificial Sequence: Synthetic oligonucleotide
uugcauacccacucaucuc

SEQ ID NO: 1178038 - RNA, 19 nt, Artificial Sequence
  Description of Artificial Sequence: Synthetic oligonucleotide
cuaacaggguugagaugag

SEQ ID NO: 1178039 - RNA, 19 nt, Artificial Sequence
  Description of Artificial Sequence: Synthetic oligonucleotide
ugugagucuucuuccgaua

SEQ ID NO: 1178040 - RNA, 19 nt, Artificial Sequence
  Description of Artificial Sequence: Synthetic oligonucleotide
aggacgcucaguauuucag

SEQ ID NO: 1178041 - RNA, 19 nt, Artificial Sequence
  Description of Artificial Sequence: Synthetic oligonucleotide
augaugugauccaugucca

SEQ ID NO: 1178042 - RNA, 19 nt, Artificial Sequence
  Description of Artificial Sequence: Synthetic oligonucleotide
uuggcucgauaaacacucc

SEQ ID NO: 1178043 - RNA, 19 nt, Artificial Sequence
  Description of Artificial Sequence: Synthetic oligonucleotide
ucgccugcucuggagacag

SEQ ID NO: 1178044 - RNA, 19 nt, Artificial Sequence
  Description of Artificial Sequence: Synthetic oligonucleotide
ugacgagcugcugaaccca

SEQ ID NO: 1178045 - RNA, 19 nt, Artificial Sequence
  Description of Artificial Sequence: Synthetic oligonucleotide
ucucggaggagcugucggu

SEQ ID NO: 1178046 - RNA, 19 nt, Artificial Sequence
  Description of Artificial Sequence: Synthetic oligonucleotide
aguugccccucguucucuc

SEQ ID NO: 1178047 - RNA, 19 nt, Artificial Sequence
  Description of Artificial Sequence: Synthetic oligonucleotide
uuccuuaaacaagcuugca

SEQ ID NO: 1178048 - RNA, 19 nt, Artificial Sequence
  Description of Artificial Sequence: Synthetic oligonucleotide
ugggaacgcuguagaguag

SEQ ID NO: 1178049 - RNA, 19 nt, Artificial Sequence
  Description of Artificial Sequence: Synthetic oligonucleotide
gucggggaggagcuccugg

SEQ ID NO: 1178050 - RNA, 19 nt, Artificial Sequence
  Description of Artificial Sequence: Synthetic oligonucleotide
agaucucuguggaucaccu

SEQ ID NO: 1178051 - RNA, 19 nt, Artificial Sequence
  Description of Artificial Sequence: Synthetic oligonucleotide
cuuggaaccucagaugaaa

SEQ ID NO: 1178052 - RNA, 19 nt, Artificial Sequence
  Description of Artificial Sequence: Synthetic oligonucleotide
cuucgccugcucuggagac

SEQ ID NO: 1178053 - RNA, 19 nt, Artificial Sequence
  Description of Artificial Sequence: Synthetic oligonucleotide
ggaaaacccaucugacuca

SEQ ID NO: 1178054 - RNA, 19 nt, Artificial Sequence
  Description of Artificial Sequence: Synthetic oligonucleotide
acagucuagaauggccugu

SEQ ID NO: 1178055 - RNA, 19 nt, Artificial Sequence
  Description of Artificial Sequence: Synthetic oligonucleotide
acgcuguagaguagugugg

SEQ ID NO: 1178056 - RNA, 19 nt, Artificial Sequence
  Description of Artificial Sequence: Synthetic oligonucleotide
aaguuccuccgcccgcggu

SEQ ID NO: 1178057 - RNA, 19 nt, Artificial Sequence
  Description of Artificial Sequence: Synthetic oligonucleotide
ugcuguuaauguagucaua

SEQ ID NO: 1178058 - RNA, 19 nt, Artificial Sequence
  Description of Artificial Sequence: Synthetic oligonucleotide
uuuuggccggaaguugccu

SEQ ID NO: 1178059 - RNA, 19 nt, Artificial Sequence
  Description of Artificial Sequence: Synthetic oligonucleotide
guaugggaagaaaggggac

SEQ ID NO: 1178060 - RNA, 19 nt, Artificial Sequence
  Description of Artificial Sequence: Synthetic oligonucleotide
cucgauaaacacucccaaa

SEQ ID NO: 1178061 - RNA, 19 nt, Artificial Sequence
  Description of Artificial Sequence: Synthetic oligonucleotide
ucaccgcggcagcauagga

SEQ ID NO: 1178062 - RNA, 19 nt, Artificial Sequence
  Description of Artificial Sequence: Synthetic oligonucleotide
ugaugugauccauguccau

SEQ ID NO: 1178063 - RNA, 19 nt, Artificial Sequence
  Description of Artificial Sequence: Synthetic oligonucleotide
ggcaguccgcacuugaguc

SEQ ID NO: 1178064 - RNA, 19 nt, Artificial Sequence
  Description of Artificial Sequence: Synthetic oligonucleotide
ucucgauagcugacuuaaa

SEQ ID NO: 1178065 - RNA, 19 nt, Artificial Sequence
  Description of Artificial Sequence: Synthetic oligonucleotide
uacaucgguggcccagguc

SEQ ID NO: 1178066 - RNA, 19 nt, Artificial Sequence
  Description of Artificial Sequence: Synthetic oligonucleotide
caguccgcacuugagucag

SEQ ID NO: 1178067 - RNA, 19 nt, Artificial Sequence
  Description of Artificial Sequence: Synthetic oligonucleotide
guacuucacgggcgucugg

SEQ ID NO: 1178068 - RNA, 19 nt, Artificial Sequence
  Description of Artificial Sequence: Synthetic oligonucleotide
acaagcuugcauacccacu

SEQ ID NO: 1178069 - RNA, 19 nt, Artificial Sequence
  Description of Artificial Sequence: Synthetic oligonucleotide
ucggucugaguagcggccc

SEQ ID NO: 1178070 - RNA, 19 nt, Artificial Sequence
  Description of Artificial Sequence: Synthetic oligonucleotide
gguccugggcacacgacgg

SEQ ID NO: 1178071 - RNA, 19 nt, Artificial Sequence
  Description of Artificial Sequence: Synthetic oligonucleotide
ggaugcaaucugccgcagg

SEQ ID NO: 1178072 - RNA, 19 nt, Artificial Sequence
  Description of Artificial Sequence: Synthetic oligonucleotide
caaccaccgcagaaccggc

SEQ ID NO: 1178073 - RNA, 19 nt, Artificial Sequence
  Description of Artificial Sequence: Synthetic oligonucleotide
agcuucucgauagcugacu

SEQ ID NO: 1178074 - RNA, 19 nt, Artificial Sequence
  Description of Artificial Sequence: Synthetic oligonucleotide
gucaucggucugaguagcg

SEQ ID NO: 1178075 - RNA, 19 nt, Artificial Sequence
  Description of Artificial Sequence: Synthetic oligonucleotide
gagaugagugaggcacuug

SEQ ID NO: 1178076 - RNA, 19 nt, Artificial Sequence
  Description of Artificial Sequence: Synthetic oligonucleotide
  modified_base (16)..(16): a, c, u, g, unknown or other
caaaauuuaggaggcnuuu

SEQ ID NO: 1178077 - RNA, 19 nt, Artificial Sequence
  Description of Artificial Sequence: Synthetic oligonucleotide
ucgccguccgaguuaggaa

SEQ ID NO: 1178078 - RNA, 19 nt, Artificial Sequence
  Description of Artificial Sequence: Synthetic oligonucleotide
agcccguacugugucgggg

SEQ ID NO: 1178079 - RNA, 19 nt, Artificial Sequence
  Description of Artificial Sequence: Synthetic oligonucleotide
gcuaguuuuggccggaagu

SEQ ID NO: 1178080 - RNA, 19 nt, Artificial Sequence
  Description of Artificial Sequence: Synthetic oligonucleotide
ccgauacuccacuuuaguc

SEQ ID NO: 1178081 - RNA, 19 nt, Artificial Sequence
  Description of Artificial Sequence: Synthetic oligonucleotide
ccuugcuaguuuuggccgg

SEQ ID NO: 1178082 - RNA, 19 nt, Artificial Sequence
  Description of Artificial Sequence: Synthetic oligonucleotide
ggcgcgagggugucuaacc

SEQ ID NO: 1178083 - RNA, 19 nt, Artificial Sequence
  Description of Artificial Sequence: Synthetic oligonucleotide
ggguugaugggugugaucu

SEQ ID NO: 1178084 - RNA, 19 nt, Artificial Sequence
  Description of Artificial Sequence: Synthetic oligonucleotide
aguuccuccgcccgcggua

SEQ ID NO: 1178085 - RNA, 19 nt, Artificial Sequence
  Description of Artificial Sequence: Synthetic oligonucleotide
cucaccgcggcagcauagg

SEQ ID NO: 1178086 - RNA, 19 nt, Artificial Sequence
  Description of Artificial Sequence: Synthetic oligonucleotide
ugauauccauuuggcucga

SEQ ID NO: 1178087 - RNA, 19 nt, Artificial Sequence
  Description of Artificial Sequence: Synthetic oligonucleotide
acacgacggucaucggucu

SEQ ID NO: 1178088 - RNA, 19 nt, Artificial Sequence
  Description of Artificial Sequence: Synthetic oligonucleotide
ccuaaaguccauugcacaa

SEQ ID NO: 1178089 - RNA, 19 nt, Artificial Sequence
  Description of Artificial Sequence: Synthetic oligonucleotide
acgacggucaucggucuga

SEQ ID NO: 1178090 - RNA, 19 nt, Artificial Sequence
  Description of Artificial Sequence: Synthetic oligonucleotide
ggcuuggaaaacccaucug

SEQ ID NO: 1178091 - RNA, 19 nt, Artificial Sequence
  Description of Artificial Sequence: Synthetic oligonucleotide
guccgucucaccgcggcag

SEQ ID NO: 1178092 - RNA, 19 nt, Artificial Sequence
  Description of Artificial Sequence: Synthetic oligonucleotide
ugccgcaggcgcgagggug

SEQ ID NO: 1178093 - RNA, 19 nt, Artificial Sequence
  Description of Artificial Sequence: Synthetic oligonucleotide
caccgcagaaccggcuugg

SEQ ID NO: 1178094 - RNA, 19 nt, Artificial Sequence
  Description of Artificial Sequence: Synthetic oligonucleotide
cugugauauccauuuggcu

SEQ ID NO: 1178095 - RNA, 19 nt, Artificial Sequence
  Description of Artificial Sequence: Synthetic oligonucleotide
aaccggcuuggaaaaccca

SEQ ID NO: 1178096 - RNA, 19 nt, Artificial Sequence
  Description of Artificial Sequence: Synthetic oligonucleotide
caaccgcuugccugugaug

SEQ ID NO: 1178097 - RNA, 19 nt, Artificial Sequence
  Description of Artificial Sequence: Synthetic oligonucleotide
gguucgccguccgaguuag

SEQ ID NO: 1178098 - RNA, 19 nt, Artificial Sequence
  Description of Artificial Sequence: Synthetic oligonucleotide
uucuuccgauacuccacuu

SEQ ID NO: 1178099 - RNA, 19 nt, Artificial Sequence
  Description of Artificial Sequence: Synthetic oligonucleotide
guagugugggaugcaaucu

SEQ ID NO: 1178100 - RNA, 19 nt, Artificial Sequence
  Description of Artificial Sequence: Synthetic oligonucleotide
aggcgcgagggugucuaac

SEQ ID NO: 1178101 - RNA, 19 nt, Artificial Sequence
  Description of Artificial Sequence: Synthetic oligonucleotide
agguaaucgugggccagcu

SEQ ID NO: 1178102 - RNA, 19 nt, Artificial Sequence
  Description of Artificial Sequence: Synthetic oligonucleotide
ggcucgauaaacacuccca

SEQ ID NO: 1178103 - RNA, 19 nt, Artificial Sequence
  Description of Artificial Sequence: Synthetic oligonucleotide
ggucaucggucugaguagc

SEQ ID NO: 1178104 - RNA, 19 nt, Artificial Sequence
  Description of Artificial Sequence: Synthetic oligonucleotide
uccgcacuugagucagauc

SEQ ID NO: 1178105 - RNA, 19 nt, Artificial Sequence
  Description of Artificial Sequence: Synthetic oligonucleotide
aucugccgcaggcgcgagg

SEQ ID NO: 1178106 - RNA, 19 nt, Artificial Sequence
  Description of Artificial Sequence: Synthetic oligonucleotide
uggguccgucucaccgcgg

SEQ ID NO: 1178107 - RNA, 19 nt, Artificial Sequence
  Description of Artificial Sequence: Synthetic oligonucleotide
gcagaaccggcuuggaaaa

SEQ ID NO: 1178108 - RNA, 19 nt, Artificial Sequence
  Description of Artificial Sequence: Synthetic oligonucleotide
uucgccugcucuggagaca

SEQ ID NO: 1178109 - RNA, 19 nt, Artificial Sequence
  Description of Artificial Sequence: Synthetic oligonucleotide
gaccggagccuccaugugu

SEQ ID NO: 1178110 - RNA, 19 nt, Artificial Sequence
  Description of Artificial Sequence: Synthetic oligonucleotide
cccauaaaacuggaugaug

SEQ ID NO: 1178111 - RNA, 19 nt, Artificial Sequence
  Description of Artificial Sequence: Synthetic oligonucleotide
gcuacaucgguggcccagg

SEQ ID NO: 1178112 - RNA, 19 nt, Artificial Sequence
  Description of Artificial Sequence: Synthetic oligonucleotide
cuccgcccgcgguaguugc

SEQ ID NO: 1178113 - RNA, 19 nt, Artificial Sequence
  Description of Artificial Sequence: Synthetic oligonucleotide
uucugacgagcugcugaac

SEQ ID NO: 1178114 - RNA, 19 nt, Artificial Sequence
  Description of Artificial Sequence: Synthetic oligonucleotide
uccugggcacacgacgguc

SEQ ID NO: 1178115 - RNA, 19 nt, Artificial Sequence
  Description of Artificial Sequence: Synthetic oligonucleotide
cagcaauaacgacauuucu

SEQ ID NO: 1178116 - RNA, 19 nt, Artificial Sequence
  Description of Artificial Sequence: Synthetic oligonucleotide
cagcccguacugugucggg

SEQ ID NO: 1178117 - RNA, 19 nt, Artificial Sequence
  Description of Artificial Sequence: Synthetic oligonucleotide
aggguucgccguccgaguu

SEQ ID NO: 1178118 - RNA, 19 nt, Artificial Sequence
  Description of Artificial Sequence: Synthetic oligonucleotide
guagugcaucccuuuggcu

SEQ ID NO: 1178119 - RNA, 19 nt, Artificial Sequence
  Description of Artificial Sequence: Synthetic oligonucleotide
ggcuacaucgguggcccag

SEQ ID NO: 1178120 - RNA, 19 nt, Artificial Sequence
  Description of Artificial Sequence: Synthetic oligonucleotide
ggguccgucucaccgcggc

SEQ ID NO: 1178121 - RNA, 19 nt, Artificial Sequence
  Description of Artificial Sequence: Synthetic oligonucleotide
ggaacgcuguagaguagug

SEQ ID NO: 1178122 - RNA, 19 nt, Artificial Sequence
  Description of Artificial Sequence: Synthetic oligonucleotide
cgcucaguauuucagccuc

SEQ ID NO: 1178123 - RNA, 19 nt, Artificial Sequence
  Description of Artificial Sequence: Synthetic oligonucleotide
cacgacggucaucggucug

SEQ ID NO: 1178124 - RNA, 19 nt, Artificial Sequence
  Description of Artificial Sequence: Synthetic oligonucleotide
cugacuuaaaauggaugau

SEQ ID NO: 1178125 - RNA, 19 nt, Artificial Sequence
  Description of Artificial Sequence: Synthetic oligonucleotide
uggccggaaguugccugug

SEQ ID NO: 1178126 - RNA, 19 nt, Artificial Sequence
  Description of Artificial Sequence: Synthetic oligonucleotide
accggagccuccaugugua

SEQ ID NO: 1178127 - RNA, 19 nt, Artificial Sequence
  Description of Artificial Sequence: Synthetic oligonucleotide
caccgcggcagcauaggaa

SEQ ID NO: 1178128 - RNA, 19 nt, Artificial Sequence
  Description of Artificial Sequence: Synthetic oligonucleotide
ccauugcacaaccaccgca

SEQ ID NO: 1178129 - RNA, 19 nt, Artificial Sequence
  Description of Artificial Sequence: Synthetic oligonucleotide
cgcagaaccggcuuggaaa

SEQ ID NO: 1178130 - RNA, 19 nt, Artificial Sequence
  Description of Artificial Sequence: Synthetic oligonucleotide
ucacgccacggugccuugc

SEQ ID NO: 1178131 - RNA, 19 nt, Artificial Sequence
  Description of Artificial Sequence: Synthetic oligonucleotide
cacugucccuggaguugag

SEQ ID NO: 1178132 - RNA, 19 nt, Artificial Sequence
  Description of Artificial Sequence: Synthetic oligonucleotide
gggugucuaaccacuggca

SEQ ID NO: 1178133 - RNA, 19 nt, Artificial Sequence
  Description of Artificial Sequence: Synthetic oligonucleotide
cggucaucggucugaguag

SEQ ID NO: 1178134 - RNA, 19 nt, Artificial Sequence
  Description of Artificial Sequence: Synthetic oligonucleotide
cagaaccggcuuggaaaac

SEQ ID NO: 1178135 - RNA, 19 nt, Artificial Sequence
  Description of Artificial Sequence: Synthetic oligonucleotide
gaugugccccuuggagaca

SEQ ID NO: 1178136 - RNA, 19 nt, Artificial Sequence
  Description of Artificial Sequence: Synthetic oligonucleotide
ggaaguugccugugagucu

SEQ ID NO: 1178137 - RNA, 19 nt, Artificial Sequence
  Description of Artificial Sequence: Synthetic oligonucleotide
caucuagaaaugcgguuuu

SEQ ID NO: 1178138 - RNA, 19 nt, Artificial Sequence
  Description of Artificial Sequence: Synthetic oligonucleotide
gaguagugugggaugcaau

SEQ ID NO: 1178139 - RNA, 19 nt, Artificial Sequence
  Description of Artificial Sequence: Synthetic oligonucleotide
uggcuacaucgguggccca

SEQ ID NO: 1178140 - RNA, 19 nt, Artificial Sequence
  Description of Artificial Sequence: Synthetic oligonucleotide
ggaugguccugggcacacg

SEQ ID NO: 1178141 - RNA, 19 nt, Artificial Sequence
  Description of Artificial Sequence: Synthetic oligonucleotide
cgguaguugccccucguuc

SEQ ID NO: 1178142 - RNA, 19 nt, Artificial Sequence
  Description of Artificial Sequence: Synthetic oligonucleotide
gcccguacugugucgggga

SEQ ID NO: 1178143 - RNA, 19 nt, Artificial Sequence
  Description of Artificial Sequence: Synthetic oligonucleotide
ugcaucccuuuggcuacau

SEQ ID NO: 1178144 - RNA, 19 nt, Artificial Sequence
  Description of Artificial Sequence: Synthetic oligonucleotide
ccugugagucuucuuccga

SEQ ID NO: 1178145 - RNA, 19 nt, Artificial Sequence
  Description of Artificial Sequence: Synthetic oligonucleotide
gcacacgacggucaucggu

SEQ ID NO: 1178146 - RNA, 19 nt, Artificial Sequence
  Description of Artificial Sequence: Synthetic oligonucleotide
gggaacgcuguagaguagu

SEQ ID NO: 1178147 - RNA, 19 nt, Artificial Sequence
  Description of Artificial Sequence: Synthetic oligonucleotide
gcgcgagggugucuaacca

SEQ ID NO: 1178148 - RNA, 19 nt, Artificial Sequence
  Description of Artificial Sequence: Synthetic oligonucleotide
cgcgagggugucuaaccac

SEQ ID NO: 1178149 - RNA, 19 nt, Artificial Sequence
  Description of Artificial Sequence: Synthetic oligonucleotide
cccguacugugucggggag

SEQ ID NO: 1178150 - RNA, 19 nt, Artificial Sequence
  Description of Artificial Sequence: Synthetic oligonucleotide
ggcgucuggguccgucuca

SEQ ID NO: 1178151 - RNA, 19 nt, Artificial Sequence
  Description of Artificial Sequence: Synthetic oligonucleotide
gggaugcaaucugccgcag

SEQ ID NO: 1178152 - RNA, 19 nt, Artificial Sequence
  Description of Artificial Sequence: Synthetic oligonucleotide
gcuucucgauagcugacuu

SEQ ID NO: 1178153 - RNA, 19 nt, Artificial Sequence
  Description of Artificial Sequence: Synthetic oligonucleotide
gacggucaucggucugagu

SEQ ID NO: 1178154 - RNA, 19 nt, Artificial Sequence
  Description of Artificial Sequence: Synthetic oligonucleotide
gguccgucucaccgcggca

SEQ ID NO: 1178155 - RNA, 19 nt, Artificial Sequence
  Description of Artificial Sequence: Synthetic oligonucleotide
ggugccuugcugagccauc

SEQ ID NO: 1178156 - RNA, 19 nt, Artificial Sequence
  Description of Artificial Sequence: Synthetic oligonucleotide
caggguucgccguccgagu

SEQ ID NO: 1178157 - RNA, 19 nt, Artificial Sequence
  Description of Artificial Sequence: Synthetic oligonucleotide
gcgagggugucuaaccacu

SEQ ID NO: 1178158 - RNA, 19 nt, Artificial Sequence
  Description of Artificial Sequence: Synthetic oligonucleotide
guccugggcacacgacggu

SEQ ID NO: 1178159 - RNA, 19 nt, Artificial Sequence
  Description of Artificial Sequence: Synthetic oligonucleotide
ggccggaaguugccuguga

SEQ ID NO: 1178160 - RNA, 19 nt, Artificial Sequence
  Description of Artificial Sequence: Synthetic oligonucleotide
guucgccguccgaguuagg

SEQ ID NO: 1178161 - RNA, 19 nt, Artificial Sequence
  Description of Artificial Sequence: Synthetic oligonucleotide
guccgcacuugagucagau

SEQ ID NO: 1178162 - RNA, 19 nt, Artificial Sequence
  Description of Artificial Sequence: Synthetic oligonucleotide
gggcgucuggguccgucuc

SEQ ID NO: 1178163 - RNA, 19 nt, Artificial Sequence
  Description of Artificial Sequence: Synthetic oligonucleotide
cagcaaccgcuugccugug

SEQ ID NO: 1178164 - RNA, 19 nt, Artificial Sequence
  Description of Artificial Sequence: Synthetic oligonucleotide
cuacaucgguggcccaggu

SEQ ID NO: 1178165 - RNA, 19 nt, Artificial Sequence
  Description of Artificial Sequence: Synthetic oligonucleotide
ggguucgccguccgaguua

SEQ ID NO: 1178166 - RNA, 19 nt, Artificial Sequence
  Description of Artificial Sequence: Synthetic oligonucleotide
cgccguccgaguuaggaaa

SEQ ID NO: 1178167 - RNA, 19 nt, Artificial Sequence
  Description of Artificial Sequence: Synthetic oligonucleotide
cugugucggggaggagcuc

SEQ ID NO: 1178168 - RNA, 19 nt, Artificial Sequence
  Description of Artificial Sequence: Synthetic oligonucleotide
gugcaucccuuuggcuaca

SEQ ID NO: 1178169 - RNA, 19 nt, Artificial Sequence
  Description of Artificial Sequence: Synthetic oligonucleotide
aguccgcacuugagucaga

SEQ ID NO: 1178170 - RNA, 19 nt, Artificial Sequence
  Description of Artificial Sequence: Synthetic oligonucleotide
caucgguggcccaggucau

SEQ ID NO: 1178171 - RNA, 19 nt, Artificial Sequence
  Description of Artificial Sequence: Synthetic oligonucleotide
ccgcccgcgguaguugccc

SEQ ID NO: 1178172 - RNA, 19 nt, Artificial Sequence
  Description of Artificial Sequence: Synthetic oligonucleotide
ccgcgguaguugccccucg

SEQ ID NO: 1178173 - RNA, 19 nt, Artificial Sequence
  Description of Artificial Sequence: Synthetic oligonucleotide
gccguccgaguuaggaaaa

SEQ ID NO: 1178174 - RNA, 19 nt, Artificial Sequence
  Description of Artificial Sequence: Synthetic oligonucleotide
ggucacgccacggugccuu

SEQ ID NO: 1178175 - RNA, 19 nt, Artificial Sequence
  Description of Artificial Sequence: Synthetic oligonucleotide
ccgcggcagcauaggaauc

SEQ ID NO: 1178176 - RNA, 19 nt, Artificial Sequence
  Description of Artificial Sequence: Synthetic oligonucleotide
cggcuuggaaaacccaucu

SEQ ID NO: 1178177 - RNA, 19 nt, Artificial Sequence
  Description of Artificial Sequence: Synthetic oligonucleotide
ccuccgcccgcgguaguug

SEQ ID NO: 1178178 - RNA, 19 nt, Artificial Sequence
  Description of Artificial Sequence: Synthetic oligonucleotide
gguaaucgugggccagcuu

SEQ ID NO: 1178179 - RNA, 19 nt, Artificial Sequence
  Description of Artificial Sequence: Synthetic oligonucleotide
gcucaguauuucagccucu

SEQ ID NO: 1178180 - RNA, 19 nt, Artificial Sequence
  Description of Artificial Sequence: Synthetic oligonucleotide
cgacggucaucggucugag

SEQ ID NO: 1178181 - RNA, 19 nt, Artificial Sequence
  Description of Artificial Sequence: Synthetic oligonucleotide
caggcgcgagggugucuaa

SEQ ID NO: 1178182 - RNA, 19 nt, Artificial Sequence
  Description of Artificial Sequence: Synthetic oligonucleotide
cuccuucgcucacccugcu

SEQ ID NO: 1178183 - RNA, 19 nt, Artificial Sequence
  Description of Artificial Sequence: Synthetic oligonucleotide
cccgcgguaguugccccuc

SEQ ID NO: 1178184 - RNA, 19 nt, Artificial Sequence
  Description of Artificial Sequence: Synthetic oligonucleotide
gcgguaguugccccucguu

SEQ ID NO: 1178185 - RNA, 19 nt, Artificial Sequence
  Description of Artificial Sequence: Synthetic oligonucleotide
ccggagccuccauguguaa

SEQ ID NO: 1178186 - RNA, 19 nt, Artificial Sequence
  Description of Artificial Sequence: Synthetic oligonucleotide
gcccgcgguaguugccccu

SEQ ID NO: 1178187 - RNA, 19 nt, Artificial Sequence
  Description of Artificial Sequence: Synthetic oligonucleotide
gggucacgccacggugccu

SEQ ID NO: 1178188 - RNA, 19 nt, Artificial Sequence
  Description of Artificial Sequence: Synthetic oligonucleotide
ccguccgaguuaggaaaau

SEQ ID NO: 1178189 - RNA, 19 nt, Artificial Sequence
  Description of Artificial Sequence: Synthetic oligonucleotide
cgcgguaguugccccucgu

SEQ ID NO: 1178190 - RNA, 19 nt, Artificial Sequence
  Description of Artificial Sequence: Synthetic oligonucleotide
cacgggcgucuggguccgu

SEQ ID NO: 1178191 - RNA, 19 nt, Artificial Sequence
  Description of Artificial Sequence: Synthetic oligonucleotide
gaagagaugagcccggacg

SEQ ID NO: 1178192 - RNA, 19 nt, Artificial Sequence
  Description of Artificial Sequence: Synthetic oligonucleotide
uaaguugugggaauggggc

SEQ ID NO: 1178193 - RNA, 19 nt, Artificial Sequence
  Description of Artificial Sequence: Synthetic oligonucleotide
auaguuagcaucucucacg

SEQ ID NO: 1178194 - RNA, 19 nt, Artificial Sequence
  Description of Artificial Sequence: Synthetic oligonucleotide
uuauucuuagacaagccgu

SEQ ID NO: 1178195 - RNA, 19 nt, Artificial Sequence
  Description of Artificial Sequence: Synthetic oligonucleotide
agaaaggcaccauagugac

SEQ ID NO: 1178196 - RNA, 19 nt, Artificial Sequence
  Description of Artificial Sequence: Synthetic oligonucleotide
ugagccaacagaaucauuc

SEQ ID NO: 1178197 - RNA, 19 nt, Artificial Sequence
  Description of Artificial Sequence: Synthetic oligonucleotide
cagaacugcacaaugagag

SEQ ID NO: 1178198 - RNA, 19 nt, Artificial Sequence
  Description of Artificial Sequence: Synthetic oligonucleotide
aaaggcaccauagugaccu

SEQ ID NO: 1178199 - RNA, 19 nt, Artificial Sequence
  Description of Artificial Sequence: Synthetic oligonucleotide
aagguuaccuucugcacuc

SEQ ID NO: 1178200 - RNA, 19 nt, Artificial Sequence
  Description of Artificial Sequence: Synthetic oligonucleotide
uuugcaagugacaggaaca

SEQ ID NO: 1178201 - RNA, 19 nt, Artificial Sequence
  Description of Artificial Sequence: Synthetic oligonucleotide
uauuguucaaugcuggaaa

SEQ ID NO: 1178202 - RNA, 19 nt, Artificial Sequence
  Description of Artificial Sequence: Synthetic oligonucleotide
uuccuaacugccuugaugu

SEQ ID NO: 1178203 - RNA, 19 nt, Artificial Sequence
  Description of Artificial Sequence: Synthetic oligonucleotide
uuuugcaagugacaggaac

SEQ ID NO: 1178204 - RNA, 19 nt, Artificial Sequence
  Description of Artificial Sequence: Synthetic oligonucleotide
auguagggcuggcagaucc

SEQ ID NO: 1178205 - RNA, 19 nt, Artificial Sequence
  Description of Artificial Sequence: Synthetic oligonucleotide
ucgaccaccacuauucucu

SEQ ID NO: 1178206 - RNA, 19 nt, Artificial Sequence
  Description of Artificial Sequence: Synthetic oligonucleotide
uggaaacauaaguuguggg

SEQ ID NO: 1178207 - RNA, 19 nt, Artificial Sequence
  Description of Artificial Sequence: Synthetic oligonucleotide
aaugagaggccuguccucg

SEQ ID NO: 1178208 - RNA, 19 nt, Artificial Sequence
  Description of Artificial Sequence: Synthetic oligonucleotide
ugcugauggaccugaagcg

SEQ ID NO: 1178209 - RNA, 19 nt, Artificial Sequence
  Description of Artificial Sequence: Synthetic oligonucleotide
ugucaaauaggagauuccc

SEQ ID NO: 1178210 - RNA, 19 nt, Artificial Sequence
  Description of Artificial Sequence: Synthetic oligonucleotide
acacccguguccuggaugc

SEQ ID NO: 1178211 - RNA, 19 nt, Artificial Sequence
  Description of Artificial Sequence: Synthetic oligonucleotide
gauaguuagcaucucucac

SEQ ID NO: 1178212 - RNA, 19 nt, Artificial Sequence
  Description of Artificial Sequence: Synthetic oligonucleotide
agguuaaacacacaucuau

SEQ ID NO: 1178213 - RNA, 19 nt, Artificial Sequence
  Description of Artificial Sequence: Synthetic oligonucleotide
aagagaugagcccggacgu

SEQ ID NO: 1178214 - RNA, 19 nt, Artificial Sequence
  Description of Artificial Sequence: Synthetic oligonucleotide
accggauauucccauuugc

SEQ ID NO: 1178215 - RNA, 19 nt, Artificial Sequence
  Description of Artificial Sequence: Synthetic oligonucleotide
cuuuccgauaguuagcauc

SEQ ID NO: 1178216 - RNA, 19 nt, Artificial Sequence
  Description of Artificial Sequence: Synthetic oligonucleotide
cucugguccaccauaggcg

SEQ ID NO: 1178217 - RNA, 19 nt, Artificial Sequence
  Description of Artificial Sequence: Synthetic oligonucleotide
aauggggcaaguucagcca

SEQ ID NO: 1178218 - RNA, 19 nt, Artificial Sequence
  Description of Artificial Sequence: Synthetic oligonucleotide
gaugcaccgcuccacaucc

SEQ ID NO: 1178219 - RNA, 19 nt, Artificial Sequence
  Description of Artificial Sequence: Synthetic oligonucleotide
uauucuuagacaagccguc

SEQ ID NO: 1178220 - RNA, 19 nt, Artificial Sequence
  Description of Artificial Sequence: Synthetic oligonucleotide
uuagacaagccguccacgc

SEQ ID NO: 1178221 - RNA, 19 nt, Artificial Sequence
  Description of Artificial Sequence: Synthetic oligonucleotide
gaacugcacaaugagaggc

SEQ ID NO: 1178222 - RNA, 19 nt, Artificial Sequence
  Description of Artificial Sequence: Synthetic oligonucleotide
accauagugaccucucuug

SEQ ID NO: 1178223 - RNA, 19 nt, Artificial Sequence
  Description of Artificial Sequence: Synthetic oligonucleotide
aauaggagauucccugagu

SEQ ID NO: 1178224 - RNA, 19 nt, Artificial Sequence
  Description of Artificial Sequence: Synthetic oligonucleotide
ucuauugcccuuuggauuu

SEQ ID NO: 1178225 - RNA, 19 nt, Artificial Sequence
  Description of Artificial Sequence: Synthetic oligonucleotide
uagggcacuacccaugacu

SEQ ID NO: 1178226 - RNA, 19 nt, Artificial Sequence
  Description of Artificial Sequence: Synthetic oligonucleotide
aaucuugugccaggagagc

SEQ ID NO: 1178227 - RNA, 19 nt, Artificial Sequence
  Description of Artificial Sequence: Synthetic oligonucleotide
ugggcgugcagcauagggg

SEQ ID NO: 1178228 - RNA, 19 nt, Artificial Sequence
  Description of Artificial Sequence: Synthetic oligonucleotide
aaacauaaguugugggaau

SEQ ID NO: 1178229 - RNA, 19 nt, Artificial Sequence
  Description of Artificial Sequence: Synthetic oligonucleotide
ucucucacgaagaccuggg

SEQ ID NO: 1178230 - RNA, 19 nt, Artificial Sequence
  Description of Artificial Sequence: Synthetic oligonucleotide
guaaucuugugccaggaga

SEQ ID NO: 1178231 - RNA, 19 nt, Artificial Sequence
  Description of Artificial Sequence: Synthetic oligonucleotide
ugugaagguuaccuucugc

SEQ ID NO: 1178232 - RNA, 19 nt, Artificial Sequence
  Description of Artificial Sequence: Synthetic oligonucleotide
aacauaaguugugggaaug

SEQ ID NO: 1178233 - RNA, 19 nt, Artificial Sequence
  Description of Artificial Sequence: Synthetic oligonucleotide
cccauuugcaaacacaggg

SEQ ID NO: 1178234 - RNA, 19 nt, Artificial Sequence
  Description of Artificial Sequence: Synthetic oligonucleotide
agggguguagcaaagcugg

SEQ ID NO: 1178235 - RNA, 19 nt, Artificial Sequence
  Description of Artificial Sequence: Synthetic oligonucleotide
acaguaaucuugugccagg

SEQ ID NO: 1178236 - RNA, 19 nt, Artificial Sequence
  Description of Artificial Sequence: Synthetic oligonucleotide
gaaacauaaguugugggaa

SEQ ID NO: 1178237 - RNA, 19 nt, Artificial Sequence
  Description of Artificial Sequence: Synthetic oligonucleotide
cacagaacugcacaaugag

SEQ ID NO: 1178238 - RNA, 19 nt, Artificial Sequence
  Description of Artificial Sequence: Synthetic oligonucleotide
uucagagaaaccaccuggu

SEQ ID NO: 1178239 - RNA, 19 nt, Artificial Sequence
  Description of Artificial Sequence: Synthetic oligonucleotide
ucaggcuagggcacuaccc

SEQ ID NO: 1178240 - RNA, 19 nt, Artificial Sequence
  Description of Artificial Sequence: Synthetic oligonucleotide
uguagcaaagcugggcucc

SEQ ID NO: 1178241 - RNA, 19 nt, Artificial Sequence
  Description of Artificial Sequence: Synthetic oligonucleotide
uggacgaacaccucugggu

SEQ ID NO: 1178242 - RNA, 19 nt, Artificial Sequence
  Description of Artificial Sequence: Synthetic oligonucleotide
ucucuuuccgauaguuagc

SEQ ID NO: 1178243 - RNA, 19 nt, Artificial Sequence
  Description of Artificial Sequence: Synthetic oligonucleotide
uggcaccgaagcuuuagcg

SEQ ID NO: 1178244 - RNA, 19 nt, Artificial Sequence
  Description of Artificial Sequence: Synthetic oligonucleotide
cuguggacagcccaaauuc

SEQ ID NO: 1178245 - RNA, 19 nt, Artificial Sequence
  Description of Artificial Sequence: Synthetic oligonucleotide
acacuuggcauauuugggu

SEQ ID NO: 1178246 - RNA, 19 nt, Artificial Sequence
  Description of Artificial Sequence: Synthetic oligonucleotide
gaaaccaccugguguuccg

SEQ ID NO: 1178247 - RNA, 19 nt, Artificial Sequence
  Description of Artificial Sequence: Synthetic oligonucleotide
ucagagaaaccaccuggug

SEQ ID NO: 1178248 - RNA, 19 nt, Artificial Sequence
  Description of Artificial Sequence: Synthetic oligonucleotide
uagggguguagcaaagcug

SEQ ID NO: 1178249 - RNA, 19 nt, Artificial Sequence
  Description of Artificial Sequence: Synthetic oligonucleotide
cuugauguguucccaggag

SEQ ID NO: 1178250 - RNA, 19 nt, Artificial Sequence
  Description of Artificial Sequence: Synthetic oligonucleotide
cauaaguugugggaauggg

SEQ ID NO: 1178251 - RNA, 19 nt, Artificial Sequence
  Description of Artificial Sequence: Synthetic oligonucleotide
cuuccuaacugccuugaug

SEQ ID NO: 1178252 - RNA, 19 nt, Artificial Sequence
  Description of Artificial Sequence: Synthetic oligonucleotide
cauagugaccucucuuggc

SEQ ID NO: 1178253 - RNA, 19 nt, Artificial Sequence
  Description of Artificial Sequence: Synthetic oligonucleotide
uauuuggguuucagggaag

SEQ ID NO: 1178254 - RNA, 19 nt, Artificial Sequence
  Description of Artificial Sequence: Synthetic oligonucleotide
agacaagccguccacgcug

SEQ ID NO: 1178255 - RNA, 19 nt, Artificial Sequence
  Description of Artificial Sequence: Synthetic oligonucleotide
uguuccgggccucaccugc

SEQ ID NO: 1178256 - RNA, 19 nt, Artificial Sequence
  Description of Artificial Sequence: Synthetic oligonucleotide
ucggcuccaaaacucaaaa

SEQ ID NO: 1178257 - RNA, 19 nt, Artificial Sequence
  Description of Artificial Sequence: Synthetic oligonucleotide
aguaaucuugugccaggag

SEQ ID NO: 1178258 - RNA, 19 nt, Artificial Sequence
  Description of Artificial Sequence: Synthetic oligonucleotide
cacagggauucccacagcc

SEQ ID NO: 1178259 - RNA, 19 nt, Artificial Sequence
  Description of Artificial Sequence: Synthetic oligonucleotide
aguuugggcauccucucca

SEQ ID NO: 1178260 - RNA, 19 nt, Artificial Sequence
  Description of Artificial Sequence: Synthetic oligonucleotide
auuuggguuucagggaagg

SEQ ID NO: 1178261 - RNA, 19 nt, Artificial Sequence
  Description of Artificial Sequence: Synthetic oligonucleotide
uaggcgccaccacaugucg

SEQ ID NO: 1178262 - RNA, 19 nt, Artificial Sequence
  Description of Artificial Sequence: Synthetic oligonucleotide
ugagcccggacguaggaca

SEQ ID NO: 1178263 - RNA, 19 nt, Artificial Sequence
  Description of Artificial Sequence: Synthetic oligonucleotide
agaaaccaccugguguucc

SEQ ID NO: 1178264 - RNA, 19 nt, Artificial Sequence
  Description of Artificial Sequence: Synthetic oligonucleotide
auucaggucaauggcauca

SEQ ID NO: 1178265 - RNA, 19 nt, Artificial Sequence
  Description of Artificial Sequence: Synthetic oligonucleotide
uauucccauuugcaaacac

SEQ ID NO: 1178266 - RNA, 19 nt, Artificial Sequence
  Description of Artificial Sequence: Synthetic oligonucleotide
gaacagagagucucucaug

SEQ ID NO: 1178267 - RNA, 19 nt, Artificial Sequence
  Description of Artificial Sequence: Synthetic oligonucleotide
gccaagguagccuuggugc

SEQ ID NO: 1178268 - RNA, 19 nt, Artificial Sequence
  Description of Artificial Sequence: Synthetic oligonucleotide
ucuguggacagcccaaauu

SEQ ID NO: 1178269 - RNA, 19 nt, Artificial Sequence
  Description of Artificial Sequence: Synthetic oligonucleotide
uacagguucucuuuccgau

SEQ ID NO: 1178270 - RNA, 19 nt, Artificial Sequence
  Description of Artificial Sequence: Synthetic oligonucleotide
ucauuggcacagaacugca

SEQ ID NO: 1178271 - RNA, 19 nt, Artificial Sequence
  Description of Artificial Sequence: Synthetic oligonucleotide
ggcauauuuggguuucagg

SEQ ID NO: 1178272 - RNA, 19 nt, Artificial Sequence
  Description of Artificial Sequence: Synthetic oligonucleotide
cuacccaugacuucagaga

SEQ ID NO: 1178273 - RNA, 19 nt, Artificial Sequence
  Description of Artificial Sequence: Synthetic oligonucleotide
ucuuugcucccuuccuuag

SEQ ID NO: 1178274 - RNA, 19 nt, Artificial Sequence
  Description of Artificial Sequence: Synthetic oligonucleotide
gggucgaagguuuugugag

SEQ ID NO: 1178275 - RNA, 19 nt, Artificial Sequence
  Description of Artificial Sequence: Synthetic oligonucleotide
cuuaagaaugucuaggcuu

SEQ ID NO: 1178276 - RNA, 19 nt, Artificial Sequence
  Description of Artificial Sequence: Synthetic oligonucleotide
caaguugccagcuggccuc

SEQ ID NO: 1178277 - RNA, 19 nt, Artificial Sequence
  Description of Artificial Sequence: Synthetic oligonucleotide
cacaguaaucuugugccag

SEQ ID NO: 1178278 - RNA, 19 nt, Artificial Sequence
  Description of Artificial Sequence: Synthetic oligonucleotide
agaaugucuaggcuucgau

SEQ ID NO: 1178279 - RNA, 19 nt, Artificial Sequence
  Description of Artificial Sequence: Synthetic oligonucleotide
acucggauuuugcaaguga

SEQ ID NO: 1178280 - RNA, 19 nt, Artificial Sequence
  Description of Artificial Sequence: Synthetic oligonucleotide
agcauagggguguagcaaa

SEQ ID NO: 1178281 - RNA, 19 nt, Artificial Sequence
  Description of Artificial Sequence: Synthetic oligonucleotide
uuucagggaagggucgaag

SEQ ID NO: 1178282 - RNA, 19 nt, Artificial Sequence
  Description of Artificial Sequence: Synthetic oligonucleotide
uggugcaacauugccaggu

SEQ ID NO: 1178283 - RNA, 19 nt, Artificial Sequence
  Description of Artificial Sequence: Synthetic oligonucleotide
cucggggcacacuucacag

SEQ ID NO: 1178284 - RNA, 19 nt, Artificial Sequence
  Description of Artificial Sequence: Synthetic oligonucleotide
gugggaauggggcaaguuc

SEQ ID NO: 1178285 - RNA, 19 nt, Artificial Sequence
  Description of Artificial Sequence: Synthetic oligonucleotide
ugcgcccaugcacagucag

SEQ ID NO: 1178286 - RNA, 19 nt, Artificial Sequence
  Description of Artificial Sequence: Synthetic oligonucleotide
ugaagagaugagcccggac

SEQ ID NO: 1178287 - RNA, 19 nt, Artificial Sequence
  Description of Artificial Sequence: Synthetic oligonucleotide
cugauggaccugaagcgug

SEQ ID NO: 1178288 - RNA, 19 nt, Artificial Sequence
  Description of Artificial Sequence: Synthetic oligonucleotide
aucugggcguaccucacug

SEQ ID NO: 1178289 - RNA, 19 nt, Artificial Sequence
  Description of Artificial Sequence: Synthetic oligonucleotide
gaagguuuugugaggguuc

SEQ ID NO: 1178290 - RNA, 19 nt, Artificial Sequence
  Description of Artificial Sequence: Synthetic oligonucleotide
acauugccagguccccacc

SEQ ID NO: 1178291 - RNA, 19 nt, Artificial Sequence
  Description of Artificial Sequence: Synthetic oligonucleotide
agccacgcccuccaggguc

SEQ ID NO: 1178292 - RNA, 19 nt, Artificial Sequence
  Description of Artificial Sequence: Synthetic oligonucleotide
ugauggaccugaagcgugu

SEQ ID NO: 1178293 - RNA, 19 nt, Artificial Sequence
  Description of Artificial Sequence: Synthetic oligonucleotide
uagacaagccguccacgcu

SEQ ID NO: 1178294 - RNA, 19 nt, Artificial Sequence
  Description of Artificial Sequence: Synthetic oligonucleotide
agcguguggugccacagcu

SEQ ID NO: 1178295 - RNA, 19 nt, Artificial Sequence
  Description of Artificial Sequence: Synthetic oligonucleotide
ccagguauuccucagccag

SEQ ID NO: 1178296 - RNA, 19 nt, Artificial Sequence
  Description of Artificial Sequence: Synthetic oligonucleotide
uucggcuccaaaacucaaa

SEQ ID NO: 1178297 - RNA, 19 nt, Artificial Sequence
  Description of Artificial Sequence: Synthetic oligonucleotide
uggaccugaagcguguggu

SEQ ID NO: 1178298 - RNA, 19 nt, Artificial Sequence
  Description of Artificial Sequence: Synthetic oligonucleotide
cacuauucucuuugcuccc

SEQ ID NO: 1178299 - RNA, 19 nt, Artificial Sequence
  Description of Artificial Sequence: Synthetic oligonucleotide
ggauauucccauuugcaaa

SEQ ID NO: 1178300 - RNA, 19 nt, Artificial Sequence
  Description of Artificial Sequence: Synthetic oligonucleotide
cuuggugcgcccaugcaca

SEQ ID NO: 1178301 - RNA, 19 nt, Artificial Sequence
  Description of Artificial Sequence: Synthetic oligonucleotide
uguccuucugugucaaaua

SEQ ID NO: 1178302 - RNA, 19 nt, Artificial Sequence
  Description of Artificial Sequence: Synthetic oligonucleotide
ucucaugagccaacagaau

SEQ ID NO: 1178303 - RNA, 19 nt, Artificial Sequence
  Description of Artificial Sequence: Synthetic oligonucleotide
cacaucuauugcccuuugg

SEQ ID NO: 1178304 - RNA, 19 nt, Artificial Sequence
  Description of Artificial Sequence: Synthetic oligonucleotide
aagaaugucuaggcuucga

SEQ ID NO: 1178305 - RNA, 19 nt, Artificial Sequence
  Description of Artificial Sequence: Synthetic oligonucleotide
ggcaccgaagcuuuagcgc

SEQ ID NO: 1178306 - RNA, 19 nt, Artificial Sequence
  Description of Artificial Sequence: Synthetic oligonucleotide
uuaggcccuggccggaugu

SEQ ID NO: 1178307 - RNA, 19 nt, Artificial Sequence
  Description of Artificial Sequence: Synthetic oligonucleotide
auugccagguccccaccug

SEQ ID NO: 1178308 - RNA, 19 nt, Artificial Sequence
  Description of Artificial Sequence: Synthetic oligonucleotide
guuaccuucugcacucaug

SEQ ID NO: 1178309 - RNA, 19 nt, Artificial Sequence
  Description of Artificial Sequence: Synthetic oligonucleotide
ccugaagacacaaacaugu

SEQ ID NO: 1178310 - RNA, 19 nt, Artificial Sequence
  Description of Artificial Sequence: Synthetic oligonucleotide
gaagcuuuagcgccuggcu

SEQ ID NO: 1178311 - RNA, 19 nt, Artificial Sequence
  Description of Artificial Sequence: Synthetic oligonucleotide
gcaggcaccggauauuccc

SEQ ID NO: 1178312 - RNA, 19 nt, Artificial Sequence
  Description of Artificial Sequence: Synthetic oligonucleotide
aguggaaagcagccaaguu

SEQ ID NO: 1178313 - RNA, 19 nt, Artificial Sequence
  Description of Artificial Sequence: Synthetic oligonucleotide
cucugggucauuggcacag

SEQ ID NO: 1178314 - RNA, 19 nt, Artificial Sequence
  Description of Artificial Sequence: Synthetic oligonucleotide
gugcaacauugccaggucc

SEQ ID NO: 1178315 - RNA, 19 nt, Artificial Sequence
  Description of Artificial Sequence: Synthetic oligonucleotide
ugucuaggcuucgauggcu

SEQ ID NO: 1178316 - RNA, 19 nt, Artificial Sequence
  Description of Artificial Sequence: Synthetic oligonucleotide
auucccugaguaaaggcau

SEQ ID NO: 1178317 - RNA, 19 nt, Artificial Sequence
  Description of Artificial Sequence: Synthetic oligonucleotide
agccuggacgaacaccucu

SEQ ID NO: 1178318 - RNA, 19 nt, Artificial Sequence
  Description of Artificial Sequence: Synthetic oligonucleotide
uccuaacugccuugaugug

SEQ ID NO: 1178319 - RNA, 19 nt, Artificial Sequence
  Description of Artificial Sequence: Synthetic oligonucleotide
agugaccucucuuggcuau

SEQ ID NO: 1178320 - RNA, 19 nt, Artificial Sequence
  Description of Artificial Sequence: Synthetic oligonucleotide
cauagggguguagcaaagc

SEQ ID NO: 1178321 - RNA, 19 nt, Artificial Sequence
  Description of Artificial Sequence: Synthetic oligonucleotide
ugggcguaccucacugucu

SEQ ID NO: 1178322 - RNA, 19 nt, Artificial Sequence
  Description of Artificial Sequence: Synthetic oligonucleotide
agacucggauuuugcaagu

SEQ ID NO: 1178323 - RNA, 19 nt, Artificial Sequence
  Description of Artificial Sequence: Synthetic oligonucleotide
gcuucgaccaccacuauuc

SEQ ID NO: 1178324 - RNA, 19 nt, Artificial Sequence
  Description of Artificial Sequence: Synthetic oligonucleotide
uucgaccaccacuauucuc

SEQ ID NO: 1178325 - RNA, 19 nt, Artificial Sequence
  Description of Artificial Sequence: Synthetic oligonucleotide
ggcgccaccacaugucggg

SEQ ID NO: 1178326 - RNA, 19 nt, Artificial Sequence
  Description of Artificial Sequence: Synthetic oligonucleotide
augagaggccuguccucgg

SEQ ID NO: 1178327 - RNA, 19 nt, Artificial Sequence
  Description of Artificial Sequence: Synthetic oligonucleotide
accccuugcacacccgugu

SEQ ID NO: 1178328 - RNA, 19 nt, Artificial Sequence
  Description of Artificial Sequence: Synthetic oligonucleotide
ugaccccuugcacacccgu

SEQ ID NO: 1178329 - RNA, 19 nt, Artificial Sequence
  Description of Artificial Sequence: Synthetic oligonucleotide
uuucaaucucugggaagac

SEQ ID NO: 1178330 - RNA, 19 nt, Artificial Sequence
  Description of Artificial Sequence: Synthetic oligonucleotide
agccaaguugccagcuggc

SEQ ID NO: 1178331 - RNA, 19 nt, Artificial Sequence
  Description of Artificial Sequence: Synthetic oligonucleotide
aagggugcuguuguacaau

SEQ ID NO: 1178332 - RNA, 19 nt, Artificial Sequence
  Description of Artificial Sequence: Synthetic oligonucleotide
ucuaggcuucgauggcugu

SEQ ID NO: 1178333 - RNA, 19 nt, Artificial Sequence
  Description of Artificial Sequence: Synthetic oligonucleotide
ggaagacucggauuuugca

SEQ ID NO: 1178334 - RNA, 19 nt, Artificial Sequence
  Description of Artificial Sequence: Synthetic oligonucleotide
gaugagcccggacguagga

SEQ ID NO: 1178335 - RNA, 19 nt, Artificial Sequence
  Description of Artificial Sequence: Synthetic oligonucleotide
agccaacagaaucauucuu

SEQ ID NO: 1178336 - RNA, 19 nt, Artificial Sequence
  Description of Artificial Sequence: Synthetic oligonucleotide
ggacgaacaccucuggguc

SEQ ID NO: 1178337 - RNA, 19 nt, Artificial Sequence
  Description of Artificial Sequence: Synthetic oligonucleotide
ccauagugaccucucuugg

SEQ ID NO: 1178338 - RNA, 19 nt, Artificial Sequence
  Description of Artificial Sequence: Synthetic oligonucleotide
caguuugggcauccucucc

SEQ ID NO: 1178339 - RNA, 19 nt, Artificial Sequence
  Description of Artificial Sequence: Synthetic oligonucleotide
guacagguucucuuuccga

SEQ ID NO: 1178340 - RNA, 19 nt, Artificial Sequence
  Description of Artificial Sequence: Synthetic oligonucleotide
accucccaggguucggcuc

SEQ ID NO: 1178341 - RNA, 19 nt, Artificial Sequence
  Description of Artificial Sequence: Synthetic oligonucleotide
ugcuucgaccaccacuauu

SEQ ID NO: 1178342 - RNA, 19 nt, Artificial Sequence
  Description of Artificial Sequence: Synthetic oligonucleotide
ucccacacagcagggcucc

SEQ ID NO: 1178343 - RNA, 19 nt, Artificial Sequence
  Description of Artificial Sequence: Synthetic oligonucleotide
ggcagauccaguggaaagc

SEQ ID NO: 1178344 - RNA, 19 nt, Artificial Sequence
  Description of Artificial Sequence: Synthetic oligonucleotide
augagcccggacguaggac

SEQ ID NO: 1178345 - RNA, 19 nt, Artificial Sequence
  Description of Artificial Sequence: Synthetic oligonucleotide
ugcaagugacaggaacaga

SEQ ID NO: 1178346 - RNA, 19 nt, Artificial Sequence
  Description of Artificial Sequence: Synthetic oligonucleotide
ucugcacucaugaccccuu

SEQ ID NO: 1178347 - RNA, 19 nt, Artificial Sequence
  Description of Artificial Sequence: Synthetic oligonucleotide
gcuuauucuuagacaagcc

SEQ ID NO: 1178348 - RNA, 19 nt, Artificial Sequence
  Description of Artificial Sequence: Synthetic oligonucleotide
gagcccgcuugcuucgacc

SEQ ID NO: 1178349 - RNA, 19 nt, Artificial Sequence
  Description of Artificial Sequence: Synthetic oligonucleotide
agagcccgcuugcuucgac

SEQ ID NO: 1178350 - RNA, 19 nt, Artificial Sequence
  Description of Artificial Sequence: Synthetic oligonucleotide
agcccgcuugcuucgacca

SEQ ID NO: 1178351 - RNA, 19 nt, Artificial Sequence
  Description of Artificial Sequence: Synthetic oligonucleotide
cucucacgaagaccugggc

SEQ ID NO: 1178352 - RNA, 19 nt, Artificial Sequence
  Description of Artificial Sequence: Synthetic oligonucleotide
gacucggauuuugcaagug

SEQ ID NO: 1178353 - RNA, 19 nt, Artificial Sequence
  Description of Artificial Sequence: Synthetic oligonucleotide
cugagguuccugcagccca

SEQ ID NO: 1178354 - RNA, 19 nt, Artificial Sequence
  Description of Artificial Sequence: Synthetic oligonucleotide
agcaacugacagccggccu

SEQ ID NO: 1178355 - RNA, 19 nt, Artificial Sequence
  Description of Artificial Sequence: Synthetic oligonucleotide
ggacguaggacagugggca

SEQ ID NO: 1178356 - RNA, 19 nt, Artificial Sequence
  Description of Artificial Sequence: Synthetic oligonucleotide
acacaucuauugcccuuug

SEQ ID NO: 1178357 - RNA, 19 nt, Artificial Sequence
  Description of Artificial Sequence: Synthetic oligonucleotide
gguguagcaaagcugggcu

SEQ ID NO: 1178358 - RNA, 19 nt, Artificial Sequence
  Description of Artificial Sequence: Synthetic oligonucleotide
ucugggcguaccucacugu

SEQ ID NO: 1178359 - RNA, 19 nt, Artificial Sequence
  Description of Artificial Sequence: Synthetic oligonucleotide
acguaggacagugggcaag

SEQ ID NO: 1178360 - RNA, 19 nt, Artificial Sequence
  Description of Artificial Sequence: Synthetic oligonucleotide
gagccaacagaaucauucu

SEQ ID NO: 1178361 - RNA, 19 nt, Artificial Sequence
  Description of Artificial Sequence: Synthetic oligonucleotide
uuggugcgcccaugcacag

SEQ ID NO: 1178362 - RNA, 19 nt, Artificial Sequence
  Description of Artificial Sequence: Synthetic oligonucleotide
ugaccucucuuggcuauca

SEQ ID NO: 1178363 - RNA, 19 nt, Artificial Sequence
  Description of Artificial Sequence: Synthetic oligonucleotide
cugggcguaccucacuguc

SEQ ID NO: 1178364 - RNA, 19 nt, Artificial Sequence
  Description of Artificial Sequence: Synthetic oligonucleotide
agagucucucaugagccaa

SEQ ID NO: 1178365 - RNA, 19 nt, Artificial Sequence
  Description of Artificial Sequence: Synthetic oligonucleotide
guagggcuggcagauccag

SEQ ID NO: 1178366 - RNA, 19 nt, Artificial Sequence
  Description of Artificial Sequence: Synthetic oligonucleotide
cauuugcaaacacagggau

SEQ ID NO: 1178367 - RNA, 19 nt, Artificial Sequence
  Description of Artificial Sequence: Synthetic oligonucleotide
agagcagccuggacgaaca

SEQ ID NO: 1178368 - RNA, 19 nt, Artificial Sequence
  Description of Artificial Sequence: Synthetic oligonucleotide
guaccucacugucuuuuca

SEQ ID NO: 1178369 - RNA, 19 nt, Artificial Sequence
  Description of Artificial Sequence: Synthetic oligonucleotide
acagguucucuuuccgaua

SEQ ID NO: 1178370 - RNA, 19 nt, Artificial Sequence
  Description of Artificial Sequence: Synthetic oligonucleotide
guuugggcauccucuccac

SEQ ID NO: 1178371 - RNA, 19 nt, Artificial Sequence
  Description of Artificial Sequence: Synthetic oligonucleotide
acccguguccuggaugcac

SEQ ID NO: 1178372 - RNA, 19 nt, Artificial Sequence
  Description of Artificial Sequence: Synthetic oligonucleotide
caggcuagggcacuaccca

SEQ ID NO: 1178373 - RNA, 19 nt, Artificial Sequence
  Description of Artificial Sequence: Synthetic oligonucleotide
auauucccauuugcaaaca

SEQ ID NO: 1178374 - RNA, 19 nt, Artificial Sequence
  Description of Artificial Sequence: Synthetic oligonucleotide
ggcacuacccaugacuuca

SEQ ID NO: 1178375 - RNA, 19 nt, Artificial Sequence
  Description of Artificial Sequence: Synthetic oligonucleotide
agaugagcccggacguagg

SEQ ID NO: 1178376 - RNA, 19 nt, Artificial Sequence
  Description of Artificial Sequence: Synthetic oligonucleotide
auuugcaaacacagggauu

SEQ ID NO: 1178377 - RNA, 19 nt, Artificial Sequence
  Description of Artificial Sequence: Synthetic oligonucleotide
cacucugguccaccauagg

SEQ ID NO: 1178378 - RNA, 19 nt, Artificial Sequence
  Description of Artificial Sequence: Synthetic oligonucleotide
ggugcgcccaugcacaguc

SEQ ID NO: 1178379 - RNA, 19 nt, Artificial Sequence
  Description of Artificial Sequence: Synthetic oligonucleotide
caccggauauucccauuug

SEQ ID NO: 1178380 - RNA, 19 nt, Artificial Sequence
  Description of Artificial Sequence: Synthetic oligonucleotide
cacacccguguccuggaug

SEQ ID NO: 1178381 - RNA, 19 nt, Artificial Sequence
  Description of Artificial Sequence: Synthetic oligonucleotide
gauggaccugaagcgugug

SEQ ID NO: 1178382 - RNA, 19 nt, Artificial Sequence
  Description of Artificial Sequence: Synthetic oligonucleotide
uucccugaguaaaggcauu

SEQ ID NO: 1178383 - RNA, 19 nt, Artificial Sequence
  Description of Artificial Sequence: Synthetic oligonucleotide
gcucgcuucuugcagcagc

SEQ ID NO: 1178384 - RNA, 19 nt, Artificial Sequence
  Description of Artificial Sequence: Synthetic oligonucleotide
gucuaggcuucgauggcug

SEQ ID NO: 1178385 - RNA, 19 nt, Artificial Sequence
  Description of Artificial Sequence: Synthetic oligonucleotide
ucggggcacacuucacagu

SEQ ID NO: 1178386 - RNA, 19 nt, Artificial Sequence
  Description of Artificial Sequence: Synthetic oligonucleotide
ccauuugcaaacacaggga

SEQ ID NO: 1178387 - RNA, 19 nt, Artificial Sequence
  Description of Artificial Sequence: Synthetic oligonucleotide
caucucucacgaagaccug

SEQ ID NO: 1178388 - RNA, 19 nt, Artificial Sequence
  Description of Artificial Sequence: Synthetic oligonucleotide
caccauaggcgccaccaca

SEQ ID NO: 1178389 - RNA, 19 nt, Artificial Sequence
  Description of Artificial Sequence: Synthetic oligonucleotide
gacagccggccuucuccag

SEQ ID NO: 1178390 - RNA, 19 nt, Artificial Sequence
  Description of Artificial Sequence: Synthetic oligonucleotide
uggaugcaccgcuccacau

SEQ ID NO: 1178391 - RNA, 19 nt, Artificial Sequence
  Description of Artificial Sequence: Synthetic oligonucleotide
agaucccauuccuccugca

SEQ ID NO: 1178392 - RNA, 19 nt, Artificial Sequence
  Description of Artificial Sequence: Synthetic oligonucleotide
cuaacugccuugauguguu

SEQ ID NO: 1178393 - RNA, 19 nt, Artificial Sequence
  Description of Artificial Sequence: Synthetic oligonucleotide
cagcaacugacagccggcc

SEQ ID NO: 1178394 - RNA, 19 nt, Artificial Sequence
  Description of Artificial Sequence: Synthetic oligonucleotide
ggguguagcaaagcugggc

SEQ ID NO: 1178395 - RNA, 19 nt, Artificial Sequence
  Description of Artificial Sequence: Synthetic oligonucleotide
guacaauguccagguauuc

SEQ ID NO: 1178396 - RNA, 19 nt, Artificial Sequence
  Description of Artificial Sequence: Synthetic oligonucleotide
agggcacuacccaugacuu

SEQ ID NO: 1178397 - RNA, 19 nt, Artificial Sequence
  Description of Artificial Sequence: Synthetic oligonucleotide
gcuaucaucuguggacagc

SEQ ID NO: 1178398 - RNA, 19 nt, Artificial Sequence
  Description of Artificial Sequence: Synthetic oligonucleotide
ccuuggugcgcccaugcac

SEQ ID NO: 1178399 - RNA, 19 nt, Artificial Sequence
  Description of Artificial Sequence: Synthetic oligonucleotide
ggcaggauugugaagguua

SEQ ID NO: 1178400 - RNA, 19 nt, Artificial Sequence
  Description of Artificial Sequence: Synthetic oligonucleotide
ggaccugaagcguguggug

SEQ ID NO: 1178401 - RNA, 19 nt, Artificial Sequence
  Description of Artificial Sequence: Synthetic oligonucleotide
cugcaggcaccggauauuc

SEQ ID NO: 1178402 - RNA, 19 nt, Artificial Sequence
  Description of Artificial Sequence: Synthetic oligonucleotide
ccggauauucccauuugca

SEQ ID NO: 1178403 - RNA, 19 nt, Artificial Sequence
  Description of Artificial Sequence: Synthetic oligonucleotide
cuugcacacccguguccug

SEQ ID NO: 1178404 - RNA, 19 nt, Artificial Sequence
  Description of Artificial Sequence: Synthetic oligonucleotide
agggaagggucgaagguuu

SEQ ID NO: 1178405 - RNA, 19 nt, Artificial Sequence
  Description of Artificial Sequence: Synthetic oligonucleotide
gacguaggacagugggcaa

SEQ ID NO: 1178406 - RNA, 19 nt, Artificial Sequence
  Description of Artificial Sequence: Synthetic oligonucleotide
cauaggcgccaccacaugu

SEQ ID NO: 1178407 - RNA, 19 nt, Artificial Sequence
  Description of Artificial Sequence: Synthetic oligonucleotide
uccucggggcacacuucac

SEQ ID NO: 1178408 - RNA, 19 nt, Artificial Sequence
  Description of Artificial Sequence: Synthetic oligonucleotide
guagccuuggugcaacauu

SEQ ID NO: 1178409 - RNA, 19 nt, Artificial Sequence
  Description of Artificial Sequence: Synthetic oligonucleotide
gcccaaauucaggucaaug

SEQ ID NO: 1178410 - RNA, 19 nt, Artificial Sequence
  Description of Artificial Sequence: Synthetic oligonucleotide
aggcaccauagugaccucu

SEQ ID NO: 1178411 - RNA, 19 nt, Artificial Sequence
  Description of Artificial Sequence: Synthetic oligonucleotide
gaccccuugcacacccgug

SEQ ID NO: 1178412 - RNA, 19 nt, Artificial Sequence
  Description of Artificial Sequence: Synthetic oligonucleotide
gggaauggggcaaguucag

SEQ ID NO: 1178413 - RNA, 19 nt, Artificial Sequence
  Description of Artificial Sequence: Synthetic oligonucleotide
aggcaccggauauucccau

SEQ ID NO: 1178414 - RNA, 19 nt, Artificial Sequence
  Description of Artificial Sequence: Synthetic oligonucleotide
caguaaucuugugccagga

SEQ ID NO: 1178415 - RNA, 19 nt, Artificial Sequence
  Description of Artificial Sequence: Synthetic oligonucleotide
cuagggcacuacccaugac

SEQ ID NO: 1178416 - RNA, 19 nt, Artificial Sequence
  Description of Artificial Sequence: Synthetic oligonucleotide
ggcaagggugcuguuguac

SEQ ID NO: 1178417 - RNA, 19 nt, Artificial Sequence
  Description of Artificial Sequence: Synthetic oligonucleotide
gauguagggcuggcagauc

SEQ ID NO: 1178418 - RNA, 19 nt, Artificial Sequence
  Description of Artificial Sequence: Synthetic oligonucleotide
gguucggcuccaaaacuca

SEQ ID NO: 1178419 - RNA, 19 nt, Artificial Sequence
  Description of Artificial Sequence: Synthetic oligonucleotide
agucagcaacugacagccg

SEQ ID NO: 1178420 - RNA, 19 nt, Artificial Sequence
  Description of Artificial Sequence: Synthetic oligonucleotide
accgaagcuuuagcgccug

SEQ ID NO: 1178421 - RNA, 19 nt, Artificial Sequence
  Description of Artificial Sequence: Synthetic oligonucleotide
ggguucggcuccaaaacuc

SEQ ID NO: 1178422 - RNA, 19 nt, Artificial Sequence
  Description of Artificial Sequence: Synthetic oligonucleotide
gguguuccgggccucaccu

SEQ ID NO: 1178423 - RNA, 19 nt, Artificial Sequence
  Description of Artificial Sequence: Synthetic oligonucleotide
cacgaagaccugggcgugc

SEQ ID NO: 1178424 - RNA, 19 nt, Artificial Sequence
  Description of Artificial Sequence: Synthetic oligonucleotide
gaccugggcgugcagcaua

SEQ ID NO: 1178425 - RNA, 19 nt, Artificial Sequence
  Description of Artificial Sequence: Synthetic oligonucleotide
cgauaguuagcaucucuca

SEQ ID NO: 1178426 - RNA, 19 nt, Artificial Sequence
  Description of Artificial Sequence: Synthetic oligonucleotide
uugcuucgaccaccacuau

SEQ ID NO: 1178427 - RNA, 19 nt, Artificial Sequence
  Description of Artificial Sequence: Synthetic oligonucleotide
cccguguccuggaugcacc

SEQ ID NO: 1178428 - RNA, 19 nt, Artificial Sequence
  Description of Artificial Sequence: Synthetic oligonucleotide
auuuugcaagugacaggaa

SEQ ID NO: 1178429 - RNA, 19 nt, Artificial Sequence
  Description of Artificial Sequence: Synthetic oligonucleotide
uuccgauaguuagcaucuc

SEQ ID NO: 1178430 - RNA, 19 nt, Artificial Sequence
  Description of Artificial Sequence: Synthetic oligonucleotide
cagcauagggguguagcaa

SEQ ID NO: 1178431 - RNA, 19 nt, Artificial Sequence
  Description of Artificial Sequence: Synthetic oligonucleotide
agguccccaccugaagaca

SEQ ID NO: 1178432 - RNA, 19 nt, Artificial Sequence
  Description of Artificial Sequence: Synthetic oligonucleotide
gggcgugcagcauaggggu

SEQ ID NO: 1178433 - RNA, 19 nt, Artificial Sequence
  Description of Artificial Sequence: Synthetic oligonucleotide
guagcaaagcugggcucca

SEQ ID NO: 1178434 - RNA, 19 nt, Artificial Sequence
  Description of Artificial Sequence: Synthetic oligonucleotide
augaccccuugcacacccg

SEQ ID NO: 1178435 - RNA, 19 nt, Artificial Sequence
  Description of Artificial Sequence: Synthetic oligonucleotide
cugggucauuggcacagaa

SEQ ID NO: 1178436 - RNA, 19 nt, Artificial Sequence
  Description of Artificial Sequence: Synthetic oligonucleotide
agagaugagcccggacgua

SEQ ID NO: 1178437 - RNA, 19 nt, Artificial Sequence
  Description of Artificial Sequence: Synthetic oligonucleotide
cugaagcguguggugccac

SEQ ID NO: 1178438 - RNA, 19 nt, Artificial Sequence
  Description of Artificial Sequence: Synthetic oligonucleotide
uccggcccucgaacagggc

SEQ ID NO: 1178439 - RNA, 19 nt, Artificial Sequence
  Description of Artificial Sequence: Synthetic oligonucleotide
ccaagguagccuuggugca

SEQ ID NO: 1178440 - RNA, 19 nt, Artificial Sequence
  Description of Artificial Sequence: Synthetic oligonucleotide
cagcccaaauucaggucaa

SEQ ID NO: 1178441 - RNA, 19 nt, Artificial Sequence
  Description of Artificial Sequence: Synthetic oligonucleotide
gguuucagggaagggucga

SEQ ID NO: 1178442 - RNA, 19 nt, Artificial Sequence
  Description of Artificial Sequence: Synthetic oligonucleotide
guuucagggaagggucgaa

SEQ ID NO: 1178443 - RNA, 19 nt, Artificial Sequence
  Description of Artificial Sequence: Synthetic oligonucleotide
cuauugcccuuuggauuuc

SEQ ID NO: 1178444 - RNA, 19 nt, Artificial Sequence
  Description of Artificial Sequence: Synthetic oligonucleotide
ggcaccauagugaccucuc

SEQ ID NO: 1178445 - RNA, 19 nt, Artificial Sequence
  Description of Artificial Sequence: Synthetic oligonucleotide
aggaggcuguuccggccau

SEQ ID NO: 1178446 - RNA, 19 nt, Artificial Sequence
  Description of Artificial Sequence: Synthetic oligonucleotide
cggauauucccauuugcaa

SEQ ID NO: 1178447 - RNA, 19 nt, Artificial Sequence
  Description of Artificial Sequence: Synthetic oligonucleotide
gggguguagcaaagcuggg

SEQ ID NO: 1178448 - RNA, 19 nt, Artificial Sequence
  Description of Artificial Sequence: Synthetic oligonucleotide
ccguguccuggaugcaccg

SEQ ID NO: 1178449 - RNA, 19 nt, Artificial Sequence
  Description of Artificial Sequence: Synthetic oligonucleotide
cccuugcacacccgugucc

SEQ ID NO: 1178450 - RNA, 19 nt, Artificial Sequence
  Description of Artificial Sequence: Synthetic oligonucleotide
cacuacccaugacuucaga

SEQ ID NO: 1178451 - RNA, 19 nt, Artificial Sequence
  Description of Artificial Sequence: Synthetic oligonucleotide
ccuuaagaaugucuaggcu

SEQ ID NO: 1178452 - RNA, 19 nt, Artificial Sequence
  Description of Artificial Sequence: Synthetic oligonucleotide
cggacguaggacagugggc

SEQ ID NO: 1178453 - RNA, 19 nt, Artificial Sequence
  Description of Artificial Sequence: Synthetic oligonucleotide
guucggcuccaaaacucaa

SEQ ID NO: 1178454 - RNA, 19 nt, Artificial Sequence
  Description of Artificial Sequence: Synthetic oligonucleotide
ggauugugaagguuaccuu

SEQ ID NO: 1178455 - RNA, 19 nt, Artificial Sequence
  Description of Artificial Sequence: Synthetic oligonucleotide
agguuaccuucugcacuca

SEQ ID NO: 1178456 - RNA, 19 nt, Artificial Sequence
  Description of Artificial Sequence: Synthetic oligonucleotide
cuucgaccaccacuauucu

SEQ ID NO: 1178457 - RNA, 19 nt, Artificial Sequence
  Description of Artificial Sequence: Synthetic oligonucleotide
caguggaaagcagccaagu

SEQ ID NO: 1178458 - RNA, 19 nt, Artificial Sequence
  Description of Artificial Sequence: Synthetic oligonucleotide
cauugccagguccccaccu

SEQ ID NO: 1178459 - RNA, 19 nt, Artificial Sequence
  Description of Artificial Sequence: Synthetic oligonucleotide
gccucaccugcugagguuc

SEQ ID NO: 1178460 - RNA, 19 nt, Artificial Sequence
  Description of Artificial Sequence: Synthetic oligonucleotide
gguggagauggcucuugcu

SEQ ID NO: 1178461 - RNA, 19 nt, Artificial Sequence
  Description of Artificial Sequence: Synthetic oligonucleotide
ccucaccugcugagguucc

SEQ ID NO: 1178462 - RNA, 19 nt, Artificial Sequence
  Description of Artificial Sequence: Synthetic oligonucleotide
gcugauggaccugaagcgu

SEQ ID NO: 1178463 - RNA, 19 nt, Artificial Sequence
  Description of Artificial Sequence: Synthetic oligonucleotide
gcacuacccaugacuucag

SEQ ID NO: 1178464 - RNA, 19 nt, Artificial Sequence
  Description of Artificial Sequence: Synthetic oligonucleotide
ggcccucgaacagggcagg

SEQ ID NO: 1178465 - RNA, 19 nt, Artificial Sequence
  Description of Artificial Sequence: Synthetic oligonucleotide
gcccggacguaggacagug

SEQ ID NO: 1178466 - RNA, 19 nt, Artificial Sequence
  Description of Artificial Sequence: Synthetic oligonucleotide
augagccaacagaaucauu

SEQ ID NO: 1178467 - RNA, 19 nt, Artificial Sequence
  Description of Artificial Sequence: Synthetic oligonucleotide
gggcacuacccaugacuuc

SEQ ID NO: 1178468 - RNA, 19 nt, Artificial Sequence
  Description of Artificial Sequence: Synthetic oligonucleotide
cuuucaggcuagggcacua

SEQ ID NO: 1178469 - RNA, 19 nt, Artificial Sequence
  Description of Artificial Sequence: Synthetic oligonucleotide
agccacggcacagguuaaa

SEQ ID NO: 1178470 - RNA, 19 nt, Artificial Sequence
  Description of Artificial Sequence: Synthetic oligonucleotide
cccggacguaggacagugg

SEQ ID NO: 1178471 - RNA, 19 nt, Artificial Sequence
  Description of Artificial Sequence: Synthetic oligonucleotide
cacacaucuauugcccuuu

SEQ ID NO: 1178472 - RNA, 19 nt, Artificial Sequence
  Description of Artificial Sequence: Synthetic oligonucleotide
ccuaacugccuugaugugu

SEQ ID NO: 1178473 - RNA, 19 nt, Artificial Sequence
  Description of Artificial Sequence: Synthetic oligonucleotide
ccucggggcacacuucaca

SEQ ID NO: 1178474 - RNA, 19 nt, Artificial Sequence
  Description of Artificial Sequence: Synthetic oligonucleotide
gcaccggauauucccauuu

SEQ ID NO: 1178475 - RNA, 19 nt, Artificial Sequence
  Description of Artificial Sequence: Synthetic oligonucleotide
ggggcacacuucacaguac

SEQ ID NO: 1178476 - RNA, 19 nt, Artificial Sequence
  Description of Artificial Sequence: Synthetic oligonucleotide
gccuuccuaacugccuuga

SEQ ID NO: 1178477 - RNA, 19 nt, Artificial Sequence
  Description of Artificial Sequence: Synthetic oligonucleotide
cgaacagggcaggauugug

SEQ ID NO: 1178478 - RNA, 19 nt, Artificial Sequence
  Description of Artificial Sequence: Synthetic oligonucleotide
caucugggcguaccucacu

SEQ ID NO: 1178479 - RNA, 19 nt, Artificial Sequence
  Description of Artificial Sequence: Synthetic oligonucleotide
agcccggacguaggacagu

SEQ ID NO: 1178480 - RNA, 19 nt, Artificial Sequence
  Description of Artificial Sequence: Synthetic oligonucleotide
gggcguaccucacugucuu

SEQ ID NO: 1178481 - RNA, 19 nt, Artificial Sequence
  Description of Artificial Sequence: Synthetic oligonucleotide
ccgaagcuuuagcgccugg

SEQ ID NO: 1178482 - RNA, 19 nt, Artificial Sequence
  Description of Artificial Sequence: Synthetic oligonucleotide
ccuggccggauguagggcu

SEQ ID NO: 1178483 - RNA, 19 nt, Artificial Sequence
  Description of Artificial Sequence: Synthetic oligonucleotide
gguuaccuucugcacucau

SEQ ID NO: 1178484 - RNA, 19 nt, Artificial Sequence
  Description of Artificial Sequence: Synthetic oligonucleotide
caccacaugucgggcaccu

SEQ ID NO: 1178485 - RNA, 19 nt, Artificial Sequence
  Description of Artificial Sequence: Synthetic oligonucleotide
ccccuugcacacccguguc

SEQ ID NO: 1178486 - RNA, 19 nt, Artificial Sequence
  Description of Artificial Sequence: Synthetic oligonucleotide
cggggcacacuucacagua

SEQ ID NO: 1178487 - RNA, 19 nt, Artificial Sequence
  Description of Artificial Sequence: Synthetic oligonucleotide
ggaggcuguuccggccaug

SEQ ID NO: 1178488 - RNA, 19 nt, Artificial Sequence
  Description of Artificial Sequence: Synthetic oligonucleotide
cagccacggcacagguuaa

SEQ ID NO: 1178489 - RNA, 19 nt, Artificial Sequence
  Description of Artificial Sequence: Synthetic oligonucleotide
ccucgaacagggcaggauu

SEQ ID NO: 1178490 - RNA, 19 nt, Artificial Sequence
  Description of Artificial Sequence: Synthetic oligonucleotide
gguagccuuggugcaacau

SEQ ID NO: 1178491 - RNA, 19 nt, Artificial Sequence
  Description of Artificial Sequence: Synthetic oligonucleotide
gcccgcuugcuucgaccac

SEQ ID NO: 1178492 - RNA, 19 nt, Artificial Sequence
  Description of Artificial Sequence: Synthetic oligonucleotide
ccaccacaugucgggcacc

SEQ ID NO: 1178493 - RNA, 19 nt, Artificial Sequence
  Description of Artificial Sequence: Synthetic oligonucleotide
gcgugcagcauaggggugu

SEQ ID NO: 1178494 - RNA, 19 nt, Artificial Sequence
  Description of Artificial Sequence: Synthetic oligonucleotide
ccuugcacacccguguccu

SEQ ID NO: 1178495 - RNA, 19 nt, Artificial Sequence
  Description of Artificial Sequence: Synthetic oligonucleotide
caccucccaggguucggcu

SEQ ID NO: 1178496 - RNA, 19 nt, Artificial Sequence
  Description of Artificial Sequence: Synthetic oligonucleotide
cguguccuggaugcaccgc

SEQ ID NO: 1178497 - RNA, 19 nt, Artificial Sequence
  Description of Artificial Sequence: Synthetic oligonucleotide
ccugaagcguguggugcca

SEQ ID NO: 1178498 - RNA, 19 nt, Artificial Sequence
  Description of Artificial Sequence: Synthetic oligonucleotide
guuccgggccucaccugcu

SEQ ID NO: 1178499 - RNA, 19 nt, Artificial Sequence
  Description of Artificial Sequence: Synthetic oligonucleotide
gguccaccauaggcgccac

SEQ ID NO: 1178500 - RNA, 19 nt, Artificial Sequence
  Description of Artificial Sequence: Synthetic oligonucleotide
ccagcaucugggcguaccu

SEQ ID NO: 1178501 - RNA, 19 nt, Artificial Sequence
  Description of Artificial Sequence: Synthetic oligonucleotide
gccggauguagggcuggca

SEQ ID NO: 1178502 - RNA, 19 nt, Artificial Sequence
  Description of Artificial Sequence: Synthetic oligonucleotide
cagagcccgcuugcuucga

SEQ ID NO: 1178503 - RNA, 19 nt, Artificial Sequence
  Description of Artificial Sequence: Synthetic oligonucleotide
cacccguguccuggaugca

SEQ ID NO: 1178504 - RNA, 19 nt, Artificial Sequence
  Description of Artificial Sequence: Synthetic oligonucleotide
ccccaccugaagacacaaa

SEQ ID NO: 1178505 - RNA, 19 nt, Artificial Sequence
  Description of Artificial Sequence: Synthetic oligonucleotide
cccaggguucggcuccaaa

SEQ ID NO: 1178506 - RNA, 19 nt, Artificial Sequence
  Description of Artificial Sequence: Synthetic oligonucleotide
gcccucgaacagggcagga

SEQ ID NO: 1178507 - RNA, 19 nt, Artificial Sequence
  Description of Artificial Sequence: Synthetic oligonucleotide
ccuuccuaacugccuugau

SEQ ID NO: 1178508 - RNA, 19 nt, Artificial Sequence
  Description of Artificial Sequence: Synthetic oligonucleotide
ggcguaccucacugucuuu

SEQ ID NO: 1178509 - RNA, 19 nt, Artificial Sequence
  Description of Artificial Sequence: Synthetic oligonucleotide
cgcuugcuucgaccaccac

SEQ ID NO: 1178510 - RNA, 19 nt, Artificial Sequence
  Description of Artificial Sequence: Synthetic oligonucleotide
gcacacccguguccuggau

SEQ ID NO: 1178511 - RNA, 19 nt, Artificial Sequence
  Description of Artificial Sequence: Synthetic oligonucleotide
gccguccacgcugcccucu

SEQ ID NO: 1178512 - RNA, 19 nt, Artificial Sequence
  Description of Artificial Sequence: Synthetic oligonucleotide
ccuguccucggggcacacu

SEQ ID NO: 1178513 - RNA, 19 nt, Artificial Sequence
  Description of Artificial Sequence: Synthetic oligonucleotide
ccuuaggcccuggccggau

SEQ ID NO: 1178514 - RNA, 19 nt, Artificial Sequence
  Description of Artificial Sequence: Synthetic oligonucleotide
ccguccacgcugcccucuu

SEQ ID NO: 1178515 - RNA, 19 nt, Artificial Sequence
  Description of Artificial Sequence: Synthetic oligonucleotide
ccacgcccuccagggucuu

SEQ ID NO: 1178516 - RNA, 19 nt, Artificial Sequence
  Description of Artificial Sequence: Synthetic oligonucleotide
uuaauaagaauuccuacgg

SEQ ID NO: 1178517 - RNA, 19 nt, Artificial Sequence
  Description of Artificial Sequence: Synthetic oligonucleotide
agcacguugagguagagcc

SEQ ID NO: 1178518 - RNA, 19 nt, Artificial Sequence
  Description of Artificial Sequence: Synthetic oligonucleotide
uucacauugcgaaugagcg

SEQ ID NO: 1178519 - RNA, 19 nt, Artificial Sequence
  Description of Artificial Sequence: Synthetic oligonucleotide
uuugcugucaaaucgagca

SEQ ID NO: 1178520 - RNA, 19 nt, Artificial Sequence
  Description of Artificial Sequence: Synthetic oligonucleotide
aacaggagcguucauuccc

SEQ ID NO: 1178521 - RNA, 19 nt, Artificial Sequence
  Description of Artificial Sequence: Synthetic oligonucleotide
aagauaaacuccuuuguga

SEQ ID NO: 1178522 - RNA, 19 nt, Artificial Sequence
  Description of Artificial Sequence: Synthetic oligonucleotide
ucggucaacauccacagcc

SEQ ID NO: 1178523 - RNA, 19 nt, Artificial Sequence
  Description of Artificial Sequence: Synthetic oligonucleotide
agucaaaucacccaaggca

SEQ ID NO: 1178524 - RNA, 19 nt, Artificial Sequence
  Description of Artificial Sequence: Synthetic oligonucleotide
uacugaucggucaacaucc

SEQ ID NO: 1178525 - RNA, 19 nt, Artificial Sequence
  Description of Artificial Sequence: Synthetic oligonucleotide
aauaagaauuccuacggua

SEQ ID NO: 1178526 - RNA, 19 nt, Artificial Sequence
  Description of Artificial Sequence: Synthetic oligonucleotide
aaugagcgugcacagcucg

SEQ ID NO: 1178527 - RNA, 19 nt, Artificial Sequence
  Description of Artificial Sequence: Synthetic oligonucleotide
ugagaugccacacgaagcc

SEQ ID NO: 1178528 - RNA, 19 nt, Artificial Sequence
  Description of Artificial Sequence: Synthetic oligonucleotide
uauuuugagaugccacacg

SEQ ID NO: 1178529 - RNA, 19 nt, Artificial Sequence
  Description of Artificial Sequence: Synthetic oligonucleotide
ucagucaaaucacccaagg

SEQ ID NO: 1178530 - RNA, 19 nt, Artificial Sequence
  Description of Artificial Sequence: Synthetic oligonucleotide
uccaaacuuauuuugagau

SEQ ID NO: 1178531 - RNA, 19 nt, Artificial Sequence
  Description of Artificial Sequence: Synthetic oligonucleotide
auaagaauuccuacgguac

SEQ ID NO: 1178532 - RNA, 19 nt, Artificial Sequence
  Description of Artificial Sequence: Synthetic oligonucleotide
ucaaagaucacaggccugg

SEQ ID NO: 1178533 - RNA, 19 nt, Artificial Sequence
  Description of Artificial Sequence: Synthetic oligonucleotide
uuucugcagggcaaaaccg

SEQ ID NO: 1178534 - RNA, 19 nt, Artificial Sequence
  Description of Artificial Sequence: Synthetic oligonucleotide
aggucucauguucaggucc

SEQ ID NO: 1178535 - RNA, 19 nt, Artificial Sequence
  Description of Artificial Sequence: Synthetic oligonucleotide
uguagcaaagacagguuug

SEQ ID NO: 1178536 - RNA, 19 nt, Artificial Sequence
  Description of Artificial Sequence: Synthetic oligonucleotide
auuccuacgguacagaauu

SEQ ID NO: 1178537 - RNA, 19 nt, Artificial Sequence
  Description of Artificial Sequence: Synthetic oligonucleotide
gagguugcauuguacaucc

SEQ ID NO: 1178538 - RNA, 19 nt, Artificial Sequence
  Description of Artificial Sequence: Synthetic oligonucleotide
uacgguacagaauugucca

SEQ ID NO: 1178539 - RNA, 19 nt, Artificial Sequence
  Description of Artificial Sequence: Synthetic oligonucleotide
aaugagcaauuccacuaag

SEQ ID NO: 1178540 - RNA, 19 nt, Artificial Sequence
  Description of Artificial Sequence: Synthetic oligonucleotide
ugugucuucauagcugugg

SEQ ID NO: 1178541 - RNA, 19 nt, Artificial Sequence
  Description of Artificial Sequence: Synthetic oligonucleotide
cuucacauugcgaaugagc

SEQ ID NO: 1178542 - RNA, 19 nt, Artificial Sequence
  Description of Artificial Sequence: Synthetic oligonucleotide
ugguccaucaacuguagca

SEQ ID NO: 1178543 - RNA, 19 nt, Artificial Sequence
  Description of Artificial Sequence: Synthetic oligonucleotide
agugaugccgauugagcac

SEQ ID NO: 1178544 - RNA, 19 nt, Artificial Sequence
  Description of Artificial Sequence: Synthetic oligonucleotide
acuuauuuugagaugccac

SEQ ID NO: 1178545 - RNA, 19 nt, Artificial Sequence
  Description of Artificial Sequence: Synthetic oligonucleotide
uuuacagaaggagccaucc

SEQ ID NO: 1178546 - RNA, 19 nt, Artificial Sequence
  Description of Artificial Sequence: Synthetic oligonucleotide
ggcaugaaugcauaggagg

SEQ ID NO: 1178547 - RNA, 19 nt, Artificial Sequence
  Description of Artificial Sequence: Synthetic oligonucleotide
aaacuuauuuugagaugcc

SEQ ID NO: 1178548 - RNA, 19 nt, Artificial Sequence
  Description of Artificial Sequence: Synthetic oligonucleotide
cuacgguacagaauugucc

SEQ ID NO: 1178549 - RNA, 19 nt, Artificial Sequence
  Description of Artificial Sequence: Synthetic oligonucleotide
uaguaguucuucagguagg

SEQ ID NO: 1178550 - RNA, 19 nt, Artificial Sequence
  Description of Artificial Sequence: Synthetic oligonucleotide
gugauccugaauuaauaag

SEQ ID NO: 1178551 - RNA, 19 nt, Artificial Sequence
  Description of Artificial Sequence: Synthetic oligonucleotide
caggaauugggguuggacc

SEQ ID NO: 1178552 - RNA, 19 nt, Artificial Sequence
  Description of Artificial Sequence: Synthetic oligonucleotide
ugcccaucaagauaaacuc

SEQ ID NO: 1178553 - RNA, 19 nt, Artificial Sequence
  Description of Artificial Sequence: Synthetic oligonucleotide
cugaauuaauaagaauucc

SEQ ID NO: 1178554 - RNA, 19 nt, Artificial Sequence
  Description of Artificial Sequence: Synthetic oligonucleotide
ucaaaucgagcaguagacg

SEQ ID NO: 1178555 - RNA, 19 nt, Artificial Sequence
  Description of Artificial Sequence: Synthetic oligonucleotide
ucuuugcugucaaaucgag

SEQ ID NO: 1178556 - RNA, 19 nt, Artificial Sequence
  Description of Artificial Sequence: Synthetic oligonucleotide
cacacgaagcccauugucc

SEQ ID NO: 1178557 - RNA, 19 nt, Artificial Sequence
  Description of Artificial Sequence: Synthetic oligonucleotide
caucauauucagaacagca

SEQ ID NO: 1178558 - RNA, 19 nt, Artificial Sequence
  Description of Artificial Sequence: Synthetic oligonucleotide
gaagcaacccucuugauau

SEQ ID NO: 1178559 - RNA, 19 nt, Artificial Sequence
  Description of Artificial Sequence: Synthetic oligonucleotide
cuuauuuugagaugccaca

SEQ ID NO: 1178560 - RNA, 19 nt, Artificial Sequence
  Description of Artificial Sequence: Synthetic oligonucleotide
agcaguagacgaaaaugcc

SEQ ID NO: 1178561 - RNA, 19 nt, Artificial Sequence
  Description of Artificial Sequence: Synthetic oligonucleotide
aggaauugggguuggacca

SEQ ID NO: 1178562 - RNA, 19 nt, Artificial Sequence
  Description of Artificial Sequence: Synthetic oligonucleotide
gguaagggagaagagaggg

SEQ ID NO: 1178563 - RNA, 19 nt, Artificial Sequence
  Description of Artificial Sequence: Synthetic oligonucleotide
ugcauuguacauccaguga

SEQ ID NO: 1178564 - RNA, 19 nt, Artificial Sequence
  Description of Artificial Sequence: Synthetic oligonucleotide
augcuuuuccagcguaagc

SEQ ID NO: 1178565 - RNA, 19 nt, Artificial Sequence
  Description of Artificial Sequence: Synthetic oligonucleotide
agcgugguaacuuugguuu

SEQ ID NO: 1178566 - RNA, 19 nt, Artificial Sequence
  Description of Artificial Sequence: Synthetic oligonucleotide
guagcaaagacagguuugg

SEQ ID NO: 1178567 - RNA, 19 nt, Artificial Sequence
  Description of Artificial Sequence: Synthetic oligonucleotide
aacaacaugcacagcagca

SEQ ID NO: 1178568 - RNA, 19 nt, Artificial Sequence
  Description of Artificial Sequence: Synthetic oligonucleotide
uccagcgugguaacuuugg

SEQ ID NO: 1178569 - RNA, 19 nt, Artificial Sequence
  Description of Artificial Sequence: Synthetic oligonucleotide
gaauguguagccaauaccu

SEQ ID NO: 1178570 - RNA, 19 nt, Artificial Sequence
  Description of Artificial Sequence: Synthetic oligonucleotide
ucuuugcuauguuuucugc

SEQ ID NO: 1178571 - RNA, 19 nt, Artificial Sequence
  Description of Artificial Sequence: Synthetic oligonucleotide
aacuuauuuugagaugcca

SEQ ID NO: 1178572 - RNA, 19 nt, Artificial Sequence
  Description of Artificial Sequence: Synthetic oligonucleotide
agucccaccaugaugugcg

SEQ ID NO: 1178573 - RNA, 19 nt, Artificial Sequence
  Description of Artificial Sequence: Synthetic oligonucleotide
uaagggacucuaccggaag

SEQ ID NO: 1178574 - RNA, 19 nt, Artificial Sequence
  Description of Artificial Sequence: Synthetic oligonucleotide
uccaccauuucucgaaccu

SEQ ID NO: 1178575 - RNA, 19 nt, Artificial Sequence
  Description of Artificial Sequence: Synthetic oligonucleotide
ugcacuggcaugaaugcau

SEQ ID NO: 1178576 - RNA, 19 nt, Artificial Sequence
  Description of Artificial Sequence: Synthetic oligonucleotide
ugugcuacugaucggucaa

SEQ ID NO: 1178577 - RNA, 19 nt, Artificial Sequence
  Description of Artificial Sequence: Synthetic oligonucleotide
aauguguagccaauaccug

SEQ ID NO: 1178578 - RNA, 19 nt, Artificial Sequence
  Description of Artificial Sequence: Synthetic oligonucleotide
ugccgauugagcacguuga

SEQ ID NO: 1178579 - RNA, 19 nt, Artificial Sequence
  Description of Artificial Sequence: Synthetic oligonucleotide
aagucgucuuccaggaagg

SEQ ID NO: 1178580 - RNA, 19 nt, Artificial Sequence
  Description of Artificial Sequence: Synthetic oligonucleotide
auugcgaaugagcgugcac

SEQ ID NO: 1178581 - RNA, 19 nt, Artificial Sequence
  Description of Artificial Sequence: Synthetic oligonucleotide
uugcgaaugagcgugcaca

SEQ ID NO: 1178582 - RNA, 19 nt, Artificial Sequence
  Description of Artificial Sequence: Synthetic oligonucleotide
caugaaucaucucggugag

SEQ ID NO: 1178583 - RNA, 19 nt, Artificial Sequence
  Description of Artificial Sequence: Synthetic oligonucleotide
cacuaagauauuucgcuuc

SEQ ID NO: 1178584 - RNA, 19 nt, Artificial Sequence
  Description of Artificial Sequence: Synthetic oligonucleotide
ucaucauauucagaacagc

SEQ ID NO: 1178585 - RNA, 19 nt, Artificial Sequence
  Description of Artificial Sequence: Synthetic oligonucleotide
uucccacggagcaucuugg

SEQ ID NO: 1178586 - RNA, 19 nt, Artificial Sequence
  Description of Artificial Sequence: Synthetic oligonucleotide
ucuugauaucuucuggcuu

SEQ ID NO: 1178587 - RNA, 19 nt, Artificial Sequence
  Description of Artificial Sequence: Synthetic oligonucleotide
cuacugaucggucaacauc

SEQ ID NO: 1178588 - RNA, 19 nt, Artificial Sequence
  Description of Artificial Sequence: Synthetic oligonucleotide
ugcgaaugagcgugcacag

SEQ ID NO: 1178589 - RNA, 19 nt, Artificial Sequence
  Description of Artificial Sequence: Synthetic oligonucleotide
uccacuguucugcccauca

SEQ ID NO: 1178590 - RNA, 19 nt, Artificial Sequence
  Description of Artificial Sequence: Synthetic oligonucleotide
gacucuaccggaagagccg

SEQ ID NO: 1178591 - RNA, 19 nt, Artificial Sequence
  Description of Artificial Sequence: Synthetic oligonucleotide
gccgguauguccuaggcag

SEQ ID NO: 1178592 - RNA, 19 nt, Artificial Sequence
  Description of Artificial Sequence: Synthetic oligonucleotide
gguugcauuguacauccag

SEQ ID NO: 1178593 - RNA, 19 nt, Artificial Sequence
  Description of Artificial Sequence: Synthetic oligonucleotide
gucaaaucgagcaguagac

SEQ ID NO: 1178594 - RNA, 19 nt, Artificial Sequence
  Description of Artificial Sequence: Synthetic oligonucleotide
uccagcguaagcagaauuu

SEQ ID NO: 1178595 - RNA, 19 nt, Artificial Sequence
  Description of Artificial Sequence: Synthetic oligonucleotide
guauguccuaggcaggcgc

SEQ ID NO: 1178596 - RNA, 19 nt, Artificial Sequence
  Description of Artificial Sequence: Synthetic oligonucleotide
cacggagcaucuuggaagc

SEQ ID NO: 1178597 - RNA, 19 nt, Artificial Sequence
  Description of Artificial Sequence: Synthetic oligonucleotide
accgucugugugcaggagg

SEQ ID NO: 1178598 - RNA, 19 nt, Artificial Sequence
  Description of Artificial Sequence: Synthetic oligonucleotide
aucaacuguagcaaagaca

SEQ ID NO: 1178599 - RNA, 19 nt, Artificial Sequence
  Description of Artificial Sequence: Synthetic oligonucleotide
augccgauugagcacguug

SEQ ID NO: 1178600 - RNA, 19 nt, Artificial Sequence
  Description of Artificial Sequence: Synthetic oligonucleotide
uacguggcaccacugcuga

SEQ ID NO: 1178601 - RNA, 19 nt, Artificial Sequence
  Description of Artificial Sequence: Synthetic oligonucleotide
cuuucaagucccaccauga

SEQ ID NO: 1178602 - RNA, 19 nt, Artificial Sequence
  Description of Artificial Sequence: Synthetic oligonucleotide
ucgugauccugaauuaaua

SEQ ID NO: 1178603 - RNA, 19 nt, Artificial Sequence
  Description of Artificial Sequence: Synthetic oligonucleotide
ucuugaauguguagccaau

SEQ ID NO: 1178604 - RNA, 19 nt, Artificial Sequence
  Description of Artificial Sequence: Synthetic oligonucleotide
cauaucgugauccugaauu

SEQ ID NO: 1178605 - RNA, 19 nt, Artificial Sequence
  Description of Artificial Sequence: Synthetic oligonucleotide
uacugugcuacugaucggu

SEQ ID NO: 1178606 - RNA, 19 nt, Artificial Sequence
  Description of Artificial Sequence: Synthetic oligonucleotide
acauuggacaugucucucu

SEQ ID NO: 1178607 - RNA, 19 nt, Artificial Sequence
  Description of Artificial Sequence: Synthetic oligonucleotide
ugguggugucucuugaggu

SEQ ID NO: 1178608 - RNA, 19 nt, Artificial Sequence
  Description of Artificial Sequence: Synthetic oligonucleotide
gaacaugccuuugccaggc

SEQ ID NO: 1178609 - RNA, 19 nt, Artificial Sequence
  Description of Artificial Sequence: Synthetic oligonucleotide
aaugcauaggaggccugug

SEQ ID NO: 1178610 - RNA, 19 nt, Artificial Sequence
  Description of Artificial Sequence: Synthetic oligonucleotide
aaucgagcaguagacgaaa

SEQ ID NO: 1178611 - RNA, 19 nt, Artificial Sequence
  Description of Artificial Sequence: Synthetic oligonucleotide
uuacagaaggagccauccu

SEQ ID NO: 1178612 - RNA, 19 nt, Artificial Sequence
  Description of Artificial Sequence: Synthetic oligonucleotide
caguagacgaaaaugccaa

SEQ ID NO: 1178613 - RNA, 19 nt, Artificial Sequence
  Description of Artificial Sequence: Synthetic oligonucleotide
gaauuccuacgguacagaa

SEQ ID NO: 1178614 - RNA, 19 nt, Artificial Sequence
  Description of Artificial Sequence: Synthetic oligonucleotide
augaaugcauaggaggccu

SEQ ID NO: 1178615 - RNA, 19 nt, Artificial Sequence
  Description of Artificial Sequence: Synthetic oligonucleotide
cuucccacggagcaucuug

SEQ ID NO: 1178616 - RNA, 19 nt, Artificial Sequence
  Description of Artificial Sequence: Synthetic oligonucleotide
ucaggaauugggguuggac

SEQ ID NO: 1178617 - RNA, 19 nt, Artificial Sequence
  Description of Artificial Sequence: Synthetic oligonucleotide
ucuuggcucguucuagcuc

SEQ ID NO: 1178618 - RNA, 19 nt, Artificial Sequence
  Description of Artificial Sequence: Synthetic oligonucleotide
caugaugugcgugagcuca

SEQ ID NO: 1178619 - RNA, 19 nt, Artificial Sequence
  Description of Artificial Sequence: Synthetic oligonucleotide
auccuuacacaguguccac

SEQ ID NO: 1178620 - RNA, 19 nt, Artificial Sequence
  Description of Artificial Sequence: Synthetic oligonucleotide
cugucuugggucugcacug

SEQ ID NO: 1178621 - RNA, 19 nt, Artificial Sequence
  Description of Artificial Sequence: Synthetic oligonucleotide
cuuaagggacucuaccgga

SEQ ID NO: 1178622 - RNA, 19 nt, Artificial Sequence
  Description of Artificial Sequence: Synthetic oligonucleotide
uuucaagucccaccaugau

SEQ ID NO: 1178623 - RNA, 19 nt, Artificial Sequence
  Description of Artificial Sequence: Synthetic oligonucleotide
aguguacugugcuacugau

SEQ ID NO: 1178624 - RNA, 19 nt, Artificial Sequence
  Description of Artificial Sequence: Synthetic oligonucleotide
agcgugcacagcucguggg

SEQ ID NO: 1178625 - RNA, 19 nt, Artificial Sequence
  Description of Artificial Sequence: Synthetic oligonucleotide
aaaaccggugcaggcccac

SEQ ID NO: 1178626 - RNA, 19 nt, Artificial Sequence
  Description of Artificial Sequence: Synthetic oligonucleotide
gugguaggagguugcauug

SEQ ID NO: 1178627 - RNA, 19 nt, Artificial Sequence
  Description of Artificial Sequence: Synthetic oligonucleotide
aaaucgagcaguagacgaa

SEQ ID NO: 1178628 - RNA, 19 nt, Artificial Sequence
  Description of Artificial Sequence: Synthetic oligonucleotide
ucgagcaguagacgaaaau

SEQ ID NO: 1178629 - RNA, 19 nt, Artificial Sequence
  Description of Artificial Sequence: Synthetic oligonucleotide
ggguauaguaguucuucag

SEQ ID NO: 1178630 - RNA, 19 nt, Artificial Sequence
  Description of Artificial Sequence: Synthetic oligonucleotide
auaucgugauccugaauua

SEQ ID NO: 1178631 - RNA, 19 nt, Artificial Sequence
  Description of Artificial Sequence: Synthetic oligonucleotide
aggugcucaugcuccacuc

SEQ ID NO: 1178632 - RNA, 19 nt, Artificial Sequence
  Description of Artificial Sequence: Synthetic oligonucleotide
agagccgguauguccuagg

SEQ ID NO: 1178633 - RNA, 19 nt, Artificial Sequence
  Description of Artificial Sequence: Synthetic oligonucleotide
ugaaugcauaggaggccug

SEQ ID NO: 1178634 - RNA, 19 nt, Artificial Sequence
  Description of Artificial Sequence: Synthetic oligonucleotide
cauccuuacacagugucca

SEQ ID NO: 1178635 - RNA, 19 nt, Artificial Sequence
  Description of Artificial Sequence: Synthetic oligonucleotide
auaccugccuccccacauc

SEQ ID NO: 1178636 - RNA, 19 nt, Artificial Sequence
  Description of Artificial Sequence: Synthetic oligonucleotide
agcuacagcaggcuuccca

SEQ ID NO: 1178637 - RNA, 19 nt, Artificial Sequence
  Description of Artificial Sequence: Synthetic oligonucleotide
aucggucaacauccacagc

SEQ ID NO: 1178638 - RNA, 19 nt, Artificial Sequence
  Description of Artificial Sequence: Synthetic oligonucleotide
gggcaggucagucaaauca

SEQ ID NO: 1178639 - RNA, 19 nt, Artificial Sequence
  Description of Artificial Sequence: Synthetic oligonucleotide
uucgcuucauaucgugauc

SEQ ID NO: 1178640 - RNA, 19 nt, Artificial Sequence
  Description of Artificial Sequence: Synthetic oligonucleotide
uuccaccauuucucgaacc

SEQ ID NO: 1178641 - RNA, 19 nt, Artificial Sequence
  Description of Artificial Sequence: Synthetic oligonucleotide
agcguucauucccguuucc

SEQ ID NO: 1178642 - RNA, 19 nt, Artificial Sequence
  Description of Artificial Sequence: Synthetic oligonucleotide
aaccggugcaggcccacug

SEQ ID NO: 1178643 - RNA, 19 nt, Artificial Sequence
  Description of Artificial Sequence: Synthetic oligonucleotide
gagcgugcacagcucgugg

SEQ ID NO: 1178644 - RNA, 19 nt, Artificial Sequence
  Description of Artificial Sequence: Synthetic oligonucleotide
gcaugaaugcauaggaggc

SEQ ID NO: 1178645 - RNA, 19 nt, Artificial Sequence
  Description of Artificial Sequence: Synthetic oligonucleotide
ugucggcagacacagcaua

SEQ ID NO: 1178646 - RNA, 19 nt, Artificial Sequence
  Description of Artificial Sequence: Synthetic oligonucleotide
ugggguacguggcaccacu

SEQ ID NO: 1178647 - RNA, 19 nt, Artificial Sequence
  Description of Artificial Sequence: Synthetic oligonucleotide
cccuuaagggacucuaccg

SEQ ID NO: 1178648 - RNA, 19 nt, Artificial Sequence
  Description of Artificial Sequence: Synthetic oligonucleotide
ucguucuagcuccaccaaa

SEQ ID NO: 1178649 - RNA, 19 nt, Artificial Sequence
  Description of Artificial Sequence: Synthetic oligonucleotide
uccuacgguacagaauugu

SEQ ID NO: 1178650 - RNA, 19 nt, Artificial Sequence
  Description of Artificial Sequence: Synthetic oligonucleotide
cucgaaccugucuuggguc

SEQ ID NO: 1178651 - RNA, 19 nt, Artificial Sequence
  Description of Artificial Sequence: Synthetic oligonucleotide
acucuaccggaagagccgg

SEQ ID NO: 1178652 - RNA, 19 nt, Artificial Sequence
  Description of Artificial Sequence: Synthetic oligonucleotide
cugagcucccaagagguac

SEQ ID NO: 1178653 - RNA, 19 nt, Artificial Sequence
  Description of Artificial Sequence: Synthetic oligonucleotide
uaucgugauccugaauuaa

SEQ ID NO: 1178654 - RNA, 19 nt, Artificial Sequence
  Description of Artificial Sequence: Synthetic oligonucleotide
cuucucgaucaaucuuugc

SEQ ID NO: 1178655 - RNA, 19 nt, Artificial Sequence
  Description of Artificial Sequence: Synthetic oligonucleotide
gagccgguauguccuaggc

SEQ ID NO: 1178656 - RNA, 19 nt, Artificial Sequence
  Description of Artificial Sequence: Synthetic oligonucleotide
ccacggagcaucuuggaag

SEQ ID NO: 1178657 - RNA, 19 nt, Artificial Sequence
  Description of Artificial Sequence: Synthetic oligonucleotide
cacguugagguagagccug

SEQ ID NO: 1178658 - RNA, 19 nt, Artificial Sequence
  Description of Artificial Sequence: Synthetic oligonucleotide
auguugggguacguggcac

SEQ ID NO: 1178659 - RNA, 19 nt, Artificial Sequence
  Description of Artificial Sequence: Synthetic oligonucleotide
cccaagagguacuuucugg

SEQ ID NO: 1178660 - RNA, 19 nt, Artificial Sequence
  Description of Artificial Sequence: Synthetic oligonucleotide
ugcuacugaucggucaaca

SEQ ID NO: 1178661 - RNA, 19 nt, Artificial Sequence
  Description of Artificial Sequence: Synthetic oligonucleotide
uuccuacgguacagaauug

SEQ ID NO: 1178662 - RNA, 19 nt, Artificial Sequence
  Description of Artificial Sequence: Synthetic oligonucleotide
guacuuucuggcacauucc

SEQ ID NO: 1178663 - RNA, 19 nt, Artificial Sequence
  Description of Artificial Sequence: Synthetic oligonucleotide
cagcaaaggggaugaaguc

SEQ ID NO: 1178664 - RNA, 19 nt, Artificial Sequence
  Description of Artificial Sequence: Synthetic oligonucleotide
ugaugugcgugagcucagg

SEQ ID NO: 1178665 - RNA, 19 nt, Artificial Sequence
  Description of Artificial Sequence: Synthetic oligonucleotide
uccuuacacaguguccaca

SEQ ID NO: 1178666 - RNA, 19 nt, Artificial Sequence
  Description of Artificial Sequence: Synthetic oligonucleotide
ucauaucgugauccugaau

SEQ ID NO: 1178667 - RNA, 19 nt, Artificial Sequence
  Description of Artificial Sequence: Synthetic oligonucleotide
augaaucaucucggugagc

SEQ ID NO: 1178668 - RNA, 19 nt, Artificial Sequence
  Description of Artificial Sequence: Synthetic oligonucleotide
ucauucccguuuccagucu

SEQ ID NO: 1178669 - RNA, 19 nt, Artificial Sequence
  Description of Artificial Sequence: Synthetic oligonucleotide
augagcaauuccacuaaga

SEQ ID NO: 1178670 - RNA, 19 nt, Artificial Sequence
  Description of Artificial Sequence: Synthetic oligonucleotide
gaauugggguuggaccaag

SEQ ID NO: 1178671 - RNA, 19 nt, Artificial Sequence
  Description of Artificial Sequence: Synthetic oligonucleotide
agaauuccuacgguacaga

SEQ ID NO: 1178672 - RNA, 19 nt, Artificial Sequence
  Description of Artificial Sequence: Synthetic oligonucleotide
ugggcacuccggguaaggg

SEQ ID NO: 1178673 - RNA, 19 nt, Artificial Sequence
  Description of Artificial Sequence: Synthetic oligonucleotide
cagaaggagccauccuuac

SEQ ID NO: 1178674 - RNA, 19 nt, Artificial Sequence
  Description of Artificial Sequence: Synthetic oligonucleotide
agcguaagcagaauuucau

SEQ ID NO: 1178675 - RNA, 19 nt, Artificial Sequence
  Description of Artificial Sequence: Synthetic oligonucleotide
acauugcgaaugagcgugc

SEQ ID NO: 1178676 - RNA, 19 nt, Artificial Sequence
  Description of Artificial Sequence: Synthetic oligonucleotide
uguccaagccuuugcuguc

SEQ ID NO: 1178677 - RNA, 19 nt, Artificial Sequence
  Description of Artificial Sequence: Synthetic oligonucleotide
gaugugcgugagcucagga

SEQ ID NO: 1178678 - RNA, 19 nt, Artificial Sequence
  Description of Artificial Sequence: Synthetic oligonucleotide
cauuguccagcgugguaac

SEQ ID NO: 1178679 - RNA, 19 nt, Artificial Sequence
  Description of Artificial Sequence: Synthetic oligonucleotide
gaaccgucugugugcagga

SEQ ID NO: 1178680 - RNA, 19 nt, Artificial Sequence
  Description of Artificial Sequence: Synthetic oligonucleotide
ggucagucaaaucacccaa

SEQ ID NO: 1178681 - RNA, 19 nt, Artificial Sequence
  Description of Artificial Sequence: Synthetic oligonucleotide
ggcacuccggguaagggag

SEQ ID NO: 1178682 - RNA, 19 nt, Artificial Sequence
  Description of Artificial Sequence: Synthetic oligonucleotide
gagcguucauucccguuuc

SEQ ID NO: 1178683 - RNA, 19 nt, Artificial Sequence
  Description of Artificial Sequence: Synthetic oligonucleotide
gugucuuggcucguucuag

SEQ ID NO: 1178684 - RNA, 19 nt, Artificial Sequence
  Description of Artificial Sequence: Synthetic oligonucleotide
gagcauggacaucagcugu

SEQ ID NO: 1178685 - RNA, 19 nt, Artificial Sequence
  Description of Artificial Sequence: Synthetic oligonucleotide
acuucucgaucaaucuuug

SEQ ID NO: 1178686 - RNA, 19 nt, Artificial Sequence
  Description of Artificial Sequence: Synthetic oligonucleotide
guacguggcaccacugcug

SEQ ID NO: 1178687 - RNA, 19 nt, Artificial Sequence
  Description of Artificial Sequence: Synthetic oligonucleotide
gacaugucucucuccaccu

SEQ ID NO: 1178688 - RNA, 19 nt, Artificial Sequence
  Description of Artificial Sequence: Synthetic oligonucleotide
agcaccggucagccugccc

SEQ ID NO: 1178689 - RNA, 19 nt, Artificial Sequence
  Description of Artificial Sequence: Synthetic oligonucleotide
cugaucggucaacauccac

SEQ ID NO: 1178690 - RNA, 19 nt, Artificial Sequence
  Description of Artificial Sequence: Synthetic oligonucleotide
agccgguauguccuaggca

SEQ ID NO: 1178691 - RNA, 19 nt, Artificial Sequence
  Description of Artificial Sequence: Synthetic oligonucleotide
agcauggacaucagcugug

SEQ ID NO: 1178692 - RNA, 19 nt, Artificial Sequence
  Description of Artificial Sequence: Synthetic oligonucleotide
uuguccagcgugguaacuu

SEQ ID NO: 1178693 - RNA, 19 nt, Artificial Sequence
  Description of Artificial Sequence: Synthetic oligonucleotide
aucgugauccugaauuaau

SEQ ID NO: 1178694 - RNA, 19 nt, Artificial Sequence
  Description of Artificial Sequence: Synthetic oligonucleotide
auauuucgcuucauaucgu

SEQ ID NO: 1178695 - RNA, 19 nt, Artificial Sequence
  Description of Artificial Sequence: Synthetic oligonucleotide
uucccguuuccagucuccc

SEQ ID NO: 1178696 - RNA, 19 nt, Artificial Sequence
  Description of Artificial Sequence: Synthetic oligonucleotide
agacagguuugggcacucc

SEQ ID NO: 1178697 - RNA, 19 nt, Artificial Sequence
  Description of Artificial Sequence: Synthetic oligonucleotide
acugugcuacugaucgguc

SEQ ID NO: 1178698 - RNA, 19 nt, Artificial Sequence
  Description of Artificial Sequence: Synthetic oligonucleotide
cuccccacauccucaaaga

SEQ ID NO: 1178699 - RNA, 19 nt, Artificial Sequence
  Description of Artificial Sequence: Synthetic oligonucleotide
guugcauuguacauccagu

SEQ ID NO: 1178700 - RNA, 19 nt, Artificial Sequence
  Description of Artificial Sequence: Synthetic oligonucleotide
cugugcuacugaucgguca

SEQ ID NO: 1178701 - RNA, 19 nt, Artificial Sequence
  Description of Artificial Sequence: Synthetic oligonucleotide
agauaccaccaugcuuuuc

SEQ ID NO: 1178702 - RNA, 19 nt, Artificial Sequence
  Description of Artificial Sequence: Synthetic oligonucleotide
guacagaauuguccaaacu

SEQ ID NO: 1178703 - RNA, 19 nt, Artificial Sequence
  Description of Artificial Sequence: Synthetic oligonucleotide
gcucguucuagcuccacca

SEQ ID NO: 1178704 - RNA, 19 nt, Artificial Sequence
  Description of Artificial Sequence: Synthetic oligonucleotide
gcaguagacgaaaaugcca

SEQ ID NO: 1178705 - RNA, 19 nt, Artificial Sequence
  Description of Artificial Sequence: Synthetic oligonucleotide
uggacuccagguucaucau

SEQ ID NO: 1178706 - RNA, 19 nt, Artificial Sequence
  Description of Artificial Sequence: Synthetic oligonucleotide
aaaucacccaaggcagcua

SEQ ID NO: 1178707 - RNA, 19 nt, Artificial Sequence
  Description of Artificial Sequence: Synthetic oligonucleotide
ucuaccggaagagccggua

SEQ ID NO: 1178708 - RNA, 19 nt, Artificial Sequence
  Description of Artificial Sequence: Synthetic oligonucleotide
caggucucauguucagguc

SEQ ID NO: 1178709 - RNA, 19 nt, Artificial Sequence
  Description of Artificial Sequence: Synthetic oligonucleotide
aaccgucugugugcaggag

SEQ ID NO: 1178710 - RNA, 19 nt, Artificial Sequence
  Description of Artificial Sequence: Synthetic oligonucleotide
ggcccuccggccgagaagg

SEQ ID NO: 1178711 - RNA, 19 nt, Artificial Sequence
  Description of Artificial Sequence: Synthetic oligonucleotide
gaaugagcgugcacagcuc

SEQ ID NO: 1178712 - RNA, 19 nt, Artificial Sequence
  Description of Artificial Sequence: Synthetic oligonucleotide
ggugcucaugcuccacucc

SEQ ID NO: 1178713 - RNA, 19 nt, Artificial Sequence
  Description of Artificial Sequence: Synthetic oligonucleotide
ccuacgguacagaauuguc

SEQ ID NO: 1178714 - RNA, 19 nt, Artificial Sequence
  Description of Artificial Sequence: Synthetic oligonucleotide
ucccguuuccagucucccu

SEQ ID NO: 1178715 - RNA, 19 nt, Artificial Sequence
  Description of Artificial Sequence: Synthetic oligonucleotide
ucccacggagcaucuugga

SEQ ID NO: 1178716 - RNA, 19 nt, Artificial Sequence
  Description of Artificial Sequence: Synthetic oligonucleotide
ggguaagggagaagagagg

SEQ ID NO: 1178717 - RNA, 19 nt, Artificial Sequence
  Description of Artificial Sequence: Synthetic oligonucleotide
ugagcacguugagguagag

SEQ ID NO: 1178718 - RNA, 19 nt, Artificial Sequence
  Description of Artificial Sequence: Synthetic oligonucleotide
cuccacucccacuccagca

SEQ ID NO: 1178719 - RNA, 19 nt, Artificial Sequence
  Description of Artificial Sequence: Synthetic oligonucleotide
acgguacagaauuguccaa

SEQ ID NO: 1178720 - RNA, 19 nt, Artificial Sequence
  Description of Artificial Sequence: Synthetic oligonucleotide
cacuucucgaucaaucuuu

SEQ ID NO: 1178721 - RNA, 19 nt, Artificial Sequence
  Description of Artificial Sequence: Synthetic oligonucleotide
cccguuuccagucucccug

SEQ ID NO: 1178722 - RNA, 19 nt, Artificial Sequence
  Description of Artificial Sequence: Synthetic oligonucleotide
accggugcaggcccacugu

SEQ ID NO: 1178723 - RNA, 19 nt, Artificial Sequence
  Description of Artificial Sequence: Synthetic oligonucleotide
acuguagcaaagacagguu

SEQ ID NO: 1178724 - RNA, 19 nt, Artificial Sequence
  Description of Artificial Sequence: Synthetic oligonucleotide
gcguaagcagaauuucauc

SEQ ID NO: 1178725 - RNA, 19 nt, Artificial Sequence
  Description of Artificial Sequence: Synthetic oligonucleotide
gcauacaugguggugucuc

SEQ ID NO: 1178726 - RNA, 19 nt, Artificial Sequence
  Description of Artificial Sequence: Synthetic oligonucleotide
ggguacguggcaccacugc

SEQ ID NO: 1178727 - RNA, 19 nt, Artificial Sequence
  Description of Artificial Sequence: Synthetic oligonucleotide
gcagcuacagcaggcuucc

SEQ ID NO: 1178728 - RNA, 19 nt, Artificial Sequence
  Description of Artificial Sequence: Synthetic oligonucleotide
cuugaauguguagccaaua

SEQ ID NO: 1178729 - RNA, 19 nt, Artificial Sequence
  Description of Artificial Sequence: Synthetic oligonucleotide
guuugggcacuccggguaa

SEQ ID NO: 1178730 - RNA, 19 nt, Artificial Sequence
  Description of Artificial Sequence: Synthetic oligonucleotide
cugugucuucauagcugug

SEQ ID NO: 1178731 - RNA, 19 nt, Artificial Sequence
  Description of Artificial Sequence: Synthetic oligonucleotide
gccgauugagcacguugag

SEQ ID NO: 1178732 - RNA, 19 nt, Artificial Sequence
  Description of Artificial Sequence: Synthetic oligonucleotide
cacuguguucucccuaaaa

SEQ ID NO: 1178733 - RNA, 19 nt, Artificial Sequence
  Description of Artificial Sequence: Synthetic oligonucleotide
aggcccuccggccgagaag

SEQ ID NO: 1178734 - RNA, 19 nt, Artificial Sequence
  Description of Artificial Sequence: Synthetic oligonucleotide
cauagcuguggugguagga

SEQ ID NO: 1178735 - RNA, 19 nt, Artificial Sequence
  Description of Artificial Sequence: Synthetic oligonucleotide
ccgauugagcacguugagg

SEQ ID NO: 1178736 - RNA, 19 nt, Artificial Sequence
  Description of Artificial Sequence: Synthetic oligonucleotide
cccaucaagauaaacuccu

SEQ ID NO: 1178737 - RNA, 19 nt, Artificial Sequence
  Description of Artificial Sequence: Synthetic oligonucleotide
gcaggggugcagaaccacg

SEQ ID NO: 1178738 - RNA, 19 nt, Artificial Sequence
  Description of Artificial Sequence: Synthetic oligonucleotide
gugucucuugaggucuggc

SEQ ID NO: 1178739 - RNA, 19 nt, Artificial Sequence
  Description of Artificial Sequence: Synthetic oligonucleotide
aaaccggugcaggcccacu

SEQ ID NO: 1178740 - RNA, 19 nt, Artificial Sequence
  Description of Artificial Sequence: Synthetic oligonucleotide
cgauugagcacguugaggu

SEQ ID NO: 1178741 - RNA, 19 nt, Artificial Sequence
  Description of Artificial Sequence: Synthetic oligonucleotide
agccuggagaacaugccuu

SEQ ID NO: 1178742 - RNA, 19 nt, Artificial Sequence
  Description of Artificial Sequence: Synthetic oligonucleotide
cuaggcaggcgcccaucuc

SEQ ID NO: 1178743 - RNA, 19 nt, Artificial Sequence
  Description of Artificial Sequence: Synthetic oligonucleotide
agcucguggggcagcuuuc

SEQ ID NO: 1178744 - RNA, 19 nt, Artificial Sequence
  Description of Artificial Sequence: Synthetic oligonucleotide
ggaagagccgguauguccu

SEQ ID NO: 1178745 - RNA, 19 nt, Artificial Sequence
  Description of Artificial Sequence: Synthetic oligonucleotide
gaaccacgucagccagcag

SEQ ID NO: 1178746 - RNA, 19 nt, Artificial Sequence
  Description of Artificial Sequence: Synthetic oligonucleotide
gguaggaaugcagcacuuc

SEQ ID NO: 1178747 - RNA, 19 nt, Artificial Sequence
  Description of Artificial Sequence: Synthetic oligonucleotide
aggagcguucauucccguu

SEQ ID NO: 1178748 - RNA, 19 nt, Artificial Sequence
  Description of Artificial Sequence: Synthetic oligonucleotide
ccagcguaagcagaauuuc

SEQ ID NO: 1178749 - RNA, 19 nt, Artificial Sequence
  Description of Artificial Sequence: Synthetic oligonucleotide
caaaucacccaaggcagcu

SEQ ID NO: 1178750 - RNA, 19 nt, Artificial Sequence
  Description of Artificial Sequence: Synthetic oligonucleotide
ccuuacacaguguccacaa

SEQ ID NO: 1178751 - RNA, 19 nt, Artificial Sequence
  Description of Artificial Sequence: Synthetic oligonucleotide
gucgucuuccaggaaggaa

SEQ ID NO: 1178752 - RNA, 19 nt, Artificial Sequence
  Description of Artificial Sequence: Synthetic oligonucleotide
agucgucuuccaggaagga

SEQ ID NO: 1178753 - RNA, 19 nt, Artificial Sequence
  Description of Artificial Sequence: Synthetic oligonucleotide
gaagagccgguauguccua

SEQ ID NO: 1178754 - RNA, 19 nt, Artificial Sequence
  Description of Artificial Sequence: Synthetic oligonucleotide
acugaucggucaacaucca

SEQ ID NO: 1178755 - RNA, 19 nt, Artificial Sequence
  Description of Artificial Sequence: Synthetic oligonucleotide
gguacguggcaccacugcu

SEQ ID NO: 1178756 - RNA, 19 nt, Artificial Sequence
  Description of Artificial Sequence: Synthetic oligonucleotide
caaaaccggugcaggccca

SEQ ID NO: 1178757 - RNA, 19 nt, Artificial Sequence
  Description of Artificial Sequence: Synthetic oligonucleotide
cgugauccugaauuaauaa

SEQ ID NO: 1178758 - RNA, 19 nt, Artificial Sequence
  Description of Artificial Sequence: Synthetic oligonucleotide
ccgguauguccuaggcagg

SEQ ID NO: 1178759 - RNA, 19 nt, Artificial Sequence
  Description of Artificial Sequence: Synthetic oligonucleotide
caagcaccaugcggucggg

SEQ ID NO: 1178760 - RNA, 19 nt, Artificial Sequence
  Description of Artificial Sequence: Synthetic oligonucleotide
acuccggguaagggagaag

SEQ ID NO: 1178761 - RNA, 19 nt, Artificial Sequence
  Description of Artificial Sequence: Synthetic oligonucleotide
gggcacuccggguaaggga

SEQ ID NO: 1178762 - RNA, 19 nt, Artificial Sequence
  Description of Artificial Sequence: Synthetic oligonucleotide
ggggauguugggguacgug

SEQ ID NO: 1178763 - RNA, 19 nt, Artificial Sequence
  Description of Artificial Sequence: Synthetic oligonucleotide
cauugcgaaugagcgugca

SEQ ID NO: 1178764 - RNA, 19 nt, Artificial Sequence
  Description of Artificial Sequence: Synthetic oligonucleotide
aucgagcaguagacgaaaa

SEQ ID NO: 1178765 - RNA, 19 nt, Artificial Sequence
  Description of Artificial Sequence: Synthetic oligonucleotide
caggggugcagaaccacgu

SEQ ID NO: 1178766 - RNA, 19 nt, Artificial Sequence
  Description of Artificial Sequence: Synthetic oligonucleotide
gggucaggucucauguuca

SEQ ID NO: 1178767 - RNA, 19 nt, Artificial Sequence
  Description of Artificial Sequence: Synthetic oligonucleotide
gcgugguaacuuugguuuc

SEQ ID NO: 1178768 - RNA, 19 nt, Artificial Sequence
  Description of Artificial Sequence: Synthetic oligonucleotide
gugcuacugaucggucaac

SEQ ID NO: 1178769 - RNA, 19 nt, Artificial Sequence
  Description of Artificial Sequence: Synthetic oligonucleotide
ccccaguguacugugcuac

SEQ ID NO: 1178770 - RNA, 19 nt, Artificial Sequence
  Description of Artificial Sequence: Synthetic oligonucleotide
gcgugagcucaggaauugg

SEQ ID NO: 1178771 - RNA, 19 nt, Artificial Sequence
  Description of Artificial Sequence: Synthetic oligonucleotide
ccaccauuucucgaaccug

SEQ ID NO: 1178772 - RNA, 19 nt, Artificial Sequence
  Description of Artificial Sequence: Synthetic oligonucleotide
ccugucuugggucugcacu

SEQ ID NO: 1178773 - RNA, 19 nt, Artificial Sequence
  Description of Artificial Sequence: Synthetic oligonucleotide
gcaccggucagccugcccu

SEQ ID NO: 1178774 - RNA, 19 nt, Artificial Sequence
  Description of Artificial Sequence: Synthetic oligonucleotide
cgaaugagcgugcacagcu

SEQ ID NO: 1178775 - RNA, 19 nt, Artificial Sequence
  Description of Artificial Sequence: Synthetic oligonucleotide
uggcaacaggagcguucau

SEQ ID NO: 1178776 - RNA, 19 nt, Artificial Sequence
  Description of Artificial Sequence: Synthetic oligonucleotide
cauaggaggccugugucuu

SEQ ID NO: 1178777 - RNA, 19 nt, Artificial Sequence
  Description of Artificial Sequence: Synthetic oligonucleotide
gcgaaugagcgugcacagc

SEQ ID NO: 1178778 - RNA, 19 nt, Artificial Sequence
  Description of Artificial Sequence: Synthetic oligonucleotide
gaagcccauuguccagcgu

SEQ ID NO: 1178779 - RNA, 19 nt, Artificial Sequence
  Description of Artificial Sequence: Synthetic oligonucleotide
cagcgugguaacuuugguu

SEQ ID NO: 1178780 - RNA, 19 nt, Artificial Sequence
  Description of Artificial Sequence: Synthetic oligonucleotide
acggagcaucuuggaagca

SEQ ID NO: 1178781 - RNA, 19 nt, Artificial Sequence
  Description of Artificial Sequence: Synthetic oligonucleotide
gcguucauucccguuucca

SEQ ID NO: 1178782 - RNA, 19 nt, Artificial Sequence
  Description of Artificial Sequence: Synthetic oligonucleotide
gaugccacacgaagcccau

SEQ ID NO: 1178783 - RNA, 19 nt, Artificial Sequence
  Description of Artificial Sequence: Synthetic oligonucleotide
ggaauugggguuggaccaa

SEQ ID NO: 1178784 - RNA, 19 nt, Artificial Sequence
  Description of Artificial Sequence: Synthetic oligonucleotide
gcuacugaucggucaacau

SEQ ID NO: 1178785 - RNA, 19 nt, Artificial Sequence
  Description of Artificial Sequence: Synthetic oligonucleotide
ccggguaagggagaagaga

SEQ ID NO: 1178786 - RNA, 19 nt, Artificial Sequence
  Description of Artificial Sequence: Synthetic oligonucleotide
uggcucguucuagcuccac

SEQ ID NO: 1178787 - RNA, 19 nt, Artificial Sequence
  Description of Artificial Sequence: Synthetic oligonucleotide
ggcaggggugcagaaccac

SEQ ID NO: 1178788 - RNA, 19 nt, Artificial Sequence
  Description of Artificial Sequence: Synthetic oligonucleotide
aggcaggggugcagaacca

SEQ ID NO: 1178789 - RNA, 19 nt, Artificial Sequence
  Description of Artificial Sequence: Synthetic oligonucleotide
cuaccggaagagccgguau

SEQ ID NO: 1178790 - RNA, 19 nt, Artificial Sequence
  Description of Artificial Sequence: Synthetic oligonucleotide
gagguacuuucuggcacau

SEQ ID NO: 1178791 - RNA, 19 nt, Artificial Sequence
  Description of Artificial Sequence: Synthetic oligonucleotide
agcucccaagagguacuuu

SEQ ID NO: 1178792 - RNA, 19 nt, Artificial Sequence
  Description of Artificial Sequence: Synthetic oligonucleotide
cauccucgucaucucaauu

SEQ ID NO: 1178793 - RNA, 19 nt, Artificial Sequence
  Description of Artificial Sequence: Synthetic oligonucleotide
cugucggcagacacagcau

SEQ ID NO: 1178794 - RNA, 19 nt, Artificial Sequence
  Description of Artificial Sequence: Synthetic oligonucleotide
cacuccggguaagggagaa

SEQ ID NO: 1178795 - RNA, 19 nt, Artificial Sequence
  Description of Artificial Sequence: Synthetic oligonucleotide
gggguacguggcaccacug

SEQ ID NO: 1178796 - RNA, 19 nt, Artificial Sequence
  Description of Artificial Sequence: Synthetic oligonucleotide
agguugcauuguacaucca

SEQ ID NO: 1178797 - RNA, 19 nt, Artificial Sequence
  Description of Artificial Sequence: Synthetic oligonucleotide
agccugcccuuaagggacu

SEQ ID NO: 1178798 - RNA, 19 nt, Artificial Sequence
  Description of Artificial Sequence: Synthetic oligonucleotide
ccacuaagauauuucgcuu

SEQ ID NO: 1178799 - RNA, 19 nt, Artificial Sequence
  Description of Artificial Sequence: Synthetic oligonucleotide
cauaggugggcaggucagu

SEQ ID NO: 1178800 - RNA, 19 nt, Artificial Sequence
  Description of Artificial Sequence: Synthetic oligonucleotide
cagcucguggggcagcuuu

SEQ ID NO: 1178801 - RNA, 19 nt, Artificial Sequence
  Description of Artificial Sequence: Synthetic oligonucleotide
cccacggagcaucuuggaa

SEQ ID NO: 1178802 - RNA, 19 nt, Artificial Sequence
  Description of Artificial Sequence: Synthetic oligonucleotide
gugcgugagcucaggaauu

SEQ ID NO: 1178803 - RNA, 19 nt, Artificial Sequence
  Description of Artificial Sequence: Synthetic oligonucleotide
cagauaccaccaugcuuuu

SEQ ID NO: 1178804 - RNA, 19 nt, Artificial Sequence
  Description of Artificial Sequence: Synthetic oligonucleotide
caggagcguucauucccgu

SEQ ID NO: 1178805 - RNA, 19 nt, Artificial Sequence
  Description of Artificial Sequence: Synthetic oligonucleotide
gaugccgauugagcacguu

SEQ ID NO: 1178806 - RNA, 19 nt, Artificial Sequence
  Description of Artificial Sequence: Synthetic oligonucleotide
ccucgucaucucaauuucu

SEQ ID NO: 1178807 - RNA, 19 nt, Artificial Sequence
  Description of Artificial Sequence: Synthetic oligonucleotide
accggucagccugcccuua

SEQ ID NO: 1178808 - RNA, 19 nt, Artificial Sequence
  Description of Artificial Sequence: Synthetic oligonucleotide
ccggaagagccgguauguc

SEQ ID NO: 1178809 - RNA, 19 nt, Artificial Sequence
  Description of Artificial Sequence: Synthetic oligonucleotide
gcacguugagguagagccu

SEQ ID NO: 1178810 - RNA, 19 nt, Artificial Sequence
  Description of Artificial Sequence: Synthetic oligonucleotide
ccacuguucugcccaucaa

SEQ ID NO: 1178811 - RNA, 19 nt, Artificial Sequence
  Description of Artificial Sequence: Synthetic oligonucleotide
ccuaggcaggcgcccaucu

SEQ ID NO: 1178812 - RNA, 19 nt, Artificial Sequence
  Description of Artificial Sequence: Synthetic oligonucleotide
ggugggcaggucagucaaa

SEQ ID NO: 1178813 - RNA, 19 nt, Artificial Sequence
  Description of Artificial Sequence: Synthetic oligonucleotide
gcacuccggguaagggaga

SEQ ID NO: 1178814 - RNA, 19 nt, Artificial Sequence
  Description of Artificial Sequence: Synthetic oligonucleotide
cucguggggcagcuuucuu

SEQ ID NO: 1178815 - RNA, 19 nt, Artificial Sequence
  Description of Artificial Sequence: Synthetic oligonucleotide
gcucguggggcagcuuucu

SEQ ID NO: 1178816 - RNA, 19 nt, Artificial Sequence
  Description of Artificial Sequence: Synthetic oligonucleotide
caccggucagccugcccuu

SEQ ID NO: 1178817 - RNA, 19 nt, Artificial Sequence
  Description of Artificial Sequence: Synthetic oligonucleotide
cuccacccaucaucauauu

SEQ ID NO: 1178818 - RNA, 19 nt, Artificial Sequence
  Description of Artificial Sequence: Synthetic oligonucleotide
ccacuguguucucccuaaa

SEQ ID NO: 1178819 - RNA, 19 nt, Artificial Sequence
  Description of Artificial Sequence: Synthetic oligonucleotide
cgcuucauaucgugauccu

SEQ ID NO: 1178820 - RNA, 19 nt, Artificial Sequence
  Description of Artificial Sequence: Synthetic oligonucleotide
ccggucagccugcccuuaa

SEQ ID NO: 1178821 - RNA, 19 nt, Artificial Sequence
  Description of Artificial Sequence: Synthetic oligonucleotide
caguggcaacaggagcguu

SEQ ID NO: 1178822 - RNA, 19 nt, Artificial Sequence
  Description of Artificial Sequence: Synthetic oligonucleotide
gcccuccggccgagaagga

SEQ ID NO: 1178823 - RNA, 19 nt, Artificial Sequence
  Description of Artificial Sequence: Synthetic oligonucleotide
gccuggacuccagguucau

SEQ ID NO: 1178824 - RNA, 19 nt, Artificial Sequence
  Description of Artificial Sequence: Synthetic oligonucleotide
ucuauuucaucauuggugg

SEQ ID NO: 1178825 - RNA, 19 nt, Artificial Sequence
  Description of Artificial Sequence: Synthetic oligonucleotide
uguaacugcacauacgugg

SEQ ID NO: 1178826 - RNA, 19 nt, Artificial Sequence
  Description of Artificial Sequence: Synthetic oligonucleotide
aaaguaauucuaaugacgg

SEQ ID NO: 1178827 - RNA, 19 nt, Artificial Sequence
  Description of Artificial Sequence: Synthetic oligonucleotide
acagccaagguuuauacac

SEQ ID NO: 1178828 - RNA, 19 nt, Artificial Sequence
  Description of Artificial Sequence: Synthetic oligonucleotide
uuuaccucaucuuaaaaca

SEQ ID NO: 1178829 - RNA, 19 nt, Artificial Sequence
  Description of Artificial Sequence: Synthetic oligonucleotide
uuuaaauaauguauaggug

SEQ ID NO: 1178830 - RNA, 19 nt, Artificial Sequence
  Description of Artificial Sequence: Synthetic oligonucleotide
caaaguaauucuaaugacg

SEQ ID NO: 1178831 - RNA, 19 nt, Artificial Sequence
  Description of Artificial Sequence: Synthetic oligonucleotide
uggaauuacgcuaaggaca

SEQ ID NO: 1178832 - RNA, 19 nt, Artificial Sequence
  Description of Artificial Sequence: Synthetic oligonucleotide
ucaaacgucagcuucaaac

SEQ ID NO: 1178833 - RNA, 19 nt, Artificial Sequence
  Description of Artificial Sequence: Synthetic oligonucleotide
uguggaauuacgcuaagga

SEQ ID NO: 1178834 - RNA, 19 nt, Artificial Sequence
  Description of Artificial Sequence: Synthetic oligonucleotide
uuugggauuaccaaaguaa

SEQ ID NO: 1178835 - RNA, 19 nt, Artificial Sequence
  Description of Artificial Sequence: Synthetic oligonucleotide
gagggauacacauuggccg

SEQ ID NO: 1178836 - RNA, 19 nt, Artificial Sequence
  Description of Artificial Sequence: Synthetic oligonucleotide
auaaacgucuauuucauca

SEQ ID NO: 1178837 - RNA, 19 nt, Artificial Sequence
  Description of Artificial Sequence: Synthetic oligonucleotide
ugauuuaaucaccuucugg

SEQ ID NO: 1178838 - RNA, 19 nt, Artificial Sequence
  Description of Artificial Sequence: Synthetic oligonucleotide
aaguaauucuaaugacggc

SEQ ID NO: 1178839 - RNA, 19 nt, Artificial Sequence
  Description of Artificial Sequence: Synthetic oligonucleotide
aaacgagugcaguugguac

SEQ ID NO: 1178840 - RNA, 19 nt, Artificial Sequence
  Description of Artificial Sequence: Synthetic oligonucleotide
aagguuuauacacucccuc

SEQ ID NO: 1178841 - RNA, 19 nt, Artificial Sequence
  Description of Artificial Sequence: Synthetic oligonucleotide
uguuuaaucacccuuugau

SEQ ID NO: 1178842 - RNA, 19 nt, Artificial Sequence
  Description of Artificial Sequence: Synthetic oligonucleotide
gacaguguaagcuucacac

SEQ ID NO: 1178843 - RNA, 19 nt, Artificial Sequence
  Description of Artificial Sequence: Synthetic oligonucleotide
ugucaaaaucuucacauac

SEQ ID NO: 1178844 - RNA, 19 nt, Artificial Sequence
  Description of Artificial Sequence: Synthetic oligonucleotide
agagguuucuuucaacugg

SEQ ID NO: 1178845 - RNA, 19 nt, Artificial Sequence
  Description of Artificial Sequence: Synthetic oligonucleotide
uccaauuaaacuagaguug

SEQ ID NO: 1178846 - RNA, 19 nt, Artificial Sequence
  Description of Artificial Sequence: Synthetic oligonucleotide
uucaguacaauagucaaug

SEQ ID NO: 1178847 - RNA, 19 nt, Artificial Sequence
  Description of Artificial Sequence: Synthetic oligonucleotide
caaaguuacuccuagucag

SEQ ID NO: 1178848 - RNA, 19 nt, Artificial Sequence
  Description of Artificial Sequence: Synthetic oligonucleotide
ucaucuuaaaacauccacu

SEQ ID NO: 1178849 - RNA, 19 nt, Artificial Sequence
  Description of Artificial Sequence: Synthetic oligonucleotide
gaguuguugaccuuugcag

SEQ ID NO: 1178850 - RNA, 19 nt, Artificial Sequence
  Description of Artificial Sequence: Synthetic oligonucleotide
auguugaaaauuccacacc

SEQ ID NO: 1178851 - RNA, 19 nt, Artificial Sequence
  Description of Artificial Sequence: Synthetic oligonucleotide
aaacuagaguuguugaccu

SEQ ID NO: 1178852 - RNA, 19 nt, Artificial Sequence
  Description of Artificial Sequence: Synthetic oligonucleotide
caucuuaaaacauccacug

SEQ ID NO: 1178853 - RNA, 19 nt, Artificial Sequence
  Description of Artificial Sequence: Synthetic oligonucleotide
gucagcauagcauggaggg

SEQ ID NO: 1178854 - RNA, 19 nt, Artificial Sequence
  Description of Artificial Sequence: Synthetic oligonucleotide
uaaacuagaguuguugacc

SEQ ID NO: 1178855 - RNA, 19 nt, Artificial Sequence
  Description of Artificial Sequence: Synthetic oligonucleotide
acucacaccauuuauauuu

SEQ ID NO: 1178856 - RNA, 19 nt, Artificial Sequence
  Description of Artificial Sequence: Synthetic oligonucleotide
uaucugaucuucaauugca

SEQ ID NO: 1178857 - RNA, 19 nt, Artificial Sequence
  Description of Artificial Sequence: Synthetic oligonucleotide
aaaacauccacugauccau

SEQ ID NO: 1178858 - RNA, 19 nt, Artificial Sequence
  Description of Artificial Sequence: Synthetic oligonucleotide
aaagagcaaaugcucacca

SEQ ID NO: 1178859 - RNA, 19 nt, Artificial Sequence
  Description of Artificial Sequence: Synthetic oligonucleotide
uguaggauccaacugguau

SEQ ID NO: 1178860 - RNA, 19 nt, Artificial Sequence
  Description of Artificial Sequence: Synthetic oligonucleotide
aguaauucuaaugacggcu

SEQ ID NO: 1178861 - RNA, 19 nt, Artificial Sequence
  Description of Artificial Sequence: Synthetic oligonucleotide
uaccugauguccaagcaag

SEQ ID NO: 1178862 - RNA, 19 nt, Artificial Sequence
  Description of Artificial Sequence: Synthetic oligonucleotide
auguauagguggcugcacc

SEQ ID NO: 1178863 - RNA, 19 nt, Artificial Sequence
  Description of Artificial Sequence: Synthetic oligonucleotide
aaaguuacuccuagucagc

SEQ ID NO: 1178864 - RNA, 19 nt, Artificial Sequence
  Description of Artificial Sequence: Synthetic oligonucleotide
ugcaguugguaccugaugu

SEQ ID NO: 1178865 - RNA, 19 nt, Artificial Sequence
  Description of Artificial Sequence: Synthetic oligonucleotide
auagcauggagggauacac

SEQ ID NO: 1178866 - RNA, 19 nt, Artificial Sequence
  Description of Artificial Sequence: Synthetic oligonucleotide
uuaaacuagaguuguugac

SEQ ID NO: 1178867 - RNA, 19 nt, Artificial Sequence
  Description of Artificial Sequence: Synthetic oligonucleotide
cauggagggauacacauug

SEQ ID NO: 1178868 - RNA, 19 nt, Artificial Sequence
  Description of Artificial Sequence: Synthetic oligonucleotide
uguacacuuguuuuauuca

SEQ ID NO: 1178869 - RNA, 19 nt, Artificial Sequence
  Description of Artificial Sequence: Synthetic oligonucleotide
caagguuagaaccuggcug

SEQ ID NO: 1178870 - RNA, 19 nt, Artificial Sequence
  Description of Artificial Sequence: Synthetic oligonucleotide
uuagcugcaaugccaaaac

SEQ ID NO: 1178871 - RNA, 19 nt, Artificial Sequence
  Description of Artificial Sequence: Synthetic oligonucleotide
ucuaaugacggcugaauau

SEQ ID NO: 1178872 - RNA, 19 nt, Artificial Sequence
  Description of Artificial Sequence: Synthetic oligonucleotide
uuacgcuaaggacacagga

SEQ ID NO: 1178873 - RNA, 19 nt, Artificial Sequence
  Description of Artificial Sequence: Synthetic oligonucleotide
cucaucuuaaaacauccac

SEQ ID NO: 1178874 - RNA, 19 nt, Artificial Sequence
  Description of Artificial Sequence: Synthetic oligonucleotide
agauguugaaaauuccaca

SEQ ID NO: 1178875 - RNA, 19 nt, Artificial Sequence
  Description of Artificial Sequence: Synthetic oligonucleotide
uaucgguacacaacagucc

SEQ ID NO: 1178876 - RNA, 19 nt, Artificial Sequence
  Description of Artificial Sequence: Synthetic oligonucleotide
uuucaacuggauuaagccu

SEQ ID NO: 1178877 - RNA, 19 nt, Artificial Sequence
  Description of Artificial Sequence: Synthetic oligonucleotide
acugcaaaguuacuccuag

SEQ ID NO: 1178878 - RNA, 19 nt, Artificial Sequence
  Description of Artificial Sequence: Synthetic oligonucleotide
uggguagcacauuuaacag

SEQ ID NO: 1178879 - RNA, 19 nt, Artificial Sequence
  Description of Artificial Sequence: Synthetic oligonucleotide
ucauaaacgucuauuucau

SEQ ID NO: 1178880 - RNA, 19 nt, Artificial Sequence
  Description of Artificial Sequence: Synthetic oligonucleotide
uccucugauuuuauuguag

SEQ ID NO: 1178881 - RNA, 19 nt, Artificial Sequence
  Description of Artificial Sequence: Synthetic oligonucleotide
uagaugaaccagauguuga

SEQ ID NO: 1178882 - RNA, 19 nt, Artificial Sequence
  Description of Artificial Sequence: Synthetic oligonucleotide
auaucgguacacaacaguc

SEQ ID NO: 1178883 - RNA, 19 nt, Artificial Sequence
  Description of Artificial Sequence: Synthetic oligonucleotide
auacacauuggccgugggc

SEQ ID NO: 1178884 - RNA, 19 nt, Artificial Sequence
  Description of Artificial Sequence: Synthetic oligonucleotide
guggguagcacauuuaaca

SEQ ID NO: 1178885 - RNA, 19 nt, Artificial Sequence
  Description of Artificial Sequence: Synthetic oligonucleotide
aaacgucagcuucaaaccu

SEQ ID NO: 1178886 - RNA, 19 nt, Artificial Sequence
  Description of Artificial Sequence: Synthetic oligonucleotide
auauuaaggccaaaucuuc

SEQ ID NO: 1178887 - RNA, 19 nt, Artificial Sequence
  Description of Artificial Sequence: Synthetic oligonucleotide
uauacacucccucuuguaa

SEQ ID NO: 1178888 - RNA, 19 nt, Artificial Sequence
  Description of Artificial Sequence: Synthetic oligonucleotide
aguacaauagucaauguua

SEQ ID NO: 1178889 - RNA, 19 nt, Artificial Sequence
  Description of Artificial Sequence: Synthetic oligonucleotide
uacacauuggccgugggca

SEQ ID NO: 1178890 - RNA, 19 nt, Artificial Sequence
  Description of Artificial Sequence: Synthetic oligonucleotide
ucugauauccguucccaga

SEQ ID NO: 1178891 - RNA, 19 nt, Artificial Sequence
  Description of Artificial Sequence: Synthetic oligonucleotide
agagcaaaugcucaccaga

SEQ ID NO: 1178892 - RNA, 19 nt, Artificial Sequence
  Description of Artificial Sequence: Synthetic oligonucleotide
uuuauacacucccucuugu

SEQ ID NO: 1178893 - RNA, 19 nt, Artificial Sequence
  Description of Artificial Sequence: Synthetic oligonucleotide
aauguauagguggcugcac

SEQ ID NO: 1178894 - RNA, 19 nt, Artificial Sequence
  Description of Artificial Sequence: Synthetic oligonucleotide
augacggcugaauauaaca

SEQ ID NO: 1178895 - RNA, 19 nt, Artificial Sequence
  Description of Artificial Sequence: Synthetic oligonucleotide
agaaacuagaaaccagcca

SEQ ID NO: 1178896 - RNA, 19 nt, Artificial Sequence
  Description of Artificial Sequence: Synthetic oligonucleotide
ucuuguuuaaucacccuuu

SEQ ID NO: 1178897 - RNA, 19 nt, Artificial Sequence
  Description of Artificial Sequence: Synthetic oligonucleotide
aagaccuuguggaauuacg

SEQ ID NO: 1178898 - RNA, 19 nt, Artificial Sequence
  Description of Artificial Sequence: Synthetic oligonucleotide
auacacucccucuuguaag

SEQ ID NO: 1178899 - RNA, 19 nt, Artificial Sequence
  Description of Artificial Sequence: Synthetic oligonucleotide
aaagaccuuguggaauuac

SEQ ID NO: 1178900 - RNA, 19 nt, Artificial Sequence
  Description of Artificial Sequence: Synthetic oligonucleotide
aagguaguaucaaacguca

SEQ ID NO: 1178901 - RNA, 19 nt, Artificial Sequence
  Description of Artificial Sequence: Synthetic oligonucleotide
caaaccuuggcauaucuga

SEQ ID NO: 1178902 - RNA, 19 nt, Artificial Sequence
  Description of Artificial Sequence: Synthetic oligonucleotide
agaccuuguggaauuacgc

SEQ ID NO: 1178903 - RNA, 19 nt, Artificial Sequence
  Description of Artificial Sequence: Synthetic oligonucleotide
uccuagucagcuuugacuu

SEQ ID NO: 1178904 - RNA, 19 nt, Artificial Sequence
  Description of Artificial Sequence: Synthetic oligonucleotide
cugauauccguucccagag

SEQ ID NO: 1178905 - RNA, 19 nt, Artificial Sequence
  Description of Artificial Sequence: Synthetic oligonucleotide
uguaagcuucacaccaggc

SEQ ID NO: 1178906 - RNA, 19 nt, Artificial Sequence
  Description of Artificial Sequence: Synthetic oligonucleotide
uuaguuauguacacuuguu

SEQ ID NO: 1178907 - RNA, 19 nt, Artificial Sequence
  Description of Artificial Sequence: Synthetic oligonucleotide
uugacauuaguauguaguu

SEQ ID NO: 1178908 - RNA, 19 nt, Artificial Sequence
  Description of Artificial Sequence: Synthetic oligonucleotide
agguaaagagcaaaugcuc

SEQ ID NO: 1178909 - RNA, 19 nt, Artificial Sequence
  Description of Artificial Sequence: Synthetic oligonucleotide
ggauuaagccuccaguucc

SEQ ID NO: 1178910 - RNA, 19 nt, Artificial Sequence
  Description of Artificial Sequence: Synthetic oligonucleotide
guuuauacacucccucuug

SEQ ID NO: 1178911 - RNA, 19 nt, Artificial Sequence
  Description of Artificial Sequence: Synthetic oligonucleotide
uguauagguggcugcacca

SEQ ID NO: 1178912 - RNA, 19 nt, Artificial Sequence
  Description of Artificial Sequence: Synthetic oligonucleotide
uguguuuggugaaaaggua

SEQ ID NO: 1178913 - RNA, 19 nt, Artificial Sequence
  Description of Artificial Sequence: Synthetic oligonucleotide
guggaauuacgcuaaggac

SEQ ID NO: 1178914 - RNA, 19 nt, Artificial Sequence
  Description of Artificial Sequence: Synthetic oligonucleotide
agccaagguuuauacacuc

SEQ ID NO: 1178915 - RNA, 19 nt, Artificial Sequence
  Description of Artificial Sequence: Synthetic oligonucleotide
ugacggcugaauauaacaa

SEQ ID NO: 1178916 - RNA, 19 nt, Artificial Sequence
  Description of Artificial Sequence: Synthetic oligonucleotide
uggauuaagccuccaguuc

SEQ ID NO: 1178917 - RNA, 19 nt, Artificial Sequence
  Description of Artificial Sequence: Synthetic oligonucleotide
uccaaggucccacugacuu

SEQ ID NO: 1178918 - RNA, 19 nt, Artificial Sequence
  Description of Artificial Sequence: Synthetic oligonucleotide
ugauauccguucccagagg

SEQ ID NO: 1178919 - RNA, 19 nt, Artificial Sequence
  Description of Artificial Sequence: Synthetic oligonucleotide
uuaccaaaguaauucuaau

SEQ ID NO: 1178920 - RNA, 19 nt, Artificial Sequence
  Description of Artificial Sequence: Synthetic oligonucleotide
uuguuuaaucacccuuuga

SEQ ID NO: 1178921 - RNA, 19 nt, Artificial Sequence
  Description of Artificial Sequence: Synthetic oligonucleotide
uaauucuaaugacggcuga

SEQ ID NO: 1178922 - RNA, 19 nt, Artificial Sequence
  Description of Artificial Sequence: Synthetic oligonucleotide
aacaguccgccauagcgaa

SEQ ID NO: 1178923 - RNA, 19 nt, Artificial Sequence
  Description of Artificial Sequence: Synthetic oligonucleotide
uccgccauagcgaagccuc

SEQ ID NO: 1178924 - RNA, 19 nt, Artificial Sequence
  Description of Artificial Sequence: Synthetic oligonucleotide
agguuuauacacucccucu

SEQ ID NO: 1178925 - RNA, 19 nt, Artificial Sequence
  Description of Artificial Sequence: Synthetic oligonucleotide
auugcaaucucugucccca

SEQ ID NO: 1178926 - RNA, 19 nt, Artificial Sequence
  Description of Artificial Sequence: Synthetic oligonucleotide
uuaaucacccuuugauuua

SEQ ID NO: 1178927 - RNA, 19 nt, Artificial Sequence
  Description of Artificial Sequence: Synthetic oligonucleotide
cuccaauuaaacuagaguu

SEQ ID NO: 1178928 - RNA, 19 nt, Artificial Sequence
  Description of Artificial Sequence: Synthetic oligonucleotide
cuuguuuaaucacccuuug

SEQ ID NO: 1178929 - RNA, 19 nt, Artificial Sequence
  Description of Artificial Sequence: Synthetic oligonucleotide
uauguauccucugauuuua

SEQ ID NO: 1178930 - RNA, 19 nt, Artificial Sequence
  Description of Artificial Sequence: Synthetic oligonucleotide
cuauuucaucauugguggg

SEQ ID NO: 1178931 - RNA, 19 nt, Artificial Sequence
  Description of Artificial Sequence: Synthetic oligonucleotide
caaggucagcauagcaugg

SEQ ID NO: 1178932 - RNA, 19 nt, Artificial Sequence
  Description of Artificial Sequence: Synthetic oligonucleotide
uaaugacggcugaauauaa

SEQ ID NO: 1178933 - RNA, 19 nt, Artificial Sequence
  Description of Artificial Sequence: Synthetic oligonucleotide
acugguauuuagcugcaau

SEQ ID NO: 1178934 - RNA, 19 nt, Artificial Sequence
  Description of Artificial Sequence: Synthetic oligonucleotide
agcaaaugcucaccagaag

SEQ ID NO: 1178935 - RNA, 19 nt, Artificial Sequence
  Description of Artificial Sequence: Synthetic oligonucleotide
uuguggaauuacgcuaagg

SEQ ID NO: 1178936 - RNA, 19 nt, Artificial Sequence
  Description of Artificial Sequence: Synthetic oligonucleotide
gauuuagguaaagagcaaa

SEQ ID NO: 1178937 - RNA, 19 nt, Artificial Sequence
  Description of Artificial Sequence: Synthetic oligonucleotide
ucauugguggguagcacau

SEQ ID NO: 1178938 - RNA, 19 nt, Artificial Sequence
  Description of Artificial Sequence: Synthetic oligonucleotide
ugguggguagcacauuuaa

SEQ ID NO: 1178939 - RNA, 19 nt, Artificial Sequence
  Description of Artificial Sequence: Synthetic oligonucleotide
aaaacgagugcaguuggua

SEQ ID NO: 1178940 - RNA, 19 nt, Artificial Sequence
  Description of Artificial Sequence: Synthetic oligonucleotide
aguccccaguccuguagcc

SEQ ID NO: 1178941 - RNA, 19 nt, Artificial Sequence
  Description of Artificial Sequence: Synthetic oligonucleotide
aaguuacuccuagucagcu

SEQ ID NO: 1178942 - RNA, 19 nt, Artificial Sequence
  Description of Artificial Sequence: Synthetic oligonucleotide
uccaagcaagguuuacuga

SEQ ID NO: 1178943 - RNA, 19 nt, Artificial Sequence
  Description of Artificial Sequence: Synthetic oligonucleotide
accaagguuagaaccuggc

SEQ ID NO: 1178944 - RNA, 19 nt, Artificial Sequence
  Description of Artificial Sequence: Synthetic oligonucleotide
gcaaaugcucaccagaaga

SEQ ID NO: 1178945 - RNA, 19 nt, Artificial Sequence
  Description of Artificial Sequence: Synthetic oligonucleotide
ccaacccaaagccaaaucc

SEQ ID NO: 1178946 - RNA, 19 nt, Artificial Sequence
  Description of Artificial Sequence: Synthetic oligonucleotide
guaaccaaagacagcugag

SEQ ID NO: 1178947 - RNA, 19 nt, Artificial Sequence
  Description of Artificial Sequence: Synthetic oligonucleotide
guccguauuagaugaacca

SEQ ID NO: 1178948 - RNA, 19 nt, Artificial Sequence
  Description of Artificial Sequence: Synthetic oligonucleotide
gauacacauuggccguggg

SEQ ID NO: 1178949 - RNA, 19 nt, Artificial Sequence
  Description of Artificial Sequence: Synthetic oligonucleotide
aauucuaaugacggcugaa

SEQ ID NO: 1178950 - RNA, 19 nt, Artificial Sequence
  Description of Artificial Sequence: Synthetic oligonucleotide
guauuagaugaaccagaug

SEQ ID NO: 1178951 - RNA, 19 nt, Artificial Sequence
  Description of Artificial Sequence: Synthetic oligonucleotide
cacgguuuucauaaacguc

SEQ ID NO: 1178952 - RNA, 19 nt, Artificial Sequence
  Description of Artificial Sequence: Synthetic oligonucleotide
guaguaucaaacgucagcu

SEQ ID NO: 1178953 - RNA, 19 nt, Artificial Sequence
  Description of Artificial Sequence: Synthetic oligonucleotide
uuaaaacucuucccaucua

SEQ ID NO: 1178954 - RNA, 19 nt, Artificial Sequence
  Description of Artificial Sequence: Synthetic oligonucleotide
accuuguggaauuacgcua

SEQ ID NO: 1178955 - RNA, 19 nt, Artificial Sequence
  Description of Artificial Sequence: Synthetic oligonucleotide
gacggcugaauauaacaaa

SEQ ID NO: 1178956 - RNA, 19 nt, Artificial Sequence
  Description of Artificial Sequence: Synthetic oligonucleotide
ugucauguuugggauuacc

SEQ ID NO: 1178957 - RNA, 19 nt, Artificial Sequence
  Description of Artificial Sequence: Synthetic oligonucleotide
agcugcaaugccaaaacga

SEQ ID NO: 1178958 - RNA, 19 nt, Artificial Sequence
  Description of Artificial Sequence: Synthetic oligonucleotide
caguugguaccugaugucc

SEQ ID NO: 1178959 - RNA, 19 nt, Artificial Sequence
  Description of Artificial Sequence: Synthetic oligonucleotide
ggaauuacgcuaaggacac

SEQ ID NO: 1178960 - RNA, 19 nt, Artificial Sequence
  Description of Artificial Sequence: Synthetic oligonucleotide
gauauccguucccagaggu

SEQ ID NO: 1178961 - RNA, 19 nt, Artificial Sequence
  Description of Artificial Sequence: Synthetic oligonucleotide
gcugcaaugccaaaacgag

SEQ ID NO: 1178962 - RNA, 19 nt, Artificial Sequence
  Description of Artificial Sequence: Synthetic oligonucleotide
ugcaccauagcagcacuga

SEQ ID NO: 1178963 - RNA, 19 nt, Artificial Sequence
  Description of Artificial Sequence: Synthetic oligonucleotide
auuacgcuaaggacacagg

SEQ ID NO: 1178964 - RNA, 19 nt, Artificial Sequence
  Description of Artificial Sequence: Synthetic oligonucleotide
uauccguucccagagguuu

SEQ ID NO: 1178965 - RNA, 19 nt, Artificial Sequence
  Description of Artificial Sequence: Synthetic oligonucleotide
ucguaaccaaagacagcug

SEQ ID NO: 1178966 - RNA, 19 nt, Artificial Sequence
  Description of Artificial Sequence: Synthetic oligonucleotide
auagcgaagccucggggaa

SEQ ID NO: 1178967 - RNA, 19 nt, Artificial Sequence
  Description of Artificial Sequence: Synthetic oligonucleotide
cauagcgaagccucgggga

SEQ ID NO: 1178968 - RNA, 19 nt, Artificial Sequence
  Description of Artificial Sequence: Synthetic oligonucleotide
agacaguguaagcuucaca

SEQ ID NO: 1178969 - RNA, 19 nt, Artificial Sequence
  Description of Artificial Sequence: Synthetic oligonucleotide
aggucccacugacuuuacc

SEQ ID NO: 1178970 - RNA, 19 nt, Artificial Sequence
  Description of Artificial Sequence: Synthetic oligonucleotide
agcccacuccaauuaaacu

SEQ ID NO: 1178971 - RNA, 19 nt, Artificial Sequence
  Description of Artificial Sequence: Synthetic oligonucleotide
uccugaggggcguugccgc

SEQ ID NO: 1178972 - RNA, 19 nt, Artificial Sequence
  Description of Artificial Sequence: Synthetic oligonucleotide
uguuaucgguguuccauuu

SEQ ID NO: 1178973 - RNA, 19 nt, Artificial Sequence
  Description of Artificial Sequence: Synthetic oligonucleotide
cccucguaaccaaagacag

SEQ ID NO: 1178974 - RNA, 19 nt, Artificial Sequence
  Description of Artificial Sequence: Synthetic oligonucleotide
uguauccucugauuuuauu

SEQ ID NO: 1178975 - RNA, 19 nt, Artificial Sequence
  Description of Artificial Sequence: Synthetic oligonucleotide
uccgcuacccagagacugc

SEQ ID NO: 1178976 - RNA, 19 nt, Artificial Sequence
  Description of Artificial Sequence: Synthetic oligonucleotide
gauuaccaaaguaauucua

SEQ ID NO: 1178977 - RNA, 19 nt, Artificial Sequence
  Description of Artificial Sequence: Synthetic oligonucleotide
cagcuuuaccaacccaaag

SEQ ID NO: 1178978 - RNA, 19 nt, Artificial Sequence
  Description of Artificial Sequence: Synthetic oligonucleotide
gacuuuaccaguguccgua

SEQ ID NO: 1178979 - RNA, 19 nt, Artificial Sequence
  Description of Artificial Sequence: Synthetic oligonucleotide
gguaaagagcaaaugcuca

SEQ ID NO: 1178980 - RNA, 19 nt, Artificial Sequence
  Description of Artificial Sequence: Synthetic oligonucleotide
ugcacauacguggagccau

SEQ ID NO: 1178981 - RNA, 19 nt, Artificial Sequence
  Description of Artificial Sequence: Synthetic oligonucleotide
aguguaagcuucacaccag

SEQ ID NO: 1178982 - RNA, 19 nt, Artificial Sequence
  Description of Artificial Sequence: Synthetic oligonucleotide
uacguggagccauuaguua

SEQ ID NO: 1178983 - RNA, 19 nt, Artificial Sequence
  Description of Artificial Sequence: Synthetic oligonucleotide
ucggggaaaaggagaucug

SEQ ID NO: 1178984 - RNA, 19 nt, Artificial Sequence
  Description of Artificial Sequence: Synthetic oligonucleotide
caaaucuucugauauccgu

SEQ ID NO: 1178985 - RNA, 19 nt, Artificial Sequence
  Description of Artificial Sequence: Synthetic oligonucleotide
ccuuugcagaaauggaagc

SEQ ID NO: 1178986 - RNA, 19 nt, Artificial Sequence
  Description of Artificial Sequence: Synthetic oligonucleotide
acggcugaauauaacaaaa

SEQ ID NO: 1178987 - RNA, 19 nt, Artificial Sequence
  Description of Artificial Sequence: Synthetic oligonucleotide
caacaguccgccauagcga

SEQ ID NO: 1178988 - RNA, 19 nt, Artificial Sequence
  Description of Artificial Sequence: Synthetic oligonucleotide
aguccgccauagcgaagcc

SEQ ID NO: 1178989 - RNA, 19 nt, Artificial Sequence
  Description of Artificial Sequence: Synthetic oligonucleotide
guaccugauguccaagcaa

SEQ ID NO: 1178990 - RNA, 19 nt, Artificial Sequence
  Description of Artificial Sequence: Synthetic oligonucleotide
cuaaugacggcugaauaua

SEQ ID NO: 1178991 - RNA, 19 nt, Artificial Sequence
  Description of Artificial Sequence: Synthetic oligonucleotide
cuuguggaauuacgcuaag

SEQ ID NO: 1178992 - RNA, 19 nt, Artificial Sequence
  Description of Artificial Sequence: Synthetic oligonucleotide
uccacaccgcugcaugacu

SEQ ID NO: 1178993 - RNA, 19 nt, Artificial Sequence
  Description of Artificial Sequence: Synthetic oligonucleotide
cuacccagagacugcgcug

SEQ ID NO: 1178994 - RNA, 19 nt, Artificial Sequence
  Description of Artificial Sequence: Synthetic oligonucleotide
aacgucagcuucaaaccuu

SEQ ID NO: 1178995 - RNA, 19 nt, Artificial Sequence
  Description of Artificial Sequence: Synthetic oligonucleotide
aacuagaguuguugaccuu

SEQ ID NO: 1178996 - RNA, 19 nt, Artificial Sequence
  Description of Artificial Sequence: Synthetic oligonucleotide
cauacguggagccauuagu

SEQ ID NO: 1178997 - RNA, 19 nt, Artificial Sequence
  Description of Artificial Sequence: Synthetic oligonucleotide
auacguggagccauuaguu

SEQ ID NO: 1178998 - RNA, 19 nt, Artificial Sequence
  Description of Artificial Sequence: Synthetic oligonucleotide
ucagcauagcauggaggga

SEQ ID NO: 1178999 - RNA, 19 nt, Artificial Sequence
  Description of Artificial Sequence: Synthetic oligonucleotide
uggccgugggcauaucggu

SEQ ID NO: 1179000 - RNA, 19 nt, Artificial Sequence
  Description of Artificial Sequence: Synthetic oligonucleotide
ugacuuuaccaguguccgu

SEQ ID NO: 1179001 - RNA, 19 nt, Artificial Sequence
  Description of Artificial Sequence: Synthetic oligonucleotide
ucccaucuaccagagcaga

SEQ ID NO: 1179002 - RNA, 19 nt, Artificial Sequence
  Description of Artificial Sequence: Synthetic oligonucleotide
cuccuagucagcuuugacu

SEQ ID NO: 1179003 - RNA, 19 nt, Artificial Sequence
  Description of Artificial Sequence: Synthetic oligonucleotide
gugcaguugguaccugaug

SEQ ID NO: 1179004 - RNA, 19 nt, Artificial Sequence
  Description of Artificial Sequence: Synthetic oligonucleotide
agcuucaaaccuuggcaua

SEQ ID NO: 1179005 - RNA, 19 nt, Artificial Sequence
  Description of Artificial Sequence: Synthetic oligonucleotide
agccaccgcggcuggaggg

SEQ ID NO: 1179006 - RNA, 19 nt, Artificial Sequence
  Description of Artificial Sequence: Synthetic oligonucleotide
auucaguacaauagucaau

SEQ ID NO: 1179007 - RNA, 19 nt, Artificial Sequence
  Description of Artificial Sequence: Synthetic oligonucleotide
aguugguaccugaugucca

SEQ ID NO: 1179008 - RNA, 19 nt, Artificial Sequence
  Description of Artificial Sequence: Synthetic oligonucleotide
ccauuuauauuuggucucc

SEQ ID NO: 1179009 - RNA, 19 nt, Artificial Sequence
  Description of Artificial Sequence: Synthetic oligonucleotide
acuuuaccaguguccguau

SEQ ID NO: 1179010 - RNA, 19 nt, Artificial Sequence
  Description of Artificial Sequence: Synthetic oligonucleotide
acacaacaguccgccauag

SEQ ID NO: 1179011 - RNA, 19 nt, Artificial Sequence
  Description of Artificial Sequence: Synthetic oligonucleotide
guguccguauuagaugaac

SEQ ID NO: 1179012 - RNA, 19 nt, Artificial Sequence
  Description of Artificial Sequence: Synthetic oligonucleotide
aguuuguggccuccagcau

SEQ ID NO: 1179013 - RNA, 19 nt, Artificial Sequence
  Description of Artificial Sequence: Synthetic oligonucleotide
guaagcagacuugauuuua

SEQ ID NO: 1179014 - RNA, 19 nt, Artificial Sequence
  Description of Artificial Sequence: Synthetic oligonucleotide
acgucagcuucaaaccuug

SEQ ID NO: 1179015 - RNA, 19 nt, Artificial Sequence
  Description of Artificial Sequence: Synthetic oligonucleotide
ccauuauugacauuaguau

SEQ ID NO: 1179016 - RNA, 19 nt, Artificial Sequence
  Description of Artificial Sequence: Synthetic oligonucleotide
gcauaucugaucuucaauu

SEQ ID NO: 1179017 - RNA, 19 nt, Artificial Sequence
  Description of Artificial Sequence: Synthetic oligonucleotide
gccauagcgaagccucggg

SEQ ID NO: 1179018 - RNA, 19 nt, Artificial Sequence
  Description of Artificial Sequence: Synthetic oligonucleotide
ggauuaccaaaguaauucu

SEQ ID NO: 1179019 - RNA, 19 nt, Artificial Sequence
  Description of Artificial Sequence: Synthetic oligonucleotide
guaggauccaacugguauu

SEQ ID NO: 1179020 - RNA, 19 nt, Artificial Sequence
  Description of Artificial Sequence: Synthetic oligonucleotide
agguaguaucaaacgucag

SEQ ID NO: 1179021 - RNA, 19 nt, Artificial Sequence
  Description of Artificial Sequence: Synthetic oligonucleotide
aggaaacugucuaaauauu

SEQ ID NO: 1179022 - RNA, 19 nt, Artificial Sequence
  Description of Artificial Sequence: Synthetic oligonucleotide
guacacaacaguccgccau

SEQ ID NO: 1179023 - RNA, 19 nt, Artificial Sequence
  Description of Artificial Sequence: Synthetic oligonucleotide
cugcggguguccugagggg

SEQ ID NO: 1179024 - RNA, 19 nt, Artificial Sequence
  Description of Artificial Sequence: Synthetic oligonucleotide
acacauuggccgugggcau

SEQ ID NO: 1179025 - RNA, 19 nt, Artificial Sequence
  Description of Artificial Sequence: Synthetic oligonucleotide
aaggucccacugacuuuac

SEQ ID NO: 1179026 - RNA, 19 nt, Artificial Sequence
  Description of Artificial Sequence: Synthetic oligonucleotide
cucggggaaaaggagaucu

SEQ ID NO: 1179027 - RNA, 19 nt, Artificial Sequence
  Description of Artificial Sequence: Synthetic oligonucleotide
cugcaccauagcagcacug

SEQ ID NO: 1179028 - RNA, 19 nt, Artificial Sequence
  Description of Artificial Sequence: Synthetic oligonucleotide
agucugaguauagcccacu

SEQ ID NO: 1179029 - RNA, 19 nt, Artificial Sequence
  Description of Artificial Sequence: Synthetic oligonucleotide
caagguuuauacacucccu

SEQ ID NO: 1179030 - RNA, 19 nt, Artificial Sequence
  Description of Artificial Sequence: Synthetic oligonucleotide
caccauagcagcacugaua

SEQ ID NO: 1179031 - RNA, 19 nt, Artificial Sequence
  Description of Artificial Sequence: Synthetic oligonucleotide
cacaggaauuugguugcac

SEQ ID NO: 1179032 - RNA, 19 nt, Artificial Sequence
  Description of Artificial Sequence: Synthetic oligonucleotide
ccguauuagaugaaccaga

SEQ ID NO: 1179033 - RNA, 19 nt, Artificial Sequence
  Description of Artificial Sequence: Synthetic oligonucleotide
gagucugaguauagcccac

SEQ ID NO: 1179034 - RNA, 19 nt, Artificial Sequence
  Description of Artificial Sequence: Synthetic oligonucleotide
ccauagcgaagccucgggg

SEQ ID NO: 1179035 - RNA, 19 nt, Artificial Sequence
  Description of Artificial Sequence: Synthetic oligonucleotide
guuuggugaaaagguagua

SEQ ID NO: 1179036 - RNA, 19 nt, Artificial Sequence
  Description of Artificial Sequence: Synthetic oligonucleotide
cgcuccgcuacccagagac

SEQ ID NO: 1179037 - RNA, 19 nt, Artificial Sequence
  Description of Artificial Sequence: Synthetic oligonucleotide
agugcaguugguaccugau

SEQ ID NO: 1179038 - RNA, 19 nt, Artificial Sequence
  Description of Artificial Sequence: Synthetic oligonucleotide
accauggcacgguuuucau

SEQ ID NO: 1179039 - RNA, 19 nt, Artificial Sequence
  Description of Artificial Sequence: Synthetic oligonucleotide
accgcugcaugacuuuguu

SEQ ID NO: 1179040 - RNA, 19 nt, Artificial Sequence
  Description of Artificial Sequence: Synthetic oligonucleotide
caguacaauagucaauguu

SEQ ID NO: 1179041 - RNA, 19 nt, Artificial Sequence
  Description of Artificial Sequence: Synthetic oligonucleotide
acaccgcugcaugacuuug

SEQ ID NO: 1179042 - RNA, 19 nt, Artificial Sequence
  Description of Artificial Sequence: Synthetic oligonucleotide
gccgugggcauaucgguac

SEQ ID NO: 1179043 - RNA, 19 nt, Artificial Sequence
  Description of Artificial Sequence: Synthetic oligonucleotide
agacuugauuuuaccacuu

SEQ ID NO: 1179044 - RNA, 19 nt, Artificial Sequence
  Description of Artificial Sequence: Synthetic oligonucleotide
aucaaacgucagcuucaaa

SEQ ID NO: 1179045 - RNA, 19 nt, Artificial Sequence
  Description of Artificial Sequence: Synthetic oligonucleotide
ccucguaaccaaagacagc

SEQ ID NO: 1179046 - RNA, 19 nt, Artificial Sequence
  Description of Artificial Sequence: Synthetic oligonucleotide
cguaaccaaagacagcuga

SEQ ID NO: 1179047 - RNA, 19 nt, Artificial Sequence
  Description of Artificial Sequence: Synthetic oligonucleotide
gguggguagcacauuuaac

SEQ ID NO: 1179048 - RNA, 19 nt, Artificial Sequence
  Description of Artificial Sequence: Synthetic oligonucleotide
gguuagaaccuggcuggcc

SEQ ID NO: 1179049 - RNA, 19 nt, Artificial Sequence
  Description of Artificial Sequence: Synthetic oligonucleotide
ccuuguggaauuacgcuaa

SEQ ID NO: 1179050 - RNA, 19 nt, Artificial Sequence
  Description of Artificial Sequence: Synthetic oligonucleotide
ccaauuaaacuagaguugu

SEQ ID NO: 1179051 - RNA, 19 nt, Artificial Sequence
  Description of Artificial Sequence: Synthetic oligonucleotide
gcccucguaaccaaagaca

SEQ ID NO: 1179052 - RNA, 19 nt, Artificial Sequence
  Description of Artificial Sequence: Synthetic oligonucleotide
gcacgguuuucauaaacgu

SEQ ID NO: 1179053 - RNA, 19 nt, Artificial Sequence
  Description of Artificial Sequence: Synthetic oligonucleotide
caccauggcacgguuuuca

SEQ ID NO: 1179054 - RNA, 19 nt, Artificial Sequence
  Description of Artificial Sequence: Synthetic oligonucleotide
cugcaaugccaaaacgagu

SEQ ID NO: 1179055 - RNA, 19 nt, Artificial Sequence
  Description of Artificial Sequence: Synthetic oligonucleotide
acauuggccgugggcauau

SEQ ID NO: 1179056 - RNA, 19 nt, Artificial Sequence
  Description of Artificial Sequence: Synthetic oligonucleotide
aggggcguugccgccgccg

SEQ ID NO: 1179057 - RNA, 19 nt, Artificial Sequence
  Description of Artificial Sequence: Synthetic oligonucleotide
ccauuaguuauguacacuu

SEQ ID NO: 1179058 - RNA, 19 nt, Artificial Sequence
  Description of Artificial Sequence: Synthetic oligonucleotide
gguuuauacacucccucuu

SEQ ID NO: 1179059 - RNA, 19 nt, Artificial Sequence
  Description of Artificial Sequence: Synthetic oligonucleotide
agcgaagccucggggaaaa

SEQ ID NO: 1179060 - RNA, 19 nt, Artificial Sequence
  Description of Artificial Sequence: Synthetic oligonucleotide
ccagagguuucuuucaacu

SEQ ID NO: 1179061 - RNA, 19 nt, Artificial Sequence
  Description of Artificial Sequence: Synthetic oligonucleotide
ggguagcacauuuaacagu

SEQ ID NO: 1179062 - RNA, 19 nt, Artificial Sequence
  Description of Artificial Sequence: Synthetic oligonucleotide
cgguacacaacaguccgcc

SEQ ID NO: 1179063 - RNA, 19 nt, Artificial Sequence
  Description of Artificial Sequence: Synthetic oligonucleotide
cagcauagcauggagggau

SEQ ID NO: 1179064 - RNA, 19 nt, Artificial Sequence
  Description of Artificial Sequence: Synthetic oligonucleotide
ccuagucagcuuugacuug

SEQ ID NO: 1179065 - RNA, 19 nt, Artificial Sequence
  Description of Artificial Sequence: Synthetic oligonucleotide
cagccaagguuuauacacu

SEQ ID NO: 1179066 - RNA, 19 nt, Artificial Sequence
  Description of Artificial Sequence: Synthetic oligonucleotide
ggcauaucugaucuucaau

SEQ ID NO: 1179067 - RNA, 19 nt, Artificial Sequence
  Description of Artificial Sequence: Synthetic oligonucleotide
gguacacaacaguccgcca

SEQ ID NO: 1179068 - RNA, 19 nt, Artificial Sequence
  Description of Artificial Sequence: Synthetic oligonucleotide
guguuaucgguguuccauu

SEQ ID NO: 1179069 - RNA, 19 nt, Artificial Sequence
  Description of Artificial Sequence: Synthetic oligonucleotide
auauccguucccagagguu

SEQ ID NO: 1179070 - RNA, 19 nt, Artificial Sequence
  Description of Artificial Sequence: Synthetic oligonucleotide
gcccacugcaaaguuacuc

SEQ ID NO: 1179071 - RNA, 19 nt, Artificial Sequence
  Description of Artificial Sequence: Synthetic oligonucleotide
gcuacccagagacugcgcu

SEQ ID NO: 1179072 - RNA, 19 nt, Artificial Sequence
  Description of Artificial Sequence: Synthetic oligonucleotide
guuaucgguguuccauuuu

SEQ ID NO: 1179073 - RNA, 19 nt, Artificial Sequence
  Description of Artificial Sequence: Synthetic oligonucleotide
cagcccucguaaccaaaga

SEQ ID NO: 1179074 - RNA, 19 nt, Artificial Sequence
  Description of Artificial Sequence: Synthetic oligonucleotide
agacugcgcugcagccacc

SEQ ID NO: 1179075 - RNA, 19 nt, Artificial Sequence
  Description of Artificial Sequence: Synthetic oligonucleotide
cagaccauacucacaccau

SEQ ID NO: 1179076 - RNA, 19 nt, Artificial Sequence
  Description of Artificial Sequence: Synthetic oligonucleotide
acaguccgccauagcgaag

SEQ ID NO: 1179077 - RNA, 19 nt, Artificial Sequence
  Description of Artificial Sequence: Synthetic oligonucleotide
aguguccguauuagaugaa

SEQ ID NO: 1179078 - RNA, 19 nt, Artificial Sequence
  Description of Artificial Sequence: Synthetic oligonucleotide
agcauagcauggagggaua

SEQ ID NO: 1179079 - RNA, 19 nt, Artificial Sequence
  Description of Artificial Sequence: Synthetic oligonucleotide
gccgcuccgcuacccagag

SEQ ID NO: 1179080 - RNA, 19 nt, Artificial Sequence
  Description of Artificial Sequence: Synthetic oligonucleotide
cugcaaaguuacuccuagu

SEQ ID NO: 1179081 - RNA, 19 nt, Artificial Sequence
  Description of Artificial Sequence: Synthetic oligonucleotide
gcggcuggagggcgaagug

SEQ ID NO: 1179082 - RNA, 19 nt, Artificial Sequence
  Description of Artificial Sequence: Synthetic oligonucleotide
ccgccauagcgaagccucg

SEQ ID NO: 1179083 - RNA, 19 nt, Artificial Sequence
  Description of Artificial Sequence: Synthetic oligonucleotide
ccgcuacccagagacugcg

SEQ ID NO: 1179084 - RNA, 19 nt, Artificial Sequence
  Description of Artificial Sequence: Synthetic oligonucleotide
ggggcguugccgccgccgc

SEQ ID NO: 1179085 - RNA, 19 nt, Artificial Sequence
  Description of Artificial Sequence: Synthetic oligonucleotide
uugccgccgccgccgccgc

SEQ ID NO: 1179086 - RNA, 19 nt, Artificial Sequence
  Description of Artificial Sequence: Synthetic oligonucleotide
gccgcuccgcucccagccg

SEQ ID NO: 1179087 - RNA, 19 nt, Artificial Sequence
  Description of Artificial Sequence: Synthetic oligonucleotide
gccucagagucugaguaua

SEQ ID NO: 1179088 - RNA, 19 nt, Artificial Sequence
  Description of Artificial Sequence: Synthetic oligonucleotide
ccaagguuagaaccuggcu

SEQ ID NO: 1179089 - RNA, 19 nt, Artificial Sequence
  Description of Artificial Sequence: Synthetic oligonucleotide
cccagaguguuaucggugu

SEQ ID NO: 1179090 - RNA, 19 nt, Artificial Sequence
  Description of Artificial Sequence: Synthetic oligonucleotide
cacauacguggagccauua

SEQ ID NO: 1179091 - RNA, 19 nt, Artificial Sequence
  Description of Artificial Sequence: Synthetic oligonucleotide
agcccacugcaaaguuacu

SEQ ID NO: 1179092 - RNA, 19 nt, Artificial Sequence
  Description of Artificial Sequence: Synthetic oligonucleotide
caccgcugcaugacuuugu

SEQ ID NO: 1179093 - RNA, 19 nt, Artificial Sequence
  Description of Artificial Sequence: Synthetic oligonucleotide
cuuuaccaguguccguauu

SEQ ID NO: 1179094 - RNA, 19 nt, Artificial Sequence
  Description of Artificial Sequence: Synthetic oligonucleotide
gccaccgcggcuggagggc

SEQ ID NO: 1179095 - RNA, 19 nt, Artificial Sequence
  Description of Artificial Sequence: Synthetic oligonucleotide
cgccauagcgaagccucgg

SEQ ID NO: 1179096 - RNA, 19 nt, Artificial Sequence
  Description of Artificial Sequence: Synthetic oligonucleotide
guccgccauagcgaagccu

SEQ ID NO: 1179097 - RNA, 19 nt, Artificial Sequence
  Description of Artificial Sequence: Synthetic oligonucleotide
accgcggcuggagggcgaa

SEQ ID NO: 1179098 - RNA, 19 nt, Artificial Sequence
  Description of Artificial Sequence: Synthetic oligonucleotide
ccauggcacgguuuucaua

SEQ ID NO: 1179099 - RNA, 19 nt, Artificial Sequence
  Description of Artificial Sequence: Synthetic oligonucleotide
cgugggcauaucgguacac

SEQ ID NO: 1179100 - RNA, 19 nt, Artificial Sequence
  Description of Artificial Sequence: Synthetic oligonucleotide
ggccgugggcauaucggua

SEQ ID NO: 1179101 - RNA, 19 nt, Artificial Sequence
  Description of Artificial Sequence: Synthetic oligonucleotide
ugccgccgccgccgccgcu

SEQ ID NO: 1179102 - RNA, 19 nt, Artificial Sequence
  Description of Artificial Sequence: Synthetic oligonucleotide
ccgugggcauaucgguaca

SEQ ID NO: 1179103 - RNA, 19 nt, Artificial Sequence
  Description of Artificial Sequence: Synthetic oligonucleotide
cauugguggguagcacauu

SEQ ID NO: 1179104 - RNA, 19 nt, Artificial Sequence
  Description of Artificial Sequence: Synthetic oligonucleotide
ccgaggccgcuccgcuacc

SEQ ID NO: 1179105 - RNA, 19 nt, Artificial Sequence
  Description of Artificial Sequence: Synthetic oligonucleotide
cgaggccgcuccgcuaccc

SEQ ID NO: 1179106 - RNA, 19 nt, Artificial Sequence
  Description of Artificial Sequence: Synthetic oligonucleotide
ccaaggucccacugacuuu

SEQ ID NO: 1179107 - RNA, 19 nt, Artificial Sequence
  Description of Artificial Sequence: Synthetic oligonucleotide
cgcuaaggacacaggaauu

SEQ ID NO: 1179108 - RNA, 19 nt, Artificial Sequence
  Description of Artificial Sequence: Synthetic oligonucleotide
cgagugcaguugguaccug

SEQ ID NO: 1179109 - RNA, 19 nt, Artificial Sequence
  Description of Artificial Sequence: Synthetic oligonucleotide
gccgccgccgccgccgcuc

SEQ ID NO: 1179110 - RNA, 19 nt, Artificial Sequence
  Description of Artificial Sequence: Synthetic oligonucleotide
ccgcuccgcucccagccga

SEQ ID NO: 1179111 - RNA, 19 nt, Artificial Sequence
  Description of Artificial Sequence: Synthetic oligonucleotide
ccagaguguuaucgguguu

SEQ ID NO: 1179112 - RNA, 19 nt, Artificial Sequence
  Description of Artificial Sequence: Synthetic oligonucleotide
gcacauacguggagccauu

SEQ ID NO: 1179113 - RNA, 19 nt, Artificial Sequence
  Description of Artificial Sequence: Synthetic oligonucleotide
gcacaccauggcacgguuu

SEQ ID NO: 1179114 - RNA, 19 nt, Artificial Sequence
  Description of Artificial Sequence: Synthetic oligonucleotide
ccgcugcaugacuuuguuu

SEQ ID NO: 1179115 - RNA, 19 nt, Artificial Sequence
  Description of Artificial Sequence: Synthetic oligonucleotide
ccgcuccgcuacccagaga

SEQ ID NO: 1179116 - RNA, 19 nt, Artificial Sequence
  Description of Artificial Sequence: Synthetic oligonucleotide
uuuaguauuaguauuuaag

SEQ ID NO: 1179117 - RNA, 19 nt, Artificial Sequence
  Description of Artificial Sequence: Synthetic oligonucleotide
aaaguuaucgcucaguccu

SEQ ID NO: 1179118 - RNA, 19 nt, Artificial Sequence
  Description of Artificial Sequence: Synthetic oligonucleotide
uaugcuauacguuuuaaag

SEQ ID NO: 1179119 - RNA, 19 nt, Artificial Sequence
  Description of Artificial Sequence: Synthetic oligonucleotide
aaguauaaguucaugagcg

SEQ ID NO: 1179120 - RNA, 19 nt, Artificial Sequence
  Description of Artificial Sequence: Synthetic oligonucleotide
uuaccugacauacugauga

SEQ ID NO: 1179121 - RNA, 19 nt, Artificial Sequence
  Description of Artificial Sequence: Synthetic oligonucleotide
ugaaguauaaguucaugag

SEQ ID NO: 1179122 - RNA, 19 nt, Artificial Sequence
  Description of Artificial Sequence: Synthetic oligonucleotide
aaaacuucccugaaguccc

SEQ ID NO: 1179123 - RNA, 19 nt, Artificial Sequence
  Description of Artificial Sequence: Synthetic oligonucleotide
acuauuagaccacguaugc

SEQ ID NO: 1179124 - RNA, 19 nt, Artificial Sequence
  Description of Artificial Sequence: Synthetic oligonucleotide
aagacgaaggggcuaaacg

SEQ ID NO: 1179125 - RNA, 19 nt, Artificial Sequence
  Description of Artificial Sequence: Synthetic oligonucleotide
uuaugcaugaaaaucugug

SEQ ID NO: 1179126 - RNA, 19 nt, Artificial Sequence
  Description of Artificial Sequence: Synthetic oligonucleotide
ugcuauacguuuuaaagug

SEQ ID NO: 1179127 - RNA, 19 nt, Artificial Sequence
  Description of Artificial Sequence: Synthetic oligonucleotide
ugaucugauacauuguacc

SEQ ID NO: 1179128 - RNA, 19 nt, Artificial Sequence
  Description of Artificial Sequence: Synthetic oligonucleotide
uagaaggcgguguagaccg

SEQ ID NO: 1179129 - RNA, 19 nt, Artificial Sequence
  Description of Artificial Sequence: Synthetic oligonucleotide
gaaguauaaguucaugagc

SEQ ID NO: 1179130 - RNA, 19 nt, Artificial Sequence
  Description of Artificial Sequence: Synthetic oligonucleotide
uugaaaaucaccugcguga

SEQ ID NO: 1179131 - RNA, 19 nt, Artificial Sequence
  Description of Artificial Sequence: Synthetic oligonucleotide
uacagaaucucuuuuaaaa

SEQ ID NO: 1179132 - RNA, 19 nt, Artificial Sequence
  Description of Artificial Sequence: Synthetic oligonucleotide
uuguccaaaagcuuuaaac

SEQ ID NO: 1179133 - RNA, 19 nt, Artificial Sequence
  Description of Artificial Sequence: Synthetic oligonucleotide
agaaguaagaucugggacu

SEQ ID NO: 1179134 - RNA, 19 nt, Artificial Sequence
  Description of Artificial Sequence: Synthetic oligonucleotide
aucugugcaaacuacaaca

SEQ ID NO: 1179135 - RNA, 19 nt, Artificial Sequence
  Description of Artificial Sequence: Synthetic oligonucleotide
uaaaaggagaagagcacag

SEQ ID NO: 1179136 - RNA, 19 nt, Artificial Sequence
  Description of Artificial Sequence: Synthetic oligonucleotide
aaaaucaccugcgugaagu

SEQ ID NO: 1179137 - RNA, 19 nt, Artificial Sequence
  Description of Artificial Sequence: Synthetic oligonucleotide
aguacuaaaguuaucgcuc

SEQ ID NO: 1179138 - RNA, 19 nt, Artificial Sequence
  Description of Artificial Sequence: Synthetic oligonucleotide
uauaaguucaugagcguga

SEQ ID NO: 1179139 - RNA, 19 nt, Artificial Sequence
  Description of Artificial Sequence: Synthetic oligonucleotide
uacauagccggcaucaccc

SEQ ID NO: 1179140 - RNA, 19 nt, Artificial Sequence
  Description of Artificial Sequence: Synthetic oligonucleotide
aagguuuucaacagaggac

SEQ ID NO: 1179141 - RNA, 19 nt, Artificial Sequence
  Description of Artificial Sequence: Synthetic oligonucleotide
uacaucgcaauaacaauca

SEQ ID NO: 1179142 - RNA, 19 nt, Artificial Sequence
  Description of Artificial Sequence: Synthetic oligonucleotide
uuuaaacuauuagaccacg

SEQ ID NO: 1179143 - RNA, 19 nt, Artificial Sequence
  Description of Artificial Sequence: Synthetic oligonucleotide
cuaucuagccaugagaaag

SEQ ID NO: 1179144 - RNA, 19 nt, Artificial Sequence
  Description of Artificial Sequence: Synthetic oligonucleotide
uauuagaccacguaugcua

SEQ ID NO: 1179145 - RNA, 19 nt, Artificial Sequence
  Description of Artificial Sequence: Synthetic oligonucleotide
gcuaguacuaaaguuaucg

SEQ ID NO: 1179146 - RNA, 19 nt, Artificial Sequence
  Description of Artificial Sequence: Synthetic oligonucleotide
ugcgugaaguauaaguuca

SEQ ID NO: 1179147 - RNA, 19 nt, Artificial Sequence
  Description of Artificial Sequence: Synthetic oligonucleotide
uaguacuaaaguuaucgcu

SEQ ID NO: 1179148 - RNA, 19 nt, Artificial Sequence
  Description of Artificial Sequence: Synthetic oligonucleotide
uugucaaagaaguaagauc

SEQ ID NO: 1179149 - RNA, 19 nt, Artificial Sequence
  Description of Artificial Sequence: Synthetic oligonucleotide
caagaugacggugacaccg

SEQ ID NO: 1179150 - RNA, 19 nt, Artificial Sequence
  Description of Artificial Sequence: Synthetic oligonucleotide
uaaacuauuagaccacgua

SEQ ID NO: 1179151 - RNA, 19 nt, Artificial Sequence
  Description of Artificial Sequence: Synthetic oligonucleotide
aacuauuagaccacguaug

SEQ ID NO: 1179152 - RNA, 19 nt, Artificial Sequence
  Description of Artificial Sequence: Synthetic oligonucleotide
accgauagcaguuaccuga

SEQ ID NO: 1179153 - RNA, 19 nt, Artificial Sequence
  Description of Artificial Sequence: Synthetic oligonucleotide
ugccugaucugauacauug

SEQ ID NO: 1179154 - RNA, 19 nt, Artificial Sequence
  Description of Artificial Sequence: Synthetic oligonucleotide
guguagagcaagaugacgg

SEQ ID NO: 1179155 - RNA, 19 nt, Artificial Sequence
  Description of Artificial Sequence: Synthetic oligonucleotide
gucauaaucaaaggagugg

SEQ ID NO: 1179156 - RNA, 19 nt, Artificial Sequence
  Description of Artificial Sequence: Synthetic oligonucleotide
ucugauacauuguaccagu

SEQ ID NO: 1179157 - RNA, 19 nt, Artificial Sequence
  Description of Artificial Sequence: Synthetic oligonucleotide
acgaucaccuuccuuuccc

SEQ ID NO: 1179158 - RNA, 19 nt, Artificial Sequence
  Description of Artificial Sequence: Synthetic oligonucleotide
uuaucgcucaguccuaucu

SEQ ID NO: 1179159 - RNA, 19 nt, Artificial Sequence
  Description of Artificial Sequence: Synthetic oligonucleotide
auacaucgcaauaacaauc

SEQ ID NO: 1179160 - RNA, 19 nt, Artificial Sequence
  Description of Artificial Sequence: Synthetic oligonucleotide
uaucuagccaugagaaagc

SEQ ID NO: 1179161 - RNA, 19 nt, Artificial Sequence
  Description of Artificial Sequence: Synthetic oligonucleotide
ugcgcguagaugaacacga

SEQ ID NO: 1179162 - RNA, 19 nt, Artificial Sequence
  Description of Artificial Sequence: Synthetic oligonucleotide
uacccacugaaauagccag

SEQ ID NO: 1179163 - RNA, 19 nt, Artificial Sequence
  Description of Artificial Sequence: Synthetic oligonucleotide
uaaucaaaggaguggacau

SEQ ID NO: 1179164 - RNA, 19 nt, Artificial Sequence
  Description of Artificial Sequence: Synthetic oligonucleotide
augcuauacguuuuaaagu

SEQ ID NO: 1179165 - RNA, 19 nt, Artificial Sequence
  Description of Artificial Sequence: Synthetic oligonucleotide
cuaaugaaaagugaggcca

SEQ ID NO: 1179166 - RNA, 19 nt, Artificial Sequence
  Description of Artificial Sequence: Synthetic oligonucleotide
cuaguacuaaaguuaucgc

SEQ ID NO: 1179167 - RNA, 19 nt, Artificial Sequence
  Description of Artificial Sequence: Synthetic oligonucleotide
ucuuugcuaguacuaaagu

SEQ ID NO: 1179168 - RNA, 19 nt, Artificial Sequence
  Description of Artificial Sequence: Synthetic oligonucleotide
cuaaaguuaucgcucaguc

SEQ ID NO: 1179169 - RNA, 19 nt, Artificial Sequence
  Description of Artificial Sequence: Synthetic oligonucleotide
uacuuuaguauuaguauuu

SEQ ID NO: 1179170 - RNA, 19 nt, Artificial Sequence
  Description of Artificial Sequence: Synthetic oligonucleotide
gaagucucggaaguaaaag

SEQ ID NO: 1179171 - RNA, 19 nt, Artificial Sequence
  Description of Artificial Sequence: Synthetic oligonucleotide
cucuuugcuaguacuaaag

SEQ ID NO: 1179172 - RNA, 19 nt, Artificial Sequence
  Description of Artificial Sequence: Synthetic oligonucleotide
agacgaaggggcuaaacga

SEQ ID NO: 1179173 - RNA, 19 nt, Artificial Sequence
  Description of Artificial Sequence: Synthetic oligonucleotide
uuaaacuauuagaccacgu

SEQ ID NO: 1179174 - RNA, 19 nt, Artificial Sequence
  Description of Artificial Sequence: Synthetic oligonucleotide
agcuguuacuuuguugucc

SEQ ID NO: 1179175 - RNA, 19 nt, Artificial Sequence
  Description of Artificial Sequence: Synthetic oligonucleotide
augagaaagcuauagcaaa

SEQ ID NO: 1179176 - RNA, 19 nt, Artificial Sequence
  Description of Artificial Sequence: Synthetic oligonucleotide
cauagggcgguacagccgg

SEQ ID NO: 1179177 - RNA, 19 nt, Artificial Sequence
  Description of Artificial Sequence: Synthetic oligonucleotide
gaugaacacgaagaggagc

SEQ ID NO: 1179178 - RNA, 19 nt, Artificial Sequence
  Description of Artificial Sequence: Synthetic oligonucleotide
ucacugucguaucuucggg

SEQ ID NO: 1179179 - RNA, 19 nt, Artificial Sequence
  Description of Artificial Sequence: Synthetic oligonucleotide
agguuuucaacagaggacu

SEQ ID NO: 1179180 - RNA, 19 nt, Artificial Sequence
  Description of Artificial Sequence: Synthetic oligonucleotide
acaguacgcagcgaggccc

SEQ ID NO: 1179181 - RNA, 19 nt, Artificial Sequence
  Description of Artificial Sequence: Synthetic oligonucleotide
cacugaaauagccaggcuc

SEQ ID NO: 1179182 - RNA, 19 nt, Artificial Sequence
  Description of Artificial Sequence: Synthetic oligonucleotide
agucauugcgcaccggcuc

SEQ ID NO: 1179183 - RNA, 19 nt, Artificial Sequence
  Description of Artificial Sequence: Synthetic oligonucleotide
cacgccgaacacuacauag

SEQ ID NO: 1179184 - RNA, 19 nt, Artificial Sequence
  Description of Artificial Sequence: Synthetic oligonucleotide
aaaaguccugcuugugcca

SEQ ID NO: 1179185 - RNA, 19 nt, Artificial Sequence
  Description of Artificial Sequence: Synthetic oligonucleotide
aaacgaguuggccgccacg

SEQ ID NO: 1179186 - RNA, 19 nt, Artificial Sequence
  Description of Artificial Sequence: Synthetic oligonucleotide
gaauccauggcuggggacc

SEQ ID NO: 1179187 - RNA, 19 nt, Artificial Sequence
  Description of Artificial Sequence: Synthetic oligonucleotide
auacguuuuaaagugaauu

SEQ ID NO: 1179188 - RNA, 19 nt, Artificial Sequence
  Description of Artificial Sequence: Synthetic oligonucleotide
gacggugacaccgauagca

SEQ ID NO: 1179189 - RNA, 19 nt, Artificial Sequence
  Description of Artificial Sequence: Synthetic oligonucleotide
gaagaauugcagacacacg

SEQ ID NO: 1179190 - RNA, 19 nt, Artificial Sequence
  Description of Artificial Sequence: Synthetic oligonucleotide
acaacauacaucgcaauaa

SEQ ID NO: 1179191 - RNA, 19 nt, Artificial Sequence
  Description of Artificial Sequence: Synthetic oligonucleotide
ccgaacacuacauagccgg

SEQ ID NO: 1179192 - RNA, 19 nt, Artificial Sequence
  Description of Artificial Sequence: Synthetic oligonucleotide
gccggcaucacccagcugg

SEQ ID NO: 1179193 - RNA, 19 nt, Artificial Sequence
  Description of Artificial Sequence: Synthetic oligonucleotide
ggagauuuuguagaggcag

SEQ ID NO: 1179194 - RNA, 19 nt, Artificial Sequence
  Description of Artificial Sequence: Synthetic oligonucleotide
cacauagggcgguacagcc

SEQ ID NO: 1179195 - RNA, 19 nt, Artificial Sequence
  Description of Artificial Sequence: Synthetic oligonucleotide
gguacagccgggcucagcg

SEQ ID NO: 1179196 - RNA, 19 nt, Artificial Sequence
  Description of Artificial Sequence: Synthetic oligonucleotide
guauaaguucaugagcgug

SEQ ID NO: 1179197 - RNA, 19 nt, Artificial Sequence
  Description of Artificial Sequence: Synthetic oligonucleotide
gaacacgaagaggagcgcg

SEQ ID NO: 1179198 - RNA, 19 nt, Artificial Sequence
  Description of Artificial Sequence: Synthetic oligonucleotide
ugucuggauccaaagugga

SEQ ID NO: 1179199 - RNA, 19 nt, Artificial Sequence
  Description of Artificial Sequence: Synthetic oligonucleotide
uagcaguuaccugacauac

SEQ ID NO: 1179200 - RNA, 19 nt, Artificial Sequence
  Description of Artificial Sequence: Synthetic oligonucleotide
gcaguuaccugacauacug

SEQ ID NO: 1179201 - RNA, 19 nt, Artificial Sequence
  Description of Artificial Sequence: Synthetic oligonucleotide
ggugaagaauugcagacac

SEQ ID NO: 1179202 - RNA, 19 nt, Artificial Sequence
  Description of Artificial Sequence: Synthetic oligonucleotide
ggcuaaugaaaagugaggc

SEQ ID NO: 1179203 - RNA, 19 nt, Artificial Sequence
  Description of Artificial Sequence: Synthetic oligonucleotide
gacgaaggggcuaaacgag

SEQ ID NO: 1179204 - RNA, 19 nt, Artificial Sequence
  Description of Artificial Sequence: Synthetic oligonucleotide
uacuaaaguuaucgcucag

SEQ ID NO: 1179205 - RNA, 19 nt, Artificial Sequence
  Description of Artificial Sequence: Synthetic oligonucleotide
ugcuaagguccuucguggg

SEQ ID NO: 1179206 - RNA, 19 nt, Artificial Sequence
  Description of Artificial Sequence: Synthetic oligonucleotide
gacucggaagaaguaaacc

SEQ ID NO: 1179207 - RNA, 19 nt, Artificial Sequence
  Description of Artificial Sequence: Synthetic oligonucleotide
uauacguuuuaaagugaau

SEQ ID NO: 1179208 - RNA, 19 nt, Artificial Sequence
  Description of Artificial Sequence: Synthetic oligonucleotide
cauaaucaaaggaguggac

SEQ ID NO: 1179209 - RNA, 19 nt, Artificial Sequence
  Description of Artificial Sequence: Synthetic oligonucleotide
cacgaagagcaccacgccg

SEQ ID NO: 1179210 - RNA, 19 nt, Artificial Sequence
  Description of Artificial Sequence: Synthetic oligonucleotide
aaacuacaacauacaucgc

SEQ ID NO: 1179211 - RNA, 19 nt, Artificial Sequence
  Description of Artificial Sequence: Synthetic oligonucleotide
gagcaaaacuucccugaag

SEQ ID NO: 1179212 - RNA, 19 nt, Artificial Sequence
  Description of Artificial Sequence: Synthetic oligonucleotide
cugaagucccguuucauga

SEQ ID NO: 1179213 - RNA, 19 nt, Artificial Sequence
  Description of Artificial Sequence: Synthetic oligonucleotide
aaaagugaggccagauaga

SEQ ID NO: 1179214 - RNA, 19 nt, Artificial Sequence
  Description of Artificial Sequence: Synthetic oligonucleotide
cuagccaugagaaagcuau

SEQ ID NO: 1179215 - RNA, 19 nt, Artificial Sequence
  Description of Artificial Sequence: Synthetic oligonucleotide
gcuaaugaaaagugaggcc

SEQ ID NO: 1179216 - RNA, 19 nt, Artificial Sequence
  Description of Artificial Sequence: Synthetic oligonucleotide
guaaaaggagaagagcaca

SEQ ID NO: 1179217 - RNA, 19 nt, Artificial Sequence
  Description of Artificial Sequence: Synthetic oligonucleotide
uuggccgccacgaagucuc

SEQ ID NO: 1179218 - RNA, 19 nt, Artificial Sequence
  Description of Artificial Sequence: Synthetic oligonucleotide
agacgaucaccuuccuuuc

SEQ ID NO: 1179219 - RNA, 19 nt, Artificial Sequence
  Description of Artificial Sequence: Synthetic oligonucleotide
ugacucggaagaaguaaac

SEQ ID NO: 1179220 - RNA, 19 nt, Artificial Sequence
  Description of Artificial Sequence: Synthetic oligonucleotide
ucgcaauaacaaucaagga

SEQ ID NO: 1179221 - RNA, 19 nt, Artificial Sequence
  Description of Artificial Sequence: Synthetic oligonucleotide
agucucggaaguaaaagga

SEQ ID NO: 1179222 - RNA, 19 nt, Artificial Sequence
  Description of Artificial Sequence: Synthetic oligonucleotide
ucggaaguaaaaggagaag

SEQ ID NO: 1179223 - RNA, 19 nt, Artificial Sequence
  Description of Artificial Sequence: Synthetic oligonucleotide
acaccgauagcaguuaccu

SEQ ID NO: 1179224 - RNA, 19 nt, Artificial Sequence
  Description of Artificial Sequence: Synthetic oligonucleotide
agccaugagaaagcuauag

SEQ ID NO: 1179225 - RNA, 19 nt, Artificial Sequence
  Description of Artificial Sequence: Synthetic oligonucleotide
auaaguucaugagcgugag

SEQ ID NO: 1179226 - RNA, 19 nt, Artificial Sequence
  Description of Artificial Sequence: Synthetic oligonucleotide
gggcuaaacgaguuggccg

SEQ ID NO: 1179227 - RNA, 19 nt, Artificial Sequence
  Description of Artificial Sequence: Synthetic oligonucleotide
uggagauuuuguagaggca

SEQ ID NO: 1179228 - RNA, 19 nt, Artificial Sequence
  Description of Artificial Sequence: Synthetic oligonucleotide
guacuaaaguuaucgcuca

SEQ ID NO: 1179229 - RNA, 19 nt, Artificial Sequence
  Description of Artificial Sequence: Synthetic oligonucleotide
aacgaguuggccgccacga

SEQ ID NO: 1179230 - RNA, 19 nt, Artificial Sequence
  Description of Artificial Sequence: Synthetic oligonucleotide
ucccacacgaagagcacca

SEQ ID NO: 1179231 - RNA, 19 nt, Artificial Sequence
  Description of Artificial Sequence: Synthetic oligonucleotide
cugcgugaaguauaaguuc

SEQ ID NO: 1179232 - RNA, 19 nt, Artificial Sequence
  Description of Artificial Sequence: Synthetic oligonucleotide
guguagaccgcggugaggc

SEQ ID NO: 1179233 - RNA, 19 nt, Artificial Sequence
  Description of Artificial Sequence: Synthetic oligonucleotide
cuauacguuuuaaagugaa

SEQ ID NO: 1179234 - RNA, 19 nt, Artificial Sequence
  Description of Artificial Sequence: Synthetic oligonucleotide
uagaccacguaugcuauac

SEQ ID NO: 1179235 - RNA, 19 nt, Artificial Sequence
  Description of Artificial Sequence: Synthetic oligonucleotide
acuaaaguuaucgcucagu

SEQ ID NO: 1179236 - RNA, 19 nt, Artificial Sequence
  Description of Artificial Sequence: Synthetic oligonucleotide
gaaggggcuaaacgaguug

SEQ ID NO: 1179237 - RNA, 19 nt, Artificial Sequence
  Description of Artificial Sequence: Synthetic oligonucleotide
uacagccgggcucagcgug

SEQ ID NO: 1179238 - RNA, 19 nt, Artificial Sequence
  Description of Artificial Sequence: Synthetic oligonucleotide
guuguccccaaucauagua

SEQ ID NO: 1179239 - RNA, 19 nt, Artificial Sequence
  Description of Artificial Sequence: Synthetic oligonucleotide
auagccggcaucacccagc

SEQ ID NO: 1179240 - RNA, 19 nt, Artificial Sequence
  Description of Artificial Sequence: Synthetic oligonucleotide
auagcaguuaccugacaua

SEQ ID NO: 1179241 - RNA, 19 nt, Artificial Sequence
  Description of Artificial Sequence: Synthetic oligonucleotide
ggcuaaacgaguuggccgc

SEQ ID NO: 1179242 - RNA, 19 nt, Artificial Sequence
  Description of Artificial Sequence: Synthetic oligonucleotide
cugaggagcaauguuccag

SEQ ID NO: 1179243 - RNA, 19 nt, Artificial Sequence
  Description of Artificial Sequence: Synthetic oligonucleotide
gacugaauccauggcuggg

SEQ ID NO: 1179244 - RNA, 19 nt, Artificial Sequence
  Description of Artificial Sequence: Synthetic oligonucleotide
caaggcuaaugaaaaguga

SEQ ID NO: 1179245 - RNA, 19 nt, Artificial Sequence
  Description of Artificial Sequence: Synthetic oligonucleotide
cuggauccaaaguggaguc

SEQ ID NO: 1179246 - RNA, 19 nt, Artificial Sequence
  Description of Artificial Sequence: Synthetic oligonucleotide
gucucggaaguaaaaggag

SEQ ID NO: 1179247 - RNA, 19 nt, Artificial Sequence
  Description of Artificial Sequence: Synthetic oligonucleotide
acgccgaacacuacauagc

SEQ ID NO: 1179248 - RNA, 19 nt, Artificial Sequence
  Description of Artificial Sequence: Synthetic oligonucleotide
ggagcaauguuccaggcaa

SEQ ID NO: 1179249 - RNA, 19 nt, Artificial Sequence
  Description of Artificial Sequence: Synthetic oligonucleotide
agaccacguaugcuauacg

SEQ ID NO: 1179250 - RNA, 19 nt, Artificial Sequence
  Description of Artificial Sequence: Synthetic oligonucleotide
ucaccugcgugaaguauaa

SEQ ID NO: 1179251 - RNA, 19 nt, Artificial Sequence
  Description of Artificial Sequence: Synthetic oligonucleotide
agcgagucauugcgcaccg

SEQ ID NO: 1179252 - RNA, 19 nt, Artificial Sequence
  Description of Artificial Sequence: Synthetic oligonucleotide
acagcacgaagaguguguc

SEQ ID NO: 1179253 - RNA, 19 nt, Artificial Sequence
  Description of Artificial Sequence: Synthetic oligonucleotide
aguucaugagcgugagggu

SEQ ID NO: 1179254 - RNA, 19 nt, Artificial Sequence
  Description of Artificial Sequence: Synthetic oligonucleotide
cucggaaguaaaaggagaa

SEQ ID NO: 1179255 - RNA, 19 nt, Artificial Sequence
  Description of Artificial Sequence: Synthetic oligonucleotide
guccuaucuagccaugaga

SEQ ID NO: 1179256 - RNA, 19 nt, Artificial Sequence
  Description of Artificial Sequence: Synthetic oligonucleotide
guaugcuauacguuuuaaa

SEQ ID NO: 1179257 - RNA, 19 nt, Artificial Sequence
  Description of Artificial Sequence: Synthetic oligonucleotide
uaucgcucaguccuaucua

SEQ ID NO: 1179258 - RNA, 19 nt, Artificial Sequence
  Description of Artificial Sequence: Synthetic oligonucleotide
uauuaguauuuaaguuaua

SEQ ID NO: 1179259 - RNA, 19 nt, Artificial Sequence
  Description of Artificial Sequence: Synthetic oligonucleotide
ugaauccauggcuggggac

SEQ ID NO: 1179260 - RNA, 19 nt, Artificial Sequence
  Description of Artificial Sequence: Synthetic oligonucleotide
aaagugaauuaugcaugaa

SEQ ID NO: 1179261 - RNA, 19 nt, Artificial Sequence
  Description of Artificial Sequence: Synthetic oligonucleotide
gagguagccgauacuugag

SEQ ID NO: 1179262 - RNA, 19 nt, Artificial Sequence
  Description of Artificial Sequence: Synthetic oligonucleotide
uggugcuacccuuggcuug

SEQ ID NO: 1179263 - RNA, 19 nt, Artificial Sequence
  Description of Artificial Sequence: Synthetic oligonucleotide
gaccacguaugcuauacgu

SEQ ID NO: 1179264 - RNA, 19 nt, Artificial Sequence
  Description of Artificial Sequence: Synthetic oligonucleotide
gaagacacucugguagcug

SEQ ID NO: 1179265 - RNA, 19 nt, Artificial Sequence
  Description of Artificial Sequence: Synthetic oligonucleotide
gcggcagcgagucauugcg

SEQ ID NO: 1179266 - RNA, 19 nt, Artificial Sequence
  Description of Artificial Sequence: Synthetic oligonucleotide
guagcgcagcaccagccag

SEQ ID NO: 1179267 - RNA, 19 nt, Artificial Sequence
  Description of Artificial Sequence: Synthetic oligonucleotide
agguguagagcaagaugac

SEQ ID NO: 1179268 - RNA, 19 nt, Artificial Sequence
  Description of Artificial Sequence: Synthetic oligonucleotide
guuaccugacauacugaug

SEQ ID NO: 1179269 - RNA, 19 nt, Artificial Sequence
  Description of Artificial Sequence: Synthetic oligonucleotide
auacccacugaaauagcca

SEQ ID NO: 1179270 - RNA, 19 nt, Artificial Sequence
  Description of Artificial Sequence: Synthetic oligonucleotide
ggacugaauccauggcugg

SEQ ID NO: 1179271 - RNA, 19 nt, Artificial Sequence
  Description of Artificial Sequence: Synthetic oligonucleotide
gaacacuacauagccggca

SEQ ID NO: 1179272 - RNA, 19 nt, Artificial Sequence
  Description of Artificial Sequence: Synthetic oligonucleotide
gaggagcgcguagaaggcg

SEQ ID NO: 1179273 - RNA, 19 nt, Artificial Sequence
  Description of Artificial Sequence: Synthetic oligonucleotide
cugcgcguagaugaacacg

SEQ ID NO: 1179274 - RNA, 19 nt, Artificial Sequence
  Description of Artificial Sequence: Synthetic oligonucleotide
guauccgcgcaucgcgccg

SEQ ID NO: 1179275 - RNA, 19 nt, Artificial Sequence
  Description of Artificial Sequence: Synthetic oligonucleotide
aggagcgcguagaaggcgg

SEQ ID NO: 1179276 - RNA, 19 nt, Artificial Sequence
  Description of Artificial Sequence: Synthetic oligonucleotide
acauagggcgguacagccg

SEQ ID NO: 1179277 - RNA, 19 nt, Artificial Sequence
  Description of Artificial Sequence: Synthetic oligonucleotide
acgaagagugugucauuga

SEQ ID NO: 1179278 - RNA, 19 nt, Artificial Sequence
  Description of Artificial Sequence: Synthetic oligonucleotide
aagaugacggugacaccga

SEQ ID NO: 1179279 - RNA, 19 nt, Artificial Sequence
  Description of Artificial Sequence: Synthetic oligonucleotide
aagucccguuucaugagga

SEQ ID NO: 1179280 - RNA, 19 nt, Artificial Sequence
  Description of Artificial Sequence: Synthetic oligonucleotide
cacaguacgcagcgaggcc

SEQ ID NO: 1179281 - RNA, 19 nt, Artificial Sequence
  Description of Artificial Sequence: Synthetic oligonucleotide
aggcccgagagguguagag

SEQ ID NO: 1179282 - RNA, 19 nt, Artificial Sequence
  Description of Artificial Sequence: Synthetic oligonucleotide
ugcuaguacuaaaguuauc

SEQ ID NO: 1179283 - RNA, 19 nt, Artificial Sequence
  Description of Artificial Sequence: Synthetic oligonucleotide
aguuggccgccacgaaguc

SEQ ID NO: 1179284 - RNA, 19 nt, Artificial Sequence
  Description of Artificial Sequence: Synthetic oligonucleotide
aggggcuaaacgaguuggc

SEQ ID NO: 1179285 - RNA, 19 nt, Artificial Sequence
  Description of Artificial Sequence: Synthetic oligonucleotide
guaaggauugaagaaacuu

SEQ ID NO: 1179286 - RNA, 19 nt, Artificial Sequence
  Description of Artificial Sequence: Synthetic oligonucleotide
auuagaccacguaugcuau

SEQ ID NO: 1179287 - RNA, 19 nt, Artificial Sequence
  Description of Artificial Sequence: Synthetic oligonucleotide
gggacugaauccauggcug

SEQ ID NO: 1179288 - RNA, 19 nt, Artificial Sequence
  Description of Artificial Sequence: Synthetic oligonucleotide
cauacaucgcaauaacaau

SEQ ID NO: 1179289 - RNA, 19 nt, Artificial Sequence
  Description of Artificial Sequence: Synthetic oligonucleotide
ggacucuuccuuaggacag

SEQ ID NO: 1179290 - RNA, 19 nt, Artificial Sequence
  Description of Artificial Sequence: Synthetic oligonucleotide
cauagccggcaucacccag

SEQ ID NO: 1179291 - RNA, 19 nt, Artificial Sequence
  Description of Artificial Sequence: Synthetic oligonucleotide
uagaccgcggugaggccga

SEQ ID NO: 1179292 - RNA, 19 nt, Artificial Sequence
  Description of Artificial Sequence: Synthetic oligonucleotide
acgaagaggagcgcguaga

SEQ ID NO: 1179293 - RNA, 19 nt, Artificial Sequence
  Description of Artificial Sequence: Synthetic oligonucleotide
cgcaauaacaaucaaggaa

SEQ ID NO: 1179294 - RNA, 19 nt, Artificial Sequence
  Description of Artificial Sequence: Synthetic oligonucleotide
cuuguggcgguagcgcagc

SEQ ID NO: 1179295 - RNA, 19 nt, Artificial Sequence
  Description of Artificial Sequence: Synthetic oligonucleotide
cacgaagaggagcgcguag

SEQ ID NO: 1179296 - RNA, 19 nt, Artificial Sequence
  Description of Artificial Sequence: Synthetic oligonucleotide
uagccggcaucacccagcu

SEQ ID NO: 1179297 - RNA, 19 nt, Artificial Sequence
  Description of Artificial Sequence: Synthetic oligonucleotide
augaggaaaagugccuaaa

SEQ ID NO: 1179298 - RNA, 19 nt, Artificial Sequence
  Description of Artificial Sequence: Synthetic oligonucleotide
acguaugcuauacguuuua

SEQ ID NO: 1179299 - RNA, 19 nt, Artificial Sequence
  Description of Artificial Sequence: Synthetic oligonucleotide
cacucucacagagacgauc

SEQ ID NO: 1179300 - RNA, 19 nt, Artificial Sequence
  Description of Artificial Sequence: Synthetic oligonucleotide
gagcuguuacuuuguuguc

SEQ ID NO: 1179301 - RNA, 19 nt, Artificial Sequence
  Description of Artificial Sequence: Synthetic oligonucleotide
gggagcuguuacuuuguug

SEQ ID NO: 1179302 - RNA, 19 nt, Artificial Sequence
  Description of Artificial Sequence: Synthetic oligonucleotide
uuagaccacguaugcuaua

SEQ ID NO: 1179303 - RNA, 19 nt, Artificial Sequence
  Description of Artificial Sequence: Synthetic oligonucleotide
gagcaauguuccaggcaag

SEQ ID NO: 1179304 - RNA, 19 nt, Artificial Sequence
  Description of Artificial Sequence: Synthetic oligonucleotide
aggagcucccacacgaaga

SEQ ID NO: 1179305 - RNA, 19 nt, Artificial Sequence
  Description of Artificial Sequence: Synthetic oligonucleotide
auaguagucuggagcaaaa

SEQ ID NO: 1179306 - RNA, 19 nt, Artificial Sequence
  Description of Artificial Sequence: Synthetic oligonucleotide
acacggggaagcaguagag

SEQ ID NO: 1179307 - RNA, 19 nt, Artificial Sequence
  Description of Artificial Sequence: Synthetic oligonucleotide
acauagccggcaucaccca

SEQ ID NO: 1179308 - RNA, 19 nt, Artificial Sequence
  Description of Artificial Sequence: Synthetic oligonucleotide
ugacggugacaccgauagc

SEQ ID NO: 1179309 - RNA, 19 nt, Artificial Sequence
  Description of Artificial Sequence: Synthetic oligonucleotide
agagacgaucaccuuccuu

SEQ ID NO: 1179310 - RNA, 19 nt, Artificial Sequence
  Description of Artificial Sequence: Synthetic oligonucleotide
cauaguagucuggagcaaa

SEQ ID NO: 1179311 - RNA, 19 nt, Artificial Sequence
  Description of Artificial Sequence: Synthetic oligonucleotide
acggugacaccgauagcag

SEQ ID NO: 1179312 - RNA, 19 nt, Artificial Sequence
  Description of Artificial Sequence: Synthetic oligonucleotide
gccagauagagagguagcc

SEQ ID NO: 1179313 - RNA, 19 nt, Artificial Sequence
  Description of Artificial Sequence: Synthetic oligonucleotide
gguauccgcgcaucgcgcc

SEQ ID NO: 1179314 - RNA, 19 nt, Artificial Sequence
  Description of Artificial Sequence: Synthetic oligonucleotide
ucgggcuggggccgcuccg

SEQ ID NO: 1179315 - RNA, 19 nt, Artificial Sequence
  Description of Artificial Sequence: Synthetic oligonucleotide
agcugcgcguagaugaaca

SEQ ID NO: 1179316 - RNA, 19 nt, Artificial Sequence
  Description of Artificial Sequence: Synthetic oligonucleotide
caccgauagcaguuaccug

SEQ ID NO: 1179317 - RNA, 19 nt, Artificial Sequence
  Description of Artificial Sequence: Synthetic oligonucleotide
guuaucgcucaguccuauc

SEQ ID NO: 1179318 - RNA, 19 nt, Artificial Sequence
  Description of Artificial Sequence: Synthetic oligonucleotide
ggggcuaaacgaguuggcc

SEQ ID NO: 1179319 - RNA, 19 nt, Artificial Sequence
  Description of Artificial Sequence: Synthetic oligonucleotide
aguuaucgcucaguccuau

SEQ ID NO: 1179320 - RNA, 19 nt, Artificial Sequence
  Description of Artificial Sequence: Synthetic oligonucleotide
acgaaggggcuaaacgagu

SEQ ID NO: 1179321 - RNA, 19 nt, Artificial Sequence
  Description of Artificial Sequence: Synthetic oligonucleotide
gaguuggccgccacgaagu

SEQ ID NO: 1179322 - RNA, 19 nt, Artificial Sequence
  Description of Artificial Sequence: Synthetic oligonucleotide
uauccgcgcaucgcgccgc

SEQ ID NO: 1179323 - RNA, 19 nt, Artificial Sequence
  Description of Artificial Sequence: Synthetic oligonucleotide
cgccgaacacuacauagcc

SEQ ID NO: 1179324 - RNA, 19 nt, Artificial Sequence
  Description of Artificial Sequence: Synthetic oligonucleotide
cgagucauugcgcaccggc

SEQ ID NO: 1179325 - RNA, 19 nt, Artificial Sequence
  Description of Artificial Sequence: Synthetic oligonucleotide
accacguaugcuauacguu

SEQ ID NO: 1179326 - RNA, 19 nt, Artificial Sequence
  Description of Artificial Sequence: Synthetic oligonucleotide
agggcgguacagccgggcu

SEQ ID NO: 1179327 - RNA, 19 nt, Artificial Sequence
  Description of Artificial Sequence: Synthetic oligonucleotide
cacgaagucucggaaguaa

SEQ ID NO: 1179328 - RNA, 19 nt, Artificial Sequence
  Description of Artificial Sequence: Synthetic oligonucleotide
uagggcgguacagccgggc

SEQ ID NO: 1179329 - RNA, 19 nt, Artificial Sequence
  Description of Artificial Sequence: Synthetic oligonucleotide
gccgaacacuacauagccg

SEQ ID NO: 1179330 - RNA, 19 nt, Artificial Sequence
  Description of Artificial Sequence: Synthetic oligonucleotide
aaguuaucgcucaguccua

SEQ ID NO: 1179331 - RNA, 19 nt, Artificial Sequence
  Description of Artificial Sequence: Synthetic oligonucleotide
ccaaucauaguagucugga

SEQ ID NO: 1179332 - RNA, 19 nt, Artificial Sequence
  Description of Artificial Sequence: Synthetic oligonucleotide
ucugguagcugagccgcuu

SEQ ID NO: 1179333 - RNA, 19 nt, Artificial Sequence
  Description of Artificial Sequence: Synthetic oligonucleotide
uacccuuggcuugcuuugu

SEQ ID NO: 1179334 - RNA, 19 nt, Artificial Sequence
  Description of Artificial Sequence: Synthetic oligonucleotide
gguguagaccgcggugagg

SEQ ID NO: 1179335 - RNA, 19 nt, Artificial Sequence
  Description of Artificial Sequence: Synthetic oligonucleotide
ccgauagcaguuaccugac

SEQ ID NO: 1179336 - RNA, 19 nt, Artificial Sequence
  Description of Artificial Sequence: Synthetic oligonucleotide
cagaagacgaaggggcuaa

SEQ ID NO: 1179337 - RNA, 19 nt, Artificial Sequence
  Description of Artificial Sequence: Synthetic oligonucleotide
uggccgccacgaagucucg

SEQ ID NO: 1179338 - RNA, 19 nt, Artificial Sequence
  Description of Artificial Sequence: Synthetic oligonucleotide
gaugacggugacaccgaua

SEQ ID NO: 1179339 - RNA, 19 nt, Artificial Sequence
  Description of Artificial Sequence: Synthetic oligonucleotide
cacucccggguauccgcgc

SEQ ID NO: 1179340 - RNA, 19 nt, Artificial Sequence
  Description of Artificial Sequence: Synthetic oligonucleotide
ggaggcgccuccaucgggc

SEQ ID NO: 1179341 - RNA, 19 nt, Artificial Sequence
  Description of Artificial Sequence: Synthetic oligonucleotide
gcugagccgcuuguggcgg

SEQ ID NO: 1179342 - RNA, 19 nt, Artificial Sequence
  Description of Artificial Sequence: Synthetic oligonucleotide
cuucgugggguuucugacu

SEQ ID NO: 1179343 - RNA, 19 nt, Artificial Sequence
  Description of Artificial Sequence: Synthetic oligonucleotide
gguucccgucuucaccagc

SEQ ID NO: 1179344 - RNA, 19 nt, Artificial Sequence
  Description of Artificial Sequence: Synthetic oligonucleotide
ggcggcagcgagucauugc

SEQ ID NO: 1179345 - RNA, 19 nt, Artificial Sequence
  Description of Artificial Sequence: Synthetic oligonucleotide
cggguauccgcgcaucgcg

SEQ ID NO: 1179346 - RNA, 19 nt, Artificial Sequence
  Description of Artificial Sequence: Synthetic oligonucleotide
gguuuucaacagaggacuc

SEQ ID NO: 1179347 - RNA, 19 nt, Artificial Sequence
  Description of Artificial Sequence: Synthetic oligonucleotide
gagucauugcgcaccggcu

SEQ ID NO: 1179348 - RNA, 19 nt, Artificial Sequence
  Description of Artificial Sequence: Synthetic oligonucleotide
gccgcuccggcuucaucgg

SEQ ID NO: 1179349 - RNA, 19 nt, Artificial Sequence
  Description of Artificial Sequence: Synthetic oligonucleotide
gagcugcgcguagaugaac

SEQ ID NO: 1179350 - RNA, 19 nt, Artificial Sequence
  Description of Artificial Sequence: Synthetic oligonucleotide
caguacgcagcgaggccca

SEQ ID NO: 1179351 - RNA, 19 nt, Artificial Sequence
  Description of Artificial Sequence: Synthetic oligonucleotide
cuaaacgaguuggccgcca

SEQ ID NO: 1179352 - RNA, 19 nt, Artificial Sequence
  Description of Artificial Sequence: Synthetic oligonucleotide
aggcucuuugcuaguacua

SEQ ID NO: 1179353 - RNA, 19 nt, Artificial Sequence
  Description of Artificial Sequence: Synthetic oligonucleotide
gccgcuuguggcgguagcg

SEQ ID NO: 1179354 - RNA, 19 nt, Artificial Sequence
  Description of Artificial Sequence: Synthetic oligonucleotide
acgaguuggccgccacgaa

SEQ ID NO: 1179355 - RNA, 19 nt, Artificial Sequence
  Description of Artificial Sequence: Synthetic oligonucleotide
gcugcgcguagaugaacac

SEQ ID NO: 1179356 - RNA, 19 nt, Artificial Sequence
  Description of Artificial Sequence: Synthetic oligonucleotide
agagcugcgcguagaugaa

SEQ ID NO: 1179357 - RNA, 19 nt, Artificial Sequence
  Description of Artificial Sequence: Synthetic oligonucleotide
ggcucuuugcuaguacuaa

SEQ ID NO: 1179358 - RNA, 19 nt, Artificial Sequence
  Description of Artificial Sequence: Synthetic oligonucleotide
ccgagagguguagagcaag

SEQ ID NO: 1179359 - RNA, 19 nt, Artificial Sequence
  Description of Artificial Sequence: Synthetic oligonucleotide
acacgaagaggagcgcgua

SEQ ID NO: 1179360 - RNA, 19 nt, Artificial Sequence
  Description of Artificial Sequence: Synthetic oligonucleotide
cgaacacuacauagccggc

SEQ ID NO: 1179361 - RNA, 19 nt, Artificial Sequence
  Description of Artificial Sequence: Synthetic oligonucleotide
ggcccgagagguguagagc

SEQ ID NO: 1179362 - RNA, 19 nt, Artificial Sequence
  Description of Artificial Sequence: Synthetic oligonucleotide
auagggcgguacagccggg

SEQ ID NO: 1179363 - RNA, 19 nt, Artificial Sequence
  Description of Artificial Sequence: Synthetic oligonucleotide
ugcuacccuuggcuugcuu

SEQ ID NO: 1179364 - RNA, 19 nt, Artificial Sequence
  Description of Artificial Sequence: Synthetic oligonucleotide
ggcgguacagccgggcuca

SEQ ID NO: 1179365 - RNA, 19 nt, Artificial Sequence
  Description of Artificial Sequence: Synthetic oligonucleotide
aguacgcagcgaggcccag

SEQ ID NO: 1179366 - RNA, 19 nt, Artificial Sequence
  Description of Artificial Sequence: Synthetic oligonucleotide
gcuaaacgaguuggccgcc

SEQ ID NO: 1179367 - RNA, 19 nt, Artificial Sequence
  Description of Artificial Sequence: Synthetic oligonucleotide
cccguuucaugaggaaaag

SEQ ID NO: 1179368 - RNA, 19 nt, Artificial Sequence
  Description of Artificial Sequence: Synthetic oligonucleotide
cacguaugcuauacguuuu

SEQ ID NO: 1179369 - RNA, 19 nt, Artificial Sequence
  Description of Artificial Sequence: Synthetic oligonucleotide
gcguagaaggcgguguaga

SEQ ID NO: 1179370 - RNA, 19 nt, Artificial Sequence
  Description of Artificial Sequence: Synthetic oligonucleotide
cucccacggaggcgccucc

SEQ ID NO: 1179371 - RNA, 19 nt, Artificial Sequence
  Description of Artificial Sequence: Synthetic oligonucleotide
gcgguguagaccgcgguga

SEQ ID NO: 1179372 - RNA, 19 nt, Artificial Sequence
  Description of Artificial Sequence: Synthetic oligonucleotide
gggaagcaguagaguagcc

SEQ ID NO: 1179373 - RNA, 19 nt, Artificial Sequence
  Description of Artificial Sequence: Synthetic oligonucleotide
ggguauccgcgcaucgcgc

SEQ ID NO: 1179374 - RNA, 19 nt, Artificial Sequence
  Description of Artificial Sequence: Synthetic oligonucleotide
ccuaucuagccaugagaaa

SEQ ID NO: 1179375 - RNA, 19 nt, Artificial Sequence
  Description of Artificial Sequence: Synthetic oligonucleotide
guaggagcucccacacgaa

SEQ ID NO: 1179376 - RNA, 19 nt, Artificial Sequence
  Description of Artificial Sequence: Synthetic oligonucleotide
ucccggguauccgcgcauc

SEQ ID NO: 1179377 - RNA, 19 nt, Artificial Sequence
  Description of Artificial Sequence: Synthetic oligonucleotide
gguugcuaagguccuucgu

SEQ ID NO: 1179378 - RNA, 19 nt, Artificial Sequence
  Description of Artificial Sequence: Synthetic oligonucleotide
ccacguaugcuauacguuu

SEQ ID NO: 1179379 - RNA, 19 nt, Artificial Sequence
  Description of Artificial Sequence: Synthetic oligonucleotide
ccggcaucacccagcuggc

SEQ ID NO: 1179380 - RNA, 19 nt, Artificial Sequence
  Description of Artificial Sequence: Synthetic oligonucleotide
cccggguauccgcgcaucg

SEQ ID NO: 1179381 - RNA, 19 nt, Artificial Sequence
  Description of Artificial Sequence: Synthetic oligonucleotide
caccugcgugaaguauaag

SEQ ID NO: 1179382 - RNA, 19 nt, Artificial Sequence
  Description of Artificial Sequence: Synthetic oligonucleotide
ggauccaaaguggagucuu

SEQ ID NO: 1179383 - RNA, 19 nt, Artificial Sequence
  Description of Artificial Sequence: Synthetic oligonucleotide
ucccacggaggcgccucca

SEQ ID NO: 1179384 - RNA, 19 nt, Artificial Sequence
  Description of Artificial Sequence: Synthetic oligonucleotide
gagcuucacauagggcggu

SEQ ID NO: 1179385 - RNA, 19 nt, Artificial Sequence
  Description of Artificial Sequence: Synthetic oligonucleotide
gggcgguacagccgggcuc

SEQ ID NO: 1179386 - RNA, 19 nt, Artificial Sequence
  Description of Artificial Sequence: Synthetic oligonucleotide
gcgugagggugaagaauug

SEQ ID NO: 1179387 - RNA, 19 nt, Artificial Sequence
  Description of Artificial Sequence: Synthetic oligonucleotide
ccgcuuguggcgguagcgc

SEQ ID NO: 1179388 - RNA, 19 nt, Artificial Sequence
  Description of Artificial Sequence: Synthetic oligonucleotide
ccgcgcaucgcgccgcacc

SEQ ID NO: 1179389 - RNA, 19 nt, Artificial Sequence
  Description of Artificial Sequence: Synthetic oligonucleotide
auccgcgcaucgcgccgca

SEQ ID NO: 1179390 - RNA, 19 nt, Artificial Sequence
  Description of Artificial Sequence: Synthetic oligonucleotide
cagccguccacucccgggu

SEQ ID NO: 1179391 - RNA, 19 nt, Artificial Sequence
  Description of Artificial Sequence: Synthetic oligonucleotide
agccggcaucacccagcug

SEQ ID NO: 1179392 - RNA, 19 nt, Artificial Sequence
  Description of Artificial Sequence: Synthetic oligonucleotide
guacagccgggcucagcgu

SEQ ID NO: 1179393 - RNA, 19 nt, Artificial Sequence
  Description of Artificial Sequence: Synthetic oligonucleotide
ccugaggagcaauguucca

SEQ ID NO: 1179394 - RNA, 19 nt, Artificial Sequence
  Description of Artificial Sequence: Synthetic oligonucleotide
cgcggugaggccgagcuuc

SEQ ID NO: 1179395 - RNA, 19 nt, Artificial Sequence
  Description of Artificial Sequence: Synthetic oligonucleotide
guacgcagcgaggcccaga

SEQ ID NO: 1179396 - RNA, 19 nt, Artificial Sequence
  Description of Artificial Sequence: Synthetic oligonucleotide
ccggguauccgcgcaucgc

SEQ ID NO: 1179397 - RNA, 19 nt, Artificial Sequence
  Description of Artificial Sequence: Synthetic oligonucleotide
cacggggaagcaguagagu

SEQ ID NO: 1179398 - RNA, 19 nt, Artificial Sequence
  Description of Artificial Sequence: Synthetic oligonucleotide
ccagagcugcgcguagaug

SEQ ID NO: 1179399 - RNA, 19 nt, Artificial Sequence
  Description of Artificial Sequence: Synthetic oligonucleotide
ggccgccacgaagucucgg

SEQ ID NO: 1179400 - RNA, 19 nt, Artificial Sequence
  Description of Artificial Sequence: Synthetic oligonucleotide
cgcgcaucgcgccgcaccc

SEQ ID NO: 1179401 - RNA, 19 nt, Artificial Sequence
  Description of Artificial Sequence: Synthetic oligonucleotide
gcgugggcggcagcgaguc

SEQ ID NO: 1179402 - RNA, 19 nt, Artificial Sequence
  Description of Artificial Sequence: Synthetic oligonucleotide
gcgagucauugcgcaccgg

SEQ ID NO: 1179403 - RNA, 19 nt, Artificial Sequence
  Description of Artificial Sequence: Synthetic oligonucleotide
caggcccgagagguguaga

SEQ ID NO: 1179404 - RNA, 19 nt, Artificial Sequence
  Description of Artificial Sequence: Synthetic oligonucleotide
ccgcuccggcuucaucggg

SEQ ID NO: 1179405 - RNA, 19 nt, Artificial Sequence
  Description of Artificial Sequence: Synthetic oligonucleotide
cggcagcgagucauugcgc

SEQ ID NO: 1179406 - RNA, 19 nt, Artificial Sequence
  Description of Artificial Sequence: Synthetic oligonucleotide
cgcguagaaggcgguguag

SEQ ID NO: 1179407 - RNA, 19 nt, Artificial Sequence
  Description of Artificial Sequence: Synthetic oligonucleotide
caucgggcuggggccgcuc

SEQ ID NO: 1179408 - RNA, 19 nt, Artificial Sequence
  Description of Artificial Sequence: Synthetic oligonucleotide
cugccugaucugauacauu

SEQ ID NO: 1179409 - RNA, 19 nt, Artificial Sequence
  Description of Artificial Sequence: Synthetic oligonucleotide
agaccgcggugaggccgag

SEQ ID NO: 1179410 - RNA, 19 nt, Artificial Sequence
  Description of Artificial Sequence: Synthetic oligonucleotide
agcaggcccgagaggugua

SEQ ID NO: 1179411 - RNA, 19 nt, Artificial Sequence
  Description of Artificial Sequence: Synthetic oligonucleotide
gcucccacggaggcgccuc

SEQ ID NO: 1179412 - RNA, 19 nt, Artificial Sequence
  Description of Artificial Sequence: Synthetic oligonucleotide
cccacacgaagagcaccac

SEQ ID NO: 1179413 - RNA, 19 nt, Artificial Sequence
  Description of Artificial Sequence: Synthetic oligonucleotide
cguaugcuauacguuuuaa

SEQ ID NO: 1179414 - RNA, 19 nt, Artificial Sequence
  Description of Artificial Sequence: Synthetic oligonucleotide
gcgcaucgcgccgcacccg

SEQ ID NO: 1179415 - RNA, 19 nt, Artificial Sequence
  Description of Artificial Sequence: Synthetic oligonucleotide
cugagccgcuuguggcggu

SEQ ID NO: 1179416 - RNA, 19 nt, Artificial Sequence
  Description of Artificial Sequence: Synthetic oligonucleotide
ccacugaaauagccaggcu

SEQ ID NO: 1179417 - RNA, 19 nt, Artificial Sequence
  Description of Artificial Sequence: Synthetic oligonucleotide
cgaaggggcuaaacgaguu

SEQ ID NO: 1179418 - RNA, 19 nt, Artificial Sequence
  Description of Artificial Sequence: Synthetic oligonucleotide
gcgcguagaugaacacgaa

SEQ ID NO: 1179419 - RNA, 19 nt, Artificial Sequence
  Description of Artificial Sequence: Synthetic oligonucleotide
cucccggguauccgcgcau

SEQ ID NO: 1179420 - RNA, 19 nt, Artificial Sequence
  Description of Artificial Sequence: Synthetic oligonucleotide
ccacgccgaacacuacaua

SEQ ID NO: 1179421 - RNA, 19 nt, Artificial Sequence
  Description of Artificial Sequence: Synthetic oligonucleotide
ggagcgcguagaaggcggu

SEQ ID NO: 1179422 - RNA, 19 nt, Artificial Sequence
  Description of Artificial Sequence: Synthetic oligonucleotide
gcgguacagccgggcucag

SEQ ID NO: 1179423 - RNA, 19 nt, Artificial Sequence
  Description of Artificial Sequence: Synthetic oligonucleotide
cgguacagccgggcucagc

SEQ ID NO: 1179424 - RNA, 19 nt, Artificial Sequence
  Description of Artificial Sequence: Synthetic oligonucleotide
caggguugcuaagguccuu

SEQ ID NO: 1179425 - RNA, 19 nt, Artificial Sequence
  Description of Artificial Sequence: Synthetic oligonucleotide
gugcuacccuuggcuugcu

SEQ ID NO: 1179426 - RNA, 19 nt, Artificial Sequence
  Description of Artificial Sequence: Synthetic oligonucleotide
gcgcaccggcucccacgga

SEQ ID NO: 1179427 - RNA, 19 nt, Artificial Sequence
  Description of Artificial Sequence: Synthetic oligonucleotide
cgugggcggcagcgaguca

SEQ ID NO: 1179428 - RNA, 19 nt, Artificial Sequence
  Description of Artificial Sequence: Synthetic oligonucleotide
aauacauuaauccguggag

SEQ ID NO: 1179429 - RNA, 19 nt, Artificial Sequence
  Description of Artificial Sequence: Synthetic oligonucleotide
uacaacauaggaaacauca

SEQ ID NO: 1179430 - RNA, 19 nt, Artificial Sequence
  Description of Artificial Sequence: Synthetic oligonucleotide
auucucgaaacacagaggg

SEQ ID NO: 1179431 - RNA, 19 nt, Artificial Sequence
  Description of Artificial Sequence: Synthetic oligonucleotide
ucuuguaugaaauacucca

SEQ ID NO: 1179432 - RNA, 19 nt, Artificial Sequence
  Description of Artificial Sequence: Synthetic oligonucleotide
aaauacauuaauccgugga

SEQ ID NO: 1179433 - RNA, 19 nt, Artificial Sequence
  Description of Artificial Sequence: Synthetic oligonucleotide
aucacaucauucuuugucc

SEQ ID NO: 1179434 - RNA, 19 nt, Artificial Sequence
  Description of Artificial Sequence: Synthetic oligonucleotide
aguagagugggacagcaac

SEQ ID NO: 1179435 - RNA, 19 nt, Artificial Sequence
  Description of Artificial Sequence: Synthetic oligonucleotide
aacucaagaacuuuuccca

SEQ ID NO: 1179436 - RNA, 19 nt, Artificial Sequence
  Description of Artificial Sequence: Synthetic oligonucleotide
ucugcauggaugauguagg

SEQ ID NO: 1179437 - RNA, 19 nt, Artificial Sequence
  Description of Artificial Sequence: Synthetic oligonucleotide
aacggcacgcacaaaaucc

SEQ ID NO: 1179438 - RNA, 19 nt, Artificial Sequence
  Description of Artificial Sequence: Synthetic oligonucleotide
cacgccauggacaugaugc

SEQ ID NO: 1179439 - RNA, 19 nt, Artificial Sequence
  Description of Artificial Sequence: Synthetic oligonucleotide
gagcauugaacucaggcag

SEQ ID NO: 1179440 - RNA, 19 nt, Artificial Sequence
  Description of Artificial Sequence: Synthetic oligonucleotide
gauaucauccccuggcucc

SEQ ID NO: 1179441 - RNA, 19 nt, Artificial Sequence
  Description of Artificial Sequence: Synthetic oligonucleotide
cuaucauccuugaacacgg

SEQ ID NO: 1179442 - RNA, 19 nt, Artificial Sequence
  Description of Artificial Sequence: Synthetic oligonucleotide
uuguaugaaauacuccagc

SEQ ID NO: 1179443 - RNA, 19 nt, Artificial Sequence
  Description of Artificial Sequence: Synthetic oligonucleotide
gccauaaauacauuaaucc

SEQ ID NO: 1179444 - RNA, 19 nt, Artificial Sequence
  Description of Artificial Sequence: Synthetic oligonucleotide
augauguccacugauguac

SEQ ID NO: 1179445 - RNA, 19 nt, Artificial Sequence
  Description of Artificial Sequence: Synthetic oligonucleotide
uucuguugcuccaugguag

SEQ ID NO: 1179446 - RNA, 19 nt, Artificial Sequence
  Description of Artificial Sequence: Synthetic oligonucleotide
uguaugaaauacuccagcu

SEQ ID NO: 1179447 - RNA, 19 nt, Artificial Sequence
  Description of Artificial Sequence: Synthetic oligonucleotide
ugagacaaugcguacuucc

SEQ ID NO: 1179448 - RNA, 19 nt, Artificial Sequence
  Description of Artificial Sequence: Synthetic oligonucleotide
cuuauugugcuugugagac

SEQ ID NO: 1179449 - RNA, 19 nt, Artificial Sequence
  Description of Artificial Sequence: Synthetic oligonucleotide
aaacggcacgcacaaaauc

SEQ ID NO: 1179450 - RNA, 19 nt, Artificial Sequence
  Description of Artificial Sequence: Synthetic oligonucleotide
gauguacgaccucugaucc

SEQ ID NO: 1179451 - RNA, 19 nt, Artificial Sequence
  Description of Artificial Sequence: Synthetic oligonucleotide
uauucucgaaacacagagg

SEQ ID NO: 1179452 - RNA, 19 nt, Artificial Sequence
  Description of Artificial Sequence: Synthetic oligonucleotide
ugagcauugaacucaggca

SEQ ID NO: 1179453 - RNA, 19 nt, Artificial Sequence
  Description of Artificial Sequence: Synthetic oligonucleotide
guaccuaucauccuugaac

SEQ ID NO: 1179454 - RNA, 19 nt, Artificial Sequence
  Description of Artificial Sequence: Synthetic oligonucleotide
uaccuaucauccuugaaca

SEQ ID NO: 1179455 - RNA, 19 nt, Artificial Sequence
  Description of Artificial Sequence: Synthetic oligonucleotide
gauccaguaccuaucaucc

SEQ ID NO: 1179456 - RNA, 19 nt, Artificial Sequence
  Description of Artificial Sequence: Synthetic oligonucleotide
ucauuggagcacaggaagg

SEQ ID NO: 1179457 - RNA, 19 nt, Artificial Sequence
  Description of Artificial Sequence: Synthetic oligonucleotide
ugccauagcgcuccaauag

SEQ ID NO: 1179458 - RNA, 19 nt, Artificial Sequence
  Description of Artificial Sequence: Synthetic oligonucleotide
aaugcguacuuccacuccu

SEQ ID NO: 1179459 - RNA, 19 nt, Artificial Sequence
  Description of Artificial Sequence: Synthetic oligonucleotide
aucccaguauucucgaaac

SEQ ID NO: 1179460 - RNA, 19 nt, Artificial Sequence
  Description of Artificial Sequence: Synthetic oligonucleotide
ugagacugacacaaacucc

SEQ ID NO: 1179461 - RNA, 19 nt, Artificial Sequence
  Description of Artificial Sequence: Synthetic oligonucleotide
gaucucaaggaccaccgag

SEQ ID NO: 1179462 - RNA, 19 nt, Artificial Sequence
  Description of Artificial Sequence: Synthetic oligonucleotide
agugaucucaaggaccacc

SEQ ID NO: 1179463 - RNA, 19 nt, Artificial Sequence
  Description of Artificial Sequence: Synthetic oligonucleotide
ugccauaaauacauuaauc

SEQ ID NO: 1179464 - RNA, 19 nt, Artificial Sequence
  Description of Artificial Sequence: Synthetic oligonucleotide
cugagcauugaacucaggc

SEQ ID NO: 1179465 - RNA, 19 nt, Artificial Sequence
  Description of Artificial Sequence: Synthetic oligonucleotide
uucacaaacggcacgcaca

SEQ ID NO: 1179466 - RNA, 19 nt, Artificial Sequence
  Description of Artificial Sequence: Synthetic oligonucleotide
ccauaaauacauuaauccg

SEQ ID NO: 1179467 - RNA, 19 nt, Artificial Sequence
  Description of Artificial Sequence: Synthetic oligonucleotide
cuucuuauucaccuugccc

SEQ ID NO: 1179468 - RNA, 19 nt, Artificial Sequence
  Description of Artificial Sequence: Synthetic oligonucleotide
accucugacucucugggac

SEQ ID NO: 1179469 - RNA, 19 nt, Artificial Sequence
  Description of Artificial Sequence: Synthetic oligonucleotide
uacauuaauccguggagcu

SEQ ID NO: 1179470 - RNA, 19 nt, Artificial Sequence
  Description of Artificial Sequence: Synthetic oligonucleotide
ugauguacgaccucugauc

SEQ ID NO: 1179471 - RNA, 19 nt, Artificial Sequence
  Description of Artificial Sequence: Synthetic oligonucleotide
agucuuguaugaaauacuc

SEQ ID NO: 1179472 - RNA, 19 nt, Artificial Sequence
  Description of Artificial Sequence: Synthetic oligonucleotide
uugaugauguccacugaug

SEQ ID NO: 1179473 - RNA, 19 nt, Artificial Sequence
  Description of Artificial Sequence: Synthetic oligonucleotide
ugauccaguaccuaucauc

SEQ ID NO: 1179474 - RNA, 19 nt, Artificial Sequence
  Description of Artificial Sequence: Synthetic oligonucleotide
auauccggaacuccaauca

SEQ ID NO: 1179475 - RNA, 19 nt, Artificial Sequence
  Description of Artificial Sequence: Synthetic oligonucleotide
agggcgcugacuuuauagc

SEQ ID NO: 1179476 - RNA, 19 nt, Artificial Sequence
  Description of Artificial Sequence: Synthetic oligonucleotide
caguauucucgaaacacag

SEQ ID NO: 1179477 - RNA, 19 nt, Artificial Sequence
  Description of Artificial Sequence: Synthetic oligonucleotide
caaaauccuggacaugggg

SEQ ID NO: 1179478 - RNA, 19 nt, Artificial Sequence
  Description of Artificial Sequence: Synthetic oligonucleotide
uguacgaccucugauccag

SEQ ID NO: 1179479 - RNA, 19 nt, Artificial Sequence
  Description of Artificial Sequence: Synthetic oligonucleotide
uuauucaccuugcccaucu

SEQ ID NO: 1179480 - RNA, 19 nt, Artificial Sequence
  Description of Artificial Sequence: Synthetic oligonucleotide
agacaaugcguacuuccac

SEQ ID NO: 1179481 - RNA, 19 nt, Artificial Sequence
  Description of Artificial Sequence: Synthetic oligonucleotide
ucucgaaacacagaggguc

SEQ ID NO: 1179482 - RNA, 19 nt, Artificial Sequence
  Description of Artificial Sequence: Synthetic oligonucleotide
guaugaaauacuccagcug

SEQ ID NO: 1179483 - RNA, 19 nt, Artificial Sequence
  Description of Artificial Sequence: Synthetic oligonucleotide
uguccacugauguacgacc

SEQ ID NO: 1179484 - RNA, 19 nt, Artificial Sequence
  Description of Artificial Sequence: Synthetic oligonucleotide
cuuaguagagucaguccgc

SEQ ID NO: 1179485 - RNA, 19 nt, Artificial Sequence
  Description of Artificial Sequence: Synthetic oligonucleotide
ugacuuuauagccuccagu

SEQ ID NO: 1179486 - RNA, 19 nt, Artificial Sequence
  Description of Artificial Sequence: Synthetic oligonucleotide
acaaacggcacgcacaaaa

SEQ ID NO: 1179487 - RNA, 19 nt, Artificial Sequence
  Description of Artificial Sequence: Synthetic oligonucleotide
gaugauguagggagaaccc

SEQ ID NO: 1179488 - RNA, 19 nt, Artificial Sequence
  Description of Artificial Sequence: Synthetic oligonucleotide
acaaugcguacuuccacuc

SEQ ID NO: 1179489 - RNA, 19 nt, Artificial Sequence
  Description of Artificial Sequence: Synthetic oligonucleotide
uuucuuacagggcgacuag

SEQ ID NO: 1179490 - RNA, 19 nt, Artificial Sequence
  Description of Artificial Sequence: Synthetic oligonucleotide
acaaacuccagugaucuca

SEQ ID NO: 1179491 - RNA, 19 nt, Artificial Sequence
  Description of Artificial Sequence: Synthetic oligonucleotide
agcuuccgaacucaagaac

SEQ ID NO: 1179492 - RNA, 19 nt, Artificial Sequence
  Description of Artificial Sequence: Synthetic oligonucleotide
cauucuuuguccaugccca

SEQ ID NO: 1179493 - RNA, 19 nt, Artificial Sequence
  Description of Artificial Sequence: Synthetic oligonucleotide
ccuuaguagagucaguccg

SEQ ID NO: 1179494 - RNA, 19 nt, Artificial Sequence
  Description of Artificial Sequence: Synthetic oligonucleotide
uuuucuuacagggcgacua

SEQ ID NO: 1179495 - RNA, 19 nt, Artificial Sequence
  Description of Artificial Sequence: Synthetic oligonucleotide
ucuuacagggcgacuaguc

SEQ ID NO: 1179496 - RNA, 19 nt, Artificial Sequence
  Description of Artificial Sequence: Synthetic oligonucleotide
ucagccuaaucuuuucuuc

SEQ ID NO: 1179497 - RNA, 19 nt, Artificial Sequence
  Description of Artificial Sequence: Synthetic oligonucleotide
uggacuuagccgcuccaag

SEQ ID NO: 1179498 - RNA, 19 nt, Artificial Sequence
  Description of Artificial Sequence: Synthetic oligonucleotide
ugagccugacaccaucagc

SEQ ID NO: 1179499 - RNA, 19 nt, Artificial Sequence
  Description of Artificial Sequence: Synthetic oligonucleotide
ucacaaacggcacgcacaa

SEQ ID NO: 1179500 - RNA, 19 nt, Artificial Sequence
  Description of Artificial Sequence: Synthetic oligonucleotide
uaauccguggagcuuccga

SEQ ID NO: 1179501 - RNA, 19 nt, Artificial Sequence
  Description of Artificial Sequence: Synthetic oligonucleotide
ugcucuaugggcuguucug

SEQ ID NO: 1179502 - RNA, 19 nt, Artificial Sequence
  Description of Artificial Sequence: Synthetic oligonucleotide
acagcugcuaaguuauggu

SEQ ID NO: 1179503 - RNA, 19 nt, Artificial Sequence
  Description of Artificial Sequence: Synthetic oligonucleotide
agggagaacccuucugcgg

SEQ ID NO: 1179504 - RNA, 19 nt, Artificial Sequence
  Description of Artificial Sequence: Synthetic oligonucleotide
cucgaaacacagagggucc

SEQ ID NO: 1179505 - RNA, 19 nt, Artificial Sequence
  Description of Artificial Sequence: Synthetic oligonucleotide
uuccaguagagugggacag

SEQ ID NO: 1179506 - RNA, 19 nt, Artificial Sequence
  Description of Artificial Sequence: Synthetic oligonucleotide
ucuaugggcuguucuguug

SEQ ID NO: 1179507 - RNA, 19 nt, Artificial Sequence
  Description of Artificial Sequence: Synthetic oligonucleotide
cagaggguccccuaacuag

SEQ ID NO: 1179508 - RNA, 19 nt, Artificial Sequence
  Description of Artificial Sequence: Synthetic oligonucleotide
aucucaaggaccaccgagg

SEQ ID NO: 1179509 - RNA, 19 nt, Artificial Sequence
  Description of Artificial Sequence: Synthetic oligonucleotide
acgaccucugauccaguac

SEQ ID NO: 1179510 - RNA, 19 nt, Artificial Sequence
  Description of Artificial Sequence: Synthetic oligonucleotide
augucauauccggaacucc

SEQ ID NO: 1179511 - RNA, 19 nt, Artificial Sequence
  Description of Artificial Sequence: Synthetic oligonucleotide
ugcuccaugguagauggca

SEQ ID NO: 1179512 - RNA, 19 nt, Artificial Sequence
  Description of Artificial Sequence: Synthetic oligonucleotide
gugaucucaaggaccaccg

SEQ ID NO: 1179513 - RNA, 19 nt, Artificial Sequence
  Description of Artificial Sequence: Synthetic oligonucleotide
ugauaucauccccuggcuc

SEQ ID NO: 1179514 - RNA, 19 nt, Artificial Sequence
  Description of Artificial Sequence: Synthetic oligonucleotide
cauuaauccguggagcuuc

SEQ ID NO: 1179515 - RNA, 19 nt, Artificial Sequence
  Description of Artificial Sequence: Synthetic oligonucleotide
uugaagggccaccacggcu

SEQ ID NO: 1179516 - RNA, 19 nt, Artificial Sequence
  Description of Artificial Sequence: Synthetic oligonucleotide
agcaacaccaccacucauc

SEQ ID NO: 1179517 - RNA, 19 nt, Artificial Sequence
  Description of Artificial Sequence: Synthetic oligonucleotide
uggugauaucauccccugg

SEQ ID NO: 1179518 - RNA, 19 nt, Artificial Sequence
  Description of Artificial Sequence: Synthetic oligonucleotide
uguugcuccaugguagaug

SEQ ID NO: 1179519 - RNA, 19 nt, Artificial Sequence
  Description of Artificial Sequence: Synthetic oligonucleotide
ugugcuugugagacugaca

SEQ ID NO: 1179520 - RNA, 19 nt, Artificial Sequence
  Description of Artificial Sequence: Synthetic oligonucleotide
cauauccggaacuccaauc

SEQ ID NO: 1179521 - RNA, 19 nt, Artificial Sequence
  Description of Artificial Sequence: Synthetic oligonucleotide
aggaggcccacugagcuac

SEQ ID NO: 1179522 - RNA, 19 nt, Artificial Sequence
  Description of Artificial Sequence: Synthetic oligonucleotide
uauccggaacuccaaucac

SEQ ID NO: 1179523 - RNA, 19 nt, Artificial Sequence
  Description of Artificial Sequence: Synthetic oligonucleotide
uccgaacucaagaacuuuu

SEQ ID NO: 1179524 - RNA, 19 nt, Artificial Sequence
  Description of Artificial Sequence: Synthetic oligonucleotide
gacaaucagccuaggguag

SEQ ID NO: 1179525 - RNA, 19 nt, Artificial Sequence
  Description of Artificial Sequence: Synthetic oligonucleotide
guagaugaucauagcaccc

SEQ ID NO: 1179526 - RNA, 19 nt, Artificial Sequence
  Description of Artificial Sequence: Synthetic oligonucleotide
auccguggagcuuccgaac

SEQ ID NO: 1179527 - RNA, 19 nt, Artificial Sequence
  Description of Artificial Sequence: Synthetic oligonucleotide
uccaugcccaugcauggac

SEQ ID NO: 1179528 - RNA, 19 nt, Artificial Sequence
  Description of Artificial Sequence: Synthetic oligonucleotide
aggaaacaucauuggagca

SEQ ID NO: 1179529 - RNA, 19 nt, Artificial Sequence
  Description of Artificial Sequence: Synthetic oligonucleotide
ggagucuuguaugaaauac

SEQ ID NO: 1179530 - RNA, 19 nt, Artificial Sequence
  Description of Artificial Sequence: Synthetic oligonucleotide
acugauguacgaccucuga

SEQ ID NO: 1179531 - RNA, 19 nt, Artificial Sequence
  Description of Artificial Sequence: Synthetic oligonucleotide
uagagugggacagcaacac

SEQ ID NO: 1179532 - RNA, 19 nt, Artificial Sequence
  Description of Artificial Sequence: Synthetic oligonucleotide
ucauauccggaacuccaau

SEQ ID NO: 1179533 - RNA, 19 nt, Artificial Sequence
  Description of Artificial Sequence: Synthetic oligonucleotide
uugagaucccugugggaca

SEQ ID NO: 1179534 - RNA, 19 nt, Artificial Sequence
  Description of Artificial Sequence: Synthetic oligonucleotide
uccguggagcuuccgaacu

SEQ ID NO: 1179535 - RNA, 19 nt, Artificial Sequence
  Description of Artificial Sequence: Synthetic oligonucleotide
uucucgaaacacagagggu

SEQ ID NO: 1179536 - RNA, 19 nt, Artificial Sequence
  Description of Artificial Sequence: Synthetic oligonucleotide
ugguguagaugaucauagc

SEQ ID NO: 1179537 - RNA, 19 nt, Artificial Sequence
  Description of Artificial Sequence: Synthetic oligonucleotide
aucugugaugcuggggugg

SEQ ID NO: 1179538 - RNA, 19 nt, Artificial Sequence
  Description of Artificial Sequence: Synthetic oligonucleotide
auuaauccguggagcuucc

SEQ ID NO: 1179539 - RNA, 19 nt, Artificial Sequence
  Description of Artificial Sequence: Synthetic oligonucleotide
accugcccuuaguagaguc

SEQ ID NO: 1179540 - RNA, 19 nt, Artificial Sequence
  Description of Artificial Sequence: Synthetic oligonucleotide
ccuaucauccuugaacacg

SEQ ID NO: 1179541 - RNA, 19 nt, Artificial Sequence
  Description of Artificial Sequence: Synthetic oligonucleotide
gucuuguaugaaauacucc

SEQ ID NO: 1179542 - RNA, 19 nt, Artificial Sequence
  Description of Artificial Sequence: Synthetic oligonucleotide
acaugaugcagagggagga

SEQ ID NO: 1179543 - RNA, 19 nt, Artificial Sequence
  Description of Artificial Sequence: Synthetic oligonucleotide
aaacuccagugaucucaag

SEQ ID NO: 1179544 - RNA, 19 nt, Artificial Sequence
  Description of Artificial Sequence: Synthetic oligonucleotide
acaaucagccuaggguagg

SEQ ID NO: 1179545 - RNA, 19 nt, Artificial Sequence
  Description of Artificial Sequence: Synthetic oligonucleotide
caaugcguacuuccacucc

SEQ ID NO: 1179546 - RNA, 19 nt, Artificial Sequence
  Description of Artificial Sequence: Synthetic oligonucleotide
uagcgcuccaauagugugu

SEQ ID NO: 1179547 - RNA, 19 nt, Artificial Sequence
  Description of Artificial Sequence: Synthetic oligonucleotide
guguccccuguucuuaucc

SEQ ID NO: 1179548 - RNA, 19 nt, Artificial Sequence
  Description of Artificial Sequence: Synthetic oligonucleotide
aaguuauggugggugcuca

SEQ ID NO: 1179549 - RNA, 19 nt, Artificial Sequence
  Description of Artificial Sequence: Synthetic oligonucleotide
uguccccuguucuuauccc

SEQ ID NO: 1179550 - RNA, 19 nt, Artificial Sequence
  Description of Artificial Sequence: Synthetic oligonucleotide
aaaccuccugagcauugaa

SEQ ID NO: 1179551 - RNA, 19 nt, Artificial Sequence
  Description of Artificial Sequence: Synthetic oligonucleotide
ggaaacaucauuggagcac

SEQ ID NO: 1179552 - RNA, 19 nt, Artificial Sequence
  Description of Artificial Sequence: Synthetic oligonucleotide
gacaaugcguacuuccacu

SEQ ID NO: 1179553 - RNA, 19 nt, Artificial Sequence
  Description of Artificial Sequence: Synthetic oligonucleotide
cuacaacauaggaaacauc

SEQ ID NO: 1179554 - RNA, 19 nt, Artificial Sequence
  Description of Artificial Sequence: Synthetic oligonucleotide
agaucgugggcacugccau

SEQ ID NO: 1179555 - RNA, 19 nt, Artificial Sequence
  Description of Artificial Sequence: Synthetic oligonucleotide
gcuaaguuauggugggugc

SEQ ID NO: 1179556 - RNA, 19 nt, Artificial Sequence
  Description of Artificial Sequence: Synthetic oligonucleotide
aguuugcuguagaucgugg

SEQ ID NO: 1179557 - RNA, 19 nt, Artificial Sequence
  Description of Artificial Sequence: Synthetic oligonucleotide
aguuauggugggugcucag

SEQ ID NO: 1179558 - RNA, 19 nt, Artificial Sequence
  Description of Artificial Sequence: Synthetic oligonucleotide
caugucauauccggaacuc

SEQ ID NO: 1179559 - RNA, 19 nt, Artificial Sequence
  Description of Artificial Sequence: Synthetic oligonucleotide
uuauugugcuugugagacu

SEQ ID NO: 1179560 - RNA, 19 nt, Artificial Sequence
  Description of Artificial Sequence: Synthetic oligonucleotide
uccaugguagauggcaggu

SEQ ID NO: 1179561 - RNA, 19 nt, Artificial Sequence
  Description of Artificial Sequence: Synthetic oligonucleotide
accacagcugcuaaguuau

SEQ ID NO: 1179562 - RNA, 19 nt, Artificial Sequence
  Description of Artificial Sequence: Synthetic oligonucleotide
acgccauucccucucuuga

SEQ ID NO: 1179563 - RNA, 19 nt, Artificial Sequence
  Description of Artificial Sequence: Synthetic oligonucleotide
ugcuguagaucgugggcac

SEQ ID NO: 1179564 - RNA, 19 nt, Artificial Sequence
  Description of Artificial Sequence: Synthetic oligonucleotide
aggcccacugagcuacaac

SEQ ID NO: 1179565 - RNA, 19 nt, Artificial Sequence
  Description of Artificial Sequence: Synthetic oligonucleotide
uaguagagucaguccgcag

SEQ ID NO: 1179566 - RNA, 19 nt, Artificial Sequence
  Description of Artificial Sequence: Synthetic oligonucleotide
cuccagugaucucaaggac

SEQ ID NO: 1179567 - RNA, 19 nt, Artificial Sequence
  Description of Artificial Sequence: Synthetic oligonucleotide
agggguagaacugccugag

SEQ ID NO: 1179568 - RNA, 19 nt, Artificial Sequence
  Description of Artificial Sequence: Synthetic oligonucleotide
uaucauccuugaacacggc

SEQ ID NO: 1179569 - RNA, 19 nt, Artificial Sequence
  Description of Artificial Sequence: Synthetic oligonucleotide
acugguguagaugaucaua

SEQ ID NO: 1179570 - RNA, 19 nt, Artificial Sequence
  Description of Artificial Sequence: Synthetic oligonucleotide
ucgaaacacagaggguccc

SEQ ID NO: 1179571 - RNA, 19 nt, Artificial Sequence
  Description of Artificial Sequence: Synthetic oligonucleotide
guagaucgugggcacugcc

SEQ ID NO: 1179572 - RNA, 19 nt, Artificial Sequence
  Description of Artificial Sequence: Synthetic oligonucleotide
cuugggcacugagagcugg

SEQ ID NO: 1179573 - RNA, 19 nt, Artificial Sequence
  Description of Artificial Sequence: Synthetic oligonucleotide
agucaguccgcagccuugg

SEQ ID NO: 1179574 - RNA, 19 nt, Artificial Sequence
  Description of Artificial Sequence: Synthetic oligonucleotide
aguguccccuguucuuauc

SEQ ID NO: 1179575 - RNA, 19 nt, Artificial Sequence
  Description of Artificial Sequence: Synthetic oligonucleotide
aguauucucgaaacacaga

SEQ ID NO: 1179576 - RNA, 19 nt, Artificial Sequence
  Description of Artificial Sequence: Synthetic oligonucleotide
aguaccuaucauccuugaa

SEQ ID NO: 1179577 - RNA, 19 nt, Artificial Sequence
  Description of Artificial Sequence: Synthetic oligonucleotide
cagccuaaucuuuucuuca

SEQ ID NO: 1179578 - RNA, 19 nt, Artificial Sequence
  Description of Artificial Sequence: Synthetic oligonucleotide
ugacccgcuggccccaugu

SEQ ID NO: 1179579 - RNA, 19 nt, Artificial Sequence
  Description of Artificial Sequence: Synthetic oligonucleotide
caaucagccuaggguaggg

SEQ ID NO: 1179580 - RNA, 19 nt, Artificial Sequence
  Description of Artificial Sequence: Synthetic oligonucleotide
aguccgcagccuugggcac

SEQ ID NO: 1179581 - RNA, 19 nt, Artificial Sequence
  Description of Artificial Sequence: Synthetic oligonucleotide
cagcucuccuuccuuuucc

SEQ ID NO: 1179582 - RNA, 19 nt, Artificial Sequence
  Description of Artificial Sequence: Synthetic oligonucleotide
ucuggcccacuccuugaga

SEQ ID NO: 1179583 - RNA, 19 nt, Artificial Sequence
  Description of Artificial Sequence: Synthetic oligonucleotide
agcgcuccaauagugugug

SEQ ID NO: 1179584 - RNA, 19 nt, Artificial Sequence
  Description of Artificial Sequence: Synthetic oligonucleotide
cacgccauucccucucuug

SEQ ID NO: 1179585 - RNA, 19 nt, Artificial Sequence
  Description of Artificial Sequence: Synthetic oligonucleotide
agggcgacuagucuuuauu

SEQ ID NO: 1179586 - RNA, 19 nt, Artificial Sequence
  Description of Artificial Sequence: Synthetic oligonucleotide
cacacagguggcucacgcc

SEQ ID NO: 1179587 - RNA, 19 nt, Artificial Sequence
  Description of Artificial Sequence: Synthetic oligonucleotide
ugcauggaccaguccaguc

SEQ ID NO: 1179588 - RNA, 19 nt, Artificial Sequence
  Description of Artificial Sequence: Synthetic oligonucleotide
cacgagggguagaacugcc

SEQ ID NO: 1179589 - RNA, 19 nt, Artificial Sequence
  Description of Artificial Sequence: Synthetic oligonucleotide
uccuuccuuuuccucgaac

SEQ ID NO: 1179590 - RNA, 19 nt, Artificial Sequence
  Description of Artificial Sequence: Synthetic oligonucleotide
cuggucacgccauucccuc

SEQ ID NO: 1179591 - RNA, 19 nt, Artificial Sequence
  Description of Artificial Sequence: Synthetic oligonucleotide
uuaauccguggagcuuccg

SEQ ID NO: 1179592 - RNA, 19 nt, Artificial Sequence
  Description of Artificial Sequence: Synthetic oligonucleotide
gcgacuagucuuuauuuuc

SEQ ID NO: 1179593 - RNA, 19 nt, Artificial Sequence
  Description of Artificial Sequence: Synthetic oligonucleotide
cacgcacaaaauccuggac

SEQ ID NO: 1179594 - RNA, 19 nt, Artificial Sequence
  Description of Artificial Sequence: Synthetic oligonucleotide
gcuccaauaguguguggcc

SEQ ID NO: 1179595 - RNA, 19 nt, Artificial Sequence
  Description of Artificial Sequence: Synthetic oligonucleotide
cugagccugacaccaucag

SEQ ID NO: 1179596 - RNA, 19 nt, Artificial Sequence
  Description of Artificial Sequence: Synthetic oligonucleotide
uggcucacgccauggacau

SEQ ID NO: 1179597 - RNA, 19 nt, Artificial Sequence
  Description of Artificial Sequence: Synthetic oligonucleotide
gaggacaugcaggaucaca

SEQ ID NO: 1179598 - RNA, 19 nt, Artificial Sequence
  Description of Artificial Sequence: Synthetic oligonucleotide
cacugccauaaauacauua

SEQ ID NO: 1179599 - RNA, 19 nt, Artificial Sequence
  Description of Artificial Sequence: Synthetic oligonucleotide
ggcacgcacaaaauccugg

SEQ ID NO: 1179600 - RNA, 19 nt, Artificial Sequence
  Description of Artificial Sequence: Synthetic oligonucleotide
cuguagaucgugggcacug

SEQ ID NO: 1179601 - RNA, 19 nt, Artificial Sequence
  Description of Artificial Sequence: Synthetic oligonucleotide
uucuuacagggcgacuagu

SEQ ID NO: 1179602 - RNA, 19 nt, Artificial Sequence
  Description of Artificial Sequence: Synthetic oligonucleotide
guagagugggacagcaaca

SEQ ID NO: 1179603 - RNA, 19 nt, Artificial Sequence
  Description of Artificial Sequence: Synthetic oligonucleotide
gcuggccaaguccuuauug

SEQ ID NO: 1179604 - RNA, 19 nt, Artificial Sequence
  Description of Artificial Sequence: Synthetic oligonucleotide
gagucuuguaugaaauacu

SEQ ID NO: 1179605 - RNA, 19 nt, Artificial Sequence
  Description of Artificial Sequence: Synthetic oligonucleotide
gcuccucuggucacgaggg

SEQ ID NO: 1179606 - RNA, 19 nt, Artificial Sequence
  Description of Artificial Sequence: Synthetic oligonucleotide
acgccauggacaugaugca

SEQ ID NO: 1179607 - RNA, 19 nt, Artificial Sequence
  Description of Artificial Sequence: Synthetic oligonucleotide
ggguccccuaacuagcagc

SEQ ID NO: 1179608 - RNA, 19 nt, Artificial Sequence
  Description of Artificial Sequence: Synthetic oligonucleotide
gagcucggagggcacagca

SEQ ID NO: 1179609 - RNA, 19 nt, Artificial Sequence
  Description of Artificial Sequence: Synthetic oligonucleotide
ggggaagcuucauuuggug

SEQ ID NO: 1179610 - RNA, 19 nt, Artificial Sequence
  Description of Artificial Sequence: Synthetic oligonucleotide
ugccaaucuccgucaugcc

SEQ ID NO: 1179611 - RNA, 19 nt, Artificial Sequence
  Description of Artificial Sequence: Synthetic oligonucleotide
acuggacuuagccgcucca

SEQ ID NO: 1179612 - RNA, 19 nt, Artificial Sequence
  Description of Artificial Sequence: Synthetic oligonucleotide
caugccaaucuccgucaug

SEQ ID NO: 1179613 - RNA, 19 nt, Artificial Sequence
  Description of Artificial Sequence: Synthetic oligonucleotide
caugcccaugcauggacca

SEQ ID NO: 1179614 - RNA, 19 nt, Artificial Sequence
  Description of Artificial Sequence: Synthetic oligonucleotide
auguacgaccucugaucca

SEQ ID NO: 1179615 - RNA, 19 nt, Artificial Sequence
  Description of Artificial Sequence: Synthetic oligonucleotide
cuaacuagcagcucuccuu

SEQ ID NO: 1179616 - RNA, 19 nt, Artificial Sequence
  Description of Artificial Sequence: Synthetic oligonucleotide
aggguccccuaacuagcag

SEQ ID NO: 1179617 - RNA, 19 nt, Artificial Sequence
  Description of Artificial Sequence: Synthetic oligonucleotide
gggaccugcccuuaguaga

SEQ ID NO: 1179618 - RNA, 19 nt, Artificial Sequence
  Description of Artificial Sequence: Synthetic oligonucleotide
ugcccaugcauggaccagu

SEQ ID NO: 1179619 - RNA, 19 nt, Artificial Sequence
  Description of Artificial Sequence: Synthetic oligonucleotide
ugaacacggcagugucccc

SEQ ID NO: 1179620 - RNA, 19 nt, Artificial Sequence
  Description of Artificial Sequence: Synthetic oligonucleotide
cccuuaguagagucagucc

SEQ ID NO: 1179621 - RNA, 19 nt, Artificial Sequence
  Description of Artificial Sequence: Synthetic oligonucleotide
gcuuccaguagagugggac

SEQ ID NO: 1179622 - RNA, 19 nt, Artificial Sequence
  Description of Artificial Sequence: Synthetic oligonucleotide
caaacuccagugaucucaa

SEQ ID NO: 1179623 - RNA, 19 nt, Artificial Sequence
  Description of Artificial Sequence: Synthetic oligonucleotide
auaucauccccuggcuccu

SEQ ID NO: 1179624 - RNA, 19 nt, Artificial Sequence
  Description of Artificial Sequence: Synthetic oligonucleotide
gguggcucacgccauggac

SEQ ID NO: 1179625 - RNA, 19 nt, Artificial Sequence
  Description of Artificial Sequence: Synthetic oligonucleotide
ccaguaccuaucauccuug

SEQ ID NO: 1179626 - RNA, 19 nt, Artificial Sequence
  Description of Artificial Sequence: Synthetic oligonucleotide
ggucacgagggguagaacu

SEQ ID NO: 1179627 - RNA, 19 nt, Artificial Sequence
  Description of Artificial Sequence: Synthetic oligonucleotide
guggcucacgccauggaca

SEQ ID NO: 1179628 - RNA, 19 nt, Artificial Sequence
  Description of Artificial Sequence: Synthetic oligonucleotide
cuuacagggcgacuagucu

SEQ ID NO: 1179629 - RNA, 19 nt, Artificial Sequence
  Description of Artificial Sequence: Synthetic oligonucleotide
ugcccuuaguagagucagu

SEQ ID NO: 1179630 - RNA, 19 nt, Artificial Sequence
  Description of Artificial Sequence: Synthetic oligonucleotide
ggcguucuuccacuucucc

SEQ ID NO: 1179631 - RNA, 19 nt, Artificial Sequence
  Description of Artificial Sequence: Synthetic oligonucleotide
cuuauucaccuugcccauc

SEQ ID NO: 1179632 - RNA, 19 nt, Artificial Sequence
  Description of Artificial Sequence: Synthetic oligonucleotide
gugggcacugccauaaaua

SEQ ID NO: 1179633 - RNA, 19 nt, Artificial Sequence
  Description of Artificial Sequence: Synthetic oligonucleotide
gugauaucauccccuggcu

SEQ ID NO: 1179634 - RNA, 19 nt, Artificial Sequence
  Description of Artificial Sequence: Synthetic oligonucleotide
agugcacccuugggccucc

SEQ ID NO: 1179635 - RNA, 19 nt, Artificial Sequence
  Description of Artificial Sequence: Synthetic oligonucleotide
acggcacgcacaaaauccu

SEQ ID NO: 1179636 - RNA, 19 nt, Artificial Sequence
  Description of Artificial Sequence: Synthetic oligonucleotide
ggaccugcccuuaguagag

SEQ ID NO: 1179637 - RNA, 19 nt, Artificial Sequence
  Description of Artificial Sequence: Synthetic oligonucleotide
cuuagccgcuccaaguacu

SEQ ID NO: 1179638 - RNA, 19 nt, Artificial Sequence
  Description of Artificial Sequence: Synthetic oligonucleotide
caccacagcugcuaaguua

SEQ ID NO: 1179639 - RNA, 19 nt, Artificial Sequence
  Description of Artificial Sequence: Synthetic oligonucleotide
cagguggcucacgccaugg

SEQ ID NO: 1179640 - RNA, 19 nt, Artificial Sequence
  Description of Artificial Sequence: Synthetic oligonucleotide
ccgaacucaagaacuuuuc

SEQ ID NO: 1179641 - RNA, 19 nt, Artificial Sequence
  Description of Artificial Sequence: Synthetic oligonucleotide
gccaaucuccgucaugcca

SEQ ID NO: 1179642 - RNA, 19 nt, Artificial Sequence
  Description of Artificial Sequence: Synthetic oligonucleotide
cagagcuccgggagucuug

SEQ ID NO: 1179643 - RNA, 19 nt, Artificial Sequence
  Description of Artificial Sequence: Synthetic oligonucleotide
cacagaaccuggccggcga

SEQ ID NO: 1179644 - RNA, 19 nt, Artificial Sequence
  Description of Artificial Sequence: Synthetic oligonucleotide
caguggucaaggucacuga

SEQ ID NO: 1179645 - RNA, 19 nt, Artificial Sequence
  Description of Artificial Sequence: Synthetic oligonucleotide
cugguuccgugggaucucc

SEQ ID NO: 1179646 - RNA, 19 nt, Artificial Sequence
  Description of Artificial Sequence: Synthetic oligonucleotide
ccucugacucucugggacc

SEQ ID NO: 1179647 - RNA, 19 nt, Artificial Sequence
  Description of Artificial Sequence: Synthetic oligonucleotide
uagagucaguccgcagccu

SEQ ID NO: 1179648 - RNA, 19 nt, Artificial Sequence
  Description of Artificial Sequence: Synthetic oligonucleotide
gccuaaucuuuucuucaca

SEQ ID NO: 1179649 - RNA, 19 nt, Artificial Sequence
  Description of Artificial Sequence: Synthetic oligonucleotide
cuguucuuaucccaguauu

SEQ ID NO: 1179650 - RNA, 19 nt, Artificial Sequence
  Description of Artificial Sequence: Synthetic oligonucleotide
gcuccaugguagauggcag

SEQ ID NO: 1179651 - RNA, 19 nt, Artificial Sequence
  Description of Artificial Sequence: Synthetic oligonucleotide
ccaugcccaugcauggacc

SEQ ID NO: 1179652 - RNA, 19 nt, Artificial Sequence
  Description of Artificial Sequence: Synthetic oligonucleotide
cuugugagacugacacaaa

SEQ ID NO: 1179653 - RNA, 19 nt, Artificial Sequence
  Description of Artificial Sequence: Synthetic oligonucleotide
gcacgcacaaaauccugga

SEQ ID NO: 1179654 - RNA, 19 nt, Artificial Sequence
  Description of Artificial Sequence: Synthetic oligonucleotide
gcccuuaguagagucaguc

SEQ ID NO: 1179655 - RNA, 19 nt, Artificial Sequence
  Description of Artificial Sequence: Synthetic oligonucleotide
uccagggcgcugacuuuau

SEQ ID NO: 1179656 - RNA, 19 nt, Artificial Sequence
  Description of Artificial Sequence: Synthetic oligonucleotide
uccgcagccuugggcacug

SEQ ID NO: 1179657 - RNA, 19 nt, Artificial Sequence
  Description of Artificial Sequence: Synthetic oligonucleotide
cugagacaaugcguacuuc

SEQ ID NO: 1179658 - RNA, 19 nt, Artificial Sequence
  Description of Artificial Sequence: Synthetic oligonucleotide
cuaaguuauggugggugcu

SEQ ID NO: 1179659 - RNA, 19 nt, Artificial Sequence
  Description of Artificial Sequence: Synthetic oligonucleotide
ccaaaccuccugagcauug

SEQ ID NO: 1179660 - RNA, 19 nt, Artificial Sequence
  Description of Artificial Sequence: Synthetic oligonucleotide
agaacccuucugcggguuu

SEQ ID NO: 1179661 - RNA, 19 nt, Artificial Sequence
  Description of Artificial Sequence: Synthetic oligonucleotide
caguaccuaucauccuuga

SEQ ID NO: 1179662 - RNA, 19 nt, Artificial Sequence
  Description of Artificial Sequence: Synthetic oligonucleotide
cagaaccuggccggcgagc

SEQ ID NO: 1179663 - RNA, 19 nt, Artificial Sequence
  Description of Artificial Sequence: Synthetic oligonucleotide
augcguacuuccacuccug

SEQ ID NO: 1179664 - RNA, 19 nt, Artificial Sequence
  Description of Artificial Sequence: Synthetic oligonucleotide
augcauggaccaguccagu

SEQ ID NO: 1179665 - RNA, 19 nt, Artificial Sequence
  Description of Artificial Sequence: Synthetic oligonucleotide
ggucacgccauucccucuc

SEQ ID NO: 1179666 - RNA, 19 nt, Artificial Sequence
  Description of Artificial Sequence: Synthetic oligonucleotide
cugauguacgaccucugau

SEQ ID NO: 1179667 - RNA, 19 nt, Artificial Sequence
  Description of Artificial Sequence: Synthetic oligonucleotide
ucugacucucugggaccug

SEQ ID NO: 1179668 - RNA, 19 nt, Artificial Sequence
  Description of Artificial Sequence: Synthetic oligonucleotide
cucugggaccugcccuuag

SEQ ID NO: 1179669 - RNA, 19 nt, Artificial Sequence
  Description of Artificial Sequence: Synthetic oligonucleotide
ccaucagccuaaucuuuuc

SEQ ID NO: 1179670 - RNA, 19 nt, Artificial Sequence
  Description of Artificial Sequence: Synthetic oligonucleotide
caaaccuccugagcauuga

SEQ ID NO: 1179671 - RNA, 19 nt, Artificial Sequence
  Description of Artificial Sequence: Synthetic oligonucleotide
uguguggcccguggcguuc

SEQ ID NO: 1179672 - RNA, 19 nt, Artificial Sequence
  Description of Artificial Sequence: Synthetic oligonucleotide
caaacggcacgcacaaaau

SEQ ID NO: 1179673 - RNA, 19 nt, Artificial Sequence
  Description of Artificial Sequence: Synthetic oligonucleotide
cgucaugccauagcgcucc

SEQ ID NO: 1179674 - RNA, 19 nt, Artificial Sequence
  Description of Artificial Sequence: Synthetic oligonucleotide
gcgcugacuuuauagccuc

SEQ ID NO: 1179675 - RNA, 19 nt, Artificial Sequence
  Description of Artificial Sequence: Synthetic oligonucleotide
gaucccugugggacaguga

SEQ ID NO: 1179676 - RNA, 19 nt, Artificial Sequence
  Description of Artificial Sequence: Synthetic oligonucleotide
ggacuuagccgcuccaagu

SEQ ID NO: 1179677 - RNA, 19 nt, Artificial Sequence
  Description of Artificial Sequence: Synthetic oligonucleotide
guuauggugggugcucagu

SEQ ID NO: 1179678 - RNA, 19 nt, Artificial Sequence
  Description of Artificial Sequence: Synthetic oligonucleotide
gacauggggcugugugaaa

SEQ ID NO: 1179679 - RNA, 19 nt, Artificial Sequence
  Description of Artificial Sequence: Synthetic oligonucleotide
caauaguguguggcccgug

SEQ ID NO: 1179680 - RNA, 19 nt, Artificial Sequence
  Description of Artificial Sequence: Synthetic oligonucleotide
ugggacagugaguguccuu

SEQ ID NO: 1179681 - RNA, 19 nt, Artificial Sequence
  Description of Artificial Sequence: Synthetic oligonucleotide
cuuccgaacucaagaacuu

SEQ ID NO: 1179682 - RNA, 19 nt, Artificial Sequence
  Description of Artificial Sequence: Synthetic oligonucleotide
cugugguuccacuggugua

SEQ ID NO: 1179683 - RNA, 19 nt, Artificial Sequence
  Description of Artificial Sequence: Synthetic oligonucleotide
uggucacgagggguagaac

SEQ ID NO: 1179684 - RNA, 19 nt, Artificial Sequence
  Description of Artificial Sequence: Synthetic oligonucleotide
ggacauggggcugugugaa

SEQ ID NO: 1179685 - RNA, 19 nt, Artificial Sequence
  Description of Artificial Sequence: Synthetic oligonucleotide
acgagggguagaacugccu

SEQ ID NO: 1179686 - RNA, 19 nt, Artificial Sequence
  Description of Artificial Sequence: Synthetic oligonucleotide
ucacgccauucccucucuu

SEQ ID NO: 1179687 - RNA, 19 nt, Artificial Sequence
  Description of Artificial Sequence: Synthetic oligonucleotide
cacagaggguccccuaacu

SEQ ID NO: 1179688 - RNA, 19 nt, Artificial Sequence
  Description of Artificial Sequence: Synthetic oligonucleotide
cacaucauucuuuguccau

SEQ ID NO: 1179689 - RNA, 19 nt, Artificial Sequence
  Description of Artificial Sequence: Synthetic oligonucleotide
cccuggucacgccauuccc

SEQ ID NO: 1179690 - RNA, 19 nt, Artificial Sequence
  Description of Artificial Sequence: Synthetic oligonucleotide
ucgugggcacugccauaaa

SEQ ID NO: 1179691 - RNA, 19 nt, Artificial Sequence
  Description of Artificial Sequence: Synthetic oligonucleotide
gacagugaguguccuucuu

SEQ ID NO: 1179692 - RNA, 19 nt, Artificial Sequence
  Description of Artificial Sequence: Synthetic oligonucleotide
gcucggagggcacagcaua

SEQ ID NO: 1179693 - RNA, 19 nt, Artificial Sequence
  Description of Artificial Sequence: Synthetic oligonucleotide
caacaccaccacucaucca

SEQ ID NO: 1179694 - RNA, 19 nt, Artificial Sequence
  Description of Artificial Sequence: Synthetic oligonucleotide
ccugagcauugaacucagg

SEQ ID NO: 1179695 - RNA, 19 nt, Artificial Sequence
  Description of Artificial Sequence: Synthetic oligonucleotide
cuggacuuagccgcuccaa

SEQ ID NO: 1179696 - RNA, 19 nt, Artificial Sequence
  Description of Artificial Sequence: Synthetic oligonucleotide
ccccaugucauauccggaa

SEQ ID NO: 1179697 - RNA, 19 nt, Artificial Sequence
  Description of Artificial Sequence: Synthetic oligonucleotide
ccggaacuccaaucacagc

SEQ ID NO: 1179698 - RNA, 19 nt, Artificial Sequence
  Description of Artificial Sequence: Synthetic oligonucleotide
cugcggguuuucugagaca

SEQ ID NO: 1179699 - RNA, 19 nt, Artificial Sequence
  Description of Artificial Sequence: Synthetic oligonucleotide
ggcgacuagucuuuauuuu

SEQ ID NO: 1179700 - RNA, 19 nt, Artificial Sequence
  Description of Artificial Sequence: Synthetic oligonucleotide
gugguuccacugguguaga

SEQ ID NO: 1179701 - RNA, 19 nt, Artificial Sequence
  Description of Artificial Sequence: Synthetic oligonucleotide
cugcucuaugggcuguucu

SEQ ID NO: 1179702 - RNA, 19 nt, Artificial Sequence
  Description of Artificial Sequence: Synthetic oligonucleotide
ccaguagagugggacagca

SEQ ID NO: 1179703 - RNA, 19 nt, Artificial Sequence
  Description of Artificial Sequence: Synthetic oligonucleotide
ucucugggaccugcccuua

SEQ ID NO: 1179704 - RNA, 19 nt, Artificial Sequence
  Description of Artificial Sequence: Synthetic oligonucleotide
gcugagccugacaccauca

SEQ ID NO: 1179705 - RNA, 19 nt, Artificial Sequence
  Description of Artificial Sequence: Synthetic oligonucleotide
ccccuaacuagcagcucuc

SEQ ID NO: 1179706 - RNA, 19 nt, Artificial Sequence
  Description of Artificial Sequence: Synthetic oligonucleotide
cccuaacuagcagcucucc

SEQ ID NO: 1179707 - RNA, 19 nt, Artificial Sequence
  Description of Artificial Sequence: Synthetic oligonucleotide
ccaugguagauggcaggug

SEQ ID NO: 1179708 - RNA, 19 nt, Artificial Sequence
  Description of Artificial Sequence: Synthetic oligonucleotide
gguccccuaacuagcagcu

SEQ ID NO: 1179709 - RNA, 19 nt, Artificial Sequence
  Description of Artificial Sequence: Synthetic oligonucleotide
cgaaacacagagggucccc

SEQ ID NO: 1179710 - RNA, 19 nt, Artificial Sequence
  Description of Artificial Sequence: Synthetic oligonucleotide
gggcgacuagucuuuauuu

SEQ ID NO: 1179711 - RNA, 19 nt, Artificial Sequence
  Description of Artificial Sequence: Synthetic oligonucleotide
ccugaguagcuccuucuua

SEQ ID NO: 1179712 - RNA, 19 nt, Artificial Sequence
  Description of Artificial Sequence: Synthetic oligonucleotide
cucuaugggcuguucuguu

SEQ ID NO: 1179713 - RNA, 19 nt, Artificial Sequence
  Description of Artificial Sequence: Synthetic oligonucleotide
ccacagaaccuggccggcg

SEQ ID NO: 1179714 - RNA, 19 nt, Artificial Sequence
  Description of Artificial Sequence: Synthetic oligonucleotide
ccgggagucuuguaugaaa

SEQ ID NO: 1179715 - RNA, 19 nt, Artificial Sequence
  Description of Artificial Sequence: Synthetic oligonucleotide
gcuggccccaugucauauc

SEQ ID NO: 1179716 - RNA, 19 nt, Artificial Sequence
  Description of Artificial Sequence: Synthetic oligonucleotide
cuggcuccucuggucacga

SEQ ID NO: 1179717 - RNA, 19 nt, Artificial Sequence
  Description of Artificial Sequence: Synthetic oligonucleotide
ggacagugaguguccuucu

SEQ ID NO: 1179718 - RNA, 19 nt, Artificial Sequence
  Description of Artificial Sequence: Synthetic oligonucleotide
guccccuaacuagcagcuc

SEQ ID NO: 1179719 - RNA, 19 nt, Artificial Sequence
  Description of Artificial Sequence: Synthetic oligonucleotide
gucacgccauucccucucu

SEQ ID NO: 1179720 - RNA, 19 nt, Artificial Sequence
  Description of Artificial Sequence: Synthetic oligonucleotide
ccucuggucacgaggggua

SEQ ID NO: 1179721 - RNA, 19 nt, Artificial Sequence
  Description of Artificial Sequence: Synthetic oligonucleotide
ccgucaugccauagcgcuc

SEQ ID NO: 1179722 - RNA, 19 nt, Artificial Sequence
  Description of Artificial Sequence: Synthetic oligonucleotide
ccguggagcuuccgaacuc

SEQ ID NO: 1179723 - RNA, 19 nt, Artificial Sequence
  Description of Artificial Sequence: Synthetic oligonucleotide
gacaguggucaaggucacu

SEQ ID NO: 1179724 - RNA, 19 nt, Artificial Sequence
  Description of Artificial Sequence: Synthetic oligonucleotide
acagggcgacuagucuuua

SEQ ID NO: 1179725 - RNA, 19 nt, Artificial Sequence
  Description of Artificial Sequence: Synthetic oligonucleotide
ggagaacccuucugcgggu

SEQ ID NO: 1179726 - RNA, 19 nt, Artificial Sequence
  Description of Artificial Sequence: Synthetic oligonucleotide
ccuaacuagcagcucuccu

SEQ ID NO: 1179727 - RNA, 19 nt, Artificial Sequence
  Description of Artificial Sequence: Synthetic oligonucleotide
ccacagcugcuaaguuaug

SEQ ID NO: 1179728 - RNA, 19 nt, Artificial Sequence
  Description of Artificial Sequence: Synthetic oligonucleotide
ccuggucacgccauucccu

SEQ ID NO: 1179729 - RNA, 19 nt, Artificial Sequence
  Description of Artificial Sequence: Synthetic oligonucleotide
cccuguucuuaucccagua

SEQ ID NO: 1179730 - RNA, 19 nt, Artificial Sequence
  Description of Artificial Sequence: Synthetic oligonucleotide
ggaccaccgaggacacuga

SEQ ID NO: 1179731 - RNA, 19 nt, Artificial Sequence
  Description of Artificial Sequence: Synthetic oligonucleotide
cgcagccuugggcacugag

SEQ ID NO: 1179732 - RNA, 19 nt, Artificial Sequence
  Description of Artificial Sequence: Synthetic oligonucleotide
gagaacccuucugcggguu

SEQ ID NO: 1179733 - RNA, 19 nt, Artificial Sequence
  Description of Artificial Sequence: Synthetic oligonucleotide
gccccaugucauauccgga

SEQ ID NO: 1179734 - RNA, 19 nt, Artificial Sequence
  Description of Artificial Sequence: Synthetic oligonucleotide
cgggagucuuguaugaaau

SEQ ID NO: 1179735 - RNA, 19 nt, Artificial Sequence
  Description of Artificial Sequence: Synthetic oligonucleotide
cacaaacggcacgcacaaa

SEQ ID NO: 1179736 - RNA, 19 nt, Artificial Sequence
  Description of Artificial Sequence: Synthetic oligonucleotide
cugugacccgcuggcccca

SEQ ID NO: 1179737 - RNA, 19 nt, Artificial Sequence
  Description of Artificial Sequence: Synthetic oligonucleotide
cugcuaaguuauggugggu

SEQ ID NO: 1179738 - RNA, 19 nt, Artificial Sequence
  Description of Artificial Sequence: Synthetic oligonucleotide
cagggcgacuagucuuuau

SEQ ID NO: 1179739 - RNA, 19 nt, Artificial Sequence
  Description of Artificial Sequence: Synthetic oligonucleotide
guguguggcccguggcguu

SEQ ID NO: 1179740 - RNA, 19 nt, Artificial Sequence
  Description of Artificial Sequence: Synthetic oligonucleotide
gccugaguagcuccuucuu

SEQ ID NO: 1179741 - RNA, 19 nt, Artificial Sequence
  Description of Artificial Sequence: Synthetic oligonucleotide
caccgaggacacugacagu

SEQ ID NO: 1179742 - RNA, 19 nt, Artificial Sequence
  Description of Artificial Sequence: Synthetic oligonucleotide
gcuguagaucgugggcacu

SEQ ID NO: 1179743 - RNA, 19 nt, Artificial Sequence
  Description of Artificial Sequence: Synthetic oligonucleotide
ggcucacgccauggacaug

SEQ ID NO: 1179744 - RNA, 19 nt, Artificial Sequence
  Description of Artificial Sequence: Synthetic oligonucleotide
ccacuggacuuagccgcuc

SEQ ID NO: 1179745 - RNA, 19 nt, Artificial Sequence
  Description of Artificial Sequence: Synthetic oligonucleotide
cucacgccauggacaugau

SEQ ID NO: 1179746 - RNA, 19 nt, Artificial Sequence
  Description of Artificial Sequence: Synthetic oligonucleotide
cgccauucccucucuugaa

SEQ ID NO: 1179747 - RNA, 19 nt, Artificial Sequence
  Description of Artificial Sequence: Synthetic oligonucleotide
gccacuggacuuagccgcu

SEQ ID NO: 1179748 - RNA, 19 nt, Artificial Sequence
  Description of Artificial Sequence: Synthetic oligonucleotide
ccaauaguguguggcccgu

SEQ ID NO: 1179749 - RNA, 19 nt, Artificial Sequence
  Description of Artificial Sequence: Synthetic oligonucleotide
cuggccggcgagccuccgu

SEQ ID NO: 1179750 - RNA, 19 nt, Artificial Sequence
  Description of Artificial Sequence: Synthetic oligonucleotide
cccaaaccuccugagcauu

SEQ ID NO: 1179751 - RNA, 19 nt, Artificial Sequence
  Description of Artificial Sequence: Synthetic oligonucleotide
gcacugccauaaauacauu

SEQ ID NO: 1179752 - RNA, 19 nt, Artificial Sequence
  Description of Artificial Sequence: Synthetic oligonucleotide
gcacccuggucacgccauu

SEQ ID NO: 1179753 - RNA, 19 nt, Artificial Sequence
  Description of Artificial Sequence: Synthetic oligonucleotide
ccgcuggccccaugucaua

SEQ ID NO: 1179754 - RNA, 19 nt, Artificial Sequence
  Description of Artificial Sequence: Synthetic oligonucleotide
cgcuggccccaugucauau

SEQ ID NO: 1179755 - RNA, 19 nt, Artificial Sequence
  Description of Artificial Sequence: Synthetic oligonucleotide
ccgcagccuugggcacuga

SEQ ID NO: 1179756 - RNA, 19 nt, Artificial Sequence
  Description of Artificial Sequence: Synthetic oligonucleotide
uuuaauauggaacugauag

SEQ ID NO: 1179757 - RNA, 19 nt, Artificial Sequence
  Description of Artificial Sequence: Synthetic oligonucleotide
uuugauauagaccaagacg

SEQ ID NO: 1179758 - RNA, 19 nt, Artificial Sequence
  Description of Artificial Sequence: Synthetic oligonucleotide
aaauuuaguggauuucgcc

SEQ ID NO: 1179759 - RNA, 19 nt, Artificial Sequence
  Description of Artificial Sequence: Synthetic oligonucleotide
uuggguauggauaaaauag

SEQ ID NO: 1179760 - RNA, 19 nt, Artificial Sequence
  Description of Artificial Sequence: Synthetic oligonucleotide
uugauauagaccaagacgu

SEQ ID NO: 1179761 - RNA, 19 nt, Artificial Sequence
  Description of Artificial Sequence: Synthetic oligonucleotide
uaagcuuauaucaucauac

SEQ ID NO: 1179762 - RNA, 19 nt, Artificial Sequence
  Description of Artificial Sequence: Synthetic oligonucleotide
aauauacgcaguugcacac

SEQ ID NO: 1179763 - RNA, 19 nt, Artificial Sequence
  Description of Artificial Sequence: Synthetic oligonucleotide
uuucuaguagauauuuugg

SEQ ID NO: 1179764 - RNA, 19 nt, Artificial Sequence
  Description of Artificial Sequence: Synthetic oligonucleotide
aaguguaccgauuguauuc

SEQ ID NO: 1179765 - RNA, 19 nt, Artificial Sequence
  Description of Artificial Sequence: Synthetic oligonucleotide
aauuuaguggauuucgcca

SEQ ID NO: 1179766 - RNA, 19 nt, Artificial Sequence
  Description of Artificial Sequence: Synthetic oligonucleotide
accgauuguauucagcacc

SEQ ID NO: 1179767 - RNA, 19 nt, Artificial Sequence
  Description of Artificial Sequence: Synthetic oligonucleotide
ucauggauauugaacaugc

SEQ ID NO: 1179768 - RNA, 19 nt, Artificial Sequence
  Description of Artificial Sequence: Synthetic oligonucleotide
uuguacaacaaaaccagcc

SEQ ID NO: 1179769 - RNA, 19 nt, Artificial Sequence
  Description of Artificial Sequence: Synthetic oligonucleotide
gauauuuuggcacgugcgg

SEQ ID NO: 1179770 - RNA, 19 nt, Artificial Sequence
  Description of Artificial Sequence: Synthetic oligonucleotide
uaagggaucaugcggaaag

SEQ ID NO: 1179771 - RNA, 19 nt, Artificial Sequence
  Description of Artificial Sequence: Synthetic oligonucleotide
uuucuugcgguccaugagg

SEQ ID NO: 1179772 - RNA, 19 nt, Artificial Sequence
  Description of Artificial Sequence: Synthetic oligonucleotide
aagacaugcuuucuugcgg

SEQ ID NO: 1179773 - RNA, 19 nt, Artificial Sequence
  Description of Artificial Sequence: Synthetic oligonucleotide
auuuaguggauuucgccac

SEQ ID NO: 1179774 - RNA, 19 nt, Artificial Sequence
  Description of Artificial Sequence: Synthetic oligonucleotide
aguuuacuaucucagaaug

SEQ ID NO: 1179775 - RNA, 19 nt, Artificial Sequence
  Description of Artificial Sequence: Synthetic oligonucleotide
uggguauggauaaaauagg

SEQ ID NO: 1179776 - RNA, 19 nt, Artificial Sequence
  Description of Artificial Sequence: Synthetic oligonucleotide
ucuaguagauauuuuggca

SEQ ID NO: 1179777 - RNA, 19 nt, Artificial Sequence
  Description of Artificial Sequence: Synthetic oligonucleotide
ugcgaagacacccauaagu

SEQ ID NO: 1179778 - RNA, 19 nt, Artificial Sequence
  Description of Artificial Sequence: Synthetic oligonucleotide
acucguuuaucuccaaggc

SEQ ID NO: 1179779 - RNA, 19 nt, Artificial Sequence
  Description of Artificial Sequence: Synthetic oligonucleotide
cuaguagauauuuuggcac

SEQ ID NO: 1179780 - RNA, 19 nt, Artificial Sequence
  Description of Artificial Sequence: Synthetic oligonucleotide
uggauauugaacaugcuua

SEQ ID NO: 1179781 - RNA, 19 nt, Artificial Sequence
  Description of Artificial Sequence: Synthetic oligonucleotide
auggugaagacagugaagg

SEQ ID NO: 1179782 - RNA, 19 nt, Artificial Sequence
  Description of Artificial Sequence: Synthetic oligonucleotide
uuugcgaagacacccauaa

SEQ ID NO: 1179783 - RNA, 19 nt, Artificial Sequence
  Description of Artificial Sequence: Synthetic oligonucleotide
uuuacuaucucagaauggu

SEQ ID NO: 1179784 - RNA, 19 nt, Artificial Sequence
  Description of Artificial Sequence: Synthetic oligonucleotide
ugaacaguuuacuaucuca

SEQ ID NO: 1179785 - RNA, 19 nt, Artificial Sequence
  Description of Artificial Sequence: Synthetic oligonucleotide
ucaggaugugcucuggcgg

SEQ ID NO: 1179786 - RNA, 19 nt, Artificial Sequence
  Description of Artificial Sequence: Synthetic oligonucleotide
uucuaguagauauuuuggc

SEQ ID NO: 1179787 - RNA, 19 nt, Artificial Sequence
  Description of Artificial Sequence: Synthetic oligonucleotide
ugcauuauugcaucugcag

SEQ ID NO: 1179788 - RNA, 19 nt, Artificial Sequence
  Description of Artificial Sequence: Synthetic oligonucleotide
auuuugacugcuucucugg

SEQ ID NO: 1179789 - RNA, 19 nt, Artificial Sequence
  Description of Artificial Sequence: Synthetic oligonucleotide
cuuugguaagcuuauauca

SEQ ID NO: 1179790 - RNA, 19 nt, Artificial Sequence
  Description of Artificial Sequence: Synthetic oligonucleotide
uaugcuauugcuucacugu

SEQ ID NO: 1179791 - RNA, 19 nt, Artificial Sequence
  Description of Artificial Sequence: Synthetic oligonucleotide
agaaauccuggcuuguggg

SEQ ID NO: 1179792 - RNA, 19 nt, Artificial Sequence
  Description of Artificial Sequence: Synthetic oligonucleotide
ucacacguaaagaaugucu

SEQ ID NO: 1179793 - RNA, 19 nt, Artificial Sequence
  Description of Artificial Sequence: Synthetic oligonucleotide
aagaugguccgaaucacac

SEQ ID NO: 1179794 - RNA, 19 nt, Artificial Sequence
  Description of Artificial Sequence: Synthetic oligonucleotide
aucggcauaagcuuggagu

SEQ ID NO: 1179795 - RNA, 19 nt, Artificial Sequence
  Description of Artificial Sequence: Synthetic oligonucleotide
gaacugauaguccaugaac

SEQ ID NO: 1179796 - RNA, 19 nt, Artificial Sequence
  Description of Artificial Sequence: Synthetic oligonucleotide
gaaucacacguaaagaaug

SEQ ID NO: 1179797 - RNA, 19 nt, Artificial Sequence
  Description of Artificial Sequence: Synthetic oligonucleotide
uagaccaagacguugguau

SEQ ID NO: 1179798 - RNA, 19 nt, Artificial Sequence
  Description of Artificial Sequence: Synthetic oligonucleotide
uguagcauauuguugccga

SEQ ID NO: 1179799 - RNA, 19 nt, Artificial Sequence
  Description of Artificial Sequence: Synthetic oligonucleotide
aagggguaagggaucaugc

SEQ ID NO: 1179800 - RNA, 19 nt, Artificial Sequence
  Description of Artificial Sequence: Synthetic oligonucleotide
ucuuuugauauagaccaag

SEQ ID NO: 1179801 - RNA, 19 nt, Artificial Sequence
  Description of Artificial Sequence: Synthetic oligonucleotide
uuaauauggaacugauagu

SEQ ID NO: 1179802 - RNA, 19 nt, Artificial Sequence
  Description of Artificial Sequence: Synthetic oligonucleotide
uagaauuauuggaagaguu

SEQ ID NO: 1179803 - RNA, 19 nt, Artificial Sequence
  Description of Artificial Sequence: Synthetic oligonucleotide
ugguaagcuuauaucauca

SEQ ID NO: 1179804 - RNA, 19 nt, Artificial Sequence
  Description of Artificial Sequence: Synthetic oligonucleotide
gaauauacgcaguugcaca

SEQ ID NO: 1179805 - RNA, 19 nt, Artificial Sequence
  Description of Artificial Sequence: Synthetic oligonucleotide
auuauuggaagaguuguug

SEQ ID NO: 1179806 - RNA, 19 nt, Artificial Sequence
  Description of Artificial Sequence: Synthetic oligonucleotide
ucguuuaucuccaaggcuu

SEQ ID NO: 1179807 - RNA, 19 nt, Artificial Sequence
  Description of Artificial Sequence: Synthetic oligonucleotide
aacugauaguccaugaaca

SEQ ID NO: 1179808 - RNA, 19 nt, Artificial Sequence
  Description of Artificial Sequence: Synthetic oligonucleotide
auauggaacugauagucca

SEQ ID NO: 1179809 - RNA, 19 nt, Artificial Sequence
  Description of Artificial Sequence: Synthetic oligonucleotide
uuggaggcaaaauaaaaua

SEQ ID NO: 1179810 - RNA, 19 nt, Artificial Sequence
  Description of Artificial Sequence: Synthetic oligonucleotide
uggauuucgccacacuuug

SEQ ID NO: 1179811 - RNA, 19 nt, Artificial Sequence
  Description of Artificial Sequence: Synthetic oligonucleotide
auauagaccaagacguugg

SEQ ID NO: 1179812 - RNA, 19 nt, Artificial Sequence
  Description of Artificial Sequence: Synthetic oligonucleotide
uuugguaagcuuauaucau

SEQ ID NO: 1179813 - RNA, 19 nt, Artificial Sequence
  Description of Artificial Sequence: Synthetic oligonucleotide
ucaugagcugcagaaaucc

SEQ ID NO: 1179814 - RNA, 19 nt, Artificial Sequence
  Description of Artificial Sequence: Synthetic oligonucleotide
gauauagaccaagacguug

SEQ ID NO: 1179815 - RNA, 19 nt, Artificial Sequence
  Description of Artificial Sequence: Synthetic oligonucleotide
uuguugucaaccccucccg

SEQ ID NO: 1179816 - RNA, 19 nt, Artificial Sequence
  Description of Artificial Sequence: Synthetic oligonucleotide
uuccacuuucuccauaaca

SEQ ID NO: 1179817 - RNA, 19 nt, Artificial Sequence
  Description of Artificial Sequence: Synthetic oligonucleotide
uuuguacaacaaaaccagc

SEQ ID NO: 1179818 - RNA, 19 nt, Artificial Sequence
  Description of Artificial Sequence: Synthetic oligonucleotide
aguagggcagcuguguagc

SEQ ID NO: 1179819 - RNA, 19 nt, Artificial Sequence
  Description of Artificial Sequence: Synthetic oligonucleotide
acaguuuacuaucucagaa

SEQ ID NO: 1179820 - RNA, 19 nt, Artificial Sequence
  Description of Artificial Sequence: Synthetic oligonucleotide
caaauuuaguggauuucgc

SEQ ID NO: 1179821 - RNA, 19 nt, Artificial Sequence
  Description of Artificial Sequence: Synthetic oligonucleotide
ggagaauauacgcaguugc

SEQ ID NO: 1179822 - RNA, 19 nt, Artificial Sequence
  Description of Artificial Sequence: Synthetic oligonucleotide
auaugcuauugcuucacug

SEQ ID NO: 1179823 - RNA, 19 nt, Artificial Sequence
  Description of Artificial Sequence: Synthetic oligonucleotide
uuugcuaagacugccugga

SEQ ID NO: 1179824 - RNA, 19 nt, Artificial Sequence
  Description of Artificial Sequence: Synthetic oligonucleotide
agauauuuuggcacgugcg

SEQ ID NO: 1179825 - RNA, 19 nt, Artificial Sequence
  Description of Artificial Sequence: Synthetic oligonucleotide
cacacguaaagaaugucug

SEQ ID NO: 1179826 - RNA, 19 nt, Artificial Sequence
  Description of Artificial Sequence: Synthetic oligonucleotide
gucgguagcagccaucucc

SEQ ID NO: 1179827 - RNA, 19 nt, Artificial Sequence
  Description of Artificial Sequence: Synthetic oligonucleotide
auacuuugcuaagacugcc

SEQ ID NO: 1179828 - RNA, 19 nt, Artificial Sequence
  Description of Artificial Sequence: Synthetic oligonucleotide
acagauuggguauggauaa

SEQ ID NO: 1179829 - RNA, 19 nt, Artificial Sequence
  Description of Artificial Sequence: Synthetic oligonucleotide
cauauuguugccgacuuug

SEQ ID NO: 1179830 - RNA, 19 nt, Artificial Sequence
  Description of Artificial Sequence: Synthetic oligonucleotide
cugugaaggaacacagucc

SEQ ID NO: 1179831 - RNA, 19 nt, Artificial Sequence
  Description of Artificial Sequence: Synthetic oligonucleotide
uguaccgauuguauucagc

SEQ ID NO: 1179832 - RNA, 19 nt, Artificial Sequence
  Description of Artificial Sequence: Synthetic oligonucleotide
guccgaaucacacguaaag

SEQ ID NO: 1179833 - RNA, 19 nt, Artificial Sequence
  Description of Artificial Sequence: Synthetic oligonucleotide
ugcaucugcaggacgaaga

SEQ ID NO: 1179834 - RNA, 19 nt, Artificial Sequence
  Description of Artificial Sequence: Synthetic oligonucleotide
gauccgagucagcugaugc

SEQ ID NO: 1179835 - RNA, 19 nt, Artificial Sequence
  Description of Artificial Sequence: Synthetic oligonucleotide
gauuucgccacacuuugca

SEQ ID NO: 1179836 - RNA, 19 nt, Artificial Sequence
  Description of Artificial Sequence: Synthetic oligonucleotide
acccauaaguucugggaac

SEQ ID NO: 1179837 - RNA, 19 nt, Artificial Sequence
  Description of Artificial Sequence: Synthetic oligonucleotide
ugcucuugcuuugaguagg

SEQ ID NO: 1179838 - RNA, 19 nt, Artificial Sequence
  Description of Artificial Sequence: Synthetic oligonucleotide
guaccgauuguauucagca

SEQ ID NO: 1179839 - RNA, 19 nt, Artificial Sequence
  Description of Artificial Sequence: Synthetic oligonucleotide
auggauauugaacaugcuu

SEQ ID NO: 1179840 - RNA, 19 nt, Artificial Sequence
  Description of Artificial Sequence: Synthetic oligonucleotide
uuaucuccaaggcuucaug

SEQ ID NO: 1179841 - RNA, 19 nt, Artificial Sequence
  Description of Artificial Sequence: Synthetic oligonucleotide
uucauggaaagagggaagc

SEQ ID NO: 1179842 - RNA, 19 nt, Artificial Sequence
  Description of Artificial Sequence: Synthetic oligonucleotide
ugagaauuugucagacacu

SEQ ID NO: 1179843 - RNA, 19 nt, Artificial Sequence
  Description of Artificial Sequence: Synthetic oligonucleotide
auuggguauggauaaaaua

SEQ ID NO: 1179844 - RNA, 19 nt, Artificial Sequence
  Description of Artificial Sequence: Synthetic oligonucleotide
aguaugucagagguucucg

SEQ ID NO: 1179845 - RNA, 19 nt, Artificial Sequence
  Description of Artificial Sequence: Synthetic oligonucleotide
uauuggaagaguuguuguc

SEQ ID NO: 1179846 - RNA, 19 nt, Artificial Sequence
  Description of Artificial Sequence: Synthetic oligonucleotide
cuuugcuaagacugccugg

SEQ ID NO: 1179847 - RNA, 19 nt, Artificial Sequence
  Description of Artificial Sequence: Synthetic oligonucleotide
agucuucgggcacacauug

SEQ ID NO: 1179848 - RNA, 19 nt, Artificial Sequence
  Description of Artificial Sequence: Synthetic oligonucleotide
gaagcuguugagaccgucg

SEQ ID NO: 1179849 - RNA, 19 nt, Artificial Sequence
  Description of Artificial Sequence: Synthetic oligonucleotide
caagacguugguaucucgc

SEQ ID NO: 1179850 - RNA, 19 nt, Artificial Sequence
  Description of Artificial Sequence: Synthetic oligonucleotide
guucaaagccccuuccacc

SEQ ID NO: 1179851 - RNA, 19 nt, Artificial Sequence
  Description of Artificial Sequence: Synthetic oligonucleotide
uuucgccacacuuugcacu

SEQ ID NO: 1179852 - RNA, 19 nt, Artificial Sequence
  Description of Artificial Sequence: Synthetic oligonucleotide
uuguugccgacuuugguaa

SEQ ID NO: 1179853 - RNA, 19 nt, Artificial Sequence
  Description of Artificial Sequence: Synthetic oligonucleotide
acacccauaaguucuggga

SEQ ID NO: 1179854 - RNA, 19 nt, Artificial Sequence
  Description of Artificial Sequence: Synthetic oligonucleotide
agaugguccgaaucacacg

SEQ ID NO: 1179855 - RNA, 19 nt, Artificial Sequence
  Description of Artificial Sequence: Synthetic oligonucleotide
uugguaagcuuauaucauc

SEQ ID NO: 1179856 - RNA, 19 nt, Artificial Sequence
  Description of Artificial Sequence: Synthetic oligonucleotide
uugggguaaacugagacuu

SEQ ID NO: 1179857 - RNA, 19 nt, Artificial Sequence
  Description of Artificial Sequence: Synthetic oligonucleotide
uauuguugccgacuuuggu

SEQ ID NO: 1179858 - RNA, 19 nt, Artificial Sequence
  Description of Artificial Sequence: Synthetic oligonucleotide
gugaagacagugaaggaug

SEQ ID NO: 1179859 - RNA, 19 nt, Artificial Sequence
  Description of Artificial Sequence: Synthetic oligonucleotide
cagccaggagaauauacgc

SEQ ID NO: 1179860 - RNA, 19 nt, Artificial Sequence
  Description of Artificial Sequence: Synthetic oligonucleotide
uguguagcauauuguugcc

SEQ ID NO: 1179861 - RNA, 19 nt, Artificial Sequence
  Description of Artificial Sequence: Synthetic oligonucleotide
aaucacacguaaagaaugu

SEQ ID NO: 1179862 - RNA, 19 nt, Artificial Sequence
  Description of Artificial Sequence: Synthetic oligonucleotide
gucauaguaugucagaggu

SEQ ID NO: 1179863 - RNA, 19 nt, Artificial Sequence
  Description of Artificial Sequence: Synthetic oligonucleotide
uacgcaguugcacacucgu

SEQ ID NO: 1179864 - RNA, 19 nt, Artificial Sequence
  Description of Artificial Sequence: Synthetic oligonucleotide
acguaaagaaugucuggug

SEQ ID NO: 1179865 - RNA, 19 nt, Artificial Sequence
  Description of Artificial Sequence: Synthetic oligonucleotide
uuuaguggauuucgccaca

SEQ ID NO: 1179866 - RNA, 19 nt, Artificial Sequence
  Description of Artificial Sequence: Synthetic oligonucleotide
gaugguccgaaucacacgu

SEQ ID NO: 1179867 - RNA, 19 nt, Artificial Sequence
  Description of Artificial Sequence: Synthetic oligonucleotide
uauacgcaguugcacacuc

SEQ ID NO: 1179868 - RNA, 19 nt, Artificial Sequence
  Description of Artificial Sequence: Synthetic oligonucleotide
auuacuggaauuagaauua

SEQ ID NO: 1179869 - RNA, 19 nt, Artificial Sequence
  Description of Artificial Sequence: Synthetic oligonucleotide
gacguugguaucucgccug

SEQ ID NO: 1179870 - RNA, 19 nt, Artificial Sequence
  Description of Artificial Sequence: Synthetic oligonucleotide
uggacaucggcauaagcuu

SEQ ID NO: 1179871 - RNA, 19 nt, Artificial Sequence
  Description of Artificial Sequence: Synthetic oligonucleotide
agguucucguccugugacc

SEQ ID NO: 1179872 - RNA, 19 nt, Artificial Sequence
  Description of Artificial Sequence: Synthetic oligonucleotide
aguggauuucgccacacuu

SEQ ID NO: 1179873 - RNA, 19 nt, Artificial Sequence
  Description of Artificial Sequence: Synthetic oligonucleotide
cuuuugauauagaccaaga

SEQ ID NO: 1179874 - RNA, 19 nt, Artificial Sequence
  Description of Artificial Sequence: Synthetic oligonucleotide
agacaugcuuucuugcggu

SEQ ID NO: 1179875 - RNA, 19 nt, Artificial Sequence
  Description of Artificial Sequence: Synthetic oligonucleotide
uugucaaccccucccgcug

SEQ ID NO: 1179876 - RNA, 19 nt, Artificial Sequence
  Description of Artificial Sequence: Synthetic oligonucleotide
gaagacacccauaaguucu

SEQ ID NO: 1179877 - RNA, 19 nt, Artificial Sequence
  Description of Artificial Sequence: Synthetic oligonucleotide
cacgugcggauuaaauucc

SEQ ID NO: 1179878 - RNA, 19 nt, Artificial Sequence
  Description of Artificial Sequence: Synthetic oligonucleotide
uccgaaucacacguaaaga

SEQ ID NO: 1179879 - RNA, 19 nt, Artificial Sequence
  Description of Artificial Sequence: Synthetic oligonucleotide
uacuuugcuaagacugccu

SEQ ID NO: 1179880 - RNA, 19 nt, Artificial Sequence
  Description of Artificial Sequence: Synthetic oligonucleotide
ggaauuagaauuauuggaa

SEQ ID NO: 1179881 - RNA, 19 nt, Artificial Sequence
  Description of Artificial Sequence: Synthetic oligonucleotide
ugaacaugcuuaggagggg

SEQ ID NO: 1179882 - RNA, 19 nt, Artificial Sequence
  Description of Artificial Sequence: Synthetic oligonucleotide
uccagcagugaagaggaug

SEQ ID NO: 1179883 - RNA, 19 nt, Artificial Sequence
  Description of Artificial Sequence: Synthetic oligonucleotide
uauuuuggcacgugcggau

SEQ ID NO: 1179884 - RNA, 19 nt, Artificial Sequence
  Description of Artificial Sequence: Synthetic oligonucleotide
ucggcauaagcuuggaguu

SEQ ID NO: 1179885 - RNA, 19 nt, Artificial Sequence
  Description of Artificial Sequence: Synthetic oligonucleotide
ccccuaaacaaauuuagug

SEQ ID NO: 1179886 - RNA, 19 nt, Artificial Sequence
  Description of Artificial Sequence: Synthetic oligonucleotide
uaugucagagguucucguc

SEQ ID NO: 1179887 - RNA, 19 nt, Artificial Sequence
  Description of Artificial Sequence: Synthetic oligonucleotide
uauggaacugauaguccau

SEQ ID NO: 1179888 - RNA, 19 nt, Artificial Sequence
  Description of Artificial Sequence: Synthetic oligonucleotide
uguugucaaccccucccgc

SEQ ID NO: 1179889 - RNA, 19 nt, Artificial Sequence
  Description of Artificial Sequence: Synthetic oligonucleotide
uuugcacucugagacacuc

SEQ ID NO: 1179890 - RNA, 19 nt, Artificial Sequence
  Description of Artificial Sequence: Synthetic oligonucleotide
gagaccgucgguagcagcc

SEQ ID NO: 1179891 - RNA, 19 nt, Artificial Sequence
  Description of Artificial Sequence: Synthetic oligonucleotide
uggaguuccagaagggcuu

SEQ ID NO: 1179892 - RNA, 19 nt, Artificial Sequence
  Description of Artificial Sequence: Synthetic oligonucleotide
gagguucaaagccccuucc

SEQ ID NO: 1179893 - RNA, 19 nt, Artificial Sequence
  Description of Artificial Sequence: Synthetic oligonucleotide
ccuaaacaaauuuagugga

SEQ ID NO: 1179894 - RNA, 19 nt, Artificial Sequence
  Description of Artificial Sequence: Synthetic oligonucleotide
aguugcacacucguuuauc

SEQ ID NO: 1179895 - RNA, 19 nt, Artificial Sequence
  Description of Artificial Sequence: Synthetic oligonucleotide
gauggcagauggugaagac

SEQ ID NO: 1179896 - RNA, 19 nt, Artificial Sequence
  Description of Artificial Sequence: Synthetic oligonucleotide
ucaguuuuggaggcaaaau

SEQ ID NO: 1179897 - RNA, 19 nt, Artificial Sequence
  Description of Artificial Sequence: Synthetic oligonucleotide
cugugacccaaguguaccg

SEQ ID NO: 1179898 - RNA, 19 nt, Artificial Sequence
  Description of Artificial Sequence: Synthetic oligonucleotide
acacucguuuaucuccaag

SEQ ID NO: 1179899 - RNA, 19 nt, Artificial Sequence
  Description of Artificial Sequence: Synthetic oligonucleotide
aucacacguaaagaauguc

SEQ ID NO: 1179900 - RNA, 19 nt, Artificial Sequence
  Description of Artificial Sequence: Synthetic oligonucleotide
ugguccgaaucacacguaa

SEQ ID NO: 1179901 - RNA, 19 nt, Artificial Sequence
  Description of Artificial Sequence: Synthetic oligonucleotide
auauuguugccgacuuugg

SEQ ID NO: 1179902 - RNA, 19 nt, Artificial Sequence
  Description of Artificial Sequence: Synthetic oligonucleotide
uggaaagagggaagcaguu

SEQ ID NO: 1179903 - RNA, 19 nt, Artificial Sequence
  Description of Artificial Sequence: Synthetic oligonucleotide
ugauauagaccaagacguu

SEQ ID NO: 1179904 - RNA, 19 nt, Artificial Sequence
  Description of Artificial Sequence: Synthetic oligonucleotide
aguguaccgauuguauuca

SEQ ID NO: 1179905 - RNA, 19 nt, Artificial Sequence
  Description of Artificial Sequence: Synthetic oligonucleotide
agcugaugccacaaacugg

SEQ ID NO: 1179906 - RNA, 19 nt, Artificial Sequence
  Description of Artificial Sequence: Synthetic oligonucleotide
augcggaaagugccuuccc

SEQ ID NO: 1179907 - RNA, 19 nt, Artificial Sequence
  Description of Artificial Sequence: Synthetic oligonucleotide
uucgccacacuuugcacuc

SEQ ID NO: 1179908 - RNA, 19 nt, Artificial Sequence
  Description of Artificial Sequence: Synthetic oligonucleotide
cuggacaucggcauaagcu

SEQ ID NO: 1179909 - RNA, 19 nt, Artificial Sequence
  Description of Artificial Sequence: Synthetic oligonucleotide
ucguccugugacccaagug

SEQ ID NO: 1179910 - RNA, 19 nt, Artificial Sequence
  Description of Artificial Sequence: Synthetic oligonucleotide
ucauggaaagagggaagca

SEQ ID NO: 1179911 - RNA, 19 nt, Artificial Sequence
  Description of Artificial Sequence: Synthetic oligonucleotide
cuguugagaccgucgguag

SEQ ID NO: 1179912 - RNA, 19 nt, Artificial Sequence
  Description of Artificial Sequence: Synthetic oligonucleotide
agacguugguaucucgccu

SEQ ID NO: 1179913 - RNA, 19 nt, Artificial Sequence
  Description of Artificial Sequence: Synthetic oligonucleotide
uaccgauuguauucagcac

SEQ ID NO: 1179914 - RNA, 19 nt, Artificial Sequence
  Description of Artificial Sequence: Synthetic oligonucleotide
auaguccaugaacaguuua

SEQ ID NO: 1179915 - RNA, 19 nt, Artificial Sequence
  Description of Artificial Sequence: Synthetic oligonucleotide
uccccauuacuggaauuag

SEQ ID NO: 1179916 - RNA, 19 nt, Artificial Sequence
  Description of Artificial Sequence: Synthetic oligonucleotide
uugcgaagacacccauaag

SEQ ID NO: 1179917 - RNA, 19 nt, Artificial Sequence
  Description of Artificial Sequence: Synthetic oligonucleotide
guaaagaaugucugguggu

SEQ ID NO: 1179918 - RNA, 19 nt, Artificial Sequence
  Description of Artificial Sequence: Synthetic oligonucleotide
guguagcauauuguugccg

SEQ ID NO: 1179919 - RNA, 19 nt, Artificial Sequence
  Description of Artificial Sequence: Synthetic oligonucleotide
uuuugcgaagacacccaua

SEQ ID NO: 1179920 - RNA, 19 nt, Artificial Sequence
  Description of Artificial Sequence: Synthetic oligonucleotide
  modified_base (14)..(14): a, c, u, g, unknown or other
ugccagaaguugcnuuaaa

SEQ ID NO: 1179921 - RNA, 19 nt, Artificial Sequence
  Description of Artificial Sequence: Synthetic oligonucleotide
caugcggaaagugccuucc

SEQ ID NO: 1179922 - RNA, 19 nt, Artificial Sequence
  Description of Artificial Sequence: Synthetic oligonucleotide
cucagauccgagucagcug

SEQ ID NO: 1179923 - RNA, 19 nt, Artificial Sequence
  Description of Artificial Sequence: Synthetic oligonucleotide
ugucaaccccucccgcugc

SEQ ID NO: 1179924 - RNA, 19 nt, Artificial Sequence
  Description of Artificial Sequence: Synthetic oligonucleotide
uuuuggcacgugcggauua

SEQ ID NO: 1179925 - RNA, 19 nt, Artificial Sequence
  Description of Artificial Sequence: Synthetic oligonucleotide
gguucaaagccccuuccac

SEQ ID NO: 1179926 - RNA, 19 nt, Artificial Sequence
  Description of Artificial Sequence: Synthetic oligonucleotide
agauuggguauggauaaaa

SEQ ID NO: 1179927 - RNA, 19 nt, Artificial Sequence
  Description of Artificial Sequence: Synthetic oligonucleotide
uggaaucugaguccccauu

SEQ ID NO: 1179928 - RNA, 19 nt, Artificial Sequence
  Description of Artificial Sequence: Synthetic oligonucleotide
uaucucgccuguguugagc

SEQ ID NO: 1179929 - RNA, 19 nt, Artificial Sequence
  Description of Artificial Sequence: Synthetic oligonucleotide
agauggcagauggugaaga

SEQ ID NO: 1179930 - RNA, 19 nt, Artificial Sequence
  Description of Artificial Sequence: Synthetic oligonucleotide
uguacagauuggguaugga

SEQ ID NO: 1179931 - RNA, 19 nt, Artificial Sequence
  Description of Artificial Sequence: Synthetic oligonucleotide
ugccuguuggaaucugagu

SEQ ID NO: 1179932 - RNA, 19 nt, Artificial Sequence
  Description of Artificial Sequence: Synthetic oligonucleotide
aggaaagcuuuugcgaaga

SEQ ID NO: 1179933 - RNA, 19 nt, Artificial Sequence
  Description of Artificial Sequence: Synthetic oligonucleotide
ggcauaagcuuggaguucc

SEQ ID NO: 1179934 - RNA, 19 nt, Artificial Sequence
  Description of Artificial Sequence: Synthetic oligonucleotide
uuucgaagacaugcuuucu

SEQ ID NO: 1179935 - RNA, 19 nt, Artificial Sequence
  Description of Artificial Sequence: Synthetic oligonucleotide
aagggaucaugcggaaagu

SEQ ID NO: 1179936 - RNA, 19 nt, Artificial Sequence
  Description of Artificial Sequence: Synthetic oligonucleotide
uuaguggauuucgccacac

SEQ ID NO: 1179937 - RNA, 19 nt, Artificial Sequence
  Description of Artificial Sequence: Synthetic oligonucleotide
uguugccgacuuugguaag

SEQ ID NO: 1179938 - RNA, 19 nt, Artificial Sequence
  Description of Artificial Sequence: Synthetic oligonucleotide
ugagaccgucgguagcagc

SEQ ID NO: 1179939 - RNA, 19 nt, Artificial Sequence
  Description of Artificial Sequence: Synthetic oligonucleotide
cuuuaauauggaacugaua

SEQ ID NO: 1179940 - RNA, 19 nt, Artificial Sequence
  Description of Artificial Sequence: Synthetic oligonucleotide
acucugagacacucugccu

SEQ ID NO: 1179941 - RNA, 19 nt, Artificial Sequence
  Description of Artificial Sequence: Synthetic oligonucleotide
gcugaugccacaaacugga

SEQ ID NO: 1179942 - RNA, 19 nt, Artificial Sequence
  Description of Artificial Sequence: Synthetic oligonucleotide
guugcacacucguuuaucu

SEQ ID NO: 1179943 - RNA, 19 nt, Artificial Sequence
  Description of Artificial Sequence: Synthetic oligonucleotide
cuucucugguccucccaag

SEQ ID NO: 1179944 - RNA, 19 nt, Artificial Sequence
  Description of Artificial Sequence: Synthetic oligonucleotide
uuugucagacacugcucuu

SEQ ID NO: 1179945 - RNA, 19 nt, Artificial Sequence
  Description of Artificial Sequence: Synthetic oligonucleotide
gggaucaugcggaaagugc

SEQ ID NO: 1179946 - RNA, 19 nt, Artificial Sequence
  Description of Artificial Sequence: Synthetic oligonucleotide
uggcacgugcggauuaaau

SEQ ID NO: 1179947 - RNA, 19 nt, Artificial Sequence
  Description of Artificial Sequence: Synthetic oligonucleotide
uaguggauuucgccacacu

SEQ ID NO: 1179948 - RNA, 19 nt, Artificial Sequence
  Description of Artificial Sequence: Synthetic oligonucleotide
ggggcaaacaaagugcuga

SEQ ID NO: 1179949 - RNA, 19 nt, Artificial Sequence
  Description of Artificial Sequence: Synthetic oligonucleotide
ugggguaaacugagacuuc

SEQ ID NO: 1179950 - RNA, 19 nt, Artificial Sequence
  Description of Artificial Sequence: Synthetic oligonucleotide
ugcauucaucucugcugug

SEQ ID NO: 1179951 - RNA, 19 nt, Artificial Sequence
  Description of Artificial Sequence: Synthetic oligonucleotide
ucaugcggaaagugccuuc

SEQ ID NO: 1179952 - RNA, 19 nt, Artificial Sequence
  Description of Artificial Sequence: Synthetic oligonucleotide
auauacgcaguugcacacu

SEQ ID NO: 1179953 - RNA, 19 nt, Artificial Sequence
  Description of Artificial Sequence: Synthetic oligonucleotide
guugguaucucgccugugu

SEQ ID NO: 1179954 - RNA, 19 nt, Artificial Sequence
  Description of Artificial Sequence: Synthetic oligonucleotide
cacccauaaguucugggaa

SEQ ID NO: 1179955 - RNA, 19 nt, Artificial Sequence
  Description of Artificial Sequence: Synthetic oligonucleotide
caucggcauaagcuuggag

SEQ ID NO: 1179956 - RNA, 19 nt, Artificial Sequence
  Description of Artificial Sequence: Synthetic oligonucleotide
guacagauuggguauggau

SEQ ID NO: 1179957 - RNA, 19 nt, Artificial Sequence
  Description of Artificial Sequence: Synthetic oligonucleotide
guacaaugcaggagguuca

SEQ ID NO: 1179958 - RNA, 19 nt, Artificial Sequence
  Description of Artificial Sequence: Synthetic oligonucleotide
agacacccauaaguucugg

SEQ ID NO: 1179959 - RNA, 19 nt, Artificial Sequence
  Description of Artificial Sequence: Synthetic oligonucleotide
uugccgacuuugguaagcu

SEQ ID NO: 1179960 - RNA, 19 nt, Artificial Sequence
  Description of Artificial Sequence: Synthetic oligonucleotide
ggcauuggcacagaagaga

SEQ ID NO: 1179961 - RNA, 19 nt, Artificial Sequence
  Description of Artificial Sequence: Synthetic oligonucleotide
guccaugaacaguuuacua

SEQ ID NO: 1179962 - RNA, 19 nt, Artificial Sequence
  Description of Artificial Sequence: Synthetic oligonucleotide
aggacgaagaugguccgaa

SEQ ID NO: 1179963 - RNA, 19 nt, Artificial Sequence
  Description of Artificial Sequence: Synthetic oligonucleotide
auacgcaguugcacacucg

SEQ ID NO: 1179964 - RNA, 19 nt, Artificial Sequence
  Description of Artificial Sequence: Synthetic oligonucleotide
cugaugccacaaacuggag

SEQ ID NO: 1179965 - RNA, 19 nt, Artificial Sequence
  Description of Artificial Sequence: Synthetic oligonucleotide
ugaagcuguugagaccguc

SEQ ID NO: 1179966 - RNA, 19 nt, Artificial Sequence
  Description of Artificial Sequence: Synthetic oligonucleotide
gcauucaucucugcugugc

SEQ ID NO: 1179967 - RNA, 19 nt, Artificial Sequence
  Description of Artificial Sequence: Synthetic oligonucleotide
uugagaccgucgguagcag

SEQ ID NO: 1179968 - RNA, 19 nt, Artificial Sequence
  Description of Artificial Sequence: Synthetic oligonucleotide
gguucucguccugugaccc

SEQ ID NO: 1179969 - RNA, 19 nt, Artificial Sequence
  Description of Artificial Sequence: Synthetic oligonucleotide
uucucguccugugacccaa

SEQ ID NO: 1179970 - RNA, 19 nt, Artificial Sequence
  Description of Artificial Sequence: Synthetic oligonucleotide
uucccggucugcuguuucu

SEQ ID NO: 1179971 - RNA, 19 nt, Artificial Sequence
  Description of Artificial Sequence: Synthetic oligonucleotide
acguugguaucucgccugu

SEQ ID NO: 1179972 - RNA, 19 nt, Artificial Sequence
  Description of Artificial Sequence: Synthetic oligonucleotide
ccgaaucacacguaaagaa

SEQ ID NO: 1179973 - RNA, 19 nt, Artificial Sequence
  Description of Artificial Sequence: Synthetic oligonucleotide
guuucuguacagauugggu

SEQ ID NO: 1179974 - RNA, 19 nt, Artificial Sequence
  Description of Artificial Sequence: Synthetic oligonucleotide
auaguaugucagagguucu

SEQ ID NO: 1179975 - RNA, 19 nt, Artificial Sequence
  Description of Artificial Sequence: Synthetic oligonucleotide
aagucuucgggcacacauu

SEQ ID NO: 1179976 - RNA, 19 nt, Artificial Sequence
  Description of Artificial Sequence: Synthetic oligonucleotide
uuuggcacgugcggauuaa

SEQ ID NO: 1179977 - RNA, 19 nt, Artificial Sequence
  Description of Artificial Sequence: Synthetic oligonucleotide
caguuuacuaucucagaau

SEQ ID NO: 1179978 - RNA, 19 nt, Artificial Sequence
  Description of Artificial Sequence: Synthetic oligonucleotide
augaggcauuggcacagaa

SEQ ID NO: 1179979 - RNA, 19 nt, Artificial Sequence
  Description of Artificial Sequence: Synthetic oligonucleotide
cuucgggcacacauugcca

SEQ ID NO: 1179980 - RNA, 19 nt, Artificial Sequence
  Description of Artificial Sequence: Synthetic oligonucleotide
cguacaaugcaggagguuc

SEQ ID NO: 1179981 - RNA, 19 nt, Artificial Sequence
  Description of Artificial Sequence: Synthetic oligonucleotide
cacguaaagaaugucuggu

SEQ ID NO: 1179982 - RNA, 19 nt, Artificial Sequence
  Description of Artificial Sequence: Synthetic oligonucleotide
cucguuuaucuccaaggcu

SEQ ID NO: 1179983 - RNA, 19 nt, Artificial Sequence
  Description of Artificial Sequence: Synthetic oligonucleotide
agaagagauggcagauggu

SEQ ID NO: 1179984 - RNA, 19 nt, Artificial Sequence
  Description of Artificial Sequence: Synthetic oligonucleotide
guugucaaccccucccgcu

SEQ ID NO: 1179985 - RNA, 19 nt, Artificial Sequence
  Description of Artificial Sequence: Synthetic oligonucleotide
gcuaagacugccuggacau

SEQ ID NO: 1179986 - RNA, 19 nt, Artificial Sequence
  Description of Artificial Sequence: Synthetic oligonucleotide
guaucucgccuguguugag

SEQ ID NO: 1179987 - RNA, 19 nt, Artificial Sequence
  Description of Artificial Sequence: Synthetic oligonucleotide
guaugucagagguucucgu

SEQ ID NO: 1179988 - RNA, 19 nt, Artificial Sequence
  Description of Artificial Sequence: Synthetic oligonucleotide
ggguaagggaucaugcgga

SEQ ID NO: 1179989 - RNA, 19 nt, Artificial Sequence
  Description of Artificial Sequence: Synthetic oligonucleotide
auagaccaagacguuggua

SEQ ID NO: 1179990 - RNA, 19 nt, Artificial Sequence
  Description of Artificial Sequence: Synthetic oligonucleotide
ggaugcuuuccacuuucuc

SEQ ID NO: 1179991 - RNA, 19 nt, Artificial Sequence
  Description of Artificial Sequence: Synthetic oligonucleotide
guccccauuacuggaauua

SEQ ID NO: 1179992 - RNA, 19 nt, Artificial Sequence
  Description of Artificial Sequence: Synthetic oligonucleotide
gugaaggaugcgaggcccc

SEQ ID NO: 1179993 - RNA, 19 nt, Artificial Sequence
  Description of Artificial Sequence: Synthetic oligonucleotide
uggccucuacugcauucau

SEQ ID NO: 1179994 - RNA, 19 nt, Artificial Sequence
  Description of Artificial Sequence: Synthetic oligonucleotide
uugcgguccaugaggcauu

SEQ ID NO: 1179995 - RNA, 19 nt, Artificial Sequence
  Description of Artificial Sequence: Synthetic oligonucleotide
ggauaaaauaggugucccu

SEQ ID NO: 1179996 - RNA, 19 nt, Artificial Sequence
  Description of Artificial Sequence: Synthetic oligonucleotide
aaagccccuuccacccucu

SEQ ID NO: 1179997 - RNA, 19 nt, Artificial Sequence
  Description of Artificial Sequence: Synthetic oligonucleotide
gaccaagacguugguaucu

SEQ ID NO: 1179998 - RNA, 19 nt, Artificial Sequence
  Description of Artificial Sequence: Synthetic oligonucleotide
ugcgguccaugaggcauug

SEQ ID NO: 1179999 - RNA, 19 nt, Artificial Sequence
  Description of Artificial Sequence: Synthetic oligonucleotide
aucaugcggaaagugccuu

SEQ ID NO: 1180000 - RNA, 19 nt, Artificial Sequence
  Description of Artificial Sequence: Synthetic oligonucleotide
gggaacugaugugucagga

SEQ ID NO: 1180001 - RNA, 19 nt, Artificial Sequence
  Description of Artificial Sequence: Synthetic oligonucleotide
gucaaccccucccgcugcc

SEQ ID NO: 1180002 - RNA, 19 nt, Artificial Sequence
  Description of Artificial Sequence: Synthetic oligonucleotide
caaguguaccgauuguauu

SEQ ID NO: 1180003 - RNA, 19 nt, Artificial Sequence
  Description of Artificial Sequence: Synthetic oligonucleotide
agcuucauacugggagcca

SEQ ID NO: 1180004 - RNA, 19 nt, Artificial Sequence
  Description of Artificial Sequence: Synthetic oligonucleotide
gcuguugagaccgucggua

SEQ ID NO: 1180005 - RNA, 19 nt, Artificial Sequence
  Description of Artificial Sequence: Synthetic oligonucleotide
guucucguccugugaccca

SEQ ID NO: 1180006 - RNA, 19 nt, Artificial Sequence
  Description of Artificial Sequence: Synthetic oligonucleotide
acgugcggauuaaauucca

SEQ ID NO: 1180007 - RNA, 19 nt, Artificial Sequence
  Description of Artificial Sequence: Synthetic oligonucleotide
gguaagggaucaugcggaa

SEQ ID NO: 1180008 - RNA, 19 nt, Artificial Sequence
  Description of Artificial Sequence: Synthetic oligonucleotide
guaagggaucaugcggaaa

SEQ ID NO: 1180009 - RNA, 19 nt, Artificial Sequence
  Description of Artificial Sequence: Synthetic oligonucleotide
agaccgucgguagcagcca

SEQ ID NO: 1180010 - RNA, 19 nt, Artificial Sequence
  Description of Artificial Sequence: Synthetic oligonucleotide
cuugcgguccaugaggcau

SEQ ID NO: 1180011 - RNA, 19 nt, Artificial Sequence
  Description of Artificial Sequence: Synthetic oligonucleotide
acaucggcauaagcuugga

SEQ ID NO: 1180012 - RNA, 19 nt, Artificial Sequence
  Description of Artificial Sequence: Synthetic oligonucleotide
gcuuguggguuccucucuc

SEQ ID NO: 1180013 - RNA, 19 nt, Artificial Sequence
  Description of Artificial Sequence: Synthetic oligonucleotide
gcuuuugcgaagacaccca

SEQ ID NO: 1180014 - RNA, 19 nt, Artificial Sequence
  Description of Artificial Sequence: Synthetic oligonucleotide
uuggcacgugcggauuaaa

SEQ ID NO: 1180015 - RNA, 19 nt, Artificial Sequence
  Description of Artificial Sequence: Synthetic oligonucleotide
gccgacuuugguaagcuua

SEQ ID NO: 1180016 - RNA, 19 nt, Artificial Sequence
  Description of Artificial Sequence: Synthetic oligonucleotide
ugccgacuuugguaagcuu

SEQ ID NO: 1180017 - RNA, 19 nt, Artificial Sequence
  Description of Artificial Sequence: Synthetic oligonucleotide
ggauuucgccacacuuugc

SEQ ID NO: 1180018 - RNA, 19 nt, Artificial Sequence
  Description of Artificial Sequence: Synthetic oligonucleotide
gguaagcuuauaucaucau

SEQ ID NO: 1180019 - RNA, 19 nt, Artificial Sequence
  Description of Artificial Sequence: Synthetic oligonucleotide
cuuuugcgaagacacccau

SEQ ID NO: 1180020 - RNA, 19 nt, Artificial Sequence
  Description of Artificial Sequence: Synthetic oligonucleotide
ggcacgugcggauuaaauu

SEQ ID NO: 1180021 - RNA, 19 nt, Artificial Sequence
  Description of Artificial Sequence: Synthetic oligonucleotide
cacguacaaugcaggaggu

SEQ ID NO: 1180022 - RNA, 19 nt, Artificial Sequence
  Description of Artificial Sequence: Synthetic oligonucleotide
cagacagauucaugucaua

SEQ ID NO: 1180023 - RNA, 19 nt, Artificial Sequence
  Description of Artificial Sequence: Synthetic oligonucleotide
gcuuugaguagggcagcug

SEQ ID NO: 1180024 - RNA, 19 nt, Artificial Sequence
  Description of Artificial Sequence: Synthetic oligonucleotide
ccacccucuuccagugugc

SEQ ID NO: 1180025 - RNA, 19 nt, Artificial Sequence
  Description of Artificial Sequence: Synthetic oligonucleotide
cccgccgagaugcagccuc

SEQ ID NO: 1180026 - RNA, 19 nt, Artificial Sequence
  Description of Artificial Sequence: Synthetic oligonucleotide
cgaagaugguccgaaucac

SEQ ID NO: 1180027 - RNA, 19 nt, Artificial Sequence
  Description of Artificial Sequence: Synthetic oligonucleotide
cgugcggauuaaauuccac

SEQ ID NO: 1180028 - RNA, 19 nt, Artificial Sequence
  Description of Artificial Sequence: Synthetic oligonucleotide
cuuugcacucugagacacu

SEQ ID NO: 1180029 - RNA, 19 nt, Artificial Sequence
  Description of Artificial Sequence: Synthetic oligonucleotide
ggcgggaggaucaagcuuu

SEQ ID NO: 1180030 - RNA, 19 nt, Artificial Sequence
  Description of Artificial Sequence: Synthetic oligonucleotide
gcgaagacacccauaaguu

SEQ ID NO: 1180031 - RNA, 19 nt, Artificial Sequence
  Description of Artificial Sequence: Synthetic oligonucleotide
cacccucuuccagugugca

SEQ ID NO: 1180032 - RNA, 19 nt, Artificial Sequence
  Description of Artificial Sequence: Synthetic oligonucleotide
gcagccucgggugagaauu

SEQ ID NO: 1180033 - RNA, 19 nt, Artificial Sequence
  Description of Artificial Sequence: Synthetic oligonucleotide
cgaaucacacguaaagaau

SEQ ID NO: 1180034 - RNA, 19 nt, Artificial Sequence
  Description of Artificial Sequence: Synthetic oligonucleotide
ccauuacuggaauuagaau

SEQ ID NO: 1180035 - RNA, 19 nt, Artificial Sequence
  Description of Artificial Sequence: Synthetic oligonucleotide
cagauuggguauggauaaa

SEQ ID NO: 1180036 - RNA, 19 nt, Artificial Sequence
  Description of Artificial Sequence: Synthetic oligonucleotide
caggacgaagaugguccga

SEQ ID NO: 1180037 - RNA, 19 nt, Artificial Sequence
  Description of Artificial Sequence: Synthetic oligonucleotide
gaagggcuucuagaagguu

SEQ ID NO: 1180038 - RNA, 19 nt, Artificial Sequence
  Description of Artificial Sequence: Synthetic oligonucleotide
aguucccggucugcuguuu

SEQ ID NO: 1180039 - RNA, 19 nt, Artificial Sequence
  Description of Artificial Sequence: Synthetic oligonucleotide
augguccgaaucacacgua

SEQ ID NO: 1180040 - RNA, 19 nt, Artificial Sequence
  Description of Artificial Sequence: Synthetic oligonucleotide
cucguccugugacccaagu

SEQ ID NO: 1180041 - RNA, 19 nt, Artificial Sequence
  Description of Artificial Sequence: Synthetic oligonucleotide
acgcaguugcacacucguu

SEQ ID NO: 1180042 - RNA, 19 nt, Artificial Sequence
  Description of Artificial Sequence: Synthetic oligonucleotide
gaccgucgguagcagccau

SEQ ID NO: 1180043 - RNA, 19 nt, Artificial Sequence
  Description of Artificial Sequence: Synthetic oligonucleotide
ccgacuuugguaagcuuau

SEQ ID NO: 1180044 - RNA, 19 nt, Artificial Sequence
  Description of Artificial Sequence: Synthetic oligonucleotide
ggaggaugcuuuccacuuu

SEQ ID NO: 1180045 - RNA, 19 nt, Artificial Sequence
  Description of Artificial Sequence: Synthetic oligonucleotide
cccauaaguucugggaacu

SEQ ID NO: 1180046 - RNA, 19 nt, Artificial Sequence
  Description of Artificial Sequence: Synthetic oligonucleotide
ggacgaagaugguccgaau

SEQ ID NO: 1180047 - RNA, 19 nt, Artificial Sequence
  Description of Artificial Sequence: Synthetic oligonucleotide
ggccugcuuaaagaguuuu

SEQ ID NO: 1180048 - RNA, 19 nt, Artificial Sequence
  Description of Artificial Sequence: Synthetic oligonucleotide
cggcauaagcuuggaguuc

SEQ ID NO: 1180049 - RNA, 19 nt, Artificial Sequence
  Description of Artificial Sequence: Synthetic oligonucleotide
ccggucugcuguuucugua

SEQ ID NO: 1180050 - RNA, 19 nt, Artificial Sequence
  Description of Artificial Sequence: Synthetic oligonucleotide
cguugguaucucgccugug

SEQ ID NO: 1180051 - RNA, 19 nt, Artificial Sequence
  Description of Artificial Sequence: Synthetic oligonucleotide
gccucgggugagaauuugu

SEQ ID NO: 1180052 - RNA, 19 nt, Artificial Sequence
  Description of Artificial Sequence: Synthetic oligonucleotide
cagccucgggugagaauuu

SEQ ID NO: 1180053 - RNA, 19 nt, Artificial Sequence
  Description of Artificial Sequence: Synthetic oligonucleotide
cccggucugcuguuucugu

SEQ ID NO: 1180054 - RNA, 19 nt, Artificial Sequence
  Description of Artificial Sequence: Synthetic oligonucleotide
cgccgagaugcagccucgg

SEQ ID NO: 1180055 - RNA, 19 nt, Artificial Sequence
  Description of Artificial Sequence: Synthetic oligonucleotide
gcgggaggaucaagcuuuu

SEQ ID NO: 1180056 - RNA, 19 nt, Artificial Sequence
  Description of Artificial Sequence: Synthetic oligonucleotide
  modified_base (18)..(18): a, c, u, g, unknown or other
ccgcugccagaaguugcnu

SEQ ID NO: 1180057 - RNA, 19 nt, Artificial Sequence
  Description of Artificial Sequence: Synthetic oligonucleotide
ccccgccgagaugcagccu

SEQ ID NO: 1180058 - RNA, 19 nt, Artificial Sequence
  Description of Artificial Sequence: Synthetic oligonucleotide
uuaguuaucaaucacccag

SEQ ID NO: 1180059 - RNA, 19 nt, Artificial Sequence
  Description of Artificial Sequence: Synthetic oligonucleotide
uuaucaaucacccagaaua

SEQ ID NO: 1180060 - RNA, 19 nt, Artificial Sequence
  Description of Artificial Sequence: Synthetic oligonucleotide
uuaagagugacaaacucgg

SEQ ID NO: 1180061 - RNA, 19 nt, Artificial Sequence
  Description of Artificial Sequence: Synthetic oligonucleotide
aaaacgaagcuuuaaguag

SEQ ID NO: 1180062 - RNA, 19 nt, Artificial Sequence
  Description of Artificial Sequence: Synthetic oligonucleotide
aauagguucaauaaggaag

SEQ ID NO: 1180063 - RNA, 19 nt, Artificial Sequence
  Description of Artificial Sequence: Synthetic oligonucleotide
aggucauacacauagacac

SEQ ID NO: 1180064 - RNA, 19 nt, Artificial Sequence
  Description of Artificial Sequence: Synthetic oligonucleotide
auaucaauuguuuuccacc

SEQ ID NO: 1180065 - RNA, 19 nt, Artificial Sequence
  Description of Artificial Sequence: Synthetic oligonucleotide
agucaaguaaucuacuacc

SEQ ID NO: 1180066 - RNA, 19 nt, Artificial Sequence
  Description of Artificial Sequence: Synthetic oligonucleotide
aauaucaauuguuuuccac

SEQ ID NO: 1180067 - RNA, 19 nt, Artificial Sequence
  Description of Artificial Sequence: Synthetic oligonucleotide
uguauuaagaauaucaauu

SEQ ID NO: 1180068 - RNA, 19 nt, Artificial Sequence
  Description of Artificial Sequence: Synthetic oligonucleotide
uuugacguaauacaggaug

SEQ ID NO: 1180069 - RNA, 19 nt, Artificial Sequence
  Description of Artificial Sequence: Synthetic oligonucleotide
uuugaugugagccaccaag

SEQ ID NO: 1180070 - RNA, 19 nt, Artificial Sequence
  Description of Artificial Sequence: Synthetic oligonucleotide
uguuuaguuaucaaucacc

SEQ ID NO: 1180071 - RNA, 19 nt, Artificial Sequence
  Description of Artificial Sequence: Synthetic oligonucleotide
auguggaacagguagaccg

SEQ ID NO: 1180072 - RNA, 19 nt, Artificial Sequence
  Description of Artificial Sequence: Synthetic oligonucleotide
uuaaugguagacuugguac

SEQ ID NO: 1180073 - RNA, 19 nt, Artificial Sequence
  Description of Artificial Sequence: Synthetic oligonucleotide
gaaaagguaccacugcugg

SEQ ID NO: 1180074 - RNA, 19 nt, Artificial Sequence
  Description of Artificial Sequence: Synthetic oligonucleotide
auuugcaacaauuuugcug

SEQ ID NO: 1180075 - RNA, 19 nt, Artificial Sequence
  Description of Artificial Sequence: Synthetic oligonucleotide
uaucaauagguucaauaag

SEQ ID NO: 1180076 - RNA, 19 nt, Artificial Sequence
  Description of Artificial Sequence: Synthetic oligonucleotide
guauuaagaauaucaauug

SEQ ID NO: 1180077 - RNA, 19 nt, Artificial Sequence
  Description of Artificial Sequence: Synthetic oligonucleotide
aaacucggcaucaaggccc

SEQ ID NO: 1180078 - RNA, 19 nt, Artificial Sequence
  Description of Artificial Sequence: Synthetic oligonucleotide
ucaucucucaagcagcagg

SEQ ID NO: 1180079 - RNA, 19 nt, Artificial Sequence
  Description of Artificial Sequence: Synthetic oligonucleotide
augggucucaccuugaauc

SEQ ID NO: 1180080 - RNA, 19 nt, Artificial Sequence
  Description of Artificial Sequence: Synthetic oligonucleotide
uaucaaugagaaaacgaag

SEQ ID NO: 1180081 - RNA, 19 nt, Artificial Sequence
  Description of Artificial Sequence: Synthetic oligonucleotide
uugacguaauacaggaugg

SEQ ID NO: 1180082 - RNA, 19 nt, Artificial Sequence
  Description of Artificial Sequence: Synthetic oligonucleotide
cacauagacaccaugcucc

SEQ ID NO: 1180083 - RNA, 19 nt, Artificial Sequence
  Description of Artificial Sequence: Synthetic oligonucleotide
aucaauagguucaauaagg

SEQ ID NO: 1180084 - RNA, 19 nt, Artificial Sequence
  Description of Artificial Sequence: Synthetic oligonucleotide
ucaaucacccagaauaugu

SEQ ID NO: 1180085 - RNA, 19 nt, Artificial Sequence
  Description of Artificial Sequence: Synthetic oligonucleotide
cucauuaagagugacaaac

SEQ ID NO: 1180086 - RNA, 19 nt, Artificial Sequence
  Description of Artificial Sequence: Synthetic oligonucleotide
cagaccaugacccacaaac

SEQ ID NO: 1180087 - RNA, 19 nt, Artificial Sequence
  Description of Artificial Sequence: Synthetic oligonucleotide
ugaagugcgacacugccca

SEQ ID NO: 1180088 - RNA, 19 nt, Artificial Sequence
  Description of Artificial Sequence: Synthetic oligonucleotide
cuuucgguacaguugaagg

SEQ ID NO: 1180089 - RNA, 19 nt, Artificial Sequence
  Description of Artificial Sequence: Synthetic oligonucleotide
gagaauguauggaagacag

SEQ ID NO: 1180090 - RNA, 19 nt, Artificial Sequence
  Description of Artificial Sequence: Synthetic oligonucleotide
uuucgguacaguugaaggg

SEQ ID NO: 1180091 - RNA, 19 nt, Artificial Sequence
  Description of Artificial Sequence: Synthetic oligonucleotide
cauacuuaucaauagguuc

SEQ ID NO: 1180092 - RNA, 19 nt, Artificial Sequence
  Description of Artificial Sequence: Synthetic oligonucleotide
uccuuuugacguaauacag

SEQ ID NO: 1180093 - RNA, 19 nt, Artificial Sequence
  Description of Artificial Sequence: Synthetic oligonucleotide
aaacgaagcuuuaaguagg

SEQ ID NO: 1180094 - RNA, 19 nt, Artificial Sequence
  Description of Artificial Sequence: Synthetic oligonucleotide
gaagccgucucucaggucc

SEQ ID NO: 1180095 - RNA, 19 nt, Artificial Sequence
  Description of Artificial Sequence: Synthetic oligonucleotide
agaucauucguuuccgggg

SEQ ID NO: 1180096 - RNA, 19 nt, Artificial Sequence
  Description of Artificial Sequence: Synthetic oligonucleotide
aagguaguauguguuuucc

SEQ ID NO: 1180097 - RNA, 19 nt, Artificial Sequence
  Description of Artificial Sequence: Synthetic oligonucleotide
ucuagaaaguaccaagcaa

SEQ ID NO: 1180098 - RNA, 19 nt, Artificial Sequence
  Description of Artificial Sequence: Synthetic oligonucleotide
ucaauagguucaauaagga

SEQ ID NO: 1180099 - RNA, 19 nt, Artificial Sequence
  Description of Artificial Sequence: Synthetic oligonucleotide
gaaaguaccaagcaagaaa

SEQ ID NO: 1180100 - RNA, 19 nt, Artificial Sequence
  Description of Artificial Sequence: Synthetic oligonucleotide
uguucgugaguccaggaug

SEQ ID NO: 1180101 - RNA, 19 nt, Artificial Sequence
  Description of Artificial Sequence: Synthetic oligonucleotide
uuccuuuugacguaauaca

SEQ ID NO: 1180102 - RNA, 19 nt, Artificial Sequence
  Description of Artificial Sequence: Synthetic oligonucleotide
uaaugguagacuugguacc

SEQ ID NO: 1180103 - RNA, 19 nt, Artificial Sequence
  Description of Artificial Sequence: Synthetic oligonucleotide
uuuaaugguagacuuggua

SEQ ID NO: 1180104 - RNA, 19 nt, Artificial Sequence
  Description of Artificial Sequence: Synthetic oligonucleotide
cuugcuacugacaucuggc

SEQ ID NO: 1180105 - RNA, 19 nt, Artificial Sequence
  Description of Artificial Sequence: Synthetic oligonucleotide
caagcaagaaaccgcaggg

SEQ ID NO: 1180106 - RNA, 19 nt, Artificial Sequence
  Description of Artificial Sequence: Synthetic oligonucleotide
ucucauaaagacccuugag

SEQ ID NO: 1180107 - RNA, 19 nt, Artificial Sequence
  Description of Artificial Sequence: Synthetic oligonucleotide
cuagaucucuugaagugcg

SEQ ID NO: 1180108 - RNA, 19 nt, Artificial Sequence
  Description of Artificial Sequence: Synthetic oligonucleotide
aucaguggaauaaagguag

SEQ ID NO: 1180109 - RNA, 19 nt, Artificial Sequence
  Description of Artificial Sequence: Synthetic oligonucleotide
gaaaacgaagcuuuaagua

SEQ ID NO: 1180110 - RNA, 19 nt, Artificial Sequence
  Description of Artificial Sequence: Synthetic oligonucleotide
aaagguaccacugcuggug

SEQ ID NO: 1180111 - RNA, 19 nt, Artificial Sequence
  Description of Artificial Sequence: Synthetic oligonucleotide
aguacugaggggaagacag

SEQ ID NO: 1180112 - RNA, 19 nt, Artificial Sequence
  Description of Artificial Sequence: Synthetic oligonucleotide
guuuaguuaucaaucaccc

SEQ ID NO: 1180113 - RNA, 19 nt, Artificial Sequence
  Description of Artificial Sequence: Synthetic oligonucleotide
uuuaaguagguagacuuga

SEQ ID NO: 1180114 - RNA, 19 nt, Artificial Sequence
  Description of Artificial Sequence: Synthetic oligonucleotide
aggucuagaaaguaccaag

SEQ ID NO: 1180115 - RNA, 19 nt, Artificial Sequence
  Description of Artificial Sequence: Synthetic oligonucleotide
uuuuccgcugcuuucgugc

SEQ ID NO: 1180116 - RNA, 19 nt, Artificial Sequence
  Description of Artificial Sequence: Synthetic oligonucleotide
agcaagaaaccgcagggag

SEQ ID NO: 1180117 - RNA, 19 nt, Artificial Sequence
  Description of Artificial Sequence: Synthetic oligonucleotide
agaguugugaggugcuugg

SEQ ID NO: 1180118 - RNA, 19 nt, Artificial Sequence
  Description of Artificial Sequence: Synthetic oligonucleotide
aucucuugaagugcgacac

SEQ ID NO: 1180119 - RNA, 19 nt, Artificial Sequence
  Description of Artificial Sequence: Synthetic oligonucleotide
ugaguagagauguagucau

SEQ ID NO: 1180120 - RNA, 19 nt, Artificial Sequence
  Description of Artificial Sequence: Synthetic oligonucleotide
aauaaagguaguauguguu

SEQ ID NO: 1180121 - RNA, 19 nt, Artificial Sequence
  Description of Artificial Sequence: Synthetic oligonucleotide
uuaaguagguagacuugag

SEQ ID NO: 1180122 - RNA, 19 nt, Artificial Sequence
  Description of Artificial Sequence: Synthetic oligonucleotide
agagagaauguauggaaga

SEQ ID NO: 1180123 - RNA, 19 nt, Artificial Sequence
  Description of Artificial Sequence: Synthetic oligonucleotide
uagaaaguaccaagcaaga

SEQ ID NO: 1180124 - RNA, 19 nt, Artificial Sequence
  Description of Artificial Sequence: Synthetic oligonucleotide
augucuagaucucuugaag

SEQ ID NO: 1180125 - RNA, 19 nt, Artificial Sequence
  Description of Artificial Sequence: Synthetic oligonucleotide
cuuuugacguaauacagga

SEQ ID NO: 1180126 - RNA, 19 nt, Artificial Sequence
  Description of Artificial Sequence: Synthetic oligonucleotide
uugaugugagccaccaagc

SEQ ID NO: 1180127 - RNA, 19 nt, Artificial Sequence
  Description of Artificial Sequence: Synthetic oligonucleotide
ugucuagaucucuugaagu

SEQ ID NO: 1180128 - RNA, 19 nt, Artificial Sequence
  Description of Artificial Sequence: Synthetic oligonucleotide
gagucaaguaaucuacuac

SEQ ID NO: 1180129 - RNA, 19 nt, Artificial Sequence
  Description of Artificial Sequence: Synthetic oligonucleotide
gaagacagauacucgucag

SEQ ID NO: 1180130 - RNA, 19 nt, Artificial Sequence
  Description of Artificial Sequence: Synthetic oligonucleotide
uccucauuaagagugacaa

SEQ ID NO: 1180131 - RNA, 19 nt, Artificial Sequence
  Description of Artificial Sequence: Synthetic oligonucleotide
gguuuaaugguagacuugg

SEQ ID NO: 1180132 - RNA, 19 nt, Artificial Sequence
  Description of Artificial Sequence: Synthetic oligonucleotide
aagcuuuaaguagguagac

SEQ ID NO: 1180133 - RNA, 19 nt, Artificial Sequence
  Description of Artificial Sequence: Synthetic oligonucleotide
auaucaaugagaaaacgaa

SEQ ID NO: 1180134 - RNA, 19 nt, Artificial Sequence
  Description of Artificial Sequence: Synthetic oligonucleotide
uuuauccccgaguacugag

SEQ ID NO: 1180135 - RNA, 19 nt, Artificial Sequence
  Description of Artificial Sequence: Synthetic oligonucleotide
auguauuaagaauaucaau

SEQ ID NO: 1180136 - RNA, 19 nt, Artificial Sequence
  Description of Artificial Sequence: Synthetic oligonucleotide
uucgguacaguugaagggc

SEQ ID NO: 1180137 - RNA, 19 nt, Artificial Sequence
  Description of Artificial Sequence: Synthetic oligonucleotide
ucuagaucucuugaagugc

SEQ ID NO: 1180138 - RNA, 19 nt, Artificial Sequence
  Description of Artificial Sequence: Synthetic oligonucleotide
gguaguauguguuuuccgc

SEQ ID NO: 1180139 - RNA, 19 nt, Artificial Sequence
  Description of Artificial Sequence: Synthetic oligonucleotide
gaucauucguuuccggggc

SEQ ID NO: 1180140 - RNA, 19 nt, Artificial Sequence
  Description of Artificial Sequence: Synthetic oligonucleotide
gaccgugucaagaacuugg

SEQ ID NO: 1180141 - RNA, 19 nt, Artificial Sequence
  Description of Artificial Sequence: Synthetic oligonucleotide
auguucagguuguaucugg

SEQ ID NO: 1180142 - RNA, 19 nt, Artificial Sequence
  Description of Artificial Sequence: Synthetic oligonucleotide
uguaccacaguagccauca

SEQ ID NO: 1180143 - RNA, 19 nt, Artificial Sequence
  Description of Artificial Sequence: Synthetic oligonucleotide
ucaagagagaauguaugga

SEQ ID NO: 1180144 - RNA, 19 nt, Artificial Sequence
  Description of Artificial Sequence: Synthetic oligonucleotide
ugucaugggucucaccuug

SEQ ID NO: 1180145 - RNA, 19 nt, Artificial Sequence
  Description of Artificial Sequence: Synthetic oligonucleotide
aaucacccagaauauguau

SEQ ID NO: 1180146 - RNA, 19 nt, Artificial Sequence
  Description of Artificial Sequence: Synthetic oligonucleotide
uuuaguuaucaaucaccca

SEQ ID NO: 1180147 - RNA, 19 nt, Artificial Sequence
  Description of Artificial Sequence: Synthetic oligonucleotide
aauaaggaagucguugaaa

SEQ ID NO: 1180148 - RNA, 19 nt, Artificial Sequence
  Description of Artificial Sequence: Synthetic oligonucleotide
agguucaauaaggaagucg

SEQ ID NO: 1180149 - RNA, 19 nt, Artificial Sequence
  Description of Artificial Sequence: Synthetic oligonucleotide
cuuuaaguagguagacuug

SEQ ID NO: 1180150 - RNA, 19 nt, Artificial Sequence
  Description of Artificial Sequence: Synthetic oligonucleotide
gucuagaucucuugaagug

SEQ ID NO: 1180151 - RNA, 19 nt, Artificial Sequence
  Description of Artificial Sequence: Synthetic oligonucleotide
auagguucaauaaggaagu

SEQ ID NO: 1180152 - RNA, 19 nt, Artificial Sequence
  Description of Artificial Sequence: Synthetic oligonucleotide
uaguuaucaaucacccaga

SEQ ID NO: 1180153 - RNA, 19 nt, Artificial Sequence
  Description of Artificial Sequence: Synthetic oligonucleotide
guauggaagacagauacuc

SEQ ID NO: 1180154 - RNA, 19 nt, Artificial Sequence
  Description of Artificial Sequence: Synthetic oligonucleotide
acaggagugaauggcaagg

SEQ ID NO: 1180155 - RNA, 19 nt, Artificial Sequence
  Description of Artificial Sequence: Synthetic oligonucleotide
aguugugaggugcuuggag

SEQ ID NO: 1180156 - RNA, 19 nt, Artificial Sequence
  Description of Artificial Sequence: Synthetic oligonucleotide
ugagccaccaagcugccuc

SEQ ID NO: 1180157 - RNA, 19 nt, Artificial Sequence
  Description of Artificial Sequence: Synthetic oligonucleotide
acccagaauauguauuaag

SEQ ID NO: 1180158 - RNA, 19 nt, Artificial Sequence
  Description of Artificial Sequence: Synthetic oligonucleotide
cuugagaguugugaggugc

SEQ ID NO: 1180159 - RNA, 19 nt, Artificial Sequence
  Description of Artificial Sequence: Synthetic oligonucleotide
uaucaaucacccagaauau

SEQ ID NO: 1180160 - RNA, 19 nt, Artificial Sequence
  Description of Artificial Sequence: Synthetic oligonucleotide
aaagccgacuggagaagcc

SEQ ID NO: 1180161 - RNA, 19 nt, Artificial Sequence
  Description of Artificial Sequence: Synthetic oligonucleotide
aguagagauguagucauca

SEQ ID NO: 1180162 - RNA, 19 nt, Artificial Sequence
  Description of Artificial Sequence: Synthetic oligonucleotide
uugaagugcgacacugccc

SEQ ID NO: 1180163 - RNA, 19 nt, Artificial Sequence
  Description of Artificial Sequence: Synthetic oligonucleotide
aaugguagacuugguacca

SEQ ID NO: 1180164 - RNA, 19 nt, Artificial Sequence
  Description of Artificial Sequence: Synthetic oligonucleotide
ucaggucuagaaaguacca

SEQ ID NO: 1180165 - RNA, 19 nt, Artificial Sequence
  Description of Artificial Sequence: Synthetic oligonucleotide
guacuuucgguacaguuga

SEQ ID NO: 1180166 - RNA, 19 nt, Artificial Sequence
  Description of Artificial Sequence: Synthetic oligonucleotide
aaaagguaccacugcuggu

SEQ ID NO: 1180167 - RNA, 19 nt, Artificial Sequence
  Description of Artificial Sequence: Synthetic oligonucleotide
ugguuuaaugguagacuug

SEQ ID NO: 1180168 - RNA, 19 nt, Artificial Sequence
  Description of Artificial Sequence: Synthetic oligonucleotide
caaugaagggaauacccuc

SEQ ID NO: 1180169 - RNA, 19 nt, Artificial Sequence
  Description of Artificial Sequence: Synthetic oligonucleotide
caauucaugucaaacugca

SEQ ID NO: 1180170 - RNA, 19 nt, Artificial Sequence
  Description of Artificial Sequence: Synthetic oligonucleotide
uaguauguguuuuccgcug

SEQ ID NO: 1180171 - RNA, 19 nt, Artificial Sequence
  Description of Artificial Sequence: Synthetic oligonucleotide
gaauugagauuccuuuuga

SEQ ID NO: 1180172 - RNA, 19 nt, Artificial Sequence
  Description of Artificial Sequence: Synthetic oligonucleotide
agguaguauguguuuuccg

SEQ ID NO: 1180173 - RNA, 19 nt, Artificial Sequence
  Description of Artificial Sequence: Synthetic oligonucleotide
ugaccccgaacacagguga

SEQ ID NO: 1180174 - RNA, 19 nt, Artificial Sequence
  Description of Artificial Sequence: Synthetic oligonucleotide
aauacccucauuaggcccu

SEQ ID NO: 1180175 - RNA, 19 nt, Artificial Sequence
  Description of Artificial Sequence: Synthetic oligonucleotide
uuggugguaggucucgcca

SEQ ID NO: 1180176 - RNA, 19 nt, Artificial Sequence
  Description of Artificial Sequence: Synthetic oligonucleotide
aacagguagaccgugucaa

SEQ ID NO: 1180177 - RNA, 19 nt, Artificial Sequence
  Description of Artificial Sequence: Synthetic oligonucleotide
agaugucuagaucucuuga

SEQ ID NO: 1180178 - RNA, 19 nt, Artificial Sequence
  Description of Artificial Sequence: Synthetic oligonucleotide
ggaauugagauuccuuuug

SEQ ID NO: 1180179 - RNA, 19 nt, Artificial Sequence
  Description of Artificial Sequence: Synthetic oligonucleotide
ccaauuuaggcuuugcuuc

SEQ ID NO: 1180180 - RNA, 19 nt, Artificial Sequence
  Description of Artificial Sequence: Synthetic oligonucleotide
ucguuuccggggcaugugg

SEQ ID NO: 1180181 - RNA, 19 nt, Artificial Sequence
  Description of Artificial Sequence: Synthetic oligonucleotide
uacucgucagcugucagug

SEQ ID NO: 1180182 - RNA, 19 nt, Artificial Sequence
  Description of Artificial Sequence: Synthetic oligonucleotide
ucuagaacauuugcaacaa

SEQ ID NO: 1180183 - RNA, 19 nt, Artificial Sequence
  Description of Artificial Sequence: Synthetic oligonucleotide
gauguguaccacaguagcc

SEQ ID NO: 1180184 - RNA, 19 nt, Artificial Sequence
  Description of Artificial Sequence: Synthetic oligonucleotide
aaguaaucuacuaccugcu

SEQ ID NO: 1180185 - RNA, 19 nt, Artificial Sequence
  Description of Artificial Sequence: Synthetic oligonucleotide
aaacucaagagagaaugua

SEQ ID NO: 1180186 - RNA, 19 nt, Artificial Sequence
  Description of Artificial Sequence: Synthetic oligonucleotide
aaccgcagggagaucauuc

SEQ ID NO: 1180187 - RNA, 19 nt, Artificial Sequence
  Description of Artificial Sequence: Synthetic oligonucleotide
acguaauacaggauggcag

SEQ ID NO: 1180188 - RNA, 19 nt, Artificial Sequence
  Description of Artificial Sequence: Synthetic oligonucleotide
cacaguagccaucagguca

SEQ ID NO: 1180189 - RNA, 19 nt, Artificial Sequence
  Description of Artificial Sequence: Synthetic oligonucleotide
ugagucaaguaaucuacua

SEQ ID NO: 1180190 - RNA, 19 nt, Artificial Sequence
  Description of Artificial Sequence: Synthetic oligonucleotide
aucacuucguaacuccgcu

SEQ ID NO: 1180191 - RNA, 19 nt, Artificial Sequence
  Description of Artificial Sequence: Synthetic oligonucleotide
ggauguguaccacaguagc

SEQ ID NO: 1180192 - RNA, 19 nt, Artificial Sequence
  Description of Artificial Sequence: Synthetic oligonucleotide
ggcaucaaggcccaccagg

SEQ ID NO: 1180193 - RNA, 19 nt, Artificial Sequence
  Description of Artificial Sequence: Synthetic oligonucleotide
aacuuugaugugagccacc

SEQ ID NO: 1180194 - RNA, 19 nt, Artificial Sequence
  Description of Artificial Sequence: Synthetic oligonucleotide
ugauuggcccauuaagaau

SEQ ID NO: 1180195 - RNA, 19 nt, Artificial Sequence
  Description of Artificial Sequence: Synthetic oligonucleotide
acucaagagagaauguaug

SEQ ID NO: 1180196 - RNA, 19 nt, Artificial Sequence
  Description of Artificial Sequence: Synthetic oligonucleotide
aagccgacuggagaagccg

SEQ ID NO: 1180197 - RNA, 19 nt, Artificial Sequence
  Description of Artificial Sequence: Synthetic oligonucleotide
caagagagaauguauggaa

SEQ ID NO: 1180198 - RNA, 19 nt, Artificial Sequence
  Description of Artificial Sequence: Synthetic oligonucleotide
uaagagugacaaacucggc

SEQ ID NO: 1180199 - RNA, 19 nt, Artificial Sequence
  Description of Artificial Sequence: Synthetic oligonucleotide
ugacuccaauaucaaugag

SEQ ID NO: 1180200 - RNA, 19 nt, Artificial Sequence
  Description of Artificial Sequence: Synthetic oligonucleotide
ugcgacacugcccaggauu

SEQ ID NO: 1180201 - RNA, 19 nt, Artificial Sequence
  Description of Artificial Sequence: Synthetic oligonucleotide
gagagaauguauggaagac

SEQ ID NO: 1180202 - RNA, 19 nt, Artificial Sequence
  Description of Artificial Sequence: Synthetic oligonucleotide
accgcagggagaucauucg

SEQ ID NO: 1180203 - RNA, 19 nt, Artificial Sequence
  Description of Artificial Sequence: Synthetic oligonucleotide
guugaugacccggaagucc

SEQ ID NO: 1180204 - RNA, 19 nt, Artificial Sequence
  Description of Artificial Sequence: Synthetic oligonucleotide
cgaagcuuuaaguagguag

SEQ ID NO: 1180205 - RNA, 19 nt, Artificial Sequence
  Description of Artificial Sequence: Synthetic oligonucleotide
cagccaucaucucucaagc

SEQ ID NO: 1180206 - RNA, 19 nt, Artificial Sequence
  Description of Artificial Sequence: Synthetic oligonucleotide
cuugagaugucuagaucuc

SEQ ID NO: 1180207 - RNA, 19 nt, Artificial Sequence
  Description of Artificial Sequence: Synthetic oligonucleotide
guagacuugagaguuguga

SEQ ID NO: 1180208 - RNA, 19 nt, Artificial Sequence
  Description of Artificial Sequence: Synthetic oligonucleotide
gauacucgucagcugucag

SEQ ID NO: 1180209 - RNA, 19 nt, Artificial Sequence
  Description of Artificial Sequence: Synthetic oligonucleotide
gcagauccaguucuggacg

SEQ ID NO: 1180210 - RNA, 19 nt, Artificial Sequence
  Description of Artificial Sequence: Synthetic oligonucleotide
gauuucgguccucuagcug

SEQ ID NO: 1180211 - RNA, 19 nt, Artificial Sequence
  Description of Artificial Sequence: Synthetic oligonucleotide
gcaagggcaggucagagug

SEQ ID NO: 1180212 - RNA, 19 nt, Artificial Sequence
  Description of Artificial Sequence: Synthetic oligonucleotide
agagaauguauggaagaca

SEQ ID NO: 1180213 - RNA, 19 nt, Artificial Sequence
  Description of Artificial Sequence: Synthetic oligonucleotide
gucuagaaaguaccaagca

SEQ ID NO: 1180214 - RNA, 19 nt, Artificial Sequence
  Description of Artificial Sequence: Synthetic oligonucleotide
ccuuuugacguaauacagg

SEQ ID NO: 1180215 - RNA, 19 nt, Artificial Sequence
  Description of Artificial Sequence: Synthetic oligonucleotide
aagugcgacacugcccagg

SEQ ID NO: 1180216 - RNA, 19 nt, Artificial Sequence
  Description of Artificial Sequence: Synthetic oligonucleotide
gaucucuugaagugcgaca

SEQ ID NO: 1180217 - RNA, 19 nt, Artificial Sequence
  Description of Artificial Sequence: Synthetic oligonucleotide
uacuaccugcuccugagua

SEQ ID NO: 1180218 - RNA, 19 nt, Artificial Sequence
  Description of Artificial Sequence: Synthetic oligonucleotide
uauccccgaguacugaguc

SEQ ID NO: 1180219 - RNA, 19 nt, Artificial Sequence
  Description of Artificial Sequence: Synthetic oligonucleotide
ugugcgggcguccucaaua

SEQ ID NO: 1180220 - RNA, 19 nt, Artificial Sequence
  Description of Artificial Sequence: Synthetic oligonucleotide
aauccacaugcugguuccc

SEQ ID NO: 1180221 - RNA, 19 nt, Artificial Sequence
  Description of Artificial Sequence: Synthetic oligonucleotide
guaggucucgccaacuuug

SEQ ID NO: 1180222 - RNA, 19 nt, Artificial Sequence
  Description of Artificial Sequence: Synthetic oligonucleotide
uugagaguugugaggugcu

SEQ ID NO: 1180223 - RNA, 19 nt, Artificial Sequence
  Description of Artificial Sequence: Synthetic oligonucleotide
uuauccccgaguacugagu

SEQ ID NO: 1180224 - RNA, 19 nt, Artificial Sequence
  Description of Artificial Sequence: Synthetic oligonucleotide
acuuucgguacaguugaag

SEQ ID NO: 1180225 - RNA, 19 nt, Artificial Sequence
  Description of Artificial Sequence: Synthetic oligonucleotide
guagccaucaggucauaca

SEQ ID NO: 1180226 - RNA, 19 nt, Artificial Sequence
  Description of Artificial Sequence: Synthetic oligonucleotide
gauguucagguuguaucug

SEQ ID NO: 1180227 - RNA, 19 nt, Artificial Sequence
  Description of Artificial Sequence: Synthetic oligonucleotide
cacuucguaacuccgcuuc

SEQ ID NO: 1180228 - RNA, 19 nt, Artificial Sequence
  Description of Artificial Sequence: Synthetic oligonucleotide
uugaccccgaacacaggug

SEQ ID NO: 1180229 - RNA, 19 nt, Artificial Sequence
  Description of Artificial Sequence: Synthetic oligonucleotide
guguuuuccgcugcuuucg

SEQ ID NO: 1180230 - RNA, 19 nt, Artificial Sequence
  Description of Artificial Sequence: Synthetic oligonucleotide
uuuugacguaauacaggau

SEQ ID NO: 1180231 - RNA, 19 nt, Artificial Sequence
  Description of Artificial Sequence: Synthetic oligonucleotide
ugacguaauacaggauggc

SEQ ID NO: 1180232 - RNA, 19 nt, Artificial Sequence
  Description of Artificial Sequence: Synthetic oligonucleotide
uuucgugccagcgaggcuu

SEQ ID NO: 1180233 - RNA, 19 nt, Artificial Sequence
  Description of Artificial Sequence: Synthetic oligonucleotide
cguaauacaggauggcagg

SEQ ID NO: 1180234 - RNA, 19 nt, Artificial Sequence
  Description of Artificial Sequence: Synthetic oligonucleotide
gacguaauacaggauggca

SEQ ID NO: 1180235 - RNA, 19 nt, Artificial Sequence
  Description of Artificial Sequence: Synthetic oligonucleotide
aguuaucaaucacccagaa

SEQ ID NO: 1180236 - RNA, 19 nt, Artificial Sequence
  Description of Artificial Sequence: Synthetic oligonucleotide
ucauuaggcccuugacccc

SEQ ID NO: 1180237 - RNA, 19 nt, Artificial Sequence
  Description of Artificial Sequence: Synthetic oligonucleotide
cugcuuucgugccagcgag

SEQ ID NO: 1180238 - RNA, 19 nt, Artificial Sequence
  Description of Artificial Sequence: Synthetic oligonucleotide
cauuaggcccuugaccccg

SEQ ID NO: 1180239 - RNA, 19 nt, Artificial Sequence
  Description of Artificial Sequence: Synthetic oligonucleotide
auacucgucagcugucagu

SEQ ID NO: 1180240 - RNA, 19 nt, Artificial Sequence
  Description of Artificial Sequence: Synthetic oligonucleotide
ggaauacccucauuaggcc

SEQ ID NO: 1180241 - RNA, 19 nt, Artificial Sequence
  Description of Artificial Sequence: Synthetic oligonucleotide
uugcuacugacaucuggcu

SEQ ID NO: 1180242 - RNA, 19 nt, Artificial Sequence
  Description of Artificial Sequence: Synthetic oligonucleotide
agugacaaacucggcauca

SEQ ID NO: 1180243 - RNA, 19 nt, Artificial Sequence
  Description of Artificial Sequence: Synthetic oligonucleotide
gaauggcaagggcagguca

SEQ ID NO: 1180244 - RNA, 19 nt, Artificial Sequence
  Description of Artificial Sequence: Synthetic oligonucleotide
aagcaagaaaccgcaggga

SEQ ID NO: 1180245 - RNA, 19 nt, Artificial Sequence
  Description of Artificial Sequence: Synthetic oligonucleotide
uaaagacccuugagcaccu

SEQ ID NO: 1180246 - RNA, 19 nt, Artificial Sequence
  Description of Artificial Sequence: Synthetic oligonucleotide
ggucucgccaacuuugaug

SEQ ID NO: 1180247 - RNA, 19 nt, Artificial Sequence
  Description of Artificial Sequence: Synthetic oligonucleotide
ucgguacaguugaagggcu

SEQ ID NO: 1180248 - RNA, 19 nt, Artificial Sequence
  Description of Artificial Sequence: Synthetic oligonucleotide
gagaguugugaggugcuug

SEQ ID NO: 1180249 - RNA, 19 nt, Artificial Sequence
  Description of Artificial Sequence: Synthetic oligonucleotide
ccuucugcagaccaugacc

SEQ ID NO: 1180250 - RNA, 19 nt, Artificial Sequence
  Description of Artificial Sequence: Synthetic oligonucleotide
caucaguggaauaaaggua

SEQ ID NO: 1180251 - RNA, 19 nt, Artificial Sequence
  Description of Artificial Sequence: Synthetic oligonucleotide
uuuccgcugcuuucgugcc

SEQ ID NO: 1180252 - RNA, 19 nt, Artificial Sequence
  Description of Artificial Sequence: Synthetic oligonucleotide
caggucauacacauagaca

SEQ ID NO: 1180253 - RNA, 19 nt, Artificial Sequence
  Description of Artificial Sequence: Synthetic oligonucleotide
caauagguucaauaaggaa

SEQ ID NO: 1180254 - RNA, 19 nt, Artificial Sequence
  Description of Artificial Sequence: Synthetic oligonucleotide
agguagaccgugucaagaa

SEQ ID NO: 1180255 - RNA, 19 nt, Artificial Sequence
  Description of Artificial Sequence: Synthetic oligonucleotide
gcccuucucauaaagaccc

SEQ ID NO: 1180256 - RNA, 19 nt, Artificial Sequence
  Description of Artificial Sequence: Synthetic oligonucleotide
acuuugaugugagccacca

SEQ ID NO: 1180257 - RNA, 19 nt, Artificial Sequence
  Description of Artificial Sequence: Synthetic oligonucleotide
uccuguucgugaguccagg

SEQ ID NO: 1180258 - RNA, 19 nt, Artificial Sequence
  Description of Artificial Sequence: Synthetic oligonucleotide
cacaggagugaauggcaag

SEQ ID NO: 1180259 - RNA, 19 nt, Artificial Sequence
  Description of Artificial Sequence: Synthetic oligonucleotide
ucggcccuucucauaaaga

SEQ ID NO: 1180260 - RNA, 19 nt, Artificial Sequence
  Description of Artificial Sequence: Synthetic oligonucleotide
caccugggccaauuuaggc

SEQ ID NO: 1180261 - RNA, 19 nt, Artificial Sequence
  Description of Artificial Sequence: Synthetic oligonucleotide
agguacuuucgguacaguu

SEQ ID NO: 1180262 - RNA, 19 nt, Artificial Sequence
  Description of Artificial Sequence: Synthetic oligonucleotide
uguguaccacaguagccau

SEQ ID NO: 1180263 - RNA, 19 nt, Artificial Sequence
  Description of Artificial Sequence: Synthetic oligonucleotide
aggauguguaccacaguag

SEQ ID NO: 1180264 - RNA, 19 nt, Artificial Sequence
  Description of Artificial Sequence: Synthetic oligonucleotide
agugcgacacugcccagga

SEQ ID NO: 1180265 - RNA, 19 nt, Artificial Sequence
  Description of Artificial Sequence: Synthetic oligonucleotide
caucucucaagcagcagga

SEQ ID NO: 1180266 - RNA, 19 nt, Artificial Sequence
  Description of Artificial Sequence: Synthetic oligonucleotide
caacuuugaugugagccac

SEQ ID NO: 1180267 - RNA, 19 nt, Artificial Sequence
  Description of Artificial Sequence: Synthetic oligonucleotide
ugcuuucgugccagcgagg

SEQ ID NO: 1180268 - RNA, 19 nt, Artificial Sequence
  Description of Artificial Sequence: Synthetic oligonucleotide
uuccggggcauguggaaca

SEQ ID NO: 1180269 - RNA, 19 nt, Artificial Sequence
  Description of Artificial Sequence: Synthetic oligonucleotide
agucguugaaaagguacca

SEQ ID NO: 1180270 - RNA, 19 nt, Artificial Sequence
  Description of Artificial Sequence: Synthetic oligonucleotide
uagaccgugucaagaacuu

SEQ ID NO: 1180271 - RNA, 19 nt, Artificial Sequence
  Description of Artificial Sequence: Synthetic oligonucleotide
ucuucaggucuagaaagua

SEQ ID NO: 1180272 - RNA, 19 nt, Artificial Sequence
  Description of Artificial Sequence: Synthetic oligonucleotide
ccucauuaggcccuugacc

SEQ ID NO: 1180273 - RNA, 19 nt, Artificial Sequence
  Description of Artificial Sequence: Synthetic oligonucleotide
uaggucucgccaacuuuga

SEQ ID NO: 1180274 - RNA, 19 nt, Artificial Sequence
  Description of Artificial Sequence: Synthetic oligonucleotide
uguuuuccgcugcuuucgu

SEQ ID NO: 1180275 - RNA, 19 nt, Artificial Sequence
  Description of Artificial Sequence: Synthetic oligonucleotide
cagguuguaucuggaauug

SEQ ID NO: 1180276 - RNA, 19 nt, Artificial Sequence
  Description of Artificial Sequence: Synthetic oligonucleotide
ggcucagucccauucuugc

SEQ ID NO: 1180277 - RNA, 19 nt, Artificial Sequence
  Description of Artificial Sequence: Synthetic oligonucleotide
agaaaguaccaagcaagaa

SEQ ID NO: 1180278 - RNA, 19 nt, Artificial Sequence
  Description of Artificial Sequence: Synthetic oligonucleotide
caggauguguaccacagua

SEQ ID NO: 1180279 - RNA, 19 nt, Artificial Sequence
  Description of Artificial Sequence: Synthetic oligonucleotide
gguucaauaaggaagucgu

SEQ ID NO: 1180280 - RNA, 19 nt, Artificial Sequence
  Description of Artificial Sequence: Synthetic oligonucleotide
acgcuugagaugucuagau

SEQ ID NO: 1180281 - RNA, 19 nt, Artificial Sequence
  Description of Artificial Sequence: Synthetic oligonucleotide
ucuggacguggacagggua

SEQ ID NO: 1180282 - RNA, 19 nt, Artificial Sequence
  Description of Artificial Sequence: Synthetic oligonucleotide
agcuuuaaguagguagacu

SEQ ID NO: 1180283 - RNA, 19 nt, Artificial Sequence
  Description of Artificial Sequence: Synthetic oligonucleotide
guaaagccgacuggagaag

SEQ ID NO: 1180284 - RNA, 19 nt, Artificial Sequence
  Description of Artificial Sequence: Synthetic oligonucleotide
agacuugguaccaucacuu

SEQ ID NO: 1180285 - RNA, 19 nt, Artificial Sequence
  Description of Artificial Sequence: Synthetic oligonucleotide
agccaauagcucagcuucc

SEQ ID NO: 1180286 - RNA, 19 nt, Artificial Sequence
  Description of Artificial Sequence: Synthetic oligonucleotide
agguagacuugagaguugu

SEQ ID NO: 1180287 - RNA, 19 nt, Artificial Sequence
  Description of Artificial Sequence: Synthetic oligonucleotide
ucaugggucucaccuugaa

SEQ ID NO: 1180288 - RNA, 19 nt, Artificial Sequence
  Description of Artificial Sequence: Synthetic oligonucleotide
acuucguaacuccgcuucu

SEQ ID NO: 1180289 - RNA, 19 nt, Artificial Sequence
  Description of Artificial Sequence: Synthetic oligonucleotide
gugucaagaacuugguccu

SEQ ID NO: 1180290 - RNA, 19 nt, Artificial Sequence
  Description of Artificial Sequence: Synthetic oligonucleotide
cccauuaagaauccacaug

SEQ ID NO: 1180291 - RNA, 19 nt, Artificial Sequence
  Description of Artificial Sequence: Synthetic oligonucleotide
uccgcugcuuucgugccag

SEQ ID NO: 1180292 - RNA, 19 nt, Artificial Sequence
  Description of Artificial Sequence: Synthetic oligonucleotide
uccccgaguacugagucaa

SEQ ID NO: 1180293 - RNA, 19 nt, Artificial Sequence
  Description of Artificial Sequence: Synthetic oligonucleotide
ggagaucauucguuuccgg

SEQ ID NO: 1180294 - RNA, 19 nt, Artificial Sequence
  Description of Artificial Sequence: Synthetic oligonucleotide
ggacgcuugagaugucuag

SEQ ID NO: 1180295 - RNA, 19 nt, Artificial Sequence
  Description of Artificial Sequence: Synthetic oligonucleotide
gacgcuugagaugucuaga

SEQ ID NO: 1180296 - RNA, 19 nt, Artificial Sequence
  Description of Artificial Sequence: Synthetic oligonucleotide
cuugcguuggugguagguc

SEQ ID NO: 1180297 - RNA, 19 nt, Artificial Sequence
  Description of Artificial Sequence: Synthetic oligonucleotide
acaggugauccuugcuacu

SEQ ID NO: 1180298 - RNA, 19 nt, Artificial Sequence
  Description of Artificial Sequence: Synthetic oligonucleotide
ugaagggcugugcgggcgu

SEQ ID NO: 1180299 - RNA, 19 nt, Artificial Sequence
  Description of Artificial Sequence: Synthetic oligonucleotide
ucgguccucuagcugucug

SEQ ID NO: 1180300 - RNA, 19 nt, Artificial Sequence
  Description of Artificial Sequence: Synthetic oligonucleotide
uggcuuuauccccgaguac

SEQ ID NO: 1180301 - RNA, 19 nt, Artificial Sequence
  Description of Artificial Sequence: Synthetic oligonucleotide
gucguugaaaagguaccac

SEQ ID NO: 1180302 - RNA, 19 nt, Artificial Sequence
  Description of Artificial Sequence: Synthetic oligonucleotide
cuggcuuuauccccgagua

SEQ ID NO: 1180303 - RNA, 19 nt, Artificial Sequence
  Description of Artificial Sequence: Synthetic oligonucleotide
gcuuuaaguagguagacuu

SEQ ID NO: 1180304 - RNA, 19 nt, Artificial Sequence
  Description of Artificial Sequence: Synthetic oligonucleotide
caggugauccuugcuacug

SEQ ID NO: 1180305 - RNA, 19 nt, Artificial Sequence
  Description of Artificial Sequence: Synthetic oligonucleotide
uuuccggggcauguggaac

SEQ ID NO: 1180306 - RNA, 19 nt, Artificial Sequence
  Description of Artificial Sequence: Synthetic oligonucleotide
guuuuccgcugcuuucgug

SEQ ID NO: 1180307 - RNA, 19 nt, Artificial Sequence
  Description of Artificial Sequence: Synthetic oligonucleotide
ucgugaguccaggaugugu

SEQ ID NO: 1180308 - RNA, 19 nt, Artificial Sequence
  Description of Artificial Sequence: Synthetic oligonucleotide
caccuugaaucuucagguc

SEQ ID NO: 1180309 - RNA, 19 nt, Artificial Sequence
  Description of Artificial Sequence: Synthetic oligonucleotide
cuggaauugagauuccuuu

SEQ ID NO: 1180310 - RNA, 19 nt, Artificial Sequence
  Description of Artificial Sequence: Synthetic oligonucleotide
uucuggacguggacagggu

SEQ ID NO: 1180311 - RNA, 19 nt, Artificial Sequence
  Description of Artificial Sequence: Synthetic oligonucleotide
agauacucgucagcuguca

SEQ ID NO: 1180312 - RNA, 19 nt, Artificial Sequence
  Description of Artificial Sequence: Synthetic oligonucleotide
ugaauggcaagggcagguc

SEQ ID NO: 1180313 - RNA, 19 nt, Artificial Sequence
  Description of Artificial Sequence: Synthetic oligonucleotide
gaagccaauagcucagcuu

SEQ ID NO: 1180314 - RNA, 19 nt, Artificial Sequence
  Description of Artificial Sequence: Synthetic oligonucleotide
ggcuggaccccacugugag

SEQ ID NO: 1180315 - RNA, 19 nt, Artificial Sequence
  Description of Artificial Sequence: Synthetic oligonucleotide
gguagaccgugucaagaac

SEQ ID NO: 1180316 - RNA, 19 nt, Artificial Sequence
  Description of Artificial Sequence: Synthetic oligonucleotide
gggagaucauucguuuccg

SEQ ID NO: 1180317 - RNA, 19 nt, Artificial Sequence
  Description of Artificial Sequence: Synthetic oligonucleotide
acaguagccaucaggucau

SEQ ID NO: 1180318 - RNA, 19 nt, Artificial Sequence
  Description of Artificial Sequence: Synthetic oligonucleotide
aucauucguuuccggggca

SEQ ID NO: 1180319 - RNA, 19 nt, Artificial Sequence
  Description of Artificial Sequence: Synthetic oligonucleotide
aagaaaccgcagggagauc

SEQ ID NO: 1180320 - RNA, 19 nt, Artificial Sequence
  Description of Artificial Sequence: Synthetic oligonucleotide
agccaucaucucucaagca

SEQ ID NO: 1180321 - RNA, 19 nt, Artificial Sequence
  Description of Artificial Sequence: Synthetic oligonucleotide
acccucauuaggcccuuga

SEQ ID NO: 1180322 - RNA, 19 nt, Artificial Sequence
  Description of Artificial Sequence: Synthetic oligonucleotide
accccgaacacaggugauc

SEQ ID NO: 1180323 - RNA, 19 nt, Artificial Sequence
  Description of Artificial Sequence: Synthetic oligonucleotide
aucacccagaauauguauu

SEQ ID NO: 1180324 - RNA, 19 nt, Artificial Sequence
  Description of Artificial Sequence: Synthetic oligonucleotide
agaccaugacccacaaacu

SEQ ID NO: 1180325 - RNA, 19 nt, Artificial Sequence
  Description of Artificial Sequence: Synthetic oligonucleotide
uggucugauuggcccauua

SEQ ID NO: 1180326 - RNA, 19 nt, Artificial Sequence
  Description of Artificial Sequence: Synthetic oligonucleotide
ugguaggucucgccaacuu

SEQ ID NO: 1180327 - RNA, 19 nt, Artificial Sequence
  Description of Artificial Sequence: Synthetic oligonucleotide
auucguuuccggggcaugu

SEQ ID NO: 1180328 - RNA, 19 nt, Artificial Sequence
  Description of Artificial Sequence: Synthetic oligonucleotide
cuccuugcguuggugguag

SEQ ID NO: 1180329 - RNA, 19 nt, Artificial Sequence
  Description of Artificial Sequence: Synthetic oligonucleotide
gccucaauaggguucuuga

SEQ ID NO: 1180330 - RNA, 19 nt, Artificial Sequence
  Description of Artificial Sequence: Synthetic oligonucleotide
uucguuuccggggcaugug

SEQ ID NO: 1180331 - RNA, 19 nt, Artificial Sequence
  Description of Artificial Sequence: Synthetic oligonucleotide
cagauacucgucagcuguc

SEQ ID NO: 1180332 - RNA, 19 nt, Artificial Sequence
  Description of Artificial Sequence: Synthetic oligonucleotide
caaucacccagaauaugua

SEQ ID NO: 1180333 - RNA, 19 nt, Artificial Sequence
  Description of Artificial Sequence: Synthetic oligonucleotide
gugaguccaggauguguac

SEQ ID NO: 1180334 - RNA, 19 nt, Artificial Sequence
  Description of Artificial Sequence: Synthetic oligonucleotide
ggucauacacauagacacc

SEQ ID NO: 1180335 - RNA, 19 nt, Artificial Sequence
  Description of Artificial Sequence: Synthetic oligonucleotide
gagauuccuuuugacguaa

SEQ ID NO: 1180336 - RNA, 19 nt, Artificial Sequence
  Description of Artificial Sequence: Synthetic oligonucleotide
gcuugguuuaaugguagac

SEQ ID NO: 1180337 - RNA, 19 nt, Artificial Sequence
  Description of Artificial Sequence: Synthetic oligonucleotide
gaugacccggaaguccuuc

SEQ ID NO: 1180338 - RNA, 19 nt, Artificial Sequence
  Description of Artificial Sequence: Synthetic oligonucleotide
cuugaccccgaacacaggu

SEQ ID NO: 1180339 - RNA, 19 nt, Artificial Sequence
  Description of Artificial Sequence: Synthetic oligonucleotide
gaagugcgacacugcccag

SEQ ID NO: 1180340 - RNA, 19 nt, Artificial Sequence
  Description of Artificial Sequence: Synthetic oligonucleotide
guagaccgugucaagaacu

SEQ ID NO: 1180341 - RNA, 19 nt, Artificial Sequence
  Description of Artificial Sequence: Synthetic oligonucleotide
ugugaggugcuuggaggaa

SEQ ID NO: 1180342 - RNA, 19 nt, Artificial Sequence
  Description of Artificial Sequence: Synthetic oligonucleotide
auccccgaguacugaguca

SEQ ID NO: 1180343 - RNA, 19 nt, Artificial Sequence
  Description of Artificial Sequence: Synthetic oligonucleotide
ucauucguuuccggggcau

SEQ ID NO: 1180344 - RNA, 19 nt, Artificial Sequence
  Description of Artificial Sequence: Synthetic oligonucleotide
guaccaucacuucguaacu

SEQ ID NO: 1180345 - RNA, 19 nt, Artificial Sequence
  Description of Artificial Sequence: Synthetic oligonucleotide
agaccgugucaagaacuug

SEQ ID NO: 1180346 - RNA, 19 nt, Artificial Sequence
  Description of Artificial Sequence: Synthetic oligonucleotide
uuccgcugcuuucgugcca

SEQ ID NO: 1180347 - RNA, 19 nt, Artificial Sequence
  Description of Artificial Sequence: Synthetic oligonucleotide
gcuuucgugccagcgaggc

SEQ ID NO: 1180348 - RNA, 19 nt, Artificial Sequence
  Description of Artificial Sequence: Synthetic oligonucleotide
uacuuucgguacaguugaa

SEQ ID NO: 1180349 - RNA, 19 nt, Artificial Sequence
  Description of Artificial Sequence: Synthetic oligonucleotide
gugcgggcguccucaauac

SEQ ID NO: 1180350 - RNA, 19 nt, Artificial Sequence
  Description of Artificial Sequence: Synthetic oligonucleotide
ucucgccaacuuugaugug

SEQ ID NO: 1180351 - RNA, 19 nt, Artificial Sequence
  Description of Artificial Sequence: Synthetic oligonucleotide
guacugaggggaagacagc

SEQ ID NO: 1180352 - RNA, 19 nt, Artificial Sequence
  Description of Artificial Sequence: Synthetic oligonucleotide
uccggggcauguggaacag

SEQ ID NO: 1180353 - RNA, 19 nt, Artificial Sequence
  Description of Artificial Sequence: Synthetic oligonucleotide
gaguagagauguagucauc

SEQ ID NO: 1180354 - RNA, 19 nt, Artificial Sequence
  Description of Artificial Sequence: Synthetic oligonucleotide
cagguagaccgugucaaga

SEQ ID NO: 1180355 - RNA, 19 nt, Artificial Sequence
  Description of Artificial Sequence: Synthetic oligonucleotide
ggcccauuaagaauccaca

SEQ ID NO: 1180356 - RNA, 19 nt, Artificial Sequence
  Description of Artificial Sequence: Synthetic oligonucleotide
uucgugccagcgaggcuuc

SEQ ID NO: 1180357 - RNA, 19 nt, Artificial Sequence
  Description of Artificial Sequence: Synthetic oligonucleotide
guuuccggggcauguggaa

SEQ ID NO: 1180358 - RNA, 19 nt, Artificial Sequence
  Description of Artificial Sequence: Synthetic oligonucleotide
guucgugaguccaggaugu

SEQ ID NO: 1180359 - RNA, 19 nt, Artificial Sequence
  Description of Artificial Sequence: Synthetic oligonucleotide
ggcuuuauccccgaguacu

SEQ ID NO: 1180360 - RNA, 19 nt, Artificial Sequence
  Description of Artificial Sequence: Synthetic oligonucleotide
auacaggauggcagguacu

SEQ ID NO: 1180361 - RNA, 19 nt, Artificial Sequence
  Description of Artificial Sequence: Synthetic oligonucleotide
ugcgggcguccucaauacu

SEQ ID NO: 1180362 - RNA, 19 nt, Artificial Sequence
  Description of Artificial Sequence: Synthetic oligonucleotide
uuggcccauuaagaaucca

SEQ ID NO: 1180363 - RNA, 19 nt, Artificial Sequence
  Description of Artificial Sequence: Synthetic oligonucleotide
cugagucaaguaaucuacu

SEQ ID NO: 1180364 - RNA, 19 nt, Artificial Sequence
  Description of Artificial Sequence: Synthetic oligonucleotide
aaaccgcagggagaucauu

SEQ ID NO: 1180365 - RNA, 19 nt, Artificial Sequence
  Description of Artificial Sequence: Synthetic oligonucleotide
uucgugaguccaggaugug

SEQ ID NO: 1180366 - RNA, 19 nt, Artificial Sequence
  Description of Artificial Sequence: Synthetic oligonucleotide
gcuuuauccccgaguacug

SEQ ID NO: 1180367 - RNA, 19 nt, Artificial Sequence
  Description of Artificial Sequence: Synthetic oligonucleotide
uccuugcguuggugguagg

SEQ ID NO: 1180368 - RNA, 19 nt, Artificial Sequence
  Description of Artificial Sequence: Synthetic oligonucleotide
ugagaguugugaggugcuu

SEQ ID NO: 1180369 - RNA, 19 nt, Artificial Sequence
  Description of Artificial Sequence: Synthetic oligonucleotide
cauucguuuccggggcaug

SEQ ID NO: 1180370 - RNA, 19 nt, Artificial Sequence
  Description of Artificial Sequence: Synthetic oligonucleotide
guaauacaggauggcaggu

SEQ ID NO: 1180371 - RNA, 19 nt, Artificial Sequence
  Description of Artificial Sequence: Synthetic oligonucleotide
ccccgaacacaggugaucc

SEQ ID NO: 1180372 - RNA, 19 nt, Artificial Sequence
  Description of Artificial Sequence: Synthetic oligonucleotide
aggucucgccaacuuugau

SEQ ID NO: 1180373 - RNA, 19 nt, Artificial Sequence
  Description of Artificial Sequence: Synthetic oligonucleotide
ucacgcccuccuugcguug

SEQ ID NO: 1180374 - RNA, 19 nt, Artificial Sequence
  Description of Artificial Sequence: Synthetic oligonucleotide
caggucuagaaaguaccaa

SEQ ID NO: 1180375 - RNA, 19 nt, Artificial Sequence
  Description of Artificial Sequence: Synthetic oligonucleotide
aagccgucucucagguccu

SEQ ID NO: 1180376 - RNA, 19 nt, Artificial Sequence
  Description of Artificial Sequence: Synthetic oligonucleotide
gugaauggcaagggcaggu

SEQ ID NO: 1180377 - RNA, 19 nt, Artificial Sequence
  Description of Artificial Sequence: Synthetic oligonucleotide
cuccaauaucaaugagaaa

SEQ ID NO: 1180378 - RNA, 19 nt, Artificial Sequence
  Description of Artificial Sequence: Synthetic oligonucleotide
caguacugaggggaagaca

SEQ ID NO: 1180379 - RNA, 19 nt, Artificial Sequence
  Description of Artificial Sequence: Synthetic oligonucleotide
cauagacaccaugcuccuc

SEQ ID NO: 1180380 - RNA, 19 nt, Artificial Sequence
  Description of Artificial Sequence: Synthetic oligonucleotide
augguagacuugguaccau

SEQ ID NO: 1180381 - RNA, 19 nt, Artificial Sequence
  Description of Artificial Sequence: Synthetic oligonucleotide
ggccucaauaggguucuug

SEQ ID NO: 1180382 - RNA, 19 nt, Artificial Sequence
  Description of Artificial Sequence: Synthetic oligonucleotide
uuaggcccuugaccccgaa

SEQ ID NO: 1180383 - RNA, 19 nt, Artificial Sequence
  Description of Artificial Sequence: Synthetic oligonucleotide
cccucauuaggcccuugac

SEQ ID NO: 1180384 - RNA, 19 nt, Artificial Sequence
  Description of Artificial Sequence: Synthetic oligonucleotide
cuuugaugugagccaccaa

SEQ ID NO: 1180385 - RNA, 19 nt, Artificial Sequence
  Description of Artificial Sequence: Synthetic oligonucleotide
uucgguccucuagcugucu

SEQ ID NO: 1180386 - RNA, 19 nt, Artificial Sequence
  Description of Artificial Sequence: Synthetic oligonucleotide
ggcuugguuuaaugguaga

SEQ ID NO: 1180387 - RNA, 19 nt, Artificial Sequence
  Description of Artificial Sequence: Synthetic oligonucleotide
gcuguauucuugggacuug

SEQ ID NO: 1180388 - RNA, 19 nt, Artificial Sequence
  Description of Artificial Sequence: Synthetic oligonucleotide
ggauuucgguccucuagcu

SEQ ID NO: 1180389 - RNA, 19 nt, Artificial Sequence
  Description of Artificial Sequence: Synthetic oligonucleotide
guuuaaugguagacuuggu

SEQ ID NO: 1180390 - RNA, 19 nt, Artificial Sequence
  Description of Artificial Sequence: Synthetic oligonucleotide
ggcguccucaauacuguca

SEQ ID NO: 1180391 - RNA, 19 nt, Artificial Sequence
  Description of Artificial Sequence: Synthetic oligonucleotide
gccaguacugaggggaaga

SEQ ID NO: 1180392 - RNA, 19 nt, Artificial Sequence
  Description of Artificial Sequence: Synthetic oligonucleotide
ggcccuugaccccgaacac

SEQ ID NO: 1180393 - RNA, 19 nt, Artificial Sequence
  Description of Artificial Sequence: Synthetic oligonucleotide
acgaagcuuuaaguaggua

SEQ ID NO: 1180394 - RNA, 19 nt, Artificial Sequence
  Description of Artificial Sequence: Synthetic oligonucleotide
cuguucgugaguccaggau

SEQ ID NO: 1180395 - RNA, 19 nt, Artificial Sequence
  Description of Artificial Sequence: Synthetic oligonucleotide
gguacaguugaagggcugu

SEQ ID NO: 1180396 - RNA, 19 nt, Artificial Sequence
  Description of Artificial Sequence: Synthetic oligonucleotide
aggacgcuugagaugucua

SEQ ID NO: 1180397 - RNA, 19 nt, Artificial Sequence
  Description of Artificial Sequence: Synthetic oligonucleotide
cagguacuuuccaauucau

SEQ ID NO: 1180398 - RNA, 19 nt, Artificial Sequence
  Description of Artificial Sequence: Synthetic oligonucleotide
gucaugggucucaccuuga

SEQ ID NO: 1180399 - RNA, 19 nt, Artificial Sequence
  Description of Artificial Sequence: Synthetic oligonucleotide
ccaguacugaggggaagac

SEQ ID NO: 1180400 - RNA, 19 nt, Artificial Sequence
  Description of Artificial Sequence: Synthetic oligonucleotide
caugggucucaccuugaau

SEQ ID NO: 1180401 - RNA, 19 nt, Artificial Sequence
  Description of Artificial Sequence: Synthetic oligonucleotide
gcguccucaauacugucau

SEQ ID NO: 1180402 - RNA, 19 nt, Artificial Sequence
  Description of Artificial Sequence: Synthetic oligonucleotide
gaagggcugugcgggcguc

SEQ ID NO: 1180403 - RNA, 19 nt, Artificial Sequence
  Description of Artificial Sequence: Synthetic oligonucleotide
ccgaguacugagucaagua

SEQ ID NO: 1180404 - RNA, 19 nt, Artificial Sequence
  Description of Artificial Sequence: Synthetic oligonucleotide
cagcuguauucuugggacu

SEQ ID NO: 1180405 - RNA, 19 nt, Artificial Sequence
  Description of Artificial Sequence: Synthetic oligonucleotide
auuaggcccuugaccccga

SEQ ID NO: 1180406 - RNA, 19 nt, Artificial Sequence
  Description of Artificial Sequence: Synthetic oligonucleotide
gggccaauuuaggcuuugc

SEQ ID NO: 1180407 - RNA, 19 nt, Artificial Sequence
  Description of Artificial Sequence: Synthetic oligonucleotide
uacccucauuaggcccuug

SEQ ID NO: 1180408 - RNA, 19 nt, Artificial Sequence
  Description of Artificial Sequence: Synthetic oligonucleotide
caucaaggucuccuggcuu

SEQ ID NO: 1180409 - RNA, 19 nt, Artificial Sequence
  Description of Artificial Sequence: Synthetic oligonucleotide
guucaauaaggaagucguu

SEQ ID NO: 1180410 - RNA, 19 nt, Artificial Sequence
  Description of Artificial Sequence: Synthetic oligonucleotide
gucacgcccuccuugcguu

SEQ ID NO: 1180411 - RNA, 19 nt, Artificial Sequence
  Description of Artificial Sequence: Synthetic oligonucleotide
cuacuaccugcuccugagu

SEQ ID NO: 1180412 - RNA, 19 nt, Artificial Sequence
  Description of Artificial Sequence: Synthetic oligonucleotide
ccuguucgugaguccagga

SEQ ID NO: 1180413 - RNA, 19 nt, Artificial Sequence
  Description of Artificial Sequence: Synthetic oligonucleotide
ggucacgcccuccuugcgu

SEQ ID NO: 1180414 - RNA, 19 nt, Artificial Sequence
  Description of Artificial Sequence: Synthetic oligonucleotide
agagggaaucuggcuucua

SEQ ID NO: 1180415 - RNA, 19 nt, Artificial Sequence
  Description of Artificial Sequence: Synthetic oligonucleotide
gugccaguacugaggggaa

SEQ ID NO: 1180416 - RNA, 19 nt, Artificial Sequence
  Description of Artificial Sequence: Synthetic oligonucleotide
auacccucauuaggcccuu

SEQ ID NO: 1180417 - RNA, 19 nt, Artificial Sequence
  Description of Artificial Sequence: Synthetic oligonucleotide
acucggcaucaaggcccac

SEQ ID NO: 1180418 - RNA, 19 nt, Artificial Sequence
  Description of Artificial Sequence: Synthetic oligonucleotide
uuucaggcucaggcaccuu

SEQ ID NO: 1180419 - RNA, 19 nt, Artificial Sequence
  Description of Artificial Sequence: Synthetic oligonucleotide
caggacgcuugagaugucu

SEQ ID NO: 1180420 - RNA, 19 nt, Artificial Sequence
  Description of Artificial Sequence: Synthetic oligonucleotide
cugucaugggucucaccuu

SEQ ID NO: 1180421 - RNA, 19 nt, Artificial Sequence
  Description of Artificial Sequence: Synthetic oligonucleotide
cuuucgugccagcgaggcu

SEQ ID NO: 1180422 - RNA, 19 nt, Artificial Sequence
  Description of Artificial Sequence: Synthetic oligonucleotide
agccgucucucagguccug

SEQ ID NO: 1180423 - RNA, 19 nt, Artificial Sequence
  Description of Artificial Sequence: Synthetic oligonucleotide
gugguaggucucgccaacu

SEQ ID NO: 1180424 - RNA, 19 nt, Artificial Sequence
  Description of Artificial Sequence: Synthetic oligonucleotide
cuucguaacuccgcuucuu

SEQ ID NO: 1180425 - RNA, 19 nt, Artificial Sequence
  Description of Artificial Sequence: Synthetic oligonucleotide
ugggcaccaugagguugau

SEQ ID NO: 1180426 - RNA, 19 nt, Artificial Sequence
  Description of Artificial Sequence: Synthetic oligonucleotide
gggacuugucuggcuuuca

SEQ ID NO: 1180427 - RNA, 19 nt, Artificial Sequence
  Description of Artificial Sequence: Synthetic oligonucleotide
cguuuccggggcaugugga

SEQ ID NO: 1180428 - RNA, 19 nt, Artificial Sequence
  Description of Artificial Sequence: Synthetic oligonucleotide
ccccgaguacugagucaag

SEQ ID NO: 1180429 - RNA, 19 nt, Artificial Sequence
  Description of Artificial Sequence: Synthetic oligonucleotide
ucgugccagcgaggcuucu

SEQ ID NO: 1180430 - RNA, 19 nt, Artificial Sequence
  Description of Artificial Sequence: Synthetic oligonucleotide
gccgacuggagaagccguc

SEQ ID NO: 1180431 - RNA, 19 nt, Artificial Sequence
  Description of Artificial Sequence: Synthetic oligonucleotide
gaccccgaacacaggugau

SEQ ID NO: 1180432 - RNA, 19 nt, Artificial Sequence
  Description of Artificial Sequence: Synthetic oligonucleotide
cguuggugguaggucucgc

SEQ ID NO: 1180433 - RNA, 19 nt, Artificial Sequence
  Description of Artificial Sequence: Synthetic oligonucleotide
ggacaggguaaagccgacu

SEQ ID NO: 1180434 - RNA, 19 nt, Artificial Sequence
  Description of Artificial Sequence: Synthetic oligonucleotide
cugccuccuguucgugagu

SEQ ID NO: 1180435 - RNA, 19 nt, Artificial Sequence
  Description of Artificial Sequence: Synthetic oligonucleotide
ccggggcauguggaacagg

SEQ ID NO: 1180436 - RNA, 19 nt, Artificial Sequence
  Description of Artificial Sequence: Synthetic oligonucleotide
cagguacuuucgguacagu

SEQ ID NO: 1180437 - RNA, 19 nt, Artificial Sequence
  Description of Artificial Sequence: Synthetic oligonucleotide
cccgaguacugagucaagu

SEQ ID NO: 1180438 - RNA, 19 nt, Artificial Sequence
  Description of Artificial Sequence: Synthetic oligonucleotide
uggccucaauaggguucuu

SEQ ID NO: 1180439 - RNA, 19 nt, Artificial Sequence
  Description of Artificial Sequence: Synthetic oligonucleotide
ccgaacacaggugauccuu

SEQ ID NO: 1180440 - RNA, 19 nt, Artificial Sequence
  Description of Artificial Sequence: Synthetic oligonucleotide
gugagccaccaagcugccu

SEQ ID NO: 1180441 - RNA, 19 nt, Artificial Sequence
  Description of Artificial Sequence: Synthetic oligonucleotide
ccuugcguuggugguaggu

SEQ ID NO: 1180442 - RNA, 19 nt, Artificial Sequence
  Description of Artificial Sequence: Synthetic oligonucleotide
gugcgacacugcccaggau

SEQ ID NO: 1180443 - RNA, 19 nt, Artificial Sequence
  Description of Artificial Sequence: Synthetic oligonucleotide
cccgaacacaggugauccu

SEQ ID NO: 1180444 - RNA, 19 nt, Artificial Sequence
  Description of Artificial Sequence: Synthetic oligonucleotide
gcaggacgcuugagauguc

SEQ ID NO: 1180445 - RNA, 19 nt, Artificial Sequence
  Description of Artificial Sequence: Synthetic oligonucleotide
cuggucugauuggcccauu

SEQ ID NO: 1180446 - RNA, 19 nt, Artificial Sequence
  Description of Artificial Sequence: Synthetic oligonucleotide
aaaauauuaaagcucaagc

SEQ ID NO: 1180447 - RNA, 19 nt, Artificial Sequence
  Description of Artificial Sequence: Synthetic oligonucleotide
aauauagucaauuugcuuc

SEQ ID NO: 1180448 - RNA, 19 nt, Artificial Sequence
  Description of Artificial Sequence: Synthetic oligonucleotide
aaauauuaaagcucaagcc

SEQ ID NO: 1180449 - RNA, 19 nt, Artificial Sequence
  Description of Artificial Sequence: Synthetic oligonucleotide
aauguuauaaaauuagcuc

SEQ ID NO: 1180450 - RNA, 19 nt, Artificial Sequence
  Description of Artificial Sequence: Synthetic oligonucleotide
aaacacaagaaauucaagc

SEQ ID NO: 1180451 - RNA, 19 nt, Artificial Sequence
  Description of Artificial Sequence: Synthetic oligonucleotide
aauguuuuauauuugauca

SEQ ID NO: 1180452 - RNA, 19 nt, Artificial Sequence
  Description of Artificial Sequence: Synthetic oligonucleotide
aauaauugaagacuauuac

SEQ ID NO: 1180453 - RNA, 19 nt, Artificial Sequence
  Description of Artificial Sequence: Synthetic oligonucleotide
uuaaaagccaucuaagugg

SEQ ID NO: 1180454 - RNA, 19 nt, Artificial Sequence
  Description of Artificial Sequence: Synthetic oligonucleotide
uuaaauguuauaaaauuag

SEQ ID NO: 1180455 - RNA, 19 nt, Artificial Sequence
  Description of Artificial Sequence: Synthetic oligonucleotide
aaaaguuacucucaacagc

SEQ ID NO: 1180456 - RNA, 19 nt, Artificial Sequence
  Description of Artificial Sequence: Synthetic oligonucleotide
aacacaagaaauucaagcg

SEQ ID NO: 1180457 - RNA, 19 nt, Artificial Sequence
  Description of Artificial Sequence: Synthetic oligonucleotide
uaaaauuagcucaagaagc

SEQ ID NO: 1180458 - RNA, 19 nt, Artificial Sequence
  Description of Artificial Sequence: Synthetic oligonucleotide
auacaauugagguauaagc

SEQ ID NO: 1180459 - RNA, 19 nt, Artificial Sequence
  Description of Artificial Sequence: Synthetic oligonucleotide
auagguauaauauuuacag

SEQ ID NO: 1180460 - RNA, 19 nt, Artificial Sequence
  Description of Artificial Sequence: Synthetic oligonucleotide
uuguuuucaagcuacaugg

SEQ ID NO: 1180461 - RNA, 19 nt, Artificial Sequence
  Description of Artificial Sequence: Synthetic oligonucleotide
aauucuaacaacucaaaca

SEQ ID NO: 1180462 - RNA, 19 nt, Artificial Sequence
  Description of Artificial Sequence: Synthetic oligonucleotide
ugaaaauuuaagcagaggu

SEQ ID NO: 1180463 - RNA, 19 nt, Artificial Sequence
  Description of Artificial Sequence: Synthetic oligonucleotide
aauauaaguacuuccagca

SEQ ID NO: 1180464 - RNA, 19 nt, Artificial Sequence
  Description of Artificial Sequence: Synthetic oligonucleotide
aacaacucaaacaaugucc

SEQ ID NO: 1180465 - RNA, 19 nt, Artificial Sequence
  Description of Artificial Sequence: Synthetic oligonucleotide
aacaauuauuuuaagaggg

SEQ ID NO: 1180466 - RNA, 19 nt, Artificial Sequence
  Description of Artificial Sequence: Synthetic oligonucleotide
auaauaugaaguuugagga

SEQ ID NO: 1180467 - RNA, 19 nt, Artificial Sequence
  Description of Artificial Sequence: Synthetic oligonucleotide
aguuugaggaacuaucugc

SEQ ID NO: 1180468 - RNA, 19 nt, Artificial Sequence
  Description of Artificial Sequence: Synthetic oligonucleotide
aauaugaaguuugaggaac

SEQ ID NO: 1180469 - RNA, 19 nt, Artificial Sequence
  Description of Artificial Sequence: Synthetic oligonucleotide
aguaacacuauauacauga

SEQ ID NO: 1180470 - RNA, 19 nt, Artificial Sequence
  Description of Artificial Sequence: Synthetic oligonucleotide
uuaagggaaguucagacag

SEQ ID NO: 1180471 - RNA, 19 nt, Artificial Sequence
  Description of Artificial Sequence: Synthetic oligonucleotide
uaacaauuauuuuaagagg

SEQ ID NO: 1180472 - RNA, 19 nt, Artificial Sequence
  Description of Artificial Sequence: Synthetic oligonucleotide
aaaauuuaagcagagguca

SEQ ID NO: 1180473 - RNA, 19 nt, Artificial Sequence
  Description of Artificial Sequence: Synthetic oligonucleotide
aaucuuauaaauuucuuuu

SEQ ID NO: 1180474 - RNA, 19 nt, Artificial Sequence
  Description of Artificial Sequence: Synthetic oligonucleotide
uaaaacuauacacauuggc

SEQ ID NO: 1180475 - RNA, 19 nt, Artificial Sequence
  Description of Artificial Sequence: Synthetic oligonucleotide
ugcuuuauaauucacuaug

SEQ ID NO: 1180476 - RNA, 19 nt, Artificial Sequence
  Description of Artificial Sequence: Synthetic oligonucleotide
accguuaacaaguacaauc

SEQ ID NO: 1180477 - RNA, 19 nt, Artificial Sequence
  Description of Artificial Sequence: Synthetic oligonucleotide
agaaaacuauggcacaucc

SEQ ID NO: 1180478 - RNA, 19 nt, Artificial Sequence
  Description of Artificial Sequence: Synthetic oligonucleotide
aagugagguaucuauauug

SEQ ID NO: 1180479 - RNA, 19 nt, Artificial Sequence
  Description of Artificial Sequence: Synthetic oligonucleotide
aagacuguccuuuuaaaca

SEQ ID NO: 1180480 - RNA, 19 nt, Artificial Sequence
  Description of Artificial Sequence: Synthetic oligonucleotide
uuauuuuaagggaaguuca

SEQ ID NO: 1180481 - RNA, 19 nt, Artificial Sequence
  Description of Artificial Sequence: Synthetic oligonucleotide
acaaaauacccauauaugu

SEQ ID NO: 1180482 - RNA, 19 nt, Artificial Sequence
  Description of Artificial Sequence: Synthetic oligonucleotide
aaacuauacacauuggcaa

SEQ ID NO: 1180483 - RNA, 19 nt, Artificial Sequence
  Description of Artificial Sequence: Synthetic oligonucleotide
aaaacuauggcacauccuu

SEQ ID NO: 1180484 - RNA, 19 nt, Artificial Sequence
  Description of Artificial Sequence: Synthetic oligonucleotide
aaggguaauauauaaugca

SEQ ID NO: 1180485 - RNA, 19 nt, Artificial Sequence
  Description of Artificial Sequence: Synthetic oligonucleotide
uuuauuucacgugagguag

SEQ ID NO: 1180486 - RNA, 19 nt, Artificial Sequence
  Description of Artificial Sequence: Synthetic oligonucleotide
aagcgaaagaauauauucc

SEQ ID NO: 1180487 - RNA, 19 nt, Artificial Sequence
  Description of Artificial Sequence: Synthetic oligonucleotide
uguuggucgaaucuuuugg

SEQ ID NO: 1180488 - RNA, 19 nt, Artificial Sequence
  Description of Artificial Sequence: Synthetic oligonucleotide
uuucacgugagguagagga

SEQ ID NO: 1180489 - RNA, 19 nt, Artificial Sequence
  Description of Artificial Sequence: Synthetic oligonucleotide
uguaaacuaaguaaccaga

SEQ ID NO: 1180490 - RNA, 19 nt, Artificial Sequence
  Description of Artificial Sequence: Synthetic oligonucleotide
uaaaaguuacucucaacag

SEQ ID NO: 1180491 - RNA, 19 nt, Artificial Sequence
  Description of Artificial Sequence: Synthetic oligonucleotide
ucuuuuauacuaaacuaac

SEQ ID NO: 1180492 - RNA, 19 nt, Artificial Sequence
  Description of Artificial Sequence: Synthetic oligonucleotide
uaaaagccaucuaaguggg

SEQ ID NO: 1180493 - RNA, 19 nt, Artificial Sequence
  Description of Artificial Sequence: Synthetic oligonucleotide
caagaagcauaaaacaucc

SEQ ID NO: 1180494 - RNA, 19 nt, Artificial Sequence
  Description of Artificial Sequence: Synthetic oligonucleotide
guaacuaaaaguuacucuc

SEQ ID NO: 1180495 - RNA, 19 nt, Artificial Sequence
  Description of Artificial Sequence: Synthetic oligonucleotide
aagacuauuacacugccuu

SEQ ID NO: 1180496 - RNA, 19 nt, Artificial Sequence
  Description of Artificial Sequence: Synthetic oligonucleotide
aaaacuauacacauuggca

SEQ ID NO: 1180497 - RNA, 19 nt, Artificial Sequence
  Description of Artificial Sequence: Synthetic oligonucleotide
uuauauuugaucacuuccu

SEQ ID NO: 1180498 - RNA, 19 nt, Artificial Sequence
  Description of Artificial Sequence: Synthetic oligonucleotide
uauaaguacuuccagcaga

SEQ ID NO: 1180499 - RNA, 19 nt, Artificial Sequence
  Description of Artificial Sequence: Synthetic oligonucleotide
auaauugaagacuauuaca

SEQ ID NO: 1180500 - RNA, 19 nt, Artificial Sequence
  Description of Artificial Sequence: Synthetic oligonucleotide
aaaauacccauauauguuu

SEQ ID NO: 1180501 - RNA, 19 nt, Artificial Sequence
  Description of Artificial Sequence: Synthetic oligonucleotide
uuuuaagggaaguucagac

SEQ ID NO: 1180502 - RNA, 19 nt, Artificial Sequence
  Description of Artificial Sequence: Synthetic oligonucleotide
uaaacaagcuucaaauugu

SEQ ID NO: 1180503 - RNA, 19 nt, Artificial Sequence
  Description of Artificial Sequence: Synthetic oligonucleotide
aacacuauauacaugacau

SEQ ID NO: 1180504 - RNA, 19 nt, Artificial Sequence
  Description of Artificial Sequence: Synthetic oligonucleotide
aacuauggcacauccuuuc

SEQ ID NO: 1180505 - RNA, 19 nt, Artificial Sequence
  Description of Artificial Sequence: Synthetic oligonucleotide
uuuacagaauuucaauugu

SEQ ID NO: 1180506 - RNA, 19 nt, Artificial Sequence
  Description of Artificial Sequence: Synthetic oligonucleotide
aauacaauugagguauaag

SEQ ID NO: 1180507 - RNA, 19 nt, Artificial Sequence
  Description of Artificial Sequence: Synthetic oligonucleotide
ucauguuucaauaaauaua

SEQ ID NO: 1180508 - RNA, 19 nt, Artificial Sequence
  Description of Artificial Sequence: Synthetic oligonucleotide
aaguagacuaugcuaaacu

SEQ ID NO: 1180509 - RNA, 19 nt, Artificial Sequence
  Description of Artificial Sequence: Synthetic oligonucleotide
uagacuaugcuaaacuaug

SEQ ID NO: 1180510 - RNA, 19 nt, Artificial Sequence
  Description of Artificial Sequence: Synthetic oligonucleotide
gcauaaaacauccuuaucc

SEQ ID NO: 1180511 - RNA, 19 nt, Artificial Sequence
  Description of Artificial Sequence: Synthetic oligonucleotide
aacaguaacacuauauaca

SEQ ID NO: 1180512 - RNA, 19 nt, Artificial Sequence
  Description of Artificial Sequence: Synthetic oligonucleotide
uucaaauuguauuauguau

SEQ ID NO: 1180513 - RNA, 19 nt, Artificial Sequence
  Description of Artificial Sequence: Synthetic oligonucleotide
aaaguuacucucaacagca

SEQ ID NO: 1180514 - RNA, 19 nt, Artificial Sequence
  Description of Artificial Sequence: Synthetic oligonucleotide
caagcgaaagaauauauuc

SEQ ID NO: 1180515 - RNA, 19 nt, Artificial Sequence
  Description of Artificial Sequence: Synthetic oligonucleotide
agguauaauauuuacaguu

SEQ ID NO: 1180516 - RNA, 19 nt, Artificial Sequence
  Description of Artificial Sequence: Synthetic oligonucleotide
uugagguauaagcuaagag

SEQ ID NO: 1180517 - RNA, 19 nt, Artificial Sequence
  Description of Artificial Sequence: Synthetic oligonucleotide
uuuauacuaaacuaacuuu

SEQ ID NO: 1180518 - RNA, 19 nt, Artificial Sequence
  Description of Artificial Sequence: Synthetic oligonucleotide
acuaugcuaaacuauguca

SEQ ID NO: 1180519 - RNA, 19 nt, Artificial Sequence
  Description of Artificial Sequence: Synthetic oligonucleotide
auaucucaguuacacaagg

SEQ ID NO: 1180520 - RNA, 19 nt, Artificial Sequence
  Description of Artificial Sequence: Synthetic oligonucleotide
aacagcaauagguauaaua

SEQ ID NO: 1180521 - RNA, 19 nt, Artificial Sequence
  Description of Artificial Sequence: Synthetic oligonucleotide
ugaaguuugaggaacuauc

SEQ ID NO: 1180522 - RNA, 19 nt, Artificial Sequence
  Description of Artificial Sequence: Synthetic oligonucleotide
uaaacuaugucaugaggca

SEQ ID NO: 1180523 - RNA, 19 nt, Artificial Sequence
  Description of Artificial Sequence: Synthetic oligonucleotide
uauaauucacuauguacac

SEQ ID NO: 1180524 - RNA, 19 nt, Artificial Sequence
  Description of Artificial Sequence: Synthetic oligonucleotide
uaacacuauauacaugaca

SEQ ID NO: 1180525 - RNA, 19 nt, Artificial Sequence
  Description of Artificial Sequence: Synthetic oligonucleotide
auaaacagguuauauauua

SEQ ID NO: 1180526 - RNA, 19 nt, Artificial Sequence
  Description of Artificial Sequence: Synthetic oligonucleotide
uauuuuaagggaaguucag

SEQ ID NO: 1180527 - RNA, 19 nt, Artificial Sequence
  Description of Artificial Sequence: Synthetic oligonucleotide
ugagaauuaagugugcugu

SEQ ID NO: 1180528 - RNA, 19 nt, Artificial Sequence
  Description of Artificial Sequence: Synthetic oligonucleotide
cacuauuuuguuuucuggg

SEQ ID NO: 1180529 - RNA, 19 nt, Artificial Sequence
  Description of Artificial Sequence: Synthetic oligonucleotide
gaagggaccauucacuuac

SEQ ID NO: 1180530 - RNA, 19 nt, Artificial Sequence
  Description of Artificial Sequence: Synthetic oligonucleotide
uaccacaagaccuaacacc

SEQ ID NO: 1180531 - RNA, 19 nt, Artificial Sequence
  Description of Artificial Sequence: Synthetic oligonucleotide
aacugaagaauaauugaag

SEQ ID NO: 1180532 - RNA, 19 nt, Artificial Sequence
  Description of Artificial Sequence: Synthetic oligonucleotide
caaggguaauauauaaugc

SEQ ID NO: 1180533 - RNA, 19 nt, Artificial Sequence
  Description of Artificial Sequence: Synthetic oligonucleotide
ucaagccaaaucuaaguug

SEQ ID NO: 1180534 - RNA, 19 nt, Artificial Sequence
  Description of Artificial Sequence: Synthetic oligonucleotide
aacuuuaagauagcaacca

SEQ ID NO: 1180535 - RNA, 19 nt, Artificial Sequence
  Description of Artificial Sequence: Synthetic oligonucleotide
uucauaucauguauugcug

SEQ ID NO: 1180536 - RNA, 19 nt, Artificial Sequence
  Description of Artificial Sequence: Synthetic oligonucleotide
ugugucauguaaugcaacc

SEQ ID NO: 1180537 - RNA, 19 nt, Artificial Sequence
  Description of Artificial Sequence: Synthetic oligonucleotide
agaauuaagugugcugugc

SEQ ID NO: 1180538 - RNA, 19 nt, Artificial Sequence
  Description of Artificial Sequence: Synthetic oligonucleotide
guacaaggcaugaaaaugg

SEQ ID NO: 1180539 - RNA, 19 nt, Artificial Sequence
  Description of Artificial Sequence: Synthetic oligonucleotide
uaagcuaagagcacaguau

SEQ ID NO: 1180540 - RNA, 19 nt, Artificial Sequence
  Description of Artificial Sequence: Synthetic oligonucleotide
ucugcuuuauaauucacua

SEQ ID NO: 1180541 - RNA, 19 nt, Artificial Sequence
  Description of Artificial Sequence: Synthetic oligonucleotide
acuaaaaguuacucucaac

SEQ ID NO: 1180542 - RNA, 19 nt, Artificial Sequence
  Description of Artificial Sequence: Synthetic oligonucleotide
uaccaguugaauuauguuc

SEQ ID NO: 1180543 - RNA, 19 nt, Artificial Sequence
  Description of Artificial Sequence: Synthetic oligonucleotide
agcgaaagaauauauucca

SEQ ID NO: 1180544 - RNA, 19 nt, Artificial Sequence
  Description of Artificial Sequence: Synthetic oligonucleotide
uuuaagggaaguucagaca

SEQ ID NO: 1180545 - RNA, 19 nt, Artificial Sequence
  Description of Artificial Sequence: Synthetic oligonucleotide
auguauugcugauugcuuc

SEQ ID NO: 1180546 - RNA, 19 nt, Artificial Sequence
  Description of Artificial Sequence: Synthetic oligonucleotide
cuucaguaguugcagaagg

SEQ ID NO: 1180547 - RNA, 19 nt, Artificial Sequence
  Description of Artificial Sequence: Synthetic oligonucleotide
acaguaacacuauauacau

SEQ ID NO: 1180548 - RNA, 19 nt, Artificial Sequence
  Description of Artificial Sequence: Synthetic oligonucleotide
uaucucaguuacacaaggg

SEQ ID NO: 1180549 - RNA, 19 nt, Artificial Sequence
  Description of Artificial Sequence: Synthetic oligonucleotide
uuucuaaacaagcuucaaa

SEQ ID NO: 1180550 - RNA, 19 nt, Artificial Sequence
  Description of Artificial Sequence: Synthetic oligonucleotide
aaauuuaagcagaggucac

SEQ ID NO: 1180551 - RNA, 19 nt, Artificial Sequence
  Description of Artificial Sequence: Synthetic oligonucleotide
acuuccuaauuccaaaaca

SEQ ID NO: 1180552 - RNA, 19 nt, Artificial Sequence
  Description of Artificial Sequence: Synthetic oligonucleotide
auauuuaucacaaauucua

SEQ ID NO: 1180553 - RNA, 19 nt, Artificial Sequence
  Description of Artificial Sequence: Synthetic oligonucleotide
uguauugcugauugcuucc

SEQ ID NO: 1180554 - RNA, 19 nt, Artificial Sequence
  Description of Artificial Sequence: Synthetic oligonucleotide
aguacuuccagcagaaaag

SEQ ID NO: 1180555 - RNA, 19 nt, Artificial Sequence
  Description of Artificial Sequence: Synthetic oligonucleotide
aaagaagcaugcauaaagu

SEQ ID NO: 1180556 - RNA, 19 nt, Artificial Sequence
  Description of Artificial Sequence: Synthetic oligonucleotide
aaaagcuuuuauugggaau

SEQ ID NO: 1180557 - RNA, 19 nt, Artificial Sequence
  Description of Artificial Sequence: Synthetic oligonucleotide
ugucauguaaugcaaccaa

SEQ ID NO: 1180558 - RNA, 19 nt, Artificial Sequence
  Description of Artificial Sequence: Synthetic oligonucleotide
aucucaguuacacaagggu

SEQ ID NO: 1180559 - RNA, 19 nt, Artificial Sequence
  Description of Artificial Sequence: Synthetic oligonucleotide
auauagucaauuugcuuca

SEQ ID NO: 1180560 - RNA, 19 nt, Artificial Sequence
  Description of Artificial Sequence: Synthetic oligonucleotide
ucauguauugcugauugcu

SEQ ID NO: 1180561 - RNA, 19 nt, Artificial Sequence
  Description of Artificial Sequence: Synthetic oligonucleotide
acuauguacacaugaauuu

SEQ ID NO: 1180562 - RNA, 19 nt, Artificial Sequence
  Description of Artificial Sequence: Synthetic oligonucleotide
uagcucaagaagcauaaaa

SEQ ID NO: 1180563 - RNA, 19 nt, Artificial Sequence
  Description of Artificial Sequence: Synthetic oligonucleotide
auauaaguacuuccagcag

SEQ ID NO: 1180564 - RNA, 19 nt, Artificial Sequence
  Description of Artificial Sequence: Synthetic oligonucleotide
ggaccauucacuuacugcc

SEQ ID NO: 1180565 - RNA, 19 nt, Artificial Sequence
  Description of Artificial Sequence: Synthetic oligonucleotide
aacuaaaaguuacucucaa

SEQ ID NO: 1180566 - RNA, 19 nt, Artificial Sequence
  Description of Artificial Sequence: Synthetic oligonucleotide
ugcuuaaguaucuuacacu

SEQ ID NO: 1180567 - RNA, 19 nt, Artificial Sequence
  Description of Artificial Sequence: Synthetic oligonucleotide
aacuauacacauuggcaaa

SEQ ID NO: 1180568 - RNA, 19 nt, Artificial Sequence
  Description of Artificial Sequence: Synthetic oligonucleotide
agugaacuuaccacaagac

SEQ ID NO: 1180569 - RNA, 19 nt, Artificial Sequence
  Description of Artificial Sequence: Synthetic oligonucleotide
uuaaagcucaagccaaauc

SEQ ID NO: 1180570 - RNA, 19 nt, Artificial Sequence
  Description of Artificial Sequence: Synthetic oligonucleotide
gugaacuuaccacaagacc

SEQ ID NO: 1180571 - RNA, 19 nt, Artificial Sequence
  Description of Artificial Sequence: Synthetic oligonucleotide
uucaagcgaaagaauauau

SEQ ID NO: 1180572 - RNA, 19 nt, Artificial Sequence
  Description of Artificial Sequence: Synthetic oligonucleotide
gguaauauauaaugcagca

SEQ ID NO: 1180573 - RNA, 19 nt, Artificial Sequence
  Description of Artificial Sequence: Synthetic oligonucleotide
auggaaaccguuaacaagu

SEQ ID NO: 1180574 - RNA, 19 nt, Artificial Sequence
  Description of Artificial Sequence: Synthetic oligonucleotide
uuucaagcuacauggugca

SEQ ID NO: 1180575 - RNA, 19 nt, Artificial Sequence
  Description of Artificial Sequence: Synthetic oligonucleotide
acaaaauacaauugaggua

SEQ ID NO: 1180576 - RNA, 19 nt, Artificial Sequence
  Description of Artificial Sequence: Synthetic oligonucleotide
uuaagaggguguuuucaug

SEQ ID NO: 1180577 - RNA, 19 nt, Artificial Sequence
  Description of Artificial Sequence: Synthetic oligonucleotide
auuuauuucacgugaggua

SEQ ID NO: 1180578 - RNA, 19 nt, Artificial Sequence
  Description of Artificial Sequence: Synthetic oligonucleotide
acuuacugccuucacaggu

SEQ ID NO: 1180579 - RNA, 19 nt, Artificial Sequence
  Description of Artificial Sequence: Synthetic oligonucleotide
ugcuaaacuaugucaugag

SEQ ID NO: 1180580 - RNA, 19 nt, Artificial Sequence
  Description of Artificial Sequence: Synthetic oligonucleotide
acaauugagguauaagcua

SEQ ID NO: 1180581 - RNA, 19 nt, Artificial Sequence
  Description of Artificial Sequence: Synthetic oligonucleotide
aaaacauccuuauccucaa

SEQ ID NO: 1180582 - RNA, 19 nt, Artificial Sequence
  Description of Artificial Sequence: Synthetic oligonucleotide
ucucaguuacacaagggua

SEQ ID NO: 1180583 - RNA, 19 nt, Artificial Sequence
  Description of Artificial Sequence: Synthetic oligonucleotide
uaaacuaaguaaccagaua

SEQ ID NO: 1180584 - RNA, 19 nt, Artificial Sequence
  Description of Artificial Sequence: Synthetic oligonucleotide
aagaggguguuuucaugag

SEQ ID NO: 1180585 - RNA, 19 nt, Artificial Sequence
  Description of Artificial Sequence: Synthetic oligonucleotide
uaaguaucuuacacuagaa

SEQ ID NO: 1180586 - RNA, 19 nt, Artificial Sequence
  Description of Artificial Sequence: Synthetic oligonucleotide
augagaauuaagugugcug

SEQ ID NO: 1180587 - RNA, 19 nt, Artificial Sequence
  Description of Artificial Sequence: Synthetic oligonucleotide
uuucaccuacuucagucug

SEQ ID NO: 1180588 - RNA, 19 nt, Artificial Sequence
  Description of Artificial Sequence: Synthetic oligonucleotide
uuuaagaggguguuuucau

SEQ ID NO: 1180589 - RNA, 19 nt, Artificial Sequence
  Description of Artificial Sequence: Synthetic oligonucleotide
aucauguauugcugauugc

SEQ ID NO: 1180590 - RNA, 19 nt, Artificial Sequence
  Description of Artificial Sequence: Synthetic oligonucleotide
aggguaauauauaaugcag

SEQ ID NO: 1180591 - RNA, 19 nt, Artificial Sequence
  Description of Artificial Sequence: Synthetic oligonucleotide
uuaccacaagaccuaacac

SEQ ID NO: 1180592 - RNA, 19 nt, Artificial Sequence
  Description of Artificial Sequence: Synthetic oligonucleotide
cuuaccacaagaccuaaca

SEQ ID NO: 1180593 - RNA, 19 nt, Artificial Sequence
  Description of Artificial Sequence: Synthetic oligonucleotide
auaagcuaagagcacagua

SEQ ID NO: 1180594 - RNA, 19 nt, Artificial Sequence
  Description of Artificial Sequence: Synthetic oligonucleotide
gauagcaaccagcacacaa

SEQ ID NO: 1180595 - RNA, 19 nt, Artificial Sequence
  Description of Artificial Sequence: Synthetic oligonucleotide
cagguuauauauuaaaugu

SEQ ID NO: 1180596 - RNA, 19 nt, Artificial Sequence
  Description of Artificial Sequence: Synthetic oligonucleotide
gaauaauugaagacuauua

SEQ ID NO: 1180597 - RNA, 19 nt, Artificial Sequence
  Description of Artificial Sequence: Synthetic oligonucleotide
aaucuaaguuguuggucga

SEQ ID NO: 1180598 - RNA, 19 nt, Artificial Sequence
  Description of Artificial Sequence: Synthetic oligonucleotide
uccaauaguggaaaugcuu

SEQ ID NO: 1180599 - RNA, 19 nt, Artificial Sequence
  Description of Artificial Sequence: Synthetic oligonucleotide
ucugcuugccuagugaacu

SEQ ID NO: 1180600 - RNA, 19 nt, Artificial Sequence
  Description of Artificial Sequence: Synthetic oligonucleotide
ucuaaacaagcuucaaauu

SEQ ID NO: 1180601 - RNA, 19 nt, Artificial Sequence
  Description of Artificial Sequence: Synthetic oligonucleotide
gaagaauaauugaagacua

SEQ ID NO: 1180602 - RNA, 19 nt, Artificial Sequence
  Description of Artificial Sequence: Synthetic oligonucleotide
auguccuagauuuaacaau

SEQ ID NO: 1180603 - RNA, 19 nt, Artificial Sequence
  Description of Artificial Sequence: Synthetic oligonucleotide
uacacaaggguaauauaua

SEQ ID NO: 1180604 - RNA, 19 nt, Artificial Sequence
  Description of Artificial Sequence: Synthetic oligonucleotide
uccuagauuuaacaauuau

SEQ ID NO: 1180605 - RNA, 19 nt, Artificial Sequence
  Description of Artificial Sequence: Synthetic oligonucleotide
aguuacacaaggguaauau

SEQ ID NO: 1180606 - RNA, 19 nt, Artificial Sequence
  Description of Artificial Sequence: Synthetic oligonucleotide
gacuaugcuaaacuauguc

SEQ ID NO: 1180607 - RNA, 19 nt, Artificial Sequence
  Description of Artificial Sequence: Synthetic oligonucleotide
gaacuaucugcuugccuag

SEQ ID NO: 1180608 - RNA, 19 nt, Artificial Sequence
  Description of Artificial Sequence: Synthetic oligonucleotide
accaguugaauuauguuca

SEQ ID NO: 1180609 - RNA, 19 nt, Artificial Sequence
  Description of Artificial Sequence: Synthetic oligonucleotide
ucaugagaauuaagugugc

SEQ ID NO: 1180610 - RNA, 19 nt, Artificial Sequence
  Description of Artificial Sequence: Synthetic oligonucleotide
auaaaacuauacacauugg

SEQ ID NO: 1180611 - RNA, 19 nt, Artificial Sequence
  Description of Artificial Sequence: Synthetic oligonucleotide
auuaccaguugaauuaugu

SEQ ID NO: 1180612 - RNA, 19 nt, Artificial Sequence
  Description of Artificial Sequence: Synthetic oligonucleotide
agacuguccuuuuaaacaa

SEQ ID NO: 1180613 - RNA, 19 nt, Artificial Sequence
  Description of Artificial Sequence: Synthetic oligonucleotide
agcaauagguauaauauuu

SEQ ID NO: 1180614 - RNA, 19 nt, Artificial Sequence
  Description of Artificial Sequence: Synthetic oligonucleotide
gcuaaacuaugucaugagg

SEQ ID NO: 1180615 - RNA, 19 nt, Artificial Sequence
  Description of Artificial Sequence: Synthetic oligonucleotide
uauggcacauccuuucauc

SEQ ID NO: 1180616 - RNA, 19 nt, Artificial Sequence
  Description of Artificial Sequence: Synthetic oligonucleotide
aaaaucuuauaaauuucuu

SEQ ID NO: 1180617 - RNA, 19 nt, Artificial Sequence
  Description of Artificial Sequence: Synthetic oligonucleotide
gagaauuaagugugcugug

SEQ ID NO: 1180618 - RNA, 19 nt, Artificial Sequence
  Description of Artificial Sequence: Synthetic oligonucleotide
ucaagcgaaagaauauauu

SEQ ID NO: 1180619 - RNA, 19 nt, Artificial Sequence
  Description of Artificial Sequence: Synthetic oligonucleotide
aaaccguuaacaaguacaa

SEQ ID NO: 1180620 - RNA, 19 nt, Artificial Sequence
  Description of Artificial Sequence: Synthetic oligonucleotide
cuaaaggcaacuauauuua

SEQ ID NO: 1180621 - RNA, 19 nt, Artificial Sequence
  Description of Artificial Sequence: Synthetic oligonucleotide
accuacuucagucugcuuu

SEQ ID NO: 1180622 - RNA, 19 nt, Artificial Sequence
  Description of Artificial Sequence: Synthetic oligonucleotide
acuaaguaaccagauagau

SEQ ID NO: 1180623 - RNA, 19 nt, Artificial Sequence
  Description of Artificial Sequence: Synthetic oligonucleotide
aauuagcucaagaagcaua

SEQ ID NO: 1180624 - RNA, 19 nt, Artificial Sequence
  Description of Artificial Sequence: Synthetic oligonucleotide
uaaugcagcaguucauauc

SEQ ID NO: 1180625 - RNA, 19 nt, Artificial Sequence
  Description of Artificial Sequence: Synthetic oligonucleotide
gguauaauauuuacaguug

SEQ ID NO: 1180626 - RNA, 19 nt, Artificial Sequence
  Description of Artificial Sequence: Synthetic oligonucleotide
auauuaaagcucaagccaa

SEQ ID NO: 1180627 - RNA, 19 nt, Artificial Sequence
  Description of Artificial Sequence: Synthetic oligonucleotide
uaucauccacaaucuauac

SEQ ID NO: 1180628 - RNA, 19 nt, Artificial Sequence
  Description of Artificial Sequence: Synthetic oligonucleotide
ggugguuuuaaacauaaua

SEQ ID NO: 1180629 - RNA, 19 nt, Artificial Sequence
  Description of Artificial Sequence: Synthetic oligonucleotide
ccguuaacaaguacaaucc

SEQ ID NO: 1180630 - RNA, 19 nt, Artificial Sequence
  Description of Artificial Sequence: Synthetic oligonucleotide
uaguggaaaugcuuaagua

SEQ ID NO: 1180631 - RNA, 19 nt, Artificial Sequence
  Description of Artificial Sequence: Synthetic oligonucleotide
uuguuggucgaaucuuuug

SEQ ID NO: 1180632 - RNA, 19 nt, Artificial Sequence
  Description of Artificial Sequence: Synthetic oligonucleotide
aauugagguauaagcuaag

SEQ ID NO: 1180633 - RNA, 19 nt, Artificial Sequence
  Description of Artificial Sequence: Synthetic oligonucleotide
aggcaacuauauuuaucac

SEQ ID NO: 1180634 - RNA, 19 nt, Artificial Sequence
  Description of Artificial Sequence: Synthetic oligonucleotide
ucacuuugggaguuuuaca

SEQ ID NO: 1180635 - RNA, 19 nt, Artificial Sequence
  Description of Artificial Sequence: Synthetic oligonucleotide
uucaccuacuucagucugc

SEQ ID NO: 1180636 - RNA, 19 nt, Artificial Sequence
  Description of Artificial Sequence: Synthetic oligonucleotide
guaaccagauagaugaauc

SEQ ID NO: 1180637 - RNA, 19 nt, Artificial Sequence
  Description of Artificial Sequence: Synthetic oligonucleotide
aaacacuauuuuguuuucu

SEQ ID NO: 1180638 - RNA, 19 nt, Artificial Sequence
  Description of Artificial Sequence: Synthetic oligonucleotide
guauaagcuaagagcacag

SEQ ID NO: 1180639 - RNA, 19 nt, Artificial Sequence
  Description of Artificial Sequence: Synthetic oligonucleotide
caaaauuuguaaacuaagu

SEQ ID NO: 1180640 - RNA, 19 nt, Artificial Sequence
  Description of Artificial Sequence: Synthetic oligonucleotide
auuuuaagggaaguucaga

SEQ ID NO: 1180641 - RNA, 19 nt, Artificial Sequence
  Description of Artificial Sequence: Synthetic oligonucleotide
ccagcagaaaagcuaaagg

SEQ ID NO: 1180642 - RNA, 19 nt, Artificial Sequence
  Description of Artificial Sequence: Synthetic oligonucleotide
ucacgugagguagaggaca

SEQ ID NO: 1180643 - RNA, 19 nt, Artificial Sequence
  Description of Artificial Sequence: Synthetic oligonucleotide
uuauuucacgugagguaga

SEQ ID NO: 1180644 - RNA, 19 nt, Artificial Sequence
  Description of Artificial Sequence: Synthetic oligonucleotide
caauugagguauaagcuaa

SEQ ID NO: 1180645 - RNA, 19 nt, Artificial Sequence
  Description of Artificial Sequence: Synthetic oligonucleotide
cacaagaaauucaagcgaa

SEQ ID NO: 1180646 - RNA, 19 nt, Artificial Sequence
  Description of Artificial Sequence: Synthetic oligonucleotide
ugcuucaguaguugcagaa

SEQ ID NO: 1180647 - RNA, 19 nt, Artificial Sequence
  Description of Artificial Sequence: Synthetic oligonucleotide
augcuaaacuaugucauga

SEQ ID NO: 1180648 - RNA, 19 nt, Artificial Sequence
  Description of Artificial Sequence: Synthetic oligonucleotide
caaaucuaaguuguugguc

SEQ ID NO: 1180649 - RNA, 19 nt, Artificial Sequence
  Description of Artificial Sequence: Synthetic oligonucleotide
gaaguagacuaugcuaaac

SEQ ID NO: 1180650 - RNA, 19 nt, Artificial Sequence
  Description of Artificial Sequence: Synthetic oligonucleotide
auaaugcagcaguucauau

SEQ ID NO: 1180651 - RNA, 19 nt, Artificial Sequence
  Description of Artificial Sequence: Synthetic oligonucleotide
aaacuaugucaugaggcaa

SEQ ID NO: 1180652 - RNA, 19 nt, Artificial Sequence
  Description of Artificial Sequence: Synthetic oligonucleotide
aagggaaguucagacagaa

SEQ ID NO: 1180653 - RNA, 19 nt, Artificial Sequence
  Description of Artificial Sequence: Synthetic oligonucleotide
acuaucugcuugccuagug

SEQ ID NO: 1180654 - RNA, 19 nt, Artificial Sequence
  Description of Artificial Sequence: Synthetic oligonucleotide
uuaccaguugaauuauguu

SEQ ID NO: 1180655 - RNA, 19 nt, Artificial Sequence
  Description of Artificial Sequence: Synthetic oligonucleotide
guagaggacaguuuugugu

SEQ ID NO: 1180656 - RNA, 19 nt, Artificial Sequence
  Description of Artificial Sequence: Synthetic oligonucleotide
cauggugcaauguaacuaa

SEQ ID NO: 1180657 - RNA, 19 nt, Artificial Sequence
  Description of Artificial Sequence: Synthetic oligonucleotide
guugaauuauguucaauau

SEQ ID NO: 1180658 - RNA, 19 nt, Artificial Sequence
  Description of Artificial Sequence: Synthetic oligonucleotide
caucuaagugggaagauua

SEQ ID NO: 1180659 - RNA, 19 nt, Artificial Sequence
  Description of Artificial Sequence: Synthetic oligonucleotide
uggugcaauguaacuaaaa

SEQ ID NO: 1180660 - RNA, 19 nt, Artificial Sequence
  Description of Artificial Sequence: Synthetic oligonucleotide
uaagggaaguucagacaga

SEQ ID NO: 1180661 - RNA, 19 nt, Artificial Sequence
  Description of Artificial Sequence: Synthetic oligonucleotide
ugauugcuuccauggaaac

SEQ ID NO: 1180662 - RNA, 19 nt, Artificial Sequence
  Description of Artificial Sequence: Synthetic oligonucleotide
auuuucaagugagguaucu

SEQ ID NO: 1180663 - RNA, 19 nt, Artificial Sequence
  Description of Artificial Sequence: Synthetic oligonucleotide
gaauuaagugugcugugcu

SEQ ID NO: 1180664 - RNA, 19 nt, Artificial Sequence
  Description of Artificial Sequence: Synthetic oligonucleotide
ggguaauauauaaugcagc

SEQ ID NO: 1180665 - RNA, 19 nt, Artificial Sequence
  Description of Artificial Sequence: Synthetic oligonucleotide
cacuuccuaauuccaaaac

SEQ ID NO: 1180666 - RNA, 19 nt, Artificial Sequence
  Description of Artificial Sequence: Synthetic oligonucleotide
auaucauccacaaucuaua

SEQ ID NO: 1180667 - RNA, 19 nt, Artificial Sequence
  Description of Artificial Sequence: Synthetic oligonucleotide
uugcagaagggaccauuca

SEQ ID NO: 1180668 - RNA, 19 nt, Artificial Sequence
  Description of Artificial Sequence: Synthetic oligonucleotide
agguuagaaacugaagaau

SEQ ID NO: 1180669 - RNA, 19 nt, Artificial Sequence
  Description of Artificial Sequence: Synthetic oligonucleotide
agguauaagcuaagagcac

SEQ ID NO: 1180670 - RNA, 19 nt, Artificial Sequence
  Description of Artificial Sequence: Synthetic oligonucleotide
aaagcucaagccaaaucua

SEQ ID NO: 1180671 - RNA, 19 nt, Artificial Sequence
  Description of Artificial Sequence: Synthetic oligonucleotide
auugagguauaagcuaaga

SEQ ID NO: 1180672 - RNA, 19 nt, Artificial Sequence
  Description of Artificial Sequence: Synthetic oligonucleotide
acuauggcacauccuuuca

SEQ ID NO: 1180673 - RNA, 19 nt, Artificial Sequence
  Description of Artificial Sequence: Synthetic oligonucleotide
ccaauauaaguacuuccag

SEQ ID NO: 1180674 - RNA, 19 nt, Artificial Sequence
  Description of Artificial Sequence: Synthetic oligonucleotide
acuauuacacugccuuaaa

SEQ ID NO: 1180675 - RNA, 19 nt, Artificial Sequence
  Description of Artificial Sequence: Synthetic oligonucleotide
aguaaccagauagaugaau

SEQ ID NO: 1180676 - RNA, 19 nt, Artificial Sequence
  Description of Artificial Sequence: Synthetic oligonucleotide
gggaccauucacuuacugc

SEQ ID NO: 1180677 - RNA, 19 nt, Artificial Sequence
  Description of Artificial Sequence: Synthetic oligonucleotide
cuuuugguguucaaagucu

SEQ ID NO: 1180678 - RNA, 19 nt, Artificial Sequence
  Description of Artificial Sequence: Synthetic oligonucleotide
gaaguuugaggaacuaucu

SEQ ID NO: 1180679 - RNA, 19 nt, Artificial Sequence
  Description of Artificial Sequence: Synthetic oligonucleotide
gacuauuacacugccuuaa

SEQ ID NO: 1180680 - RNA, 19 nt, Artificial Sequence
  Description of Artificial Sequence: Synthetic oligonucleotide
aguacaauccaaacuguuu

SEQ ID NO: 1180681 - RNA, 19 nt, Artificial Sequence
  Description of Artificial Sequence: Synthetic oligonucleotide
uccuuucaucuucugggaa

SEQ ID NO: 1180682 - RNA, 19 nt, Artificial Sequence
  Description of Artificial Sequence: Synthetic oligonucleotide
cuaugcuaaacuaugucau

SEQ ID NO: 1180683 - RNA, 19 nt, Artificial Sequence
  Description of Artificial Sequence: Synthetic oligonucleotide
agguaucuauauugaagaa

SEQ ID NO: 1180684 - RNA, 19 nt, Artificial Sequence
  Description of Artificial Sequence: Synthetic oligonucleotide
auugccaauauaaguacuu

SEQ ID NO: 1180685 - RNA, 19 nt, Artificial Sequence
  Description of Artificial Sequence: Synthetic oligonucleotide
auucaagcgaaagaauaua

SEQ ID NO: 1180686 - RNA, 19 nt, Artificial Sequence
  Description of Artificial Sequence: Synthetic oligonucleotide
uuuaagcagaggucacuuu

SEQ ID NO: 1180687 - RNA, 19 nt, Artificial Sequence
  Description of Artificial Sequence: Synthetic oligonucleotide
cugauugcuuccauggaaa

SEQ ID NO: 1180688 - RNA, 19 nt, Artificial Sequence
  Description of Artificial Sequence: Synthetic oligonucleotide
acuauacacauuggcaaaa

SEQ ID NO: 1180689 - RNA, 19 nt, Artificial Sequence
  Description of Artificial Sequence: Synthetic oligonucleotide
agguuauauauuaaauguu

SEQ ID NO: 1180690 - RNA, 19 nt, Artificial Sequence
  Description of Artificial Sequence: Synthetic oligonucleotide
cacuuacugccuucacagg

SEQ ID NO: 1180691 - RNA, 19 nt, Artificial Sequence
  Description of Artificial Sequence: Synthetic oligonucleotide
auagcaaccagcacacaaa

SEQ ID NO: 1180692 - RNA, 19 nt, Artificial Sequence
  Description of Artificial Sequence: Synthetic oligonucleotide
agagcacaguaugucaugu

SEQ ID NO: 1180693 - RNA, 19 nt, Artificial Sequence
  Description of Artificial Sequence: Synthetic oligonucleotide
agucugcuuuauaauucac

SEQ ID NO: 1180694 - RNA, 19 nt, Artificial Sequence
  Description of Artificial Sequence: Synthetic oligonucleotide
guaaugcaaccaaccacag

SEQ ID NO: 1180695 - RNA, 19 nt, Artificial Sequence
  Description of Artificial Sequence: Synthetic oligonucleotide
ucaccuacuucagucugcu

SEQ ID NO: 1180696 - RNA, 19 nt, Artificial Sequence
  Description of Artificial Sequence: Synthetic oligonucleotide
uuugaggaacuaucugcuu

SEQ ID NO: 1180697 - RNA, 19 nt, Artificial Sequence
  Description of Artificial Sequence: Synthetic oligonucleotide
aagcuuuuauugggaauau

SEQ ID NO: 1180698 - RNA, 19 nt, Artificial Sequence
  Description of Artificial Sequence: Synthetic oligonucleotide
agcucaagccaaaucuaag

SEQ ID NO: 1180699 - RNA, 19 nt, Artificial Sequence
  Description of Artificial Sequence: Synthetic oligonucleotide
uggaaaccguuaacaagua

SEQ ID NO: 1180700 - RNA, 19 nt, Artificial Sequence
  Description of Artificial Sequence: Synthetic oligonucleotide
gguaucuauauugaagaaa

SEQ ID NO: 1180701 - RNA, 19 nt, Artificial Sequence
  Description of Artificial Sequence: Synthetic oligonucleotide
auuucacgugagguagagg

SEQ ID NO: 1180702 - RNA, 19 nt, Artificial Sequence
  Description of Artificial Sequence: Synthetic oligonucleotide
agggaccauucacuuacug

SEQ ID NO: 1180703 - RNA, 19 nt, Artificial Sequence
  Description of Artificial Sequence: Synthetic oligonucleotide
ucaguuacacaaggguaau

SEQ ID NO: 1180704 - RNA, 19 nt, Artificial Sequence
  Description of Artificial Sequence: Synthetic oligonucleotide
aagugugcugugcuuucuu

SEQ ID NO: 1180705 - RNA, 19 nt, Artificial Sequence
  Description of Artificial Sequence: Synthetic oligonucleotide
acacuauauacaugacauu

SEQ ID NO: 1180706 - RNA, 19 nt, Artificial Sequence
  Description of Artificial Sequence: Synthetic oligonucleotide
aaacuauggcacauccuuu

SEQ ID NO: 1180707 - RNA, 19 nt, Artificial Sequence
  Description of Artificial Sequence: Synthetic oligonucleotide
uugcuucaguaguugcaga

SEQ ID NO: 1180708 - RNA, 19 nt, Artificial Sequence
  Description of Artificial Sequence: Synthetic oligonucleotide
agcuaaaggcaacuauauu

SEQ ID NO: 1180709 - RNA, 19 nt, Artificial Sequence
  Description of Artificial Sequence: Synthetic oligonucleotide
gccaauauaaguacuucca

SEQ ID NO: 1180710 - RNA, 19 nt, Artificial Sequence
  Description of Artificial Sequence: Synthetic oligonucleotide
aaacauccuuauccucaaa

SEQ ID NO: 1180711 - RNA, 19 nt, Artificial Sequence
  Description of Artificial Sequence: Synthetic oligonucleotide
agacuaugcuaaacuaugu

SEQ ID NO: 1180712 - RNA, 19 nt, Artificial Sequence
  Description of Artificial Sequence: Synthetic oligonucleotide
gguuagaaacugaagaaua

SEQ ID NO: 1180713 - RNA, 19 nt, Artificial Sequence
  Description of Artificial Sequence: Synthetic oligonucleotide
caauaguggaaaugcuuaa

SEQ ID NO: 1180714 - RNA, 19 nt, Artificial Sequence
  Description of Artificial Sequence: Synthetic oligonucleotide
guaacacuauauacaugac

SEQ ID NO: 1180715 - RNA, 19 nt, Artificial Sequence
  Description of Artificial Sequence: Synthetic oligonucleotide
gaacuuaccacaagaccua

SEQ ID NO: 1180716 - RNA, 19 nt, Artificial Sequence
  Description of Artificial Sequence: Synthetic oligonucleotide
cuuccauggaaaccguuaa

SEQ ID NO: 1180717 - RNA, 19 nt, Artificial Sequence
  Description of Artificial Sequence: Synthetic oligonucleotide
uuuguuuucugggcuuaau

SEQ ID NO: 1180718 - RNA, 19 nt, Artificial Sequence
  Description of Artificial Sequence: Synthetic oligonucleotide
agacuauuacacugccuua

SEQ ID NO: 1180719 - RNA, 19 nt, Artificial Sequence
  Description of Artificial Sequence: Synthetic oligonucleotide
cacuauauacaugacauuu

SEQ ID NO: 1180720 - RNA, 19 nt, Artificial Sequence
  Description of Artificial Sequence: Synthetic oligonucleotide
aacuuaccacaagaccuaa

SEQ ID NO: 1180721 - RNA, 19 nt, Artificial Sequence
  Description of Artificial Sequence: Synthetic oligonucleotide
gcuaagagcacaguauguc

SEQ ID NO: 1180722 - RNA, 19 nt, Artificial Sequence
  Description of Artificial Sequence: Synthetic oligonucleotide
aaccguuaacaaguacaau

SEQ ID NO: 1180723 - RNA, 19 nt, Artificial Sequence
  Description of Artificial Sequence: Synthetic oligonucleotide
agaagggaccauucacuua

SEQ ID NO: 1180724 - RNA, 19 nt, Artificial Sequence
  Description of Artificial Sequence: Synthetic oligonucleotide
gugucauguaaugcaacca

SEQ ID NO: 1180725 - RNA, 19 nt, Artificial Sequence
  Description of Artificial Sequence: Synthetic oligonucleotide
auaucauguauugcugauu

SEQ ID NO: 1180726 - RNA, 19 nt, Artificial Sequence
  Description of Artificial Sequence: Synthetic oligonucleotide
guuggucgaaucuuuuggu

SEQ ID NO: 1180727 - RNA, 19 nt, Artificial Sequence
  Description of Artificial Sequence: Synthetic oligonucleotide
aacuaucugcuugccuagu

SEQ ID NO: 1180728 - RNA, 19 nt, Artificial Sequence
  Description of Artificial Sequence: Synthetic oligonucleotide
guaaacuaaguaaccagau

SEQ ID NO: 1180729 - RNA, 19 nt, Artificial Sequence
  Description of Artificial Sequence: Synthetic oligonucleotide
agcuaagagcacaguaugu

SEQ ID NO: 1180730 - RNA, 19 nt, Artificial Sequence
  Description of Artificial Sequence: Synthetic oligonucleotide
uaagugugcugugcuuucu

SEQ ID NO: 1180731 - RNA, 19 nt, Artificial Sequence
  Description of Artificial Sequence: Synthetic oligonucleotide
cacagcaauuuuaaucaua

SEQ ID NO: 1180732 - RNA, 19 nt, Artificial Sequence
  Description of Artificial Sequence: Synthetic oligonucleotide
ccaauaguggaaaugcuua

SEQ ID NO: 1180733 - RNA, 19 nt, Artificial Sequence
  Description of Artificial Sequence: Synthetic oligonucleotide
ggaaaccguuaacaaguac

SEQ ID NO: 1180734 - RNA, 19 nt, Artificial Sequence
  Description of Artificial Sequence: Synthetic oligonucleotide
guagacuaugcuaaacuau

SEQ ID NO: 1180735 - RNA, 19 nt, Artificial Sequence
  Description of Artificial Sequence: Synthetic oligonucleotide
caguaugucauguuucaau

SEQ ID NO: 1180736 - RNA, 19 nt, Artificial Sequence
  Description of Artificial Sequence: Synthetic oligonucleotide
gcuucaguaguugcagaag

SEQ ID NO: 1180737 - RNA, 19 nt, Artificial Sequence
  Description of Artificial Sequence: Synthetic oligonucleotide
gaaaacuauggcacauccu

SEQ ID NO: 1180738 - RNA, 19 nt, Artificial Sequence
  Description of Artificial Sequence: Synthetic oligonucleotide
aaguuacucucaacagcaa

SEQ ID NO: 1180739 - RNA, 19 nt, Artificial Sequence
  Description of Artificial Sequence: Synthetic oligonucleotide
uggcacauccuuucaucuu

SEQ ID NO: 1180740 - RNA, 19 nt, Artificial Sequence
  Description of Artificial Sequence: Synthetic oligonucleotide
cauucacuuacugccuuca

SEQ ID NO: 1180741 - RNA, 19 nt, Artificial Sequence
  Description of Artificial Sequence: Synthetic oligonucleotide
gugugucauguaaugcaac

SEQ ID NO: 1180742 - RNA, 19 nt, Artificial Sequence
  Description of Artificial Sequence: Synthetic oligonucleotide
aaguaaccagauagaugaa

SEQ ID NO: 1180743 - RNA, 19 nt, Artificial Sequence
  Description of Artificial Sequence: Synthetic oligonucleotide
aucuaagugggaagauuaa

SEQ ID NO: 1180744 - RNA, 19 nt, Artificial Sequence
  Description of Artificial Sequence: Synthetic oligonucleotide
acaaggcaugaaaauggaa

SEQ ID NO: 1180745 - RNA, 19 nt, Artificial Sequence
  Description of Artificial Sequence: Synthetic oligonucleotide
gcucaagccaaaucuaagu

SEQ ID NO: 1180746 - RNA, 19 nt, Artificial Sequence
  Description of Artificial Sequence: Synthetic oligonucleotide
cucaagccaaaucuaaguu

SEQ ID NO: 1180747 - RNA, 19 nt, Artificial Sequence
  Description of Artificial Sequence: Synthetic oligonucleotide
caugagaauuaagugugcu

SEQ ID NO: 1180748 - RNA, 19 nt, Artificial Sequence
  Description of Artificial Sequence: Synthetic oligonucleotide
aucuaaguuguuggucgaa

SEQ ID NO: 1180749 - RNA, 19 nt, Artificial Sequence
  Description of Artificial Sequence: Synthetic oligonucleotide
cauguauugcugauugcuu

SEQ ID NO: 1180750 - RNA, 19 nt, Artificial Sequence
  Description of Artificial Sequence: Synthetic oligonucleotide
auguuucaauaaauauaau

SEQ ID NO: 1180751 - RNA, 19 nt, Artificial Sequence
  Description of Artificial Sequence: Synthetic oligonucleotide
cugcuuuauaauucacuau

SEQ ID NO: 1180752 - RNA, 19 nt, Artificial Sequence
  Description of Artificial Sequence: Synthetic oligonucleotide
ccuagugaacuuaccacaa

SEQ ID NO: 1180753 - RNA, 19 nt, Artificial Sequence
  Description of Artificial Sequence: Synthetic oligonucleotide
gaccauucacuuacugccu

SEQ ID NO: 1180754 - RNA, 19 nt, Artificial Sequence
  Description of Artificial Sequence: Synthetic oligonucleotide
cagaagggaccauucacuu

SEQ ID NO: 1180755 - RNA, 19 nt, Artificial Sequence
  Description of Artificial Sequence: Synthetic oligonucleotide
gcuugccuagugaacuuac

SEQ ID NO: 1180756 - RNA, 19 nt, Artificial Sequence
  Description of Artificial Sequence: Synthetic oligonucleotide
auggugcaauguaacuaaa

SEQ ID NO: 1180757 - RNA, 19 nt, Artificial Sequence
  Description of Artificial Sequence: Synthetic oligonucleotide
gcgaaagaauauauuccaa

SEQ ID NO: 1180758 - RNA, 19 nt, Artificial Sequence
  Description of Artificial Sequence: Synthetic oligonucleotide
cccuguacaaaagauuuua

SEQ ID NO: 1180759 - RNA, 19 nt, Artificial Sequence
  Description of Artificial Sequence: Synthetic oligonucleotide
ggucgaaucuuuugguguu

SEQ ID NO: 1180760 - RNA, 19 nt, Artificial Sequence
  Description of Artificial Sequence: Synthetic oligonucleotide
aggucacuuugggaguuuu

SEQ ID NO: 1180761 - RNA, 19 nt, Artificial Sequence
  Description of Artificial Sequence: Synthetic oligonucleotide
caccccuguacaaaagauu

SEQ ID NO: 1180762 - RNA, 19 nt, Artificial Sequence
  Description of Artificial Sequence: Synthetic oligonucleotide
cccaccccuguacaaaaga

SEQ ID NO: 1180763 - RNA, 19 nt, Artificial Sequence
  Description of Artificial Sequence: Synthetic oligonucleotide
caguuacacaaggguaaua

SEQ ID NO: 1180764 - RNA, 19 nt, Artificial Sequence
  Description of Artificial Sequence: Synthetic oligonucleotide
cugcuugccuagugaacuu

SEQ ID NO: 1180765 - RNA, 19 nt, Artificial Sequence
  Description of Artificial Sequence: Synthetic oligonucleotide
ccaccccuguacaaaagau

SEQ ID NO: 1180766 - RNA, 19 nt, Artificial Sequence
  Description of Artificial Sequence: Synthetic oligonucleotide
gccaucuaagugggaagau

SEQ ID NO: 1180767 - RNA, 19 nt, Artificial Sequence
  Description of Artificial Sequence: Synthetic oligonucleotide
ccccuguacaaaagauuuu

SEQ ID NO: 1180768 - RNA, 19 nt, Artificial Sequence
  Description of Artificial Sequence: Synthetic oligonucleotide
caccuacuucagucugcuu

SEQ ID NO: 1180769 - RNA, 19 nt, Artificial Sequence
  Description of Artificial Sequence: Synthetic oligonucleotide
aaauaauuaggcuguagcc

SEQ ID NO: 1180770 - RNA, 19 nt, Artificial Sequence
  Description of Artificial Sequence: Synthetic oligonucleotide
acagucacgagccagaugc

SEQ ID NO: 1180771 - RNA, 19 nt, Artificial Sequence
  Description of Artificial Sequence: Synthetic oligonucleotide
aauauguccaaauucacca

SEQ ID NO: 1180772 - RNA, 19 nt, Artificial Sequence
  Description of Artificial Sequence: Synthetic oligonucleotide
aacuguauguucuaugagg

SEQ ID NO: 1180773 - RNA, 19 nt, Artificial Sequence
  Description of Artificial Sequence: Synthetic oligonucleotide
aauuauagcaggcauccuc

SEQ ID NO: 1180774 - RNA, 19 nt, Artificial Sequence
  Description of Artificial Sequence: Synthetic oligonucleotide
aauugauggcuacaugacc

SEQ ID NO: 1180775 - RNA, 19 nt, Artificial Sequence
  Description of Artificial Sequence: Synthetic oligonucleotide
agaacuuuagucaaacucc

SEQ ID NO: 1180776 - RNA, 19 nt, Artificial Sequence
  Description of Artificial Sequence: Synthetic oligonucleotide
auuaugcuaacucugagug

SEQ ID NO: 1180777 - RNA, 19 nt, Artificial Sequence
  Description of Artificial Sequence: Synthetic oligonucleotide
uuacuuaauagcuacugag

SEQ ID NO: 1180778 - RNA, 19 nt, Artificial Sequence
  Description of Artificial Sequence: Synthetic oligonucleotide
uauuuauggaagcucaggc

SEQ ID NO: 1180779 - RNA, 19 nt, Artificial Sequence
  Description of Artificial Sequence: Synthetic oligonucleotide
uacuuaauagcuacugagg

SEQ ID NO: 1180780 - RNA, 19 nt, Artificial Sequence
  Description of Artificial Sequence: Synthetic oligonucleotide
uguuauuuauggaagcuca

SEQ ID NO: 1180781 - RNA, 19 nt, Artificial Sequence
  Description of Artificial Sequence: Synthetic oligonucleotide
uuaauagcuacugagguca

SEQ ID NO: 1180782 - RNA, 19 nt, Artificial Sequence
  Description of Artificial Sequence: Synthetic oligonucleotide
acaccuauagcacuucacc

SEQ ID NO: 1180783 - RNA, 19 nt, Artificial Sequence
  Description of Artificial Sequence: Synthetic oligonucleotide
ucuaccaaacuaaacauaa

SEQ ID NO: 1180784 - RNA, 19 nt, Artificial Sequence
  Description of Artificial Sequence: Synthetic oligonucleotide
auaauuaggcuguagccuc

SEQ ID NO: 1180785 - RNA, 19 nt, Artificial Sequence
  Description of Artificial Sequence: Synthetic oligonucleotide
aauuggaauccucugccuc

SEQ ID NO: 1180786 - RNA, 19 nt, Artificial Sequence
  Description of Artificial Sequence: Synthetic oligonucleotide
uaauacaaccaucaaucag

SEQ ID NO: 1180787 - RNA, 19 nt, Artificial Sequence
  Description of Artificial Sequence: Synthetic oligonucleotide
uaacaguugacuucacucg

SEQ ID NO: 1180788 - RNA, 19 nt, Artificial Sequence
  Description of Artificial Sequence: Synthetic oligonucleotide
aguuucaccacaccuauag

SEQ ID NO: 1180789 - RNA, 19 nt, Artificial Sequence
  Description of Artificial Sequence: Synthetic oligonucleotide
aauaauuaggcuguagccu

SEQ ID NO: 1180790 - RNA, 19 nt, Artificial Sequence
  Description of Artificial Sequence: Synthetic oligonucleotide
uaccaaacuaaacauaaac

SEQ ID NO: 1180791 - RNA, 19 nt, Artificial Sequence
  Description of Artificial Sequence: Synthetic oligonucleotide
uagauuuagucuuugaaaa

SEQ ID NO: 1180792 - RNA, 19 nt, Artificial Sequence
  Description of Artificial Sequence: Synthetic oligonucleotide
aauuaugcuaacucugagu

SEQ ID NO: 1180793 - RNA, 19 nt, Artificial Sequence
  Description of Artificial Sequence: Synthetic oligonucleotide
uggcuguuuauuuucaggg

SEQ ID NO: 1180794 - RNA, 19 nt, Artificial Sequence
  Description of Artificial Sequence: Synthetic oligonucleotide
aacugauuacagcaaauga

SEQ ID NO: 1180795 - RNA, 19 nt, Artificial Sequence
  Description of Artificial Sequence: Synthetic oligonucleotide
aucccuauucaccaguggc

SEQ ID NO: 1180796 - RNA, 19 nt, Artificial Sequence
  Description of Artificial Sequence: Synthetic oligonucleotide
uagauagccaucaacacau

SEQ ID NO: 1180797 - RNA, 19 nt, Artificial Sequence
  Description of Artificial Sequence: Synthetic oligonucleotide
uccagaauugguuuuaccu

SEQ ID NO: 1180798 - RNA, 19 nt, Artificial Sequence
  Description of Artificial Sequence: Synthetic oligonucleotide
ucaacuguauguucuauga

SEQ ID NO: 1180799 - RNA, 19 nt, Artificial Sequence
  Description of Artificial Sequence: Synthetic oligonucleotide
uguauguucuaugagggcc

SEQ ID NO: 1180800 - RNA, 19 nt, Artificial Sequence
  Description of Artificial Sequence: Synthetic oligonucleotide
uaagugauauaguauacaa

SEQ ID NO: 1180801 - RNA, 19 nt, Artificial Sequence
  Description of Artificial Sequence: Synthetic oligonucleotide
uuacacugcaaguaaagcu

SEQ ID NO: 1180802 - RNA, 19 nt, Artificial Sequence
  Description of Artificial Sequence: Synthetic oligonucleotide
ugagugauguuuacucugg

SEQ ID NO: 1180803 - RNA, 19 nt, Artificial Sequence
  Description of Artificial Sequence: Synthetic oligonucleotide
uuuacucuggguuuuagau

SEQ ID NO: 1180804 - RNA, 19 nt, Artificial Sequence
  Description of Artificial Sequence: Synthetic oligonucleotide
acuuaauagcuacugaggu

SEQ ID NO: 1180805 - RNA, 19 nt, Artificial Sequence
  Description of Artificial Sequence: Synthetic oligonucleotide
aaacacaguugucuaagug

SEQ ID NO: 1180806 - RNA, 19 nt, Artificial Sequence
  Description of Artificial Sequence: Synthetic oligonucleotide
uggguuuuagauuuagucu

SEQ ID NO: 1180807 - RNA, 19 nt, Artificial Sequence
  Description of Artificial Sequence: Synthetic oligonucleotide
uuauuuauggaagcucagg

SEQ ID NO: 1180808 - RNA, 19 nt, Artificial Sequence
  Description of Artificial Sequence: Synthetic oligonucleotide
ugcaaguaaagcucacugg

SEQ ID NO: 1180809 - RNA, 19 nt, Artificial Sequence
  Description of Artificial Sequence: Synthetic oligonucleotide
uccaaauuaugcuaacucu

SEQ ID NO: 1180810 - RNA, 19 nt, Artificial Sequence
  Description of Artificial Sequence: Synthetic oligonucleotide
caugggaacacacucaaac

SEQ ID NO: 1180811 - RNA, 19 nt, Artificial Sequence
  Description of Artificial Sequence: Synthetic oligonucleotide
caaauuggaauccucugcc

SEQ ID NO: 1180812 - RNA, 19 nt, Artificial Sequence
  Description of Artificial Sequence: Synthetic oligonucleotide
uuucuaggacuucaguugc

SEQ ID NO: 1180813 - RNA, 19 nt, Artificial Sequence
  Description of Artificial Sequence: Synthetic oligonucleotide
uuuaccuccuacaugggaa

SEQ ID NO: 1180814 - RNA, 19 nt, Artificial Sequence
  Description of Artificial Sequence: Synthetic oligonucleotide
gauacucggacgcaggccc

SEQ ID NO: 1180815 - RNA, 19 nt, Artificial Sequence
  Description of Artificial Sequence: Synthetic oligonucleotide
gcaguuaagagcuucggcg

SEQ ID NO: 1180816 - RNA, 19 nt, Artificial Sequence
  Description of Artificial Sequence: Synthetic oligonucleotide
uggaauaguuuaaaauuac

SEQ ID NO: 1180817 - RNA, 19 nt, Artificial Sequence
  Description of Artificial Sequence: Synthetic oligonucleotide
auagcugcaguuaagagcu

SEQ ID NO: 1180818 - RNA, 19 nt, Artificial Sequence
  Description of Artificial Sequence: Synthetic oligonucleotide
cauaacaccucuaccaaac

SEQ ID NO: 1180819 - RNA, 19 nt, Artificial Sequence
  Description of Artificial Sequence: Synthetic oligonucleotide
ucuaagugauauaguauac

SEQ ID NO: 1180820 - RNA, 19 nt, Artificial Sequence
  Description of Artificial Sequence: Synthetic oligonucleotide
auagauagccaucaacaca

SEQ ID NO: 1180821 - RNA, 19 nt, Artificial Sequence
  Description of Artificial Sequence: Synthetic oligonucleotide
ugauacagauguuacuuga

SEQ ID NO: 1180822 - RNA, 19 nt, Artificial Sequence
  Description of Artificial Sequence: Synthetic oligonucleotide
acuguauguucuaugaggg

SEQ ID NO: 1180823 - RNA, 19 nt, Artificial Sequence
  Description of Artificial Sequence: Synthetic oligonucleotide
cuaucugccaaccuuuggc

SEQ ID NO: 1180824 - RNA, 19 nt, Artificial Sequence
  Description of Artificial Sequence: Synthetic oligonucleotide
cuggguuuuagauuuaguc

SEQ ID NO: 1180825 - RNA, 19 nt, Artificial Sequence
  Description of Artificial Sequence: Synthetic oligonucleotide
ugucaggaagagaugagga

SEQ ID NO: 1180826 - RNA, 19 nt, Artificial Sequence
  Description of Artificial Sequence: Synthetic oligonucleotide
acuuuagucaaacuccccu

SEQ ID NO: 1180827 - RNA, 19 nt, Artificial Sequence
  Description of Artificial Sequence: Synthetic oligonucleotide
uguguuaggcuuuuaucca

SEQ ID NO: 1180828 - RNA, 19 nt, Artificial Sequence
  Description of Artificial Sequence: Synthetic oligonucleotide
uguucuacaccuuugccau

SEQ ID NO: 1180829 - RNA, 19 nt, Artificial Sequence
  Description of Artificial Sequence: Synthetic oligonucleotide
aaacaaauuggaauccucu

SEQ ID NO: 1180830 - RNA, 19 nt, Artificial Sequence
  Description of Artificial Sequence: Synthetic oligonucleotide
cuccugaagaucacaaucc

SEQ ID NO: 1180831 - RNA, 19 nt, Artificial Sequence
  Description of Artificial Sequence: Synthetic oligonucleotide
ucucauuccacgaccccgg

SEQ ID NO: 1180832 - RNA, 19 nt, Artificial Sequence
  Description of Artificial Sequence: Synthetic oligonucleotide
aacaguugacuucacucgu

SEQ ID NO: 1180833 - RNA, 19 nt, Artificial Sequence
  Description of Artificial Sequence: Synthetic oligonucleotide
auuuauggaagcucaggca

SEQ ID NO: 1180834 - RNA, 19 nt, Artificial Sequence
  Description of Artificial Sequence: Synthetic oligonucleotide
agagcuucggcgucugagc

SEQ ID NO: 1180835 - RNA, 19 nt, Artificial Sequence
  Description of Artificial Sequence: Synthetic oligonucleotide
accucuaccgcaauuauag

SEQ ID NO: 1180836 - RNA, 19 nt, Artificial Sequence
  Description of Artificial Sequence: Synthetic oligonucleotide
agcgguaacaguugacuuc

SEQ ID NO: 1180837 - RNA, 19 nt, Artificial Sequence
  Description of Artificial Sequence: Synthetic oligonucleotide
uagccaucaacacauuugu

SEQ ID NO: 1180838 - RNA, 19 nt, Artificial Sequence
  Description of Artificial Sequence: Synthetic oligonucleotide
auaugcaugggaugaagcu

SEQ ID NO: 1180839 - RNA, 19 nt, Artificial Sequence
  Description of Artificial Sequence: Synthetic oligonucleotide
uuaaucccuauucaccagu

SEQ ID NO: 1180840 - RNA, 19 nt, Artificial Sequence
  Description of Artificial Sequence: Synthetic oligonucleotide
uaugcuaacucugagugau

SEQ ID NO: 1180841 - RNA, 19 nt, Artificial Sequence
  Description of Artificial Sequence: Synthetic oligonucleotide
aauugugcauucccgugca

SEQ ID NO: 1180842 - RNA, 19 nt, Artificial Sequence
  Description of Artificial Sequence: Synthetic oligonucleotide
ucuaucugccaaccuuugg

SEQ ID NO: 1180843 - RNA, 19 nt, Artificial Sequence
  Description of Artificial Sequence: Synthetic oligonucleotide
auacagauguuacuugaug

SEQ ID NO: 1180844 - RNA, 19 nt, Artificial Sequence
  Description of Artificial Sequence: Synthetic oligonucleotide
uuagucaaacuccccuucc

SEQ ID NO: 1180845 - RNA, 19 nt, Artificial Sequence
  Description of Artificial Sequence: Synthetic oligonucleotide
acaauccuuagcaagauga

SEQ ID NO: 1180846 - RNA, 19 nt, Artificial Sequence
  Description of Artificial Sequence: Synthetic oligonucleotide
uacucuggguuuuagauuu

SEQ ID NO: 1180847 - RNA, 19 nt, Artificial Sequence
  Description of Artificial Sequence: Synthetic oligonucleotide
uacuugauguuacuuaaua

SEQ ID NO: 1180848 - RNA, 19 nt, Artificial Sequence
  Description of Artificial Sequence: Synthetic oligonucleotide
cauagauagccaucaacac

SEQ ID NO: 1180849 - RNA, 19 nt, Artificial Sequence
  Description of Artificial Sequence: Synthetic oligonucleotide
ugauuucugugaaaaugca

SEQ ID NO: 1180850 - RNA, 19 nt, Artificial Sequence
  Description of Artificial Sequence: Synthetic oligonucleotide
ucaauugugcauucccgug

SEQ ID NO: 1180851 - RNA, 19 nt, Artificial Sequence
  Description of Artificial Sequence: Synthetic oligonucleotide
uuuuaccuccuacauggga

SEQ ID NO: 1180852 - RNA, 19 nt, Artificial Sequence
  Description of Artificial Sequence: Synthetic oligonucleotide
uacauaacaccucuaccaa

SEQ ID NO: 1180853 - RNA, 19 nt, Artificial Sequence
  Description of Artificial Sequence: Synthetic oligonucleotide
ugucuaagugauauaguau

SEQ ID NO: 1180854 - RNA, 19 nt, Artificial Sequence
  Description of Artificial Sequence: Synthetic oligonucleotide
aaauuggaauccucugccu

SEQ ID NO: 1180855 - RNA, 19 nt, Artificial Sequence
  Description of Artificial Sequence: Synthetic oligonucleotide
agcgguaacagaugucagg

SEQ ID NO: 1180856 - RNA, 19 nt, Artificial Sequence
  Description of Artificial Sequence: Synthetic oligonucleotide
uuuuagauuuagucuuuga

SEQ ID NO: 1180857 - RNA, 19 nt, Artificial Sequence
  Description of Artificial Sequence: Synthetic oligonucleotide
uuuagucaaacuccccuuc

SEQ ID NO: 1180858 - RNA, 19 nt, Artificial Sequence
  Description of Artificial Sequence: Synthetic oligonucleotide
cauuaaucccuauucacca

SEQ ID NO: 1180859 - RNA, 19 nt, Artificial Sequence
  Description of Artificial Sequence: Synthetic oligonucleotide
auuuucaggguccuugccu

SEQ ID NO: 1180860 - RNA, 19 nt, Artificial Sequence
  Description of Artificial Sequence: Synthetic oligonucleotide
agauguuacuugauguuac

SEQ ID NO: 1180861 - RNA, 19 nt, Artificial Sequence
  Description of Artificial Sequence: Synthetic oligonucleotide
ugcaguuaagagcuucggc

SEQ ID NO: 1180862 - RNA, 19 nt, Artificial Sequence
  Description of Artificial Sequence: Synthetic oligonucleotide
uucucauuccacgaccccg

SEQ ID NO: 1180863 - RNA, 19 nt, Artificial Sequence
  Description of Artificial Sequence: Synthetic oligonucleotide
uucccuggcauagauagcc

SEQ ID NO: 1180864 - RNA, 19 nt, Artificial Sequence
  Description of Artificial Sequence: Synthetic oligonucleotide
cuuaauagcuacugagguc

SEQ ID NO: 1180865 - RNA, 19 nt, Artificial Sequence
  Description of Artificial Sequence: Synthetic oligonucleotide
aaacacucguugcugcuca

SEQ ID NO: 1180866 - RNA, 19 nt, Artificial Sequence
  Description of Artificial Sequence: Synthetic oligonucleotide
aacuuuagucaaacucccc

SEQ ID NO: 1180867 - RNA, 19 nt, Artificial Sequence
  Description of Artificial Sequence: Synthetic oligonucleotide
caaguaaagcucacuggcc

SEQ ID NO: 1180868 - RNA, 19 nt, Artificial Sequence
  Description of Artificial Sequence: Synthetic oligonucleotide
gaacuuuagucaaacuccc

SEQ ID NO: 1180869 - RNA, 19 nt, Artificial Sequence
  Description of Artificial Sequence: Synthetic oligonucleotide
cuauucaccaguggcacgg

SEQ ID NO: 1180870 - RNA, 19 nt, Artificial Sequence
  Description of Artificial Sequence: Synthetic oligonucleotide
caauugauggcuacaugac

SEQ ID NO: 1180871 - RNA, 19 nt, Artificial Sequence
  Description of Artificial Sequence: Synthetic oligonucleotide
ggucagacaauccaaggcc

SEQ ID NO: 1180872 - RNA, 19 nt, Artificial Sequence
  Description of Artificial Sequence: Synthetic oligonucleotide
accaaacuaaacauaaacu

SEQ ID NO: 1180873 - RNA, 19 nt, Artificial Sequence
  Description of Artificial Sequence: Synthetic oligonucleotide
uugguuuuaccuccuacau

SEQ ID NO: 1180874 - RNA, 19 nt, Artificial Sequence
  Description of Artificial Sequence: Synthetic oligonucleotide
gaucguccacacuugaaac

SEQ ID NO: 1180875 - RNA, 19 nt, Artificial Sequence
  Description of Artificial Sequence: Synthetic oligonucleotide
auagcuccaaauuaugcua

SEQ ID NO: 1180876 - RNA, 19 nt, Artificial Sequence
  Description of Artificial Sequence: Synthetic oligonucleotide
gucuaagugauauaguaua

SEQ ID NO: 1180877 - RNA, 19 nt, Artificial Sequence
  Description of Artificial Sequence: Synthetic oligonucleotide
uacaugggaacacacucaa

SEQ ID NO: 1180878 - RNA, 19 nt, Artificial Sequence
  Description of Artificial Sequence: Synthetic oligonucleotide
ugauguuacuuaauagcua

SEQ ID NO: 1180879 - RNA, 19 nt, Artificial Sequence
  Description of Artificial Sequence: Synthetic oligonucleotide
aguuaagagcuucggcguc

SEQ ID NO: 1180880 - RNA, 19 nt, Artificial Sequence
  Description of Artificial Sequence: Synthetic oligonucleotide
caauugugcauucccgugc

SEQ ID NO: 1180881 - RNA, 19 nt, Artificial Sequence
  Description of Artificial Sequence: Synthetic oligonucleotide
ucccuauucaccaguggca

SEQ ID NO: 1180882 - RNA, 19 nt, Artificial Sequence
  Description of Artificial Sequence: Synthetic oligonucleotide
uaacagaugucaggaagag

SEQ ID NO: 1180883 - RNA, 19 nt, Artificial Sequence
  Description of Artificial Sequence: Synthetic oligonucleotide
uaaucccuauucaccagug

SEQ ID NO: 1180884 - RNA, 19 nt, Artificial Sequence
  Description of Artificial Sequence: Synthetic oligonucleotide
aaggccgucauuaugcuaa

SEQ ID NO: 1180885 - RNA, 19 nt, Artificial Sequence
  Description of Artificial Sequence: Synthetic oligonucleotide
uuaggcuguagccucaauu

SEQ ID NO: 1180886 - RNA, 19 nt, Artificial Sequence
  Description of Artificial Sequence: Synthetic oligonucleotide
aagagcuucggcgucugag

SEQ ID NO: 1180887 - RNA, 19 nt, Artificial Sequence
  Description of Artificial Sequence: Synthetic oligonucleotide
agaucguccacacuugaaa

SEQ ID NO: 1180888 - RNA, 19 nt, Artificial Sequence
  Description of Artificial Sequence: Synthetic oligonucleotide
acagccucuaucugccaac

SEQ ID NO: 1180889 - RNA, 19 nt, Artificial Sequence
  Description of Artificial Sequence: Synthetic oligonucleotide
gcaauugauggcuacauga

SEQ ID NO: 1180890 - RNA, 19 nt, Artificial Sequence
  Description of Artificial Sequence: Synthetic oligonucleotide
acagcgguaacagauguca

SEQ ID NO: 1180891 - RNA, 19 nt, Artificial Sequence
  Description of Artificial Sequence: Synthetic oligonucleotide
uucaguuuacucucccacu

SEQ ID NO: 1180892 - RNA, 19 nt, Artificial Sequence
  Description of Artificial Sequence: Synthetic oligonucleotide
uugccugcgccacacgcgg

SEQ ID NO: 1180893 - RNA, 19 nt, Artificial Sequence
  Description of Artificial Sequence: Synthetic oligonucleotide
cacuugaaacacucguugc

SEQ ID NO: 1180894 - RNA, 19 nt, Artificial Sequence
  Description of Artificial Sequence: Synthetic oligonucleotide
ucaccauaugcaugggaug

SEQ ID NO: 1180895 - RNA, 19 nt, Artificial Sequence
  Description of Artificial Sequence: Synthetic oligonucleotide
uuauggaagcucaggcacu

SEQ ID NO: 1180896 - RNA, 19 nt, Artificial Sequence
  Description of Artificial Sequence: Synthetic oligonucleotide
uauagcaggcauccuccug

SEQ ID NO: 1180897 - RNA, 19 nt, Artificial Sequence
  Description of Artificial Sequence: Synthetic oligonucleotide
ugcauucccgugcaagaug

SEQ ID NO: 1180898 - RNA, 19 nt, Artificial Sequence
  Description of Artificial Sequence: Synthetic oligonucleotide
ugauguuuacucuggguuu

SEQ ID NO: 1180899 - RNA, 19 nt, Artificial Sequence
  Description of Artificial Sequence: Synthetic oligonucleotide
ccaaauuaugcuaacucug

SEQ ID NO: 1180900 - RNA, 19 nt, Artificial Sequence
  Description of Artificial Sequence: Synthetic oligonucleotide
cacaagaauagcacuucug

SEQ ID NO: 1180901 - RNA, 19 nt, Artificial Sequence
  Description of Artificial Sequence: Synthetic oligonucleotide
uuaugcuaacucugaguga

SEQ ID NO: 1180902 - RNA, 19 nt, Artificial Sequence
  Description of Artificial Sequence: Synthetic oligonucleotide
gucagacaauccaaggccg

SEQ ID NO: 1180903 - RNA, 19 nt, Artificial Sequence
  Description of Artificial Sequence: Synthetic oligonucleotide
acucguugcugcucauagc

SEQ ID NO: 1180904 - RNA, 19 nt, Artificial Sequence
  Description of Artificial Sequence: Synthetic oligonucleotide
ugcucauagcugcaguuaa

SEQ ID NO: 1180905 - RNA, 19 nt, Artificial Sequence
  Description of Artificial Sequence: Synthetic oligonucleotide
cuaccgcaauuauagcagg

SEQ ID NO: 1180906 - RNA, 19 nt, Artificial Sequence
  Description of Artificial Sequence: Synthetic oligonucleotide
guguuaggcuuuuauccag

SEQ ID NO: 1180907 - RNA, 19 nt, Artificial Sequence
  Description of Artificial Sequence: Synthetic oligonucleotide
cucuaccgcaauuauagca

SEQ ID NO: 1180908 - RNA, 19 nt, Artificial Sequence
  Description of Artificial Sequence: Synthetic oligonucleotide
uucaguccuccacauuccc

SEQ ID NO: 1180909 - RNA, 19 nt, Artificial Sequence
  Description of Artificial Sequence: Synthetic oligonucleotide
cuaugagggccugauacag

SEQ ID NO: 1180910 - RNA, 19 nt, Artificial Sequence
  Description of Artificial Sequence: Synthetic oligonucleotide
accacaagaauagcacuuc

SEQ ID NO: 1180911 - RNA, 19 nt, Artificial Sequence
  Description of Artificial Sequence: Synthetic oligonucleotide
uccuacaugggaacacacu

SEQ ID NO: 1180912 - RNA, 19 nt, Artificial Sequence
  Description of Artificial Sequence: Synthetic oligonucleotide
gcaaaugaaacacaguugu

SEQ ID NO: 1180913 - RNA, 19 nt, Artificial Sequence
  Description of Artificial Sequence: Synthetic oligonucleotide
aagugauauaguauacaaa

SEQ ID NO: 1180914 - RNA, 19 nt, Artificial Sequence
  Description of Artificial Sequence: Synthetic oligonucleotide
aagggcuuauuggucugac

SEQ ID NO: 1180915 - RNA, 19 nt, Artificial Sequence
  Description of Artificial Sequence: Synthetic oligonucleotide
uugugcauucccgugcaag

SEQ ID NO: 1180916 - RNA, 19 nt, Artificial Sequence
  Description of Artificial Sequence: Synthetic oligonucleotide
uccacauuccccucuuuaa

SEQ ID NO: 1180917 - RNA, 19 nt, Artificial Sequence
  Description of Artificial Sequence: Synthetic oligonucleotide
guuauuuauggaagcucag

SEQ ID NO: 1180918 - RNA, 19 nt, Artificial Sequence
  Description of Artificial Sequence: Synthetic oligonucleotide
cacucguugcugcucauag

SEQ ID NO: 1180919 - RNA, 19 nt, Artificial Sequence
  Description of Artificial Sequence: Synthetic oligonucleotide
cuugccugcgccacacgcg

SEQ ID NO: 1180920 - RNA, 19 nt, Artificial Sequence
  Description of Artificial Sequence: Synthetic oligonucleotide
acauuccccucuuuaauau

SEQ ID NO: 1180921 - RNA, 19 nt, Artificial Sequence
  Description of Artificial Sequence: Synthetic oligonucleotide
ucuggguuuuagauuuagu

SEQ ID NO: 1180922 - RNA, 19 nt, Artificial Sequence
  Description of Artificial Sequence: Synthetic oligonucleotide
auagcacuucaccuuggug

SEQ ID NO: 1180923 - RNA, 19 nt, Artificial Sequence
  Description of Artificial Sequence: Synthetic oligonucleotide
uaccgcaauuauagcaggc

SEQ ID NO: 1180924 - RNA, 19 nt, Artificial Sequence
  Description of Artificial Sequence: Synthetic oligonucleotide
ucagacaauccaaggccgu

SEQ ID NO: 1180925 - RNA, 19 nt, Artificial Sequence
  Description of Artificial Sequence: Synthetic oligonucleotide
aucguccacacuugaaaca

SEQ ID NO: 1180926 - RNA, 19 nt, Artificial Sequence
  Description of Artificial Sequence: Synthetic oligonucleotide
gacugaacucuucccauuc

SEQ ID NO: 1180927 - RNA, 19 nt, Artificial Sequence
  Description of Artificial Sequence: Synthetic oligonucleotide
uccuguguuaggcuuuuau

SEQ ID NO: 1180928 - RNA, 19 nt, Artificial Sequence
  Description of Artificial Sequence: Synthetic oligonucleotide
uuccagaauugguuuuacc

SEQ ID NO: 1180929 - RNA, 19 nt, Artificial Sequence
  Description of Artificial Sequence: Synthetic oligonucleotide
uaauagcuacugaggucag

SEQ ID NO: 1180930 - RNA, 19 nt, Artificial Sequence
  Description of Artificial Sequence: Synthetic oligonucleotide
caaaugaaacacaguuguc

SEQ ID NO: 1180931 - RNA, 19 nt, Artificial Sequence
  Description of Artificial Sequence: Synthetic oligonucleotide
uuacuugauguuacuuaau

SEQ ID NO: 1180932 - RNA, 19 nt, Artificial Sequence
  Description of Artificial Sequence: Synthetic oligonucleotide
cugugaaaaugcauuucuc

SEQ ID NO: 1180933 - RNA, 19 nt, Artificial Sequence
  Description of Artificial Sequence: Synthetic oligonucleotide
uacugaggucagacaaucc

SEQ ID NO: 1180934 - RNA, 19 nt, Artificial Sequence
  Description of Artificial Sequence: Synthetic oligonucleotide
aucaccauaugcaugggau

SEQ ID NO: 1180935 - RNA, 19 nt, Artificial Sequence
  Description of Artificial Sequence: Synthetic oligonucleotide
augaccaguuucaccacac

SEQ ID NO: 1180936 - RNA, 19 nt, Artificial Sequence
  Description of Artificial Sequence: Synthetic oligonucleotide
aagcaguggcuguuuauuu

SEQ ID NO: 1180937 - RNA, 19 nt, Artificial Sequence
  Description of Artificial Sequence: Synthetic oligonucleotide
ugaccaguuucaccacacc

SEQ ID NO: 1180938 - RNA, 19 nt, Artificial Sequence
  Description of Artificial Sequence: Synthetic oligonucleotide
gggaacagccucuaucugc

SEQ ID NO: 1180939 - RNA, 19 nt, Artificial Sequence
  Description of Artificial Sequence: Synthetic oligonucleotide
ucgucuugcugcaauugau

SEQ ID NO: 1180940 - RNA, 19 nt, Artificial Sequence
  Description of Artificial Sequence: Synthetic oligonucleotide
uguucuaugagggccugau

SEQ ID NO: 1180941 - RNA, 19 nt, Artificial Sequence
  Description of Artificial Sequence: Synthetic oligonucleotide
ugaagaggauucagagaaa

SEQ ID NO: 1180942 - RNA, 19 nt, Artificial Sequence
  Description of Artificial Sequence: Synthetic oligonucleotide
aagaugcccugacucgcca

SEQ ID NO: 1180943 - RNA, 19 nt, Artificial Sequence
  Description of Artificial Sequence: Synthetic oligonucleotide
uccgcguggucacagucac

SEQ ID NO: 1180944 - RNA, 19 nt, Artificial Sequence
  Description of Artificial Sequence: Synthetic oligonucleotide
cacaccuauagcacuucac

SEQ ID NO: 1180945 - RNA, 19 nt, Artificial Sequence
  Description of Artificial Sequence: Synthetic oligonucleotide
acauaacaccucuaccaaa

SEQ ID NO: 1180946 - RNA, 19 nt, Artificial Sequence
  Description of Artificial Sequence: Synthetic oligonucleotide
agaucacaauccuuagcaa

SEQ ID NO: 1180947 - RNA, 19 nt, Artificial Sequence
  Description of Artificial Sequence: Synthetic oligonucleotide
ggcauagauagccaucaac

SEQ ID NO: 1180948 - RNA, 19 nt, Artificial Sequence
  Description of Artificial Sequence: Synthetic oligonucleotide
ccuacaugggaacacacuc

SEQ ID NO: 1180949 - RNA, 19 nt, Artificial Sequence
  Description of Artificial Sequence: Synthetic oligonucleotide
ugaccagacucaccacagc

SEQ ID NO: 1180950 - RNA, 19 nt, Artificial Sequence
  Description of Artificial Sequence: Synthetic oligonucleotide
cuacaugggaacacacuca

SEQ ID NO: 1180951 - RNA, 19 nt, Artificial Sequence
  Description of Artificial Sequence: Synthetic oligonucleotide
caagaugcccugacucgcc

SEQ ID NO: 1180952 - RNA, 19 nt, Artificial Sequence
  Description of Artificial Sequence: Synthetic oligonucleotide
accuccuacaugggaacac

SEQ ID NO: 1180953 - RNA, 19 nt, Artificial Sequence
  Description of Artificial Sequence: Synthetic oligonucleotide
ccucaauugugcauucccg

SEQ ID NO: 1180954 - RNA, 19 nt, Artificial Sequence
  Description of Artificial Sequence: Synthetic oligonucleotide
cuacugaggucagacaauc

SEQ ID NO: 1180955 - RNA, 19 nt, Artificial Sequence
  Description of Artificial Sequence: Synthetic oligonucleotide
uuaggcuuuuauccagauu

SEQ ID NO: 1180956 - RNA, 19 nt, Artificial Sequence
  Description of Artificial Sequence: Synthetic oligonucleotide
auccaaggccgucauuaug

SEQ ID NO: 1180957 - RNA, 19 nt, Artificial Sequence
  Description of Artificial Sequence: Synthetic oligonucleotide
accagacucaccacagcgg

SEQ ID NO: 1180958 - RNA, 19 nt, Artificial Sequence
  Description of Artificial Sequence: Synthetic oligonucleotide
aagcgacucgcaaagcagu

SEQ ID NO: 1180959 - RNA, 19 nt, Artificial Sequence
  Description of Artificial Sequence: Synthetic oligonucleotide
cuugcaguccuuggcaaug

SEQ ID NO: 1180960 - RNA, 19 nt, Artificial Sequence
  Description of Artificial Sequence: Synthetic oligonucleotide
cugaauagcuccaaauuau

SEQ ID NO: 1180961 - RNA, 19 nt, Artificial Sequence
  Description of Artificial Sequence: Synthetic oligonucleotide
uaaagcucacuggccuggg

SEQ ID NO: 1180962 - RNA, 19 nt, Artificial Sequence
  Description of Artificial Sequence: Synthetic oligonucleotide
accgcaauuauagcaggca

SEQ ID NO: 1180963 - RNA, 19 nt, Artificial Sequence
  Description of Artificial Sequence: Synthetic oligonucleotide
cuucucauuccacgacccc

SEQ ID NO: 1180964 - RNA, 19 nt, Artificial Sequence
  Description of Artificial Sequence: Synthetic oligonucleotide
ucccauucauuaaucccua

SEQ ID NO: 1180965 - RNA, 19 nt, Artificial Sequence
  Description of Artificial Sequence: Synthetic oligonucleotide
ucacucgucuugcugcaau

SEQ ID NO: 1180966 - RNA, 19 nt, Artificial Sequence
  Description of Artificial Sequence: Synthetic oligonucleotide
gauguuacuugauguuacu

SEQ ID NO: 1180967 - RNA, 19 nt, Artificial Sequence
  Description of Artificial Sequence: Synthetic oligonucleotide
ugcugcaauugauggcuac

SEQ ID NO: 1180968 - RNA, 19 nt, Artificial Sequence
  Description of Artificial Sequence: Synthetic oligonucleotide
agacucaccacagcgguaa

SEQ ID NO: 1180969 - RNA, 19 nt, Artificial Sequence
  Description of Artificial Sequence: Synthetic oligonucleotide
aagaggauucagagaaaau

SEQ ID NO: 1180970 - RNA, 19 nt, Artificial Sequence
  Description of Artificial Sequence: Synthetic oligonucleotide
gccucaauugugcauuccc

SEQ ID NO: 1180971 - RNA, 19 nt, Artificial Sequence
  Description of Artificial Sequence: Synthetic oligonucleotide
ucggcgucugagcugccca

SEQ ID NO: 1180972 - RNA, 19 nt, Artificial Sequence
  Description of Artificial Sequence: Synthetic oligonucleotide
cuggcauagauagccauca

SEQ ID NO: 1180973 - RNA, 19 nt, Artificial Sequence
  Description of Artificial Sequence: Synthetic oligonucleotide
cacaauccuuagcaagaug

SEQ ID NO: 1180974 - RNA, 19 nt, Artificial Sequence
  Description of Artificial Sequence: Synthetic oligonucleotide
cucguugcugcucauagcu

SEQ ID NO: 1180975 - RNA, 19 nt, Artificial Sequence
  Description of Artificial Sequence: Synthetic oligonucleotide
uuaagagcuucggcgucug

SEQ ID NO: 1180976 - RNA, 19 nt, Artificial Sequence
  Description of Artificial Sequence: Synthetic oligonucleotide
cuccuacaugggaacacac

SEQ ID NO: 1180977 - RNA, 19 nt, Artificial Sequence
  Description of Artificial Sequence: Synthetic oligonucleotide
cugcaguuaagagcuucgg

SEQ ID NO: 1180978 - RNA, 19 nt, Artificial Sequence
  Description of Artificial Sequence: Synthetic oligonucleotide
ucacaauccuuagcaagau

SEQ ID NO: 1180979 - RNA, 19 nt, Artificial Sequence
  Description of Artificial Sequence: Synthetic oligonucleotide
agacaauccaaggccguca

SEQ ID NO: 1180980 - RNA, 19 nt, Artificial Sequence
  Description of Artificial Sequence: Synthetic oligonucleotide
aggauucagagaaaauaau

SEQ ID NO: 1180981 - RNA, 19 nt, Artificial Sequence
  Description of Artificial Sequence: Synthetic oligonucleotide
cugggaacagccucuaucu

SEQ ID NO: 1180982 - RNA, 19 nt, Artificial Sequence
  Description of Artificial Sequence: Synthetic oligonucleotide
agccucaauugugcauucc

SEQ ID NO: 1180983 - RNA, 19 nt, Artificial Sequence
  Description of Artificial Sequence: Synthetic oligonucleotide
ugagggccugauacagaug

SEQ ID NO: 1180984 - RNA, 19 nt, Artificial Sequence
  Description of Artificial Sequence: Synthetic oligonucleotide
caccauaugcaugggauga

SEQ ID NO: 1180985 - RNA, 19 nt, Artificial Sequence
  Description of Artificial Sequence: Synthetic oligonucleotide
ggauucagagaaaauaaua

SEQ ID NO: 1180986 - RNA, 19 nt, Artificial Sequence
  Description of Artificial Sequence: Synthetic oligonucleotide
cugcaauuccugaauagcu

SEQ ID NO: 1180987 - RNA, 19 nt, Artificial Sequence
  Description of Artificial Sequence: Synthetic oligonucleotide
ugacugaacucuucccauu

SEQ ID NO: 1180988 - RNA, 19 nt, Artificial Sequence
  Description of Artificial Sequence: Synthetic oligonucleotide
acucgucuugcugcaauug

SEQ ID NO: 1180989 - RNA, 19 nt, Artificial Sequence
  Description of Artificial Sequence: Synthetic oligonucleotide
cucuaccaaacuaaacaua

SEQ ID NO: 1180990 - RNA, 19 nt, Artificial Sequence
  Description of Artificial Sequence: Synthetic oligonucleotide
auacaaccaucaaucagaa

SEQ ID NO: 1180991 - RNA, 19 nt, Artificial Sequence
  Description of Artificial Sequence: Synthetic oligonucleotide
aauuaggcuguagccucaa

SEQ ID NO: 1180992 - RNA, 19 nt, Artificial Sequence
  Description of Artificial Sequence: Synthetic oligonucleotide
ggaacacacucaaacccag

SEQ ID NO: 1180993 - RNA, 19 nt, Artificial Sequence
  Description of Artificial Sequence: Synthetic oligonucleotide
ucccgugcaagaugcccug

SEQ ID NO: 1180994 - RNA, 19 nt, Artificial Sequence
  Description of Artificial Sequence: Synthetic oligonucleotide
ucccuggcauagauagcca

SEQ ID NO: 1180995 - RNA, 19 nt, Artificial Sequence
  Description of Artificial Sequence: Synthetic oligonucleotide
cacgcgggucugcacacgg

SEQ ID NO: 1180996 - RNA, 19 nt, Artificial Sequence
  Description of Artificial Sequence: Synthetic oligonucleotide
gcugcaguuaagagcuucg

SEQ ID NO: 1180997 - RNA, 19 nt, Artificial Sequence
  Description of Artificial Sequence: Synthetic oligonucleotide
acacugcaaguaaagcuca

SEQ ID NO: 1180998 - RNA, 19 nt, Artificial Sequence
  Description of Artificial Sequence: Synthetic oligonucleotide
auauggcauuuucuucuau

SEQ ID NO: 1180999 - RNA, 19 nt, Artificial Sequence
  Description of Artificial Sequence: Synthetic oligonucleotide
cucaauugugcauucccgu

SEQ ID NO: 1181000 - RNA, 19 nt, Artificial Sequence
  Description of Artificial Sequence: Synthetic oligonucleotide
gcccugacucgccacagcg

SEQ ID NO: 1181001 - RNA, 19 nt, Artificial Sequence
  Description of Artificial Sequence: Synthetic oligonucleotide
cagcgguaacagaugucag

SEQ ID NO: 1181002 - RNA, 19 nt, Artificial Sequence
  Description of Artificial Sequence: Synthetic oligonucleotide
gcauucccgugcaagaugc

SEQ ID NO: 1181003 - RNA, 19 nt, Artificial Sequence
  Description of Artificial Sequence: Synthetic oligonucleotide
caggaaagcgacucgcaaa

SEQ ID NO: 1181004 - RNA, 19 nt, Artificial Sequence
  Description of Artificial Sequence: Synthetic oligonucleotide
cacagcgguaacaguugac

SEQ ID NO: 1181005 - RNA, 19 nt, Artificial Sequence
  Description of Artificial Sequence: Synthetic oligonucleotide
ugauggcuacaugaccagu

SEQ ID NO: 1181006 - RNA, 19 nt, Artificial Sequence
  Description of Artificial Sequence: Synthetic oligonucleotide
gggguucuuuaacaaagca

SEQ ID NO: 1181007 - RNA, 19 nt, Artificial Sequence
  Description of Artificial Sequence: Synthetic oligonucleotide
cucgucuugcugcaauuga

SEQ ID NO: 1181008 - RNA, 19 nt, Artificial Sequence
  Description of Artificial Sequence: Synthetic oligonucleotide
agggcuuauuggucugacu

SEQ ID NO: 1181009 - RNA, 19 nt, Artificial Sequence
  Description of Artificial Sequence: Synthetic oligonucleotide
agcuucggcgucugagcug

SEQ ID NO: 1181010 - RNA, 19 nt, Artificial Sequence
  Description of Artificial Sequence: Synthetic oligonucleotide
auuauacauaacaccucua

SEQ ID NO: 1181011 - RNA, 19 nt, Artificial Sequence
  Description of Artificial Sequence: Synthetic oligonucleotide
caguuaagagcuucggcgu

SEQ ID NO: 1181012 - RNA, 19 nt, Artificial Sequence
  Description of Artificial Sequence: Synthetic oligonucleotide
gcgguggauacucggacgc

SEQ ID NO: 1181013 - RNA, 19 nt, Artificial Sequence
  Description of Artificial Sequence: Synthetic oligonucleotide
agccaucaacacauuuguc

SEQ ID NO: 1181014 - RNA, 19 nt, Artificial Sequence
  Description of Artificial Sequence: Synthetic oligonucleotide
cauccgcguggucacaguc

SEQ ID NO: 1181015 - RNA, 19 nt, Artificial Sequence
  Description of Artificial Sequence: Synthetic oligonucleotide
guuuacucucccacucaac

SEQ ID NO: 1181016 - RNA, 19 nt, Artificial Sequence
  Description of Artificial Sequence: Synthetic oligonucleotide
cauucccgugcaagaugcc

SEQ ID NO: 1181017 - RNA, 19 nt, Artificial Sequence
  Description of Artificial Sequence: Synthetic oligonucleotide
caucaccauaugcauggga

SEQ ID NO: 1181018 - RNA, 19 nt, Artificial Sequence
  Description of Artificial Sequence: Synthetic oligonucleotide
caccuauagcacuucaccu

SEQ ID NO: 1181019 - RNA, 19 nt, Artificial Sequence
  Description of Artificial Sequence: Synthetic oligonucleotide
aguugacuucacucgucuu

SEQ ID NO: 1181020 - RNA, 19 nt, Artificial Sequence
  Description of Artificial Sequence: Synthetic oligonucleotide
ugcgcacggcucuccuccg

SEQ ID NO: 1181021 - RNA, 19 nt, Artificial Sequence
  Description of Artificial Sequence: Synthetic oligonucleotide
uccuugccugcgccacacg

SEQ ID NO: 1181022 - RNA, 19 nt, Artificial Sequence
  Description of Artificial Sequence: Synthetic oligonucleotide
cacagcgguaacagauguc

SEQ ID NO: 1181023 - RNA, 19 nt, Artificial Sequence
  Description of Artificial Sequence: Synthetic oligonucleotide
ucggacgcaggcccaggaa

SEQ ID NO: 1181024 - RNA, 19 nt, Artificial Sequence
  Description of Artificial Sequence: Synthetic oligonucleotide
ugcccugacucgccacagc

SEQ ID NO: 1181025 - RNA, 19 nt, Artificial Sequence
  Description of Artificial Sequence: Synthetic oligonucleotide
uaccuccuacaugggaaca

SEQ ID NO: 1181026 - RNA, 19 nt, Artificial Sequence
  Description of Artificial Sequence: Synthetic oligonucleotide
gcgguaacagaugucagga

SEQ ID NO: 1181027 - RNA, 19 nt, Artificial Sequence
  Description of Artificial Sequence: Synthetic oligonucleotide
aggcauccuccugaagauc

SEQ ID NO: 1181028 - RNA, 19 nt, Artificial Sequence
  Description of Artificial Sequence: Synthetic oligonucleotide
ccuauucaccaguggcacg

SEQ ID NO: 1181029 - RNA, 19 nt, Artificial Sequence
  Description of Artificial Sequence: Synthetic oligonucleotide
cucauccgcguggucacag

SEQ ID NO: 1181030 - RNA, 19 nt, Artificial Sequence
  Description of Artificial Sequence: Synthetic oligonucleotide
uagccucaauugugcauuc

SEQ ID NO: 1181031 - RNA, 19 nt, Artificial Sequence
  Description of Artificial Sequence: Synthetic oligonucleotide
gcaagaugcccugacucgc

SEQ ID NO: 1181032 - RNA, 19 nt, Artificial Sequence
  Description of Artificial Sequence: Synthetic oligonucleotide
gcuucggcgucugagcugc

SEQ ID NO: 1181033 - RNA, 19 nt, Artificial Sequence
  Description of Artificial Sequence: Synthetic oligonucleotide
cacacgcgggucugcacac

SEQ ID NO: 1181034 - RNA, 19 nt, Artificial Sequence
  Description of Artificial Sequence: Synthetic oligonucleotide
acucaacuguauguucuau

SEQ ID NO: 1181035 - RNA, 19 nt, Artificial Sequence
  Description of Artificial Sequence: Synthetic oligonucleotide
cagccucuaucugccaacc

SEQ ID NO: 1181036 - RNA, 19 nt, Artificial Sequence
  Description of Artificial Sequence: Synthetic oligonucleotide
auucaccaguggcacggaa

SEQ ID NO: 1181037 - RNA, 19 nt, Artificial Sequence
  Description of Artificial Sequence: Synthetic oligonucleotide
agcgacucgcaaagcagug

SEQ ID NO: 1181038 - RNA, 19 nt, Artificial Sequence
  Description of Artificial Sequence: Synthetic oligonucleotide
acucaccacagcgguaaca

SEQ ID NO: 1181039 - RNA, 19 nt, Artificial Sequence
  Description of Artificial Sequence: Synthetic oligonucleotide
gauguuuacucuggguuuu

SEQ ID NO: 1181040 - RNA, 19 nt, Artificial Sequence
  Description of Artificial Sequence: Synthetic oligonucleotide
cuuuagucaaacuccccuu

SEQ ID NO: 1181041 - RNA, 19 nt, Artificial Sequence
  Description of Artificial Sequence: Synthetic oligonucleotide
gauggcuacaugaccaguu

SEQ ID NO: 1181042 - RNA, 19 nt, Artificial Sequence
  Description of Artificial Sequence: Synthetic oligonucleotide
uucggcgucugagcugccc

SEQ ID NO: 1181043 - RNA, 19 nt, Artificial Sequence
  Description of Artificial Sequence: Synthetic oligonucleotide
cagacaauccaaggccguc

SEQ ID NO: 1181044 - RNA, 19 nt, Artificial Sequence
  Description of Artificial Sequence: Synthetic oligonucleotide
uacucggacgcaggcccag

SEQ ID NO: 1181045 - RNA, 19 nt, Artificial Sequence
  Description of Artificial Sequence: Synthetic oligonucleotide
uugcugcaauugauggcua

SEQ ID NO: 1181046 - RNA, 19 nt, Artificial Sequence
  Description of Artificial Sequence: Synthetic oligonucleotide
gcgguaacaguugacuuca

SEQ ID NO: 1181047 - RNA, 19 nt, Artificial Sequence
  Description of Artificial Sequence: Synthetic oligonucleotide
ccagaagggcuuauugguc

SEQ ID NO: 1181048 - RNA, 19 nt, Artificial Sequence
  Description of Artificial Sequence: Synthetic oligonucleotide
gaagggcuuauuggucuga

SEQ ID NO: 1181049 - RNA, 19 nt, Artificial Sequence
  Description of Artificial Sequence: Synthetic oligonucleotide
ggauacucggacgcaggcc

SEQ ID NO: 1181050 - RNA, 19 nt, Artificial Sequence
  Description of Artificial Sequence: Synthetic oligonucleotide
ugccugcgccacacgcggg

SEQ ID NO: 1181051 - RNA, 19 nt, Artificial Sequence
  Description of Artificial Sequence: Synthetic oligonucleotide
agccucuaucugccaaccu

SEQ ID NO: 1181052 - RNA, 19 nt, Artificial Sequence
  Description of Artificial Sequence: Synthetic oligonucleotide
guagccucaauugugcauu

SEQ ID NO: 1181053 - RNA, 19 nt, Artificial Sequence
  Description of Artificial Sequence: Synthetic oligonucleotide
gagcuucggcgucugagcu

SEQ ID NO: 1181054 - RNA, 19 nt, Artificial Sequence
  Description of Artificial Sequence: Synthetic oligonucleotide
cgcaauuauagcaggcauc

SEQ ID NO: 1181055 - RNA, 19 nt, Artificial Sequence
  Description of Artificial Sequence: Synthetic oligonucleotide
ggccugauacagauguuac

SEQ ID NO: 1181056 - RNA, 19 nt, Artificial Sequence
  Description of Artificial Sequence: Synthetic oligonucleotide
ccuugccugcgccacacgc

SEQ ID NO: 1181057 - RNA, 19 nt, Artificial Sequence
  Description of Artificial Sequence: Synthetic oligonucleotide
cgacucgcaaagcaguggc

SEQ ID NO: 1181058 - RNA, 19 nt, Artificial Sequence
  Description of Artificial Sequence: Synthetic oligonucleotide
gcaagaugaccagacucac

SEQ ID NO: 1181059 - RNA, 19 nt, Artificial Sequence
  Description of Artificial Sequence: Synthetic oligonucleotide
aggggcgacaaaggaaaau

SEQ ID NO: 1181060 - RNA, 19 nt, Artificial Sequence
  Description of Artificial Sequence: Synthetic oligonucleotide
guuaagagcuucggcgucu

SEQ ID NO: 1181061 - RNA, 19 nt, Artificial Sequence
  Description of Artificial Sequence: Synthetic oligonucleotide
cagaucguccacacuugaa

SEQ ID NO: 1181062 - RNA, 19 nt, Artificial Sequence
  Description of Artificial Sequence: Synthetic oligonucleotide
gcgacaaaggaaaauaauu

SEQ ID NO: 1181063 - RNA, 19 nt, Artificial Sequence
  Description of Artificial Sequence: Synthetic oligonucleotide
aggguccuugccugcgcca

SEQ ID NO: 1181064 - RNA, 19 nt, Artificial Sequence
  Description of Artificial Sequence: Synthetic oligonucleotide
accauaugcaugggaugaa

SEQ ID NO: 1181065 - RNA, 19 nt, Artificial Sequence
  Description of Artificial Sequence: Synthetic oligonucleotide
gacucaccacagcgguaac

SEQ ID NO: 1181066 - RNA, 19 nt, Artificial Sequence
  Description of Artificial Sequence: Synthetic oligonucleotide
caguugacuucacucgucu

SEQ ID NO: 1181067 - RNA, 19 nt, Artificial Sequence
  Description of Artificial Sequence: Synthetic oligonucleotide
caauggccagaucguccac

SEQ ID NO: 1181068 - RNA, 19 nt, Artificial Sequence
  Description of Artificial Sequence: Synthetic oligonucleotide
cccuauucaccaguggcac

SEQ ID NO: 1181069 - RNA, 19 nt, Artificial Sequence
  Description of Artificial Sequence: Synthetic oligonucleotide
ggggcgacaaaggaaaaua

SEQ ID NO: 1181070 - RNA, 19 nt, Artificial Sequence
  Description of Artificial Sequence: Synthetic oligonucleotide
augcccuggcuugccacag

SEQ ID NO: 1181071 - RNA, 19 nt, Artificial Sequence
  Description of Artificial Sequence: Synthetic oligonucleotide
cacucaacuguauguucua

SEQ ID NO: 1181072 - RNA, 19 nt, Artificial Sequence
  Description of Artificial Sequence: Synthetic oligonucleotide
gcgacucgcaaagcagugg

SEQ ID NO: 1181073 - RNA, 19 nt, Artificial Sequence
  Description of Artificial Sequence: Synthetic oligonucleotide
auccgcguggucacaguca

SEQ ID NO: 1181074 - RNA, 19 nt, Artificial Sequence
  Description of Artificial Sequence: Synthetic oligonucleotide
gcaauguggccaccucuac

SEQ ID NO: 1181075 - RNA, 19 nt, Artificial Sequence
  Description of Artificial Sequence: Synthetic oligonucleotide
cccacucaacuguauguuc

SEQ ID NO: 1181076 - RNA, 19 nt, Artificial Sequence
  Description of Artificial Sequence: Synthetic oligonucleotide
gcagcauugcucucgcucu

SEQ ID NO: 1181077 - RNA, 19 nt, Artificial Sequence
  Description of Artificial Sequence: Synthetic oligonucleotide
ccucuaccgcaauuauagc

SEQ ID NO: 1181078 - RNA, 19 nt, Artificial Sequence
  Description of Artificial Sequence: Synthetic oligonucleotide
ggaaagcgacucgcaaagc

SEQ ID NO: 1181079 - RNA, 19 nt, Artificial Sequence
  Description of Artificial Sequence: Synthetic oligonucleotide
ggcauucccuggcccaaug

SEQ ID NO: 1181080 - RNA, 19 nt, Artificial Sequence
  Description of Artificial Sequence: Synthetic oligonucleotide
caccucuaccgcaauuaua

SEQ ID NO: 1181081 - RNA, 19 nt, Artificial Sequence
  Description of Artificial Sequence: Synthetic oligonucleotide
cucgcaaagcaguggcugu

SEQ ID NO: 1181082 - RNA, 19 nt, Artificial Sequence
  Description of Artificial Sequence: Synthetic oligonucleotide
acacgcgggucugcacacg

SEQ ID NO: 1181083 - RNA, 19 nt, Artificial Sequence
  Description of Artificial Sequence: Synthetic oligonucleotide
cacacacgccgcugcgcac

SEQ ID NO: 1181084 - RNA, 19 nt, Artificial Sequence
  Description of Artificial Sequence: Synthetic oligonucleotide
cccugacucgccacagcgg

SEQ ID NO: 1181085 - RNA, 19 nt, Artificial Sequence
  Description of Artificial Sequence: Synthetic oligonucleotide
uucacucgucuugcugcaa

SEQ ID NO: 1181086 - RNA, 19 nt, Artificial Sequence
  Description of Artificial Sequence: Synthetic oligonucleotide
guccuugccugcgccacac

SEQ ID NO: 1181087 - RNA, 19 nt, Artificial Sequence
  Description of Artificial Sequence: Synthetic oligonucleotide
cagcuuuauuggaauaguu

SEQ ID NO: 1181088 - RNA, 19 nt, Artificial Sequence
  Description of Artificial Sequence: Synthetic oligonucleotide
caaagcaguggcuguuuau

SEQ ID NO: 1181089 - RNA, 19 nt, Artificial Sequence
  Description of Artificial Sequence: Synthetic oligonucleotide
auguucuaugagggccuga

SEQ ID NO: 1181090 - RNA, 19 nt, Artificial Sequence
  Description of Artificial Sequence: Synthetic oligonucleotide
ccgccaguagggcauuccc

SEQ ID NO: 1181091 - RNA, 19 nt, Artificial Sequence
  Description of Artificial Sequence: Synthetic oligonucleotide
cccacagcgguggauacuc

SEQ ID NO: 1181092 - RNA, 19 nt, Artificial Sequence
  Description of Artificial Sequence: Synthetic oligonucleotide
aggccgucauuaugcuaaa

SEQ ID NO: 1181093 - RNA, 19 nt, Artificial Sequence
  Description of Artificial Sequence: Synthetic oligonucleotide
cugcucauagcugcaguua

SEQ ID NO: 1181094 - RNA, 19 nt, Artificial Sequence
  Description of Artificial Sequence: Synthetic oligonucleotide
ccacucaacuguauguucu

SEQ ID NO: 1181095 - RNA, 19 nt, Artificial Sequence
  Description of Artificial Sequence: Synthetic oligonucleotide
ggaauccucugccucggcu

SEQ ID NO: 1181096 - RNA, 19 nt, Artificial Sequence
  Description of Artificial Sequence: Synthetic oligonucleotide
auguuuacucuggguuuua

SEQ ID NO: 1181097 - RNA, 19 nt, Artificial Sequence
  Description of Artificial Sequence: Synthetic oligonucleotide
caaggccgucauuaugcua

SEQ ID NO: 1181098 - RNA, 19 nt, Artificial Sequence
  Description of Artificial Sequence: Synthetic oligonucleotide
gggcgacaaaggaaaauaa

SEQ ID NO: 1181099 - RNA, 19 nt, Artificial Sequence
  Description of Artificial Sequence: Synthetic oligonucleotide
gggccugauacagauguua

SEQ ID NO: 1181100 - RNA, 19 nt, Artificial Sequence
  Description of Artificial Sequence: Synthetic oligonucleotide
cucggacgcaggcccagga

SEQ ID NO: 1181101 - RNA, 19 nt, Artificial Sequence
  Description of Artificial Sequence: Synthetic oligonucleotide
auacucggacgcaggccca

SEQ ID NO: 1181102 - RNA, 19 nt, Artificial Sequence
  Description of Artificial Sequence: Synthetic oligonucleotide
agggcauucccuggcccaa

SEQ ID NO: 1181103 - RNA, 19 nt, Artificial Sequence
  Description of Artificial Sequence: Synthetic oligonucleotide
ggcgacaaaggaaaauaau

SEQ ID NO: 1181104 - RNA, 19 nt, Artificial Sequence
  Description of Artificial Sequence: Synthetic oligonucleotide
acacucguugcugcucaua

SEQ ID NO: 1181105 - RNA, 19 nt, Artificial Sequence
  Description of Artificial Sequence: Synthetic oligonucleotide
gacucgcaaagcaguggcu

SEQ ID NO: 1181106 - RNA, 19 nt, Artificial Sequence
  Description of Artificial Sequence: Synthetic oligonucleotide
cagaugcccuggcuugcca

SEQ ID NO: 1181107 - RNA, 19 nt, Artificial Sequence
  Description of Artificial Sequence: Synthetic oligonucleotide
gccaccucuaccgcaauua

SEQ ID NO: 1181108 - RNA, 19 nt, Artificial Sequence
  Description of Artificial Sequence: Synthetic oligonucleotide
gccucuaucugccaaccuu

SEQ ID NO: 1181109 - RNA, 19 nt, Artificial Sequence
  Description of Artificial Sequence: Synthetic oligonucleotide
ccgugcaagaugcccugac

SEQ ID NO: 1181110 - RNA, 19 nt, Artificial Sequence
  Description of Artificial Sequence: Synthetic oligonucleotide
ccaggaaagcgacucgcaa

SEQ ID NO: 1181111 - RNA, 19 nt, Artificial Sequence
  Description of Artificial Sequence: Synthetic oligonucleotide
ccacagcgguggauacucg

SEQ ID NO: 1181112 - RNA, 19 nt, Artificial Sequence
  Description of Artificial Sequence: Synthetic oligonucleotide
cagcgguaacaguugacuu

SEQ ID NO: 1181113 - RNA, 19 nt, Artificial Sequence
  Description of Artificial Sequence: Synthetic oligonucleotide
cagacucaccacagcggua

SEQ ID NO: 1181114 - RNA, 19 nt, Artificial Sequence
  Description of Artificial Sequence: Synthetic oligonucleotide
gaggggcgacaaaggaaaa

SEQ ID NO: 1181115 - RNA, 19 nt, Artificial Sequence
  Description of Artificial Sequence: Synthetic oligonucleotide
gcuccaaauuaugcuaacu

SEQ ID NO: 1181116 - RNA, 19 nt, Artificial Sequence
  Description of Artificial Sequence: Synthetic oligonucleotide
agauagccaucaacacauu

SEQ ID NO: 1181117 - RNA, 19 nt, Artificial Sequence
  Description of Artificial Sequence: Synthetic oligonucleotide
ccagacucaccacagcggu

SEQ ID NO: 1181118 - RNA, 19 nt, Artificial Sequence
  Description of Artificial Sequence: Synthetic oligonucleotide
cuucggcgucugagcugcc

SEQ ID NO: 1181119 - RNA, 19 nt, Artificial Sequence
  Description of Artificial Sequence: Synthetic oligonucleotide
ccagaucguccacacuuga

SEQ ID NO: 1181120 - RNA, 19 nt, Artificial Sequence
  Description of Artificial Sequence: Synthetic oligonucleotide
cccaggaaagcgacucgca

SEQ ID NO: 1181121 - RNA, 19 nt, Artificial Sequence
  Description of Artificial Sequence: Synthetic oligonucleotide
ccacacacgccgcugcgca

SEQ ID NO: 1181122 - RNA, 19 nt, Artificial Sequence
  Description of Artificial Sequence: Synthetic oligonucleotide
ccugacucgccacagcggu

SEQ ID NO: 1181123 - RNA, 19 nt, Artificial Sequence
  Description of Artificial Sequence: Synthetic oligonucleotide
cgcguggucacagucacga

SEQ ID NO: 1181124 - RNA, 19 nt, Artificial Sequence
  Description of Artificial Sequence: Synthetic oligonucleotide
caauuauagcaggcauccu

SEQ ID NO: 1181125 - RNA, 19 nt, Artificial Sequence
  Description of Artificial Sequence: Synthetic oligonucleotide
gugcauucccgugcaagau

SEQ ID NO: 1181126 - RNA, 19 nt, Artificial Sequence
  Description of Artificial Sequence: Synthetic oligonucleotide
cugacucgccacagcggua

SEQ ID NO: 1181127 - RNA, 19 nt, Artificial Sequence
  Description of Artificial Sequence: Synthetic oligonucleotide
ccuccuacaugggaacaca

SEQ ID NO: 1181128 - RNA, 19 nt, Artificial Sequence
  Description of Artificial Sequence: Synthetic oligonucleotide
gcgggucugcacacggccc

SEQ ID NO: 1181129 - RNA, 19 nt, Artificial Sequence
  Description of Artificial Sequence: Synthetic oligonucleotide
cacgccgcugcgcacggcu

SEQ ID NO: 1181130 - RNA, 19 nt, Artificial Sequence
  Description of Artificial Sequence: Synthetic oligonucleotide
cuggcccaauggccagauc

SEQ ID NO: 1181131 - RNA, 19 nt, Artificial Sequence
  Description of Artificial Sequence: Synthetic oligonucleotide
ccacaccuauagcacuuca

SEQ ID NO: 1181132 - RNA, 19 nt, Artificial Sequence
  Description of Artificial Sequence: Synthetic oligonucleotide
gcacuucaccuuggugcag

SEQ ID NO: 1181133 - RNA, 19 nt, Artificial Sequence
  Description of Artificial Sequence: Synthetic oligonucleotide
gguccuugccugcgccaca

SEQ ID NO: 1181134 - RNA, 19 nt, Artificial Sequence
  Description of Artificial Sequence: Synthetic oligonucleotide
cacucgucuugcugcaauu

SEQ ID NO: 1181135 - RNA, 19 nt, Artificial Sequence
  Description of Artificial Sequence: Synthetic oligonucleotide
cggcuucucauuccacgac

SEQ ID NO: 1181136 - RNA, 19 nt, Artificial Sequence
  Description of Artificial Sequence: Synthetic oligonucleotide
gcugcgcacggcucuccuc

SEQ ID NO: 1181137 - RNA, 19 nt, Artificial Sequence
  Description of Artificial Sequence: Synthetic oligonucleotide
gcuacugaggucagacaau

SEQ ID NO: 1181138 - RNA, 19 nt, Artificial Sequence
  Description of Artificial Sequence: Synthetic oligonucleotide
gccacacgcgggucugcac

SEQ ID NO: 1181139 - RNA, 19 nt, Artificial Sequence
  Description of Artificial Sequence: Synthetic oligonucleotide
ccacagcgguaacagaugu

SEQ ID NO: 1181140 - RNA, 19 nt, Artificial Sequence
  Description of Artificial Sequence: Synthetic oligonucleotide
ccgcguggucacagucacg

SEQ ID NO: 1181141 - RNA, 19 nt, Artificial Sequence
  Description of Artificial Sequence: Synthetic oligonucleotide
ccgcaauuauagcaggcau

SEQ ID NO: 1181142 - RNA, 19 nt, Artificial Sequence
  Description of Artificial Sequence: Synthetic oligonucleotide
gcgcacggcucuccuccgc

SEQ ID NO: 1181143 - RNA, 19 nt, Artificial Sequence
  Description of Artificial Sequence: Synthetic oligonucleotide
ccaaggccgucauuaugcu

SEQ ID NO: 1181144 - RNA, 19 nt, Artificial Sequence
  Description of Artificial Sequence: Synthetic oligonucleotide
cugcgccacacgcgggucu

SEQ ID NO: 1181145 - RNA, 19 nt, Artificial Sequence
  Description of Artificial Sequence: Synthetic oligonucleotide
cgguaacagaugucaggaa

SEQ ID NO: 1181146 - RNA, 19 nt, Artificial Sequence
  Description of Artificial Sequence: Synthetic oligonucleotide
gccugcgccacacgcgggu

SEQ ID NO: 1181147 - RNA, 19 nt, Artificial Sequence
  Description of Artificial Sequence: Synthetic oligonucleotide
cggcgucugagcugcccac

SEQ ID NO: 1181148 - RNA, 19 nt, Artificial Sequence
  Description of Artificial Sequence: Synthetic oligonucleotide
ggccgucauuaugcuaaaa

SEQ ID NO: 1181149 - RNA, 19 nt, Artificial Sequence
  Description of Artificial Sequence: Synthetic oligonucleotide
cccuggcauagauagccau

SEQ ID NO: 1181150 - RNA, 19 nt, Artificial Sequence
  Description of Artificial Sequence: Synthetic oligonucleotide
ccugcgccacacgcggguc

SEQ ID NO: 1181151 - RNA, 19 nt, Artificial Sequence
  Description of Artificial Sequence: Synthetic oligonucleotide
gcucauccgcguggucaca

SEQ ID NO: 1181152 - RNA, 19 nt, Artificial Sequence
  Description of Artificial Sequence: Synthetic oligonucleotide
ggccaccucuaccgcaauu

SEQ ID NO: 1181153 - RNA, 19 nt, Artificial Sequence
  Description of Artificial Sequence: Synthetic oligonucleotide
cggccuccgccaguagggc

SEQ ID NO: 1181154 - RNA, 19 nt, Artificial Sequence
  Description of Artificial Sequence: Synthetic oligonucleotide
gcgccacacgcgggucugc

SEQ ID NO: 1181155 - RNA, 19 nt, Artificial Sequence
  Description of Artificial Sequence: Synthetic oligonucleotide
cccgugcaagaugcccuga

SEQ ID NO: 1181156 - RNA, 19 nt, Artificial Sequence
  Description of Artificial Sequence: Synthetic oligonucleotide
cgguggauacucggacgca

SEQ ID NO: 1181157 - RNA, 19 nt, Artificial Sequence
  Description of Artificial Sequence: Synthetic oligonucleotide
gggcauucccuggcccaau

SEQ ID NO: 1181158 - RNA, 19 nt, Artificial Sequence
  Description of Artificial Sequence: Synthetic oligonucleotide
cgccacacgcgggucugca

SEQ ID NO: 1181159 - RNA, 19 nt, Artificial Sequence
  Description of Artificial Sequence: Synthetic oligonucleotide
aauauggugaaauuaauac

SEQ ID NO: 1181160 - RNA, 19 nt, Artificial Sequence
  Description of Artificial Sequence: Synthetic oligonucleotide
uuuuguaagagucaaaaug

SEQ ID NO: 1181161 - RNA, 19 nt, Artificial Sequence
  Description of Artificial Sequence: Synthetic oligonucleotide
ucuaauaagcucaugauug

SEQ ID NO: 1181162 - RNA, 19 nt, Artificial Sequence
  Description of Artificial Sequence: Synthetic oligonucleotide
aaaugaaaacgcuuaauuc

SEQ ID NO: 1181163 - RNA, 19 nt, Artificial Sequence
  Description of Artificial Sequence: Synthetic oligonucleotide
ucucaaaugacauagugag

SEQ ID NO: 1181164 - RNA, 19 nt, Artificial Sequence
  Description of Artificial Sequence: Synthetic oligonucleotide
uuuaguauccccaaaguug

SEQ ID NO: 1181165 - RNA, 19 nt, Artificial Sequence
  Description of Artificial Sequence: Synthetic oligonucleotide
aagagcacuagcuucaacg

SEQ ID NO: 1181166 - RNA, 19 nt, Artificial Sequence
  Description of Artificial Sequence: Synthetic oligonucleotide
ugcacuguuaaacuaaccg

SEQ ID NO: 1181167 - RNA, 19 nt, Artificial Sequence
  Description of Artificial Sequence: Synthetic oligonucleotide
uauucuaauaagcucauga

SEQ ID NO: 1181168 - RNA, 19 nt, Artificial Sequence
  Description of Artificial Sequence: Synthetic oligonucleotide
aucauauuuguacaaggcc

SEQ ID NO: 1181169 - RNA, 19 nt, Artificial Sequence
  Description of Artificial Sequence: Synthetic oligonucleotide
aaagcuauaauuacgagga

SEQ ID NO: 1181170 - RNA, 19 nt, Artificial Sequence
  Description of Artificial Sequence: Synthetic oligonucleotide
aaacgcuuaauucuguauc

SEQ ID NO: 1181171 - RNA, 19 nt, Artificial Sequence
  Description of Artificial Sequence: Synthetic oligonucleotide
uuauaaaugggacagccca

SEQ ID NO: 1181172 - RNA, 19 nt, Artificial Sequence
  Description of Artificial Sequence: Synthetic oligonucleotide
uguacaaggccacugaaag

SEQ ID NO: 1181173 - RNA, 19 nt, Artificial Sequence
  Description of Artificial Sequence: Synthetic oligonucleotide
aaccucuacacauguaugc

SEQ ID NO: 1181174 - RNA, 19 nt, Artificial Sequence
  Description of Artificial Sequence: Synthetic oligonucleotide
aacauuaaagcuguagaac

SEQ ID NO: 1181175 - RNA, 19 nt, Artificial Sequence
  Description of Artificial Sequence: Synthetic oligonucleotide
ucuguuauaaaugggacag

SEQ ID NO: 1181176 - RNA, 19 nt, Artificial Sequence
  Description of Artificial Sequence: Synthetic oligonucleotide
ucuacuuucuaauauggug

SEQ ID NO: 1181177 - RNA, 19 nt, Artificial Sequence
  Description of Artificial Sequence: Synthetic oligonucleotide
uaucuacuuucuaauaugg

SEQ ID NO: 1181178 - RNA, 19 nt, Artificial Sequence
  Description of Artificial Sequence: Synthetic oligonucleotide
uguuaaacuaaccgaaacc

SEQ ID NO: 1181179 - RNA, 19 nt, Artificial Sequence
  Description of Artificial Sequence: Synthetic oligonucleotide
agaacgggcaaauaucgcc

SEQ ID NO: 1181180 - RNA, 19 nt, Artificial Sequence
  Description of Artificial Sequence: Synthetic oligonucleotide
ucagaacgggcaaauaucg

SEQ ID NO: 1181181 - RNA, 19 nt, Artificial Sequence
  Description of Artificial Sequence: Synthetic oligonucleotide
ugagguucuauuaaauaag

SEQ ID NO: 1181182 - RNA, 19 nt, Artificial Sequence
  Description of Artificial Sequence: Synthetic oligonucleotide
caaagcuauaauuacgagg

SEQ ID NO: 1181183 - RNA, 19 nt, Artificial Sequence
  Description of Artificial Sequence: Synthetic oligonucleotide
ugaauuaugugacuugucu

SEQ ID NO: 1181184 - RNA, 19 nt, Artificial Sequence
  Description of Artificial Sequence: Synthetic oligonucleotide
auaucauauuuguacaagg

SEQ ID NO: 1181185 - RNA, 19 nt, Artificial Sequence
  Description of Artificial Sequence: Synthetic oligonucleotide
aaaugggacagcccaacac

SEQ ID NO: 1181186 - RNA, 19 nt, Artificial Sequence
  Description of Artificial Sequence: Synthetic oligonucleotide
uuaauucuguaucaggcug

SEQ ID NO: 1181187 - RNA, 19 nt, Artificial Sequence
  Description of Artificial Sequence: Synthetic oligonucleotide
uaaucagccagccagcuug

SEQ ID NO: 1181188 - RNA, 19 nt, Artificial Sequence
  Description of Artificial Sequence: Synthetic oligonucleotide
uuaucguaacuuaaguugc

SEQ ID NO: 1181189 - RNA, 19 nt, Artificial Sequence
  Description of Artificial Sequence: Synthetic oligonucleotide
uaaacuaaccgaaaccucu

SEQ ID NO: 1181190 - RNA, 19 nt, Artificial Sequence
  Description of Artificial Sequence: Synthetic oligonucleotide
ucagucucaaaugacauag

SEQ ID NO: 1181191 - RNA, 19 nt, Artificial Sequence
  Description of Artificial Sequence: Synthetic oligonucleotide
uuuaaggccgucaagucca

SEQ ID NO: 1181192 - RNA, 19 nt, Artificial Sequence
  Description of Artificial Sequence: Synthetic oligonucleotide
uguuguaauccccagaauc

SEQ ID NO: 1181193 - RNA, 19 nt, Artificial Sequence
  Description of Artificial Sequence: Synthetic oligonucleotide
acauacuaccacuaccugc

SEQ ID NO: 1181194 - RNA, 19 nt, Artificial Sequence
  Description of Artificial Sequence: Synthetic oligonucleotide
auaauuacgaggaaguaag

SEQ ID NO: 1181195 - RNA, 19 nt, Artificial Sequence
  Description of Artificial Sequence: Synthetic oligonucleotide
aagccuuuaacuuuaguau

SEQ ID NO: 1181196 - RNA, 19 nt, Artificial Sequence
  Description of Artificial Sequence: Synthetic oligonucleotide
aauauuaguaacaaaugaa

SEQ ID NO: 1181197 - RNA, 19 nt, Artificial Sequence
  Description of Artificial Sequence: Synthetic oligonucleotide
uaaaagguugugcaaaacu

SEQ ID NO: 1181198 - RNA, 19 nt, Artificial Sequence
  Description of Artificial Sequence: Synthetic oligonucleotide
cacaagucacaucagaacg

SEQ ID NO: 1181199 - RNA, 19 nt, Artificial Sequence
  Description of Artificial Sequence: Synthetic oligonucleotide
uaaguaacguaguaaggag

SEQ ID NO: 1181200 - RNA, 19 nt, Artificial Sequence
  Description of Artificial Sequence: Synthetic oligonucleotide
uucuguaucaggcugagua

SEQ ID NO: 1181201 - RNA, 19 nt, Artificial Sequence
  Description of Artificial Sequence: Synthetic oligonucleotide
agaacauuaaagcuguaga

SEQ ID NO: 1181202 - RNA, 19 nt, Artificial Sequence
  Description of Artificial Sequence: Synthetic oligonucleotide
ucaacgacagcugauaagc

SEQ ID NO: 1181203 - RNA, 19 nt, Artificial Sequence
  Description of Artificial Sequence: Synthetic oligonucleotide
uaaagauagacauguauau

SEQ ID NO: 1181204 - RNA, 19 nt, Artificial Sequence
  Description of Artificial Sequence: Synthetic oligonucleotide
aauuaucguaacuuaaguu

SEQ ID NO: 1181205 - RNA, 19 nt, Artificial Sequence
  Description of Artificial Sequence: Synthetic oligonucleotide
uguuauaaaugggacagcc

SEQ ID NO: 1181206 - RNA, 19 nt, Artificial Sequence
  Description of Artificial Sequence: Synthetic oligonucleotide
auagucagugcacaugcac

SEQ ID NO: 1181207 - RNA, 19 nt, Artificial Sequence
  Description of Artificial Sequence: Synthetic oligonucleotide
auaaaggacauuagaagac

SEQ ID NO: 1181208 - RNA, 19 nt, Artificial Sequence
  Description of Artificial Sequence: Synthetic oligonucleotide
aagucaugaauauuaguaa

SEQ ID NO: 1181209 - RNA, 19 nt, Artificial Sequence
  Description of Artificial Sequence: Synthetic oligonucleotide
ucuuuugcagcccauuuac

SEQ ID NO: 1181210 - RNA, 19 nt, Artificial Sequence
  Description of Artificial Sequence: Synthetic oligonucleotide
uguaugcucccuuacaaca

SEQ ID NO: 1181211 - RNA, 19 nt, Artificial Sequence
  Description of Artificial Sequence: Synthetic oligonucleotide
auuaucuacuuucuaauau

SEQ ID NO: 1181212 - RNA, 19 nt, Artificial Sequence
  Description of Artificial Sequence: Synthetic oligonucleotide
aguaaagauagacauguau

SEQ ID NO: 1181213 - RNA, 19 nt, Artificial Sequence
  Description of Artificial Sequence: Synthetic oligonucleotide
aagcauuggagucacacaa

SEQ ID NO: 1181214 - RNA, 19 nt, Artificial Sequence
  Description of Artificial Sequence: Synthetic oligonucleotide
aacgcuuaauucuguauca

SEQ ID NO: 1181215 - RNA, 19 nt, Artificial Sequence
  Description of Artificial Sequence: Synthetic oligonucleotide
auauggugaaauuaauaca

SEQ ID NO: 1181216 - RNA, 19 nt, Artificial Sequence
  Description of Artificial Sequence: Synthetic oligonucleotide
ugaauuguaauguuuugua

SEQ ID NO: 1181217 - RNA, 19 nt, Artificial Sequence
  Description of Artificial Sequence: Synthetic oligonucleotide
aaagcugucccaacacugc

SEQ ID NO: 1181218 - RNA, 19 nt, Artificial Sequence
  Description of Artificial Sequence: Synthetic oligonucleotide
cuaaccgaaaccucuacac

SEQ ID NO: 1181219 - RNA, 19 nt, Artificial Sequence
  Description of Artificial Sequence: Synthetic oligonucleotide
acuagcuucaacgacagcu

SEQ ID NO: 1181220 - RNA, 19 nt, Artificial Sequence
  Description of Artificial Sequence: Synthetic oligonucleotide
aacuaaccgaaaccucuac

SEQ ID NO: 1181221 - RNA, 19 nt, Artificial Sequence
  Description of Artificial Sequence: Synthetic oligonucleotide
uggacuagucacuuuaucu

SEQ ID NO: 1181222 - RNA, 19 nt, Artificial Sequence
  Description of Artificial Sequence: Synthetic oligonucleotide
cagaaaguggguaaguaac

SEQ ID NO: 1181223 - RNA, 19 nt, Artificial Sequence
  Description of Artificial Sequence: Synthetic oligonucleotide
uaucgcccagguaagaugc

SEQ ID NO: 1181224 - RNA, 19 nt, Artificial Sequence
  Description of Artificial Sequence: Synthetic oligonucleotide
uuacgaggaaguaaggaaa

SEQ ID NO: 1181225 - RNA, 19 nt, Artificial Sequence
  Description of Artificial Sequence: Synthetic oligonucleotide
aauuacgaggaaguaagga

SEQ ID NO: 1181226 - RNA, 19 nt, Artificial Sequence
  Description of Artificial Sequence: Synthetic oligonucleotide
agccuuuaacuuuaguauc

SEQ ID NO: 1181227 - RNA, 19 nt, Artificial Sequence
  Description of Artificial Sequence: Synthetic oligonucleotide
aaccgaaaccucuacacau

SEQ ID NO: 1181228 - RNA, 19 nt, Artificial Sequence
  Description of Artificial Sequence: Synthetic oligonucleotide
uaguuauucaaaaucuuuu

SEQ ID NO: 1181229 - RNA, 19 nt, Artificial Sequence
  Description of Artificial Sequence: Synthetic oligonucleotide
uacaauuaucguaacuuaa

SEQ ID NO: 1181230 - RNA, 19 nt, Artificial Sequence
  Description of Artificial Sequence: Synthetic oligonucleotide
caacaaagaaagcuguccc

SEQ ID NO: 1181231 - RNA, 19 nt, Artificial Sequence
  Description of Artificial Sequence: Synthetic oligonucleotide
aaaacgcuuaauucuguau

SEQ ID NO: 1181232 - RNA, 19 nt, Artificial Sequence
  Description of Artificial Sequence: Synthetic oligonucleotide
gagaaugcaagccuuuaac

SEQ ID NO: 1181233 - RNA, 19 nt, Artificial Sequence
  Description of Artificial Sequence: Synthetic oligonucleotide
uaauuacgaggaaguaagg

SEQ ID NO: 1181234 - RNA, 19 nt, Artificial Sequence
  Description of Artificial Sequence: Synthetic oligonucleotide
cugaguagauuucaguuug

SEQ ID NO: 1181235 - RNA, 19 nt, Artificial Sequence
  Description of Artificial Sequence: Synthetic oligonucleotide
agaaugcaagccuuuaacu

SEQ ID NO: 1181236 - RNA, 19 nt, Artificial Sequence
  Description of Artificial Sequence: Synthetic oligonucleotide
auucuguuauaaaugggac

SEQ ID NO: 1181237 - RNA, 19 nt, Artificial Sequence
  Description of Artificial Sequence: Synthetic oligonucleotide
uuaaacuaaccgaaaccuc

SEQ ID NO: 1181238 - RNA, 19 nt, Artificial Sequence
  Description of Artificial Sequence: Synthetic oligonucleotide
uugguauucuaauaagcuc

SEQ ID NO: 1181239 - RNA, 19 nt, Artificial Sequence
  Description of Artificial Sequence: Synthetic oligonucleotide
gaacauuaaagcuguagaa

SEQ ID NO: 1181240 - RNA, 19 nt, Artificial Sequence
  Description of Artificial Sequence: Synthetic oligonucleotide
acaauuaucguaacuuaag

SEQ ID NO: 1181241 - RNA, 19 nt, Artificial Sequence
  Description of Artificial Sequence: Synthetic oligonucleotide
guuuaaggccgucaagucc

SEQ ID NO: 1181242 - RNA, 19 nt, Artificial Sequence
  Description of Artificial Sequence: Synthetic oligonucleotide
ggguaaguaacguaguaag

SEQ ID NO: 1181243 - RNA, 19 nt, Artificial Sequence
  Description of Artificial Sequence: Synthetic oligonucleotide
aaguccaaguaguuauuca

SEQ ID NO: 1181244 - RNA, 19 nt, Artificial Sequence
  Description of Artificial Sequence: Synthetic oligonucleotide
guaaguaacguaguaagga

SEQ ID NO: 1181245 - RNA, 19 nt, Artificial Sequence
  Description of Artificial Sequence: Synthetic oligonucleotide
acuuccgcggacauggugc

SEQ ID NO: 1181246 - RNA, 19 nt, Artificial Sequence
  Description of Artificial Sequence: Synthetic oligonucleotide
aaggccgucaaguccaagu

SEQ ID NO: 1181247 - RNA, 19 nt, Artificial Sequence
  Description of Artificial Sequence: Synthetic oligonucleotide
aagacucaugcaguucagc

SEQ ID NO: 1181248 - RNA, 19 nt, Artificial Sequence
  Description of Artificial Sequence: Synthetic oligonucleotide
ucaugaauauuaguaacaa

SEQ ID NO: 1181249 - RNA, 19 nt, Artificial Sequence
  Description of Artificial Sequence: Synthetic oligonucleotide
agcuauaauuacgaggaag

SEQ ID NO: 1181250 - RNA, 19 nt, Artificial Sequence
  Description of Artificial Sequence: Synthetic oligonucleotide
uucaacgacagcugauaag

SEQ ID NO: 1181251 - RNA, 19 nt, Artificial Sequence
  Description of Artificial Sequence: Synthetic oligonucleotide
guuugguauucuaauaagc

SEQ ID NO: 1181252 - RNA, 19 nt, Artificial Sequence
  Description of Artificial Sequence: Synthetic oligonucleotide
aauaagcucaugauuguaa

SEQ ID NO: 1181253 - RNA, 19 nt, Artificial Sequence
  Description of Artificial Sequence: Synthetic oligonucleotide
cucuuguuaaagcuggaac

SEQ ID NO: 1181254 - RNA, 19 nt, Artificial Sequence
  Description of Artificial Sequence: Synthetic oligonucleotide
auagugagugaaaggaaac

SEQ ID NO: 1181255 - RNA, 19 nt, Artificial Sequence
  Description of Artificial Sequence: Synthetic oligonucleotide
augguuuccgcugaggaag

SEQ ID NO: 1181256 - RNA, 19 nt, Artificial Sequence
  Description of Artificial Sequence: Synthetic oligonucleotide
uaacguaguaaggagaaau

SEQ ID NO: 1181257 - RNA, 19 nt, Artificial Sequence
  Description of Artificial Sequence: Synthetic oligonucleotide
uaagcuucugucuuacaaa

SEQ ID NO: 1181258 - RNA, 19 nt, Artificial Sequence
  Description of Artificial Sequence: Synthetic oligonucleotide
acuuuaguauccccaaagu

SEQ ID NO: 1181259 - RNA, 19 nt, Artificial Sequence
  Description of Artificial Sequence: Synthetic oligonucleotide
uguaaaagguugugcaaaa

SEQ ID NO: 1181260 - RNA, 19 nt, Artificial Sequence
  Description of Artificial Sequence: Synthetic oligonucleotide
aauacaacugagguucuau

SEQ ID NO: 1181261 - RNA, 19 nt, Artificial Sequence
  Description of Artificial Sequence: Synthetic oligonucleotide
uucuaauauggugaaauua

SEQ ID NO: 1181262 - RNA, 19 nt, Artificial Sequence
  Description of Artificial Sequence: Synthetic oligonucleotide
auuaauacagacauuugua

SEQ ID NO: 1181263 - RNA, 19 nt, Artificial Sequence
  Description of Artificial Sequence: Synthetic oligonucleotide
uaaccgaaaccucuacaca

SEQ ID NO: 1181264 - RNA, 19 nt, Artificial Sequence
  Description of Artificial Sequence: Synthetic oligonucleotide
aaucuuuugcagcccauuu

SEQ ID NO: 1181265 - RNA, 19 nt, Artificial Sequence
  Description of Artificial Sequence: Synthetic oligonucleotide
agacucaugcaguucagcu

SEQ ID NO: 1181266 - RNA, 19 nt, Artificial Sequence
  Description of Artificial Sequence: Synthetic oligonucleotide
caaauaucgcccagguaag

SEQ ID NO: 1181267 - RNA, 19 nt, Artificial Sequence
  Description of Artificial Sequence: Synthetic oligonucleotide
agaaaguggguaaguaacg

SEQ ID NO: 1181268 - RNA, 19 nt, Artificial Sequence
  Description of Artificial Sequence: Synthetic oligonucleotide
uuacaacagcagcacauac

SEQ ID NO: 1181269 - RNA, 19 nt, Artificial Sequence
  Description of Artificial Sequence: Synthetic oligonucleotide
uuuugcagcccauuuacuu

SEQ ID NO: 1181270 - RNA, 19 nt, Artificial Sequence
  Description of Artificial Sequence: Synthetic oligonucleotide
uuauaugaauuguaauguu

SEQ ID NO: 1181271 - RNA, 19 nt, Artificial Sequence
  Description of Artificial Sequence: Synthetic oligonucleotide
uaagcauuggagucacaca

SEQ ID NO: 1181272 - RNA, 19 nt, Artificial Sequence
  Description of Artificial Sequence: Synthetic oligonucleotide
acuugcuugcuacuuguug

SEQ ID NO: 1181273 - RNA, 19 nt, Artificial Sequence
  Description of Artificial Sequence: Synthetic oligonucleotide
cugagguucuauuaaauaa

SEQ ID NO: 1181274 - RNA, 19 nt, Artificial Sequence
  Description of Artificial Sequence: Synthetic oligonucleotide
aguguggauaccuugcuuu

SEQ ID NO: 1181275 - RNA, 19 nt, Artificial Sequence
  Description of Artificial Sequence: Synthetic oligonucleotide
ugcaaaacuauuguauuua

SEQ ID NO: 1181276 - RNA, 19 nt, Artificial Sequence
  Description of Artificial Sequence: Synthetic oligonucleotide
aaaguggguaaguaacgua

SEQ ID NO: 1181277 - RNA, 19 nt, Artificial Sequence
  Description of Artificial Sequence: Synthetic oligonucleotide
uugcuagcaaccagggaug

SEQ ID NO: 1181278 - RNA, 19 nt, Artificial Sequence
  Description of Artificial Sequence: Synthetic oligonucleotide
auaccagcuagguaauaug

SEQ ID NO: 1181279 - RNA, 19 nt, Artificial Sequence
  Description of Artificial Sequence: Synthetic oligonucleotide
cuagcuucaacgacagcug

SEQ ID NO: 1181280 - RNA, 19 nt, Artificial Sequence
  Description of Artificial Sequence: Synthetic oligonucleotide
gguucuauuaaauaagagu

SEQ ID NO: 1181281 - RNA, 19 nt, Artificial Sequence
  Description of Artificial Sequence: Synthetic oligonucleotide
guuggagccagcccuauac

SEQ ID NO: 1181282 - RNA, 19 nt, Artificial Sequence
  Description of Artificial Sequence: Synthetic oligonucleotide
ucguaacuuaaguugcugu

SEQ ID NO: 1181283 - RNA, 19 nt, Artificial Sequence
  Description of Artificial Sequence: Synthetic oligonucleotide
augaaaacgcuuaauucug

SEQ ID NO: 1181284 - RNA, 19 nt, Artificial Sequence
  Description of Artificial Sequence: Synthetic oligonucleotide
ugaaaacgcuuaauucugu

SEQ ID NO: 1181285 - RNA, 19 nt, Artificial Sequence
  Description of Artificial Sequence: Synthetic oligonucleotide
ucuuuuaaucagccagcca

SEQ ID NO: 1181286 - RNA, 19 nt, Artificial Sequence
  Description of Artificial Sequence: Synthetic oligonucleotide
aaaucggaaccuccaggcu

SEQ ID NO: 1181287 - RNA, 19 nt, Artificial Sequence
  Description of Artificial Sequence: Synthetic oligonucleotide
guuaaacuaaccgaaaccu

SEQ ID NO: 1181288 - RNA, 19 nt, Artificial Sequence
  Description of Artificial Sequence: Synthetic oligonucleotide
gaauguggucaccagugac

SEQ ID NO: 1181289 - RNA, 19 nt, Artificial Sequence
  Description of Artificial Sequence: Synthetic oligonucleotide
aaagguugugcaaaacuau

SEQ ID NO: 1181290 - RNA, 19 nt, Artificial Sequence
  Description of Artificial Sequence: Synthetic oligonucleotide
uucaacaaagaaagcuguc

SEQ ID NO: 1181291 - RNA, 19 nt, Artificial Sequence
  Description of Artificial Sequence: Synthetic oligonucleotide
aaguaacguaguaaggaga

SEQ ID NO: 1181292 - RNA, 19 nt, Artificial Sequence
  Description of Artificial Sequence: Synthetic oligonucleotide
agagcacuagcuucaacga

SEQ ID NO: 1181293 - RNA, 19 nt, Artificial Sequence
  Description of Artificial Sequence: Synthetic oligonucleotide
caucagugcacuguuaaac

SEQ ID NO: 1181294 - RNA, 19 nt, Artificial Sequence
  Description of Artificial Sequence: Synthetic oligonucleotide
guuguaauccccagaauca

SEQ ID NO: 1181295 - RNA, 19 nt, Artificial Sequence
  Description of Artificial Sequence: Synthetic oligonucleotide
auuagaagacucaugcagu

SEQ ID NO: 1181296 - RNA, 19 nt, Artificial Sequence
  Description of Artificial Sequence: Synthetic oligonucleotide
aggaaguaaggaaagccag

SEQ ID NO: 1181297 - RNA, 19 nt, Artificial Sequence
  Description of Artificial Sequence: Synthetic oligonucleotide
agguuuaaggccgucaagu

SEQ ID NO: 1181298 - RNA, 19 nt, Artificial Sequence
  Description of Artificial Sequence: Synthetic oligonucleotide
auaucgcccagguaagaug

SEQ ID NO: 1181299 - RNA, 19 nt, Artificial Sequence
  Description of Artificial Sequence: Synthetic oligonucleotide
uaugugacuugucuuccaa

SEQ ID NO: 1181300 - RNA, 19 nt, Artificial Sequence
  Description of Artificial Sequence: Synthetic oligonucleotide
uauaccagcuagguaauau

SEQ ID NO: 1181301 - RNA, 19 nt, Artificial Sequence
  Description of Artificial Sequence: Synthetic oligonucleotide
uaccacuaccugcaaagcu

SEQ ID NO: 1181302 - RNA, 19 nt, Artificial Sequence
  Description of Artificial Sequence: Synthetic oligonucleotide
acauggugcuccuucuauc

SEQ ID NO: 1181303 - RNA, 19 nt, Artificial Sequence
  Description of Artificial Sequence: Synthetic oligonucleotide
gauaccuugcuuuuaacuu

SEQ ID NO: 1181304 - RNA, 19 nt, Artificial Sequence
  Description of Artificial Sequence: Synthetic oligonucleotide
uuguacaaggccacugaaa

SEQ ID NO: 1181305 - RNA, 19 nt, Artificial Sequence
  Description of Artificial Sequence: Synthetic oligonucleotide
gguaagaugcucuuguuaa

SEQ ID NO: 1181306 - RNA, 19 nt, Artificial Sequence
  Description of Artificial Sequence: Synthetic oligonucleotide
gggguugagaagaauauag

SEQ ID NO: 1181307 - RNA, 19 nt, Artificial Sequence
  Description of Artificial Sequence: Synthetic oligonucleotide
aaaccucuacacauguaug

SEQ ID NO: 1181308 - RNA, 19 nt, Artificial Sequence
  Description of Artificial Sequence: Synthetic oligonucleotide
uuagaagacucaugcaguu

SEQ ID NO: 1181309 - RNA, 19 nt, Artificial Sequence
  Description of Artificial Sequence: Synthetic oligonucleotide
uuuguguaggaagucuugu

SEQ ID NO: 1181310 - RNA, 19 nt, Artificial Sequence
  Description of Artificial Sequence: Synthetic oligonucleotide
agcuagguaauauguacaa

SEQ ID NO: 1181311 - RNA, 19 nt, Artificial Sequence
  Description of Artificial Sequence: Synthetic oligonucleotide
cauagugagugaaaggaaa

SEQ ID NO: 1181312 - RNA, 19 nt, Artificial Sequence
  Description of Artificial Sequence: Synthetic oligonucleotide
gaacgggcaaauaucgccc

SEQ ID NO: 1181313 - RNA, 19 nt, Artificial Sequence
  Description of Artificial Sequence: Synthetic oligonucleotide
acuaaccgaaaccucuaca

SEQ ID NO: 1181314 - RNA, 19 nt, Artificial Sequence
  Description of Artificial Sequence: Synthetic oligonucleotide
aauaucgcccagguaagau

SEQ ID NO: 1181315 - RNA, 19 nt, Artificial Sequence
  Description of Artificial Sequence: Synthetic oligonucleotide
uaugccuaagcaacauauc

SEQ ID NO: 1181316 - RNA, 19 nt, Artificial Sequence
  Description of Artificial Sequence: Synthetic oligonucleotide
aacuuaaguugcuguuaca

SEQ ID NO: 1181317 - RNA, 19 nt, Artificial Sequence
  Description of Artificial Sequence: Synthetic oligonucleotide
auaugccuaagcaacauau

SEQ ID NO: 1181318 - RNA, 19 nt, Artificial Sequence
  Description of Artificial Sequence: Synthetic oligonucleotide
agcccauuuacuugugucu

SEQ ID NO: 1181319 - RNA, 19 nt, Artificial Sequence
  Description of Artificial Sequence: Synthetic oligonucleotide
acugagguucuauuaaaua

SEQ ID NO: 1181320 - RNA, 19 nt, Artificial Sequence
  Description of Artificial Sequence: Synthetic oligonucleotide
uagugagugaaaggaaaca

SEQ ID NO: 1181321 - RNA, 19 nt, Artificial Sequence
  Description of Artificial Sequence: Synthetic oligonucleotide
cacuguuaaacuaaccgaa

SEQ ID NO: 1181322 - RNA, 19 nt, Artificial Sequence
  Description of Artificial Sequence: Synthetic oligonucleotide
aguaacguaguaaggagaa

SEQ ID NO: 1181323 - RNA, 19 nt, Artificial Sequence
  Description of Artificial Sequence: Synthetic oligonucleotide
agugcacuguuaaacuaac

SEQ ID NO: 1181324 - RNA, 19 nt, Artificial Sequence
  Description of Artificial Sequence: Synthetic oligonucleotide
uacuuguuggagccagccc

SEQ ID NO: 1181325 - RNA, 19 nt, Artificial Sequence
  Description of Artificial Sequence: Synthetic oligonucleotide
aacuuccgcggacauggug

SEQ ID NO: 1181326 - RNA, 19 nt, Artificial Sequence
  Description of Artificial Sequence: Synthetic oligonucleotide
ugcaaucguuuccuuaaaa

SEQ ID NO: 1181327 - RNA, 19 nt, Artificial Sequence
  Description of Artificial Sequence: Synthetic oligonucleotide
uguaucaggcugaguagau

SEQ ID NO: 1181328 - RNA, 19 nt, Artificial Sequence
  Description of Artificial Sequence: Synthetic oligonucleotide
gagguucuauuaaauaaga

SEQ ID NO: 1181329 - RNA, 19 nt, Artificial Sequence
  Description of Artificial Sequence: Synthetic oligonucleotide
gguaaguaacguaguaagg

SEQ ID NO: 1181330 - RNA, 19 nt, Artificial Sequence
  Description of Artificial Sequence: Synthetic oligonucleotide
uggugcuccuucuaucccc

SEQ ID NO: 1181331 - RNA, 19 nt, Artificial Sequence
  Description of Artificial Sequence: Synthetic oligonucleotide
aacgggcaaauaucgccca

SEQ ID NO: 1181332 - RNA, 19 nt, Artificial Sequence
  Description of Artificial Sequence: Synthetic oligonucleotide
aagcaacauaucauauuug

SEQ ID NO: 1181333 - RNA, 19 nt, Artificial Sequence
  Description of Artificial Sequence: Synthetic oligonucleotide
uggguaaguaacguaguaa

SEQ ID NO: 1181334 - RNA, 19 nt, Artificial Sequence
  Description of Artificial Sequence: Synthetic oligonucleotide
uuaugugacuugucuucca

SEQ ID NO: 1181335 - RNA, 19 nt, Artificial Sequence
  Description of Artificial Sequence: Synthetic oligonucleotide
uuuugcuccuccgccgacg

SEQ ID NO: 1181336 - RNA, 19 nt, Artificial Sequence
  Description of Artificial Sequence: Synthetic oligonucleotide
ucugucuuaucuggggcug

SEQ ID NO: 1181337 - RNA, 19 nt, Artificial Sequence
  Description of Artificial Sequence: Synthetic oligonucleotide
agguucuauuaaauaagag

SEQ ID NO: 1181338 - RNA, 19 nt, Artificial Sequence
  Description of Artificial Sequence: Synthetic oligonucleotide
agagaaugcaagccuuuaa

SEQ ID NO: 1181339 - RNA, 19 nt, Artificial Sequence
  Description of Artificial Sequence: Synthetic oligonucleotide
ugucugaauuaugugacuu

SEQ ID NO: 1181340 - RNA, 19 nt, Artificial Sequence
  Description of Artificial Sequence: Synthetic oligonucleotide
ccagcuagguaauauguac

SEQ ID NO: 1181341 - RNA, 19 nt, Artificial Sequence
  Description of Artificial Sequence: Synthetic oligonucleotide
cuacuuguuggagccagcc

SEQ ID NO: 1181342 - RNA, 19 nt, Artificial Sequence
  Description of Artificial Sequence: Synthetic oligonucleotide
agcaaccagggaugguuuc

SEQ ID NO: 1181343 - RNA, 19 nt, Artificial Sequence
  Description of Artificial Sequence: Synthetic oligonucleotide
aauggugggcagauuugug

SEQ ID NO: 1181344 - RNA, 19 nt, Artificial Sequence
  Description of Artificial Sequence: Synthetic oligonucleotide
agguaagaugcucuuguua

SEQ ID NO: 1181345 - RNA, 19 nt, Artificial Sequence
  Description of Artificial Sequence: Synthetic oligonucleotide
auuuguguaggaagucuug

SEQ ID NO: 1181346 - RNA, 19 nt, Artificial Sequence
  Description of Artificial Sequence: Synthetic oligonucleotide
gaaaacgcuuaauucugua

SEQ ID NO: 1181347 - RNA, 19 nt, Artificial Sequence
  Description of Artificial Sequence: Synthetic oligonucleotide
guaugcucccuuacaacag

SEQ ID NO: 1181348 - RNA, 19 nt, Artificial Sequence
  Description of Artificial Sequence: Synthetic oligonucleotide
aaaguugaguguggaagua

SEQ ID NO: 1181349 - RNA, 19 nt, Artificial Sequence
  Description of Artificial Sequence: Synthetic oligonucleotide
caugauuguaaacuauucu

SEQ ID NO: 1181350 - RNA, 19 nt, Artificial Sequence
  Description of Artificial Sequence: Synthetic oligonucleotide
ugcaauagucagugcacau

SEQ ID NO: 1181351 - RNA, 19 nt, Artificial Sequence
  Description of Artificial Sequence: Synthetic oligonucleotide
acguaguaaggagaaauaa

SEQ ID NO: 1181352 - RNA, 19 nt, Artificial Sequence
  Description of Artificial Sequence: Synthetic oligonucleotide
cauguauauucuguuauaa

SEQ ID NO: 1181353 - RNA, 19 nt, Artificial Sequence
  Description of Artificial Sequence: Synthetic oligonucleotide
cccuauaccagcuagguaa

SEQ ID NO: 1181354 - RNA, 19 nt, Artificial Sequence
  Description of Artificial Sequence: Synthetic oligonucleotide
agugaaugcaauagucagu

SEQ ID NO: 1181355 - RNA, 19 nt, Artificial Sequence
  Description of Artificial Sequence: Synthetic oligonucleotide
cagaacgggcaaauaucgc

SEQ ID NO: 1181356 - RNA, 19 nt, Artificial Sequence
  Description of Artificial Sequence: Synthetic oligonucleotide
aagguugugcaaaacuauu

SEQ ID NO: 1181357 - RNA, 19 nt, Artificial Sequence
  Description of Artificial Sequence: Synthetic oligonucleotide
aaauaucgcccagguaaga

SEQ ID NO: 1181358 - RNA, 19 nt, Artificial Sequence
  Description of Artificial Sequence: Synthetic oligonucleotide
ccaaguguggauaccuugc

SEQ ID NO: 1181359 - RNA, 19 nt, Artificial Sequence
  Description of Artificial Sequence: Synthetic oligonucleotide
gaauuaugugacuugucuu

SEQ ID NO: 1181360 - RNA, 19 nt, Artificial Sequence
  Description of Artificial Sequence: Synthetic oligonucleotide
aagcuauaauuacgaggaa

SEQ ID NO: 1181361 - RNA, 19 nt, Artificial Sequence
  Description of Artificial Sequence: Synthetic oligonucleotide
gcacuguuaaacuaaccga

SEQ ID NO: 1181362 - RNA, 19 nt, Artificial Sequence
  Description of Artificial Sequence: Synthetic oligonucleotide
cacauguaugcucccuuac

SEQ ID NO: 1181363 - RNA, 19 nt, Artificial Sequence
  Description of Artificial Sequence: Synthetic oligonucleotide
caaaugacauagugaguga

SEQ ID NO: 1181364 - RNA, 19 nt, Artificial Sequence
  Description of Artificial Sequence: Synthetic oligonucleotide
caauuaucguaacuuaagu

SEQ ID NO: 1181365 - RNA, 19 nt, Artificial Sequence
  Description of Artificial Sequence: Synthetic oligonucleotide
ugcaagccuuuaacuuuag

SEQ ID NO: 1181366 - RNA, 19 nt, Artificial Sequence
  Description of Artificial Sequence: Synthetic oligonucleotide
gcuguuacauguccuuugc

SEQ ID NO: 1181367 - RNA, 19 nt, Artificial Sequence
  Description of Artificial Sequence: Synthetic oligonucleotide
guaaaagguugugcaaaac

SEQ ID NO: 1181368 - RNA, 19 nt, Artificial Sequence
  Description of Artificial Sequence: Synthetic oligonucleotide
gccuuuaacuuuaguaucc

SEQ ID NO: 1181369 - RNA, 19 nt, Artificial Sequence
  Description of Artificial Sequence: Synthetic oligonucleotide
aaacuaaccgaaaccucua

SEQ ID NO: 1181370 - RNA, 19 nt, Artificial Sequence
  Description of Artificial Sequence: Synthetic oligonucleotide
cagcuagguaauauguaca

SEQ ID NO: 1181371 - RNA, 19 nt, Artificial Sequence
  Description of Artificial Sequence: Synthetic oligonucleotide
gauaugccuaagcaacaua

SEQ ID NO: 1181372 - RNA, 19 nt, Artificial Sequence
  Description of Artificial Sequence: Synthetic oligonucleotide
cacauacuaccacuaccug

SEQ ID NO: 1181373 - RNA, 19 nt, Artificial Sequence
  Description of Artificial Sequence: Synthetic oligonucleotide
agcuugcuagcaaccaggg

SEQ ID NO: 1181374 - RNA, 19 nt, Artificial Sequence
  Description of Artificial Sequence: Synthetic oligonucleotide
acgcuuaauucuguaucag

SEQ ID NO: 1181375 - RNA, 19 nt, Artificial Sequence
  Description of Artificial Sequence: Synthetic oligonucleotide
cagguuuaaggccgucaag

SEQ ID NO: 1181376 - RNA, 19 nt, Artificial Sequence
  Description of Artificial Sequence: Synthetic oligonucleotide
caaaguugaguguggaagu

SEQ ID NO: 1181377 - RNA, 19 nt, Artificial Sequence
  Description of Artificial Sequence: Synthetic oligonucleotide
guaacuuaaguugcuguua

SEQ ID NO: 1181378 - RNA, 19 nt, Artificial Sequence
  Description of Artificial Sequence: Synthetic oligonucleotide
guaggaagucuugugcuuc

SEQ ID NO: 1181379 - RNA, 19 nt, Artificial Sequence
  Description of Artificial Sequence: Synthetic oligonucleotide
cuggacuagucacuuuauc

SEQ ID NO: 1181380 - RNA, 19 nt, Artificial Sequence
  Description of Artificial Sequence: Synthetic oligonucleotide
aguugaguguggaaguaaa

SEQ ID NO: 1181381 - RNA, 19 nt, Artificial Sequence
  Description of Artificial Sequence: Synthetic oligonucleotide
cuguuauaaaugggacagc

SEQ ID NO: 1181382 - RNA, 19 nt, Artificial Sequence
  Description of Artificial Sequence: Synthetic oligonucleotide
gcuauaauuacgaggaagu

SEQ ID NO: 1181383 - RNA, 19 nt, Artificial Sequence
  Description of Artificial Sequence: Synthetic oligonucleotide
gguuuaaggccgucaaguc

SEQ ID NO: 1181384 - RNA, 19 nt, Artificial Sequence
  Description of Artificial Sequence: Synthetic oligonucleotide
cagugcacuguuaaacuaa

SEQ ID NO: 1181385 - RNA, 19 nt, Artificial Sequence
  Description of Artificial Sequence: Synthetic oligonucleotide
uuuugcccuuucugcaauc

SEQ ID NO: 1181386 - RNA, 19 nt, Artificial Sequence
  Description of Artificial Sequence: Synthetic oligonucleotide
uugcuuuugccauguugua

SEQ ID NO: 1181387 - RNA, 19 nt, Artificial Sequence
  Description of Artificial Sequence: Synthetic oligonucleotide
aguaacauacaaagcuaua

SEQ ID NO: 1181388 - RNA, 19 nt, Artificial Sequence
  Description of Artificial Sequence: Synthetic oligonucleotide
gcucuuuuaaucagccagc

SEQ ID NO: 1181389 - RNA, 19 nt, Artificial Sequence
  Description of Artificial Sequence: Synthetic oligonucleotide
accgaaaccucuacacaug

SEQ ID NO: 1181390 - RNA, 19 nt, Artificial Sequence
  Description of Artificial Sequence: Synthetic oligonucleotide
cuuuaguauccccaaaguu

SEQ ID NO: 1181391 - RNA, 19 nt, Artificial Sequence
  Description of Artificial Sequence: Synthetic oligonucleotide
acgggcaaauaucgcccag

SEQ ID NO: 1181392 - RNA, 19 nt, Artificial Sequence
  Description of Artificial Sequence: Synthetic oligonucleotide
guauucuaauaagcucaug

SEQ ID NO: 1181393 - RNA, 19 nt, Artificial Sequence
  Description of Artificial Sequence: Synthetic oligonucleotide
cuccuucuauccccgcgcc

SEQ ID NO: 1181394 - RNA, 19 nt, Artificial Sequence
  Description of Artificial Sequence: Synthetic oligonucleotide
cucaugauuguaaacuauu

SEQ ID NO: 1181395 - RNA, 19 nt, Artificial Sequence
  Description of Artificial Sequence: Synthetic oligonucleotide
ugucccaaguguggauacc

SEQ ID NO: 1181396 - RNA, 19 nt, Artificial Sequence
  Description of Artificial Sequence: Synthetic oligonucleotide
uuggcacauuaucuacuuu

SEQ ID NO: 1181397 - RNA, 19 nt, Artificial Sequence
  Description of Artificial Sequence: Synthetic oligonucleotide
acgacagcugauaagcauu

SEQ ID NO: 1181398 - RNA, 19 nt, Artificial Sequence
  Description of Artificial Sequence: Synthetic oligonucleotide
uauccccgcgccuccggcc

SEQ ID NO: 1181399 - RNA, 19 nt, Artificial Sequence
  Description of Artificial Sequence: Synthetic oligonucleotide
aggccgucaaguccaagua

SEQ ID NO: 1181400 - RNA, 19 nt, Artificial Sequence
  Description of Artificial Sequence: Synthetic oligonucleotide
gucacacaagucacaucag

SEQ ID NO: 1181401 - RNA, 19 nt, Artificial Sequence
  Description of Artificial Sequence: Synthetic oligonucleotide
cuucaacgacagcugauaa

SEQ ID NO: 1181402 - RNA, 19 nt, Artificial Sequence
  Description of Artificial Sequence: Synthetic oligonucleotide
ggacauuagaagacucaug

SEQ ID NO: 1181403 - RNA, 19 nt, Artificial Sequence
  Description of Artificial Sequence: Synthetic oligonucleotide
uuccgcugaggaagguccu

SEQ ID NO: 1181404 - RNA, 19 nt, Artificial Sequence
  Description of Artificial Sequence: Synthetic oligonucleotide
ggccgucaaguccaaguag

SEQ ID NO: 1181405 - RNA, 19 nt, Artificial Sequence
  Description of Artificial Sequence: Synthetic oligonucleotide
gccuaagcaacauaucaua

SEQ ID NO: 1181406 - RNA, 19 nt, Artificial Sequence
  Description of Artificial Sequence: Synthetic oligonucleotide
uuaaggccgucaaguccaa

SEQ ID NO: 1181407 - RNA, 19 nt, Artificial Sequence
  Description of Artificial Sequence: Synthetic oligonucleotide
guggguaaguaacguagua

SEQ ID NO: 1181408 - RNA, 19 nt, Artificial Sequence
  Description of Artificial Sequence: Synthetic oligonucleotide
ggugcuccuucuauccccg

SEQ ID NO: 1181409 - RNA, 19 nt, Artificial Sequence
  Description of Artificial Sequence: Synthetic oligonucleotide
caacgacagcugauaagca

SEQ ID NO: 1181410 - RNA, 19 nt, Artificial Sequence
  Description of Artificial Sequence: Synthetic oligonucleotide
gacgcccaagcacuuccuc

SEQ ID NO: 1181411 - RNA, 19 nt, Artificial Sequence
  Description of Artificial Sequence: Synthetic oligonucleotide
guuggcacauuaucuacuu

SEQ ID NO: 1181412 - RNA, 19 nt, Artificial Sequence
  Description of Artificial Sequence: Synthetic oligonucleotide
cuauccccgcgccuccggc

SEQ ID NO: 1181413 - RNA, 19 nt, Artificial Sequence
  Description of Artificial Sequence: Synthetic oligonucleotide
uaccugcaaagcugucagu

SEQ ID NO: 1181414 - RNA, 19 nt, Artificial Sequence
  Description of Artificial Sequence: Synthetic oligonucleotide
ggacuagucacuuuaucuu

SEQ ID NO: 1181415 - RNA, 19 nt, Artificial Sequence
  Description of Artificial Sequence: Synthetic oligonucleotide
guagaacuugcuugcuacu

SEQ ID NO: 1181416 - RNA, 19 nt, Artificial Sequence
  Description of Artificial Sequence: Synthetic oligonucleotide
cguaguaaggagaaauaaa

SEQ ID NO: 1181417 - RNA, 19 nt, Artificial Sequence
  Description of Artificial Sequence: Synthetic oligonucleotide
accagcuagguaauaugua

SEQ ID NO: 1181418 - RNA, 19 nt, Artificial Sequence
  Description of Artificial Sequence: Synthetic oligonucleotide
uaaggccgucaaguccaag

SEQ ID NO: 1181419 - RNA, 19 nt, Artificial Sequence
  Description of Artificial Sequence: Synthetic oligonucleotide
gcggacauggugcuccuuc

SEQ ID NO: 1181420 - RNA, 19 nt, Artificial Sequence
  Description of Artificial Sequence: Synthetic oligonucleotide
agcuucaacgacagcugau

SEQ ID NO: 1181421 - RNA, 19 nt, Artificial Sequence
  Description of Artificial Sequence: Synthetic oligonucleotide
gggaugguuuccgcugagg

SEQ ID NO: 1181422 - RNA, 19 nt, Artificial Sequence
  Description of Artificial Sequence: Synthetic oligonucleotide
guaacguaguaaggagaaa

SEQ ID NO: 1181423 - RNA, 19 nt, Artificial Sequence
  Description of Artificial Sequence: Synthetic oligonucleotide
cacuagcuucaacgacagc

SEQ ID NO: 1181424 - RNA, 19 nt, Artificial Sequence
  Description of Artificial Sequence: Synthetic oligonucleotide
gcugaguagauuucaguuu

SEQ ID NO: 1181425 - RNA, 19 nt, Artificial Sequence
  Description of Artificial Sequence: Synthetic oligonucleotide
gcuucaacgacagcugaua

SEQ ID NO: 1181426 - RNA, 19 nt, Artificial Sequence
  Description of Artificial Sequence: Synthetic oligonucleotide
gugacuugucuuccaacuu

SEQ ID NO: 1181427 - RNA, 19 nt, Artificial Sequence
  Description of Artificial Sequence: Synthetic oligonucleotide
uuguuggagccagcccuau

SEQ ID NO: 1181428 - RNA, 19 nt, Artificial Sequence
  Description of Artificial Sequence: Synthetic oligonucleotide
cugcaaucguuuccuuaaa

SEQ ID NO: 1181429 - RNA, 19 nt, Artificial Sequence
  Description of Artificial Sequence: Synthetic oligonucleotide
cccugcgacgcccaagcac

SEQ ID NO: 1181430 - RNA, 19 nt, Artificial Sequence
  Description of Artificial Sequence: Synthetic oligonucleotide
cagagaaugcaagccuuua

SEQ ID NO: 1181431 - RNA, 19 nt, Artificial Sequence
  Description of Artificial Sequence: Synthetic oligonucleotide
gcaucagugcacuguuaaa

SEQ ID NO: 1181432 - RNA, 19 nt, Artificial Sequence
  Description of Artificial Sequence: Synthetic oligonucleotide
ugcgacgcccaagcacuuc

SEQ ID NO: 1181433 - RNA, 19 nt, Artificial Sequence
  Description of Artificial Sequence: Synthetic oligonucleotide
guguggauaccuugcuuuu

SEQ ID NO: 1181434 - RNA, 19 nt, Artificial Sequence
  Description of Artificial Sequence: Synthetic oligonucleotide
gguauucuaauaagcucau

SEQ ID NO: 1181435 - RNA, 19 nt, Artificial Sequence
  Description of Artificial Sequence: Synthetic oligonucleotide
ccugcgacgcccaagcacu

SEQ ID NO: 1181436 - RNA, 19 nt, Artificial Sequence
  Description of Artificial Sequence: Synthetic oligonucleotide
ggcaaauaucgcccaggua

SEQ ID NO: 1181437 - RNA, 19 nt, Artificial Sequence
  Description of Artificial Sequence: Synthetic oligonucleotide
gccgucaaguccaaguagu

SEQ ID NO: 1181438 - RNA, 19 nt, Artificial Sequence
  Description of Artificial Sequence: Synthetic oligonucleotide
cgggcaaauaucgcccagg

SEQ ID NO: 1181439 - RNA, 19 nt, Artificial Sequence
  Description of Artificial Sequence: Synthetic oligonucleotide
cuuccgcggacauggugcu

SEQ ID NO: 1181440 - RNA, 19 nt, Artificial Sequence
  Description of Artificial Sequence: Synthetic oligonucleotide
aucgcccagguaagaugcu

SEQ ID NO: 1181441 - RNA, 19 nt, Artificial Sequence
  Description of Artificial Sequence: Synthetic oligonucleotide
cagugaccucugucuuauc

SEQ ID NO: 1181442 - RNA, 19 nt, Artificial Sequence
  Description of Artificial Sequence: Synthetic oligonucleotide
cuauaccagcuagguaaua

SEQ ID NO: 1181443 - RNA, 19 nt, Artificial Sequence
  Description of Artificial Sequence: Synthetic oligonucleotide
guaucaggcugaguagauu

SEQ ID NO: 1181444 - RNA, 19 nt, Artificial Sequence
  Description of Artificial Sequence: Synthetic oligonucleotide
cagguaagaugcucuuguu

SEQ ID NO: 1181445 - RNA, 19 nt, Artificial Sequence
  Description of Artificial Sequence: Synthetic oligonucleotide
gcaguucagcucuuuuaau

SEQ ID NO: 1181446 - RNA, 19 nt, Artificial Sequence
  Description of Artificial Sequence: Synthetic oligonucleotide
cguaacuuaaguugcuguu

SEQ ID NO: 1181447 - RNA, 19 nt, Artificial Sequence
  Description of Artificial Sequence: Synthetic oligonucleotide
ccacuaccugcaaagcugu

SEQ ID NO: 1181448 - RNA, 19 nt, Artificial Sequence
  Description of Artificial Sequence: Synthetic oligonucleotide
ccgaaaccucuacacaugu

SEQ ID NO: 1181449 - RNA, 19 nt, Artificial Sequence
  Description of Artificial Sequence: Synthetic oligonucleotide
uuccgcggacauggugcuc

SEQ ID NO: 1181450 - RNA, 19 nt, Artificial Sequence
  Description of Artificial Sequence: Synthetic oligonucleotide
caccagugaccucugucuu

SEQ ID NO: 1181451 - RNA, 19 nt, Artificial Sequence
  Description of Artificial Sequence: Synthetic oligonucleotide
cagcagguuuaaggccguc

SEQ ID NO: 1181452 - RNA, 19 nt, Artificial Sequence
  Description of Artificial Sequence: Synthetic oligonucleotide
ccuauaccagcuagguaau

SEQ ID NO: 1181453 - RNA, 19 nt, Artificial Sequence
  Description of Artificial Sequence: Synthetic oligonucleotide
gcagcccauuuacuugugu

SEQ ID NO: 1181454 - RNA, 19 nt, Artificial Sequence
  Description of Artificial Sequence: Synthetic oligonucleotide
gaacuuccgcggacauggu

SEQ ID NO: 1181455 - RNA, 19 nt, Artificial Sequence
  Description of Artificial Sequence: Synthetic oligonucleotide
ccaggcuuuugucccaagu

SEQ ID NO: 1181456 - RNA, 19 nt, Artificial Sequence
  Description of Artificial Sequence: Synthetic oligonucleotide
ccccaaaguugagugugga

SEQ ID NO: 1181457 - RNA, 19 nt, Artificial Sequence
  Description of Artificial Sequence: Synthetic oligonucleotide
ccucgggaacuuccgcgga

SEQ ID NO: 1181458 - RNA, 19 nt, Artificial Sequence
  Description of Artificial Sequence: Synthetic oligonucleotide
ccagugaccucugucuuau

SEQ ID NO: 1181459 - RNA, 19 nt, Artificial Sequence
  Description of Artificial Sequence: Synthetic oligonucleotide
ccgccgacgcugccucggg

SEQ ID NO: 1181460 - RNA, 19 nt, Artificial Sequence
  Description of Artificial Sequence: Synthetic oligonucleotide
gcuagcaaccagggauggu

SEQ ID NO: 1181461 - RNA, 19 nt, Artificial Sequence
  Description of Artificial Sequence: Synthetic oligonucleotide
ccagaacauuaaagcugua

SEQ ID NO: 1181462 - RNA, 19 nt, Artificial Sequence
  Description of Artificial Sequence: Synthetic oligonucleotide
gguuuccgcugaggaaggu

SEQ ID NO: 1181463 - RNA, 19 nt, Artificial Sequence
  Description of Artificial Sequence: Synthetic oligonucleotide
cggacauggugcuccuucu

SEQ ID NO: 1181464 - RNA, 19 nt, Artificial Sequence
  Description of Artificial Sequence: Synthetic oligonucleotide
cugcgacgcccaagcacuu

SEQ ID NO: 1181465 - RNA, 19 nt, Artificial Sequence
  Description of Artificial Sequence: Synthetic oligonucleotide
cgccuccggcccugcgacg

SEQ ID NO: 1181466 - RNA, 19 nt, Artificial Sequence
  Description of Artificial Sequence: Synthetic oligonucleotide
cgccgacgcugccucggga

SEQ ID NO: 1181467 - RNA, 19 nt, Artificial Sequence
  Description of Artificial Sequence: Synthetic oligonucleotide
cgcggacauggugcuccuu

SEQ ID NO: 1181468 - RNA, 19 nt, Artificial Sequence
  Description of Artificial Sequence: Synthetic oligonucleotide
aaggcaaaggcuuucaggc

SEQ ID NO: 1181469 - RNA, 19 nt, Artificial Sequence
  Description of Artificial Sequence: Synthetic oligonucleotide
aguaggauaacuuccagcc

SEQ ID NO: 1181470 - RNA, 19 nt, Artificial Sequence
  Description of Artificial Sequence: Synthetic oligonucleotide
ugagcaguaaugaauaucg

SEQ ID NO: 1181471 - RNA, 19 nt, Artificial Sequence
  Description of Artificial Sequence: Synthetic oligonucleotide
uuauauaucacuaggguca

SEQ ID NO: 1181472 - RNA, 19 nt, Artificial Sequence
  Description of Artificial Sequence: Synthetic oligonucleotide
agugauggacauuaaaugc

SEQ ID NO: 1181473 - RNA, 19 nt, Artificial Sequence
  Description of Artificial Sequence: Synthetic oligonucleotide
auauaagaguuacaaaacc

SEQ ID NO: 1181474 - RNA, 19 nt, Artificial Sequence
  Description of Artificial Sequence: Synthetic oligonucleotide
acagcuacuagauacagcg

SEQ ID NO: 1181475 - RNA, 19 nt, Artificial Sequence
  Description of Artificial Sequence: Synthetic oligonucleotide
aauuauguccguuaguaug

SEQ ID NO: 1181476 - RNA, 19 nt, Artificial Sequence
  Description of Artificial Sequence: Synthetic oligonucleotide
auagaauugagauacagga

SEQ ID NO: 1181477 - RNA, 19 nt, Artificial Sequence
  Description of Artificial Sequence: Synthetic oligonucleotide
cuugguuucaguuaacugg

SEQ ID NO: 1181478 - RNA, 19 nt, Artificial Sequence
  Description of Artificial Sequence: Synthetic oligonucleotide
aaucacaguaaccacauga

SEQ ID NO: 1181479 - RNA, 19 nt, Artificial Sequence
  Description of Artificial Sequence: Synthetic oligonucleotide
ugagauacaggauaaacca

SEQ ID NO: 1181480 - RNA, 19 nt, Artificial Sequence
  Description of Artificial Sequence: Synthetic oligonucleotide
acuguuauauaucacuagg

SEQ ID NO: 1181481 - RNA, 19 nt, Artificial Sequence
  Description of Artificial Sequence: Synthetic oligonucleotide
uucucuacgaaacacuucc

SEQ ID NO: 1181482 - RNA, 19 nt, Artificial Sequence
  Description of Artificial Sequence: Synthetic oligonucleotide
aaaaccugccaauuuggac

SEQ ID NO: 1181483 - RNA, 19 nt, Artificial Sequence
  Description of Artificial Sequence: Synthetic oligonucleotide
ugcacuuuuacccagcuga

SEQ ID NO: 1181484 - RNA, 19 nt, Artificial Sequence
  Description of Artificial Sequence: Synthetic oligonucleotide
aagugauggacauuaaaug

SEQ ID NO: 1181485 - RNA, 19 nt, Artificial Sequence
  Description of Artificial Sequence: Synthetic oligonucleotide
cacaguaaccacaugagcg

SEQ ID NO: 1181486 - RNA, 19 nt, Artificial Sequence
  Description of Artificial Sequence: Synthetic oligonucleotide
aaagacuccacugccaugg

SEQ ID NO: 1181487 - RNA, 19 nt, Artificial Sequence
  Description of Artificial Sequence: Synthetic oligonucleotide
uguuauauaucacuagggu

SEQ ID NO: 1181488 - RNA, 19 nt, Artificial Sequence
  Description of Artificial Sequence: Synthetic oligonucleotide
uuugggaugaggaaaguga

SEQ ID NO: 1181489 - RNA, 19 nt, Artificial Sequence
  Description of Artificial Sequence: Synthetic oligonucleotide
auaaacauggccauccagc

SEQ ID NO: 1181490 - RNA, 19 nt, Artificial Sequence
  Description of Artificial Sequence: Synthetic oligonucleotide
guuuagaugagacugcacc

SEQ ID NO: 1181491 - RNA, 19 nt, Artificial Sequence
  Description of Artificial Sequence: Synthetic oligonucleotide
uuuguggccaaucucucgg

SEQ ID NO: 1181492 - RNA, 19 nt, Artificial Sequence
  Description of Artificial Sequence: Synthetic oligonucleotide
aaaaccugaaucccaagga

SEQ ID NO: 1181493 - RNA, 19 nt, Artificial Sequence
  Description of Artificial Sequence: Synthetic oligonucleotide
auuuauuucagauuuuaau

SEQ ID NO: 1181494 - RNA, 19 nt, Artificial Sequence
  Description of Artificial Sequence: Synthetic oligonucleotide
uuuaagcuggcaaauaaaa

SEQ ID NO: 1181495 - RNA, 19 nt, Artificial Sequence
  Description of Artificial Sequence: Synthetic oligonucleotide
agcuacuagauacagcgac

SEQ ID NO: 1181496 - RNA, 19 nt, Artificial Sequence
  Description of Artificial Sequence: Synthetic oligonucleotide
uauacaaagguguaauagu

SEQ ID NO: 1181497 - RNA, 19 nt, Artificial Sequence
  Description of Artificial Sequence: Synthetic oligonucleotide
uugcaaauagaauugagau

SEQ ID NO: 1181498 - RNA, 19 nt, Artificial Sequence
  Description of Artificial Sequence: Synthetic oligonucleotide
uggaguuuagaugagacug

SEQ ID NO: 1181499 - RNA, 19 nt, Artificial Sequence
  Description of Artificial Sequence: Synthetic oligonucleotide
uagaaauuauguccguuag

SEQ ID NO: 1181500 - RNA, 19 nt, Artificial Sequence
  Description of Artificial Sequence: Synthetic oligonucleotide
agcaaucacuaauuguacc

SEQ ID NO: 1181501 - RNA, 19 nt, Artificial Sequence
  Description of Artificial Sequence: Synthetic oligonucleotide
acaguaaccacaugagcgg

SEQ ID NO: 1181502 - RNA, 19 nt, Artificial Sequence
  Description of Artificial Sequence: Synthetic oligonucleotide
cauccuuaaacccagcaag

SEQ ID NO: 1181503 - RNA, 19 nt, Artificial Sequence
  Description of Artificial Sequence: Synthetic oligonucleotide
uguguguuuagcaaucacu

SEQ ID NO: 1181504 - RNA, 19 nt, Artificial Sequence
  Description of Artificial Sequence: Synthetic oligonucleotide
cuguuauauaucacuaggg

SEQ ID NO: 1181505 - RNA, 19 nt, Artificial Sequence
  Description of Artificial Sequence: Synthetic oligonucleotide
ugaauuuuauuugggauga

SEQ ID NO: 1181506 - RNA, 19 nt, Artificial Sequence
  Description of Artificial Sequence: Synthetic oligonucleotide
gacuacaaacuccaaauac

SEQ ID NO: 1181507 - RNA, 19 nt, Artificial Sequence
  Description of Artificial Sequence: Synthetic oligonucleotide
gcaaauagaauugagauac

SEQ ID NO: 1181508 - RNA, 19 nt, Artificial Sequence
  Description of Artificial Sequence: Synthetic oligonucleotide
agauacagcgaccacuagg

SEQ ID NO: 1181509 - RNA, 19 nt, Artificial Sequence
  Description of Artificial Sequence: Synthetic oligonucleotide
cauaagaaaaggagacucg

SEQ ID NO: 1181510 - RNA, 19 nt, Artificial Sequence
  Description of Artificial Sequence: Synthetic oligonucleotide
uacaaagguguaauaguag

SEQ ID NO: 1181511 - RNA, 19 nt, Artificial Sequence
  Description of Artificial Sequence: Synthetic oligonucleotide
aaggcuuucaggccaaugu

SEQ ID NO: 1181512 - RNA, 19 nt, Artificial Sequence
  Description of Artificial Sequence: Synthetic oligonucleotide
aaggauuguguguuuagca

SEQ ID NO: 1181513 - RNA, 19 nt, Artificial Sequence
  Description of Artificial Sequence: Synthetic oligonucleotide
uccaaagacaucaaauuau

SEQ ID NO: 1181514 - RNA, 19 nt, Artificial Sequence
  Description of Artificial Sequence: Synthetic oligonucleotide
uccauaauuugcuuauaag

SEQ ID NO: 1181515 - RNA, 19 nt, Artificial Sequence
  Description of Artificial Sequence: Synthetic oligonucleotide
aaugauuaugggcaccaga

SEQ ID NO: 1181516 - RNA, 19 nt, Artificial Sequence
  Description of Artificial Sequence: Synthetic oligonucleotide
uaguagagaggaaacuuag

SEQ ID NO: 1181517 - RNA, 19 nt, Artificial Sequence
  Description of Artificial Sequence: Synthetic oligonucleotide
aacgaggucacaggggacc

SEQ ID NO: 1181518 - RNA, 19 nt, Artificial Sequence
  Description of Artificial Sequence: Synthetic oligonucleotide
agugaacgaggucacaggg

SEQ ID NO: 1181519 - RNA, 19 nt, Artificial Sequence
  Description of Artificial Sequence: Synthetic oligonucleotide
ucccgcauaagaaaaggag

SEQ ID NO: 1181520 - RNA, 19 nt, Artificial Sequence
  Description of Artificial Sequence: Synthetic oligonucleotide
cagcugaaagcauagauac

SEQ ID NO: 1181521 - RNA, 19 nt, Artificial Sequence
  Description of Artificial Sequence: Synthetic oligonucleotide
uauaucacuagggucaaug

SEQ ID NO: 1181522 - RNA, 19 nt, Artificial Sequence
  Description of Artificial Sequence: Synthetic oligonucleotide
guacuuaggguuuucacug

SEQ ID NO: 1181523 - RNA, 19 nt, Artificial Sequence
  Description of Artificial Sequence: Synthetic oligonucleotide
ugaacgaggucacagggga

SEQ ID NO: 1181524 - RNA, 19 nt, Artificial Sequence
  Description of Artificial Sequence: Synthetic oligonucleotide
guuauauaucacuaggguc

SEQ ID NO: 1181525 - RNA, 19 nt, Artificial Sequence
  Description of Artificial Sequence: Synthetic oligonucleotide
ucuacgaaacacuuccuca

SEQ ID NO: 1181526 - RNA, 19 nt, Artificial Sequence
  Description of Artificial Sequence: Synthetic oligonucleotide
ugacacguuagucagcuac

SEQ ID NO: 1181527 - RNA, 19 nt, Artificial Sequence
  Description of Artificial Sequence: Synthetic oligonucleotide
aagugaacgaggucacagg

SEQ ID NO: 1181528 - RNA, 19 nt, Artificial Sequence
  Description of Artificial Sequence: Synthetic oligonucleotide
uggaguaugggacuagcug

SEQ ID NO: 1181529 - RNA, 19 nt, Artificial Sequence
  Description of Artificial Sequence: Synthetic oligonucleotide
uuaagcuggcaaauaaaac

SEQ ID NO: 1181530 - RNA, 19 nt, Artificial Sequence
  Description of Artificial Sequence: Synthetic oligonucleotide
auuauguccguuaguaugg

SEQ ID NO: 1181531 - RNA, 19 nt, Artificial Sequence
  Description of Artificial Sequence: Synthetic oligonucleotide
gugaauaagccucucuuag

SEQ ID NO: 1181532 - RNA, 19 nt, Artificial Sequence
  Description of Artificial Sequence: Synthetic oligonucleotide
aaucacuaauuguaccaug

SEQ ID NO: 1181533 - RNA, 19 nt, Artificial Sequence
  Description of Artificial Sequence: Synthetic oligonucleotide
aaccacaugagcggggccc

SEQ ID NO: 1181534 - RNA, 19 nt, Artificial Sequence
  Description of Artificial Sequence: Synthetic oligonucleotide
uaaaccaaggaucuaugau

SEQ ID NO: 1181535 - RNA, 19 nt, Artificial Sequence
  Description of Artificial Sequence: Synthetic oligonucleotide
aagguguauacaaaggugu

SEQ ID NO: 1181536 - RNA, 19 nt, Artificial Sequence
  Description of Artificial Sequence: Synthetic oligonucleotide
auaucacuagggucaaugg

SEQ ID NO: 1181537 - RNA, 19 nt, Artificial Sequence
  Description of Artificial Sequence: Synthetic oligonucleotide
aggaucuaugaugacaugg

SEQ ID NO: 1181538 - RNA, 19 nt, Artificial Sequence
  Description of Artificial Sequence: Synthetic oligonucleotide
acaaagaauacaaacuuca

SEQ ID NO: 1181539 - RNA, 19 nt, Artificial Sequence
  Description of Artificial Sequence: Synthetic oligonucleotide
uggcaaauaaaacccauau

SEQ ID NO: 1181540 - RNA, 19 nt, Artificial Sequence
  Description of Artificial Sequence: Synthetic oligonucleotide
acaaacaugagagggacug

SEQ ID NO: 1181541 - RNA, 19 nt, Artificial Sequence
  Description of Artificial Sequence: Synthetic oligonucleotide
uuuuaagcuggcaaauaaa

SEQ ID NO: 1181542 - RNA, 19 nt, Artificial Sequence
  Description of Artificial Sequence: Synthetic oligonucleotide
ggaguaugggacuagcugg

SEQ ID NO: 1181543 - RNA, 19 nt, Artificial Sequence
  Description of Artificial Sequence: Synthetic oligonucleotide
gacuguuauauaucacuag

SEQ ID NO: 1181544 - RNA, 19 nt, Artificial Sequence
  Description of Artificial Sequence: Synthetic oligonucleotide
aaucccaaggauugugugu

SEQ ID NO: 1181545 - RNA, 19 nt, Artificial Sequence
  Description of Artificial Sequence: Synthetic oligonucleotide
auaagaguuacaaaaccug

SEQ ID NO: 1181546 - RNA, 19 nt, Artificial Sequence
  Description of Artificial Sequence: Synthetic oligonucleotide
gaaauuauguccguuagua

SEQ ID NO: 1181547 - RNA, 19 nt, Artificial Sequence
  Description of Artificial Sequence: Synthetic oligonucleotide
uuaguaggauaacuuccag

SEQ ID NO: 1181548 - RNA, 19 nt, Artificial Sequence
  Description of Artificial Sequence: Synthetic oligonucleotide
caaagguguaauaguagag

SEQ ID NO: 1181549 - RNA, 19 nt, Artificial Sequence
  Description of Artificial Sequence: Synthetic oligonucleotide
ugcaccaguaugcacugag

SEQ ID NO: 1181550 - RNA, 19 nt, Artificial Sequence
  Description of Artificial Sequence: Synthetic oligonucleotide
aaaccugaaucccaaggau

SEQ ID NO: 1181551 - RNA, 19 nt, Artificial Sequence
  Description of Artificial Sequence: Synthetic oligonucleotide
auggcuaagguguauacaa

SEQ ID NO: 1181552 - RNA, 19 nt, Artificial Sequence
  Description of Artificial Sequence: Synthetic oligonucleotide
gauagguagaaauuuauuu

SEQ ID NO: 1181553 - RNA, 19 nt, Artificial Sequence
  Description of Artificial Sequence: Synthetic oligonucleotide
aaauuauguccguuaguau

SEQ ID NO: 1181554 - RNA, 19 nt, Artificial Sequence
  Description of Artificial Sequence: Synthetic oligonucleotide
cuuuuacccagcugaaagc

SEQ ID NO: 1181555 - RNA, 19 nt, Artificial Sequence
  Description of Artificial Sequence: Synthetic oligonucleotide
cuacgaaacacuuccucag

SEQ ID NO: 1181556 - RNA, 19 nt, Artificial Sequence
  Description of Artificial Sequence: Synthetic oligonucleotide
auuucugaccuccacucug

SEQ ID NO: 1181557 - RNA, 19 nt, Artificial Sequence
  Description of Artificial Sequence: Synthetic oligonucleotide
uuaggguuuucacuguggu

SEQ ID NO: 1181558 - RNA, 19 nt, Artificial Sequence
  Description of Artificial Sequence: Synthetic oligonucleotide
aaguuucugcuguugacaa

SEQ ID NO: 1181559 - RNA, 19 nt, Artificial Sequence
  Description of Artificial Sequence: Synthetic oligonucleotide
uacagcgaccacuagggca

SEQ ID NO: 1181560 - RNA, 19 nt, Artificial Sequence
  Description of Artificial Sequence: Synthetic oligonucleotide
aaccaaggaucuaugauga

SEQ ID NO: 1181561 - RNA, 19 nt, Artificial Sequence
  Description of Artificial Sequence: Synthetic oligonucleotide
acauggcuaagguguauac

SEQ ID NO: 1181562 - RNA, 19 nt, Artificial Sequence
  Description of Artificial Sequence: Synthetic oligonucleotide
gguguaauaguagagagga

SEQ ID NO: 1181563 - RNA, 19 nt, Artificial Sequence
  Description of Artificial Sequence: Synthetic oligonucleotide
auaaaccaaggaucuauga

SEQ ID NO: 1181564 - RNA, 19 nt, Artificial Sequence
  Description of Artificial Sequence: Synthetic oligonucleotide
auggacauuaaaugcaaaa

SEQ ID NO: 1181565 - RNA, 19 nt, Artificial Sequence
  Description of Artificial Sequence: Synthetic oligonucleotide
cucuuaguaggauaacuuc

SEQ ID NO: 1181566 - RNA, 19 nt, Artificial Sequence
  Description of Artificial Sequence: Synthetic oligonucleotide
aauuucugaccuccacucu

SEQ ID NO: 1181567 - RNA, 19 nt, Artificial Sequence
  Description of Artificial Sequence: Synthetic oligonucleotide
agauaccacaaacaugaga

SEQ ID NO: 1181568 - RNA, 19 nt, Artificial Sequence
  Description of Artificial Sequence: Synthetic oligonucleotide
cuucaagugaacgagguca

SEQ ID NO: 1181569 - RNA, 19 nt, Artificial Sequence
  Description of Artificial Sequence: Synthetic oligonucleotide
ugaauaucgucuccauccu

SEQ ID NO: 1181570 - RNA, 19 nt, Artificial Sequence
  Description of Artificial Sequence: Synthetic oligonucleotide
aagccuugguuucaguuaa

SEQ ID NO: 1181571 - RNA, 19 nt, Artificial Sequence
  Description of Artificial Sequence: Synthetic oligonucleotide
aaccuccggguacuuaggg

SEQ ID NO: 1181572 - RNA, 19 nt, Artificial Sequence
  Description of Artificial Sequence: Synthetic oligonucleotide
ugaaucccaaggauugugu

SEQ ID NO: 1181573 - RNA, 19 nt, Artificial Sequence
  Description of Artificial Sequence: Synthetic oligonucleotide
ucagucccgcauaagaaaa

SEQ ID NO: 1181574 - RNA, 19 nt, Artificial Sequence
  Description of Artificial Sequence: Synthetic oligonucleotide
guaauaguagagaggaaac

SEQ ID NO: 1181575 - RNA, 19 nt, Artificial Sequence
  Description of Artificial Sequence: Synthetic oligonucleotide
cuaauuguaccauguuuuc

SEQ ID NO: 1181576 - RNA, 19 nt, Artificial Sequence
  Description of Artificial Sequence: Synthetic oligonucleotide
cuuaguaggauaacuucca

SEQ ID NO: 1181577 - RNA, 19 nt, Artificial Sequence
  Description of Artificial Sequence: Synthetic oligonucleotide
uguucucuacgaaacacuu

SEQ ID NO: 1181578 - RNA, 19 nt, Artificial Sequence
  Description of Artificial Sequence: Synthetic oligonucleotide
uguccguuaguauggguga

SEQ ID NO: 1181579 - RNA, 19 nt, Artificial Sequence
  Description of Artificial Sequence: Synthetic oligonucleotide
acuagauacagcgaccacu

SEQ ID NO: 1181580 - RNA, 19 nt, Artificial Sequence
  Description of Artificial Sequence: Synthetic oligonucleotide
uguaccauguuuucccaaa

SEQ ID NO: 1181581 - RNA, 19 nt, Artificial Sequence
  Description of Artificial Sequence: Synthetic oligonucleotide
gauaaaccaaggaucuaug

SEQ ID NO: 1181582 - RNA, 19 nt, Artificial Sequence
  Description of Artificial Sequence: Synthetic oligonucleotide
uacgaaacacuuccucagc

SEQ ID NO: 1181583 - RNA, 19 nt, Artificial Sequence
  Description of Artificial Sequence: Synthetic oligonucleotide
auccuuaaacccagcaagc

SEQ ID NO: 1181584 - RNA, 19 nt, Artificial Sequence
  Description of Artificial Sequence: Synthetic oligonucleotide
ccauauaagaguuacaaaa

SEQ ID NO: 1181585 - RNA, 19 nt, Artificial Sequence
  Description of Artificial Sequence: Synthetic oligonucleotide
uaugggacuagcuggucac

SEQ ID NO: 1181586 - RNA, 19 nt, Artificial Sequence
  Description of Artificial Sequence: Synthetic oligonucleotide
gaaucccaaggauugugug

SEQ ID NO: 1181587 - RNA, 19 nt, Artificial Sequence
  Description of Artificial Sequence: Synthetic oligonucleotide
gaggauccgugucaugagg

SEQ ID NO: 1181588 - RNA, 19 nt, Artificial Sequence
  Description of Artificial Sequence: Synthetic oligonucleotide
gagggacuguuauauauca

SEQ ID NO: 1181589 - RNA, 19 nt, Artificial Sequence
  Description of Artificial Sequence: Synthetic oligonucleotide
augaugacauggcuaaggu

SEQ ID NO: 1181590 - RNA, 19 nt, Artificial Sequence
  Description of Artificial Sequence: Synthetic oligonucleotide
aagauagguagaaauuuau

SEQ ID NO: 1181591 - RNA, 19 nt, Artificial Sequence
  Description of Artificial Sequence: Synthetic oligonucleotide
agaaauuauguccguuagu

SEQ ID NO: 1181592 - RNA, 19 nt, Artificial Sequence
  Description of Artificial Sequence: Synthetic oligonucleotide
uucaagugaacgaggucac

SEQ ID NO: 1181593 - RNA, 19 nt, Artificial Sequence
  Description of Artificial Sequence: Synthetic oligonucleotide
ggagcagucgcugugaaag

SEQ ID NO: 1181594 - RNA, 19 nt, Artificial Sequence
  Description of Artificial Sequence: Synthetic oligonucleotide
acaccuucaagugaacgag

SEQ ID NO: 1181595 - RNA, 19 nt, Artificial Sequence
  Description of Artificial Sequence: Synthetic oligonucleotide
cauaaacauggccauccag

SEQ ID NO: 1181596 - RNA, 19 nt, Artificial Sequence
  Description of Artificial Sequence: Synthetic oligonucleotide
acguuagucagcuaccaaa

SEQ ID NO: 1181597 - RNA, 19 nt, Artificial Sequence
  Description of Artificial Sequence: Synthetic oligonucleotide
aucacaguaaccacaugag

SEQ ID NO: 1181598 - RNA, 19 nt, Artificial Sequence
  Description of Artificial Sequence: Synthetic oligonucleotide
uggagugucaaggucaaaa

SEQ ID NO: 1181599 - RNA, 19 nt, Artificial Sequence
  Description of Artificial Sequence: Synthetic oligonucleotide
aauaucgucuccauccuua

SEQ ID NO: 1181600 - RNA, 19 nt, Artificial Sequence
  Description of Artificial Sequence: Synthetic oligonucleotide
uccucggcgaaugaugucc

SEQ ID NO: 1181601 - RNA, 19 nt, Artificial Sequence
  Description of Artificial Sequence: Synthetic oligonucleotide
caauuuggacaaagggagc

SEQ ID NO: 1181602 - RNA, 19 nt, Artificial Sequence
  Description of Artificial Sequence: Synthetic oligonucleotide
aggauuguguguuuagcaa

SEQ ID NO: 1181603 - RNA, 19 nt, Artificial Sequence
  Description of Artificial Sequence: Synthetic oligonucleotide
auacaccuucaagugaacg

SEQ ID NO: 1181604 - RNA, 19 nt, Artificial Sequence
  Description of Artificial Sequence: Synthetic oligonucleotide
caaugaggccugcugagag

SEQ ID NO: 1181605 - RNA, 19 nt, Artificial Sequence
  Description of Artificial Sequence: Synthetic oligonucleotide
augagacugcaccaguaug

SEQ ID NO: 1181606 - RNA, 19 nt, Artificial Sequence
  Description of Artificial Sequence: Synthetic oligonucleotide
gcuguugacaauuucugac

SEQ ID NO: 1181607 - RNA, 19 nt, Artificial Sequence
  Description of Artificial Sequence: Synthetic oligonucleotide
uccuuaaacccagcaagcc

SEQ ID NO: 1181608 - RNA, 19 nt, Artificial Sequence
  Description of Artificial Sequence: Synthetic oligonucleotide
augagcggggcccagguca

SEQ ID NO: 1181609 - RNA, 19 nt, Artificial Sequence
  Description of Artificial Sequence: Synthetic oligonucleotide
cagacuugguggaguaugg

SEQ ID NO: 1181610 - RNA, 19 nt, Artificial Sequence
  Description of Artificial Sequence: Synthetic oligonucleotide
gauuguguguuuagcaauc

SEQ ID NO: 1181611 - RNA, 19 nt, Artificial Sequence
  Description of Artificial Sequence: Synthetic oligonucleotide
aucacuaauuguaccaugu

SEQ ID NO: 1181612 - RNA, 19 nt, Artificial Sequence
  Description of Artificial Sequence: Synthetic oligonucleotide
uuguguguuuagcaaucac

SEQ ID NO: 1181613 - RNA, 19 nt, Artificial Sequence
  Description of Artificial Sequence: Synthetic oligonucleotide
acgaaacacuuccucagcu

SEQ ID NO: 1181614 - RNA, 19 nt, Artificial Sequence
  Description of Artificial Sequence: Synthetic oligonucleotide
agguguaauaguagagagg

SEQ ID NO: 1181615 - RNA, 19 nt, Artificial Sequence
  Description of Artificial Sequence: Synthetic oligonucleotide
acaugagagggacuguuau

SEQ ID NO: 1181616 - RNA, 19 nt, Artificial Sequence
  Description of Artificial Sequence: Synthetic oligonucleotide
agcauagauaccacaaaca

SEQ ID NO: 1181617 - RNA, 19 nt, Artificial Sequence
  Description of Artificial Sequence: Synthetic oligonucleotide
auguccguuaguaugggug

SEQ ID NO: 1181618 - RNA, 19 nt, Artificial Sequence
  Description of Artificial Sequence: Synthetic oligonucleotide
aacacagcuacuagauaca

SEQ ID NO: 1181619 - RNA, 19 nt, Artificial Sequence
  Description of Artificial Sequence: Synthetic oligonucleotide
agccaauuagggcagccca

SEQ ID NO: 1181620 - RNA, 19 nt, Artificial Sequence
  Description of Artificial Sequence: Synthetic oligonucleotide
aaggaucuaugaugacaug

SEQ ID NO: 1181621 - RNA, 19 nt, Artificial Sequence
  Description of Artificial Sequence: Synthetic oligonucleotide
ucacagugaauaagccucu

SEQ ID NO: 1181622 - RNA, 19 nt, Artificial Sequence
  Description of Artificial Sequence: Synthetic oligonucleotide
ggagugucaaggucaaaag

SEQ ID NO: 1181623 - RNA, 19 nt, Artificial Sequence
  Description of Artificial Sequence: Synthetic oligonucleotide
uuauguccguuaguauggg

SEQ ID NO: 1181624 - RNA, 19 nt, Artificial Sequence
  Description of Artificial Sequence: Synthetic oligonucleotide
acuuaggguuuucacugug

SEQ ID NO: 1181625 - RNA, 19 nt, Artificial Sequence
  Description of Artificial Sequence: Synthetic oligonucleotide
auuguaccauguuuuccca

SEQ ID NO: 1181626 - RNA, 19 nt, Artificial Sequence
  Description of Artificial Sequence: Synthetic oligonucleotide
uuucaguuaacuggagguc

SEQ ID NO: 1181627 - RNA, 19 nt, Artificial Sequence
  Description of Artificial Sequence: Synthetic oligonucleotide
gaauugagauacaggauaa

SEQ ID NO: 1181628 - RNA, 19 nt, Artificial Sequence
  Description of Artificial Sequence: Synthetic oligonucleotide
cuaugcugcaaccacuuga

SEQ ID NO: 1181629 - RNA, 19 nt, Artificial Sequence
  Description of Artificial Sequence: Synthetic oligonucleotide
acuuagaaauuauguccgu

SEQ ID NO: 1181630 - RNA, 19 nt, Artificial Sequence
  Description of Artificial Sequence: Synthetic oligonucleotide
gugauggacauuaaaugca

SEQ ID NO: 1181631 - RNA, 19 nt, Artificial Sequence
  Description of Artificial Sequence: Synthetic oligonucleotide
auacaaagguguaauagua

SEQ ID NO: 1181632 - RNA, 19 nt, Artificial Sequence
  Description of Artificial Sequence: Synthetic oligonucleotide
caaggauuguguguuuagc

SEQ ID NO: 1181633 - RNA, 19 nt, Artificial Sequence
  Description of Artificial Sequence: Synthetic oligonucleotide
uaguaugggugaauuuuau

SEQ ID NO: 1181634 - RNA, 19 nt, Artificial Sequence
  Description of Artificial Sequence: Synthetic oligonucleotide
cuaagguguauacaaaggu

SEQ ID NO: 1181635 - RNA, 19 nt, Artificial Sequence
  Description of Artificial Sequence: Synthetic oligonucleotide
uagauaccacaaacaugag

SEQ ID NO: 1181636 - RNA, 19 nt, Artificial Sequence
  Description of Artificial Sequence: Synthetic oligonucleotide
cucuacgaaacacuuccuc

SEQ ID NO: 1181637 - RNA, 19 nt, Artificial Sequence
  Description of Artificial Sequence: Synthetic oligonucleotide
agcggucgguagaagagcc

SEQ ID NO: 1181638 - RNA, 19 nt, Artificial Sequence
  Description of Artificial Sequence: Synthetic oligonucleotide
gacacguuagucagcuacc

SEQ ID NO: 1181639 - RNA, 19 nt, Artificial Sequence
  Description of Artificial Sequence: Synthetic oligonucleotide
cugacuacaaacuccaaau

SEQ ID NO: 1181640 - RNA, 19 nt, Artificial Sequence
  Description of Artificial Sequence: Synthetic oligonucleotide
gcauaagaaaaggagacuc

SEQ ID NO: 1181641 - RNA, 19 nt, Artificial Sequence
  Description of Artificial Sequence: Synthetic oligonucleotide
cuagauacagcgaccacua

SEQ ID NO: 1181642 - RNA, 19 nt, Artificial Sequence
  Description of Artificial Sequence: Synthetic oligonucleotide
caccuucaagugaacgagg

SEQ ID NO: 1181643 - RNA, 19 nt, Artificial Sequence
  Description of Artificial Sequence: Synthetic oligonucleotide
ggaucuaugaugacauggc

SEQ ID NO: 1181644 - RNA, 19 nt, Artificial Sequence
  Description of Artificial Sequence: Synthetic oligonucleotide
cacagcuacuagauacagc

SEQ ID NO: 1181645 - RNA, 19 nt, Artificial Sequence
  Description of Artificial Sequence: Synthetic oligonucleotide
uauauaucacuagggucaa

SEQ ID NO: 1181646 - RNA, 19 nt, Artificial Sequence
  Description of Artificial Sequence: Synthetic oligonucleotide
uccgugcaaugauuauggg

SEQ ID NO: 1181647 - RNA, 19 nt, Artificial Sequence
  Description of Artificial Sequence: Synthetic oligonucleotide
ugucaaggucaaaagcauu

SEQ ID NO: 1181648 - RNA, 19 nt, Artificial Sequence
  Description of Artificial Sequence: Synthetic oligonucleotide
ugcaaccacuugaggcugg

SEQ ID NO: 1181649 - RNA, 19 nt, Artificial Sequence
  Description of Artificial Sequence: Synthetic oligonucleotide
aguuuagaugagacugcac

SEQ ID NO: 1181650 - RNA, 19 nt, Artificial Sequence
  Description of Artificial Sequence: Synthetic oligonucleotide
accaaggaucuaugaugac

SEQ ID NO: 1181651 - RNA, 19 nt, Artificial Sequence
  Description of Artificial Sequence: Synthetic oligonucleotide
ggaaacuuagaaauuaugu

SEQ ID NO: 1181652 - RNA, 19 nt, Artificial Sequence
  Description of Artificial Sequence: Synthetic oligonucleotide
gagagggacuguuauauau

SEQ ID NO: 1181653 - RNA, 19 nt, Artificial Sequence
  Description of Artificial Sequence: Synthetic oligonucleotide
aucucucggucaaaguuuc

SEQ ID NO: 1181654 - RNA, 19 nt, Artificial Sequence
  Description of Artificial Sequence: Synthetic oligonucleotide
ccgcauaagaaaaggagac

SEQ ID NO: 1181655 - RNA, 19 nt, Artificial Sequence
  Description of Artificial Sequence: Synthetic oligonucleotide
cugagcaguaaugaauauc

SEQ ID NO: 1181656 - RNA, 19 nt, Artificial Sequence
  Description of Artificial Sequence: Synthetic oligonucleotide
ucaucgcugcucagucccg

SEQ ID NO: 1181657 - RNA, 19 nt, Artificial Sequence
  Description of Artificial Sequence: Synthetic oligonucleotide
auaguagagaggaaacuua

SEQ ID NO: 1181658 - RNA, 19 nt, Artificial Sequence
  Description of Artificial Sequence: Synthetic oligonucleotide
guaaccacaugagcggggc

SEQ ID NO: 1181659 - RNA, 19 nt, Artificial Sequence
  Description of Artificial Sequence: Synthetic oligonucleotide
cuuaaacccagcaagccau

SEQ ID NO: 1181660 - RNA, 19 nt, Artificial Sequence
  Description of Artificial Sequence: Synthetic oligonucleotide
guguuuagcaaucacuaau

SEQ ID NO: 1181661 - RNA, 19 nt, Artificial Sequence
  Description of Artificial Sequence: Synthetic oligonucleotide
gugaacgaggucacagggg

SEQ ID NO: 1181662 - RNA, 19 nt, Artificial Sequence
  Description of Artificial Sequence: Synthetic oligonucleotide
uuaaacccagcaagccauc

SEQ ID NO: 1181663 - RNA, 19 nt, Artificial Sequence
  Description of Artificial Sequence: Synthetic oligonucleotide
uacuuaggguuuucacugu

SEQ ID NO: 1181664 - RNA, 19 nt, Artificial Sequence
  Description of Artificial Sequence: Synthetic oligonucleotide
acagcggucgguagaagag

SEQ ID NO: 1181665 - RNA, 19 nt, Artificial Sequence
  Description of Artificial Sequence: Synthetic oligonucleotide
agacaggaaaccaguccac

SEQ ID NO: 1181666 - RNA, 19 nt, Artificial Sequence
  Description of Artificial Sequence: Synthetic oligonucleotide
uacuagauacagcgaccac

SEQ ID NO: 1181667 - RNA, 19 nt, Artificial Sequence
  Description of Artificial Sequence: Synthetic oligonucleotide
aguaaccacaugagcgggg

SEQ ID NO: 1181668 - RNA, 19 nt, Artificial Sequence
  Description of Artificial Sequence: Synthetic oligonucleotide
gaguuuagaugagacugca

SEQ ID NO: 1181669 - RNA, 19 nt, Artificial Sequence
  Description of Artificial Sequence: Synthetic oligonucleotide
caaggaucuaugaugacau

SEQ ID NO: 1181670 - RNA, 19 nt, Artificial Sequence
  Description of Artificial Sequence: Synthetic oligonucleotide
acaaagggagcagucgcug

SEQ ID NO: 1181671 - RNA, 19 nt, Artificial Sequence
  Description of Artificial Sequence: Synthetic oligonucleotide
uuuuggcuggcacccgggu

SEQ ID NO: 1181672 - RNA, 19 nt, Artificial Sequence
  Description of Artificial Sequence: Synthetic oligonucleotide
cacugagcaguaaugaaua

SEQ ID NO: 1181673 - RNA, 19 nt, Artificial Sequence
  Description of Artificial Sequence: Synthetic oligonucleotide
uucugcuguugacaauuuc

SEQ ID NO: 1181674 - RNA, 19 nt, Artificial Sequence
  Description of Artificial Sequence: Synthetic oligonucleotide
uggcuaagguguauacaaa

SEQ ID NO: 1181675 - RNA, 19 nt, Artificial Sequence
  Description of Artificial Sequence: Synthetic oligonucleotide
aaccugaaucccaaggauu

SEQ ID NO: 1181676 - RNA, 19 nt, Artificial Sequence
  Description of Artificial Sequence: Synthetic oligonucleotide
guuagucagcuaccaaaca

SEQ ID NO: 1181677 - RNA, 19 nt, Artificial Sequence
  Description of Artificial Sequence: Synthetic oligonucleotide
guaugggacuagcugguca

SEQ ID NO: 1181678 - RNA, 19 nt, Artificial Sequence
  Description of Artificial Sequence: Synthetic oligonucleotide
guuaguaugggugaauuuu

SEQ ID NO: 1181679 - RNA, 19 nt, Artificial Sequence
  Description of Artificial Sequence: Synthetic oligonucleotide
cugaaucccaaggauugug

SEQ ID NO: 1181680 - RNA, 19 nt, Artificial Sequence
  Description of Artificial Sequence: Synthetic oligonucleotide
gcaguaaugaauaucgucu

SEQ ID NO: 1181681 - RNA, 19 nt, Artificial Sequence
  Description of Artificial Sequence: Synthetic oligonucleotide
cuacuagauacagcgacca

SEQ ID NO: 1181682 - RNA, 19 nt, Artificial Sequence
  Description of Artificial Sequence: Synthetic oligonucleotide
gccaauuuggacaaaggga

SEQ ID NO: 1181683 - RNA, 19 nt, Artificial Sequence
  Description of Artificial Sequence: Synthetic oligonucleotide
gguacuuaggguuuucacu

SEQ ID NO: 1181684 - RNA, 19 nt, Artificial Sequence
  Description of Artificial Sequence: Synthetic oligonucleotide
caguaaccacaugagcggg

SEQ ID NO: 1181685 - RNA, 19 nt, Artificial Sequence
  Description of Artificial Sequence: Synthetic oligonucleotide
uauguccguuaguaugggu

SEQ ID NO: 1181686 - RNA, 19 nt, Artificial Sequence
  Description of Artificial Sequence: Synthetic oligonucleotide
accacaaacaugagaggga

SEQ ID NO: 1181687 - RNA, 19 nt, Artificial Sequence
  Description of Artificial Sequence: Synthetic oligonucleotide
augcugcaaccacuugagg

SEQ ID NO: 1181688 - RNA, 19 nt, Artificial Sequence
  Description of Artificial Sequence: Synthetic oligonucleotide
cucucugccgggcaaucac

SEQ ID NO: 1181689 - RNA, 19 nt, Artificial Sequence
  Description of Artificial Sequence: Synthetic oligonucleotide
aaaacccauauaagaguua

SEQ ID NO: 1181690 - RNA, 19 nt, Artificial Sequence
  Description of Artificial Sequence: Synthetic oligonucleotide
ccgugcaaugauuaugggc

SEQ ID NO: 1181691 - RNA, 19 nt, Artificial Sequence
  Description of Artificial Sequence: Synthetic oligonucleotide
acugagcaguaaugaauau

SEQ ID NO: 1181692 - RNA, 19 nt, Artificial Sequence
  Description of Artificial Sequence: Synthetic oligonucleotide
caaccuccggguacuuagg

SEQ ID NO: 1181693 - RNA, 19 nt, Artificial Sequence
  Description of Artificial Sequence: Synthetic oligonucleotide
auaucgucuccauccuuaa

SEQ ID NO: 1181694 - RNA, 19 nt, Artificial Sequence
  Description of Artificial Sequence: Synthetic oligonucleotide
ucggcgaaugauguccaca

SEQ ID NO: 1181695 - RNA, 19 nt, Artificial Sequence
  Description of Artificial Sequence: Synthetic oligonucleotide
ggaguuuagaugagacugc

SEQ ID NO: 1181696 - RNA, 19 nt, Artificial Sequence
  Description of Artificial Sequence: Synthetic oligonucleotide
ggucaaugguucugacacg

SEQ ID NO: 1181697 - RNA, 19 nt, Artificial Sequence
  Description of Artificial Sequence: Synthetic oligonucleotide
acaugagcggggcccaggu

SEQ ID NO: 1181698 - RNA, 19 nt, Artificial Sequence
  Description of Artificial Sequence: Synthetic oligonucleotide
aguaugggacuagcugguc

SEQ ID NO: 1181699 - RNA, 19 nt, Artificial Sequence
  Description of Artificial Sequence: Synthetic oligonucleotide
gaugagacugcaccaguau

SEQ ID NO: 1181700 - RNA, 19 nt, Artificial Sequence
  Description of Artificial Sequence: Synthetic oligonucleotide
aucccaaggauuguguguu

SEQ ID NO: 1181701 - RNA, 19 nt, Artificial Sequence
  Description of Artificial Sequence: Synthetic oligonucleotide
gucucggaagacaggaaac

SEQ ID NO: 1181702 - RNA, 19 nt, Artificial Sequence
  Description of Artificial Sequence: Synthetic oligonucleotide
agucgcugugaaagacucc

SEQ ID NO: 1181703 - RNA, 19 nt, Artificial Sequence
  Description of Artificial Sequence: Synthetic oligonucleotide
ugccgggcaaucacaguaa

SEQ ID NO: 1181704 - RNA, 19 nt, Artificial Sequence
  Description of Artificial Sequence: Synthetic oligonucleotide
cagcaauguguccccagac

SEQ ID NO: 1181705 - RNA, 19 nt, Artificial Sequence
  Description of Artificial Sequence: Synthetic oligonucleotide
cuaccaaacacagcuacua

SEQ ID NO: 1181706 - RNA, 19 nt, Artificial Sequence
  Description of Artificial Sequence: Synthetic oligonucleotide
gguggcuacacagaaggca

SEQ ID NO: 1181707 - RNA, 19 nt, Artificial Sequence
  Description of Artificial Sequence: Synthetic oligonucleotide
acuuuuaagcuggcaaaua

SEQ ID NO: 1181708 - RNA, 19 nt, Artificial Sequence
  Description of Artificial Sequence: Synthetic oligonucleotide
ucaccaaccuccggguacu

SEQ ID NO: 1181709 - RNA, 19 nt, Artificial Sequence
  Description of Artificial Sequence: Synthetic oligonucleotide
ucaagugaacgaggucaca

SEQ ID NO: 1181710 - RNA, 19 nt, Artificial Sequence
  Description of Artificial Sequence: Synthetic oligonucleotide
gcuacuagauacagcgacc

SEQ ID NO: 1181711 - RNA, 19 nt, Artificial Sequence
  Description of Artificial Sequence: Synthetic oligonucleotide
gguguagaggauccguguc

SEQ ID NO: 1181712 - RNA, 19 nt, Artificial Sequence
  Description of Artificial Sequence: Synthetic oligonucleotide
uuguggccaaucucucggu

SEQ ID NO: 1181713 - RNA, 19 nt, Artificial Sequence
  Description of Artificial Sequence: Synthetic oligonucleotide
agguggcuacacagaaggc

SEQ ID NO: 1181714 - RNA, 19 nt, Artificial Sequence
  Description of Artificial Sequence: Synthetic oligonucleotide
cguuagucagcuaccaaac

SEQ ID NO: 1181715 - RNA, 19 nt, Artificial Sequence
  Description of Artificial Sequence: Synthetic oligonucleotide
aguugucaaucuugucaau

SEQ ID NO: 1181716 - RNA, 19 nt, Artificial Sequence
  Description of Artificial Sequence: Synthetic oligonucleotide
cacagcggucgguagaaga

SEQ ID NO: 1181717 - RNA, 19 nt, Artificial Sequence
  Description of Artificial Sequence: Synthetic oligonucleotide
ggguacuuaggguuuucac

SEQ ID NO: 1181718 - RNA, 19 nt, Artificial Sequence
  Description of Artificial Sequence: Synthetic oligonucleotide
gguccgugcaaugauuaug

SEQ ID NO: 1181719 - RNA, 19 nt, Artificial Sequence
  Description of Artificial Sequence: Synthetic oligonucleotide
ccaaggauuguguguuuag

SEQ ID NO: 1181720 - RNA, 19 nt, Artificial Sequence
  Description of Artificial Sequence: Synthetic oligonucleotide
gaccacuagggcaguuugc

SEQ ID NO: 1181721 - RNA, 19 nt, Artificial Sequence
  Description of Artificial Sequence: Synthetic oligonucleotide
caaucucucggucaaaguu

SEQ ID NO: 1181722 - RNA, 19 nt, Artificial Sequence
  Description of Artificial Sequence: Synthetic oligonucleotide
gauggacauuaaaugcaaa

SEQ ID NO: 1181723 - RNA, 19 nt, Artificial Sequence
  Description of Artificial Sequence: Synthetic oligonucleotide
cuaugaugacauggcuaag

SEQ ID NO: 1181724 - RNA, 19 nt, Artificial Sequence
  Description of Artificial Sequence: Synthetic oligonucleotide
cccgcauaagaaaaggaga

SEQ ID NO: 1181725 - RNA, 19 nt, Artificial Sequence
  Description of Artificial Sequence: Synthetic oligonucleotide
cagccaauuagggcagccc

SEQ ID NO: 1181726 - RNA, 19 nt, Artificial Sequence
  Description of Artificial Sequence: Synthetic oligonucleotide
auccgugucaugagguuga

SEQ ID NO: 1181727 - RNA, 19 nt, Artificial Sequence
  Description of Artificial Sequence: Synthetic oligonucleotide
ggucucggaagacaggaaa

SEQ ID NO: 1181728 - RNA, 19 nt, Artificial Sequence
  Description of Artificial Sequence: Synthetic oligonucleotide
ggcaaauaaaacccauaua

SEQ ID NO: 1181729 - RNA, 19 nt, Artificial Sequence
  Description of Artificial Sequence: Synthetic oligonucleotide
caaugauuaugggcaccag

SEQ ID NO: 1181730 - RNA, 19 nt, Artificial Sequence
  Description of Artificial Sequence: Synthetic oligonucleotide
cauggcuaagguguauaca

SEQ ID NO: 1181731 - RNA, 19 nt, Artificial Sequence
  Description of Artificial Sequence: Synthetic oligonucleotide
cucggaagacaggaaacca

SEQ ID NO: 1181732 - RNA, 19 nt, Artificial Sequence
  Description of Artificial Sequence: Synthetic oligonucleotide
agccucucuuaguaggaua

SEQ ID NO: 1181733 - RNA, 19 nt, Artificial Sequence
  Description of Artificial Sequence: Synthetic oligonucleotide
cacuaauuguaccauguuu

SEQ ID NO: 1181734 - RNA, 19 nt, Artificial Sequence
  Description of Artificial Sequence: Synthetic oligonucleotide
gacauggcuaagguguaua

SEQ ID NO: 1181735 - RNA, 19 nt, Artificial Sequence
  Description of Artificial Sequence: Synthetic oligonucleotide
ugguggaguaugggacuag

SEQ ID NO: 1181736 - RNA, 19 nt, Artificial Sequence
  Description of Artificial Sequence: Synthetic oligonucleotide
guagaggauccgugucaug

SEQ ID NO: 1181737 - RNA, 19 nt, Artificial Sequence
  Description of Artificial Sequence: Synthetic oligonucleotide
cucgaacaucaccaaccuc

SEQ ID NO: 1181738 - RNA, 19 nt, Artificial Sequence
  Description of Artificial Sequence: Synthetic oligonucleotide
uggucaccucucugccggg

SEQ ID NO: 1181739 - RNA, 19 nt, Artificial Sequence
  Description of Artificial Sequence: Synthetic oligonucleotide
gucagcuaccaaacacagc

SEQ ID NO: 1181740 - RNA, 19 nt, Artificial Sequence
  Description of Artificial Sequence: Synthetic oligonucleotide
gccaaucucucggucaaag

SEQ ID NO: 1181741 - RNA, 19 nt, Artificial Sequence
  Description of Artificial Sequence: Synthetic oligonucleotide
ccugccaauuuggacaaag

SEQ ID NO: 1181742 - RNA, 19 nt, Artificial Sequence
  Description of Artificial Sequence: Synthetic oligonucleotide
cugcacuuuuacccagcug

SEQ ID NO: 1181743 - RNA, 19 nt, Artificial Sequence
  Description of Artificial Sequence: Synthetic oligonucleotide
cagcggucgguagaagagc

SEQ ID NO: 1181744 - RNA, 19 nt, Artificial Sequence
  Description of Artificial Sequence: Synthetic oligonucleotide
uccguuaguaugggugaau

SEQ ID NO: 1181745 - RNA, 19 nt, Artificial Sequence
  Description of Artificial Sequence: Synthetic oligonucleotide
ggucacagugaauaagccu

SEQ ID NO: 1181746 - RNA, 19 nt, Artificial Sequence
  Description of Artificial Sequence: Synthetic oligonucleotide
guaggauaacuuccagccu

SEQ ID NO: 1181747 - RNA, 19 nt, Artificial Sequence
  Description of Artificial Sequence: Synthetic oligonucleotide
ggauaaaccaaggaucuau

SEQ ID NO: 1181748 - RNA, 19 nt, Artificial Sequence
  Description of Artificial Sequence: Synthetic oligonucleotide
gguguauacaaagguguaa

SEQ ID NO: 1181749 - RNA, 19 nt, Artificial Sequence
  Description of Artificial Sequence: Synthetic oligonucleotide
cacugccauggcacugggg

SEQ ID NO: 1181750 - RNA, 19 nt, Artificial Sequence
  Description of Artificial Sequence: Synthetic oligonucleotide
cucucuuaguaggauaacu

SEQ ID NO: 1181751 - RNA, 19 nt, Artificial Sequence
  Description of Artificial Sequence: Synthetic oligonucleotide
agaugagacugcaccagua

SEQ ID NO: 1181752 - RNA, 19 nt, Artificial Sequence
  Description of Artificial Sequence: Synthetic oligonucleotide
ccaaggaucuaugaugaca

SEQ ID NO: 1181753 - RNA, 19 nt, Artificial Sequence
  Description of Artificial Sequence: Synthetic oligonucleotide
agguguauacaaaggugua

SEQ ID NO: 1181754 - RNA, 19 nt, Artificial Sequence
  Description of Artificial Sequence: Synthetic oligonucleotide
ggacuguuauauaucacua

SEQ ID NO: 1181755 - RNA, 19 nt, Artificial Sequence
  Description of Artificial Sequence: Synthetic oligonucleotide
accuguccguccuccgugu

SEQ ID NO: 1181756 - RNA, 19 nt, Artificial Sequence
  Description of Artificial Sequence: Synthetic oligonucleotide
uccguccuccguguacuca

SEQ ID NO: 1181757 - RNA, 19 nt, Artificial Sequence
  Description of Artificial Sequence: Synthetic oligonucleotide
cuggcacccggguccgugc

SEQ ID NO: 1181758 - RNA, 19 nt, Artificial Sequence
  Description of Artificial Sequence: Synthetic oligonucleotide
gggcaaucacaguaaccac

SEQ ID NO: 1181759 - RNA, 19 nt, Artificial Sequence
  Description of Artificial Sequence: Synthetic oligonucleotide
gaacgaggucacaggggac

SEQ ID NO: 1181760 - RNA, 19 nt, Artificial Sequence
  Description of Artificial Sequence: Synthetic oligonucleotide
cacaugagcggggcccagg

SEQ ID NO: 1181761 - RNA, 19 nt, Artificial Sequence
  Description of Artificial Sequence: Synthetic oligonucleotide
ggucaucgcugcucagucc

SEQ ID NO: 1181762 - RNA, 19 nt, Artificial Sequence
  Description of Artificial Sequence: Synthetic oligonucleotide
gucccgcauaagaaaagga

SEQ ID NO: 1181763 - RNA, 19 nt, Artificial Sequence
  Description of Artificial Sequence: Synthetic oligonucleotide
ggcaccagagccaggcagc

SEQ ID NO: 1181764 - RNA, 19 nt, Artificial Sequence
  Description of Artificial Sequence: Synthetic oligonucleotide
uggcacccggguccgugca

SEQ ID NO: 1181765 - RNA, 19 nt, Artificial Sequence
  Description of Artificial Sequence: Synthetic oligonucleotide
gucaccucucugccgggca

SEQ ID NO: 1181766 - RNA, 19 nt, Artificial Sequence
  Description of Artificial Sequence: Synthetic oligonucleotide
cucggcgaaugauguccac

SEQ ID NO: 1181767 - RNA, 19 nt, Artificial Sequence
  Description of Artificial Sequence: Synthetic oligonucleotide
ggcgaaugauguccacaug

SEQ ID NO: 1181768 - RNA, 19 nt, Artificial Sequence
  Description of Artificial Sequence: Synthetic oligonucleotide
cagcuacuagauacagcga

SEQ ID NO: 1181769 - RNA, 19 nt, Artificial Sequence
  Description of Artificial Sequence: Synthetic oligonucleotide
agucuccucggcgaaugau

SEQ ID NO: 1181770 - RNA, 19 nt, Artificial Sequence
  Description of Artificial Sequence: Synthetic oligonucleotide
agccuugguuucaguuaac

SEQ ID NO: 1181771 - RNA, 19 nt, Artificial Sequence
  Description of Artificial Sequence: Synthetic oligonucleotide
ccgggcaaucacaguaacc

SEQ ID NO: 1181772 - RNA, 19 nt, Artificial Sequence
  Description of Artificial Sequence: Synthetic oligonucleotide
gaauaucgucuccauccuu

SEQ ID NO: 1181773 - RNA, 19 nt, Artificial Sequence
  Description of Artificial Sequence: Synthetic oligonucleotide
cuuagaaauuauguccguu

SEQ ID NO: 1181774 - RNA, 19 nt, Artificial Sequence
  Description of Artificial Sequence: Synthetic oligonucleotide
acgaggucacaggggaccu

SEQ ID NO: 1181775 - RNA, 19 nt, Artificial Sequence
  Description of Artificial Sequence: Synthetic oligonucleotide
caguaugcacugagcagua

SEQ ID NO: 1181776 - RNA, 19 nt, Artificial Sequence
  Description of Artificial Sequence: Synthetic oligonucleotide
cccauauaagaguuacaaa

SEQ ID NO: 1181777 - RNA, 19 nt, Artificial Sequence
  Description of Artificial Sequence: Synthetic oligonucleotide
ccuucaagugaacgagguc

SEQ ID NO: 1181778 - RNA, 19 nt, Artificial Sequence
  Description of Artificial Sequence: Synthetic oligonucleotide
cacguuagucagcuaccaa

SEQ ID NO: 1181779 - RNA, 19 nt, Artificial Sequence
  Description of Artificial Sequence: Synthetic oligonucleotide
gccucucuuaguaggauaa

SEQ ID NO: 1181780 - RNA, 19 nt, Artificial Sequence
  Description of Artificial Sequence: Synthetic oligonucleotide
gagcaguaaugaauaucgu

SEQ ID NO: 1181781 - RNA, 19 nt, Artificial Sequence
  Description of Artificial Sequence: Synthetic oligonucleotide
gcaagccaucucuggcugc

SEQ ID NO: 1181782 - RNA, 19 nt, Artificial Sequence
  Description of Artificial Sequence: Synthetic oligonucleotide
caaagggagcagucgcugu

SEQ ID NO: 1181783 - RNA, 19 nt, Artificial Sequence
  Description of Artificial Sequence: Synthetic oligonucleotide
gggacuagcuggucaccuc

SEQ ID NO: 1181784 - RNA, 19 nt, Artificial Sequence
  Description of Artificial Sequence: Synthetic oligonucleotide
auauaucacuagggucaau

SEQ ID NO: 1181785 - RNA, 19 nt, Artificial Sequence
  Description of Artificial Sequence: Synthetic oligonucleotide
gccaauuagggcagcccac

SEQ ID NO: 1181786 - RNA, 19 nt, Artificial Sequence
  Description of Artificial Sequence: Synthetic oligonucleotide
cacuuuuacccagcugaaa

SEQ ID NO: 1181787 - RNA, 19 nt, Artificial Sequence
  Description of Artificial Sequence: Synthetic oligonucleotide
ccaguaugcacugagcagu

SEQ ID NO: 1181788 - RNA, 19 nt, Artificial Sequence
  Description of Artificial Sequence: Synthetic oligonucleotide
ggucgguagaagagccagc

SEQ ID NO: 1181789 - RNA, 19 nt, Artificial Sequence
  Description of Artificial Sequence: Synthetic oligonucleotide
caguuaacuggaggucaca

SEQ ID NO: 1181790 - RNA, 19 nt, Artificial Sequence
  Description of Artificial Sequence: Synthetic oligonucleotide
acccagcugaaagcauaga

SEQ ID NO: 1181791 - RNA, 19 nt, Artificial Sequence
  Description of Artificial Sequence: Synthetic oligonucleotide
gcacugagcaguaaugaau

SEQ ID NO: 1181792 - RNA, 19 nt, Artificial Sequence
  Description of Artificial Sequence: Synthetic oligonucleotide
gcugcucagucccgcauaa

SEQ ID NO: 1181793 - RNA, 19 nt, Artificial Sequence
  Description of Artificial Sequence: Synthetic oligonucleotide
guggaguaugggacuagcu

SEQ ID NO: 1181794 - RNA, 19 nt, Artificial Sequence
  Description of Artificial Sequence: Synthetic oligonucleotide
cggucgguagaagagccag

SEQ ID NO: 1181795 - RNA, 19 nt, Artificial Sequence
  Description of Artificial Sequence: Synthetic oligonucleotide
caucaccaaccuccgggua

SEQ ID NO: 1181796 - RNA, 19 nt, Artificial Sequence
  Description of Artificial Sequence: Synthetic oligonucleotide
guccguuaguaugggugaa

SEQ ID NO: 1181797 - RNA, 19 nt, Artificial Sequence
  Description of Artificial Sequence: Synthetic oligonucleotide
caaacaugagagggacugu

SEQ ID NO: 1181798 - RNA, 19 nt, Artificial Sequence
  Description of Artificial Sequence: Synthetic oligonucleotide
ggucaccucucugccgggc

SEQ ID NO: 1181799 - RNA, 19 nt, Artificial Sequence
  Description of Artificial Sequence: Synthetic oligonucleotide
ccucucuuaguaggauaac

SEQ ID NO: 1181800 - RNA, 19 nt, Artificial Sequence
  Description of Artificial Sequence: Synthetic oligonucleotide
gagcggggcccaggucagg

SEQ ID NO: 1181801 - RNA, 19 nt, Artificial Sequence
  Description of Artificial Sequence: Synthetic oligonucleotide
accaaccuccggguacuua

SEQ ID NO: 1181802 - RNA, 19 nt, Artificial Sequence
  Description of Artificial Sequence: Synthetic oligonucleotide
guccguccuccguguacuc

SEQ ID NO: 1181803 - RNA, 19 nt, Artificial Sequence
  Description of Artificial Sequence: Synthetic oligonucleotide
gcuggagugucaaggucaa

SEQ ID NO: 1181804 - RNA, 19 nt, Artificial Sequence
  Description of Artificial Sequence: Synthetic oligonucleotide
ccgugucaugagguugagg

SEQ ID NO: 1181805 - RNA, 19 nt, Artificial Sequence
  Description of Artificial Sequence: Synthetic oligonucleotide
ccacuaugcugcaaccacu

SEQ ID NO: 1181806 - RNA, 19 nt, Artificial Sequence
  Description of Artificial Sequence: Synthetic oligonucleotide
ggauccgugucaugagguu

SEQ ID NO: 1181807 - RNA, 19 nt, Artificial Sequence
  Description of Artificial Sequence: Synthetic oligonucleotide
agcgaccacuagggcaguu

SEQ ID NO: 1181808 - RNA, 19 nt, Artificial Sequence
  Description of Artificial Sequence: Synthetic oligonucleotide
cccaaggauuguguguuua

SEQ ID NO: 1181809 - RNA, 19 nt, Artificial Sequence
  Description of Artificial Sequence: Synthetic oligonucleotide
cugcaccaguaugcacuga

SEQ ID NO: 1181810 - RNA, 19 nt, Artificial Sequence
  Description of Artificial Sequence: Synthetic oligonucleotide
ggguccgugcaaugauuau

SEQ ID NO: 1181811 - RNA, 19 nt, Artificial Sequence
  Description of Artificial Sequence: Synthetic oligonucleotide
gcggucgguagaagagcca

SEQ ID NO: 1181812 - RNA, 19 nt, Artificial Sequence
  Description of Artificial Sequence: Synthetic oligonucleotide
cuggagugucaaggucaaa

SEQ ID NO: 1181813 - RNA, 19 nt, Artificial Sequence
  Description of Artificial Sequence: Synthetic oligonucleotide
cggcgaaugauguccacau

SEQ ID NO: 1181814 - RNA, 19 nt, Artificial Sequence
  Description of Artificial Sequence: Synthetic oligonucleotide
cgcauaagaaaaggagacu

SEQ ID NO: 1181815 - RNA, 19 nt, Artificial Sequence
  Description of Artificial Sequence: Synthetic oligonucleotide
ccgcaggccccaugucuuc

SEQ ID NO: 1181816 - RNA, 19 nt, Artificial Sequence
  Description of Artificial Sequence: Synthetic oligonucleotide
cguuaguaugggugaauuu

SEQ ID NO: 1181817 - RNA, 19 nt, Artificial Sequence
  Description of Artificial Sequence: Synthetic oligonucleotide
ccggguacuuaggguuuuc

SEQ ID NO: 1181818 - RNA, 19 nt, Artificial Sequence
  Description of Artificial Sequence: Synthetic oligonucleotide
ccacaugagcggggcccag

SEQ ID NO: 1181819 - RNA, 19 nt, Artificial Sequence
  Description of Artificial Sequence: Synthetic oligonucleotide
caccucucugccgggcaau

SEQ ID NO: 1181820 - RNA, 19 nt, Artificial Sequence
  Description of Artificial Sequence: Synthetic oligonucleotide
cccggguccgugcaaugau

SEQ ID NO: 1181821 - RNA, 19 nt, Artificial Sequence
  Description of Artificial Sequence: Synthetic oligonucleotide
ccggguccgugcaaugauu

SEQ ID NO: 1181822 - RNA, 19 nt, Artificial Sequence
  Description of Artificial Sequence: Synthetic oligonucleotide
auaaguaacuucugagucc

SEQ ID NO: 1181823 - RNA, 19 nt, Artificial Sequence
  Description of Artificial Sequence: Synthetic oligonucleotide
agagguuaaagucaagguc

SEQ ID NO: 1181824 - RNA, 19 nt, Artificial Sequence
  Description of Artificial Sequence: Synthetic oligonucleotide
uguugcuuugaguauauag

SEQ ID NO: 1181825 - RNA, 19 nt, Artificial Sequence
  Description of Artificial Sequence: Synthetic oligonucleotide
ucaaaugggucgaagagca

SEQ ID NO: 1181826 - RNA, 19 nt, Artificial Sequence
  Description of Artificial Sequence: Synthetic oligonucleotide
cuacauacagcucagggag

SEQ ID NO: 1181827 - RNA, 19 nt, Artificial Sequence
  Description of Artificial Sequence: Synthetic oligonucleotide
gaguauauaggauucacuc

SEQ ID NO: 1181828 - RNA, 19 nt, Artificial Sequence
  Description of Artificial Sequence: Synthetic oligonucleotide
cuagacacuucaaaggagg

SEQ ID NO: 1181829 - RNA, 19 nt, Artificial Sequence
  Description of Artificial Sequence: Synthetic oligonucleotide
ucuagaacucauaucaccu

SEQ ID NO: 1181830 - RNA, 19 nt, Artificial Sequence
  Description of Artificial Sequence: Synthetic oligonucleotide
guugcuuugaguauauagg

SEQ ID NO: 1181831 - RNA, 19 nt, Artificial Sequence
  Description of Artificial Sequence: Synthetic oligonucleotide
uccguaaaagugcaaagca

SEQ ID NO: 1181832 - RNA, 19 nt, Artificial Sequence
  Description of Artificial Sequence: Synthetic oligonucleotide
ugguguccagcucaaaugg

SEQ ID NO: 1181833 - RNA, 19 nt, Artificial Sequence
  Description of Artificial Sequence: Synthetic oligonucleotide
uuagcugaauguuuggcug

SEQ ID NO: 1181834 - RNA, 19 nt, Artificial Sequence
  Description of Artificial Sequence: Synthetic oligonucleotide
cagaacaucaagaagccug

SEQ ID NO: 1181835 - RNA, 19 nt, Artificial Sequence
  Description of Artificial Sequence: Synthetic oligonucleotide
ugugucuacagguuccagg

SEQ ID NO: 1181836 - RNA, 19 nt, Artificial Sequence
  Description of Artificial Sequence: Synthetic oligonucleotide
aucggagauacucagggag

SEQ ID NO: 1181837 - RNA, 19 nt, Artificial Sequence
  Description of Artificial Sequence: Synthetic oligonucleotide
ugccuagacacuucaaagg

SEQ ID NO: 1181838 - RNA, 19 nt, Artificial Sequence
  Description of Artificial Sequence: Synthetic oligonucleotide
aaaugggucgaagagcauc

SEQ ID NO: 1181839 - RNA, 19 nt, Artificial Sequence
  Description of Artificial Sequence: Synthetic oligonucleotide
uccgcagaguaacacaggg

SEQ ID NO: 1181840 - RNA, 19 nt, Artificial Sequence
  Description of Artificial Sequence: Synthetic oligonucleotide
cauaaguaacuucugaguc

SEQ ID NO: 1181841 - RNA, 19 nt, Artificial Sequence
  Description of Artificial Sequence: Synthetic oligonucleotide
ucuacauacagcucaggga

SEQ ID NO: 1181842 - RNA, 19 nt, Artificial Sequence
  Description of Artificial Sequence: Synthetic oligonucleotide
uuuuacaccccgcugcuug

SEQ ID NO: 1181843 - RNA, 19 nt, Artificial Sequence
  Description of Artificial Sequence: Synthetic oligonucleotide
ugugguacagccuccagga

SEQ ID NO: 1181844 - RNA, 19 nt, Artificial Sequence
  Description of Artificial Sequence: Synthetic oligonucleotide
uugcuuugaguauauagga

SEQ ID NO: 1181845 - RNA, 19 nt, Artificial Sequence
  Description of Artificial Sequence: Synthetic oligonucleotide
acauaaguaacuucugagu

SEQ ID NO: 1181846 - RNA, 19 nt, Artificial Sequence
  Description of Artificial Sequence: Synthetic oligonucleotide
aacgucauccagaugccgc

SEQ ID NO: 1181847 - RNA, 19 nt, Artificial Sequence
  Description of Artificial Sequence: Synthetic oligonucleotide
aguauauaggauucacucu

SEQ ID NO: 1181848 - RNA, 19 nt, Artificial Sequence
  Description of Artificial Sequence: Synthetic oligonucleotide
acucauaucaccuuuucuu

SEQ ID NO: 1181849 - RNA, 19 nt, Artificial Sequence
  Description of Artificial Sequence: Synthetic oligonucleotide
aaggaggcagcuaagaacu

SEQ ID NO: 1181850 - RNA, 19 nt, Artificial Sequence
  Description of Artificial Sequence: Synthetic oligonucleotide
caaacuuggacaugccucc

SEQ ID NO: 1181851 - RNA, 19 nt, Artificial Sequence
  Description of Artificial Sequence: Synthetic oligonucleotide
ucugaucggagauacucag

SEQ ID NO: 1181852 - RNA, 19 nt, Artificial Sequence
  Description of Artificial Sequence: Synthetic oligonucleotide
aaagcagaagccacugacg

SEQ ID NO: 1181853 - RNA, 19 nt, Artificial Sequence
  Description of Artificial Sequence: Synthetic oligonucleotide
ucugucguaaugccucacg

SEQ ID NO: 1181854 - RNA, 19 nt, Artificial Sequence
  Description of Artificial Sequence: Synthetic oligonucleotide
uauauaggauucacucugc

SEQ ID NO: 1181855 - RNA, 19 nt, Artificial Sequence
  Description of Artificial Sequence: Synthetic oligonucleotide
agaacaucaagaagccugc

SEQ ID NO: 1181856 - RNA, 19 nt, Artificial Sequence
  Description of Artificial Sequence: Synthetic oligonucleotide
uaaguaacuucugagucca

SEQ ID NO: 1181857 - RNA, 19 nt, Artificial Sequence
  Description of Artificial Sequence: Synthetic oligonucleotide
caaugagugccaaauugcc

SEQ ID NO: 1181858 - RNA, 19 nt, Artificial Sequence
  Description of Artificial Sequence: Synthetic oligonucleotide
ugaguauauaggauucacu

SEQ ID NO: 1181859 - RNA, 19 nt, Artificial Sequence
  Description of Artificial Sequence: Synthetic oligonucleotide
ugguacagccuccaggacc

SEQ ID NO: 1181860 - RNA, 19 nt, Artificial Sequence
  Description of Artificial Sequence: Synthetic oligonucleotide
gaauguuuggcugugaucu

SEQ ID NO: 1181861 - RNA, 19 nt, Artificial Sequence
  Description of Artificial Sequence: Synthetic oligonucleotide
aacucauaucaccuuuucu

SEQ ID NO: 1181862 - RNA, 19 nt, Artificial Sequence
  Description of Artificial Sequence: Synthetic oligonucleotide
aaggccuugcccuuagcug

SEQ ID NO: 1181863 - RNA, 19 nt, Artificial Sequence
  Description of Artificial Sequence: Synthetic oligonucleotide
caaauugccaaacucuguc

SEQ ID NO: 1181864 - RNA, 19 nt, Artificial Sequence
  Description of Artificial Sequence: Synthetic oligonucleotide
gaagcaacccucugaucgg

SEQ ID NO: 1181865 - RNA, 19 nt, Artificial Sequence
  Description of Artificial Sequence: Synthetic oligonucleotide
gugaucugugaguucagcg

SEQ ID NO: 1181866 - RNA, 19 nt, Artificial Sequence
  Description of Artificial Sequence: Synthetic oligonucleotide
agugacgauauacugccca

SEQ ID NO: 1181867 - RNA, 19 nt, Artificial Sequence
  Description of Artificial Sequence: Synthetic oligonucleotide
augagugccaaauugccaa

SEQ ID NO: 1181868 - RNA, 19 nt, Artificial Sequence
  Description of Artificial Sequence: Synthetic oligonucleotide
cagggugcguuuuacaccc

SEQ ID NO: 1181869 - RNA, 19 nt, Artificial Sequence
  Description of Artificial Sequence: Synthetic oligonucleotide
gaauucaaggugccuagac

SEQ ID NO: 1181870 - RNA, 19 nt, Artificial Sequence
  Description of Artificial Sequence: Synthetic oligonucleotide
gucaaggucucuuugguuc

SEQ ID NO: 1181871 - RNA, 19 nt, Artificial Sequence
  Description of Artificial Sequence: Synthetic oligonucleotide
cuugaagugucuagaacuc

SEQ ID NO: 1181872 - RNA, 19 nt, Artificial Sequence
  Description of Artificial Sequence: Synthetic oligonucleotide
aagcaaaagaccacugaug

SEQ ID NO: 1181873 - RNA, 19 nt, Artificial Sequence
  Description of Artificial Sequence: Synthetic oligonucleotide
cauccgcagaguaacacag

SEQ ID NO: 1181874 - RNA, 19 nt, Artificial Sequence
  Description of Artificial Sequence: Synthetic oligonucleotide
cagcuaagaacucaagaac

SEQ ID NO: 1181875 - RNA, 19 nt, Artificial Sequence
  Description of Artificial Sequence: Synthetic oligonucleotide
gauuaaagcaaaagaccac

SEQ ID NO: 1181876 - RNA, 19 nt, Artificial Sequence
  Description of Artificial Sequence: Synthetic oligonucleotide
gacgauauacugcccauca

SEQ ID NO: 1181877 - RNA, 19 nt, Artificial Sequence
  Description of Artificial Sequence: Synthetic oligonucleotide
gaugaggagcccuucugug

SEQ ID NO: 1181878 - RNA, 19 nt, Artificial Sequence
  Description of Artificial Sequence: Synthetic oligonucleotide
uugaccuugccaucguccc

SEQ ID NO: 1181879 - RNA, 19 nt, Artificial Sequence
  Description of Artificial Sequence: Synthetic oligonucleotide
ucuuacacccggcaacgga

SEQ ID NO: 1181880 - RNA, 19 nt, Artificial Sequence
  Description of Artificial Sequence: Synthetic oligonucleotide
aaugggucgaagagcaucu

SEQ ID NO: 1181881 - RNA, 19 nt, Artificial Sequence
  Description of Artificial Sequence: Synthetic oligonucleotide
uugaguauauaggauucac

SEQ ID NO: 1181882 - RNA, 19 nt, Artificial Sequence
  Description of Artificial Sequence: Synthetic oligonucleotide
aaccgaagcaacccucuga

SEQ ID NO: 1181883 - RNA, 19 nt, Artificial Sequence
  Description of Artificial Sequence: Synthetic oligonucleotide
uccagggugcguuuuacac

SEQ ID NO: 1181884 - RNA, 19 nt, Artificial Sequence
  Description of Artificial Sequence: Synthetic oligonucleotide
uucuacaccagcaucccuu

SEQ ID NO: 1181885 - RNA, 19 nt, Artificial Sequence
  Description of Artificial Sequence: Synthetic oligonucleotide
cucaaaugggucgaagagc

SEQ ID NO: 1181886 - RNA, 19 nt, Artificial Sequence
  Description of Artificial Sequence: Synthetic oligonucleotide
uuuacaccccgcugcuugg

SEQ ID NO: 1181887 - RNA, 19 nt, Artificial Sequence
  Description of Artificial Sequence: Synthetic oligonucleotide
cugucguaaugccucacgg

SEQ ID NO: 1181888 - RNA, 19 nt, Artificial Sequence
  Description of Artificial Sequence: Synthetic oligonucleotide
acugacggguguuucccac

SEQ ID NO: 1181889 - RNA, 19 nt, Artificial Sequence
  Description of Artificial Sequence: Synthetic oligonucleotide
uggagugcuccguaaaagu

SEQ ID NO: 1181890 - RNA, 19 nt, Artificial Sequence
  Description of Artificial Sequence: Synthetic oligonucleotide
ugucuagaacucauaucac

SEQ ID NO: 1181891 - RNA, 19 nt, Artificial Sequence
  Description of Artificial Sequence: Synthetic oligonucleotide
acugucaaacaugucccac

SEQ ID NO: 1181892 - RNA, 19 nt, Artificial Sequence
  Description of Artificial Sequence: Synthetic oligonucleotide
agcucaaaugggucgaaga

SEQ ID NO: 1181893 - RNA, 19 nt, Artificial Sequence
  Description of Artificial Sequence: Synthetic oligonucleotide
cgaagcaacccucugaucg

SEQ ID NO: 1181894 - RNA, 19 nt, Artificial Sequence
  Description of Artificial Sequence: Synthetic oligonucleotide
ccagugacgauauacugcc

SEQ ID NO: 1181895 - RNA, 19 nt, Artificial Sequence
  Description of Artificial Sequence: Synthetic oligonucleotide
ggaacuggaccacaggcag

SEQ ID NO: 1181896 - RNA, 19 nt, Artificial Sequence
  Description of Artificial Sequence: Synthetic oligonucleotide
uguucugcccauccgcaga

SEQ ID NO: 1181897 - RNA, 19 nt, Artificial Sequence
  Description of Artificial Sequence: Synthetic oligonucleotide
ugcuuugaguauauaggau

SEQ ID NO: 1181898 - RNA, 19 nt, Artificial Sequence
  Description of Artificial Sequence: Synthetic oligonucleotide
uggaugagguugaacucug

SEQ ID NO: 1181899 - RNA, 19 nt, Artificial Sequence
  Description of Artificial Sequence: Synthetic oligonucleotide
gagugcuccguaaaagugc

SEQ ID NO: 1181900 - RNA, 19 nt, Artificial Sequence
  Description of Artificial Sequence: Synthetic oligonucleotide
uguacagcguucucagggu

SEQ ID NO: 1181901 - RNA, 19 nt, Artificial Sequence
  Description of Artificial Sequence: Synthetic oligonucleotide
cuccguaaaagugcaaagc

SEQ ID NO: 1181902 - RNA, 19 nt, Artificial Sequence
  Description of Artificial Sequence: Synthetic oligonucleotide
gagguugaacucugggagc

SEQ ID NO: 1181903 - RNA, 19 nt, Artificial Sequence
  Description of Artificial Sequence: Synthetic oligonucleotide
ugucguaaugccucacgga

SEQ ID NO: 1181904 - RNA, 19 nt, Artificial Sequence
  Description of Artificial Sequence: Synthetic oligonucleotide
uuggaaacugccagagcgu

SEQ ID NO: 1181905 - RNA, 19 nt, Artificial Sequence
  Description of Artificial Sequence: Synthetic oligonucleotide
aaggcgauccaguccccag

SEQ ID NO: 1181906 - RNA, 19 nt, Artificial Sequence
  Description of Artificial Sequence: Synthetic oligonucleotide
ugcguuuuacaccccgcug

SEQ ID NO: 1181907 - RNA, 19 nt, Artificial Sequence
  Description of Artificial Sequence: Synthetic oligonucleotide
ggcaucagagguuaaaguc

SEQ ID NO: 1181908 - RNA, 19 nt, Artificial Sequence
  Description of Artificial Sequence: Synthetic oligonucleotide
uguuucccacaccuugacc

SEQ ID NO: 1181909 - RNA, 19 nt, Artificial Sequence
  Description of Artificial Sequence: Synthetic oligonucleotide
acggguguuucccacaccu

SEQ ID NO: 1181910 - RNA, 19 nt, Artificial Sequence
  Description of Artificial Sequence: Synthetic oligonucleotide
ucucauugagccggaaggc

SEQ ID NO: 1181911 - RNA, 19 nt, Artificial Sequence
  Description of Artificial Sequence: Synthetic oligonucleotide
agaugaggagcccuucugu

SEQ ID NO: 1181912 - RNA, 19 nt, Artificial Sequence
  Description of Artificial Sequence: Synthetic oligonucleotide
aucaggauggcccggguaa

SEQ ID NO: 1181913 - RNA, 19 nt, Artificial Sequence
  Description of Artificial Sequence: Synthetic oligonucleotide
gaacucauaucaccuuuuc

SEQ ID NO: 1181914 - RNA, 19 nt, Artificial Sequence
  Description of Artificial Sequence: Synthetic oligonucleotide
aacucccucugucguaaug

SEQ ID NO: 1181915 - RNA, 19 nt, Artificial Sequence
  Description of Artificial Sequence: Synthetic oligonucleotide
cauaucaccuuuucuuaca

SEQ ID NO: 1181916 - RNA, 19 nt, Artificial Sequence
  Description of Artificial Sequence: Synthetic oligonucleotide
agguagaauucaaggugcc

SEQ ID NO: 1181917 - RNA, 19 nt, Artificial Sequence
  Description of Artificial Sequence: Synthetic oligonucleotide
cugaucggagauacucagg

SEQ ID NO: 1181918 - RNA, 19 nt, Artificial Sequence
  Description of Artificial Sequence: Synthetic oligonucleotide
cauccagagagaagaugag

SEQ ID NO: 1181919 - RNA, 19 nt, Artificial Sequence
  Description of Artificial Sequence: Synthetic oligonucleotide
gcagcuaagaacucaagaa

SEQ ID NO: 1181920 - RNA, 19 nt, Artificial Sequence
  Description of Artificial Sequence: Synthetic oligonucleotide
ggaacccaucuguacagcg

SEQ ID NO: 1181921 - RNA, 19 nt, Artificial Sequence
  Description of Artificial Sequence: Synthetic oligonucleotide
ucauuggauuaaagcaaaa

SEQ ID NO: 1181922 - RNA, 19 nt, Artificial Sequence
  Description of Artificial Sequence: Synthetic oligonucleotide
uuccugccggucuugaggu

SEQ ID NO: 1181923 - RNA, 19 nt, Artificial Sequence
  Description of Artificial Sequence: Synthetic oligonucleotide
accgaagcaacccucugau

SEQ ID NO: 1181924 - RNA, 19 nt, Artificial Sequence
  Description of Artificial Sequence: Synthetic oligonucleotide
ggguaaacucccucugucg

SEQ ID NO: 1181925 - RNA, 19 nt, Artificial Sequence
  Description of Artificial Sequence: Synthetic oligonucleotide
ucuugucccaagaggcacu

SEQ ID NO: 1181926 - RNA, 19 nt, Artificial Sequence
  Description of Artificial Sequence: Synthetic oligonucleotide
agggcaucagagguuaaag

SEQ ID NO: 1181927 - RNA, 19 nt, Artificial Sequence
  Description of Artificial Sequence: Synthetic oligonucleotide
acgauauacugcccaucag

SEQ ID NO: 1181928 - RNA, 19 nt, Artificial Sequence
  Description of Artificial Sequence: Synthetic oligonucleotide
ugcuccguaaaagugcaaa

SEQ ID NO: 1181929 - RNA, 19 nt, Artificial Sequence
  Description of Artificial Sequence: Synthetic oligonucleotide
uugaagugucuagaacuca

SEQ ID NO: 1181930 - RNA, 19 nt, Artificial Sequence
  Description of Artificial Sequence: Synthetic oligonucleotide
cgauauacugcccaucagg

SEQ ID NO: 1181931 - RNA, 19 nt, Artificial Sequence
  Description of Artificial Sequence: Synthetic oligonucleotide
ugacccugauuucaggcuu

SEQ ID NO: 1181932 - RNA, 19 nt, Artificial Sequence
  Description of Artificial Sequence: Synthetic oligonucleotide
guagcgguuccagucacag

SEQ ID NO: 1181933 - RNA, 19 nt, Artificial Sequence
  Description of Artificial Sequence: Synthetic oligonucleotide
gagauacucagggagugga

SEQ ID NO: 1181934 - RNA, 19 nt, Artificial Sequence
  Description of Artificial Sequence: Synthetic oligonucleotide
uacaccagcaucccuucuu

SEQ ID NO: 1181935 - RNA, 19 nt, Artificial Sequence
  Description of Artificial Sequence: Synthetic oligonucleotide
cucaagaaccuucucuaca

SEQ ID NO: 1181936 - RNA, 19 nt, Artificial Sequence
  Description of Artificial Sequence: Synthetic oligonucleotide
gauggcccggguaaacucc

SEQ ID NO: 1181937 - RNA, 19 nt, Artificial Sequence
  Description of Artificial Sequence: Synthetic oligonucleotide
aaguuggcccuguugcuuu

SEQ ID NO: 1181938 - RNA, 19 nt, Artificial Sequence
  Description of Artificial Sequence: Synthetic oligonucleotide
gauggacuucauuggauua

SEQ ID NO: 1181939 - RNA, 19 nt, Artificial Sequence
  Description of Artificial Sequence: Synthetic oligonucleotide
ugacggguguuucccacac

SEQ ID NO: 1181940 - RNA, 19 nt, Artificial Sequence
  Description of Artificial Sequence: Synthetic oligonucleotide
augccucacggauccgccc

SEQ ID NO: 1181941 - RNA, 19 nt, Artificial Sequence
  Description of Artificial Sequence: Synthetic oligonucleotide
ucguaaugccucacggauc

SEQ ID NO: 1181942 - RNA, 19 nt, Artificial Sequence
  Description of Artificial Sequence: Synthetic oligonucleotide
acugcgaccccguucuccu

SEQ ID NO: 1181943 - RNA, 19 nt, Artificial Sequence
  Description of Artificial Sequence: Synthetic oligonucleotide
agcguacuggauguuguag

SEQ ID NO: 1181944 - RNA, 19 nt, Artificial Sequence
  Description of Artificial Sequence: Synthetic oligonucleotide
ccugaguaggugcagacug

SEQ ID NO: 1181945 - RNA, 19 nt, Artificial Sequence
  Description of Artificial Sequence: Synthetic oligonucleotide
uuacacccggcaacggaac

SEQ ID NO: 1181946 - RNA, 19 nt, Artificial Sequence
  Description of Artificial Sequence: Synthetic oligonucleotide
gcguuuuacaccccgcugc

SEQ ID NO: 1181947 - RNA, 19 nt, Artificial Sequence
  Description of Artificial Sequence: Synthetic oligonucleotide
gguucuccaacugucaaac

SEQ ID NO: 1181948 - RNA, 19 nt, Artificial Sequence
  Description of Artificial Sequence: Synthetic oligonucleotide
ucucuacauacagcucagg

SEQ ID NO: 1181949 - RNA, 19 nt, Artificial Sequence
  Description of Artificial Sequence: Synthetic oligonucleotide
ucagaggcgucuguguccu

SEQ ID NO: 1181950 - RNA, 19 nt, Artificial Sequence
  Description of Artificial Sequence: Synthetic oligonucleotide
cuuggacaugccuccugcc

SEQ ID NO: 1181951 - RNA, 19 nt, Artificial Sequence
  Description of Artificial Sequence: Synthetic oligonucleotide
cguaaugccucacggaucc

SEQ ID NO: 1181952 - RNA, 19 nt, Artificial Sequence
  Description of Artificial Sequence: Synthetic oligonucleotide
ugguucuccaacugucaaa

SEQ ID NO: 1181953 - RNA, 19 nt, Artificial Sequence
  Description of Artificial Sequence: Synthetic oligonucleotide
ccguaaaagugcaaagcag

SEQ ID NO: 1181954 - RNA, 19 nt, Artificial Sequence
  Description of Artificial Sequence: Synthetic oligonucleotide
ugcccauccgcagaguaac

SEQ ID NO: 1181955 - RNA, 19 nt, Artificial Sequence
  Description of Artificial Sequence: Synthetic oligonucleotide
cuuacacccggcaacggaa

SEQ ID NO: 1181956 - RNA, 19 nt, Artificial Sequence
  Description of Artificial Sequence: Synthetic oligonucleotide
cucuuugguucuccaacug

SEQ ID NO: 1181957 - RNA, 19 nt, Artificial Sequence
  Description of Artificial Sequence: Synthetic oligonucleotide
accuuuucuuacacccggc

SEQ ID NO: 1181958 - RNA, 19 nt, Artificial Sequence
  Description of Artificial Sequence: Synthetic oligonucleotide
ucgauggaacccaucugua

SEQ ID NO: 1181959 - RNA, 19 nt, Artificial Sequence
  Description of Artificial Sequence: Synthetic oligonucleotide
ggguguuucccacaccuug

SEQ ID NO: 1181960 - RNA, 19 nt, Artificial Sequence
  Description of Artificial Sequence: Synthetic oligonucleotide
ugucuacagguuccagggu

SEQ ID NO: 1181961 - RNA, 19 nt, Artificial Sequence
  Description of Artificial Sequence: Synthetic oligonucleotide
guaacuucugaguccauau

SEQ ID NO: 1181962 - RNA, 19 nt, Artificial Sequence
  Description of Artificial Sequence: Synthetic oligonucleotide
agguugaacucugggagcu

SEQ ID NO: 1181963 - RNA, 19 nt, Artificial Sequence
  Description of Artificial Sequence: Synthetic oligonucleotide
agcuuggaaacgucaucca

SEQ ID NO: 1181964 - RNA, 19 nt, Artificial Sequence
  Description of Artificial Sequence: Synthetic oligonucleotide
agugcuccguaaaagugca

SEQ ID NO: 1181965 - RNA, 19 nt, Artificial Sequence
  Description of Artificial Sequence: Synthetic oligonucleotide
ggccagacagaacaucaag

SEQ ID NO: 1181966 - RNA, 19 nt, Artificial Sequence
  Description of Artificial Sequence: Synthetic oligonucleotide
gcuccguaaaagugcaaag

SEQ ID NO: 1181967 - RNA, 19 nt, Artificial Sequence
  Description of Artificial Sequence: Synthetic oligonucleotide
uguagcgguuccagucaca

SEQ ID NO: 1181968 - RNA, 19 nt, Artificial Sequence
  Description of Artificial Sequence: Synthetic oligonucleotide
caacggaacugcgaccccg

SEQ ID NO: 1181969 - RNA, 19 nt, Artificial Sequence
  Description of Artificial Sequence: Synthetic oligonucleotide
uggcaaccgaagcaacccu

SEQ ID NO: 1181970 - RNA, 19 nt, Artificial Sequence
  Description of Artificial Sequence: Synthetic oligonucleotide
aucugugaguucagcgugg

SEQ ID NO: 1181971 - RNA, 19 nt, Artificial Sequence
  Description of Artificial Sequence: Synthetic oligonucleotide
ggcaacggaacugcgaccc

SEQ ID NO: 1181972 - RNA, 19 nt, Artificial Sequence
  Description of Artificial Sequence: Synthetic oligonucleotide
gccuagacacuucaaagga

SEQ ID NO: 1181973 - RNA, 19 nt, Artificial Sequence
  Description of Artificial Sequence: Synthetic oligonucleotide
ugagugccaaauugccaaa

SEQ ID NO: 1181974 - RNA, 19 nt, Artificial Sequence
  Description of Artificial Sequence: Synthetic oligonucleotide
aguaacuucugaguccaua

SEQ ID NO: 1181975 - RNA, 19 nt, Artificial Sequence
  Description of Artificial Sequence: Synthetic oligonucleotide
gcguacuggauguuguagc

SEQ ID NO: 1181976 - RNA, 19 nt, Artificial Sequence
  Description of Artificial Sequence: Synthetic oligonucleotide
caucguccccaccagugac

SEQ ID NO: 1181977 - RNA, 19 nt, Artificial Sequence
  Description of Artificial Sequence: Synthetic oligonucleotide
ucaggagaguaggccagug

SEQ ID NO: 1181978 - RNA, 19 nt, Artificial Sequence
  Description of Artificial Sequence: Synthetic oligonucleotide
gaacaucaagaagccugcc

SEQ ID NO: 1181979 - RNA, 19 nt, Artificial Sequence
  Description of Artificial Sequence: Synthetic oligonucleotide
cagagguuaaagucaaggu

SEQ ID NO: 1181980 - RNA, 19 nt, Artificial Sequence
  Description of Artificial Sequence: Synthetic oligonucleotide
gagcagccaaaggcgaucc

SEQ ID NO: 1181981 - RNA, 19 nt, Artificial Sequence
  Description of Artificial Sequence: Synthetic oligonucleotide
agagcguacuggauguugu

SEQ ID NO: 1181982 - RNA, 19 nt, Artificial Sequence
  Description of Artificial Sequence: Synthetic oligonucleotide
caccccgcugcuuggaaac

SEQ ID NO: 1181983 - RNA, 19 nt, Artificial Sequence
  Description of Artificial Sequence: Synthetic oligonucleotide
agccggaaggccaucagga

SEQ ID NO: 1181984 - RNA, 19 nt, Artificial Sequence
  Description of Artificial Sequence: Synthetic oligonucleotide
auacagcucagggagggaa

SEQ ID NO: 1181985 - RNA, 19 nt, Artificial Sequence
  Description of Artificial Sequence: Synthetic oligonucleotide
gcagaguaacacagggugg

SEQ ID NO: 1181986 - RNA, 19 nt, Artificial Sequence
  Description of Artificial Sequence: Synthetic oligonucleotide
ggagugcuccguaaaagug

SEQ ID NO: 1181987 - RNA, 19 nt, Artificial Sequence
  Description of Artificial Sequence: Synthetic oligonucleotide
aagcaacccucugaucgga

SEQ ID NO: 1181988 - RNA, 19 nt, Artificial Sequence
  Description of Artificial Sequence: Synthetic oligonucleotide
ugacgauauacugcccauc

SEQ ID NO: 1181989 - RNA, 19 nt, Artificial Sequence
  Description of Artificial Sequence: Synthetic oligonucleotide
ggcuugaagugucuagaac

SEQ ID NO: 1181990 - RNA, 19 nt, Artificial Sequence
  Description of Artificial Sequence: Synthetic oligonucleotide
gaucugcucccggacauga

SEQ ID NO: 1181991 - RNA, 19 nt, Artificial Sequence
  Description of Artificial Sequence: Synthetic oligonucleotide
guaacacaggguggugaag

SEQ ID NO: 1181992 - RNA, 19 nt, Artificial Sequence
  Description of Artificial Sequence: Synthetic oligonucleotide
ggaacugcgaccccguucu

SEQ ID NO: 1181993 - RNA, 19 nt, Artificial Sequence
  Description of Artificial Sequence: Synthetic oligonucleotide
uggaacccaucuguacagc

SEQ ID NO: 1181994 - RNA, 19 nt, Artificial Sequence
  Description of Artificial Sequence: Synthetic oligonucleotide
uaggauucacucugccauu

SEQ ID NO: 1181995 - RNA, 19 nt, Artificial Sequence
  Description of Artificial Sequence: Synthetic oligonucleotide
acagaacaucaagaagccu

SEQ ID NO: 1181996 - RNA, 19 nt, Artificial Sequence
  Description of Artificial Sequence: Synthetic oligonucleotide
cuccaacugucaaacaugu

SEQ ID NO: 1181997 - RNA, 19 nt, Artificial Sequence
  Description of Artificial Sequence: Synthetic oligonucleotide
gggugcguuuuacaccccg

SEQ ID NO: 1181998 - RNA, 19 nt, Artificial Sequence
  Description of Artificial Sequence: Synthetic oligonucleotide
ccagggugcguuuuacacc

SEQ ID NO: 1181999 - RNA, 19 nt, Artificial Sequence
  Description of Artificial Sequence: Synthetic oligonucleotide
agaauucaaggugccuaga

SEQ ID NO: 1182000 - RNA, 19 nt, Artificial Sequence
  Description of Artificial Sequence: Synthetic oligonucleotide
caggccggaaagucacagc

SEQ ID NO: 1182001 - RNA, 19 nt, Artificial Sequence
  Description of Artificial Sequence: Synthetic oligonucleotide
gagagguugcaggaaagcu

SEQ ID NO: 1182002 - RNA, 19 nt, Artificial Sequence
  Description of Artificial Sequence: Synthetic oligonucleotide
gcuuugaguauauaggauu

SEQ ID NO: 1182003 - RNA, 19 nt, Artificial Sequence
  Description of Artificial Sequence: Synthetic oligonucleotide
ggagauacucagggagugg

SEQ ID NO: 1182004 - RNA, 19 nt, Artificial Sequence
  Description of Artificial Sequence: Synthetic oligonucleotide
cacggauccgcccaggugu

SEQ ID NO: 1182005 - RNA, 19 nt, Artificial Sequence
  Description of Artificial Sequence: Synthetic oligonucleotide
auccgcccaggugucacac

SEQ ID NO: 1182006 - RNA, 19 nt, Artificial Sequence
  Description of Artificial Sequence: Synthetic oligonucleotide
uugagccggaaggccauca

SEQ ID NO: 1182007 - RNA, 19 nt, Artificial Sequence
  Description of Artificial Sequence: Synthetic oligonucleotide
aacggaacugcgaccccgu

SEQ ID NO: 1182008 - RNA, 19 nt, Artificial Sequence
  Description of Artificial Sequence: Synthetic oligonucleotide
accacugaugggccccuca

SEQ ID NO: 1182009 - RNA, 19 nt, Artificial Sequence
  Description of Artificial Sequence: Synthetic oligonucleotide
gguguccagcucaaauggg

SEQ ID NO: 1182010 - RNA, 19 nt, Artificial Sequence
  Description of Artificial Sequence: Synthetic oligonucleotide
gguucuacaccagcauccc

SEQ ID NO: 1182011 - RNA, 19 nt, Artificial Sequence
  Description of Artificial Sequence: Synthetic oligonucleotide
cccucugucguaaugccuc

SEQ ID NO: 1182012 - RNA, 19 nt, Artificial Sequence
  Description of Artificial Sequence: Synthetic oligonucleotide
agcgcugaccacaucaauu

SEQ ID NO: 1182013 - RNA, 19 nt, Artificial Sequence
  Description of Artificial Sequence: Synthetic oligonucleotide
cacccggcaacggaacugc

SEQ ID NO: 1182014 - RNA, 19 nt, Artificial Sequence
  Description of Artificial Sequence: Synthetic oligonucleotide
ccucugaucggagauacuc

SEQ ID NO: 1182015 - RNA, 19 nt, Artificial Sequence
  Description of Artificial Sequence: Synthetic oligonucleotide
cagugacgauauacugccc

SEQ ID NO: 1182016 - RNA, 19 nt, Artificial Sequence
  Description of Artificial Sequence: Synthetic oligonucleotide
ccuuagcugaauguuuggc

SEQ ID NO: 1182017 - RNA, 19 nt, Artificial Sequence
  Description of Artificial Sequence: Synthetic oligonucleotide
cacaggguggugaaggccu

SEQ ID NO: 1182018 - RNA, 19 nt, Artificial Sequence
  Description of Artificial Sequence: Synthetic oligonucleotide
caaaggcgauccagucccc

SEQ ID NO: 1182019 - RNA, 19 nt, Artificial Sequence
  Description of Artificial Sequence: Synthetic oligonucleotide
auccgcagaguaacacagg

SEQ ID NO: 1182020 - RNA, 19 nt, Artificial Sequence
  Description of Artificial Sequence: Synthetic oligonucleotide
caggcuugaagugucuaga

SEQ ID NO: 1182021 - RNA, 19 nt, Artificial Sequence
  Description of Artificial Sequence: Synthetic oligonucleotide
gacggguguuucccacacc

SEQ ID NO: 1182022 - RNA, 19 nt, Artificial Sequence
  Description of Artificial Sequence: Synthetic oligonucleotide
gaagcgcugaccacaucaa

SEQ ID NO: 1182023 - RNA, 19 nt, Artificial Sequence
  Description of Artificial Sequence: Synthetic oligonucleotide
ugccugcccucgauggaac

SEQ ID NO: 1182024 - RNA, 19 nt, Artificial Sequence
  Description of Artificial Sequence: Synthetic oligonucleotide
gugacccugauuucaggcu

SEQ ID NO: 1182025 - RNA, 19 nt, Artificial Sequence
  Description of Artificial Sequence: Synthetic oligonucleotide
ccggcaacggaacugcgac

SEQ ID NO: 1182026 - RNA, 19 nt, Artificial Sequence
  Description of Artificial Sequence: Synthetic oligonucleotide
ggacuucauuggauuaaag

SEQ ID NO: 1182027 - RNA, 19 nt, Artificial Sequence
  Description of Artificial Sequence: Synthetic oligonucleotide
aucagagguuaaagucaag

SEQ ID NO: 1182028 - RNA, 19 nt, Artificial Sequence
  Description of Artificial Sequence: Synthetic oligonucleotide
ggucccagaaggugaucug

SEQ ID NO: 1182029 - RNA, 19 nt, Artificial Sequence
  Description of Artificial Sequence: Synthetic oligonucleotide
gccacugacggguguuucc

SEQ ID NO: 1182030 - RNA, 19 nt, Artificial Sequence
  Description of Artificial Sequence: Synthetic oligonucleotide
uuacaccccgcugcuugga

SEQ ID NO: 1182031 - RNA, 19 nt, Artificial Sequence
  Description of Artificial Sequence: Synthetic oligonucleotide
acccaucuguacagcguuc

SEQ ID NO: 1182032 - RNA, 19 nt, Artificial Sequence
  Description of Artificial Sequence: Synthetic oligonucleotide
ugcucccggacaugauaaa

SEQ ID NO: 1182033 - RNA, 19 nt, Artificial Sequence
  Description of Artificial Sequence: Synthetic oligonucleotide
caucaagaagccugccugu

SEQ ID NO: 1182034 - RNA, 19 nt, Artificial Sequence
  Description of Artificial Sequence: Synthetic oligonucleotide
guaaugccucacggauccg

SEQ ID NO: 1182035 - RNA, 19 nt, Artificial Sequence
  Description of Artificial Sequence: Synthetic oligonucleotide
acaccccgcugcuuggaaa

SEQ ID NO: 1182036 - RNA, 19 nt, Artificial Sequence
  Description of Artificial Sequence: Synthetic oligonucleotide
caccccgcuggagugcucc

SEQ ID NO: 1182037 - RNA, 19 nt, Artificial Sequence
  Description of Artificial Sequence: Synthetic oligonucleotide
cuagaacucauaucaccuu

SEQ ID NO: 1182038 - RNA, 19 nt, Artificial Sequence
  Description of Artificial Sequence: Synthetic oligonucleotide
gguguuucccacaccuuga

SEQ ID NO: 1182039 - RNA, 19 nt, Artificial Sequence
  Description of Artificial Sequence: Synthetic oligonucleotide
gcuaagaacucaagaaccu

SEQ ID NO: 1182040 - RNA, 19 nt, Artificial Sequence
  Description of Artificial Sequence: Synthetic oligonucleotide
cugaauguuuggcugugau

SEQ ID NO: 1182041 - RNA, 19 nt, Artificial Sequence
  Description of Artificial Sequence: Synthetic oligonucleotide
cugugucuacagguuccag

SEQ ID NO: 1182042 - RNA, 19 nt, Artificial Sequence
  Description of Artificial Sequence: Synthetic oligonucleotide
gauccgcccaggugucaca

SEQ ID NO: 1182043 - RNA, 19 nt, Artificial Sequence
  Description of Artificial Sequence: Synthetic oligonucleotide
cugacggguguuucccaca

SEQ ID NO: 1182044 - RNA, 19 nt, Artificial Sequence
  Description of Artificial Sequence: Synthetic oligonucleotide
agauacucagggaguggau

SEQ ID NO: 1182045 - RNA, 19 nt, Artificial Sequence
  Description of Artificial Sequence: Synthetic oligonucleotide
agcagccaaaggcgaucca

SEQ ID NO: 1182046 - RNA, 19 nt, Artificial Sequence
  Description of Artificial Sequence: Synthetic oligonucleotide
gugcguuuuacaccccgcu

SEQ ID NO: 1182047 - RNA, 19 nt, Artificial Sequence
  Description of Artificial Sequence: Synthetic oligonucleotide
ugcaccccgcuggagugcu

SEQ ID NO: 1182048 - RNA, 19 nt, Artificial Sequence
  Description of Artificial Sequence: Synthetic oligonucleotide
ggugcguuuuacaccccgc

SEQ ID NO: 1182049 - RNA, 19 nt, Artificial Sequence
  Description of Artificial Sequence: Synthetic oligonucleotide
agcaacccucugaucggag

SEQ ID NO: 1182050 - RNA, 19 nt, Artificial Sequence
  Description of Artificial Sequence: Synthetic oligonucleotide
cgauggaacccaucuguac

SEQ ID NO: 1182051 - RNA, 19 nt, Artificial Sequence
  Description of Artificial Sequence: Synthetic oligonucleotide
gucugcaccccgcuggagu

SEQ ID NO: 1182052 - RNA, 19 nt, Artificial Sequence
  Description of Artificial Sequence: Synthetic oligonucleotide
gugacgauauacugcccau

SEQ ID NO: 1182053 - RNA, 19 nt, Artificial Sequence
  Description of Artificial Sequence: Synthetic oligonucleotide
cccgcugcuuggaaacugc

SEQ ID NO: 1182054 - RNA, 19 nt, Artificial Sequence
  Description of Artificial Sequence: Synthetic oligonucleotide
ccuccugccagaauguucu

SEQ ID NO: 1182055 - RNA, 19 nt, Artificial Sequence
  Description of Artificial Sequence: Synthetic oligonucleotide
caggauggcccggguaaac

SEQ ID NO: 1182056 - RNA, 19 nt, Artificial Sequence
  Description of Artificial Sequence: Synthetic oligonucleotide
gcaacccucugaucggaga

SEQ ID NO: 1182057 - RNA, 19 nt, Artificial Sequence
  Description of Artificial Sequence: Synthetic oligonucleotide
ccuuuucuuacacccggca

SEQ ID NO: 1182058 - RNA, 19 nt, Artificial Sequence
  Description of Artificial Sequence: Synthetic oligonucleotide
ggagggaagcgcugaccac

SEQ ID NO: 1182059 - RNA, 19 nt, Artificial Sequence
  Description of Artificial Sequence: Synthetic oligonucleotide
augggucgaagagcaucug

SEQ ID NO: 1182060 - RNA, 19 nt, Artificial Sequence
  Description of Artificial Sequence: Synthetic oligonucleotide
ccacugacggguguuuccc

SEQ ID NO: 1182061 - RNA, 19 nt, Artificial Sequence
  Description of Artificial Sequence: Synthetic oligonucleotide
caugccugcccucgaugga

SEQ ID NO: 1182062 - RNA, 19 nt, Artificial Sequence
  Description of Artificial Sequence: Synthetic oligonucleotide
agggugcguuuuacacccc

SEQ ID NO: 1182063 - RNA, 19 nt, Artificial Sequence
  Description of Artificial Sequence: Synthetic oligonucleotide
gggcaucagagguuaaagu

SEQ ID NO: 1182064 - RNA, 19 nt, Artificial Sequence
  Description of Artificial Sequence: Synthetic oligonucleotide
ccauccgcagaguaacaca

SEQ ID NO: 1182065 - RNA, 19 nt, Artificial Sequence
  Description of Artificial Sequence: Synthetic oligonucleotide
ugcccucgauggaacccau

SEQ ID NO: 1182066 - RNA, 19 nt, Artificial Sequence
  Description of Artificial Sequence: Synthetic oligonucleotide
uggcccggguaaacucccu

SEQ ID NO: 1182067 - RNA, 19 nt, Artificial Sequence
  Description of Artificial Sequence: Synthetic oligonucleotide
ggcaaccgaagcaacccuc

SEQ ID NO: 1182068 - RNA, 19 nt, Artificial Sequence
  Description of Artificial Sequence: Synthetic oligonucleotide
agcgcccagugggagagaa

SEQ ID NO: 1182069 - RNA, 19 nt, Artificial Sequence
  Description of Artificial Sequence: Synthetic oligonucleotide
acccugauuucaggcuuga

SEQ ID NO: 1182070 - RNA, 19 nt, Artificial Sequence
  Description of Artificial Sequence: Synthetic oligonucleotide
ccuugcccuuagcugaaug

SEQ ID NO: 1182071 - RNA, 19 nt, Artificial Sequence
  Description of Artificial Sequence: Synthetic oligonucleotide
guucuacaccagcaucccu

SEQ ID NO: 1182072 - RNA, 19 nt, Artificial Sequence
  Description of Artificial Sequence: Synthetic oligonucleotide
cacugacggguguuuccca

SEQ ID NO: 1182073 - RNA, 19 nt, Artificial Sequence
  Description of Artificial Sequence: Synthetic oligonucleotide
gucccagaaggugaucugu

SEQ ID NO: 1182074 - RNA, 19 nt, Artificial Sequence
  Description of Artificial Sequence: Synthetic oligonucleotide
cauugagccggaaggccau

SEQ ID NO: 1182075 - RNA, 19 nt, Artificial Sequence
  Description of Artificial Sequence: Synthetic oligonucleotide
gaccuccugugccaguuuu

SEQ ID NO: 1182076 - RNA, 19 nt, Artificial Sequence
  Description of Artificial Sequence: Synthetic oligonucleotide
cagggcaucagagguuaaa

SEQ ID NO: 1182077 - RNA, 19 nt, Artificial Sequence
  Description of Artificial Sequence: Synthetic oligonucleotide
gcaacggaacugcgacccc

SEQ ID NO: 1182078 - RNA, 19 nt, Artificial Sequence
  Description of Artificial Sequence: Synthetic oligonucleotide
gcccagugggagagaagcg

SEQ ID NO: 1182079 - RNA, 19 nt, Artificial Sequence
  Description of Artificial Sequence: Synthetic oligonucleotide
cggguaaacucccucuguc

SEQ ID NO: 1182080 - RNA, 19 nt, Artificial Sequence
  Description of Artificial Sequence: Synthetic oligonucleotide
cccauccgcagaguaacac

SEQ ID NO: 1182081 - RNA, 19 nt, Artificial Sequence
  Description of Artificial Sequence: Synthetic oligonucleotide
gguagaauucaaggugccu

SEQ ID NO: 1182082 - RNA, 19 nt, Artificial Sequence
  Description of Artificial Sequence: Synthetic oligonucleotide
uccugccggucuugagguc

SEQ ID NO: 1182083 - RNA, 19 nt, Artificial Sequence
  Description of Artificial Sequence: Synthetic oligonucleotide
gaacugcgaccccguucuc

SEQ ID NO: 1182084 - RNA, 19 nt, Artificial Sequence
  Description of Artificial Sequence: Synthetic oligonucleotide
ccgcugcuuggaaacugcc

SEQ ID NO: 1182085 - RNA, 19 nt, Artificial Sequence
  Description of Artificial Sequence: Synthetic oligonucleotide
ggauccgcccaggugucac

SEQ ID NO: 1182086 - RNA, 19 nt, Artificial Sequence
  Description of Artificial Sequence: Synthetic oligonucleotide
gcgcugaccacaucaauuu

SEQ ID NO: 1182087 - RNA, 19 nt, Artificial Sequence
  Description of Artificial Sequence: Synthetic oligonucleotide
acccggcaacggaacugcg

SEQ ID NO: 1182088 - RNA, 19 nt, Artificial Sequence
  Description of Artificial Sequence: Synthetic oligonucleotide
acggaacugcgaccccguu

SEQ ID NO: 1182089 - RNA, 19 nt, Artificial Sequence
  Description of Artificial Sequence: Synthetic oligonucleotide
cuucagccgcuguccaugu

SEQ ID NO: 1182090 - RNA, 19 nt, Artificial Sequence
  Description of Artificial Sequence: Synthetic oligonucleotide
gccugcccucgauggaacc

SEQ ID NO: 1182091 - RNA, 19 nt, Artificial Sequence
  Description of Artificial Sequence: Synthetic oligonucleotide
gccgcuguccaugugacau

SEQ ID NO: 1182092 - RNA, 19 nt, Artificial Sequence
  Description of Artificial Sequence: Synthetic oligonucleotide
ggcccggguaaacucccuc

SEQ ID NO: 1182093 - RNA, 19 nt, Artificial Sequence
  Description of Artificial Sequence: Synthetic oligonucleotide
gguuaaagucaaggucucu

SEQ ID NO: 1182094 - RNA, 19 nt, Artificial Sequence
  Description of Artificial Sequence: Synthetic oligonucleotide
cugcgaccccguucuccuc

SEQ ID NO: 1182095 - RNA, 19 nt, Artificial Sequence
  Description of Artificial Sequence: Synthetic oligonucleotide
ggccggaaagucacagcca

SEQ ID NO: 1182096 - RNA, 19 nt, Artificial Sequence
  Description of Artificial Sequence: Synthetic oligonucleotide
cucacggauccgcccaggu

SEQ ID NO: 1182097 - RNA, 19 nt, Artificial Sequence
  Description of Artificial Sequence: Synthetic oligonucleotide
gcugaauguuuggcuguga

SEQ ID NO: 1182098 - RNA, 19 nt, Artificial Sequence
  Description of Artificial Sequence: Synthetic oligonucleotide
ugccggucuugaggucaug

SEQ ID NO: 1182099 - RNA, 19 nt, Artificial Sequence
  Description of Artificial Sequence: Synthetic oligonucleotide
gguugaacucugggagcuc

SEQ ID NO: 1182100 - RNA, 19 nt, Artificial Sequence
  Description of Artificial Sequence: Synthetic oligonucleotide
gcuguccaugugacauaag

SEQ ID NO: 1182101 - RNA, 19 nt, Artificial Sequence
  Description of Artificial Sequence: Synthetic oligonucleotide
gcaaccgaagcaacccucu

SEQ ID NO: 1182102 - RNA, 19 nt, Artificial Sequence
  Description of Artificial Sequence: Synthetic oligonucleotide
ccgaagcaacccucugauc

SEQ ID NO: 1182103 - RNA, 19 nt, Artificial Sequence
  Description of Artificial Sequence: Synthetic oligonucleotide
caaaugggucgaagagcau

SEQ ID NO: 1182104 - RNA, 19 nt, Artificial Sequence
  Description of Artificial Sequence: Synthetic oligonucleotide
cggaacugcgaccccguuc

SEQ ID NO: 1182105 - RNA, 19 nt, Artificial Sequence
  Description of Artificial Sequence: Synthetic oligonucleotide
ccucugucguaaugccuca

SEQ ID NO: 1182106 - RNA, 19 nt, Artificial Sequence
  Description of Artificial Sequence: Synthetic oligonucleotide
gcguucucagggucccaga

SEQ ID NO: 1182107 - RNA, 19 nt, Artificial Sequence
  Description of Artificial Sequence: Synthetic oligonucleotide
cccggcaacggaacugcga

SEQ ID NO: 1182108 - RNA, 19 nt, Artificial Sequence
  Description of Artificial Sequence: Synthetic oligonucleotide
cggcaacggaacugcgacc

SEQ ID NO: 1182109 - RNA, 19 nt, Artificial Sequence
  Description of Artificial Sequence: Synthetic oligonucleotide
cugccagagcguacuggau

SEQ ID NO: 1182110 - RNA, 19 nt, Artificial Sequence
  Description of Artificial Sequence: Synthetic oligonucleotide
cccuguugcuuugaguaua

SEQ ID NO: 1182111 - RNA, 19 nt, Artificial Sequence
  Description of Artificial Sequence: Synthetic oligonucleotide
cuguugcuuugaguauaua

SEQ ID NO: 1182112 - RNA, 19 nt, Artificial Sequence
  Description of Artificial Sequence: Synthetic oligonucleotide
guuuuacaccccgcugcuu

SEQ ID NO: 1182113 - RNA, 19 nt, Artificial Sequence
  Description of Artificial Sequence: Synthetic oligonucleotide
ccccgcugcuuggaaacug

SEQ ID NO: 1182114 - RNA, 19 nt, Artificial Sequence
  Description of Artificial Sequence: Synthetic oligonucleotide
ugggccccucauggccaga

SEQ ID NO: 1182115 - RNA, 19 nt, Artificial Sequence
  Description of Artificial Sequence: Synthetic oligonucleotide
cguuuuacaccccgcugcu

SEQ ID NO: 1182116 - RNA, 19 nt, Artificial Sequence
  Description of Artificial Sequence: Synthetic oligonucleotide
gaugccgcuggagccccuu

SEQ ID NO: 1182117 - RNA, 19 nt, Artificial Sequence
  Description of Artificial Sequence: Synthetic oligonucleotide
ccgcagaguaacacagggu

SEQ ID NO: 1182118 - RNA, 19 nt, Artificial Sequence
  Description of Artificial Sequence: Synthetic oligonucleotide
gcgcccagugggagagaag

SEQ ID NO: 1182119 - RNA, 19 nt, Artificial Sequence
  Description of Artificial Sequence: Synthetic oligonucleotide
cgcuggagugcuccguaaa

SEQ ID NO: 1182120 - RNA, 19 nt, Artificial Sequence
  Description of Artificial Sequence: Synthetic oligonucleotide
cccgcuggagugcuccgua

SEQ ID NO: 1182121 - RNA, 19 nt, Artificial Sequence
  Description of Artificial Sequence: Synthetic oligonucleotide
ccgcuguccaugugacaua

SEQ ID NO: 1182122 - RNA, 19 nt, Artificial Sequence
  Description of Artificial Sequence: Synthetic oligonucleotide
ccgcuggagugcuccguaa

SEQ ID NO: 1182123 - RNA, 19 nt, Artificial Sequence
  Description of Artificial Sequence: Synthetic oligonucleotide
cccugaguaggugcagacu

SEQ ID NO: 1182124 - RNA, 19 nt, Artificial Sequence
  Description of Artificial Sequence: Synthetic oligonucleotide
cgaccccguucuccucccc

SEQ ID NO: 1182125 - RNA, 19 nt, Artificial Sequence
  Description of Artificial Sequence: Synthetic oligonucleotide
cccucugaucggagauacu

SEQ ID NO: 1182126 - RNA, 19 nt, Artificial Sequence
  Description of Artificial Sequence: Synthetic oligonucleotide
cugcaccaucaggccggaa

SEQ ID NO: 1182127 - RNA, 19 nt, Artificial Sequence
  Description of Artificial Sequence: Synthetic oligonucleotide
gcaccccgcuggagugcuc

SEQ ID NO: 1182128 - RNA, 19 nt, Artificial Sequence
  Description of Artificial Sequence: Synthetic oligonucleotide
cggguguuucccacaccuu

SEQ ID NO: 1182129 - RNA, 19 nt, Artificial Sequence
  Description of Artificial Sequence: Synthetic oligonucleotide
gccuugcccuuagcugaau

SEQ ID NO: 1182130 - RNA, 19 nt, Artificial Sequence
  Description of Artificial Sequence: Synthetic oligonucleotide
ccccaccagugacgauaua

SEQ ID NO: 1182131 - RNA, 19 nt, Artificial Sequence
  Description of Artificial Sequence: Synthetic oligonucleotide
aaaacuucaggcuuucacc

SEQ ID NO: 1182132 - RNA, 19 nt, Artificial Sequence
  Description of Artificial Sequence: Synthetic oligonucleotide
ucaugauugauucacaggc

SEQ ID NO: 1182133 - RNA, 19 nt, Artificial Sequence
  Description of Artificial Sequence: Synthetic oligonucleotide
aaagacauuggagaagugc

SEQ ID NO: 1182134 - RNA, 19 nt, Artificial Sequence
  Description of Artificial Sequence: Synthetic oligonucleotide
aauccauucucagugaugg

SEQ ID NO: 1182135 - RNA, 19 nt, Artificial Sequence
  Description of Artificial Sequence: Synthetic oligonucleotide
augggcuaaauuuauaaac

SEQ ID NO: 1182136 - RNA, 19 nt, Artificial Sequence
  Description of Artificial Sequence: Synthetic oligonucleotide
aagaugcaaggccugagcc

SEQ ID NO: 1182137 - RNA, 19 nt, Artificial Sequence
  Description of Artificial Sequence: Synthetic oligonucleotide
ucagugauggacaaaagac

SEQ ID NO: 1182138 - RNA, 19 nt, Artificial Sequence
  Description of Artificial Sequence: Synthetic oligonucleotide
aaugccauaacaguuagga

SEQ ID NO: 1182139 - RNA, 19 nt, Artificial Sequence
  Description of Artificial Sequence: Synthetic oligonucleotide
gaucaauccauucucagug

SEQ ID NO: 1182140 - RNA, 19 nt, Artificial Sequence
  Description of Artificial Sequence: Synthetic oligonucleotide
augauugauucacaggccc

SEQ ID NO: 1182141 - RNA, 19 nt, Artificial Sequence
  Description of Artificial Sequence: Synthetic oligonucleotide
gaucauaugacaucuuggc

SEQ ID NO: 1182142 - RNA, 19 nt, Artificial Sequence
  Description of Artificial Sequence: Synthetic oligonucleotide
ugagccacaguguugaucc

SEQ ID NO: 1182143 - RNA, 19 nt, Artificial Sequence
  Description of Artificial Sequence: Synthetic oligonucleotide
uucucuacugcugugaggg

SEQ ID NO: 1182144 - RNA, 19 nt, Artificial Sequence
  Description of Artificial Sequence: Synthetic oligonucleotide
aaugcaaacucacugcagu

SEQ ID NO: 1182145 - RNA, 19 nt, Artificial Sequence
  Description of Artificial Sequence: Synthetic oligonucleotide
agaacaugaauucugugug

SEQ ID NO: 1182146 - RNA, 19 nt, Artificial Sequence
  Description of Artificial Sequence: Synthetic oligonucleotide
agauacuguguuuucaggg

SEQ ID NO: 1182147 - RNA, 19 nt, Artificial Sequence
  Description of Artificial Sequence: Synthetic oligonucleotide
aacaguuaggaaagggucc

SEQ ID NO: 1182148 - RNA, 19 nt, Artificial Sequence
  Description of Artificial Sequence: Synthetic oligonucleotide
uuuagcaaaggauaccucu

SEQ ID NO: 1182149 - RNA, 19 nt, Artificial Sequence
  Description of Artificial Sequence: Synthetic oligonucleotide
acaauaauauucaaauagg

SEQ ID NO: 1182150 - RNA, 19 nt, Artificial Sequence
  Description of Artificial Sequence: Synthetic oligonucleotide
gagaguacugagaagaugc

SEQ ID NO: 1182151 - RNA, 19 nt, Artificial Sequence
  Description of Artificial Sequence: Synthetic oligonucleotide
aaagugucaucuaccaagc

SEQ ID NO: 1182152 - RNA, 19 nt, Artificial Sequence
  Description of Artificial Sequence: Synthetic oligonucleotide
uuagaaguccagcucggcg

SEQ ID NO: 1182153 - RNA, 19 nt, Artificial Sequence
  Description of Artificial Sequence: Synthetic oligonucleotide
uaggauuuagcaaaggaua

SEQ ID NO: 1182154 - RNA, 19 nt, Artificial Sequence
  Description of Artificial Sequence: Synthetic oligonucleotide
agacacaugaggcgaaggc

SEQ ID NO: 1182155 - RNA, 19 nt, Artificial Sequence
  Description of Artificial Sequence: Synthetic oligonucleotide
ucuucgauguagcuggugc

SEQ ID NO: 1182156 - RNA, 19 nt, Artificial Sequence
  Description of Artificial Sequence: Synthetic oligonucleotide
agugauggacaaaagacac

SEQ ID NO: 1182157 - RNA, 19 nt, Artificial Sequence
  Description of Artificial Sequence: Synthetic oligonucleotide
auagagaguacugagaaga

SEQ ID NO: 1182158 - RNA, 19 nt, Artificial Sequence
  Description of Artificial Sequence: Synthetic oligonucleotide
ucagcauugaguagcaccu

SEQ ID NO: 1182159 - RNA, 19 nt, Artificial Sequence
  Description of Artificial Sequence: Synthetic oligonucleotide
agaaagauguguccaaucu

SEQ ID NO: 1182160 - RNA, 19 nt, Artificial Sequence
  Description of Artificial Sequence: Synthetic oligonucleotide
uuuugagagaggagaacag

SEQ ID NO: 1182161 - RNA, 19 nt, Artificial Sequence
  Description of Artificial Sequence: Synthetic oligonucleotide
uuuauguccaugccucucc

SEQ ID NO: 1182162 - RNA, 19 nt, Artificial Sequence
  Description of Artificial Sequence: Synthetic oligonucleotide
uucaaauaggauuuagcaa

SEQ ID NO: 1182163 - RNA, 19 nt, Artificial Sequence
  Description of Artificial Sequence: Synthetic oligonucleotide
uaacaguuaggaaaggguc

SEQ ID NO: 1182164 - RNA, 19 nt, Artificial Sequence
  Description of Artificial Sequence: Synthetic oligonucleotide
gaaaacuucaggcuuucac

SEQ ID NO: 1182165 - RNA, 19 nt, Artificial Sequence
  Description of Artificial Sequence: Synthetic oligonucleotide
ugcucaaugauucggcagc

SEQ ID NO: 1182166 - RNA, 19 nt, Artificial Sequence
  Description of Artificial Sequence: Synthetic oligonucleotide
ugaaugcaaacucacugca

SEQ ID NO: 1182167 - RNA, 19 nt, Artificial Sequence
  Description of Artificial Sequence: Synthetic oligonucleotide
cuguuagaaguccagcucg

SEQ ID NO: 1182168 - RNA, 19 nt, Artificial Sequence
  Description of Artificial Sequence: Synthetic oligonucleotide
uacacgugggaucaaauuc

SEQ ID NO: 1182169 - RNA, 19 nt, Artificial Sequence
  Description of Artificial Sequence: Synthetic oligonucleotide
uccagcucggcgcagauug

SEQ ID NO: 1182170 - RNA, 19 nt, Artificial Sequence
  Description of Artificial Sequence: Synthetic oligonucleotide
aauucugugugugugugug

SEQ ID NO: 1182171 - RNA, 19 nt, Artificial Sequence
  Description of Artificial Sequence: Synthetic oligonucleotide
ucuaggagaaagauguguc

SEQ ID NO: 1182172 - RNA, 19 nt, Artificial Sequence
  Description of Artificial Sequence: Synthetic oligonucleotide
ucguugaacaccuuguccu

SEQ ID NO: 1182173 - RNA, 19 nt, Artificial Sequence
  Description of Artificial Sequence: Synthetic oligonucleotide
aaaggguccauagagagua

SEQ ID NO: 1182174 - RNA, 19 nt, Artificial Sequence
  Description of Artificial Sequence: Synthetic oligonucleotide
ucgaccuuugguuucacug

SEQ ID NO: 1182175 - RNA, 19 nt, Artificial Sequence
  Description of Artificial Sequence: Synthetic oligonucleotide
ucugucuaggagaaagaug

SEQ ID NO: 1182176 - RNA, 19 nt, Artificial Sequence
  Description of Artificial Sequence: Synthetic oligonucleotide
acaguguugauccaacgcu

SEQ ID NO: 1182177 - RNA, 19 nt, Artificial Sequence
  Description of Artificial Sequence: Synthetic oligonucleotide
auaagccaugucucgaggg

SEQ ID NO: 1182178 - RNA, 19 nt, Artificial Sequence
  Description of Artificial Sequence: Synthetic oligonucleotide
acuugauucggaaaguguc

SEQ ID NO: 1182179 - RNA, 19 nt, Artificial Sequence
  Description of Artificial Sequence: Synthetic oligonucleotide
ucaggcucuugucagagga

SEQ ID NO: 1182180 - RNA, 19 nt, Artificial Sequence
  Description of Artificial Sequence: Synthetic oligonucleotide
uguuagaaguccagcucgg

SEQ ID NO: 1182181 - RNA, 19 nt, Artificial Sequence
  Description of Artificial Sequence: Synthetic oligonucleotide
agugcugucacaaagucca

SEQ ID NO: 1182182 - RNA, 19 nt, Artificial Sequence
  Description of Artificial Sequence: Synthetic oligonucleotide
aagugucaucuaccaagcc

SEQ ID NO: 1182183 - RNA, 19 nt, Artificial Sequence
  Description of Artificial Sequence: Synthetic oligonucleotide
aguacugagaagaugcaag

SEQ ID NO: 1182184 - RNA, 19 nt, Artificial Sequence
  Description of Artificial Sequence: Synthetic oligonucleotide
uucuauuggugacaccugc

SEQ ID NO: 1182185 - RNA, 19 nt, Artificial Sequence
  Description of Artificial Sequence: Synthetic oligonucleotide
uugucagaaagaugaaucu

SEQ ID NO: 1182186 - RNA, 19 nt, Artificial Sequence
  Description of Artificial Sequence: Synthetic oligonucleotide
uauucucuacugcugugag

SEQ ID NO: 1182187 - RNA, 19 nt, Artificial Sequence
  Description of Artificial Sequence: Synthetic oligonucleotide
cuaggagaaagaugugucc

SEQ ID NO: 1182188 - RNA, 19 nt, Artificial Sequence
  Description of Artificial Sequence: Synthetic oligonucleotide
uucggaaagugucaucuac

SEQ ID NO: 1182189 - RNA, 19 nt, Artificial Sequence
  Description of Artificial Sequence: Synthetic oligonucleotide
cuauuggugacaccugccg

SEQ ID NO: 1182190 - RNA, 19 nt, Artificial Sequence
  Description of Artificial Sequence: Synthetic oligonucleotide
agauguguccaaucucugg

SEQ ID NO: 1182191 - RNA, 19 nt, Artificial Sequence
  Description of Artificial Sequence: Synthetic oligonucleotide
aagugcugucacaaagucc

SEQ ID NO: 1182192 - RNA, 19 nt, Artificial Sequence
  Description of Artificial Sequence: Synthetic oligonucleotide
gauacuguguuuucaggga

SEQ ID NO: 1182193 - RNA, 19 nt, Artificial Sequence
  Description of Artificial Sequence: Synthetic oligonucleotide
caaucucuggucuucgacc

SEQ ID NO: 1182194 - RNA, 19 nt, Artificial Sequence
  Description of Artificial Sequence: Synthetic oligonucleotide
ugaaucuguacccuuucuc

SEQ ID NO: 1182195 - RNA, 19 nt, Artificial Sequence
  Description of Artificial Sequence: Synthetic oligonucleotide
ucggaaagugucaucuacc

SEQ ID NO: 1182196 - RNA, 19 nt, Artificial Sequence
  Description of Artificial Sequence: Synthetic oligonucleotide
ucgagggacuuucagguca

SEQ ID NO: 1182197 - RNA, 19 nt, Artificial Sequence
  Description of Artificial Sequence: Synthetic oligonucleotide
acgaaaauugcuccucuug

SEQ ID NO: 1182198 - RNA, 19 nt, Artificial Sequence
  Description of Artificial Sequence: Synthetic oligonucleotide
cucauuucugaucucguug

SEQ ID NO: 1182199 - RNA, 19 nt, Artificial Sequence
  Description of Artificial Sequence: Synthetic oligonucleotide
ucuauuggugacaccugcc

SEQ ID NO: 1182200 - RNA, 19 nt, Artificial Sequence
  Description of Artificial Sequence: Synthetic oligonucleotide
aggaaguaaucccugaaaa

SEQ ID NO: 1182201 - RNA, 19 nt, Artificial Sequence
  Description of Artificial Sequence: Synthetic oligonucleotide
uuauguccaugccucuccg

SEQ ID NO: 1182202 - RNA, 19 nt, Artificial Sequence
  Description of Artificial Sequence: Synthetic oligonucleotide
uuggagaagguuagcaggu

SEQ ID NO: 1182203 - RNA, 19 nt, Artificial Sequence
  Description of Artificial Sequence: Synthetic oligonucleotide
agaacugaaggcgucagug

SEQ ID NO: 1182204 - RNA, 19 nt, Artificial Sequence
  Description of Artificial Sequence: Synthetic oligonucleotide
acauaggcaccacugaaga

SEQ ID NO: 1182205 - RNA, 19 nt, Artificial Sequence
  Description of Artificial Sequence: Synthetic oligonucleotide
aacugaaggcgucagugau

SEQ ID NO: 1182206 - RNA, 19 nt, Artificial Sequence
  Description of Artificial Sequence: Synthetic oligonucleotide
agcauugaguagcaccuuc

SEQ ID NO: 1182207 - RNA, 19 nt, Artificial Sequence
  Description of Artificial Sequence: Synthetic oligonucleotide
uauguguguguguaugugu

SEQ ID NO: 1182208 - RNA, 19 nt, Artificial Sequence
  Description of Artificial Sequence: Synthetic oligonucleotide
auaacaguuaggaaagggu

SEQ ID NO: 1182209 - RNA, 19 nt, Artificial Sequence
  Description of Artificial Sequence: Synthetic oligonucleotide
aucuguaauccuuugggau

SEQ ID NO: 1182210 - RNA, 19 nt, Artificial Sequence
  Description of Artificial Sequence: Synthetic oligonucleotide
uuucagggaucuguaaucc

SEQ ID NO: 1182211 - RNA, 19 nt, Artificial Sequence
  Description of Artificial Sequence: Synthetic oligonucleotide
ucaucuaccaagcccucgu

SEQ ID NO: 1182212 - RNA, 19 nt, Artificial Sequence
  Description of Artificial Sequence: Synthetic oligonucleotide
uguguccaaucucuggucu

SEQ ID NO: 1182213 - RNA, 19 nt, Artificial Sequence
  Description of Artificial Sequence: Synthetic oligonucleotide
uaagccaugucucgaggga

SEQ ID NO: 1182214 - RNA, 19 nt, Artificial Sequence
  Description of Artificial Sequence: Synthetic oligonucleotide
uguagcuggugcucucucg

SEQ ID NO: 1182215 - RNA, 19 nt, Artificial Sequence
  Description of Artificial Sequence: Synthetic oligonucleotide
auuucugaucucguugaac

SEQ ID NO: 1182216 - RNA, 19 nt, Artificial Sequence
  Description of Artificial Sequence: Synthetic oligonucleotide
caauauggagacucagcag

SEQ ID NO: 1182217 - RNA, 19 nt, Artificial Sequence
  Description of Artificial Sequence: Synthetic oligonucleotide
uguacccuuucucucugcc

SEQ ID NO: 1182218 - RNA, 19 nt, Artificial Sequence
  Description of Artificial Sequence: Synthetic oligonucleotide
ugugugugugugaacuggc

SEQ ID NO: 1182219 - RNA, 19 nt, Artificial Sequence
  Description of Artificial Sequence: Synthetic oligonucleotide
guugauccaacgcugguca

SEQ ID NO: 1182220 - RNA, 19 nt, Artificial Sequence
  Description of Artificial Sequence: Synthetic oligonucleotide
uaggagaaagaugugucca

SEQ ID NO: 1182221 - RNA, 19 nt, Artificial Sequence
  Description of Artificial Sequence: Synthetic oligonucleotide
uguguguguguguaugugu

SEQ ID NO: 1182222 - RNA, 19 nt, Artificial Sequence
  Description of Artificial Sequence: Synthetic oligonucleotide
ggccaagaaaacuucaggc

SEQ ID NO: 1182223 - RNA, 19 nt, Artificial Sequence
  Description of Artificial Sequence: Synthetic oligonucleotide
cucguugaacaccuugucc

SEQ ID NO: 1182224 - RNA, 19 nt, Artificial Sequence
  Description of Artificial Sequence: Synthetic oligonucleotide
cauacuccccaucuacacg

SEQ ID NO: 1182225 - RNA, 19 nt, Artificial Sequence
  Description of Artificial Sequence: Synthetic oligonucleotide
ucuaccaagcccucguaaa

SEQ ID NO: 1182226 - RNA, 19 nt, Artificial Sequence
  Description of Artificial Sequence: Synthetic oligonucleotide
auaggauuuagcaaaggau

SEQ ID NO: 1182227 - RNA, 19 nt, Artificial Sequence
  Description of Artificial Sequence: Synthetic oligonucleotide
ugaauucugugugugugug

SEQ ID NO: 1182228 - RNA, 19 nt, Artificial Sequence
  Description of Artificial Sequence: Synthetic oligonucleotide
auucacaggccccaauaug

SEQ ID NO: 1182229 - RNA, 19 nt, Artificial Sequence
  Description of Artificial Sequence: Synthetic oligonucleotide
aagccaugucucgagggac

SEQ ID NO: 1182230 - RNA, 19 nt, Artificial Sequence
  Description of Artificial Sequence: Synthetic oligonucleotide
ucaggcuuucaccucacuc

SEQ ID NO: 1182231 - RNA, 19 nt, Artificial Sequence
  Description of Artificial Sequence: Synthetic oligonucleotide
cauagcucugcagauacug

SEQ ID NO: 1182232 - RNA, 19 nt, Artificial Sequence
  Description of Artificial Sequence: Synthetic oligonucleotide
cugauggcacgaaaauugc

SEQ ID NO: 1182233 - RNA, 19 nt, Artificial Sequence
  Description of Artificial Sequence: Synthetic oligonucleotide
aacuggccaagaaaacuuc

SEQ ID NO: 1182234 - RNA, 19 nt, Artificial Sequence
  Description of Artificial Sequence: Synthetic oligonucleotide
cauagagaguacugagaag

SEQ ID NO: 1182235 - RNA, 19 nt, Artificial Sequence
  Description of Artificial Sequence: Synthetic oligonucleotide
ugucucgagggacuuucag

SEQ ID NO: 1182236 - RNA, 19 nt, Artificial Sequence
  Description of Artificial Sequence: Synthetic oligonucleotide
ucagggaucuguaauccuu

SEQ ID NO: 1182237 - RNA, 19 nt, Artificial Sequence
  Description of Artificial Sequence: Synthetic oligonucleotide
cauaagccaugucucgagg

SEQ ID NO: 1182238 - RNA, 19 nt, Artificial Sequence
  Description of Artificial Sequence: Synthetic oligonucleotide
accuuccaggaaguaaucc

SEQ ID NO: 1182239 - RNA, 19 nt, Artificial Sequence
  Description of Artificial Sequence: Synthetic oligonucleotide
aagaugaaucuguacccuu

SEQ ID NO: 1182240 - RNA, 19 nt, Artificial Sequence
  Description of Artificial Sequence: Synthetic oligonucleotide
uguccaugccucuccggcg

SEQ ID NO: 1182241 - RNA, 19 nt, Artificial Sequence
  Description of Artificial Sequence: Synthetic oligonucleotide
ucgacacucccacacuuga

SEQ ID NO: 1182242 - RNA, 19 nt, Artificial Sequence
  Description of Artificial Sequence: Synthetic oligonucleotide
ucaauccauucucagugau

SEQ ID NO: 1182243 - RNA, 19 nt, Artificial Sequence
  Description of Artificial Sequence: Synthetic oligonucleotide
cuugauucggaaaguguca

SEQ ID NO: 1182244 - RNA, 19 nt, Artificial Sequence
  Description of Artificial Sequence: Synthetic oligonucleotide
aguucuugggacacgaagu

SEQ ID NO: 1182245 - RNA, 19 nt, Artificial Sequence
  Description of Artificial Sequence: Synthetic oligonucleotide
caaugauucggcagcucag

SEQ ID NO: 1182246 - RNA, 19 nt, Artificial Sequence
  Description of Artificial Sequence: Synthetic oligonucleotide
ucucugucuaggagaaaga

SEQ ID NO: 1182247 - RNA, 19 nt, Artificial Sequence
  Description of Artificial Sequence: Synthetic oligonucleotide
ucuguacccuuucucucug

SEQ ID NO: 1182248 - RNA, 19 nt, Artificial Sequence
  Description of Artificial Sequence: Synthetic oligonucleotide
aaggcgucagugaucuuuc

SEQ ID NO: 1182249 - RNA, 19 nt, Artificial Sequence
  Description of Artificial Sequence: Synthetic oligonucleotide
ugaguagcaccuucaggcu

SEQ ID NO: 1182250 - RNA, 19 nt, Artificial Sequence
  Description of Artificial Sequence: Synthetic oligonucleotide
uucugugugugugugugug

SEQ ID NO: 1182251 - RNA, 19 nt, Artificial Sequence
  Description of Artificial Sequence: Synthetic oligonucleotide
uauguccaugccucuccgg

SEQ ID NO: 1182252 - RNA, 19 nt, Artificial Sequence
  Description of Artificial Sequence: Synthetic oligonucleotide
uuccaugaggcgagcacug

SEQ ID NO: 1182253 - RNA, 19 nt, Artificial Sequence
  Description of Artificial Sequence: Synthetic oligonucleotide
cagugauggacaaaagaca

SEQ ID NO: 1182254 - RNA, 19 nt, Artificial Sequence
  Description of Artificial Sequence: Synthetic oligonucleotide
aauauucaaauaggauuua

SEQ ID NO: 1182255 - RNA, 19 nt, Artificial Sequence
  Description of Artificial Sequence: Synthetic oligonucleotide
cucuccggcgaucauacug

SEQ ID NO: 1182256 - RNA, 19 nt, Artificial Sequence
  Description of Artificial Sequence: Synthetic oligonucleotide
agcuccgucgcuccagcac

SEQ ID NO: 1182257 - RNA, 19 nt, Artificial Sequence
  Description of Artificial Sequence: Synthetic oligonucleotide
ugugugugugugugaacug

SEQ ID NO: 1182258 - RNA, 19 nt, Artificial Sequence
  Description of Artificial Sequence: Synthetic oligonucleotide
uccaacgcuggucaccuuc

SEQ ID NO: 1182259 - RNA, 19 nt, Artificial Sequence
  Description of Artificial Sequence: Synthetic oligonucleotide
uguguguguguguguaugu

SEQ ID NO: 1182260 - RNA, 19 nt, Artificial Sequence
  Description of Artificial Sequence: Synthetic oligonucleotide
auacugggccugcaaguuc

SEQ ID NO: 1182261 - RNA, 19 nt, Artificial Sequence
  Description of Artificial Sequence: Synthetic oligonucleotide
gugugugugugugaacugg

SEQ ID NO: 1182262 - RNA, 19 nt, Artificial Sequence
  Description of Artificial Sequence: Synthetic oligonucleotide
agaugcaaggccugagcca

SEQ ID NO: 1182263 - RNA, 19 nt, Artificial Sequence
  Description of Artificial Sequence: Synthetic oligonucleotide
ugcagauacuguguuuuca

SEQ ID NO: 1182264 - RNA, 19 nt, Artificial Sequence
  Description of Artificial Sequence: Synthetic oligonucleotide
guccucagcauugaguagc

SEQ ID NO: 1182265 - RNA, 19 nt, Artificial Sequence
  Description of Artificial Sequence: Synthetic oligonucleotide
ugcaguuuagcagccguac

SEQ ID NO: 1182266 - RNA, 19 nt, Artificial Sequence
  Description of Artificial Sequence: Synthetic oligonucleotide
uguguguguaugugugugu

SEQ ID NO: 1182267 - RNA, 19 nt, Artificial Sequence
  Description of Artificial Sequence: Synthetic oligonucleotide
uaccaagcccucguaaacc

SEQ ID NO: 1182268 - RNA, 19 nt, Artificial Sequence
  Description of Artificial Sequence: Synthetic oligonucleotide
ugggccaaagucgacacuc

SEQ ID NO: 1182269 - RNA, 19 nt, Artificial Sequence
  Description of Artificial Sequence: Synthetic oligonucleotide
gcagcucagaggcacauag

SEQ ID NO: 1182270 - RNA, 19 nt, Artificial Sequence
  Description of Artificial Sequence: Synthetic oligonucleotide
agaagguuagcaggugcuc

SEQ ID NO: 1182271 - RNA, 19 nt, Artificial Sequence
  Description of Artificial Sequence: Synthetic oligonucleotide
aagucgacacucccacacu

SEQ ID NO: 1182272 - RNA, 19 nt, Artificial Sequence
  Description of Artificial Sequence: Synthetic oligonucleotide
agagaguacugagaagaug

SEQ ID NO: 1182273 - RNA, 19 nt, Artificial Sequence
  Description of Artificial Sequence: Synthetic oligonucleotide
agggcugauaucucugaga

SEQ ID NO: 1182274 - RNA, 19 nt, Artificial Sequence
  Description of Artificial Sequence: Synthetic oligonucleotide
gaaaccgcagggcugauau

SEQ ID NO: 1182275 - RNA, 19 nt, Artificial Sequence
  Description of Artificial Sequence: Synthetic oligonucleotide
agcacuguuuguaauggcu

SEQ ID NO: 1182276 - RNA, 19 nt, Artificial Sequence
  Description of Artificial Sequence: Synthetic oligonucleotide
cacucccacacuugauucg

SEQ ID NO: 1182277 - RNA, 19 nt, Artificial Sequence
  Description of Artificial Sequence: Synthetic oligonucleotide
ugaggcgaaggcuuucuau

SEQ ID NO: 1182278 - RNA, 19 nt, Artificial Sequence
  Description of Artificial Sequence: Synthetic oligonucleotide
gauugauucacaggcccca

SEQ ID NO: 1182279 - RNA, 19 nt, Artificial Sequence
  Description of Artificial Sequence: Synthetic oligonucleotide
uguguguguguaugugugu

SEQ ID NO: 1182280 - RNA, 19 nt, Artificial Sequence
  Description of Artificial Sequence: Synthetic oligonucleotide
cuaccaagcccucguaaac

SEQ ID NO: 1182281 - RNA, 19 nt, Artificial Sequence
  Description of Artificial Sequence: Synthetic oligonucleotide
uagagaguacugagaagau

SEQ ID NO: 1182282 - RNA, 19 nt, Artificial Sequence
  Description of Artificial Sequence: Synthetic oligonucleotide
ugauccaacgcuggucacc

SEQ ID NO: 1182283 - RNA, 19 nt, Artificial Sequence
  Description of Artificial Sequence: Synthetic oligonucleotide
uguugauccaacgcugguc

SEQ ID NO: 1182284 - RNA, 19 nt, Artificial Sequence
  Description of Artificial Sequence: Synthetic oligonucleotide
aguagcgcaugcucagucu

SEQ ID NO: 1182285 - RNA, 19 nt, Artificial Sequence
  Description of Artificial Sequence: Synthetic oligonucleotide
gagugugugugugugugug

SEQ ID NO: 1182286 - RNA, 19 nt, Artificial Sequence
  Description of Artificial Sequence: Synthetic oligonucleotide
aaaccgcagggcugauauc

SEQ ID NO: 1182287 - RNA, 19 nt, Artificial Sequence
  Description of Artificial Sequence: Synthetic oligonucleotide
agaacaccaccaaaaugag

SEQ ID NO: 1182288 - RNA, 19 nt, Artificial Sequence
  Description of Artificial Sequence: Synthetic oligonucleotide
ucccugcauaucuuagcag

SEQ ID NO: 1182289 - RNA, 19 nt, Artificial Sequence
  Description of Artificial Sequence: Synthetic oligonucleotide
uguguguaugugugugugu

SEQ ID NO: 1182290 - RNA, 19 nt, Artificial Sequence
  Description of Artificial Sequence: Synthetic oligonucleotide
augaaucuguacccuuucu

SEQ ID NO: 1182291 - RNA, 19 nt, Artificial Sequence
  Description of Artificial Sequence: Synthetic oligonucleotide
cgaaaauugcuccucuugg

SEQ ID NO: 1182292 - RNA, 19 nt, Artificial Sequence
  Description of Artificial Sequence: Synthetic oligonucleotide
caugcucagucuugauuag

SEQ ID NO: 1182293 - RNA, 19 nt, Artificial Sequence
  Description of Artificial Sequence: Synthetic oligonucleotide
gguuagcaggugcucaggg

SEQ ID NO: 1182294 - RNA, 19 nt, Artificial Sequence
  Description of Artificial Sequence: Synthetic oligonucleotide
uagugugagugugugugug

SEQ ID NO: 1182295 - RNA, 19 nt, Artificial Sequence
  Description of Artificial Sequence: Synthetic oligonucleotide
caguuuagcagccguacca

SEQ ID NO: 1182296 - RNA, 19 nt, Artificial Sequence
  Description of Artificial Sequence: Synthetic oligonucleotide
caaugccauaacaguuagg

SEQ ID NO: 1182297 - RNA, 19 nt, Artificial Sequence
  Description of Artificial Sequence: Synthetic oligonucleotide
ggagaagguuagcaggugc

SEQ ID NO: 1182298 - RNA, 19 nt, Artificial Sequence
  Description of Artificial Sequence: Synthetic oligonucleotide
acacgugggaucaaauuca

SEQ ID NO: 1182299 - RNA, 19 nt, Artificial Sequence
  Description of Artificial Sequence: Synthetic oligonucleotide
aaugaggcgcagggacucg

SEQ ID NO: 1182300 - RNA, 19 nt, Artificial Sequence
  Description of Artificial Sequence: Synthetic oligonucleotide
gggaucuguaauccuuugg

SEQ ID NO: 1182301 - RNA, 19 nt, Artificial Sequence
  Description of Artificial Sequence: Synthetic oligonucleotide
guguguguguguaugugug

SEQ ID NO: 1182302 - RNA, 19 nt, Artificial Sequence
  Description of Artificial Sequence: Synthetic oligonucleotide
gaagcccuccaguagcgca

SEQ ID NO: 1182303 - RNA, 19 nt, Artificial Sequence
  Description of Artificial Sequence: Synthetic oligonucleotide
acacuugauucggaaagug

SEQ ID NO: 1182304 - RNA, 19 nt, Artificial Sequence
  Description of Artificial Sequence: Synthetic oligonucleotide
augaggcgagcacuguuug

SEQ ID NO: 1182305 - RNA, 19 nt, Artificial Sequence
  Description of Artificial Sequence: Synthetic oligonucleotide
uucagggaucuguaauccu

SEQ ID NO: 1182306 - RNA, 19 nt, Artificial Sequence
  Description of Artificial Sequence: Synthetic oligonucleotide
ugauuaguuccuggaaguc

SEQ ID NO: 1182307 - RNA, 19 nt, Artificial Sequence
  Description of Artificial Sequence: Synthetic oligonucleotide
guguucuucgauguagcug

SEQ ID NO: 1182308 - RNA, 19 nt, Artificial Sequence
  Description of Artificial Sequence: Synthetic oligonucleotide
gugagugugugugugugug

SEQ ID NO: 1182309 - RNA, 19 nt, Artificial Sequence
  Description of Artificial Sequence: Synthetic oligonucleotide
cacgugggaucaaauucag

SEQ ID NO: 1182310 - RNA, 19 nt, Artificial Sequence
  Description of Artificial Sequence: Synthetic oligonucleotide
uugauucggaaagugucau

SEQ ID NO: 1182311 - RNA, 19 nt, Artificial Sequence
  Description of Artificial Sequence: Synthetic oligonucleotide
aggagaaagauguguccaa

SEQ ID NO: 1182312 - RNA, 19 nt, Artificial Sequence
  Description of Artificial Sequence: Synthetic oligonucleotide
uucggcagcucagaggcac

SEQ ID NO: 1182313 - RNA, 19 nt, Artificial Sequence
  Description of Artificial Sequence: Synthetic oligonucleotide
agugugagugugugugugu

SEQ ID NO: 1182314 - RNA, 19 nt, Artificial Sequence
  Description of Artificial Sequence: Synthetic oligonucleotide
agagaacugaaggcgucag

SEQ ID NO: 1182315 - RNA, 19 nt, Artificial Sequence
  Description of Artificial Sequence: Synthetic oligonucleotide
uguguguguguguguguga

SEQ ID NO: 1182316 - RNA, 19 nt, Artificial Sequence
  Description of Artificial Sequence: Synthetic oligonucleotide
ugugagugugugugugugu

SEQ ID NO: 1182317 - RNA, 19 nt, Artificial Sequence
  Description of Artificial Sequence: Synthetic oligonucleotide
ggcgaaggcuuucuauugg

SEQ ID NO: 1182318 - RNA, 19 nt, Artificial Sequence
  Description of Artificial Sequence: Synthetic oligonucleotide
gacauaagccaugucucga

SEQ ID NO: 1182319 - RNA, 19 nt, Artificial Sequence
  Description of Artificial Sequence: Synthetic oligonucleotide
ccaauauggagacucagca

SEQ ID NO: 1182320 - RNA, 19 nt, Artificial Sequence
  Description of Artificial Sequence: Synthetic oligonucleotide
uguguauguguguguguau

SEQ ID NO: 1182321 - RNA, 19 nt, Artificial Sequence
  Description of Artificial Sequence: Synthetic oligonucleotide
uccccaucuacacguggga

SEQ ID NO: 1182322 - RNA, 19 nt, Artificial Sequence
  Description of Artificial Sequence: Synthetic oligonucleotide
guguguguguaugugugug

SEQ ID NO: 1182323 - RNA, 19 nt, Artificial Sequence
  Description of Artificial Sequence: Synthetic oligonucleotide
gagcacuguuuguaauggc

SEQ ID NO: 1182324 - RNA, 19 nt, Artificial Sequence
  Description of Artificial Sequence: Synthetic oligonucleotide
caccaccaaaaugaggcgc

SEQ ID NO: 1182325 - RNA, 19 nt, Artificial Sequence
  Description of Artificial Sequence: Synthetic oligonucleotide
caggccccaauauggagac

SEQ ID NO: 1182326 - RNA, 19 nt, Artificial Sequence
  Description of Artificial Sequence: Synthetic oligonucleotide
uguguguguguauguguau

SEQ ID NO: 1182327 - RNA, 19 nt, Artificial Sequence
  Description of Artificial Sequence: Synthetic oligonucleotide
ucuucgaccuuugguuuca

SEQ ID NO: 1182328 - RNA, 19 nt, Artificial Sequence
  Description of Artificial Sequence: Synthetic oligonucleotide
caugggcuaaauuuauaaa

SEQ ID NO: 1182329 - RNA, 19 nt, Artificial Sequence
  Description of Artificial Sequence: Synthetic oligonucleotide
caugucucgagggacuuuc

SEQ ID NO: 1182330 - RNA, 19 nt, Artificial Sequence
  Description of Artificial Sequence: Synthetic oligonucleotide
gcgucagugaucuuuccug

SEQ ID NO: 1182331 - RNA, 19 nt, Artificial Sequence
  Description of Artificial Sequence: Synthetic oligonucleotide
guguguguaugugugugug

SEQ ID NO: 1182332 - RNA, 19 nt, Artificial Sequence
  Description of Artificial Sequence: Synthetic oligonucleotide
agggaucuguaauccuuug

SEQ ID NO: 1182333 - RNA, 19 nt, Artificial Sequence
  Description of Artificial Sequence: Synthetic oligonucleotide
ggauuuagcaaaggauacc

SEQ ID NO: 1182334 - RNA, 19 nt, Artificial Sequence
  Description of Artificial Sequence: Synthetic oligonucleotide
ugugugugugugugugugu

SEQ ID NO: 1182335 - RNA, 19 nt, Artificial Sequence
  Description of Artificial Sequence: Synthetic oligonucleotide
cucuacugcugugagggug

SEQ ID NO: 1182336 - RNA, 19 nt, Artificial Sequence
  Description of Artificial Sequence: Synthetic oligonucleotide
ucugugugugugugugugu

SEQ ID NO: 1182337 - RNA, 19 nt, Artificial Sequence
  Description of Artificial Sequence: Synthetic oligonucleotide
aucuaccaagcccucguaa

SEQ ID NO: 1182338 - RNA, 19 nt, Artificial Sequence
  Description of Artificial Sequence: Synthetic oligonucleotide
uggcacgaaaauugcuccu

SEQ ID NO: 1182339 - RNA, 19 nt, Artificial Sequence
  Description of Artificial Sequence: Synthetic oligonucleotide
caccugcucaaugauucgg

SEQ ID NO: 1182340 - RNA, 19 nt, Artificial Sequence
  Description of Artificial Sequence: Synthetic oligonucleotide
ugauucggaaagugucauc

SEQ ID NO: 1182341 - RNA, 19 nt, Artificial Sequence
  Description of Artificial Sequence: Synthetic oligonucleotide
gcaugcucagucuugauua

SEQ ID NO: 1182342 - RNA, 19 nt, Artificial Sequence
  Description of Artificial Sequence: Synthetic oligonucleotide
cccaauauggagacucagc

SEQ ID NO: 1182343 - RNA, 19 nt, Artificial Sequence
  Description of Artificial Sequence: Synthetic oligonucleotide
aggcgucagugaucuuucc

SEQ ID NO: 1182344 - RNA, 19 nt, Artificial Sequence
  Description of Artificial Sequence: Synthetic oligonucleotide
ugagugugugugugugugu

SEQ ID NO: 1182345 - RNA, 19 nt, Artificial Sequence
  Description of Artificial Sequence: Synthetic oligonucleotide
cuugaguucuugggacacg

SEQ ID NO: 1182346 - RNA, 19 nt, Artificial Sequence
  Description of Artificial Sequence: Synthetic oligonucleotide
gagacucagcaggcgaugc

SEQ ID NO: 1182347 - RNA, 19 nt, Artificial Sequence
  Description of Artificial Sequence: Synthetic oligonucleotide
guguguguguguguguaug

SEQ ID NO: 1182348 - RNA, 19 nt, Artificial Sequence
  Description of Artificial Sequence: Synthetic oligonucleotide
gcaugggcuaaauuuauaa

SEQ ID NO: 1182349 - RNA, 19 nt, Artificial Sequence
  Description of Artificial Sequence: Synthetic oligonucleotide
cugugugugugugugugug

SEQ ID NO: 1182350 - RNA, 19 nt, Artificial Sequence
  Description of Artificial Sequence: Synthetic oligonucleotide
ugugugugugugugugaac

SEQ ID NO: 1182351 - RNA, 19 nt, Artificial Sequence
  Description of Artificial Sequence: Synthetic oligonucleotide
gugugugugugugugugug

SEQ ID NO: 1182352 - RNA, 19 nt, Artificial Sequence
  Description of Artificial Sequence: Synthetic oligonucleotide
ucccacacuugauucggaa

SEQ ID NO: 1182353 - RNA, 19 nt, Artificial Sequence
  Description of Artificial Sequence: Synthetic oligonucleotide
agugugugugugugugugu

SEQ ID NO: 1182354 - RNA, 19 nt, Artificial Sequence
  Description of Artificial Sequence: Synthetic oligonucleotide
uugauucacaggccccaau

SEQ ID NO: 1182355 - RNA, 19 nt, Artificial Sequence
  Description of Artificial Sequence: Synthetic oligonucleotide
agucgacacucccacacuu

SEQ ID NO: 1182356 - RNA, 19 nt, Artificial Sequence
  Description of Artificial Sequence: Synthetic oligonucleotide
cuuccaggaaguaaucccu

SEQ ID NO: 1182357 - RNA, 19 nt, Artificial Sequence
  Description of Artificial Sequence: Synthetic oligonucleotide
gggcugauaucucugagaa

SEQ ID NO: 1182358 - RNA, 19 nt, Artificial Sequence
  Description of Artificial Sequence: Synthetic oligonucleotide
gacucagcaggcgaugcuc

SEQ ID NO: 1182359 - RNA, 19 nt, Artificial Sequence
  Description of Artificial Sequence: Synthetic oligonucleotide
gugugagugugugugugug

SEQ ID NO: 1182360 - RNA, 19 nt, Artificial Sequence
  Description of Artificial Sequence: Synthetic oligonucleotide
gggcuaaauuuauaaacaa

SEQ ID NO: 1182361 - RNA, 19 nt, Artificial Sequence
  Description of Artificial Sequence: Synthetic oligonucleotide
agccaugucugugaaugca

SEQ ID NO: 1182362 - RNA, 19 nt, Artificial Sequence
  Description of Artificial Sequence: Synthetic oligonucleotide
auucugugugugugugugu

SEQ ID NO: 1182363 - RNA, 19 nt, Artificial Sequence
  Description of Artificial Sequence: Synthetic oligonucleotide
uucuugggacacgaaguuc

SEQ ID NO: 1182364 - RNA, 19 nt, Artificial Sequence
  Description of Artificial Sequence: Synthetic oligonucleotide
ugaggcgagcacuguuugu

SEQ ID NO: 1182365 - RNA, 19 nt, Artificial Sequence
  Description of Artificial Sequence: Synthetic oligonucleotide
agcaaagugcugucacaaa

SEQ ID NO: 1182366 - RNA, 19 nt, Artificial Sequence
  Description of Artificial Sequence: Synthetic oligonucleotide
uguguguguguguguguau

SEQ ID NO: 1182367 - RNA, 19 nt, Artificial Sequence
  Description of Artificial Sequence: Synthetic oligonucleotide
acgugggaucaaauucagc

SEQ ID NO: 1182368 - RNA, 19 nt, Artificial Sequence
  Description of Artificial Sequence: Synthetic oligonucleotide
agacucagcaggcgaugcu

SEQ ID NO: 1182369 - RNA, 19 nt, Artificial Sequence
  Description of Artificial Sequence: Synthetic oligonucleotide
guguguguguguguaugug

SEQ ID NO: 1182370 - RNA, 19 nt, Artificial Sequence
  Description of Artificial Sequence: Synthetic oligonucleotide
uucgaccuuugguuucacu

SEQ ID NO: 1182371 - RNA, 19 nt, Artificial Sequence
  Description of Artificial Sequence: Synthetic oligonucleotide
caguagcgcaugcucaguc

SEQ ID NO: 1182372 - RNA, 19 nt, Artificial Sequence
  Description of Artificial Sequence: Synthetic oligonucleotide
cccucguaaaccacuuggg

SEQ ID NO: 1182373 - RNA, 19 nt, Artificial Sequence
  Description of Artificial Sequence: Synthetic oligonucleotide
uugauccaacgcuggucac

SEQ ID NO: 1182374 - RNA, 19 nt, Artificial Sequence
  Description of Artificial Sequence: Synthetic oligonucleotide
uacuccccaucuacacgug

SEQ ID NO: 1182375 - RNA, 19 nt, Artificial Sequence
  Description of Artificial Sequence: Synthetic oligonucleotide
agaugaaucuguacccuuu

SEQ ID NO: 1182376 - RNA, 19 nt, Artificial Sequence
  Description of Artificial Sequence: Synthetic oligonucleotide
uuagcagcaugggcuaaau

SEQ ID NO: 1182377 - RNA, 19 nt, Artificial Sequence
  Description of Artificial Sequence: Synthetic oligonucleotide
uucaggcuuucaccucacu

SEQ ID NO: 1182378 - RNA, 19 nt, Artificial Sequence
  Description of Artificial Sequence: Synthetic oligonucleotide
auguguguguguaugugua

SEQ ID NO: 1182379 - RNA, 19 nt, Artificial Sequence
  Description of Artificial Sequence: Synthetic oligonucleotide
auaccucucccugcauauc

SEQ ID NO: 1182380 - RNA, 19 nt, Artificial Sequence
  Description of Artificial Sequence: Synthetic oligonucleotide
gccaagaaaacuucaggcu

SEQ ID NO: 1182381 - RNA, 19 nt, Artificial Sequence
  Description of Artificial Sequence: Synthetic oligonucleotide
gugugugugugugugaacu

SEQ ID NO: 1182382 - RNA, 19 nt, Artificial Sequence
  Description of Artificial Sequence: Synthetic oligonucleotide
ugcucucucggauguugaa

SEQ ID NO: 1182383 - RNA, 19 nt, Artificial Sequence
  Description of Artificial Sequence: Synthetic oligonucleotide
gagaagguuagcaggugcu

SEQ ID NO: 1182384 - RNA, 19 nt, Artificial Sequence
  Description of Artificial Sequence: Synthetic oligonucleotide
gaacuggccaagaaaacuu

SEQ ID NO: 1182385 - RNA, 19 nt, Artificial Sequence
  Description of Artificial Sequence: Synthetic oligonucleotide
gcaguuuagcagccguacc

SEQ ID NO: 1182386 - RNA, 19 nt, Artificial Sequence
  Description of Artificial Sequence: Synthetic oligonucleotide
guugaacaccuuguccuca

SEQ ID NO: 1182387 - RNA, 19 nt, Artificial Sequence
  Description of Artificial Sequence: Synthetic oligonucleotide
gaggcgagcacuguuugua

SEQ ID NO: 1182388 - RNA, 19 nt, Artificial Sequence
  Description of Artificial Sequence: Synthetic oligonucleotide
guguguaugugugugugua

SEQ ID NO: 1182389 - RNA, 19 nt, Artificial Sequence
  Description of Artificial Sequence: Synthetic oligonucleotide
uuccgggccuucuggcuca

SEQ ID NO: 1182390 - RNA, 19 nt, Artificial Sequence
  Description of Artificial Sequence: Synthetic oligonucleotide
uagcuggugcucucucgga

SEQ ID NO: 1182391 - RNA, 19 nt, Artificial Sequence
  Description of Artificial Sequence: Synthetic oligonucleotide
ggaugugacuucugggcca

SEQ ID NO: 1182392 - RNA, 19 nt, Artificial Sequence
  Description of Artificial Sequence: Synthetic oligonucleotide
gauccaacgcuggucaccu

SEQ ID NO: 1182393 - RNA, 19 nt, Artificial Sequence
  Description of Artificial Sequence: Synthetic oligonucleotide
cuccggcgaucauacuggg

SEQ ID NO: 1182394 - RNA, 19 nt, Artificial Sequence
  Description of Artificial Sequence: Synthetic oligonucleotide
cucggcgcagauuggagaa

SEQ ID NO: 1182395 - RNA, 19 nt, Artificial Sequence
  Description of Artificial Sequence: Synthetic oligonucleotide
gaauucugugugugugugu

SEQ ID NO: 1182396 - RNA, 19 nt, Artificial Sequence
  Description of Artificial Sequence: Synthetic oligonucleotide
ccggucuauguguucuucg

SEQ ID NO: 1182397 - RNA, 19 nt, Artificial Sequence
  Description of Artificial Sequence: Synthetic oligonucleotide
gcuccgucgcuccagcacc

SEQ ID NO: 1182398 - RNA, 19 nt, Artificial Sequence
  Description of Artificial Sequence: Synthetic oligonucleotide
ggacacgaaguucuucauc

SEQ ID NO: 1182399 - RNA, 19 nt, Artificial Sequence
  Description of Artificial Sequence: Synthetic oligonucleotide
ucucuacugcugugagggu

SEQ ID NO: 1182400 - RNA, 19 nt, Artificial Sequence
  Description of Artificial Sequence: Synthetic oligonucleotide
agcgcaugcucagucuuga

SEQ ID NO: 1182401 - RNA, 19 nt, Artificial Sequence
  Description of Artificial Sequence: Synthetic oligonucleotide
cacuugggagcaaagugcu

SEQ ID NO: 1182402 - RNA, 19 nt, Artificial Sequence
  Description of Artificial Sequence: Synthetic oligonucleotide
cacuugauucggaaagugu

SEQ ID NO: 1182403 - RNA, 19 nt, Artificial Sequence
  Description of Artificial Sequence: Synthetic oligonucleotide
gaugugacuucugggccaa

SEQ ID NO: 1182404 - RNA, 19 nt, Artificial Sequence
  Description of Artificial Sequence: Synthetic oligonucleotide
gucgacacucccacacuug

SEQ ID NO: 1182405 - RNA, 19 nt, Artificial Sequence
  Description of Artificial Sequence: Synthetic oligonucleotide
ggccaaagucgacacuccc

SEQ ID NO: 1182406 - RNA, 19 nt, Artificial Sequence
  Description of Artificial Sequence: Synthetic oligonucleotide
agaaaacuucaggcuuuca

SEQ ID NO: 1182407 - RNA, 19 nt, Artificial Sequence
  Description of Artificial Sequence: Synthetic oligonucleotide
guauguguauagugugagu

SEQ ID NO: 1182408 - RNA, 19 nt, Artificial Sequence
  Description of Artificial Sequence: Synthetic oligonucleotide
cagggccauagcucugcag

SEQ ID NO: 1182409 - RNA, 19 nt, Artificial Sequence
  Description of Artificial Sequence: Synthetic oligonucleotide
aagcccuccaguagcgcau

SEQ ID NO: 1182410 - RNA, 19 nt, Artificial Sequence
  Description of Artificial Sequence: Synthetic oligonucleotide
aggcgagcacuguuuguaa

SEQ ID NO: 1182411 - RNA, 19 nt, Artificial Sequence
  Description of Artificial Sequence: Synthetic oligonucleotide
ggcuuucuauuggugacac

SEQ ID NO: 1182412 - RNA, 19 nt, Artificial Sequence
  Description of Artificial Sequence: Synthetic oligonucleotide
ccaacgcuggucaccuucc

SEQ ID NO: 1182413 - RNA, 19 nt, Artificial Sequence
  Description of Artificial Sequence: Synthetic oligonucleotide
cccaucuacacgugggauc

SEQ ID NO: 1182414 - RNA, 19 nt, Artificial Sequence
  Description of Artificial Sequence: Synthetic oligonucleotide
aggagaacagaggcuuuau

SEQ ID NO: 1182415 - RNA, 19 nt, Artificial Sequence
  Description of Artificial Sequence: Synthetic oligonucleotide
gugugugugugugugugaa

SEQ ID NO: 1182416 - RNA, 19 nt, Artificial Sequence
  Description of Artificial Sequence: Synthetic oligonucleotide
cuucgauguagcuggugcu

SEQ ID NO: 1182417 - RNA, 19 nt, Artificial Sequence
  Description of Artificial Sequence: Synthetic oligonucleotide
caucugccaaugccauaac

SEQ ID NO: 1182418 - RNA, 19 nt, Artificial Sequence
  Description of Artificial Sequence: Synthetic oligonucleotide
gagaacugaaggcgucagu

SEQ ID NO: 1182419 - RNA, 19 nt, Artificial Sequence
  Description of Artificial Sequence: Synthetic oligonucleotide
aagcccucguaaaccacuu

SEQ ID NO: 1182420 - RNA, 19 nt, Artificial Sequence
  Description of Artificial Sequence: Synthetic oligonucleotide
caugccucuccggcgauca

SEQ ID NO: 1182421 - RNA, 19 nt, Artificial Sequence
  Description of Artificial Sequence: Synthetic oligonucleotide
agcucggcgcagauuggag

SEQ ID NO: 1182422 - RNA, 19 nt, Artificial Sequence
  Description of Artificial Sequence: Synthetic oligonucleotide
ggcacgaaaauugcuccuc

SEQ ID NO: 1182423 - RNA, 19 nt, Artificial Sequence
  Description of Artificial Sequence: Synthetic oligonucleotide
agccacaguguugauccaa

SEQ ID NO: 1182424 - RNA, 19 nt, Artificial Sequence
  Description of Artificial Sequence: Synthetic oligonucleotide
guuuagcagccguaccacu

SEQ ID NO: 1182425 - RNA, 19 nt, Artificial Sequence
  Description of Artificial Sequence: Synthetic oligonucleotide
cauuucugaucucguugaa

SEQ ID NO: 1182426 - RNA, 19 nt, Artificial Sequence
  Description of Artificial Sequence: Synthetic oligonucleotide
accgcagggcugauaucuc

SEQ ID NO: 1182427 - RNA, 19 nt, Artificial Sequence
  Description of Artificial Sequence: Synthetic oligonucleotide
ccaucuacacgugggauca

SEQ ID NO: 1182428 - RNA, 19 nt, Artificial Sequence
  Description of Artificial Sequence: Synthetic oligonucleotide
gugugugugugugugugua

SEQ ID NO: 1182429 - RNA, 19 nt, Artificial Sequence
  Description of Artificial Sequence: Synthetic oligonucleotide
cugcugugagggugucccc

SEQ ID NO: 1182430 - RNA, 19 nt, Artificial Sequence
  Description of Artificial Sequence: Synthetic oligonucleotide
gcucuugucagaggaugug

SEQ ID NO: 1182431 - RNA, 19 nt, Artificial Sequence
  Description of Artificial Sequence: Synthetic oligonucleotide
gcagcaugggcuaaauuua

SEQ ID NO: 1182432 - RNA, 19 nt, Artificial Sequence
  Description of Artificial Sequence: Synthetic oligonucleotide
cuacacgugggaucaaauu

SEQ ID NO: 1182433 - RNA, 19 nt, Artificial Sequence
  Description of Artificial Sequence: Synthetic oligonucleotide
ugccucuccggcgaucaua

SEQ ID NO: 1182434 - RNA, 19 nt, Artificial Sequence
  Description of Artificial Sequence: Synthetic oligonucleotide
augaggcgaaggcuuucua

SEQ ID NO: 1182435 - RNA, 19 nt, Artificial Sequence
  Description of Artificial Sequence: Synthetic oligonucleotide
caugaggcgagcacuguuu

SEQ ID NO: 1182436 - RNA, 19 nt, Artificial Sequence
  Description of Artificial Sequence: Synthetic oligonucleotide
ccucguaaaccacuuggga

SEQ ID NO: 1182437 - RNA, 19 nt, Artificial Sequence
  Description of Artificial Sequence: Synthetic oligonucleotide
gcuuucuauuggugacacc

SEQ ID NO: 1182438 - RNA, 19 nt, Artificial Sequence
  Description of Artificial Sequence: Synthetic oligonucleotide
cuuagcagcaugggcuaaa

SEQ ID NO: 1182439 - RNA, 19 nt, Artificial Sequence
  Description of Artificial Sequence: Synthetic oligonucleotide
ggauaccucucccugcaua

SEQ ID NO: 1182440 - RNA, 19 nt, Artificial Sequence
  Description of Artificial Sequence: Synthetic oligonucleotide
aggauaccucucccugcau

SEQ ID NO: 1182441 - RNA, 19 nt, Artificial Sequence
  Description of Artificial Sequence: Synthetic oligonucleotide
agcaugggcuaaauuuaua

SEQ ID NO: 1182442 - RNA, 19 nt, Artificial Sequence
  Description of Artificial Sequence: Synthetic oligonucleotide
ccaagaaaacuucaggcuu

SEQ ID NO: 1182443 - RNA, 19 nt, Artificial Sequence
  Description of Artificial Sequence: Synthetic oligonucleotide
guagcgcaugcucagucuu

SEQ ID NO: 1182444 - RNA, 19 nt, Artificial Sequence
  Description of Artificial Sequence: Synthetic oligonucleotide
uccaugccucuccggcgau

SEQ ID NO: 1182445 - RNA, 19 nt, Artificial Sequence
  Description of Artificial Sequence: Synthetic oligonucleotide
acagaucauaugacaucuu

SEQ ID NO: 1182446 - RNA, 19 nt, Artificial Sequence
  Description of Artificial Sequence: Synthetic oligonucleotide
cucugucuaggagaaagau

SEQ ID NO: 1182447 - RNA, 19 nt, Artificial Sequence
  Description of Artificial Sequence: Synthetic oligonucleotide
gugugugaacuggccaaga

SEQ ID NO: 1182448 - RNA, 19 nt, Artificial Sequence
  Description of Artificial Sequence: Synthetic oligonucleotide
cuguguuuucagggaucug

SEQ ID NO: 1182449 - RNA, 19 nt, Artificial Sequence
  Description of Artificial Sequence: Synthetic oligonucleotide
gccacaguguugauccaac

SEQ ID NO: 1182450 - RNA, 19 nt, Artificial Sequence
  Description of Artificial Sequence: Synthetic oligonucleotide
gcucggcgcagauuggaga

SEQ ID NO: 1182451 - RNA, 19 nt, Artificial Sequence
  Description of Artificial Sequence: Synthetic oligonucleotide
gccucuccggcgaucauac

SEQ ID NO: 1182452 - RNA, 19 nt, Artificial Sequence
  Description of Artificial Sequence: Synthetic oligonucleotide
ggcgaucauacugggccug

SEQ ID NO: 1182453 - RNA, 19 nt, Artificial Sequence
  Description of Artificial Sequence: Synthetic oligonucleotide
ccggagccugcucuguuag

SEQ ID NO: 1182454 - RNA, 19 nt, Artificial Sequence
  Description of Artificial Sequence: Synthetic oligonucleotide
cagaggcacauaggcacca

SEQ ID NO: 1182455 - RNA, 19 nt, Artificial Sequence
  Description of Artificial Sequence: Synthetic oligonucleotide
gggacagaacaugaauucu

SEQ ID NO: 1182456 - RNA, 19 nt, Artificial Sequence
  Description of Artificial Sequence: Synthetic oligonucleotide
ggugacaccugccggucua

SEQ ID NO: 1182457 - RNA, 19 nt, Artificial Sequence
  Description of Artificial Sequence: Synthetic oligonucleotide
cagcaugggcuaaauuuau

SEQ ID NO: 1182458 - RNA, 19 nt, Artificial Sequence
  Description of Artificial Sequence: Synthetic oligonucleotide
ccaagcccucguaaaccac

SEQ ID NO: 1182459 - RNA, 19 nt, Artificial Sequence
  Description of Artificial Sequence: Synthetic oligonucleotide
cacacuugauucggaaagu

SEQ ID NO: 1182460 - RNA, 19 nt, Artificial Sequence
  Description of Artificial Sequence: Synthetic oligonucleotide
agcccuccaguagcgcaug

SEQ ID NO: 1182461 - RNA, 19 nt, Artificial Sequence
  Description of Artificial Sequence: Synthetic oligonucleotide
agaaaccgcagggcugaua

SEQ ID NO: 1182462 - RNA, 19 nt, Artificial Sequence
  Description of Artificial Sequence: Synthetic oligonucleotide
caucuaccaagcccucgua

SEQ ID NO: 1182463 - RNA, 19 nt, Artificial Sequence
  Description of Artificial Sequence: Synthetic oligonucleotide
ggcgucagugaucuuuccu

SEQ ID NO: 1182464 - RNA, 19 nt, Artificial Sequence
  Description of Artificial Sequence: Synthetic oligonucleotide
gcacgaaaauugcuccucu

SEQ ID NO: 1182465 - RNA, 19 nt, Artificial Sequence
  Description of Artificial Sequence: Synthetic oligonucleotide
gcgaaggcuuucuauuggu

SEQ ID NO: 1182466 - RNA, 19 nt, Artificial Sequence
  Description of Artificial Sequence: Synthetic oligonucleotide
caugaggcgaaggcuuucu

SEQ ID NO: 1182467 - RNA, 19 nt, Artificial Sequence
  Description of Artificial Sequence: Synthetic oligonucleotide
cauacugggccugcaaguu

SEQ ID NO: 1182468 - RNA, 19 nt, Artificial Sequence
  Description of Artificial Sequence: Synthetic oligonucleotide
ccagcucggcgcagauugg

SEQ ID NO: 1182469 - RNA, 19 nt, Artificial Sequence
  Description of Artificial Sequence: Synthetic oligonucleotide
gcgaucauacugggccugc

SEQ ID NO: 1182470 - RNA, 19 nt, Artificial Sequence
  Description of Artificial Sequence: Synthetic oligonucleotide
cuuagccaugucugugaau

SEQ ID NO: 1182471 - RNA, 19 nt, Artificial Sequence
  Description of Artificial Sequence: Synthetic oligonucleotide
cggcgcagauuggagaagg

SEQ ID NO: 1182472 - RNA, 19 nt, Artificial Sequence
  Description of Artificial Sequence: Synthetic oligonucleotide
ccaaaaugaggcgcaggga

SEQ ID NO: 1182473 - RNA, 19 nt, Artificial Sequence
  Description of Artificial Sequence: Synthetic oligonucleotide
cacgaaaauugcuccucuu

SEQ ID NO: 1182474 - RNA, 19 nt, Artificial Sequence
  Description of Artificial Sequence: Synthetic oligonucleotide
cagcucggcgcagauugga

SEQ ID NO: 1182475 - RNA, 19 nt, Artificial Sequence
  Description of Artificial Sequence: Synthetic oligonucleotide
auucggcagcucagaggca

SEQ ID NO: 1182476 - RNA, 19 nt, Artificial Sequence
  Description of Artificial Sequence: Synthetic oligonucleotide
cggucuauguguucuucga

SEQ ID NO: 1182477 - RNA, 19 nt, Artificial Sequence
  Description of Artificial Sequence: Synthetic oligonucleotide
cuugggacacgaaguucuu

SEQ ID NO: 1182478 - RNA, 19 nt, Artificial Sequence
  Description of Artificial Sequence: Synthetic oligonucleotide
ggacucgcuggaagccuug

SEQ ID NO: 1182479 - RNA, 19 nt, Artificial Sequence
  Description of Artificial Sequence: Synthetic oligonucleotide
ccuuagccaugucugugaa

SEQ ID NO: 1182480 - RNA, 19 nt, Artificial Sequence
  Description of Artificial Sequence: Synthetic oligonucleotide
cguaaaccacuugggagca

SEQ ID NO: 1182481 - RNA, 19 nt, Artificial Sequence
  Description of Artificial Sequence: Synthetic oligonucleotide
accugccggucuauguguu

SEQ ID NO: 1182482 - RNA, 19 nt, Artificial Sequence
  Description of Artificial Sequence: Synthetic oligonucleotide
ggcucuugucagaggaugu

SEQ ID NO: 1182483 - RNA, 19 nt, Artificial Sequence
  Description of Artificial Sequence: Synthetic oligonucleotide
gccggucuauguguucuuc

SEQ ID NO: 1182484 - RNA, 19 nt, Artificial Sequence
  Description of Artificial Sequence: Synthetic oligonucleotide
ggcgagcacuguuuguaau

SEQ ID NO: 1182485 - RNA, 19 nt, Artificial Sequence
  Description of Artificial Sequence: Synthetic oligonucleotide
gcucaaugauucggcagcu

SEQ ID NO: 1182486 - RNA, 19 nt, Artificial Sequence
  Description of Artificial Sequence: Synthetic oligonucleotide
ccccaagaacaccaccaaa

SEQ ID NO: 1182487 - RNA, 19 nt, Artificial Sequence
  Description of Artificial Sequence: Synthetic oligonucleotide
aggccccaauauggagacu

SEQ ID NO: 1182488 - RNA, 19 nt, Artificial Sequence
  Description of Artificial Sequence: Synthetic oligonucleotide
ggcugauaucucugagaau

SEQ ID NO: 1182489 - RNA, 19 nt, Artificial Sequence
  Description of Artificial Sequence: Synthetic oligonucleotide
gcccuccaguagcgcaugc

SEQ ID NO: 1182490 - RNA, 19 nt, Artificial Sequence
  Description of Artificial Sequence: Synthetic oligonucleotide
gcgaugcuccuguuuuagu

SEQ ID NO: 1182491 - RNA, 19 nt, Artificial Sequence
  Description of Artificial Sequence: Synthetic oligonucleotide
gagggacuuucaggucaua

SEQ ID NO: 1182492 - RNA, 19 nt, Artificial Sequence
  Description of Artificial Sequence: Synthetic oligonucleotide
caucuacacgugggaucaa

SEQ ID NO: 1182493 - RNA, 19 nt, Artificial Sequence
  Description of Artificial Sequence: Synthetic oligonucleotide
caguuaggaaaggguccau

SEQ ID NO: 1182494 - RNA, 19 nt, Artificial Sequence
  Description of Artificial Sequence: Synthetic oligonucleotide
cccggagccugcucuguua

SEQ ID NO: 1182495 - RNA, 19 nt, Artificial Sequence
  Description of Artificial Sequence: Synthetic oligonucleotide
ggcagcucagaggcacaua

SEQ ID NO: 1182496 - RNA, 19 nt, Artificial Sequence
  Description of Artificial Sequence: Synthetic oligonucleotide
ccgcagggcugauaucucu

SEQ ID NO: 1182497 - RNA, 19 nt, Artificial Sequence
  Description of Artificial Sequence: Synthetic oligonucleotide
cagcauugaguagcaccuu

SEQ ID NO: 1182498 - RNA, 19 nt, Artificial Sequence
  Description of Artificial Sequence: Synthetic oligonucleotide
ccaugaggcgagcacuguu

SEQ ID NO: 1182499 - RNA, 19 nt, Artificial Sequence
  Description of Artificial Sequence: Synthetic oligonucleotide
cgaucauacugggccugca

SEQ ID NO: 1182500 - RNA, 19 nt, Artificial Sequence
  Description of Artificial Sequence: Synthetic oligonucleotide
ccaguagcgcaugcucagu

SEQ ID NO: 1182501 - RNA, 19 nt, Artificial Sequence
  Description of Artificial Sequence: Synthetic oligonucleotide
gcgcaugcucagucuugau

SEQ ID NO: 1182502 - RNA, 19 nt, Artificial Sequence
  Description of Artificial Sequence: Synthetic oligonucleotide
ccccaucuacacgugggau

SEQ ID NO: 1182503 - RNA, 19 nt, Artificial Sequence
  Description of Artificial Sequence: Synthetic oligonucleotide
ccucuccggcgaucauacu

SEQ ID NO: 1182504 - RNA, 19 nt, Artificial Sequence
  Description of Artificial Sequence: Synthetic oligonucleotide
cccugccagcuccgucgcu

SEQ ID NO: 1182505 - RNA, 19 nt, Artificial Sequence
  Description of Artificial Sequence: Synthetic oligonucleotide
guuaauuccaaucaccucg

SEQ ID NO: 1182506 - RNA, 19 nt, Artificial Sequence
  Description of Artificial Sequence: Synthetic oligonucleotide
uuaaguaugaagaaguacu

SEQ ID NO: 1182507 - RNA, 19 nt, Artificial Sequence
  Description of Artificial Sequence: Synthetic oligonucleotide
ugauauacgcuccagagag

SEQ ID NO: 1182508 - RNA, 19 nt, Artificial Sequence
  Description of Artificial Sequence: Synthetic oligonucleotide
uucaguucaaccuugaccc

SEQ ID NO: 1182509 - RNA, 19 nt, Artificial Sequence
  Description of Artificial Sequence: Synthetic oligonucleotide
aauaacuguaagcauaaug

SEQ ID NO: 1182510 - RNA, 19 nt, Artificial Sequence
  Description of Artificial Sequence: Synthetic oligonucleotide
aaaguuguauuuauggcgc

SEQ ID NO: 1182511 - RNA, 19 nt, Artificial Sequence
  Description of Artificial Sequence: Synthetic oligonucleotide
uuuccauaauugaugaugg

SEQ ID NO: 1182512 - RNA, 19 nt, Artificial Sequence
  Description of Artificial Sequence: Synthetic oligonucleotide
uccaaguuuacuaaggggc

SEQ ID NO: 1182513 - RNA, 19 nt, Artificial Sequence
  Description of Artificial Sequence: Synthetic oligonucleotide
aaucaacugcauuaguugg

SEQ ID NO: 1182514 - RNA, 19 nt, Artificial Sequence
  Description of Artificial Sequence: Synthetic oligonucleotide
aaaugucagacaaaagucc

SEQ ID NO: 1182515 - RNA, 19 nt, Artificial Sequence
  Description of Artificial Sequence: Synthetic oligonucleotide
aauauaguccauaucagag

SEQ ID NO: 1182516 - RNA, 19 nt, Artificial Sequence
  Description of Artificial Sequence: Synthetic oligonucleotide
aauguugacuguuuaagca

SEQ ID NO: 1182517 - RNA, 19 nt, Artificial Sequence
  Description of Artificial Sequence: Synthetic oligonucleotide
ugaggaacgaccaagcagc

SEQ ID NO: 1182518 - RNA, 19 nt, Artificial Sequence
  Description of Artificial Sequence: Synthetic oligonucleotide
agcgacaucauucggauac

SEQ ID NO: 1182519 - RNA, 19 nt, Artificial Sequence
  Description of Artificial Sequence: Synthetic oligonucleotide
acugacuguccauugaugc

SEQ ID NO: 1182520 - RNA, 19 nt, Artificial Sequence
  Description of Artificial Sequence: Synthetic oligonucleotide
aauagcugaaacucaaagu

SEQ ID NO: 1182521 - RNA, 19 nt, Artificial Sequence
  Description of Artificial Sequence: Synthetic oligonucleotide
ucaggaauaacuguaagca

SEQ ID NO: 1182522 - RNA, 19 nt, Artificial Sequence
  Description of Artificial Sequence: Synthetic oligonucleotide
guauuuauggcgcaaacug

SEQ ID NO: 1182523 - RNA, 19 nt, Artificial Sequence
  Description of Artificial Sequence: Synthetic oligonucleotide
cauuaguuggacaacuugg

SEQ ID NO: 1182524 - RNA, 19 nt, Artificial Sequence
  Description of Artificial Sequence: Synthetic oligonucleotide
auaucagaguuucggagcc

SEQ ID NO: 1182525 - RNA, 19 nt, Artificial Sequence
  Description of Artificial Sequence: Synthetic oligonucleotide
uguguuaauuccaaucacc

SEQ ID NO: 1182526 - RNA, 19 nt, Artificial Sequence
  Description of Artificial Sequence: Synthetic oligonucleotide
auaacuguaagcauaaugu

SEQ ID NO: 1182527 - RNA, 19 nt, Artificial Sequence
  Description of Artificial Sequence: Synthetic oligonucleotide
cauucggauaccaauauac

SEQ ID NO: 1182528 - RNA, 19 nt, Artificial Sequence
  Description of Artificial Sequence: Synthetic oligonucleotide
ucagacacgaugaauccag

SEQ ID NO: 1182529 - RNA, 19 nt, Artificial Sequence
  Description of Artificial Sequence: Synthetic oligonucleotide
uuuaauagcugaaacucaa

SEQ ID NO: 1182530 - RNA, 19 nt, Artificial Sequence
  Description of Artificial Sequence: Synthetic oligonucleotide
uguugacuguuuaagcagg

SEQ ID NO: 1182531 - RNA, 19 nt, Artificial Sequence
  Description of Artificial Sequence: Synthetic oligonucleotide
aguguguuaauuccaauca

SEQ ID NO: 1182532 - RNA, 19 nt, Artificial Sequence
  Description of Artificial Sequence: Synthetic oligonucleotide
auuagcagugaccacugac

SEQ ID NO: 1182533 - RNA, 19 nt, Artificial Sequence
  Description of Artificial Sequence: Synthetic oligonucleotide
cauugcauuuguuuuaccc

SEQ ID NO: 1182534 - RNA, 19 nt, Artificial Sequence
  Description of Artificial Sequence: Synthetic oligonucleotide
ucuacuggagaauuuugag

SEQ ID NO: 1182535 - RNA, 19 nt, Artificial Sequence
  Description of Artificial Sequence: Synthetic oligonucleotide
ucgggaauuacuucaauga

SEQ ID NO: 1182536 - RNA, 19 nt, Artificial Sequence
  Description of Artificial Sequence: Synthetic oligonucleotide
auuuugauaagugcgaugu

SEQ ID NO: 1182537 - RNA, 19 nt, Artificial Sequence
  Description of Artificial Sequence: Synthetic oligonucleotide
aauuuugauaagugcgaug

SEQ ID NO: 1182538 - RNA, 19 nt, Artificial Sequence
  Description of Artificial Sequence: Synthetic oligonucleotide
ucggauaccaauauacuuc

SEQ ID NO: 1182539 - RNA, 19 nt, Artificial Sequence
  Description of Artificial Sequence: Synthetic oligonucleotide
agacccacuagccacgggc

SEQ ID NO: 1182540 - RNA, 19 nt, Artificial Sequence
  Description of Artificial Sequence: Synthetic oligonucleotide
uuauggcgcaaacuguugg

SEQ ID NO: 1182541 - RNA, 19 nt, Artificial Sequence
  Description of Artificial Sequence: Synthetic oligonucleotide
gacacgaugaauccagacc

SEQ ID NO: 1182542 - RNA, 19 nt, Artificial Sequence
  Description of Artificial Sequence: Synthetic oligonucleotide
cauaucagaguuucggagc

SEQ ID NO: 1182543 - RNA, 19 nt, Artificial Sequence
  Description of Artificial Sequence: Synthetic oligonucleotide
cuacuggagaauuuugagg

SEQ ID NO: 1182544 - RNA, 19 nt, Artificial Sequence
  Description of Artificial Sequence: Synthetic oligonucleotide
uuugauaagugcgaugucu

SEQ ID NO: 1182545 - RNA, 19 nt, Artificial Sequence
  Description of Artificial Sequence: Synthetic oligonucleotide
uggucaauuuugauaagug

SEQ ID NO: 1182546 - RNA, 19 nt, Artificial Sequence
  Description of Artificial Sequence: Synthetic oligonucleotide
uuuaaguaugaagaaguac

SEQ ID NO: 1182547 - RNA, 19 nt, Artificial Sequence
  Description of Artificial Sequence: Synthetic oligonucleotide
aauuccaaucaccucgcca

SEQ ID NO: 1182548 - RNA, 19 nt, Artificial Sequence
  Description of Artificial Sequence: Synthetic oligonucleotide
uuacuucaaugauauacgc

SEQ ID NO: 1182549 - RNA, 19 nt, Artificial Sequence
  Description of Artificial Sequence: Synthetic oligonucleotide
uuaauuccaaucaccucgc

SEQ ID NO: 1182550 - RNA, 19 nt, Artificial Sequence
  Description of Artificial Sequence: Synthetic oligonucleotide
uugauaagugcgaugucug

SEQ ID NO: 1182551 - RNA, 19 nt, Artificial Sequence
  Description of Artificial Sequence: Synthetic oligonucleotide
aagcgcgcugcauacauag

SEQ ID NO: 1182552 - RNA, 19 nt, Artificial Sequence
  Description of Artificial Sequence: Synthetic oligonucleotide
guaaacacguccaagacca

SEQ ID NO: 1182553 - RNA, 19 nt, Artificial Sequence
  Description of Artificial Sequence: Synthetic oligonucleotide
caccacgucagcaauaaag

SEQ ID NO: 1182554 - RNA, 19 nt, Artificial Sequence
  Description of Artificial Sequence: Synthetic oligonucleotide
cacgucagcaauaaaguug

SEQ ID NO: 1182555 - RNA, 19 nt, Artificial Sequence
  Description of Artificial Sequence: Synthetic oligonucleotide
uaucuaugcauccaaucaa

SEQ ID NO: 1182556 - RNA, 19 nt, Artificial Sequence
  Description of Artificial Sequence: Synthetic oligonucleotide
uauuuauggcgcaaacugu

SEQ ID NO: 1182557 - RNA, 19 nt, Artificial Sequence
  Description of Artificial Sequence: Synthetic oligonucleotide
agugucgggaauuacuuca

SEQ ID NO: 1182558 - RNA, 19 nt, Artificial Sequence
  Description of Artificial Sequence: Synthetic oligonucleotide
uugguauaggucuuggcgu

SEQ ID NO: 1182559 - RNA, 19 nt, Artificial Sequence
  Description of Artificial Sequence: Synthetic oligonucleotide
cuagaugugagcgacauca

SEQ ID NO: 1182560 - RNA, 19 nt, Artificial Sequence
  Description of Artificial Sequence: Synthetic oligonucleotide
ucucaugugucaucuacug

SEQ ID NO: 1182561 - RNA, 19 nt, Artificial Sequence
  Description of Artificial Sequence: Synthetic oligonucleotide
uaugggucgauuucuucag

SEQ ID NO: 1182562 - RNA, 19 nt, Artificial Sequence
  Description of Artificial Sequence: Synthetic oligonucleotide
ucccugauggucaauuuug

SEQ ID NO: 1182563 - RNA, 19 nt, Artificial Sequence
  Description of Artificial Sequence: Synthetic oligonucleotide
uguucccugaacaagcaaa

SEQ ID NO: 1182564 - RNA, 19 nt, Artificial Sequence
  Description of Artificial Sequence: Synthetic oligonucleotide
auuaguuggacaacuuggg

SEQ ID NO: 1182565 - RNA, 19 nt, Artificial Sequence
  Description of Artificial Sequence: Synthetic oligonucleotide
uauggcgcaaacuguuggg

SEQ ID NO: 1182566 - RNA, 19 nt, Artificial Sequence
  Description of Artificial Sequence: Synthetic oligonucleotide
augugagcgacaucauucg

SEQ ID NO: 1182567 - RNA, 19 nt, Artificial Sequence
  Description of Artificial Sequence: Synthetic oligonucleotide
uccuaagaggcaucuuugg

SEQ ID NO: 1182568 - RNA, 19 nt, Artificial Sequence
  Description of Artificial Sequence: Synthetic oligonucleotide
cuuaucuaugcauccaauc

SEQ ID NO: 1182569 - RNA, 19 nt, Artificial Sequence
  Description of Artificial Sequence: Synthetic oligonucleotide
uguccgauggaauugcaaa

SEQ ID NO: 1182570 - RNA, 19 nt, Artificial Sequence
  Description of Artificial Sequence: Synthetic oligonucleotide
uuccuaagaggcaucuuug

SEQ ID NO: 1182571 - RNA, 19 nt, Artificial Sequence
  Description of Artificial Sequence: Synthetic oligonucleotide
aaaagcgcgcugcauacau

SEQ ID NO: 1182572 - RNA, 19 nt, Artificial Sequence
  Description of Artificial Sequence: Synthetic oligonucleotide
aguagugcugacaaucccg

SEQ ID NO: 1182573 - RNA, 19 nt, Artificial Sequence
  Description of Artificial Sequence: Synthetic oligonucleotide
cuaugcauccaaucaacug

SEQ ID NO: 1182574 - RNA, 19 nt, Artificial Sequence
  Description of Artificial Sequence: Synthetic oligonucleotide
gauaagugcgaugucugcc

SEQ ID NO: 1182575 - RNA, 19 nt, Artificial Sequence
  Description of Artificial Sequence: Synthetic oligonucleotide
uugaguagugcugacaauc

SEQ ID NO: 1182576 - RNA, 19 nt, Artificial Sequence
  Description of Artificial Sequence: Synthetic oligonucleotide
acaucauucggauaccaau

SEQ ID NO: 1182577 - RNA, 19 nt, Artificial Sequence
  Description of Artificial Sequence: Synthetic oligonucleotide
ucaaccuugacccgguuuu

SEQ ID NO: 1182578 - RNA, 19 nt, Artificial Sequence
  Description of Artificial Sequence: Synthetic oligonucleotide
aaaguguaaacacguccaa

SEQ ID NO: 1182579 - RNA, 19 nt, Artificial Sequence
  Description of Artificial Sequence: Synthetic oligonucleotide
auacgcuccagagaguacg

SEQ ID NO: 1182580 - RNA, 19 nt, Artificial Sequence
  Description of Artificial Sequence: Synthetic oligonucleotide
uuacuaaggggccuccaga

SEQ ID NO: 1182581 - RNA, 19 nt, Artificial Sequence
  Description of Artificial Sequence: Synthetic oligonucleotide
ugugaaccacagcaggagc

SEQ ID NO: 1182582 - RNA, 19 nt, Artificial Sequence
  Description of Artificial Sequence: Synthetic oligonucleotide
ucuaugcauccaaucaacu

SEQ ID NO: 1182583 - RNA, 19 nt, Artificial Sequence
  Description of Artificial Sequence: Synthetic oligonucleotide
aaguuuacuaaggggccuc

SEQ ID NO: 1182584 - RNA, 19 nt, Artificial Sequence
  Description of Artificial Sequence: Synthetic oligonucleotide
auagguagcuccauucuuc

SEQ ID NO: 1182585 - RNA, 19 nt, Artificial Sequence
  Description of Artificial Sequence: Synthetic oligonucleotide
uccucuuaucuaugcaucc

SEQ ID NO: 1182586 - RNA, 19 nt, Artificial Sequence
  Description of Artificial Sequence: Synthetic oligonucleotide
aucuaugcauccaaucaac

SEQ ID NO: 1182587 - RNA, 19 nt, Artificial Sequence
  Description of Artificial Sequence: Synthetic oligonucleotide
aucagaguuucggagcccc

SEQ ID NO: 1182588 - RNA, 19 nt, Artificial Sequence
  Description of Artificial Sequence: Synthetic oligonucleotide
ugugagcgacaucauucgg

SEQ ID NO: 1182589 - RNA, 19 nt, Artificial Sequence
  Description of Artificial Sequence: Synthetic oligonucleotide
uucggauaccaauauacuu

SEQ ID NO: 1182590 - RNA, 19 nt, Artificial Sequence
  Description of Artificial Sequence: Synthetic oligonucleotide
aacacguccaagaccauga

SEQ ID NO: 1182591 - RNA, 19 nt, Artificial Sequence
  Description of Artificial Sequence: Synthetic oligonucleotide
uuuaagcaggaagagccca

SEQ ID NO: 1182592 - RNA, 19 nt, Artificial Sequence
  Description of Artificial Sequence: Synthetic oligonucleotide
ugacuguccauugaugcug

SEQ ID NO: 1182593 - RNA, 19 nt, Artificial Sequence
  Description of Artificial Sequence: Synthetic oligonucleotide
uuaauagcugaaacucaaa

SEQ ID NO: 1182594 - RNA, 19 nt, Artificial Sequence
  Description of Artificial Sequence: Synthetic oligonucleotide
ugauaagugcgaugucugc

SEQ ID NO: 1182595 - RNA, 19 nt, Artificial Sequence
  Description of Artificial Sequence: Synthetic oligonucleotide
augauauacgcuccagaga

SEQ ID NO: 1182596 - RNA, 19 nt, Artificial Sequence
  Description of Artificial Sequence: Synthetic oligonucleotide
ucaaugauauacgcuccag

SEQ ID NO: 1182597 - RNA, 19 nt, Artificial Sequence
  Description of Artificial Sequence: Synthetic oligonucleotide
uguuaauuccaaucaccuc

SEQ ID NO: 1182598 - RNA, 19 nt, Artificial Sequence
  Description of Artificial Sequence: Synthetic oligonucleotide
gugaccguauuuugaagag

SEQ ID NO: 1182599 - RNA, 19 nt, Artificial Sequence
  Description of Artificial Sequence: Synthetic oligonucleotide
aguacuuuaauagcugaaa

SEQ ID NO: 1182600 - RNA, 19 nt, Artificial Sequence
  Description of Artificial Sequence: Synthetic oligonucleotide
uucucaugugucaucuacu

SEQ ID NO: 1182601 - RNA, 19 nt, Artificial Sequence
  Description of Artificial Sequence: Synthetic oligonucleotide
cuugcuagaugugagcgac

SEQ ID NO: 1182602 - RNA, 19 nt, Artificial Sequence
  Description of Artificial Sequence: Synthetic oligonucleotide
aaguugguauaggucuugg

SEQ ID NO: 1182603 - RNA, 19 nt, Artificial Sequence
  Description of Artificial Sequence: Synthetic oligonucleotide
agcauacagaggguggggc

SEQ ID NO: 1182604 - RNA, 19 nt, Artificial Sequence
  Description of Artificial Sequence: Synthetic oligonucleotide
gucgggaauuacuucaaug

SEQ ID NO: 1182605 - RNA, 19 nt, Artificial Sequence
  Description of Artificial Sequence: Synthetic oligonucleotide
uggccugucggucauggga

SEQ ID NO: 1182606 - RNA, 19 nt, Artificial Sequence
  Description of Artificial Sequence: Synthetic oligonucleotide
accacgugagcauuuguca

SEQ ID NO: 1182607 - RNA, 19 nt, Artificial Sequence
  Description of Artificial Sequence: Synthetic oligonucleotide
ugagcgacaucauucggau

SEQ ID NO: 1182608 - RNA, 19 nt, Artificial Sequence
  Description of Artificial Sequence: Synthetic oligonucleotide
ucuuaucuaugcauccaau

SEQ ID NO: 1182609 - RNA, 19 nt, Artificial Sequence
  Description of Artificial Sequence: Synthetic oligonucleotide
acugcauuaguuggacaac

SEQ ID NO: 1182610 - RNA, 19 nt, Artificial Sequence
  Description of Artificial Sequence: Synthetic oligonucleotide
aaguuguauuuauggcgca

SEQ ID NO: 1182611 - RNA, 19 nt, Artificial Sequence
  Description of Artificial Sequence: Synthetic oligonucleotide
gugaaccacagcaggagcg

SEQ ID NO: 1182612 - RNA, 19 nt, Artificial Sequence
  Description of Artificial Sequence: Synthetic oligonucleotide
cuaugggucgauuucuuca

SEQ ID NO: 1182613 - RNA, 19 nt, Artificial Sequence
  Description of Artificial Sequence: Synthetic oligonucleotide
uuuacccgcagacuaucaa

SEQ ID NO: 1182614 - RNA, 19 nt, Artificial Sequence
  Description of Artificial Sequence: Synthetic oligonucleotide
guccgauggaauugcaaag

SEQ ID NO: 1182615 - RNA, 19 nt, Artificial Sequence
  Description of Artificial Sequence: Synthetic oligonucleotide
guagugcugacaaucccgg

SEQ ID NO: 1182616 - RNA, 19 nt, Artificial Sequence
  Description of Artificial Sequence: Synthetic oligonucleotide
uguuuuacccgcagacuau

SEQ ID NO: 1182617 - RNA, 19 nt, Artificial Sequence
  Description of Artificial Sequence: Synthetic oligonucleotide
uuuuacccgcagacuauca

SEQ ID NO: 1182618 - RNA, 19 nt, Artificial Sequence
  Description of Artificial Sequence: Synthetic oligonucleotide
aucauucggauaccaauau

SEQ ID NO: 1182619 - RNA, 19 nt, Artificial Sequence
  Description of Artificial Sequence: Synthetic oligonucleotide
gaguagugcugacaauccc

SEQ ID NO: 1182620 - RNA, 19 nt, Artificial Sequence
  Description of Artificial Sequence: Synthetic oligonucleotide
gauggucaauuuugauaag

SEQ ID NO: 1182621 - RNA, 19 nt, Artificial Sequence
  Description of Artificial Sequence: Synthetic oligonucleotide
acaaucccgguggugaccg

SEQ ID NO: 1182622 - RNA, 19 nt, Artificial Sequence
  Description of Artificial Sequence: Synthetic oligonucleotide
acgucagcaauaaaguugu

SEQ ID NO: 1182623 - RNA, 19 nt, Artificial Sequence
  Description of Artificial Sequence: Synthetic oligonucleotide
cggacaaccauguucaggg

SEQ ID NO: 1182624 - RNA, 19 nt, Artificial Sequence
  Description of Artificial Sequence: Synthetic oligonucleotide
uacauagcauacagagggu

SEQ ID NO: 1182625 - RNA, 19 nt, Artificial Sequence
  Description of Artificial Sequence: Synthetic oligonucleotide
uacccgcagacuaucaaaa

SEQ ID NO: 1182626 - RNA, 19 nt, Artificial Sequence
  Description of Artificial Sequence: Synthetic oligonucleotide
ucgccauccaaguuuacua

SEQ ID NO: 1182627 - RNA, 19 nt, Artificial Sequence
  Description of Artificial Sequence: Synthetic oligonucleotide
acgggcaccucccucuugg

SEQ ID NO: 1182628 - RNA, 19 nt, Artificial Sequence
  Description of Artificial Sequence: Synthetic oligonucleotide
gaccguauuuugaagagaa

SEQ ID NO: 1182629 - RNA, 19 nt, Artificial Sequence
  Description of Artificial Sequence: Synthetic oligonucleotide
ucggucaugggacucuguc

SEQ ID NO: 1182630 - RNA, 19 nt, Artificial Sequence
  Description of Artificial Sequence: Synthetic oligonucleotide
uccuggauguccuguguca

SEQ ID NO: 1182631 - RNA, 19 nt, Artificial Sequence
  Description of Artificial Sequence: Synthetic oligonucleotide
acgaugaauccagacccac

SEQ ID NO: 1182632 - RNA, 19 nt, Artificial Sequence
  Description of Artificial Sequence: Synthetic oligonucleotide
ugguauaggucuuggcguc

SEQ ID NO: 1182633 - RNA, 19 nt, Artificial Sequence
  Description of Artificial Sequence: Synthetic oligonucleotide
cugggcgccgaguuggagg

SEQ ID NO: 1182634 - RNA, 19 nt, Artificial Sequence
  Description of Artificial Sequence: Synthetic oligonucleotide
ggugaccguauuuugaaga

SEQ ID NO: 1182635 - RNA, 19 nt, Artificial Sequence
  Description of Artificial Sequence: Synthetic oligonucleotide
ucauucggauaccaauaua

SEQ ID NO: 1182636 - RNA, 19 nt, Artificial Sequence
  Description of Artificial Sequence: Synthetic oligonucleotide
ccaaguuuacuaaggggcc

SEQ ID NO: 1182637 - RNA, 19 nt, Artificial Sequence
  Description of Artificial Sequence: Synthetic oligonucleotide
gcauuaguuggacaacuug

SEQ ID NO: 1182638 - RNA, 19 nt, Artificial Sequence
  Description of Artificial Sequence: Synthetic oligonucleotide
gucgcugccgcacaccggc

SEQ ID NO: 1182639 - RNA, 19 nt, Artificial Sequence
  Description of Artificial Sequence: Synthetic oligonucleotide
cuuccgauggcuaccacaa

SEQ ID NO: 1182640 - RNA, 19 nt, Artificial Sequence
  Description of Artificial Sequence: Synthetic oligonucleotide
caguucaaccuugacccgg

SEQ ID NO: 1182641 - RNA, 19 nt, Artificial Sequence
  Description of Artificial Sequence: Synthetic oligonucleotide
auuuauggcgcaaacuguu

SEQ ID NO: 1182642 - RNA, 19 nt, Artificial Sequence
  Description of Artificial Sequence: Synthetic oligonucleotide
uagcauacagagggugggg

SEQ ID NO: 1182643 - RNA, 19 nt, Artificial Sequence
  Description of Artificial Sequence: Synthetic oligonucleotide
uuguccgauggaauugcaa

SEQ ID NO: 1182644 - RNA, 19 nt, Artificial Sequence
  Description of Artificial Sequence: Synthetic oligonucleotide
agagcccaagcuuguaaga

SEQ ID NO: 1182645 - RNA, 19 nt, Artificial Sequence
  Description of Artificial Sequence: Synthetic oligonucleotide
auucggauaccaauauacu

SEQ ID NO: 1182646 - RNA, 19 nt, Artificial Sequence
  Description of Artificial Sequence: Synthetic oligonucleotide
ugcauuaguuggacaacuu

SEQ ID NO: 1182647 - RNA, 19 nt, Artificial Sequence
  Description of Artificial Sequence: Synthetic oligonucleotide
caaugauauacgcuccaga

SEQ ID NO: 1182648 - RNA, 19 nt, Artificial Sequence
  Description of Artificial Sequence: Synthetic oligonucleotide
aggaaaguguaaacacguc

SEQ ID NO: 1182649 - RNA, 19 nt, Artificial Sequence
  Description of Artificial Sequence: Synthetic oligonucleotide
uucaaccuugacccgguuu

SEQ ID NO: 1182650 - RNA, 19 nt, Artificial Sequence
  Description of Artificial Sequence: Synthetic oligonucleotide
agggcuuccgauggcuacc

SEQ ID NO: 1182651 - RNA, 19 nt, Artificial Sequence
  Description of Artificial Sequence: Synthetic oligonucleotide
caucauucggauaccaaua

SEQ ID NO: 1182652 - RNA, 19 nt, Artificial Sequence
  Description of Artificial Sequence: Synthetic oligonucleotide
ggaauuacuucaaugauau

SEQ ID NO: 1182653 - RNA, 19 nt, Artificial Sequence
  Description of Artificial Sequence: Synthetic oligonucleotide
ugaccguauuuugaagaga

SEQ ID NO: 1182654 - RNA, 19 nt, Artificial Sequence
  Description of Artificial Sequence: Synthetic oligonucleotide
ugcuagaugugagcgacau

SEQ ID NO: 1182655 - RNA, 19 nt, Artificial Sequence
  Description of Artificial Sequence: Synthetic oligonucleotide
caacuugggcuaagggaag

SEQ ID NO: 1182656 - RNA, 19 nt, Artificial Sequence
  Description of Artificial Sequence: Synthetic oligonucleotide
guaugaagaaguacuuuaa

SEQ ID NO: 1182657 - RNA, 19 nt, Artificial Sequence
  Description of Artificial Sequence: Synthetic oligonucleotide
cacaccggcucgcugcugg

SEQ ID NO: 1182658 - RNA, 19 nt, Artificial Sequence
  Description of Artificial Sequence: Synthetic oligonucleotide
uuucuuuaucuuguccgau

SEQ ID NO: 1182659 - RNA, 19 nt, Artificial Sequence
  Description of Artificial Sequence: Synthetic oligonucleotide
auggaauugcaaaggagau

SEQ ID NO: 1182660 - RNA, 19 nt, Artificial Sequence
  Description of Artificial Sequence: Synthetic oligonucleotide
aacuugggcuaagggaaga

SEQ ID NO: 1182661 - RNA, 19 nt, Artificial Sequence
  Description of Artificial Sequence: Synthetic oligonucleotide
uggcgcaaacuguuggggu

SEQ ID NO: 1182662 - RNA, 19 nt, Artificial Sequence
  Description of Artificial Sequence: Synthetic oligonucleotide
ucgguggcgguccuucaac

SEQ ID NO: 1182663 - RNA, 19 nt, Artificial Sequence
  Description of Artificial Sequence: Synthetic oligonucleotide
cccaccuauggucucaggg

SEQ ID NO: 1182664 - RNA, 19 nt, Artificial Sequence
  Description of Artificial Sequence: Synthetic oligonucleotide
cagggucacccaccuaugg

SEQ ID NO: 1182665 - RNA, 19 nt, Artificial Sequence
  Description of Artificial Sequence: Synthetic oligonucleotide
acccacuagccacgggcac

SEQ ID NO: 1182666 - RNA, 19 nt, Artificial Sequence
  Description of Artificial Sequence: Synthetic oligonucleotide
gagugucgggaauuacuuc

SEQ ID NO: 1182667 - RNA, 19 nt, Artificial Sequence
  Description of Artificial Sequence: Synthetic oligonucleotide
guaagcauaaugucuucau

SEQ ID NO: 1182668 - RNA, 19 nt, Artificial Sequence
  Description of Artificial Sequence: Synthetic oligonucleotide
acgaugaccggcggcuggc

SEQ ID NO: 1182669 - RNA, 19 nt, Artificial Sequence
  Description of Artificial Sequence: Synthetic oligonucleotide
ugacggcuuucccuuuggc

SEQ ID NO: 1182670 - RNA, 19 nt, Artificial Sequence
  Description of Artificial Sequence: Synthetic oligonucleotide
gugacggcuuucccuuugg

SEQ ID NO: 1182671 - RNA, 19 nt, Artificial Sequence
  Description of Artificial Sequence: Synthetic oligonucleotide
ucguugaguagugcugaca

SEQ ID NO: 1182672 - RNA, 19 nt, Artificial Sequence
  Description of Artificial Sequence: Synthetic oligonucleotide
ugucgggaauuacuucaau

SEQ ID NO: 1182673 - RNA, 19 nt, Artificial Sequence
  Description of Artificial Sequence: Synthetic oligonucleotide
uugacuguuuaagcaggaa

SEQ ID NO: 1182674 - RNA, 19 nt, Artificial Sequence
  Description of Artificial Sequence: Synthetic oligonucleotide
gcaaggacgaugaccggcg

SEQ ID NO: 1182675 - RNA, 19 nt, Artificial Sequence
  Description of Artificial Sequence: Synthetic oligonucleotide
caccuauggucucagggca

SEQ ID NO: 1182676 - RNA, 19 nt, Artificial Sequence
  Description of Artificial Sequence: Synthetic oligonucleotide
gagaguacgucugggaagu

SEQ ID NO: 1182677 - RNA, 19 nt, Artificial Sequence
  Description of Artificial Sequence: Synthetic oligonucleotide
cuuugagcccuccggcuuc

SEQ ID NO: 1182678 - RNA, 19 nt, Artificial Sequence
  Description of Artificial Sequence: Synthetic oligonucleotide
cacgugagcauuugucaca

SEQ ID NO: 1182679 - RNA, 19 nt, Artificial Sequence
  Description of Artificial Sequence: Synthetic oligonucleotide
gugagcgacaucauucgga

SEQ ID NO: 1182680 - RNA, 19 nt, Artificial Sequence
  Description of Artificial Sequence: Synthetic oligonucleotide
uugcuagaugugagcgaca

SEQ ID NO: 1182681 - RNA, 19 nt, Artificial Sequence
  Description of Artificial Sequence: Synthetic oligonucleotide
cagaguuucggagccccag

SEQ ID NO: 1182682 - RNA, 19 nt, Artificial Sequence
  Description of Artificial Sequence: Synthetic oligonucleotide
uaagugcgaugucugccuu

SEQ ID NO: 1182683 - RNA, 19 nt, Artificial Sequence
  Description of Artificial Sequence: Synthetic oligonucleotide
ugccaccucguugaguagu

SEQ ID NO: 1182684 - RNA, 19 nt, Artificial Sequence
  Description of Artificial Sequence: Synthetic oligonucleotide
guacgucugggaagucucg

SEQ ID NO: 1182685 - RNA, 19 nt, Artificial Sequence
  Description of Artificial Sequence: Synthetic oligonucleotide
aagugcgaugucugccuuu

SEQ ID NO: 1182686 - RNA, 19 nt, Artificial Sequence
  Description of Artificial Sequence: Synthetic oligonucleotide
caaggacgaugaccggcgg

SEQ ID NO: 1182687 - RNA, 19 nt, Artificial Sequence
  Description of Artificial Sequence: Synthetic oligonucleotide
caaucaguccauccucaga

SEQ ID NO: 1182688 - RNA, 19 nt, Artificial Sequence
  Description of Artificial Sequence: Synthetic oligonucleotide
ggacuggcagcuuucccug

SEQ ID NO: 1182689 - RNA, 19 nt, Artificial Sequence
  Description of Artificial Sequence: Synthetic oligonucleotide
gggucacccaccuaugguc

SEQ ID NO: 1182690 - RNA, 19 nt, Artificial Sequence
  Description of Artificial Sequence: Synthetic oligonucleotide
cuuuaucuuguccgaugga

SEQ ID NO: 1182691 - RNA, 19 nt, Artificial Sequence
  Description of Artificial Sequence: Synthetic oligonucleotide
gacaaaaguccuggauguc

SEQ ID NO: 1182692 - RNA, 19 nt, Artificial Sequence
  Description of Artificial Sequence: Synthetic oligonucleotide
uuggcgucgcugccgcaca

SEQ ID NO: 1182693 - RNA, 19 nt, Artificial Sequence
  Description of Artificial Sequence: Synthetic oligonucleotide
gaacgaccaagcagcagga

SEQ ID NO: 1182694 - RNA, 19 nt, Artificial Sequence
  Description of Artificial Sequence: Synthetic oligonucleotide
gcaacauugcauuuguuuu

SEQ ID NO: 1182695 - RNA, 19 nt, Artificial Sequence
  Description of Artificial Sequence: Synthetic oligonucleotide
gguauaggucuuggcgucg

SEQ ID NO: 1182696 - RNA, 19 nt, Artificial Sequence
  Description of Artificial Sequence: Synthetic oligonucleotide
cagggguguucccugaaca

SEQ ID NO: 1182697 - RNA, 19 nt, Artificial Sequence
  Description of Artificial Sequence: Synthetic oligonucleotide
ucggagcggcggcuggcgg

SEQ ID NO: 1182698 - RNA, 19 nt, Artificial Sequence
  Description of Artificial Sequence: Synthetic oligonucleotide
ugcggacaaccauguucag

SEQ ID NO: 1182699 - RNA, 19 nt, Artificial Sequence
  Description of Artificial Sequence: Synthetic oligonucleotide
guucccugaacaagcaaaa

SEQ ID NO: 1182700 - RNA, 19 nt, Artificial Sequence
  Description of Artificial Sequence: Synthetic oligonucleotide
uaaacacguccaagaccau

SEQ ID NO: 1182701 - RNA, 19 nt, Artificial Sequence
  Description of Artificial Sequence: Synthetic oligonucleotide
acgugagcauuugucacaa

SEQ ID NO: 1182702 - RNA, 19 nt, Artificial Sequence
  Description of Artificial Sequence: Synthetic oligonucleotide
ugccccugcggacaaccau

SEQ ID NO: 1182703 - RNA, 19 nt, Artificial Sequence
  Description of Artificial Sequence: Synthetic oligonucleotide
cugcaaggacgaugaccgg

SEQ ID NO: 1182704 - RNA, 19 nt, Artificial Sequence
  Description of Artificial Sequence: Synthetic oligonucleotide
agugcgaugucugccuuuu

SEQ ID NO: 1182705 - RNA, 19 nt, Artificial Sequence
  Description of Artificial Sequence: Synthetic oligonucleotide
ggcacaaguugguauaggu

SEQ ID NO: 1182706 - RNA, 19 nt, Artificial Sequence
  Description of Artificial Sequence: Synthetic oligonucleotide
ggcgcaaacuguugggguc

SEQ ID NO: 1182707 - RNA, 19 nt, Artificial Sequence
  Description of Artificial Sequence: Synthetic oligonucleotide
gggguguucccugaacaag

SEQ ID NO: 1182708 - RNA, 19 nt, Artificial Sequence
  Description of Artificial Sequence: Synthetic oligonucleotide
guagcuccauucuucaguu

SEQ ID NO: 1182709 - RNA, 19 nt, Artificial Sequence
  Description of Artificial Sequence: Synthetic oligonucleotide
aaucccgguggugaccgua

SEQ ID NO: 1182710 - RNA, 19 nt, Artificial Sequence
  Description of Artificial Sequence: Synthetic oligonucleotide
cacgaugaauccagaccca

SEQ ID NO: 1182711 - RNA, 19 nt, Artificial Sequence
  Description of Artificial Sequence: Synthetic oligonucleotide
ccguauuuugaagagaaaa

SEQ ID NO: 1182712 - RNA, 19 nt, Artificial Sequence
  Description of Artificial Sequence: Synthetic oligonucleotide
augaccggcggcuggcgaa

SEQ ID NO: 1182713 - RNA, 19 nt, Artificial Sequence
  Description of Artificial Sequence: Synthetic oligonucleotide
gaccuuccucuuaucuaug

SEQ ID NO: 1182714 - RNA, 19 nt, Artificial Sequence
  Description of Artificial Sequence: Synthetic oligonucleotide
gcggacaaccauguucagg

SEQ ID NO: 1182715 - RNA, 19 nt, Artificial Sequence
  Description of Artificial Sequence: Synthetic oligonucleotide
agcgcgcugcauacauagc

SEQ ID NO: 1182716 - RNA, 19 nt, Artificial Sequence
  Description of Artificial Sequence: Synthetic oligonucleotide
caaacucucccggccgcag

SEQ ID NO: 1182717 - RNA, 19 nt, Artificial Sequence
  Description of Artificial Sequence: Synthetic oligonucleotide
ugaccggcggcuggcgaag

SEQ ID NO: 1182718 - RNA, 19 nt, Artificial Sequence
  Description of Artificial Sequence: Synthetic oligonucleotide
gacccacuagccacgggca

SEQ ID NO: 1182719 - RNA, 19 nt, Artificial Sequence
  Description of Artificial Sequence: Synthetic oligonucleotide
gcgcgcugcauacauagca

SEQ ID NO: 1182720 - RNA, 19 nt, Artificial Sequence
  Description of Artificial Sequence: Synthetic oligonucleotide
gcugccgcacaccggcucg

SEQ ID NO: 1182721 - RNA, 19 nt, Artificial Sequence
  Description of Artificial Sequence: Synthetic oligonucleotide
cuuguccgauggaauugca

SEQ ID NO: 1182722 - RNA, 19 nt, Artificial Sequence
  Description of Artificial Sequence: Synthetic oligonucleotide
ggugacggcuuucccuuug

SEQ ID NO: 1182723 - RNA, 19 nt, Artificial Sequence
  Description of Artificial Sequence: Synthetic oligonucleotide
agguuccugccucugccua

SEQ ID NO: 1182724 - RNA, 19 nt, Artificial Sequence
  Description of Artificial Sequence: Synthetic oligonucleotide
gcacaaguugguauagguc

SEQ ID NO: 1182725 - RNA, 19 nt, Artificial Sequence
  Description of Artificial Sequence: Synthetic oligonucleotide
ucucgguggcgguccuuca

SEQ ID NO: 1182726 - RNA, 19 nt, Artificial Sequence
  Description of Artificial Sequence: Synthetic oligonucleotide
acccaccuauggucucagg

SEQ ID NO: 1182727 - RNA, 19 nt, Artificial Sequence
  Description of Artificial Sequence: Synthetic oligonucleotide
gaguacgucugggaagucu

SEQ ID NO: 1182728 - RNA, 19 nt, Artificial Sequence
  Description of Artificial Sequence: Synthetic oligonucleotide
caggaauaacuguaagcau

SEQ ID NO: 1182729 - RNA, 19 nt, Artificial Sequence
  Description of Artificial Sequence: Synthetic oligonucleotide
caggcgccgcgcugcaagg

SEQ ID NO: 1182730 - RNA, 19 nt, Artificial Sequence
  Description of Artificial Sequence: Synthetic oligonucleotide
acaaacucucccggccgca

SEQ ID NO: 1182731 - RNA, 19 nt, Artificial Sequence
  Description of Artificial Sequence: Synthetic oligonucleotide
agaguacgucugggaaguc

SEQ ID NO: 1182732 - RNA, 19 nt, Artificial Sequence
  Description of Artificial Sequence: Synthetic oligonucleotide
cuuggccgcaggcgccgcg

SEQ ID NO: 1182733 - RNA, 19 nt, Artificial Sequence
  Description of Artificial Sequence: Synthetic oligonucleotide
acgcuccagagaguacguc

SEQ ID NO: 1182734 - RNA, 19 nt, Artificial Sequence
  Description of Artificial Sequence: Synthetic oligonucleotide
cucggagcggcggcuggcg

SEQ ID NO: 1182735 - RNA, 19 nt, Artificial Sequence
  Description of Artificial Sequence: Synthetic oligonucleotide
ccuaugggucgauuucuuc

SEQ ID NO: 1182736 - RNA, 19 nt, Artificial Sequence
  Description of Artificial Sequence: Synthetic oligonucleotide
caauuuugauaagugcgau

SEQ ID NO: 1182737 - RNA, 19 nt, Artificial Sequence
  Description of Artificial Sequence: Synthetic oligonucleotide
aaagcgcgcugcauacaua

SEQ ID NO: 1182738 - RNA, 19 nt, Artificial Sequence
  Description of Artificial Sequence: Synthetic oligonucleotide
gggucgauuucuucaggaa

SEQ ID NO: 1182739 - RNA, 19 nt, Artificial Sequence
  Description of Artificial Sequence: Synthetic oligonucleotide
cugcauuaguuggacaacu

SEQ ID NO: 1182740 - RNA, 19 nt, Artificial Sequence
  Description of Artificial Sequence: Synthetic oligonucleotide
gauauacgcuccagagagu

SEQ ID NO: 1182741 - RNA, 19 nt, Artificial Sequence
  Description of Artificial Sequence: Synthetic oligonucleotide
ugucggcagggguguuccc

SEQ ID NO: 1182742 - RNA, 19 nt, Artificial Sequence
  Description of Artificial Sequence: Synthetic oligonucleotide
ggccugucggucaugggac

SEQ ID NO: 1182743 - RNA, 19 nt, Artificial Sequence
  Description of Artificial Sequence: Synthetic oligonucleotide
cguugaguagugcugacaa

SEQ ID NO: 1182744 - RNA, 19 nt, Artificial Sequence
  Description of Artificial Sequence: Synthetic oligonucleotide
gguggcgguccuucaacuc

SEQ ID NO: 1182745 - RNA, 19 nt, Artificial Sequence
  Description of Artificial Sequence: Synthetic oligonucleotide
gucacccaccuauggucuc

SEQ ID NO: 1182746 - RNA, 19 nt, Artificial Sequence
  Description of Artificial Sequence: Synthetic oligonucleotide
caaguuuacuaaggggccu

SEQ ID NO: 1182747 - RNA, 19 nt, Artificial Sequence
  Description of Artificial Sequence: Synthetic oligonucleotide
gucucgguggcgguccuuc

SEQ ID NO: 1182748 - RNA, 19 nt, Artificial Sequence
  Description of Artificial Sequence: Synthetic oligonucleotide
accguauuuugaagagaaa

SEQ ID NO: 1182749 - RNA, 19 nt, Artificial Sequence
  Description of Artificial Sequence: Synthetic oligonucleotide
uagccacgggcaccucccu

SEQ ID NO: 1182750 - RNA, 19 nt, Artificial Sequence
  Description of Artificial Sequence: Synthetic oligonucleotide
gcccaagcuuguaagaaaa

SEQ ID NO: 1182751 - RNA, 19 nt, Artificial Sequence
  Description of Artificial Sequence: Synthetic oligonucleotide
gugucgggaauuacuucaa

SEQ ID NO: 1182752 - RNA, 19 nt, Artificial Sequence
  Description of Artificial Sequence: Synthetic oligonucleotide
ccggccgcagcucugagga

SEQ ID NO: 1182753 - RNA, 19 nt, Artificial Sequence
  Description of Artificial Sequence: Synthetic oligonucleotide
cacccaccuauggucucag

SEQ ID NO: 1182754 - RNA, 19 nt, Artificial Sequence
  Description of Artificial Sequence: Synthetic oligonucleotide
cacguccaagaccaugacu

SEQ ID NO: 1182755 - RNA, 19 nt, Artificial Sequence
  Description of Artificial Sequence: Synthetic oligonucleotide
ccgcccaugcaccugcaac

SEQ ID NO: 1182756 - RNA, 19 nt, Artificial Sequence
  Description of Artificial Sequence: Synthetic oligonucleotide
gcugacaaucccgguggug

SEQ ID NO: 1182757 - RNA, 19 nt, Artificial Sequence
  Description of Artificial Sequence: Synthetic oligonucleotide
ccgaguuggaggaaagugu

SEQ ID NO: 1182758 - RNA, 19 nt, Artificial Sequence
  Description of Artificial Sequence: Synthetic oligonucleotide
accuauggucucagggcau

SEQ ID NO: 1182759 - RNA, 19 nt, Artificial Sequence
  Description of Artificial Sequence: Synthetic oligonucleotide
caccucgccauccaaguuu

SEQ ID NO: 1182760 - RNA, 19 nt, Artificial Sequence
  Description of Artificial Sequence: Synthetic oligonucleotide
cgcgcugcaaggacgauga

SEQ ID NO: 1182761 - RNA, 19 nt, Artificial Sequence
  Description of Artificial Sequence: Synthetic oligonucleotide
gagcgacaucauucggaua

SEQ ID NO: 1182762 - RNA, 19 nt, Artificial Sequence
  Description of Artificial Sequence: Synthetic oligonucleotide
gcuagaugugagcgacauc

SEQ ID NO: 1182763 - RNA, 19 nt, Artificial Sequence
  Description of Artificial Sequence: Synthetic oligonucleotide
cccacuagccacgggcacc

SEQ ID NO: 1182764 - RNA, 19 nt, Artificial Sequence
  Description of Artificial Sequence: Synthetic oligonucleotide
gcgacaucauucggauacc

SEQ ID NO: 1182765 - RNA, 19 nt, Artificial Sequence
  Description of Artificial Sequence: Synthetic oligonucleotide
cgaguuggaggaaagugua

SEQ ID NO: 1182766 - RNA, 19 nt, Artificial Sequence
  Description of Artificial Sequence: Synthetic oligonucleotide
ucgcugccgcacaccggcu

SEQ ID NO: 1182767 - RNA, 19 nt, Artificial Sequence
  Description of Artificial Sequence: Synthetic oligonucleotide
ccugcaacauugcauuugu

SEQ ID NO: 1182768 - RNA, 19 nt, Artificial Sequence
  Description of Artificial Sequence: Synthetic oligonucleotide
ggauuccuaagaggcaucu

SEQ ID NO: 1182769 - RNA, 19 nt, Artificial Sequence
  Description of Artificial Sequence: Synthetic oligonucleotide
uggugacggcuuucccuuu

SEQ ID NO: 1182770 - RNA, 19 nt, Artificial Sequence
  Description of Artificial Sequence: Synthetic oligonucleotide
agaugccugcugucaccuu

SEQ ID NO: 1182771 - RNA, 19 nt, Artificial Sequence
  Description of Artificial Sequence: Synthetic oligonucleotide
ggagugucgggaauuacuu

SEQ ID NO: 1182772 - RNA, 19 nt, Artificial Sequence
  Description of Artificial Sequence: Synthetic oligonucleotide
ucccgguggugaccguauu

SEQ ID NO: 1182773 - RNA, 19 nt, Artificial Sequence
  Description of Artificial Sequence: Synthetic oligonucleotide
ggaagucucgguggcgguc

SEQ ID NO: 1182774 - RNA, 19 nt, Artificial Sequence
  Description of Artificial Sequence: Synthetic oligonucleotide
ccuauggucucagggcauc

SEQ ID NO: 1182775 - RNA, 19 nt, Artificial Sequence
  Description of Artificial Sequence: Synthetic oligonucleotide
aucccgguggugaccguau

SEQ ID NO: 1182776 - RNA, 19 nt, Artificial Sequence
  Description of Artificial Sequence: Synthetic oligonucleotide
cggauaccaauauacuucu

SEQ ID NO: 1182777 - RNA, 19 nt, Artificial Sequence
  Description of Artificial Sequence: Synthetic oligonucleotide
ccagacccacuagccacgg

SEQ ID NO: 1182778 - RNA, 19 nt, Artificial Sequence
  Description of Artificial Sequence: Synthetic oligonucleotide
cugccgcacaccggcucgc

SEQ ID NO: 1182779 - RNA, 19 nt, Artificial Sequence
  Description of Artificial Sequence: Synthetic oligonucleotide
ggucacccaccuauggucu

SEQ ID NO: 1182780 - RNA, 19 nt, Artificial Sequence
  Description of Artificial Sequence: Synthetic oligonucleotide
gugcgaugucugccuuuuc

SEQ ID NO: 1182781 - RNA, 19 nt, Artificial Sequence
  Description of Artificial Sequence: Synthetic oligonucleotide
ggacucugucaggaauuuc

SEQ ID NO: 1182782 - RNA, 19 nt, Artificial Sequence
  Description of Artificial Sequence: Synthetic oligonucleotide
gaccggcggcuggcgaagc

SEQ ID NO: 1182783 - RNA, 19 nt, Artificial Sequence
  Description of Artificial Sequence: Synthetic oligonucleotide
ggacgaugaccggcggcug

SEQ ID NO: 1182784 - RNA, 19 nt, Artificial Sequence
  Description of Artificial Sequence: Synthetic oligonucleotide
gcgccgcgcugcaaggacg

SEQ ID NO: 1182785 - RNA, 19 nt, Artificial Sequence
  Description of Artificial Sequence: Synthetic oligonucleotide
cauugccccugcggacaac

SEQ ID NO: 1182786 - RNA, 19 nt, Artificial Sequence
  Description of Artificial Sequence: Synthetic oligonucleotide
gccgcaggcgccgcgcugc

SEQ ID NO: 1182787 - RNA, 19 nt, Artificial Sequence
  Description of Artificial Sequence: Synthetic oligonucleotide
cucugggcgccgaguugga

SEQ ID NO: 1182788 - RNA, 19 nt, Artificial Sequence
  Description of Artificial Sequence: Synthetic oligonucleotide
gcggcacgcagcuggcaca

SEQ ID NO: 1182789 - RNA, 19 nt, Artificial Sequence
  Description of Artificial Sequence: Synthetic oligonucleotide
cuuugccaccucguugagu

SEQ ID NO: 1182790 - RNA, 19 nt, Artificial Sequence
  Description of Artificial Sequence: Synthetic oligonucleotide
ggacaaccauguucagggu

SEQ ID NO: 1182791 - RNA, 19 nt, Artificial Sequence
  Description of Artificial Sequence: Synthetic oligonucleotide
cugucggucaugggacucu

SEQ ID NO: 1182792 - RNA, 19 nt, Artificial Sequence
  Description of Artificial Sequence: Synthetic oligonucleotide
ccaccucguugaguagugc

SEQ ID NO: 1182793 - RNA, 19 nt, Artificial Sequence
  Description of Artificial Sequence: Synthetic oligonucleotide
cggagugucgggaauuacu

SEQ ID NO: 1182794 - RNA, 19 nt, Artificial Sequence
  Description of Artificial Sequence: Synthetic oligonucleotide
cccuuggccgcaggcgccg

SEQ ID NO: 1182795 - RNA, 19 nt, Artificial Sequence
  Description of Artificial Sequence: Synthetic oligonucleotide
ccgcgcugcaaggacgaug

SEQ ID NO: 1182796 - RNA, 19 nt, Artificial Sequence
  Description of Artificial Sequence: Synthetic oligonucleotide
gcgcaaacuguuggggucu

SEQ ID NO: 1182797 - RNA, 19 nt, Artificial Sequence
  Description of Artificial Sequence: Synthetic oligonucleotide
cgggaauuacuucaaugau

SEQ ID NO: 1182798 - RNA, 19 nt, Artificial Sequence
  Description of Artificial Sequence: Synthetic oligonucleotide
ccacgucagcaauaaaguu

SEQ ID NO: 1182799 - RNA, 19 nt, Artificial Sequence
  Description of Artificial Sequence: Synthetic oligonucleotide
caccugcaacauugcauuu

SEQ ID NO: 1182800 - RNA, 19 nt, Artificial Sequence
  Description of Artificial Sequence: Synthetic oligonucleotide
caccuucaguguguuaauu

SEQ ID NO: 1182801 - RNA, 19 nt, Artificial Sequence
  Description of Artificial Sequence: Synthetic oligonucleotide
ccggagugucgggaauuac

SEQ ID NO: 1182802 - RNA, 19 nt, Artificial Sequence
  Description of Artificial Sequence: Synthetic oligonucleotide
gcggcuggcgaagcuucuc

SEQ ID NO: 1182803 - RNA, 19 nt, Artificial Sequence
  Description of Artificial Sequence: Synthetic oligonucleotide
gccugcugucaccuucagu

SEQ ID NO: 1182804 - RNA, 19 nt, Artificial Sequence
  Description of Artificial Sequence: Synthetic oligonucleotide
cugccggagugucgggaau

SEQ ID NO: 1182805 - RNA, 19 nt, Artificial Sequence
  Description of Artificial Sequence: Synthetic oligonucleotide
gccugucggucaugggacu

SEQ ID NO: 1182806 - RNA, 19 nt, Artificial Sequence
  Description of Artificial Sequence: Synthetic oligonucleotide
cacuagccacgggcaccuc

SEQ ID NO: 1182807 - RNA, 19 nt, Artificial Sequence
  Description of Artificial Sequence: Synthetic oligonucleotide
gcgcugcaaggacgaugac

SEQ ID NO: 1182808 - RNA, 19 nt, Artificial Sequence
  Description of Artificial Sequence: Synthetic oligonucleotide
ggauaccaauauacuucuu

SEQ ID NO: 1182809 - RNA, 19 nt, Artificial Sequence
  Description of Artificial Sequence: Synthetic oligonucleotide
cgcugccgcacaccggcuc

SEQ ID NO: 1182810 - RNA, 19 nt, Artificial Sequence
  Description of Artificial Sequence: Synthetic oligonucleotide
ccacuagccacgggcaccu

SEQ ID NO: 1182811 - RNA, 19 nt, Artificial Sequence
  Description of Artificial Sequence: Synthetic oligonucleotide
caaucccgguggugaccgu

SEQ ID NO: 1182812 - RNA, 19 nt, Artificial Sequence
  Description of Artificial Sequence: Synthetic oligonucleotide
gcccaugcaccugcaacau

SEQ ID NO: 1182813 - RNA, 19 nt, Artificial Sequence
  Description of Artificial Sequence: Synthetic oligonucleotide
ccccugcggacaaccaugu

SEQ ID NO: 1182814 - RNA, 19 nt, Artificial Sequence
  Description of Artificial Sequence: Synthetic oligonucleotide
ccgguggugaccguauuuu

SEQ ID NO: 1182815 - RNA, 19 nt, Artificial Sequence
  Description of Artificial Sequence: Synthetic oligonucleotide
gcacaccggcucgcugcug

SEQ ID NO: 1182816 - RNA, 19 nt, Artificial Sequence
  Description of Artificial Sequence: Synthetic oligonucleotide
gccuaugggucgauuucuu

SEQ ID NO: 1182817 - RNA, 19 nt, Artificial Sequence
  Description of Artificial Sequence: Synthetic oligonucleotide
cucugccuaugggucgauu

SEQ ID NO: 1182818 - RNA, 19 nt, Artificial Sequence
  Description of Artificial Sequence: Synthetic oligonucleotide
cccgguggugaccguauuu

SEQ ID NO: 1182819 - RNA, 19 nt, Artificial Sequence
  Description of Artificial Sequence: Synthetic oligonucleotide
ggcgguccuucaacucuuu

SEQ ID NO: 1182820 - RNA, 19 nt, Artificial Sequence
  Description of Artificial Sequence: Synthetic oligonucleotide
cggcacgcagcuggcacaa

SEQ ID NO: 1182821 - RNA, 19 nt, Artificial Sequence
  Description of Artificial Sequence: Synthetic oligonucleotide
cgcacaccggcucgcugcu

SEQ ID NO: 1182822 - RNA, 19 nt, Artificial Sequence
  Description of Artificial Sequence: Synthetic oligonucleotide
cgccgaguuggaggaaagu

SEQ ID NO: 1182823 - RNA, 19 nt, Artificial Sequence
  Description of Artificial Sequence: Synthetic oligonucleotide
gccgcgcugcaaggacgau

SEQ ID NO: 1182824 - RNA, 19 nt, Artificial Sequence
  Description of Artificial Sequence: Synthetic oligonucleotide
cgcaaacuguuggggucuu

SEQ ID NO: 1182825 - RNA, 19 nt, Artificial Sequence
  Description of Artificial Sequence: Synthetic oligonucleotide
aauaccuagauaucuaacg

SEQ ID NO: 1182826 - RNA, 19 nt, Artificial Sequence
  Description of Artificial Sequence: Synthetic oligonucleotide
uuuaaugcuaaacaaaauc

SEQ ID NO: 1182827 - RNA, 19 nt, Artificial Sequence
  Description of Artificial Sequence: Synthetic oligonucleotide
uuaguuaguagaaacaaga

SEQ ID NO: 1182828 - RNA, 19 nt, Artificial Sequence
  Description of Artificial Sequence: Synthetic oligonucleotide
uacaaauuaauacagcccu

SEQ ID NO: 1182829 - RNA, 19 nt, Artificial Sequence
  Description of Artificial Sequence: Synthetic oligonucleotide
acuagaauauaguaauuac

SEQ ID NO: 1182830 - RNA, 19 nt, Artificial Sequence
  Description of Artificial Sequence: Synthetic oligonucleotide
aauggcuuagcuauguggc

SEQ ID NO: 1182831 - RNA, 19 nt, Artificial Sequence
  Description of Artificial Sequence: Synthetic oligonucleotide
uaaugcuaaacaaaaucag

SEQ ID NO: 1182832 - RNA, 19 nt, Artificial Sequence
  Description of Artificial Sequence: Synthetic oligonucleotide
aguuaguagaaacaagauc

SEQ ID NO: 1182833 - RNA, 19 nt, Artificial Sequence
  Description of Artificial Sequence: Synthetic oligonucleotide
uaaguagucaauauaugga

SEQ ID NO: 1182834 - RNA, 19 nt, Artificial Sequence
  Description of Artificial Sequence: Synthetic oligonucleotide
aguagaaacaagaucuucc

SEQ ID NO: 1182835 - RNA, 19 nt, Artificial Sequence
  Description of Artificial Sequence: Synthetic oligonucleotide
guagucaauauauggaagg

SEQ ID NO: 1182836 - RNA, 19 nt, Artificial Sequence
  Description of Artificial Sequence: Synthetic oligonucleotide
uauauaagugaccaugggu

SEQ ID NO: 1182837 - RNA, 19 nt, Artificial Sequence
  Description of Artificial Sequence: Synthetic oligonucleotide
agauaucuaacgucaaaac

SEQ ID NO: 1182838 - RNA, 19 nt, Artificial Sequence
  Description of Artificial Sequence: Synthetic oligonucleotide
aaacugcccgcuuugcugc

SEQ ID NO: 1182839 - RNA, 19 nt, Artificial Sequence
  Description of Artificial Sequence: Synthetic oligonucleotide
uguguuauuggggaggacg

SEQ ID NO: 1182840 - RNA, 19 nt, Artificial Sequence
  Description of Artificial Sequence: Synthetic oligonucleotide
ugugcgaucugguagagca

SEQ ID NO: 1182841 - RNA, 19 nt, Artificial Sequence
  Description of Artificial Sequence: Synthetic oligonucleotide
aagaccuuuauucccaaca

SEQ ID NO: 1182842 - RNA, 19 nt, Artificial Sequence
  Description of Artificial Sequence: Synthetic oligonucleotide
aucauagcgguacaucagc

SEQ ID NO: 1182843 - RNA, 19 nt, Artificial Sequence
  Description of Artificial Sequence: Synthetic oligonucleotide
caaguuaccaaacaaaaca

SEQ ID NO: 1182844 - RNA, 19 nt, Artificial Sequence
  Description of Artificial Sequence: Synthetic oligonucleotide
uuaaacagugaguguacgg

SEQ ID NO: 1182845 - RNA, 19 nt, Artificial Sequence
  Description of Artificial Sequence: Synthetic oligonucleotide
aaguagucaauauauggaa

SEQ ID NO: 1182846 - RNA, 19 nt, Artificial Sequence
  Description of Artificial Sequence: Synthetic oligonucleotide
cuuuguaccgcucuuuucc

SEQ ID NO: 1182847 - RNA, 19 nt, Artificial Sequence
  Description of Artificial Sequence: Synthetic oligonucleotide
uacuuagaugcacuugugg

SEQ ID NO: 1182848 - RNA, 19 nt, Artificial Sequence
  Description of Artificial Sequence: Synthetic oligonucleotide
uggagaauggcuuagcuau

SEQ ID NO: 1182849 - RNA, 19 nt, Artificial Sequence
  Description of Artificial Sequence: Synthetic oligonucleotide
ugagguuccauccaugccu

SEQ ID NO: 1182850 - RNA, 19 nt, Artificial Sequence
  Description of Artificial Sequence: Synthetic oligonucleotide
auagcgguacaucagcuuc

SEQ ID NO: 1182851 - RNA, 19 nt, Artificial Sequence
  Description of Artificial Sequence: Synthetic oligonucleotide
aguaacgccauggaugagc

SEQ ID NO: 1182852 - RNA, 19 nt, Artificial Sequence
  Description of Artificial Sequence: Synthetic oligonucleotide
uaaacagugaguguacggc

SEQ ID NO: 1182853 - RNA, 19 nt, Artificial Sequence
  Description of Artificial Sequence: Synthetic oligonucleotide
uuagccagggaauagucac

SEQ ID NO: 1182854 - RNA, 19 nt, Artificial Sequence
  Description of Artificial Sequence: Synthetic oligonucleotide
guagaaacaagaucuuccc

SEQ ID NO: 1182855 - RNA, 19 nt, Artificial Sequence
  Description of Artificial Sequence: Synthetic oligonucleotide
uaucuaacgucaaaacuuc

SEQ ID NO: 1182856 - RNA, 19 nt, Artificial Sequence
  Description of Artificial Sequence: Synthetic oligonucleotide
ugcuugugcgaucugguag

SEQ ID NO: 1182857 - RNA, 19 nt, Artificial Sequence
  Description of Artificial Sequence: Synthetic oligonucleotide
uuagagcuagugcaaagac

SEQ ID NO: 1182858 - RNA, 19 nt, Artificial Sequence
  Description of Artificial Sequence: Synthetic oligonucleotide
uuuaaacagugaguguacg

SEQ ID NO: 1182859 - RNA, 19 nt, Artificial Sequence
  Description of Artificial Sequence: Synthetic oligonucleotide
ucagcaggaaugcaauacc

SEQ ID NO: 1182860 - RNA, 19 nt, Artificial Sequence
  Description of Artificial Sequence: Synthetic oligonucleotide
ugaacugccaaaacaugac

SEQ ID NO: 1182861 - RNA, 19 nt, Artificial Sequence
  Description of Artificial Sequence: Synthetic oligonucleotide
caaacaaaacaaaacaaaa

SEQ ID NO: 1182862 - RNA, 19 nt, Artificial Sequence
  Description of Artificial Sequence: Synthetic oligonucleotide
auaccuagauaucuaacgu

SEQ ID NO: 1182863 - RNA, 19 nt, Artificial Sequence
  Description of Artificial Sequence: Synthetic oligonucleotide
accaaggugacgcaggaug

SEQ ID NO: 1182864 - RNA, 19 nt, Artificial Sequence
  Description of Artificial Sequence: Synthetic oligonucleotide
ugcuaaacaaaaucaguuc

SEQ ID NO: 1182865 - RNA, 19 nt, Artificial Sequence
  Description of Artificial Sequence: Synthetic oligonucleotide
uauauggaaggugauuuug

SEQ ID NO: 1182866 - RNA, 19 nt, Artificial Sequence
  Description of Artificial Sequence: Synthetic oligonucleotide
ucuaacgucaaaacuucaa

SEQ ID NO: 1182867 - RNA, 19 nt, Artificial Sequence
  Description of Artificial Sequence: Synthetic oligonucleotide
cuuuacacagcaccucugg

SEQ ID NO: 1182868 - RNA, 19 nt, Artificial Sequence
  Description of Artificial Sequence: Synthetic oligonucleotide
uauccuacagcaaguacuc

SEQ ID NO: 1182869 - RNA, 19 nt, Artificial Sequence
  Description of Artificial Sequence: Synthetic oligonucleotide
ccuugcaaaaguuaguuag

SEQ ID NO: 1182870 - RNA, 19 nt, Artificial Sequence
  Description of Artificial Sequence: Synthetic oligonucleotide
auaucuaacgucaaaacuu

SEQ ID NO: 1182871 - RNA, 19 nt, Artificial Sequence
  Description of Artificial Sequence: Synthetic oligonucleotide
aauacagcccucaagguuu

SEQ ID NO: 1182872 - RNA, 19 nt, Artificial Sequence
  Description of Artificial Sequence: Synthetic oligonucleotide
uguacggcagcuuccaaac

SEQ ID NO: 1182873 - RNA, 19 nt, Artificial Sequence
  Description of Artificial Sequence: Synthetic oligonucleotide
ugagcgaacaaucgccgcc

SEQ ID NO: 1182874 - RNA, 19 nt, Artificial Sequence
  Description of Artificial Sequence: Synthetic oligonucleotide
aaaccugacugcaauaccu

SEQ ID NO: 1182875 - RNA, 19 nt, Artificial Sequence
  Description of Artificial Sequence: Synthetic oligonucleotide
cuugagcgaacaaucgccg

SEQ ID NO: 1182876 - RNA, 19 nt, Artificial Sequence
  Description of Artificial Sequence: Synthetic oligonucleotide
uagauaucuaacgucaaaa

SEQ ID NO: 1182877 - RNA, 19 nt, Artificial Sequence
  Description of Artificial Sequence: Synthetic oligonucleotide
uuuagccagggaauaguca

SEQ ID NO: 1182878 - RNA, 19 nt, Artificial Sequence
  Description of Artificial Sequence: Synthetic oligonucleotide
uuuagagcuagugcaaaga

SEQ ID NO: 1182879 - RNA, 19 nt, Artificial Sequence
  Description of Artificial Sequence: Synthetic oligonucleotide
gcaaaaguuaguuaguaga

SEQ ID NO: 1182880 - RNA, 19 nt, Artificial Sequence
  Description of Artificial Sequence: Synthetic oligonucleotide
gucaauauauggaagguga

SEQ ID NO: 1182881 - RNA, 19 nt, Artificial Sequence
  Description of Artificial Sequence: Synthetic oligonucleotide
auauaagugaccauggguu

SEQ ID NO: 1182882 - RNA, 19 nt, Artificial Sequence
  Description of Artificial Sequence: Synthetic oligonucleotide
aaguuaguuaguagaaaca

SEQ ID NO: 1182883 - RNA, 19 nt, Artificial Sequence
  Description of Artificial Sequence: Synthetic oligonucleotide
uccuugagcgaacaaucgc

SEQ ID NO: 1182884 - RNA, 19 nt, Artificial Sequence
  Description of Artificial Sequence: Synthetic oligonucleotide
aaaggacuuuugucagccg

SEQ ID NO: 1182885 - RNA, 19 nt, Artificial Sequence
  Description of Artificial Sequence: Synthetic oligonucleotide
uuaauacagcccucaaggu

SEQ ID NO: 1182886 - RNA, 19 nt, Artificial Sequence
  Description of Artificial Sequence: Synthetic oligonucleotide
aguuaguuaguagaaacaa

SEQ ID NO: 1182887 - RNA, 19 nt, Artificial Sequence
  Description of Artificial Sequence: Synthetic oligonucleotide
uaauacagcccucaagguu

SEQ ID NO: 1182888 - RNA, 19 nt, Artificial Sequence
  Description of Artificial Sequence: Synthetic oligonucleotide
ucucgagaccagcaugagg

SEQ ID NO: 1182889 - RNA, 19 nt, Artificial Sequence
  Description of Artificial Sequence: Synthetic oligonucleotide
ucugagacgcuguagccac

SEQ ID NO: 1182890 - RNA, 19 nt, Artificial Sequence
  Description of Artificial Sequence: Synthetic oligonucleotide
ggcgauacaaauuaauaca

SEQ ID NO: 1182891 - RNA, 19 nt, Artificial Sequence
  Description of Artificial Sequence: Synthetic oligonucleotide
guuaguuaguagaaacaag

SEQ ID NO: 1182892 - RNA, 19 nt, Artificial Sequence
  Description of Artificial Sequence: Synthetic oligonucleotide
acagugaguguacggcagc

SEQ ID NO: 1182893 - RNA, 19 nt, Artificial Sequence
  Description of Artificial Sequence: Synthetic oligonucleotide
uguauccuacagcaaguac

SEQ ID NO: 1182894 - RNA, 19 nt, Artificial Sequence
  Description of Artificial Sequence: Synthetic oligonucleotide
auauggaaggugauuuugg

SEQ ID NO: 1182895 - RNA, 19 nt, Artificial Sequence
  Description of Artificial Sequence: Synthetic oligonucleotide
gaccaugccaauauuuagc

SEQ ID NO: 1182896 - RNA, 19 nt, Artificial Sequence
  Description of Artificial Sequence: Synthetic oligonucleotide
uguuaguguccacuuuccc

SEQ ID NO: 1182897 - RNA, 19 nt, Artificial Sequence
  Description of Artificial Sequence: Synthetic oligonucleotide
uuacuuagaugcacuugug

SEQ ID NO: 1182898 - RNA, 19 nt, Artificial Sequence
  Description of Artificial Sequence: Synthetic oligonucleotide
cuagugcaaagacagcuug

SEQ ID NO: 1182899 - RNA, 19 nt, Artificial Sequence
  Description of Artificial Sequence: Synthetic oligonucleotide
uggacccuguguuauuggg

SEQ ID NO: 1182900 - RNA, 19 nt, Artificial Sequence
  Description of Artificial Sequence: Synthetic oligonucleotide
uuauucccaacaaguuacc

SEQ ID NO: 1182901 - RNA, 19 nt, Artificial Sequence
  Description of Artificial Sequence: Synthetic oligonucleotide
aguagucaauauauggaag

SEQ ID NO: 1182902 - RNA, 19 nt, Artificial Sequence
  Description of Artificial Sequence: Synthetic oligonucleotide
gauggcgggacguccacag

SEQ ID NO: 1182903 - RNA, 19 nt, Artificial Sequence
  Description of Artificial Sequence: Synthetic oligonucleotide
aaacaaaaucaguucucua

SEQ ID NO: 1182904 - RNA, 19 nt, Artificial Sequence
  Description of Artificial Sequence: Synthetic oligonucleotide
uauuuagccagggaauagu

SEQ ID NO: 1182905 - RNA, 19 nt, Artificial Sequence
  Description of Artificial Sequence: Synthetic oligonucleotide
uaccuagauaucuaacguc

SEQ ID NO: 1182906 - RNA, 19 nt, Artificial Sequence
  Description of Artificial Sequence: Synthetic oligonucleotide
auggcuuagcuauguggcg

SEQ ID NO: 1182907 - RNA, 19 nt, Artificial Sequence
  Description of Artificial Sequence: Synthetic oligonucleotide
ugaguguacggcagcuucc

SEQ ID NO: 1182908 - RNA, 19 nt, Artificial Sequence
  Description of Artificial Sequence: Synthetic oligonucleotide
uggcuuagcuauguggcgg

SEQ ID NO: 1182909 - RNA, 19 nt, Artificial Sequence
  Description of Artificial Sequence: Synthetic oligonucleotide
caucauagcgguacaucag

SEQ ID NO: 1182910 - RNA, 19 nt, Artificial Sequence
  Description of Artificial Sequence: Synthetic oligonucleotide
ugcaauaccuagauaucua

SEQ ID NO: 1182911 - RNA, 19 nt, Artificial Sequence
  Description of Artificial Sequence: Synthetic oligonucleotide
caauaccuagauaucuaac

SEQ ID NO: 1182912 - RNA, 19 nt, Artificial Sequence
  Description of Artificial Sequence: Synthetic oligonucleotide
gugaccauggguuucggca

SEQ ID NO: 1182913 - RNA, 19 nt, Artificial Sequence
  Description of Artificial Sequence: Synthetic oligonucleotide
auucccaacaaguuaccaa

SEQ ID NO: 1182914 - RNA, 19 nt, Artificial Sequence
  Description of Artificial Sequence: Synthetic oligonucleotide
accgcucuuuuccuugagc

SEQ ID NO: 1182915 - RNA, 19 nt, Artificial Sequence
  Description of Artificial Sequence: Synthetic oligonucleotide
agugaccauggguuucggc

SEQ ID NO: 1182916 - RNA, 19 nt, Artificial Sequence
  Description of Artificial Sequence: Synthetic oligonucleotide
accuagauaucuaacguca

SEQ ID NO: 1182917 - RNA, 19 nt, Artificial Sequence
  Description of Artificial Sequence: Synthetic oligonucleotide
agucaauauauggaaggug

SEQ ID NO: 1182918 - RNA, 19 nt, Artificial Sequence
  Description of Artificial Sequence: Synthetic oligonucleotide
auaagugaccauggguuuc

SEQ ID NO: 1182919 - RNA, 19 nt, Artificial Sequence
  Description of Artificial Sequence: Synthetic oligonucleotide
acgucaaaacuucaacagu

SEQ ID NO: 1182920 - RNA, 19 nt, Artificial Sequence
  Description of Artificial Sequence: Synthetic oligonucleotide
agcuagugcaaagacagcu

SEQ ID NO: 1182921 - RNA, 19 nt, Artificial Sequence
  Description of Artificial Sequence: Synthetic oligonucleotide
uauaagugaccauggguuu

SEQ ID NO: 1182922 - RNA, 19 nt, Artificial Sequence
  Description of Artificial Sequence: Synthetic oligonucleotide
ucauagcgguacaucagcu

SEQ ID NO: 1182923 - RNA, 19 nt, Artificial Sequence
  Description of Artificial Sequence: Synthetic oligonucleotide
guguuauuggggaggacgg

SEQ ID NO: 1182924 - RNA, 19 nt, Artificial Sequence
  Description of Artificial Sequence: Synthetic oligonucleotide
agaucaugacauugcucuc

SEQ ID NO: 1182925 - RNA, 19 nt, Artificial Sequence
  Description of Artificial Sequence: Synthetic oligonucleotide
acagucgcucucuuacggg

SEQ ID NO: 1182926 - RNA, 19 nt, Artificial Sequence
  Description of Artificial Sequence: Synthetic oligonucleotide
cuuacuuagaugcacuugu

SEQ ID NO: 1182927 - RNA, 19 nt, Artificial Sequence
  Description of Artificial Sequence: Synthetic oligonucleotide
gggcgauacaaauuaauac

SEQ ID NO: 1182928 - RNA, 19 nt, Artificial Sequence
  Description of Artificial Sequence: Synthetic oligonucleotide
cacagucgcucucuuacgg

SEQ ID NO: 1182929 - RNA, 19 nt, Artificial Sequence
  Description of Artificial Sequence: Synthetic oligonucleotide
gacccuguguuauugggga

SEQ ID NO: 1182930 - RNA, 19 nt, Artificial Sequence
  Description of Artificial Sequence: Synthetic oligonucleotide
caacaguuuaaugcuaaac

SEQ ID NO: 1182931 - RNA, 19 nt, Artificial Sequence
  Description of Artificial Sequence: Synthetic oligonucleotide
uacggaagccguuccuggg

SEQ ID NO: 1182932 - RNA, 19 nt, Artificial Sequence
  Description of Artificial Sequence: Synthetic oligonucleotide
cucgagaccagcaugaggu

SEQ ID NO: 1182933 - RNA, 19 nt, Artificial Sequence
  Description of Artificial Sequence: Synthetic oligonucleotide
uggucucgagaccagcaug

SEQ ID NO: 1182934 - RNA, 19 nt, Artificial Sequence
  Description of Artificial Sequence: Synthetic oligonucleotide
ggaauagucacuccaggca

SEQ ID NO: 1182935 - RNA, 19 nt, Artificial Sequence
  Description of Artificial Sequence: Synthetic oligonucleotide
cagggaauagucacuccag

SEQ ID NO: 1182936 - RNA, 19 nt, Artificial Sequence
  Description of Artificial Sequence: Synthetic oligonucleotide
cuucaugaggauggcagcc

SEQ ID NO: 1182937 - RNA, 19 nt, Artificial Sequence
  Description of Artificial Sequence: Synthetic oligonucleotide
gcccucaagguuuaaacag

SEQ ID NO: 1182938 - RNA, 19 nt, Artificial Sequence
  Description of Artificial Sequence: Synthetic oligonucleotide
gcgauacaaauuaauacag

SEQ ID NO: 1182939 - RNA, 19 nt, Artificial Sequence
  Description of Artificial Sequence: Synthetic oligonucleotide
augcuaaacaaaaucaguu

SEQ ID NO: 1182940 - RNA, 19 nt, Artificial Sequence
  Description of Artificial Sequence: Synthetic oligonucleotide
guauggaccacaucuucca

SEQ ID NO: 1182941 - RNA, 19 nt, Artificial Sequence
  Description of Artificial Sequence: Synthetic oligonucleotide
cagucgcucucuuacgggg

SEQ ID NO: 1182942 - RNA, 19 nt, Artificial Sequence
  Description of Artificial Sequence: Synthetic oligonucleotide
auaucugguugaccaaacu

SEQ ID NO: 1182943 - RNA, 19 nt, Artificial Sequence
  Description of Artificial Sequence: Synthetic oligonucleotide
ugugugccccucuaauggc

SEQ ID NO: 1182944 - RNA, 19 nt, Artificial Sequence
  Description of Artificial Sequence: Synthetic oligonucleotide
ccuugagcgaacaaucgcc

SEQ ID NO: 1182945 - RNA, 19 nt, Artificial Sequence
  Description of Artificial Sequence: Synthetic oligonucleotide
acaacaaacugcccgcuuu

SEQ ID NO: 1182946 - RNA, 19 nt, Artificial Sequence
  Description of Artificial Sequence: Synthetic oligonucleotide
gauggacccuguguuauug

SEQ ID NO: 1182947 - RNA, 19 nt, Artificial Sequence
  Description of Artificial Sequence: Synthetic oligonucleotide
uggggagaucaugacauug

SEQ ID NO: 1182948 - RNA, 19 nt, Artificial Sequence
  Description of Artificial Sequence: Synthetic oligonucleotide
guuuaaacagugaguguac

SEQ ID NO: 1182949 - RNA, 19 nt, Artificial Sequence
  Description of Artificial Sequence: Synthetic oligonucleotide
gggaguaacgccauggaug

SEQ ID NO: 1182950 - RNA, 19 nt, Artificial Sequence
  Description of Artificial Sequence: Synthetic oligonucleotide
agcaaagugcacugucucu

SEQ ID NO: 1182951 - RNA, 19 nt, Artificial Sequence
  Description of Artificial Sequence: Synthetic oligonucleotide
agcccucaagguuuaaaca

SEQ ID NO: 1182952 - RNA, 19 nt, Artificial Sequence
  Description of Artificial Sequence: Synthetic oligonucleotide
cugguagagcaacuucucc

SEQ ID NO: 1182953 - RNA, 19 nt, Artificial Sequence
  Description of Artificial Sequence: Synthetic oligonucleotide
gugagggcgauacaaauua

SEQ ID NO: 1182954 - RNA, 19 nt, Artificial Sequence
  Description of Artificial Sequence: Synthetic oligonucleotide
ugaccaaacugaugaucug

SEQ ID NO: 1182955 - RNA, 19 nt, Artificial Sequence
  Description of Artificial Sequence: Synthetic oligonucleotide
ggaguaacgccauggauga

SEQ ID NO: 1182956 - RNA, 19 nt, Artificial Sequence
  Description of Artificial Sequence: Synthetic oligonucleotide
gagcgaacaaucgccgccg

SEQ ID NO: 1182957 - RNA, 19 nt, Artificial Sequence
  Description of Artificial Sequence: Synthetic oligonucleotide
uugagcgaacaaucgccgc

SEQ ID NO: 1182958 - RNA, 19 nt, Artificial Sequence
  Description of Artificial Sequence: Synthetic oligonucleotide
gggaauagucacuccaggc

SEQ ID NO: 1182959 - RNA, 19 nt, Artificial Sequence
  Description of Artificial Sequence: Synthetic oligonucleotide
gugaacugccaaaacauga

SEQ ID NO: 1182960 - RNA, 19 nt, Artificial Sequence
  Description of Artificial Sequence: Synthetic oligonucleotide
agguuuaaacagugagugu

SEQ ID NO: 1182961 - RNA, 19 nt, Artificial Sequence
  Description of Artificial Sequence: Synthetic oligonucleotide
ccuccaguacucuugcucg

SEQ ID NO: 1182962 - RNA, 19 nt, Artificial Sequence
  Description of Artificial Sequence: Synthetic oligonucleotide
ggugagguuccauccaugc

SEQ ID NO: 1182963 - RNA, 19 nt, Artificial Sequence
  Description of Artificial Sequence: Synthetic oligonucleotide
ggugacgcaggauggaccc

SEQ ID NO: 1182964 - RNA, 19 nt, Artificial Sequence
  Description of Artificial Sequence: Synthetic oligonucleotide
guauccuacagcaaguacu

SEQ ID NO: 1182965 - RNA, 19 nt, Artificial Sequence
  Description of Artificial Sequence: Synthetic oligonucleotide
ugggaguaacgccauggau

SEQ ID NO: 1182966 - RNA, 19 nt, Artificial Sequence
  Description of Artificial Sequence: Synthetic oligonucleotide
gguuuaaacagugagugua

SEQ ID NO: 1182967 - RNA, 19 nt, Artificial Sequence
  Description of Artificial Sequence: Synthetic oligonucleotide
uagaaaagaccaugccaau

SEQ ID NO: 1182968 - RNA, 19 nt, Artificial Sequence
  Description of Artificial Sequence: Synthetic oligonucleotide
cuuucccgcagugaacugc

SEQ ID NO: 1182969 - RNA, 19 nt, Artificial Sequence
  Description of Artificial Sequence: Synthetic oligonucleotide
uuuuggucucgagaccagc

SEQ ID NO: 1182970 - RNA, 19 nt, Artificial Sequence
  Description of Artificial Sequence: Synthetic oligonucleotide
gcagugaacugccaaaaca

SEQ ID NO: 1182971 - RNA, 19 nt, Artificial Sequence
  Description of Artificial Sequence: Synthetic oligonucleotide
aggugacgcaggauggacc

SEQ ID NO: 1182972 - RNA, 19 nt, Artificial Sequence
  Description of Artificial Sequence: Synthetic oligonucleotide
aacaaucgccgccggccug

SEQ ID NO: 1182973 - RNA, 19 nt, Artificial Sequence
  Description of Artificial Sequence: Synthetic oligonucleotide
gacccgggaaagcagacaa

SEQ ID NO: 1182974 - RNA, 19 nt, Artificial Sequence
  Description of Artificial Sequence: Synthetic oligonucleotide
cuugcuacggaagccguuc

SEQ ID NO: 1182975 - RNA, 19 nt, Artificial Sequence
  Description of Artificial Sequence: Synthetic oligonucleotide
uagcgguacaucagcuucu

SEQ ID NO: 1182976 - RNA, 19 nt, Artificial Sequence
  Description of Artificial Sequence: Synthetic oligonucleotide
agcuauguggcggcgcuuc

SEQ ID NO: 1182977 - RNA, 19 nt, Artificial Sequence
  Description of Artificial Sequence: Synthetic oligonucleotide
ccgcucuuuuccuugagcg

SEQ ID NO: 1182978 - RNA, 19 nt, Artificial Sequence
  Description of Artificial Sequence: Synthetic oligonucleotide
agaugcacuuguggaaguc

SEQ ID NO: 1182979 - RNA, 19 nt, Artificial Sequence
  Description of Artificial Sequence: Synthetic oligonucleotide
uggcgggacguccacaguc

SEQ ID NO: 1182980 - RNA, 19 nt, Artificial Sequence
  Description of Artificial Sequence: Synthetic oligonucleotide
uuuugucagccgugagggc

SEQ ID NO: 1182981 - RNA, 19 nt, Artificial Sequence
  Description of Artificial Sequence: Synthetic oligonucleotide
uuggucucgagaccagcau

SEQ ID NO: 1182982 - RNA, 19 nt, Artificial Sequence
  Description of Artificial Sequence: Synthetic oligonucleotide
agucucgaagcccaugcuu

SEQ ID NO: 1182983 - RNA, 19 nt, Artificial Sequence
  Description of Artificial Sequence: Synthetic oligonucleotide
gguagcaaagugcacuguc

SEQ ID NO: 1182984 - RNA, 19 nt, Artificial Sequence
  Description of Artificial Sequence: Synthetic oligonucleotide
ccacauaucugguugacca

SEQ ID NO: 1182985 - RNA, 19 nt, Artificial Sequence
  Description of Artificial Sequence: Synthetic oligonucleotide
uugcuacggaagccguucc

SEQ ID NO: 1182986 - RNA, 19 nt, Artificial Sequence
  Description of Artificial Sequence: Synthetic oligonucleotide
cuagauaucuaacgucaaa

SEQ ID NO: 1182987 - RNA, 19 nt, Artificial Sequence
  Description of Artificial Sequence: Synthetic oligonucleotide
ugagggcgauacaaauuaa

SEQ ID NO: 1182988 - RNA, 19 nt, Artificial Sequence
  Description of Artificial Sequence: Synthetic oligonucleotide
gguauggaccacaucuucc

SEQ ID NO: 1182989 - RNA, 19 nt, Artificial Sequence
  Description of Artificial Sequence: Synthetic oligonucleotide
cuuagcuauguggcggcgc

SEQ ID NO: 1182990 - RNA, 19 nt, Artificial Sequence
  Description of Artificial Sequence: Synthetic oligonucleotide
agaaaagaccaugccaaua

SEQ ID NO: 1182991 - RNA, 19 nt, Artificial Sequence
  Description of Artificial Sequence: Synthetic oligonucleotide
uggguuucggcaucuucau

SEQ ID NO: 1182992 - RNA, 19 nt, Artificial Sequence
  Description of Artificial Sequence: Synthetic oligonucleotide
guguuaguguccacuuucc

SEQ ID NO: 1182993 - RNA, 19 nt, Artificial Sequence
  Description of Artificial Sequence: Synthetic oligonucleotide
guagagcaacuucuccaug

SEQ ID NO: 1182994 - RNA, 19 nt, Artificial Sequence
  Description of Artificial Sequence: Synthetic oligonucleotide
ugucaguguguuugccaga

SEQ ID NO: 1182995 - RNA, 19 nt, Artificial Sequence
  Description of Artificial Sequence: Synthetic oligonucleotide
ccaaggugacgcaggaugg

SEQ ID NO: 1182996 - RNA, 19 nt, Artificial Sequence
  Description of Artificial Sequence: Synthetic oligonucleotide
uccuguggaccuugauccc

SEQ ID NO: 1182997 - RNA, 19 nt, Artificial Sequence
  Description of Artificial Sequence: Synthetic oligonucleotide
cauggguuucggcaucuuc

SEQ ID NO: 1182998 - RNA, 19 nt, Artificial Sequence
  Description of Artificial Sequence: Synthetic oligonucleotide
uacuccaaacuagaauaua

SEQ ID NO: 1182999 - RNA, 19 nt, Artificial Sequence
  Description of Artificial Sequence: Synthetic oligonucleotide
cuugcaaaaguuaguuagu

SEQ ID NO: 1183000 - RNA, 19 nt, Artificial Sequence
  Description of Artificial Sequence: Synthetic oligonucleotide
agccguuccugggaguaac

SEQ ID NO: 1183001 - RNA, 19 nt, Artificial Sequence
  Description of Artificial Sequence: Synthetic oligonucleotide
uguuauuggggaggacggu

SEQ ID NO: 1183002 - RNA, 19 nt, Artificial Sequence
  Description of Artificial Sequence: Synthetic oligonucleotide
ccccucuuuacacagcacc

SEQ ID NO: 1183003 - RNA, 19 nt, Artificial Sequence
  Description of Artificial Sequence: Synthetic oligonucleotide
ggacggugagguuccaucc

SEQ ID NO: 1183004 - RNA, 19 nt, Artificial Sequence
  Description of Artificial Sequence: Synthetic oligonucleotide
agggcgauacaaauuaaua

SEQ ID NO: 1183005 - RNA, 19 nt, Artificial Sequence
  Description of Artificial Sequence: Synthetic oligonucleotide
agcgaacaaucgccgccgg

SEQ ID NO: 1183006 - RNA, 19 nt, Artificial Sequence
  Description of Artificial Sequence: Synthetic oligonucleotide
uaccgcucuuuuccuugag

SEQ ID NO: 1183007 - RNA, 19 nt, Artificial Sequence
  Description of Artificial Sequence: Synthetic oligonucleotide
aggacuuuugucagccgug

SEQ ID NO: 1183008 - RNA, 19 nt, Artificial Sequence
  Description of Artificial Sequence: Synthetic oligonucleotide
gcacuuguggaagucacug

SEQ ID NO: 1183009 - RNA, 19 nt, Artificial Sequence
  Description of Artificial Sequence: Synthetic oligonucleotide
ucccgcagugaacugccaa

SEQ ID NO: 1183010 - RNA, 19 nt, Artificial Sequence
  Description of Artificial Sequence: Synthetic oligonucleotide
caaguacuccaaacuagaa

SEQ ID NO: 1183011 - RNA, 19 nt, Artificial Sequence
  Description of Artificial Sequence: Synthetic oligonucleotide
gcaauaccuagauaucuaa

SEQ ID NO: 1183012 - RNA, 19 nt, Artificial Sequence
  Description of Artificial Sequence: Synthetic oligonucleotide
gguggucauucucugugug

SEQ ID NO: 1183013 - RNA, 19 nt, Artificial Sequence
  Description of Artificial Sequence: Synthetic oligonucleotide
ugagacgcuguagccacaa

SEQ ID NO: 1183014 - RNA, 19 nt, Artificial Sequence
  Description of Artificial Sequence: Synthetic oligonucleotide
ggggagaucaugacauugc

SEQ ID NO: 1183015 - RNA, 19 nt, Artificial Sequence
  Description of Artificial Sequence: Synthetic oligonucleotide
gaucuucccuuacuuagau

SEQ ID NO: 1183016 - RNA, 19 nt, Artificial Sequence
  Description of Artificial Sequence: Synthetic oligonucleotide
auuuuggucucgagaccag

SEQ ID NO: 1183017 - RNA, 19 nt, Artificial Sequence
  Description of Artificial Sequence: Synthetic oligonucleotide
aucgccgccggccuguuuu

SEQ ID NO: 1183018 - RNA, 19 nt, Artificial Sequence
  Description of Artificial Sequence: Synthetic oligonucleotide
aguguguuugccagacacu

SEQ ID NO: 1183019 - RNA, 19 nt, Artificial Sequence
  Description of Artificial Sequence: Synthetic oligonucleotide
guguacggcagcuuccaaa

SEQ ID NO: 1183020 - RNA, 19 nt, Artificial Sequence
  Description of Artificial Sequence: Synthetic oligonucleotide
acuuucccgcagugaacug

SEQ ID NO: 1183021 - RNA, 19 nt, Artificial Sequence
  Description of Artificial Sequence: Synthetic oligonucleotide
gcuugugcgaucugguaga

SEQ ID NO: 1183022 - RNA, 19 nt, Artificial Sequence
  Description of Artificial Sequence: Synthetic oligonucleotide
aaccugacugcaauaccua

SEQ ID NO: 1183023 - RNA, 19 nt, Artificial Sequence
  Description of Artificial Sequence: Synthetic oligonucleotide
ccugggaguaacgccaugg

SEQ ID NO: 1183024 - RNA, 19 nt, Artificial Sequence
  Description of Artificial Sequence: Synthetic oligonucleotide
ccaacaaguuaccaaacaa

SEQ ID NO: 1183025 - RNA, 19 nt, Artificial Sequence
  Description of Artificial Sequence: Synthetic oligonucleotide
cugacugcaauaccuagau

SEQ ID NO: 1183026 - RNA, 19 nt, Artificial Sequence
  Description of Artificial Sequence: Synthetic oligonucleotide
agcaggaaugcaauaccaa

SEQ ID NO: 1183027 - RNA, 19 nt, Artificial Sequence
  Description of Artificial Sequence: Synthetic oligonucleotide
gcaaguacuccaaacuaga

SEQ ID NO: 1183028 - RNA, 19 nt, Artificial Sequence
  Description of Artificial Sequence: Synthetic oligonucleotide
gaguguacggcagcuucca

SEQ ID NO: 1183029 - RNA, 19 nt, Artificial Sequence
  Description of Artificial Sequence: Synthetic oligonucleotide
guacggcagcuuccaaacc

SEQ ID NO: 1183030 - RNA, 19 nt, Artificial Sequence
  Description of Artificial Sequence: Synthetic oligonucleotide
ggcuuagcuauguggcggc

SEQ ID NO: 1183031 - RNA, 19 nt, Artificial Sequence
  Description of Artificial Sequence: Synthetic oligonucleotide
ugccacauaucugguugac

SEQ ID NO: 1183032 - RNA, 19 nt, Artificial Sequence
  Description of Artificial Sequence: Synthetic oligonucleotide
agacaacaaacugcccgcu

SEQ ID NO: 1183033 - RNA, 19 nt, Artificial Sequence
  Description of Artificial Sequence: Synthetic oligonucleotide
uaacgccauggaugagccc

SEQ ID NO: 1183034 - RNA, 19 nt, Artificial Sequence
  Description of Artificial Sequence: Synthetic oligonucleotide
gacgcuguagccacaacau

SEQ ID NO: 1183035 - RNA, 19 nt, Artificial Sequence
  Description of Artificial Sequence: Synthetic oligonucleotide
cugauuuccccacggggaa

SEQ ID NO: 1183036 - RNA, 19 nt, Artificial Sequence
  Description of Artificial Sequence: Synthetic oligonucleotide
agccgugagggcgauacaa

SEQ ID NO: 1183037 - RNA, 19 nt, Artificial Sequence
  Description of Artificial Sequence: Synthetic oligonucleotide
cuugugcgaucugguagag

SEQ ID NO: 1183038 - RNA, 19 nt, Artificial Sequence
  Description of Artificial Sequence: Synthetic oligonucleotide
ggguauggaccacaucuuc

SEQ ID NO: 1183039 - RNA, 19 nt, Artificial Sequence
  Description of Artificial Sequence: Synthetic oligonucleotide
aucuaacgucaaaacuuca

SEQ ID NO: 1183040 - RNA, 19 nt, Artificial Sequence
  Description of Artificial Sequence: Synthetic oligonucleotide
agcgguacaucagcuucug

SEQ ID NO: 1183041 - RNA, 19 nt, Artificial Sequence
  Description of Artificial Sequence: Synthetic oligonucleotide
gcucgaucucugcuggugc

SEQ ID NO: 1183042 - RNA, 19 nt, Artificial Sequence
  Description of Artificial Sequence: Synthetic oligonucleotide
cucgaucucugcuggugca

SEQ ID NO: 1183043 - RNA, 19 nt, Artificial Sequence
  Description of Artificial Sequence: Synthetic oligonucleotide
gugugccccucuaauggcc

SEQ ID NO: 1183044 - RNA, 19 nt, Artificial Sequence
  Description of Artificial Sequence: Synthetic oligonucleotide
uugugcgaucugguagagc

SEQ ID NO: 1183045 - RNA, 19 nt, Artificial Sequence
  Description of Artificial Sequence: Synthetic oligonucleotide
cugggaguaacgccaugga

SEQ ID NO: 1183046 - RNA, 19 nt, Artificial Sequence
  Description of Artificial Sequence: Synthetic oligonucleotide
ugaggacaccuuuguccuc

SEQ ID NO: 1183047 - RNA, 19 nt, Artificial Sequence
  Description of Artificial Sequence: Synthetic oligonucleotide
gaacaaucgccgccggccu

SEQ ID NO: 1183048 - RNA, 19 nt, Artificial Sequence
  Description of Artificial Sequence: Synthetic oligonucleotide
cgaacaaucgccgccggcc

SEQ ID NO: 1183049 - RNA, 19 nt, Artificial Sequence
  Description of Artificial Sequence: Synthetic oligonucleotide
ggucucgagaccagcauga

SEQ ID NO: 1183050 - RNA, 19 nt, Artificial Sequence
  Description of Artificial Sequence: Synthetic oligonucleotide
guuuugaguggggccuggc

SEQ ID NO: 1183051 - RNA, 19 nt, Artificial Sequence
  Description of Artificial Sequence: Synthetic oligonucleotide
gcuacggaagccguuccug

SEQ ID NO: 1183052 - RNA, 19 nt, Artificial Sequence
  Description of Artificial Sequence: Synthetic oligonucleotide
ggagaucaugacauugcuc

SEQ ID NO: 1183053 - RNA, 19 nt, Artificial Sequence
  Description of Artificial Sequence: Synthetic oligonucleotide
ccuuacuuagaugcacuug

SEQ ID NO: 1183054 - RNA, 19 nt, Artificial Sequence
  Description of Artificial Sequence: Synthetic oligonucleotide
acagcccucaagguuuaaa

SEQ ID NO: 1183055 - RNA, 19 nt, Artificial Sequence
  Description of Artificial Sequence: Synthetic oligonucleotide
ggcgggacguccacagucg

SEQ ID NO: 1183056 - RNA, 19 nt, Artificial Sequence
  Description of Artificial Sequence: Synthetic oligonucleotide
acgcuguagccacaacaua

SEQ ID NO: 1183057 - RNA, 19 nt, Artificial Sequence
  Description of Artificial Sequence: Synthetic oligonucleotide
gucucgagaccagcaugag

SEQ ID NO: 1183058 - RNA, 19 nt, Artificial Sequence
  Description of Artificial Sequence: Synthetic oligonucleotide
acccgggaaagcagacaac

SEQ ID NO: 1183059 - RNA, 19 nt, Artificial Sequence
  Description of Artificial Sequence: Synthetic oligonucleotide
gagggcgauacaaauuaau

SEQ ID NO: 1183060 - RNA, 19 nt, Artificial Sequence
  Description of Artificial Sequence: Synthetic oligonucleotide
guacucuugcucgaucucu

SEQ ID NO: 1183061 - RNA, 19 nt, Artificial Sequence
  Description of Artificial Sequence: Synthetic oligonucleotide
gagacgcuguagccacaac

SEQ ID NO: 1183062 - RNA, 19 nt, Artificial Sequence
  Description of Artificial Sequence: Synthetic oligonucleotide
gaguaacgccauggaugag

SEQ ID NO: 1183063 - RNA, 19 nt, Artificial Sequence
  Description of Artificial Sequence: Synthetic oligonucleotide
cccaacaaguuaccaaaca

SEQ ID NO: 1183064 - RNA, 19 nt, Artificial Sequence
  Description of Artificial Sequence: Synthetic oligonucleotide
cacuuucccgcagugaacu

SEQ ID NO: 1183065 - RNA, 19 nt, Artificial Sequence
  Description of Artificial Sequence: Synthetic oligonucleotide
aggguauggaccacaucuu

SEQ ID NO: 1183066 - RNA, 19 nt, Artificial Sequence
  Description of Artificial Sequence: Synthetic oligonucleotide
caauauauggaaggugauu

SEQ ID NO: 1183067 - RNA, 19 nt, Artificial Sequence
  Description of Artificial Sequence: Synthetic oligonucleotide
cuacagcaaguacuccaaa

SEQ ID NO: 1183068 - RNA, 19 nt, Artificial Sequence
  Description of Artificial Sequence: Synthetic oligonucleotide
agugaguguacggcagcuu

SEQ ID NO: 1183069 - RNA, 19 nt, Artificial Sequence
  Description of Artificial Sequence: Synthetic oligonucleotide
ggacuuuugucagccguga

SEQ ID NO: 1183070 - RNA, 19 nt, Artificial Sequence
  Description of Artificial Sequence: Synthetic oligonucleotide
gccacauaucugguugacc

SEQ ID NO: 1183071 - RNA, 19 nt, Artificial Sequence
  Description of Artificial Sequence: Synthetic oligonucleotide
agcccucgggguaccauug

SEQ ID NO: 1183072 - RNA, 19 nt, Artificial Sequence
  Description of Artificial Sequence: Synthetic oligonucleotide
ggguuucggcaucuucaug

SEQ ID NO: 1183073 - RNA, 19 nt, Artificial Sequence
  Description of Artificial Sequence: Synthetic oligonucleotide
gacaacaaacugcccgcuu

SEQ ID NO: 1183074 - RNA, 19 nt, Artificial Sequence
  Description of Artificial Sequence: Synthetic oligonucleotide
aagccguuccugggaguaa

SEQ ID NO: 1183075 - RNA, 19 nt, Artificial Sequence
  Description of Artificial Sequence: Synthetic oligonucleotide
ccgucggugcuccucgggg

SEQ ID NO: 1183076 - RNA, 19 nt, Artificial Sequence
  Description of Artificial Sequence: Synthetic oligonucleotide
gugcaaagacagcuuguau

SEQ ID NO: 1183077 - RNA, 19 nt, Artificial Sequence
  Description of Artificial Sequence: Synthetic oligonucleotide
gccggccuguuuugagugg

SEQ ID NO: 1183078 - RNA, 19 nt, Artificial Sequence
  Description of Artificial Sequence: Synthetic oligonucleotide
gcuuagcuauguggcggcg

SEQ ID NO: 1183079 - RNA, 19 nt, Artificial Sequence
  Description of Artificial Sequence: Synthetic oligonucleotide
cuuugcgcuucucuaggau

SEQ ID NO: 1183080 - RNA, 19 nt, Artificial Sequence
  Description of Artificial Sequence: Synthetic oligonucleotide
ccgcuuugcugcacagucc

SEQ ID NO: 1183081 - RNA, 19 nt, Artificial Sequence
  Description of Artificial Sequence: Synthetic oligonucleotide
cccgggaaagcagacaaca

SEQ ID NO: 1183082 - RNA, 19 nt, Artificial Sequence
  Description of Artificial Sequence: Synthetic oligonucleotide
ccuagauaucuaacgucaa

SEQ ID NO: 1183083 - RNA, 19 nt, Artificial Sequence
  Description of Artificial Sequence: Synthetic oligonucleotide
gcgaacaaucgccgccggc

SEQ ID NO: 1183084 - RNA, 19 nt, Artificial Sequence
  Description of Artificial Sequence: Synthetic oligonucleotide
ccggccuguuuugaguggg

SEQ ID NO: 1183085 - RNA, 19 nt, Artificial Sequence
  Description of Artificial Sequence: Synthetic oligonucleotide
cuguggaccuugauccccu

SEQ ID NO: 1183086 - RNA, 19 nt, Artificial Sequence
  Description of Artificial Sequence: Synthetic oligonucleotide
gggaagccgcugccguggg

SEQ ID NO: 1183087 - RNA, 19 nt, Artificial Sequence
  Description of Artificial Sequence: Synthetic oligonucleotide
gggcucaaagcggggcagg

SEQ ID NO: 1183088 - RNA, 19 nt, Artificial Sequence
  Description of Artificial Sequence: Synthetic oligonucleotide
aaucgccgccggccuguuu

SEQ ID NO: 1183089 - RNA, 19 nt, Artificial Sequence
  Description of Artificial Sequence: Synthetic oligonucleotide
uggcagucucgaagcccau

SEQ ID NO: 1183090 - RNA, 19 nt, Artificial Sequence
  Description of Artificial Sequence: Synthetic oligonucleotide
gccgucggugcuccucggg

SEQ ID NO: 1183091 - RNA, 19 nt, Artificial Sequence
  Description of Artificial Sequence: Synthetic oligonucleotide
ggcccuuugcgcuucucua

SEQ ID NO: 1183092 - RNA, 19 nt, Artificial Sequence
  Description of Artificial Sequence: Synthetic oligonucleotide
ccaugccaauauuuagcca

SEQ ID NO: 1183093 - RNA, 19 nt, Artificial Sequence
  Description of Artificial Sequence: Synthetic oligonucleotide
gcccucgggguaccauugg

SEQ ID NO: 1183094 - RNA, 19 nt, Artificial Sequence
  Description of Artificial Sequence: Synthetic oligonucleotide
cugagacgcuguagccaca

SEQ ID NO: 1183095 - RNA, 19 nt, Artificial Sequence
  Description of Artificial Sequence: Synthetic oligonucleotide
ccuguuuugaguggggccu

SEQ ID NO: 1183096 - RNA, 19 nt, Artificial Sequence
  Description of Artificial Sequence: Synthetic oligonucleotide
ccgagauggcgggacgucc

SEQ ID NO: 1183097 - RNA, 19 nt, Artificial Sequence
  Description of Artificial Sequence: Synthetic oligonucleotide
auacagcccucaagguuua

SEQ ID NO: 1183098 - RNA, 19 nt, Artificial Sequence
  Description of Artificial Sequence: Synthetic oligonucleotide
gcgguacaucagcuucugc

SEQ ID NO: 1183099 - RNA, 19 nt, Artificial Sequence
  Description of Artificial Sequence: Synthetic oligonucleotide
guggaccuugauccccucu

SEQ ID NO: 1183100 - RNA, 19 nt, Artificial Sequence
  Description of Artificial Sequence: Synthetic oligonucleotide
cgggguaccauuggccugc

SEQ ID NO: 1183101 - RNA, 19 nt, Artificial Sequence
  Description of Artificial Sequence: Synthetic oligonucleotide
gcgggacguccacagucgc

SEQ ID NO: 1183102 - RNA, 19 nt, Artificial Sequence
  Description of Artificial Sequence: Synthetic oligonucleotide
ugccccucuaauggcccuu

SEQ ID NO: 1183103 - RNA, 19 nt, Artificial Sequence
  Description of Artificial Sequence: Synthetic oligonucleotide
uagcuauguggcggcgcuu

SEQ ID NO: 1183104 - RNA, 19 nt, Artificial Sequence
  Description of Artificial Sequence: Synthetic oligonucleotide
gcuauguggcggcgcuuca

SEQ ID NO: 1183105 - RNA, 19 nt, Artificial Sequence
  Description of Artificial Sequence: Synthetic oligonucleotide
cccgcagugaacugccaaa

SEQ ID NO: 1183106 - RNA, 19 nt, Artificial Sequence
  Description of Artificial Sequence: Synthetic oligonucleotide
guccacugggugguagcaa

SEQ ID NO: 1183107 - RNA, 19 nt, Artificial Sequence
  Description of Artificial Sequence: Synthetic oligonucleotide
cgccggccuguuuugagug

SEQ ID NO: 1183108 - RNA, 19 nt, Artificial Sequence
  Description of Artificial Sequence: Synthetic oligonucleotide
ugucagccgugagggcgau

SEQ ID NO: 1183109 - RNA, 19 nt, Artificial Sequence
  Description of Artificial Sequence: Synthetic oligonucleotide
gugcgaucugguagagcaa

SEQ ID NO: 1183110 - RNA, 19 nt, Artificial Sequence
  Description of Artificial Sequence: Synthetic oligonucleotide
gcuagugcaaagacagcuu

SEQ ID NO: 1183111 - RNA, 19 nt, Artificial Sequence
  Description of Artificial Sequence: Synthetic oligonucleotide
ggguaccauuggccugcag

SEQ ID NO: 1183112 - RNA, 19 nt, Artificial Sequence
  Description of Artificial Sequence: Synthetic oligonucleotide
cggugagguuccauccaug

SEQ ID NO: 1183113 - RNA, 19 nt, Artificial Sequence
  Description of Artificial Sequence: Synthetic oligonucleotide
ccauggaugagcccauuuu

SEQ ID NO: 1183114 - RNA, 19 nt, Artificial Sequence
  Description of Artificial Sequence: Synthetic oligonucleotide
gccgugagggcgauacaaa

SEQ ID NO: 1183115 - RNA, 19 nt, Artificial Sequence
  Description of Artificial Sequence: Synthetic oligonucleotide
cuauguggcggcgcuucau

SEQ ID NO: 1183116 - RNA, 19 nt, Artificial Sequence
  Description of Artificial Sequence: Synthetic oligonucleotide
cagccgugagggcgauaca

SEQ ID NO: 1183117 - RNA, 19 nt, Artificial Sequence
  Description of Artificial Sequence: Synthetic oligonucleotide
gccgagauggcgggacguc

SEQ ID NO: 1183118 - RNA, 19 nt, Artificial Sequence
  Description of Artificial Sequence: Synthetic oligonucleotide
cuggggagaucaugacauu

SEQ ID NO: 1183119 - RNA, 19 nt, Artificial Sequence
  Description of Artificial Sequence: Synthetic oligonucleotide
ggguguuaguguccacuuu

SEQ ID NO: 1183120 - RNA, 19 nt, Artificial Sequence
  Description of Artificial Sequence: Synthetic oligonucleotide
ccgugagggcgauacaaau

SEQ ID NO: 1183121 - RNA, 19 nt, Artificial Sequence
  Description of Artificial Sequence: Synthetic oligonucleotide
ccgcagugaacugccaaaa

SEQ ID NO: 1183122 - RNA, 19 nt, Artificial Sequence
  Description of Artificial Sequence: Synthetic oligonucleotide
ggauggacccuguguuauu

SEQ ID NO: 1183123 - RNA, 19 nt, Artificial Sequence
  Description of Artificial Sequence: Synthetic oligonucleotide
cgugagggcgauacaaauu

SEQ ID NO: 1183124 - RNA, 19 nt, Artificial Sequence
  Description of Artificial Sequence: Synthetic oligonucleotide
ggaagccgcugccgugggu

SEQ ID NO: 1183125 - RNA, 19 nt, Artificial Sequence
  Description of Artificial Sequence: Synthetic oligonucleotide
caccaaggugacgcaggau

SEQ ID NO: 1183126 - RNA, 19 nt, Artificial Sequence
  Description of Artificial Sequence: Synthetic oligonucleotide
caaucgccgccggccuguu

SEQ ID NO: 1183127 - RNA, 19 nt, Artificial Sequence
  Description of Artificial Sequence: Synthetic oligonucleotide
cgccgccggccuguuuuga

SEQ ID NO: 1183128 - RNA, 19 nt, Artificial Sequence
  Description of Artificial Sequence: Synthetic oligonucleotide
aaaacacgaauccaaagcc

SEQ ID NO: 1183129 - RNA, 19 nt, Artificial Sequence
  Description of Artificial Sequence: Synthetic oligonucleotide
auauauauauaugaaaggg

SEQ ID NO: 1183130 - RNA, 19 nt, Artificial Sequence
  Description of Artificial Sequence: Synthetic oligonucleotide
aauaacucaaacaaugcag

SEQ ID NO: 1183131 - RNA, 19 nt, Artificial Sequence
  Description of Artificial Sequence: Synthetic oligonucleotide
ucaaucacaaaucaucuca

SEQ ID NO: 1183132 - RNA, 19 nt, Artificial Sequence
  Description of Artificial Sequence: Synthetic oligonucleotide
ucacaaaucaucucagugg

SEQ ID NO: 1183133 - RNA, 19 nt, Artificial Sequence
  Description of Artificial Sequence: Synthetic oligonucleotide
gaaaacacgaauccaaagc

SEQ ID NO: 1183134 - RNA, 19 nt, Artificial Sequence
  Description of Artificial Sequence: Synthetic oligonucleotide
aaauaacucaaacaaugca

SEQ ID NO: 1183135 - RNA, 19 nt, Artificial Sequence
  Description of Artificial Sequence: Synthetic oligonucleotide
uguuaggucguucaguugc

SEQ ID NO: 1183136 - RNA, 19 nt, Artificial Sequence
  Description of Artificial Sequence: Synthetic oligonucleotide
acaucuauaccgcucuucc

SEQ ID NO: 1183137 - RNA, 19 nt, Artificial Sequence
  Description of Artificial Sequence: Synthetic oligonucleotide
uauauauaugaaaggggcc

SEQ ID NO: 1183138 - RNA, 19 nt, Artificial Sequence
  Description of Artificial Sequence: Synthetic oligonucleotide
ugcagcaaccuucaggccg

SEQ ID NO: 1183139 - RNA, 19 nt, Artificial Sequence
  Description of Artificial Sequence: Synthetic oligonucleotide
gaaagauaggaacaaauaa

SEQ ID NO: 1183140 - RNA, 19 nt, Artificial Sequence
  Description of Artificial Sequence: Synthetic oligonucleotide
aaggaguagucccucuggc

SEQ ID NO: 1183141 - RNA, 19 nt, Artificial Sequence
  Description of Artificial Sequence: Synthetic oligonucleotide
uacgacauccuccagucag

SEQ ID NO: 1183142 - RNA, 19 nt, Artificial Sequence
  Description of Artificial Sequence: Synthetic oligonucleotide
caagcuucaaguauucagc

SEQ ID NO: 1183143 - RNA, 19 nt, Artificial Sequence
  Description of Artificial Sequence: Synthetic oligonucleotide
uccuuagggaaauugagac

SEQ ID NO: 1183144 - RNA, 19 nt, Artificial Sequence
  Description of Artificial Sequence: Synthetic oligonucleotide
cuuagggaaauugagacug

SEQ ID NO: 1183145 - RNA, 19 nt, Artificial Sequence
  Description of Artificial Sequence: Synthetic oligonucleotide
aucuuaguggucuucauga

SEQ ID NO: 1183146 - RNA, 19 nt, Artificial Sequence
  Description of Artificial Sequence: Synthetic oligonucleotide
uguaaggucugcauuauua

SEQ ID NO: 1183147 - RNA, 19 nt, Artificial Sequence
  Description of Artificial Sequence: Synthetic oligonucleotide
uaugaaaggggccaugauc

SEQ ID NO: 1183148 - RNA, 19 nt, Artificial Sequence
  Description of Artificial Sequence: Synthetic oligonucleotide
uaaggaguagucccucugg

SEQ ID NO: 1183149 - RNA, 19 nt, Artificial Sequence
  Description of Artificial Sequence: Synthetic oligonucleotide
uagucguucacaucuauac

SEQ ID NO: 1183150 - RNA, 19 nt, Artificial Sequence
  Description of Artificial Sequence: Synthetic oligonucleotide
aaagccgugccucacccag

SEQ ID NO: 1183151 - RNA, 19 nt, Artificial Sequence
  Description of Artificial Sequence: Synthetic oligonucleotide
aacguugucgucucgggcu

SEQ ID NO: 1183152 - RNA, 19 nt, Artificial Sequence
  Description of Artificial Sequence: Synthetic oligonucleotide
agcuuuugugcgcugaggg

SEQ ID NO: 1183153 - RNA, 19 nt, Artificial Sequence
  Description of Artificial Sequence: Synthetic oligonucleotide
ugcauuauuaaggaguagu

SEQ ID NO: 1183154 - RNA, 19 nt, Artificial Sequence
  Description of Artificial Sequence: Synthetic oligonucleotide
uuugaugcgagcagccugc

SEQ ID NO: 1183155 - RNA, 19 nt, Artificial Sequence
  Description of Artificial Sequence: Synthetic oligonucleotide
agaaaacacgaauccaaag

SEQ ID NO: 1183156 - RNA, 19 nt, Artificial Sequence
  Description of Artificial Sequence: Synthetic oligonucleotide
uaaugcucaagcuucuucu

SEQ ID NO: 1183157 - RNA, 19 nt, Artificial Sequence
  Description of Artificial Sequence: Synthetic oligonucleotide
aaacacgaauccaaagccg

SEQ ID NO: 1183158 - RNA, 19 nt, Artificial Sequence
  Description of Artificial Sequence: Synthetic oligonucleotide
auauauaugaaaggggcca

SEQ ID NO: 1183159 - RNA, 19 nt, Artificial Sequence
  Description of Artificial Sequence: Synthetic oligonucleotide
aucuauaccgcucuuccug

SEQ ID NO: 1183160 - RNA, 19 nt, Artificial Sequence
  Description of Artificial Sequence: Synthetic oligonucleotide
uuauuaaggaguagucccu

SEQ ID NO: 1183161 - RNA, 19 nt, Artificial Sequence
  Description of Artificial Sequence: Synthetic oligonucleotide
uguuugugcaaucuugauc

SEQ ID NO: 1183162 - RNA, 19 nt, Artificial Sequence
  Description of Artificial Sequence: Synthetic oligonucleotide
ggagaugcgggucugacgg

SEQ ID NO: 1183163 - RNA, 19 nt, Artificial Sequence
  Description of Artificial Sequence: Synthetic oligonucleotide
uaaggguguggucuagagg

SEQ ID NO: 1183164 - RNA, 19 nt, Artificial Sequence
  Description of Artificial Sequence: Synthetic oligonucleotide
cuauauccagaccaucucc

SEQ ID NO: 1183165 - RNA, 19 nt, Artificial Sequence
  Description of Artificial Sequence: Synthetic oligonucleotide
ucugcauuauuaaggagua

SEQ ID NO: 1183166 - RNA, 19 nt, Artificial Sequence
  Description of Artificial Sequence: Synthetic oligonucleotide
cuuaguggucuucaugacc

SEQ ID NO: 1183167 - RNA, 19 nt, Artificial Sequence
  Description of Artificial Sequence: Synthetic oligonucleotide
uuaaggaguagucccucug

SEQ ID NO: 1183168 - RNA, 19 nt, Artificial Sequence
  Description of Artificial Sequence: Synthetic oligonucleotide
ucucaugugagcacagccu

SEQ ID NO: 1183169 - RNA, 19 nt, Artificial Sequence
  Description of Artificial Sequence: Synthetic oligonucleotide
ugugaugugaugagcccug

SEQ ID NO: 1183170 - RNA, 19 nt, Artificial Sequence
  Description of Artificial Sequence: Synthetic oligonucleotide
acgaauccaaagccgugcc

SEQ ID NO: 1183171 - RNA, 19 nt, Artificial Sequence
  Description of Artificial Sequence: Synthetic oligonucleotide
uuagggaaauugagacugg

SEQ ID NO: 1183172 - RNA, 19 nt, Artificial Sequence
  Description of Artificial Sequence: Synthetic oligonucleotide
ggauacauggucuggagug

SEQ ID NO: 1183173 - RNA, 19 nt, Artificial Sequence
  Description of Artificial Sequence: Synthetic oligonucleotide
ugguguuaaacaguagcag

SEQ ID NO: 1183174 - RNA, 19 nt, Artificial Sequence
  Description of Artificial Sequence: Synthetic oligonucleotide
guguuaaacaguagcagag

SEQ ID NO: 1183175 - RNA, 19 nt, Artificial Sequence
  Description of Artificial Sequence: Synthetic oligonucleotide
uucugugagcuuuaggauc

SEQ ID NO: 1183176 - RNA, 19 nt, Artificial Sequence
  Description of Artificial Sequence: Synthetic oligonucleotide
uauaugaaaggggccauga

SEQ ID NO: 1183177 - RNA, 19 nt, Artificial Sequence
  Description of Artificial Sequence: Synthetic oligonucleotide
uuccuguacucucauguga

SEQ ID NO: 1183178 - RNA, 19 nt, Artificial Sequence
  Description of Artificial Sequence: Synthetic oligonucleotide
ucuguuaggucguucaguu

SEQ ID NO: 1183179 - RNA, 19 nt, Artificial Sequence
  Description of Artificial Sequence: Synthetic oligonucleotide
ucaggccgaacccagagau

SEQ ID NO: 1183180 - RNA, 19 nt, Artificial Sequence
  Description of Artificial Sequence: Synthetic oligonucleotide
ucaaguauucagcaacguu

SEQ ID NO: 1183181 - RNA, 19 nt, Artificial Sequence
  Description of Artificial Sequence: Synthetic oligonucleotide
ugaucccagaggccuaagg

SEQ ID NO: 1183182 - RNA, 19 nt, Artificial Sequence
  Description of Artificial Sequence: Synthetic oligonucleotide
ucacccagccuccagaaau

SEQ ID NO: 1183183 - RNA, 19 nt, Artificial Sequence
  Description of Artificial Sequence: Synthetic oligonucleotide
aacacgaauccaaagccgu

SEQ ID NO: 1183184 - RNA, 19 nt, Artificial Sequence
  Description of Artificial Sequence: Synthetic oligonucleotide
gcaagcuucaaguauucag

SEQ ID NO: 1183185 - RNA, 19 nt, Artificial Sequence
  Description of Artificial Sequence: Synthetic oligonucleotide
gcuaccaauggcugcaucg

SEQ ID NO: 1183186 - RNA, 19 nt, Artificial Sequence
  Description of Artificial Sequence: Synthetic oligonucleotide
uguuaaacaguagcagaga

SEQ ID NO: 1183187 - RNA, 19 nt, Artificial Sequence
  Description of Artificial Sequence: Synthetic oligonucleotide
aggccgaacccagagaugg

SEQ ID NO: 1183188 - RNA, 19 nt, Artificial Sequence
  Description of Artificial Sequence: Synthetic oligonucleotide
aggaguagucccucuggcg

SEQ ID NO: 1183189 - RNA, 19 nt, Artificial Sequence
  Description of Artificial Sequence: Synthetic oligonucleotide
aauccaaagccgugccuca

SEQ ID NO: 1183190 - RNA, 19 nt, Artificial Sequence
  Description of Artificial Sequence: Synthetic oligonucleotide
guuugaugcgagcagccug

SEQ ID NO: 1183191 - RNA, 19 nt, Artificial Sequence
  Description of Artificial Sequence: Synthetic oligonucleotide
gaaauugagacuggcuuuc

SEQ ID NO: 1183192 - RNA, 19 nt, Artificial Sequence
  Description of Artificial Sequence: Synthetic oligonucleotide
agaaaagucccacgugacu

SEQ ID NO: 1183193 - RNA, 19 nt, Artificial Sequence
  Description of Artificial Sequence: Synthetic oligonucleotide
gauuccguucuguuccacc

SEQ ID NO: 1183194 - RNA, 19 nt, Artificial Sequence
  Description of Artificial Sequence: Synthetic oligonucleotide
gaucacguugaugaacuug

SEQ ID NO: 1183195 - RNA, 19 nt, Artificial Sequence
  Description of Artificial Sequence: Synthetic oligonucleotide
auuccguucuguuccaccu

SEQ ID NO: 1183196 - RNA, 19 nt, Artificial Sequence
  Description of Artificial Sequence: Synthetic oligonucleotide
cuugcggugguaaugcuca

SEQ ID NO: 1183197 - RNA, 19 nt, Artificial Sequence
  Description of Artificial Sequence: Synthetic oligonucleotide
ucuauaccgcucuuccugu

SEQ ID NO: 1183198 - RNA, 19 nt, Artificial Sequence
  Description of Artificial Sequence: Synthetic oligonucleotide
aacucaacuugaucccaga

SEQ ID NO: 1183199 - RNA, 19 nt, Artificial Sequence
  Description of Artificial Sequence: Synthetic oligonucleotide
uuuugugcgcugagggucu

SEQ ID NO: 1183200 - RNA, 19 nt, Artificial Sequence
  Description of Artificial Sequence: Synthetic oligonucleotide
gcaaccuucaggccgaacc

SEQ ID NO: 1183201 - RNA, 19 nt, Artificial Sequence
  Description of Artificial Sequence: Synthetic oligonucleotide
cuucuagucguucacaucu

SEQ ID NO: 1183202 - RNA, 19 nt, Artificial Sequence
  Description of Artificial Sequence: Synthetic oligonucleotide
ugucgucucgggcuguuug

SEQ ID NO: 1183203 - RNA, 19 nt, Artificial Sequence
  Description of Artificial Sequence: Synthetic oligonucleotide
gguguuaaacaguagcaga

SEQ ID NO: 1183204 - RNA, 19 nt, Artificial Sequence
  Description of Artificial Sequence: Synthetic oligonucleotide
ccguucauaggacugauag

SEQ ID NO: 1183205 - RNA, 19 nt, Artificial Sequence
  Description of Artificial Sequence: Synthetic oligonucleotide
cuuuugugcgcugaggguc

SEQ ID NO: 1183206 - RNA, 19 nt, Artificial Sequence
  Description of Artificial Sequence: Synthetic oligonucleotide
ggaguagucccucuggcgc

SEQ ID NO: 1183207 - RNA, 19 nt, Artificial Sequence
  Description of Artificial Sequence: Synthetic oligonucleotide
gaugugaugagcccuggcu

SEQ ID NO: 1183208 - RNA, 19 nt, Artificial Sequence
  Description of Artificial Sequence: Synthetic oligonucleotide
gaaaagucccacgugacua

SEQ ID NO: 1183209 - RNA, 19 nt, Artificial Sequence
  Description of Artificial Sequence: Synthetic oligonucleotide
accuguuugaugcgagcag

SEQ ID NO: 1183210 - RNA, 19 nt, Artificial Sequence
  Description of Artificial Sequence: Synthetic oligonucleotide
aaauagaacucaacuugau

SEQ ID NO: 1183211 - RNA, 19 nt, Artificial Sequence
  Description of Artificial Sequence: Synthetic oligonucleotide
ucuuaguggucuucaugac

SEQ ID NO: 1183212 - RNA, 19 nt, Artificial Sequence
  Description of Artificial Sequence: Synthetic oligonucleotide
ccucccacuggcuauaucc

SEQ ID NO: 1183213 - RNA, 19 nt, Artificial Sequence
  Description of Artificial Sequence: Synthetic oligonucleotide
cacgugacuauaaauaacu

SEQ ID NO: 1183214 - RNA, 19 nt, Artificial Sequence
  Description of Artificial Sequence: Synthetic oligonucleotide
agaugcgggucugacgggc

SEQ ID NO: 1183215 - RNA, 19 nt, Artificial Sequence
  Description of Artificial Sequence: Synthetic oligonucleotide
caaugguggacacgaacac

SEQ ID NO: 1183216 - RNA, 19 nt, Artificial Sequence
  Description of Artificial Sequence: Synthetic oligonucleotide
aauugagacuggcuuucua

SEQ ID NO: 1183217 - RNA, 19 nt, Artificial Sequence
  Description of Artificial Sequence: Synthetic oligonucleotide
auaccgcucuuccuguaag

SEQ ID NO: 1183218 - RNA, 19 nt, Artificial Sequence
  Description of Artificial Sequence: Synthetic oligonucleotide
aggaucacguugaugaacu

SEQ ID NO: 1183219 - RNA, 19 nt, Artificial Sequence
  Description of Artificial Sequence: Synthetic oligonucleotide
uauaccgcucuuccuguaa

SEQ ID NO: 1183220 - RNA, 19 nt, Artificial Sequence
  Description of Artificial Sequence: Synthetic oligonucleotide
ugcucuucuagucguucac

SEQ ID NO: 1183221 - RNA, 19 nt, Artificial Sequence
  Description of Artificial Sequence: Synthetic oligonucleotide
uaccgcucuuccuguaagg

SEQ ID NO: 1183222 - RNA, 19 nt, Artificial Sequence
  Description of Artificial Sequence: Synthetic oligonucleotide
guaaggucugcauuauuaa

SEQ ID NO: 1183223 - RNA, 19 nt, Artificial Sequence
  Description of Artificial Sequence: Synthetic oligonucleotide
uccaaagccgugccucacc

SEQ ID NO: 1183224 - RNA, 19 nt, Artificial Sequence
  Description of Artificial Sequence: Synthetic oligonucleotide
cuucaggccgaacccagag

SEQ ID NO: 1183225 - RNA, 19 nt, Artificial Sequence
  Description of Artificial Sequence: Synthetic oligonucleotide
agcaacguugucgucucgg

SEQ ID NO: 1183226 - RNA, 19 nt, Artificial Sequence
  Description of Artificial Sequence: Synthetic oligonucleotide
ucuagucguucacaucuau

SEQ ID NO: 1183227 - RNA, 19 nt, Artificial Sequence
  Description of Artificial Sequence: Synthetic oligonucleotide
ugaugugaugagcccuggc

SEQ ID NO: 1183228 - RNA, 19 nt, Artificial Sequence
  Description of Artificial Sequence: Synthetic oligonucleotide
agggcggugcuggugauac

SEQ ID NO: 1183229 - RNA, 19 nt, Artificial Sequence
  Description of Artificial Sequence: Synthetic oligonucleotide
cacacccagugauaggcag

SEQ ID NO: 1183230 - RNA, 19 nt, Artificial Sequence
  Description of Artificial Sequence: Synthetic oligonucleotide
cacgaauccaaagccgugc

SEQ ID NO: 1183231 - RNA, 19 nt, Artificial Sequence
  Description of Artificial Sequence: Synthetic oligonucleotide
aggacugauaggcaauuuu

SEQ ID NO: 1183232 - RNA, 19 nt, Artificial Sequence
  Description of Artificial Sequence: Synthetic oligonucleotide
agaaacaccagaggauaca

SEQ ID NO: 1183233 - RNA, 19 nt, Artificial Sequence
  Description of Artificial Sequence: Synthetic oligonucleotide
uauuaaggaguagucccuc

SEQ ID NO: 1183234 - RNA, 19 nt, Artificial Sequence
  Description of Artificial Sequence: Synthetic oligonucleotide
aaacaccuguuugaugcga

SEQ ID NO: 1183235 - RNA, 19 nt, Artificial Sequence
  Description of Artificial Sequence: Synthetic oligonucleotide
ucuucuagucguucacauc

SEQ ID NO: 1183236 - RNA, 19 nt, Artificial Sequence
  Description of Artificial Sequence: Synthetic oligonucleotide
ucagcaacguugucgucuc

SEQ ID NO: 1183237 - RNA, 19 nt, Artificial Sequence
  Description of Artificial Sequence: Synthetic oligonucleotide
cagucagcccagaaaaguc

SEQ ID NO: 1183238 - RNA, 19 nt, Artificial Sequence
  Description of Artificial Sequence: Synthetic oligonucleotide
gucaugagugucuccacuc

SEQ ID NO: 1183239 - RNA, 19 nt, Artificial Sequence
  Description of Artificial Sequence: Synthetic oligonucleotide
gagcuugcggugguaaugc

SEQ ID NO: 1183240 - RNA, 19 nt, Artificial Sequence
  Description of Artificial Sequence: Synthetic oligonucleotide
agacccuggugcauguccc

SEQ ID NO: 1183241 - RNA, 19 nt, Artificial Sequence
  Description of Artificial Sequence: Synthetic oligonucleotide
caugugagcacagccuccc

SEQ ID NO: 1183242 - RNA, 19 nt, Artificial Sequence
  Description of Artificial Sequence: Synthetic oligonucleotide
aggaaacuguggccacccc

SEQ ID NO: 1183243 - RNA, 19 nt, Artificial Sequence
  Description of Artificial Sequence: Synthetic oligonucleotide
gauacggaggcgugucuuc

SEQ ID NO: 1183244 - RNA, 19 nt, Artificial Sequence
  Description of Artificial Sequence: Synthetic oligonucleotide
acgugacuauaaauaacuc

SEQ ID NO: 1183245 - RNA, 19 nt, Artificial Sequence
  Description of Artificial Sequence: Synthetic oligonucleotide
aaacaccagaggauacaug

SEQ ID NO: 1183246 - RNA, 19 nt, Artificial Sequence
  Description of Artificial Sequence: Synthetic oligonucleotide
aaauugagacuggcuuucu

SEQ ID NO: 1183247 - RNA, 19 nt, Artificial Sequence
  Description of Artificial Sequence: Synthetic oligonucleotide
uucaggccgaacccagaga

SEQ ID NO: 1183248 - RNA, 19 nt, Artificial Sequence
  Description of Artificial Sequence: Synthetic oligonucleotide
auauaugaaaggggccaug

SEQ ID NO: 1183249 - RNA, 19 nt, Artificial Sequence
  Description of Artificial Sequence: Synthetic oligonucleotide
auaugaaaggggccaugau

SEQ ID NO: 1183250 - RNA, 19 nt, Artificial Sequence
  Description of Artificial Sequence: Synthetic oligonucleotide
uggagcucuguuaggucgu

SEQ ID NO: 1183251 - RNA, 19 nt, Artificial Sequence
  Description of Artificial Sequence: Synthetic oligonucleotide
cuguucugugagcuuuagg

SEQ ID NO: 1183252 - RNA, 19 nt, Artificial Sequence
  Description of Artificial Sequence: Synthetic oligonucleotide
acgacauccuccagucagc

SEQ ID NO: 1183253 - RNA, 19 nt, Artificial Sequence
  Description of Artificial Sequence: Synthetic oligonucleotide
gucugacgggccuccaggg

SEQ ID NO: 1183254 - RNA, 19 nt, Artificial Sequence
  Description of Artificial Sequence: Synthetic oligonucleotide
aucugguguggcugcuugg

SEQ ID NO: 1183255 - RNA, 19 nt, Artificial Sequence
  Description of Artificial Sequence: Synthetic oligonucleotide
uguuugaugcgagcagccu

SEQ ID NO: 1183256 - RNA, 19 nt, Artificial Sequence
  Description of Artificial Sequence: Synthetic oligonucleotide
agagcccgcgcauuggcgu

SEQ ID NO: 1183257 - RNA, 19 nt, Artificial Sequence
  Description of Artificial Sequence: Synthetic oligonucleotide
caacguugucgucucgggc

SEQ ID NO: 1183258 - RNA, 19 nt, Artificial Sequence
  Description of Artificial Sequence: Synthetic oligonucleotide
uccccuguuccauuugguc

SEQ ID NO: 1183259 - RNA, 19 nt, Artificial Sequence
  Description of Artificial Sequence: Synthetic oligonucleotide
ugaaaggggccaugauccu

SEQ ID NO: 1183260 - RNA, 19 nt, Artificial Sequence
  Description of Artificial Sequence: Synthetic oligonucleotide
ggucugacgggccuccagg

SEQ ID NO: 1183261 - RNA, 19 nt, Artificial Sequence
  Description of Artificial Sequence: Synthetic oligonucleotide
ggcgugaugaaguuggcaa

SEQ ID NO: 1183262 - RNA, 19 nt, Artificial Sequence
  Description of Artificial Sequence: Synthetic oligonucleotide
gcggugguaaugcucaagc

SEQ ID NO: 1183263 - RNA, 19 nt, Artificial Sequence
  Description of Artificial Sequence: Synthetic oligonucleotide
agauaggaacaaauaaaua

SEQ ID NO: 1183264 - RNA, 19 nt, Artificial Sequence
  Description of Artificial Sequence: Synthetic oligonucleotide
auauccagaccaucuccau

SEQ ID NO: 1183265 - RNA, 19 nt, Artificial Sequence
  Description of Artificial Sequence: Synthetic oligonucleotide
acaaaucaucucagugggg

SEQ ID NO: 1183266 - RNA, 19 nt, Artificial Sequence
  Description of Artificial Sequence: Synthetic oligonucleotide
caucugguguggcugcuug

SEQ ID NO: 1183267 - RNA, 19 nt, Artificial Sequence
  Description of Artificial Sequence: Synthetic oligonucleotide
guuggcaaugguggacacg

SEQ ID NO: 1183268 - RNA, 19 nt, Artificial Sequence
  Description of Artificial Sequence: Synthetic oligonucleotide
aggcaauuuucucuuccau

SEQ ID NO: 1183269 - RNA, 19 nt, Artificial Sequence
  Description of Artificial Sequence: Synthetic oligonucleotide
gucagcccagaaaaguccc

SEQ ID NO: 1183270 - RNA, 19 nt, Artificial Sequence
  Description of Artificial Sequence: Synthetic oligonucleotide
cuggagugugaugugauga

SEQ ID NO: 1183271 - RNA, 19 nt, Artificial Sequence
  Description of Artificial Sequence: Synthetic oligonucleotide
gagaugcgggucugacggg

SEQ ID NO: 1183272 - RNA, 19 nt, Artificial Sequence
  Description of Artificial Sequence: Synthetic oligonucleotide
agcuaccaauggcugcauc

SEQ ID NO: 1183273 - RNA, 19 nt, Artificial Sequence
  Description of Artificial Sequence: Synthetic oligonucleotide
ggacugauaggcaauuuuc

SEQ ID NO: 1183274 - RNA, 19 nt, Artificial Sequence
  Description of Artificial Sequence: Synthetic oligonucleotide
augauccucccgcccaucu

SEQ ID NO: 1183275 - RNA, 19 nt, Artificial Sequence
  Description of Artificial Sequence: Synthetic oligonucleotide
uuccccuguuccauuuggu

SEQ ID NO: 1183276 - RNA, 19 nt, Artificial Sequence
  Description of Artificial Sequence: Synthetic oligonucleotide
gcaacguugucgucucggg

SEQ ID NO: 1183277 - RNA, 19 nt, Artificial Sequence
  Description of Artificial Sequence: Synthetic oligonucleotide
ggaaagauaggaacaaaua

SEQ ID NO: 1183278 - RNA, 19 nt, Artificial Sequence
  Description of Artificial Sequence: Synthetic oligonucleotide
uucuagucguucacaucua

SEQ ID NO: 1183279 - RNA, 19 nt, Artificial Sequence
  Description of Artificial Sequence: Synthetic oligonucleotide
ugcggugguaaugcucaag

SEQ ID NO: 1183280 - RNA, 19 nt, Artificial Sequence
  Description of Artificial Sequence: Synthetic oligonucleotide
aaacauccuugggcugccg

SEQ ID NO: 1183281 - RNA, 19 nt, Artificial Sequence
  Description of Artificial Sequence: Synthetic oligonucleotide
acguugucgucucgggcug

SEQ ID NO: 1183282 - RNA, 19 nt, Artificial Sequence
  Description of Artificial Sequence: Synthetic oligonucleotide
cuguuaggucguucaguug

SEQ ID NO: 1183283 - RNA, 19 nt, Artificial Sequence
  Description of Artificial Sequence: Synthetic oligonucleotide
cugguggagcucuguuagg

SEQ ID NO: 1183284 - RNA, 19 nt, Artificial Sequence
  Description of Artificial Sequence: Synthetic oligonucleotide
ugaugcgagcagccugcug

SEQ ID NO: 1183285 - RNA, 19 nt, Artificial Sequence
  Description of Artificial Sequence: Synthetic oligonucleotide
agggaaauugagacuggcu

SEQ ID NO: 1183286 - RNA, 19 nt, Artificial Sequence
  Description of Artificial Sequence: Synthetic oligonucleotide
cagagcccgcgcauuggcg

SEQ ID NO: 1183287 - RNA, 19 nt, Artificial Sequence
  Description of Artificial Sequence: Synthetic oligonucleotide
cuucaugaggggcgugaug

SEQ ID NO: 1183288 - RNA, 19 nt, Artificial Sequence
  Description of Artificial Sequence: Synthetic oligonucleotide
ggcugcuugggagagcggg

SEQ ID NO: 1183289 - RNA, 19 nt, Artificial Sequence
  Description of Artificial Sequence: Synthetic oligonucleotide
uuucuaucuuaguggucuu

SEQ ID NO: 1183290 - RNA, 19 nt, Artificial Sequence
  Description of Artificial Sequence: Synthetic oligonucleotide
aggucguucaguugcucuu

SEQ ID NO: 1183291 - RNA, 19 nt, Artificial Sequence
  Description of Artificial Sequence: Synthetic oligonucleotide
guaggugagcgagucccag

SEQ ID NO: 1183292 - RNA, 19 nt, Artificial Sequence
  Description of Artificial Sequence: Synthetic oligonucleotide
gcauuggcguucuccagcc

SEQ ID NO: 1183293 - RNA, 19 nt, Artificial Sequence
  Description of Artificial Sequence: Synthetic oligonucleotide
cgugacuauaaauaacuca

SEQ ID NO: 1183294 - RNA, 19 nt, Artificial Sequence
  Description of Artificial Sequence: Synthetic oligonucleotide
ggaaacuguggccacccca

SEQ ID NO: 1183295 - RNA, 19 nt, Artificial Sequence
  Description of Artificial Sequence: Synthetic oligonucleotide
ugauacggaggcgugucuu

SEQ ID NO: 1183296 - RNA, 19 nt, Artificial Sequence
  Description of Artificial Sequence: Synthetic oligonucleotide
ugacgggccuccagggccu

SEQ ID NO: 1183297 - RNA, 19 nt, Artificial Sequence
  Description of Artificial Sequence: Synthetic oligonucleotide
cuucaugaccuacgacauc

SEQ ID NO: 1183298 - RNA, 19 nt, Artificial Sequence
  Description of Artificial Sequence: Synthetic oligonucleotide
cagcuuuugugcgcugagg

SEQ ID NO: 1183299 - RNA, 19 nt, Artificial Sequence
  Description of Artificial Sequence: Synthetic oligonucleotide
cguucauaggacugauagg

SEQ ID NO: 1183300 - RNA, 19 nt, Artificial Sequence
  Description of Artificial Sequence: Synthetic oligonucleotide
ccacgugacuauaaauaac

SEQ ID NO: 1183301 - RNA, 19 nt, Artificial Sequence
  Description of Artificial Sequence: Synthetic oligonucleotide
ccaugggaggaaacugugg

SEQ ID NO: 1183302 - RNA, 19 nt, Artificial Sequence
  Description of Artificial Sequence: Synthetic oligonucleotide
ugugcgcugagggucuggu

SEQ ID NO: 1183303 - RNA, 19 nt, Artificial Sequence
  Description of Artificial Sequence: Synthetic oligonucleotide
ugaggggcgugaugaaguu

SEQ ID NO: 1183304 - RNA, 19 nt, Artificial Sequence
  Description of Artificial Sequence: Synthetic oligonucleotide
cuaccaauggcugcaucga

SEQ ID NO: 1183305 - RNA, 19 nt, Artificial Sequence
  Description of Artificial Sequence: Synthetic oligonucleotide
cuagucguucacaucuaua

SEQ ID NO: 1183306 - RNA, 19 nt, Artificial Sequence
  Description of Artificial Sequence: Synthetic oligonucleotide
cugcauuauuaaggaguag

SEQ ID NO: 1183307 - RNA, 19 nt, Artificial Sequence
  Description of Artificial Sequence: Synthetic oligonucleotide
gcugcaucgagccugcugu

SEQ ID NO: 1183308 - RNA, 19 nt, Artificial Sequence
  Description of Artificial Sequence: Synthetic oligonucleotide
aaagucccacgugacuaua

SEQ ID NO: 1183309 - RNA, 19 nt, Artificial Sequence
  Description of Artificial Sequence: Synthetic oligonucleotide
cacccagccuccagaaauc

SEQ ID NO: 1183310 - RNA, 19 nt, Artificial Sequence
  Description of Artificial Sequence: Synthetic oligonucleotide
cacuggcuauauccagacc

SEQ ID NO: 1183311 - RNA, 19 nt, Artificial Sequence
  Description of Artificial Sequence: Synthetic oligonucleotide
gaugcgggucugacgggcc

SEQ ID NO: 1183312 - RNA, 19 nt, Artificial Sequence
  Description of Artificial Sequence: Synthetic oligonucleotide
ccagaggauacauggucug

SEQ ID NO: 1183313 - RNA, 19 nt, Artificial Sequence
  Description of Artificial Sequence: Synthetic oligonucleotide
acacgaauccaaagccgug

SEQ ID NO: 1183314 - RNA, 19 nt, Artificial Sequence
  Description of Artificial Sequence: Synthetic oligonucleotide
ggagcuugcggugguaaug

SEQ ID NO: 1183315 - RNA, 19 nt, Artificial Sequence
  Description of Artificial Sequence: Synthetic oligonucleotide
ucccgggcccguucauagg

SEQ ID NO: 1183316 - RNA, 19 nt, Artificial Sequence
  Description of Artificial Sequence: Synthetic oligonucleotide
auacggaggcgugucuuca

SEQ ID NO: 1183317 - RNA, 19 nt, Artificial Sequence
  Description of Artificial Sequence: Synthetic oligonucleotide
cagcccagaaaagucccac

SEQ ID NO: 1183318 - RNA, 19 nt, Artificial Sequence
  Description of Artificial Sequence: Synthetic oligonucleotide
ccaaagccgugccucaccc

SEQ ID NO: 1183319 - RNA, 19 nt, Artificial Sequence
  Description of Artificial Sequence: Synthetic oligonucleotide
ggcuuucuaucuuaguggu

SEQ ID NO: 1183320 - RNA, 19 nt, Artificial Sequence
  Description of Artificial Sequence: Synthetic oligonucleotide
uuaggucguucaguugcuc

SEQ ID NO: 1183321 - RNA, 19 nt, Artificial Sequence
  Description of Artificial Sequence: Synthetic oligonucleotide
gcaucgagccugcugucug

SEQ ID NO: 1183322 - RNA, 19 nt, Artificial Sequence
  Description of Artificial Sequence: Synthetic oligonucleotide
aggggccaugauccucccg

SEQ ID NO: 1183323 - RNA, 19 nt, Artificial Sequence
  Description of Artificial Sequence: Synthetic oligonucleotide
agcgagggaaagauaggaa

SEQ ID NO: 1183324 - RNA, 19 nt, Artificial Sequence
  Description of Artificial Sequence: Synthetic oligonucleotide
ugcugcugcugcugcugca

SEQ ID NO: 1183325 - RNA, 19 nt, Artificial Sequence
  Description of Artificial Sequence: Synthetic oligonucleotide
uagaggcucagggcccuug

SEQ ID NO: 1183326 - RNA, 19 nt, Artificial Sequence
  Description of Artificial Sequence: Synthetic oligonucleotide
cugcugcugcugcugcugc

SEQ ID NO: 1183327 - RNA, 19 nt, Artificial Sequence
  Description of Artificial Sequence: Synthetic oligonucleotide
ggugauacggaggcguguc

SEQ ID NO: 1183328 - RNA, 19 nt, Artificial Sequence
  Description of Artificial Sequence: Synthetic oligonucleotide
uugugcgcugagggucugg

SEQ ID NO: 1183329 - RNA, 19 nt, Artificial Sequence
  Description of Artificial Sequence: Synthetic oligonucleotide
uugaucccagaggccuaag

SEQ ID NO: 1183330 - RNA, 19 nt, Artificial Sequence
  Description of Artificial Sequence: Synthetic oligonucleotide
ggagcgaggagggcggugc

SEQ ID NO: 1183331 - RNA, 19 nt, Artificial Sequence
  Description of Artificial Sequence: Synthetic oligonucleotide
cauuggcguucuccagccc

SEQ ID NO: 1183332 - RNA, 19 nt, Artificial Sequence
  Description of Artificial Sequence: Synthetic oligonucleotide
cucuucuagucguucacau

SEQ ID NO: 1183333 - RNA, 19 nt, Artificial Sequence
  Description of Artificial Sequence: Synthetic oligonucleotide
cccacgugacuauaaauaa

SEQ ID NO: 1183334 - RNA, 19 nt, Artificial Sequence
  Description of Artificial Sequence: Synthetic oligonucleotide
ggcugcaucgagccugcug

SEQ ID NO: 1183335 - RNA, 19 nt, Artificial Sequence
  Description of Artificial Sequence: Synthetic oligonucleotide
ugucuucaugaggggcgug

SEQ ID NO: 1183336 - RNA, 19 nt, Artificial Sequence
  Description of Artificial Sequence: Synthetic oligonucleotide
guggccaccccaggauggg

SEQ ID NO: 1183337 - RNA, 19 nt, Artificial Sequence
  Description of Artificial Sequence: Synthetic oligonucleotide
uuugugcgcugagggucug

SEQ ID NO: 1183338 - RNA, 19 nt, Artificial Sequence
  Description of Artificial Sequence: Synthetic oligonucleotide
cuccugcuuuaaguucagg

SEQ ID NO: 1183339 - RNA, 19 nt, Artificial Sequence
  Description of Artificial Sequence: Synthetic oligonucleotide
gaacccagagaugguguua

SEQ ID NO: 1183340 - RNA, 19 nt, Artificial Sequence
  Description of Artificial Sequence: Synthetic oligonucleotide
gcgagcagccugcugcuug

SEQ ID NO: 1183341 - RNA, 19 nt, Artificial Sequence
  Description of Artificial Sequence: Synthetic oligonucleotide
uccucccgcccaucuggug

SEQ ID NO: 1183342 - RNA, 19 nt, Artificial Sequence
  Description of Artificial Sequence: Synthetic oligonucleotide
gcagagcccgcgcauuggc

SEQ ID NO: 1183343 - RNA, 19 nt, Artificial Sequence
  Description of Artificial Sequence: Synthetic oligonucleotide
agagcgggcuggguggcca

SEQ ID NO: 1183344 - RNA, 19 nt, Artificial Sequence
  Description of Artificial Sequence: Synthetic oligonucleotide
accugcugcugcugcugcu

SEQ ID NO: 1183345 - RNA, 19 nt, Artificial Sequence
  Description of Artificial Sequence: Synthetic oligonucleotide
gccgaacccagagauggug

SEQ ID NO: 1183346 - RNA, 19 nt, Artificial Sequence
  Description of Artificial Sequence: Synthetic oligonucleotide
gcugcugcugcugcugcag

SEQ ID NO: 1183347 - RNA, 19 nt, Artificial Sequence
  Description of Artificial Sequence: Synthetic oligonucleotide
gggcagaagcgagggaaag

SEQ ID NO: 1183348 - RNA, 19 nt, Artificial Sequence
  Description of Artificial Sequence: Synthetic oligonucleotide
cacccagugauaggcagaa

SEQ ID NO: 1183349 - RNA, 19 nt, Artificial Sequence
  Description of Artificial Sequence: Synthetic oligonucleotide
ggucuggagugugauguga

SEQ ID NO: 1183350 - RNA, 19 nt, Artificial Sequence
  Description of Artificial Sequence: Synthetic oligonucleotide
gucccacgugacuauaaau

SEQ ID NO: 1183351 - RNA, 19 nt, Artificial Sequence
  Description of Artificial Sequence: Synthetic oligonucleotide
ggucaugagugucuccacu

SEQ ID NO: 1183352 - RNA, 19 nt, Artificial Sequence
  Description of Artificial Sequence: Synthetic oligonucleotide
acccgccccuuccuguacu

SEQ ID NO: 1183353 - RNA, 19 nt, Artificial Sequence
  Description of Artificial Sequence: Synthetic oligonucleotide
uggcgcccacauccuucag

SEQ ID NO: 1183354 - RNA, 19 nt, Artificial Sequence
  Description of Artificial Sequence: Synthetic oligonucleotide
caaagccgugccucaccca

SEQ ID NO: 1183355 - RNA, 19 nt, Artificial Sequence
  Description of Artificial Sequence: Synthetic oligonucleotide
gggucugacgggccuccag

SEQ ID NO: 1183356 - RNA, 19 nt, Artificial Sequence
  Description of Artificial Sequence: Synthetic oligonucleotide
gacccgccccuuccuguac

SEQ ID NO: 1183357 - RNA, 19 nt, Artificial Sequence
  Description of Artificial Sequence: Synthetic oligonucleotide
aggauggucugugcagauu

SEQ ID NO: 1183358 - RNA, 19 nt, Artificial Sequence
  Description of Artificial Sequence: Synthetic oligonucleotide
guuaggucguucaguugcu

SEQ ID NO: 1183359 - RNA, 19 nt, Artificial Sequence
  Description of Artificial Sequence: Synthetic oligonucleotide
gcagaagcgagggaaagau

SEQ ID NO: 1183360 - RNA, 19 nt, Artificial Sequence
  Description of Artificial Sequence: Synthetic oligonucleotide
gucgucucgggcuguuugu

SEQ ID NO: 1183361 - RNA, 19 nt, Artificial Sequence
  Description of Artificial Sequence: Synthetic oligonucleotide
ccgugccucacccagccuc

SEQ ID NO: 1183362 - RNA, 19 nt, Artificial Sequence
  Description of Artificial Sequence: Synthetic oligonucleotide
gcugcuugggagagcgggc

SEQ ID NO: 1183363 - RNA, 19 nt, Artificial Sequence
  Description of Artificial Sequence: Synthetic oligonucleotide
gcgcauuggcguucuccag

SEQ ID NO: 1183364 - RNA, 19 nt, Artificial Sequence
  Description of Artificial Sequence: Synthetic oligonucleotide
gcuugcggugguaaugcuc

SEQ ID NO: 1183365 - RNA, 19 nt, Artificial Sequence
  Description of Artificial Sequence: Synthetic oligonucleotide
agcccgcgcauuggcguuc

SEQ ID NO: 1183366 - RNA, 19 nt, Artificial Sequence
  Description of Artificial Sequence: Synthetic oligonucleotide
cuauaccgcucuuccugua

SEQ ID NO: 1183367 - RNA, 19 nt, Artificial Sequence
  Description of Artificial Sequence: Synthetic oligonucleotide
ccgcucuuccuguaagguc

SEQ ID NO: 1183368 - RNA, 19 nt, Artificial Sequence
  Description of Artificial Sequence: Synthetic oligonucleotide
gcuuuugugcgcugagggu

SEQ ID NO: 1183369 - RNA, 19 nt, Artificial Sequence
  Description of Artificial Sequence: Synthetic oligonucleotide
gggcccguucauaggacug

SEQ ID NO: 1183370 - RNA, 19 nt, Artificial Sequence
  Description of Artificial Sequence: Synthetic oligonucleotide
gacccuggugcaugucccu

SEQ ID NO: 1183371 - RNA, 19 nt, Artificial Sequence
  Description of Artificial Sequence: Synthetic oligonucleotide
gugauacggaggcgugucu

SEQ ID NO: 1183372 - RNA, 19 nt, Artificial Sequence
  Description of Artificial Sequence: Synthetic oligonucleotide
gcuuucuaucuuagugguc

SEQ ID NO: 1183373 - RNA, 19 nt, Artificial Sequence
  Description of Artificial Sequence: Synthetic oligonucleotide
ccaacuccugcuuuaaguu

SEQ ID NO: 1183374 - RNA, 19 nt, Artificial Sequence
  Description of Artificial Sequence: Synthetic oligonucleotide
ccuuagggaaauugagacu

SEQ ID NO: 1183375 - RNA, 19 nt, Artificial Sequence
  Description of Artificial Sequence: Synthetic oligonucleotide
ggcagcuuuugugcgcuga

SEQ ID NO: 1183376 - RNA, 19 nt, Artificial Sequence
  Description of Artificial Sequence: Synthetic oligonucleotide
uggcguucuccagcccuuc

SEQ ID NO: 1183377 - RNA, 19 nt, Artificial Sequence
  Description of Artificial Sequence: Synthetic oligonucleotide
ccagccuccagaaaucaau

SEQ ID NO: 1183378 - RNA, 19 nt, Artificial Sequence
  Description of Artificial Sequence: Synthetic oligonucleotide
ccuggagcccagcugggca

SEQ ID NO: 1183379 - RNA, 19 nt, Artificial Sequence
  Description of Artificial Sequence: Synthetic oligonucleotide
ccugcugcugcugcugcug

SEQ ID NO: 1183380 - RNA, 19 nt, Artificial Sequence
  Description of Artificial Sequence: Synthetic oligonucleotide
ccgcgcauuggcguucucc

SEQ ID NO: 1183381 - RNA, 19 nt, Artificial Sequence
  Description of Artificial Sequence: Synthetic oligonucleotide
gguaggugagcgaguccca

SEQ ID NO: 1183382 - RNA, 19 nt, Artificial Sequence
  Description of Artificial Sequence: Synthetic oligonucleotide
ggaugucccgggcccguuc

SEQ ID NO: 1183383 - RNA, 19 nt, Artificial Sequence
  Description of Artificial Sequence: Synthetic oligonucleotide
augucccgggcccguucau

SEQ ID NO: 1183384 - RNA, 19 nt, Artificial Sequence
  Description of Artificial Sequence: Synthetic oligonucleotide
cgcgcauuggcguucucca

SEQ ID NO: 1183385 - RNA, 19 nt, Artificial Sequence
  Description of Artificial Sequence: Synthetic oligonucleotide
auccucccgcccaucuggu

SEQ ID NO: 1183386 - RNA, 19 nt, Artificial Sequence
  Description of Artificial Sequence: Synthetic oligonucleotide
uugucgucucgggcuguuu

SEQ ID NO: 1183387 - RNA, 19 nt, Artificial Sequence
  Description of Artificial Sequence: Synthetic oligonucleotide
ggcccguucauaggacuga

SEQ ID NO: 1183388 - RNA, 19 nt, Artificial Sequence
  Description of Artificial Sequence: Synthetic oligonucleotide
ggauuccguucuguuccac

SEQ ID NO: 1183389 - RNA, 19 nt, Artificial Sequence
  Description of Artificial Sequence: Synthetic oligonucleotide
gcgugaugaaguuggcaau

SEQ ID NO: 1183390 - RNA, 19 nt, Artificial Sequence
  Description of Artificial Sequence: Synthetic oligonucleotide
cccgggcccguucauagga

SEQ ID NO: 1183391 - RNA, 19 nt, Artificial Sequence
  Description of Artificial Sequence: Synthetic oligonucleotide
uggaugucccgggcccguu

SEQ ID NO: 1183392 - RNA, 19 nt, Artificial Sequence
  Description of Artificial Sequence: Synthetic oligonucleotide
ggugugcaauggcagcuuu

SEQ ID NO: 1183393 - RNA, 19 nt, Artificial Sequence
  Description of Artificial Sequence: Synthetic oligonucleotide
gugcgcugagggucuggua

SEQ ID NO: 1183394 - RNA, 19 nt, Artificial Sequence
  Description of Artificial Sequence: Synthetic oligonucleotide
acccagugauaggcagaaa

SEQ ID NO: 1183395 - RNA, 19 nt, Artificial Sequence
  Description of Artificial Sequence: Synthetic oligonucleotide
ccgaacccagagauggugu

SEQ ID NO: 1183396 - RNA, 19 nt, Artificial Sequence
  Description of Artificial Sequence: Synthetic oligonucleotide
ccuaaggguguggucuaga

SEQ ID NO: 1183397 - RNA, 19 nt, Artificial Sequence
  Description of Artificial Sequence: Synthetic oligonucleotide
gagcccgcgcauuggcguu

SEQ ID NO: 1183398 - RNA, 19 nt, Artificial Sequence
  Description of Artificial Sequence: Synthetic oligonucleotide
ggacccgccccuuccugua

SEQ ID NO: 1183399 - RNA, 19 nt, Artificial Sequence
  Description of Artificial Sequence: Synthetic oligonucleotide
gugugcaauggcagcuuuu

SEQ ID NO: 1183400 - RNA, 19 nt, Artificial Sequence
  Description of Artificial Sequence: Synthetic oligonucleotide
ccucccgcccaucuggugu

SEQ ID NO: 1183401 - RNA, 19 nt, Artificial Sequence
  Description of Artificial Sequence: Synthetic oligonucleotide
gagcuaccaauggcugcau

SEQ ID NO: 1183402 - RNA, 19 nt, Artificial Sequence
  Description of Artificial Sequence: Synthetic oligonucleotide
uggcugcaucgagccugcu

SEQ ID NO: 1183403 - RNA, 19 nt, Artificial Sequence
  Description of Artificial Sequence: Synthetic oligonucleotide
guugucgucucgggcuguu

SEQ ID NO: 1183404 - RNA, 19 nt, Artificial Sequence
  Description of Artificial Sequence: Synthetic oligonucleotide
gggcccuuggggccuauuu

SEQ ID NO: 1183405 - RNA, 19 nt, Artificial Sequence
  Description of Artificial Sequence: Synthetic oligonucleotide
ccuguaaggucugcauuau

SEQ ID NO: 1183406 - RNA, 19 nt, Artificial Sequence
  Description of Artificial Sequence: Synthetic oligonucleotide
cccguucauaggacugaua

SEQ ID NO: 1183407 - RNA, 19 nt, Artificial Sequence
  Description of Artificial Sequence: Synthetic oligonucleotide
cggugguaaugcucaagcu

SEQ ID NO: 1183408 - RNA, 19 nt, Artificial Sequence
  Description of Artificial Sequence: Synthetic oligonucleotide
cccgcccaucugguguggc

SEQ ID NO: 1183409 - RNA, 19 nt, Artificial Sequence
  Description of Artificial Sequence: Synthetic oligonucleotide
agggcccuuggggccuauu

SEQ ID NO: 1183410 - RNA, 19 nt, Artificial Sequence
  Description of Artificial Sequence: Synthetic oligonucleotide
cacucccuccagccuggau

SEQ ID NO: 1183411 - RNA, 19 nt, Artificial Sequence
  Description of Artificial Sequence: Synthetic oligonucleotide
ggccgaacccagagauggu

SEQ ID NO: 1183412 - RNA, 19 nt, Artificial Sequence
  Description of Artificial Sequence: Synthetic oligonucleotide
gccgugccucacccagccu

SEQ ID NO: 1183413 - RNA, 19 nt, Artificial Sequence
  Description of Artificial Sequence: Synthetic oligonucleotide
ccccuuccuguacucucau

SEQ ID NO: 1183414 - RNA, 19 nt, Artificial Sequence
  Description of Artificial Sequence: Synthetic oligonucleotide
gcucuuccuuagggaaauu

SEQ ID NO: 1183415 - RNA, 19 nt, Artificial Sequence
  Description of Artificial Sequence: Synthetic oligonucleotide
gcccgcgcauuggcguucu

SEQ ID NO: 1183416 - RNA, 19 nt, Artificial Sequence
  Description of Artificial Sequence: Synthetic oligonucleotide
cguugucgucucgggcugu

SEQ ID NO: 1183417 - RNA, 19 nt, Artificial Sequence
  Description of Artificial Sequence: Synthetic oligonucleotide
cgggucugacgggccucca

SEQ ID NO: 1183418 - RNA, 19 nt, Artificial Sequence
  Description of Artificial Sequence: Synthetic oligonucleotide
auugcuauggaaucgaaug

SEQ ID NO: 1183419 - RNA, 19 nt, Artificial Sequence
  Description of Artificial Sequence: Synthetic oligonucleotide
gaaucgaauggauucaccg

SEQ ID NO: 1183420 - RNA, 19 nt, Artificial Sequence
  Description of Artificial Sequence: Synthetic oligonucleotide
gaugacgcgaguuagggcc

SEQ ID NO: 1183421 - RNA, 19 nt, Artificial Sequence
  Description of Artificial Sequence: Synthetic oligonucleotide
aguucaaggaaauggacag

SEQ ID NO: 1183422 - RNA, 19 nt, Artificial Sequence
  Description of Artificial Sequence: Synthetic oligonucleotide
cauaacugagucuagcugc

SEQ ID NO: 1183423 - RNA, 19 nt, Artificial Sequence
  Description of Artificial Sequence: Synthetic oligonucleotide
aaaccauuggcuguggccg

SEQ ID NO: 1183424 - RNA, 19 nt, Artificial Sequence
  Description of Artificial Sequence: Synthetic oligonucleotide
uauggaaucgaauggauuc

SEQ ID NO: 1183425 - RNA, 19 nt, Artificial Sequence
  Description of Artificial Sequence: Synthetic oligonucleotide
aauggauucaccguggggu

SEQ ID NO: 1183426 - RNA, 19 nt, Artificial Sequence
  Description of Artificial Sequence: Synthetic oligonucleotide
uuagagucggcacccaggg

SEQ ID NO: 1183427 - RNA, 19 nt, Artificial Sequence
  Description of Artificial Sequence: Synthetic oligonucleotide
acguccuucagguagcggc

SEQ ID NO: 1183428 - RNA, 19 nt, Artificial Sequence
  Description of Artificial Sequence: Synthetic oligonucleotide
uggauucaucugcagaugg

SEQ ID NO: 1183429 - RNA, 19 nt, Artificial Sequence
  Description of Artificial Sequence: Synthetic oligonucleotide
ucggcaaugauccuugugu

SEQ ID NO: 1183430 - RNA, 19 nt, Artificial Sequence
  Description of Artificial Sequence: Synthetic oligonucleotide
uccgaugcgaagaacagga

SEQ ID NO: 1183431 - RNA, 19 nt, Artificial Sequence
  Description of Artificial Sequence: Synthetic oligonucleotide
uguagagucgagagaacag

SEQ ID NO: 1183432 - RNA, 19 nt, Artificial Sequence
  Description of Artificial Sequence: Synthetic oligonucleotide
uagugagcgacaaugacaa

SEQ ID NO: 1183433 - RNA, 19 nt, Artificial Sequence
  Description of Artificial Sequence: Synthetic oligonucleotide
aaucgaauggauucaccgu

SEQ ID NO: 1183434 - RNA, 19 nt, Artificial Sequence
  Description of Artificial Sequence: Synthetic oligonucleotide
ucuacgcuggugaucaacc

SEQ ID NO: 1183435 - RNA, 19 nt, Artificial Sequence
  Description of Artificial Sequence: Synthetic oligonucleotide
accauuuggaaaccauugg

SEQ ID NO: 1183436 - RNA, 19 nt, Artificial Sequence
  Description of Artificial Sequence: Synthetic oligonucleotide
gcgacaaugacaauggugg

SEQ ID NO: 1183437 - RNA, 19 nt, Artificial Sequence
  Description of Artificial Sequence: Synthetic oligonucleotide
ucaggcuacaaaaucucca

SEQ ID NO: 1183438 - RNA, 19 nt, Artificial Sequence
  Description of Artificial Sequence: Synthetic oligonucleotide
aucgaauggauucaccgug

SEQ ID NO: 1183439 - RNA, 19 nt, Artificial Sequence
  Description of Artificial Sequence: Synthetic oligonucleotide
cagguagcggcucagaaag

SEQ ID NO: 1183440 - RNA, 19 nt, Artificial Sequence
  Description of Artificial Sequence: Synthetic oligonucleotide
agggccucggcaaugaucc

SEQ ID NO: 1183441 - RNA, 19 nt, Artificial Sequence
  Description of Artificial Sequence: Synthetic oligonucleotide
uucuuaaccugccaacugu

SEQ ID NO: 1183442 - RNA, 19 nt, Artificial Sequence
  Description of Artificial Sequence: Synthetic oligonucleotide
aaaguacacagggaccacg

SEQ ID NO: 1183443 - RNA, 19 nt, Artificial Sequence
  Description of Artificial Sequence: Synthetic oligonucleotide
aagacaaacucgggguccc

SEQ ID NO: 1183444 - RNA, 19 nt, Artificial Sequence
  Description of Artificial Sequence: Synthetic oligonucleotide
cuuagaauccacccgggac

SEQ ID NO: 1183445 - RNA, 19 nt, Artificial Sequence
  Description of Artificial Sequence: Synthetic oligonucleotide
uagaugacgcgaguuaggg

SEQ ID NO: 1183446 - RNA, 19 nt, Artificial Sequence
  Description of Artificial Sequence: Synthetic oligonucleotide
aaguucaaggaaauggaca

SEQ ID NO: 1183447 - RNA, 19 nt, Artificial Sequence
  Description of Artificial Sequence: Synthetic oligonucleotide
uuauagaugacgcgaguua

SEQ ID NO: 1183448 - RNA, 19 nt, Artificial Sequence
  Description of Artificial Sequence: Synthetic oligonucleotide
ucgaauggauucaccgugg

SEQ ID NO: 1183449 - RNA, 19 nt, Artificial Sequence
  Description of Artificial Sequence: Synthetic oligonucleotide
aucguagugagcgacaaug

SEQ ID NO: 1183450 - RNA, 19 nt, Artificial Sequence
  Description of Artificial Sequence: Synthetic oligonucleotide
ugcgacagugugaaggcag

SEQ ID NO: 1183451 - RNA, 19 nt, Artificial Sequence
  Description of Artificial Sequence: Synthetic oligonucleotide
guacguguagagucgagag

SEQ ID NO: 1183452 - RNA, 19 nt, Artificial Sequence
  Description of Artificial Sequence: Synthetic oligonucleotide
guguccuagugacugaccg

SEQ ID NO: 1183453 - RNA, 19 nt, Artificial Sequence
  Description of Artificial Sequence: Synthetic oligonucleotide
uacgcuuguacguguagag

SEQ ID NO: 1183454 - RNA, 19 nt, Artificial Sequence
  Description of Artificial Sequence: Synthetic oligonucleotide
uagugacugaccgaaaccc

SEQ ID NO: 1183455 - RNA, 19 nt, Artificial Sequence
  Description of Artificial Sequence: Synthetic oligonucleotide
uuauuuucuuaaccugcca

SEQ ID NO: 1183456 - RNA, 19 nt, Artificial Sequence
  Description of Artificial Sequence: Synthetic oligonucleotide
gaaugucccguccuugucc

SEQ ID NO: 1183457 - RNA, 19 nt, Artificial Sequence
  Description of Artificial Sequence: Synthetic oligonucleotide
uccauaacugagucuagcu

SEQ ID NO: 1183458 - RNA, 19 nt, Artificial Sequence
  Description of Artificial Sequence: Synthetic oligonucleotide
ucguccgccagguugaucu

SEQ ID NO: 1183459 - RNA, 19 nt, Artificial Sequence
  Description of Artificial Sequence: Synthetic oligonucleotide
uccgcugguuaccauuugg

SEQ ID NO: 1183460 - RNA, 19 nt, Artificial Sequence
  Description of Artificial Sequence: Synthetic oligonucleotide
caggcuugagucuguaugg

SEQ ID NO: 1183461 - RNA, 19 nt, Artificial Sequence
  Description of Artificial Sequence: Synthetic oligonucleotide
aaugucccguccuugucca

SEQ ID NO: 1183462 - RNA, 19 nt, Artificial Sequence
  Description of Artificial Sequence: Synthetic oligonucleotide
guagagucgagagaacagg

SEQ ID NO: 1183463 - RNA, 19 nt, Artificial Sequence
  Description of Artificial Sequence: Synthetic oligonucleotide
uuuucuuaaccugccaacu

SEQ ID NO: 1183464 - RNA, 19 nt, Artificial Sequence
  Description of Artificial Sequence: Synthetic oligonucleotide
agcguacucaggaaugucc

SEQ ID NO: 1183465 - RNA, 19 nt, Artificial Sequence
  Description of Artificial Sequence: Synthetic oligonucleotide
gaauggauucaccgugggg

SEQ ID NO: 1183466 - RNA, 19 nt, Artificial Sequence
  Description of Artificial Sequence: Synthetic oligonucleotide
aggugcgacagugugaagg

SEQ ID NO: 1183467 - RNA, 19 nt, Artificial Sequence
  Description of Artificial Sequence: Synthetic oligonucleotide
cuagugacugaccgaaacc

SEQ ID NO: 1183468 - RNA, 19 nt, Artificial Sequence
  Description of Artificial Sequence: Synthetic oligonucleotide
agaugacgcgaguuagggc

SEQ ID NO: 1183469 - RNA, 19 nt, Artificial Sequence
  Description of Artificial Sequence: Synthetic oligonucleotide
gaaacccucugcuucaguc

SEQ ID NO: 1183470 - RNA, 19 nt, Artificial Sequence
  Description of Artificial Sequence: Synthetic oligonucleotide
ugucggacguccuucaggu

SEQ ID NO: 1183471 - RNA, 19 nt, Artificial Sequence
  Description of Artificial Sequence: Synthetic oligonucleotide
uccagcguacucaggaaug

SEQ ID NO: 1183472 - RNA, 19 nt, Artificial Sequence
  Description of Artificial Sequence: Synthetic oligonucleotide
cacggggccacccaaaggc

SEQ ID NO: 1183473 - RNA, 19 nt, Artificial Sequence
  Description of Artificial Sequence: Synthetic oligonucleotide
ucucaggcuacaaaaucuc

SEQ ID NO: 1183474 - RNA, 19 nt, Artificial Sequence
  Description of Artificial Sequence: Synthetic oligonucleotide
aucaaccagucgcucaccg

SEQ ID NO: 1183475 - RNA, 19 nt, Artificial Sequence
  Description of Artificial Sequence: Synthetic oligonucleotide
acucaggaaugucccgucc

SEQ ID NO: 1183476 - RNA, 19 nt, Artificial Sequence
  Description of Artificial Sequence: Synthetic oligonucleotide
uuagcuggucauagaagac

SEQ ID NO: 1183477 - RNA, 19 nt, Artificial Sequence
  Description of Artificial Sequence: Synthetic oligonucleotide
gugagcgacaaugacaaug

SEQ ID NO: 1183478 - RNA, 19 nt, Artificial Sequence
  Description of Artificial Sequence: Synthetic oligonucleotide
uguguuccgugucaggguc

SEQ ID NO: 1183479 - RNA, 19 nt, Artificial Sequence
  Description of Artificial Sequence: Synthetic oligonucleotide
gaccgcacguccaugaugc

SEQ ID NO: 1183480 - RNA, 19 nt, Artificial Sequence
  Description of Artificial Sequence: Synthetic oligonucleotide
aggaggcuucgacacaugg

SEQ ID NO: 1183481 - RNA, 19 nt, Artificial Sequence
  Description of Artificial Sequence: Synthetic oligonucleotide
uguacgcuuguacguguag

SEQ ID NO: 1183482 - RNA, 19 nt, Artificial Sequence
  Description of Artificial Sequence: Synthetic oligonucleotide
uguacgcugcguguguacg

SEQ ID NO: 1183483 - RNA, 19 nt, Artificial Sequence
  Description of Artificial Sequence: Synthetic oligonucleotide
ucuuagaauccacccggga

SEQ ID NO: 1183484 - RNA, 19 nt, Artificial Sequence
  Description of Artificial Sequence: Synthetic oligonucleotide
uuuacauggugcugucgga

SEQ ID NO: 1183485 - RNA, 19 nt, Artificial Sequence
  Description of Artificial Sequence: Synthetic oligonucleotide
uagaauccacccgggaccg

SEQ ID NO: 1183486 - RNA, 19 nt, Artificial Sequence
  Description of Artificial Sequence: Synthetic oligonucleotide
uguacagcacauggaagug

SEQ ID NO: 1183487 - RNA, 19 nt, Artificial Sequence
  Description of Artificial Sequence: Synthetic oligonucleotide
uguacguguagagucgaga

SEQ ID NO: 1183488 - RNA, 19 nt, Artificial Sequence
  Description of Artificial Sequence: Synthetic oligonucleotide
uacguguagagucgagaga

SEQ ID NO: 1183489 - RNA, 19 nt, Artificial Sequence
  Description of Artificial Sequence: Synthetic oligonucleotide
ugccguuagagucggcacc

SEQ ID NO: 1183490 - RNA, 19 nt, Artificial Sequence
  Description of Artificial Sequence: Synthetic oligonucleotide
cucaggcuacaaaaucucc

SEQ ID NO: 1183491 - RNA, 19 nt, Artificial Sequence
  Description of Artificial Sequence: Synthetic oligonucleotide
aacuguagacccgccugac

SEQ ID NO: 1183492 - RNA, 19 nt, Artificial Sequence
  Description of Artificial Sequence: Synthetic oligonucleotide
ucguagugagcgacaauga

SEQ ID NO: 1183493 - RNA, 19 nt, Artificial Sequence
  Description of Artificial Sequence: Synthetic oligonucleotide
ucagccgucccucuacgcu

SEQ ID NO: 1183494 - RNA, 19 nt, Artificial Sequence
  Description of Artificial Sequence: Synthetic oligonucleotide
gaugcgaagaacaggaggu

SEQ ID NO: 1183495 - RNA, 19 nt, Artificial Sequence
  Description of Artificial Sequence: Synthetic oligonucleotide
ugccacugccguuagaguc

SEQ ID NO: 1183496 - RNA, 19 nt, Artificial Sequence
  Description of Artificial Sequence: Synthetic oligonucleotide
uguaugguccaagcugucc

SEQ ID NO: 1183497 - RNA, 19 nt, Artificial Sequence
  Description of Artificial Sequence: Synthetic oligonucleotide
ucuuaaccugccaacugua

SEQ ID NO: 1183498 - RNA, 19 nt, Artificial Sequence
  Description of Artificial Sequence: Synthetic oligonucleotide
ugcguguguacgcuuguac

SEQ ID NO: 1183499 - RNA, 19 nt, Artificial Sequence
  Description of Artificial Sequence: Synthetic oligonucleotide
ugacugaccgaaacccucu

SEQ ID NO: 1183500 - RNA, 19 nt, Artificial Sequence
  Description of Artificial Sequence: Synthetic oligonucleotide
gaccgaaacccucugcuuc

SEQ ID NO: 1183501 - RNA, 19 nt, Artificial Sequence
  Description of Artificial Sequence: Synthetic oligonucleotide
acguguagagucgagagaa

SEQ ID NO: 1183502 - RNA, 19 nt, Artificial Sequence
  Description of Artificial Sequence: Synthetic oligonucleotide
ucagguagcggcucagaaa

SEQ ID NO: 1183503 - RNA, 19 nt, Artificial Sequence
  Description of Artificial Sequence: Synthetic oligonucleotide
uagcggcucagaaagugcu

SEQ ID NO: 1183504 - RNA, 19 nt, Artificial Sequence
  Description of Artificial Sequence: Synthetic oligonucleotide
gaagcugacgucagggaac

SEQ ID NO: 1183505 - RNA, 19 nt, Artificial Sequence
  Description of Artificial Sequence: Synthetic oligonucleotide
ugucagccgucccucuacg

SEQ ID NO: 1183506 - RNA, 19 nt, Artificial Sequence
  Description of Artificial Sequence: Synthetic oligonucleotide
uuugcacagcuguugucac

SEQ ID NO: 1183507 - RNA, 19 nt, Artificial Sequence
  Description of Artificial Sequence: Synthetic oligonucleotide
gaccacggucuccauagcc

SEQ ID NO: 1183508 - RNA, 19 nt, Artificial Sequence
  Description of Artificial Sequence: Synthetic oligonucleotide
agcgacaaugacaauggug

SEQ ID NO: 1183509 - RNA, 19 nt, Artificial Sequence
  Description of Artificial Sequence: Synthetic oligonucleotide
ccauuuggaaaccauuggc

SEQ ID NO: 1183510 - RNA, 19 nt, Artificial Sequence
  Description of Artificial Sequence: Synthetic oligonucleotide
agucuguaugguccaagcu

SEQ ID NO: 1183511 - RNA, 19 nt, Artificial Sequence
  Description of Artificial Sequence: Synthetic oligonucleotide
agcgcucgugcucccaggc

SEQ ID NO: 1183512 - RNA, 19 nt, Artificial Sequence
  Description of Artificial Sequence: Synthetic oligonucleotide
auagaugacgcgaguuagg

SEQ ID NO: 1183513 - RNA, 19 nt, Artificial Sequence
  Description of Artificial Sequence: Synthetic oligonucleotide
ggcuucgacacauggaggc

SEQ ID NO: 1183514 - RNA, 19 nt, Artificial Sequence
  Description of Artificial Sequence: Synthetic oligonucleotide
gggucuuagaauccacccg

SEQ ID NO: 1183515 - RNA, 19 nt, Artificial Sequence
  Description of Artificial Sequence: Synthetic oligonucleotide
uguagacccgccugacacc

SEQ ID NO: 1183516 - RNA, 19 nt, Artificial Sequence
  Description of Artificial Sequence: Synthetic oligonucleotide
uguguacgcuuguacgugu

SEQ ID NO: 1183517 - RNA, 19 nt, Artificial Sequence
  Description of Artificial Sequence: Synthetic oligonucleotide
auggauucaccguggggug

SEQ ID NO: 1183518 - RNA, 19 nt, Artificial Sequence
  Description of Artificial Sequence: Synthetic oligonucleotide
ucaaggaaauggacaggaa

SEQ ID NO: 1183519 - RNA, 19 nt, Artificial Sequence
  Description of Artificial Sequence: Synthetic oligonucleotide
acguuauccugcagcaggc

SEQ ID NO: 1183520 - RNA, 19 nt, Artificial Sequence
  Description of Artificial Sequence: Synthetic oligonucleotide
uuacauggugcugucggac

SEQ ID NO: 1183521 - RNA, 19 nt, Artificial Sequence
  Description of Artificial Sequence: Synthetic oligonucleotide
agcagcccgagguugguug

SEQ ID NO: 1183522 - RNA, 19 nt, Artificial Sequence
  Description of Artificial Sequence: Synthetic oligonucleotide
guacacagggaccacgguc

SEQ ID NO: 1183523 - RNA, 19 nt, Artificial Sequence
  Description of Artificial Sequence: Synthetic oligonucleotide
uggugugcagccaccgucu

SEQ ID NO: 1183524 - RNA, 19 nt, Artificial Sequence
  Description of Artificial Sequence: Synthetic oligonucleotide
cagguuauagaugacgcga

SEQ ID NO: 1183525 - RNA, 19 nt, Artificial Sequence
  Description of Artificial Sequence: Synthetic oligonucleotide
cugucggacguccuucagg

SEQ ID NO: 1183526 - RNA, 19 nt, Artificial Sequence
  Description of Artificial Sequence: Synthetic oligonucleotide
acgcaggaaggcaugcugc

SEQ ID NO: 1183527 - RNA, 19 nt, Artificial Sequence
  Description of Artificial Sequence: Synthetic oligonucleotide
ucaaccagucgcucaccgc

SEQ ID NO: 1183528 - RNA, 19 nt, Artificial Sequence
  Description of Artificial Sequence: Synthetic oligonucleotide
uguccuagugacugaccga

SEQ ID NO: 1183529 - RNA, 19 nt, Artificial Sequence
  Description of Artificial Sequence: Synthetic oligonucleotide
cugggucauauugcuaugg

SEQ ID NO: 1183530 - RNA, 19 nt, Artificial Sequence
  Description of Artificial Sequence: Synthetic oligonucleotide
cuuugcacagcuguuguca

SEQ ID NO: 1183531 - RNA, 19 nt, Artificial Sequence
  Description of Artificial Sequence: Synthetic oligonucleotide
aggaaugucccguccuugu

SEQ ID NO: 1183532 - RNA, 19 nt, Artificial Sequence
  Description of Artificial Sequence: Synthetic oligonucleotide
cuucagugcguguggcccg

SEQ ID NO: 1183533 - RNA, 19 nt, Artificial Sequence
  Description of Artificial Sequence: Synthetic oligonucleotide
uggacggcuguguacgcca

SEQ ID NO: 1183534 - RNA, 19 nt, Artificial Sequence
  Description of Artificial Sequence: Synthetic oligonucleotide
uuguacguguagagucgag

SEQ ID NO: 1183535 - RNA, 19 nt, Artificial Sequence
  Description of Artificial Sequence: Synthetic oligonucleotide
uucgacacauggaggcgca

SEQ ID NO: 1183536 - RNA, 19 nt, Artificial Sequence
  Description of Artificial Sequence: Synthetic oligonucleotide
agguuauagaugacgcgag

SEQ ID NO: 1183537 - RNA, 19 nt, Artificial Sequence
  Description of Artificial Sequence: Synthetic oligonucleotide
gagguaugccccaaugcac

SEQ ID NO: 1183538 - RNA, 19 nt, Artificial Sequence
  Description of Artificial Sequence: Synthetic oligonucleotide
gcguguguacgcuuguacg

SEQ ID NO: 1183539 - RNA, 19 nt, Artificial Sequence
  Description of Artificial Sequence: Synthetic oligonucleotide
aaggcaucguagugagcga

SEQ ID NO: 1183540 - RNA, 19 nt, Artificial Sequence
  Description of Artificial Sequence: Synthetic oligonucleotide
cuucgacacauggaggcgc

SEQ ID NO: 1183541 - RNA, 19 nt, Artificial Sequence
  Description of Artificial Sequence: Synthetic oligonucleotide
cauauugcuauggaaucga

SEQ ID NO: 1183542 - RNA, 19 nt, Artificial Sequence
  Description of Artificial Sequence: Synthetic oligonucleotide
aagcgcucgugcucccagg

SEQ ID NO: 1183543 - RNA, 19 nt, Artificial Sequence
  Description of Artificial Sequence: Synthetic oligonucleotide
cauggagaagcugacguca

SEQ ID NO: 1183544 - RNA, 19 nt, Artificial Sequence
  Description of Artificial Sequence: Synthetic oligonucleotide
aagcugacgucagggaacu

SEQ ID NO: 1183545 - RNA, 19 nt, Artificial Sequence
  Description of Artificial Sequence: Synthetic oligonucleotide
accgaaacccucugcuuca

SEQ ID NO: 1183546 - RNA, 19 nt, Artificial Sequence
  Description of Artificial Sequence: Synthetic oligonucleotide
uacgccaagccgagguaug

SEQ ID NO: 1183547 - RNA, 19 nt, Artificial Sequence
  Description of Artificial Sequence: Synthetic oligonucleotide
agguugguuggugagccag

SEQ ID NO: 1183548 - RNA, 19 nt, Artificial Sequence
  Description of Artificial Sequence: Synthetic oligonucleotide
ggugcgacagugugaaggc

SEQ ID NO: 1183549 - RNA, 19 nt, Artificial Sequence
  Description of Artificial Sequence: Synthetic oligonucleotide
auggaaucgaauggauuca

SEQ ID NO: 1183550 - RNA, 19 nt, Artificial Sequence
  Description of Artificial Sequence: Synthetic oligonucleotide
cuucagucuggcggcaugg

SEQ ID NO: 1183551 - RNA, 19 nt, Artificial Sequence
  Description of Artificial Sequence: Synthetic oligonucleotide
uguaugcauucaucaccug

SEQ ID NO: 1183552 - RNA, 19 nt, Artificial Sequence
  Description of Artificial Sequence: Synthetic oligonucleotide
ucgagagaacaggcgagcc

SEQ ID NO: 1183553 - RNA, 19 nt, Artificial Sequence
  Description of Artificial Sequence: Synthetic oligonucleotide
aggcaucguagugagcgac

SEQ ID NO: 1183554 - RNA, 19 nt, Artificial Sequence
  Description of Artificial Sequence: Synthetic oligonucleotide
agucuggcggcaugggugu

SEQ ID NO: 1183555 - RNA, 19 nt, Artificial Sequence
  Description of Artificial Sequence: Synthetic oligonucleotide
ugcgcggucccgcacggug

SEQ ID NO: 1183556 - RNA, 19 nt, Artificial Sequence
  Description of Artificial Sequence: Synthetic oligonucleotide
uggaaucgaauggauucac

SEQ ID NO: 1183557 - RNA, 19 nt, Artificial Sequence
  Description of Artificial Sequence: Synthetic oligonucleotide
acaaacucggggucccgcu

SEQ ID NO: 1183558 - RNA, 19 nt, Artificial Sequence
  Description of Artificial Sequence: Synthetic oligonucleotide
cugcuuuagcuggucauag

SEQ ID NO: 1183559 - RNA, 19 nt, Artificial Sequence
  Description of Artificial Sequence: Synthetic oligonucleotide
gugaucaaccagucgcuca

SEQ ID NO: 1183560 - RNA, 19 nt, Artificial Sequence
  Description of Artificial Sequence: Synthetic oligonucleotide
cacagucuuguacagcaca

SEQ ID NO: 1183561 - RNA, 19 nt, Artificial Sequence
  Description of Artificial Sequence: Synthetic oligonucleotide
cuguguacgccaagccgag

SEQ ID NO: 1183562 - RNA, 19 nt, Artificial Sequence
  Description of Artificial Sequence: Synthetic oligonucleotide
auggcgaagcgcucgugcu

SEQ ID NO: 1183563 - RNA, 19 nt, Artificial Sequence
  Description of Artificial Sequence: Synthetic oligonucleotide
cuggugugcagccaccguc

SEQ ID NO: 1183564 - RNA, 19 nt, Artificial Sequence
  Description of Artificial Sequence: Synthetic oligonucleotide
uucagucuggcggcauggg

SEQ ID NO: 1183565 - RNA, 19 nt, Artificial Sequence
  Description of Artificial Sequence: Synthetic oligonucleotide
gcuuguacguguagagucg

SEQ ID NO: 1183566 - RNA, 19 nt, Artificial Sequence
  Description of Artificial Sequence: Synthetic oligonucleotide
guccauaacugagucuagc

SEQ ID NO: 1183567 - RNA, 19 nt, Artificial Sequence
  Description of Artificial Sequence: Synthetic oligonucleotide
cuccaggugcgacagugug

SEQ ID NO: 1183568 - RNA, 19 nt, Artificial Sequence
  Description of Artificial Sequence: Synthetic oligonucleotide
uacucaggaaugucccguc

SEQ ID NO: 1183569 - RNA, 19 nt, Artificial Sequence
  Description of Artificial Sequence: Synthetic oligonucleotide
gcugguuaccauuuggaaa

SEQ ID NO: 1183570 - RNA, 19 nt, Artificial Sequence
  Description of Artificial Sequence: Synthetic oligonucleotide
acgccaagccgagguaugc

SEQ ID NO: 1183571 - RNA, 19 nt, Artificial Sequence
  Description of Artificial Sequence: Synthetic oligonucleotide
cuccgaugcgaagaacagg

SEQ ID NO: 1183572 - RNA, 19 nt, Artificial Sequence
  Description of Artificial Sequence: Synthetic oligonucleotide
aguacacagggaccacggu

SEQ ID NO: 1183573 - RNA, 19 nt, Artificial Sequence
  Description of Artificial Sequence: Synthetic oligonucleotide
agguaugccccaaugcaca

SEQ ID NO: 1183574 - RNA, 19 nt, Artificial Sequence
  Description of Artificial Sequence: Synthetic oligonucleotide
ccauaacugagucuagcug

SEQ ID NO: 1183575 - RNA, 19 nt, Artificial Sequence
  Description of Artificial Sequence: Synthetic oligonucleotide
acuguagacccgccugaca

SEQ ID NO: 1183576 - RNA, 19 nt, Artificial Sequence
  Description of Artificial Sequence: Synthetic oligonucleotide
uguacgccaagccgaggua

SEQ ID NO: 1183577 - RNA, 19 nt, Artificial Sequence
  Description of Artificial Sequence: Synthetic oligonucleotide
cagaaagugcuccagcgua

SEQ ID NO: 1183578 - RNA, 19 nt, Artificial Sequence
  Description of Artificial Sequence: Synthetic oligonucleotide
ugggugugugggccggucc

SEQ ID NO: 1183579 - RNA, 19 nt, Artificial Sequence
  Description of Artificial Sequence: Synthetic oligonucleotide
uuguacgcugcguguguac

SEQ ID NO: 1183580 - RNA, 19 nt, Artificial Sequence
  Description of Artificial Sequence: Synthetic oligonucleotide
ccacccaaaggcaucguag

SEQ ID NO: 1183581 - RNA, 19 nt, Artificial Sequence
  Description of Artificial Sequence: Synthetic oligonucleotide
gacaaacucggggucccgc

SEQ ID NO: 1183582 - RNA, 19 nt, Artificial Sequence
  Description of Artificial Sequence: Synthetic oligonucleotide
ccuagugacugaccgaaac

SEQ ID NO: 1183583 - RNA, 19 nt, Artificial Sequence
  Description of Artificial Sequence: Synthetic oligonucleotide
uucagugcguguggcccgg

SEQ ID NO: 1183584 - RNA, 19 nt, Artificial Sequence
  Description of Artificial Sequence: Synthetic oligonucleotide
guagcggcucagaaagugc

SEQ ID NO: 1183585 - RNA, 19 nt, Artificial Sequence
  Description of Artificial Sequence: Synthetic oligonucleotide
gacugaccgaaacccucug

SEQ ID NO: 1183586 - RNA, 19 nt, Artificial Sequence
  Description of Artificial Sequence: Synthetic oligonucleotide
guguguacgcuuguacgug

SEQ ID NO: 1183587 - RNA, 19 nt, Artificial Sequence
  Description of Artificial Sequence: Synthetic oligonucleotide
cugccaacuguagacccgc

SEQ ID NO: 1183588 - RNA, 19 nt, Artificial Sequence
  Description of Artificial Sequence: Synthetic oligonucleotide
cugccguuagagucggcac

SEQ ID NO: 1183589 - RNA, 19 nt, Artificial Sequence
  Description of Artificial Sequence: Synthetic oligonucleotide
guacgcugcguguguacgc

SEQ ID NO: 1183590 - RNA, 19 nt, Artificial Sequence
  Description of Artificial Sequence: Synthetic oligonucleotide
caggagguuguacgcugcg

SEQ ID NO: 1183591 - RNA, 19 nt, Artificial Sequence
  Description of Artificial Sequence: Synthetic oligonucleotide
cgaugcgaagaacaggagg

SEQ ID NO: 1183592 - RNA, 19 nt, Artificial Sequence
  Description of Artificial Sequence: Synthetic oligonucleotide
ggugacaggcugcagcgac

SEQ ID NO: 1183593 - RNA, 19 nt, Artificial Sequence
  Description of Artificial Sequence: Synthetic oligonucleotide
cauggaagugcuggacggc

SEQ ID NO: 1183594 - RNA, 19 nt, Artificial Sequence
  Description of Artificial Sequence: Synthetic oligonucleotide
caugcugcagcguccccuc

SEQ ID NO: 1183595 - RNA, 19 nt, Artificial Sequence
  Description of Artificial Sequence: Synthetic oligonucleotide
cucggcaaugauccuugug

SEQ ID NO: 1183596 - RNA, 19 nt, Artificial Sequence
  Description of Artificial Sequence: Synthetic oligonucleotide
agcacaucguccgccaggu

SEQ ID NO: 1183597 - RNA, 19 nt, Artificial Sequence
  Description of Artificial Sequence: Synthetic oligonucleotide
gcugccucggcccacggug

SEQ ID NO: 1183598 - RNA, 19 nt, Artificial Sequence
  Description of Artificial Sequence: Synthetic oligonucleotide
ugaccgaaacccucugcuu

SEQ ID NO: 1183599 - RNA, 19 nt, Artificial Sequence
  Description of Artificial Sequence: Synthetic oligonucleotide
uguguacgccaagccgagg

SEQ ID NO: 1183600 - RNA, 19 nt, Artificial Sequence
  Description of Artificial Sequence: Synthetic oligonucleotide
uggcuugacccuguaugca

SEQ ID NO: 1183601 - RNA, 19 nt, Artificial Sequence
  Description of Artificial Sequence: Synthetic oligonucleotide
auucaccguggggugacag

SEQ ID NO: 1183602 - RNA, 19 nt, Artificial Sequence
  Description of Artificial Sequence: Synthetic oligonucleotide
cagccgucccucuacgcug

SEQ ID NO: 1183603 - RNA, 19 nt, Artificial Sequence
  Description of Artificial Sequence: Synthetic oligonucleotide
agguuguacgcugcgugug

SEQ ID NO: 1183604 - RNA, 19 nt, Artificial Sequence
  Description of Artificial Sequence: Synthetic oligonucleotide
aggucccuguguccuagug

SEQ ID NO: 1183605 - RNA, 19 nt, Artificial Sequence
  Description of Artificial Sequence: Synthetic oligonucleotide
agugcuggacggcugugua

SEQ ID NO: 1183606 - RNA, 19 nt, Artificial Sequence
  Description of Artificial Sequence: Synthetic oligonucleotide
gaauccacccgggaccgca

SEQ ID NO: 1183607 - RNA, 19 nt, Artificial Sequence
  Description of Artificial Sequence: Synthetic oligonucleotide
gaucaaccagucgcucacc

SEQ ID NO: 1183608 - RNA, 19 nt, Artificial Sequence
  Description of Artificial Sequence: Synthetic oligonucleotide
guccuagugacugaccgaa

SEQ ID NO: 1183609 - RNA, 19 nt, Artificial Sequence
  Description of Artificial Sequence: Synthetic oligonucleotide
cucuacgcuggugaucaac

SEQ ID NO: 1183610 - RNA, 19 nt, Artificial Sequence
  Description of Artificial Sequence: Synthetic oligonucleotide
gugacugaccgaaacccuc

SEQ ID NO: 1183611 - RNA, 19 nt, Artificial Sequence
  Description of Artificial Sequence: Synthetic oligonucleotide
cuguguccuagugacugac

SEQ ID NO: 1183612 - RNA, 19 nt, Artificial Sequence
  Description of Artificial Sequence: Synthetic oligonucleotide
acuggugugcagccaccgu

SEQ ID NO: 1183613 - RNA, 19 nt, Artificial Sequence
  Description of Artificial Sequence: Synthetic oligonucleotide
aggcuucgacacauggagg

SEQ ID NO: 1183614 - RNA, 19 nt, Artificial Sequence
  Description of Artificial Sequence: Synthetic oligonucleotide
agccugcggauggcgaagc

SEQ ID NO: 1183615 - RNA, 19 nt, Artificial Sequence
  Description of Artificial Sequence: Synthetic oligonucleotide
auccacccgggaccgcacg

SEQ ID NO: 1183616 - RNA, 19 nt, Artificial Sequence
  Description of Artificial Sequence: Synthetic oligonucleotide
uggauucaccgugggguga

SEQ ID NO: 1183617 - RNA, 19 nt, Artificial Sequence
  Description of Artificial Sequence: Synthetic oligonucleotide
ggcaaugauccuuguguuc

SEQ ID NO: 1183618 - RNA, 19 nt, Artificial Sequence
  Description of Artificial Sequence: Synthetic oligonucleotide
gaacuggugugcagccacc

SEQ ID NO: 1183619 - RNA, 19 nt, Artificial Sequence
  Description of Artificial Sequence: Synthetic oligonucleotide
gcuugucagccuuuacaug

SEQ ID NO: 1183620 - RNA, 19 nt, Artificial Sequence
  Description of Artificial Sequence: Synthetic oligonucleotide
gccaagccgagguaugccc

SEQ ID NO: 1183621 - RNA, 19 nt, Artificial Sequence
  Description of Artificial Sequence: Synthetic oligonucleotide
caacuguagacccgccuga

SEQ ID NO: 1183622 - RNA, 19 nt, Artificial Sequence
  Description of Artificial Sequence: Synthetic oligonucleotide
cgcuuguacguguagaguc

SEQ ID NO: 1183623 - RNA, 19 nt, Artificial Sequence
  Description of Artificial Sequence: Synthetic oligonucleotide
uggcgaagcgcucgugcuc

SEQ ID NO: 1183624 - RNA, 19 nt, Artificial Sequence
  Description of Artificial Sequence: Synthetic oligonucleotide
gcuguguacgccaagccga

SEQ ID NO: 1183625 - RNA, 19 nt, Artificial Sequence
  Description of Artificial Sequence: Synthetic oligonucleotide
guacgcuuguacguguaga

SEQ ID NO: 1183626 - RNA, 19 nt, Artificial Sequence
  Description of Artificial Sequence: Synthetic oligonucleotide
cuguccuccagccagcgcu

SEQ ID NO: 1183627 - RNA, 19 nt, Artificial Sequence
  Description of Artificial Sequence: Synthetic oligonucleotide
cacggcuagcagcagguca

SEQ ID NO: 1183628 - RNA, 19 nt, Artificial Sequence
  Description of Artificial Sequence: Synthetic oligonucleotide
gucuuguacagcacaugga

SEQ ID NO: 1183629 - RNA, 19 nt, Artificial Sequence
  Description of Artificial Sequence: Synthetic oligonucleotide
gacggcuguguacgccaag

SEQ ID NO: 1183630 - RNA, 19 nt, Artificial Sequence
  Description of Artificial Sequence: Synthetic oligonucleotide
aguccauaacugagucuag

SEQ ID NO: 1183631 - RNA, 19 nt, Artificial Sequence
  Description of Artificial Sequence: Synthetic oligonucleotide
ccuucagugcguguggccc

SEQ ID NO: 1183632 - RNA, 19 nt, Artificial Sequence
  Description of Artificial Sequence: Synthetic oligonucleotide
cugucagguuauagaugac

SEQ ID NO: 1183633 - RNA, 19 nt, Artificial Sequence
  Description of Artificial Sequence: Synthetic oligonucleotide
guguacgccaagccgaggu

SEQ ID NO: 1183634 - RNA, 19 nt, Artificial Sequence
  Description of Artificial Sequence: Synthetic oligonucleotide
ugccaacuguagacccgcc

SEQ ID NO: 1183635 - RNA, 19 nt, Artificial Sequence
  Description of Artificial Sequence: Synthetic oligonucleotide
guuauagaugacgcgaguu

SEQ ID NO: 1183636 - RNA, 19 nt, Artificial Sequence
  Description of Artificial Sequence: Synthetic oligonucleotide
ggaaaccauuggcuguggc

SEQ ID NO: 1183637 - RNA, 19 nt, Artificial Sequence
  Description of Artificial Sequence: Synthetic oligonucleotide
ccugccaacuguagacccg

SEQ ID NO: 1183638 - RNA, 19 nt, Artificial Sequence
  Description of Artificial Sequence: Synthetic oligonucleotide
uccuagugacugaccgaaa

SEQ ID NO: 1183639 - RNA, 19 nt, Artificial Sequence
  Description of Artificial Sequence: Synthetic oligonucleotide
gcacacggcuagcagcagg

SEQ ID NO: 1183640 - RNA, 19 nt, Artificial Sequence
  Description of Artificial Sequence: Synthetic oligonucleotide
cccgaggaggcuucgacac

SEQ ID NO: 1183641 - RNA, 19 nt, Artificial Sequence
  Description of Artificial Sequence: Synthetic oligonucleotide
gacguccuucagguagcgg

SEQ ID NO: 1183642 - RNA, 19 nt, Artificial Sequence
  Description of Artificial Sequence: Synthetic oligonucleotide
uccacccgggaccgcacgu

SEQ ID NO: 1183643 - RNA, 19 nt, Artificial Sequence
  Description of Artificial Sequence: Synthetic oligonucleotide
gugcguguggcccggguga

SEQ ID NO: 1183644 - RNA, 19 nt, Artificial Sequence
  Description of Artificial Sequence: Synthetic oligonucleotide
cuacgcuggugaucaacca

SEQ ID NO: 1183645 - RNA, 19 nt, Artificial Sequence
  Description of Artificial Sequence: Synthetic oligonucleotide
gcguacucaggaauguccc

SEQ ID NO: 1183646 - RNA, 19 nt, Artificial Sequence
  Description of Artificial Sequence: Synthetic oligonucleotide
ccgagguaugccccaaugc

SEQ ID NO: 1183647 - RNA, 19 nt, Artificial Sequence
  Description of Artificial Sequence: Synthetic oligonucleotide
cuuguacguguagagucga

SEQ ID NO: 1183648 - RNA, 19 nt, Artificial Sequence
  Description of Artificial Sequence: Synthetic oligonucleotide
agccaguccauaacugagu

SEQ ID NO: 1183649 - RNA, 19 nt, Artificial Sequence
  Description of Artificial Sequence: Synthetic oligonucleotide
caggaaugucccguccuug

SEQ ID NO: 1183650 - RNA, 19 nt, Artificial Sequence
  Description of Artificial Sequence: Synthetic oligonucleotide
agacaaacucggggucccg

SEQ ID NO: 1183651 - RNA, 19 nt, Artificial Sequence
  Description of Artificial Sequence: Synthetic oligonucleotide
gguaugccccaaugcacac

SEQ ID NO: 1183652 - RNA, 19 nt, Artificial Sequence
  Description of Artificial Sequence: Synthetic oligonucleotide
gcgaguuagggccucggca

SEQ ID NO: 1183653 - RNA, 19 nt, Artificial Sequence
  Description of Artificial Sequence: Synthetic oligonucleotide
gucagccgucccucuacgc

SEQ ID NO: 1183654 - RNA, 19 nt, Artificial Sequence
  Description of Artificial Sequence: Synthetic oligonucleotide
ggucuccauagccagcauc

SEQ ID NO: 1183655 - RNA, 19 nt, Artificial Sequence
  Description of Artificial Sequence: Synthetic oligonucleotide
gcuucgacacauggaggcg

SEQ ID NO: 1183656 - RNA, 19 nt, Artificial Sequence
  Description of Artificial Sequence: Synthetic oligonucleotide
ccaagccgagguaugcccc

SEQ ID NO: 1183657 - RNA, 19 nt, Artificial Sequence
  Description of Artificial Sequence: Synthetic oligonucleotide
auauugcuauggaaucgaa

SEQ ID NO: 1183658 - RNA, 19 nt, Artificial Sequence
  Description of Artificial Sequence: Synthetic oligonucleotide
gcagcgaccgggccacugg

SEQ ID NO: 1183659 - RNA, 19 nt, Artificial Sequence
  Description of Artificial Sequence: Synthetic oligonucleotide
gcagcguccccucccgagg

SEQ ID NO: 1183660 - RNA, 19 nt, Artificial Sequence
  Description of Artificial Sequence: Synthetic oligonucleotide
cuggacggcuguguacgcc

SEQ ID NO: 1183661 - RNA, 19 nt, Artificial Sequence
  Description of Artificial Sequence: Synthetic oligonucleotide
ggugacuguucugucccag

SEQ ID NO: 1183662 - RNA, 19 nt, Artificial Sequence
  Description of Artificial Sequence: Synthetic oligonucleotide
ugggcuccgcugguuacca

SEQ ID NO: 1183663 - RNA, 19 nt, Artificial Sequence
  Description of Artificial Sequence: Synthetic oligonucleotide
cacccgggaccgcacgucc

SEQ ID NO: 1183664 - RNA, 19 nt, Artificial Sequence
  Description of Artificial Sequence: Synthetic oligonucleotide
uuagggccucggcaaugau

SEQ ID NO: 1183665 - RNA, 19 nt, Artificial Sequence
  Description of Artificial Sequence: Synthetic oligonucleotide
ggaccgcacguccaugaug

SEQ ID NO: 1183666 - RNA, 19 nt, Artificial Sequence
  Description of Artificial Sequence: Synthetic oligonucleotide
gacgcgaguuagggccucg

SEQ ID NO: 1183667 - RNA, 19 nt, Artificial Sequence
  Description of Artificial Sequence: Synthetic oligonucleotide
gaaagugcuccagcguacu

SEQ ID NO: 1183668 - RNA, 19 nt, Artificial Sequence
  Description of Artificial Sequence: Synthetic oligonucleotide
caagccgagguaugcccca

SEQ ID NO: 1183669 - RNA, 19 nt, Artificial Sequence
  Description of Artificial Sequence: Synthetic oligonucleotide
cguagugagcgacaaugac

SEQ ID NO: 1183670 - RNA, 19 nt, Artificial Sequence
  Description of Artificial Sequence: Synthetic oligonucleotide
gugacaggcugcagcgacc

SEQ ID NO: 1183671 - RNA, 19 nt, Artificial Sequence
  Description of Artificial Sequence: Synthetic oligonucleotide
ggcuugagucuguaugguc

SEQ ID NO: 1183672 - RNA, 19 nt, Artificial Sequence
  Description of Artificial Sequence: Synthetic oligonucleotide
guacucaggaaugucccgu

SEQ ID NO: 1183673 - RNA, 19 nt, Artificial Sequence
  Description of Artificial Sequence: Synthetic oligonucleotide
gcgacagugugaaggcagg

SEQ ID NO: 1183674 - RNA, 19 nt, Artificial Sequence
  Description of Artificial Sequence: Synthetic oligonucleotide
aggagguuguacgcugcgu

SEQ ID NO: 1183675 - RNA, 19 nt, Artificial Sequence
  Description of Artificial Sequence: Synthetic oligonucleotide
gccguuagagucggcaccc

SEQ ID NO: 1183676 - RNA, 19 nt, Artificial Sequence
  Description of Artificial Sequence: Synthetic oligonucleotide
ucgacacauggaggcgcag

SEQ ID NO: 1183677 - RNA, 19 nt, Artificial Sequence
  Description of Artificial Sequence: Synthetic oligonucleotide
agccgucccucuacgcugg

SEQ ID NO: 1183678 - RNA, 19 nt, Artificial Sequence
  Description of Artificial Sequence: Synthetic oligonucleotide
cucggggucccgcuuguca

SEQ ID NO: 1183679 - RNA, 19 nt, Artificial Sequence
  Description of Artificial Sequence: Synthetic oligonucleotide
cgagguaugccccaaugca

SEQ ID NO: 1183680 - RNA, 19 nt, Artificial Sequence
  Description of Artificial Sequence: Synthetic oligonucleotide
cgaauggauucaccguggg

SEQ ID NO: 1183681 - RNA, 19 nt, Artificial Sequence
  Description of Artificial Sequence: Synthetic oligonucleotide
cacacggcuagcagcaggu

SEQ ID NO: 1183682 - RNA, 19 nt, Artificial Sequence
  Description of Artificial Sequence: Synthetic oligonucleotide
agcguccccucccgaggag

SEQ ID NO: 1183683 - RNA, 19 nt, Artificial Sequence
  Description of Artificial Sequence: Synthetic oligonucleotide
agugagcgacaaugacaau

SEQ ID NO: 1183684 - RNA, 19 nt, Artificial Sequence
  Description of Artificial Sequence: Synthetic oligonucleotide
ggccggucccuccugggcc

SEQ ID NO: 1183685 - RNA, 19 nt, Artificial Sequence
  Description of Artificial Sequence: Synthetic oligonucleotide
agcgcuuggugcccuggua

SEQ ID NO: 1183686 - RNA, 19 nt, Artificial Sequence
  Description of Artificial Sequence: Synthetic oligonucleotide
gaugggcggggcucuccuc

SEQ ID NO: 1183687 - RNA, 19 nt, Artificial Sequence
  Description of Artificial Sequence: Synthetic oligonucleotide
acgcgaguuagggccucgg

SEQ ID NO: 1183688 - RNA, 19 nt, Artificial Sequence
  Description of Artificial Sequence: Synthetic oligonucleotide
gguuauagaugacgcgagu

SEQ ID NO: 1183689 - RNA, 19 nt, Artificial Sequence
  Description of Artificial Sequence: Synthetic oligonucleotide
uggcggcaugggugugugg

SEQ ID NO: 1183690 - RNA, 19 nt, Artificial Sequence
  Description of Artificial Sequence: Synthetic oligonucleotide
augucccguccuuguccag

SEQ ID NO: 1183691 - RNA, 19 nt, Artificial Sequence
  Description of Artificial Sequence: Synthetic oligonucleotide
guagacccgccugacaccu

SEQ ID NO: 1183692 - RNA, 19 nt, Artificial Sequence
  Description of Artificial Sequence: Synthetic oligonucleotide
augcgaagaacaggagguu

SEQ ID NO: 1183693 - RNA, 19 nt, Artificial Sequence
  Description of Artificial Sequence: Synthetic oligonucleotide
augacgcgaguuagggccu

SEQ ID NO: 1183694 - RNA, 19 nt, Artificial Sequence
  Description of Artificial Sequence: Synthetic oligonucleotide
ucccgcacgguggcucucc

SEQ ID NO: 1183695 - RNA, 19 nt, Artificial Sequence
  Description of Artificial Sequence: Synthetic oligonucleotide
cagcguacucaggaauguc

SEQ ID NO: 1183696 - RNA, 19 nt, Artificial Sequence
  Description of Artificial Sequence: Synthetic oligonucleotide
cacgguguccaggcacagc

SEQ ID NO: 1183697 - RNA, 19 nt, Artificial Sequence
  Description of Artificial Sequence: Synthetic oligonucleotide
ggauucaccguggggugac

SEQ ID NO: 1183698 - RNA, 19 nt, Artificial Sequence
  Description of Artificial Sequence: Synthetic oligonucleotide
gccucggcaaugauccuug

SEQ ID NO: 1183699 - RNA, 19 nt, Artificial Sequence
  Description of Artificial Sequence: Synthetic oligonucleotide
cuccgcugguuaccauuug

SEQ ID NO: 1183700 - RNA, 19 nt, Artificial Sequence
  Description of Artificial Sequence: Synthetic oligonucleotide
aucguccgccagguugauc

SEQ ID NO: 1183701 - RNA, 19 nt, Artificial Sequence
  Description of Artificial Sequence: Synthetic oligonucleotide
ucagugcguguggcccggg

SEQ ID NO: 1183702 - RNA, 19 nt, Artificial Sequence
  Description of Artificial Sequence: Synthetic oligonucleotide
gcucugugaacacuggcau

SEQ ID NO: 1183703 - RNA, 19 nt, Artificial Sequence
  Description of Artificial Sequence: Synthetic oligonucleotide
cccucuacgcuggugauca

SEQ ID NO: 1183704 - RNA, 19 nt, Artificial Sequence
  Description of Artificial Sequence: Synthetic oligonucleotide
agcccgagguugguuggug

SEQ ID NO: 1183705 - RNA, 19 nt, Artificial Sequence
  Description of Artificial Sequence: Synthetic oligonucleotide
cagaugggcggggcucucc

SEQ ID NO: 1183706 - RNA, 19 nt, Artificial Sequence
  Description of Artificial Sequence: Synthetic oligonucleotide
aagccgagguaugccccaa

SEQ ID NO: 1183707 - RNA, 19 nt, Artificial Sequence
  Description of Artificial Sequence: Synthetic oligonucleotide
ugcguguggcccgggugac

SEQ ID NO: 1183708 - RNA, 19 nt, Artificial Sequence
  Description of Artificial Sequence: Synthetic oligonucleotide
agccagcaucucaggcuac

SEQ ID NO: 1183709 - RNA, 19 nt, Artificial Sequence
  Description of Artificial Sequence: Synthetic oligonucleotide
gugacuguucugucccagu

SEQ ID NO: 1183710 - RNA, 19 nt, Artificial Sequence
  Description of Artificial Sequence: Synthetic oligonucleotide
cccgccugacaccuccugg

SEQ ID NO: 1183711 - RNA, 19 nt, Artificial Sequence
  Description of Artificial Sequence: Synthetic oligonucleotide
gcugucggacguccuucag

SEQ ID NO: 1183712 - RNA, 19 nt, Artificial Sequence
  Description of Artificial Sequence: Synthetic oligonucleotide
ggacguccuucagguagcg

SEQ ID NO: 1183713 - RNA, 19 nt, Artificial Sequence
  Description of Artificial Sequence: Synthetic oligonucleotide
ccgaugcgaagaacaggag

SEQ ID NO: 1183714 - RNA, 19 nt, Artificial Sequence
  Description of Artificial Sequence: Synthetic oligonucleotide
cuucagguagcggcucaga

SEQ ID NO: 1183715 - RNA, 19 nt, Artificial Sequence
  Description of Artificial Sequence: Synthetic oligonucleotide
gcaugggugugugggccgg

SEQ ID NO: 1183716 - RNA, 19 nt, Artificial Sequence
  Description of Artificial Sequence: Synthetic oligonucleotide
agcgaccgggccacuggag

SEQ ID NO: 1183717 - RNA, 19 nt, Artificial Sequence
  Description of Artificial Sequence: Synthetic oligonucleotide
guuguacgcugcgugugua

SEQ ID NO: 1183718 - RNA, 19 nt, Artificial Sequence
  Description of Artificial Sequence: Synthetic oligonucleotide
gaguuagggccucggcaau

SEQ ID NO: 1183719 - RNA, 19 nt, Artificial Sequence
  Description of Artificial Sequence: Synthetic oligonucleotide
gccuuuacauggugcuguc

SEQ ID NO: 1183720 - RNA, 19 nt, Artificial Sequence
  Description of Artificial Sequence: Synthetic oligonucleotide
caggcagccugcggauggc

SEQ ID NO: 1183721 - RNA, 19 nt, Artificial Sequence
  Description of Artificial Sequence: Synthetic oligonucleotide
gauucaccguggggugaca

SEQ ID NO: 1183722 - RNA, 19 nt, Artificial Sequence
  Description of Artificial Sequence: Synthetic oligonucleotide
uagacccgccugacaccuc

SEQ ID NO: 1183723 - RNA, 19 nt, Artificial Sequence
  Description of Artificial Sequence: Synthetic oligonucleotide
cguuagagucggcacccag

SEQ ID NO: 1183724 - RNA, 19 nt, Artificial Sequence
  Description of Artificial Sequence: Synthetic oligonucleotide
accgcacguccaugaugcu

SEQ ID NO: 1183725 - RNA, 19 nt, Artificial Sequence
  Description of Artificial Sequence: Synthetic oligonucleotide
ugacgcgaguuagggccuc

SEQ ID NO: 1183726 - RNA, 19 nt, Artificial Sequence
  Description of Artificial Sequence: Synthetic oligonucleotide
gguuguacgcugcgugugu

SEQ ID NO: 1183727 - RNA, 19 nt, Artificial Sequence
  Description of Artificial Sequence: Synthetic oligonucleotide
cuccagcguacucaggaau

SEQ ID NO: 1183728 - RNA, 19 nt, Artificial Sequence
  Description of Artificial Sequence: Synthetic oligonucleotide
cggacguccuucagguagc

SEQ ID NO: 1183729 - RNA, 19 nt, Artificial Sequence
  Description of Artificial Sequence: Synthetic oligonucleotide
gcgaccgggccacuggaga

SEQ ID NO: 1183730 - RNA, 19 nt, Artificial Sequence
  Description of Artificial Sequence: Synthetic oligonucleotide
ccgagguugguuggugagc

SEQ ID NO: 1183731 - RNA, 19 nt, Artificial Sequence
  Description of Artificial Sequence: Synthetic oligonucleotide
gccugcggauggcgaagcg

SEQ ID NO: 1183732 - RNA, 19 nt, Artificial Sequence
  Description of Artificial Sequence: Synthetic oligonucleotide
ucccgcuugucagccuuua

SEQ ID NO: 1183733 - RNA, 19 nt, Artificial Sequence
  Description of Artificial Sequence: Synthetic oligonucleotide
cagcguccccucccgagga

SEQ ID NO: 1183734 - RNA, 19 nt, Artificial Sequence
  Description of Artificial Sequence: Synthetic oligonucleotide
ggcaucguagugagcgaca

SEQ ID NO: 1183735 - RNA, 19 nt, Artificial Sequence
  Description of Artificial Sequence: Synthetic oligonucleotide
guacgccaagccgagguau

SEQ ID NO: 1183736 - RNA, 19 nt, Artificial Sequence
  Description of Artificial Sequence: Synthetic oligonucleotide
gugcgacagugugaaggca

SEQ ID NO: 1183737 - RNA, 19 nt, Artificial Sequence
  Description of Artificial Sequence: Synthetic oligonucleotide
cguguagagucgagagaac

SEQ ID NO: 1183738 - RNA, 19 nt, Artificial Sequence
  Description of Artificial Sequence: Synthetic oligonucleotide
gcaucguagugagcgacaa

SEQ ID NO: 1183739 - RNA, 19 nt, Artificial Sequence
  Description of Artificial Sequence: Synthetic oligonucleotide
cagcgaccgggccacugga

SEQ ID NO: 1183740 - RNA, 19 nt, Artificial Sequence
  Description of Artificial Sequence: Synthetic oligonucleotide
guguacgcuuguacgugua

SEQ ID NO: 1183741 - RNA, 19 nt, Artificial Sequence
  Description of Artificial Sequence: Synthetic oligonucleotide
ccacguuauccugcagcag

SEQ ID NO: 1183742 - RNA, 19 nt, Artificial Sequence
  Description of Artificial Sequence: Synthetic oligonucleotide
ccaaugcacacggcuagca

SEQ ID NO: 1183743 - RNA, 19 nt, Artificial Sequence
  Description of Artificial Sequence: Synthetic oligonucleotide
ggcguccccuucucuguca

SEQ ID NO: 1183744 - RNA, 19 nt, Artificial Sequence
  Description of Artificial Sequence: Synthetic oligonucleotide
cggcccacgguguccaggc

SEQ ID NO: 1183745 - RNA, 19 nt, Artificial Sequence
  Description of Artificial Sequence: Synthetic oligonucleotide
cguguguacgcuuguacgu

SEQ ID NO: 1183746 - RNA, 19 nt, Artificial Sequence
  Description of Artificial Sequence: Synthetic oligonucleotide
gcgcucgugcucccaggcc

SEQ ID NO: 1183747 - RNA, 19 nt, Artificial Sequence
  Description of Artificial Sequence: Synthetic oligonucleotide
ccgcacguccaugaugcug

SEQ ID NO: 1183748 - RNA, 19 nt, Artificial Sequence
  Description of Artificial Sequence: Synthetic oligonucleotide
cccacgguguccaggcaca

SEQ ID NO: 1183749 - RNA, 19 nt, Artificial Sequence
  Description of Artificial Sequence: Synthetic oligonucleotide
cugcugcgcggucccgcac

SEQ ID NO: 1183750 - RNA, 19 nt, Artificial Sequence
  Description of Artificial Sequence: Synthetic oligonucleotide
gggugacuguucuguccca

SEQ ID NO: 1183751 - RNA, 19 nt, Artificial Sequence
  Description of Artificial Sequence: Synthetic oligonucleotide
gcgcggucccgcacggugg

SEQ ID NO: 1183752 - RNA, 19 nt, Artificial Sequence
  Description of Artificial Sequence: Synthetic oligonucleotide
gccacccaaaggcaucgua

SEQ ID NO: 1183753 - RNA, 19 nt, Artificial Sequence
  Description of Artificial Sequence: Synthetic oligonucleotide
gcccgagguugguugguga

SEQ ID NO: 1183754 - RNA, 19 nt, Artificial Sequence
  Description of Artificial Sequence: Synthetic oligonucleotide
ggggccacccaaaggcauc

SEQ ID NO: 1183755 - RNA, 19 nt, Artificial Sequence
  Description of Artificial Sequence: Synthetic oligonucleotide
cgcugguuaccauuuggaa

SEQ ID NO: 1183756 - RNA, 19 nt, Artificial Sequence
  Description of Artificial Sequence: Synthetic oligonucleotide
cgcgaguuagggccucggc

SEQ ID NO: 1183757 - RNA, 19 nt, Artificial Sequence
  Description of Artificial Sequence: Synthetic oligonucleotide
gucggacguccuucaggua

SEQ ID NO: 1183758 - RNA, 19 nt, Artificial Sequence
  Description of Artificial Sequence: Synthetic oligonucleotide
ggugcugucggacguccuu

SEQ ID NO: 1183759 - RNA, 19 nt, Artificial Sequence
  Description of Artificial Sequence: Synthetic oligonucleotide
acccgggaccgcacgucca

SEQ ID NO: 1183760 - RNA, 19 nt, Artificial Sequence
  Description of Artificial Sequence: Synthetic oligonucleotide
caaacucggggucccgcuu

SEQ ID NO: 1183761 - RNA, 19 nt, Artificial Sequence
  Description of Artificial Sequence: Synthetic oligonucleotide
agccagcgcuuggugcccu

SEQ ID NO: 1183762 - RNA, 19 nt, Artificial Sequence
  Description of Artificial Sequence: Synthetic oligonucleotide
gucccucuacgcuggugau

SEQ ID NO: 1183763 - RNA, 19 nt, Artificial Sequence
  Description of Artificial Sequence: Synthetic oligonucleotide
caucguagugagcgacaau

SEQ ID NO: 1183764 - RNA, 19 nt, Artificial Sequence
  Description of Artificial Sequence: Synthetic oligonucleotide
gccggucccuccugggcca

SEQ ID NO: 1183765 - RNA, 19 nt, Artificial Sequence
  Description of Artificial Sequence: Synthetic oligonucleotide
gggcguccccuucucuguc

SEQ ID NO: 1183766 - RNA, 19 nt, Artificial Sequence
  Description of Artificial Sequence: Synthetic oligonucleotide
ugacaccuccugggucaua

SEQ ID NO: 1183767 - RNA, 19 nt, Artificial Sequence
  Description of Artificial Sequence: Synthetic oligonucleotide
cccgggugacuguucuguc

SEQ ID NO: 1183768 - RNA, 19 nt, Artificial Sequence
  Description of Artificial Sequence: Synthetic oligonucleotide
cccgcuugucagccuuuac

SEQ ID NO: 1183769 - RNA, 19 nt, Artificial Sequence
  Description of Artificial Sequence: Synthetic oligonucleotide
ggcuccgcugguuaccauu

SEQ ID NO: 1183770 - RNA, 19 nt, Artificial Sequence
  Description of Artificial Sequence: Synthetic oligonucleotide
gguugguuggugagccagu

SEQ ID NO: 1183771 - RNA, 19 nt, Artificial Sequence
  Description of Artificial Sequence: Synthetic oligonucleotide
cggggucccgcuugucagc

SEQ ID NO: 1183772 - RNA, 19 nt, Artificial Sequence
  Description of Artificial Sequence: Synthetic oligonucleotide
cgccaagccgagguaugcc

SEQ ID NO: 1183773 - RNA, 19 nt, Artificial Sequence
  Description of Artificial Sequence: Synthetic oligonucleotide
gcccgggugacuguucugu

SEQ ID NO: 1183774 - RNA, 19 nt, Artificial Sequence
  Description of Artificial Sequence: Synthetic oligonucleotide
ccgcacgguggcucuccag

SEQ ID NO: 1183775 - RNA, 19 nt, Artificial Sequence
  Description of Artificial Sequence: Synthetic oligonucleotide
ccacgguguccaggcacag

SEQ ID NO: 1183776 - RNA, 19 nt, Artificial Sequence
  Description of Artificial Sequence: Synthetic oligonucleotide
cgcggucccgcacgguggc

SEQ ID NO: 1183777 - RNA, 19 nt, Artificial Sequence
  Description of Artificial Sequence: Synthetic oligonucleotide
cgggaccgcacguccauga

SEQ ID NO: 1183778 - RNA, 19 nt, Artificial Sequence
  Description of Artificial Sequence: Synthetic oligonucleotide
ccagcguacucaggaaugu

SEQ ID NO: 1183779 - RNA, 19 nt, Artificial Sequence
  Description of Artificial Sequence: Synthetic oligonucleotide
ccacccgggaccgcacguc

SEQ ID NO: 1183780 - RNA, 19 nt, Artificial Sequence
  Description of Artificial Sequence: Synthetic oligonucleotide
ggacggcuguguacgccaa

SEQ ID NO: 1183781 - RNA, 19 nt, Artificial Sequence
  Description of Artificial Sequence: Synthetic oligonucleotide
gcuccgcugguuaccauuu

SEQ ID NO: 1183782 - RNA, 19 nt, Artificial Sequence
  Description of Artificial Sequence: Synthetic oligonucleotide
gggaccgcacguccaugau

SEQ ID NO: 1183783 - RNA, 19 nt, Artificial Sequence
  Description of Artificial Sequence: Synthetic oligonucleotide
gucccgcacgguggcucuc

SEQ ID NO: 1183784 - RNA, 19 nt, Artificial Sequence
  Description of Artificial Sequence: Synthetic oligonucleotide
ccgucccucuacgcuggug

SEQ ID NO: 1183785 - RNA, 19 nt, Artificial Sequence
  Description of Artificial Sequence: Synthetic oligonucleotide
gcagaugggcggggcucuc

SEQ ID NO: 1183786 - RNA, 19 nt, Artificial Sequence
  Description of Artificial Sequence: Synthetic oligonucleotide
ccccuccgaugcgaagaac

SEQ ID NO: 1183787 - RNA, 19 nt, Artificial Sequence
  Description of Artificial Sequence: Synthetic oligonucleotide
caugggugugugggccggu

SEQ ID NO: 1183788 - RNA, 19 nt, Artificial Sequence
  Description of Artificial Sequence: Synthetic oligonucleotide
ccgggaccgcacguccaug

SEQ ID NO: 1183789 - RNA, 19 nt, Artificial Sequence
  Description of Artificial Sequence: Synthetic oligonucleotide
cagcccgagguugguuggu

SEQ ID NO: 1183790 - RNA, 19 nt, Artificial Sequence
  Description of Artificial Sequence: Synthetic oligonucleotide
ccguuagagucggcaccca

SEQ ID NO: 1183791 - RNA, 19 nt, Artificial Sequence
  Description of Artificial Sequence: Synthetic oligonucleotide
caucguccgccagguugau

SEQ ID NO: 1183792 - RNA, 19 nt, Artificial Sequence
  Description of Artificial Sequence: Synthetic oligonucleotide
cccgcacgguggcucucca

SEQ ID NO: 1183793 - RNA, 19 nt, Artificial Sequence
  Description of Artificial Sequence: Synthetic oligonucleotide
ccucuacgcuggugaucaa

SEQ ID NO: 1183794 - RNA, 19 nt, Artificial Sequence
  Description of Artificial Sequence: Synthetic oligonucleotide
ccucggcaaugauccuugu

SEQ ID NO: 1183795 - RNA, 19 nt, Artificial Sequence
  Description of Artificial Sequence: Synthetic oligonucleotide
ccggucccuccugggccac

SEQ ID NO: 1183796 - RNA, 19 nt, Artificial Sequence
  Description of Artificial Sequence: Synthetic oligonucleotide
ggccacccaaaggcaucgu

SEQ ID NO: 1183797 - RNA, 19 nt, Artificial Sequence
  Description of Artificial Sequence: Synthetic oligonucleotide
cggauggcgaagcgcucgu

SEQ ID NO: 1183798 - RNA, 19 nt, Artificial Sequence
  Description of Artificial Sequence: Synthetic oligonucleotide
gggcuccgcugguuaccau

SEQ ID NO: 1183799 - RNA, 19 nt, Artificial Sequence
  Description of Artificial Sequence: Synthetic oligonucleotide
gcguguggcccgggugacu

SEQ ID NO: 1183800 - RNA, 19 nt, Artificial Sequence
  Description of Artificial Sequence: Synthetic oligonucleotide
cggucccuccugggccacc

SEQ ID NO: 1183801 - RNA, 19 nt, Artificial Sequence
  Description of Artificial Sequence: Synthetic oligonucleotide
cugcgcggucccgcacggu

SEQ ID NO: 1183802 - RNA, 19 nt, Artificial Sequence
  Description of Artificial Sequence: Synthetic oligonucleotide
gcggucccgcacgguggcu

SEQ ID NO: 1183803 - RNA, 19 nt, Artificial Sequence
  Description of Artificial Sequence: Synthetic oligonucleotide
cugucuauuauucuaaggg

SEQ ID NO: 1183804 - RNA, 19 nt, Artificial Sequence
  Description of Artificial Sequence: Synthetic oligonucleotide
ucuauuauucuaagggagg

SEQ ID NO: 1183805 - RNA, 19 nt, Artificial Sequence
  Description of Artificial Sequence: Synthetic oligonucleotide
ugaagcacgaaccauaggu

SEQ ID NO: 1183806 - RNA, 19 nt, Artificial Sequence
  Description of Artificial Sequence: Synthetic oligonucleotide
aagcacgaaccauaggucc

SEQ ID NO: 1183807 - RNA, 19 nt, Artificial Sequence
  Description of Artificial Sequence: Synthetic oligonucleotide
aacacacaaauacuaggcg

SEQ ID NO: 1183808 - RNA, 19 nt, Artificial Sequence
  Description of Artificial Sequence: Synthetic oligonucleotide
uuugagggcacacauaaca

SEQ ID NO: 1183809 - RNA, 19 nt, Artificial Sequence
  Description of Artificial Sequence: Synthetic oligonucleotide
ucgaucuuaacuuugcaug

SEQ ID NO: 1183810 - RNA, 19 nt, Artificial Sequence
  Description of Artificial Sequence: Synthetic oligonucleotide
aggaaaacucacuuugccc

SEQ ID NO: 1183811 - RNA, 19 nt, Artificial Sequence
  Description of Artificial Sequence: Synthetic oligonucleotide
ugguguuuaguauaggggc

SEQ ID NO: 1183812 - RNA, 19 nt, Artificial Sequence
  Description of Artificial Sequence: Synthetic oligonucleotide
ugcuaugacaaacacacaa

SEQ ID NO: 1183813 - RNA, 19 nt, Artificial Sequence
  Description of Artificial Sequence: Synthetic oligonucleotide
aaugcugcgugugagugcg

SEQ ID NO: 1183814 - RNA, 19 nt, Artificial Sequence
  Description of Artificial Sequence: Synthetic oligonucleotide
caagcagauucucagagcc

SEQ ID NO: 1183815 - RNA, 19 nt, Artificial Sequence
  Description of Artificial Sequence: Synthetic oligonucleotide
aaauacuaggcgaacuuuc

SEQ ID NO: 1183816 - RNA, 19 nt, Artificial Sequence
  Description of Artificial Sequence: Synthetic oligonucleotide
uggcccuuugcucaaaagg

SEQ ID NO: 1183817 - RNA, 19 nt, Artificial Sequence
  Description of Artificial Sequence: Synthetic oligonucleotide
ucaaaagggguuucgaagu

SEQ ID NO: 1183818 - RNA, 19 nt, Artificial Sequence
  Description of Artificial Sequence: Synthetic oligonucleotide
ugucuauuauucuaaggga

SEQ ID NO: 1183819 - RNA, 19 nt, Artificial Sequence
  Description of Artificial Sequence: Synthetic oligonucleotide
ucucgcgucaaauacauau

SEQ ID NO: 1183820 - RNA, 19 nt, Artificial Sequence
  Description of Artificial Sequence: Synthetic oligonucleotide
ucaagacugucuauuauuc

SEQ ID NO: 1183821 - RNA, 19 nt, Artificial Sequence
  Description of Artificial Sequence: Synthetic oligonucleotide
ggugcuaugacaaacacac

SEQ ID NO: 1183822 - RNA, 19 nt, Artificial Sequence
  Description of Artificial Sequence: Synthetic oligonucleotide
uuagcuucguuauccgagg

SEQ ID NO: 1183823 - RNA, 19 nt, Artificial Sequence
  Description of Artificial Sequence: Synthetic oligonucleotide
acugucuauuauucuaagg

SEQ ID NO: 1183824 - RNA, 19 nt, Artificial Sequence
  Description of Artificial Sequence: Synthetic oligonucleotide
aagacugucuauuauucua

SEQ ID NO: 1183825 - RNA, 19 nt, Artificial Sequence
  Description of Artificial Sequence: Synthetic oligonucleotide
ucucgguucauuuucuuga

SEQ ID NO: 1183826 - RNA, 19 nt, Artificial Sequence
  Description of Artificial Sequence: Synthetic oligonucleotide
uuuauacucagggagggga

SEQ ID NO: 1183827 - RNA, 19 nt, Artificial Sequence
  Description of Artificial Sequence: Synthetic oligonucleotide
acaugcagcagacauucuc

SEQ ID NO: 1183828 - RNA, 19 nt, Artificial Sequence
  Description of Artificial Sequence: Synthetic oligonucleotide
gauguuaguagaugggaga

SEQ ID NO: 1183829 - RNA, 19 nt, Artificial Sequence
  Description of Artificial Sequence: Synthetic oligonucleotide
agguuaauggucuugcuaa

SEQ ID NO: 1183830 - RNA, 19 nt, Artificial Sequence
  Description of Artificial Sequence: Synthetic oligonucleotide
uuccccuauaaucgggugg

SEQ ID NO: 1183831 - RNA, 19 nt, Artificial Sequence
  Description of Artificial Sequence: Synthetic oligonucleotide
agcaccccauuucucaugc

SEQ ID NO: 1183832 - RNA, 19 nt, Artificial Sequence
  Description of Artificial Sequence: Synthetic oligonucleotide
acacuagguggguaggagc

SEQ ID NO: 1183833 - RNA, 19 nt, Artificial Sequence
  Description of Artificial Sequence: Synthetic oligonucleotide
acacacaaauacuaggcga

SEQ ID NO: 1183834 - RNA, 19 nt, Artificial Sequence
  Description of Artificial Sequence: Synthetic oligonucleotide
ucgcgucaaauacauauug

SEQ ID NO: 1183835 - RNA, 19 nt, Artificial Sequence
  Description of Artificial Sequence: Synthetic oligonucleotide
uccagcgccgaguagcucg

SEQ ID NO: 1183836 - RNA, 19 nt, Artificial Sequence
  Description of Artificial Sequence: Synthetic oligonucleotide
agcugcgagagguaggacg

SEQ ID NO: 1183837 - RNA, 19 nt, Artificial Sequence
  Description of Artificial Sequence: Synthetic oligonucleotide
uauuauucuaagggagggg

SEQ ID NO: 1183838 - RNA, 19 nt, Artificial Sequence
  Description of Artificial Sequence: Synthetic oligonucleotide
gucuauuauucuaagggag

SEQ ID NO: 1183839 - RNA, 19 nt, Artificial Sequence
  Description of Artificial Sequence: Synthetic oligonucleotide
guuaguagaugggagauac

SEQ ID NO: 1183840 - RNA, 19 nt, Artificial Sequence
  Description of Artificial Sequence: Synthetic oligonucleotide
aguucggaguuacauugcg

SEQ ID NO: 1183841 - RNA, 19 nt, Artificial Sequence
  Description of Artificial Sequence: Synthetic oligonucleotide
ucuuaacuuugcauggaga

SEQ ID NO: 1183842 - RNA, 19 nt, Artificial Sequence
  Description of Artificial Sequence: Synthetic oligonucleotide
guuucgaagucguuggccc

SEQ ID NO: 1183843 - RNA, 19 nt, Artificial Sequence
  Description of Artificial Sequence: Synthetic oligonucleotide
guugggucuagacacuggg

SEQ ID NO: 1183844 - RNA, 19 nt, Artificial Sequence
  Description of Artificial Sequence: Synthetic oligonucleotide
auuauucuaagggagggga

SEQ ID NO: 1183845 - RNA, 19 nt, Artificial Sequence
  Description of Artificial Sequence: Synthetic oligonucleotide
aauuggaggucaguucccg

SEQ ID NO: 1183846 - RNA, 19 nt, Artificial Sequence
  Description of Artificial Sequence: Synthetic oligonucleotide
uucuuuccccuauaaucgg

SEQ ID NO: 1183847 - RNA, 19 nt, Artificial Sequence
  Description of Artificial Sequence: Synthetic oligonucleotide
aucuuaacuuugcauggag

SEQ ID NO: 1183848 - RNA, 19 nt, Artificial Sequence
  Description of Artificial Sequence: Synthetic oligonucleotide
uuuaucuccucuuuagcuu

SEQ ID NO: 1183849 - RNA, 19 nt, Artificial Sequence
  Description of Artificial Sequence: Synthetic oligonucleotide
ucccagauugcauauacau

SEQ ID NO: 1183850 - RNA, 19 nt, Artificial Sequence
  Description of Artificial Sequence: Synthetic oligonucleotide
uaggcgaacuuucaagacu

SEQ ID NO: 1183851 - RNA, 19 nt, Artificial Sequence
  Description of Artificial Sequence: Synthetic oligonucleotide
cugcgcuccgguuauagcg

SEQ ID NO: 1183852 - RNA, 19 nt, Artificial Sequence
  Description of Artificial Sequence: Synthetic oligonucleotide
ugucuguaagguuaauggu

SEQ ID NO: 1183853 - RNA, 19 nt, Artificial Sequence
  Description of Artificial Sequence: Synthetic oligonucleotide
cuuaacuuugcauggagaa

SEQ ID NO: 1183854 - RNA, 19 nt, Artificial Sequence
  Description of Artificial Sequence: Synthetic oligonucleotide
uauucuaagggaggggaug

SEQ ID NO: 1183855 - RNA, 19 nt, Artificial Sequence
  Description of Artificial Sequence: Synthetic oligonucleotide
aguagcucgggcuggcgcg

SEQ ID NO: 1183856 - RNA, 19 nt, Artificial Sequence
  Description of Artificial Sequence: Synthetic oligonucleotide
gugagugagggacugacac

SEQ ID NO: 1183857 - RNA, 19 nt, Artificial Sequence
  Description of Artificial Sequence: Synthetic oligonucleotide
ggaauagagagcugccucg

SEQ ID NO: 1183858 - RNA, 19 nt, Artificial Sequence
  Description of Artificial Sequence: Synthetic oligonucleotide
aauacuaggcgaacuuuca

SEQ ID NO: 1183859 - RNA, 19 nt, Artificial Sequence
  Description of Artificial Sequence: Synthetic oligonucleotide
uugcuaaucuccaggcggc

SEQ ID NO: 1183860 - RNA, 19 nt, Artificial Sequence
  Description of Artificial Sequence: Synthetic oligonucleotide
acuuugcucggucuugauc

SEQ ID NO: 1183861 - RNA, 19 nt, Artificial Sequence
  Description of Artificial Sequence: Synthetic oligonucleotide
guaagguuaauggucuugc

SEQ ID NO: 1183862 - RNA, 19 nt, Artificial Sequence
  Description of Artificial Sequence: Synthetic oligonucleotide
aaccauaggucccuuggaa

SEQ ID NO: 1183863 - RNA, 19 nt, Artificial Sequence
  Description of Artificial Sequence: Synthetic oligonucleotide
acaaauacuaggcgaacuu

SEQ ID NO: 1183864 - RNA, 19 nt, Artificial Sequence
  Description of Artificial Sequence: Synthetic oligonucleotide
gauuccagauguuccgcgc

SEQ ID NO: 1183865 - RNA, 19 nt, Artificial Sequence
  Description of Artificial Sequence: Synthetic oligonucleotide
uuuugggcccgccagacuu

SEQ ID NO: 1183866 - RNA, 19 nt, Artificial Sequence
  Description of Artificial Sequence: Synthetic oligonucleotide
ucggaguuacauugcgagg

SEQ ID NO: 1183867 - RNA, 19 nt, Artificial Sequence
  Description of Artificial Sequence: Synthetic oligonucleotide
aagggcuccgcguacgagu

SEQ ID NO: 1183868 - RNA, 19 nt, Artificial Sequence
  Description of Artificial Sequence: Synthetic oligonucleotide
uuaacuuugcauggagaac

SEQ ID NO: 1183869 - RNA, 19 nt, Artificial Sequence
  Description of Artificial Sequence: Synthetic oligonucleotide
agauguuaguagaugggag

SEQ ID NO: 1183870 - RNA, 19 nt, Artificial Sequence
  Description of Artificial Sequence: Synthetic oligonucleotide
gggacugacacacacacca

SEQ ID NO: 1183871 - RNA, 19 nt, Artificial Sequence
  Description of Artificial Sequence: Synthetic oligonucleotide
auagcgcucuccuccuccc

SEQ ID NO: 1183872 - RNA, 19 nt, Artificial Sequence
  Description of Artificial Sequence: Synthetic oligonucleotide
aguagaugggagauacagg

SEQ ID NO: 1183873 - RNA, 19 nt, Artificial Sequence
  Description of Artificial Sequence: Synthetic oligonucleotide
gauccgauucucucgguuc

SEQ ID NO: 1183874 - RNA, 19 nt, Artificial Sequence
  Description of Artificial Sequence: Synthetic oligonucleotide
gaaagcgagggcgcgagcc

SEQ ID NO: 1183875 - RNA, 19 nt, Artificial Sequence
  Description of Artificial Sequence: Synthetic oligonucleotide
ccuauaaucggguggauuc

SEQ ID NO: 1183876 - RNA, 19 nt, Artificial Sequence
  Description of Artificial Sequence: Synthetic oligonucleotide
ugccuuuugggcccgccag

SEQ ID NO: 1183877 - RNA, 19 nt, Artificial Sequence
  Description of Artificial Sequence: Synthetic oligonucleotide
cuauaaucggguggauucg

SEQ ID NO: 1183878 - RNA, 19 nt, Artificial Sequence
  Description of Artificial Sequence: Synthetic oligonucleotide
uuauacucagggaggggaa

SEQ ID NO: 1183879 - RNA, 19 nt, Artificial Sequence
  Description of Artificial Sequence: Synthetic oligonucleotide
agauugcauauacauuccu

SEQ ID NO: 1183880 - RNA, 19 nt, Artificial Sequence
  Description of Artificial Sequence: Synthetic oligonucleotide
ucuaagggaggggaugcag

SEQ ID NO: 1183881 - RNA, 19 nt, Artificial Sequence
  Description of Artificial Sequence: Synthetic oligonucleotide
caccccgaaacccagcacc

SEQ ID NO: 1183882 - RNA, 19 nt, Artificial Sequence
  Description of Artificial Sequence: Synthetic oligonucleotide
auuaaaauuggaggucagu

SEQ ID NO: 1183883 - RNA, 19 nt, Artificial Sequence
  Description of Artificial Sequence: Synthetic oligonucleotide
ucccucuuggaaagcgagg

SEQ ID NO: 1183884 - RNA, 19 nt, Artificial Sequence
  Description of Artificial Sequence: Synthetic oligonucleotide
uccgcguacgaguucggag

SEQ ID NO: 1183885 - RNA, 19 nt, Artificial Sequence
  Description of Artificial Sequence: Synthetic oligonucleotide
agcacgaaccauagguccc

SEQ ID NO: 1183886 - RNA, 19 nt, Artificial Sequence
  Description of Artificial Sequence: Synthetic oligonucleotide
gggguuucgaagucguugg

SEQ ID NO: 1183887 - RNA, 19 nt, Artificial Sequence
  Description of Artificial Sequence: Synthetic oligonucleotide
uuauucuaagggaggggau

SEQ ID NO: 1183888 - RNA, 19 nt, Artificial Sequence
  Description of Artificial Sequence: Synthetic oligonucleotide
cuaggcgaacuuucaagac

SEQ ID NO: 1183889 - RNA, 19 nt, Artificial Sequence
  Description of Artificial Sequence: Synthetic oligonucleotide
gaugggagauacagggugc

SEQ ID NO: 1183890 - RNA, 19 nt, Artificial Sequence
  Description of Artificial Sequence: Synthetic oligonucleotide
auuuauacucagggagggg

SEQ ID NO: 1183891 - RNA, 19 nt, Artificial Sequence
  Description of Artificial Sequence: Synthetic oligonucleotide
uucugagauguuaguagau

SEQ ID NO: 1183892 - RNA, 19 nt, Artificial Sequence
  Description of Artificial Sequence: Synthetic oligonucleotide
ugcgcuccgguuauagcgc

SEQ ID NO: 1183893 - RNA, 19 nt, Artificial Sequence
  Description of Artificial Sequence: Synthetic oligonucleotide
gcauuuauacucagggagg

SEQ ID NO: 1183894 - RNA, 19 nt, Artificial Sequence
  Description of Artificial Sequence: Synthetic oligonucleotide
uuucgaagucguuggcccc

SEQ ID NO: 1183895 - RNA, 19 nt, Artificial Sequence
  Description of Artificial Sequence: Synthetic oligonucleotide
uuuaguauaggggcaccuc

SEQ ID NO: 1183896 - RNA, 19 nt, Artificial Sequence
  Description of Artificial Sequence: Synthetic oligonucleotide
gagugcgugggugagugag

SEQ ID NO: 1183897 - RNA, 19 nt, Artificial Sequence
  Description of Artificial Sequence: Synthetic oligonucleotide
uacgaguucggaguuacau

SEQ ID NO: 1183898 - RNA, 19 nt, Artificial Sequence
  Description of Artificial Sequence: Synthetic oligonucleotide
uaagguuaauggucuugcu

SEQ ID NO: 1183899 - RNA, 19 nt, Artificial Sequence
  Description of Artificial Sequence: Synthetic oligonucleotide
gauacagggugcugggaga

SEQ ID NO: 1183900 - RNA, 19 nt, Artificial Sequence
  Description of Artificial Sequence: Synthetic oligonucleotide
uuugcaggcguguugcauu

SEQ ID NO: 1183901 - RNA, 19 nt, Artificial Sequence
  Description of Artificial Sequence: Synthetic oligonucleotide
acagaaugcugcgugugag

SEQ ID NO: 1183902 - RNA, 19 nt, Artificial Sequence
  Description of Artificial Sequence: Synthetic oligonucleotide
uuaguagaugggagauaca

SEQ ID NO: 1183903 - RNA, 19 nt, Artificial Sequence
  Description of Artificial Sequence: Synthetic oligonucleotide
uugacacuagguggguagg

SEQ ID NO: 1183904 - RNA, 19 nt, Artificial Sequence
  Description of Artificial Sequence: Synthetic oligonucleotide
auucgaucuuaacuuugca

SEQ ID NO: 1183905 - RNA, 19 nt, Artificial Sequence
  Description of Artificial Sequence: Synthetic oligonucleotide
agucugcggucuuugcccg

SEQ ID NO: 1183906 - RNA, 19 nt, Artificial Sequence
  Description of Artificial Sequence: Synthetic oligonucleotide
uccccuauaaucgggugga

SEQ ID NO: 1183907 - RNA, 19 nt, Artificial Sequence
  Description of Artificial Sequence: Synthetic oligonucleotide
uuuccccuauaaucgggug

SEQ ID NO: 1183908 - RNA, 19 nt, Artificial Sequence
  Description of Artificial Sequence: Synthetic oligonucleotide
uauaaucggguggauucga

SEQ ID NO: 1183909 - RNA, 19 nt, Artificial Sequence
  Description of Artificial Sequence: Synthetic oligonucleotide
gacacuagguggguaggag

SEQ ID NO: 1183910 - RNA, 19 nt, Artificial Sequence
  Description of Artificial Sequence: Synthetic oligonucleotide
ggugggaauagagagcugc

SEQ ID NO: 1183911 - RNA, 19 nt, Artificial Sequence
  Description of Artificial Sequence: Synthetic oligonucleotide
cacacaaauacuaggcgaa

SEQ ID NO: 1183912 - RNA, 19 nt, Artificial Sequence
  Description of Artificial Sequence: Synthetic oligonucleotide
aggcgaacuuucaagacug

SEQ ID NO: 1183913 - RNA, 19 nt, Artificial Sequence
  Description of Artificial Sequence: Synthetic oligonucleotide
ccuccaugaagcacgaacc

SEQ ID NO: 1183914 - RNA, 19 nt, Artificial Sequence
  Description of Artificial Sequence: Synthetic oligonucleotide
agggguuucgaagucguug

SEQ ID NO: 1183915 - RNA, 19 nt, Artificial Sequence
  Description of Artificial Sequence: Synthetic oligonucleotide
gaagcacgaaccauagguc

SEQ ID NO: 1183916 - RNA, 19 nt, Artificial Sequence
  Description of Artificial Sequence: Synthetic oligonucleotide
uguuuaguauaggggcacc

SEQ ID NO: 1183917 - RNA, 19 nt, Artificial Sequence
  Description of Artificial Sequence: Synthetic oligonucleotide
uaaucggguggauucgauc

SEQ ID NO: 1183918 - RNA, 19 nt, Artificial Sequence
  Description of Artificial Sequence: Synthetic oligonucleotide
cuuugcccguuccuuuucg

SEQ ID NO: 1183919 - RNA, 19 nt, Artificial Sequence
  Description of Artificial Sequence: Synthetic oligonucleotide
guggauucgaucuuaacuu

SEQ ID NO: 1183920 - RNA, 19 nt, Artificial Sequence
  Description of Artificial Sequence: Synthetic oligonucleotide
agcgccgaguagcucgggc

SEQ ID NO: 1183921 - RNA, 19 nt, Artificial Sequence
  Description of Artificial Sequence: Synthetic oligonucleotide
uugcucaaaagggguuucg

SEQ ID NO: 1183922 - RNA, 19 nt, Artificial Sequence
  Description of Artificial Sequence: Synthetic oligonucleotide
gguggauucgaucuuaacu

SEQ ID NO: 1183923 - RNA, 19 nt, Artificial Sequence
  Description of Artificial Sequence: Synthetic oligonucleotide
aucaccccgcaguugaagu

SEQ ID NO: 1183924 - RNA, 19 nt, Artificial Sequence
  Description of Artificial Sequence: Synthetic oligonucleotide
uucguuauccgaggugucu

SEQ ID NO: 1183925 - RNA, 19 nt, Artificial Sequence
  Description of Artificial Sequence: Synthetic oligonucleotide
auguuaguagaugggagau

SEQ ID NO: 1183926 - RNA, 19 nt, Artificial Sequence
  Description of Artificial Sequence: Synthetic oligonucleotide
gaagucacucccagauugc

SEQ ID NO: 1183927 - RNA, 19 nt, Artificial Sequence
  Description of Artificial Sequence: Synthetic oligonucleotide
uugggucuagacacugggu

SEQ ID NO: 1183928 - RNA, 19 nt, Artificial Sequence
  Description of Artificial Sequence: Synthetic oligonucleotide
ucguuauccgaggugucug

SEQ ID NO: 1183929 - RNA, 19 nt, Artificial Sequence
  Description of Artificial Sequence: Synthetic oligonucleotide
uuugcccguuccuuuucgc

SEQ ID NO: 1183930 - RNA, 19 nt, Artificial Sequence
  Description of Artificial Sequence: Synthetic oligonucleotide
cgaucuuaacuuugcaugg

SEQ ID NO: 1183931 - RNA, 19 nt, Artificial Sequence
  Description of Artificial Sequence: Synthetic oligonucleotide
uggauucgaucuuaacuuu

SEQ ID NO: 1183932 - RNA, 19 nt, Artificial Sequence
  Description of Artificial Sequence: Synthetic oligonucleotide
uggaaagcgagggcgcgag

SEQ ID NO: 1183933 - RNA, 19 nt, Artificial Sequence
  Description of Artificial Sequence: Synthetic oligonucleotide
caaaagggguuucgaaguc

SEQ ID NO: 1183934 - RNA, 19 nt, Artificial Sequence
  Description of Artificial Sequence: Synthetic oligonucleotide
gaaccauaggucccuugga

SEQ ID NO: 1183935 - RNA, 19 nt, Artificial Sequence
  Description of Artificial Sequence: Synthetic oligonucleotide
uaccucgugcuccccaaga

SEQ ID NO: 1183936 - RNA, 19 nt, Artificial Sequence
  Description of Artificial Sequence: Synthetic oligonucleotide
uuccgcucuuugcugucag

SEQ ID NO: 1183937 - RNA, 19 nt, Artificial Sequence
  Description of Artificial Sequence: Synthetic oligonucleotide
guuauccgaggugucuggg

SEQ ID NO: 1183938 - RNA, 19 nt, Artificial Sequence
  Description of Artificial Sequence: Synthetic oligonucleotide
cagacauucuccuccuuga

SEQ ID NO: 1183939 - RNA, 19 nt, Artificial Sequence
  Description of Artificial Sequence: Synthetic oligonucleotide
auacauuccugcgcuccgg

SEQ ID NO: 1183940 - RNA, 19 nt, Artificial Sequence
  Description of Artificial Sequence: Synthetic oligonucleotide
cgaguucggaguuacauug

SEQ ID NO: 1183941 - RNA, 19 nt, Artificial Sequence
  Description of Artificial Sequence: Synthetic oligonucleotide
uguccagcgccgaguagcu

SEQ ID NO: 1183942 - RNA, 19 nt, Artificial Sequence
  Description of Artificial Sequence: Synthetic oligonucleotide
ugcggucuuugcccguucc

SEQ ID NO: 1183943 - RNA, 19 nt, Artificial Sequence
  Description of Artificial Sequence: Synthetic oligonucleotide
cuucaagcagauucucaga

SEQ ID NO: 1183944 - RNA, 19 nt, Artificial Sequence
  Description of Artificial Sequence: Synthetic oligonucleotide
cuggcgcgauaguagcugg

SEQ ID NO: 1183945 - RNA, 19 nt, Artificial Sequence
  Description of Artificial Sequence: Synthetic oligonucleotide
gucagccaauuuccugugg

SEQ ID NO: 1183946 - RNA, 19 nt, Artificial Sequence
  Description of Artificial Sequence: Synthetic oligonucleotide
gcugcgagagguaggacgg

SEQ ID NO: 1183947 - RNA, 19 nt, Artificial Sequence
  Description of Artificial Sequence: Synthetic oligonucleotide
accccgaaacccagcaccc

SEQ ID NO: 1183948 - RNA, 19 nt, Artificial Sequence
  Description of Artificial Sequence: Synthetic oligonucleotide
gugagugcgugggugagug

SEQ ID NO: 1183949 - RNA, 19 nt, Artificial Sequence
  Description of Artificial Sequence: Synthetic oligonucleotide
gggaauagagagcugccuc

SEQ ID NO: 1183950 - RNA, 19 nt, Artificial Sequence
  Description of Artificial Sequence: Synthetic oligonucleotide
uccaugaagcacgaaccau

SEQ ID NO: 1183951 - RNA, 19 nt, Artificial Sequence
  Description of Artificial Sequence: Synthetic oligonucleotide
agacugucuauuauucuaa

SEQ ID NO: 1183952 - RNA, 19 nt, Artificial Sequence
  Description of Artificial Sequence: Synthetic oligonucleotide
agauguuccgcgcgcgggu

SEQ ID NO: 1183953 - RNA, 19 nt, Artificial Sequence
  Description of Artificial Sequence: Synthetic oligonucleotide
gggcacacauaacaccccg

SEQ ID NO: 1183954 - RNA, 19 nt, Artificial Sequence
  Description of Artificial Sequence: Synthetic oligonucleotide
guguugcauuuauacucag

SEQ ID NO: 1183955 - RNA, 19 nt, Artificial Sequence
  Description of Artificial Sequence: Synthetic oligonucleotide
cagccaauuuccuguggug

SEQ ID NO: 1183956 - RNA, 19 nt, Artificial Sequence
  Description of Artificial Sequence: Synthetic oligonucleotide
uagcuucguuauccgaggu

SEQ ID NO: 1183957 - RNA, 19 nt, Artificial Sequence
  Description of Artificial Sequence: Synthetic oligonucleotide
gaguucggaguuacauugc

SEQ ID NO: 1183958 - RNA, 19 nt, Artificial Sequence
  Description of Artificial Sequence: Synthetic oligonucleotide
cauauacauuccugcgcuc

SEQ ID NO: 1183959 - RNA, 19 nt, Artificial Sequence
  Description of Artificial Sequence: Synthetic oligonucleotide
gacccucucugguuguuuc

SEQ ID NO: 1183960 - RNA, 19 nt, Artificial Sequence
  Description of Artificial Sequence: Synthetic oligonucleotide
uguuaguagaugggagaua

SEQ ID NO: 1183961 - RNA, 19 nt, Artificial Sequence
  Description of Artificial Sequence: Synthetic oligonucleotide
uccugcgcuccgguuauag

SEQ ID NO: 1183962 - RNA, 19 nt, Artificial Sequence
  Description of Artificial Sequence: Synthetic oligonucleotide
ggaggguugggucuagaca

SEQ ID NO: 1183963 - RNA, 19 nt, Artificial Sequence
  Description of Artificial Sequence: Synthetic oligonucleotide
cagauguuccgcgcgcggg

SEQ ID NO: 1183964 - RNA, 19 nt, Artificial Sequence
  Description of Artificial Sequence: Synthetic oligonucleotide
ccuuuucgcucuccgaggg

SEQ ID NO: 1183965 - RNA, 19 nt, Artificial Sequence
  Description of Artificial Sequence: Synthetic oligonucleotide
cuguacaugcagcagacau

SEQ ID NO: 1183966 - RNA, 19 nt, Artificial Sequence
  Description of Artificial Sequence: Synthetic oligonucleotide
uccgcgcgcggguugagac

SEQ ID NO: 1183967 - RNA, 19 nt, Artificial Sequence
  Description of Artificial Sequence: Synthetic oligonucleotide
uggguacagguaccucgug

SEQ ID NO: 1183968 - RNA, 19 nt, Artificial Sequence
  Description of Artificial Sequence: Synthetic oligonucleotide
gugggaauagagagcugcc

SEQ ID NO: 1183969 - RNA, 19 nt, Artificial Sequence
  Description of Artificial Sequence: Synthetic oligonucleotide
ccaacagguuguuccaggc

SEQ ID NO: 1183970 - RNA, 19 nt, Artificial Sequence
  Description of Artificial Sequence: Synthetic oligonucleotide
ugcucggucuugaucucau

SEQ ID NO: 1183971 - RNA, 19 nt, Artificial Sequence
  Description of Artificial Sequence: Synthetic oligonucleotide
ucccggauccgauucucuc

SEQ ID NO: 1183972 - RNA, 19 nt, Artificial Sequence
  Description of Artificial Sequence: Synthetic oligonucleotide
gcugaggcgauuccagaug

SEQ ID NO: 1183973 - RNA, 19 nt, Artificial Sequence
  Description of Artificial Sequence: Synthetic oligonucleotide
gcgguaggcggcuuugggg

SEQ ID NO: 1183974 - RNA, 19 nt, Artificial Sequence
  Description of Artificial Sequence: Synthetic oligonucleotide
gcccgccagacuuugcucg

SEQ ID NO: 1183975 - RNA, 19 nt, Artificial Sequence
  Description of Artificial Sequence: Synthetic oligonucleotide
cuucguuauccgagguguc

SEQ ID NO: 1183976 - RNA, 19 nt, Artificial Sequence
  Description of Artificial Sequence: Synthetic oligonucleotide
acgaaccauaggucccuug

SEQ ID NO: 1183977 - RNA, 19 nt, Artificial Sequence
  Description of Artificial Sequence: Synthetic oligonucleotide
gacaggacuccggcagggg

SEQ ID NO: 1183978 - RNA, 19 nt, Artificial Sequence
  Description of Artificial Sequence: Synthetic oligonucleotide
uuauagcgcucuccuccuc

SEQ ID NO: 1183979 - RNA, 19 nt, Artificial Sequence
  Description of Artificial Sequence: Synthetic oligonucleotide
agucguuggccccggcaca

SEQ ID NO: 1183980 - RNA, 19 nt, Artificial Sequence
  Description of Artificial Sequence: Synthetic oligonucleotide
ggcguuuuguccagcgccg

SEQ ID NO: 1183981 - RNA, 19 nt, Artificial Sequence
  Description of Artificial Sequence: Synthetic oligonucleotide
ugcgagagguaggacgggu

SEQ ID NO: 1183982 - RNA, 19 nt, Artificial Sequence
  Description of Artificial Sequence: Synthetic oligonucleotide
uccgagacccucucugguu

SEQ ID NO: 1183983 - RNA, 19 nt, Artificial Sequence
  Description of Artificial Sequence: Synthetic oligonucleotide
uucuaagggaggggaugca

SEQ ID NO: 1183984 - RNA, 19 nt, Artificial Sequence
  Description of Artificial Sequence: Synthetic oligonucleotide
caguggggcguuuugucca

SEQ ID NO: 1183985 - RNA, 19 nt, Artificial Sequence
  Description of Artificial Sequence: Synthetic oligonucleotide
ggcuccgcguacgaguucg

SEQ ID NO: 1183986 - RNA, 19 nt, Artificial Sequence
  Description of Artificial Sequence: Synthetic oligonucleotide
uuggaaagcgagggcgcga

SEQ ID NO: 1183987 - RNA, 19 nt, Artificial Sequence
  Description of Artificial Sequence: Synthetic oligonucleotide
augcuuuagcuggaagccu

SEQ ID NO: 1183988 - RNA, 19 nt, Artificial Sequence
  Description of Artificial Sequence: Synthetic oligonucleotide
augggagauacagggugcu

SEQ ID NO: 1183989 - RNA, 19 nt, Artificial Sequence
  Description of Artificial Sequence: Synthetic oligonucleotide
guuauagcgcucuccuccu

SEQ ID NO: 1183990 - RNA, 19 nt, Artificial Sequence
  Description of Artificial Sequence: Synthetic oligonucleotide
caucaccccgcaguugaag

SEQ ID NO: 1183991 - RNA, 19 nt, Artificial Sequence
  Description of Artificial Sequence: Synthetic oligonucleotide
ugggagauacagggugcug

SEQ ID NO: 1183992 - RNA, 19 nt, Artificial Sequence
  Description of Artificial Sequence: Synthetic oligonucleotide
agguaccucgugcucccca

SEQ ID NO: 1183993 - RNA, 19 nt, Artificial Sequence
  Description of Artificial Sequence: Synthetic oligonucleotide
caagacugucuauuauucu

SEQ ID NO: 1183994 - RNA, 19 nt, Artificial Sequence
  Description of Artificial Sequence: Synthetic oligonucleotide
cgcgauaguagcuggguac

SEQ ID NO: 1183995 - RNA, 19 nt, Artificial Sequence
  Description of Artificial Sequence: Synthetic oligonucleotide
uugcucggucuugaucuca

SEQ ID NO: 1183996 - RNA, 19 nt, Artificial Sequence
  Description of Artificial Sequence: Synthetic oligonucleotide
ucucaugcuuuagcuggaa

SEQ ID NO: 1183997 - RNA, 19 nt, Artificial Sequence
  Description of Artificial Sequence: Synthetic oligonucleotide
ggcacuuuucgcccgcuuc

SEQ ID NO: 1183998 - RNA, 19 nt, Artificial Sequence
  Description of Artificial Sequence: Synthetic oligonucleotide
cuuuccccuauaaucgggu

SEQ ID NO: 1183999 - RNA, 19 nt, Artificial Sequence
  Description of Artificial Sequence: Synthetic oligonucleotide
caucuuugagggcacacau

SEQ ID NO: 1184000 - RNA, 19 nt, Artificial Sequence
  Description of Artificial Sequence: Synthetic oligonucleotide
guaccucgugcuccccaag

SEQ ID NO: 1184001 - RNA, 19 nt, Artificial Sequence
  Description of Artificial Sequence: Synthetic oligonucleotide
guucggaguuacauugcga

SEQ ID NO: 1184002 - RNA, 19 nt, Artificial Sequence
  Description of Artificial Sequence: Synthetic oligonucleotide
uguuccgcgcgcggguuga

SEQ ID NO: 1184003 - RNA, 19 nt, Artificial Sequence
  Description of Artificial Sequence: Synthetic oligonucleotide
gcucaaaagggguuucgaa

SEQ ID NO: 1184004 - RNA, 19 nt, Artificial Sequence
  Description of Artificial Sequence: Synthetic oligonucleotide
uccuugacacuaggugggu

SEQ ID NO: 1184005 - RNA, 19 nt, Artificial Sequence
  Description of Artificial Sequence: Synthetic oligonucleotide
ucggguggauucgaucuua

SEQ ID NO: 1184006 - RNA, 19 nt, Artificial Sequence
  Description of Artificial Sequence: Synthetic oligonucleotide
cgcggguugagacuggccc

SEQ ID NO: 1184007 - RNA, 19 nt, Artificial Sequence
  Description of Artificial Sequence: Synthetic oligonucleotide
cacacauaacaccccgaaa

SEQ ID NO: 1184008 - RNA, 19 nt, Artificial Sequence
  Description of Artificial Sequence: Synthetic oligonucleotide
gcgcucucgcgucaaauac

SEQ ID NO: 1184009 - RNA, 19 nt, Artificial Sequence
  Description of Artificial Sequence: Synthetic oligonucleotide
gcacacauaacaccccgaa

SEQ ID NO: 1184010 - RNA, 19 nt, Artificial Sequence
  Description of Artificial Sequence: Synthetic oligonucleotide
ugaggcgauuccagauguu

SEQ ID NO: 1184011 - RNA, 19 nt, Artificial Sequence
  Description of Artificial Sequence: Synthetic oligonucleotide
aucggguggauucgaucuu

SEQ ID NO: 1184012 - RNA, 19 nt, Artificial Sequence
  Description of Artificial Sequence: Synthetic oligonucleotide
cgucugguguuuaguauag

SEQ ID NO: 1184013 - RNA, 19 nt, Artificial Sequence
  Description of Artificial Sequence: Synthetic oligonucleotide
auaaucggguggauucgau

SEQ ID NO: 1184014 - RNA, 19 nt, Artificial Sequence
  Description of Artificial Sequence: Synthetic oligonucleotide
auguuccgcgcgcggguug

SEQ ID NO: 1184015 - RNA, 19 nt, Artificial Sequence
  Description of Artificial Sequence: Synthetic oligonucleotide
ugagugcgugggugaguga

SEQ ID NO: 1184016 - RNA, 19 nt, Artificial Sequence
  Description of Artificial Sequence: Synthetic oligonucleotide
guuuaguauaggggcaccu

SEQ ID NO: 1184017 - RNA, 19 nt, Artificial Sequence
  Description of Artificial Sequence: Synthetic oligonucleotide
gcggcuuuggggucgcccc

SEQ ID NO: 1184018 - RNA, 19 nt, Artificial Sequence
  Description of Artificial Sequence: Synthetic oligonucleotide
gggaggguugggucuagac

SEQ ID NO: 1184019 - RNA, 19 nt, Artificial Sequence
  Description of Artificial Sequence: Synthetic oligonucleotide
cugaggcgauuccagaugu

SEQ ID NO: 1184020 - RNA, 19 nt, Artificial Sequence
  Description of Artificial Sequence: Synthetic oligonucleotide
uaaucuccaggcggcgcuc

SEQ ID NO: 1184021 - RNA, 19 nt, Artificial Sequence
  Description of Artificial Sequence: Synthetic oligonucleotide
gcuucguuauccgaggugu

SEQ ID NO: 1184022 - RNA, 19 nt, Artificial Sequence
  Description of Artificial Sequence: Synthetic oligonucleotide
agucacucccagauugcau

SEQ ID NO: 1184023 - RNA, 19 nt, Artificial Sequence
  Description of Artificial Sequence: Synthetic oligonucleotide
cguguugcauuuauacuca

SEQ ID NO: 1184024 - RNA, 19 nt, Artificial Sequence
  Description of Artificial Sequence: Synthetic oligonucleotide
cguuauccgaggugucugg

SEQ ID NO: 1184025 - RNA, 19 nt, Artificial Sequence
  Description of Artificial Sequence: Synthetic oligonucleotide
ggggucucaggaaaacuca

SEQ ID NO: 1184026 - RNA, 19 nt, Artificial Sequence
  Description of Artificial Sequence: Synthetic oligonucleotide
cgagagguaggacggguag

SEQ ID NO: 1184027 - RNA, 19 nt, Artificial Sequence
  Description of Artificial Sequence: Synthetic oligonucleotide
caagggcuccgcguacgag

SEQ ID NO: 1184028 - RNA, 19 nt, Artificial Sequence
  Description of Artificial Sequence: Synthetic oligonucleotide
ucugcggucuuugcccguu

SEQ ID NO: 1184029 - RNA, 19 nt, Artificial Sequence
  Description of Artificial Sequence: Synthetic oligonucleotide
cacuuuucgcccgcuucuc

SEQ ID NO: 1184030 - RNA, 19 nt, Artificial Sequence
  Description of Artificial Sequence: Synthetic oligonucleotide
ccgagacccucucugguug

SEQ ID NO: 1184031 - RNA, 19 nt, Artificial Sequence
  Description of Artificial Sequence: Synthetic oligonucleotide
ggguggauucgaucuuaac

SEQ ID NO: 1184032 - RNA, 19 nt, Artificial Sequence
  Description of Artificial Sequence: Synthetic oligonucleotide
ucgcucuccgaggggcugc

SEQ ID NO: 1184033 - RNA, 19 nt, Artificial Sequence
  Description of Artificial Sequence: Synthetic oligonucleotide
cugcgagagguaggacggg

SEQ ID NO: 1184034 - RNA, 19 nt, Artificial Sequence
  Description of Artificial Sequence: Synthetic oligonucleotide
guaggacggguagguguug

SEQ ID NO: 1184035 - RNA, 19 nt, Artificial Sequence
  Description of Artificial Sequence: Synthetic oligonucleotide
caggcggcgcucucgcguc

SEQ ID NO: 1184036 - RNA, 19 nt, Artificial Sequence
  Description of Artificial Sequence: Synthetic oligonucleotide
gcgauuccagauguuccgc

SEQ ID NO: 1184037 - RNA, 19 nt, Artificial Sequence
  Description of Artificial Sequence: Synthetic oligonucleotide
ugggugagugagggacuga

SEQ ID NO: 1184038 - RNA, 19 nt, Artificial Sequence
  Description of Artificial Sequence: Synthetic oligonucleotide
uccgauucucucgguucau

SEQ ID NO: 1184039 - RNA, 19 nt, Artificial Sequence
  Description of Artificial Sequence: Synthetic oligonucleotide
gcgauaguagcuggguaca

SEQ ID NO: 1184040 - RNA, 19 nt, Artificial Sequence
  Description of Artificial Sequence: Synthetic oligonucleotide
cagaaugcugcgugugagu

SEQ ID NO: 1184041 - RNA, 19 nt, Artificial Sequence
  Description of Artificial Sequence: Synthetic oligonucleotide
aggguugggucuagacacu

SEQ ID NO: 1184042 - RNA, 19 nt, Artificial Sequence
  Description of Artificial Sequence: Synthetic oligonucleotide
cguacgaguucggaguuac

SEQ ID NO: 1184043 - RNA, 19 nt, Artificial Sequence
  Description of Artificial Sequence: Synthetic oligonucleotide
gcgaacuuucaagacuguc

SEQ ID NO: 1184044 - RNA, 19 nt, Artificial Sequence
  Description of Artificial Sequence: Synthetic oligonucleotide
cccgcaguugaagucacuc

SEQ ID NO: 1184045 - RNA, 19 nt, Artificial Sequence
  Description of Artificial Sequence: Synthetic oligonucleotide
cugccuuuugggcccgcca

SEQ ID NO: 1184046 - RNA, 19 nt, Artificial Sequence
  Description of Artificial Sequence: Synthetic oligonucleotide
cucgcgucaaauacauauu

SEQ ID NO: 1184047 - RNA, 19 nt, Artificial Sequence
  Description of Artificial Sequence: Synthetic oligonucleotide
ccugcgcuccgguuauagc

SEQ ID NO: 1184048 - RNA, 19 nt, Artificial Sequence
  Description of Artificial Sequence: Synthetic oligonucleotide
ggacagaggccugccaaca

SEQ ID NO: 1184049 - RNA, 19 nt, Artificial Sequence
  Description of Artificial Sequence: Synthetic oligonucleotide
gcacuuuucgcccgcuucu

SEQ ID NO: 1184050 - RNA, 19 nt, Artificial Sequence
  Description of Artificial Sequence: Synthetic oligonucleotide
cccgccagacuuugcucgg

SEQ ID NO: 1184051 - RNA, 19 nt, Artificial Sequence
  Description of Artificial Sequence: Synthetic oligonucleotide
gguuaauggucuugcuaau

SEQ ID NO: 1184052 - RNA, 19 nt, Artificial Sequence
  Description of Artificial Sequence: Synthetic oligonucleotide
cgcgucaaauacauauuga

SEQ ID NO: 1184053 - RNA, 19 nt, Artificial Sequence
  Description of Artificial Sequence: Synthetic oligonucleotide
gccgaguagcucgggcugg

SEQ ID NO: 1184054 - RNA, 19 nt, Artificial Sequence
  Description of Artificial Sequence: Synthetic oligonucleotide
ggaaagcgagggcgcgagc

SEQ ID NO: 1184055 - RNA, 19 nt, Artificial Sequence
  Description of Artificial Sequence: Synthetic oligonucleotide
cagccaagggcuccgcgua

SEQ ID NO: 1184056 - RNA, 19 nt, Artificial Sequence
  Description of Artificial Sequence: Synthetic oligonucleotide
acgcuggcucaggugaaau

SEQ ID NO: 1184057 - RNA, 19 nt, Artificial Sequence
  Description of Artificial Sequence: Synthetic oligonucleotide
agacccucucugguuguuu

SEQ ID NO: 1184058 - RNA, 19 nt, Artificial Sequence
  Description of Artificial Sequence: Synthetic oligonucleotide
uuccgcgcgcggguugaga

SEQ ID NO: 1184059 - RNA, 19 nt, Artificial Sequence
  Description of Artificial Sequence: Synthetic oligonucleotide
ccaagacaggacuccggca

SEQ ID NO: 1184060 - RNA, 19 nt, Artificial Sequence
  Description of Artificial Sequence: Synthetic oligonucleotide
caggcguguugcauuuaua

SEQ ID NO: 1184061 - RNA, 19 nt, Artificial Sequence
  Description of Artificial Sequence: Synthetic oligonucleotide
guagcucgggcuggcgcga

SEQ ID NO: 1184062 - RNA, 19 nt, Artificial Sequence
  Description of Artificial Sequence: Synthetic oligonucleotide
guacgaguucggaguuaca

SEQ ID NO: 1184063 - RNA, 19 nt, Artificial Sequence
  Description of Artificial Sequence: Synthetic oligonucleotide
cugcggucuuugcccguuc

SEQ ID NO: 1184064 - RNA, 19 nt, Artificial Sequence
  Description of Artificial Sequence: Synthetic oligonucleotide
cuccgagacccucucuggu

SEQ ID NO: 1184065 - RNA, 19 nt, Artificial Sequence
  Description of Artificial Sequence: Synthetic oligonucleotide
ggcggggaaaggagagaug

SEQ ID NO: 1184066 - RNA, 19 nt, Artificial Sequence
  Description of Artificial Sequence: Synthetic oligonucleotide
ggcccgccagacuuugcuc

SEQ ID NO: 1184067 - RNA, 19 nt, Artificial Sequence
  Description of Artificial Sequence: Synthetic oligonucleotide
ugcaggcguguugcauuua

SEQ ID NO: 1184068 - RNA, 19 nt, Artificial Sequence
  Description of Artificial Sequence: Synthetic oligonucleotide
gccaauuuccugugguguu

SEQ ID NO: 1184069 - RNA, 19 nt, Artificial Sequence
  Description of Artificial Sequence: Synthetic oligonucleotide
ggauccgauucucucgguu

SEQ ID NO: 1184070 - RNA, 19 nt, Artificial Sequence
  Description of Artificial Sequence: Synthetic oligonucleotide
guggggcguuuuguccagc

SEQ ID NO: 1184071 - RNA, 19 nt, Artificial Sequence
  Description of Artificial Sequence: Synthetic oligonucleotide
cgauaguagcuggguacag

SEQ ID NO: 1184072 - RNA, 19 nt, Artificial Sequence
  Description of Artificial Sequence: Synthetic oligonucleotide
gcucucgcgucaaauacau

SEQ ID NO: 1184073 - RNA, 19 nt, Artificial Sequence
  Description of Artificial Sequence: Synthetic oligonucleotide
ccgcguacgaguucggagu

SEQ ID NO: 1184074 - RNA, 19 nt, Artificial Sequence
  Description of Artificial Sequence: Synthetic oligonucleotide
cuccgcguacgaguucgga

SEQ ID NO: 1184075 - RNA, 19 nt, Artificial Sequence
  Description of Artificial Sequence: Synthetic oligonucleotide
gccagacuuugcucggucu

SEQ ID NO: 1184076 - RNA, 19 nt, Artificial Sequence
  Description of Artificial Sequence: Synthetic oligonucleotide
cagcugcgagagguaggac

SEQ ID NO: 1184077 - RNA, 19 nt, Artificial Sequence
  Description of Artificial Sequence: Synthetic oligonucleotide
gcaggcguguugcauuuau

SEQ ID NO: 1184078 - RNA, 19 nt, Artificial Sequence
  Description of Artificial Sequence: Synthetic oligonucleotide
aggcggcgcucucgcguca

SEQ ID NO: 1184079 - RNA, 19 nt, Artificial Sequence
  Description of Artificial Sequence: Synthetic oligonucleotide
gauguuccgcgcgcggguu

SEQ ID NO: 1184080 - RNA, 19 nt, Artificial Sequence
  Description of Artificial Sequence: Synthetic oligonucleotide
cucucgcgucaaauacaua

SEQ ID NO: 1184081 - RNA, 19 nt, Artificial Sequence
  Description of Artificial Sequence: Synthetic oligonucleotide
cgccgaguagcucgggcug

SEQ ID NO: 1184082 - RNA, 19 nt, Artificial Sequence
  Description of Artificial Sequence: Synthetic oligonucleotide
gcggguugagacuggcccu

SEQ ID NO: 1184083 - RNA, 19 nt, Artificial Sequence
  Description of Artificial Sequence: Synthetic oligonucleotide
cccagauugcauauacauu

SEQ ID NO: 1184084 - RNA, 19 nt, Artificial Sequence
  Description of Artificial Sequence: Synthetic oligonucleotide
guuccgcgcgcggguugag

SEQ ID NO: 1184085 - RNA, 19 nt, Artificial Sequence
  Description of Artificial Sequence: Synthetic oligonucleotide
cgcucucgcgucaaauaca

SEQ ID NO: 1184086 - RNA, 19 nt, Artificial Sequence
  Description of Artificial Sequence: Synthetic oligonucleotide
gcgccgaguagcucgggcu

SEQ ID NO: 1184087 - RNA, 19 nt, Artificial Sequence
  Description of Artificial Sequence: Synthetic oligonucleotide
ccgaguagcucgggcuggc

SEQ ID NO: 1184088 - RNA, 19 nt, Artificial Sequence
  Description of Artificial Sequence: Synthetic oligonucleotide
gcacgaaccauaggucccu

SEQ ID NO: 1184089 - RNA, 19 nt, Artificial Sequence
  Description of Artificial Sequence: Synthetic oligonucleotide
gcuccgcguacgaguucgg

SEQ ID NO: 1184090 - RNA, 19 nt, Artificial Sequence
  Description of Artificial Sequence: Synthetic oligonucleotide
cgcgcgcggguugagacug

SEQ ID NO: 1184091 - RNA, 19 nt, Artificial Sequence
  Description of Artificial Sequence: Synthetic oligonucleotide
ggucccuuggaaggagagu

SEQ ID NO: 1184092 - RNA, 19 nt, Artificial Sequence
  Description of Artificial Sequence: Synthetic oligonucleotide
gcguuuuguccagcgccga

SEQ ID NO: 1184093 - RNA, 19 nt, Artificial Sequence
  Description of Artificial Sequence: Synthetic oligonucleotide
guccagcgccgaguagcuc

SEQ ID NO: 1184094 - RNA, 19 nt, Artificial Sequence
  Description of Artificial Sequence: Synthetic oligonucleotide
ccaagggcuccgcguacga

SEQ ID NO: 1184095 - RNA, 19 nt, Artificial Sequence
  Description of Artificial Sequence: Synthetic oligonucleotide
gucugcggucuuugcccgu

SEQ ID NO: 1184096 - RNA, 19 nt, Artificial Sequence
  Description of Artificial Sequence: Synthetic oligonucleotide
gcgagagguaggacgggua

SEQ ID NO: 1184097 - RNA, 19 nt, Artificial Sequence
  Description of Artificial Sequence: Synthetic oligonucleotide
gcgcggguugagacuggcc

SEQ ID NO: 1184098 - RNA, 19 nt, Artificial Sequence
  Description of Artificial Sequence: Synthetic oligonucleotide
gcagauucucagagccacu

SEQ ID NO: 1184099 - RNA, 19 nt, Artificial Sequence
  Description of Artificial Sequence: Synthetic oligonucleotide
ggcgaacuuucaagacugu

SEQ ID NO: 1184100 - RNA, 19 nt, Artificial Sequence
  Description of Artificial Sequence: Synthetic oligonucleotide
gcgcuccgguuauagcgcu

SEQ ID NO: 1184101 - RNA, 19 nt, Artificial Sequence
  Description of Artificial Sequence: Synthetic oligonucleotide
ccuugacacuaggugggua

SEQ ID NO: 1184102 - RNA, 19 nt, Artificial Sequence
  Description of Artificial Sequence: Synthetic oligonucleotide
ccgaaacccagcaccccau

SEQ ID NO: 1184103 - RNA, 19 nt, Artificial Sequence
  Description of Artificial Sequence: Synthetic oligonucleotide
cggguggauucgaucuuaa

SEQ ID NO: 1184104 - RNA, 19 nt, Artificial Sequence
  Description of Artificial Sequence: Synthetic oligonucleotide
gcguacgaguucggaguua

SEQ ID NO: 1184105 - RNA, 19 nt, Artificial Sequence
  Description of Artificial Sequence: Synthetic oligonucleotide
cgcuccgguuauagcgcuc

SEQ ID NO: 1184106 - RNA, 19 nt, Artificial Sequence
  Description of Artificial Sequence: Synthetic oligonucleotide
cccuauaaucggguggauu

SEQ ID NO: 1184107 - RNA, 19 nt, Artificial Sequence
  Description of Artificial Sequence: Synthetic oligonucleotide
cccaggaguccagcugcga

SEQ ID NO: 1184108 - RNA, 19 nt, Artificial Sequence
  Description of Artificial Sequence: Synthetic oligonucleotide
cggcgcagccaagggcucc

SEQ ID NO: 1184109 - RNA, 19 nt, Artificial Sequence
  Description of Artificial Sequence: Synthetic oligonucleotide
cacgaaccauaggucccuu

SEQ ID NO: 1184110 - RNA, 19 nt, Artificial Sequence
  Description of Artificial Sequence: Synthetic oligonucleotide
gcucggucuugaucucauu

SEQ ID NO: 1184111 - RNA, 19 nt, Artificial Sequence
  Description of Artificial Sequence: Synthetic oligonucleotide
ggcggcgcucucgcgucaa

SEQ ID NO: 1184112 - RNA, 19 nt, Artificial Sequence
  Description of Artificial Sequence: Synthetic oligonucleotide
gcccgcuucucugcacugu

SEQ ID NO: 1184113 - RNA, 19 nt, Artificial Sequence
  Description of Artificial Sequence: Synthetic oligonucleotide
cgcguacgaguucggaguu

SEQ ID NO: 1184114 - RNA, 19 nt, Artificial Sequence
  Description of Artificial Sequence: Synthetic oligonucleotide
ccgauucucucgguucauu

SEQ ID NO: 1184115 - RNA, 19 nt, Artificial Sequence
  Description of Artificial Sequence: Synthetic oligonucleotide
ccgcgcgcggguugagacu

SEQ ID NO: 1184116 - RNA, 19 nt, Artificial Sequence
  Description of Artificial Sequence: Synthetic oligonucleotide
ccccgcaguugaagucacu

SEQ ID NO: 1184117 - RNA, 19 nt, Artificial Sequence
  Description of Artificial Sequence: Synthetic oligonucleotide
cggauccgauucucucggu

SEQ ID NO: 1184118 - RNA, 19 nt, Artificial Sequence
  Description of Artificial Sequence: Synthetic oligonucleotide
ggccugccaacagguuguu

SEQ ID NO: 1184119 - RNA, 19 nt, Artificial Sequence
  Description of Artificial Sequence: Synthetic oligonucleotide
ccgaggugucugggcugga

SEQ ID NO: 1184120 - RNA, 19 nt, Artificial Sequence
  Description of Artificial Sequence: Synthetic oligonucleotide
aaaaguugaagacaaaagg

SEQ ID NO: 1184121 - RNA, 19 nt, Artificial Sequence
  Description of Artificial Sequence: Synthetic oligonucleotide
aaacugacaacucaugcgc

SEQ ID NO: 1184122 - RNA, 19 nt, Artificial Sequence
  Description of Artificial Sequence: Synthetic oligonucleotide
uguacaauaaguuaguaca

SEQ ID NO: 1184123 - RNA, 19 nt, Artificial Sequence
  Description of Artificial Sequence: Synthetic oligonucleotide
uuaauugaagacaauaagc

SEQ ID NO: 1184124 - RNA, 19 nt, Artificial Sequence
  Description of Artificial Sequence: Synthetic oligonucleotide
uaauugaagacaauaagcc

SEQ ID NO: 1184125 - RNA, 19 nt, Artificial Sequence
  Description of Artificial Sequence: Synthetic oligonucleotide
aaggagaaaauuauggucc

SEQ ID NO: 1184126 - RNA, 19 nt, Artificial Sequence
  Description of Artificial Sequence: Synthetic oligonucleotide
auuucaauccaccuguucc

SEQ ID NO: 1184127 - RNA, 19 nt, Artificial Sequence
  Description of Artificial Sequence: Synthetic oligonucleotide
aaaacugacaacucaugcg

SEQ ID NO: 1184128 - RNA, 19 nt, Artificial Sequence
  Description of Artificial Sequence: Synthetic oligonucleotide
uguaauuuguacaauaagu

SEQ ID NO: 1184129 - RNA, 19 nt, Artificial Sequence
  Description of Artificial Sequence: Synthetic oligonucleotide
ugaagaauggucuuaaucu

SEQ ID NO: 1184130 - RNA, 19 nt, Artificial Sequence
  Description of Artificial Sequence: Synthetic oligonucleotide
uuuaaacugauuguaaccg

SEQ ID NO: 1184131 - RNA, 19 nt, Artificial Sequence
  Description of Artificial Sequence: Synthetic oligonucleotide
uaauauaguaagaaaacac

SEQ ID NO: 1184132 - RNA, 19 nt, Artificial Sequence
  Description of Artificial Sequence: Synthetic oligonucleotide
aaaagaaugaucucauaca

SEQ ID NO: 1184133 - RNA, 19 nt, Artificial Sequence
  Description of Artificial Sequence: Synthetic oligonucleotide
auauuaacugcacuggugg

SEQ ID NO: 1184134 - RNA, 19 nt, Artificial Sequence
  Description of Artificial Sequence: Synthetic oligonucleotide
aauacuucauuccuggaga

SEQ ID NO: 1184135 - RNA, 19 nt, Artificial Sequence
  Description of Artificial Sequence: Synthetic oligonucleotide
aauaucaaccucuuguggu

SEQ ID NO: 1184136 - RNA, 19 nt, Artificial Sequence
  Description of Artificial Sequence: Synthetic oligonucleotide
aaauaucaaccucuugugg

SEQ ID NO: 1184137 - RNA, 19 nt, Artificial Sequence
  Description of Artificial Sequence: Synthetic oligonucleotide
acuaugagcauauuaacug

SEQ ID NO: 1184138 - RNA, 19 nt, Artificial Sequence
  Description of Artificial Sequence: Synthetic oligonucleotide
aaguaaauagucacugugc

SEQ ID NO: 1184139 - RNA, 19 nt, Artificial Sequence
  Description of Artificial Sequence: Synthetic oligonucleotide
aauagguggugucuuuccc

SEQ ID NO: 1184140 - RNA, 19 nt, Artificial Sequence
  Description of Artificial Sequence: Synthetic oligonucleotide
uuuuaauuuugacugguga

SEQ ID NO: 1184141 - RNA, 19 nt, Artificial Sequence
  Description of Artificial Sequence: Synthetic oligonucleotide
ucgaaaaggagauuacacg

SEQ ID NO: 1184142 - RNA, 19 nt, Artificial Sequence
  Description of Artificial Sequence: Synthetic oligonucleotide
acuauuuucauauagcaua

SEQ ID NO: 1184143 - RNA, 19 nt, Artificial Sequence
  Description of Artificial Sequence: Synthetic oligonucleotide
uauagcauagaaaaccacu

SEQ ID NO: 1184144 - RNA, 19 nt, Artificial Sequence
  Description of Artificial Sequence: Synthetic oligonucleotide
aaagaaugaucucauacau

SEQ ID NO: 1184145 - RNA, 19 nt, Artificial Sequence
  Description of Artificial Sequence: Synthetic oligonucleotide
acaucugagacauucguuc

SEQ ID NO: 1184146 - RNA, 19 nt, Artificial Sequence
  Description of Artificial Sequence: Synthetic oligonucleotide
ucuuaaucucacauaaacc

SEQ ID NO: 1184147 - RNA, 19 nt, Artificial Sequence
  Description of Artificial Sequence: Synthetic oligonucleotide
auaggcaaagcauacuaac

SEQ ID NO: 1184148 - RNA, 19 nt, Artificial Sequence
  Description of Artificial Sequence: Synthetic oligonucleotide
ugugguagcugcauuagag

SEQ ID NO: 1184149 - RNA, 19 nt, Artificial Sequence
  Description of Artificial Sequence: Synthetic oligonucleotide
aacugauuguaaccgagag

SEQ ID NO: 1184150 - RNA, 19 nt, Artificial Sequence
  Description of Artificial Sequence: Synthetic oligonucleotide
gaaaacugacaacucaugc

SEQ ID NO: 1184151 - RNA, 19 nt, Artificial Sequence
  Description of Artificial Sequence: Synthetic oligonucleotide
gaauacuucauuccuggag

SEQ ID NO: 1184152 - RNA, 19 nt, Artificial Sequence
  Description of Artificial Sequence: Synthetic oligonucleotide
uaaacugauuguaaccgag

SEQ ID NO: 1184153 - RNA, 19 nt, Artificial Sequence
  Description of Artificial Sequence: Synthetic oligonucleotide
cuaacuacauacacaacag

SEQ ID NO: 1184154 - RNA, 19 nt, Artificial Sequence
  Description of Artificial Sequence: Synthetic oligonucleotide
uaugcuaacuacauacaca

SEQ ID NO: 1184155 - RNA, 19 nt, Artificial Sequence
  Description of Artificial Sequence: Synthetic oligonucleotide
gacacaauaugcuaacuac

SEQ ID NO: 1184156 - RNA, 19 nt, Artificial Sequence
  Description of Artificial Sequence: Synthetic oligonucleotide
uuaaucucacauaaaccug

SEQ ID NO: 1184157 - RNA, 19 nt, Artificial Sequence
  Description of Artificial Sequence: Synthetic oligonucleotide
uuacacagaguuuuaaacu

SEQ ID NO: 1184158 - RNA, 19 nt, Artificial Sequence
  Description of Artificial Sequence: Synthetic oligonucleotide
uuagggucuaguauguuca

SEQ ID NO: 1184159 - RNA, 19 nt, Artificial Sequence
  Description of Artificial Sequence: Synthetic oligonucleotide
cugauaaaugacauccugg

SEQ ID NO: 1184160 - RNA, 19 nt, Artificial Sequence
  Description of Artificial Sequence: Synthetic oligonucleotide
ugugacgacagaaaagugu

SEQ ID NO: 1184161 - RNA, 19 nt, Artificial Sequence
  Description of Artificial Sequence: Synthetic oligonucleotide
gguggaacaugcuugaugg

SEQ ID NO: 1184162 - RNA, 19 nt, Artificial Sequence
  Description of Artificial Sequence: Synthetic oligonucleotide
uaagcuugcuccauuagcu

SEQ ID NO: 1184163 - RNA, 19 nt, Artificial Sequence
  Description of Artificial Sequence: Synthetic oligonucleotide
aaugcacuaguguuucguc

SEQ ID NO: 1184164 - RNA, 19 nt, Artificial Sequence
  Description of Artificial Sequence: Synthetic oligonucleotide
gacgacuauuuucauauag

SEQ ID NO: 1184165 - RNA, 19 nt, Artificial Sequence
  Description of Artificial Sequence: Synthetic oligonucleotide
agugacacaauaugcuaac

SEQ ID NO: 1184166 - RNA, 19 nt, Artificial Sequence
  Description of Artificial Sequence: Synthetic oligonucleotide
aaguaagugcugcaucuuc

SEQ ID NO: 1184167 - RNA, 19 nt, Artificial Sequence
  Description of Artificial Sequence: Synthetic oligonucleotide
aggcaaagcauacuaacuc

SEQ ID NO: 1184168 - RNA, 19 nt, Artificial Sequence
  Description of Artificial Sequence: Synthetic oligonucleotide
uucagugacacaauaugcu

SEQ ID NO: 1184169 - RNA, 19 nt, Artificial Sequence
  Description of Artificial Sequence: Synthetic oligonucleotide
gagagcauaacagagguac

SEQ ID NO: 1184170 - RNA, 19 nt, Artificial Sequence
  Description of Artificial Sequence: Synthetic oligonucleotide
agauuuccuuauuuuaagg

SEQ ID NO: 1184171 - RNA, 19 nt, Artificial Sequence
  Description of Artificial Sequence: Synthetic oligonucleotide
aacacaauguucucggaaa

SEQ ID NO: 1184172 - RNA, 19 nt, Artificial Sequence
  Description of Artificial Sequence: Synthetic oligonucleotide
uuagcugacguagugcugg

SEQ ID NO: 1184173 - RNA, 19 nt, Artificial Sequence
  Description of Artificial Sequence: Synthetic oligonucleotide
aacucaugcgccuuuaaaa

SEQ ID NO: 1184174 - RNA, 19 nt, Artificial Sequence
  Description of Artificial Sequence: Synthetic oligonucleotide
agauaauauaguaagaaaa

SEQ ID NO: 1184175 - RNA, 19 nt, Artificial Sequence
  Description of Artificial Sequence: Synthetic oligonucleotide
gagcauauuaacugcacug

SEQ ID NO: 1184176 - RNA, 19 nt, Artificial Sequence
  Description of Artificial Sequence: Synthetic oligonucleotide
cuuacaaauucuaccuucc

SEQ ID NO: 1184177 - RNA, 19 nt, Artificial Sequence
  Description of Artificial Sequence: Synthetic oligonucleotide
auguaauuuguacaauaag

SEQ ID NO: 1184178 - RNA, 19 nt, Artificial Sequence
  Description of Artificial Sequence: Synthetic oligonucleotide
aggagaaaauuaugguccc

SEQ ID NO: 1184179 - RNA, 19 nt, Artificial Sequence
  Description of Artificial Sequence: Synthetic oligonucleotide
acuacaaugcacuaguguu

SEQ ID NO: 1184180 - RNA, 19 nt, Artificial Sequence
  Description of Artificial Sequence: Synthetic oligonucleotide
auuaacugcacugguggcc

SEQ ID NO: 1184181 - RNA, 19 nt, Artificial Sequence
  Description of Artificial Sequence: Synthetic oligonucleotide
ugacguuccauuuuaauuu

SEQ ID NO: 1184182 - RNA, 19 nt, Artificial Sequence
  Description of Artificial Sequence: Synthetic oligonucleotide
auaauauaguaagaaaaca

SEQ ID NO: 1184183 - RNA, 19 nt, Artificial Sequence
  Description of Artificial Sequence: Synthetic oligonucleotide
uaccaagacuguuacacag

SEQ ID NO: 1184184 - RNA, 19 nt, Artificial Sequence
  Description of Artificial Sequence: Synthetic oligonucleotide
cuuaaucucacauaaaccu

SEQ ID NO: 1184185 - RNA, 19 nt, Artificial Sequence
  Description of Artificial Sequence: Synthetic oligonucleotide
ucaugcgccuuuaaaauac

SEQ ID NO: 1184186 - RNA, 19 nt, Artificial Sequence
  Description of Artificial Sequence: Synthetic oligonucleotide
ugaaaacugacaacucaug

SEQ ID NO: 1184187 - RNA, 19 nt, Artificial Sequence
  Description of Artificial Sequence: Synthetic oligonucleotide
uaugagcauauuaacugca

SEQ ID NO: 1184188 - RNA, 19 nt, Artificial Sequence
  Description of Artificial Sequence: Synthetic oligonucleotide
aguaauauaggcaaagcau

SEQ ID NO: 1184189 - RNA, 19 nt, Artificial Sequence
  Description of Artificial Sequence: Synthetic oligonucleotide
aauuaugguccccagcaau

SEQ ID NO: 1184190 - RNA, 19 nt, Artificial Sequence
  Description of Artificial Sequence: Synthetic oligonucleotide
uguacugugccacaggauu

SEQ ID NO: 1184191 - RNA, 19 nt, Artificial Sequence
  Description of Artificial Sequence: Synthetic oligonucleotide
aagcauacuaacucuuaca

SEQ ID NO: 1184192 - RNA, 19 nt, Artificial Sequence
  Description of Artificial Sequence: Synthetic oligonucleotide
augcacuaguguuucgucc

SEQ ID NO: 1184193 - RNA, 19 nt, Artificial Sequence
  Description of Artificial Sequence: Synthetic oligonucleotide
guaaccgagagcauaacag

SEQ ID NO: 1184194 - RNA, 19 nt, Artificial Sequence
  Description of Artificial Sequence: Synthetic oligonucleotide
cucgaaaaggagauuacac

SEQ ID NO: 1184195 - RNA, 19 nt, Artificial Sequence
  Description of Artificial Sequence: Synthetic oligonucleotide
auacacugaaaacugacaa

SEQ ID NO: 1184196 - RNA, 19 nt, Artificial Sequence
  Description of Artificial Sequence: Synthetic oligonucleotide
gaaaauuaugguccccagc

SEQ ID NO: 1184197 - RNA, 19 nt, Artificial Sequence
  Description of Artificial Sequence: Synthetic oligonucleotide
cugcauuagagaaccaagg

SEQ ID NO: 1184198 - RNA, 19 nt, Artificial Sequence
  Description of Artificial Sequence: Synthetic oligonucleotide
aguuaguacaaaguaaaca

SEQ ID NO: 1184199 - RNA, 19 nt, Artificial Sequence
  Description of Artificial Sequence: Synthetic oligonucleotide
caauguaggaauuucucuc

SEQ ID NO: 1184200 - RNA, 19 nt, Artificial Sequence
  Description of Artificial Sequence: Synthetic oligonucleotide
uuaauuuugacuggugaaa

SEQ ID NO: 1184201 - RNA, 19 nt, Artificial Sequence
  Description of Artificial Sequence: Synthetic oligonucleotide
uuaacugcacugguggccg

SEQ ID NO: 1184202 - RNA, 19 nt, Artificial Sequence
  Description of Artificial Sequence: Synthetic oligonucleotide
aaaucugccaugauuauuu

SEQ ID NO: 1184203 - RNA, 19 nt, Artificial Sequence
  Description of Artificial Sequence: Synthetic oligonucleotide
aaguuaguacaaaguaaac

SEQ ID NO: 1184204 - RNA, 19 nt, Artificial Sequence
  Description of Artificial Sequence: Synthetic oligonucleotide
acgacuauuuucauauagc

SEQ ID NO: 1184205 - RNA, 19 nt, Artificial Sequence
  Description of Artificial Sequence: Synthetic oligonucleotide
cagaucuaagaccagggag

SEQ ID NO: 1184206 - RNA, 19 nt, Artificial Sequence
  Description of Artificial Sequence: Synthetic oligonucleotide
gcuaucaucaaccucugag

SEQ ID NO: 1184207 - RNA, 19 nt, Artificial Sequence
  Description of Artificial Sequence: Synthetic oligonucleotide
auagguggugucuuucccg

SEQ ID NO: 1184208 - RNA, 19 nt, Artificial Sequence
  Description of Artificial Sequence: Synthetic oligonucleotide
acugugacgacagaaaagu

SEQ ID NO: 1184209 - RNA, 19 nt, Artificial Sequence
  Description of Artificial Sequence: Synthetic oligonucleotide
agcauacuaacucuuacaa

SEQ ID NO: 1184210 - RNA, 19 nt, Artificial Sequence
  Description of Artificial Sequence: Synthetic oligonucleotide
gcauuagagaaccaaggcg

SEQ ID NO: 1184211 - RNA, 19 nt, Artificial Sequence
  Description of Artificial Sequence: Synthetic oligonucleotide
ugcauagccacuguuaggu

SEQ ID NO: 1184212 - RNA, 19 nt, Artificial Sequence
  Description of Artificial Sequence: Synthetic oligonucleotide
uuaaacugauuguaaccga

SEQ ID NO: 1184213 - RNA, 19 nt, Artificial Sequence
  Description of Artificial Sequence: Synthetic oligonucleotide
aaugaagcugcauguaauu

SEQ ID NO: 1184214 - RNA, 19 nt, Artificial Sequence
  Description of Artificial Sequence: Synthetic oligonucleotide
uuuaaggauucauuugaaa

SEQ ID NO: 1184215 - RNA, 19 nt, Artificial Sequence
  Description of Artificial Sequence: Synthetic oligonucleotide
uuagguaccaagacuguua

SEQ ID NO: 1184216 - RNA, 19 nt, Artificial Sequence
  Description of Artificial Sequence: Synthetic oligonucleotide
caggauuaugcauagccac

SEQ ID NO: 1184217 - RNA, 19 nt, Artificial Sequence
  Description of Artificial Sequence: Synthetic oligonucleotide
gaaaaggagauuacacgcc

SEQ ID NO: 1184218 - RNA, 19 nt, Artificial Sequence
  Description of Artificial Sequence: Synthetic oligonucleotide
cauacaucugagacauucg

SEQ ID NO: 1184219 - RNA, 19 nt, Artificial Sequence
  Description of Artificial Sequence: Synthetic oligonucleotide
aagaaugaucucauacauc

SEQ ID NO: 1184220 - RNA, 19 nt, Artificial Sequence
  Description of Artificial Sequence: Synthetic oligonucleotide
uuucguccagaucuaagac

SEQ ID NO: 1184221 - RNA, 19 nt, Artificial Sequence
  Description of Artificial Sequence: Synthetic oligonucleotide
acagaaaaguguccucagg

SEQ ID NO: 1184222 - RNA, 19 nt, Artificial Sequence
  Description of Artificial Sequence: Synthetic oligonucleotide
ugagcauauuaacugcacu

SEQ ID NO: 1184223 - RNA, 19 nt, Artificial Sequence
  Description of Artificial Sequence: Synthetic oligonucleotide
gcuaacuacauacacaaca

SEQ ID NO: 1184224 - RNA, 19 nt, Artificial Sequence
  Description of Artificial Sequence: Synthetic oligonucleotide
cauucagacuacaaugcac

SEQ ID NO: 1184225 - RNA, 19 nt, Artificial Sequence
  Description of Artificial Sequence: Synthetic oligonucleotide
uuaugcauagccacuguua

SEQ ID NO: 1184226 - RNA, 19 nt, Artificial Sequence
  Description of Artificial Sequence: Synthetic oligonucleotide
uaggcaaagcauacuaacu

SEQ ID NO: 1184227 - RNA, 19 nt, Artificial Sequence
  Description of Artificial Sequence: Synthetic oligonucleotide
ucauuccuggagaaaaccu

SEQ ID NO: 1184228 - RNA, 19 nt, Artificial Sequence
  Description of Artificial Sequence: Synthetic oligonucleotide
uaacucuuacaaauucuac

SEQ ID NO: 1184229 - RNA, 19 nt, Artificial Sequence
  Description of Artificial Sequence: Synthetic oligonucleotide
cauauagcauagaaaacca

SEQ ID NO: 1184230 - RNA, 19 nt, Artificial Sequence
  Description of Artificial Sequence: Synthetic oligonucleotide
guaguuauuucaauccacc

SEQ ID NO: 1184231 - RNA, 19 nt, Artificial Sequence
  Description of Artificial Sequence: Synthetic oligonucleotide
aauauaggcaaagcauacu

SEQ ID NO: 1184232 - RNA, 19 nt, Artificial Sequence
  Description of Artificial Sequence: Synthetic oligonucleotide
cauacuaacucuuacaaau

SEQ ID NO: 1184233 - RNA, 19 nt, Artificial Sequence
  Description of Artificial Sequence: Synthetic oligonucleotide
uaucaucaaccucugagua

SEQ ID NO: 1184234 - RNA, 19 nt, Artificial Sequence
  Description of Artificial Sequence: Synthetic oligonucleotide
uccauuagcugacguagug

SEQ ID NO: 1184235 - RNA, 19 nt, Artificial Sequence
  Description of Artificial Sequence: Synthetic oligonucleotide
guaagcuugcuccauuagc

SEQ ID NO: 1184236 - RNA, 19 nt, Artificial Sequence
  Description of Artificial Sequence: Synthetic oligonucleotide
uuaugggugccacauguaa

SEQ ID NO: 1184237 - RNA, 19 nt, Artificial Sequence
  Description of Artificial Sequence: Synthetic oligonucleotide
uaaccgagagcauaacaga

SEQ ID NO: 1184238 - RNA, 19 nt, Artificial Sequence
  Description of Artificial Sequence: Synthetic oligonucleotide
uguuucguccagaucuaag

SEQ ID NO: 1184239 - RNA, 19 nt, Artificial Sequence
  Description of Artificial Sequence: Synthetic oligonucleotide
aagccuuccguguucucag

SEQ ID NO: 1184240 - RNA, 19 nt, Artificial Sequence
  Description of Artificial Sequence: Synthetic oligonucleotide
uguuacacagaguuuuaaa

SEQ ID NO: 1184241 - RNA, 19 nt, Artificial Sequence
  Description of Artificial Sequence: Synthetic oligonucleotide
aaaaccacuaugagcauau

SEQ ID NO: 1184242 - RNA, 19 nt, Artificial Sequence
  Description of Artificial Sequence: Synthetic oligonucleotide
uguaaaccuucacugugac

SEQ ID NO: 1184243 - RNA, 19 nt, Artificial Sequence
  Description of Artificial Sequence: Synthetic oligonucleotide
auuacacgccacuauaaaa

SEQ ID NO: 1184244 - RNA, 19 nt, Artificial Sequence
  Description of Artificial Sequence: Synthetic oligonucleotide
aaacacucaaccugaugaa

SEQ ID NO: 1184245 - RNA, 19 nt, Artificial Sequence
  Description of Artificial Sequence: Synthetic oligonucleotide
auacaucugagacauucgu

SEQ ID NO: 1184246 - RNA, 19 nt, Artificial Sequence
  Description of Artificial Sequence: Synthetic oligonucleotide
agcauaacagagguacuac

SEQ ID NO: 1184247 - RNA, 19 nt, Artificial Sequence
  Description of Artificial Sequence: Synthetic oligonucleotide
ucagacuacaaugcacuag

SEQ ID NO: 1184248 - RNA, 19 nt, Artificial Sequence
  Description of Artificial Sequence: Synthetic oligonucleotide
aaccgagagcauaacagag

SEQ ID NO: 1184249 - RNA, 19 nt, Artificial Sequence
  Description of Artificial Sequence: Synthetic oligonucleotide
aggcgugacgacuauuuuc

SEQ ID NO: 1184250 - RNA, 19 nt, Artificial Sequence
  Description of Artificial Sequence: Synthetic oligonucleotide
ucuuuuaugggugccacau

SEQ ID NO: 1184251 - RNA, 19 nt, Artificial Sequence
  Description of Artificial Sequence: Synthetic oligonucleotide
guugcugagaagccuuccg

SEQ ID NO: 1184252 - RNA, 19 nt, Artificial Sequence
  Description of Artificial Sequence: Synthetic oligonucleotide
uauuaacugcacugguggc

SEQ ID NO: 1184253 - RNA, 19 nt, Artificial Sequence
  Description of Artificial Sequence: Synthetic oligonucleotide
gguaccaagacuguuacac

SEQ ID NO: 1184254 - RNA, 19 nt, Artificial Sequence
  Description of Artificial Sequence: Synthetic oligonucleotide
aggacuggaaaaguaagug

SEQ ID NO: 1184255 - RNA, 19 nt, Artificial Sequence
  Description of Artificial Sequence: Synthetic oligonucleotide
agaauggucuuaaucucac

SEQ ID NO: 1184256 - RNA, 19 nt, Artificial Sequence
  Description of Artificial Sequence: Synthetic oligonucleotide
cauuagagaaccaaggcgu

SEQ ID NO: 1184257 - RNA, 19 nt, Artificial Sequence
  Description of Artificial Sequence: Synthetic oligonucleotide
auaaguuaguacaaaguaa

SEQ ID NO: 1184258 - RNA, 19 nt, Artificial Sequence
  Description of Artificial Sequence: Synthetic oligonucleotide
cugaaggcaagcuaucauc

SEQ ID NO: 1184259 - RNA, 19 nt, Artificial Sequence
  Description of Artificial Sequence: Synthetic oligonucleotide
guaaauagucacugugcug

SEQ ID NO: 1184260 - RNA, 19 nt, Artificial Sequence
  Description of Artificial Sequence: Synthetic oligonucleotide
aaggaauucccugaagaau

SEQ ID NO: 1184261 - RNA, 19 nt, Artificial Sequence
  Description of Artificial Sequence: Synthetic oligonucleotide
ucguucaaggaauucccug

SEQ ID NO: 1184262 - RNA, 19 nt, Artificial Sequence
  Description of Artificial Sequence: Synthetic oligonucleotide
agaucuaagaccagggaga

SEQ ID NO: 1184263 - RNA, 19 nt, Artificial Sequence
  Description of Artificial Sequence: Synthetic oligonucleotide
guuucguccagaucuaaga

SEQ ID NO: 1184264 - RNA, 19 nt, Artificial Sequence
  Description of Artificial Sequence: Synthetic oligonucleotide
acucaugcgccuuuaaaau

SEQ ID NO: 1184265 - RNA, 19 nt, Artificial Sequence
  Description of Artificial Sequence: Synthetic oligonucleotide
ucccgcuuagcccucagca

SEQ ID NO: 1184266 - RNA, 19 nt, Artificial Sequence
  Description of Artificial Sequence: Synthetic oligonucleotide
auauagcauagaaaaccac

SEQ ID NO: 1184267 - RNA, 19 nt, Artificial Sequence
  Description of Artificial Sequence: Synthetic oligonucleotide
ucagugacacaauaugcua

SEQ ID NO: 1184268 - RNA, 19 nt, Artificial Sequence
  Description of Artificial Sequence: Synthetic oligonucleotide
aacucuggugugcuucuug

SEQ ID NO: 1184269 - RNA, 19 nt, Artificial Sequence
  Description of Artificial Sequence: Synthetic oligonucleotide
caaguaauauaggcaaagc

SEQ ID NO: 1184270 - RNA, 19 nt, Artificial Sequence
  Description of Artificial Sequence: Synthetic oligonucleotide
ugcgccuuuaaaauacaaa

SEQ ID NO: 1184271 - RNA, 19 nt, Artificial Sequence
  Description of Artificial Sequence: Synthetic oligonucleotide
accacuaugagcauauuaa

SEQ ID NO: 1184272 - RNA, 19 nt, Artificial Sequence
  Description of Artificial Sequence: Synthetic oligonucleotide
gucuaguauguucaguaac

SEQ ID NO: 1184273 - RNA, 19 nt, Artificial Sequence
  Description of Artificial Sequence: Synthetic oligonucleotide
uccuauuuagcuguucuuc

SEQ ID NO: 1184274 - RNA, 19 nt, Artificial Sequence
  Description of Artificial Sequence: Synthetic oligonucleotide
ugcauacaccuucuuagaa

SEQ ID NO: 1184275 - RNA, 19 nt, Artificial Sequence
  Description of Artificial Sequence: Synthetic oligonucleotide
cgaaaaggagauuacacgc

SEQ ID NO: 1184276 - RNA, 19 nt, Artificial Sequence
  Description of Artificial Sequence: Synthetic oligonucleotide
acaugcuugaugguaagcu

SEQ ID NO: 1184277 - RNA, 19 nt, Artificial Sequence
  Description of Artificial Sequence: Synthetic oligonucleotide
gaauaaggauuuuccacaa

SEQ ID NO: 1184278 - RNA, 19 nt, Artificial Sequence
  Description of Artificial Sequence: Synthetic oligonucleotide
acuucauuccuggagaaaa

SEQ ID NO: 1184279 - RNA, 19 nt, Artificial Sequence
  Description of Artificial Sequence: Synthetic oligonucleotide
uaugggugccacauguaaa

SEQ ID NO: 1184280 - RNA, 19 nt, Artificial Sequence
  Description of Artificial Sequence: Synthetic oligonucleotide
ucuugugguagcugcauua

SEQ ID NO: 1184281 - RNA, 19 nt, Artificial Sequence
  Description of Artificial Sequence: Synthetic oligonucleotide
cacugugacgacagaaaag

SEQ ID NO: 1184282 - RNA, 19 nt, Artificial Sequence
  Description of Artificial Sequence: Synthetic oligonucleotide
gaacaugcuugaugguaag

SEQ ID NO: 1184283 - RNA, 19 nt, Artificial Sequence
  Description of Artificial Sequence: Synthetic oligonucleotide
cuaccgaccugcugcaccg

SEQ ID NO: 1184284 - RNA, 19 nt, Artificial Sequence
  Description of Artificial Sequence: Synthetic oligonucleotide
ucaucaaccucugaguauu

SEQ ID NO: 1184285 - RNA, 19 nt, Artificial Sequence
  Description of Artificial Sequence: Synthetic oligonucleotide
ucccgagugcgcaauaggu

SEQ ID NO: 1184286 - RNA, 19 nt, Artificial Sequence
  Description of Artificial Sequence: Synthetic oligonucleotide
agugguggaacaugcuuga

SEQ ID NO: 1184287 - RNA, 19 nt, Artificial Sequence
  Description of Artificial Sequence: Synthetic oligonucleotide
uguuagguaccaagacugu

SEQ ID NO: 1184288 - RNA, 19 nt, Artificial Sequence
  Description of Artificial Sequence: Synthetic oligonucleotide
gauuacacgccacuauaaa

SEQ ID NO: 1184289 - RNA, 19 nt, Artificial Sequence
  Description of Artificial Sequence: Synthetic oligonucleotide
guaaaccuucacugugacg

SEQ ID NO: 1184290 - RNA, 19 nt, Artificial Sequence
  Description of Artificial Sequence: Synthetic oligonucleotide
ugacgacagaaaagugucc

SEQ ID NO: 1184291 - RNA, 19 nt, Artificial Sequence
  Description of Artificial Sequence: Synthetic oligonucleotide
augagcauauuaacugcac

SEQ ID NO: 1184292 - RNA, 19 nt, Artificial Sequence
  Description of Artificial Sequence: Synthetic oligonucleotide
cacaacagauaauauagua

SEQ ID NO: 1184293 - RNA, 19 nt, Artificial Sequence
  Description of Artificial Sequence: Synthetic oligonucleotide
gaguuuuaaacugauugua

SEQ ID NO: 1184294 - RNA, 19 nt, Artificial Sequence
  Description of Artificial Sequence: Synthetic oligonucleotide
uugcugagaagccuuccgu

SEQ ID NO: 1184295 - RNA, 19 nt, Artificial Sequence
  Description of Artificial Sequence: Synthetic oligonucleotide
agagaaccaaggcgugacg

SEQ ID NO: 1184296 - RNA, 19 nt, Artificial Sequence
  Description of Artificial Sequence: Synthetic oligonucleotide
aaacugauuguaaccgaga

SEQ ID NO: 1184297 - RNA, 19 nt, Artificial Sequence
  Description of Artificial Sequence: Synthetic oligonucleotide
auuaugguccccagcaaug

SEQ ID NO: 1184298 - RNA, 19 nt, Artificial Sequence
  Description of Artificial Sequence: Synthetic oligonucleotide
acugacaacucaugcgccu

SEQ ID NO: 1184299 - RNA, 19 nt, Artificial Sequence
  Description of Artificial Sequence: Synthetic oligonucleotide
auaucaaccucuuguggua

SEQ ID NO: 1184300 - RNA, 19 nt, Artificial Sequence
  Description of Artificial Sequence: Synthetic oligonucleotide
cacuguuagguaccaagac

SEQ ID NO: 1184301 - RNA, 19 nt, Artificial Sequence
  Description of Artificial Sequence: Synthetic oligonucleotide
gagauuacacgccacuaua

SEQ ID NO: 1184302 - RNA, 19 nt, Artificial Sequence
  Description of Artificial Sequence: Synthetic oligonucleotide
ucaucuuuuaugggugcca

SEQ ID NO: 1184303 - RNA, 19 nt, Artificial Sequence
  Description of Artificial Sequence: Synthetic oligonucleotide
gugacgacagaaaaguguc

SEQ ID NO: 1184304 - RNA, 19 nt, Artificial Sequence
  Description of Artificial Sequence: Synthetic oligonucleotide
uagagaaccaaggcgugac

SEQ ID NO: 1184305 - RNA, 19 nt, Artificial Sequence
  Description of Artificial Sequence: Synthetic oligonucleotide
uggaacaugcuugauggua

SEQ ID NO: 1184306 - RNA, 19 nt, Artificial Sequence
  Description of Artificial Sequence: Synthetic oligonucleotide
caguaacuugucugcauac

SEQ ID NO: 1184307 - RNA, 19 nt, Artificial Sequence
  Description of Artificial Sequence: Synthetic oligonucleotide
aacacucaaccugaugaaa

SEQ ID NO: 1184308 - RNA, 19 nt, Artificial Sequence
  Description of Artificial Sequence: Synthetic oligonucleotide
ccgagugcgcaauaggugg

SEQ ID NO: 1184309 - RNA, 19 nt, Artificial Sequence
  Description of Artificial Sequence: Synthetic oligonucleotide
aguaacuugucugcauaca

SEQ ID NO: 1184310 - RNA, 19 nt, Artificial Sequence
  Description of Artificial Sequence: Synthetic oligonucleotide
acauucguucaaggaauuc

SEQ ID NO: 1184311 - RNA, 19 nt, Artificial Sequence
  Description of Artificial Sequence: Synthetic oligonucleotide
uuaugguccccagcaaugu

SEQ ID NO: 1184312 - RNA, 19 nt, Artificial Sequence
  Description of Artificial Sequence: Synthetic oligonucleotide
auggucuuaaucucacaua

SEQ ID NO: 1184313 - RNA, 19 nt, Artificial Sequence
  Description of Artificial Sequence: Synthetic oligonucleotide
gagaacucuggugugcuuc

SEQ ID NO: 1184314 - RNA, 19 nt, Artificial Sequence
  Description of Artificial Sequence: Synthetic oligonucleotide
ucaauccaccuguuccaug

SEQ ID NO: 1184315 - RNA, 19 nt, Artificial Sequence
  Description of Artificial Sequence: Synthetic oligonucleotide
ugcgcaauagguggugucu

SEQ ID NO: 1184316 - RNA, 19 nt, Artificial Sequence
  Description of Artificial Sequence: Synthetic oligonucleotide
acacaauguucucggaaaa

SEQ ID NO: 1184317 - RNA, 19 nt, Artificial Sequence
  Description of Artificial Sequence: Synthetic oligonucleotide
gcauaacagagguacuacc

SEQ ID NO: 1184318 - RNA, 19 nt, Artificial Sequence
  Description of Artificial Sequence: Synthetic oligonucleotide
acuggaaaaguaagugcug

SEQ ID NO: 1184319 - RNA, 19 nt, Artificial Sequence
  Description of Artificial Sequence: Synthetic oligonucleotide
uugggugugcuuccuuuaa

SEQ ID NO: 1184320 - RNA, 19 nt, Artificial Sequence
  Description of Artificial Sequence: Synthetic oligonucleotide
cuaucaucaaccucugagu

SEQ ID NO: 1184321 - RNA, 19 nt, Artificial Sequence
  Description of Artificial Sequence: Synthetic oligonucleotide
uugcucuacaugcuagauu

SEQ ID NO: 1184322 - RNA, 19 nt, Artificial Sequence
  Description of Artificial Sequence: Synthetic oligonucleotide
accgcacggacagggaccc

SEQ ID NO: 1184323 - RNA, 19 nt, Artificial Sequence
  Description of Artificial Sequence: Synthetic oligonucleotide
aaucugccaugauuauuuu

SEQ ID NO: 1184324 - RNA, 19 nt, Artificial Sequence
  Description of Artificial Sequence: Synthetic oligonucleotide
cauuagcugacguagugcu

SEQ ID NO: 1184325 - RNA, 19 nt, Artificial Sequence
  Description of Artificial Sequence: Synthetic oligonucleotide
ugcuaacuacauacacaac

SEQ ID NO: 1184326 - RNA, 19 nt, Artificial Sequence
  Description of Artificial Sequence: Synthetic oligonucleotide
gcugcauuagagaaccaag

SEQ ID NO: 1184327 - RNA, 19 nt, Artificial Sequence
  Description of Artificial Sequence: Synthetic oligonucleotide
ugcuccauuagcugacgua

SEQ ID NO: 1184328 - RNA, 19 nt, Artificial Sequence
  Description of Artificial Sequence: Synthetic oligonucleotide
ggauuaugcauagccacug

SEQ ID NO: 1184329 - RNA, 19 nt, Artificial Sequence
  Description of Artificial Sequence: Synthetic oligonucleotide
cuuuuaugggugccacaug

SEQ ID NO: 1184330 - RNA, 19 nt, Artificial Sequence
  Description of Artificial Sequence: Synthetic oligonucleotide
uucagacuacaaugcacua

SEQ ID NO: 1184331 - RNA, 19 nt, Artificial Sequence
  Description of Artificial Sequence: Synthetic oligonucleotide
gucccgagugcgcaauagg

SEQ ID NO: 1184332 - RNA, 19 nt, Artificial Sequence
  Description of Artificial Sequence: Synthetic oligonucleotide
uggcagugcgcuguguuug

SEQ ID NO: 1184333 - RNA, 19 nt, Artificial Sequence
  Description of Artificial Sequence: Synthetic oligonucleotide
gacuguuacacagaguuuu

SEQ ID NO: 1184334 - RNA, 19 nt, Artificial Sequence
  Description of Artificial Sequence: Synthetic oligonucleotide
cacaauaugcuaacuacau

SEQ ID NO: 1184335 - RNA, 19 nt, Artificial Sequence
  Description of Artificial Sequence: Synthetic oligonucleotide
agugcgcuguguuuggauu

SEQ ID NO: 1184336 - RNA, 19 nt, Artificial Sequence
  Description of Artificial Sequence: Synthetic oligonucleotide
cauuccuggagaaaaccua

SEQ ID NO: 1184337 - RNA, 19 nt, Artificial Sequence
  Description of Artificial Sequence: Synthetic oligonucleotide
auuucccgccuaccgaccu

SEQ ID NO: 1184338 - RNA, 19 nt, Artificial Sequence
  Description of Artificial Sequence: Synthetic oligonucleotide
aggauuaugcauagccacu

SEQ ID NO: 1184339 - RNA, 19 nt, Artificial Sequence
  Description of Artificial Sequence: Synthetic oligonucleotide
cagugacacaauaugcuaa

SEQ ID NO: 1184340 - RNA, 19 nt, Artificial Sequence
  Description of Artificial Sequence: Synthetic oligonucleotide
acguagugcugguaguuau

SEQ ID NO: 1184341 - RNA, 19 nt, Artificial Sequence
  Description of Artificial Sequence: Synthetic oligonucleotide
cugugacgacagaaaagug

SEQ ID NO: 1184342 - RNA, 19 nt, Artificial Sequence
  Description of Artificial Sequence: Synthetic oligonucleotide
acacucaaccugaugaaaa

SEQ ID NO: 1184343 - RNA, 19 nt, Artificial Sequence
  Description of Artificial Sequence: Synthetic oligonucleotide
aaccuucacugugacgaca

SEQ ID NO: 1184344 - RNA, 19 nt, Artificial Sequence
  Description of Artificial Sequence: Synthetic oligonucleotide
gaucuaagaccagggagaa

SEQ ID NO: 1184345 - RNA, 19 nt, Artificial Sequence
  Description of Artificial Sequence: Synthetic oligonucleotide
gacgacagaaaaguguccu

SEQ ID NO: 1184346 - RNA, 19 nt, Artificial Sequence
  Description of Artificial Sequence: Synthetic oligonucleotide
aaggcgugacgacuauuuu

SEQ ID NO: 1184347 - RNA, 19 nt, Artificial Sequence
  Description of Artificial Sequence: Synthetic oligonucleotide
caccgcacggacagggacc

SEQ ID NO: 1184348 - RNA, 19 nt, Artificial Sequence
  Description of Artificial Sequence: Synthetic oligonucleotide
uaugguccccagcaaugua

SEQ ID NO: 1184349 - RNA, 19 nt, Artificial Sequence
  Description of Artificial Sequence: Synthetic oligonucleotide
cauuucccgccuaccgacc

SEQ ID NO: 1184350 - RNA, 19 nt, Artificial Sequence
  Description of Artificial Sequence: Synthetic oligonucleotide
agauuacacgccacuauaa

SEQ ID NO: 1184351 - RNA, 19 nt, Artificial Sequence
  Description of Artificial Sequence: Synthetic oligonucleotide
ugauuguaaccgagagcau

SEQ ID NO: 1184352 - RNA, 19 nt, Artificial Sequence
  Description of Artificial Sequence: Synthetic oligonucleotide
acacaacagauaauauagu

SEQ ID NO: 1184353 - RNA, 19 nt, Artificial Sequence
  Description of Artificial Sequence: Synthetic oligonucleotide
agaaaaccacuaugagcau

SEQ ID NO: 1184354 - RNA, 19 nt, Artificial Sequence
  Description of Artificial Sequence: Synthetic oligonucleotide
aagcuaucaucaaccucug

SEQ ID NO: 1184355 - RNA, 19 nt, Artificial Sequence
  Description of Artificial Sequence: Synthetic oligonucleotide
uccggcaauggucccgagu

SEQ ID NO: 1184356 - RNA, 19 nt, Artificial Sequence
  Description of Artificial Sequence: Synthetic oligonucleotide
ccacuaugagcauauuaac

SEQ ID NO: 1184357 - RNA, 19 nt, Artificial Sequence
  Description of Artificial Sequence: Synthetic oligonucleotide
gcagguuuccuauuuagcu

SEQ ID NO: 1184358 - RNA, 19 nt, Artificial Sequence
  Description of Artificial Sequence: Synthetic oligonucleotide
cuaucucuucagcuuccac

SEQ ID NO: 1184359 - RNA, 19 nt, Artificial Sequence
  Description of Artificial Sequence: Synthetic oligonucleotide
gagcauaacagagguacua

SEQ ID NO: 1184360 - RNA, 19 nt, Artificial Sequence
  Description of Artificial Sequence: Synthetic oligonucleotide
ggcgugacgacuauuuuca

SEQ ID NO: 1184361 - RNA, 19 nt, Artificial Sequence
  Description of Artificial Sequence: Synthetic oligonucleotide
uuucccgccuaccgaccug

SEQ ID NO: 1184362 - RNA, 19 nt, Artificial Sequence
  Description of Artificial Sequence: Synthetic oligonucleotide
cugcauacaccuucuuaga

SEQ ID NO: 1184363 - RNA, 19 nt, Artificial Sequence
  Description of Artificial Sequence: Synthetic oligonucleotide
gauuaugcauagccacugu

SEQ ID NO: 1184364 - RNA, 19 nt, Artificial Sequence
  Description of Artificial Sequence: Synthetic oligonucleotide
ugccugaccaguugcuuuu

SEQ ID NO: 1184365 - RNA, 19 nt, Artificial Sequence
  Description of Artificial Sequence: Synthetic oligonucleotide
agcccaugcaaaguaaaua

SEQ ID NO: 1184366 - RNA, 19 nt, Artificial Sequence
  Description of Artificial Sequence: Synthetic oligonucleotide
ccggcaauggucccgagug

SEQ ID NO: 1184367 - RNA, 19 nt, Artificial Sequence
  Description of Artificial Sequence: Synthetic oligonucleotide
cugacguuccauuuuaauu

SEQ ID NO: 1184368 - RNA, 19 nt, Artificial Sequence
  Description of Artificial Sequence: Synthetic oligonucleotide
uucaauccaccuguuccau

SEQ ID NO: 1184369 - RNA, 19 nt, Artificial Sequence
  Description of Artificial Sequence: Synthetic oligonucleotide
agaagccuuccguguucuc

SEQ ID NO: 1184370 - RNA, 19 nt, Artificial Sequence
  Description of Artificial Sequence: Synthetic oligonucleotide
auuagcugacguagugcug

SEQ ID NO: 1184371 - RNA, 19 nt, Artificial Sequence
  Description of Artificial Sequence: Synthetic oligonucleotide
ugacaacucaugcgccuuu

SEQ ID NO: 1184372 - RNA, 19 nt, Artificial Sequence
  Description of Artificial Sequence: Synthetic oligonucleotide
ugacguagugcugguaguu

SEQ ID NO: 1184373 - RNA, 19 nt, Artificial Sequence
  Description of Artificial Sequence: Synthetic oligonucleotide
ccagucgccauuucccgcc

SEQ ID NO: 1184374 - RNA, 19 nt, Artificial Sequence
  Description of Artificial Sequence: Synthetic oligonucleotide
cucaugcgccuuuaaaaua

SEQ ID NO: 1184375 - RNA, 19 nt, Artificial Sequence
  Description of Artificial Sequence: Synthetic oligonucleotide
ccauuucccgccuaccgac

SEQ ID NO: 1184376 - RNA, 19 nt, Artificial Sequence
  Description of Artificial Sequence: Synthetic oligonucleotide
uuguaaccgagagcauaac

SEQ ID NO: 1184377 - RNA, 19 nt, Artificial Sequence
  Description of Artificial Sequence: Synthetic oligonucleotide
agagcauaacagagguacu

SEQ ID NO: 1184378 - RNA, 19 nt, Artificial Sequence
  Description of Artificial Sequence: Synthetic oligonucleotide
cuccugaaggcaagcuauc

SEQ ID NO: 1184379 - RNA, 19 nt, Artificial Sequence
  Description of Artificial Sequence: Synthetic oligonucleotide
ccgccuaccgaccugcugc

SEQ ID NO: 1184380 - RNA, 19 nt, Artificial Sequence
  Description of Artificial Sequence: Synthetic oligonucleotide
gagugcgcaauagguggug

SEQ ID NO: 1184381 - RNA, 19 nt, Artificial Sequence
  Description of Artificial Sequence: Synthetic oligonucleotide
ggauucauuugaaaaugaa

SEQ ID NO: 1184382 - RNA, 19 nt, Artificial Sequence
  Description of Artificial Sequence: Synthetic oligonucleotide
ugacgacuauuuucauaua

SEQ ID NO: 1184383 - RNA, 19 nt, Artificial Sequence
  Description of Artificial Sequence: Synthetic oligonucleotide
caugcgccuuuaaaauaca

SEQ ID NO: 1184384 - RNA, 19 nt, Artificial Sequence
  Description of Artificial Sequence: Synthetic oligonucleotide
ccauuagcugacguagugc

SEQ ID NO: 1184385 - RNA, 19 nt, Artificial Sequence
  Description of Artificial Sequence: Synthetic oligonucleotide
aggagauuacacgccacua

SEQ ID NO: 1184386 - RNA, 19 nt, Artificial Sequence
  Description of Artificial Sequence: Synthetic oligonucleotide
uuuuagggucuaguauguu

SEQ ID NO: 1184387 - RNA, 19 nt, Artificial Sequence
  Description of Artificial Sequence: Synthetic oligonucleotide
gcaagcuaucaucaaccuc

SEQ ID NO: 1184388 - RNA, 19 nt, Artificial Sequence
  Description of Artificial Sequence: Synthetic oligonucleotide
ccgcuuagcccucagcagc

SEQ ID NO: 1184389 - RNA, 19 nt, Artificial Sequence
  Description of Artificial Sequence: Synthetic oligonucleotide
ggcagugcgcuguguuugg

SEQ ID NO: 1184390 - RNA, 19 nt, Artificial Sequence
  Description of Artificial Sequence: Synthetic oligonucleotide
agugcgcaauagguggugu

SEQ ID NO: 1184391 - RNA, 19 nt, Artificial Sequence
  Description of Artificial Sequence: Synthetic oligonucleotide
ggucuaguauguucaguaa

SEQ ID NO: 1184392 - RNA, 19 nt, Artificial Sequence
  Description of Artificial Sequence: Synthetic oligonucleotide
gcauacuaacucuuacaaa

SEQ ID NO: 1184393 - RNA, 19 nt, Artificial Sequence
  Description of Artificial Sequence: Synthetic oligonucleotide
ccuaccgaccugcugcacc

SEQ ID NO: 1184394 - RNA, 19 nt, Artificial Sequence
  Description of Artificial Sequence: Synthetic oligonucleotide
uagcugacguagugcuggu

SEQ ID NO: 1184395 - RNA, 19 nt, Artificial Sequence
  Description of Artificial Sequence: Synthetic oligonucleotide
caaggcgugacgacuauuu

SEQ ID NO: 1184396 - RNA, 19 nt, Artificial Sequence
  Description of Artificial Sequence: Synthetic oligonucleotide
caagcuugcucuacaugcu

SEQ ID NO: 1184397 - RNA, 19 nt, Artificial Sequence
  Description of Artificial Sequence: Synthetic oligonucleotide
gugcgcaauaggugguguc

SEQ ID NO: 1184398 - RNA, 19 nt, Artificial Sequence
  Description of Artificial Sequence: Synthetic oligonucleotide
acagaguuuuaaacugauu

SEQ ID NO: 1184399 - RNA, 19 nt, Artificial Sequence
  Description of Artificial Sequence: Synthetic oligonucleotide
accgaccugcugcaccgca

SEQ ID NO: 1184400 - RNA, 19 nt, Artificial Sequence
  Description of Artificial Sequence: Synthetic oligonucleotide
gacguagugcugguaguua

SEQ ID NO: 1184401 - RNA, 19 nt, Artificial Sequence
  Description of Artificial Sequence: Synthetic oligonucleotide
cuugggugugcuuccuuua

SEQ ID NO: 1184402 - RNA, 19 nt, Artificial Sequence
  Description of Artificial Sequence: Synthetic oligonucleotide
cccgagugcgcaauaggug

SEQ ID NO: 1184403 - RNA, 19 nt, Artificial Sequence
  Description of Artificial Sequence: Synthetic oligonucleotide
aguguuucguccagaucua

SEQ ID NO: 1184404 - RNA, 19 nt, Artificial Sequence
  Description of Artificial Sequence: Synthetic oligonucleotide
auucuaccuuccacuaaaa

SEQ ID NO: 1184405 - RNA, 19 nt, Artificial Sequence
  Description of Artificial Sequence: Synthetic oligonucleotide
ggagauuacacgccacuau

SEQ ID NO: 1184406 - RNA, 19 nt, Artificial Sequence
  Description of Artificial Sequence: Synthetic oligonucleotide
caaugcacuaguguuucgu

SEQ ID NO: 1184407 - RNA, 19 nt, Artificial Sequence
  Description of Artificial Sequence: Synthetic oligonucleotide
ccacuguuagguaccaaga

SEQ ID NO: 1184408 - RNA, 19 nt, Artificial Sequence
  Description of Artificial Sequence: Synthetic oligonucleotide
caauggucccgagugcgca

SEQ ID NO: 1184409 - RNA, 19 nt, Artificial Sequence
  Description of Artificial Sequence: Synthetic oligonucleotide
agguggugucuuucccgcu

SEQ ID NO: 1184410 - RNA, 19 nt, Artificial Sequence
  Description of Artificial Sequence: Synthetic oligonucleotide
cuguuacacagaguuuuaa

SEQ ID NO: 1184411 - RNA, 19 nt, Artificial Sequence
  Description of Artificial Sequence: Synthetic oligonucleotide
accaaggcgugacgacuau

SEQ ID NO: 1184412 - RNA, 19 nt, Artificial Sequence
  Description of Artificial Sequence: Synthetic oligonucleotide
caugcuugaugguaagcuu

SEQ ID NO: 1184413 - RNA, 19 nt, Artificial Sequence
  Description of Artificial Sequence: Synthetic oligonucleotide
guacugugccacaggauua

SEQ ID NO: 1184414 - RNA, 19 nt, Artificial Sequence
  Description of Artificial Sequence: Synthetic oligonucleotide
gugcugguaguuauuucaa

SEQ ID NO: 1184415 - RNA, 19 nt, Artificial Sequence
  Description of Artificial Sequence: Synthetic oligonucleotide
gguugcugagaagccuucc

SEQ ID NO: 1184416 - RNA, 19 nt, Artificial Sequence
  Description of Artificial Sequence: Synthetic oligonucleotide
aaaccacuaugagcauauu

SEQ ID NO: 1184417 - RNA, 19 nt, Artificial Sequence
  Description of Artificial Sequence: Synthetic oligonucleotide
uccguguucucagcuucau

SEQ ID NO: 1184418 - RNA, 19 nt, Artificial Sequence
  Description of Artificial Sequence: Synthetic oligonucleotide
cccucgaaaaggagauuac

SEQ ID NO: 1184419 - RNA, 19 nt, Artificial Sequence
  Description of Artificial Sequence: Synthetic oligonucleotide
caccuucuuagaagcagua

SEQ ID NO: 1184420 - RNA, 19 nt, Artificial Sequence
  Description of Artificial Sequence: Synthetic oligonucleotide
gaauucccugaagaauggu

SEQ ID NO: 1184421 - RNA, 19 nt, Artificial Sequence
  Description of Artificial Sequence: Synthetic oligonucleotide
ggugucuuucccgcuuagc

SEQ ID NO: 1184422 - RNA, 19 nt, Artificial Sequence
  Description of Artificial Sequence: Synthetic oligonucleotide
cccgcuuagcccucagcag

SEQ ID NO: 1184423 - RNA, 19 nt, Artificial Sequence
  Description of Artificial Sequence: Synthetic oligonucleotide
uggauuggacuggguugcu

SEQ ID NO: 1184424 - RNA, 19 nt, Artificial Sequence
  Description of Artificial Sequence: Synthetic oligonucleotide
augcgccuuuaaaauacaa

SEQ ID NO: 1184425 - RNA, 19 nt, Artificial Sequence
  Description of Artificial Sequence: Synthetic oligonucleotide
gacaacucaugcgccuuua

SEQ ID NO: 1184426 - RNA, 19 nt, Artificial Sequence
  Description of Artificial Sequence: Synthetic oligonucleotide
accucuugugguagcugca

SEQ ID NO: 1184427 - RNA, 19 nt, Artificial Sequence
  Description of Artificial Sequence: Synthetic oligonucleotide
cgccauuucccgccuaccg

SEQ ID NO: 1184428 - RNA, 19 nt, Artificial Sequence
  Description of Artificial Sequence: Synthetic oligonucleotide
guuagguaccaagacuguu

SEQ ID NO: 1184429 - RNA, 19 nt, Artificial Sequence
  Description of Artificial Sequence: Synthetic oligonucleotide
ggcaagcuaucaucaaccu

SEQ ID NO: 1184430 - RNA, 19 nt, Artificial Sequence
  Description of Artificial Sequence: Synthetic oligonucleotide
ggauuggacuggguugcug

SEQ ID NO: 1184431 - RNA, 19 nt, Artificial Sequence
  Description of Artificial Sequence: Synthetic oligonucleotide
cugacguagugcugguagu

SEQ ID NO: 1184432 - RNA, 19 nt, Artificial Sequence
  Description of Artificial Sequence: Synthetic oligonucleotide
gugccacaggauuaugcau

SEQ ID NO: 1184433 - RNA, 19 nt, Artificial Sequence
  Description of Artificial Sequence: Synthetic oligonucleotide
ccgagagcauaacagaggu

SEQ ID NO: 1184434 - RNA, 19 nt, Artificial Sequence
  Description of Artificial Sequence: Synthetic oligonucleotide
ccucgaaaaggagauuaca

SEQ ID NO: 1184435 - RNA, 19 nt, Artificial Sequence
  Description of Artificial Sequence: Synthetic oligonucleotide
gcaauggucccgagugcgc

SEQ ID NO: 1184436 - RNA, 19 nt, Artificial Sequence
  Description of Artificial Sequence: Synthetic oligonucleotide
gacauucguucaaggaauu

SEQ ID NO: 1184437 - RNA, 19 nt, Artificial Sequence
  Description of Artificial Sequence: Synthetic oligonucleotide
guggaacaugcuugauggu

SEQ ID NO: 1184438 - RNA, 19 nt, Artificial Sequence
  Description of Artificial Sequence: Synthetic oligonucleotide
uaccgaccugcugcaccgc

SEQ ID NO: 1184439 - RNA, 19 nt, Artificial Sequence
  Description of Artificial Sequence: Synthetic oligonucleotide
guguuucguccagaucuaa

SEQ ID NO: 1184440 - RNA, 19 nt, Artificial Sequence
  Description of Artificial Sequence: Synthetic oligonucleotide
ucccgccuaccgaccugcu

SEQ ID NO: 1184441 - RNA, 19 nt, Artificial Sequence
  Description of Artificial Sequence: Synthetic oligonucleotide
cuaccagcccaugcaaagu

SEQ ID NO: 1184442 - RNA, 19 nt, Artificial Sequence
  Description of Artificial Sequence: Synthetic oligonucleotide
cugagccugacguuccauu

SEQ ID NO: 1184443 - RNA, 19 nt, Artificial Sequence
  Description of Artificial Sequence: Synthetic oligonucleotide
ccuacacaaacacaauguu

SEQ ID NO: 1184444 - RNA, 19 nt, Artificial Sequence
  Description of Artificial Sequence: Synthetic oligonucleotide
cuggguugcugagaagccu

SEQ ID NO: 1184445 - RNA, 19 nt, Artificial Sequence
  Description of Artificial Sequence: Synthetic oligonucleotide
agucgccauuucccgccua

SEQ ID NO: 1184446 - RNA, 19 nt, Artificial Sequence
  Description of Artificial Sequence: Synthetic oligonucleotide
cuccggcaauggucccgag

SEQ ID NO: 1184447 - RNA, 19 nt, Artificial Sequence
  Description of Artificial Sequence: Synthetic oligonucleotide
ccccucgaaaaggagauua

SEQ ID NO: 1184448 - RNA, 19 nt, Artificial Sequence
  Description of Artificial Sequence: Synthetic oligonucleotide
cgugacgacuauuuucaua

SEQ ID NO: 1184449 - RNA, 19 nt, Artificial Sequence
  Description of Artificial Sequence: Synthetic oligonucleotide
gcauagccacuguuaggua

SEQ ID NO: 1184450 - RNA, 19 nt, Artificial Sequence
  Description of Artificial Sequence: Synthetic oligonucleotide
cagugcgcuguguuuggau

SEQ ID NO: 1184451 - RNA, 19 nt, Artificial Sequence
  Description of Artificial Sequence: Synthetic oligonucleotide
ccguguucucagcuucauc

SEQ ID NO: 1184452 - RNA, 19 nt, Artificial Sequence
  Description of Artificial Sequence: Synthetic oligonucleotide
agccacuguuagguaccaa

SEQ ID NO: 1184453 - RNA, 19 nt, Artificial Sequence
  Description of Artificial Sequence: Synthetic oligonucleotide
guguacugugccacaggau

SEQ ID NO: 1184454 - RNA, 19 nt, Artificial Sequence
  Description of Artificial Sequence: Synthetic oligonucleotide
ggccgggaguguacugugc

SEQ ID NO: 1184455 - RNA, 19 nt, Artificial Sequence
  Description of Artificial Sequence: Synthetic oligonucleotide
ccacaggauuaugcauagc

SEQ ID NO: 1184456 - RNA, 19 nt, Artificial Sequence
  Description of Artificial Sequence: Synthetic oligonucleotide
ccugaaggcaagcuaucau

SEQ ID NO: 1184457 - RNA, 19 nt, Artificial Sequence
  Description of Artificial Sequence: Synthetic oligonucleotide
cugacaacucaugcgccuu

SEQ ID NO: 1184458 - RNA, 19 nt, Artificial Sequence
  Description of Artificial Sequence: Synthetic oligonucleotide
cucuggugugcuucuuguu

SEQ ID NO: 1184459 - RNA, 19 nt, Artificial Sequence
  Description of Artificial Sequence: Synthetic oligonucleotide
ccgggaguguacugugcca

SEQ ID NO: 1184460 - RNA, 19 nt, Artificial Sequence
  Description of Artificial Sequence: Synthetic oligonucleotide
caucaaccucugaguauuu

SEQ ID NO: 1184461 - RNA, 19 nt, Artificial Sequence
  Description of Artificial Sequence: Synthetic oligonucleotide
cuccuccugaaggcaagcu

SEQ ID NO: 1184462 - RNA, 19 nt, Artificial Sequence
  Description of Artificial Sequence: Synthetic oligonucleotide
cccgccuaccgaccugcug

SEQ ID NO: 1184463 - RNA, 19 nt, Artificial Sequence
  Description of Artificial Sequence: Synthetic oligonucleotide
gaacucuggugugcuucuu

SEQ ID NO: 1184464 - RNA, 19 nt, Artificial Sequence
  Description of Artificial Sequence: Synthetic oligonucleotide
gcagugcgcuguguuugga

SEQ ID NO: 1184465 - RNA, 19 nt, Artificial Sequence
  Description of Artificial Sequence: Synthetic oligonucleotide
ggagaacucuggugugcuu

SEQ ID NO: 1184466 - RNA, 19 nt, Artificial Sequence
  Description of Artificial Sequence: Synthetic oligonucleotide
guuccaugucaagcugcuu

SEQ ID NO: 1184467 - RNA, 19 nt, Artificial Sequence
  Description of Artificial Sequence: Synthetic oligonucleotide
cagucgccauuucccgccu

SEQ ID NO: 1184468 - RNA, 19 nt, Artificial Sequence
  Description of Artificial Sequence: Synthetic oligonucleotide
gccugacguuccauuuuaa

SEQ ID NO: 1184469 - RNA, 19 nt, Artificial Sequence
  Description of Artificial Sequence: Synthetic oligonucleotide
cgagagcauaacagaggua

SEQ ID NO: 1184470 - RNA, 19 nt, Artificial Sequence
  Description of Artificial Sequence: Synthetic oligonucleotide
cucauacaucugagacauu

SEQ ID NO: 1184471 - RNA, 19 nt, Artificial Sequence
  Description of Artificial Sequence: Synthetic oligonucleotide
gguuuccuauuuagcuguu

SEQ ID NO: 1184472 - RNA, 19 nt, Artificial Sequence
  Description of Artificial Sequence: Synthetic oligonucleotide
gcgugacgacuauuuucau

SEQ ID NO: 1184473 - RNA, 19 nt, Artificial Sequence
  Description of Artificial Sequence: Synthetic oligonucleotide
cgagugcgcaauagguggu

SEQ ID NO: 1184474 - RNA, 19 nt, Artificial Sequence
  Description of Artificial Sequence: Synthetic oligonucleotide
gccuaccgaccugcugcac

SEQ ID NO: 1184475 - RNA, 19 nt, Artificial Sequence
  Description of Artificial Sequence: Synthetic oligonucleotide
gcgcaauagguggugucuu

SEQ ID NO: 1184476 - RNA, 19 nt, Artificial Sequence
  Description of Artificial Sequence: Synthetic oligonucleotide
cgccuaccgaccugcugca

SEQ ID NO: 1184477 - RNA, 19 nt, Artificial Sequence
  Description of Artificial Sequence: Synthetic oligonucleotide
cguagugcugguaguuauu

SEQ ID NO: 1184478 - RNA, 19 nt, Artificial Sequence
  Description of Artificial Sequence: Synthetic oligonucleotide
ccgcacggacagggacccg

SEQ ID NO: 1184479 - RNA, 19 nt, Artificial Sequence
  Description of Artificial Sequence: Synthetic oligonucleotide
ccaaggcgugacgacuauu

SEQ ID NO: 1184480 - RNA, 19 nt, Artificial Sequence
  Description of Artificial Sequence: Synthetic oligonucleotide
aaggauacuauauauaugg

SEQ ID NO: 1184481 - RNA, 19 nt, Artificial Sequence
  Description of Artificial Sequence: Synthetic oligonucleotide
aacaaauggguguagaacc

SEQ ID NO: 1184482 - RNA, 19 nt, Artificial Sequence
  Description of Artificial Sequence: Synthetic oligonucleotide
uaauuuuagaacaugaccu

SEQ ID NO: 1184483 - RNA, 19 nt, Artificial Sequence
  Description of Artificial Sequence: Synthetic oligonucleotide
uuaauuuuagaacaugacc

SEQ ID NO: 1184484 - RNA, 19 nt, Artificial Sequence
  Description of Artificial Sequence: Synthetic oligonucleotide
gauacuauauauauggacg

SEQ ID NO: 1184485 - RNA, 19 nt, Artificial Sequence
  Description of Artificial Sequence: Synthetic oligonucleotide
acuaguaucucucaacagc

SEQ ID NO: 1184486 - RNA, 19 nt, Artificial Sequence
  Description of Artificial Sequence: Synthetic oligonucleotide
uuaacugcuaguucuaggg

SEQ ID NO: 1184487 - RNA, 19 nt, Artificial Sequence
  Description of Artificial Sequence: Synthetic oligonucleotide
aaagucguccaucuggugg

SEQ ID NO: 1184488 - RNA, 19 nt, Artificial Sequence
  Description of Artificial Sequence: Synthetic oligonucleotide
aauuuuagaacaugaccug

SEQ ID NO: 1184489 - RNA, 19 nt, Artificial Sequence
  Description of Artificial Sequence: Synthetic oligonucleotide
uacauauucuccaugggug

SEQ ID NO: 1184490 - RNA, 19 nt, Artificial Sequence
  Description of Artificial Sequence: Synthetic oligonucleotide
uuaguuguguaacccaagg

SEQ ID NO: 1184491 - RNA, 19 nt, Artificial Sequence
  Description of Artificial Sequence: Synthetic oligonucleotide
gaucagaccgugcaggugg

SEQ ID NO: 1184492 - RNA, 19 nt, Artificial Sequence
  Description of Artificial Sequence: Synthetic oligonucleotide
uauaaaacacagcauuacu

SEQ ID NO: 1184493 - RNA, 19 nt, Artificial Sequence
  Description of Artificial Sequence: Synthetic oligonucleotide
cucaacgugugccagaugg

SEQ ID NO: 1184494 - RNA, 19 nt, Artificial Sequence
  Description of Artificial Sequence: Synthetic oligonucleotide
aaccgugcgaaccauucac

SEQ ID NO: 1184495 - RNA, 19 nt, Artificial Sequence
  Description of Artificial Sequence: Synthetic oligonucleotide
uguauugcuccucauccag

SEQ ID NO: 1184496 - RNA, 19 nt, Artificial Sequence
  Description of Artificial Sequence: Synthetic oligonucleotide
uuuaacugcuaguucuagg

SEQ ID NO: 1184497 - RNA, 19 nt, Artificial Sequence
  Description of Artificial Sequence: Synthetic oligonucleotide
agauaauuuauuucuauuu

SEQ ID NO: 1184498 - RNA, 19 nt, Artificial Sequence
  Description of Artificial Sequence: Synthetic oligonucleotide
uuaucuacauagcugcgca

SEQ ID NO: 1184499 - RNA, 19 nt, Artificial Sequence
  Description of Artificial Sequence: Synthetic oligonucleotide
acuauauauauggacggac

SEQ ID NO: 1184500 - RNA, 19 nt, Artificial Sequence
  Description of Artificial Sequence: Synthetic oligonucleotide
ugcacgaggcgguagaagg

SEQ ID NO: 1184501 - RNA, 19 nt, Artificial Sequence
  Description of Artificial Sequence: Synthetic oligonucleotide
agaucuuaucuacauagcu

SEQ ID NO: 1184502 - RNA, 19 nt, Artificial Sequence
  Description of Artificial Sequence: Synthetic oligonucleotide
aagaucuuaucuacauagc

SEQ ID NO: 1184503 - RNA, 19 nt, Artificial Sequence
  Description of Artificial Sequence: Synthetic oligonucleotide
ugcgcaugaacucucgaag

SEQ ID NO: 1184504 - RNA, 19 nt, Artificial Sequence
  Description of Artificial Sequence: Synthetic oligonucleotide
uccagguugccaaucacag

SEQ ID NO: 1184505 - RNA, 19 nt, Artificial Sequence
  Description of Artificial Sequence: Synthetic oligonucleotide
acuggaaacuggcuuaguc

SEQ ID NO: 1184506 - RNA, 19 nt, Artificial Sequence
  Description of Artificial Sequence: Synthetic oligonucleotide
uuagcugacuucagguuag

SEQ ID NO: 1184507 - RNA, 19 nt, Artificial Sequence
  Description of Artificial Sequence: Synthetic oligonucleotide
uauauggacggacacuacu

SEQ ID NO: 1184508 - RNA, 19 nt, Artificial Sequence
  Description of Artificial Sequence: Synthetic oligonucleotide
uuuaguuguguaacccaag

SEQ ID NO: 1184509 - RNA, 19 nt, Artificial Sequence
  Description of Artificial Sequence: Synthetic oligonucleotide
agggacaccuuguacauag

SEQ ID NO: 1184510 - RNA, 19 nt, Artificial Sequence
  Description of Artificial Sequence: Synthetic oligonucleotide
cagcugacaauccaggucc

SEQ ID NO: 1184511 - RNA, 19 nt, Artificial Sequence
  Description of Artificial Sequence: Synthetic oligonucleotide
ucugauuggaggagaagga

SEQ ID NO: 1184512 - RNA, 19 nt, Artificial Sequence
  Description of Artificial Sequence: Synthetic oligonucleotide
acucguuggaggaagagcg

SEQ ID NO: 1184513 - RNA, 19 nt, Artificial Sequence
  Description of Artificial Sequence: Synthetic oligonucleotide
uauauauggacggacacua

SEQ ID NO: 1184514 - RNA, 19 nt, Artificial Sequence
  Description of Artificial Sequence: Synthetic oligonucleotide
ugcguguacagguaaaccu

SEQ ID NO: 1184515 - RNA, 19 nt, Artificial Sequence
  Description of Artificial Sequence: Synthetic oligonucleotide
uucuccgccaaccagcugu

SEQ ID NO: 1184516 - RNA, 19 nt, Artificial Sequence
  Description of Artificial Sequence: Synthetic oligonucleotide
agagagaucagaccgugca

SEQ ID NO: 1184517 - RNA, 19 nt, Artificial Sequence
  Description of Artificial Sequence: Synthetic oligonucleotide
gaagcacauggucaugagg

SEQ ID NO: 1184518 - RNA, 19 nt, Artificial Sequence
  Description of Artificial Sequence: Synthetic oligonucleotide
agacuaguaucucucaaca

SEQ ID NO: 1184519 - RNA, 19 nt, Artificial Sequence
  Description of Artificial Sequence: Synthetic oligonucleotide
uaacccaagggacaccuug

SEQ ID NO: 1184520 - RNA, 19 nt, Artificial Sequence
  Description of Artificial Sequence: Synthetic oligonucleotide
aacuggcuuagucagcuga

SEQ ID NO: 1184521 - RNA, 19 nt, Artificial Sequence
  Description of Artificial Sequence: Synthetic oligonucleotide
agucuuuaacugcuaguuc

SEQ ID NO: 1184522 - RNA, 19 nt, Artificial Sequence
  Description of Artificial Sequence: Synthetic oligonucleotide
uugaccuccuacucugugg

SEQ ID NO: 1184523 - RNA, 19 nt, Artificial Sequence
  Description of Artificial Sequence: Synthetic oligonucleotide
ucugucgggagcaggugcg

SEQ ID NO: 1184524 - RNA, 19 nt, Artificial Sequence
  Description of Artificial Sequence: Synthetic oligonucleotide
cuuacauauucuccauggg

SEQ ID NO: 1184525 - RNA, 19 nt, Artificial Sequence
  Description of Artificial Sequence: Synthetic oligonucleotide
ucaggaagucacugcauag

SEQ ID NO: 1184526 - RNA, 19 nt, Artificial Sequence
  Description of Artificial Sequence: Synthetic oligonucleotide
accauucacggccuuuccc

SEQ ID NO: 1184527 - RNA, 19 nt, Artificial Sequence
  Description of Artificial Sequence: Synthetic oligonucleotide
agagaucagaccgugcagg

SEQ ID NO: 1184528 - RNA, 19 nt, Artificial Sequence
  Description of Artificial Sequence: Synthetic oligonucleotide
aaauggguguagaaccccg

SEQ ID NO: 1184529 - RNA, 19 nt, Artificial Sequence
  Description of Artificial Sequence: Synthetic oligonucleotide
uggagucuuuaacugcuag

SEQ ID NO: 1184530 - RNA, 19 nt, Artificial Sequence
  Description of Artificial Sequence: Synthetic oligonucleotide
gugcgaaccauucacggcc

SEQ ID NO: 1184531 - RNA, 19 nt, Artificial Sequence
  Description of Artificial Sequence: Synthetic oligonucleotide
ugguaguaggugaagcaca

SEQ ID NO: 1184532 - RNA, 19 nt, Artificial Sequence
  Description of Artificial Sequence: Synthetic oligonucleotide
ccuuacauauucuccaugg

SEQ ID NO: 1184533 - RNA, 19 nt, Artificial Sequence
  Description of Artificial Sequence: Synthetic oligonucleotide
uacauagcugcgcaugaac

SEQ ID NO: 1184534 - RNA, 19 nt, Artificial Sequence
  Description of Artificial Sequence: Synthetic oligonucleotide
gacuaguaucucucaacag

SEQ ID NO: 1184535 - RNA, 19 nt, Artificial Sequence
  Description of Artificial Sequence: Synthetic oligonucleotide
caaggauacuauauauaug

SEQ ID NO: 1184536 - RNA, 19 nt, Artificial Sequence
  Description of Artificial Sequence: Synthetic oligonucleotide
uaacugcuaguucuagggc

SEQ ID NO: 1184537 - RNA, 19 nt, Artificial Sequence
  Description of Artificial Sequence: Synthetic oligonucleotide
aacucucgaagugccaggg

SEQ ID NO: 1184538 - RNA, 19 nt, Artificial Sequence
  Description of Artificial Sequence: Synthetic oligonucleotide
cuuaucuacauagcugcgc

SEQ ID NO: 1184539 - RNA, 19 nt, Artificial Sequence
  Description of Artificial Sequence: Synthetic oligonucleotide
agaaccccgagagagauca

SEQ ID NO: 1184540 - RNA, 19 nt, Artificial Sequence
  Description of Artificial Sequence: Synthetic oligonucleotide
uuaggagucaaugcugcca

SEQ ID NO: 1184541 - RNA, 19 nt, Artificial Sequence
  Description of Artificial Sequence: Synthetic oligonucleotide
ggcucugauacacacuugg

SEQ ID NO: 1184542 - RNA, 19 nt, Artificial Sequence
  Description of Artificial Sequence: Synthetic oligonucleotide
gugcgguuugcccaggugg

SEQ ID NO: 1184543 - RNA, 19 nt, Artificial Sequence
  Description of Artificial Sequence: Synthetic oligonucleotide
cucacaaaccgugcgaacc

SEQ ID NO: 1184544 - RNA, 19 nt, Artificial Sequence
  Description of Artificial Sequence: Synthetic oligonucleotide
cuuggucccaugaugggug

SEQ ID NO: 1184545 - RNA, 19 nt, Artificial Sequence
  Description of Artificial Sequence: Synthetic oligonucleotide
agccaaauguccaacuccg

SEQ ID NO: 1184546 - RNA, 19 nt, Artificial Sequence
  Description of Artificial Sequence: Synthetic oligonucleotide
cacuuagcagcuuguauug

SEQ ID NO: 1184547 - RNA, 19 nt, Artificial Sequence
  Description of Artificial Sequence: Synthetic oligonucleotide
ugcgaaggacugcacgagg

SEQ ID NO: 1184548 - RNA, 19 nt, Artificial Sequence
  Description of Artificial Sequence: Synthetic oligonucleotide
ggugaaugugcccagcugc

SEQ ID NO: 1184549 - RNA, 19 nt, Artificial Sequence
  Description of Artificial Sequence: Synthetic oligonucleotide
gaaggacugcacgaggcgg

SEQ ID NO: 1184550 - RNA, 19 nt, Artificial Sequence
  Description of Artificial Sequence: Synthetic oligonucleotide
auguugugggugaaugugc

SEQ ID NO: 1184551 - RNA, 19 nt, Artificial Sequence
  Description of Artificial Sequence: Synthetic oligonucleotide
aaggacucguuggaggaag

SEQ ID NO: 1184552 - RNA, 19 nt, Artificial Sequence
  Description of Artificial Sequence: Synthetic oligonucleotide
acugcgaaggacugcacga

SEQ ID NO: 1184553 - RNA, 19 nt, Artificial Sequence
  Description of Artificial Sequence: Synthetic oligonucleotide
uguagaaccccgagagaga

SEQ ID NO: 1184554 - RNA, 19 nt, Artificial Sequence
  Description of Artificial Sequence: Synthetic oligonucleotide
gaacucucgaagugccagg

SEQ ID NO: 1184555 - RNA, 19 nt, Artificial Sequence
  Description of Artificial Sequence: Synthetic oligonucleotide
caacaaauggguguagaac

SEQ ID NO: 1184556 - RNA, 19 nt, Artificial Sequence
  Description of Artificial Sequence: Synthetic oligonucleotide
cucaaacagcaccacugcg

SEQ ID NO: 1184557 - RNA, 19 nt, Artificial Sequence
  Description of Artificial Sequence: Synthetic oligonucleotide
augcguguacagguaaacc

SEQ ID NO: 1184558 - RNA, 19 nt, Artificial Sequence
  Description of Artificial Sequence: Synthetic oligonucleotide
agaaccucaacgugugcca

SEQ ID NO: 1184559 - RNA, 19 nt, Artificial Sequence
  Description of Artificial Sequence: Synthetic oligonucleotide
auauauauggacggacacu

SEQ ID NO: 1184560 - RNA, 19 nt, Artificial Sequence
  Description of Artificial Sequence: Synthetic oligonucleotide
ugaagcacauggucaugag

SEQ ID NO: 1184561 - RNA, 19 nt, Artificial Sequence
  Description of Artificial Sequence: Synthetic oligonucleotide
ugggagaucgcuuccgccu

SEQ ID NO: 1184562 - RNA, 19 nt, Artificial Sequence
  Description of Artificial Sequence: Synthetic oligonucleotide
cccgagagagaucagaccg

SEQ ID NO: 1184563 - RNA, 19 nt, Artificial Sequence
  Description of Artificial Sequence: Synthetic oligonucleotide
uugugggugaaugugccca

SEQ ID NO: 1184564 - RNA, 19 nt, Artificial Sequence
  Description of Artificial Sequence: Synthetic oligonucleotide
acucacaaaccgugcgaac

SEQ ID NO: 1184565 - RNA, 19 nt, Artificial Sequence
  Description of Artificial Sequence: Synthetic oligonucleotide
aaaccgugcgaaccauuca

SEQ ID NO: 1184566 - RNA, 19 nt, Artificial Sequence
  Description of Artificial Sequence: Synthetic oligonucleotide
caaaccgugcgaaccauuc

SEQ ID NO: 1184567 - RNA, 19 nt, Artificial Sequence
  Description of Artificial Sequence: Synthetic oligonucleotide
cuucagaugcguguacagg

SEQ ID NO: 1184568 - RNA, 19 nt, Artificial Sequence
  Description of Artificial Sequence: Synthetic oligonucleotide
agggcaaagaguuguguaa

SEQ ID NO: 1184569 - RNA, 19 nt, Artificial Sequence
  Description of Artificial Sequence: Synthetic oligonucleotide
uacuauauauauggacgga

SEQ ID NO: 1184570 - RNA, 19 nt, Artificial Sequence
  Description of Artificial Sequence: Synthetic oligonucleotide
acaauccagguccuuacau

SEQ ID NO: 1184571 - RNA, 19 nt, Artificial Sequence
  Description of Artificial Sequence: Synthetic oligonucleotide
acuuagcagcuuguauugc

SEQ ID NO: 1184572 - RNA, 19 nt, Artificial Sequence
  Description of Artificial Sequence: Synthetic oligonucleotide
uggguguagaaccccgaga

SEQ ID NO: 1184573 - RNA, 19 nt, Artificial Sequence
  Description of Artificial Sequence: Synthetic oligonucleotide
gauacacacuuggacuugc

SEQ ID NO: 1184574 - RNA, 19 nt, Artificial Sequence
  Description of Artificial Sequence: Synthetic oligonucleotide
caugaugggugugagggug

SEQ ID NO: 1184575 - RNA, 19 nt, Artificial Sequence
  Description of Artificial Sequence: Synthetic oligonucleotide
ugauuacagucacagucuu

SEQ ID NO: 1184576 - RNA, 19 nt, Artificial Sequence
  Description of Artificial Sequence: Synthetic oligonucleotide
agcaggugcgguuugccca

SEQ ID NO: 1184577 - RNA, 19 nt, Artificial Sequence
  Description of Artificial Sequence: Synthetic oligonucleotide
gcuguuagcugacuucagg

SEQ ID NO: 1184578 - RNA, 19 nt, Artificial Sequence
  Description of Artificial Sequence: Synthetic oligonucleotide
cucucgaagugccaggguc

SEQ ID NO: 1184579 - RNA, 19 nt, Artificial Sequence
  Description of Artificial Sequence: Synthetic oligonucleotide
gacucguuggaggaagagc

SEQ ID NO: 1184580 - RNA, 19 nt, Artificial Sequence
  Description of Artificial Sequence: Synthetic oligonucleotide
gguccuuacauauucucca

SEQ ID NO: 1184581 - RNA, 19 nt, Artificial Sequence
  Description of Artificial Sequence: Synthetic oligonucleotide
cauuugcucaaugugguca

SEQ ID NO: 1184582 - RNA, 19 nt, Artificial Sequence
  Description of Artificial Sequence: Synthetic oligonucleotide
ucgcuuccgccucucacag

SEQ ID NO: 1184583 - RNA, 19 nt, Artificial Sequence
  Description of Artificial Sequence: Synthetic oligonucleotide
gagaagaucuuaucuacau

SEQ ID NO: 1184584 - RNA, 19 nt, Artificial Sequence
  Description of Artificial Sequence: Synthetic oligonucleotide
agggucuccucaucugggg

SEQ ID NO: 1184585 - RNA, 19 nt, Artificial Sequence
  Description of Artificial Sequence: Synthetic oligonucleotide
cuuuaacugcuaguucuag

SEQ ID NO: 1184586 - RNA, 19 nt, Artificial Sequence
  Description of Artificial Sequence: Synthetic oligonucleotide
acaguggacagcaucaaaa

SEQ ID NO: 1184587 - RNA, 19 nt, Artificial Sequence
  Description of Artificial Sequence: Synthetic oligonucleotide
gaugcguguacagguaaac

SEQ ID NO: 1184588 - RNA, 19 nt, Artificial Sequence
  Description of Artificial Sequence: Synthetic oligonucleotide
caaguccuccccuccagag

SEQ ID NO: 1184589 - RNA, 19 nt, Artificial Sequence
  Description of Artificial Sequence: Synthetic oligonucleotide
ucuguggccauuugcucaa

SEQ ID NO: 1184590 - RNA, 19 nt, Artificial Sequence
  Description of Artificial Sequence: Synthetic oligonucleotide
acgugugccagaugggcug

SEQ ID NO: 1184591 - RNA, 19 nt, Artificial Sequence
  Description of Artificial Sequence: Synthetic oligonucleotide
gaaccgcaggcugucaucc

SEQ ID NO: 1184592 - RNA, 19 nt, Artificial Sequence
  Description of Artificial Sequence: Synthetic oligonucleotide
ugggugaaugugcccagcu

SEQ ID NO: 1184593 - RNA, 19 nt, Artificial Sequence
  Description of Artificial Sequence: Synthetic oligonucleotide
gcuggugucaugcaggguc

SEQ ID NO: 1184594 - RNA, 19 nt, Artificial Sequence
  Description of Artificial Sequence: Synthetic oligonucleotide
gagucaaugcugccagcug

SEQ ID NO: 1184595 - RNA, 19 nt, Artificial Sequence
  Description of Artificial Sequence: Synthetic oligonucleotide
caggaagucacugcauagc

SEQ ID NO: 1184596 - RNA, 19 nt, Artificial Sequence
  Description of Artificial Sequence: Synthetic oligonucleotide
ugcgguuugcccagguggu

SEQ ID NO: 1184597 - RNA, 19 nt, Artificial Sequence
  Description of Artificial Sequence: Synthetic oligonucleotide
ucguuggaggaagagcggc

SEQ ID NO: 1184598 - RNA, 19 nt, Artificial Sequence
  Description of Artificial Sequence: Synthetic oligonucleotide
ucuuggucccaugaugggu

SEQ ID NO: 1184599 - RNA, 19 nt, Artificial Sequence
  Description of Artificial Sequence: Synthetic oligonucleotide
ucagaugcguguacaggua

SEQ ID NO: 1184600 - RNA, 19 nt, Artificial Sequence
  Description of Artificial Sequence: Synthetic oligonucleotide
caaauggguguagaacccc

SEQ ID NO: 1184601 - RNA, 19 nt, Artificial Sequence
  Description of Artificial Sequence: Synthetic oligonucleotide
aaacuggcuuagucagcug

SEQ ID NO: 1184602 - RNA, 19 nt, Artificial Sequence
  Description of Artificial Sequence: Synthetic oligonucleotide
auauucuccauggguggag

SEQ ID NO: 1184603 - RNA, 19 nt, Artificial Sequence
  Description of Artificial Sequence: Synthetic oligonucleotide
cucguuggaggaagagcgg

SEQ ID NO: 1184604 - RNA, 19 nt, Artificial Sequence
  Description of Artificial Sequence: Synthetic oligonucleotide
ucucaaccuuaauuuuaga

SEQ ID NO: 1184605 - RNA, 19 nt, Artificial Sequence
  Description of Artificial Sequence: Synthetic oligonucleotide
aaucagcacucugauugga

SEQ ID NO: 1184606 - RNA, 19 nt, Artificial Sequence
  Description of Artificial Sequence: Synthetic oligonucleotide
caacgugugccagaugggc

SEQ ID NO: 1184607 - RNA, 19 nt, Artificial Sequence
  Description of Artificial Sequence: Synthetic oligonucleotide
uggaguccccauagaaacu

SEQ ID NO: 1184608 - RNA, 19 nt, Artificial Sequence
  Description of Artificial Sequence: Synthetic oligonucleotide
ucuuugcaggaaacagcac

SEQ ID NO: 1184609 - RNA, 19 nt, Artificial Sequence
  Description of Artificial Sequence: Synthetic oligonucleotide
auauauggacggacacuac

SEQ ID NO: 1184610 - RNA, 19 nt, Artificial Sequence
  Description of Artificial Sequence: Synthetic oligonucleotide
aaccucaacgugugccaga

SEQ ID NO: 1184611 - RNA, 19 nt, Artificial Sequence
  Description of Artificial Sequence: Synthetic oligonucleotide
guauugcuccucauccagg

SEQ ID NO: 1184612 - RNA, 19 nt, Artificial Sequence
  Description of Artificial Sequence: Synthetic oligonucleotide
cucugucgggagcaggugc

SEQ ID NO: 1184613 - RNA, 19 nt, Artificial Sequence
  Description of Artificial Sequence: Synthetic oligonucleotide
gaucgcuuccgccucucac

SEQ ID NO: 1184614 - RNA, 19 nt, Artificial Sequence
  Description of Artificial Sequence: Synthetic oligonucleotide
uuuccugaccagugguccu

SEQ ID NO: 1184615 - RNA, 19 nt, Artificial Sequence
  Description of Artificial Sequence: Synthetic oligonucleotide
gcuuccgccucucacagug

SEQ ID NO: 1184616 - RNA, 19 nt, Artificial Sequence
  Description of Artificial Sequence: Synthetic oligonucleotide
gugguaguaggugaagcac

SEQ ID NO: 1184617 - RNA, 19 nt, Artificial Sequence
  Description of Artificial Sequence: Synthetic oligonucleotide
aaccccgagagagaucaga

SEQ ID NO: 1184618 - RNA, 19 nt, Artificial Sequence
  Description of Artificial Sequence: Synthetic oligonucleotide
guugaccuccuacucugug

SEQ ID NO: 1184619 - RNA, 19 nt, Artificial Sequence
  Description of Artificial Sequence: Synthetic oligonucleotide
accccgagagagaucagac

SEQ ID NO: 1184620 - RNA, 19 nt, Artificial Sequence
  Description of Artificial Sequence: Synthetic oligonucleotide
uuccgccucucacagugga

SEQ ID NO: 1184621 - RNA, 19 nt, Artificial Sequence
  Description of Artificial Sequence: Synthetic oligonucleotide
agguuaggagucaaugcug

SEQ ID NO: 1184622 - RNA, 19 nt, Artificial Sequence
  Description of Artificial Sequence: Synthetic oligonucleotide
cauagaaugggagcagaca

SEQ ID NO: 1184623 - RNA, 19 nt, Artificial Sequence
  Description of Artificial Sequence: Synthetic oligonucleotide
aacgugugccagaugggcu

SEQ ID NO: 1184624 - RNA, 19 nt, Artificial Sequence
  Description of Artificial Sequence: Synthetic oligonucleotide
accacugcgaaggacugca

SEQ ID NO: 1184625 - RNA, 19 nt, Artificial Sequence
  Description of Artificial Sequence: Synthetic oligonucleotide
aauggguguagaaccccga

SEQ ID NO: 1184626 - RNA, 19 nt, Artificial Sequence
  Description of Artificial Sequence: Synthetic oligonucleotide
gacaauccagguccuuaca

SEQ ID NO: 1184627 - RNA, 19 nt, Artificial Sequence
  Description of Artificial Sequence: Synthetic oligonucleotide
gaaccucaacgugugccag

SEQ ID NO: 1184628 - RNA, 19 nt, Artificial Sequence
  Description of Artificial Sequence: Synthetic oligonucleotide
ugacucgcccaugucauuc

SEQ ID NO: 1184629 - RNA, 19 nt, Artificial Sequence
  Description of Artificial Sequence: Synthetic oligonucleotide
acacuuggacuugcagcgc

SEQ ID NO: 1184630 - RNA, 19 nt, Artificial Sequence
  Description of Artificial Sequence: Synthetic oligonucleotide
ugcgaaccauucacggccu

SEQ ID NO: 1184631 - RNA, 19 nt, Artificial Sequence
  Description of Artificial Sequence: Synthetic oligonucleotide
gcuuagucagcugacaauc

SEQ ID NO: 1184632 - RNA, 19 nt, Artificial Sequence
  Description of Artificial Sequence: Synthetic oligonucleotide
uggugggagaucgcuuccg

SEQ ID NO: 1184633 - RNA, 19 nt, Artificial Sequence
  Description of Artificial Sequence: Synthetic oligonucleotide
ggcgguagaagguuggcuc

SEQ ID NO: 1184634 - RNA, 19 nt, Artificial Sequence
  Description of Artificial Sequence: Synthetic oligonucleotide
ggguugaccuccuacucug

SEQ ID NO: 1184635 - RNA, 19 nt, Artificial Sequence
  Description of Artificial Sequence: Synthetic oligonucleotide
gugaaugugcccagcugcc

SEQ ID NO: 1184636 - RNA, 19 nt, Artificial Sequence
  Description of Artificial Sequence: Synthetic oligonucleotide
cagguuaggagucaaugcu

SEQ ID NO: 1184637 - RNA, 19 nt, Artificial Sequence
  Description of Artificial Sequence: Synthetic oligonucleotide
gcagguggaguccccauag

SEQ ID NO: 1184638 - RNA, 19 nt, Artificial Sequence
  Description of Artificial Sequence: Synthetic oligonucleotide
cuugcagcgcugugcacuc

SEQ ID NO: 1184639 - RNA, 19 nt, Artificial Sequence
  Description of Artificial Sequence: Synthetic oligonucleotide
ugggucauguggcaccauu

SEQ ID NO: 1184640 - RNA, 19 nt, Artificial Sequence
  Description of Artificial Sequence: Synthetic oligonucleotide
gauuacagucacagucuuc

SEQ ID NO: 1184641 - RNA, 19 nt, Artificial Sequence
  Description of Artificial Sequence: Synthetic oligonucleotide
aggauacuauauauaugga

SEQ ID NO: 1184642 - RNA, 19 nt, Artificial Sequence
  Description of Artificial Sequence: Synthetic oligonucleotide
gcgcugugcacucacaaac

SEQ ID NO: 1184643 - RNA, 19 nt, Artificial Sequence
  Description of Artificial Sequence: Synthetic oligonucleotide
gugggagaucgcuuccgcc

SEQ ID NO: 1184644 - RNA, 19 nt, Artificial Sequence
  Description of Artificial Sequence: Synthetic oligonucleotide
aggcccaaagucguccauc

SEQ ID NO: 1184645 - RNA, 19 nt, Artificial Sequence
  Description of Artificial Sequence: Synthetic oligonucleotide
accgugcgaaccauucacg

SEQ ID NO: 1184646 - RNA, 19 nt, Artificial Sequence
  Description of Artificial Sequence: Synthetic oligonucleotide
gguggugggagaucgcuuc

SEQ ID NO: 1184647 - RNA, 19 nt, Artificial Sequence
  Description of Artificial Sequence: Synthetic oligonucleotide
caaagucguccaucuggug

SEQ ID NO: 1184648 - RNA, 19 nt, Artificial Sequence
  Description of Artificial Sequence: Synthetic oligonucleotide
caaccagcuguuagcugac

SEQ ID NO: 1184649 - RNA, 19 nt, Artificial Sequence
  Description of Artificial Sequence: Synthetic oligonucleotide
cugagacuaguaucucuca

SEQ ID NO: 1184650 - RNA, 19 nt, Artificial Sequence
  Description of Artificial Sequence: Synthetic oligonucleotide
accagcuguuagcugacuu

SEQ ID NO: 1184651 - RNA, 19 nt, Artificial Sequence
  Description of Artificial Sequence: Synthetic oligonucleotide
gaacaugaccuggcagggc

SEQ ID NO: 1184652 - RNA, 19 nt, Artificial Sequence
  Description of Artificial Sequence: Synthetic oligonucleotide
gagagagaucagaccgugc

SEQ ID NO: 1184653 - RNA, 19 nt, Artificial Sequence
  Description of Artificial Sequence: Synthetic oligonucleotide
ccaaggauacuauauauau

SEQ ID NO: 1184654 - RNA, 19 nt, Artificial Sequence
  Description of Artificial Sequence: Synthetic oligonucleotide
cauugaaccgcaggcuguc

SEQ ID NO: 1184655 - RNA, 19 nt, Artificial Sequence
  Description of Artificial Sequence: Synthetic oligonucleotide
agcgcugugcacucacaaa

SEQ ID NO: 1184656 - RNA, 19 nt, Artificial Sequence
  Description of Artificial Sequence: Synthetic oligonucleotide
agaucagaccgugcaggug

SEQ ID NO: 1184657 - RNA, 19 nt, Artificial Sequence
  Description of Artificial Sequence: Synthetic oligonucleotide
gcaacaaauggguguagaa

SEQ ID NO: 1184658 - RNA, 19 nt, Artificial Sequence
  Description of Artificial Sequence: Synthetic oligonucleotide
guggccauuugcucaaugu

SEQ ID NO: 1184659 - RNA, 19 nt, Artificial Sequence
  Description of Artificial Sequence: Synthetic oligonucleotide
cuuccgccucucacagugg

SEQ ID NO: 1184660 - RNA, 19 nt, Artificial Sequence
  Description of Artificial Sequence: Synthetic oligonucleotide
ccgugcgaaccauucacgg

SEQ ID NO: 1184661 - RNA, 19 nt, Artificial Sequence
  Description of Artificial Sequence: Synthetic oligonucleotide
gagaucagaccgugcaggu

SEQ ID NO: 1184662 - RNA, 19 nt, Artificial Sequence
  Description of Artificial Sequence: Synthetic oligonucleotide
cugcgaaggacugcacgag

SEQ ID NO: 1184663 - RNA, 19 nt, Artificial Sequence
  Description of Artificial Sequence: Synthetic oligonucleotide
auucuccauggguggagau

SEQ ID NO: 1184664 - RNA, 19 nt, Artificial Sequence
  Description of Artificial Sequence: Synthetic oligonucleotide
gaccuccuacucuguggcc

SEQ ID NO: 1184665 - RNA, 19 nt, Artificial Sequence
  Description of Artificial Sequence: Synthetic oligonucleotide
uugcucaauguggucacuu

SEQ ID NO: 1184666 - RNA, 19 nt, Artificial Sequence
  Description of Artificial Sequence: Synthetic oligonucleotide
ggacuugcagcgcugugca

SEQ ID NO: 1184667 - RNA, 19 nt, Artificial Sequence
  Description of Artificial Sequence: Synthetic oligonucleotide
acucucgaagugccagggu

SEQ ID NO: 1184668 - RNA, 19 nt, Artificial Sequence
  Description of Artificial Sequence: Synthetic oligonucleotide
uggcaacaaauggguguag

SEQ ID NO: 1184669 - RNA, 19 nt, Artificial Sequence
  Description of Artificial Sequence: Synthetic oligonucleotide
uccgccucucacaguggac

SEQ ID NO: 1184670 - RNA, 19 nt, Artificial Sequence
  Description of Artificial Sequence: Synthetic oligonucleotide
uagaaccccgagagagauc

SEQ ID NO: 1184671 - RNA, 19 nt, Artificial Sequence
  Description of Artificial Sequence: Synthetic oligonucleotide
cagggcaaagaguugugua

SEQ ID NO: 1184672 - RNA, 19 nt, Artificial Sequence
  Description of Artificial Sequence: Synthetic oligonucleotide
gaccgugcagguggagucc

SEQ ID NO: 1184673 - RNA, 19 nt, Artificial Sequence
  Description of Artificial Sequence: Synthetic oligonucleotide
ugaugggugugagggugac

SEQ ID NO: 1184674 - RNA, 19 nt, Artificial Sequence
  Description of Artificial Sequence: Synthetic oligonucleotide
gcauggguugaccuccuac

SEQ ID NO: 1184675 - RNA, 19 nt, Artificial Sequence
  Description of Artificial Sequence: Synthetic oligonucleotide
ggugggagaucgcuuccgc

SEQ ID NO: 1184676 - RNA, 19 nt, Artificial Sequence
  Description of Artificial Sequence: Synthetic oligonucleotide
ggacaccuuguacauagaa

SEQ ID NO: 1184677 - RNA, 19 nt, Artificial Sequence
  Description of Artificial Sequence: Synthetic oligonucleotide
guaguaggugaagcacaug

SEQ ID NO: 1184678 - RNA, 19 nt, Artificial Sequence
  Description of Artificial Sequence: Synthetic oligonucleotide
ccauucacggccuuuccca

SEQ ID NO: 1184679 - RNA, 19 nt, Artificial Sequence
  Description of Artificial Sequence: Synthetic oligonucleotide
gcaggugcgguuugcccag

SEQ ID NO: 1184680 - RNA, 19 nt, Artificial Sequence
  Description of Artificial Sequence: Synthetic oligonucleotide
gacuucagguuaggaguca

SEQ ID NO: 1184681 - RNA, 19 nt, Artificial Sequence
  Description of Artificial Sequence: Synthetic oligonucleotide
cagaugcguguacagguaa

SEQ ID NO: 1184682 - RNA, 19 nt, Artificial Sequence
  Description of Artificial Sequence: Synthetic oligonucleotide
agcuuguauugcuccucau

SEQ ID NO: 1184683 - RNA, 19 nt, Artificial Sequence
  Description of Artificial Sequence: Synthetic oligonucleotide
agcuguuagcugacuucag

SEQ ID NO: 1184684 - RNA, 19 nt, Artificial Sequence
  Description of Artificial Sequence: Synthetic oligonucleotide
ucagaccgugcagguggag

SEQ ID NO: 1184685 - RNA, 19 nt, Artificial Sequence
  Description of Artificial Sequence: Synthetic oligonucleotide
ucgaagugccagggucucc

SEQ ID NO: 1184686 - RNA, 19 nt, Artificial Sequence
  Description of Artificial Sequence: Synthetic oligonucleotide
cugacaauccagguccuua

SEQ ID NO: 1184687 - RNA, 19 nt, Artificial Sequence
  Description of Artificial Sequence: Synthetic oligonucleotide
acccaagggacaccuugua

SEQ ID NO: 1184688 - RNA, 19 nt, Artificial Sequence
  Description of Artificial Sequence: Synthetic oligonucleotide
uccgggaggcucccuggau

SEQ ID NO: 1184689 - RNA, 19 nt, Artificial Sequence
  Description of Artificial Sequence: Synthetic oligonucleotide
uccuacucuguggccauuu

SEQ ID NO: 1184690 - RNA, 19 nt, Artificial Sequence
  Description of Artificial Sequence: Synthetic oligonucleotide
auugaaccgcaggcuguca

SEQ ID NO: 1184691 - RNA, 19 nt, Artificial Sequence
  Description of Artificial Sequence: Synthetic oligonucleotide
agaugcguguacagguaaa

SEQ ID NO: 1184692 - RNA, 19 nt, Artificial Sequence
  Description of Artificial Sequence: Synthetic oligonucleotide
ccagguugccaaucacagc

SEQ ID NO: 1184693 - RNA, 19 nt, Artificial Sequence
  Description of Artificial Sequence: Synthetic oligonucleotide
gggugugagggugacucgc

SEQ ID NO: 1184694 - RNA, 19 nt, Artificial Sequence
  Description of Artificial Sequence: Synthetic oligonucleotide
gguguagaaccccgagaga

SEQ ID NO: 1184695 - RNA, 19 nt, Artificial Sequence
  Description of Artificial Sequence: Synthetic oligonucleotide
agaucgcuuccgccucuca

SEQ ID NO: 1184696 - RNA, 19 nt, Artificial Sequence
  Description of Artificial Sequence: Synthetic oligonucleotide
gcccuucauauucucugug

SEQ ID NO: 1184697 - RNA, 19 nt, Artificial Sequence
  Description of Artificial Sequence: Synthetic oligonucleotide
ugucgggagcaggugcggu

SEQ ID NO: 1184698 - RNA, 19 nt, Artificial Sequence
  Description of Artificial Sequence: Synthetic oligonucleotide
ggcaacaaauggguguaga

SEQ ID NO: 1184699 - RNA, 19 nt, Artificial Sequence
  Description of Artificial Sequence: Synthetic oligonucleotide
aagggacaccuuguacaua

SEQ ID NO: 1184700 - RNA, 19 nt, Artificial Sequence
  Description of Artificial Sequence: Synthetic oligonucleotide
cgugcgaaccauucacggc

SEQ ID NO: 1184701 - RNA, 19 nt, Artificial Sequence
  Description of Artificial Sequence: Synthetic oligonucleotide
acgaggcgguagaagguug

SEQ ID NO: 1184702 - RNA, 19 nt, Artificial Sequence
  Description of Artificial Sequence: Synthetic oligonucleotide
ggacucguuggaggaagag

SEQ ID NO: 1184703 - RNA, 19 nt, Artificial Sequence
  Description of Artificial Sequence: Synthetic oligonucleotide
cgcaugaacucucgaagug

SEQ ID NO: 1184704 - RNA, 19 nt, Artificial Sequence
  Description of Artificial Sequence: Synthetic oligonucleotide
ggugugagggugacucgcc

SEQ ID NO: 1184705 - RNA, 19 nt, Artificial Sequence
  Description of Artificial Sequence: Synthetic oligonucleotide
gcaaagaguuguguaacua

SEQ ID NO: 1184706 - RNA, 19 nt, Artificial Sequence
  Description of Artificial Sequence: Synthetic oligonucleotide
cccaagggacaccuuguac

SEQ ID NO: 1184707 - RNA, 19 nt, Artificial Sequence
  Description of Artificial Sequence: Synthetic oligonucleotide
guuguguaacuaacauaua

SEQ ID NO: 1184708 - RNA, 19 nt, Artificial Sequence
  Description of Artificial Sequence: Synthetic oligonucleotide
cgcugugcacucacaaacc

SEQ ID NO: 1184709 - RNA, 19 nt, Artificial Sequence
  Description of Artificial Sequence: Synthetic oligonucleotide
cuggcuuagucagcugaca

SEQ ID NO: 1184710 - RNA, 19 nt, Artificial Sequence
  Description of Artificial Sequence: Synthetic oligonucleotide
guccuuacauauucuccau

SEQ ID NO: 1184711 - RNA, 19 nt, Artificial Sequence
  Description of Artificial Sequence: Synthetic oligonucleotide
gacucgcccaugucauucu

SEQ ID NO: 1184712 - RNA, 19 nt, Artificial Sequence
  Description of Artificial Sequence: Synthetic oligonucleotide
ggagcaggugcgguuugcc

SEQ ID NO: 1184713 - RNA, 19 nt, Artificial Sequence
  Description of Artificial Sequence: Synthetic oligonucleotide
cgaggcgguagaagguugg

SEQ ID NO: 1184714 - RNA, 19 nt, Artificial Sequence
  Description of Artificial Sequence: Synthetic oligonucleotide
ggcggucuuggucccauga

SEQ ID NO: 1184715 - RNA, 19 nt, Artificial Sequence
  Description of Artificial Sequence: Synthetic oligonucleotide
gggagaucgcuuccgccuc

SEQ ID NO: 1184716 - RNA, 19 nt, Artificial Sequence
  Description of Artificial Sequence: Synthetic oligonucleotide
aggugcgguuugcccaggu

SEQ ID NO: 1184717 - RNA, 19 nt, Artificial Sequence
  Description of Artificial Sequence: Synthetic oligonucleotide
ccauuugcucaaugugguc

SEQ ID NO: 1184718 - RNA, 19 nt, Artificial Sequence
  Description of Artificial Sequence: Synthetic oligonucleotide
uguggucacuuagcagcuu

SEQ ID NO: 1184719 - RNA, 19 nt, Artificial Sequence
  Description of Artificial Sequence: Synthetic oligonucleotide
acaaaccgugcgaaccauu

SEQ ID NO: 1184720 - RNA, 19 nt, Artificial Sequence
  Description of Artificial Sequence: Synthetic oligonucleotide
gaaccccgagagagaucag

SEQ ID NO: 1184721 - RNA, 19 nt, Artificial Sequence
  Description of Artificial Sequence: Synthetic oligonucleotide
aucagaccgugcaggugga

SEQ ID NO: 1184722 - RNA, 19 nt, Artificial Sequence
  Description of Artificial Sequence: Synthetic oligonucleotide
guuggcucugauacacacu

SEQ ID NO: 1184723 - RNA, 19 nt, Artificial Sequence
  Description of Artificial Sequence: Synthetic oligonucleotide
cugcacuggaaacuggcuu

SEQ ID NO: 1184724 - RNA, 19 nt, Artificial Sequence
  Description of Artificial Sequence: Synthetic oligonucleotide
aggacucguuggaggaaga

SEQ ID NO: 1184725 - RNA, 19 nt, Artificial Sequence
  Description of Artificial Sequence: Synthetic oligonucleotide
gugagggugacucgcccau

SEQ ID NO: 1184726 - RNA, 19 nt, Artificial Sequence
  Description of Artificial Sequence: Synthetic oligonucleotide
gcauguugugggugaaugu

SEQ ID NO: 1184727 - RNA, 19 nt, Artificial Sequence
  Description of Artificial Sequence: Synthetic oligonucleotide
ggcuuagucagcugacaau

SEQ ID NO: 1184728 - RNA, 19 nt, Artificial Sequence
  Description of Artificial Sequence: Synthetic oligonucleotide
gcgcaugaacucucgaagu

SEQ ID NO: 1184729 - RNA, 19 nt, Artificial Sequence
  Description of Artificial Sequence: Synthetic oligonucleotide
ccaaagucguccaucuggu

SEQ ID NO: 1184730 - RNA, 19 nt, Artificial Sequence
  Description of Artificial Sequence: Synthetic oligonucleotide
cgagagagaucagaccgug

SEQ ID NO: 1184731 - RNA, 19 nt, Artificial Sequence
  Description of Artificial Sequence: Synthetic oligonucleotide
caugaccuggcagggcaaa

SEQ ID NO: 1184732 - RNA, 19 nt, Artificial Sequence
  Description of Artificial Sequence: Synthetic oligonucleotide
ccgcaggcugucaucccgc

SEQ ID NO: 1184733 - RNA, 19 nt, Artificial Sequence
  Description of Artificial Sequence: Synthetic oligonucleotide
gcacucugauuggaggaga

SEQ ID NO: 1184734 - RNA, 19 nt, Artificial Sequence
  Description of Artificial Sequence: Synthetic oligonucleotide
guuugcccaggugguagua

SEQ ID NO: 1184735 - RNA, 19 nt, Artificial Sequence
  Description of Artificial Sequence: Synthetic oligonucleotide
uugcagcgcugugcacuca

SEQ ID NO: 1184736 - RNA, 19 nt, Artificial Sequence
  Description of Artificial Sequence: Synthetic oligonucleotide
caggugcgguuugcccagg

SEQ ID NO: 1184737 - RNA, 19 nt, Artificial Sequence
  Description of Artificial Sequence: Synthetic oligonucleotide
caaugcugccagcuggcuu

SEQ ID NO: 1184738 - RNA, 19 nt, Artificial Sequence
  Description of Artificial Sequence: Synthetic oligonucleotide
gaagagcggcggucuuggu

SEQ ID NO: 1184739 - RNA, 19 nt, Artificial Sequence
  Description of Artificial Sequence: Synthetic oligonucleotide
cuggauggucccucauuuu

SEQ ID NO: 1184740 - RNA, 19 nt, Artificial Sequence
  Description of Artificial Sequence: Synthetic oligonucleotide
ccuggauggucccucauuu

SEQ ID NO: 1184741 - RNA, 19 nt, Artificial Sequence
  Description of Artificial Sequence: Synthetic oligonucleotide
cacgaggcgguagaagguu

SEQ ID NO: 1184742 - RNA, 19 nt, Artificial Sequence
  Description of Artificial Sequence: Synthetic oligonucleotide
ccugaccagugguccuuuc

SEQ ID NO: 1184743 - RNA, 19 nt, Artificial Sequence
  Description of Artificial Sequence: Synthetic oligonucleotide
gcagggcaaagaguugugu

SEQ ID NO: 1184744 - RNA, 19 nt, Artificial Sequence
  Description of Artificial Sequence: Synthetic oligonucleotide
cacaaaccgugcgaaccau

SEQ ID NO: 1184745 - RNA, 19 nt, Artificial Sequence
  Description of Artificial Sequence: Synthetic oligonucleotide
ccgagagagaucagaccgu

SEQ ID NO: 1184746 - RNA, 19 nt, Artificial Sequence
  Description of Artificial Sequence: Synthetic oligonucleotide
gggacaccuuguacauaga

SEQ ID NO: 1184747 - RNA, 19 nt, Artificial Sequence
  Description of Artificial Sequence: Synthetic oligonucleotide
gugacucgcccaugucauu

SEQ ID NO: 1184748 - RNA, 19 nt, Artificial Sequence
  Description of Artificial Sequence: Synthetic oligonucleotide
gggucauguggcaccauuu

SEQ ID NO: 1184749 - RNA, 19 nt, Artificial Sequence
  Description of Artificial Sequence: Synthetic oligonucleotide
gcacgaggcgguagaaggu

SEQ ID NO: 1184750 - RNA, 19 nt, Artificial Sequence
  Description of Artificial Sequence: Synthetic oligonucleotide
ggggcugaaucagcacucu

SEQ ID NO: 1184751 - RNA, 19 nt, Artificial Sequence
  Description of Artificial Sequence: Synthetic oligonucleotide
ccaugaugggugugagggu

SEQ ID NO: 1184752 - RNA, 19 nt, Artificial Sequence
  Description of Artificial Sequence: Synthetic oligonucleotide
cgaagugccagggucuccu

SEQ ID NO: 1184753 - RNA, 19 nt, Artificial Sequence
  Description of Artificial Sequence: Synthetic oligonucleotide
gcgguuugcccagguggua

SEQ ID NO: 1184754 - RNA, 19 nt, Artificial Sequence
  Description of Artificial Sequence: Synthetic oligonucleotide
gcugacaauccagguccuu

SEQ ID NO: 1184755 - RNA, 19 nt, Artificial Sequence
  Description of Artificial Sequence: Synthetic oligonucleotide
cuccgccaaccagcuguua

SEQ ID NO: 1184756 - RNA, 19 nt, Artificial Sequence
  Description of Artificial Sequence: Synthetic oligonucleotide
cagcacugccugagaucuu

SEQ ID NO: 1184757 - RNA, 19 nt, Artificial Sequence
  Description of Artificial Sequence: Synthetic oligonucleotide
gcgaaccauucacggccuu

SEQ ID NO: 1184758 - RNA, 19 nt, Artificial Sequence
  Description of Artificial Sequence: Synthetic oligonucleotide
cggcggucuuggucccaug

SEQ ID NO: 1184759 - RNA, 19 nt, Artificial Sequence
  Description of Artificial Sequence: Synthetic oligonucleotide
caacuccgggaggcucccu

SEQ ID NO: 1184760 - RNA, 19 nt, Artificial Sequence
  Description of Artificial Sequence: Synthetic oligonucleotide
cuccuacucuguggccauu

SEQ ID NO: 1184761 - RNA, 19 nt, Artificial Sequence
  Description of Artificial Sequence: Synthetic oligonucleotide
gcggcggucuuggucccau

SEQ ID NO: 1184762 - RNA, 19 nt, Artificial Sequence
  Description of Artificial Sequence: Synthetic oligonucleotide
uauggaaucacucagacuu

SEQ ID NO: 1184763 - RNA, 19 nt, Artificial Sequence
  Description of Artificial Sequence: Synthetic oligonucleotide
acuucuaacacccacagug

SEQ ID NO: 1184764 - RNA, 19 nt, Artificial Sequence
  Description of Artificial Sequence: Synthetic oligonucleotide
agguaauuuauuuauaucu

SEQ ID NO: 1184765 - RNA, 19 nt, Artificial Sequence
  Description of Artificial Sequence: Synthetic oligonucleotide
auaaagaugaaccacagua

SEQ ID NO: 1184766 - RNA, 19 nt, Artificial Sequence
  Description of Artificial Sequence: Synthetic oligonucleotide
uuuauaucuauagaacagg

SEQ ID NO: 1184767 - RNA, 19 nt, Artificial Sequence
  Description of Artificial Sequence: Synthetic oligonucleotide
auaucuauagaacagguau

SEQ ID NO: 1184768 - RNA, 19 nt, Artificial Sequence
  Description of Artificial Sequence: Synthetic oligonucleotide
agcaaugacccauagcccc

SEQ ID NO: 1184769 - RNA, 19 nt, Artificial Sequence
  Description of Artificial Sequence: Synthetic oligonucleotide
aaacacauugcccaggagu

SEQ ID NO: 1184770 - RNA, 19 nt, Artificial Sequence
  Description of Artificial Sequence: Synthetic oligonucleotide
uuacucucaacccaaagga

SEQ ID NO: 1184771 - RNA, 19 nt, Artificial Sequence
  Description of Artificial Sequence: Synthetic oligonucleotide
ugaaccacaguauaacugc

SEQ ID NO: 1184772 - RNA, 19 nt, Artificial Sequence
  Description of Artificial Sequence: Synthetic oligonucleotide
ucaacgaagagugaaagca

SEQ ID NO: 1184773 - RNA, 19 nt, Artificial Sequence
  Description of Artificial Sequence: Synthetic oligonucleotide
aaucacucagacuuuucag

SEQ ID NO: 1184774 - RNA, 19 nt, Artificial Sequence
  Description of Artificial Sequence: Synthetic oligonucleotide
cacaguauaacugcuaugg

SEQ ID NO: 1184775 - RNA, 19 nt, Artificial Sequence
  Description of Artificial Sequence: Synthetic oligonucleotide
cuuacucucaacccaaagg

SEQ ID NO: 1184776 - RNA, 19 nt, Artificial Sequence
  Description of Artificial Sequence: Synthetic oligonucleotide
cuagcauucacccucugcc

SEQ ID NO: 1184777 - RNA, 19 nt, Artificial Sequence
  Description of Artificial Sequence: Synthetic oligonucleotide
aacgaagagugaaagcagc

SEQ ID NO: 1184778 - RNA, 19 nt, Artificial Sequence
  Description of Artificial Sequence: Synthetic oligonucleotide
auauaaagaaagccucccg

SEQ ID NO: 1184779 - RNA, 19 nt, Artificial Sequence
  Description of Artificial Sequence: Synthetic oligonucleotide
auuuauaucuauagaacag

SEQ ID NO: 1184780 - RNA, 19 nt, Artificial Sequence
  Description of Artificial Sequence: Synthetic oligonucleotide
agggguaggacaucagugc

SEQ ID NO: 1184781 - RNA, 19 nt, Artificial Sequence
  Description of Artificial Sequence: Synthetic oligonucleotide
gguuauucaacgaagagug

SEQ ID NO: 1184782 - RNA, 19 nt, Artificial Sequence
  Description of Artificial Sequence: Synthetic oligonucleotide
caguccaucggucaaagcc

SEQ ID NO: 1184783 - RNA, 19 nt, Artificial Sequence
  Description of Artificial Sequence: Synthetic oligonucleotide
ugaggacgcaacauggucc

SEQ ID NO: 1184784 - RNA, 19 nt, Artificial Sequence
  Description of Artificial Sequence: Synthetic oligonucleotide
uggacaucagccaagggaa

SEQ ID NO: 1184785 - RNA, 19 nt, Artificial Sequence
  Description of Artificial Sequence: Synthetic oligonucleotide
gaacacaucuggcugcgcg

SEQ ID NO: 1184786 - RNA, 19 nt, Artificial Sequence
  Description of Artificial Sequence: Synthetic oligonucleotide
gagacugcuagccugagga

SEQ ID NO: 1184787 - RNA, 19 nt, Artificial Sequence
  Description of Artificial Sequence: Synthetic oligonucleotide
aggacuaggggccugagca

SEQ ID NO: 1184788 - RNA, 19 nt, Artificial Sequence
  Description of Artificial Sequence: Synthetic oligonucleotide
ggggauuguguacagaugg

SEQ ID NO: 1184789 - RNA, 19 nt, Artificial Sequence
  Description of Artificial Sequence: Synthetic oligonucleotide
gaaugguuauucaacgaag

SEQ ID NO: 1184790 - RNA, 19 nt, Artificial Sequence
  Description of Artificial Sequence: Synthetic oligonucleotide
agcacuguuuccucuacuc

SEQ ID NO: 1184791 - RNA, 19 nt, Artificial Sequence
  Description of Artificial Sequence: Synthetic oligonucleotide
ucacucagacuuuucagug

SEQ ID NO: 1184792 - RNA, 19 nt, Artificial Sequence
  Description of Artificial Sequence: Synthetic oligonucleotide
uccaccuaaggcaaagcug

SEQ ID NO: 1184793 - RNA, 19 nt, Artificial Sequence
  Description of Artificial Sequence: Synthetic oligonucleotide
gagauagccacugacuuug

SEQ ID NO: 1184794 - RNA, 19 nt, Artificial Sequence
  Description of Artificial Sequence: Synthetic oligonucleotide
uuauucaacgaagagugaa

SEQ ID NO: 1184795 - RNA, 19 nt, Artificial Sequence
  Description of Artificial Sequence: Synthetic oligonucleotide
cuucuaacacccacagugg

SEQ ID NO: 1184796 - RNA, 19 nt, Artificial Sequence
  Description of Artificial Sequence: Synthetic oligonucleotide
cugcaaagcacccaccucc

SEQ ID NO: 1184797 - RNA, 19 nt, Artificial Sequence
  Description of Artificial Sequence: Synthetic oligonucleotide
ugucuuauugcuugcuaug

SEQ ID NO: 1184798 - RNA, 19 nt, Artificial Sequence
  Description of Artificial Sequence: Synthetic oligonucleotide
uauucaacgaagagugaaa

SEQ ID NO: 1184799 - RNA, 19 nt, Artificial Sequence
  Description of Artificial Sequence: Synthetic oligonucleotide
gguguagaaacacauugcc

SEQ ID NO: 1184800 - RNA, 19 nt, Artificial Sequence
  Description of Artificial Sequence: Synthetic oligonucleotide
uauaucuauagaacaggua

SEQ ID NO: 1184801 - RNA, 19 nt, Artificial Sequence
  Description of Artificial Sequence: Synthetic oligonucleotide
aacugcuauggaaucacuc

SEQ ID NO: 1184802 - RNA, 19 nt, Artificial Sequence
  Description of Artificial Sequence: Synthetic oligonucleotide
ucuagcauucacccucugc

SEQ ID NO: 1184803 - RNA, 19 nt, Artificial Sequence
  Description of Artificial Sequence: Synthetic oligonucleotide
ucuuauugcuugcuaugca

SEQ ID NO: 1184804 - RNA, 19 nt, Artificial Sequence
  Description of Artificial Sequence: Synthetic oligonucleotide
gaaucacucagacuuuuca

SEQ ID NO: 1184805 - RNA, 19 nt, Artificial Sequence
  Description of Artificial Sequence: Synthetic oligonucleotide
uucaacgaagagugaaagc

SEQ ID NO: 1184806 - RNA, 19 nt, Artificial Sequence
  Description of Artificial Sequence: Synthetic oligonucleotide
uguuucagacgccaggcuc

SEQ ID NO: 1184807 - RNA, 19 nt, Artificial Sequence
  Description of Artificial Sequence: Synthetic oligonucleotide
uacaaagugacagcacaag

SEQ ID NO: 1184808 - RNA, 19 nt, Artificial Sequence
  Description of Artificial Sequence: Synthetic oligonucleotide
ugagagguuggcucuagca

SEQ ID NO: 1184809 - RNA, 19 nt, Artificial Sequence
  Description of Artificial Sequence: Synthetic oligonucleotide
agguguagaaacacauugc

SEQ ID NO: 1184810 - RNA, 19 nt, Artificial Sequence
  Description of Artificial Sequence: Synthetic oligonucleotide
auucaacgaagagugaaag

SEQ ID NO: 1184811 - RNA, 19 nt, Artificial Sequence
  Description of Artificial Sequence: Synthetic oligonucleotide
uugagguuccggaccacgg

SEQ ID NO: 1184812 - RNA, 19 nt, Artificial Sequence
  Description of Artificial Sequence: Synthetic oligonucleotide
gguauuuacagauaaagau

SEQ ID NO: 1184813 - RNA, 19 nt, Artificial Sequence
  Description of Artificial Sequence: Synthetic oligonucleotide
cuaacacccacaguggagc

SEQ ID NO: 1184814 - RNA, 19 nt, Artificial Sequence
  Description of Artificial Sequence: Synthetic oligonucleotide
acagugucggucucucucg

SEQ ID NO: 1184815 - RNA, 19 nt, Artificial Sequence
  Description of Artificial Sequence: Synthetic oligonucleotide
uauaacugcuauggaauca

SEQ ID NO: 1184816 - RNA, 19 nt, Artificial Sequence
  Description of Artificial Sequence: Synthetic oligonucleotide
cucucucgaacacaucugg

SEQ ID NO: 1184817 - RNA, 19 nt, Artificial Sequence
  Description of Artificial Sequence: Synthetic oligonucleotide
agcuguuucagacgccagg

SEQ ID NO: 1184818 - RNA, 19 nt, Artificial Sequence
  Description of Artificial Sequence: Synthetic oligonucleotide
uucuaacacccacagugga

SEQ ID NO: 1184819 - RNA, 19 nt, Artificial Sequence
  Description of Artificial Sequence: Synthetic oligonucleotide
uaucuauagaacagguauu

SEQ ID NO: 1184820 - RNA, 19 nt, Artificial Sequence
  Description of Artificial Sequence: Synthetic oligonucleotide
uugaccagggcaauauaaa

SEQ ID NO: 1184821 - RNA, 19 nt, Artificial Sequence
  Description of Artificial Sequence: Synthetic oligonucleotide
acuggccaccccuaggagg

SEQ ID NO: 1184822 - RNA, 19 nt, Artificial Sequence
  Description of Artificial Sequence: Synthetic oligonucleotide
uuugagguuccggaccacg

SEQ ID NO: 1184823 - RNA, 19 nt, Artificial Sequence
  Description of Artificial Sequence: Synthetic oligonucleotide
uacagguguaggcccaugc

SEQ ID NO: 1184824 - RNA, 19 nt, Artificial Sequence
  Description of Artificial Sequence: Synthetic oligonucleotide
ugcuauggaaucacucaga

SEQ ID NO: 1184825 - RNA, 19 nt, Artificial Sequence
  Description of Artificial Sequence: Synthetic oligonucleotide
ugacccauagccccagcug

SEQ ID NO: 1184826 - RNA, 19 nt, Artificial Sequence
  Description of Artificial Sequence: Synthetic oligonucleotide
guggccuccauugagcgcg

SEQ ID NO: 1184827 - RNA, 19 nt, Artificial Sequence
  Description of Artificial Sequence: Synthetic oligonucleotide
aacacaucuggcugcgcgu

SEQ ID NO: 1184828 - RNA, 19 nt, Artificial Sequence
  Description of Artificial Sequence: Synthetic oligonucleotide
agauaaagaugaaccacag

SEQ ID NO: 1184829 - RNA, 19 nt, Artificial Sequence
  Description of Artificial Sequence: Synthetic oligonucleotide
cugcuauggaaucacucag

SEQ ID NO: 1184830 - RNA, 19 nt, Artificial Sequence
  Description of Artificial Sequence: Synthetic oligonucleotide
cacucagacuuuucagugg

SEQ ID NO: 1184831 - RNA, 19 nt, Artificial Sequence
  Description of Artificial Sequence: Synthetic oligonucleotide
ugaguaccuggacaucagc

SEQ ID NO: 1184832 - RNA, 19 nt, Artificial Sequence
  Description of Artificial Sequence: Synthetic oligonucleotide
augaaccacaguauaacug

SEQ ID NO: 1184833 - RNA, 19 nt, Artificial Sequence
  Description of Artificial Sequence: Synthetic oligonucleotide
acuuugagguuccggacca

SEQ ID NO: 1184834 - RNA, 19 nt, Artificial Sequence
  Description of Artificial Sequence: Synthetic oligonucleotide
uguguacagauggcgaagc

SEQ ID NO: 1184835 - RNA, 19 nt, Artificial Sequence
  Description of Artificial Sequence: Synthetic oligonucleotide
cucgaacacaucuggcugc

SEQ ID NO: 1184836 - RNA, 19 nt, Artificial Sequence
  Description of Artificial Sequence: Synthetic oligonucleotide
agagcacuguuuccucuac

SEQ ID NO: 1184837 - RNA, 19 nt, Artificial Sequence
  Description of Artificial Sequence: Synthetic oligonucleotide
cugacuuugagguuccgga

SEQ ID NO: 1184838 - RNA, 19 nt, Artificial Sequence
  Description of Artificial Sequence: Synthetic oligonucleotide
agccucccgagguaaaggg

SEQ ID NO: 1184839 - RNA, 19 nt, Artificial Sequence
  Description of Artificial Sequence: Synthetic oligonucleotide
aaggcucguucucccugcc

SEQ ID NO: 1184840 - RNA, 19 nt, Artificial Sequence
  Description of Artificial Sequence: Synthetic oligonucleotide
ugagguuccggaccacggc

SEQ ID NO: 1184841 - RNA, 19 nt, Artificial Sequence
  Description of Artificial Sequence: Synthetic oligonucleotide
gauuauggcuucagcauuc

SEQ ID NO: 1184842 - RNA, 19 nt, Artificial Sequence
  Description of Artificial Sequence: Synthetic oligonucleotide
accuaaggcaaagcugagc

SEQ ID NO: 1184843 - RNA, 19 nt, Artificial Sequence
  Description of Artificial Sequence: Synthetic oligonucleotide
uuggcugucgagguggucu

SEQ ID NO: 1184844 - RNA, 19 nt, Artificial Sequence
  Description of Artificial Sequence: Synthetic oligonucleotide
guauaacugcuauggaauc

SEQ ID NO: 1184845 - RNA, 19 nt, Artificial Sequence
  Description of Artificial Sequence: Synthetic oligonucleotide
ucugaggacgcaacauggu

SEQ ID NO: 1184846 - RNA, 19 nt, Artificial Sequence
  Description of Artificial Sequence: Synthetic oligonucleotide
auuugcuggggaagcaugg

SEQ ID NO: 1184847 - RNA, 19 nt, Artificial Sequence
  Description of Artificial Sequence: Synthetic oligonucleotide
ggauuguguacagauggcg

SEQ ID NO: 1184848 - RNA, 19 nt, Artificial Sequence
  Description of Artificial Sequence: Synthetic oligonucleotide
gauccagagcacuguuucc

SEQ ID NO: 1184849 - RNA, 19 nt, Artificial Sequence
  Description of Artificial Sequence: Synthetic oligonucleotide
uuguguacagauggcgaag

SEQ ID NO: 1184850 - RNA, 19 nt, Artificial Sequence
  Description of Artificial Sequence: Synthetic oligonucleotide
gucuuauugcuugcuaugc

SEQ ID NO: 1184851 - RNA, 19 nt, Artificial Sequence
  Description of Artificial Sequence: Synthetic oligonucleotide
ugucggucucucucgaaca

SEQ ID NO: 1184852 - RNA, 19 nt, Artificial Sequence
  Description of Artificial Sequence: Synthetic oligonucleotide
aguggccuccauugagcgc

SEQ ID NO: 1184853 - RNA, 19 nt, Artificial Sequence
  Description of Artificial Sequence: Synthetic oligonucleotide
aguuggggauuauggcuuc

SEQ ID NO: 1184854 - RNA, 19 nt, Artificial Sequence
  Description of Artificial Sequence: Synthetic oligonucleotide
aucuauagaacagguauuu

SEQ ID NO: 1184855 - RNA, 19 nt, Artificial Sequence
  Description of Artificial Sequence: Synthetic oligonucleotide
guuucagacgccaggcucc

SEQ ID NO: 1184856 - RNA, 19 nt, Artificial Sequence
  Description of Artificial Sequence: Synthetic oligonucleotide
acagcuagcccaugaguga

SEQ ID NO: 1184857 - RNA, 19 nt, Artificial Sequence
  Description of Artificial Sequence: Synthetic oligonucleotide
acaguauaacugcuaugga

SEQ ID NO: 1184858 - RNA, 19 nt, Artificial Sequence
  Description of Artificial Sequence: Synthetic oligonucleotide
cuaaggcaaagcugagcag

SEQ ID NO: 1184859 - RNA, 19 nt, Artificial Sequence
  Description of Artificial Sequence: Synthetic oligonucleotide
acucucaacccaaaggacu

SEQ ID NO: 1184860 - RNA, 19 nt, Artificial Sequence
  Description of Artificial Sequence: Synthetic oligonucleotide
ugcgcguacacaccacaca

SEQ ID NO: 1184861 - RNA, 19 nt, Artificial Sequence
  Description of Artificial Sequence: Synthetic oligonucleotide
ugguuagaaguccaaucuu

SEQ ID NO: 1184862 - RNA, 19 nt, Artificial Sequence
  Description of Artificial Sequence: Synthetic oligonucleotide
guugucuaugguguuggcc

SEQ ID NO: 1184863 - RNA, 19 nt, Artificial Sequence
  Description of Artificial Sequence: Synthetic oligonucleotide
gggcaauauaaagaaagcc

SEQ ID NO: 1184864 - RNA, 19 nt, Artificial Sequence
  Description of Artificial Sequence: Synthetic oligonucleotide
ucgaacacaucuggcugcg

SEQ ID NO: 1184865 - RNA, 19 nt, Artificial Sequence
  Description of Artificial Sequence: Synthetic oligonucleotide
gugguuagaaguccaaucu

SEQ ID NO: 1184866 - RNA, 19 nt, Artificial Sequence
  Description of Artificial Sequence: Synthetic oligonucleotide
cagcaaugacccauagccc

SEQ ID NO: 1184867 - RNA, 19 nt, Artificial Sequence
  Description of Artificial Sequence: Synthetic oligonucleotide
aggacuacucacugccuug

SEQ ID NO: 1184868 - RNA, 19 nt, Artificial Sequence
  Description of Artificial Sequence: Synthetic oligonucleotide
cuacucacugccuugcaga

SEQ ID NO: 1184869 - RNA, 19 nt, Artificial Sequence
  Description of Artificial Sequence: Synthetic oligonucleotide
cuuccaagaggucaggcaa

SEQ ID NO: 1184870 - RNA, 19 nt, Artificial Sequence
  Description of Artificial Sequence: Synthetic oligonucleotide
ggugguuagaaguccaauc

SEQ ID NO: 1184871 - RNA, 19 nt, Artificial Sequence
  Description of Artificial Sequence: Synthetic oligonucleotide
ggguaugucugcuggaccc

SEQ ID NO: 1184872 - RNA, 19 nt, Artificial Sequence
  Description of Artificial Sequence: Synthetic oligonucleotide
auugaccagggcaauauaa

SEQ ID NO: 1184873 - RNA, 19 nt, Artificial Sequence
  Description of Artificial Sequence: Synthetic oligonucleotide
ucuaugguguuggccagca

SEQ ID NO: 1184874 - RNA, 19 nt, Artificial Sequence
  Description of Artificial Sequence: Synthetic oligonucleotide
uggagcuuggcugcagucc

SEQ ID NO: 1184875 - RNA, 19 nt, Artificial Sequence
  Description of Artificial Sequence: Synthetic oligonucleotide
ugagcgcggcagcaguggg

SEQ ID NO: 1184876 - RNA, 19 nt, Artificial Sequence
  Description of Artificial Sequence: Synthetic oligonucleotide
cacagugucggucucucuc

SEQ ID NO: 1184877 - RNA, 19 nt, Artificial Sequence
  Description of Artificial Sequence: Synthetic oligonucleotide
ugggagacugcuagccuga

SEQ ID NO: 1184878 - RNA, 19 nt, Artificial Sequence
  Description of Artificial Sequence: Synthetic oligonucleotide
ugagauagccacugacuuu

SEQ ID NO: 1184879 - RNA, 19 nt, Artificial Sequence
  Description of Artificial Sequence: Synthetic oligonucleotide
aguccaucggucaaagcca

SEQ ID NO: 1184880 - RNA, 19 nt, Artificial Sequence
  Description of Artificial Sequence: Synthetic oligonucleotide
cugaggacgcaacaugguc

SEQ ID NO: 1184881 - RNA, 19 nt, Artificial Sequence
  Description of Artificial Sequence: Synthetic oligonucleotide
aguccaccuaaggcaaagc

SEQ ID NO: 1184882 - RNA, 19 nt, Artificial Sequence
  Description of Artificial Sequence: Synthetic oligonucleotide
aucacagugucggucucuc

SEQ ID NO: 1184883 - RNA, 19 nt, Artificial Sequence
  Description of Artificial Sequence: Synthetic oligonucleotide
gauaaagaugaaccacagu

SEQ ID NO: 1184884 - RNA, 19 nt, Artificial Sequence
  Description of Artificial Sequence: Synthetic oligonucleotide
ggauccagagcacuguuuc

SEQ ID NO: 1184885 - RNA, 19 nt, Artificial Sequence
  Description of Artificial Sequence: Synthetic oligonucleotide
uaacugcuauggaaucacu

SEQ ID NO: 1184886 - RNA, 19 nt, Artificial Sequence
  Description of Artificial Sequence: Synthetic oligonucleotide
ggucaggcaacacauugac

SEQ ID NO: 1184887 - RNA, 19 nt, Artificial Sequence
  Description of Artificial Sequence: Synthetic oligonucleotide
guagagaacuggagcuugg

SEQ ID NO: 1184888 - RNA, 19 nt, Artificial Sequence
  Description of Artificial Sequence: Synthetic oligonucleotide
cacugggagacugcuagcc

SEQ ID NO: 1184889 - RNA, 19 nt, Artificial Sequence
  Description of Artificial Sequence: Synthetic oligonucleotide
ugaggacuacucacugccu

SEQ ID NO: 1184890 - RNA, 19 nt, Artificial Sequence
  Description of Artificial Sequence: Synthetic oligonucleotide
uuggggauuauggcuucag

SEQ ID NO: 1184891 - RNA, 19 nt, Artificial Sequence
  Description of Artificial Sequence: Synthetic oligonucleotide
uagagaacuggagcuuggc

SEQ ID NO: 1184892 - RNA, 19 nt, Artificial Sequence
  Description of Artificial Sequence: Synthetic oligonucleotide
cagacuuuucaguggccac

SEQ ID NO: 1184893 - RNA, 19 nt, Artificial Sequence
  Description of Artificial Sequence: Synthetic oligonucleotide
agugacagcacaaguuggu

SEQ ID NO: 1184894 - RNA, 19 nt, Artificial Sequence
  Description of Artificial Sequence: Synthetic oligonucleotide
cacagggaucacagugucg

SEQ ID NO: 1184895 - RNA, 19 nt, Artificial Sequence
  Description of Artificial Sequence: Synthetic oligonucleotide
agcagguguagaaacacau

SEQ ID NO: 1184896 - RNA, 19 nt, Artificial Sequence
  Description of Artificial Sequence: Synthetic oligonucleotide
ccaggaguccaccuaaggc

SEQ ID NO: 1184897 - RNA, 19 nt, Artificial Sequence
  Description of Artificial Sequence: Synthetic oligonucleotide
gagugggaugucaggaaug

SEQ ID NO: 1184898 - RNA, 19 nt, Artificial Sequence
  Description of Artificial Sequence: Synthetic oligonucleotide
gugucggucucucucgaac

SEQ ID NO: 1184899 - RNA, 19 nt, Artificial Sequence
  Description of Artificial Sequence: Synthetic oligonucleotide
agcuucugaggacgcaaca

SEQ ID NO: 1184900 - RNA, 19 nt, Artificial Sequence
  Description of Artificial Sequence: Synthetic oligonucleotide
agcacaaguugguugucuu

SEQ ID NO: 1184901 - RNA, 19 nt, Artificial Sequence
  Description of Artificial Sequence: Synthetic oligonucleotide
aaaggacuaggggccugag

SEQ ID NO: 1184902 - RNA, 19 nt, Artificial Sequence
  Description of Artificial Sequence: Synthetic oligonucleotide
cuggcggccacagcuagcc

SEQ ID NO: 1184903 - RNA, 19 nt, Artificial Sequence
  Description of Artificial Sequence: Synthetic oligonucleotide
cuagccugaggacuacuca

SEQ ID NO: 1184904 - RNA, 19 nt, Artificial Sequence
  Description of Artificial Sequence: Synthetic oligonucleotide
caguguggagcccucacca

SEQ ID NO: 1184905 - RNA, 19 nt, Artificial Sequence
  Description of Artificial Sequence: Synthetic oligonucleotide
ggagcauuugcuggggaag

SEQ ID NO: 1184906 - RNA, 19 nt, Artificial Sequence
  Description of Artificial Sequence: Synthetic oligonucleotide
gagagguuggcucuagcau

SEQ ID NO: 1184907 - RNA, 19 nt, Artificial Sequence
  Description of Artificial Sequence: Synthetic oligonucleotide
cucucaacccaaaggacua

SEQ ID NO: 1184908 - RNA, 19 nt, Artificial Sequence
  Description of Artificial Sequence: Synthetic oligonucleotide
gcuguuucagacgccaggc

SEQ ID NO: 1184909 - RNA, 19 nt, Artificial Sequence
  Description of Artificial Sequence: Synthetic oligonucleotide
cugaugcuacagguguagg

SEQ ID NO: 1184910 - RNA, 19 nt, Artificial Sequence
  Description of Artificial Sequence: Synthetic oligonucleotide
cagcaaggcucguucuccc

SEQ ID NO: 1184911 - RNA, 19 nt, Artificial Sequence
  Description of Artificial Sequence: Synthetic oligonucleotide
cucucgaacacaucuggcu

SEQ ID NO: 1184912 - RNA, 19 nt, Artificial Sequence
  Description of Artificial Sequence: Synthetic oligonucleotide
gcacuguuuccucuacucc

SEQ ID NO: 1184913 - RNA, 19 nt, Artificial Sequence
  Description of Artificial Sequence: Synthetic oligonucleotide
ccacuucuaacacccacag

SEQ ID NO: 1184914 - RNA, 19 nt, Artificial Sequence
  Description of Artificial Sequence: Synthetic oligonucleotide
cucccgagguaaagggcag

SEQ ID NO: 1184915 - RNA, 19 nt, Artificial Sequence
  Description of Artificial Sequence: Synthetic oligonucleotide
uggugagagcugccuguga

SEQ ID NO: 1184916 - RNA, 19 nt, Artificial Sequence
  Description of Artificial Sequence: Synthetic oligonucleotide
gucggucucucucgaacac

SEQ ID NO: 1184917 - RNA, 19 nt, Artificial Sequence
  Description of Artificial Sequence: Synthetic oligonucleotide
aaccacaguauaacugcua

SEQ ID NO: 1184918 - RNA, 19 nt, Artificial Sequence
  Description of Artificial Sequence: Synthetic oligonucleotide
caugggcccagacuggcca

SEQ ID NO: 1184919 - RNA, 19 nt, Artificial Sequence
  Description of Artificial Sequence: Synthetic oligonucleotide
uccaucggucaaagccagc

SEQ ID NO: 1184920 - RNA, 19 nt, Artificial Sequence
  Description of Artificial Sequence: Synthetic oligonucleotide
gcaacaugguccccaaauc

SEQ ID NO: 1184921 - RNA, 19 nt, Artificial Sequence
  Description of Artificial Sequence: Synthetic oligonucleotide
acuaggggccugagcaggg

SEQ ID NO: 1184922 - RNA, 19 nt, Artificial Sequence
  Description of Artificial Sequence: Synthetic oligonucleotide
ucccgagguaaagggcagg

SEQ ID NO: 1184923 - RNA, 19 nt, Artificial Sequence
  Description of Artificial Sequence: Synthetic oligonucleotide
cugcgcguacacaccacac

SEQ ID NO: 1184924 - RNA, 19 nt, Artificial Sequence
  Description of Artificial Sequence: Synthetic oligonucleotide
uggugguuagaaguccaau

SEQ ID NO: 1184925 - RNA, 19 nt, Artificial Sequence
  Description of Artificial Sequence: Synthetic oligonucleotide
gcuuggcugcaguccaucg

SEQ ID NO: 1184926 - RNA, 19 nt, Artificial Sequence
  Description of Artificial Sequence: Synthetic oligonucleotide
ucggucucucucgaacaca

SEQ ID NO: 1184927 - RNA, 19 nt, Artificial Sequence
  Description of Artificial Sequence: Synthetic oligonucleotide
ggaggagguccuugagagg

SEQ ID NO: 1184928 - RNA, 19 nt, Artificial Sequence
  Description of Artificial Sequence: Synthetic oligonucleotide
gcgcguacacaccacacac

SEQ ID NO: 1184929 - RNA, 19 nt, Artificial Sequence
  Description of Artificial Sequence: Synthetic oligonucleotide
guuauucaacgaagaguga

SEQ ID NO: 1184930 - RNA, 19 nt, Artificial Sequence
  Description of Artificial Sequence: Synthetic oligonucleotide
caguggccacuucuaacac

SEQ ID NO: 1184931 - RNA, 19 nt, Artificial Sequence
  Description of Artificial Sequence: Synthetic oligonucleotide
uuccggaccacggcucuca

SEQ ID NO: 1184932 - RNA, 19 nt, Artificial Sequence
  Description of Artificial Sequence: Synthetic oligonucleotide
agcugaguaccuggacauc

SEQ ID NO: 1184933 - RNA, 19 nt, Artificial Sequence
  Description of Artificial Sequence: Synthetic oligonucleotide
caccuuacucucaacccaa

SEQ ID NO: 1184934 - RNA, 19 nt, Artificial Sequence
  Description of Artificial Sequence: Synthetic oligonucleotide
uggcucuagcauucacccu

SEQ ID NO: 1184935 - RNA, 19 nt, Artificial Sequence
  Description of Artificial Sequence: Synthetic oligonucleotide
ucccugcccggguaugucu

SEQ ID NO: 1184936 - RNA, 19 nt, Artificial Sequence
  Description of Artificial Sequence: Synthetic oligonucleotide
guccaccuaaggcaaagcu

SEQ ID NO: 1184937 - RNA, 19 nt, Artificial Sequence
  Description of Artificial Sequence: Synthetic oligonucleotide
guguacagauggcgaagca

SEQ ID NO: 1184938 - RNA, 19 nt, Artificial Sequence
  Description of Artificial Sequence: Synthetic oligonucleotide
guaggcccaugccucuggc

SEQ ID NO: 1184939 - RNA, 19 nt, Artificial Sequence
  Description of Artificial Sequence: Synthetic oligonucleotide
acugcuagccugaggacua

SEQ ID NO: 1184940 - RNA, 19 nt, Artificial Sequence
  Description of Artificial Sequence: Synthetic oligonucleotide
caaugacccauagccccag

SEQ ID NO: 1184941 - RNA, 19 nt, Artificial Sequence
  Description of Artificial Sequence: Synthetic oligonucleotide
agcgcggcagcaguggggu

SEQ ID NO: 1184942 - RNA, 19 nt, Artificial Sequence
  Description of Artificial Sequence: Synthetic oligonucleotide
ggacuaggggccugagcag

SEQ ID NO: 1184943 - RNA, 19 nt, Artificial Sequence
  Description of Artificial Sequence: Synthetic oligonucleotide
uccggaccacggcucucag

SEQ ID NO: 1184944 - RNA, 19 nt, Artificial Sequence
  Description of Artificial Sequence: Synthetic oligonucleotide
gagcgcggcagcagugggg

SEQ ID NO: 1184945 - RNA, 19 nt, Artificial Sequence
  Description of Artificial Sequence: Synthetic oligonucleotide
ggccacuucuaacacccac

SEQ ID NO: 1184946 - RNA, 19 nt, Artificial Sequence
  Description of Artificial Sequence: Synthetic oligonucleotide
gacgcaacaugguccccaa

SEQ ID NO: 1184947 - RNA, 19 nt, Artificial Sequence
  Description of Artificial Sequence: Synthetic oligonucleotide
uggcugucgagguggucuc

SEQ ID NO: 1184948 - RNA, 19 nt, Artificial Sequence
  Description of Artificial Sequence: Synthetic oligonucleotide
cagagugggaugucaggaa

SEQ ID NO: 1184949 - RNA, 19 nt, Artificial Sequence
  Description of Artificial Sequence: Synthetic oligonucleotide
gggauuguguacagauggc

SEQ ID NO: 1184950 - RNA, 19 nt, Artificial Sequence
  Description of Artificial Sequence: Synthetic oligonucleotide
agggagcauuugcugggga

SEQ ID NO: 1184951 - RNA, 19 nt, Artificial Sequence
  Description of Artificial Sequence: Synthetic oligonucleotide
cacccuggagcugcacugg

SEQ ID NO: 1184952 - RNA, 19 nt, Artificial Sequence
  Description of Artificial Sequence: Synthetic oligonucleotide
cuauggaaucacucagacu

SEQ ID NO: 1184953 - RNA, 19 nt, Artificial Sequence
  Description of Artificial Sequence: Synthetic oligonucleotide
ggacuacucacugccuugc

SEQ ID NO: 1184954 - RNA, 19 nt, Artificial Sequence
  Description of Artificial Sequence: Synthetic oligonucleotide
accuccccucucuuuggcu

SEQ ID NO: 1184955 - RNA, 19 nt, Artificial Sequence
  Description of Artificial Sequence: Synthetic oligonucleotide
gcagagugggaugucagga

SEQ ID NO: 1184956 - RNA, 19 nt, Artificial Sequence
  Description of Artificial Sequence: Synthetic oligonucleotide
aggacgcaacauggucccc

SEQ ID NO: 1184957 - RNA, 19 nt, Artificial Sequence
  Description of Artificial Sequence: Synthetic oligonucleotide
gacccugugcuggcaggag

SEQ ID NO: 1184958 - RNA, 19 nt, Artificial Sequence
  Description of Artificial Sequence: Synthetic oligonucleotide
caccuccccucucuuuggc

SEQ ID NO: 1184959 - RNA, 19 nt, Artificial Sequence
  Description of Artificial Sequence: Synthetic oligonucleotide
ccacaguauaacugcuaug

SEQ ID NO: 1184960 - RNA, 19 nt, Artificial Sequence
  Description of Artificial Sequence: Synthetic oligonucleotide
cagcugcugcugcugcugc

SEQ ID NO: 1184961 - RNA, 19 nt, Artificial Sequence
  Description of Artificial Sequence: Synthetic oligonucleotide
cagggagugccacggguca

SEQ ID NO: 1184962 - RNA, 19 nt, Artificial Sequence
  Description of Artificial Sequence: Synthetic oligonucleotide
guuuggcaguugggguugg

SEQ ID NO: 1184963 - RNA, 19 nt, Artificial Sequence
  Description of Artificial Sequence: Synthetic oligonucleotide
ccucccgagguaaagggca

SEQ ID NO: 1184964 - RNA, 19 nt, Artificial Sequence
  Description of Artificial Sequence: Synthetic oligonucleotide
aucagccaagggaaacagu

SEQ ID NO: 1184965 - RNA, 19 nt, Artificial Sequence
  Description of Artificial Sequence: Synthetic oligonucleotide
gguaggacaucagugcugu

SEQ ID NO: 1184966 - RNA, 19 nt, Artificial Sequence
  Description of Artificial Sequence: Synthetic oligonucleotide
caguuggggauuauggcuu

SEQ ID NO: 1184967 - RNA, 19 nt, Artificial Sequence
  Description of Artificial Sequence: Synthetic oligonucleotide
agcugcugcugcugcugca

SEQ ID NO: 1184968 - RNA, 19 nt, Artificial Sequence
  Description of Artificial Sequence: Synthetic oligonucleotide
gcauucacccucugccuca

SEQ ID NO: 1184969 - RNA, 19 nt, Artificial Sequence
  Description of Artificial Sequence: Synthetic oligonucleotide
gaugucaggaaugguuauu

SEQ ID NO: 1184970 - RNA, 19 nt, Artificial Sequence
  Description of Artificial Sequence: Synthetic oligonucleotide
acacacccucucuguccag

SEQ ID NO: 1184971 - RNA, 19 nt, Artificial Sequence
  Description of Artificial Sequence: Synthetic oligonucleotide
ccucucuguccagugagag

SEQ ID NO: 1184972 - RNA, 19 nt, Artificial Sequence
  Description of Artificial Sequence: Synthetic oligonucleotide
ugcuagccugaggacuacu

SEQ ID NO: 1184973 - RNA, 19 nt, Artificial Sequence
  Description of Artificial Sequence: Synthetic oligonucleotide
caaaggacuaggggccuga

SEQ ID NO: 1184974 - RNA, 19 nt, Artificial Sequence
  Description of Artificial Sequence: Synthetic oligonucleotide
ccaccuuacucucaaccca

SEQ ID NO: 1184975 - RNA, 19 nt, Artificial Sequence
  Description of Artificial Sequence: Synthetic oligonucleotide
gguuagaaguccaaucuuu

SEQ ID NO: 1184976 - RNA, 19 nt, Artificial Sequence
  Description of Artificial Sequence: Synthetic oligonucleotide
cauucacccucugccucac

SEQ ID NO: 1184977 - RNA, 19 nt, Artificial Sequence
  Description of Artificial Sequence: Synthetic oligonucleotide
gcugcugcugcugcugcag

SEQ ID NO: 1184978 - RNA, 19 nt, Artificial Sequence
  Description of Artificial Sequence: Synthetic oligonucleotide
gcaacacauugaccagggc

SEQ ID NO: 1184979 - RNA, 19 nt, Artificial Sequence
  Description of Artificial Sequence: Synthetic oligonucleotide
auggugguuagaaguccaa

SEQ ID NO: 1184980 - RNA, 19 nt, Artificial Sequence
  Description of Artificial Sequence: Synthetic oligonucleotide
auggaaucacucagacuuu

SEQ ID NO: 1184981 - RNA, 19 nt, Artificial Sequence
  Description of Artificial Sequence: Synthetic oligonucleotide
cauugagcgcggcagcagu

SEQ ID NO: 1184982 - RNA, 19 nt, Artificial Sequence
  Description of Artificial Sequence: Synthetic oligonucleotide
gaaagccucccgagguaaa

SEQ ID NO: 1184983 - RNA, 19 nt, Artificial Sequence
  Description of Artificial Sequence: Synthetic oligonucleotide
agccacugacuuugagguu

SEQ ID NO: 1184984 - RNA, 19 nt, Artificial Sequence
  Description of Artificial Sequence: Synthetic oligonucleotide
ccucacauacaaagugaca

SEQ ID NO: 1184985 - RNA, 19 nt, Artificial Sequence
  Description of Artificial Sequence: Synthetic oligonucleotide
gaucacagugucggucucu

SEQ ID NO: 1184986 - RNA, 19 nt, Artificial Sequence
  Description of Artificial Sequence: Synthetic oligonucleotide
cuacagguguaggcccaug

SEQ ID NO: 1184987 - RNA, 19 nt, Artificial Sequence
  Description of Artificial Sequence: Synthetic oligonucleotide
gcugcgcguacacaccaca

SEQ ID NO: 1184988 - RNA, 19 nt, Artificial Sequence
  Description of Artificial Sequence: Synthetic oligonucleotide
ggacgcaacauggucccca

SEQ ID NO: 1184989 - RNA, 19 nt, Artificial Sequence
  Description of Artificial Sequence: Synthetic oligonucleotide
cauucucccaguucacauu

SEQ ID NO: 1184990 - RNA, 19 nt, Artificial Sequence
  Description of Artificial Sequence: Synthetic oligonucleotide
gaacuggagcuuggcugca

SEQ ID NO: 1184991 - RNA, 19 nt, Artificial Sequence
  Description of Artificial Sequence: Synthetic oligonucleotide
guugguugucuuauugcuu

SEQ ID NO: 1184992 - RNA, 19 nt, Artificial Sequence
  Description of Artificial Sequence: Synthetic oligonucleotide
guguaggcccaugccucug

SEQ ID NO: 1184993 - RNA, 19 nt, Artificial Sequence
  Description of Artificial Sequence: Synthetic oligonucleotide
gcacugggagacugcuagc

SEQ ID NO: 1184994 - RNA, 19 nt, Artificial Sequence
  Description of Artificial Sequence: Synthetic oligonucleotide
cgcguacacaccacacacc

SEQ ID NO: 1184995 - RNA, 19 nt, Artificial Sequence
  Description of Artificial Sequence: Synthetic oligonucleotide
cagugucggucucucucga

SEQ ID NO: 1184996 - RNA, 19 nt, Artificial Sequence
  Description of Artificial Sequence: Synthetic oligonucleotide
cacccucucuguccaguga

SEQ ID NO: 1184997 - RNA, 19 nt, Artificial Sequence
  Description of Artificial Sequence: Synthetic oligonucleotide
ggccgggcucugcagccgg

SEQ ID NO: 1184998 - RNA, 19 nt, Artificial Sequence
  Description of Artificial Sequence: Synthetic oligonucleotide
ccggggcugaugcuacagg

SEQ ID NO: 1184999 - RNA, 19 nt, Artificial Sequence
  Description of Artificial Sequence: Synthetic oligonucleotide
gggaagcaugggcccagac

SEQ ID NO: 1185000 - RNA, 19 nt, Artificial Sequence
  Description of Artificial Sequence: Synthetic oligonucleotide
cccggagcaggauagcaaa

SEQ ID NO: 1185001 - RNA, 19 nt, Artificial Sequence
  Description of Artificial Sequence: Synthetic oligonucleotide
gccacgggucaucuucuuc

SEQ ID NO: 1185002 - RNA, 19 nt, Artificial Sequence
  Description of Artificial Sequence: Synthetic oligonucleotide
cugcuagccugaggacuac

SEQ ID NO: 1185003 - RNA, 19 nt, Artificial Sequence
  Description of Artificial Sequence: Synthetic oligonucleotide
acccaccuccccucucuuu

SEQ ID NO: 1185004 - RNA, 19 nt, Artificial Sequence
  Description of Artificial Sequence: Synthetic oligonucleotide
acgcaacaugguccccaaa

SEQ ID NO: 1185005 - RNA, 19 nt, Artificial Sequence
  Description of Artificial Sequence: Synthetic oligonucleotide
uggccaccccuaggaggag

SEQ ID NO: 1185006 - RNA, 19 nt, Artificial Sequence
  Description of Artificial Sequence: Synthetic oligonucleotide
ccauugagcgcggcagcag

SEQ ID NO: 1185007 - RNA, 19 nt, Artificial Sequence
  Description of Artificial Sequence: Synthetic oligonucleotide
cucccugcccggguauguc

SEQ ID NO: 1185008 - RNA, 19 nt, Artificial Sequence
  Description of Artificial Sequence: Synthetic oligonucleotide
ccugcccggguaugucugc

SEQ ID NO: 1185009 - RNA, 19 nt, Artificial Sequence
  Description of Artificial Sequence: Synthetic oligonucleotide
gccuccauugagcgcggca

SEQ ID NO: 1185010 - RNA, 19 nt, Artificial Sequence
  Description of Artificial Sequence: Synthetic oligonucleotide
cacuucuaacacccacagu

SEQ ID NO: 1185011 - RNA, 19 nt, Artificial Sequence
  Description of Artificial Sequence: Synthetic oligonucleotide
ccggaccacggcucucagg

SEQ ID NO: 1185012 - RNA, 19 nt, Artificial Sequence
  Description of Artificial Sequence: Synthetic oligonucleotide
agggagugccacgggucau

SEQ ID NO: 1185013 - RNA, 19 nt, Artificial Sequence
  Description of Artificial Sequence: Synthetic oligonucleotide
cuaggggccugagcaggga

SEQ ID NO: 1185014 - RNA, 19 nt, Artificial Sequence
  Description of Artificial Sequence: Synthetic oligonucleotide
cacggcucucaggccgggc

SEQ ID NO: 1185015 - RNA, 19 nt, Artificial Sequence
  Description of Artificial Sequence: Synthetic oligonucleotide
cuccccucucuuuggcugu

SEQ ID NO: 1185016 - RNA, 19 nt, Artificial Sequence
  Description of Artificial Sequence: Synthetic oligonucleotide
cugcacugggagacugcua

SEQ ID NO: 1185017 - RNA, 19 nt, Artificial Sequence
  Description of Artificial Sequence: Synthetic oligonucleotide
cccuaggaggagguccuug

SEQ ID NO: 1185018 - RNA, 19 nt, Artificial Sequence
  Description of Artificial Sequence: Synthetic oligonucleotide
gggaaacaguuggggauua

SEQ ID NO: 1185019 - RNA, 19 nt, Artificial Sequence
  Description of Artificial Sequence: Synthetic oligonucleotide
cacacccucucuguccagu

SEQ ID NO: 1185020 - RNA, 19 nt, Artificial Sequence
  Description of Artificial Sequence: Synthetic oligonucleotide
cccgagguaaagggcagga

SEQ ID NO: 1185021 - RNA, 19 nt, Artificial Sequence
  Description of Artificial Sequence: Synthetic oligonucleotide
cgcaacaugguccccaaau

SEQ ID NO: 1185022 - RNA, 19 nt, Artificial Sequence
  Description of Artificial Sequence: Synthetic oligonucleotide
gcccagacuggccaccccu

SEQ ID NO: 1185023 - RNA, 19 nt, Artificial Sequence
  Description of Artificial Sequence: Synthetic oligonucleotide
gcccggagcaggauagcaa

SEQ ID NO: 1185024 - RNA, 19 nt, Artificial Sequence
  Description of Artificial Sequence: Synthetic oligonucleotide
ggagugccacgggucaucu

SEQ ID NO: 1185025 - RNA, 19 nt, Artificial Sequence
  Description of Artificial Sequence: Synthetic oligonucleotide
ccccucucuuuggcugucg

SEQ ID NO: 1185026 - RNA, 19 nt, Artificial Sequence
  Description of Artificial Sequence: Synthetic oligonucleotide
cccggguaugucugcugga

SEQ ID NO: 1185027 - RNA, 19 nt, Artificial Sequence
  Description of Artificial Sequence: Synthetic oligonucleotide
gagcuuggcugcaguccau

SEQ ID NO: 1185028 - RNA, 19 nt, Artificial Sequence
  Description of Artificial Sequence: Synthetic oligonucleotide
cugcccggguaugucugcu

SEQ ID NO: 1185029 - RNA, 19 nt, Artificial Sequence
  Description of Artificial Sequence: Synthetic oligonucleotide
gccaccccuaggaggaggu

SEQ ID NO: 1185030 - RNA, 19 nt, Artificial Sequence
  Description of Artificial Sequence: Synthetic oligonucleotide
ggccuccauugagcgcggc

SEQ ID NO: 1185031 - RNA, 19 nt, Artificial Sequence
  Description of Artificial Sequence: Synthetic oligonucleotide
gcuacagguguaggcccau

SEQ ID NO: 1185032 - RNA, 19 nt, Artificial Sequence
  Description of Artificial Sequence: Synthetic oligonucleotide
ccaccccuaggaggagguc

SEQ ID NO: 1185033 - RNA, 19 nt, Artificial Sequence
  Description of Artificial Sequence: Synthetic oligonucleotide
cguucucccugcccgggua

SEQ ID NO: 1185034 - RNA, 19 nt, Artificial Sequence
  Description of Artificial Sequence: Synthetic oligonucleotide
cccaaaggacuaggggccu

SEQ ID NO: 1185035 - RNA, 19 nt, Artificial Sequence
  Description of Artificial Sequence: Synthetic oligonucleotide
gccuugcagacugcuguuu

SEQ ID NO: 1185036 - RNA, 19 nt, Artificial Sequence
  Description of Artificial Sequence: Synthetic oligonucleotide
gccggcugggccagacagu

SEQ ID NO: 1185037 - RNA, 19 nt, Artificial Sequence
  Description of Artificial Sequence: Synthetic oligonucleotide
ccgagguaaagggcaggau

SEQ ID NO: 1185038 - RNA, 19 nt, Artificial Sequence
  Description of Artificial Sequence: Synthetic oligonucleotide
ccccuaggaggagguccuu

SEQ ID NO: 1185039 - RNA, 19 nt, Artificial Sequence
  Description of Artificial Sequence: Synthetic oligonucleotide
uuaauuaccaguuagaauu

SEQ ID NO: 1185040 - RNA, 19 nt, Artificial Sequence
  Description of Artificial Sequence: Synthetic oligonucleotide
aauuagacuaccccagugc

SEQ ID NO: 1185041 - RNA, 19 nt, Artificial Sequence
  Description of Artificial Sequence: Synthetic oligonucleotide
cuuuguauacauuugagcc

SEQ ID NO: 1185042 - RNA, 19 nt, Artificial Sequence
  Description of Artificial Sequence: Synthetic oligonucleotide
ugaucuuuggaaacaaugg

SEQ ID NO: 1185043 - RNA, 19 nt, Artificial Sequence
  Description of Artificial Sequence: Synthetic oligonucleotide
agaggggcaaaucaaaacc

SEQ ID NO: 1185044 - RNA, 19 nt, Artificial Sequence
  Description of Artificial Sequence: Synthetic oligonucleotide
uuuauugagaguauuggcu

SEQ ID NO: 1185045 - RNA, 19 nt, Artificial Sequence
  Description of Artificial Sequence: Synthetic oligonucleotide
ugugccuuaaaagaaaccg

SEQ ID NO: 1185046 - RNA, 19 nt, Artificial Sequence
  Description of Artificial Sequence: Synthetic oligonucleotide
uccuauguucgucagaacg

SEQ ID NO: 1185047 - RNA, 19 nt, Artificial Sequence
  Description of Artificial Sequence: Synthetic oligonucleotide
acuuuguauacauuugagc

SEQ ID NO: 1185048 - RNA, 19 nt, Artificial Sequence
  Description of Artificial Sequence: Synthetic oligonucleotide
uaacacauuaauauagcag

SEQ ID NO: 1185049 - RNA, 19 nt, Artificial Sequence
  Description of Artificial Sequence: Synthetic oligonucleotide
ucuaaagagaagcugcugc

SEQ ID NO: 1185050 - RNA, 19 nt, Artificial Sequence
  Description of Artificial Sequence: Synthetic oligonucleotide
agaaauuggaauuccuugg

SEQ ID NO: 1185051 - RNA, 19 nt, Artificial Sequence
  Description of Artificial Sequence: Synthetic oligonucleotide
  modified_base (5)..(5): a, c, u, g, unknown or other
aaacnguaaacaccuuuac

SEQ ID NO: 1185052 - RNA, 19 nt, Artificial Sequence
  Description of Artificial Sequence: Synthetic oligonucleotide
ucaauagcuguucagacac

SEQ ID NO: 1185053 - RNA, 19 nt, Artificial Sequence
  Description of Artificial Sequence: Synthetic oligonucleotide
  modified_base (10)..(10): a, c, u, g, unknown or other
acugcaaacnguaaacacc

SEQ ID NO: 1185054 - RNA, 19 nt, Artificial Sequence
  Description of Artificial Sequence: Synthetic oligonucleotide
ugcuuuaacacauuaauau

SEQ ID NO: 1185055 - RNA, 19 nt, Artificial Sequence
  Description of Artificial Sequence: Synthetic oligonucleotide
ugaacgaacucccuuaggc

SEQ ID NO: 1185056 - RNA, 19 nt, Artificial Sequence
  Description of Artificial Sequence: Synthetic oligonucleotide
  modified_base (3)..(3): a, c, u, g, unknown or other
acnguaaacaccuuuacau

SEQ ID NO: 1185057 - RNA, 19 nt, Artificial Sequence
  Description of Artificial Sequence: Synthetic oligonucleotide
auagcaguaauuuacaguu

SEQ ID NO: 1185058 - RNA, 19 nt, Artificial Sequence
  Description of Artificial Sequence: Synthetic oligonucleotide
uacaaagccgucaugauaa

SEQ ID NO: 1185059 - RNA, 19 nt, Artificial Sequence
  Description of Artificial Sequence: Synthetic oligonucleotide
auuggaauuccuuggguac

SEQ ID NO: 1185060 - RNA, 19 nt, Artificial Sequence
  Description of Artificial Sequence: Synthetic oligonucleotide
gaaauuggaauuccuuggg

SEQ ID NO: 1185061 - RNA, 19 nt, Artificial Sequence
  Description of Artificial Sequence: Synthetic oligonucleotide
aaaccuaaucuugaaagag

SEQ ID NO: 1185062 - RNA, 19 nt, Artificial Sequence
  Description of Artificial Sequence: Synthetic oligonucleotide
aaacguuggggcuugaaga

SEQ ID NO: 1185063 - RNA, 19 nt, Artificial Sequence
  Description of Artificial Sequence: Synthetic oligonucleotide
acugacauuacuuagcaau

SEQ ID NO: 1185064 - RNA, 19 nt, Artificial Sequence
  Description of Artificial Sequence: Synthetic oligonucleotide
ucgugugcauauuugaagg

SEQ ID NO: 1185065 - RNA, 19 nt, Artificial Sequence
  Description of Artificial Sequence: Synthetic oligonucleotide
uacgguuagcaaaauaaag

SEQ ID NO: 1185066 - RNA, 19 nt, Artificial Sequence
  Description of Artificial Sequence: Synthetic oligonucleotide
ucagaauucacuuccuccc

SEQ ID NO: 1185067 - RNA, 19 nt, Artificial Sequence
  Description of Artificial Sequence: Synthetic oligonucleotide
uaauuaauuaccaguuaga

SEQ ID NO: 1185068 - RNA, 19 nt, Artificial Sequence
  Description of Artificial Sequence: Synthetic oligonucleotide
uugaauuaguagcugaagu

SEQ ID NO: 1185069 - RNA, 19 nt, Artificial Sequence
  Description of Artificial Sequence: Synthetic oligonucleotide
accaguuagaauuagacua

SEQ ID NO: 1185070 - RNA, 19 nt, Artificial Sequence
  Description of Artificial Sequence: Synthetic oligonucleotide
agaguauuggcuuugaauu

SEQ ID NO: 1185071 - RNA, 19 nt, Artificial Sequence
  Description of Artificial Sequence: Synthetic oligonucleotide
uaauuggcaaacauaauua

SEQ ID NO: 1185072 - RNA, 19 nt, Artificial Sequence
  Description of Artificial Sequence: Synthetic oligonucleotide
aauuaguagcugaaguaac

SEQ ID NO: 1185073 - RNA, 19 nt, Artificial Sequence
  Description of Artificial Sequence: Synthetic oligonucleotide
  modified_base (4)..(4): a, c, u, g, unknown or other
aacnguaaacaccuuuaca

SEQ ID NO: 1185074 - RNA, 19 nt, Artificial Sequence
  Description of Artificial Sequence: Synthetic oligonucleotide
cucucagaaacaaauguag

SEQ ID NO: 1185075 - RNA, 19 nt, Artificial Sequence
  Description of Artificial Sequence: Synthetic oligonucleotide
uuuacauuuucagagcggc

SEQ ID NO: 1185076 - RNA, 19 nt, Artificial Sequence
  Description of Artificial Sequence: Synthetic oligonucleotide
ucaauuacgguuagcaaaa

SEQ ID NO: 1185077 - RNA, 19 nt, Artificial Sequence
  Description of Artificial Sequence: Synthetic oligonucleotide
aacccaguaaacaaaucac

SEQ ID NO: 1185078 - RNA, 19 nt, Artificial Sequence
  Description of Artificial Sequence: Synthetic oligonucleotide
uauagcaguaauuuacagu

SEQ ID NO: 1185079 - RNA, 19 nt, Artificial Sequence
  Description of Artificial Sequence: Synthetic oligonucleotide
uaauuuaguaggcacaauu

SEQ ID NO: 1185080 - RNA, 19 nt, Artificial Sequence
  Description of Artificial Sequence: Synthetic oligonucleotide
uacuuagcaauuuauugga

SEQ ID NO: 1185081 - RNA, 19 nt, Artificial Sequence
  Description of Artificial Sequence: Synthetic oligonucleotide
acaaugaucuauaaaauga

SEQ ID NO: 1185082 - RNA, 19 nt, Artificial Sequence
  Description of Artificial Sequence: Synthetic oligonucleotide
uuaagcacauuccacagua

SEQ ID NO: 1185083 - RNA, 19 nt, Artificial Sequence
  Description of Artificial Sequence: Synthetic oligonucleotide
acaacugggaauuacuacu

SEQ ID NO: 1185084 - RNA, 19 nt, Artificial Sequence
  Description of Artificial Sequence: Synthetic oligonucleotide
uuugugucuacccagcauc

SEQ ID NO: 1185085 - RNA, 19 nt, Artificial Sequence
  Description of Artificial Sequence: Synthetic oligonucleotide
ugauuuacugacauuacuu

SEQ ID NO: 1185086 - RNA, 19 nt, Artificial Sequence
  Description of Artificial Sequence: Synthetic oligonucleotide
uucgucagaacgacgauga

SEQ ID NO: 1185087 - RNA, 19 nt, Artificial Sequence
  Description of Artificial Sequence: Synthetic oligonucleotide
gcaacuacuuuauugagag

SEQ ID NO: 1185088 - RNA, 19 nt, Artificial Sequence
  Description of Artificial Sequence: Synthetic oligonucleotide
aacucccuuaggcaugugg

SEQ ID NO: 1185089 - RNA, 19 nt, Artificial Sequence
  Description of Artificial Sequence: Synthetic oligonucleotide
aauuggaauuccuugggua

SEQ ID NO: 1185090 - RNA, 19 nt, Artificial Sequence
  Description of Artificial Sequence: Synthetic oligonucleotide
caugaucucccaaggaugg

SEQ ID NO: 1185091 - RNA, 19 nt, Artificial Sequence
  Description of Artificial Sequence: Synthetic oligonucleotide
agcgucaucaucguacugc

SEQ ID NO: 1185092 - RNA, 19 nt, Artificial Sequence
  Description of Artificial Sequence: Synthetic oligonucleotide
ucaaacagauaauuggcaa

SEQ ID NO: 1185093 - RNA, 19 nt, Artificial Sequence
  Description of Artificial Sequence: Synthetic oligonucleotide
caugugguagccauguagc

SEQ ID NO: 1185094 - RNA, 19 nt, Artificial Sequence
  Description of Artificial Sequence: Synthetic oligonucleotide
agugcagaccgcuaucugg

SEQ ID NO: 1185095 - RNA, 19 nt, Artificial Sequence
  Description of Artificial Sequence: Synthetic oligonucleotide
ugaauuaguagcugaagua

SEQ ID NO: 1185096 - RNA, 19 nt, Artificial Sequence
  Description of Artificial Sequence: Synthetic oligonucleotide
aaccuaaucuugaaagagg

SEQ ID NO: 1185097 - RNA, 19 nt, Artificial Sequence
  Description of Artificial Sequence: Synthetic oligonucleotide
uugauuuacugacauuacu

SEQ ID NO: 1185098 - RNA, 19 nt, Artificial Sequence
  Description of Artificial Sequence: Synthetic oligonucleotide
agauaauuggcaaacauaa

SEQ ID NO: 1185099 - RNA, 19 nt, Artificial Sequence
  Description of Artificial Sequence: Synthetic oligonucleotide
ugaccugaaggucuaaaga

SEQ ID NO: 1185100 - RNA, 19 nt, Artificial Sequence
  Description of Artificial Sequence: Synthetic oligonucleotide
  modified_base (18)..(18): a, c, u, g, unknown or other
aucaucguacugcaaacng

SEQ ID NO: 1185101 - RNA, 19 nt, Artificial Sequence
  Description of Artificial Sequence: Synthetic oligonucleotide
cagaaauuggaauuccuug

SEQ ID NO: 1185102 - RNA, 19 nt, Artificial Sequence
  Description of Artificial Sequence: Synthetic oligonucleotide
gaaacguuggggcuugaag

SEQ ID NO: 1185103 - RNA, 19 nt, Artificial Sequence
  Description of Artificial Sequence: Synthetic oligonucleotide
ugccuuaaaagaaaccggu

SEQ ID NO: 1185104 - RNA, 19 nt, Artificial Sequence
  Description of Artificial Sequence: Synthetic oligonucleotide
uuugaauuaguagcugaag

SEQ ID NO: 1185105 - RNA, 19 nt, Artificial Sequence
  Description of Artificial Sequence: Synthetic oligonucleotide
auuacgguuagcaaaauaa

SEQ ID NO: 1185106 - RNA, 19 nt, Artificial Sequence
  Description of Artificial Sequence: Synthetic oligonucleotide
agcaauuuauuggacaaag

SEQ ID NO: 1185107 - RNA, 19 nt, Artificial Sequence
  Description of Artificial Sequence: Synthetic oligonucleotide
aaagccgucaugauaauau

SEQ ID NO: 1185108 - RNA, 19 nt, Artificial Sequence
  Description of Artificial Sequence: Synthetic oligonucleotide
auauagcaguaauuuacag

SEQ ID NO: 1185109 - RNA, 19 nt, Artificial Sequence
  Description of Artificial Sequence: Synthetic oligonucleotide
ugaaaggguacugacauuc

SEQ ID NO: 1185110 - RNA, 19 nt, Artificial Sequence
  Description of Artificial Sequence: Synthetic oligonucleotide
aacgaacucccuuaggcau

SEQ ID NO: 1185111 - RNA, 19 nt, Artificial Sequence
  Description of Artificial Sequence: Synthetic oligonucleotide
uauuggacaaaggucaaac

SEQ ID NO: 1185112 - RNA, 19 nt, Artificial Sequence
  Description of Artificial Sequence: Synthetic oligonucleotide
ugcaacuacuuuauugaga

SEQ ID NO: 1185113 - RNA, 19 nt, Artificial Sequence
  Description of Artificial Sequence: Synthetic oligonucleotide
uccccuuauagacagggga

SEQ ID NO: 1185114 - RNA, 19 nt, Artificial Sequence
  Description of Artificial Sequence: Synthetic oligonucleotide
uucaauagcuguucagaca

SEQ ID NO: 1185115 - RNA, 19 nt, Artificial Sequence
  Description of Artificial Sequence: Synthetic oligonucleotide
acgacgaugaccugaaggu

SEQ ID NO: 1185116 - RNA, 19 nt, Artificial Sequence
  Description of Artificial Sequence: Synthetic oligonucleotide
uuccacaguacaaagccgu

SEQ ID NO: 1185117 - RNA, 19 nt, Artificial Sequence
  Description of Artificial Sequence: Synthetic oligonucleotide
accuaaucuugaaagaggg

SEQ ID NO: 1185118 - RNA, 19 nt, Artificial Sequence
  Description of Artificial Sequence: Synthetic oligonucleotide
auuagacuaccccagugcu

SEQ ID NO: 1185119 - RNA, 19 nt, Artificial Sequence
  Description of Artificial Sequence: Synthetic oligonucleotide
uugaccaauguccuuucug

SEQ ID NO: 1185120 - RNA, 19 nt, Artificial Sequence
  Description of Artificial Sequence: Synthetic oligonucleotide
aaccgguacagaaaggaag

SEQ ID NO: 1185121 - RNA, 19 nt, Artificial Sequence
  Description of Artificial Sequence: Synthetic oligonucleotide
gaauuagacuaccccagug

SEQ ID NO: 1185122 - RNA, 19 nt, Artificial Sequence
  Description of Artificial Sequence: Synthetic oligonucleotide
aguuucaauagcuguucag

SEQ ID NO: 1185123 - RNA, 19 nt, Artificial Sequence
  Description of Artificial Sequence: Synthetic oligonucleotide
  modified_base (14)..(14): a, c, u, g, unknown or other
ucguacugcaaacnguaaa

SEQ ID NO: 1185124 - RNA, 19 nt, Artificial Sequence
  Description of Artificial Sequence: Synthetic oligonucleotide
aaggaaguguaauccaaaa

SEQ ID NO: 1185125 - RNA, 19 nt, Artificial Sequence
  Description of Artificial Sequence: Synthetic oligonucleotide
aagccgucaugauaauauc

SEQ ID NO: 1185126 - RNA, 19 nt, Artificial Sequence
  Description of Artificial Sequence: Synthetic oligonucleotide
ugugaacgaacucccuuag

SEQ ID NO: 1185127 - RNA, 19 nt, Artificial Sequence
  Description of Artificial Sequence: Synthetic oligonucleotide
uauguucgucagaacgacg

SEQ ID NO: 1185128 - RNA, 19 nt, Artificial Sequence
  Description of Artificial Sequence: Synthetic oligonucleotide
acaucaacccaguaaacaa

SEQ ID NO: 1185129 - RNA, 19 nt, Artificial Sequence
  Description of Artificial Sequence: Synthetic oligonucleotide
uuacgguuagcaaaauaaa

SEQ ID NO: 1185130 - RNA, 19 nt, Artificial Sequence
  Description of Artificial Sequence: Synthetic oligonucleotide
acuacuguaaucccagaaa

SEQ ID NO: 1185131 - RNA, 19 nt, Artificial Sequence
  Description of Artificial Sequence: Synthetic oligonucleotide
uguacugcauaauacucau

SEQ ID NO: 1185132 - RNA, 19 nt, Artificial Sequence
  Description of Artificial Sequence: Synthetic oligonucleotide
uuuaugucguccacaccgc

SEQ ID NO: 1185133 - RNA, 19 nt, Artificial Sequence
  Description of Artificial Sequence: Synthetic oligonucleotide
acccaguaaacaaaucacc

SEQ ID NO: 1185134 - RNA, 19 nt, Artificial Sequence
  Description of Artificial Sequence: Synthetic oligonucleotide
agcaacaucaacccaguaa

SEQ ID NO: 1185135 - RNA, 19 nt, Artificial Sequence
  Description of Artificial Sequence: Synthetic oligonucleotide
ugcaaguuuaugucgucca

SEQ ID NO: 1185136 - RNA, 19 nt, Artificial Sequence
  Description of Artificial Sequence: Synthetic oligonucleotide
cucaauuacgguuagcaaa

SEQ ID NO: 1185137 - RNA, 19 nt, Artificial Sequence
  Description of Artificial Sequence: Synthetic oligonucleotide
agggagagcgucaucaucg

SEQ ID NO: 1185138 - RNA, 19 nt, Artificial Sequence
  Description of Artificial Sequence: Synthetic oligonucleotide
gcuauaauuuaguaggcac

SEQ ID NO: 1185139 - RNA, 19 nt, Artificial Sequence
  Description of Artificial Sequence: Synthetic oligonucleotide
aauuaccaguuagaauuag

SEQ ID NO: 1185140 - RNA, 19 nt, Artificial Sequence
  Description of Artificial Sequence: Synthetic oligonucleotide
gucgugugcauauuugaag

SEQ ID NO: 1185141 - RNA, 19 nt, Artificial Sequence
  Description of Artificial Sequence: Synthetic oligonucleotide
aacucagcugugaacgaac

SEQ ID NO: 1185142 - RNA, 19 nt, Artificial Sequence
  Description of Artificial Sequence: Synthetic oligonucleotide
gaauuaguagcugaaguaa

SEQ ID NO: 1185143 - RNA, 19 nt, Artificial Sequence
  Description of Artificial Sequence: Synthetic oligonucleotide
aauuacgguuagcaaaaua

SEQ ID NO: 1185144 - RNA, 19 nt, Artificial Sequence
  Description of Artificial Sequence: Synthetic oligonucleotide
uagaaccaauuccagcccc

SEQ ID NO: 1185145 - RNA, 19 nt, Artificial Sequence
  Description of Artificial Sequence: Synthetic oligonucleotide
guagccaguaguucaagac

SEQ ID NO: 1185146 - RNA, 19 nt, Artificial Sequence
  Description of Artificial Sequence: Synthetic oligonucleotide
uuuggguacaaugaucuau

SEQ ID NO: 1185147 - RNA, 19 nt, Artificial Sequence
  Description of Artificial Sequence: Synthetic oligonucleotide
gugagaaugauguauuaaa

SEQ ID NO: 1185148 - RNA, 19 nt, Artificial Sequence
  Description of Artificial Sequence: Synthetic oligonucleotide
gaaaccgguacagaaagga

SEQ ID NO: 1185149 - RNA, 19 nt, Artificial Sequence
  Description of Artificial Sequence: Synthetic oligonucleotide
aauuccuuggguacccaag

SEQ ID NO: 1185150 - RNA, 19 nt, Artificial Sequence
  Description of Artificial Sequence: Synthetic oligonucleotide
caguuggugagcuaagcug

SEQ ID NO: 1185151 - RNA, 19 nt, Artificial Sequence
  Description of Artificial Sequence: Synthetic oligonucleotide
cuaaucuugaaagagggaa

SEQ ID NO: 1185152 - RNA, 19 nt, Artificial Sequence
  Description of Artificial Sequence: Synthetic oligonucleotide
acgguuagcaaaauaaagu

SEQ ID NO: 1185153 - RNA, 19 nt, Artificial Sequence
  Description of Artificial Sequence: Synthetic oligonucleotide
caauucaaaggucgugugc

SEQ ID NO: 1185154 - RNA, 19 nt, Artificial Sequence
  Description of Artificial Sequence: Synthetic oligonucleotide
uuuauuggacaaaggucaa

SEQ ID NO: 1185155 - RNA, 19 nt, Artificial Sequence
  Description of Artificial Sequence: Synthetic oligonucleotide
acgaacuucuauauuuaac

SEQ ID NO: 1185156 - RNA, 19 nt, Artificial Sequence
  Description of Artificial Sequence: Synthetic oligonucleotide
aauagcuguucagacacau

SEQ ID NO: 1185157 - RNA, 19 nt, Artificial Sequence
  Description of Artificial Sequence: Synthetic oligonucleotide
acacuccccuuauagacag

SEQ ID NO: 1185158 - RNA, 19 nt, Artificial Sequence
  Description of Artificial Sequence: Synthetic oligonucleotide
cuggauaaucuuuggguac

SEQ ID NO: 1185159 - RNA, 19 nt, Artificial Sequence
  Description of Artificial Sequence: Synthetic oligonucleotide
uuaggcaugugguagccau

SEQ ID NO: 1185160 - RNA, 19 nt, Artificial Sequence
  Description of Artificial Sequence: Synthetic oligonucleotide
uuggguacaaugaucuaua

SEQ ID NO: 1185161 - RNA, 19 nt, Artificial Sequence
  Description of Artificial Sequence: Synthetic oligonucleotide
ugggaauuacuacuguaau

SEQ ID NO: 1185162 - RNA, 19 nt, Artificial Sequence
  Description of Artificial Sequence: Synthetic oligonucleotide
aacaaaggccaugaagcca

SEQ ID NO: 1185163 - RNA, 19 nt, Artificial Sequence
  Description of Artificial Sequence: Synthetic oligonucleotide
aggguacugacauuccuug

SEQ ID NO: 1185164 - RNA, 19 nt, Artificial Sequence
  Description of Artificial Sequence: Synthetic oligonucleotide
uguagaagcaugugagaau

SEQ ID NO: 1185165 - RNA, 19 nt, Artificial Sequence
  Description of Artificial Sequence: Synthetic oligonucleotide
gagaggggcaaaucaaaac

SEQ ID NO: 1185166 - RNA, 19 nt, Artificial Sequence
  Description of Artificial Sequence: Synthetic oligonucleotide
aaagugcagaccgcuaucu

SEQ ID NO: 1185167 - RNA, 19 nt, Artificial Sequence
  Description of Artificial Sequence: Synthetic oligonucleotide
ugugagaaugauguauuaa

SEQ ID NO: 1185168 - RNA, 19 nt, Artificial Sequence
  Description of Artificial Sequence: Synthetic oligonucleotide
aggggacuacuuuguauac

SEQ ID NO: 1185169 - RNA, 19 nt, Artificial Sequence
  Description of Artificial Sequence: Synthetic oligonucleotide
acuccccuuauagacaggg

SEQ ID NO: 1185170 - RNA, 19 nt, Artificial Sequence
  Description of Artificial Sequence: Synthetic oligonucleotide
ugcuauaauuuaguaggca

SEQ ID NO: 1185171 - RNA, 19 nt, Artificial Sequence
  Description of Artificial Sequence: Synthetic oligonucleotide
uuguccgacacauuccuau

SEQ ID NO: 1185172 - RNA, 19 nt, Artificial Sequence
  Description of Artificial Sequence: Synthetic oligonucleotide
uuauagacaggggacuacu

SEQ ID NO: 1185173 - RNA, 19 nt, Artificial Sequence
  Description of Artificial Sequence: Synthetic oligonucleotide
cugcuauaauuuaguaggc

SEQ ID NO: 1185174 - RNA, 19 nt, Artificial Sequence
  Description of Artificial Sequence: Synthetic oligonucleotide
gacacgaacuucuauauuu

SEQ ID NO: 1185175 - RNA, 19 nt, Artificial Sequence
  Description of Artificial Sequence: Synthetic oligonucleotide
ccagauugggccaaagugc

SEQ ID NO: 1185176 - RNA, 19 nt, Artificial Sequence
  Description of Artificial Sequence: Synthetic oligonucleotide
gaacgaacucccuuaggca

SEQ ID NO: 1185177 - RNA, 19 nt, Artificial Sequence
  Description of Artificial Sequence: Synthetic oligonucleotide
ucccuuaggcaugugguag

SEQ ID NO: 1185178 - RNA, 19 nt, Artificial Sequence
  Description of Artificial Sequence: Synthetic oligonucleotide
uggauaaucuuuggguaca

SEQ ID NO: 1185179 - RNA, 19 nt, Artificial Sequence
  Description of Artificial Sequence: Synthetic oligonucleotide
agaauuagacuaccccagu

SEQ ID NO: 1185180 - RNA, 19 nt, Artificial Sequence
  Description of Artificial Sequence: Synthetic oligonucleotide
ggaaacaauggagaggggc

SEQ ID NO: 1185181 - RNA, 19 nt, Artificial Sequence
  Description of Artificial Sequence: Synthetic oligonucleotide
aauguugaccaauguccuu

SEQ ID NO: 1185182 - RNA, 19 nt, Artificial Sequence
  Description of Artificial Sequence: Synthetic oligonucleotide
  modified_base (6)..(6): a, c, u, g, unknown or other
caaacnguaaacaccuuua

SEQ ID NO: 1185183 - RNA, 19 nt, Artificial Sequence
  Description of Artificial Sequence: Synthetic oligonucleotide
gcaacaucaacccaguaaa

SEQ ID NO: 1185184 - RNA, 19 nt, Artificial Sequence
  Description of Artificial Sequence: Synthetic oligonucleotide
uccccugcuauaauuuagu

SEQ ID NO: 1185185 - RNA, 19 nt, Artificial Sequence
  Description of Artificial Sequence: Synthetic oligonucleotide
gguugguccuuugaaaggg

SEQ ID NO: 1185186 - RNA, 19 nt, Artificial Sequence
  Description of Artificial Sequence: Synthetic oligonucleotide
uugugucuacccagcaucu

SEQ ID NO: 1185187 - RNA, 19 nt, Artificial Sequence
  Description of Artificial Sequence: Synthetic oligonucleotide
gagaguauuggcuuugaau

SEQ ID NO: 1185188 - RNA, 19 nt, Artificial Sequence
  Description of Artificial Sequence: Synthetic oligonucleotide
aguccagaguacaacuggg

SEQ ID NO: 1185189 - RNA, 19 nt, Artificial Sequence
  Description of Artificial Sequence: Synthetic oligonucleotide
cugcaacuacuuuauugag

SEQ ID NO: 1185190 - RNA, 19 nt, Artificial Sequence
  Description of Artificial Sequence: Synthetic oligonucleotide
acaguugcucaauuacggu

SEQ ID NO: 1185191 - RNA, 19 nt, Artificial Sequence
  Description of Artificial Sequence: Synthetic oligonucleotide
gucaaauggaugaugagcu

SEQ ID NO: 1185192 - RNA, 19 nt, Artificial Sequence
  Description of Artificial Sequence: Synthetic oligonucleotide
cuuugaauuaguagcugaa

SEQ ID NO: 1185193 - RNA, 19 nt, Artificial Sequence
  Description of Artificial Sequence: Synthetic oligonucleotide
cugcuuugugucuacccag

SEQ ID NO: 1185194 - RNA, 19 nt, Artificial Sequence
  Description of Artificial Sequence: Synthetic oligonucleotide
aaggucgugugcauauuug

SEQ ID NO: 1185195 - RNA, 19 nt, Artificial Sequence
  Description of Artificial Sequence: Synthetic oligonucleotide
auugagaguauuggcuuug

SEQ ID NO: 1185196 - RNA, 19 nt, Artificial Sequence
  Description of Artificial Sequence: Synthetic oligonucleotide
auguucgucagaacgacga

SEQ ID NO: 1185197 - RNA, 19 nt, Artificial Sequence
  Description of Artificial Sequence: Synthetic oligonucleotide
cugggaauuacuacuguaa

SEQ ID NO: 1185198 - RNA, 19 nt, Artificial Sequence
  Description of Artificial Sequence: Synthetic oligonucleotide
  modified_base (9)..(9): a, c, u, g, unknown or other
cugcaaacnguaaacaccu

SEQ ID NO: 1185199 - RNA, 19 nt, Artificial Sequence
  Description of Artificial Sequence: Synthetic oligonucleotide
gauugggccaaagugcaga

SEQ ID NO: 1185200 - RNA, 19 nt, Artificial Sequence
  Description of Artificial Sequence: Synthetic oligonucleotide
uggauccucugcaaguuua

SEQ ID NO: 1185201 - RNA, 19 nt, Artificial Sequence
  Description of Artificial Sequence: Synthetic oligonucleotide
agagcgucaucaucguacu

SEQ ID NO: 1185202 - RNA, 19 nt, Artificial Sequence
  Description of Artificial Sequence: Synthetic oligonucleotide
uccuuugaaaggguacuga

SEQ ID NO: 1185203 - RNA, 19 nt, Artificial Sequence
  Description of Artificial Sequence: Synthetic oligonucleotide
cuauguucgucagaacgac

SEQ ID NO: 1185204 - RNA, 19 nt, Artificial Sequence
  Description of Artificial Sequence: Synthetic oligonucleotide
uguccgacacauuccuaug

SEQ ID NO: 1185205 - RNA, 19 nt, Artificial Sequence
  Description of Artificial Sequence: Synthetic oligonucleotide
aggucgugugcauauuuga

SEQ ID NO: 1185206 - RNA, 19 nt, Artificial Sequence
  Description of Artificial Sequence: Synthetic oligonucleotide
aaacaauggagaggggcaa

SEQ ID NO: 1185207 - RNA, 19 nt, Artificial Sequence
  Description of Artificial Sequence: Synthetic oligonucleotide
guugcucaauuacgguuag

SEQ ID NO: 1185208 - RNA, 19 nt, Artificial Sequence
  Description of Artificial Sequence: Synthetic oligonucleotide
uggaauuccuuggguaccc

SEQ ID NO: 1185209 - RNA, 19 nt, Artificial Sequence
  Description of Artificial Sequence: Synthetic oligonucleotide
acugggaauuacuacugua

SEQ ID NO: 1185210 - RNA, 19 nt, Artificial Sequence
  Description of Artificial Sequence: Synthetic oligonucleotide
cagauugggccaaagugca

SEQ ID NO: 1185211 - RNA, 19 nt, Artificial Sequence
  Description of Artificial Sequence: Synthetic oligonucleotide
aauggaugaugagcuguga

SEQ ID NO: 1185212 - RNA, 19 nt, Artificial Sequence
  Description of Artificial Sequence: Synthetic oligonucleotide
gaauucacuuccuccccuc

SEQ ID NO: 1185213 - RNA, 19 nt, Artificial Sequence
  Description of Artificial Sequence: Synthetic oligonucleotide
gaaaggguacugacauucc

SEQ ID NO: 1185214 - RNA, 19 nt, Artificial Sequence
  Description of Artificial Sequence: Synthetic oligonucleotide
gugaacgaacucccuuagg

SEQ ID NO: 1185215 - RNA, 19 nt, Artificial Sequence
  Description of Artificial Sequence: Synthetic oligonucleotide
auuaccaguuagaauuaga

SEQ ID NO: 1185216 - RNA, 19 nt, Artificial Sequence
  Description of Artificial Sequence: Synthetic oligonucleotide
agcauucacaaugccagga

SEQ ID NO: 1185217 - RNA, 19 nt, Artificial Sequence
  Description of Artificial Sequence: Synthetic oligonucleotide
aaccaauuccagccccaga

SEQ ID NO: 1185218 - RNA, 19 nt, Artificial Sequence
  Description of Artificial Sequence: Synthetic oligonucleotide
cuuauagacaggggacuac

SEQ ID NO: 1185219 - RNA, 19 nt, Artificial Sequence
  Description of Artificial Sequence: Synthetic oligonucleotide
ugagugguguguccacacu

SEQ ID NO: 1185220 - RNA, 19 nt, Artificial Sequence
  Description of Artificial Sequence: Synthetic oligonucleotide
ccaguuagaauuagacuac

SEQ ID NO: 1185221 - RNA, 19 nt, Artificial Sequence
  Description of Artificial Sequence: Synthetic oligonucleotide
caguuagaauuagacuacc

SEQ ID NO: 1185222 - RNA, 19 nt, Artificial Sequence
  Description of Artificial Sequence: Synthetic oligonucleotide
uauagacaggggacuacuu

SEQ ID NO: 1185223 - RNA, 19 nt, Artificial Sequence
  Description of Artificial Sequence: Synthetic oligonucleotide
caacaucaacccaguaaac

SEQ ID NO: 1185224 - RNA, 19 nt, Artificial Sequence
  Description of Artificial Sequence: Synthetic oligonucleotide
accgguacagaaaggaagu

SEQ ID NO: 1185225 - RNA, 19 nt, Artificial Sequence
  Description of Artificial Sequence: Synthetic oligonucleotide
gcaauuuauuggacaaagg

SEQ ID NO: 1185226 - RNA, 19 nt, Artificial Sequence
  Description of Artificial Sequence: Synthetic oligonucleotide
uuagacuaccccagugcuu

SEQ ID NO: 1185227 - RNA, 19 nt, Artificial Sequence
  Description of Artificial Sequence: Synthetic oligonucleotide
gaguacaacugggaauuac

SEQ ID NO: 1185228 - RNA, 19 nt, Artificial Sequence
  Description of Artificial Sequence: Synthetic oligonucleotide
ugcaguuggugagcuaagc

SEQ ID NO: 1185229 - RNA, 19 nt, Artificial Sequence
  Description of Artificial Sequence: Synthetic oligonucleotide
agaacucagcugugaacga

SEQ ID NO: 1185230 - RNA, 19 nt, Artificial Sequence
  Description of Artificial Sequence: Synthetic oligonucleotide
uccgacacauuccuauguu

SEQ ID NO: 1185231 - RNA, 19 nt, Artificial Sequence
  Description of Artificial Sequence: Synthetic oligonucleotide
uuacuacuguaaucccaga

SEQ ID NO: 1185232 - RNA, 19 nt, Artificial Sequence
  Description of Artificial Sequence: Synthetic oligonucleotide
ugacauuacuuagcaauuu

SEQ ID NO: 1185233 - RNA, 19 nt, Artificial Sequence
  Description of Artificial Sequence: Synthetic oligonucleotide
guucgucagaacgacgaug

SEQ ID NO: 1185234 - RNA, 19 nt, Artificial Sequence
  Description of Artificial Sequence: Synthetic oligonucleotide
uguugaccaauguccuuuc

SEQ ID NO: 1185235 - RNA, 19 nt, Artificial Sequence
  Description of Artificial Sequence: Synthetic oligonucleotide
aguugcucaauuacgguua

SEQ ID NO: 1185236 - RNA, 19 nt, Artificial Sequence
  Description of Artificial Sequence: Synthetic oligonucleotide
guguacugcauaauacuca

SEQ ID NO: 1185237 - RNA, 19 nt, Artificial Sequence
  Description of Artificial Sequence: Synthetic oligonucleotide
ugcucuacuugcaguuggu

SEQ ID NO: 1185238 - RNA, 19 nt, Artificial Sequence
  Description of Artificial Sequence: Synthetic oligonucleotide
aaaccgguacagaaaggaa

SEQ ID NO: 1185239 - RNA, 19 nt, Artificial Sequence
  Description of Artificial Sequence: Synthetic oligonucleotide
gcuuugaauuaguagcuga

SEQ ID NO: 1185240 - RNA, 19 nt, Artificial Sequence
  Description of Artificial Sequence: Synthetic oligonucleotide
aucaacccaguaaacaaau

SEQ ID NO: 1185241 - RNA, 19 nt, Artificial Sequence
  Description of Artificial Sequence: Synthetic oligonucleotide
auguugaccaauguccuuu

SEQ ID NO: 1185242 - RNA, 19 nt, Artificial Sequence
  Description of Artificial Sequence: Synthetic oligonucleotide
agacacauauuuauuucaa

SEQ ID NO: 1185243 - RNA, 19 nt, Artificial Sequence
  Description of Artificial Sequence: Synthetic oligonucleotide
acucccuuaggcauguggu

SEQ ID NO: 1185244 - RNA, 19 nt, Artificial Sequence
  Description of Artificial Sequence: Synthetic oligonucleotide
uccacaguacaaagccguc

SEQ ID NO: 1185245 - RNA, 19 nt, Artificial Sequence
  Description of Artificial Sequence: Synthetic oligonucleotide
cgguuagcaaaauaaaguc

SEQ ID NO: 1185246 - RNA, 19 nt, Artificial Sequence
  Description of Artificial Sequence: Synthetic oligonucleotide
caaagugcagaccgcuauc

SEQ ID NO: 1185247 - RNA, 19 nt, Artificial Sequence
  Description of Artificial Sequence: Synthetic oligonucleotide
augugagaaugauguauua

SEQ ID NO: 1185248 - RNA, 19 nt, Artificial Sequence
  Description of Artificial Sequence: Synthetic oligonucleotide
cacauuaauauagcaguaa

SEQ ID NO: 1185249 - RNA, 19 nt, Artificial Sequence
  Description of Artificial Sequence: Synthetic oligonucleotide
caggggacuacuuuguaua

SEQ ID NO: 1185250 - RNA, 19 nt, Artificial Sequence
  Description of Artificial Sequence: Synthetic oligonucleotide
ugcagaccgcuaucuggag

SEQ ID NO: 1185251 - RNA, 19 nt, Artificial Sequence
  Description of Artificial Sequence: Synthetic oligonucleotide
gacgaugaccugaaggucu

SEQ ID NO: 1185252 - RNA, 19 nt, Artificial Sequence
  Description of Artificial Sequence: Synthetic oligonucleotide
gguguacugcauaauacuc

SEQ ID NO: 1185253 - RNA, 19 nt, Artificial Sequence
  Description of Artificial Sequence: Synthetic oligonucleotide
agccgucaugauaauaucu

SEQ ID NO: 1185254 - RNA, 19 nt, Artificial Sequence
  Description of Artificial Sequence: Synthetic oligonucleotide
uccuagagugugcuuccau

SEQ ID NO: 1185255 - RNA, 19 nt, Artificial Sequence
  Description of Artificial Sequence: Synthetic oligonucleotide
acccagauugggccaaagu

SEQ ID NO: 1185256 - RNA, 19 nt, Artificial Sequence
  Description of Artificial Sequence: Synthetic oligonucleotide
gugagugguguguccacac

SEQ ID NO: 1185257 - RNA, 19 nt, Artificial Sequence
  Description of Artificial Sequence: Synthetic oligonucleotide
gccgucaugauaauaucug

SEQ ID NO: 1185258 - RNA, 19 nt, Artificial Sequence
  Description of Artificial Sequence: Synthetic oligonucleotide
cauguagccaguaguucaa

SEQ ID NO: 1185259 - RNA, 19 nt, Artificial Sequence
  Description of Artificial Sequence: Synthetic oligonucleotide
cuugaaagagggaaacaau

SEQ ID NO: 1185260 - RNA, 19 nt, Artificial Sequence
  Description of Artificial Sequence: Synthetic oligonucleotide
caauguugaccaauguccu

SEQ ID NO: 1185261 - RNA, 19 nt, Artificial Sequence
  Description of Artificial Sequence: Synthetic oligonucleotide
gaauugggagggccaucug

SEQ ID NO: 1185262 - RNA, 19 nt, Artificial Sequence
  Description of Artificial Sequence: Synthetic oligonucleotide
ggcggugagaaacguuggg

SEQ ID NO: 1185263 - RNA, 19 nt, Artificial Sequence
  Description of Artificial Sequence: Synthetic oligonucleotide
ccuagagugugcuuccaug

SEQ ID NO: 1185264 - RNA, 19 nt, Artificial Sequence
  Description of Artificial Sequence: Synthetic oligonucleotide
augaauugggagggccauc

SEQ ID NO: 1185265 - RNA, 19 nt, Artificial Sequence
  Description of Artificial Sequence: Synthetic oligonucleotide
gaaggucuaaagagaagcu

SEQ ID NO: 1185266 - RNA, 19 nt, Artificial Sequence
  Description of Artificial Sequence: Synthetic oligonucleotide
ccaacacacacugaucccc

SEQ ID NO: 1185267 - RNA, 19 nt, Artificial Sequence
  Description of Artificial Sequence: Synthetic oligonucleotide
cacacuccccuuauagaca

SEQ ID NO: 1185268 - RNA, 19 nt, Artificial Sequence
  Description of Artificial Sequence: Synthetic oligonucleotide
agaacgacgaugaccugaa

SEQ ID NO: 1185269 - RNA, 19 nt, Artificial Sequence
  Description of Artificial Sequence: Synthetic oligonucleotide
aacccagauugggccaaag

SEQ ID NO: 1185270 - RNA, 19 nt, Artificial Sequence
  Description of Artificial Sequence: Synthetic oligonucleotide
ccuauguucgucagaacga

SEQ ID NO: 1185271 - RNA, 19 nt, Artificial Sequence
  Description of Artificial Sequence: Synthetic oligonucleotide
caugugagaaugauguauu

SEQ ID NO: 1185272 - RNA, 19 nt, Artificial Sequence
  Description of Artificial Sequence: Synthetic oligonucleotide
cucagcugugaacgaacuc

SEQ ID NO: 1185273 - RNA, 19 nt, Artificial Sequence
  Description of Artificial Sequence: Synthetic oligonucleotide
cagaacgacgaugaccuga

SEQ ID NO: 1185274 - RNA, 19 nt, Artificial Sequence
  Description of Artificial Sequence: Synthetic oligonucleotide
cuaccccagugcuuuaaca

SEQ ID NO: 1185275 - RNA, 19 nt, Artificial Sequence
  Description of Artificial Sequence: Synthetic oligonucleotide
cacaauucaaaggucgugu

SEQ ID NO: 1185276 - RNA, 19 nt, Artificial Sequence
  Description of Artificial Sequence: Synthetic oligonucleotide
cagugcuuuaacacauuaa

SEQ ID NO: 1185277 - RNA, 19 nt, Artificial Sequence
  Description of Artificial Sequence: Synthetic oligonucleotide
agcggcacuggauccucug

SEQ ID NO: 1185278 - RNA, 19 nt, Artificial Sequence
  Description of Artificial Sequence: Synthetic oligonucleotide
agagcggcacuggauccuc

SEQ ID NO: 1185279 - RNA, 19 nt, Artificial Sequence
  Description of Artificial Sequence: Synthetic oligonucleotide
cauuguccgacacauuccu

SEQ ID NO: 1185280 - RNA, 19 nt, Artificial Sequence
  Description of Artificial Sequence: Synthetic oligonucleotide
ucgucagaacgacgaugac

SEQ ID NO: 1185281 - RNA, 19 nt, Artificial Sequence
  Description of Artificial Sequence: Synthetic oligonucleotide
cacgaacuucuauauuuaa

SEQ ID NO: 1185282 - RNA, 19 nt, Artificial Sequence
  Description of Artificial Sequence: Synthetic oligonucleotide
ggcucuucacuggagggag

SEQ ID NO: 1185283 - RNA, 19 nt, Artificial Sequence
  Description of Artificial Sequence: Synthetic oligonucleotide
gaacgacgaugaccugaag

SEQ ID NO: 1185284 - RNA, 19 nt, Artificial Sequence
  Description of Artificial Sequence: Synthetic oligonucleotide
gcaaguuuaugucguccac

SEQ ID NO: 1185285 - RNA, 19 nt, Artificial Sequence
  Description of Artificial Sequence: Synthetic oligonucleotide
agacaggggacuacuuugu

SEQ ID NO: 1185286 - RNA, 19 nt, Artificial Sequence
  Description of Artificial Sequence: Synthetic oligonucleotide
cucugcaaguuuaugucgu

SEQ ID NO: 1185287 - RNA, 19 nt, Artificial Sequence
  Description of Artificial Sequence: Synthetic oligonucleotide
  modified_base (8)..(8): a, c, u, g, unknown or other
ugcaaacnguaaacaccuu

SEQ ID NO: 1185288 - RNA, 19 nt, Artificial Sequence
  Description of Artificial Sequence: Synthetic oligonucleotide
gaacucagcugugaacgaa

SEQ ID NO: 1185289 - RNA, 19 nt, Artificial Sequence
  Description of Artificial Sequence: Synthetic oligonucleotide
agcaugugagaaugaugua

SEQ ID NO: 1185290 - RNA, 19 nt, Artificial Sequence
  Description of Artificial Sequence: Synthetic oligonucleotide
  modified_base (19)..(19): a, c, u, g, unknown or other
caucaucguacugcaaacn

SEQ ID NO: 1185291 - RNA, 19 nt, Artificial Sequence
  Description of Artificial Sequence: Synthetic oligonucleotide
caguuucaauagcuguuca

SEQ ID NO: 1185292 - RNA, 19 nt, Artificial Sequence
  Description of Artificial Sequence: Synthetic oligonucleotide
ccagaacucagcugugaac

SEQ ID NO: 1185293 - RNA, 19 nt, Artificial Sequence
  Description of Artificial Sequence: Synthetic oligonucleotide
gggacuacuuuguauacau

SEQ ID NO: 1185294 - RNA, 19 nt, Artificial Sequence
  Description of Artificial Sequence: Synthetic oligonucleotide
acacgaacuucuauauuua

SEQ ID NO: 1185295 - RNA, 19 nt, Artificial Sequence
  Description of Artificial Sequence: Synthetic oligonucleotide
acgaacucccuuaggcaug

SEQ ID NO: 1185296 - RNA, 19 nt, Artificial Sequence
  Description of Artificial Sequence: Synthetic oligonucleotide
gagcgucaucaucguacug

SEQ ID NO: 1185297 - RNA, 19 nt, Artificial Sequence
  Description of Artificial Sequence: Synthetic oligonucleotide
  modified_base (7)..(7): a, c, u, g, unknown or other
gcaaacnguaaacaccuuu

SEQ ID NO: 1185298 - RNA, 19 nt, Artificial Sequence
  Description of Artificial Sequence: Synthetic oligonucleotide
augagcggcugcucuacuu

SEQ ID NO: 1185299 - RNA, 19 nt, Artificial Sequence
  Description of Artificial Sequence: Synthetic oligonucleotide
ggguacaaugaucuauaaa

SEQ ID NO: 1185300 - RNA, 19 nt, Artificial Sequence
  Description of Artificial Sequence: Synthetic oligonucleotide
acaaagccgucaugauaau

SEQ ID NO: 1185301 - RNA, 19 nt, Artificial Sequence
  Description of Artificial Sequence: Synthetic oligonucleotide
uugcucaauuacgguuagc

SEQ ID NO: 1185302 - RNA, 19 nt, Artificial Sequence
  Description of Artificial Sequence: Synthetic oligonucleotide
  modified_base (2)..(2): a, c, u, g, unknown or other
cnguaaacaccuuuacauu

SEQ ID NO: 1185303 - RNA, 19 nt, Artificial Sequence
  Description of Artificial Sequence: Synthetic oligonucleotide
gcacaauucaaaggucgug

SEQ ID NO: 1185304 - RNA, 19 nt, Artificial Sequence
  Description of Artificial Sequence: Synthetic oligonucleotide
cgugugcauauuugaaggc

SEQ ID NO: 1185305 - RNA, 19 nt, Artificial Sequence
  Description of Artificial Sequence: Synthetic oligonucleotide
agauugggccaaagugcag

SEQ ID NO: 1185306 - RNA, 19 nt, Artificial Sequence
  Description of Artificial Sequence: Synthetic oligonucleotide
cacaguacaaagccgucau

SEQ ID NO: 1185307 - RNA, 19 nt, Artificial Sequence
  Description of Artificial Sequence: Synthetic oligonucleotide
uguccacacuccccuuaua

SEQ ID NO: 1185308 - RNA, 19 nt, Artificial Sequence
  Description of Artificial Sequence: Synthetic oligonucleotide
cguuggggcuugaagagug

SEQ ID NO: 1185309 - RNA, 19 nt, Artificial Sequence
  Description of Artificial Sequence: Synthetic oligonucleotide
ggagauauagguguagguu

SEQ ID NO: 1185310 - RNA, 19 nt, Artificial Sequence
  Description of Artificial Sequence: Synthetic oligonucleotide
gcucaauuacgguuagcaa

SEQ ID NO: 1185311 - RNA, 19 nt, Artificial Sequence
  Description of Artificial Sequence: Synthetic oligonucleotide
ccgcuaucuggagauauag

SEQ ID NO: 1185312 - RNA, 19 nt, Artificial Sequence
  Description of Artificial Sequence: Synthetic oligonucleotide
cacuccccuuauagacagg

SEQ ID NO: 1185313 - RNA, 19 nt, Artificial Sequence
  Description of Artificial Sequence: Synthetic oligonucleotide
caguugcucaauuacgguu

SEQ ID NO: 1185314 - RNA, 19 nt, Artificial Sequence
  Description of Artificial Sequence: Synthetic oligonucleotide
guccgacacauuccuaugu

SEQ ID NO: 1185315 - RNA, 19 nt, Artificial Sequence
  Description of Artificial Sequence: Synthetic oligonucleotide
agaaacguuggggcuugaa

SEQ ID NO: 1185316 - RNA, 19 nt, Artificial Sequence
  Description of Artificial Sequence: Synthetic oligonucleotide
gcgucaucaucguacugca

SEQ ID NO: 1185317 - RNA, 19 nt, Artificial Sequence
  Description of Artificial Sequence: Synthetic oligonucleotide
ccgacacauuccuauguuc

SEQ ID NO: 1185318 - RNA, 19 nt, Artificial Sequence
  Description of Artificial Sequence: Synthetic oligonucleotide
ccgccaauuugauucuaug

SEQ ID NO: 1185319 - RNA, 19 nt, Artificial Sequence
  Description of Artificial Sequence: Synthetic oligonucleotide
ccuaaucuugaaagaggga

SEQ ID NO: 1185320 - RNA, 19 nt, Artificial Sequence
  Description of Artificial Sequence: Synthetic oligonucleotide
  modified_base (15)..(15): a, c, u, g, unknown or other
aucguacugcaaacnguaa

SEQ ID NO: 1185321 - RNA, 19 nt, Artificial Sequence
  Description of Artificial Sequence: Synthetic oligonucleotide
cuuugugucuacccagcau

SEQ ID NO: 1185322 - RNA, 19 nt, Artificial Sequence
  Description of Artificial Sequence: Synthetic oligonucleotide
cucccuuaggcauguggua

SEQ ID NO: 1185323 - RNA, 19 nt, Artificial Sequence
  Description of Artificial Sequence: Synthetic oligonucleotide
acccaaguccccugcuaua

SEQ ID NO: 1185324 - RNA, 19 nt, Artificial Sequence
  Description of Artificial Sequence: Synthetic oligonucleotide
guacugcauaauacucauc

SEQ ID NO: 1185325 - RNA, 19 nt, Artificial Sequence
  Description of Artificial Sequence: Synthetic oligonucleotide
accgccaauuugauucuau

SEQ ID NO: 1185326 - RNA, 19 nt, Artificial Sequence
  Description of Artificial Sequence: Synthetic oligonucleotide
caaguccccugcuauaauu

SEQ ID NO: 1185327 - RNA, 19 nt, Artificial Sequence
  Description of Artificial Sequence: Synthetic oligonucleotide
cucccuauccccugggcau

SEQ ID NO: 1185328 - RNA, 19 nt, Artificial Sequence
  Description of Artificial Sequence: Synthetic oligonucleotide
ggucgugugcauauuugaa

SEQ ID NO: 1185329 - RNA, 19 nt, Artificial Sequence
  Description of Artificial Sequence: Synthetic oligonucleotide
gggcggugagaaacguugg

SEQ ID NO: 1185330 - RNA, 19 nt, Artificial Sequence
  Description of Artificial Sequence: Synthetic oligonucleotide
ggguacugacauuccuuga

SEQ ID NO: 1185331 - RNA, 19 nt, Artificial Sequence
  Description of Artificial Sequence: Synthetic oligonucleotide
cuuaggcaugugguagcca

SEQ ID NO: 1185332 - RNA, 19 nt, Artificial Sequence
  Description of Artificial Sequence: Synthetic oligonucleotide
gaccgcuaucuggagauau

SEQ ID NO: 1185333 - RNA, 19 nt, Artificial Sequence
  Description of Artificial Sequence: Synthetic oligonucleotide
agaguacaacugggaauua

SEQ ID NO: 1185334 - RNA, 19 nt, Artificial Sequence
  Description of Artificial Sequence: Synthetic oligonucleotide
acgaugaccugaaggucua

SEQ ID NO: 1185335 - RNA, 19 nt, Artificial Sequence
  Description of Artificial Sequence: Synthetic oligonucleotide
caaagccgucaugauaaua

SEQ ID NO: 1185336 - RNA, 19 nt, Artificial Sequence
  Description of Artificial Sequence: Synthetic oligonucleotide
ggggacuacuuuguauaca

SEQ ID NO: 1185337 - RNA, 19 nt, Artificial Sequence
  Description of Artificial Sequence: Synthetic oligonucleotide
auuguccgacacauuccua

SEQ ID NO: 1185338 - RNA, 19 nt, Artificial Sequence
  Description of Artificial Sequence: Synthetic oligonucleotide
accgcuaucuggagauaua

SEQ ID NO: 1185339 - RNA, 19 nt, Artificial Sequence
  Description of Artificial Sequence: Synthetic oligonucleotide
ucccuauccccugggcauu

SEQ ID NO: 1185340 - RNA, 19 nt, Artificial Sequence
  Description of Artificial Sequence: Synthetic oligonucleotide
gcaugagcggcugcucuac

SEQ ID NO: 1185341 - RNA, 19 nt, Artificial Sequence
  Description of Artificial Sequence: Synthetic oligonucleotide
ccagaguacaacugggaau

SEQ ID NO: 1185342 - RNA, 19 nt, Artificial Sequence
  Description of Artificial Sequence: Synthetic oligonucleotide
ggauaaucuuuggguacaa

SEQ ID NO: 1185343 - RNA, 19 nt, Artificial Sequence
  Description of Artificial Sequence: Synthetic oligonucleotide
ggcacaauucaaaggucgu

SEQ ID NO: 1185344 - RNA, 19 nt, Artificial Sequence
  Description of Artificial Sequence: Synthetic oligonucleotide
gugcauauuugaaggccau

SEQ ID NO: 1185345 - RNA, 19 nt, Artificial Sequence
  Description of Artificial Sequence: Synthetic oligonucleotide
ccacaguacaaagccguca

SEQ ID NO: 1185346 - RNA, 19 nt, Artificial Sequence
  Description of Artificial Sequence: Synthetic oligonucleotide
ggcaugagcggcugcucua

SEQ ID NO: 1185347 - RNA, 19 nt, Artificial Sequence
  Description of Artificial Sequence: Synthetic oligonucleotide
ccgguacagaaaggaagug

SEQ ID NO: 1185348 - RNA, 19 nt, Artificial Sequence
  Description of Artificial Sequence: Synthetic oligonucleotide
gaacucccuuaggcaugug

SEQ ID NO: 1185349 - RNA, 19 nt, Artificial Sequence
  Description of Artificial Sequence: Synthetic oligonucleotide
ccgucaugauaauaucugu

SEQ ID NO: 1185350 - RNA, 19 nt, Artificial Sequence
  Description of Artificial Sequence: Synthetic oligonucleotide
ggaauuccuuggguaccca

SEQ ID NO: 1185351 - RNA, 19 nt, Artificial Sequence
  Description of Artificial Sequence: Synthetic oligonucleotide
ggaguacugcaacuacuuu

SEQ ID NO: 1185352 - RNA, 19 nt, Artificial Sequence
  Description of Artificial Sequence: Synthetic oligonucleotide
ggagagcgucaucaucgua

SEQ ID NO: 1185353 - RNA, 19 nt, Artificial Sequence
  Description of Artificial Sequence: Synthetic oligonucleotide
ggccaaagugcagaccgcu

SEQ ID NO: 1185354 - RNA, 19 nt, Artificial Sequence
  Description of Artificial Sequence: Synthetic oligonucleotide
gggagagcgucaucaucgu

SEQ ID NO: 1185355 - RNA, 19 nt, Artificial Sequence
  Description of Artificial Sequence: Synthetic oligonucleotide
gggcaugagcggcugcucu

SEQ ID NO: 1185356 - RNA, 19 nt, Artificial Sequence
  Description of Artificial Sequence: Synthetic oligonucleotide
ggacacgaacuucuauauu

SEQ ID NO: 1185357 - RNA, 19 nt, Artificial Sequence
  Description of Artificial Sequence: Synthetic oligonucleotide
agaccgcuaucuggagaua

SEQ ID NO: 1185358 - RNA, 19 nt, Artificial Sequence
  Description of Artificial Sequence: Synthetic oligonucleotide
caauuacgguuagcaaaau

SEQ ID NO: 1185359 - RNA, 19 nt, Artificial Sequence
  Description of Artificial Sequence: Synthetic oligonucleotide
caugagcggcugcucuacu

SEQ ID NO: 1185360 - RNA, 19 nt, Artificial Sequence
  Description of Artificial Sequence: Synthetic oligonucleotide
ccuauccccugggcauucc

SEQ ID NO: 1185361 - RNA, 19 nt, Artificial Sequence
  Description of Artificial Sequence: Synthetic oligonucleotide
gccaaagugcagaccgcua

SEQ ID NO: 1185362 - RNA, 19 nt, Artificial Sequence
  Description of Artificial Sequence: Synthetic oligonucleotide
caaaggucgugugcauauu

SEQ ID NO: 1185363 - RNA, 19 nt, Artificial Sequence
  Description of Artificial Sequence: Synthetic oligonucleotide
gagcggcacuggauccucu

SEQ ID NO: 1185364 - RNA, 19 nt, Artificial Sequence
  Description of Artificial Sequence: Synthetic oligonucleotide
cccuauccccugggcauuc

SEQ ID NO: 1185365 - RNA, 19 nt, Artificial Sequence
  Description of Artificial Sequence: Synthetic oligonucleotide
cgaacucccuuaggcaugu

SEQ ID NO: 1185366 - RNA, 19 nt, Artificial Sequence
  Description of Artificial Sequence: Synthetic oligonucleotide
ccacaccgccaauuugauu

SEQ ID NO: 1185367 - RNA, 19 nt, Artificial Sequence
  Description of Artificial Sequence: Synthetic oligonucleotide
aaagauauuagucagugcu

SEQ ID NO: 1185368 - RNA, 19 nt, Artificial Sequence
  Description of Artificial Sequence: Synthetic oligonucleotide
aauagcugggaacacagcc

SEQ ID NO: 1185369 - RNA, 19 nt, Artificial Sequence
  Description of Artificial Sequence: Synthetic oligonucleotide
agcaugauaguuuuaaagc

SEQ ID NO: 1185370 - RNA, 19 nt, Artificial Sequence
  Description of Artificial Sequence: Synthetic oligonucleotide
agcaauaccaauaagcacc

SEQ ID NO: 1185371 - RNA, 19 nt, Artificial Sequence
  Description of Artificial Sequence: Synthetic oligonucleotide
uucuuuaauccuaaaaugc

SEQ ID NO: 1185372 - RNA, 19 nt, Artificial Sequence
  Description of Artificial Sequence: Synthetic oligonucleotide
uuagcaauaccaauaagca

SEQ ID NO: 1185373 - RNA, 19 nt, Artificial Sequence
  Description of Artificial Sequence: Synthetic oligonucleotide
acuaaaauuuacuggugcc

SEQ ID NO: 1185374 - RNA, 19 nt, Artificial Sequence
  Description of Artificial Sequence: Synthetic oligonucleotide
aaagaacaaaccaagaucu

SEQ ID NO: 1185375 - RNA, 19 nt, Artificial Sequence
  Description of Artificial Sequence: Synthetic oligonucleotide
uaggguauuagcaauacca

SEQ ID NO: 1185376 - RNA, 19 nt, Artificial Sequence
  Description of Artificial Sequence: Synthetic oligonucleotide
auacacuaaaauuuacugg

SEQ ID NO: 1185377 - RNA, 19 nt, Artificial Sequence
  Description of Artificial Sequence: Synthetic oligonucleotide
uauguagcaaagaauggcc

SEQ ID NO: 1185378 - RNA, 19 nt, Artificial Sequence
  Description of Artificial Sequence: Synthetic oligonucleotide
aauuucaauagcucgccug

SEQ ID NO: 1185379 - RNA, 19 nt, Artificial Sequence
  Description of Artificial Sequence: Synthetic oligonucleotide
ucugccaaaugccagcugg

SEQ ID NO: 1185380 - RNA, 19 nt, Artificial Sequence
  Description of Artificial Sequence: Synthetic oligonucleotide
ucaaacagcguguauaaca

SEQ ID NO: 1185381 - RNA, 19 nt, Artificial Sequence
  Description of Artificial Sequence: Synthetic oligonucleotide
cuugcugauagcaagugcc

SEQ ID NO: 1185382 - RNA, 19 nt, Artificial Sequence
  Description of Artificial Sequence: Synthetic oligonucleotide
aaagaauggccuugacccc

SEQ ID NO: 1185383 - RNA, 19 nt, Artificial Sequence
  Description of Artificial Sequence: Synthetic oligonucleotide
uuagucagugcuaacauuc

SEQ ID NO: 1185384 - RNA, 19 nt, Artificial Sequence
  Description of Artificial Sequence: Synthetic oligonucleotide
gacauuucugcucagaauc

SEQ ID NO: 1185385 - RNA, 19 nt, Artificial Sequence
  Description of Artificial Sequence: Synthetic oligonucleotide
aaucgggaauugcucagcc

SEQ ID NO: 1185386 - RNA, 19 nt, Artificial Sequence
  Description of Artificial Sequence: Synthetic oligonucleotide
ucguccaacaccaacacga

SEQ ID NO: 1185387 - RNA, 19 nt, Artificial Sequence
  Description of Artificial Sequence: Synthetic oligonucleotide
uaccaauaagcaccaaucg

SEQ ID NO: 1185388 - RNA, 19 nt, Artificial Sequence
  Description of Artificial Sequence: Synthetic oligonucleotide
cuucauauaacuuccccag

SEQ ID NO: 1185389 - RNA, 19 nt, Artificial Sequence
  Description of Artificial Sequence: Synthetic oligonucleotide
gggacaaacacucagacug

SEQ ID NO: 1185390 - RNA, 19 nt, Artificial Sequence
  Description of Artificial Sequence: Synthetic oligonucleotide
augcaauucagcaugauag

SEQ ID NO: 1185391 - RNA, 19 nt, Artificial Sequence
  Description of Artificial Sequence: Synthetic oligonucleotide
caaacacucagacuggucc

SEQ ID NO: 1185392 - RNA, 19 nt, Artificial Sequence
  Description of Artificial Sequence: Synthetic oligonucleotide
ucuuggcucagaauuagcc

SEQ ID NO: 1185393 - RNA, 19 nt, Artificial Sequence
  Description of Artificial Sequence: Synthetic oligonucleotide
agacaugcaauucagcaug

SEQ ID NO: 1185394 - RNA, 19 nt, Artificial Sequence
  Description of Artificial Sequence: Synthetic oligonucleotide
guagcuaucugguuucugg

SEQ ID NO: 1185395 - RNA, 19 nt, Artificial Sequence
  Description of Artificial Sequence: Synthetic oligonucleotide
acaaaccaagaucuucugc

SEQ ID NO: 1185396 - RNA, 19 nt, Artificial Sequence
  Description of Artificial Sequence: Synthetic oligonucleotide
auaacuuccccagagugac

SEQ ID NO: 1185397 - RNA, 19 nt, Artificial Sequence
  Description of Artificial Sequence: Synthetic oligonucleotide
cauucgugaauucauacac

SEQ ID NO: 1185398 - RNA, 19 nt, Artificial Sequence
  Description of Artificial Sequence: Synthetic oligonucleotide
uaggcuucauauaacuucc

SEQ ID NO: 1185399 - RNA, 19 nt, Artificial Sequence
  Description of Artificial Sequence: Synthetic oligonucleotide
aaacagcggauacuuuucg

SEQ ID NO: 1185400 - RNA, 19 nt, Artificial Sequence
  Description of Artificial Sequence: Synthetic oligonucleotide
gaugucucccgaaacagcg

SEQ ID NO: 1185401 - RNA, 19 nt, Artificial Sequence
  Description of Artificial Sequence: Synthetic oligonucleotide
cuugacaccugauugaguc

SEQ ID NO: 1185402 - RNA, 19 nt, Artificial Sequence
  Description of Artificial Sequence: Synthetic oligonucleotide
aaaauuuacuggugccgag

SEQ ID NO: 1185403 - RNA, 19 nt, Artificial Sequence
  Description of Artificial Sequence: Synthetic oligonucleotide
uucaagucgagguagaauu

SEQ ID NO: 1185404 - RNA, 19 nt, Artificial Sequence
  Description of Artificial Sequence: Synthetic oligonucleotide
gauguuaccaaugaaagcu

SEQ ID NO: 1185405 - RNA, 19 nt, Artificial Sequence
  Description of Artificial Sequence: Synthetic oligonucleotide
uggccauucaaacagcgug

SEQ ID NO: 1185406 - RNA, 19 nt, Artificial Sequence
  Description of Artificial Sequence: Synthetic oligonucleotide
ugacccaacuaaaauggag

SEQ ID NO: 1185407 - RNA, 19 nt, Artificial Sequence
  Description of Artificial Sequence: Synthetic oligonucleotide
gauacuugcagguagggua

SEQ ID NO: 1185408 - RNA, 19 nt, Artificial Sequence
  Description of Artificial Sequence: Synthetic oligonucleotide
ugagcaauagcugggaaca

SEQ ID NO: 1185409 - RNA, 19 nt, Artificial Sequence
  Description of Artificial Sequence: Synthetic oligonucleotide
acagcggauacuuuucggg

SEQ ID NO: 1185410 - RNA, 19 nt, Artificial Sequence
  Description of Artificial Sequence: Synthetic oligonucleotide
cugaauugcagcacugucc

SEQ ID NO: 1185411 - RNA, 19 nt, Artificial Sequence
  Description of Artificial Sequence: Synthetic oligonucleotide
cagcaugauaguuuuaaag

SEQ ID NO: 1185412 - RNA, 19 nt, Artificial Sequence
  Description of Artificial Sequence: Synthetic oligonucleotide
aacagcggauacuuuucgg

SEQ ID NO: 1185413 - RNA, 19 nt, Artificial Sequence
  Description of Artificial Sequence: Synthetic oligonucleotide
cacuaaaauuuacuggugc

SEQ ID NO: 1185414 - RNA, 19 nt, Artificial Sequence
  Description of Artificial Sequence: Synthetic oligonucleotide
guguauaacacauccugcc

SEQ ID NO: 1185415 - RNA, 19 nt, Artificial Sequence
  Description of Artificial Sequence: Synthetic oligonucleotide
ccaauaagcaccaaucggg

SEQ ID NO: 1185416 - RNA, 19 nt, Artificial Sequence
  Description of Artificial Sequence: Synthetic oligonucleotide
cuauguagcaaagaauggc

SEQ ID NO: 1185417 - RNA, 19 nt, Artificial Sequence
  Description of Artificial Sequence: Synthetic oligonucleotide
cacagaacugaauugcagc

SEQ ID NO: 1185418 - RNA, 19 nt, Artificial Sequence
  Description of Artificial Sequence: Synthetic oligonucleotide
acccaacuaaaauggagac

SEQ ID NO: 1185419 - RNA, 19 nt, Artificial Sequence
  Description of Artificial Sequence: Synthetic oligonucleotide
caaacagcguguauaacac

SEQ ID NO: 1185420 - RNA, 19 nt, Artificial Sequence
  Description of Artificial Sequence: Synthetic oligonucleotide
aagacaugcaauucagcau

SEQ ID NO: 1185421 - RNA, 19 nt, Artificial Sequence
  Description of Artificial Sequence: Synthetic oligonucleotide
aguccugaaagggacaaac

SEQ ID NO: 1185422 - RNA, 19 nt, Artificial Sequence
  Description of Artificial Sequence: Synthetic oligonucleotide
aaggccaacacgcuuggga

SEQ ID NO: 1185423 - RNA, 19 nt, Artificial Sequence
  Description of Artificial Sequence: Synthetic oligonucleotide
uauuagucagugcuaacau

SEQ ID NO: 1185424 - RNA, 19 nt, Artificial Sequence
  Description of Artificial Sequence: Synthetic oligonucleotide
acuuuucgggcacagaacu

SEQ ID NO: 1185425 - RNA, 19 nt, Artificial Sequence
  Description of Artificial Sequence: Synthetic oligonucleotide
uaggguaagagaagcauuc

SEQ ID NO: 1185426 - RNA, 19 nt, Artificial Sequence
  Description of Artificial Sequence: Synthetic oligonucleotide
uccgaaaugacuugggaua

SEQ ID NO: 1185427 - RNA, 19 nt, Artificial Sequence
  Description of Artificial Sequence: Synthetic oligonucleotide
aacaaaccaagaucuucug

SEQ ID NO: 1185428 - RNA, 19 nt, Artificial Sequence
  Description of Artificial Sequence: Synthetic oligonucleotide
uuaccaaugaaagcuuugc

SEQ ID NO: 1185429 - RNA, 19 nt, Artificial Sequence
  Description of Artificial Sequence: Synthetic oligonucleotide
ugagaucuaggguauuagc

SEQ ID NO: 1185430 - RNA, 19 nt, Artificial Sequence
  Description of Artificial Sequence: Synthetic oligonucleotide
ucgacagacgcuacuguag

SEQ ID NO: 1185431 - RNA, 19 nt, Artificial Sequence
  Description of Artificial Sequence: Synthetic oligonucleotide
aguugauccaucucgucca

SEQ ID NO: 1185432 - RNA, 19 nt, Artificial Sequence
  Description of Artificial Sequence: Synthetic oligonucleotide
aggauguuaccaaugaaag

SEQ ID NO: 1185433 - RNA, 19 nt, Artificial Sequence
  Description of Artificial Sequence: Synthetic oligonucleotide
aauuagccuguucccauca

SEQ ID NO: 1185434 - RNA, 19 nt, Artificial Sequence
  Description of Artificial Sequence: Synthetic oligonucleotide
auuuucagccgccugguca

SEQ ID NO: 1185435 - RNA, 19 nt, Artificial Sequence
  Description of Artificial Sequence: Synthetic oligonucleotide
aaacucgcuauguagcaaa

SEQ ID NO: 1185436 - RNA, 19 nt, Artificial Sequence
  Description of Artificial Sequence: Synthetic oligonucleotide
aaaaggucauagcuuucca

SEQ ID NO: 1185437 - RNA, 19 nt, Artificial Sequence
  Description of Artificial Sequence: Synthetic oligonucleotide
auauuagucagugcuaaca

SEQ ID NO: 1185438 - RNA, 19 nt, Artificial Sequence
  Description of Artificial Sequence: Synthetic oligonucleotide
aacuuccgaaaugacuugg

SEQ ID NO: 1185439 - RNA, 19 nt, Artificial Sequence
  Description of Artificial Sequence: Synthetic oligonucleotide
agugcuaacauucgugaau

SEQ ID NO: 1185440 - RNA, 19 nt, Artificial Sequence
  Description of Artificial Sequence: Synthetic oligonucleotide
ugaucugccaaaugccagc

SEQ ID NO: 1185441 - RNA, 19 nt, Artificial Sequence
  Description of Artificial Sequence: Synthetic oligonucleotide
agaucuaggguauuagcaa

SEQ ID NO: 1185442 - RNA, 19 nt, Artificial Sequence
  Description of Artificial Sequence: Synthetic oligonucleotide
cuggcuuuugacauccgcc

SEQ ID NO: 1185443 - RNA, 19 nt, Artificial Sequence
  Description of Artificial Sequence: Synthetic oligonucleotide
uucgugaauucauacacua

SEQ ID NO: 1185444 - RNA, 19 nt, Artificial Sequence
  Description of Artificial Sequence: Synthetic oligonucleotide
cagcguguauaacacaucc

SEQ ID NO: 1185445 - RNA, 19 nt, Artificial Sequence
  Description of Artificial Sequence: Synthetic oligonucleotide
uuuucgacagacgcuacug

SEQ ID NO: 1185446 - RNA, 19 nt, Artificial Sequence
  Description of Artificial Sequence: Synthetic oligonucleotide
caggcauacgccaucacac

SEQ ID NO: 1185447 - RNA, 19 nt, Artificial Sequence
  Description of Artificial Sequence: Synthetic oligonucleotide
caguugauccaucucgucc

SEQ ID NO: 1185448 - RNA, 19 nt, Artificial Sequence
  Description of Artificial Sequence: Synthetic oligonucleotide
gaaccggugcuucggaggg

SEQ ID NO: 1185449 - RNA, 19 nt, Artificial Sequence
  Description of Artificial Sequence: Synthetic oligonucleotide
ucuuugauuuucagccgcc

SEQ ID NO: 1185450 - RNA, 19 nt, Artificial Sequence
  Description of Artificial Sequence: Synthetic oligonucleotide
acauucgugaauucauaca

SEQ ID NO: 1185451 - RNA, 19 nt, Artificial Sequence
  Description of Artificial Sequence: Synthetic oligonucleotide
ugguggacauuucugcuca

SEQ ID NO: 1185452 - RNA, 19 nt, Artificial Sequence
  Description of Artificial Sequence: Synthetic oligonucleotide
cucuuugauuuucagccgc

SEQ ID NO: 1185453 - RNA, 19 nt, Artificial Sequence
  Description of Artificial Sequence: Synthetic oligonucleotide
uuuacuggugccgaguaaa

SEQ ID NO: 1185454 - RNA, 19 nt, Artificial Sequence
  Description of Artificial Sequence: Synthetic oligonucleotide
cuugggauaugugagcaag

SEQ ID NO: 1185455 - RNA, 19 nt, Artificial Sequence
  Description of Artificial Sequence: Synthetic oligonucleotide
cagaaguccugaaagggac

SEQ ID NO: 1185456 - RNA, 19 nt, Artificial Sequence
  Description of Artificial Sequence: Synthetic oligonucleotide
agcggucauaugcuuuucc

SEQ ID NO: 1185457 - RNA, 19 nt, Artificial Sequence
  Description of Artificial Sequence: Synthetic oligonucleotide
uacgccaucacacccaguu

SEQ ID NO: 1185458 - RNA, 19 nt, Artificial Sequence
  Description of Artificial Sequence: Synthetic oligonucleotide
uuuucgggcacagaacuga

SEQ ID NO: 1185459 - RNA, 19 nt, Artificial Sequence
  Description of Artificial Sequence: Synthetic oligonucleotide
aaauuuacuggugccgagu

SEQ ID NO: 1185460 - RNA, 19 nt, Artificial Sequence
  Description of Artificial Sequence: Synthetic oligonucleotide
aggcauacgccaucacacc

SEQ ID NO: 1185461 - RNA, 19 nt, Artificial Sequence
  Description of Artificial Sequence: Synthetic oligonucleotide
accugauugagucuauccu

SEQ ID NO: 1185462 - RNA, 19 nt, Artificial Sequence
  Description of Artificial Sequence: Synthetic oligonucleotide
ccaaaugccagcuggauac

SEQ ID NO: 1185463 - RNA, 19 nt, Artificial Sequence
  Description of Artificial Sequence: Synthetic oligonucleotide
uccuaaaaugccucuggac

SEQ ID NO: 1185464 - RNA, 19 nt, Artificial Sequence
  Description of Artificial Sequence: Synthetic oligonucleotide
aauagcucgccugcaaaca

SEQ ID NO: 1185465 - RNA, 19 nt, Artificial Sequence
  Description of Artificial Sequence: Synthetic oligonucleotide
caaagauauuagucagugc

SEQ ID NO: 1185466 - RNA, 19 nt, Artificial Sequence
  Description of Artificial Sequence: Synthetic oligonucleotide
ugcuuuacggaugucuccc

SEQ ID NO: 1185467 - RNA, 19 nt, Artificial Sequence
  Description of Artificial Sequence: Synthetic oligonucleotide
uaugugagcaaggccaaca

SEQ ID NO: 1185468 - RNA, 19 nt, Artificial Sequence
  Description of Artificial Sequence: Synthetic oligonucleotide
gaggauguuaccaaugaaa

SEQ ID NO: 1185469 - RNA, 19 nt, Artificial Sequence
  Description of Artificial Sequence: Synthetic oligonucleotide
ggauaugugagcaaggcca

SEQ ID NO: 1185470 - RNA, 19 nt, Artificial Sequence
  Description of Artificial Sequence: Synthetic oligonucleotide
ucaauagcucgccugcaaa

SEQ ID NO: 1185471 - RNA, 19 nt, Artificial Sequence
  Description of Artificial Sequence: Synthetic oligonucleotide
uuugaggacugucuggcuu

SEQ ID NO: 1185472 - RNA, 19 nt, Artificial Sequence
  Description of Artificial Sequence: Synthetic oligonucleotide
ccaacuaaaauggagacuc

SEQ ID NO: 1185473 - RNA, 19 nt, Artificial Sequence
  Description of Artificial Sequence: Synthetic oligonucleotide
ugggauaugugagcaaggc

SEQ ID NO: 1185474 - RNA, 19 nt, Artificial Sequence
  Description of Artificial Sequence: Synthetic oligonucleotide
uggcuuuugacauccgccu

SEQ ID NO: 1185475 - RNA, 19 nt, Artificial Sequence
  Description of Artificial Sequence: Synthetic oligonucleotide
cugagcaauagcugggaac

SEQ ID NO: 1185476 - RNA, 19 nt, Artificial Sequence
  Description of Artificial Sequence: Synthetic oligonucleotide
ucgggcacagaacugaauu

SEQ ID NO: 1185477 - RNA, 19 nt, Artificial Sequence
  Description of Artificial Sequence: Synthetic oligonucleotide
uuagccuguucccaucaac

SEQ ID NO: 1185478 - RNA, 19 nt, Artificial Sequence
  Description of Artificial Sequence: Synthetic oligonucleotide
guucccaucaacuuccgaa

SEQ ID NO: 1185479 - RNA, 19 nt, Artificial Sequence
  Description of Artificial Sequence: Synthetic oligonucleotide
agaagcauucauggcaguc

SEQ ID NO: 1185480 - RNA, 19 nt, Artificial Sequence
  Description of Artificial Sequence: Synthetic oligonucleotide
cuugcuuaaacagccuuac

SEQ ID NO: 1185481 - RNA, 19 nt, Artificial Sequence
  Description of Artificial Sequence: Synthetic oligonucleotide
uccagugcuuuacggaugu

SEQ ID NO: 1185482 - RNA, 19 nt, Artificial Sequence
  Description of Artificial Sequence: Synthetic oligonucleotide
gauauuagucagugcuaac

SEQ ID NO: 1185483 - RNA, 19 nt, Artificial Sequence
  Description of Artificial Sequence: Synthetic oligonucleotide
uugagucuauccugcaaga

SEQ ID NO: 1185484 - RNA, 19 nt, Artificial Sequence
  Description of Artificial Sequence: Synthetic oligonucleotide
accaaucgggaauugcuca

SEQ ID NO: 1185485 - RNA, 19 nt, Artificial Sequence
  Description of Artificial Sequence: Synthetic oligonucleotide
gacccaacuaaaauggaga

SEQ ID NO: 1185486 - RNA, 19 nt, Artificial Sequence
  Description of Artificial Sequence: Synthetic oligonucleotide
ugaaagggacaaacacuca

SEQ ID NO: 1185487 - RNA, 19 nt, Artificial Sequence
  Description of Artificial Sequence: Synthetic oligonucleotide
gcguguauaacacauccug

SEQ ID NO: 1185488 - RNA, 19 nt, Artificial Sequence
  Description of Artificial Sequence: Synthetic oligonucleotide
ucaagucgagguagaauuc

SEQ ID NO: 1185489 - RNA, 19 nt, Artificial Sequence
  Description of Artificial Sequence: Synthetic oligonucleotide
uagcuucaagucgagguag

SEQ ID NO: 1185490 - RNA, 19 nt, Artificial Sequence
  Description of Artificial Sequence: Synthetic oligonucleotide
uaacauucgugaauucaua

SEQ ID NO: 1185491 - RNA, 19 nt, Artificial Sequence
  Description of Artificial Sequence: Synthetic oligonucleotide
agcucgccugcaaacaucc

SEQ ID NO: 1185492 - RNA, 19 nt, Artificial Sequence
  Description of Artificial Sequence: Synthetic oligonucleotide
ucuaggguauuagcaauac

SEQ ID NO: 1185493 - RNA, 19 nt, Artificial Sequence
  Description of Artificial Sequence: Synthetic oligonucleotide
aacacagccugggcacucc

SEQ ID NO: 1185494 - RNA, 19 nt, Artificial Sequence
  Description of Artificial Sequence: Synthetic oligonucleotide
uucccaucaacuuccgaaa

SEQ ID NO: 1185495 - RNA, 19 nt, Artificial Sequence
  Description of Artificial Sequence: Synthetic oligonucleotide
agauauuagucagugcuaa

SEQ ID NO: 1185496 - RNA, 19 nt, Artificial Sequence
  Description of Artificial Sequence: Synthetic oligonucleotide
cuuaaacagccuuacucga

SEQ ID NO: 1185497 - RNA, 19 nt, Artificial Sequence
  Description of Artificial Sequence: Synthetic oligonucleotide
aaugccagcuggauacuug

SEQ ID NO: 1185498 - RNA, 19 nt, Artificial Sequence
  Description of Artificial Sequence: Synthetic oligonucleotide
uuucgacagacgcuacugu

SEQ ID NO: 1185499 - RNA, 19 nt, Artificial Sequence
  Description of Artificial Sequence: Synthetic oligonucleotide
uucaauagcucgccugcaa

SEQ ID NO: 1185500 - RNA, 19 nt, Artificial Sequence
  Description of Artificial Sequence: Synthetic oligonucleotide
agcuuugcuugcugauagc

SEQ ID NO: 1185501 - RNA, 19 nt, Artificial Sequence
  Description of Artificial Sequence: Synthetic oligonucleotide
gcaaagaauggccuugacc

SEQ ID NO: 1185502 - RNA, 19 nt, Artificial Sequence
  Description of Artificial Sequence: Synthetic oligonucleotide
agcaccaaucgggaauugc

SEQ ID NO: 1185503 - RNA, 19 nt, Artificial Sequence
  Description of Artificial Sequence: Synthetic oligonucleotide
ucgccugcaaacauccagu

SEQ ID NO: 1185504 - RNA, 19 nt, Artificial Sequence
  Description of Artificial Sequence: Synthetic oligonucleotide
caauagcucgccugcaaac

SEQ ID NO: 1185505 - RNA, 19 nt, Artificial Sequence
  Description of Artificial Sequence: Synthetic oligonucleotide
aucaacuuccgaaaugacu

SEQ ID NO: 1185506 - RNA, 19 nt, Artificial Sequence
  Description of Artificial Sequence: Synthetic oligonucleotide
uguuaccaaugaaagcuuu

SEQ ID NO: 1185507 - RNA, 19 nt, Artificial Sequence
  Description of Artificial Sequence: Synthetic oligonucleotide
acuguaggcuucauauaac

SEQ ID NO: 1185508 - RNA, 19 nt, Artificial Sequence
  Description of Artificial Sequence: Synthetic oligonucleotide
uugcugauagcaagugccu

SEQ ID NO: 1185509 - RNA, 19 nt, Artificial Sequence
  Description of Artificial Sequence: Synthetic oligonucleotide
uacucgagcagguuccuuc

SEQ ID NO: 1185510 - RNA, 19 nt, Artificial Sequence
  Description of Artificial Sequence: Synthetic oligonucleotide
gauuguagcuaucugguuu

SEQ ID NO: 1185511 - RNA, 19 nt, Artificial Sequence
  Description of Artificial Sequence: Synthetic oligonucleotide
cagcggauacuuuucgggc

SEQ ID NO: 1185512 - RNA, 19 nt, Artificial Sequence
  Description of Artificial Sequence: Synthetic oligonucleotide
cagguaggguaagagaagc

SEQ ID NO: 1185513 - RNA, 19 nt, Artificial Sequence
  Description of Artificial Sequence: Synthetic oligonucleotide
caccaacacgaucaugggg

SEQ ID NO: 1185514 - RNA, 19 nt, Artificial Sequence
  Description of Artificial Sequence: Synthetic oligonucleotide
gaaacagcggauacuuuuc

SEQ ID NO: 1185515 - RNA, 19 nt, Artificial Sequence
  Description of Artificial Sequence: Synthetic oligonucleotide
ggauguuaccaaugaaagc

SEQ ID NO: 1185516 - RNA, 19 nt, Artificial Sequence
  Description of Artificial Sequence: Synthetic oligonucleotide
ucgagcagguuccuucucu

SEQ ID NO: 1185517 - RNA, 19 nt, Artificial Sequence
  Description of Artificial Sequence: Synthetic oligonucleotide
cagguuccuucucuggugg

SEQ ID NO: 1185518 - RNA, 19 nt, Artificial Sequence
  Description of Artificial Sequence: Synthetic oligonucleotide
uucuuggcucagaauuagc

SEQ ID NO: 1185519 - RNA, 19 nt, Artificial Sequence
  Description of Artificial Sequence: Synthetic oligonucleotide
cuaggguauuagcaauacc

SEQ ID NO: 1185520 - RNA, 19 nt, Artificial Sequence
  Description of Artificial Sequence: Synthetic oligonucleotide
cucgcuauguagcaaagaa

SEQ ID NO: 1185521 - RNA, 19 nt, Artificial Sequence
  Description of Artificial Sequence: Synthetic oligonucleotide
uacggaugucucccgaaac

SEQ ID NO: 1185522 - RNA, 19 nt, Artificial Sequence
  Description of Artificial Sequence: Synthetic oligonucleotide
auaaggugggaaguucaag

SEQ ID NO: 1185523 - RNA, 19 nt, Artificial Sequence
  Description of Artificial Sequence: Synthetic oligonucleotide
gucagugcuaacauucgug

SEQ ID NO: 1185524 - RNA, 19 nt, Artificial Sequence
  Description of Artificial Sequence: Synthetic oligonucleotide
cuugucucuggcaggcagc

SEQ ID NO: 1185525 - RNA, 19 nt, Artificial Sequence
  Description of Artificial Sequence: Synthetic oligonucleotide
uuuacggaugucucccgaa

SEQ ID NO: 1185526 - RNA, 19 nt, Artificial Sequence
  Description of Artificial Sequence: Synthetic oligonucleotide
uuacggaugucucccgaaa

SEQ ID NO: 1185527 - RNA, 19 nt, Artificial Sequence
  Description of Artificial Sequence: Synthetic oligonucleotide
gaacaaaccaagaucuucu

SEQ ID NO: 1185528 - RNA, 19 nt, Artificial Sequence
  Description of Artificial Sequence: Synthetic oligonucleotide
agcggauacuuuucgggca

SEQ ID NO: 1185529 - RNA, 19 nt, Artificial Sequence
  Description of Artificial Sequence: Synthetic oligonucleotide
auccuaaaaugccucugga

SEQ ID NO: 1185530 - RNA, 19 nt, Artificial Sequence
  Description of Artificial Sequence: Synthetic oligonucleotide
ucgugaauucauacacuaa

SEQ ID NO: 1185531 - RNA, 19 nt, Artificial Sequence
  Description of Artificial Sequence: Synthetic oligonucleotide
auuagucagugcuaacauu

SEQ ID NO: 1185532 - RNA, 19 nt, Artificial Sequence
  Description of Artificial Sequence: Synthetic oligonucleotide
caauaagcaccaaucggga

SEQ ID NO: 1185533 - RNA, 19 nt, Artificial Sequence
  Description of Artificial Sequence: Synthetic oligonucleotide
uagcuaucugguuucuggu

SEQ ID NO: 1185534 - RNA, 19 nt, Artificial Sequence
  Description of Artificial Sequence: Synthetic oligonucleotide
auccggcucaagcaggcag

SEQ ID NO: 1185535 - RNA, 19 nt, Artificial Sequence
  Description of Artificial Sequence: Synthetic oligonucleotide
ggucauagcuuuccaaaug

SEQ ID NO: 1185536 - RNA, 19 nt, Artificial Sequence
  Description of Artificial Sequence: Synthetic oligonucleotide
cacgcuugggaaccggugc

SEQ ID NO: 1185537 - RNA, 19 nt, Artificial Sequence
  Description of Artificial Sequence: Synthetic oligonucleotide
caggcagccgaucugggac

SEQ ID NO: 1185538 - RNA, 19 nt, Artificial Sequence
  Description of Artificial Sequence: Synthetic oligonucleotide
ugauugagucuauccugca

SEQ ID NO: 1185539 - RNA, 19 nt, Artificial Sequence
  Description of Artificial Sequence: Synthetic oligonucleotide
gguauuagcaauaccaaua

SEQ ID NO: 1185540 - RNA, 19 nt, Artificial Sequence
  Description of Artificial Sequence: Synthetic oligonucleotide
ggaaccggugcuucggagg

SEQ ID NO: 1185541 - RNA, 19 nt, Artificial Sequence
  Description of Artificial Sequence: Synthetic oligonucleotide
auggcaguccaucggcgag

SEQ ID NO: 1185542 - RNA, 19 nt, Artificial Sequence
  Description of Artificial Sequence: Synthetic oligonucleotide
agucagugcuaacauucgu

SEQ ID NO: 1185543 - RNA, 19 nt, Artificial Sequence
  Description of Artificial Sequence: Synthetic oligonucleotide
gacagacgcuacuguaggc

SEQ ID NO: 1185544 - RNA, 19 nt, Artificial Sequence
  Description of Artificial Sequence: Synthetic oligonucleotide
gauugagucuauccugcaa

SEQ ID NO: 1185545 - RNA, 19 nt, Artificial Sequence
  Description of Artificial Sequence: Synthetic oligonucleotide
gcuucauauaacuucccca

SEQ ID NO: 1185546 - RNA, 19 nt, Artificial Sequence
  Description of Artificial Sequence: Synthetic oligonucleotide
ucagcggucauaugcuuuu

SEQ ID NO: 1185547 - RNA, 19 nt, Artificial Sequence
  Description of Artificial Sequence: Synthetic oligonucleotide
ccaaagauauuagucagug

SEQ ID NO: 1185548 - RNA, 19 nt, Artificial Sequence
  Description of Artificial Sequence: Synthetic oligonucleotide
aagucgagguagaauucug

SEQ ID NO: 1185549 - RNA, 19 nt, Artificial Sequence
  Description of Artificial Sequence: Synthetic oligonucleotide
gugagaucuaggguauuag

SEQ ID NO: 1185550 - RNA, 19 nt, Artificial Sequence
  Description of Artificial Sequence: Synthetic oligonucleotide
agggacaaacacucagacu

SEQ ID NO: 1185551 - RNA, 19 nt, Artificial Sequence
  Description of Artificial Sequence: Synthetic oligonucleotide
ugauuuucagccgccuggu

SEQ ID NO: 1185552 - RNA, 19 nt, Artificial Sequence
  Description of Artificial Sequence: Synthetic oligonucleotide
guauaacacauccugcccu

SEQ ID NO: 1185553 - RNA, 19 nt, Artificial Sequence
  Description of Artificial Sequence: Synthetic oligonucleotide
acuuccgaaaugacuuggg

SEQ ID NO: 1185554 - RNA, 19 nt, Artificial Sequence
  Description of Artificial Sequence: Synthetic oligonucleotide
cuuuucgggcacagaacug

SEQ ID NO: 1185555 - RNA, 19 nt, Artificial Sequence
  Description of Artificial Sequence: Synthetic oligonucleotide
ucuugacaccugauugagu

SEQ ID NO: 1185556 - RNA, 19 nt, Artificial Sequence
  Description of Artificial Sequence: Synthetic oligonucleotide
agcaaggccaacacgcuug

SEQ ID NO: 1185557 - RNA, 19 nt, Artificial Sequence
  Description of Artificial Sequence: Synthetic oligonucleotide
cauacgccaucacacccag

SEQ ID NO: 1185558 - RNA, 19 nt, Artificial Sequence
  Description of Artificial Sequence: Synthetic oligonucleotide
ugugagaucuaggguauua

SEQ ID NO: 1185559 - RNA, 19 nt, Artificial Sequence
  Description of Artificial Sequence: Synthetic oligonucleotide
ccuuacucgagcagguucc

SEQ ID NO: 1185560 - RNA, 19 nt, Artificial Sequence
  Description of Artificial Sequence: Synthetic oligonucleotide
ggcuucauauaacuucccc

SEQ ID NO: 1185561 - RNA, 19 nt, Artificial Sequence
  Description of Artificial Sequence: Synthetic oligonucleotide
uuacuggugccgaguaaaa

SEQ ID NO: 1185562 - RNA, 19 nt, Artificial Sequence
  Description of Artificial Sequence: Synthetic oligonucleotide
ugauaguuuuaaagccuuu

SEQ ID NO: 1185563 - RNA, 19 nt, Artificial Sequence
  Description of Artificial Sequence: Synthetic oligonucleotide
caauagcugggaacacagc

SEQ ID NO: 1185564 - RNA, 19 nt, Artificial Sequence
  Description of Artificial Sequence: Synthetic oligonucleotide
uguuuucgacagacgcuac

SEQ ID NO: 1185565 - RNA, 19 nt, Artificial Sequence
  Description of Artificial Sequence: Synthetic oligonucleotide
gugccuucuugcuuaaaca

SEQ ID NO: 1185566 - RNA, 19 nt, Artificial Sequence
  Description of Artificial Sequence: Synthetic oligonucleotide
aacucgcuauguagcaaag

SEQ ID NO: 1185567 - RNA, 19 nt, Artificial Sequence
  Description of Artificial Sequence: Synthetic oligonucleotide
acacuaaaauuuacuggug

SEQ ID NO: 1185568 - RNA, 19 nt, Artificial Sequence
  Description of Artificial Sequence: Synthetic oligonucleotide
agggugacugaccuucaga

SEQ ID NO: 1185569 - RNA, 19 nt, Artificial Sequence
  Description of Artificial Sequence: Synthetic oligonucleotide
ugcuugcugauagcaagug

SEQ ID NO: 1185570 - RNA, 19 nt, Artificial Sequence
  Description of Artificial Sequence: Synthetic oligonucleotide
uccugcaagauuguagcua

SEQ ID NO: 1185571 - RNA, 19 nt, Artificial Sequence
  Description of Artificial Sequence: Synthetic oligonucleotide
gcuacuguaggcuucauau

SEQ ID NO: 1185572 - RNA, 19 nt, Artificial Sequence
  Description of Artificial Sequence: Synthetic oligonucleotide
caacuuccgaaaugacuug

SEQ ID NO: 1185573 - RNA, 19 nt, Artificial Sequence
  Description of Artificial Sequence: Synthetic oligonucleotide
ucggcgaggauguuaccaa

SEQ ID NO: 1185574 - RNA, 19 nt, Artificial Sequence
  Description of Artificial Sequence: Synthetic oligonucleotide
gaauccggcucaagcaggc

SEQ ID NO: 1185575 - RNA, 19 nt, Artificial Sequence
  Description of Artificial Sequence: Synthetic oligonucleotide
caccaaucgggaauugcuc

SEQ ID NO: 1185576 - RNA, 19 nt, Artificial Sequence
  Description of Artificial Sequence: Synthetic oligonucleotide
uccggcucaagcaggcagu

SEQ ID NO: 1185577 - RNA, 19 nt, Artificial Sequence
  Description of Artificial Sequence: Synthetic oligonucleotide
uugaggacugucuggcuuu

SEQ ID NO: 1185578 - RNA, 19 nt, Artificial Sequence
  Description of Artificial Sequence: Synthetic oligonucleotide
gggauaugugagcaaggcc

SEQ ID NO: 1185579 - RNA, 19 nt, Artificial Sequence
  Description of Artificial Sequence: Synthetic oligonucleotide
gacuccagaaguccugaaa

SEQ ID NO: 1185580 - RNA, 19 nt, Artificial Sequence
  Description of Artificial Sequence: Synthetic oligonucleotide
gaucuaggguauuagcaau

SEQ ID NO: 1185581 - RNA, 19 nt, Artificial Sequence
  Description of Artificial Sequence: Synthetic oligonucleotide
uaagcaccaaucgggaauu

SEQ ID NO: 1185582 - RNA, 19 nt, Artificial Sequence
  Description of Artificial Sequence: Synthetic oligonucleotide
ugacugaccuucagacagu

SEQ ID NO: 1185583 - RNA, 19 nt, Artificial Sequence
  Description of Artificial Sequence: Synthetic oligonucleotide
ggcauacgccaucacaccc

SEQ ID NO: 1185584 - RNA, 19 nt, Artificial Sequence
  Description of Artificial Sequence: Synthetic oligonucleotide
gguagaauucugucuguga

SEQ ID NO: 1185585 - RNA, 19 nt, Artificial Sequence
  Description of Artificial Sequence: Synthetic oligonucleotide
gagacaccuuggucaggcg

SEQ ID NO: 1185586 - RNA, 19 nt, Artificial Sequence
  Description of Artificial Sequence: Synthetic oligonucleotide
ucccaucaacuuccgaaau

SEQ ID NO: 1185587 - RNA, 19 nt, Artificial Sequence
  Description of Artificial Sequence: Synthetic oligonucleotide
uguucccaucaacuuccga

SEQ ID NO: 1185588 - RNA, 19 nt, Artificial Sequence
  Description of Artificial Sequence: Synthetic oligonucleotide
aucggcgaggauguuacca

SEQ ID NO: 1185589 - RNA, 19 nt, Artificial Sequence
  Description of Artificial Sequence: Synthetic oligonucleotide
gauaugugagcaaggccaa

SEQ ID NO: 1185590 - RNA, 19 nt, Artificial Sequence
  Description of Artificial Sequence: Synthetic oligonucleotide
caugcaauucagcaugaua

SEQ ID NO: 1185591 - RNA, 19 nt, Artificial Sequence
  Description of Artificial Sequence: Synthetic oligonucleotide
aguccaucggcgaggaugu

SEQ ID NO: 1185592 - RNA, 19 nt, Artificial Sequence
  Description of Artificial Sequence: Synthetic oligonucleotide
gacugaccuucagacagug

SEQ ID NO: 1185593 - RNA, 19 nt, Artificial Sequence
  Description of Artificial Sequence: Synthetic oligonucleotide
acagcguguauaacacauc

SEQ ID NO: 1185594 - RNA, 19 nt, Artificial Sequence
  Description of Artificial Sequence: Synthetic oligonucleotide
cuuccgaaaugacuuggga

SEQ ID NO: 1185595 - RNA, 19 nt, Artificial Sequence
  Description of Artificial Sequence: Synthetic oligonucleotide
guguucaggacaagcuuug

SEQ ID NO: 1185596 - RNA, 19 nt, Artificial Sequence
  Description of Artificial Sequence: Synthetic oligonucleotide
agauuguagcuaucugguu

SEQ ID NO: 1185597 - RNA, 19 nt, Artificial Sequence
  Description of Artificial Sequence: Synthetic oligonucleotide
caaucgggaauugcucagc

SEQ ID NO: 1185598 - RNA, 19 nt, Artificial Sequence
  Description of Artificial Sequence: Synthetic oligonucleotide
cguguauaacacauccugc

SEQ ID NO: 1185599 - RNA, 19 nt, Artificial Sequence
  Description of Artificial Sequence: Synthetic oligonucleotide
cucccgaaacagcggauac

SEQ ID NO: 1185600 - RNA, 19 nt, Artificial Sequence
  Description of Artificial Sequence: Synthetic oligonucleotide
auccugcaagauuguagcu

SEQ ID NO: 1185601 - RNA, 19 nt, Artificial Sequence
  Description of Artificial Sequence: Synthetic oligonucleotide
ugagucuauccugcaagau

SEQ ID NO: 1185602 - RNA, 19 nt, Artificial Sequence
  Description of Artificial Sequence: Synthetic oligonucleotide
gcuaacauucgugaauuca

SEQ ID NO: 1185603 - RNA, 19 nt, Artificial Sequence
  Description of Artificial Sequence: Synthetic oligonucleotide
aucgggaauugcucagcca

SEQ ID NO: 1185604 - RNA, 19 nt, Artificial Sequence
  Description of Artificial Sequence: Synthetic oligonucleotide
cuuggcucagaauuagccu

SEQ ID NO: 1185605 - RNA, 19 nt, Artificial Sequence
  Description of Artificial Sequence: Synthetic oligonucleotide
ccuaaaaugccucuggacu

SEQ ID NO: 1185606 - RNA, 19 nt, Artificial Sequence
  Description of Artificial Sequence: Synthetic oligonucleotide
ucuauccugcaagauugua

SEQ ID NO: 1185607 - RNA, 19 nt, Artificial Sequence
  Description of Artificial Sequence: Synthetic oligonucleotide
ugguauaaggugggaaguu

SEQ ID NO: 1185608 - RNA, 19 nt, Artificial Sequence
  Description of Artificial Sequence: Synthetic oligonucleotide
ccucuuugauuuucagccg

SEQ ID NO: 1185609 - RNA, 19 nt, Artificial Sequence
  Description of Artificial Sequence: Synthetic oligonucleotide
gagucuauccugcaagauu

SEQ ID NO: 1185610 - RNA, 19 nt, Artificial Sequence
  Description of Artificial Sequence: Synthetic oligonucleotide
acaccugauugagucuauc

SEQ ID NO: 1185611 - RNA, 19 nt, Artificial Sequence
  Description of Artificial Sequence: Synthetic oligonucleotide
cccugaucugccaaaugcc

SEQ ID NO: 1185612 - RNA, 19 nt, Artificial Sequence
  Description of Artificial Sequence: Synthetic oligonucleotide
ugggaaccggugcuucgga

SEQ ID NO: 1185613 - RNA, 19 nt, Artificial Sequence
  Description of Artificial Sequence: Synthetic oligonucleotide
gauacuuuucgggcacaga

SEQ ID NO: 1185614 - RNA, 19 nt, Artificial Sequence
  Description of Artificial Sequence: Synthetic oligonucleotide
gguauaaggugggaaguuc

SEQ ID NO: 1185615 - RNA, 19 nt, Artificial Sequence
  Description of Artificial Sequence: Synthetic oligonucleotide
aacacgcuugggaaccggu

SEQ ID NO: 1185616 - RNA, 19 nt, Artificial Sequence
  Description of Artificial Sequence: Synthetic oligonucleotide
acgcuugggaaccggugcu

SEQ ID NO: 1185617 - RNA, 19 nt, Artificial Sequence
  Description of Artificial Sequence: Synthetic oligonucleotide
ugccagcuggauacuugca

SEQ ID NO: 1185618 - RNA, 19 nt, Artificial Sequence
  Description of Artificial Sequence: Synthetic oligonucleotide
acuugggauaugugagcaa

SEQ ID NO: 1185619 - RNA, 19 nt, Artificial Sequence
  Description of Artificial Sequence: Synthetic oligonucleotide
cuguuuucgacagacgcua

SEQ ID NO: 1185620 - RNA, 19 nt, Artificial Sequence
  Description of Artificial Sequence: Synthetic oligonucleotide
agcaccagagagguagaga

SEQ ID NO: 1185621 - RNA, 19 nt, Artificial Sequence
  Description of Artificial Sequence: Synthetic oligonucleotide
ccaucggcgaggauguuac

SEQ ID NO: 1185622 - RNA, 19 nt, Artificial Sequence
  Description of Artificial Sequence: Synthetic oligonucleotide
aggguaagagaagcauuca

SEQ ID NO: 1185623 - RNA, 19 nt, Artificial Sequence
  Description of Artificial Sequence: Synthetic oligonucleotide
agacgcuacuguaggcuuc

SEQ ID NO: 1185624 - RNA, 19 nt, Artificial Sequence
  Description of Artificial Sequence: Synthetic oligonucleotide
cuuuacggaugucucccga

SEQ ID NO: 1185625 - RNA, 19 nt, Artificial Sequence
  Description of Artificial Sequence: Synthetic oligonucleotide
cucuagcuucaagucgagg

SEQ ID NO: 1185626 - RNA, 19 nt, Artificial Sequence
  Description of Artificial Sequence: Synthetic oligonucleotide
uucgggcacagaacugaau

SEQ ID NO: 1185627 - RNA, 19 nt, Artificial Sequence
  Description of Artificial Sequence: Synthetic oligonucleotide
gcuuuacggaugucucccg

SEQ ID NO: 1185628 - RNA, 19 nt, Artificial Sequence
  Description of Artificial Sequence: Synthetic oligonucleotide
ccaaucgggaauugcucag

SEQ ID NO: 1185629 - RNA, 19 nt, Artificial Sequence
  Description of Artificial Sequence: Synthetic oligonucleotide
uggucaggcggcuuuccuu

SEQ ID NO: 1185630 - RNA, 19 nt, Artificial Sequence
  Description of Artificial Sequence: Synthetic oligonucleotide
ucccgaaacagcggauacu

SEQ ID NO: 1185631 - RNA, 19 nt, Artificial Sequence
  Description of Artificial Sequence: Synthetic oligonucleotide
cauggcaguccaucggcga

SEQ ID NO: 1185632 - RNA, 19 nt, Artificial Sequence
  Description of Artificial Sequence: Synthetic oligonucleotide
aucugccaaaugccagcug

SEQ ID NO: 1185633 - RNA, 19 nt, Artificial Sequence
  Description of Artificial Sequence: Synthetic oligonucleotide
cugccacccgcuguuuucg

SEQ ID NO: 1185634 - RNA, 19 nt, Artificial Sequence
  Description of Artificial Sequence: Synthetic oligonucleotide
gacgcuacuguaggcuuca

SEQ ID NO: 1185635 - RNA, 19 nt, Artificial Sequence
  Description of Artificial Sequence: Synthetic oligonucleotide
cauccugcccuuugcuguc

SEQ ID NO: 1185636 - RNA, 19 nt, Artificial Sequence
  Description of Artificial Sequence: Synthetic oligonucleotide
cgugaauucauacacuaaa

SEQ ID NO: 1185637 - RNA, 19 nt, Artificial Sequence
  Description of Artificial Sequence: Synthetic oligonucleotide
agcguguauaacacauccu

SEQ ID NO: 1185638 - RNA, 19 nt, Artificial Sequence
  Description of Artificial Sequence: Synthetic oligonucleotide
uccaucggcgaggauguua

SEQ ID NO: 1185639 - RNA, 19 nt, Artificial Sequence
  Description of Artificial Sequence: Synthetic oligonucleotide
ucucagcggucauaugcuu

SEQ ID NO: 1185640 - RNA, 19 nt, Artificial Sequence
  Description of Artificial Sequence: Synthetic oligonucleotide
gcgaggauguuaccaauga

SEQ ID NO: 1185641 - RNA, 19 nt, Artificial Sequence
  Description of Artificial Sequence: Synthetic oligonucleotide
cugucuggcuuuugacauc

SEQ ID NO: 1185642 - RNA, 19 nt, Artificial Sequence
  Description of Artificial Sequence: Synthetic oligonucleotide
aggcagccgaucugggaca

SEQ ID NO: 1185643 - RNA, 19 nt, Artificial Sequence
  Description of Artificial Sequence: Synthetic oligonucleotide
ugccaaaugccagcuggau

SEQ ID NO: 1185644 - RNA, 19 nt, Artificial Sequence
  Description of Artificial Sequence: Synthetic oligonucleotide
acucgcuauguagcaaaga

SEQ ID NO: 1185645 - RNA, 19 nt, Artificial Sequence
  Description of Artificial Sequence: Synthetic oligonucleotide
agacucccugaucugccaa

SEQ ID NO: 1185646 - RNA, 19 nt, Artificial Sequence
  Description of Artificial Sequence: Synthetic oligonucleotide
gugcuucggagggugacug

SEQ ID NO: 1185647 - RNA, 19 nt, Artificial Sequence
  Description of Artificial Sequence: Synthetic oligonucleotide
ggugacugaccuucagaca

SEQ ID NO: 1185648 - RNA, 19 nt, Artificial Sequence
  Description of Artificial Sequence: Synthetic oligonucleotide
cuuugcuguccaguugauc

SEQ ID NO: 1185649 - RNA, 19 nt, Artificial Sequence
  Description of Artificial Sequence: Synthetic oligonucleotide
ugcugauagcaagugccuu

SEQ ID NO: 1185650 - RNA, 19 nt, Artificial Sequence
  Description of Artificial Sequence: Synthetic oligonucleotide
accggugcuucggagggug

SEQ ID NO: 1185651 - RNA, 19 nt, Artificial Sequence
  Description of Artificial Sequence: Synthetic oligonucleotide
guuuucgacagacgcuacu

SEQ ID NO: 1185652 - RNA, 19 nt, Artificial Sequence
  Description of Artificial Sequence: Synthetic oligonucleotide
ggauacuuuucgggcacag

SEQ ID NO: 1185653 - RNA, 19 nt, Artificial Sequence
  Description of Artificial Sequence: Synthetic oligonucleotide
gcaauaccaauaagcacca

SEQ ID NO: 1185654 - RNA, 19 nt, Artificial Sequence
  Description of Artificial Sequence: Synthetic oligonucleotide
gacucccugaucugccaaa

SEQ ID NO: 1185655 - RNA, 19 nt, Artificial Sequence
  Description of Artificial Sequence: Synthetic oligonucleotide
ggcuuacaguuuucucuag

SEQ ID NO: 1185656 - RNA, 19 nt, Artificial Sequence
  Description of Artificial Sequence: Synthetic oligonucleotide
gcggucauaugcuuuucca

SEQ ID NO: 1185657 - RNA, 19 nt, Artificial Sequence
  Description of Artificial Sequence: Synthetic oligonucleotide
ugcuucggagggugacuga

SEQ ID NO: 1185658 - RNA, 19 nt, Artificial Sequence
  Description of Artificial Sequence: Synthetic oligonucleotide
aagcaccaaucgggaauug

SEQ ID NO: 1185659 - RNA, 19 nt, Artificial Sequence
  Description of Artificial Sequence: Synthetic oligonucleotide
agguagagacuuccagcuu

SEQ ID NO: 1185660 - RNA, 19 nt, Artificial Sequence
  Description of Artificial Sequence: Synthetic oligonucleotide
gguagagacuuccagcuuu

SEQ ID NO: 1185661 - RNA, 19 nt, Artificial Sequence
  Description of Artificial Sequence: Synthetic oligonucleotide
ccugaucugccaaaugcca

SEQ ID NO: 1185662 - RNA, 19 nt, Artificial Sequence
  Description of Artificial Sequence: Synthetic oligonucleotide
cgacagacgcuacuguagg

SEQ ID NO: 1185663 - RNA, 19 nt, Artificial Sequence
  Description of Artificial Sequence: Synthetic oligonucleotide
caacacgcuugggaaccgg

SEQ ID NO: 1185664 - RNA, 19 nt, Artificial Sequence
  Description of Artificial Sequence: Synthetic oligonucleotide
agguaggguaagagaagca

SEQ ID NO: 1185665 - RNA, 19 nt, Artificial Sequence
  Description of Artificial Sequence: Synthetic oligonucleotide
cuucucugguggacauuuc

SEQ ID NO: 1185666 - RNA, 19 nt, Artificial Sequence
  Description of Artificial Sequence: Synthetic oligonucleotide
ccaacacgaucauggggcc

SEQ ID NO: 1185667 - RNA, 19 nt, Artificial Sequence
  Description of Artificial Sequence: Synthetic oligonucleotide
acauccgccuccacaauuu

SEQ ID NO: 1185668 - RNA, 19 nt, Artificial Sequence
  Description of Artificial Sequence: Synthetic oligonucleotide
gggcuuacaguuuucucua

SEQ ID NO: 1185669 - RNA, 19 nt, Artificial Sequence
  Description of Artificial Sequence: Synthetic oligonucleotide
ugauagcaagugccuucuu

SEQ ID NO: 1185670 - RNA, 19 nt, Artificial Sequence
  Description of Artificial Sequence: Synthetic oligonucleotide
acacgcuugggaaccggug

SEQ ID NO: 1185671 - RNA, 19 nt, Artificial Sequence
  Description of Artificial Sequence: Synthetic oligonucleotide
gcggauacuuuucgggcac

SEQ ID NO: 1185672 - RNA, 19 nt, Artificial Sequence
  Description of Artificial Sequence: Synthetic oligonucleotide
cuaucugguuucugguaua

SEQ ID NO: 1185673 - RNA, 19 nt, Artificial Sequence
  Description of Artificial Sequence: Synthetic oligonucleotide
cccagagugaccucuuuga

SEQ ID NO: 1185674 - RNA, 19 nt, Artificial Sequence
  Description of Artificial Sequence: Synthetic oligonucleotide
agguuccuucucuggugga

SEQ ID NO: 1185675 - RNA, 19 nt, Artificial Sequence
  Description of Artificial Sequence: Synthetic oligonucleotide
cagccacaaacucgcuaug

SEQ ID NO: 1185676 - RNA, 19 nt, Artificial Sequence
  Description of Artificial Sequence: Synthetic oligonucleotide
cauccgccuccacaauuuc

SEQ ID NO: 1185677 - RNA, 19 nt, Artificial Sequence
  Description of Artificial Sequence: Synthetic oligonucleotide
cagugcuaacauucgugaa

SEQ ID NO: 1185678 - RNA, 19 nt, Artificial Sequence
  Description of Artificial Sequence: Synthetic oligonucleotide
guugauccaucucguccaa

SEQ ID NO: 1185679 - RNA, 19 nt, Artificial Sequence
  Description of Artificial Sequence: Synthetic oligonucleotide
gcuaucugguuucugguau

SEQ ID NO: 1185680 - RNA, 19 nt, Artificial Sequence
  Description of Artificial Sequence: Synthetic oligonucleotide
agcuucaagucgagguaga

SEQ ID NO: 1185681 - RNA, 19 nt, Artificial Sequence
  Description of Artificial Sequence: Synthetic oligonucleotide
cccgcuguuuucgacagac

SEQ ID NO: 1185682 - RNA, 19 nt, Artificial Sequence
  Description of Artificial Sequence: Synthetic oligonucleotide
caagucgagguagaauucu

SEQ ID NO: 1185683 - RNA, 19 nt, Artificial Sequence
  Description of Artificial Sequence: Synthetic oligonucleotide
caucggcgaggauguuacc

SEQ ID NO: 1185684 - RNA, 19 nt, Artificial Sequence
  Description of Artificial Sequence: Synthetic oligonucleotide
cugguauaaggugggaagu

SEQ ID NO: 1185685 - RNA, 19 nt, Artificial Sequence
  Description of Artificial Sequence: Synthetic oligonucleotide
ggcuuuugacauccgccuc

SEQ ID NO: 1185686 - RNA, 19 nt, Artificial Sequence
  Description of Artificial Sequence: Synthetic oligonucleotide
gguuccuucucugguggac

SEQ ID NO: 1185687 - RNA, 19 nt, Artificial Sequence
  Description of Artificial Sequence: Synthetic oligonucleotide
gugcuaacauucgugaauu

SEQ ID NO: 1185688 - RNA, 19 nt, Artificial Sequence
  Description of Artificial Sequence: Synthetic oligonucleotide
gacauccgccuccacaauu

SEQ ID NO: 1185689 - RNA, 19 nt, Artificial Sequence
  Description of Artificial Sequence: Synthetic oligonucleotide
ggguauuagcaauaccaau

SEQ ID NO: 1185690 - RNA, 19 nt, Artificial Sequence
  Description of Artificial Sequence: Synthetic oligonucleotide
caaacucgcuauguagcaa

SEQ ID NO: 1185691 - RNA, 19 nt, Artificial Sequence
  Description of Artificial Sequence: Synthetic oligonucleotide
gccuuuuaggacaugcucu

SEQ ID NO: 1185692 - RNA, 19 nt, Artificial Sequence
  Description of Artificial Sequence: Synthetic oligonucleotide
cagugcuuuacggaugucu

SEQ ID NO: 1185693 - RNA, 19 nt, Artificial Sequence
  Description of Artificial Sequence: Synthetic oligonucleotide
auccgccuccacaauuuca

SEQ ID NO: 1185694 - RNA, 19 nt, Artificial Sequence
  Description of Artificial Sequence: Synthetic oligonucleotide
gcaaacauccagugcuuua

SEQ ID NO: 1185695 - RNA, 19 nt, Artificial Sequence
  Description of Artificial Sequence: Synthetic oligonucleotide
ggcucaagcaggcaguuuu

SEQ ID NO: 1185696 - RNA, 19 nt, Artificial Sequence
  Description of Artificial Sequence: Synthetic oligonucleotide
ggccaacacgcuugggaac

SEQ ID NO: 1185697 - RNA, 19 nt, Artificial Sequence
  Description of Artificial Sequence: Synthetic oligonucleotide
acgccaucacacccaguua

SEQ ID NO: 1185698 - RNA, 19 nt, Artificial Sequence
  Description of Artificial Sequence: Synthetic oligonucleotide
gcuucggagggugacugac

SEQ ID NO: 1185699 - RNA, 19 nt, Artificial Sequence
  Description of Artificial Sequence: Synthetic oligonucleotide
caauuucaauagcucgccu

SEQ ID NO: 1185700 - RNA, 19 nt, Artificial Sequence
  Description of Artificial Sequence: Synthetic oligonucleotide
ugccacccgcuguuuucga

SEQ ID NO: 1185701 - RNA, 19 nt, Artificial Sequence
  Description of Artificial Sequence: Synthetic oligonucleotide
acagugguuugaggacugu

SEQ ID NO: 1185702 - RNA, 19 nt, Artificial Sequence
  Description of Artificial Sequence: Synthetic oligonucleotide
caaggccaacacgcuuggg

SEQ ID NO: 1185703 - RNA, 19 nt, Artificial Sequence
  Description of Artificial Sequence: Synthetic oligonucleotide
gccaucacacccaguuacc

SEQ ID NO: 1185704 - RNA, 19 nt, Artificial Sequence
  Description of Artificial Sequence: Synthetic oligonucleotide
gaggacugucuggcuuuug

SEQ ID NO: 1185705 - RNA, 19 nt, Artificial Sequence
  Description of Artificial Sequence: Synthetic oligonucleotide
ggacauuucugcucagaau

SEQ ID NO: 1185706 - RNA, 19 nt, Artificial Sequence
  Description of Artificial Sequence: Synthetic oligonucleotide
ccaguugauccaucucguc

SEQ ID NO: 1185707 - RNA, 19 nt, Artificial Sequence
  Description of Artificial Sequence: Synthetic oligonucleotide
uuacucgagcagguuccuu

SEQ ID NO: 1185708 - RNA, 19 nt, Artificial Sequence
  Description of Artificial Sequence: Synthetic oligonucleotide
gcauacgccaucacaccca

SEQ ID NO: 1185709 - RNA, 19 nt, Artificial Sequence
  Description of Artificial Sequence: Synthetic oligonucleotide
aaccggugcuucggagggu

SEQ ID NO: 1185710 - RNA, 19 nt, Artificial Sequence
  Description of Artificial Sequence: Synthetic oligonucleotide
gccaaaugccagcuggaua

SEQ ID NO: 1185711 - RNA, 19 nt, Artificial Sequence
  Description of Artificial Sequence: Synthetic oligonucleotide
cuucaagucgagguagaau

SEQ ID NO: 1185712 - RNA, 19 nt, Artificial Sequence
  Description of Artificial Sequence: Synthetic oligonucleotide
cggaugucucccgaaacag

SEQ ID NO: 1185713 - RNA, 19 nt, Artificial Sequence
  Description of Artificial Sequence: Synthetic oligonucleotide
gcccuuugcuguccaguug

SEQ ID NO: 1185714 - RNA, 19 nt, Artificial Sequence
  Description of Artificial Sequence: Synthetic oligonucleotide
aggcggcuuuccuuauuuu

SEQ ID NO: 1185715 - RNA, 19 nt, Artificial Sequence
  Description of Artificial Sequence: Synthetic oligonucleotide
gccgaucugggacagcugu

SEQ ID NO: 1185716 - RNA, 19 nt, Artificial Sequence
  Description of Artificial Sequence: Synthetic oligonucleotide
ucggagggugacugaccuu

SEQ ID NO: 1185717 - RNA, 19 nt, Artificial Sequence
  Description of Artificial Sequence: Synthetic oligonucleotide
gcaccaaucgggaauugcu

SEQ ID NO: 1185718 - RNA, 19 nt, Artificial Sequence
  Description of Artificial Sequence: Synthetic oligonucleotide
cugcagaauccggcucaag

SEQ ID NO: 1185719 - RNA, 19 nt, Artificial Sequence
  Description of Artificial Sequence: Synthetic oligonucleotide
gcuguuuucgacagacgcu

SEQ ID NO: 1185720 - RNA, 19 nt, Artificial Sequence
  Description of Artificial Sequence: Synthetic oligonucleotide
ccagccacaaacucgcuau

SEQ ID NO: 1185721 - RNA, 19 nt, Artificial Sequence
  Description of Artificial Sequence: Synthetic oligonucleotide
ccgcuguuuucgacagacg

SEQ ID NO: 1185722 - RNA, 19 nt, Artificial Sequence
  Description of Artificial Sequence: Synthetic oligonucleotide
cucagcggucauaugcuuu

SEQ ID NO: 1185723 - RNA, 19 nt, Artificial Sequence
  Description of Artificial Sequence: Synthetic oligonucleotide
ccgaucugggacagcugug

SEQ ID NO: 1185724 - RNA, 19 nt, Artificial Sequence
  Description of Artificial Sequence: Synthetic oligonucleotide
ggccauucaaacagcgugu

SEQ ID NO: 1185725 - RNA, 19 nt, Artificial Sequence
  Description of Artificial Sequence: Synthetic oligonucleotide
ccacccgcuguuuucgaca

SEQ ID NO: 1185726 - RNA, 19 nt, Artificial Sequence
  Description of Artificial Sequence: Synthetic oligonucleotide
agccgaucugggacagcug

SEQ ID NO: 1185727 - RNA, 19 nt, Artificial Sequence
  Description of Artificial Sequence: Synthetic oligonucleotide
ggauacuugcagguagggu

SEQ ID NO: 1185728 - RNA, 19 nt, Artificial Sequence
  Description of Artificial Sequence: Synthetic oligonucleotide
cagacgcuacuguaggcuu

SEQ ID NO: 1185729 - RNA, 19 nt, Artificial Sequence
  Description of Artificial Sequence: Synthetic oligonucleotide
gccacccgcuguuuucgac

SEQ ID NO: 1185730 - RNA, 19 nt, Artificial Sequence
  Description of Artificial Sequence: Synthetic oligonucleotide
cagcggucauaugcuuuuc

SEQ ID NO: 1185731 - RNA, 19 nt, Artificial Sequence
  Description of Artificial Sequence: Synthetic oligonucleotide
agccuuacucgagcagguu

SEQ ID NO: 1185732 - RNA, 19 nt, Artificial Sequence
  Description of Artificial Sequence: Synthetic oligonucleotide
gcuucaagucgagguagaa

SEQ ID NO: 1185733 - RNA, 19 nt, Artificial Sequence
  Description of Artificial Sequence: Synthetic oligonucleotide
cgggaauugcucagccaug

SEQ ID NO: 1185734 - RNA, 19 nt, Artificial Sequence
  Description of Artificial Sequence: Synthetic oligonucleotide
gucuauccugcaagauugu

SEQ ID NO: 1185735 - RNA, 19 nt, Artificial Sequence
  Description of Artificial Sequence: Synthetic oligonucleotide
gccauucaaacagcgugua

SEQ ID NO: 1185736 - RNA, 19 nt, Artificial Sequence
  Description of Artificial Sequence: Synthetic oligonucleotide
cuuacucgagcagguuccu

SEQ ID NO: 1185737 - RNA, 19 nt, Artificial Sequence
  Description of Artificial Sequence: Synthetic oligonucleotide
ggacaugcucuauuuccuu

SEQ ID NO: 1185738 - RNA, 19 nt, Artificial Sequence
  Description of Artificial Sequence: Synthetic oligonucleotide
ggcaguccaucggcgagga

SEQ ID NO: 1185739 - RNA, 19 nt, Artificial Sequence
  Description of Artificial Sequence: Synthetic oligonucleotide
cacgaucauggggcccuuc

SEQ ID NO: 1185740 - RNA, 19 nt, Artificial Sequence
  Description of Artificial Sequence: Synthetic oligonucleotide
ggacuccagaaguccugaa

SEQ ID NO: 1185741 - RNA, 19 nt, Artificial Sequence
  Description of Artificial Sequence: Synthetic oligonucleotide
cucuggcaggcagccgauc

SEQ ID NO: 1185742 - RNA, 19 nt, Artificial Sequence
  Description of Artificial Sequence: Synthetic oligonucleotide
caauaccaauaagcaccaa

SEQ ID NO: 1185743 - RNA, 19 nt, Artificial Sequence
  Description of Artificial Sequence: Synthetic oligonucleotide
cccugaugacauccaucuc

SEQ ID NO: 1185744 - RNA, 19 nt, Artificial Sequence
  Description of Artificial Sequence: Synthetic oligonucleotide
ccgaaaugacuugggauau

SEQ ID NO: 1185745 - RNA, 19 nt, Artificial Sequence
  Description of Artificial Sequence: Synthetic oligonucleotide
ccaguuaccuggucauuuu

SEQ ID NO: 1185746 - RNA, 19 nt, Artificial Sequence
  Description of Artificial Sequence: Synthetic oligonucleotide
gucucccgaaacagcggau

SEQ ID NO: 1185747 - RNA, 19 nt, Artificial Sequence
  Description of Artificial Sequence: Synthetic oligonucleotide
acgcuacuguaggcuucau

SEQ ID NO: 1185748 - RNA, 19 nt, Artificial Sequence
  Description of Artificial Sequence: Synthetic oligonucleotide
ccauucaaacagcguguau

SEQ ID NO: 1185749 - RNA, 19 nt, Artificial Sequence
  Description of Artificial Sequence: Synthetic oligonucleotide
gcucgccugcaaacaucca

SEQ ID NO: 1185750 - RNA, 19 nt, Artificial Sequence
  Description of Artificial Sequence: Synthetic oligonucleotide
ccugcagaauccggcucaa

SEQ ID NO: 1185751 - RNA, 19 nt, Artificial Sequence
  Description of Artificial Sequence: Synthetic oligonucleotide
gcccuucucagcggucaua

SEQ ID NO: 1185752 - RNA, 19 nt, Artificial Sequence
  Description of Artificial Sequence: Synthetic oligonucleotide
ccggugcuucggaggguga

SEQ ID NO: 1185753 - RNA, 19 nt, Artificial Sequence
  Description of Artificial Sequence: Synthetic oligonucleotide
ccgaaacagcggauacuuu

SEQ ID NO: 1185754 - RNA, 19 nt, Artificial Sequence
  Description of Artificial Sequence: Synthetic oligonucleotide
caccuuggucaggcggcuu

SEQ ID NO: 1185755 - RNA, 19 nt, Artificial Sequence
  Description of Artificial Sequence: Synthetic oligonucleotide
cggcgaggauguuaccaau

SEQ ID NO: 1185756 - RNA, 19 nt, Artificial Sequence
  Description of Artificial Sequence: Synthetic oligonucleotide
ggccagccacaaacucgcu

SEQ ID NO: 1185757 - RNA, 19 nt, Artificial Sequence
  Description of Artificial Sequence: Synthetic oligonucleotide
gcaguccaucggcgaggau

SEQ ID NO: 1185758 - RNA, 19 nt, Artificial Sequence
  Description of Artificial Sequence: Synthetic oligonucleotide
guccaucggcgaggauguu

SEQ ID NO: 1185759 - RNA, 19 nt, Artificial Sequence
  Description of Artificial Sequence: Synthetic oligonucleotide
ccggcucaagcaggcaguu

SEQ ID NO: 1185760 - RNA, 19 nt, Artificial Sequence
  Description of Artificial Sequence: Synthetic oligonucleotide
aagacaaccaguaucaucc

SEQ ID NO: 1185761 - RNA, 19 nt, Artificial Sequence
  Description of Artificial Sequence: Synthetic oligonucleotide
accaguaucauccugagcg

SEQ ID NO: 1185762 - RNA, 19 nt, Artificial Sequence
  Description of Artificial Sequence: Synthetic oligonucleotide
cuaccuauggcaaagaugg

SEQ ID NO: 1185763 - RNA, 19 nt, Artificial Sequence
  Description of Artificial Sequence: Synthetic oligonucleotide
aaaucaauugaccugauau

SEQ ID NO: 1185764 - RNA, 19 nt, Artificial Sequence
  Description of Artificial Sequence: Synthetic oligonucleotide
aauagaagagaccucgguc

SEQ ID NO: 1185765 - RNA, 19 nt, Artificial Sequence
  Description of Artificial Sequence: Synthetic oligonucleotide
gauaauagaagagaccucg

SEQ ID NO: 1185766 - RNA, 19 nt, Artificial Sequence
  Description of Artificial Sequence: Synthetic oligonucleotide
aguaguguaaaagacgucc

SEQ ID NO: 1185767 - RNA, 19 nt, Artificial Sequence
  Description of Artificial Sequence: Synthetic oligonucleotide
aaguaaccaaauaagugcc

SEQ ID NO: 1185768 - RNA, 19 nt, Artificial Sequence
  Description of Artificial Sequence: Synthetic oligonucleotide
guaacuuugaggcuaagcc

SEQ ID NO: 1185769 - RNA, 19 nt, Artificial Sequence
  Description of Artificial Sequence: Synthetic oligonucleotide
aaagucagcagacacguca

SEQ ID NO: 1185770 - RNA, 19 nt, Artificial Sequence
  Description of Artificial Sequence: Synthetic oligonucleotide
uucuagagaccucagacag

SEQ ID NO: 1185771 - RNA, 19 nt, Artificial Sequence
  Description of Artificial Sequence: Synthetic oligonucleotide
uugaugaguaacuuugagg

SEQ ID NO: 1185772 - RNA, 19 nt, Artificial Sequence
  Description of Artificial Sequence: Synthetic oligonucleotide
ugcaguaguguaaaagacg

SEQ ID NO: 1185773 - RNA, 19 nt, Artificial Sequence
  Description of Artificial Sequence: Synthetic oligonucleotide
uguagugacugcuaaaaug

SEQ ID NO: 1185774 - RNA, 19 nt, Artificial Sequence
  Description of Artificial Sequence: Synthetic oligonucleotide
aauuggauccuggucacgc

SEQ ID NO: 1185775 - RNA, 19 nt, Artificial Sequence
  Description of Artificial Sequence: Synthetic oligonucleotide
gagauaguugcccaguggg

SEQ ID NO: 1185776 - RNA, 19 nt, Artificial Sequence
  Description of Artificial Sequence: Synthetic oligonucleotide
agcuucaguacacugaggg

SEQ ID NO: 1185777 - RNA, 19 nt, Artificial Sequence
  Description of Artificial Sequence: Synthetic oligonucleotide
cagauuuaggacuacacag

SEQ ID NO: 1185778 - RNA, 19 nt, Artificial Sequence
  Description of Artificial Sequence: Synthetic oligonucleotide
ucuucuagagaccucagac

SEQ ID NO: 1185779 - RNA, 19 nt, Artificial Sequence
  Description of Artificial Sequence: Synthetic oligonucleotide
agaacaggcagcuagcaag

SEQ ID NO: 1185780 - RNA, 19 nt, Artificial Sequence
  Description of Artificial Sequence: Synthetic oligonucleotide
aaaauuucuucuagagacc

SEQ ID NO: 1185781 - RNA, 19 nt, Artificial Sequence
  Description of Artificial Sequence: Synthetic oligonucleotide
uguauugguaggaagcuca

SEQ ID NO: 1185782 - RNA, 19 nt, Artificial Sequence
  Description of Artificial Sequence: Synthetic oligonucleotide
ucgauaauagaagagaccu

SEQ ID NO: 1185783 - RNA, 19 nt, Artificial Sequence
  Description of Artificial Sequence: Synthetic oligonucleotide
uucaucaauaccaacuaac

SEQ ID NO: 1185784 - RNA, 19 nt, Artificial Sequence
  Description of Artificial Sequence: Synthetic oligonucleotide
cauccuauuuaagagaugg

SEQ ID NO: 1185785 - RNA, 19 nt, Artificial Sequence
  Description of Artificial Sequence: Synthetic oligonucleotide
uauuaaugacaacaccucc

SEQ ID NO: 1185786 - RNA, 19 nt, Artificial Sequence
  Description of Artificial Sequence: Synthetic oligonucleotide
aucaauugaccugauaugg

SEQ ID NO: 1185787 - RNA, 19 nt, Artificial Sequence
  Description of Artificial Sequence: Synthetic oligonucleotide
agaagggucagauuuagga

SEQ ID NO: 1185788 - RNA, 19 nt, Artificial Sequence
  Description of Artificial Sequence: Synthetic oligonucleotide
aagggucagauuuaggacu

SEQ ID NO: 1185789 - RNA, 19 nt, Artificial Sequence
  Description of Artificial Sequence: Synthetic oligonucleotide
uuauuaaugacaacaccuc

SEQ ID NO: 1185790 - RNA, 19 nt, Artificial Sequence
  Description of Artificial Sequence: Synthetic oligonucleotide
ucagauuuaggacuacaca

SEQ ID NO: 1185791 - RNA, 19 nt, Artificial Sequence
  Description of Artificial Sequence: Synthetic oligonucleotide
auagaagagaccucggucu

SEQ ID NO: 1185792 - RNA, 19 nt, Artificial Sequence
  Description of Artificial Sequence: Synthetic oligonucleotide
aagcucaaggcgaugacgc

SEQ ID NO: 1185793 - RNA, 19 nt, Artificial Sequence
  Description of Artificial Sequence: Synthetic oligonucleotide
caaaaguccaagagaaggg

SEQ ID NO: 1185794 - RNA, 19 nt, Artificial Sequence
  Description of Artificial Sequence: Synthetic oligonucleotide
uguaaaagacgucccagca

SEQ ID NO: 1185795 - RNA, 19 nt, Artificial Sequence
  Description of Artificial Sequence: Synthetic oligonucleotide
aggucguucuggcugaucc

SEQ ID NO: 1185796 - RNA, 19 nt, Artificial Sequence
  Description of Artificial Sequence: Synthetic oligonucleotide
cauuagugcagucaguagc

SEQ ID NO: 1185797 - RNA, 19 nt, Artificial Sequence
  Description of Artificial Sequence: Synthetic oligonucleotide
ugaacauucacuacuuuua

SEQ ID NO: 1185798 - RNA, 19 nt, Artificial Sequence
  Description of Artificial Sequence: Synthetic oligonucleotide
caaacuaugcaagacuugg

SEQ ID NO: 1185799 - RNA, 19 nt, Artificial Sequence
  Description of Artificial Sequence: Synthetic oligonucleotide
gucucguacagccauaucc

SEQ ID NO: 1185800 - RNA, 19 nt, Artificial Sequence
  Description of Artificial Sequence: Synthetic oligonucleotide
uuaugucuccaauuguucc

SEQ ID NO: 1185801 - RNA, 19 nt, Artificial Sequence
  Description of Artificial Sequence: Synthetic oligonucleotide
ucuguagcuugauauagug

SEQ ID NO: 1185802 - RNA, 19 nt, Artificial Sequence
  Description of Artificial Sequence: Synthetic oligonucleotide
cugaagaacaggcagcuag

SEQ ID NO: 1185803 - RNA, 19 nt, Artificial Sequence
  Description of Artificial Sequence: Synthetic oligonucleotide
uucaauagcaauucaguua

SEQ ID NO: 1185804 - RNA, 19 nt, Artificial Sequence
  Description of Artificial Sequence: Synthetic oligonucleotide
agaaucaggagauucuugu

SEQ ID NO: 1185805 - RNA, 19 nt, Artificial Sequence
  Description of Artificial Sequence: Synthetic oligonucleotide
uaaaagacgucccagcaua

SEQ ID NO: 1185806 - RNA, 19 nt, Artificial Sequence
  Description of Artificial Sequence: Synthetic oligonucleotide
uccuauuuaagagauggug

SEQ ID NO: 1185807 - RNA, 19 nt, Artificial Sequence
  Description of Artificial Sequence: Synthetic oligonucleotide
uggcgaacaugacagagag

SEQ ID NO: 1185808 - RNA, 19 nt, Artificial Sequence
  Description of Artificial Sequence: Synthetic oligonucleotide
accucggucucguacagcc

SEQ ID NO: 1185809 - RNA, 19 nt, Artificial Sequence
  Description of Artificial Sequence: Synthetic oligonucleotide
ucaguuaagaaaagacaac

SEQ ID NO: 1185810 - RNA, 19 nt, Artificial Sequence
  Description of Artificial Sequence: Synthetic oligonucleotide
gauguguucuugucggagg

SEQ ID NO: 1185811 - RNA, 19 nt, Artificial Sequence
  Description of Artificial Sequence: Synthetic oligonucleotide
aagauuuuaugucuccaau

SEQ ID NO: 1185812 - RNA, 19 nt, Artificial Sequence
  Description of Artificial Sequence: Synthetic oligonucleotide
gacuuggcgaacaugacag

SEQ ID NO: 1185813 - RNA, 19 nt, Artificial Sequence
  Description of Artificial Sequence: Synthetic oligonucleotide
gauauaguggggcuccgag

SEQ ID NO: 1185814 - RNA, 19 nt, Artificial Sequence
  Description of Artificial Sequence: Synthetic oligonucleotide
ucuaccuucuggcuuuuag

SEQ ID NO: 1185815 - RNA, 19 nt, Artificial Sequence
  Description of Artificial Sequence: Synthetic oligonucleotide
uuuagagauaguugcccag

SEQ ID NO: 1185816 - RNA, 19 nt, Artificial Sequence
  Description of Artificial Sequence: Synthetic oligonucleotide
aaaccaugcagugugucag

SEQ ID NO: 1185817 - RNA, 19 nt, Artificial Sequence
  Description of Artificial Sequence: Synthetic oligonucleotide
uucucaggcuucaauagca

SEQ ID NO: 1185818 - RNA, 19 nt, Artificial Sequence
  Description of Artificial Sequence: Synthetic oligonucleotide
uguacaacucauugacuag

SEQ ID NO: 1185819 - RNA, 19 nt, Artificial Sequence
  Description of Artificial Sequence: Synthetic oligonucleotide
cugagauaggcuuuccagg

SEQ ID NO: 1185820 - RNA, 19 nt, Artificial Sequence
  Description of Artificial Sequence: Synthetic oligonucleotide
gaaaaggcgcauuagugca

SEQ ID NO: 1185821 - RNA, 19 nt, Artificial Sequence
  Description of Artificial Sequence: Synthetic oligonucleotide
ucaauugaccugauauggc

SEQ ID NO: 1185822 - RNA, 19 nt, Artificial Sequence
  Description of Artificial Sequence: Synthetic oligonucleotide
uuugccauacacuggcacc

SEQ ID NO: 1185823 - RNA, 19 nt, Artificial Sequence
  Description of Artificial Sequence: Synthetic oligonucleotide
auguguucuugucggaggc

SEQ ID NO: 1185824 - RNA, 19 nt, Artificial Sequence
  Description of Artificial Sequence: Synthetic oligonucleotide
ccuauuuaagagauggugg

SEQ ID NO: 1185825 - RNA, 19 nt, Artificial Sequence
  Description of Artificial Sequence: Synthetic oligonucleotide
ugagggcacaaccaaacca

SEQ ID NO: 1185826 - RNA, 19 nt, Artificial Sequence
  Description of Artificial Sequence: Synthetic oligonucleotide
auaccaacuaacaggaguc

SEQ ID NO: 1185827 - RNA, 19 nt, Artificial Sequence
  Description of Artificial Sequence: Synthetic oligonucleotide
uaauagaagagaccucggu

SEQ ID NO: 1185828 - RNA, 19 nt, Artificial Sequence
  Description of Artificial Sequence: Synthetic oligonucleotide
acaauuggauccuggucac

SEQ ID NO: 1185829 - RNA, 19 nt, Artificial Sequence
  Description of Artificial Sequence: Synthetic oligonucleotide
agugacugcuaaaaugacc

SEQ ID NO: 1185830 - RNA, 19 nt, Artificial Sequence
  Description of Artificial Sequence: Synthetic oligonucleotide
ccugauauggccaaggaug

SEQ ID NO: 1185831 - RNA, 19 nt, Artificial Sequence
  Description of Artificial Sequence: Synthetic oligonucleotide
acaacucauugacuagagc

SEQ ID NO: 1185832 - RNA, 19 nt, Artificial Sequence
  Description of Artificial Sequence: Synthetic oligonucleotide
cuuuuagagauaguugccc

SEQ ID NO: 1185833 - RNA, 19 nt, Artificial Sequence
  Description of Artificial Sequence: Synthetic oligonucleotide
aaaaguccaagagaagggu

SEQ ID NO: 1185834 - RNA, 19 nt, Artificial Sequence
  Description of Artificial Sequence: Synthetic oligonucleotide
uacaacucauugacuagag

SEQ ID NO: 1185835 - RNA, 19 nt, Artificial Sequence
  Description of Artificial Sequence: Synthetic oligonucleotide
agagaccucagacaguuca

SEQ ID NO: 1185836 - RNA, 19 nt, Artificial Sequence
  Description of Artificial Sequence: Synthetic oligonucleotide
agauuuaggacuacacagg

SEQ ID NO: 1185837 - RNA, 19 nt, Artificial Sequence
  Description of Artificial Sequence: Synthetic oligonucleotide
ugacauccuauuuaagaga

SEQ ID NO: 1185838 - RNA, 19 nt, Artificial Sequence
  Description of Artificial Sequence: Synthetic oligonucleotide
uccgaguaagagcagaaaa

SEQ ID NO: 1185839 - RNA, 19 nt, Artificial Sequence
  Description of Artificial Sequence: Synthetic oligonucleotide
cauaucuuggcacucagca

SEQ ID NO: 1185840 - RNA, 19 nt, Artificial Sequence
  Description of Artificial Sequence: Synthetic oligonucleotide
agcaagggucccuugacuc

SEQ ID NO: 1185841 - RNA, 19 nt, Artificial Sequence
  Description of Artificial Sequence: Synthetic oligonucleotide
ugaagaacaggcagcuagc

SEQ ID NO: 1185842 - RNA, 19 nt, Artificial Sequence
  Description of Artificial Sequence: Synthetic oligonucleotide
agagaccucggucucguac

SEQ ID NO: 1185843 - RNA, 19 nt, Artificial Sequence
  Description of Artificial Sequence: Synthetic oligonucleotide
gaagggucagauuuaggac

SEQ ID NO: 1185844 - RNA, 19 nt, Artificial Sequence
  Description of Artificial Sequence: Synthetic oligonucleotide
aaccaguaucauccugagc

SEQ ID NO: 1185845 - RNA, 19 nt, Artificial Sequence
  Description of Artificial Sequence: Synthetic oligonucleotide
caagacuuggcgaacauga

SEQ ID NO: 1185846 - RNA, 19 nt, Artificial Sequence
  Description of Artificial Sequence: Synthetic oligonucleotide
agagauaguugcccagugg

SEQ ID NO: 1185847 - RNA, 19 nt, Artificial Sequence
  Description of Artificial Sequence: Synthetic oligonucleotide
aacuauucacaggucguuc

SEQ ID NO: 1185848 - RNA, 19 nt, Artificial Sequence
  Description of Artificial Sequence: Synthetic oligonucleotide
uuaggacuacacaggaucu

SEQ ID NO: 1185849 - RNA, 19 nt, Artificial Sequence
  Description of Artificial Sequence: Synthetic oligonucleotide
cauugauccaguuuugaca

SEQ ID NO: 1185850 - RNA, 19 nt, Artificial Sequence
  Description of Artificial Sequence: Synthetic oligonucleotide
ugcuuaacuucaucaauac

SEQ ID NO: 1185851 - RNA, 19 nt, Artificial Sequence
  Description of Artificial Sequence: Synthetic oligonucleotide
auuuaagagauggugggca

SEQ ID NO: 1185852 - RNA, 19 nt, Artificial Sequence
  Description of Artificial Sequence: Synthetic oligonucleotide
acaccuguugaugaguaac

SEQ ID NO: 1185853 - RNA, 19 nt, Artificial Sequence
  Description of Artificial Sequence: Synthetic oligonucleotide
caaaccaggucucggaaag

SEQ ID NO: 1185854 - RNA, 19 nt, Artificial Sequence
  Description of Artificial Sequence: Synthetic oligonucleotide
auugcgauggucugaacau

SEQ ID NO: 1185855 - RNA, 19 nt, Artificial Sequence
  Description of Artificial Sequence: Synthetic oligonucleotide
cuugauauaguggggcucc

SEQ ID NO: 1185856 - RNA, 19 nt, Artificial Sequence
  Description of Artificial Sequence: Synthetic oligonucleotide
aacaggagucgauaauaga

SEQ ID NO: 1185857 - RNA, 19 nt, Artificial Sequence
  Description of Artificial Sequence: Synthetic oligonucleotide
agugugucaguccuggccu

SEQ ID NO: 1185858 - RNA, 19 nt, Artificial Sequence
  Description of Artificial Sequence: Synthetic oligonucleotide
guaagcuggagauugggga

SEQ ID NO: 1185859 - RNA, 19 nt, Artificial Sequence
  Description of Artificial Sequence: Synthetic oligonucleotide
aacuaacaggagucgauaa

SEQ ID NO: 1185860 - RNA, 19 nt, Artificial Sequence
  Description of Artificial Sequence: Synthetic oligonucleotide
ucacgcaggagacuguaca

SEQ ID NO: 1185861 - RNA, 19 nt, Artificial Sequence
  Description of Artificial Sequence: Synthetic oligonucleotide
aggauguauugguaggaag

SEQ ID NO: 1185862 - RNA, 19 nt, Artificial Sequence
  Description of Artificial Sequence: Synthetic oligonucleotide
agcaacucuguuaaaaucu

SEQ ID NO: 1185863 - RNA, 19 nt, Artificial Sequence
  Description of Artificial Sequence: Synthetic oligonucleotide
gaagcucaaggcgaugacg

SEQ ID NO: 1185864 - RNA, 19 nt, Artificial Sequence
  Description of Artificial Sequence: Synthetic oligonucleotide
auuaaugacaacaccuccu

SEQ ID NO: 1185865 - RNA, 19 nt, Artificial Sequence
  Description of Artificial Sequence: Synthetic oligonucleotide
acuaugcaagacuuggcga

SEQ ID NO: 1185866 - RNA, 19 nt, Artificial Sequence
  Description of Artificial Sequence: Synthetic oligonucleotide
acuauucacaggucguucu

SEQ ID NO: 1185867 - RNA, 19 nt, Artificial Sequence
  Description of Artificial Sequence: Synthetic oligonucleotide
ccaaaaguccaagagaagg

SEQ ID NO: 1185868 - RNA, 19 nt, Artificial Sequence
  Description of Artificial Sequence: Synthetic oligonucleotide
auaucuuggcacucagcag

SEQ ID NO: 1185869 - RNA, 19 nt, Artificial Sequence
  Description of Artificial Sequence: Synthetic oligonucleotide
uggagauuggggaccagca

SEQ ID NO: 1185870 - RNA, 19 nt, Artificial Sequence
  Description of Artificial Sequence: Synthetic oligonucleotide
guuuugacauccuauuuaa

SEQ ID NO: 1185871 - RNA, 19 nt, Artificial Sequence
  Description of Artificial Sequence: Synthetic oligonucleotide
ugaggcuaagccauguuuu

SEQ ID NO: 1185872 - RNA, 19 nt, Artificial Sequence
  Description of Artificial Sequence: Synthetic oligonucleotide
ugacgcucuaccuucuggc

SEQ ID NO: 1185873 - RNA, 19 nt, Artificial Sequence
  Description of Artificial Sequence: Synthetic oligonucleotide
acugagggcacaaccaaac

SEQ ID NO: 1185874 - RNA, 19 nt, Artificial Sequence
  Description of Artificial Sequence: Synthetic oligonucleotide
caaucacaguuucuaauac

SEQ ID NO: 1185875 - RNA, 19 nt, Artificial Sequence
  Description of Artificial Sequence: Synthetic oligonucleotide
gucucggaaagucugcacc

SEQ ID NO: 1185876 - RNA, 19 nt, Artificial Sequence
  Description of Artificial Sequence: Synthetic oligonucleotide
ucucggaaagucugcacca

SEQ ID NO: 1185877 - RNA, 19 nt, Artificial Sequence
  Description of Artificial Sequence: Synthetic oligonucleotide
aauugaccugauauggcca

SEQ ID NO: 1185878 - RNA, 19 nt, Artificial Sequence
  Description of Artificial Sequence: Synthetic oligonucleotide
uagcuugauauaguggggc

SEQ ID NO: 1185879 - RNA, 19 nt, Artificial Sequence
  Description of Artificial Sequence: Synthetic oligonucleotide
auggucugaacauucacua

SEQ ID NO: 1185880 - RNA, 19 nt, Artificial Sequence
  Description of Artificial Sequence: Synthetic oligonucleotide
guagcuccaucuuaacagc

SEQ ID NO: 1185881 - RNA, 19 nt, Artificial Sequence
  Description of Artificial Sequence: Synthetic oligonucleotide
guacacugagggcacaacc

SEQ ID NO: 1185882 - RNA, 19 nt, Artificial Sequence
  Description of Artificial Sequence: Synthetic oligonucleotide
guaaccaaauaagugccug

SEQ ID NO: 1185883 - RNA, 19 nt, Artificial Sequence
  Description of Artificial Sequence: Synthetic oligonucleotide
ugaccugauauggccaagg

SEQ ID NO: 1185884 - RNA, 19 nt, Artificial Sequence
  Description of Artificial Sequence: Synthetic oligonucleotide
augacgcucuaccuucugg

SEQ ID NO: 1185885 - RNA, 19 nt, Artificial Sequence
  Description of Artificial Sequence: Synthetic oligonucleotide
agauaguugcccagugggc

SEQ ID NO: 1185886 - RNA, 19 nt, Artificial Sequence
  Description of Artificial Sequence: Synthetic oligonucleotide
gcgaacaugacagagagca

SEQ ID NO: 1185887 - RNA, 19 nt, Artificial Sequence
  Description of Artificial Sequence: Synthetic oligonucleotide
uucuucuagagaccucaga

SEQ ID NO: 1185888 - RNA, 19 nt, Artificial Sequence
  Description of Artificial Sequence: Synthetic oligonucleotide
auuuggagagugucgggcu

SEQ ID NO: 1185889 - RNA, 19 nt, Artificial Sequence
  Description of Artificial Sequence: Synthetic oligonucleotide
ggauguauugguaggaagc

SEQ ID NO: 1185890 - RNA, 19 nt, Artificial Sequence
  Description of Artificial Sequence: Synthetic oligonucleotide
uucuguagcuugauauagu

SEQ ID NO: 1185891 - RNA, 19 nt, Artificial Sequence
  Description of Artificial Sequence: Synthetic oligonucleotide
agaaagaguuugguggcuc

SEQ ID NO: 1185892 - RNA, 19 nt, Artificial Sequence
  Description of Artificial Sequence: Synthetic oligonucleotide
uuagagauaguugcccagu

SEQ ID NO: 1185893 - RNA, 19 nt, Artificial Sequence
  Description of Artificial Sequence: Synthetic oligonucleotide
auaauagaagagaccucgg

SEQ ID NO: 1185894 - RNA, 19 nt, Artificial Sequence
  Description of Artificial Sequence: Synthetic oligonucleotide
ugagcgcugagauaggcuu

SEQ ID NO: 1185895 - RNA, 19 nt, Artificial Sequence
  Description of Artificial Sequence: Synthetic oligonucleotide
aacucuguuaaaaucugua

SEQ ID NO: 1185896 - RNA, 19 nt, Artificial Sequence
  Description of Artificial Sequence: Synthetic oligonucleotide
gacucguaccagcacauca

SEQ ID NO: 1185897 - RNA, 19 nt, Artificial Sequence
  Description of Artificial Sequence: Synthetic oligonucleotide
uauggccaaggauguauug

SEQ ID NO: 1185898 - RNA, 19 nt, Artificial Sequence
  Description of Artificial Sequence: Synthetic oligonucleotide
ucaggagauucuuguauuc

SEQ ID NO: 1185899 - RNA, 19 nt, Artificial Sequence
  Description of Artificial Sequence: Synthetic oligonucleotide
uguuccaaucacaguuucu

SEQ ID NO: 1185900 - RNA, 19 nt, Artificial Sequence
  Description of Artificial Sequence: Synthetic oligonucleotide
acuaacaggagucgauaau

SEQ ID NO: 1185901 - RNA, 19 nt, Artificial Sequence
  Description of Artificial Sequence: Synthetic oligonucleotide
acaaccaguaucauccuga

SEQ ID NO: 1185902 - RNA, 19 nt, Artificial Sequence
  Description of Artificial Sequence: Synthetic oligonucleotide
cuguacaacucauugacua

SEQ ID NO: 1185903 - RNA, 19 nt, Artificial Sequence
  Description of Artificial Sequence: Synthetic oligonucleotide
ucggaaagucugcaccacc

SEQ ID NO: 1185904 - RNA, 19 nt, Artificial Sequence
  Description of Artificial Sequence: Synthetic oligonucleotide
uaccaacuaacaggagucg

SEQ ID NO: 1185905 - RNA, 19 nt, Artificial Sequence
  Description of Artificial Sequence: Synthetic oligonucleotide
cuaaaaugaccuggcaaac

SEQ ID NO: 1185906 - RNA, 19 nt, Artificial Sequence
  Description of Artificial Sequence: Synthetic oligonucleotide
ucuagcaccugcugcacau

SEQ ID NO: 1185907 - RNA, 19 nt, Artificial Sequence
  Description of Artificial Sequence: Synthetic oligonucleotide
ucuuaacagcaggaaaugu

SEQ ID NO: 1185908 - RNA, 19 nt, Artificial Sequence
  Description of Artificial Sequence: Synthetic oligonucleotide
ugaguaacuuugaggcuaa

SEQ ID NO: 1185909 - RNA, 19 nt, Artificial Sequence
  Description of Artificial Sequence: Synthetic oligonucleotide
cauugcgauggucugaaca

SEQ ID NO: 1185910 - RNA, 19 nt, Artificial Sequence
  Description of Artificial Sequence: Synthetic oligonucleotide
augaguaacuuugaggcua

SEQ ID NO: 1185911 - RNA, 19 nt, Artificial Sequence
  Description of Artificial Sequence: Synthetic oligonucleotide
guagcuugauauagugggg

SEQ ID NO: 1185912 - RNA, 19 nt, Artificial Sequence
  Description of Artificial Sequence: Synthetic oligonucleotide
cuugacucguaccagcaca

SEQ ID NO: 1185913 - RNA, 19 nt, Artificial Sequence
  Description of Artificial Sequence: Synthetic oligonucleotide
gauccuccaaaaguccaag

SEQ ID NO: 1185914 - RNA, 19 nt, Artificial Sequence
  Description of Artificial Sequence: Synthetic oligonucleotide
acaaccaaaccaggucucg

SEQ ID NO: 1185915 - RNA, 19 nt, Artificial Sequence
  Description of Artificial Sequence: Synthetic oligonucleotide
ccaaauaagugccuguuuc

SEQ ID NO: 1185916 - RNA, 19 nt, Artificial Sequence
  Description of Artificial Sequence: Synthetic oligonucleotide
cuucuagagaccucagaca

SEQ ID NO: 1185917 - RNA, 19 nt, Artificial Sequence
  Description of Artificial Sequence: Synthetic oligonucleotide
cagcaacucuguuaaaauc

SEQ ID NO: 1185918 - RNA, 19 nt, Artificial Sequence
  Description of Artificial Sequence: Synthetic oligonucleotide
ucuagagaccucagacagu

SEQ ID NO: 1185919 - RNA, 19 nt, Artificial Sequence
  Description of Artificial Sequence: Synthetic oligonucleotide
cccaacuauucacaggucg

SEQ ID NO: 1185920 - RNA, 19 nt, Artificial Sequence
  Description of Artificial Sequence: Synthetic oligonucleotide
cuaugcaagacuuggcgaa

SEQ ID NO: 1185921 - RNA, 19 nt, Artificial Sequence
  Description of Artificial Sequence: Synthetic oligonucleotide
ucuugucggaggcccagca

SEQ ID NO: 1185922 - RNA, 19 nt, Artificial Sequence
  Description of Artificial Sequence: Synthetic oligonucleotide
gagauuggggaccagcaua

SEQ ID NO: 1185923 - RNA, 19 nt, Artificial Sequence
  Description of Artificial Sequence: Synthetic oligonucleotide
uggaccccaaguaaccaaa

SEQ ID NO: 1185924 - RNA, 19 nt, Artificial Sequence
  Description of Artificial Sequence: Synthetic oligonucleotide
ggcgcauuagugcagucag

SEQ ID NO: 1185925 - RNA, 19 nt, Artificial Sequence
  Description of Artificial Sequence: Synthetic oligonucleotide
gugacugcuaaaaugaccu

SEQ ID NO: 1185926 - RNA, 19 nt, Artificial Sequence
  Description of Artificial Sequence: Synthetic oligonucleotide
auguauugguaggaagcuc

SEQ ID NO: 1185927 - RNA, 19 nt, Artificial Sequence
  Description of Artificial Sequence: Synthetic oligonucleotide
aaaggcgcauuagugcagu

SEQ ID NO: 1185928 - RNA, 19 nt, Artificial Sequence
  Description of Artificial Sequence: Synthetic oligonucleotide
uugacucguaccagcacau

SEQ ID NO: 1185929 - RNA, 19 nt, Artificial Sequence
  Description of Artificial Sequence: Synthetic oligonucleotide
caggagauucuuguauucc

SEQ ID NO: 1185930 - RNA, 19 nt, Artificial Sequence
  Description of Artificial Sequence: Synthetic oligonucleotide
ucuggcugauccuccaaaa

SEQ ID NO: 1185931 - RNA, 19 nt, Artificial Sequence
  Description of Artificial Sequence: Synthetic oligonucleotide
caucuuaacagcaggaaau

SEQ ID NO: 1185932 - RNA, 19 nt, Artificial Sequence
  Description of Artificial Sequence: Synthetic oligonucleotide
ccaaggauguauugguagg

SEQ ID NO: 1185933 - RNA, 19 nt, Artificial Sequence
  Description of Artificial Sequence: Synthetic oligonucleotide
agucuuggcaaugcuaccu

SEQ ID NO: 1185934 - RNA, 19 nt, Artificial Sequence
  Description of Artificial Sequence: Synthetic oligonucleotide
ugucgggcuggacuucucc

SEQ ID NO: 1185935 - RNA, 19 nt, Artificial Sequence
  Description of Artificial Sequence: Synthetic oligonucleotide
aaggauguauugguaggaa

SEQ ID NO: 1185936 - RNA, 19 nt, Artificial Sequence
  Description of Artificial Sequence: Synthetic oligonucleotide
ucguucaccagcucacaaa

SEQ ID NO: 1185937 - RNA, 19 nt, Artificial Sequence
  Description of Artificial Sequence: Synthetic oligonucleotide
ugcaguagccuugaagcuc

SEQ ID NO: 1185938 - RNA, 19 nt, Artificial Sequence
  Description of Artificial Sequence: Synthetic oligonucleotide
ugacagagagcagcaaaac

SEQ ID NO: 1185939 - RNA, 19 nt, Artificial Sequence
  Description of Artificial Sequence: Synthetic oligonucleotide
uacucagcaguaagcugga

SEQ ID NO: 1185940 - RNA, 19 nt, Artificial Sequence
  Description of Artificial Sequence: Synthetic oligonucleotide
agacaguucacaaccacaa

SEQ ID NO: 1185941 - RNA, 19 nt, Artificial Sequence
  Description of Artificial Sequence: Synthetic oligonucleotide
cuggcugauccuccaaaag

SEQ ID NO: 1185942 - RNA, 19 nt, Artificial Sequence
  Description of Artificial Sequence: Synthetic oligonucleotide
acucguaccagcacaucag

SEQ ID NO: 1185943 - RNA, 19 nt, Artificial Sequence
  Description of Artificial Sequence: Synthetic oligonucleotide
ugacugcuaaaaugaccug

SEQ ID NO: 1185944 - RNA, 19 nt, Artificial Sequence
  Description of Artificial Sequence: Synthetic oligonucleotide
gaggaaaaggcgcauuagu

SEQ ID NO: 1185945 - RNA, 19 nt, Artificial Sequence
  Description of Artificial Sequence: Synthetic oligonucleotide
agagugucgggcuggacuu

SEQ ID NO: 1185946 - RNA, 19 nt, Artificial Sequence
  Description of Artificial Sequence: Synthetic oligonucleotide
ugcuaccuauggcaaagau

SEQ ID NO: 1185947 - RNA, 19 nt, Artificial Sequence
  Description of Artificial Sequence: Synthetic oligonucleotide
aaggcgcauuagugcaguc

SEQ ID NO: 1185948 - RNA, 19 nt, Artificial Sequence
  Description of Artificial Sequence: Synthetic oligonucleotide
gauguauugguaggaagcu

SEQ ID NO: 1185949 - RNA, 19 nt, Artificial Sequence
  Description of Artificial Sequence: Synthetic oligonucleotide
cuggcaaacuaugcaagac

SEQ ID NO: 1185950 - RNA, 19 nt, Artificial Sequence
  Description of Artificial Sequence: Synthetic oligonucleotide
ugccaagaucagaaagagu

SEQ ID NO: 1185951 - RNA, 19 nt, Artificial Sequence
  Description of Artificial Sequence: Synthetic oligonucleotide
acgcaggagacuguacaac

SEQ ID NO: 1185952 - RNA, 19 nt, Artificial Sequence
  Description of Artificial Sequence: Synthetic oligonucleotide
ggagucgauaauagaagag

SEQ ID NO: 1185953 - RNA, 19 nt, Artificial Sequence
  Description of Artificial Sequence: Synthetic oligonucleotide
ugucggaggcccagcaacu

SEQ ID NO: 1185954 - RNA, 19 nt, Artificial Sequence
  Description of Artificial Sequence: Synthetic oligonucleotide
guucacaaccacaauugga

SEQ ID NO: 1185955 - RNA, 19 nt, Artificial Sequence
  Description of Artificial Sequence: Synthetic oligonucleotide
cuaccuucuggcuuuuaga

SEQ ID NO: 1185956 - RNA, 19 nt, Artificial Sequence
  Description of Artificial Sequence: Synthetic oligonucleotide
guguucuugucggaggccc

SEQ ID NO: 1185957 - RNA, 19 nt, Artificial Sequence
  Description of Artificial Sequence: Synthetic oligonucleotide
guacaacucauugacuaga

SEQ ID NO: 1185958 - RNA, 19 nt, Artificial Sequence
  Description of Artificial Sequence: Synthetic oligonucleotide
gagagugucgggcuggacu

SEQ ID NO: 1185959 - RNA, 19 nt, Artificial Sequence
  Description of Artificial Sequence: Synthetic oligonucleotide
agucaguagcuccaucuua

SEQ ID NO: 1185960 - RNA, 19 nt, Artificial Sequence
  Description of Artificial Sequence: Synthetic oligonucleotide
gauaguugcccagugggcu

SEQ ID NO: 1185961 - RNA, 19 nt, Artificial Sequence
  Description of Artificial Sequence: Synthetic oligonucleotide
gaaaucaauugaccugaua

SEQ ID NO: 1185962 - RNA, 19 nt, Artificial Sequence
  Description of Artificial Sequence: Synthetic oligonucleotide
aaacaccuguugaugagua

SEQ ID NO: 1185963 - RNA, 19 nt, Artificial Sequence
  Description of Artificial Sequence: Synthetic oligonucleotide
uaggacuacacaggaucug

SEQ ID NO: 1185964 - RNA, 19 nt, Artificial Sequence
  Description of Artificial Sequence: Synthetic oligonucleotide
ucuaugcaguaguguaaaa

SEQ ID NO: 1185965 - RNA, 19 nt, Artificial Sequence
  Description of Artificial Sequence: Synthetic oligonucleotide
gaugaguaacuuugaggcu

SEQ ID NO: 1185966 - RNA, 19 nt, Artificial Sequence
  Description of Artificial Sequence: Synthetic oligonucleotide
uagagccauuuggagagug

SEQ ID NO: 1185967 - RNA, 19 nt, Artificial Sequence
  Description of Artificial Sequence: Synthetic oligonucleotide
acacugcucuguguaaguc

SEQ ID NO: 1185968 - RNA, 19 nt, Artificial Sequence
  Description of Artificial Sequence: Synthetic oligonucleotide
ggcuuauuaaugacaacac

SEQ ID NO: 1185969 - RNA, 19 nt, Artificial Sequence
  Description of Artificial Sequence: Synthetic oligonucleotide
cacaaccaaaccaggucuc

SEQ ID NO: 1185970 - RNA, 19 nt, Artificial Sequence
  Description of Artificial Sequence: Synthetic oligonucleotide
caaccaaaccaggucucgg

SEQ ID NO: 1185971 - RNA, 19 nt, Artificial Sequence
  Description of Artificial Sequence: Synthetic oligonucleotide
gguaggaagcucaaggcga

SEQ ID NO: 1185972 - RNA, 19 nt, Artificial Sequence
  Description of Artificial Sequence: Synthetic oligonucleotide
agcgcugagauaggcuuuc

SEQ ID NO: 1185973 - RNA, 19 nt, Artificial Sequence
  Description of Artificial Sequence: Synthetic oligonucleotide
aguaucauccugagcgcug

SEQ ID NO: 1185974 - RNA, 19 nt, Artificial Sequence
  Description of Artificial Sequence: Synthetic oligonucleotide
accuggcaaacuaugcaag

SEQ ID NO: 1185975 - RNA, 19 nt, Artificial Sequence
  Description of Artificial Sequence: Synthetic oligonucleotide
cuggagauuggggaccagc

SEQ ID NO: 1185976 - RNA, 19 nt, Artificial Sequence
  Description of Artificial Sequence: Synthetic oligonucleotide
aguaaccaaauaagugccu

SEQ ID NO: 1185977 - RNA, 19 nt, Artificial Sequence
  Description of Artificial Sequence: Synthetic oligonucleotide
caggaaaugucucugacuu

SEQ ID NO: 1185978 - RNA, 19 nt, Artificial Sequence
  Description of Artificial Sequence: Synthetic oligonucleotide
ugcaagacuuggcgaacau

SEQ ID NO: 1185979 - RNA, 19 nt, Artificial Sequence
  Description of Artificial Sequence: Synthetic oligonucleotide
ggucccuugacucguacca

SEQ ID NO: 1185980 - RNA, 19 nt, Artificial Sequence
  Description of Artificial Sequence: Synthetic oligonucleotide
ucggaggcccagcaacucu

SEQ ID NO: 1185981 - RNA, 19 nt, Artificial Sequence
  Description of Artificial Sequence: Synthetic oligonucleotide
ugggcuuauuaaugacaac

SEQ ID NO: 1185982 - RNA, 19 nt, Artificial Sequence
  Description of Artificial Sequence: Synthetic oligonucleotide
gcuaccuauggcaaagaug

SEQ ID NO: 1185983 - RNA, 19 nt, Artificial Sequence
  Description of Artificial Sequence: Synthetic oligonucleotide
gaccugauauggccaagga

SEQ ID NO: 1185984 - RNA, 19 nt, Artificial Sequence
  Description of Artificial Sequence: Synthetic oligonucleotide
ggcgcgagaggaaaaggcg

SEQ ID NO: 1185985 - RNA, 19 nt, Artificial Sequence
  Description of Artificial Sequence: Synthetic oligonucleotide
uccugagcgcugagauagg

SEQ ID NO: 1185986 - RNA, 19 nt, Artificial Sequence
  Description of Artificial Sequence: Synthetic oligonucleotide
agaccucggucucguacag

SEQ ID NO: 1185987 - RNA, 19 nt, Artificial Sequence
  Description of Artificial Sequence: Synthetic oligonucleotide
agauuggggaccagcauaa

SEQ ID NO: 1185988 - RNA, 19 nt, Artificial Sequence
  Description of Artificial Sequence: Synthetic oligonucleotide
cuccaucuuaacagcagga

SEQ ID NO: 1185989 - RNA, 19 nt, Artificial Sequence
  Description of Artificial Sequence: Synthetic oligonucleotide
gcauuagugcagucaguag

SEQ ID NO: 1185990 - RNA, 19 nt, Artificial Sequence
  Description of Artificial Sequence: Synthetic oligonucleotide
auggaccccaaguaaccaa

SEQ ID NO: 1185991 - RNA, 19 nt, Artificial Sequence
  Description of Artificial Sequence: Synthetic oligonucleotide
aaaagacgucccagcauau

SEQ ID NO: 1185992 - RNA, 19 nt, Artificial Sequence
  Description of Artificial Sequence: Synthetic oligonucleotide
cuacacaggaucugcuuaa

SEQ ID NO: 1185993 - RNA, 19 nt, Artificial Sequence
  Description of Artificial Sequence: Synthetic oligonucleotide
ugauauaguggggcuccga

SEQ ID NO: 1185994 - RNA, 19 nt, Artificial Sequence
  Description of Artificial Sequence: Synthetic oligonucleotide
caaaaccaugcaguguguc

SEQ ID NO: 1185995 - RNA, 19 nt, Artificial Sequence
  Description of Artificial Sequence: Synthetic oligonucleotide
aucguucaccagcucacaa

SEQ ID NO: 1185996 - RNA, 19 nt, Artificial Sequence
  Description of Artificial Sequence: Synthetic oligonucleotide
ucguaccagcacaucaguu

SEQ ID NO: 1185997 - RNA, 19 nt, Artificial Sequence
  Description of Artificial Sequence: Synthetic oligonucleotide
cuucaauagcaauucaguu

SEQ ID NO: 1185998 - RNA, 19 nt, Artificial Sequence
  Description of Artificial Sequence: Synthetic oligonucleotide
auaguugcccagugggcuu

SEQ ID NO: 1185999 - RNA, 19 nt, Artificial Sequence
  Description of Artificial Sequence: Synthetic oligonucleotide
aguagccuugaagcucuuc

SEQ ID NO: 1186000 - RNA, 19 nt, Artificial Sequence
  Description of Artificial Sequence: Synthetic oligonucleotide
gucgggcuggacuucuccc

SEQ ID NO: 1186001 - RNA, 19 nt, Artificial Sequence
  Description of Artificial Sequence: Synthetic oligonucleotide
caguagcuccaucuuaaca

SEQ ID NO: 1186002 - RNA, 19 nt, Artificial Sequence
  Description of Artificial Sequence: Synthetic oligonucleotide
uggcacucagcagggcgcg

SEQ ID NO: 1186003 - RNA, 19 nt, Artificial Sequence
  Description of Artificial Sequence: Synthetic oligonucleotide
cacaucaguuuuguacaug

SEQ ID NO: 1186004 - RNA, 19 nt, Artificial Sequence
  Description of Artificial Sequence: Synthetic oligonucleotide
cugauauggccaaggaugu

SEQ ID NO: 1186005 - RNA, 19 nt, Artificial Sequence
  Description of Artificial Sequence: Synthetic oligonucleotide
ggggcuccgaguaagagca

SEQ ID NO: 1186006 - RNA, 19 nt, Artificial Sequence
  Description of Artificial Sequence: Synthetic oligonucleotide
caguaguguaaaagacguc

SEQ ID NO: 1186007 - RNA, 19 nt, Artificial Sequence
  Description of Artificial Sequence: Synthetic oligonucleotide
caaggauguauugguagga

SEQ ID NO: 1186008 - RNA, 19 nt, Artificial Sequence
  Description of Artificial Sequence: Synthetic oligonucleotide
gaaaugucucugacuucac

SEQ ID NO: 1186009 - RNA, 19 nt, Artificial Sequence
  Description of Artificial Sequence: Synthetic oligonucleotide
ccauggaccccaaguaacc

SEQ ID NO: 1186010 - RNA, 19 nt, Artificial Sequence
  Description of Artificial Sequence: Synthetic oligonucleotide
guaagucuuggcaaugcua

SEQ ID NO: 1186011 - RNA, 19 nt, Artificial Sequence
  Description of Artificial Sequence: Synthetic oligonucleotide
uaaggagcauuggggauuu

SEQ ID NO: 1186012 - RNA, 19 nt, Artificial Sequence
  Description of Artificial Sequence: Synthetic oligonucleotide
guaaaagacgucccagcau

SEQ ID NO: 1186013 - RNA, 19 nt, Artificial Sequence
  Description of Artificial Sequence: Synthetic oligonucleotide
caaggaaacaccuguugau

SEQ ID NO: 1186014 - RNA, 19 nt, Artificial Sequence
  Description of Artificial Sequence: Synthetic oligonucleotide
agcucaaggcgaugacgcu

SEQ ID NO: 1186015 - RNA, 19 nt, Artificial Sequence
  Description of Artificial Sequence: Synthetic oligonucleotide
aggcgaugacgcucuaccu

SEQ ID NO: 1186016 - RNA, 19 nt, Artificial Sequence
  Description of Artificial Sequence: Synthetic oligonucleotide
ccuguuuccccucacuguc

SEQ ID NO: 1186017 - RNA, 19 nt, Artificial Sequence
  Description of Artificial Sequence: Synthetic oligonucleotide
agggcgcgagaggaaaagg

SEQ ID NO: 1186018 - RNA, 19 nt, Artificial Sequence
  Description of Artificial Sequence: Synthetic oligonucleotide
cucuaugcaguaguguaaa

SEQ ID NO: 1186019 - RNA, 19 nt, Artificial Sequence
  Description of Artificial Sequence: Synthetic oligonucleotide
uuagugcagucaguagcuc

SEQ ID NO: 1186020 - RNA, 19 nt, Artificial Sequence
  Description of Artificial Sequence: Synthetic oligonucleotide
gauuggggaccagcauaag

SEQ ID NO: 1186021 - RNA, 19 nt, Artificial Sequence
  Description of Artificial Sequence: Synthetic oligonucleotide
caauuggauccuggucacg

SEQ ID NO: 1186022 - RNA, 19 nt, Artificial Sequence
  Description of Artificial Sequence: Synthetic oligonucleotide
gcgaugacgcucuaccuuc

SEQ ID NO: 1186023 - RNA, 19 nt, Artificial Sequence
  Description of Artificial Sequence: Synthetic oligonucleotide
ucacagagauuugcauuuc

SEQ ID NO: 1186024 - RNA, 19 nt, Artificial Sequence
  Description of Artificial Sequence: Synthetic oligonucleotide
guaucauccugagcgcuga

SEQ ID NO: 1186025 - RNA, 19 nt, Artificial Sequence
  Description of Artificial Sequence: Synthetic oligonucleotide
gaccccaaguaaccaaaua

SEQ ID NO: 1186026 - RNA, 19 nt, Artificial Sequence
  Description of Artificial Sequence: Synthetic oligonucleotide
augcaagacuuggcgaaca

SEQ ID NO: 1186027 - RNA, 19 nt, Artificial Sequence
  Description of Artificial Sequence: Synthetic oligonucleotide
aggcgcauuagugcaguca

SEQ ID NO: 1186028 - RNA, 19 nt, Artificial Sequence
  Description of Artificial Sequence: Synthetic oligonucleotide
cuggcuuuuagagauaguu

SEQ ID NO: 1186029 - RNA, 19 nt, Artificial Sequence
  Description of Artificial Sequence: Synthetic oligonucleotide
auccuauuuaagagauggu

SEQ ID NO: 1186030 - RNA, 19 nt, Artificial Sequence
  Description of Artificial Sequence: Synthetic oligonucleotide
acauccuauuuaagagaug

SEQ ID NO: 1186031 - RNA, 19 nt, Artificial Sequence
  Description of Artificial Sequence: Synthetic oligonucleotide
acgcucuaccuucuggcuu

SEQ ID NO: 1186032 - RNA, 19 nt, Artificial Sequence
  Description of Artificial Sequence: Synthetic oligonucleotide
caaagucagcagacacguc

SEQ ID NO: 1186033 - RNA, 19 nt, Artificial Sequence
  Description of Artificial Sequence: Synthetic oligonucleotide
gcuagcaagggucccuuga

SEQ ID NO: 1186034 - RNA, 19 nt, Artificial Sequence
  Description of Artificial Sequence: Synthetic oligonucleotide
guaccagcacaucaguuuu

SEQ ID NO: 1186035 - RNA, 19 nt, Artificial Sequence
  Description of Artificial Sequence: Synthetic oligonucleotide
ggaagcucaaggcgaugac

SEQ ID NO: 1186036 - RNA, 19 nt, Artificial Sequence
  Description of Artificial Sequence: Synthetic oligonucleotide
acuuugaggcuaagccaug

SEQ ID NO: 1186037 - RNA, 19 nt, Artificial Sequence
  Description of Artificial Sequence: Synthetic oligonucleotide
cauaaggagcauuggggau

SEQ ID NO: 1186038 - RNA, 19 nt, Artificial Sequence
  Description of Artificial Sequence: Synthetic oligonucleotide
cagggcgcgagaggaaaag

SEQ ID NO: 1186039 - RNA, 19 nt, Artificial Sequence
  Description of Artificial Sequence: Synthetic oligonucleotide
uuagagccauuuggagagu

SEQ ID NO: 1186040 - RNA, 19 nt, Artificial Sequence
  Description of Artificial Sequence: Synthetic oligonucleotide
gacgcucuaccuucuggcu

SEQ ID NO: 1186041 - RNA, 19 nt, Artificial Sequence
  Description of Artificial Sequence: Synthetic oligonucleotide
gucccuugacucguaccag

SEQ ID NO: 1186042 - RNA, 19 nt, Artificial Sequence
  Description of Artificial Sequence: Synthetic oligonucleotide
cacgcaggagacuguacaa

SEQ ID NO: 1186043 - RNA, 19 nt, Artificial Sequence
  Description of Artificial Sequence: Synthetic oligonucleotide
gacuacacaggaucugcuu

SEQ ID NO: 1186044 - RNA, 19 nt, Artificial Sequence
  Description of Artificial Sequence: Synthetic oligonucleotide
gcucccggcucucugaaga

SEQ ID NO: 1186045 - RNA, 19 nt, Artificial Sequence
  Description of Artificial Sequence: Synthetic oligonucleotide
caacuaacaggagucgaua

SEQ ID NO: 1186046 - RNA, 19 nt, Artificial Sequence
  Description of Artificial Sequence: Synthetic oligonucleotide
cauggaccccaaguaacca

SEQ ID NO: 1186047 - RNA, 19 nt, Artificial Sequence
  Description of Artificial Sequence: Synthetic oligonucleotide
gaagagaccucggucucgu

SEQ ID NO: 1186048 - RNA, 19 nt, Artificial Sequence
  Description of Artificial Sequence: Synthetic oligonucleotide
ugauauggccaaggaugua

SEQ ID NO: 1186049 - RNA, 19 nt, Artificial Sequence
  Description of Artificial Sequence: Synthetic oligonucleotide
agucugcaccaccacugua

SEQ ID NO: 1186050 - RNA, 19 nt, Artificial Sequence
  Description of Artificial Sequence: Synthetic oligonucleotide
gacaguucacaaccacaau

SEQ ID NO: 1186051 - RNA, 19 nt, Artificial Sequence
  Description of Artificial Sequence: Synthetic oligonucleotide
cacugcucuguguaagucu

SEQ ID NO: 1186052 - RNA, 19 nt, Artificial Sequence
  Description of Artificial Sequence: Synthetic oligonucleotide
uugcgauggucugaacauu

SEQ ID NO: 1186053 - RNA, 19 nt, Artificial Sequence
  Description of Artificial Sequence: Synthetic oligonucleotide
ucggucucguacagccaua

SEQ ID NO: 1186054 - RNA, 19 nt, Artificial Sequence
  Description of Artificial Sequence: Synthetic oligonucleotide
cgucccagcauaucuuggc

SEQ ID NO: 1186055 - RNA, 19 nt, Artificial Sequence
  Description of Artificial Sequence: Synthetic oligonucleotide
gcaagacuuggcgaacaug

SEQ ID NO: 1186056 - RNA, 19 nt, Artificial Sequence
  Description of Artificial Sequence: Synthetic oligonucleotide
cuguguaagucuuggcaau

SEQ ID NO: 1186057 - RNA, 19 nt, Artificial Sequence
  Description of Artificial Sequence: Synthetic oligonucleotide
gcuugauauaguggggcuc

SEQ ID NO: 1186058 - RNA, 19 nt, Artificial Sequence
  Description of Artificial Sequence: Synthetic oligonucleotide
gcgcgagaggaaaaggcgc

SEQ ID NO: 1186059 - RNA, 19 nt, Artificial Sequence
  Description of Artificial Sequence: Synthetic oligonucleotide
guauugguaggaagcucaa

SEQ ID NO: 1186060 - RNA, 19 nt, Artificial Sequence
  Description of Artificial Sequence: Synthetic oligonucleotide
ucccggcucucugaagaac

SEQ ID NO: 1186061 - RNA, 19 nt, Artificial Sequence
  Description of Artificial Sequence: Synthetic oligonucleotide
ggucagauuuaggacuaca

SEQ ID NO: 1186062 - RNA, 19 nt, Artificial Sequence
  Description of Artificial Sequence: Synthetic oligonucleotide
gggucccuugacucguacc

SEQ ID NO: 1186063 - RNA, 19 nt, Artificial Sequence
  Description of Artificial Sequence: Synthetic oligonucleotide
ugacucguaccagcacauc

SEQ ID NO: 1186064 - RNA, 19 nt, Artificial Sequence
  Description of Artificial Sequence: Synthetic oligonucleotide
uggccucacucuguuucac

SEQ ID NO: 1186065 - RNA, 19 nt, Artificial Sequence
  Description of Artificial Sequence: Synthetic oligonucleotide
cgauaauagaagagaccuc

SEQ ID NO: 1186066 - RNA, 19 nt, Artificial Sequence
  Description of Artificial Sequence: Synthetic oligonucleotide
aagagaccucggucucgua

SEQ ID NO: 1186067 - RNA, 19 nt, Artificial Sequence
  Description of Artificial Sequence: Synthetic oligonucleotide
gcauaucuuggcacucagc

SEQ ID NO: 1186068 - RNA, 19 nt, Artificial Sequence
  Description of Artificial Sequence: Synthetic oligonucleotide
augcuaccuauggcaaaga

SEQ ID NO: 1186069 - RNA, 19 nt, Artificial Sequence
  Description of Artificial Sequence: Synthetic oligonucleotide
gccccauugauccaguuuu

SEQ ID NO: 1186070 - RNA, 19 nt, Artificial Sequence
  Description of Artificial Sequence: Synthetic oligonucleotide
cuugucggaggcccagcaa

SEQ ID NO: 1186071 - RNA, 19 nt, Artificial Sequence
  Description of Artificial Sequence: Synthetic oligonucleotide
gaccucggucucguacagc

SEQ ID NO: 1186072 - RNA, 19 nt, Artificial Sequence
  Description of Artificial Sequence: Synthetic oligonucleotide
gcucaaggcgaugacgcuc

SEQ ID NO: 1186073 - RNA, 19 nt, Artificial Sequence
  Description of Artificial Sequence: Synthetic oligonucleotide
caguuuugacauccuauuu

SEQ ID NO: 1186074 - RNA, 19 nt, Artificial Sequence
  Description of Artificial Sequence: Synthetic oligonucleotide
gucacgcaggagacuguac

SEQ ID NO: 1186075 - RNA, 19 nt, Artificial Sequence
  Description of Artificial Sequence: Synthetic oligonucleotide
cucggucucguacagccau

SEQ ID NO: 1186076 - RNA, 19 nt, Artificial Sequence
  Description of Artificial Sequence: Synthetic oligonucleotide
aguggggcuccgaguaaga

SEQ ID NO: 1186077 - RNA, 19 nt, Artificial Sequence
  Description of Artificial Sequence: Synthetic oligonucleotide
cucguaccagcacaucagu

SEQ ID NO: 1186078 - RNA, 19 nt, Artificial Sequence
  Description of Artificial Sequence: Synthetic oligonucleotide
ccaacuauucacaggucgu

SEQ ID NO: 1186079 - RNA, 19 nt, Artificial Sequence
  Description of Artificial Sequence: Synthetic oligonucleotide
cugagcgcugagauaggcu

SEQ ID NO: 1186080 - RNA, 19 nt, Artificial Sequence
  Description of Artificial Sequence: Synthetic oligonucleotide
ccggcucucugaagaacag

SEQ ID NO: 1186081 - RNA, 19 nt, Artificial Sequence
  Description of Artificial Sequence: Synthetic oligonucleotide
ucaaggcgaugacgcucua

SEQ ID NO: 1186082 - RNA, 19 nt, Artificial Sequence
  Description of Artificial Sequence: Synthetic oligonucleotide
cgaacaugacagagagcag

SEQ ID NO: 1186083 - RNA, 19 nt, Artificial Sequence
  Description of Artificial Sequence: Synthetic oligonucleotide
aggaucugcuuaacuucau

SEQ ID NO: 1186084 - RNA, 19 nt, Artificial Sequence
  Description of Artificial Sequence: Synthetic oligonucleotide
caccacuguagugaugugu

SEQ ID NO: 1186085 - RNA, 19 nt, Artificial Sequence
  Description of Artificial Sequence: Synthetic oligonucleotide
cccggcucucugaagaaca

SEQ ID NO: 1186086 - RNA, 19 nt, Artificial Sequence
  Description of Artificial Sequence: Synthetic oligonucleotide
cggaaagucugcaccacca

SEQ ID NO: 1186087 - RNA, 19 nt, Artificial Sequence
  Description of Artificial Sequence: Synthetic oligonucleotide
cuccgaguaagagcagaaa

SEQ ID NO: 1186088 - RNA, 19 nt, Artificial Sequence
  Description of Artificial Sequence: Synthetic oligonucleotide
gucggaggcccagcaacuc

SEQ ID NO: 1186089 - RNA, 19 nt, Artificial Sequence
  Description of Artificial Sequence: Synthetic oligonucleotide
ccaguuuugacauccuauu

SEQ ID NO: 1186090 - RNA, 19 nt, Artificial Sequence
  Description of Artificial Sequence: Synthetic oligonucleotide
ccaaaccaggucucggaaa

SEQ ID NO: 1186091 - RNA, 19 nt, Artificial Sequence
  Description of Artificial Sequence: Synthetic oligonucleotide
gagugucgggcuggacuuc

SEQ ID NO: 1186092 - RNA, 19 nt, Artificial Sequence
  Description of Artificial Sequence: Synthetic oligonucleotide
caguaucauccugagcgcu

SEQ ID NO: 1186093 - RNA, 19 nt, Artificial Sequence
  Description of Artificial Sequence: Synthetic oligonucleotide
guugcccagugggcuuugc

SEQ ID NO: 1186094 - RNA, 19 nt, Artificial Sequence
  Description of Artificial Sequence: Synthetic oligonucleotide
ccagugggcuuugccauac

SEQ ID NO: 1186095 - RNA, 19 nt, Artificial Sequence
  Description of Artificial Sequence: Synthetic oligonucleotide
caguacacugagggcacaa

SEQ ID NO: 1186096 - RNA, 19 nt, Artificial Sequence
  Description of Artificial Sequence: Synthetic oligonucleotide
gcucauugcgauggucuga

SEQ ID NO: 1186097 - RNA, 19 nt, Artificial Sequence
  Description of Artificial Sequence: Synthetic oligonucleotide
ccaacuaacaggagucgau

SEQ ID NO: 1186098 - RNA, 19 nt, Artificial Sequence
  Description of Artificial Sequence: Synthetic oligonucleotide
ggcgaugacgcucuaccuu

SEQ ID NO: 1186099 - RNA, 19 nt, Artificial Sequence
  Description of Artificial Sequence: Synthetic oligonucleotide
ggucucguacagccauauc

SEQ ID NO: 1186100 - RNA, 19 nt, Artificial Sequence
  Description of Artificial Sequence: Synthetic oligonucleotide
gcagacacgucagugcagu

SEQ ID NO: 1186101 - RNA, 19 nt, Artificial Sequence
  Description of Artificial Sequence: Synthetic oligonucleotide
caacuauucacaggucguu

SEQ ID NO: 1186102 - RNA, 19 nt, Artificial Sequence
  Description of Artificial Sequence: Synthetic oligonucleotide
cacgucagugcaguagccu

SEQ ID NO: 1186103 - RNA, 19 nt, Artificial Sequence
  Description of Artificial Sequence: Synthetic oligonucleotide
cagaaagaguuugguggcu

SEQ ID NO: 1186104 - RNA, 19 nt, Artificial Sequence
  Description of Artificial Sequence: Synthetic oligonucleotide
caccuucuguagcuugaua

SEQ ID NO: 1186105 - RNA, 19 nt, Artificial Sequence
  Description of Artificial Sequence: Synthetic oligonucleotide
cgcgagaggaaaaggcgca

SEQ ID NO: 1186106 - RNA, 19 nt, Artificial Sequence
  Description of Artificial Sequence: Synthetic oligonucleotide
cccagcauaucuuggcacu

SEQ ID NO: 1186107 - RNA, 19 nt, Artificial Sequence
  Description of Artificial Sequence: Synthetic oligonucleotide
ggucguucuggcugauccu

SEQ ID NO: 1186108 - RNA, 19 nt, Artificial Sequence
  Description of Artificial Sequence: Synthetic oligonucleotide
cuggcaccaguguguugaa

SEQ ID NO: 1186109 - RNA, 19 nt, Artificial Sequence
  Description of Artificial Sequence: Synthetic oligonucleotide
ggucacgcaggagacugua

SEQ ID NO: 1186110 - RNA, 19 nt, Artificial Sequence
  Description of Artificial Sequence: Synthetic oligonucleotide
cgcauuagugcagucagua

SEQ ID NO: 1186111 - RNA, 19 nt, Artificial Sequence
  Description of Artificial Sequence: Synthetic oligonucleotide
cagacacgucagugcagua

SEQ ID NO: 1186112 - RNA, 19 nt, Artificial Sequence
  Description of Artificial Sequence: Synthetic oligonucleotide
cgcaggagacuguacaacu

SEQ ID NO: 1186113 - RNA, 19 nt, Artificial Sequence
  Description of Artificial Sequence: Synthetic oligonucleotide
cagugggcuuugccauaca

SEQ ID NO: 1186114 - RNA, 19 nt, Artificial Sequence
  Description of Artificial Sequence: Synthetic oligonucleotide
gagcgcugagauaggcuuu

SEQ ID NO: 1186115 - RNA, 19 nt, Artificial Sequence
  Description of Artificial Sequence: Synthetic oligonucleotide
gcuggagauuggggaccag

SEQ ID NO: 1186116 - RNA, 19 nt, Artificial Sequence
  Description of Artificial Sequence: Synthetic oligonucleotide
gcgcugagauaggcuuucc

SEQ ID NO: 1186117 - RNA, 19 nt, Artificial Sequence
  Description of Artificial Sequence: Synthetic oligonucleotide
ccucggucucguacagcca

SEQ ID NO: 1186118 - RNA, 19 nt, Artificial Sequence
  Description of Artificial Sequence: Synthetic oligonucleotide
ggaccccaaguaaccaaau

SEQ ID NO: 1186119 - RNA, 19 nt, Artificial Sequence
  Description of Artificial Sequence: Synthetic oligonucleotide
gcagggcgcgagaggaaaa

SEQ ID NO: 1186120 - RNA, 19 nt, Artificial Sequence
  Description of Artificial Sequence: Synthetic oligonucleotide
cagcuagcaagggucccuu

SEQ ID NO: 1186121 - RNA, 19 nt, Artificial Sequence
  Description of Artificial Sequence: Synthetic oligonucleotide
cgcucuaccuucuggcuuu

SEQ ID NO: 1186122 - RNA, 19 nt, Artificial Sequence
  Description of Artificial Sequence: Synthetic oligonucleotide
ggcacucagcagggcgcga

SEQ ID NO: 1186123 - RNA, 19 nt, Artificial Sequence
  Description of Artificial Sequence: Synthetic oligonucleotide
gcgagaggaaaaggcgcau

SEQ ID NO: 1186124 - RNA, 19 nt, Artificial Sequence
  Description of Artificial Sequence: Synthetic oligonucleotide
gcgcauuagugcagucagu

SEQ ID NO: 1186125 - RNA, 19 nt, Artificial Sequence
  Description of Artificial Sequence: Synthetic oligonucleotide
cgaugacgcucuaccuucu

SEQ ID NO: 1186126 - RNA, 19 nt, Artificial Sequence
  Description of Artificial Sequence: Synthetic oligonucleotide
ccuggucacgcaggagacu

SEQ ID NO: 1186127 - RNA, 19 nt, Artificial Sequence
  Description of Artificial Sequence: Synthetic oligonucleotide
gcucuaccuucuggcuuuu

SEQ ID NO: 1186128 - RNA, 19 nt, Artificial Sequence
  Description of Artificial Sequence: Synthetic oligonucleotide
uccauguagaucuuaaugg

SEQ ID NO: 1186129 - RNA, 19 nt, Artificial Sequence
  Description of Artificial Sequence: Synthetic oligonucleotide
cacaaaucggugaagaccc

SEQ ID NO: 1186130 - RNA, 19 nt, Artificial Sequence
  Description of Artificial Sequence: Synthetic oligonucleotide
ucugaugaaguccgguucg

SEQ ID NO: 1186131 - RNA, 19 nt, Artificial Sequence
  Description of Artificial Sequence: Synthetic oligonucleotide
uuuguggaggcgcagacca

SEQ ID NO: 1186132 - RNA, 19 nt, Artificial Sequence
  Description of Artificial Sequence: Synthetic oligonucleotide
uauucuacugcauccccgg

SEQ ID NO: 1186133 - RNA, 19 nt, Artificial Sequence
  Description of Artificial Sequence: Synthetic oligonucleotide
augaaguccgguucgagag

SEQ ID NO: 1186134 - RNA, 19 nt, Artificial Sequence
  Description of Artificial Sequence: Synthetic oligonucleotide
aaaucggugaagacccugc

SEQ ID NO: 1186135 - RNA, 19 nt, Artificial Sequence
  Description of Artificial Sequence: Synthetic oligonucleotide
auagugcaaaucucagggc

SEQ ID NO: 1186136 - RNA, 19 nt, Artificial Sequence
  Description of Artificial Sequence: Synthetic oligonucleotide
ucggugaagacccugcagc

SEQ ID NO: 1186137 - RNA, 19 nt, Artificial Sequence
  Description of Artificial Sequence: Synthetic oligonucleotide
ucagcagguauucuacugc

SEQ ID NO: 1186138 - RNA, 19 nt, Artificial Sequence
  Description of Artificial Sequence: Synthetic oligonucleotide
agggaaaagagccgaagag

SEQ ID NO: 1186139 - RNA, 19 nt, Artificial Sequence
  Description of Artificial Sequence: Synthetic oligonucleotide
aguggggucaagcaucccg

SEQ ID NO: 1186140 - RNA, 19 nt, Artificial Sequence
  Description of Artificial Sequence: Synthetic oligonucleotide
aaacgagcgaggucuggcg

SEQ ID NO: 1186141 - RNA, 19 nt, Artificial Sequence
  Description of Artificial Sequence: Synthetic oligonucleotide
acauaaucuuuucccgggc

SEQ ID NO: 1186142 - RNA, 19 nt, Artificial Sequence
  Description of Artificial Sequence: Synthetic oligonucleotide
cacauaaucuuuucccggg

SEQ ID NO: 1186143 - RNA, 19 nt, Artificial Sequence
  Description of Artificial Sequence: Synthetic oligonucleotide
acaagcgaaagcucccggc

SEQ ID NO: 1186144 - RNA, 19 nt, Artificial Sequence
  Description of Artificial Sequence: Synthetic oligonucleotide
aacaucaggaggucacuug

SEQ ID NO: 1186145 - RNA, 19 nt, Artificial Sequence
  Description of Artificial Sequence: Synthetic oligonucleotide
ucuacugcauccccggagc

SEQ ID NO: 1186146 - RNA, 19 nt, Artificial Sequence
  Description of Artificial Sequence: Synthetic oligonucleotide
uaucaguugcuggaggugg

SEQ ID NO: 1186147 - RNA, 19 nt, Artificial Sequence
  Description of Artificial Sequence: Synthetic oligonucleotide
ugggucuaagcucuggagc

SEQ ID NO: 1186148 - RNA, 19 nt, Artificial Sequence
  Description of Artificial Sequence: Synthetic oligonucleotide
gaggcgcagaccaacaucg

SEQ ID NO: 1186149 - RNA, 19 nt, Artificial Sequence
  Description of Artificial Sequence: Synthetic oligonucleotide
accgcuuccagguagacau

SEQ ID NO: 1186150 - RNA, 19 nt, Artificial Sequence
  Description of Artificial Sequence: Synthetic oligonucleotide
cagguauucuacugcaucc

SEQ ID NO: 1186151 - RNA, 19 nt, Artificial Sequence
  Description of Artificial Sequence: Synthetic oligonucleotide
ucucuuggggccaacccag

SEQ ID NO: 1186152 - RNA, 19 nt, Artificial Sequence
  Description of Artificial Sequence: Synthetic oligonucleotide
cugagaagcaccuugcuga

SEQ ID NO: 1186153 - RNA, 19 nt, Artificial Sequence
  Description of Artificial Sequence: Synthetic oligonucleotide
ucuaucaguugcuggaggu

SEQ ID NO: 1186154 - RNA, 19 nt, Artificial Sequence
  Description of Artificial Sequence: Synthetic oligonucleotide
gaacccuacagccccacag

SEQ ID NO: 1186155 - RNA, 19 nt, Artificial Sequence
  Description of Artificial Sequence: Synthetic oligonucleotide
ucccaugggagcauagugc

SEQ ID NO: 1186156 - RNA, 19 nt, Artificial Sequence
  Description of Artificial Sequence: Synthetic oligonucleotide
cauguagaucuuaauggug

SEQ ID NO: 1186157 - RNA, 19 nt, Artificial Sequence
  Description of Artificial Sequence: Synthetic oligonucleotide
aaugacgcucagugggguc

SEQ ID NO: 1186158 - RNA, 19 nt, Artificial Sequence
  Description of Artificial Sequence: Synthetic oligonucleotide
gaucccgugaggaaagucc

SEQ ID NO: 1186159 - RNA, 19 nt, Artificial Sequence
  Description of Artificial Sequence: Synthetic oligonucleotide
aggagaacaggaccugagg

SEQ ID NO: 1186160 - RNA, 19 nt, Artificial Sequence
  Description of Artificial Sequence: Synthetic oligonucleotide
ugaaguccgguucgagagg

SEQ ID NO: 1186161 - RNA, 19 nt, Artificial Sequence
  Description of Artificial Sequence: Synthetic oligonucleotide
agcuagccgagguagcugg

SEQ ID NO: 1186162 - RNA, 19 nt, Artificial Sequence
  Description of Artificial Sequence: Synthetic oligonucleotide
aucugauggccccaccacg

SEQ ID NO: 1186163 - RNA, 19 nt, Artificial Sequence
  Description of Artificial Sequence: Synthetic oligonucleotide
uuugacaguuccaggcgga

SEQ ID NO: 1186164 - RNA, 19 nt, Artificial Sequence
  Description of Artificial Sequence: Synthetic oligonucleotide
gaaagcucccggcugagga

SEQ ID NO: 1186165 - RNA, 19 nt, Artificial Sequence
  Description of Artificial Sequence: Synthetic oligonucleotide
cagaacaucaggaggucac

SEQ ID NO: 1186166 - RNA, 19 nt, Artificial Sequence
  Description of Artificial Sequence: Synthetic oligonucleotide
guagaaacgagcgaggucu

SEQ ID NO: 1186167 - RNA, 19 nt, Artificial Sequence
  Description of Artificial Sequence: Synthetic oligonucleotide
ucaguggggucaagcaucc

SEQ ID NO: 1186168 - RNA, 19 nt, Artificial Sequence
  Description of Artificial Sequence: Synthetic oligonucleotide
cauucgugggcugcgaagg

SEQ ID NO: 1186169 - RNA, 19 nt, Artificial Sequence
  Description of Artificial Sequence: Synthetic oligonucleotide
ugcaauggcuagcucuccc

SEQ ID NO: 1186170 - RNA, 19 nt, Artificial Sequence
  Description of Artificial Sequence: Synthetic oligonucleotide
aagcgaaagcucccggcug

SEQ ID NO: 1186171 - RNA, 19 nt, Artificial Sequence
  Description of Artificial Sequence: Synthetic oligonucleotide
guucgagaggccaucaagc

SEQ ID NO: 1186172 - RNA, 19 nt, Artificial Sequence
  Description of Artificial Sequence: Synthetic oligonucleotide
gaaucugauggccccacca

SEQ ID NO: 1186173 - RNA, 19 nt, Artificial Sequence
  Description of Artificial Sequence: Synthetic oligonucleotide
guauucuacugcauccccg

SEQ ID NO: 1186174 - RNA, 19 nt, Artificial Sequence
  Description of Artificial Sequence: Synthetic oligonucleotide
gacaagcgaaagcucccgg

SEQ ID NO: 1186175 - RNA, 19 nt, Artificial Sequence
  Description of Artificial Sequence: Synthetic oligonucleotide
ugacaagcgaaagcucccg

SEQ ID NO: 1186176 - RNA, 19 nt, Artificial Sequence
  Description of Artificial Sequence: Synthetic oligonucleotide
auucgugggcugcgaaggc

SEQ ID NO: 1186177 - RNA, 19 nt, Artificial Sequence
  Description of Artificial Sequence: Synthetic oligonucleotide
ugucauggucccauccucu

SEQ ID NO: 1186178 - RNA, 19 nt, Artificial Sequence
  Description of Artificial Sequence: Synthetic oligonucleotide
acgugggcaaaccagugcu

SEQ ID NO: 1186179 - RNA, 19 nt, Artificial Sequence
  Description of Artificial Sequence: Synthetic oligonucleotide
auggcuagcucucccaggu

SEQ ID NO: 1186180 - RNA, 19 nt, Artificial Sequence
  Description of Artificial Sequence: Synthetic oligonucleotide
ggcagaaagccucugcugc

SEQ ID NO: 1186181 - RNA, 19 nt, Artificial Sequence
  Description of Artificial Sequence: Synthetic oligonucleotide
augcggccaacccagaaca

SEQ ID NO: 1186182 - RNA, 19 nt, Artificial Sequence
  Description of Artificial Sequence: Synthetic oligonucleotide
uugccaguuuccagaagug

SEQ ID NO: 1186183 - RNA, 19 nt, Artificial Sequence
  Description of Artificial Sequence: Synthetic oligonucleotide
accacgacacaccacgcca

SEQ ID NO: 1186184 - RNA, 19 nt, Artificial Sequence
  Description of Artificial Sequence: Synthetic oligonucleotide
agcauuccuuccugucacc

SEQ ID NO: 1186185 - RNA, 19 nt, Artificial Sequence
  Description of Artificial Sequence: Synthetic oligonucleotide
gaaacgagcgaggucuggc

SEQ ID NO: 1186186 - RNA, 19 nt, Artificial Sequence
  Description of Artificial Sequence: Synthetic oligonucleotide
cagcggacaaaccacuggc

SEQ ID NO: 1186187 - RNA, 19 nt, Artificial Sequence
  Description of Artificial Sequence: Synthetic oligonucleotide
aacgagcgaggucuggcgu

SEQ ID NO: 1186188 - RNA, 19 nt, Artificial Sequence
  Description of Artificial Sequence: Synthetic oligonucleotide
ggugucauccaguggggcg

SEQ ID NO: 1186189 - RNA, 19 nt, Artificial Sequence
  Description of Artificial Sequence: Synthetic oligonucleotide
gaaguccgguucgagaggc

SEQ ID NO: 1186190 - RNA, 19 nt, Artificial Sequence
  Description of Artificial Sequence: Synthetic oligonucleotide
aguaccauggggugcuccu

SEQ ID NO: 1186191 - RNA, 19 nt, Artificial Sequence
  Description of Artificial Sequence: Synthetic oligonucleotide
gcuuugacaguuccaggcg

SEQ ID NO: 1186192 - RNA, 19 nt, Artificial Sequence
  Description of Artificial Sequence: Synthetic oligonucleotide
ugugggugacaagcgaaag

SEQ ID NO: 1186193 - RNA, 19 nt, Artificial Sequence
  Description of Artificial Sequence: Synthetic oligonucleotide
aucggcacaggagaacagg

SEQ ID NO: 1186194 - RNA, 19 nt, Artificial Sequence
  Description of Artificial Sequence: Synthetic oligonucleotide
gguucgagaggccaucaag

SEQ ID NO: 1186195 - RNA, 19 nt, Artificial Sequence
  Description of Artificial Sequence: Synthetic oligonucleotide
cuuuuguggaggcgcagac

SEQ ID NO: 1186196 - RNA, 19 nt, Artificial Sequence
  Description of Artificial Sequence: Synthetic oligonucleotide
gcauagugcaaaucucagg

SEQ ID NO: 1186197 - RNA, 19 nt, Artificial Sequence
  Description of Artificial Sequence: Synthetic oligonucleotide
gcgcacauaaucuuuuccc

SEQ ID NO: 1186198 - RNA, 19 nt, Artificial Sequence
  Description of Artificial Sequence: Synthetic oligonucleotide
caccacgccaccacguggg

SEQ ID NO: 1186199 - RNA, 19 nt, Artificial Sequence
  Description of Artificial Sequence: Synthetic oligonucleotide
gugggugacaagcgaaagc

SEQ ID NO: 1186200 - RNA, 19 nt, Artificial Sequence
  Description of Artificial Sequence: Synthetic oligonucleotide
cuggcagcggacaaaccac

SEQ ID NO: 1186201 - RNA, 19 nt, Artificial Sequence
  Description of Artificial Sequence: Synthetic oligonucleotide
ccgaagagaaccaaguguc

SEQ ID NO: 1186202 - RNA, 19 nt, Artificial Sequence
  Description of Artificial Sequence: Synthetic oligonucleotide
agggcacggaggauaaagc

SEQ ID NO: 1186203 - RNA, 19 nt, Artificial Sequence
  Description of Artificial Sequence: Synthetic oligonucleotide
agcgcagggcauuccagag

SEQ ID NO: 1186204 - RNA, 19 nt, Artificial Sequence
  Description of Artificial Sequence: Synthetic oligonucleotide
uuuuguggaggcgcagacc

SEQ ID NO: 1186205 - RNA, 19 nt, Artificial Sequence
  Description of Artificial Sequence: Synthetic oligonucleotide
gggcacggaggauaaagcg

SEQ ID NO: 1186206 - RNA, 19 nt, Artificial Sequence
  Description of Artificial Sequence: Synthetic oligonucleotide
uuuucccgggccacaaauc

SEQ ID NO: 1186207 - RNA, 19 nt, Artificial Sequence
  Description of Artificial Sequence: Synthetic oligonucleotide
caccacgugggcaaaccag

SEQ ID NO: 1186208 - RNA, 19 nt, Artificial Sequence
  Description of Artificial Sequence: Synthetic oligonucleotide
gaaaagagccgaagagaac

SEQ ID NO: 1186209 - RNA, 19 nt, Artificial Sequence
  Description of Artificial Sequence: Synthetic oligonucleotide
gguauucuacugcaucccc

SEQ ID NO: 1186210 - RNA, 19 nt, Artificial Sequence
  Description of Artificial Sequence: Synthetic oligonucleotide
caugcggccaacccagaac

SEQ ID NO: 1186211 - RNA, 19 nt, Artificial Sequence
  Description of Artificial Sequence: Synthetic oligonucleotide
caauggcuagcucucccag

SEQ ID NO: 1186212 - RNA, 19 nt, Artificial Sequence
  Description of Artificial Sequence: Synthetic oligonucleotide
ugauggccccaccacgaca

SEQ ID NO: 1186213 - RNA, 19 nt, Artificial Sequence
  Description of Artificial Sequence: Synthetic oligonucleotide
acgagcgaggucuggcguc

SEQ ID NO: 1186214 - RNA, 19 nt, Artificial Sequence
  Description of Artificial Sequence: Synthetic oligonucleotide
gcucagaguucccugacgc

SEQ ID NO: 1186215 - RNA, 19 nt, Artificial Sequence
  Description of Artificial Sequence: Synthetic oligonucleotide
guggggucaagcaucccgg

SEQ ID NO: 1186216 - RNA, 19 nt, Artificial Sequence
  Description of Artificial Sequence: Synthetic oligonucleotide
gauaaagcgcagggcauuc

SEQ ID NO: 1186217 - RNA, 19 nt, Artificial Sequence
  Description of Artificial Sequence: Synthetic oligonucleotide
ccacaaaucggugaagacc

SEQ ID NO: 1186218 - RNA, 19 nt, Artificial Sequence
  Description of Artificial Sequence: Synthetic oligonucleotide
uagaaacgagcgaggucug

SEQ ID NO: 1186219 - RNA, 19 nt, Artificial Sequence
  Description of Artificial Sequence: Synthetic oligonucleotide
cuugccaguuuccagaagu

SEQ ID NO: 1186220 - RNA, 19 nt, Artificial Sequence
  Description of Artificial Sequence: Synthetic oligonucleotide
uacugcauccccggagcgg

SEQ ID NO: 1186221 - RNA, 19 nt, Artificial Sequence
  Description of Artificial Sequence: Synthetic oligonucleotide
uggggucaagcaucccggg

SEQ ID NO: 1186222 - RNA, 19 nt, Artificial Sequence
  Description of Artificial Sequence: Synthetic oligonucleotide
caccagguaggcuggaauc

SEQ ID NO: 1186223 - RNA, 19 nt, Artificial Sequence
  Description of Artificial Sequence: Synthetic oligonucleotide
uguggaggcgcagaccaac

SEQ ID NO: 1186224 - RNA, 19 nt, Artificial Sequence
  Description of Artificial Sequence: Synthetic oligonucleotide
agagccgaagagaaccaag

SEQ ID NO: 1186225 - RNA, 19 nt, Artificial Sequence
  Description of Artificial Sequence: Synthetic oligonucleotide
cacgugggcaaaccagugc

SEQ ID NO: 1186226 - RNA, 19 nt, Artificial Sequence
  Description of Artificial Sequence: Synthetic oligonucleotide
uacagggugugggugacaa

SEQ ID NO: 1186227 - RNA, 19 nt, Artificial Sequence
  Description of Artificial Sequence: Synthetic oligonucleotide
acccuacagccccacagug

SEQ ID NO: 1186228 - RNA, 19 nt, Artificial Sequence
  Description of Artificial Sequence: Synthetic oligonucleotide
ucagcgcgcacauaaucuu

SEQ ID NO: 1186229 - RNA, 19 nt, Artificial Sequence
  Description of Artificial Sequence: Synthetic oligonucleotide
aggcaguaccauggggugc

SEQ ID NO: 1186230 - RNA, 19 nt, Artificial Sequence
  Description of Artificial Sequence: Synthetic oligonucleotide
ggucccauccucugcaaug

SEQ ID NO: 1186231 - RNA, 19 nt, Artificial Sequence
  Description of Artificial Sequence: Synthetic oligonucleotide
ucugucccacacucgggga

SEQ ID NO: 1186232 - RNA, 19 nt, Artificial Sequence
  Description of Artificial Sequence: Synthetic oligonucleotide
caaaccagugcuggccagg

SEQ ID NO: 1186233 - RNA, 19 nt, Artificial Sequence
  Description of Artificial Sequence: Synthetic oligonucleotide
accgcccagcauuccuucc

SEQ ID NO: 1186234 - RNA, 19 nt, Artificial Sequence
  Description of Artificial Sequence: Synthetic oligonucleotide
uggcgguaguucaggaccu

SEQ ID NO: 1186235 - RNA, 19 nt, Artificial Sequence
  Description of Artificial Sequence: Synthetic oligonucleotide
ugggcaaaccagugcuggc

SEQ ID NO: 1186236 - RNA, 19 nt, Artificial Sequence
  Description of Artificial Sequence: Synthetic oligonucleotide
cuaucaguugcuggaggug

SEQ ID NO: 1186237 - RNA, 19 nt, Artificial Sequence
  Description of Artificial Sequence: Synthetic oligonucleotide
gggucuaagcucuggagca

SEQ ID NO: 1186238 - RNA, 19 nt, Artificial Sequence
  Description of Artificial Sequence: Synthetic oligonucleotide
agaaacgagcgaggucugg

SEQ ID NO: 1186239 - RNA, 19 nt, Artificial Sequence
  Description of Artificial Sequence: Synthetic oligonucleotide
gcagcggacaaaccacugg

SEQ ID NO: 1186240 - RNA, 19 nt, Artificial Sequence
  Description of Artificial Sequence: Synthetic oligonucleotide
cuacugcauccccggagcg

SEQ ID NO: 1186241 - RNA, 19 nt, Artificial Sequence
  Description of Artificial Sequence: Synthetic oligonucleotide
ucgggcagcuagccgaggu

SEQ ID NO: 1186242 - RNA, 19 nt, Artificial Sequence
  Description of Artificial Sequence: Synthetic oligonucleotide
uggcagcggacaaaccacu

SEQ ID NO: 1186243 - RNA, 19 nt, Artificial Sequence
  Description of Artificial Sequence: Synthetic oligonucleotide
gugacaagcgaaagcuccc

SEQ ID NO: 1186244 - RNA, 19 nt, Artificial Sequence
  Description of Artificial Sequence: Synthetic oligonucleotide
caaaucggugaagacccug

SEQ ID NO: 1186245 - RNA, 19 nt, Artificial Sequence
  Description of Artificial Sequence: Synthetic oligonucleotide
uucgugggcugcgaaggcc

SEQ ID NO: 1186246 - RNA, 19 nt, Artificial Sequence
  Description of Artificial Sequence: Synthetic oligonucleotide
ccaacaucggcacaggaga

SEQ ID NO: 1186247 - RNA, 19 nt, Artificial Sequence
  Description of Artificial Sequence: Synthetic oligonucleotide
cucagccuccgaucgcccg

SEQ ID NO: 1186248 - RNA, 19 nt, Artificial Sequence
  Description of Artificial Sequence: Synthetic oligonucleotide
ggcugcgaaggccaagcgg

SEQ ID NO: 1186249 - RNA, 19 nt, Artificial Sequence
  Description of Artificial Sequence: Synthetic oligonucleotide
caccacgacacaccacgcc

SEQ ID NO: 1186250 - RNA, 19 nt, Artificial Sequence
  Description of Artificial Sequence: Synthetic oligonucleotide
cacucggggaucccgugag

SEQ ID NO: 1186251 - RNA, 19 nt, Artificial Sequence
  Description of Artificial Sequence: Synthetic oligonucleotide
aaguccgguucgagaggcc

SEQ ID NO: 1186252 - RNA, 19 nt, Artificial Sequence
  Description of Artificial Sequence: Synthetic oligonucleotide
acuugccaguuuccagaag

SEQ ID NO: 1186253 - RNA, 19 nt, Artificial Sequence
  Description of Artificial Sequence: Synthetic oligonucleotide
gugucauggucccauccuc

SEQ ID NO: 1186254 - RNA, 19 nt, Artificial Sequence
  Description of Artificial Sequence: Synthetic oligonucleotide
gggaaaagagccgaagaga

SEQ ID NO: 1186255 - RNA, 19 nt, Artificial Sequence
  Description of Artificial Sequence: Synthetic oligonucleotide
guucccugacgcugggagc

SEQ ID NO: 1186256 - RNA, 19 nt, Artificial Sequence
  Description of Artificial Sequence: Synthetic oligonucleotide
augacgcucagugggguca

SEQ ID NO: 1186257 - RNA, 19 nt, Artificial Sequence
  Description of Artificial Sequence: Synthetic oligonucleotide
auggugucauccagugggg

SEQ ID NO: 1186258 - RNA, 19 nt, Artificial Sequence
  Description of Artificial Sequence: Synthetic oligonucleotide
accacgccaccacgugggc

SEQ ID NO: 1186259 - RNA, 19 nt, Artificial Sequence
  Description of Artificial Sequence: Synthetic oligonucleotide
cagcagguauucuacugca

SEQ ID NO: 1186260 - RNA, 19 nt, Artificial Sequence
  Description of Artificial Sequence: Synthetic oligonucleotide
gguagaaacgagcgagguc

SEQ ID NO: 1186261 - RNA, 19 nt, Artificial Sequence
  Description of Artificial Sequence: Synthetic oligonucleotide
aagagccgaagagaaccaa

SEQ ID NO: 1186262 - RNA, 19 nt, Artificial Sequence
  Description of Artificial Sequence: Synthetic oligonucleotide
ccaaguugccaucucucag

SEQ ID NO: 1186263 - RNA, 19 nt, Artificial Sequence
  Description of Artificial Sequence: Synthetic oligonucleotide
agugcaaaucucagggcau

SEQ ID NO: 1186264 - RNA, 19 nt, Artificial Sequence
  Description of Artificial Sequence: Synthetic oligonucleotide
ggcucagaguucccugacg

SEQ ID NO: 1186265 - RNA, 19 nt, Artificial Sequence
  Description of Artificial Sequence: Synthetic oligonucleotide
ccaacccagaacaucagga

SEQ ID NO: 1186266 - RNA, 19 nt, Artificial Sequence
  Description of Artificial Sequence: Synthetic oligonucleotide
cucagcgcgcacauaaucu

SEQ ID NO: 1186267 - RNA, 19 nt, Artificial Sequence
  Description of Artificial Sequence: Synthetic oligonucleotide
gcaaugacgcucagugggg

SEQ ID NO: 1186268 - RNA, 19 nt, Artificial Sequence
  Description of Artificial Sequence: Synthetic oligonucleotide
aggccccguucccucagcg

SEQ ID NO: 1186269 - RNA, 19 nt, Artificial Sequence
  Description of Artificial Sequence: Synthetic oligonucleotide
aguccgguucgagaggcca

SEQ ID NO: 1186270 - RNA, 19 nt, Artificial Sequence
  Description of Artificial Sequence: Synthetic oligonucleotide
agccgagguagcuggcucu

SEQ ID NO: 1186271 - RNA, 19 nt, Artificial Sequence
  Description of Artificial Sequence: Synthetic oligonucleotide
gggccucagccuccgaucg

SEQ ID NO: 1186272 - RNA, 19 nt, Artificial Sequence
  Description of Artificial Sequence: Synthetic oligonucleotide
gaccaacaucggcacagga

SEQ ID NO: 1186273 - RNA, 19 nt, Artificial Sequence
  Description of Artificial Sequence: Synthetic oligonucleotide
cacaccacgccaccacgug

SEQ ID NO: 1186274 - RNA, 19 nt, Artificial Sequence
  Description of Artificial Sequence: Synthetic oligonucleotide
ggcgcagaccaacaucggc

SEQ ID NO: 1186275 - RNA, 19 nt, Artificial Sequence
  Description of Artificial Sequence: Synthetic oligonucleotide
aucccgugaggaaaguccu

SEQ ID NO: 1186276 - RNA, 19 nt, Artificial Sequence
  Description of Artificial Sequence: Synthetic oligonucleotide
ugucauccaguggggcgag

SEQ ID NO: 1186277 - RNA, 19 nt, Artificial Sequence
  Description of Artificial Sequence: Synthetic oligonucleotide
aggauaaagcgcagggcau

SEQ ID NO: 1186278 - RNA, 19 nt, Artificial Sequence
  Description of Artificial Sequence: Synthetic oligonucleotide
ccaggcggagggcagaaag

SEQ ID NO: 1186279 - RNA, 19 nt, Artificial Sequence
  Description of Artificial Sequence: Synthetic oligonucleotide
cagaauccaggcguccaug

SEQ ID NO: 1186280 - RNA, 19 nt, Artificial Sequence
  Description of Artificial Sequence: Synthetic oligonucleotide
cuccucugaugaaguccgg

SEQ ID NO: 1186281 - RNA, 19 nt, Artificial Sequence
  Description of Artificial Sequence: Synthetic oligonucleotide
ucggggaucccgugaggaa

SEQ ID NO: 1186282 - RNA, 19 nt, Artificial Sequence
  Description of Artificial Sequence: Synthetic oligonucleotide
uggucccauccucugcaau

SEQ ID NO: 1186283 - RNA, 19 nt, Artificial Sequence
  Description of Artificial Sequence: Synthetic oligonucleotide
cuccgaucgcccgaccgcc

SEQ ID NO: 1186284 - RNA, 19 nt, Artificial Sequence
  Description of Artificial Sequence: Synthetic oligonucleotide
ugcuacuucucgggccuca

SEQ ID NO: 1186285 - RNA, 19 nt, Artificial Sequence
  Description of Artificial Sequence: Synthetic oligonucleotide
ggaggcgcagaccaacauc

SEQ ID NO: 1186286 - RNA, 19 nt, Artificial Sequence
  Description of Artificial Sequence: Synthetic oligonucleotide
gggugucauggucccaucc

SEQ ID NO: 1186287 - RNA, 19 nt, Artificial Sequence
  Description of Artificial Sequence: Synthetic oligonucleotide
gccacaaaucggugaagac

SEQ ID NO: 1186288 - RNA, 19 nt, Artificial Sequence
  Description of Artificial Sequence: Synthetic oligonucleotide
cagguaggcuggaaucuga

SEQ ID NO: 1186289 - RNA, 19 nt, Artificial Sequence
  Description of Artificial Sequence: Synthetic oligonucleotide
cugauggccccaccacgac

SEQ ID NO: 1186290 - RNA, 19 nt, Artificial Sequence
  Description of Artificial Sequence: Synthetic oligonucleotide
caagcgaaagcucccggcu

SEQ ID NO: 1186291 - RNA, 19 nt, Artificial Sequence
  Description of Artificial Sequence: Synthetic oligonucleotide
uccccggagcggcugcaga

SEQ ID NO: 1186292 - RNA, 19 nt, Artificial Sequence
  Description of Artificial Sequence: Synthetic oligonucleotide
agcggacaaaccacuggcu

SEQ ID NO: 1186293 - RNA, 19 nt, Artificial Sequence
  Description of Artificial Sequence: Synthetic oligonucleotide
ugcagacaggcaguaccau

SEQ ID NO: 1186294 - RNA, 19 nt, Artificial Sequence
  Description of Artificial Sequence: Synthetic oligonucleotide
ggcaggaacccuacagccc

SEQ ID NO: 1186295 - RNA, 19 nt, Artificial Sequence
  Description of Artificial Sequence: Synthetic oligonucleotide
gcauuccuuccugucaccc

SEQ ID NO: 1186296 - RNA, 19 nt, Artificial Sequence
  Description of Artificial Sequence: Synthetic oligonucleotide
uccgguucgagaggccauc

SEQ ID NO: 1186297 - RNA, 19 nt, Artificial Sequence
  Description of Artificial Sequence: Synthetic oligonucleotide
agcgaggucuggcgucucu

SEQ ID NO: 1186298 - RNA, 19 nt, Artificial Sequence
  Description of Artificial Sequence: Synthetic oligonucleotide
ggucuaagcucuggagcag

SEQ ID NO: 1186299 - RNA, 19 nt, Artificial Sequence
  Description of Artificial Sequence: Synthetic oligonucleotide
ggaaucugauggccccacc

SEQ ID NO: 1186300 - RNA, 19 nt, Artificial Sequence
  Description of Artificial Sequence: Synthetic oligonucleotide
cagacaggugcaggucgcc

SEQ ID NO: 1186301 - RNA, 19 nt, Artificial Sequence
  Description of Artificial Sequence: Synthetic oligonucleotide
ggugucauggucccauccu

SEQ ID NO: 1186302 - RNA, 19 nt, Artificial Sequence
  Description of Artificial Sequence: Synthetic oligonucleotide
ugcgaaggccaagcggcuc

SEQ ID NO: 1186303 - RNA, 19 nt, Artificial Sequence
  Description of Artificial Sequence: Synthetic oligonucleotide
ggggaucccgugaggaaag

SEQ ID NO: 1186304 - RNA, 19 nt, Artificial Sequence
  Description of Artificial Sequence: Synthetic oligonucleotide
ucccgugaggaaaguccuu

SEQ ID NO: 1186305 - RNA, 19 nt, Artificial Sequence
  Description of Artificial Sequence: Synthetic oligonucleotide
ggcaggguuccuucaacaa

SEQ ID NO: 1186306 - RNA, 19 nt, Artificial Sequence
  Description of Artificial Sequence: Synthetic oligonucleotide
gaucgcccgaccgcccagc

SEQ ID NO: 1186307 - RNA, 19 nt, Artificial Sequence
  Description of Artificial Sequence: Synthetic oligonucleotide
gcgcagaccaacaucggca

SEQ ID NO: 1186308 - RNA, 19 nt, Artificial Sequence
  Description of Artificial Sequence: Synthetic oligonucleotide
cgcgcacauaaucuuuucc

SEQ ID NO: 1186309 - RNA, 19 nt, Artificial Sequence
  Description of Artificial Sequence: Synthetic oligonucleotide
acgacacaccacgccacca

SEQ ID NO: 1186310 - RNA, 19 nt, Artificial Sequence
  Description of Artificial Sequence: Synthetic oligonucleotide
uucugugcugcggcugcaa

SEQ ID NO: 1186311 - RNA, 19 nt, Artificial Sequence
  Description of Artificial Sequence: Synthetic oligonucleotide
ggccugagaagcaccuugc

SEQ ID NO: 1186312 - RNA, 19 nt, Artificial Sequence
  Description of Artificial Sequence: Synthetic oligonucleotide
cagcuagccgagguagcug

SEQ ID NO: 1186313 - RNA, 19 nt, Artificial Sequence
  Description of Artificial Sequence: Synthetic oligonucleotide
guucaggaccucagagaca

SEQ ID NO: 1186314 - RNA, 19 nt, Artificial Sequence
  Description of Artificial Sequence: Synthetic oligonucleotide
acaaaucggugaagacccu

SEQ ID NO: 1186315 - RNA, 19 nt, Artificial Sequence
  Description of Artificial Sequence: Synthetic oligonucleotide
aggaggucacuugccaguu

SEQ ID NO: 1186316 - RNA, 19 nt, Artificial Sequence
  Description of Artificial Sequence: Synthetic oligonucleotide
cccucucacauucgugggc

SEQ ID NO: 1186317 - RNA, 19 nt, Artificial Sequence
  Description of Artificial Sequence: Synthetic oligonucleotide
aggcgcagaccaacaucgg

SEQ ID NO: 1186318 - RNA, 19 nt, Artificial Sequence
  Description of Artificial Sequence: Synthetic oligonucleotide
ucuccgcagagggguguca

SEQ ID NO: 1186319 - RNA, 19 nt, Artificial Sequence
  Description of Artificial Sequence: Synthetic oligonucleotide
agcgcgcacauaaucuuuu

SEQ ID NO: 1186320 - RNA, 19 nt, Artificial Sequence
  Description of Artificial Sequence: Synthetic oligonucleotide
ccucagcgcgcacauaauc

SEQ ID NO: 1186321 - RNA, 19 nt, Artificial Sequence
  Description of Artificial Sequence: Synthetic oligonucleotide
cccauuuccuggcagcgga

SEQ ID NO: 1186322 - RNA, 19 nt, Artificial Sequence
  Description of Artificial Sequence: Synthetic oligonucleotide
gcgaaggccaagcggcuca

SEQ ID NO: 1186323 - RNA, 19 nt, Artificial Sequence
  Description of Artificial Sequence: Synthetic oligonucleotide
ggggcaggguuccuucaac

SEQ ID NO: 1186324 - RNA, 19 nt, Artificial Sequence
  Description of Artificial Sequence: Synthetic oligonucleotide
cgagaggccaucaagcugu

SEQ ID NO: 1186325 - RNA, 19 nt, Artificial Sequence
  Description of Artificial Sequence: Synthetic oligonucleotide
cgcagaccaacaucggcac

SEQ ID NO: 1186326 - RNA, 19 nt, Artificial Sequence
  Description of Artificial Sequence: Synthetic oligonucleotide
gaacaucaggaggucacuu

SEQ ID NO: 1186327 - RNA, 19 nt, Artificial Sequence
  Description of Artificial Sequence: Synthetic oligonucleotide
cgucucuuggggccaaccc

SEQ ID NO: 1186328 - RNA, 19 nt, Artificial Sequence
  Description of Artificial Sequence: Synthetic oligonucleotide
ugacgcucaguggggucaa

SEQ ID NO: 1186329 - RNA, 19 nt, Artificial Sequence
  Description of Artificial Sequence: Synthetic oligonucleotide
aucgcccgaccgcccagca

SEQ ID NO: 1186330 - RNA, 19 nt, Artificial Sequence
  Description of Artificial Sequence: Synthetic oligonucleotide
cgggcuuuuguggaggcgc

SEQ ID NO: 1186331 - RNA, 19 nt, Artificial Sequence
  Description of Artificial Sequence: Synthetic oligonucleotide
gcuuuuguggaggcgcaga

SEQ ID NO: 1186332 - RNA, 19 nt, Artificial Sequence
  Description of Artificial Sequence: Synthetic oligonucleotide
gcggagggcagaaagccuc

SEQ ID NO: 1186333 - RNA, 19 nt, Artificial Sequence
  Description of Artificial Sequence: Synthetic oligonucleotide
aggaagccccucucacauu

SEQ ID NO: 1186334 - RNA, 19 nt, Artificial Sequence
  Description of Artificial Sequence: Synthetic oligonucleotide
ggcagcggacaaaccacug

SEQ ID NO: 1186335 - RNA, 19 nt, Artificial Sequence
  Description of Artificial Sequence: Synthetic oligonucleotide
ccucagagacagacaggug

SEQ ID NO: 1186336 - RNA, 19 nt, Artificial Sequence
  Description of Artificial Sequence: Synthetic oligonucleotide
gcugaaggggagcugcccu

SEQ ID NO: 1186337 - RNA, 19 nt, Artificial Sequence
  Description of Artificial Sequence: Synthetic oligonucleotide
gcuacuucucgggccucag

SEQ ID NO: 1186338 - RNA, 19 nt, Artificial Sequence
  Description of Artificial Sequence: Synthetic oligonucleotide
gccagucuccgcagagggg

SEQ ID NO: 1186339 - RNA, 19 nt, Artificial Sequence
  Description of Artificial Sequence: Synthetic oligonucleotide
cggucaguuuugcugcuac

SEQ ID NO: 1186340 - RNA, 19 nt, Artificial Sequence
  Description of Artificial Sequence: Synthetic oligonucleotide
ucgcccgaccgcccagcau

SEQ ID NO: 1186341 - RNA, 19 nt, Artificial Sequence
  Description of Artificial Sequence: Synthetic oligonucleotide
ggaucccgugaggaaaguc

SEQ ID NO: 1186342 - RNA, 19 nt, Artificial Sequence
  Description of Artificial Sequence: Synthetic oligonucleotide
ggcagcuagccgagguagc

SEQ ID NO: 1186343 - RNA, 19 nt, Artificial Sequence
  Description of Artificial Sequence: Synthetic oligonucleotide
ggguagaaacgagcgaggu

SEQ ID NO: 1186344 - RNA, 19 nt, Artificial Sequence
  Description of Artificial Sequence: Synthetic oligonucleotide
cagccuccgaucgcccgac

SEQ ID NO: 1186345 - RNA, 19 nt, Artificial Sequence
  Description of Artificial Sequence: Synthetic oligonucleotide
ucccugacgcugggagccu

SEQ ID NO: 1186346 - RNA, 19 nt, Artificial Sequence
  Description of Artificial Sequence: Synthetic oligonucleotide
cgacacaccacgccaccac

SEQ ID NO: 1186347 - RNA, 19 nt, Artificial Sequence
  Description of Artificial Sequence: Synthetic oligonucleotide
caccgcuuccagguagaca

SEQ ID NO: 1186348 - RNA, 19 nt, Artificial Sequence
  Description of Artificial Sequence: Synthetic oligonucleotide
gcagaccaacaucggcaca

SEQ ID NO: 1186349 - RNA, 19 nt, Artificial Sequence
  Description of Artificial Sequence: Synthetic oligonucleotide
gcgcgcacauaaucuuuuc

SEQ ID NO: 1186350 - RNA, 19 nt, Artificial Sequence
  Description of Artificial Sequence: Synthetic oligonucleotide
caaugacgcucaguggggu

SEQ ID NO: 1186351 - RNA, 19 nt, Artificial Sequence
  Description of Artificial Sequence: Synthetic oligonucleotide
gcgggcuuuuguggaggcg

SEQ ID NO: 1186352 - RNA, 19 nt, Artificial Sequence
  Description of Artificial Sequence: Synthetic oligonucleotide
gcugaggugcaaaguucuc

SEQ ID NO: 1186353 - RNA, 19 nt, Artificial Sequence
  Description of Artificial Sequence: Synthetic oligonucleotide
ggccucagccuccgaucgc

SEQ ID NO: 1186354 - RNA, 19 nt, Artificial Sequence
  Description of Artificial Sequence: Synthetic oligonucleotide
gucuccgcagagggguguc

SEQ ID NO: 1186355 - RNA, 19 nt, Artificial Sequence
  Description of Artificial Sequence: Synthetic oligonucleotide
cuggcgucucuuggggcca

SEQ ID NO: 1186356 - RNA, 19 nt, Artificial Sequence
  Description of Artificial Sequence: Synthetic oligonucleotide
gcgguaguucaggaccuca

SEQ ID NO: 1186357 - RNA, 19 nt, Artificial Sequence
  Description of Artificial Sequence: Synthetic oligonucleotide
gccgagguagcuggcucug

SEQ ID NO: 1186358 - RNA, 19 nt, Artificial Sequence
  Description of Artificial Sequence: Synthetic oligonucleotide
ccgggccacaaaucgguga

SEQ ID NO: 1186359 - RNA, 19 nt, Artificial Sequence
  Description of Artificial Sequence: Synthetic oligonucleotide
ggauaaagcgcagggcauu

SEQ ID NO: 1186360 - RNA, 19 nt, Artificial Sequence
  Description of Artificial Sequence: Synthetic oligonucleotide
gcuagccgagguagcuggc

SEQ ID NO: 1186361 - RNA, 19 nt, Artificial Sequence
  Description of Artificial Sequence: Synthetic oligonucleotide
gcagcuagccgagguagcu

SEQ ID NO: 1186362 - RNA, 19 nt, Artificial Sequence
  Description of Artificial Sequence: Synthetic oligonucleotide
cagcgcgcacauaaucuuu

SEQ ID NO: 1186363 - RNA, 19 nt, Artificial Sequence
  Description of Artificial Sequence: Synthetic oligonucleotide
uggcgucucuuggggccaa

SEQ ID NO: 1186364 - RNA, 19 nt, Artificial Sequence
  Description of Artificial Sequence: Synthetic oligonucleotide
ccgagguagcuggcucugg

SEQ ID NO: 1186365 - RNA, 19 nt, Artificial Sequence
  Description of Artificial Sequence: Synthetic oligonucleotide
cgggccucagccuccgauc

SEQ ID NO: 1186366 - RNA, 19 nt, Artificial Sequence
  Description of Artificial Sequence: Synthetic oligonucleotide
gagcgaggucuggcgucuc

SEQ ID NO: 1186367 - RNA, 19 nt, Artificial Sequence
  Description of Artificial Sequence: Synthetic oligonucleotide
ggcgguaguucaggaccuc

SEQ ID NO: 1186368 - RNA, 19 nt, Artificial Sequence
  Description of Artificial Sequence: Synthetic oligonucleotide
cauccccggagcggcugca

SEQ ID NO: 1186369 - RNA, 19 nt, Artificial Sequence
  Description of Artificial Sequence: Synthetic oligonucleotide
ccgcuuccagguagacauc

SEQ ID NO: 1186370 - RNA, 19 nt, Artificial Sequence
  Description of Artificial Sequence: Synthetic oligonucleotide
ggcggagggcagaaagccu

SEQ ID NO: 1186371 - RNA, 19 nt, Artificial Sequence
  Description of Artificial Sequence: Synthetic oligonucleotide
guccgguucgagaggccau

SEQ ID NO: 1186372 - RNA, 19 nt, Artificial Sequence
  Description of Artificial Sequence: Synthetic oligonucleotide
ccgaucgcccgaccgccca

SEQ ID NO: 1186373 - RNA, 19 nt, Artificial Sequence
  Description of Artificial Sequence: Synthetic oligonucleotide
cuccgcagaggggugucau

SEQ ID NO: 1186374 - RNA, 19 nt, Artificial Sequence
  Description of Artificial Sequence: Synthetic oligonucleotide
cgaucgcccgaccgcccag

SEQ ID NO: 1186375 - RNA, 19 nt, Artificial Sequence
  Description of Artificial Sequence: Synthetic oligonucleotide
ggaggucacuugccaguuu

SEQ ID NO: 1186376 - RNA, 19 nt, Artificial Sequence
  Description of Artificial Sequence: Synthetic oligonucleotide
cccggagcggcugcagaca

SEQ ID NO: 1186377 - RNA, 19 nt, Artificial Sequence
  Description of Artificial Sequence: Synthetic oligonucleotide
ccgguucgagaggccauca

SEQ ID NO: 1186378 - RNA, 19 nt, Artificial Sequence
  Description of Artificial Sequence: Synthetic oligonucleotide
gcccgaccgcccagcauuc

SEQ ID NO: 1186379 - RNA, 19 nt, Artificial Sequence
  Description of Artificial Sequence: Synthetic oligonucleotide
cccgaccgcccagcauucc

SEQ ID NO: 1186380 - RNA, 19 nt, Artificial Sequence
  Description of Artificial Sequence: Synthetic oligonucleotide
ggcgucucuuggggccaac

SEQ ID NO: 1186381 - RNA, 19 nt, Artificial Sequence
  Description of Artificial Sequence: Synthetic oligonucleotide
cccgugaggaaaguccuuu

SEQ ID NO: 1186382 - RNA, 19 nt, Artificial Sequence
  Description of Artificial Sequence: Synthetic oligonucleotide
gggaucccgugaggaaagu

SEQ ID NO: 1186383 - RNA, 19 nt, Artificial Sequence
  Description of Artificial Sequence: Synthetic oligonucleotide
gggcgagggcccagccuga

SEQ ID NO: 1186384 - RNA, 19 nt, Artificial Sequence
  Description of Artificial Sequence: Synthetic oligonucleotide
ccgugaggaaaguccuuuu

SEQ ID NO: 1186385 - RNA, 19 nt, Artificial Sequence
  Description of Artificial Sequence: Synthetic oligonucleotide
cccguucccucagcgcgca

SEQ ID NO: 1186386 - RNA, 19 nt, Artificial Sequence
  Description of Artificial Sequence: Synthetic oligonucleotide
cgguucgagaggccaucaa

SEQ ID NO: 1186387 - RNA, 19 nt, Artificial Sequence
  Description of Artificial Sequence: Synthetic oligonucleotide
cgcccgaccgcccagcauu

SEQ ID NO: 1186388 - RNA, 19 nt, Artificial Sequence
  Description of Artificial Sequence: Synthetic oligonucleotide
gcgaggucuggcgucucuu

SEQ ID NO: 1186389 - RNA, 19 nt, Artificial Sequence
  Description of Artificial Sequence: Synthetic oligonucleotide
cccucagcgcgcacauaau

SEQ ID NO: 1186390 - RNA, 19 nt, Artificial Sequence
  Description of Artificial Sequence: Synthetic oligonucleotide
ccguucccucagcgcgcac

SEQ ID NO: 1186391 - RNA, 19 nt, Artificial Sequence
  Description of Artificial Sequence: Synthetic oligonucleotide
cggcugcaauggcuagcuc

SEQ ID NO: 1186392 - RNA, 19 nt, Artificial Sequence
  Description of Artificial Sequence: Synthetic oligonucleotide
ccggucaguuuugcugcua

SEQ ID NO: 1186393 - RNA, 19 nt, Artificial Sequence
  Description of Artificial Sequence: Synthetic oligonucleotide
cgagcgaggucuggcgucu

SEQ ID NO: 1186394 - RNA, 19 nt, Artificial Sequence
  Description of Artificial Sequence: Synthetic oligonucleotide
cgaccgcccagcauuccuu

SEQ ID NO: 1186395 - RNA, 19 nt, Artificial Sequence
  Description of Artificial Sequence: Synthetic oligonucleotide
aauuaguggaguaagacag

SEQ ID NO: 1186396 - RNA, 19 nt, Artificial Sequence
  Description of Artificial Sequence: Synthetic oligonucleotide
gauauuugaaucuccaacc

SEQ ID NO: 1186397 - RNA, 19 nt, Artificial Sequence
  Description of Artificial Sequence: Synthetic oligonucleotide
gauauguccaccuucauac

SEQ ID NO: 1186398 - RNA, 19 nt, Artificial Sequence
  Description of Artificial Sequence: Synthetic oligonucleotide
gaugcuuucaaucucauga

SEQ ID NO: 1186399 - RNA, 19 nt, Artificial Sequence
  Description of Artificial Sequence: Synthetic oligonucleotide
agaguuaauacaaacaagg

SEQ ID NO: 1186400 - RNA, 19 nt, Artificial Sequence
  Description of Artificial Sequence: Synthetic oligonucleotide
auauuugaaucuccaaccc

SEQ ID NO: 1186401 - RNA, 19 nt, Artificial Sequence
  Description of Artificial Sequence: Synthetic oligonucleotide
aaagccuuagaguaaucuc

SEQ ID NO: 1186402 - RNA, 19 nt, Artificial Sequence
  Description of Artificial Sequence: Synthetic oligonucleotide
cacaauuacaaauuucucc

SEQ ID NO: 1186403 - RNA, 19 nt, Artificial Sequence
  Description of Artificial Sequence: Synthetic oligonucleotide
aagacuauaaaaggcuccc

SEQ ID NO: 1186404 - RNA, 19 nt, Artificial Sequence
  Description of Artificial Sequence: Synthetic oligonucleotide
aaagacuauaaaaggcucc

SEQ ID NO: 1186405 - RNA, 19 nt, Artificial Sequence
  Description of Artificial Sequence: Synthetic oligonucleotide
aagccuuagaguaaucucc

SEQ ID NO: 1186406 - RNA, 19 nt, Artificial Sequence
  Description of Artificial Sequence: Synthetic oligonucleotide
ugugucggaagacaaagag

SEQ ID NO: 1186407 - RNA, 19 nt, Artificial Sequence
  Description of Artificial Sequence: Synthetic oligonucleotide
auaaaaggcucccaugaac

SEQ ID NO: 1186408 - RNA, 19 nt, Artificial Sequence
  Description of Artificial Sequence: Synthetic oligonucleotide
ucaaaagggaugcucagug

SEQ ID NO: 1186409 - RNA, 19 nt, Artificial Sequence
  Description of Artificial Sequence: Synthetic oligonucleotide
uuaaagaagaagaucccgu

SEQ ID NO: 1186410 - RNA, 19 nt, Artificial Sequence
  Description of Artificial Sequence: Synthetic oligonucleotide
aaaguucggaugcuguggg

SEQ ID NO: 1186411 - RNA, 19 nt, Artificial Sequence
  Description of Artificial Sequence: Synthetic oligonucleotide
aggggugucacacucuucc

SEQ ID NO: 1186412 - RNA, 19 nt, Artificial Sequence
  Description of Artificial Sequence: Synthetic oligonucleotide
aaaagacuauaaaaggcuc

SEQ ID NO: 1186413 - RNA, 19 nt, Artificial Sequence
  Description of Artificial Sequence: Synthetic oligonucleotide
aaaaguucggaugcugugg

SEQ ID NO: 1186414 - RNA, 19 nt, Artificial Sequence
  Description of Artificial Sequence: Synthetic oligonucleotide
aguaagcgauauuugaauc

SEQ ID NO: 1186415 - RNA, 19 nt, Artificial Sequence
  Description of Artificial Sequence: Synthetic oligonucleotide
aguuaauacaaacaaggaa

SEQ ID NO: 1186416 - RNA, 19 nt, Artificial Sequence
  Description of Artificial Sequence: Synthetic oligonucleotide
auuaaagaagaagaucccg

SEQ ID NO: 1186417 - RNA, 19 nt, Artificial Sequence
  Description of Artificial Sequence: Synthetic oligonucleotide
ugucggaagacaaagaguu

SEQ ID NO: 1186418 - RNA, 19 nt, Artificial Sequence
  Description of Artificial Sequence: Synthetic oligonucleotide
uuagaguaaucuccaauca

SEQ ID NO: 1186419 - RNA, 19 nt, Artificial Sequence
  Description of Artificial Sequence: Synthetic oligonucleotide
aagacgugacacuacacca

SEQ ID NO: 1186420 - RNA, 19 nt, Artificial Sequence
  Description of Artificial Sequence: Synthetic oligonucleotide
cuaaagagguucuccaugc

SEQ ID NO: 1186421 - RNA, 19 nt, Artificial Sequence
  Description of Artificial Sequence: Synthetic oligonucleotide
gcauuaaagaagaagaucc

SEQ ID NO: 1186422 - RNA, 19 nt, Artificial Sequence
  Description of Artificial Sequence: Synthetic oligonucleotide
uagaguaaucuccaaucag

SEQ ID NO: 1186423 - RNA, 19 nt, Artificial Sequence
  Description of Artificial Sequence: Synthetic oligonucleotide
aaguagguggccucauagg

SEQ ID NO: 1186424 - RNA, 19 nt, Artificial Sequence
  Description of Artificial Sequence: Synthetic oligonucleotide
aagaguuaauacaaacaag

SEQ ID NO: 1186425 - RNA, 19 nt, Artificial Sequence
  Description of Artificial Sequence: Synthetic oligonucleotide
acuaaagagguucuccaug

SEQ ID NO: 1186426 - RNA, 19 nt, Artificial Sequence
  Description of Artificial Sequence: Synthetic oligonucleotide
uggggcucacaaaaguucg

SEQ ID NO: 1186427 - RNA, 19 nt, Artificial Sequence
  Description of Artificial Sequence: Synthetic oligonucleotide
ucuuccuuauccuagguuu

SEQ ID NO: 1186428 - RNA, 19 nt, Artificial Sequence
  Description of Artificial Sequence: Synthetic oligonucleotide
uguaugagggagccuaccc

SEQ ID NO: 1186429 - RNA, 19 nt, Artificial Sequence
  Description of Artificial Sequence: Synthetic oligonucleotide
ugaguaagcgauauuugaa

SEQ ID NO: 1186430 - RNA, 19 nt, Artificial Sequence
  Description of Artificial Sequence: Synthetic oligonucleotide
acuauaaaaggcucccaug

SEQ ID NO: 1186431 - RNA, 19 nt, Artificial Sequence
  Description of Artificial Sequence: Synthetic oligonucleotide
ugaccagugaggcucuggg

SEQ ID NO: 1186432 - RNA, 19 nt, Artificial Sequence
  Description of Artificial Sequence: Synthetic oligonucleotide
caagacgugacacuacacc

SEQ ID NO: 1186433 - RNA, 19 nt, Artificial Sequence
  Description of Artificial Sequence: Synthetic oligonucleotide
caaaucacucuccaggaug

SEQ ID NO: 1186434 - RNA, 19 nt, Artificial Sequence
  Description of Artificial Sequence: Synthetic oligonucleotide
uauccacccaucaggcugg

SEQ ID NO: 1186435 - RNA, 19 nt, Artificial Sequence
  Description of Artificial Sequence: Synthetic oligonucleotide
uacucauagggguaucugc

SEQ ID NO: 1186436 - RNA, 19 nt, Artificial Sequence
  Description of Artificial Sequence: Synthetic oligonucleotide
acaaguggggcacuaaaga

SEQ ID NO: 1186437 - RNA, 19 nt, Artificial Sequence
  Description of Artificial Sequence: Synthetic oligonucleotide
agacacgggccuuagguuc

SEQ ID NO: 1186438 - RNA, 19 nt, Artificial Sequence
  Description of Artificial Sequence: Synthetic oligonucleotide
cuuugagcggaagacacgg

SEQ ID NO: 1186439 - RNA, 19 nt, Artificial Sequence
  Description of Artificial Sequence: Synthetic oligonucleotide
acaguggaaaauaaggaug

SEQ ID NO: 1186440 - RNA, 19 nt, Artificial Sequence
  Description of Artificial Sequence: Synthetic oligonucleotide
guauccacccaucaggcug

SEQ ID NO: 1186441 - RNA, 19 nt, Artificial Sequence
  Description of Artificial Sequence: Synthetic oligonucleotide
cacugcacggcauggaugg

SEQ ID NO: 1186442 - RNA, 19 nt, Artificial Sequence
  Description of Artificial Sequence: Synthetic oligonucleotide
agucauuagcugcacgguc

SEQ ID NO: 1186443 - RNA, 19 nt, Artificial Sequence
  Description of Artificial Sequence: Synthetic oligonucleotide
gaugauucucuuguccagg

SEQ ID NO: 1186444 - RNA, 19 nt, Artificial Sequence
  Description of Artificial Sequence: Synthetic oligonucleotide
cauggauggagaucggaag

SEQ ID NO: 1186445 - RNA, 19 nt, Artificial Sequence
  Description of Artificial Sequence: Synthetic oligonucleotide
agugugucggaagacaaag

SEQ ID NO: 1186446 - RNA, 19 nt, Artificial Sequence
  Description of Artificial Sequence: Synthetic oligonucleotide
ugacgaaccggcacaugcg

SEQ ID NO: 1186447 - RNA, 19 nt, Artificial Sequence
  Description of Artificial Sequence: Synthetic oligonucleotide
aaagcacuuccuccuagcu

SEQ ID NO: 1186448 - RNA, 19 nt, Artificial Sequence
  Description of Artificial Sequence: Synthetic oligonucleotide
auucuugauauguccaccu

SEQ ID NO: 1186449 - RNA, 19 nt, Artificial Sequence
  Description of Artificial Sequence: Synthetic oligonucleotide
ucgacaucccguuccagag

SEQ ID NO: 1186450 - RNA, 19 nt, Artificial Sequence
  Description of Artificial Sequence: Synthetic oligonucleotide
aagcgauauuugaaucucc

SEQ ID NO: 1186451 - RNA, 19 nt, Artificial Sequence
  Description of Artificial Sequence: Synthetic oligonucleotide
uugcacgaggcuuuauuag

SEQ ID NO: 1186452 - RNA, 19 nt, Artificial Sequence
  Description of Artificial Sequence: Synthetic oligonucleotide
cugacgaaccggcacaugc

SEQ ID NO: 1186453 - RNA, 19 nt, Artificial Sequence
  Description of Artificial Sequence: Synthetic oligonucleotide
ugguauccacccaucaggc

SEQ ID NO: 1186454 - RNA, 19 nt, Artificial Sequence
  Description of Artificial Sequence: Synthetic oligonucleotide
gaagaucccguucugggca

SEQ ID NO: 1186455 - RNA, 19 nt, Artificial Sequence
  Description of Artificial Sequence: Synthetic oligonucleotide
uacugaguaagcgauauuu

SEQ ID NO: 1186456 - RNA, 19 nt, Artificial Sequence
  Description of Artificial Sequence: Synthetic oligonucleotide
cucauaggcccauggaacc

SEQ ID NO: 1186457 - RNA, 19 nt, Artificial Sequence
  Description of Artificial Sequence: Synthetic oligonucleotide
agaaggucucgacaucccg

SEQ ID NO: 1186458 - RNA, 19 nt, Artificial Sequence
  Description of Artificial Sequence: Synthetic oligonucleotide
ugagcggaagacacgggcc

SEQ ID NO: 1186459 - RNA, 19 nt, Artificial Sequence
  Description of Artificial Sequence: Synthetic oligonucleotide
cuugauauguccaccuuca

SEQ ID NO: 1186460 - RNA, 19 nt, Artificial Sequence
  Description of Artificial Sequence: Synthetic oligonucleotide
aaaucacucuccaggaugu

SEQ ID NO: 1186461 - RNA, 19 nt, Artificial Sequence
  Description of Artificial Sequence: Synthetic oligonucleotide
gacgaaccggcacaugcgg

SEQ ID NO: 1186462 - RNA, 19 nt, Artificial Sequence
  Description of Artificial Sequence: Synthetic oligonucleotide
uuaguggaguaagacagga

SEQ ID NO: 1186463 - RNA, 19 nt, Artificial Sequence
  Description of Artificial Sequence: Synthetic oligonucleotide
ugauauguccaccuucaua

SEQ ID NO: 1186464 - RNA, 19 nt, Artificial Sequence
  Description of Artificial Sequence: Synthetic oligonucleotide
agaguaaucuccaaucagu

SEQ ID NO: 1186465 - RNA, 19 nt, Artificial Sequence
  Description of Artificial Sequence: Synthetic oligonucleotide
ugcacgaggcuuuauuaga

SEQ ID NO: 1186466 - RNA, 19 nt, Artificial Sequence
  Description of Artificial Sequence: Synthetic oligonucleotide
uacaaggcuugauggggcg

SEQ ID NO: 1186467 - RNA, 19 nt, Artificial Sequence
  Description of Artificial Sequence: Synthetic oligonucleotide
ucaacuugcacgaggcuuu

SEQ ID NO: 1186468 - RNA, 19 nt, Artificial Sequence
  Description of Artificial Sequence: Synthetic oligonucleotide
ugugacucuuccuuauccu

SEQ ID NO: 1186469 - RNA, 19 nt, Artificial Sequence
  Description of Artificial Sequence: Synthetic oligonucleotide
caagaaggucucgacaucc

SEQ ID NO: 1186470 - RNA, 19 nt, Artificial Sequence
  Description of Artificial Sequence: Synthetic oligonucleotide
uaaagagguucuccaugcc

SEQ ID NO: 1186471 - RNA, 19 nt, Artificial Sequence
  Description of Artificial Sequence: Synthetic oligonucleotide
uaagcgauauuugaaucuc

SEQ ID NO: 1186472 - RNA, 19 nt, Artificial Sequence
  Description of Artificial Sequence: Synthetic oligonucleotide
ugggucuguaguucugggg

SEQ ID NO: 1186473 - RNA, 19 nt, Artificial Sequence
  Description of Artificial Sequence: Synthetic oligonucleotide
auggauggagaucggaaga

SEQ ID NO: 1186474 - RNA, 19 nt, Artificial Sequence
  Description of Artificial Sequence: Synthetic oligonucleotide
ucauagggguaucugcagu

SEQ ID NO: 1186475 - RNA, 19 nt, Artificial Sequence
  Description of Artificial Sequence: Synthetic oligonucleotide
uuugagcggaagacacggg

SEQ ID NO: 1186476 - RNA, 19 nt, Artificial Sequence
  Description of Artificial Sequence: Synthetic oligonucleotide
gaagacacgggccuuaggu

SEQ ID NO: 1186477 - RNA, 19 nt, Artificial Sequence
  Description of Artificial Sequence: Synthetic oligonucleotide
gacuuugagcggaagacac

SEQ ID NO: 1186478 - RNA, 19 nt, Artificial Sequence
  Description of Artificial Sequence: Synthetic oligonucleotide
gacaagacgugacacuaca

SEQ ID NO: 1186479 - RNA, 19 nt, Artificial Sequence
  Description of Artificial Sequence: Synthetic oligonucleotide
uacaucucaggguaguaua

SEQ ID NO: 1186480 - RNA, 19 nt, Artificial Sequence
  Description of Artificial Sequence: Synthetic oligonucleotide
cugaguaagcgauauuuga

SEQ ID NO: 1186481 - RNA, 19 nt, Artificial Sequence
  Description of Artificial Sequence: Synthetic oligonucleotide
gaguuaauacaaacaagga

SEQ ID NO: 1186482 - RNA, 19 nt, Artificial Sequence
  Description of Artificial Sequence: Synthetic oligonucleotide
uggagaucggaagagccgc

SEQ ID NO: 1186483 - RNA, 19 nt, Artificial Sequence
  Description of Artificial Sequence: Synthetic oligonucleotide
agaucggaagagccgcugg

SEQ ID NO: 1186484 - RNA, 19 nt, Artificial Sequence
  Description of Artificial Sequence: Synthetic oligonucleotide
ugaacaugaugagauccug

SEQ ID NO: 1186485 - RNA, 19 nt, Artificial Sequence
  Description of Artificial Sequence: Synthetic oligonucleotide
caauuacaaauuucuccac

SEQ ID NO: 1186486 - RNA, 19 nt, Artificial Sequence
  Description of Artificial Sequence: Synthetic oligonucleotide
gaagguccucagcucaucc

SEQ ID NO: 1186487 - RNA, 19 nt, Artificial Sequence
  Description of Artificial Sequence: Synthetic oligonucleotide
cacccaauagcaccugagg

SEQ ID NO: 1186488 - RNA, 19 nt, Artificial Sequence
  Description of Artificial Sequence: Synthetic oligonucleotide
ggccggaucacacugcacg

SEQ ID NO: 1186489 - RNA, 19 nt, Artificial Sequence
  Description of Artificial Sequence: Synthetic oligonucleotide
cuugguguuugccauccac

SEQ ID NO: 1186490 - RNA, 19 nt, Artificial Sequence
  Description of Artificial Sequence: Synthetic oligonucleotide
aaccggcacaugcggggcc

SEQ ID NO: 1186491 - RNA, 19 nt, Artificial Sequence
  Description of Artificial Sequence: Synthetic oligonucleotide
ugacaaguggggcacuaaa

SEQ ID NO: 1186492 - RNA, 19 nt, Artificial Sequence
  Description of Artificial Sequence: Synthetic oligonucleotide
aaagggaugcucagugucu

SEQ ID NO: 1186493 - RNA, 19 nt, Artificial Sequence
  Description of Artificial Sequence: Synthetic oligonucleotide
auucucuuguccaggcuac

SEQ ID NO: 1186494 - RNA, 19 nt, Artificial Sequence
  Description of Artificial Sequence: Synthetic oligonucleotide
acaugaugagauccuguga

SEQ ID NO: 1186495 - RNA, 19 nt, Artificial Sequence
  Description of Artificial Sequence: Synthetic oligonucleotide
auuaguggaguaagacagg

SEQ ID NO: 1186496 - RNA, 19 nt, Artificial Sequence
  Description of Artificial Sequence: Synthetic oligonucleotide
gaguaaucuccaaucaguc

SEQ ID NO: 1186497 - RNA, 19 nt, Artificial Sequence
  Description of Artificial Sequence: Synthetic oligonucleotide
uggggcacuaaagagguuc

SEQ ID NO: 1186498 - RNA, 19 nt, Artificial Sequence
  Description of Artificial Sequence: Synthetic oligonucleotide
uccuagcugguauccaccc

SEQ ID NO: 1186499 - RNA, 19 nt, Artificial Sequence
  Description of Artificial Sequence: Synthetic oligonucleotide
acaagggucaaaagggaug

SEQ ID NO: 1186500 - RNA, 19 nt, Artificial Sequence
  Description of Artificial Sequence: Synthetic oligonucleotide
ugucacacucuuccugcgc

SEQ ID NO: 1186501 - RNA, 19 nt, Artificial Sequence
  Description of Artificial Sequence: Synthetic oligonucleotide
cucauagggguaucugcag

SEQ ID NO: 1186502 - RNA, 19 nt, Artificial Sequence
  Description of Artificial Sequence: Synthetic oligonucleotide
aacacccaauagcaccuga

SEQ ID NO: 1186503 - RNA, 19 nt, Artificial Sequence
  Description of Artificial Sequence: Synthetic oligonucleotide
acgaggcuuuauuagacaa

SEQ ID NO: 1186504 - RNA, 19 nt, Artificial Sequence
  Description of Artificial Sequence: Synthetic oligonucleotide
guaagcgauauuugaaucu

SEQ ID NO: 1186505 - RNA, 19 nt, Artificial Sequence
  Description of Artificial Sequence: Synthetic oligonucleotide
auguaugagggagccuacc

SEQ ID NO: 1186506 - RNA, 19 nt, Artificial Sequence
  Description of Artificial Sequence: Synthetic oligonucleotide
gaggucuugguguuugcca

SEQ ID NO: 1186507 - RNA, 19 nt, Artificial Sequence
  Description of Artificial Sequence: Synthetic oligonucleotide
ggugucacacucuuccugc

SEQ ID NO: 1186508 - RNA, 19 nt, Artificial Sequence
  Description of Artificial Sequence: Synthetic oligonucleotide
acgguggucacuguccagg

SEQ ID NO: 1186509 - RNA, 19 nt, Artificial Sequence
  Description of Artificial Sequence: Synthetic oligonucleotide
aagacacgggccuuagguu

SEQ ID NO: 1186510 - RNA, 19 nt, Artificial Sequence
  Description of Artificial Sequence: Synthetic oligonucleotide
augggucuguaguucuggg

SEQ ID NO: 1186511 - RNA, 19 nt, Artificial Sequence
  Description of Artificial Sequence: Synthetic oligonucleotide
gcuaccaggccccacgagg

SEQ ID NO: 1186512 - RNA, 19 nt, Artificial Sequence
  Description of Artificial Sequence: Synthetic oligonucleotide
aguggggcacuaaagaggu

SEQ ID NO: 1186513 - RNA, 19 nt, Artificial Sequence
  Description of Artificial Sequence: Synthetic oligonucleotide
aaggucucgacaucccguu

SEQ ID NO: 1186514 - RNA, 19 nt, Artificial Sequence
  Description of Artificial Sequence: Synthetic oligonucleotide
acugaguaagcgauauuug

SEQ ID NO: 1186515 - RNA, 19 nt, Artificial Sequence
  Description of Artificial Sequence: Synthetic oligonucleotide
gaguaagacaggagaauca

SEQ ID NO: 1186516 - RNA, 19 nt, Artificial Sequence
  Description of Artificial Sequence: Synthetic oligonucleotide
gaccagugaggcucugggg

SEQ ID NO: 1186517 - RNA, 19 nt, Artificial Sequence
  Description of Artificial Sequence: Synthetic oligonucleotide
auggagaucggaagagccg

SEQ ID NO: 1186518 - RNA, 19 nt, Artificial Sequence
  Description of Artificial Sequence: Synthetic oligonucleotide
agcugcgugucuugaggcg

SEQ ID NO: 1186519 - RNA, 19 nt, Artificial Sequence
  Description of Artificial Sequence: Synthetic oligonucleotide
gugacacuacaccaucccc

SEQ ID NO: 1186520 - RNA, 19 nt, Artificial Sequence
  Description of Artificial Sequence: Synthetic oligonucleotide
uuucaacuugcacgaggcu

SEQ ID NO: 1186521 - RNA, 19 nt, Artificial Sequence
  Description of Artificial Sequence: Synthetic oligonucleotide
aggcggaagguccucagcu

SEQ ID NO: 1186522 - RNA, 19 nt, Artificial Sequence
  Description of Artificial Sequence: Synthetic oligonucleotide
cccaacacccaauagcacc

SEQ ID NO: 1186523 - RNA, 19 nt, Artificial Sequence
  Description of Artificial Sequence: Synthetic oligonucleotide
uucccugacgaaccggcac

SEQ ID NO: 1186524 - RNA, 19 nt, Artificial Sequence
  Description of Artificial Sequence: Synthetic oligonucleotide
aggccuacugaguaagcga

SEQ ID NO: 1186525 - RNA, 19 nt, Artificial Sequence
  Description of Artificial Sequence: Synthetic oligonucleotide
gacgugacacuacaccauc

SEQ ID NO: 1186526 - RNA, 19 nt, Artificial Sequence
  Description of Artificial Sequence: Synthetic oligonucleotide
ucaugacacagggacuuug

SEQ ID NO: 1186527 - RNA, 19 nt, Artificial Sequence
  Description of Artificial Sequence: Synthetic oligonucleotide
gaguaagcgauauuugaau

SEQ ID NO: 1186528 - RNA, 19 nt, Artificial Sequence
  Description of Artificial Sequence: Synthetic oligonucleotide
cgauauuugaaucuccaac

SEQ ID NO: 1186529 - RNA, 19 nt, Artificial Sequence
  Description of Artificial Sequence: Synthetic oligonucleotide
caucucaggguaguauagg

SEQ ID NO: 1186530 - RNA, 19 nt, Artificial Sequence
  Description of Artificial Sequence: Synthetic oligonucleotide
ugcagcaagaaggucucga

SEQ ID NO: 1186531 - RNA, 19 nt, Artificial Sequence
  Description of Artificial Sequence: Synthetic oligonucleotide
uaaggaugauucucuuguc

SEQ ID NO: 1186532 - RNA, 19 nt, Artificial Sequence
  Description of Artificial Sequence: Synthetic oligonucleotide
cuacagaguucccuccggc

SEQ ID NO: 1186533 - RNA, 19 nt, Artificial Sequence
  Description of Artificial Sequence: Synthetic oligonucleotide
uagggguaucugcagucca

SEQ ID NO: 1186534 - RNA, 19 nt, Artificial Sequence
  Description of Artificial Sequence: Synthetic oligonucleotide
acucauagggguaucugca

SEQ ID NO: 1186535 - RNA, 19 nt, Artificial Sequence
  Description of Artificial Sequence: Synthetic oligonucleotide
caggccuacugaguaagcg

SEQ ID NO: 1186536 - RNA, 19 nt, Artificial Sequence
  Description of Artificial Sequence: Synthetic oligonucleotide
ucccguucugggcaaacaa

SEQ ID NO: 1186537 - RNA, 19 nt, Artificial Sequence
  Description of Artificial Sequence: Synthetic oligonucleotide
acaucucaggguaguauag

SEQ ID NO: 1186538 - RNA, 19 nt, Artificial Sequence
  Description of Artificial Sequence: Synthetic oligonucleotide
guaugagggagccuaccca

SEQ ID NO: 1186539 - RNA, 19 nt, Artificial Sequence
  Description of Artificial Sequence: Synthetic oligonucleotide
ucauaggcccauggaaccc

SEQ ID NO: 1186540 - RNA, 19 nt, Artificial Sequence
  Description of Artificial Sequence: Synthetic oligonucleotide
uguuugccauccacagucu

SEQ ID NO: 1186541 - RNA, 19 nt, Artificial Sequence
  Description of Artificial Sequence: Synthetic oligonucleotide
ggaugauucucuuguccag

SEQ ID NO: 1186542 - RNA, 19 nt, Artificial Sequence
  Description of Artificial Sequence: Synthetic oligonucleotide
gaaagccuuagaguaaucu

SEQ ID NO: 1186543 - RNA, 19 nt, Artificial Sequence
  Description of Artificial Sequence: Synthetic oligonucleotide
gugagauguacuugagguc

SEQ ID NO: 1186544 - RNA, 19 nt, Artificial Sequence
  Description of Artificial Sequence: Synthetic oligonucleotide
ggcauuaaagaagaagauc

SEQ ID NO: 1186545 - RNA, 19 nt, Artificial Sequence
  Description of Artificial Sequence: Synthetic oligonucleotide
acaagacgugacacuacac

SEQ ID NO: 1186546 - RNA, 19 nt, Artificial Sequence
  Description of Artificial Sequence: Synthetic oligonucleotide
agcgauauuugaaucucca

SEQ ID NO: 1186547 - RNA, 19 nt, Artificial Sequence
  Description of Artificial Sequence: Synthetic oligonucleotide
gcuuucaaucucaugacac

SEQ ID NO: 1186548 - RNA, 19 nt, Artificial Sequence
  Description of Artificial Sequence: Synthetic oligonucleotide
aggucuugguguuugccau

SEQ ID NO: 1186549 - RNA, 19 nt, Artificial Sequence
  Description of Artificial Sequence: Synthetic oligonucleotide
acuugcacgaggcuuuauu

SEQ ID NO: 1186550 - RNA, 19 nt, Artificial Sequence
  Description of Artificial Sequence: Synthetic oligonucleotide
uagucauuagcugcacggu

SEQ ID NO: 1186551 - RNA, 19 nt, Artificial Sequence
  Description of Artificial Sequence: Synthetic oligonucleotide
acuuugagcggaagacacg

SEQ ID NO: 1186552 - RNA, 19 nt, Artificial Sequence
  Description of Artificial Sequence: Synthetic oligonucleotide
aguauaggcugggguaguc

SEQ ID NO: 1186553 - RNA, 19 nt, Artificial Sequence
  Description of Artificial Sequence: Synthetic oligonucleotide
acgugacacuacaccaucc

SEQ ID NO: 1186554 - RNA, 19 nt, Artificial Sequence
  Description of Artificial Sequence: Synthetic oligonucleotide
auauguccaccuucauacu

SEQ ID NO: 1186555 - RNA, 19 nt, Artificial Sequence
  Description of Artificial Sequence: Synthetic oligonucleotide
uucuugauauguccaccuu

SEQ ID NO: 1186556 - RNA, 19 nt, Artificial Sequence
  Description of Artificial Sequence: Synthetic oligonucleotide
agacaagacgugacacuac

SEQ ID NO: 1186557 - RNA, 19 nt, Artificial Sequence
  Description of Artificial Sequence: Synthetic oligonucleotide
auuagcugcacggucccgu

SEQ ID NO: 1186558 - RNA, 19 nt, Artificial Sequence
  Description of Artificial Sequence: Synthetic oligonucleotide
ggucaaaagggaugcucag

SEQ ID NO: 1186559 - RNA, 19 nt, Artificial Sequence
  Description of Artificial Sequence: Synthetic oligonucleotide
ggucucgacaucccguucc

SEQ ID NO: 1186560 - RNA, 19 nt, Artificial Sequence
  Description of Artificial Sequence: Synthetic oligonucleotide
acacagggacuuugagcgg

SEQ ID NO: 1186561 - RNA, 19 nt, Artificial Sequence
  Description of Artificial Sequence: Synthetic oligonucleotide
gccaccauaguuucuggug

SEQ ID NO: 1186562 - RNA, 19 nt, Artificial Sequence
  Description of Artificial Sequence: Synthetic oligonucleotide
ggcacuaaagagguucucc

SEQ ID NO: 1186563 - RNA, 19 nt, Artificial Sequence
  Description of Artificial Sequence: Synthetic oligonucleotide
aaguucggaugcuguggga

SEQ ID NO: 1186564 - RNA, 19 nt, Artificial Sequence
  Description of Artificial Sequence: Synthetic oligonucleotide
cagcugcgugucuugaggc

SEQ ID NO: 1186565 - RNA, 19 nt, Artificial Sequence
  Description of Artificial Sequence: Synthetic oligonucleotide
aucaguccacgguggucac

SEQ ID NO: 1186566 - RNA, 19 nt, Artificial Sequence
  Description of Artificial Sequence: Synthetic oligonucleotide
cuugcacgaggcuuuauua

SEQ ID NO: 1186567 - RNA, 19 nt, Artificial Sequence
  Description of Artificial Sequence: Synthetic oligonucleotide
cacgcucagaugagaauuc

SEQ ID NO: 1186568 - RNA, 19 nt, Artificial Sequence
  Description of Artificial Sequence: Synthetic oligonucleotide
agcugguauccacccauca

SEQ ID NO: 1186569 - RNA, 19 nt, Artificial Sequence
  Description of Artificial Sequence: Synthetic oligonucleotide
aagaucccguucugggcaa

SEQ ID NO: 1186570 - RNA, 19 nt, Artificial Sequence
  Description of Artificial Sequence: Synthetic oligonucleotide
ugcaguccacaauuacaaa

SEQ ID NO: 1186571 - RNA, 19 nt, Artificial Sequence
  Description of Artificial Sequence: Synthetic oligonucleotide
aguucggaugcugugggaa

SEQ ID NO: 1186572 - RNA, 19 nt, Artificial Sequence
  Description of Artificial Sequence: Synthetic oligonucleotide
uagcaccugaggccucuag

SEQ ID NO: 1186573 - RNA, 19 nt, Artificial Sequence
  Description of Artificial Sequence: Synthetic oligonucleotide
cucgacaucccguuccaga

SEQ ID NO: 1186574 - RNA, 19 nt, Artificial Sequence
  Description of Artificial Sequence: Synthetic oligonucleotide
gggacuuugagcggaagac

SEQ ID NO: 1186575 - RNA, 19 nt, Artificial Sequence
  Description of Artificial Sequence: Synthetic oligonucleotide
gcuacagaguucccuccgg

SEQ ID NO: 1186576 - RNA, 19 nt, Artificial Sequence
  Description of Artificial Sequence: Synthetic oligonucleotide
cgugucuugaggcggaagg

SEQ ID NO: 1186577 - RNA, 19 nt, Artificial Sequence
  Description of Artificial Sequence: Synthetic oligonucleotide
cuuccuccuagcugguauc

SEQ ID NO: 1186578 - RNA, 19 nt, Artificial Sequence
  Description of Artificial Sequence: Synthetic oligonucleotide
gccucuugaggaugggccg

SEQ ID NO: 1186579 - RNA, 19 nt, Artificial Sequence
  Description of Artificial Sequence: Synthetic oligonucleotide
ggcucccaugaacacaaag

SEQ ID NO: 1186580 - RNA, 19 nt, Artificial Sequence
  Description of Artificial Sequence: Synthetic oligonucleotide
aggucucgacaucccguuc

SEQ ID NO: 1186581 - RNA, 19 nt, Artificial Sequence
  Description of Artificial Sequence: Synthetic oligonucleotide
ugucagugugucggaagac

SEQ ID NO: 1186582 - RNA, 19 nt, Artificial Sequence
  Description of Artificial Sequence: Synthetic oligonucleotide
agacuauaaaaggcuccca

SEQ ID NO: 1186583 - RNA, 19 nt, Artificial Sequence
  Description of Artificial Sequence: Synthetic oligonucleotide
gcccauggaacccacuggc

SEQ ID NO: 1186584 - RNA, 19 nt, Artificial Sequence
  Description of Artificial Sequence: Synthetic oligonucleotide
gagaucggaagagccgcug

SEQ ID NO: 1186585 - RNA, 19 nt, Artificial Sequence
  Description of Artificial Sequence: Synthetic oligonucleotide
ggcaaacaaaagccaggcc

SEQ ID NO: 1186586 - RNA, 19 nt, Artificial Sequence
  Description of Artificial Sequence: Synthetic oligonucleotide
ucccguuccagaggcaagu

SEQ ID NO: 1186587 - RNA, 19 nt, Artificial Sequence
  Description of Artificial Sequence: Synthetic oligonucleotide
gcucagaugagaauucaca

SEQ ID NO: 1186588 - RNA, 19 nt, Artificial Sequence
  Description of Artificial Sequence: Synthetic oligonucleotide
aggguaguauaggcugggg

SEQ ID NO: 1186589 - RNA, 19 nt, Artificial Sequence
  Description of Artificial Sequence: Synthetic oligonucleotide
accggcacaugcggggccc

SEQ ID NO: 1186590 - RNA, 19 nt, Artificial Sequence
  Description of Artificial Sequence: Synthetic oligonucleotide
ucuugguguuugccaucca

SEQ ID NO: 1186591 - RNA, 19 nt, Artificial Sequence
  Description of Artificial Sequence: Synthetic oligonucleotide
cugaacaugaugagauccu

SEQ ID NO: 1186592 - RNA, 19 nt, Artificial Sequence
  Description of Artificial Sequence: Synthetic oligonucleotide
agaugcccuuucaacagga

SEQ ID NO: 1186593 - RNA, 19 nt, Artificial Sequence
  Description of Artificial Sequence: Synthetic oligonucleotide
gccggaucacacugcacgg

SEQ ID NO: 1186594 - RNA, 19 nt, Artificial Sequence
  Description of Artificial Sequence: Synthetic oligonucleotide
acgggccuuagguucuuca

SEQ ID NO: 1186595 - RNA, 19 nt, Artificial Sequence
  Description of Artificial Sequence: Synthetic oligonucleotide
gaggaaagccuuagaguaa

SEQ ID NO: 1186596 - RNA, 19 nt, Artificial Sequence
  Description of Artificial Sequence: Synthetic oligonucleotide
cacgaggcuuuauuagaca

SEQ ID NO: 1186597 - RNA, 19 nt, Artificial Sequence
  Description of Artificial Sequence: Synthetic oligonucleotide
uggcuaccaggccccacga

SEQ ID NO: 1186598 - RNA, 19 nt, Artificial Sequence
  Description of Artificial Sequence: Synthetic oligonucleotide
cuggcacuugcugaacaug

SEQ ID NO: 1186599 - RNA, 19 nt, Artificial Sequence
  Description of Artificial Sequence: Synthetic oligonucleotide
uagcugguauccacccauc

SEQ ID NO: 1186600 - RNA, 19 nt, Artificial Sequence
  Description of Artificial Sequence: Synthetic oligonucleotide
uuuugacaaguggggcacu

SEQ ID NO: 1186601 - RNA, 19 nt, Artificial Sequence
  Description of Artificial Sequence: Synthetic oligonucleotide
cuugugguucaugggucug

SEQ ID NO: 1186602 - RNA, 19 nt, Artificial Sequence
  Description of Artificial Sequence: Synthetic oligonucleotide
cugaccagugaggcucugg

SEQ ID NO: 1186603 - RNA, 19 nt, Artificial Sequence
  Description of Artificial Sequence: Synthetic oligonucleotide
agacgugacacuacaccau

SEQ ID NO: 1186604 - RNA, 19 nt, Artificial Sequence
  Description of Artificial Sequence: Synthetic oligonucleotide
uugaggcggaagguccuca

SEQ ID NO: 1186605 - RNA, 19 nt, Artificial Sequence
  Description of Artificial Sequence: Synthetic oligonucleotide
ucauacucauagggguauc

SEQ ID NO: 1186606 - RNA, 19 nt, Artificial Sequence
  Description of Artificial Sequence: Synthetic oligonucleotide
uuagcugcacggucccguu

SEQ ID NO: 1186607 - RNA, 19 nt, Artificial Sequence
  Description of Artificial Sequence: Synthetic oligonucleotide
guccaggcuacaaggcuug

SEQ ID NO: 1186608 - RNA, 19 nt, Artificial Sequence
  Description of Artificial Sequence: Synthetic oligonucleotide
gaaggucucgacaucccgu

SEQ ID NO: 1186609 - RNA, 19 nt, Artificial Sequence
  Description of Artificial Sequence: Synthetic oligonucleotide
guauaggcugggguaguca

SEQ ID NO: 1186610 - RNA, 19 nt, Artificial Sequence
  Description of Artificial Sequence: Synthetic oligonucleotide
gucccguucccugacgaac

SEQ ID NO: 1186611 - RNA, 19 nt, Artificial Sequence
  Description of Artificial Sequence: Synthetic oligonucleotide
ugccugucaacagggccac

SEQ ID NO: 1186612 - RNA, 19 nt, Artificial Sequence
  Description of Artificial Sequence: Synthetic oligonucleotide
ccuucauacucauaggggu

SEQ ID NO: 1186613 - RNA, 19 nt, Artificial Sequence
  Description of Artificial Sequence: Synthetic oligonucleotide
cgugacacuacaccauccc

SEQ ID NO: 1186614 - RNA, 19 nt, Artificial Sequence
  Description of Artificial Sequence: Synthetic oligonucleotide
ucucgacaucccguuccag

SEQ ID NO: 1186615 - RNA, 19 nt, Artificial Sequence
  Description of Artificial Sequence: Synthetic oligonucleotide
cuagcugguauccacccau

SEQ ID NO: 1186616 - RNA, 19 nt, Artificial Sequence
  Description of Artificial Sequence: Synthetic oligonucleotide
cuagccucuugaggauggg

SEQ ID NO: 1186617 - RNA, 19 nt, Artificial Sequence
  Description of Artificial Sequence: Synthetic oligonucleotide
acggucccguucccugacg

SEQ ID NO: 1186618 - RNA, 19 nt, Artificial Sequence
  Description of Artificial Sequence: Synthetic oligonucleotide
agggaugcucagugucugu

SEQ ID NO: 1186619 - RNA, 19 nt, Artificial Sequence
  Description of Artificial Sequence: Synthetic oligonucleotide
uucucuuguccaggcuaca

SEQ ID NO: 1186620 - RNA, 19 nt, Artificial Sequence
  Description of Artificial Sequence: Synthetic oligonucleotide
gggacagacaagacgugac

SEQ ID NO: 1186621 - RNA, 19 nt, Artificial Sequence
  Description of Artificial Sequence: Synthetic oligonucleotide
uccuccuagcugguaucca

SEQ ID NO: 1186622 - RNA, 19 nt, Artificial Sequence
  Description of Artificial Sequence: Synthetic oligonucleotide
cacagggacuuugagcgga

SEQ ID NO: 1186623 - RNA, 19 nt, Artificial Sequence
  Description of Artificial Sequence: Synthetic oligonucleotide
gccucauaggcccauggaa

SEQ ID NO: 1186624 - RNA, 19 nt, Artificial Sequence
  Description of Artificial Sequence: Synthetic oligonucleotide
cuggggccguucuagccuc

SEQ ID NO: 1186625 - RNA, 19 nt, Artificial Sequence
  Description of Artificial Sequence: Synthetic oligonucleotide
acgcucagaugagaauuca

SEQ ID NO: 1186626 - RNA, 19 nt, Artificial Sequence
  Description of Artificial Sequence: Synthetic oligonucleotide
ccuccuagcugguauccac

SEQ ID NO: 1186627 - RNA, 19 nt, Artificial Sequence
  Description of Artificial Sequence: Synthetic oligonucleotide
caugcggggcccacgcuca

SEQ ID NO: 1186628 - RNA, 19 nt, Artificial Sequence
  Description of Artificial Sequence: Synthetic oligonucleotide
cguucccugacgaaccggc

SEQ ID NO: 1186629 - RNA, 19 nt, Artificial Sequence
  Description of Artificial Sequence: Synthetic oligonucleotide
agccuacccagcugucagu

SEQ ID NO: 1186630 - RNA, 19 nt, Artificial Sequence
  Description of Artificial Sequence: Synthetic oligonucleotide
cauaggcccauggaaccca

SEQ ID NO: 1186631 - RNA, 19 nt, Artificial Sequence
  Description of Artificial Sequence: Synthetic oligonucleotide
cacuggucuugcagccggc

SEQ ID NO: 1186632 - RNA, 19 nt, Artificial Sequence
  Description of Artificial Sequence: Synthetic oligonucleotide
cuaccaggccccacgaggu

SEQ ID NO: 1186633 - RNA, 19 nt, Artificial Sequence
  Description of Artificial Sequence: Synthetic oligonucleotide
caucaggcugggcucuuca

SEQ ID NO: 1186634 - RNA, 19 nt, Artificial Sequence
  Description of Artificial Sequence: Synthetic oligonucleotide
gugucggaagacaaagagu

SEQ ID NO: 1186635 - RNA, 19 nt, Artificial Sequence
  Description of Artificial Sequence: Synthetic oligonucleotide
ggggcucacaaaaguucgg

SEQ ID NO: 1186636 - RNA, 19 nt, Artificial Sequence
  Description of Artificial Sequence: Synthetic oligonucleotide
gcggaagguccucagcuca

SEQ ID NO: 1186637 - RNA, 19 nt, Artificial Sequence
  Description of Artificial Sequence: Synthetic oligonucleotide
agccaggccuacugaguaa

SEQ ID NO: 1186638 - RNA, 19 nt, Artificial Sequence
  Description of Artificial Sequence: Synthetic oligonucleotide
ggccuugugguucaugggu

SEQ ID NO: 1186639 - RNA, 19 nt, Artificial Sequence
  Description of Artificial Sequence: Synthetic oligonucleotide
gcacaugcggggcccacgc

SEQ ID NO: 1186640 - RNA, 19 nt, Artificial Sequence
  Description of Artificial Sequence: Synthetic oligonucleotide
gcgauauuugaaucuccaa

SEQ ID NO: 1186641 - RNA, 19 nt, Artificial Sequence
  Description of Artificial Sequence: Synthetic oligonucleotide
uggaacccacuggcuacca

SEQ ID NO: 1186642 - RNA, 19 nt, Artificial Sequence
  Description of Artificial Sequence: Synthetic oligonucleotide
gucaaaagggaugcucagu

SEQ ID NO: 1186643 - RNA, 19 nt, Artificial Sequence
  Description of Artificial Sequence: Synthetic oligonucleotide
gugugucggaagacaaaga

SEQ ID NO: 1186644 - RNA, 19 nt, Artificial Sequence
  Description of Artificial Sequence: Synthetic oligonucleotide
cagugugucggaagacaaa

SEQ ID NO: 1186645 - RNA, 19 nt, Artificial Sequence
  Description of Artificial Sequence: Synthetic oligonucleotide
gcugggguagucauuagcu

SEQ ID NO: 1186646 - RNA, 19 nt, Artificial Sequence
  Description of Artificial Sequence: Synthetic oligonucleotide
cacggucccguucccugac

SEQ ID NO: 1186647 - RNA, 19 nt, Artificial Sequence
  Description of Artificial Sequence: Synthetic oligonucleotide
caucccguuccagaggcaa

SEQ ID NO: 1186648 - RNA, 19 nt, Artificial Sequence
  Description of Artificial Sequence: Synthetic oligonucleotide
cacuaaagagguucuccau

SEQ ID NO: 1186649 - RNA, 19 nt, Artificial Sequence
  Description of Artificial Sequence: Synthetic oligonucleotide
cauacucauagggguaucu

SEQ ID NO: 1186650 - RNA, 19 nt, Artificial Sequence
  Description of Artificial Sequence: Synthetic oligonucleotide
uggggcgcugcagcaagaa

SEQ ID NO: 1186651 - RNA, 19 nt, Artificial Sequence
  Description of Artificial Sequence: Synthetic oligonucleotide
ccguucugggcaaacaaaa

SEQ ID NO: 1186652 - RNA, 19 nt, Artificial Sequence
  Description of Artificial Sequence: Synthetic oligonucleotide
gcauggauggagaucggaa

SEQ ID NO: 1186653 - RNA, 19 nt, Artificial Sequence
  Description of Artificial Sequence: Synthetic oligonucleotide
caggggugucacacucuuc

SEQ ID NO: 1186654 - RNA, 19 nt, Artificial Sequence
  Description of Artificial Sequence: Synthetic oligonucleotide
ggcggaagguccucagcuc

SEQ ID NO: 1186655 - RNA, 19 nt, Artificial Sequence
  Description of Artificial Sequence: Synthetic oligonucleotide
gccuacccagcugucagug

SEQ ID NO: 1186656 - RNA, 19 nt, Artificial Sequence
  Description of Artificial Sequence: Synthetic oligonucleotide
uccaggcuacaaggcuuga

SEQ ID NO: 1186657 - RNA, 19 nt, Artificial Sequence
  Description of Artificial Sequence: Synthetic oligonucleotide
cagggacuuugagcggaag

SEQ ID NO: 1186658 - RNA, 19 nt, Artificial Sequence
  Description of Artificial Sequence: Synthetic oligonucleotide
cugcgugucuugaggcgga

SEQ ID NO: 1186659 - RNA, 19 nt, Artificial Sequence
  Description of Artificial Sequence: Synthetic oligonucleotide
gacacgggccuuagguucu

SEQ ID NO: 1186660 - RNA, 19 nt, Artificial Sequence
  Description of Artificial Sequence: Synthetic oligonucleotide
cgcucagaugagaauucac

SEQ ID NO: 1186661 - RNA, 19 nt, Artificial Sequence
  Description of Artificial Sequence: Synthetic oligonucleotide
ggcacaugcggggcccacg

SEQ ID NO: 1186662 - RNA, 19 nt, Artificial Sequence
  Description of Artificial Sequence: Synthetic oligonucleotide
ccaggccuacugaguaagc

SEQ ID NO: 1186663 - RNA, 19 nt, Artificial Sequence
  Description of Artificial Sequence: Synthetic oligonucleotide
gaauuccuuguagccgccu

SEQ ID NO: 1186664 - RNA, 19 nt, Artificial Sequence
  Description of Artificial Sequence: Synthetic oligonucleotide
cugggcucuucaagaugga

SEQ ID NO: 1186665 - RNA, 19 nt, Artificial Sequence
  Description of Artificial Sequence: Synthetic oligonucleotide
gggguaucugcaguccaca

SEQ ID NO: 1186666 - RNA, 19 nt, Artificial Sequence
  Description of Artificial Sequence: Synthetic oligonucleotide
guucccugacgaaccggca

SEQ ID NO: 1186667 - RNA, 19 nt, Artificial Sequence
  Description of Artificial Sequence: Synthetic oligonucleotide
gguguuugccauccacagu

SEQ ID NO: 1186668 - RNA, 19 nt, Artificial Sequence
  Description of Artificial Sequence: Synthetic oligonucleotide
auaggcugggguagucauu

SEQ ID NO: 1186669 - RNA, 19 nt, Artificial Sequence
  Description of Artificial Sequence: Synthetic oligonucleotide
cgggccuuagguucuucag

SEQ ID NO: 1186670 - RNA, 19 nt, Artificial Sequence
  Description of Artificial Sequence: Synthetic oligonucleotide
gagcuggcaccaggauaug

SEQ ID NO: 1186671 - RNA, 19 nt, Artificial Sequence
  Description of Artificial Sequence: Synthetic oligonucleotide
ugcgugucuugaggcggaa

SEQ ID NO: 1186672 - RNA, 19 nt, Artificial Sequence
  Description of Artificial Sequence: Synthetic oligonucleotide
ccguuccagaggcaaguuc

SEQ ID NO: 1186673 - RNA, 19 nt, Artificial Sequence
  Description of Artificial Sequence: Synthetic oligonucleotide
gguauccacccaucaggcu

SEQ ID NO: 1186674 - RNA, 19 nt, Artificial Sequence
  Description of Artificial Sequence: Synthetic oligonucleotide
ggcucacaaaaguucggau

SEQ ID NO: 1186675 - RNA, 19 nt, Artificial Sequence
  Description of Artificial Sequence: Synthetic oligonucleotide
ggccccacgagguaaggau

SEQ ID NO: 1186676 - RNA, 19 nt, Artificial Sequence
  Description of Artificial Sequence: Synthetic oligonucleotide
ccccaacacccaauagcac

SEQ ID NO: 1186677 - RNA, 19 nt, Artificial Sequence
  Description of Artificial Sequence: Synthetic oligonucleotide
agccggcuacagaguuccc

SEQ ID NO: 1186678 - RNA, 19 nt, Artificial Sequence
  Description of Artificial Sequence: Synthetic oligonucleotide
ggaaagccuuagaguaauc

SEQ ID NO: 1186679 - RNA, 19 nt, Artificial Sequence
  Description of Artificial Sequence: Synthetic oligonucleotide
gggccguucuagccucuug

SEQ ID NO: 1186680 - RNA, 19 nt, Artificial Sequence
  Description of Artificial Sequence: Synthetic oligonucleotide
ccggaucacacugcacggc

SEQ ID NO: 1186681 - RNA, 19 nt, Artificial Sequence
  Description of Artificial Sequence: Synthetic oligonucleotide
cccguucugggcaaacaaa

SEQ ID NO: 1186682 - RNA, 19 nt, Artificial Sequence
  Description of Artificial Sequence: Synthetic oligonucleotide
ggccuacugaguaagcgau

SEQ ID NO: 1186683 - RNA, 19 nt, Artificial Sequence
  Description of Artificial Sequence: Synthetic oligonucleotide
acaucccguuccagaggca

SEQ ID NO: 1186684 - RNA, 19 nt, Artificial Sequence
  Description of Artificial Sequence: Synthetic oligonucleotide
ccuacugaguaagcgauau

SEQ ID NO: 1186685 - RNA, 19 nt, Artificial Sequence
  Description of Artificial Sequence: Synthetic oligonucleotide
gcuggcacuugcugaacau

SEQ ID NO: 1186686 - RNA, 19 nt, Artificial Sequence
  Description of Artificial Sequence: Synthetic oligonucleotide
gcgugucuugaggcggaag

SEQ ID NO: 1186687 - RNA, 19 nt, Artificial Sequence
  Description of Artificial Sequence: Synthetic oligonucleotide
agaucccguucugggcaaa

SEQ ID NO: 1186688 - RNA, 19 nt, Artificial Sequence
  Description of Artificial Sequence: Synthetic oligonucleotide
gcacggucccguucccuga

SEQ ID NO: 1186689 - RNA, 19 nt, Artificial Sequence
  Description of Artificial Sequence: Synthetic oligonucleotide
gggcacuaaagagguucuc

SEQ ID NO: 1186690 - RNA, 19 nt, Artificial Sequence
  Description of Artificial Sequence: Synthetic oligonucleotide
ccguucccugacgaaccgg

SEQ ID NO: 1186691 - RNA, 19 nt, Artificial Sequence
  Description of Artificial Sequence: Synthetic oligonucleotide
gcagccggcuacagaguuc

SEQ ID NO: 1186692 - RNA, 19 nt, Artificial Sequence
  Description of Artificial Sequence: Synthetic oligonucleotide
gcccacgcucagaugagaa

SEQ ID NO: 1186693 - RNA, 19 nt, Artificial Sequence
  Description of Artificial Sequence: Synthetic oligonucleotide
cacgggccuuagguucuuc

SEQ ID NO: 1186694 - RNA, 19 nt, Artificial Sequence
  Description of Artificial Sequence: Synthetic oligonucleotide
ccacgcucagaugagaauu

SEQ ID NO: 1186695 - RNA, 19 nt, Artificial Sequence
  Description of Artificial Sequence: Synthetic oligonucleotide
ccugacgaaccggcacaug

SEQ ID NO: 1186696 - RNA, 19 nt, Artificial Sequence
  Description of Artificial Sequence: Synthetic oligonucleotide
gccggcuacagaguucccu

SEQ ID NO: 1186697 - RNA, 19 nt, Artificial Sequence
  Description of Artificial Sequence: Synthetic oligonucleotide
ccaaucaguccacgguggu

SEQ ID NO: 1186698 - RNA, 19 nt, Artificial Sequence
  Description of Artificial Sequence: Synthetic oligonucleotide
ggagaucggaagagccgcu

SEQ ID NO: 1186699 - RNA, 19 nt, Artificial Sequence
  Description of Artificial Sequence: Synthetic oligonucleotide
acacgggccuuagguucuu

SEQ ID NO: 1186700 - RNA, 19 nt, Artificial Sequence
  Description of Artificial Sequence: Synthetic oligonucleotide
gccccacgagguaaggaua

SEQ ID NO: 1186701 - RNA, 19 nt, Artificial Sequence
  Description of Artificial Sequence: Synthetic oligonucleotide
gccuacugaguaagcgaua

SEQ ID NO: 1186702 - RNA, 19 nt, Artificial Sequence
  Description of Artificial Sequence: Synthetic oligonucleotide
cacaugcggggcccacgcu

SEQ ID NO: 1186703 - RNA, 19 nt, Artificial Sequence
  Description of Artificial Sequence: Synthetic oligonucleotide
gggccggaucacacugcac

SEQ ID NO: 1186704 - RNA, 19 nt, Artificial Sequence
  Description of Artificial Sequence: Synthetic oligonucleotide
gcggggcccacgcucagau

SEQ ID NO: 1186705 - RNA, 19 nt, Artificial Sequence
  Description of Artificial Sequence: Synthetic oligonucleotide
ccaucaggcugggcucuuc

SEQ ID NO: 1186706 - RNA, 19 nt, Artificial Sequence
  Description of Artificial Sequence: Synthetic oligonucleotide
ggauagcagcaggaugcau

SEQ ID NO: 1186707 - RNA, 19 nt, Artificial Sequence
  Description of Artificial Sequence: Synthetic oligonucleotide
cacuggcuaccaggcccca

SEQ ID NO: 1186708 - RNA, 19 nt, Artificial Sequence
  Description of Artificial Sequence: Synthetic oligonucleotide
gcgcuugcucuggacaggu

SEQ ID NO: 1186709 - RNA, 19 nt, Artificial Sequence
  Description of Artificial Sequence: Synthetic oligonucleotide
cccuuucaacaggagucaa

SEQ ID NO: 1186710 - RNA, 19 nt, Artificial Sequence
  Description of Artificial Sequence: Synthetic oligonucleotide
gcccagcugcgugucuuga

SEQ ID NO: 1186711 - RNA, 19 nt, Artificial Sequence
  Description of Artificial Sequence: Synthetic oligonucleotide
cccacgcucagaugagaau

SEQ ID NO: 1186712 - RNA, 19 nt, Artificial Sequence
  Description of Artificial Sequence: Synthetic oligonucleotide
gcgcugcagcaagaagguc

SEQ ID NO: 1186713 - RNA, 19 nt, Artificial Sequence
  Description of Artificial Sequence: Synthetic oligonucleotide
cggucccguucccugacga

SEQ ID NO: 1186714 - RNA, 19 nt, Artificial Sequence
  Description of Artificial Sequence: Synthetic oligonucleotide
cccugacgaaccggcacau

SEQ ID NO: 1186715 - RNA, 19 nt, Artificial Sequence
  Description of Artificial Sequence: Synthetic oligonucleotide
cccaucaggcugggcucuu

SEQ ID NO: 1186716 - RNA, 19 nt, Artificial Sequence
  Description of Artificial Sequence: Synthetic oligonucleotide
aggaacaagauguugaggc

SEQ ID NO: 1186717 - RNA, 19 nt, Artificial Sequence
  Description of Artificial Sequence: Synthetic oligonucleotide
aaaaucagcuccuagggag

SEQ ID NO: 1186718 - RNA, 19 nt, Artificial Sequence
  Description of Artificial Sequence: Synthetic oligonucleotide
aaagugaggaacaagaugu

SEQ ID NO: 1186719 - RNA, 19 nt, Artificial Sequence
  Description of Artificial Sequence: Synthetic oligonucleotide
aagcuguuaccacaguugc

SEQ ID NO: 1186720 - RNA, 19 nt, Artificial Sequence
  Description of Artificial Sequence: Synthetic oligonucleotide
accgaaaucaucaaggcac

SEQ ID NO: 1186721 - RNA, 19 nt, Artificial Sequence
  Description of Artificial Sequence: Synthetic oligonucleotide
aagaauuccacguuuccca

SEQ ID NO: 1186722 - RNA, 19 nt, Artificial Sequence
  Description of Artificial Sequence: Synthetic oligonucleotide
uauacucagacaccacucg

SEQ ID NO: 1186723 - RNA, 19 nt, Artificial Sequence
  Description of Artificial Sequence: Synthetic oligonucleotide
uugaaaagaucaaacgcug

SEQ ID NO: 1186724 - RNA, 19 nt, Artificial Sequence
  Description of Artificial Sequence: Synthetic oligonucleotide
agguugaaaagaucaaacg

SEQ ID NO: 1186725 - RNA, 19 nt, Artificial Sequence
  Description of Artificial Sequence: Synthetic oligonucleotide
agaagugcgccauagaacu

SEQ ID NO: 1186726 - RNA, 19 nt, Artificial Sequence
  Description of Artificial Sequence: Synthetic oligonucleotide
aggucuuccugccuuaugc

SEQ ID NO: 1186727 - RNA, 19 nt, Artificial Sequence
  Description of Artificial Sequence: Synthetic oligonucleotide
gaccuuaucccacaauugg

SEQ ID NO: 1186728 - RNA, 19 nt, Artificial Sequence
  Description of Artificial Sequence: Synthetic oligonucleotide
ucaaggucugauuacagga

SEQ ID NO: 1186729 - RNA, 19 nt, Artificial Sequence
  Description of Artificial Sequence: Synthetic oligonucleotide
caucaaggaacacaaaggc

SEQ ID NO: 1186730 - RNA, 19 nt, Artificial Sequence
  Description of Artificial Sequence: Synthetic oligonucleotide
agccgugacaccuugcugc

SEQ ID NO: 1186731 - RNA, 19 nt, Artificial Sequence
  Description of Artificial Sequence: Synthetic oligonucleotide
aacccauuguccuguaggg

SEQ ID NO: 1186732 - RNA, 19 nt, Artificial Sequence
  Description of Artificial Sequence: Synthetic oligonucleotide
uguuuaaaagggcaaggac

SEQ ID NO: 1186733 - RNA, 19 nt, Artificial Sequence
  Description of Artificial Sequence: Synthetic oligonucleotide
aagaucaaacgcuguugac

SEQ ID NO: 1186734 - RNA, 19 nt, Artificial Sequence
  Description of Artificial Sequence: Synthetic oligonucleotide
ugcgccauagaacugugag

SEQ ID NO: 1186735 - RNA, 19 nt, Artificial Sequence
  Description of Artificial Sequence: Synthetic oligonucleotide
ucucacuugcucaaggucu

SEQ ID NO: 1186736 - RNA, 19 nt, Artificial Sequence
  Description of Artificial Sequence: Synthetic oligonucleotide
aucaagaagcucuucaccu

SEQ ID NO: 1186737 - RNA, 19 nt, Artificial Sequence
  Description of Artificial Sequence: Synthetic oligonucleotide
ucagcucccgaucugaugu

SEQ ID NO: 1186738 - RNA, 19 nt, Artificial Sequence
  Description of Artificial Sequence: Synthetic oligonucleotide
agaagcucaggcaucacgc

SEQ ID NO: 1186739 - RNA, 19 nt, Artificial Sequence
  Description of Artificial Sequence: Synthetic oligonucleotide
ucuucucacuugcucaagg

SEQ ID NO: 1186740 - RNA, 19 nt, Artificial Sequence
  Description of Artificial Sequence: Synthetic oligonucleotide
gaucaagaagcucuucacc

SEQ ID NO: 1186741 - RNA, 19 nt, Artificial Sequence
  Description of Artificial Sequence: Synthetic oligonucleotide
ucaaacgcuguugacuugg

SEQ ID NO: 1186742 - RNA, 19 nt, Artificial Sequence
  Description of Artificial Sequence: Synthetic oligonucleotide
aauuccacguuucccagaa

SEQ ID NO: 1186743 - RNA, 19 nt, Artificial Sequence
  Description of Artificial Sequence: Synthetic oligonucleotide
aguuaaaaucagcuccuag

SEQ ID NO: 1186744 - RNA, 19 nt, Artificial Sequence
  Description of Artificial Sequence: Synthetic oligonucleotide
aaggguaggaaggaucuag

SEQ ID NO: 1186745 - RNA, 19 nt, Artificial Sequence
  Description of Artificial Sequence: Synthetic oligonucleotide
uuucccagaaagagggugc

SEQ ID NO: 1186746 - RNA, 19 nt, Artificial Sequence
  Description of Artificial Sequence: Synthetic oligonucleotide
cagguugaaaagaucaaac

SEQ ID NO: 1186747 - RNA, 19 nt, Artificial Sequence
  Description of Artificial Sequence: Synthetic oligonucleotide
uaaaaucagcuccuaggga

SEQ ID NO: 1186748 - RNA, 19 nt, Artificial Sequence
  Description of Artificial Sequence: Synthetic oligonucleotide
guaggacagaaccagguug

SEQ ID NO: 1186749 - RNA, 19 nt, Artificial Sequence
  Description of Artificial Sequence: Synthetic oligonucleotide
ugggauaacgcuugcggag

SEQ ID NO: 1186750 - RNA, 19 nt, Artificial Sequence
  Description of Artificial Sequence: Synthetic oligonucleotide
acuccgaacucucuguuag

SEQ ID NO: 1186751 - RNA, 19 nt, Artificial Sequence
  Description of Artificial Sequence: Synthetic oligonucleotide
aaaggcgaacuccgaacuc

SEQ ID NO: 1186752 - RNA, 19 nt, Artificial Sequence
  Description of Artificial Sequence: Synthetic oligonucleotide
agagggugcuguuuaaaag

SEQ ID NO: 1186753 - RNA, 19 nt, Artificial Sequence
  Description of Artificial Sequence: Synthetic oligonucleotide
gaagcuguuaccacaguug

SEQ ID NO: 1186754 - RNA, 19 nt, Artificial Sequence
  Description of Artificial Sequence: Synthetic oligonucleotide
acguuucccagaaagaggg

SEQ ID NO: 1186755 - RNA, 19 nt, Artificial Sequence
  Description of Artificial Sequence: Synthetic oligonucleotide
aagcucuucaccucagcca

SEQ ID NO: 1186756 - RNA, 19 nt, Artificial Sequence
  Description of Artificial Sequence: Synthetic oligonucleotide
gacaccaugggguucuccc

SEQ ID NO: 1186757 - RNA, 19 nt, Artificial Sequence
  Description of Artificial Sequence: Synthetic oligonucleotide
aguguaguacacgguaggc

SEQ ID NO: 1186758 - RNA, 19 nt, Artificial Sequence
  Description of Artificial Sequence: Synthetic oligonucleotide
auacucagacaccacucgg

SEQ ID NO: 1186759 - RNA, 19 nt, Artificial Sequence
  Description of Artificial Sequence: Synthetic oligonucleotide
ucucuguuaggucuuccug

SEQ ID NO: 1186760 - RNA, 19 nt, Artificial Sequence
  Description of Artificial Sequence: Synthetic oligonucleotide
ggugggauaacgcuugcgg

SEQ ID NO: 1186761 - RNA, 19 nt, Artificial Sequence
  Description of Artificial Sequence: Synthetic oligonucleotide
acucggaagaauuccacgu

SEQ ID NO: 1186762 - RNA, 19 nt, Artificial Sequence
  Description of Artificial Sequence: Synthetic oligonucleotide
agcccaacagggcaggcac

SEQ ID NO: 1186763 - RNA, 19 nt, Artificial Sequence
  Description of Artificial Sequence: Synthetic oligonucleotide
cucccaguguaguacacgg

SEQ ID NO: 1186764 - RNA, 19 nt, Artificial Sequence
  Description of Artificial Sequence: Synthetic oligonucleotide
aagagggugcuguuuaaaa

SEQ ID NO: 1186765 - RNA, 19 nt, Artificial Sequence
  Description of Artificial Sequence: Synthetic oligonucleotide
guagguagagcaugcaaac

SEQ ID NO: 1186766 - RNA, 19 nt, Artificial Sequence
  Description of Artificial Sequence: Synthetic oligonucleotide
uccucaauugcaucuuuga

SEQ ID NO: 1186767 - RNA, 19 nt, Artificial Sequence
  Description of Artificial Sequence: Synthetic oligonucleotide
aaccaugcccagaagugcg

SEQ ID NO: 1186768 - RNA, 19 nt, Artificial Sequence
  Description of Artificial Sequence: Synthetic oligonucleotide
cuuaugcugugguacuucc

SEQ ID NO: 1186769 - RNA, 19 nt, Artificial Sequence
  Description of Artificial Sequence: Synthetic oligonucleotide
cacguuucccagaaagagg

SEQ ID NO: 1186770 - RNA, 19 nt, Artificial Sequence
  Description of Artificial Sequence: Synthetic oligonucleotide
agcaggguacuccuuccgc

SEQ ID NO: 1186771 - RNA, 19 nt, Artificial Sequence
  Description of Artificial Sequence: Synthetic oligonucleotide
uaagccgugacaccuugcu

SEQ ID NO: 1186772 - RNA, 19 nt, Artificial Sequence
  Description of Artificial Sequence: Synthetic oligonucleotide
acgcuguugacuugguggg

SEQ ID NO: 1186773 - RNA, 19 nt, Artificial Sequence
  Description of Artificial Sequence: Synthetic oligonucleotide
ugucaggcuacguuugccc

SEQ ID NO: 1186774 - RNA, 19 nt, Artificial Sequence
  Description of Artificial Sequence: Synthetic oligonucleotide
cuauacucagacaccacuc

SEQ ID NO: 1186775 - RNA, 19 nt, Artificial Sequence
  Description of Artificial Sequence: Synthetic oligonucleotide
agaucaaacgcuguugacu

SEQ ID NO: 1186776 - RNA, 19 nt, Artificial Sequence
  Description of Artificial Sequence: Synthetic oligonucleotide
caaggucugauuacaggag

SEQ ID NO: 1186777 - RNA, 19 nt, Artificial Sequence
  Description of Artificial Sequence: Synthetic oligonucleotide
uacucagacaccacucgga

SEQ ID NO: 1186778 - RNA, 19 nt, Artificial Sequence
  Description of Artificial Sequence: Synthetic oligonucleotide
ugcuguuuaaaagggcaag

SEQ ID NO: 1186779 - RNA, 19 nt, Artificial Sequence
  Description of Artificial Sequence: Synthetic oligonucleotide
acagaaccagguugaaaag

SEQ ID NO: 1186780 - RNA, 19 nt, Artificial Sequence
  Description of Artificial Sequence: Synthetic oligonucleotide
cuuagcaaguaccgaacac

SEQ ID NO: 1186781 - RNA, 19 nt, Artificial Sequence
  Description of Artificial Sequence: Synthetic oligonucleotide
agugcugagcucucacagg

SEQ ID NO: 1186782 - RNA, 19 nt, Artificial Sequence
  Description of Artificial Sequence: Synthetic oligonucleotide
uguaagccgugacaccuug

SEQ ID NO: 1186783 - RNA, 19 nt, Artificial Sequence
  Description of Artificial Sequence: Synthetic oligonucleotide
ggcaccgaaaucaucaagg

SEQ ID NO: 1186784 - RNA, 19 nt, Artificial Sequence
  Description of Artificial Sequence: Synthetic oligonucleotide
aaucagcuccuagggaggg

SEQ ID NO: 1186785 - RNA, 19 nt, Artificial Sequence
  Description of Artificial Sequence: Synthetic oligonucleotide
ugugccccggcaaaccucc

SEQ ID NO: 1186786 - RNA, 19 nt, Artificial Sequence
  Description of Artificial Sequence: Synthetic oligonucleotide
cagaagugcgccauagaac

SEQ ID NO: 1186787 - RNA, 19 nt, Artificial Sequence
  Description of Artificial Sequence: Synthetic oligonucleotide
uguuaggucuuccugccuu

SEQ ID NO: 1186788 - RNA, 19 nt, Artificial Sequence
  Description of Artificial Sequence: Synthetic oligonucleotide
uccacguuucccagaaaga

SEQ ID NO: 1186789 - RNA, 19 nt, Artificial Sequence
  Description of Artificial Sequence: Synthetic oligonucleotide
gguaggaaggaucuagcug

SEQ ID NO: 1186790 - RNA, 19 nt, Artificial Sequence
  Description of Artificial Sequence: Synthetic oligonucleotide
gcaaggacccagcagagag

SEQ ID NO: 1186791 - RNA, 19 nt, Artificial Sequence
  Description of Artificial Sequence: Synthetic oligonucleotide
aaggcgaacuccgaacucu

SEQ ID NO: 1186792 - RNA, 19 nt, Artificial Sequence
  Description of Artificial Sequence: Synthetic oligonucleotide
uuaucccacaauuggccac

SEQ ID NO: 1186793 - RNA, 19 nt, Artificial Sequence
  Description of Artificial Sequence: Synthetic oligonucleotide
cuuagagcaucaccagccc

SEQ ID NO: 1186794 - RNA, 19 nt, Artificial Sequence
  Description of Artificial Sequence: Synthetic oligonucleotide
uguaggcaagcccuauacu

SEQ ID NO: 1186795 - RNA, 19 nt, Artificial Sequence
  Description of Artificial Sequence: Synthetic oligonucleotide
ugguacuuccuccgcaaca

SEQ ID NO: 1186796 - RNA, 19 nt, Artificial Sequence
  Description of Artificial Sequence: Synthetic oligonucleotide
guucuguaagccgugacac

SEQ ID NO: 1186797 - RNA, 19 nt, Artificial Sequence
  Description of Artificial Sequence: Synthetic oligonucleotide
ucaagaagcucuucaccuc

SEQ ID NO: 1186798 - RNA, 19 nt, Artificial Sequence
  Description of Artificial Sequence: Synthetic oligonucleotide
uccccuugggccuuagagc

SEQ ID NO: 1186799 - RNA, 19 nt, Artificial Sequence
  Description of Artificial Sequence: Synthetic oligonucleotide
ggaaggaucuagcugucag

SEQ ID NO: 1186800 - RNA, 19 nt, Artificial Sequence
  Description of Artificial Sequence: Synthetic oligonucleotide
uguuggugggauaacgcuu

SEQ ID NO: 1186801 - RNA, 19 nt, Artificial Sequence
  Description of Artificial Sequence: Synthetic oligonucleotide
cuacguuugcccagcacac

SEQ ID NO: 1186802 - RNA, 19 nt, Artificial Sequence
  Description of Artificial Sequence: Synthetic oligonucleotide
cucguucaaagugaggaac

SEQ ID NO: 1186803 - RNA, 19 nt, Artificial Sequence
  Description of Artificial Sequence: Synthetic oligonucleotide
ucaggcuacguuugcccag

SEQ ID NO: 1186804 - RNA, 19 nt, Artificial Sequence
  Description of Artificial Sequence: Synthetic oligonucleotide
uacacgguaggcugacuca

SEQ ID NO: 1186805 - RNA, 19 nt, Artificial Sequence
  Description of Artificial Sequence: Synthetic oligonucleotide
guuguuggugggauaacgc

SEQ ID NO: 1186806 - RNA, 19 nt, Artificial Sequence
  Description of Artificial Sequence: Synthetic oligonucleotide
aacgcuugcggagccguuc

SEQ ID NO: 1186807 - RNA, 19 nt, Artificial Sequence
  Description of Artificial Sequence: Synthetic oligonucleotide
ucggaagaauuccacguuu

SEQ ID NO: 1186808 - RNA, 19 nt, Artificial Sequence
  Description of Artificial Sequence: Synthetic oligonucleotide
ucucccaguguaguacacg

SEQ ID NO: 1186809 - RNA, 19 nt, Artificial Sequence
  Description of Artificial Sequence: Synthetic oligonucleotide
cccuuagcagaucagagag

SEQ ID NO: 1186810 - RNA, 19 nt, Artificial Sequence
  Description of Artificial Sequence: Synthetic oligonucleotide
ugugguacuuccuccgcaa

SEQ ID NO: 1186811 - RNA, 19 nt, Artificial Sequence
  Description of Artificial Sequence: Synthetic oligonucleotide
acgguaggcugacucacag

SEQ ID NO: 1186812 - RNA, 19 nt, Artificial Sequence
  Description of Artificial Sequence: Synthetic oligonucleotide
uucuguaagccgugacacc

SEQ ID NO: 1186813 - RNA, 19 nt, Artificial Sequence
  Description of Artificial Sequence: Synthetic oligonucleotide
guuggugggauaacgcuug

SEQ ID NO: 1186814 - RNA, 19 nt, Artificial Sequence
  Description of Artificial Sequence: Synthetic oligonucleotide
uccgccagcguccugcagu

SEQ ID NO: 1186815 - RNA, 19 nt, Artificial Sequence
  Description of Artificial Sequence: Synthetic oligonucleotide
ugcucaaggucugauuaca

SEQ ID NO: 1186816 - RNA, 19 nt, Artificial Sequence
  Description of Artificial Sequence: Synthetic oligonucleotide
accuuagcaaguaccgaac

SEQ ID NO: 1186817 - RNA, 19 nt, Artificial Sequence
  Description of Artificial Sequence: Synthetic oligonucleotide
uuaccacaguugcugcagc

SEQ ID NO: 1186818 - RNA, 19 nt, Artificial Sequence
  Description of Artificial Sequence: Synthetic oligonucleotide
ggaacaagauguugaggcc

SEQ ID NO: 1186819 - RNA, 19 nt, Artificial Sequence
  Description of Artificial Sequence: Synthetic oligonucleotide
gaguggggucuacugcugg

SEQ ID NO: 1186820 - RNA, 19 nt, Artificial Sequence
  Description of Artificial Sequence: Synthetic oligonucleotide
agaaccagguugaaaagau

SEQ ID NO: 1186821 - RNA, 19 nt, Artificial Sequence
  Description of Artificial Sequence: Synthetic oligonucleotide
aagccgugacaccuugcug

SEQ ID NO: 1186822 - RNA, 19 nt, Artificial Sequence
  Description of Artificial Sequence: Synthetic oligonucleotide
ggaagaauuccacguuucc

SEQ ID NO: 1186823 - RNA, 19 nt, Artificial Sequence
  Description of Artificial Sequence: Synthetic oligonucleotide
uuaugcugugguacuuccu

SEQ ID NO: 1186824 - RNA, 19 nt, Artificial Sequence
  Description of Artificial Sequence: Synthetic oligonucleotide
ccggcaaaccuccugaagg

SEQ ID NO: 1186825 - RNA, 19 nt, Artificial Sequence
  Description of Artificial Sequence: Synthetic oligonucleotide
cucacuugcucaaggucug

SEQ ID NO: 1186826 - RNA, 19 nt, Artificial Sequence
  Description of Artificial Sequence: Synthetic oligonucleotide
cauggcuuaagaagaggca

SEQ ID NO: 1186827 - RNA, 19 nt, Artificial Sequence
  Description of Artificial Sequence: Synthetic oligonucleotide
gaaaggcgaacuccgaacu

SEQ ID NO: 1186828 - RNA, 19 nt, Artificial Sequence
  Description of Artificial Sequence: Synthetic oligonucleotide
ucauccgccgcuguaggca

SEQ ID NO: 1186829 - RNA, 19 nt, Artificial Sequence
  Description of Artificial Sequence: Synthetic oligonucleotide
accaugggaccuuauccca

SEQ ID NO: 1186830 - RNA, 19 nt, Artificial Sequence
  Description of Artificial Sequence: Synthetic oligonucleotide
uccgaacucucuguuaggu

SEQ ID NO: 1186831 - RNA, 19 nt, Artificial Sequence
  Description of Artificial Sequence: Synthetic oligonucleotide
cucauggcuuaagaagagg

SEQ ID NO: 1186832 - RNA, 19 nt, Artificial Sequence
  Description of Artificial Sequence: Synthetic oligonucleotide
agcccuauacucagacacc

SEQ ID NO: 1186833 - RNA, 19 nt, Artificial Sequence
  Description of Artificial Sequence: Synthetic oligonucleotide
gcuacguuugcccagcaca

SEQ ID NO: 1186834 - RNA, 19 nt, Artificial Sequence
  Description of Artificial Sequence: Synthetic oligonucleotide
gauaacgcuugcggagccg

SEQ ID NO: 1186835 - RNA, 19 nt, Artificial Sequence
  Description of Artificial Sequence: Synthetic oligonucleotide
aaaaugaccaugggaccuu

SEQ ID NO: 1186836 - RNA, 19 nt, Artificial Sequence
  Description of Artificial Sequence: Synthetic oligonucleotide
acccauuguccuguagggc

SEQ ID NO: 1186837 - RNA, 19 nt, Artificial Sequence
  Description of Artificial Sequence: Synthetic oligonucleotide
guacacgguaggcugacuc

SEQ ID NO: 1186838 - RNA, 19 nt, Artificial Sequence
  Description of Artificial Sequence: Synthetic oligonucleotide
cauccucccuccucaauug

SEQ ID NO: 1186839 - RNA, 19 nt, Artificial Sequence
  Description of Artificial Sequence: Synthetic oligonucleotide
ggagccguucuguaagccg

SEQ ID NO: 1186840 - RNA, 19 nt, Artificial Sequence
  Description of Artificial Sequence: Synthetic oligonucleotide
cauucuugcugaggaaccc

SEQ ID NO: 1186841 - RNA, 19 nt, Artificial Sequence
  Description of Artificial Sequence: Synthetic oligonucleotide
cugccuuaugcugugguac

SEQ ID NO: 1186842 - RNA, 19 nt, Artificial Sequence
  Description of Artificial Sequence: Synthetic oligonucleotide
ugacucacaggugcaacac

SEQ ID NO: 1186843 - RNA, 19 nt, Artificial Sequence
  Description of Artificial Sequence: Synthetic oligonucleotide
guaccgaacaccaucaccu

SEQ ID NO: 1186844 - RNA, 19 nt, Artificial Sequence
  Description of Artificial Sequence: Synthetic oligonucleotide
gguacuuccuccgcaacag

SEQ ID NO: 1186845 - RNA, 19 nt, Artificial Sequence
  Description of Artificial Sequence: Synthetic oligonucleotide
aggcaccgaaaucaucaag

SEQ ID NO: 1186846 - RNA, 19 nt, Artificial Sequence
  Description of Artificial Sequence: Synthetic oligonucleotide
acucagacaccacucggaa

SEQ ID NO: 1186847 - RNA, 19 nt, Artificial Sequence
  Description of Artificial Sequence: Synthetic oligonucleotide
uuagcagaucagagagaac

SEQ ID NO: 1186848 - RNA, 19 nt, Artificial Sequence
  Description of Artificial Sequence: Synthetic oligonucleotide
aagggagcuccaaggguuc

SEQ ID NO: 1186849 - RNA, 19 nt, Artificial Sequence
  Description of Artificial Sequence: Synthetic oligonucleotide
cauggaguaccaggcaccc

SEQ ID NO: 1186850 - RNA, 19 nt, Artificial Sequence
  Description of Artificial Sequence: Synthetic oligonucleotide
aacuccgaacucucuguua

SEQ ID NO: 1186851 - RNA, 19 nt, Artificial Sequence
  Description of Artificial Sequence: Synthetic oligonucleotide
uacguuugcccagcacacg

SEQ ID NO: 1186852 - RNA, 19 nt, Artificial Sequence
  Description of Artificial Sequence: Synthetic oligonucleotide
gagaguggggucuacugcu

SEQ ID NO: 1186853 - RNA, 19 nt, Artificial Sequence
  Description of Artificial Sequence: Synthetic oligonucleotide
uaccgaacaccaucaccug

SEQ ID NO: 1186854 - RNA, 19 nt, Artificial Sequence
  Description of Artificial Sequence: Synthetic oligonucleotide
cuguuuaaaagggcaagga

SEQ ID NO: 1186855 - RNA, 19 nt, Artificial Sequence
  Description of Artificial Sequence: Synthetic oligonucleotide
cuugggguucauccgccgc

SEQ ID NO: 1186856 - RNA, 19 nt, Artificial Sequence
  Description of Artificial Sequence: Synthetic oligonucleotide
agcaugcaaaccaugccca

SEQ ID NO: 1186857 - RNA, 19 nt, Artificial Sequence
  Description of Artificial Sequence: Synthetic oligonucleotide
gugggauaacgcuugcgga

SEQ ID NO: 1186858 - RNA, 19 nt, Artificial Sequence
  Description of Artificial Sequence: Synthetic oligonucleotide
gucugauuacaggaggcac

SEQ ID NO: 1186859 - RNA, 19 nt, Artificial Sequence
  Description of Artificial Sequence: Synthetic oligonucleotide
ucaaggcacccauggagua

SEQ ID NO: 1186860 - RNA, 19 nt, Artificial Sequence
  Description of Artificial Sequence: Synthetic oligonucleotide
gguaggcugacucacaggu

SEQ ID NO: 1186861 - RNA, 19 nt, Artificial Sequence
  Description of Artificial Sequence: Synthetic oligonucleotide
uucauccgccgcuguaggc

SEQ ID NO: 1186862 - RNA, 19 nt, Artificial Sequence
  Description of Artificial Sequence: Synthetic oligonucleotide
uguccuguagggccagcuc

SEQ ID NO: 1186863 - RNA, 19 nt, Artificial Sequence
  Description of Artificial Sequence: Synthetic oligonucleotide
caccuuagcaaguaccgaa

SEQ ID NO: 1186864 - RNA, 19 nt, Artificial Sequence
  Description of Artificial Sequence: Synthetic oligonucleotide
aucaaacgcuguugacuug

SEQ ID NO: 1186865 - RNA, 19 nt, Artificial Sequence
  Description of Artificial Sequence: Synthetic oligonucleotide
gcaccgaaaucaucaaggc

SEQ ID NO: 1186866 - RNA, 19 nt, Artificial Sequence
  Description of Artificial Sequence: Synthetic oligonucleotide
gaauuccacguuucccaga

SEQ ID NO: 1186867 - RNA, 19 nt, Artificial Sequence
  Description of Artificial Sequence: Synthetic oligonucleotide
cuccgaacucucuguuagg

SEQ ID NO: 1186868 - RNA, 19 nt, Artificial Sequence
  Description of Artificial Sequence: Synthetic oligonucleotide
ggaucuagcugucaggcua

SEQ ID NO: 1186869 - RNA, 19 nt, Artificial Sequence
  Description of Artificial Sequence: Synthetic oligonucleotide
guagagcaugcaaaccaug

SEQ ID NO: 1186870 - RNA, 19 nt, Artificial Sequence
  Description of Artificial Sequence: Synthetic oligonucleotide
uuggugggauaacgcuugc

SEQ ID NO: 1186871 - RNA, 19 nt, Artificial Sequence
  Description of Artificial Sequence: Synthetic oligonucleotide
aggcaguagguagagcaug

SEQ ID NO: 1186872 - RNA, 19 nt, Artificial Sequence
  Description of Artificial Sequence: Synthetic oligonucleotide
auaacgcuugcggagccgu

SEQ ID NO: 1186873 - RNA, 19 nt, Artificial Sequence
  Description of Artificial Sequence: Synthetic oligonucleotide
cugacucacaggugcaaca

SEQ ID NO: 1186874 - RNA, 19 nt, Artificial Sequence
  Description of Artificial Sequence: Synthetic oligonucleotide
ggcuuaagaagaggcacag

SEQ ID NO: 1186875 - RNA, 19 nt, Artificial Sequence
  Description of Artificial Sequence: Synthetic oligonucleotide
ugcugagcucucacaggca

SEQ ID NO: 1186876 - RNA, 19 nt, Artificial Sequence
  Description of Artificial Sequence: Synthetic oligonucleotide
cugagaagguggcagcgca

SEQ ID NO: 1186877 - RNA, 19 nt, Artificial Sequence
  Description of Artificial Sequence: Synthetic oligonucleotide
cacccucguucaaagugag

SEQ ID NO: 1186878 - RNA, 19 nt, Artificial Sequence
  Description of Artificial Sequence: Synthetic oligonucleotide
aggacuugggcaccuugaa

SEQ ID NO: 1186879 - RNA, 19 nt, Artificial Sequence
  Description of Artificial Sequence: Synthetic oligonucleotide
accaugcccagaagugcgc

SEQ ID NO: 1186880 - RNA, 19 nt, Artificial Sequence
  Description of Artificial Sequence: Synthetic oligonucleotide
cgaucugaugucugcaucc

SEQ ID NO: 1186881 - RNA, 19 nt, Artificial Sequence
  Description of Artificial Sequence: Synthetic oligonucleotide
gcgccauagaacugugagg

SEQ ID NO: 1186882 - RNA, 19 nt, Artificial Sequence
  Description of Artificial Sequence: Synthetic oligonucleotide
gcaagcccuauacucagac

SEQ ID NO: 1186883 - RNA, 19 nt, Artificial Sequence
  Description of Artificial Sequence: Synthetic oligonucleotide
cacaauuggccacuguucu

SEQ ID NO: 1186884 - RNA, 19 nt, Artificial Sequence
  Description of Artificial Sequence: Synthetic oligonucleotide
gguucucccaguguaguac

SEQ ID NO: 1186885 - RNA, 19 nt, Artificial Sequence
  Description of Artificial Sequence: Synthetic oligonucleotide
gucaggcuacguuugccca

SEQ ID NO: 1186886 - RNA, 19 nt, Artificial Sequence
  Description of Artificial Sequence: Synthetic oligonucleotide
cagcaggguacuccuuccg

SEQ ID NO: 1186887 - RNA, 19 nt, Artificial Sequence
  Description of Artificial Sequence: Synthetic oligonucleotide
cagaaccagguugaaaaga

SEQ ID NO: 1186888 - RNA, 19 nt, Artificial Sequence
  Description of Artificial Sequence: Synthetic oligonucleotide
ccgaaaucaucaaggcacc

SEQ ID NO: 1186889 - RNA, 19 nt, Artificial Sequence
  Description of Artificial Sequence: Synthetic oligonucleotide
gcaggguacuccuuccgcc

SEQ ID NO: 1186890 - RNA, 19 nt, Artificial Sequence
  Description of Artificial Sequence: Synthetic oligonucleotide
ggaccuuaucccacaauug

SEQ ID NO: 1186891 - RNA, 19 nt, Artificial Sequence
  Description of Artificial Sequence: Synthetic oligonucleotide
gaagugcgccauagaacug

SEQ ID NO: 1186892 - RNA, 19 nt, Artificial Sequence
  Description of Artificial Sequence: Synthetic oligonucleotide
uaguacacgguaggcugac

SEQ ID NO: 1186893 - RNA, 19 nt, Artificial Sequence
  Description of Artificial Sequence: Synthetic oligonucleotide
aguaccaggcacccucguu

SEQ ID NO: 1186894 - RNA, 19 nt, Artificial Sequence
  Description of Artificial Sequence: Synthetic oligonucleotide
ucccgaucugaugucugca

SEQ ID NO: 1186895 - RNA, 19 nt, Artificial Sequence
  Description of Artificial Sequence: Synthetic oligonucleotide
ccacaauuggccacuguuc

SEQ ID NO: 1186896 - RNA, 19 nt, Artificial Sequence
  Description of Artificial Sequence: Synthetic oligonucleotide
gcgggaaaggcgaacuccg

SEQ ID NO: 1186897 - RNA, 19 nt, Artificial Sequence
  Description of Artificial Sequence: Synthetic oligonucleotide
caccucauucuugcugagg

SEQ ID NO: 1186898 - RNA, 19 nt, Artificial Sequence
  Description of Artificial Sequence: Synthetic oligonucleotide
cagagagaagcucaggcau

SEQ ID NO: 1186899 - RNA, 19 nt, Artificial Sequence
  Description of Artificial Sequence: Synthetic oligonucleotide
gcgaacuccgaacucucug

SEQ ID NO: 1186900 - RNA, 19 nt, Artificial Sequence
  Description of Artificial Sequence: Synthetic oligonucleotide
caagcaggucaucaaggaa

SEQ ID NO: 1186901 - RNA, 19 nt, Artificial Sequence
  Description of Artificial Sequence: Synthetic oligonucleotide
ugggaccuuaucccacaau

SEQ ID NO: 1186902 - RNA, 19 nt, Artificial Sequence
  Description of Artificial Sequence: Synthetic oligonucleotide
ugccccggcaaaccuccug

SEQ ID NO: 1186903 - RNA, 19 nt, Artificial Sequence
  Description of Artificial Sequence: Synthetic oligonucleotide
gggauaacgcuugcggagc

SEQ ID NO: 1186904 - RNA, 19 nt, Artificial Sequence
  Description of Artificial Sequence: Synthetic oligonucleotide
caggcuacguuugcccagc

SEQ ID NO: 1186905 - RNA, 19 nt, Artificial Sequence
  Description of Artificial Sequence: Synthetic oligonucleotide
gaagggagcuccaaggguu

SEQ ID NO: 1186906 - RNA, 19 nt, Artificial Sequence
  Description of Artificial Sequence: Synthetic oligonucleotide
ggauaacgcuugcggagcc

SEQ ID NO: 1186907 - RNA, 19 nt, Artificial Sequence
  Description of Artificial Sequence: Synthetic oligonucleotide
uugcggagccguucuguaa

SEQ ID NO: 1186908 - RNA, 19 nt, Artificial Sequence
  Description of Artificial Sequence: Synthetic oligonucleotide
ggcacgggugcccucauca

SEQ ID NO: 1186909 - RNA, 19 nt, Artificial Sequence
  Description of Artificial Sequence: Synthetic oligonucleotide
gacaccacucggaagaauu

SEQ ID NO: 1186910 - RNA, 19 nt, Artificial Sequence
  Description of Artificial Sequence: Synthetic oligonucleotide
agcgcagccugcacaguuc

SEQ ID NO: 1186911 - RNA, 19 nt, Artificial Sequence
  Description of Artificial Sequence: Synthetic oligonucleotide
acgcuugcggagccguucu

SEQ ID NO: 1186912 - RNA, 19 nt, Artificial Sequence
  Description of Artificial Sequence: Synthetic oligonucleotide
aggugcaacacaggcgggu

SEQ ID NO: 1186913 - RNA, 19 nt, Artificial Sequence
  Description of Artificial Sequence: Synthetic oligonucleotide
ggcgggaaaggcgaacucc

SEQ ID NO: 1186914 - RNA, 19 nt, Artificial Sequence
  Description of Artificial Sequence: Synthetic oligonucleotide
agccucuuguaggacagaa

SEQ ID NO: 1186915 - RNA, 19 nt, Artificial Sequence
  Description of Artificial Sequence: Synthetic oligonucleotide
ugggguucauccgccgcug

SEQ ID NO: 1186916 - RNA, 19 nt, Artificial Sequence
  Description of Artificial Sequence: Synthetic oligonucleotide
aggcgaacuccgaacucuc

SEQ ID NO: 1186917 - RNA, 19 nt, Artificial Sequence
  Description of Artificial Sequence: Synthetic oligonucleotide
gccgugacaccuugcugcg

SEQ ID NO: 1186918 - RNA, 19 nt, Artificial Sequence
  Description of Artificial Sequence: Synthetic oligonucleotide
cacgggugcccucaucauc

SEQ ID NO: 1186919 - RNA, 19 nt, Artificial Sequence
  Description of Artificial Sequence: Synthetic oligonucleotide
ucccacaauuggccacugu

SEQ ID NO: 1186920 - RNA, 19 nt, Artificial Sequence
  Description of Artificial Sequence: Synthetic oligonucleotide
accagguugaaaagaucaa

SEQ ID NO: 1186921 - RNA, 19 nt, Artificial Sequence
  Description of Artificial Sequence: Synthetic oligonucleotide
gcgugagguccucuguggg

SEQ ID NO: 1186922 - RNA, 19 nt, Artificial Sequence
  Description of Artificial Sequence: Synthetic oligonucleotide
cccucguucaaagugagga

SEQ ID NO: 1186923 - RNA, 19 nt, Artificial Sequence
  Description of Artificial Sequence: Synthetic oligonucleotide
acgccucagaggaccaggg

SEQ ID NO: 1186924 - RNA, 19 nt, Artificial Sequence
  Description of Artificial Sequence: Synthetic oligonucleotide
guuaggucuuccugccuua

SEQ ID NO: 1186925 - RNA, 19 nt, Artificial Sequence
  Description of Artificial Sequence: Synthetic oligonucleotide
uuaggucuuccugccuuau

SEQ ID NO: 1186926 - RNA, 19 nt, Artificial Sequence
  Description of Artificial Sequence: Synthetic oligonucleotide
gugacaccuugcugcgcag

SEQ ID NO: 1186927 - RNA, 19 nt, Artificial Sequence
  Description of Artificial Sequence: Synthetic oligonucleotide
cugugguacuuccuccgca

SEQ ID NO: 1186928 - RNA, 19 nt, Artificial Sequence
  Description of Artificial Sequence: Synthetic oligonucleotide
ggaguaccaggcacccucg

SEQ ID NO: 1186929 - RNA, 19 nt, Artificial Sequence
  Description of Artificial Sequence: Synthetic oligonucleotide
ugaggacaccaugggguuc

SEQ ID NO: 1186930 - RNA, 19 nt, Artificial Sequence
  Description of Artificial Sequence: Synthetic oligonucleotide
caucaccugcguccuucag

SEQ ID NO: 1186931 - RNA, 19 nt, Artificial Sequence
  Description of Artificial Sequence: Synthetic oligonucleotide
aaugaccaugggaccuuau

SEQ ID NO: 1186932 - RNA, 19 nt, Artificial Sequence
  Description of Artificial Sequence: Synthetic oligonucleotide
gagccguucuguaagccgu

SEQ ID NO: 1186933 - RNA, 19 nt, Artificial Sequence
  Description of Artificial Sequence: Synthetic oligonucleotide
ucagggcgggaaaggcgaa

SEQ ID NO: 1186934 - RNA, 19 nt, Artificial Sequence
  Description of Artificial Sequence: Synthetic oligonucleotide
guuugcccagcacacgccu

SEQ ID NO: 1186935 - RNA, 19 nt, Artificial Sequence
  Description of Artificial Sequence: Synthetic oligonucleotide
guaagccgugacaccuugc

SEQ ID NO: 1186936 - RNA, 19 nt, Artificial Sequence
  Description of Artificial Sequence: Synthetic oligonucleotide
agugcgccauagaacugug

SEQ ID NO: 1186937 - RNA, 19 nt, Artificial Sequence
  Description of Artificial Sequence: Synthetic oligonucleotide
gcugugguacuuccuccgc

SEQ ID NO: 1186938 - RNA, 19 nt, Artificial Sequence
  Description of Artificial Sequence: Synthetic oligonucleotide
guguaguacacgguaggcu

SEQ ID NO: 1186939 - RNA, 19 nt, Artificial Sequence
  Description of Artificial Sequence: Synthetic oligonucleotide
ccccuugggccuuagagca

SEQ ID NO: 1186940 - RNA, 19 nt, Artificial Sequence
  Description of Artificial Sequence: Synthetic oligonucleotide
agcuguuaccacaguugcu

SEQ ID NO: 1186941 - RNA, 19 nt, Artificial Sequence
  Description of Artificial Sequence: Synthetic oligonucleotide
augggaccuuaucccacaa

SEQ ID NO: 1186942 - RNA, 19 nt, Artificial Sequence
  Description of Artificial Sequence: Synthetic oligonucleotide
gggaccuuaucccacaauu

SEQ ID NO: 1186943 - RNA, 19 nt, Artificial Sequence
  Description of Artificial Sequence: Synthetic oligonucleotide
gcuugggguucauccgccg

SEQ ID NO: 1186944 - RNA, 19 nt, Artificial Sequence
  Description of Artificial Sequence: Synthetic oligonucleotide
gcugucaggcuacguuugc

SEQ ID NO: 1186945 - RNA, 19 nt, Artificial Sequence
  Description of Artificial Sequence: Synthetic oligonucleotide
agcacacgccucagaggac

SEQ ID NO: 1186946 - RNA, 19 nt, Artificial Sequence
  Description of Artificial Sequence: Synthetic oligonucleotide
gugcuguuuaaaagggcaa

SEQ ID NO: 1186947 - RNA, 19 nt, Artificial Sequence
  Description of Artificial Sequence: Synthetic oligonucleotide
caguuggaucaagaagcuc

SEQ ID NO: 1186948 - RNA, 19 nt, Artificial Sequence
  Description of Artificial Sequence: Synthetic oligonucleotide
ccacucggaagaauuccac

SEQ ID NO: 1186949 - RNA, 19 nt, Artificial Sequence
  Description of Artificial Sequence: Synthetic oligonucleotide
cuugaaggagcagcaccga

SEQ ID NO: 1186950 - RNA, 19 nt, Artificial Sequence
  Description of Artificial Sequence: Synthetic oligonucleotide
ucuccccuugggccuuaga

SEQ ID NO: 1186951 - RNA, 19 nt, Artificial Sequence
  Description of Artificial Sequence: Synthetic oligonucleotide
gggaaaggcgaacuccgaa

SEQ ID NO: 1186952 - RNA, 19 nt, Artificial Sequence
  Description of Artificial Sequence: Synthetic oligonucleotide
ggggucuacugcuggcccc

SEQ ID NO: 1186953 - RNA, 19 nt, Artificial Sequence
  Description of Artificial Sequence: Synthetic oligonucleotide
cuugcggagccguucugua

SEQ ID NO: 1186954 - RNA, 19 nt, Artificial Sequence
  Description of Artificial Sequence: Synthetic oligonucleotide
agcguccugcagugcugag

SEQ ID NO: 1186955 - RNA, 19 nt, Artificial Sequence
  Description of Artificial Sequence: Synthetic oligonucleotide
cuccgcaacagcucagacu

SEQ ID NO: 1186956 - RNA, 19 nt, Artificial Sequence
  Description of Artificial Sequence: Synthetic oligonucleotide
gcugcgcagcaccucauuc

SEQ ID NO: 1186957 - RNA, 19 nt, Artificial Sequence
  Description of Artificial Sequence: Synthetic oligonucleotide
caccuugaaggagcagcac

SEQ ID NO: 1186958 - RNA, 19 nt, Artificial Sequence
  Description of Artificial Sequence: Synthetic oligonucleotide
acccucguucaaagugagg

SEQ ID NO: 1186959 - RNA, 19 nt, Artificial Sequence
  Description of Artificial Sequence: Synthetic oligonucleotide
ccuauacucagacaccacu

SEQ ID NO: 1186960 - RNA, 19 nt, Artificial Sequence
  Description of Artificial Sequence: Synthetic oligonucleotide
gaacuccgaacucucuguu

SEQ ID NO: 1186961 - RNA, 19 nt, Artificial Sequence
  Description of Artificial Sequence: Synthetic oligonucleotide
cuugggccuuagagcauca

SEQ ID NO: 1186962 - RNA, 19 nt, Artificial Sequence
  Description of Artificial Sequence: Synthetic oligonucleotide
guugaggcccaagcagguc

SEQ ID NO: 1186963 - RNA, 19 nt, Artificial Sequence
  Description of Artificial Sequence: Synthetic oligonucleotide
ccuuagcaaguaccgaaca

SEQ ID NO: 1186964 - RNA, 19 nt, Artificial Sequence
  Description of Artificial Sequence: Synthetic oligonucleotide
uugggccuuagagcaucac

SEQ ID NO: 1186965 - RNA, 19 nt, Artificial Sequence
  Description of Artificial Sequence: Synthetic oligonucleotide
gcucaggcaucacgcuggg

SEQ ID NO: 1186966 - RNA, 19 nt, Artificial Sequence
  Description of Artificial Sequence: Synthetic oligonucleotide
aguacacgguaggcugacu

SEQ ID NO: 1186967 - RNA, 19 nt, Artificial Sequence
  Description of Artificial Sequence: Synthetic oligonucleotide
ccucaauugcaucuuugaa

SEQ ID NO: 1186968 - RNA, 19 nt, Artificial Sequence
  Description of Artificial Sequence: Synthetic oligonucleotide
ccgaucugaugucugcauc

SEQ ID NO: 1186969 - RNA, 19 nt, Artificial Sequence
  Description of Artificial Sequence: Synthetic oligonucleotide
caggcaccgaaaucaucaa

SEQ ID NO: 1186970 - RNA, 19 nt, Artificial Sequence
  Description of Artificial Sequence: Synthetic oligonucleotide
gcugacucacaggugcaac

SEQ ID NO: 1186971 - RNA, 19 nt, Artificial Sequence
  Description of Artificial Sequence: Synthetic oligonucleotide
ggugcaacacaggcggguc

SEQ ID NO: 1186972 - RNA, 19 nt, Artificial Sequence
  Description of Artificial Sequence: Synthetic oligonucleotide
cguucuguaagccgugaca

SEQ ID NO: 1186973 - RNA, 19 nt, Artificial Sequence
  Description of Artificial Sequence: Synthetic oligonucleotide
cccaguguaguacacggua

SEQ ID NO: 1186974 - RNA, 19 nt, Artificial Sequence
  Description of Artificial Sequence: Synthetic oligonucleotide
cagcucccgaucugauguc

SEQ ID NO: 1186975 - RNA, 19 nt, Artificial Sequence
  Description of Artificial Sequence: Synthetic oligonucleotide
ccgaacucucuguuagguc

SEQ ID NO: 1186976 - RNA, 19 nt, Artificial Sequence
  Description of Artificial Sequence: Synthetic oligonucleotide
ccuuaugcugugguacuuc

SEQ ID NO: 1186977 - RNA, 19 nt, Artificial Sequence
  Description of Artificial Sequence: Synthetic oligonucleotide
cauccgccgcuguaggcaa

SEQ ID NO: 1186978 - RNA, 19 nt, Artificial Sequence
  Description of Artificial Sequence: Synthetic oligonucleotide
caucacgcuggggcucacc

SEQ ID NO: 1186979 - RNA, 19 nt, Artificial Sequence
  Description of Artificial Sequence: Synthetic oligonucleotide
agacaccacucggaagaau

SEQ ID NO: 1186980 - RNA, 19 nt, Artificial Sequence
  Description of Artificial Sequence: Synthetic oligonucleotide
accgagagcagaagcuguu

SEQ ID NO: 1186981 - RNA, 19 nt, Artificial Sequence
  Description of Artificial Sequence: Synthetic oligonucleotide
agccguucuguaagccgug

SEQ ID NO: 1186982 - RNA, 19 nt, Artificial Sequence
  Description of Artificial Sequence: Synthetic oligonucleotide
ccccuuagcagaucagaga

SEQ ID NO: 1186983 - RNA, 19 nt, Artificial Sequence
  Description of Artificial Sequence: Synthetic oligonucleotide
uugggagaguggggucuac

SEQ ID NO: 1186984 - RNA, 19 nt, Artificial Sequence
  Description of Artificial Sequence: Synthetic oligonucleotide
ggcuacguuugcccagcac

SEQ ID NO: 1186985 - RNA, 19 nt, Artificial Sequence
  Description of Artificial Sequence: Synthetic oligonucleotide
cacacgccucagaggacca

SEQ ID NO: 1186986 - RNA, 19 nt, Artificial Sequence
  Description of Artificial Sequence: Synthetic oligonucleotide
caccgagagcagaagcugu

SEQ ID NO: 1186987 - RNA, 19 nt, Artificial Sequence
  Description of Artificial Sequence: Synthetic oligonucleotide
aucccacaauuggccacug

SEQ ID NO: 1186988 - RNA, 19 nt, Artificial Sequence
  Description of Artificial Sequence: Synthetic oligonucleotide
ucccggacgcuggcccagg

SEQ ID NO: 1186989 - RNA, 19 nt, Artificial Sequence
  Description of Artificial Sequence: Synthetic oligonucleotide
aggcugacucacaggugca

SEQ ID NO: 1186990 - RNA, 19 nt, Artificial Sequence
  Description of Artificial Sequence: Synthetic oligonucleotide
aggcuacguuugcccagca

SEQ ID NO: 1186991 - RNA, 19 nt, Artificial Sequence
  Description of Artificial Sequence: Synthetic oligonucleotide
gcagaucagagagaacaua

SEQ ID NO: 1186992 - RNA, 19 nt, Artificial Sequence
  Description of Artificial Sequence: Synthetic oligonucleotide
acaagauguugaggcccaa

SEQ ID NO: 1186993 - RNA, 19 nt, Artificial Sequence
  Description of Artificial Sequence: Synthetic oligonucleotide
ccuuagcagaucagagaga

SEQ ID NO: 1186994 - RNA, 19 nt, Artificial Sequence
  Description of Artificial Sequence: Synthetic oligonucleotide
gccccggcaaaccuccuga

SEQ ID NO: 1186995 - RNA, 19 nt, Artificial Sequence
  Description of Artificial Sequence: Synthetic oligonucleotide
caggcaugcucuuccugcu

SEQ ID NO: 1186996 - RNA, 19 nt, Artificial Sequence
  Description of Artificial Sequence: Synthetic oligonucleotide
cagggcgggaaaggcgaac

SEQ ID NO: 1186997 - RNA, 19 nt, Artificial Sequence
  Description of Artificial Sequence: Synthetic oligonucleotide
caucauccucccuccucaa

SEQ ID NO: 1186998 - RNA, 19 nt, Artificial Sequence
  Description of Artificial Sequence: Synthetic oligonucleotide
gguagagcaugcaaaccau

SEQ ID NO: 1186999 - RNA, 19 nt, Artificial Sequence
  Description of Artificial Sequence: Synthetic oligonucleotide
cagcugugccccggcaaac

SEQ ID NO: 1187000 - RNA, 19 nt, Artificial Sequence
  Description of Artificial Sequence: Synthetic oligonucleotide
ccuugggccuuagagcauc

SEQ ID NO: 1187001 - RNA, 19 nt, Artificial Sequence
  Description of Artificial Sequence: Synthetic oligonucleotide
cgugacaccuugcugcgca

SEQ ID NO: 1187002 - RNA, 19 nt, Artificial Sequence
  Description of Artificial Sequence: Synthetic oligonucleotide
ccucguucaaagugaggaa

SEQ ID NO: 1187003 - RNA, 19 nt, Artificial Sequence
  Description of Artificial Sequence: Synthetic oligonucleotide
ccguucuguaagccgugac

SEQ ID NO: 1187004 - RNA, 19 nt, Artificial Sequence
  Description of Artificial Sequence: Synthetic oligonucleotide
caucaccagcccagcugga

SEQ ID NO: 1187005 - RNA, 19 nt, Artificial Sequence
  Description of Artificial Sequence: Synthetic oligonucleotide
cugggcacgggugcccuca

SEQ ID NO: 1187006 - RNA, 19 nt, Artificial Sequence
  Description of Artificial Sequence: Synthetic oligonucleotide
ggcccaagcaggucaucaa

SEQ ID NO: 1187007 - RNA, 19 nt, Artificial Sequence
  Description of Artificial Sequence: Synthetic oligonucleotide
caaacgcuguugacuuggu

SEQ ID NO: 1187008 - RNA, 19 nt, Artificial Sequence
  Description of Artificial Sequence: Synthetic oligonucleotide
gcaguagguagagcaugca

SEQ ID NO: 1187009 - RNA, 19 nt, Artificial Sequence
  Description of Artificial Sequence: Synthetic oligonucleotide
ugggcacgggugcccucau

SEQ ID NO: 1187010 - RNA, 19 nt, Artificial Sequence
  Description of Artificial Sequence: Synthetic oligonucleotide
ccuccgcaacagcucagac

SEQ ID NO: 1187011 - RNA, 19 nt, Artificial Sequence
  Description of Artificial Sequence: Synthetic oligonucleotide
gcccacucagcucccgauc

SEQ ID NO: 1187012 - RNA, 19 nt, Artificial Sequence
  Description of Artificial Sequence: Synthetic oligonucleotide
gggucuacugcuggcccca

SEQ ID NO: 1187013 - RNA, 19 nt, Artificial Sequence
  Description of Artificial Sequence: Synthetic oligonucleotide
ccgccagcguccugcagug

SEQ ID NO: 1187014 - RNA, 19 nt, Artificial Sequence
  Description of Artificial Sequence: Synthetic oligonucleotide
cagcguccugcagugcuga

SEQ ID NO: 1187015 - RNA, 19 nt, Artificial Sequence
  Description of Artificial Sequence: Synthetic oligonucleotide
ggacacucagagagaagcu

SEQ ID NO: 1187016 - RNA, 19 nt, Artificial Sequence
  Description of Artificial Sequence: Synthetic oligonucleotide
gggcgggaaaggcgaacuc

SEQ ID NO: 1187017 - RNA, 19 nt, Artificial Sequence
  Description of Artificial Sequence: Synthetic oligonucleotide
cuguuaggucuuccugccu

SEQ ID NO: 1187018 - RNA, 19 nt, Artificial Sequence
  Description of Artificial Sequence: Synthetic oligonucleotide
cagacaccacucggaagaa

SEQ ID NO: 1187019 - RNA, 19 nt, Artificial Sequence
  Description of Artificial Sequence: Synthetic oligonucleotide
gugcgccauagaacuguga

SEQ ID NO: 1187020 - RNA, 19 nt, Artificial Sequence
  Description of Artificial Sequence: Synthetic oligonucleotide
ggcgggucaggaaggcuuc

SEQ ID NO: 1187021 - RNA, 19 nt, Artificial Sequence
  Description of Artificial Sequence: Synthetic oligonucleotide
ggguucauccgccgcugua

SEQ ID NO: 1187022 - RNA, 19 nt, Artificial Sequence
  Description of Artificial Sequence: Synthetic oligonucleotide
gagguccucugugggugua

SEQ ID NO: 1187023 - RNA, 19 nt, Artificial Sequence
  Description of Artificial Sequence: Synthetic oligonucleotide
cuguaagccgugacaccuu

SEQ ID NO: 1187024 - RNA, 19 nt, Artificial Sequence
  Description of Artificial Sequence: Synthetic oligonucleotide
auccgccgcuguaggcaag

SEQ ID NO: 1187025 - RNA, 19 nt, Artificial Sequence
  Description of Artificial Sequence: Synthetic oligonucleotide
ccaccuuagcaaguaccga

SEQ ID NO: 1187026 - RNA, 19 nt, Artificial Sequence
  Description of Artificial Sequence: Synthetic oligonucleotide
cugccuggcgugagguccu

SEQ ID NO: 1187027 - RNA, 19 nt, Artificial Sequence
  Description of Artificial Sequence: Synthetic oligonucleotide
ggucuacugcuggccccag

SEQ ID NO: 1187028 - RNA, 19 nt, Artificial Sequence
  Description of Artificial Sequence: Synthetic oligonucleotide
gggguucucccaguguagu

SEQ ID NO: 1187029 - RNA, 19 nt, Artificial Sequence
  Description of Artificial Sequence: Synthetic oligonucleotide
gcgcagcaccucauucuug

SEQ ID NO: 1187030 - RNA, 19 nt, Artificial Sequence
  Description of Artificial Sequence: Synthetic oligonucleotide
cccagaagugcgccauaga

SEQ ID NO: 1187031 - RNA, 19 nt, Artificial Sequence
  Description of Artificial Sequence: Synthetic oligonucleotide
cuccaggaacagcccugaa

SEQ ID NO: 1187032 - RNA, 19 nt, Artificial Sequence
  Description of Artificial Sequence: Synthetic oligonucleotide
cggagccguucuguaagcc

SEQ ID NO: 1187033 - RNA, 19 nt, Artificial Sequence
  Description of Artificial Sequence: Synthetic oligonucleotide
gcuugcggagccguucugu

SEQ ID NO: 1187034 - RNA, 19 nt, Artificial Sequence
  Description of Artificial Sequence: Synthetic oligonucleotide
gccguucuguaagccguga

SEQ ID NO: 1187035 - RNA, 19 nt, Artificial Sequence
  Description of Artificial Sequence: Synthetic oligonucleotide
ugccuggcgugagguccuc

SEQ ID NO: 1187036 - RNA, 19 nt, Artificial Sequence
  Description of Artificial Sequence: Synthetic oligonucleotide
gcgggucaggaaggcuucc

SEQ ID NO: 1187037 - RNA, 19 nt, Artificial Sequence
  Description of Artificial Sequence: Synthetic oligonucleotide
cggcaaaccuccugaaggu

SEQ ID NO: 1187038 - RNA, 19 nt, Artificial Sequence
  Description of Artificial Sequence: Synthetic oligonucleotide
cccgaucugaugucugcau

SEQ ID NO: 1187039 - RNA, 19 nt, Artificial Sequence
  Description of Artificial Sequence: Synthetic oligonucleotide
gggguucauccgccgcugu

SEQ ID NO: 1187040 - RNA, 19 nt, Artificial Sequence
  Description of Artificial Sequence: Synthetic oligonucleotide
ccgagagcagaagcuguua

SEQ ID NO: 1187041 - RNA, 19 nt, Artificial Sequence
  Description of Artificial Sequence: Synthetic oligonucleotide
ccgccgcuguaggcaagcc

SEQ ID NO: 1187042 - RNA, 19 nt, Artificial Sequence
  Description of Artificial Sequence: Synthetic oligonucleotide
gcccugaagggagcuccaa

SEQ ID NO: 1187043 - RNA, 19 nt, Artificial Sequence
  Description of Artificial Sequence: Synthetic oligonucleotide
cuccuuccgccagcguccu

SEQ ID NO: 1187044 - RNA, 19 nt, Artificial Sequence
  Description of Artificial Sequence: Synthetic oligonucleotide
gccuuaugcugugguacuu

SEQ ID NO: 1187045 - RNA, 19 nt, Artificial Sequence
  Description of Artificial Sequence: Synthetic oligonucleotide
cgcuugcggagccguucug

SEQ ID NO: 1187046 - RNA, 19 nt, Artificial Sequence
  Description of Artificial Sequence: Synthetic oligonucleotide
ccccggcaaaccuccugaa

SEQ ID NO: 1187047 - RNA, 19 nt, Artificial Sequence
  Description of Artificial Sequence: Synthetic oligonucleotide
cguuucccagaaagagggu

SEQ ID NO: 1187048 - RNA, 19 nt, Artificial Sequence
  Description of Artificial Sequence: Synthetic oligonucleotide
gcaucacgcuggggcucac

SEQ ID NO: 1187049 - RNA, 19 nt, Artificial Sequence
  Description of Artificial Sequence: Synthetic oligonucleotide
ccgcaacagcucagacucu

SEQ ID NO: 1187050 - RNA, 19 nt, Artificial Sequence
  Description of Artificial Sequence: Synthetic oligonucleotide
cgcuguaggcaagcccuau

SEQ ID NO: 1187051 - RNA, 19 nt, Artificial Sequence
  Description of Artificial Sequence: Synthetic oligonucleotide
aaugauauugaaaauaugc

SEQ ID NO: 1187052 - RNA, 19 nt, Artificial Sequence
  Description of Artificial Sequence: Synthetic oligonucleotide
aaacuuugaaugcaaaucc

SEQ ID NO: 1187053 - RNA, 19 nt, Artificial Sequence
  Description of Artificial Sequence: Synthetic oligonucleotide
aaacacuugaucuucaaac

SEQ ID NO: 1187054 - RNA, 19 nt, Artificial Sequence
  Description of Artificial Sequence: Synthetic oligonucleotide
aaaacggcuacuuuggugg

SEQ ID NO: 1187055 - RNA, 19 nt, Artificial Sequence
  Description of Artificial Sequence: Synthetic oligonucleotide
aauguggaauaucaaaagc

SEQ ID NO: 1187056 - RNA, 19 nt, Artificial Sequence
  Description of Artificial Sequence: Synthetic oligonucleotide
aaaguguaaucauacgucc

SEQ ID NO: 1187057 - RNA, 19 nt, Artificial Sequence
  Description of Artificial Sequence: Synthetic oligonucleotide
uuuacuaagauccagcugu

SEQ ID NO: 1187058 - RNA, 19 nt, Artificial Sequence
  Description of Artificial Sequence: Synthetic oligonucleotide
aauauuuccauaguacgcc

SEQ ID NO: 1187059 - RNA, 19 nt, Artificial Sequence
  Description of Artificial Sequence: Synthetic oligonucleotide
gaauaaagcagguuggagg

SEQ ID NO: 1187060 - RNA, 19 nt, Artificial Sequence
  Description of Artificial Sequence: Synthetic oligonucleotide
aagauaauaauuucuugug

SEQ ID NO: 1187061 - RNA, 19 nt, Artificial Sequence
  Description of Artificial Sequence: Synthetic oligonucleotide
aauuguauaucguucacga

SEQ ID NO: 1187062 - RNA, 19 nt, Artificial Sequence
  Description of Artificial Sequence: Synthetic oligonucleotide
ucugccaaagacuuuaggg

SEQ ID NO: 1187063 - RNA, 19 nt, Artificial Sequence
  Description of Artificial Sequence: Synthetic oligonucleotide
aaauaugcucuauagucuc

SEQ ID NO: 1187064 - RNA, 19 nt, Artificial Sequence
  Description of Artificial Sequence: Synthetic oligonucleotide
ugauuagucauugauagag

SEQ ID NO: 1187065 - RNA, 19 nt, Artificial Sequence
  Description of Artificial Sequence: Synthetic oligonucleotide
auacuuaguggcuucaccc

SEQ ID NO: 1187066 - RNA, 19 nt, Artificial Sequence
  Description of Artificial Sequence: Synthetic oligonucleotide
ucacggaugcauuagaagg

SEQ ID NO: 1187067 - RNA, 19 nt, Artificial Sequence
  Description of Artificial Sequence: Synthetic oligonucleotide
auugcuacuaggaaaacgc

SEQ ID NO: 1187068 - RNA, 19 nt, Artificial Sequence
  Description of Artificial Sequence: Synthetic oligonucleotide
ucuauagucucaucaaccg

SEQ ID NO: 1187069 - RNA, 19 nt, Artificial Sequence
  Description of Artificial Sequence: Synthetic oligonucleotide
aaaauuguauaucguucac

SEQ ID NO: 1187070 - RNA, 19 nt, Artificial Sequence
  Description of Artificial Sequence: Synthetic oligonucleotide
acuaggaaaacgcacacag

SEQ ID NO: 1187071 - RNA, 19 nt, Artificial Sequence
  Description of Artificial Sequence: Synthetic oligonucleotide
uauucacuaagucuucacg

SEQ ID NO: 1187072 - RNA, 19 nt, Artificial Sequence
  Description of Artificial Sequence: Synthetic oligonucleotide
aauucugcaaggauuaguc

SEQ ID NO: 1187073 - RNA, 19 nt, Artificial Sequence
  Description of Artificial Sequence: Synthetic oligonucleotide
uacaaaacggcuacuuugg

SEQ ID NO: 1187074 - RNA, 19 nt, Artificial Sequence
  Description of Artificial Sequence: Synthetic oligonucleotide
uauuugaugacaagggcug

SEQ ID NO: 1187075 - RNA, 19 nt, Artificial Sequence
  Description of Artificial Sequence: Synthetic oligonucleotide
uaaaauuguauaucguuca

SEQ ID NO: 1187076 - RNA, 19 nt, Artificial Sequence
  Description of Artificial Sequence: Synthetic oligonucleotide
uaaccagaaaacauuaugu

SEQ ID NO: 1187077 - RNA, 19 nt, Artificial Sequence
  Description of Artificial Sequence: Synthetic oligonucleotide
cauugauagaggaagaaac

SEQ ID NO: 1187078 - RNA, 19 nt, Artificial Sequence
  Description of Artificial Sequence: Synthetic oligonucleotide
ugcuuuucuaacugcaucg

SEQ ID NO: 1187079 - RNA, 19 nt, Artificial Sequence
  Description of Artificial Sequence: Synthetic oligonucleotide
uuuucuaacugcaucgaug

SEQ ID NO: 1187080 - RNA, 19 nt, Artificial Sequence
  Description of Artificial Sequence: Synthetic oligonucleotide
gguguaaaauuguauaucg

SEQ ID NO: 1187081 - RNA, 19 nt, Artificial Sequence
  Description of Artificial Sequence: Synthetic oligonucleotide
uaaucauacguccagugga

SEQ ID NO: 1187082 - RNA, 19 nt, Artificial Sequence
  Description of Artificial Sequence: Synthetic oligonucleotide
aaccagaaaacauuaugug

SEQ ID NO: 1187083 - RNA, 19 nt, Artificial Sequence
  Description of Artificial Sequence: Synthetic oligonucleotide
auaaccagaaaacauuaug

SEQ ID NO: 1187084 - RNA, 19 nt, Artificial Sequence
  Description of Artificial Sequence: Synthetic oligonucleotide
ugaaagccgagacagcacg

SEQ ID NO: 1187085 - RNA, 19 nt, Artificial Sequence
  Description of Artificial Sequence: Synthetic oligonucleotide
ucgaugaucuuuucuaggg

SEQ ID NO: 1187086 - RNA, 19 nt, Artificial Sequence
  Description of Artificial Sequence: Synthetic oligonucleotide
ugcaaugaccagcagauca

SEQ ID NO: 1187087 - RNA, 19 nt, Artificial Sequence
  Description of Artificial Sequence: Synthetic oligonucleotide
aaauuguauaucguucacg

SEQ ID NO: 1187088 - RNA, 19 nt, Artificial Sequence
  Description of Artificial Sequence: Synthetic oligonucleotide
aaggauuagucgugaaaac

SEQ ID NO: 1187089 - RNA, 19 nt, Artificial Sequence
  Description of Artificial Sequence: Synthetic oligonucleotide
uuucuaacugcaucgauga

SEQ ID NO: 1187090 - RNA, 19 nt, Artificial Sequence
  Description of Artificial Sequence: Synthetic oligonucleotide
aguuguauacaaaaugugg

SEQ ID NO: 1187091 - RNA, 19 nt, Artificial Sequence
  Description of Artificial Sequence: Synthetic oligonucleotide
ucgugaaaacugaaaacgg

SEQ ID NO: 1187092 - RNA, 19 nt, Artificial Sequence
  Description of Artificial Sequence: Synthetic oligonucleotide
gucgugaaaacugaaaacg

SEQ ID NO: 1187093 - RNA, 19 nt, Artificial Sequence
  Description of Artificial Sequence: Synthetic oligonucleotide
gauaagacagucuucacaa

SEQ ID NO: 1187094 - RNA, 19 nt, Artificial Sequence
  Description of Artificial Sequence: Synthetic oligonucleotide
aauugcuacuaggaaaacg

SEQ ID NO: 1187095 - RNA, 19 nt, Artificial Sequence
  Description of Artificial Sequence: Synthetic oligonucleotide
auauucacauauuaugucu

SEQ ID NO: 1187096 - RNA, 19 nt, Artificial Sequence
  Description of Artificial Sequence: Synthetic oligonucleotide
gaaagauaauaauuucuug

SEQ ID NO: 1187097 - RNA, 19 nt, Artificial Sequence
  Description of Artificial Sequence: Synthetic oligonucleotide
agugacagacguuagagcu

SEQ ID NO: 1187098 - RNA, 19 nt, Artificial Sequence
  Description of Artificial Sequence: Synthetic oligonucleotide
ucuuucuugaguuguauac

SEQ ID NO: 1187099 - RNA, 19 nt, Artificial Sequence
  Description of Artificial Sequence: Synthetic oligonucleotide
ucagugagauacuuagugg

SEQ ID NO: 1187100 - RNA, 19 nt, Artificial Sequence
  Description of Artificial Sequence: Synthetic oligonucleotide
aaacauuaugugaagcuuc

SEQ ID NO: 1187101 - RNA, 19 nt, Artificial Sequence
  Description of Artificial Sequence: Synthetic oligonucleotide
ucguucacgauacaguuca

SEQ ID NO: 1187102 - RNA, 19 nt, Artificial Sequence
  Description of Artificial Sequence: Synthetic oligonucleotide
uuguauaucguucacgaua

SEQ ID NO: 1187103 - RNA, 19 nt, Artificial Sequence
  Description of Artificial Sequence: Synthetic oligonucleotide
ugaaaauaugcucuauagu

SEQ ID NO: 1187104 - RNA, 19 nt, Artificial Sequence
  Description of Artificial Sequence: Synthetic oligonucleotide
auucacauauuaugucugc

SEQ ID NO: 1187105 - RNA, 19 nt, Artificial Sequence
  Description of Artificial Sequence: Synthetic oligonucleotide
uggaauaucaaaagcucca

SEQ ID NO: 1187106 - RNA, 19 nt, Artificial Sequence
  Description of Artificial Sequence: Synthetic oligonucleotide
aaauaagaaauuucauuua

SEQ ID NO: 1187107 - RNA, 19 nt, Artificial Sequence
  Description of Artificial Sequence: Synthetic oligonucleotide
aaugaguaggaauauccaa

SEQ ID NO: 1187108 - RNA, 19 nt, Artificial Sequence
  Description of Artificial Sequence: Synthetic oligonucleotide
agacguuagagcuucagug

SEQ ID NO: 1187109 - RNA, 19 nt, Artificial Sequence
  Description of Artificial Sequence: Synthetic oligonucleotide
auauuuccauaguacgccc

SEQ ID NO: 1187110 - RNA, 19 nt, Artificial Sequence
  Description of Artificial Sequence: Synthetic oligonucleotide
aaaauaugcucuauagucu

SEQ ID NO: 1187111 - RNA, 19 nt, Artificial Sequence
  Description of Artificial Sequence: Synthetic oligonucleotide
uauaucguucacgauacag

SEQ ID NO: 1187112 - RNA, 19 nt, Artificial Sequence
  Description of Artificial Sequence: Synthetic oligonucleotide
aguguaaucauacguccag

SEQ ID NO: 1187113 - RNA, 19 nt, Artificial Sequence
  Description of Artificial Sequence: Synthetic oligonucleotide
caaaguguaaucauacguc

SEQ ID NO: 1187114 - RNA, 19 nt, Artificial Sequence
  Description of Artificial Sequence: Synthetic oligonucleotide
uuucuaucguuuuaagcug

SEQ ID NO: 1187115 - RNA, 19 nt, Artificial Sequence
  Description of Artificial Sequence: Synthetic oligonucleotide
uacuugucugcaaugacca

SEQ ID NO: 1187116 - RNA, 19 nt, Artificial Sequence
  Description of Artificial Sequence: Synthetic oligonucleotide
ucugguguaaaauuguaua

SEQ ID NO: 1187117 - RNA, 19 nt, Artificial Sequence
  Description of Artificial Sequence: Synthetic oligonucleotide
uucuaucguuuuaagcugg

SEQ ID NO: 1187118 - RNA, 19 nt, Artificial Sequence
  Description of Artificial Sequence: Synthetic oligonucleotide
cucuaauucagugacagac

SEQ ID NO: 1187119 - RNA, 19 nt, Artificial Sequence
  Description of Artificial Sequence: Synthetic oligonucleotide
uaggaaaacgcacacaguu

SEQ ID NO: 1187120 - RNA, 19 nt, Artificial Sequence
  Description of Artificial Sequence: Synthetic oligonucleotide
guaaucauacguccagugg

SEQ ID NO: 1187121 - RNA, 19 nt, Artificial Sequence
  Description of Artificial Sequence: Synthetic oligonucleotide
cucuauagucucaucaacc

SEQ ID NO: 1187122 - RNA, 19 nt, Artificial Sequence
  Description of Artificial Sequence: Synthetic oligonucleotide
uaccauaacuuuauuacaa

SEQ ID NO: 1187123 - RNA, 19 nt, Artificial Sequence
  Description of Artificial Sequence: Synthetic oligonucleotide
ggaauauccaaauugcuac

SEQ ID NO: 1187124 - RNA, 19 nt, Artificial Sequence
  Description of Artificial Sequence: Synthetic oligonucleotide
uucacgauacaguucagcu

SEQ ID NO: 1187125 - RNA, 19 nt, Artificial Sequence
  Description of Artificial Sequence: Synthetic oligonucleotide
cauauuaugucugccaaag

SEQ ID NO: 1187126 - RNA, 19 nt, Artificial Sequence
  Description of Artificial Sequence: Synthetic oligonucleotide
aacauggcguccuuguucu

SEQ ID NO: 1187127 - RNA, 19 nt, Artificial Sequence
  Description of Artificial Sequence: Synthetic oligonucleotide
uguaaucauacguccagug

SEQ ID NO: 1187128 - RNA, 19 nt, Artificial Sequence
  Description of Artificial Sequence: Synthetic oligonucleotide
uacuuugguggauacuugg

SEQ ID NO: 1187129 - RNA, 19 nt, Artificial Sequence
  Description of Artificial Sequence: Synthetic oligonucleotide
cuaagauccagcuguacug

SEQ ID NO: 1187130 - RNA, 19 nt, Artificial Sequence
  Description of Artificial Sequence: Synthetic oligonucleotide
agauaauaauuucuugugu

SEQ ID NO: 1187131 - RNA, 19 nt, Artificial Sequence
  Description of Artificial Sequence: Synthetic oligonucleotide
auucacuaagucuucacga

SEQ ID NO: 1187132 - RNA, 19 nt, Artificial Sequence
  Description of Artificial Sequence: Synthetic oligonucleotide
ucuuggaaaagagccaggg

SEQ ID NO: 1187133 - RNA, 19 nt, Artificial Sequence
  Description of Artificial Sequence: Synthetic oligonucleotide
ugaaugcaaauccacuucu

SEQ ID NO: 1187134 - RNA, 19 nt, Artificial Sequence
  Description of Artificial Sequence: Synthetic oligonucleotide
auaagguuggugcagcaug

SEQ ID NO: 1187135 - RNA, 19 nt, Artificial Sequence
  Description of Artificial Sequence: Synthetic oligonucleotide
agaucguucgaucauauuu

SEQ ID NO: 1187136 - RNA, 19 nt, Artificial Sequence
  Description of Artificial Sequence: Synthetic oligonucleotide
accagaaaacauuauguga

SEQ ID NO: 1187137 - RNA, 19 nt, Artificial Sequence
  Description of Artificial Sequence: Synthetic oligonucleotide
aguaggaucuuccaggaaa

SEQ ID NO: 1187138 - RNA, 19 nt, Artificial Sequence
  Description of Artificial Sequence: Synthetic oligonucleotide
caagcucuaauucagugac

SEQ ID NO: 1187139 - RNA, 19 nt, Artificial Sequence
  Description of Artificial Sequence: Synthetic oligonucleotide
agauaagacagucuucaca

SEQ ID NO: 1187140 - RNA, 19 nt, Artificial Sequence
  Description of Artificial Sequence: Synthetic oligonucleotide
uuuaugcagaggcacucag

SEQ ID NO: 1187141 - RNA, 19 nt, Artificial Sequence
  Description of Artificial Sequence: Synthetic oligonucleotide
uauacauauuacacaagau

SEQ ID NO: 1187142 - RNA, 19 nt, Artificial Sequence
  Description of Artificial Sequence: Synthetic oligonucleotide
uucugcaaggauuagucgu

SEQ ID NO: 1187143 - RNA, 19 nt, Artificial Sequence
  Description of Artificial Sequence: Synthetic oligonucleotide
uuuuaagcuggaauuugcu

SEQ ID NO: 1187144 - RNA, 19 nt, Artificial Sequence
  Description of Artificial Sequence: Synthetic oligonucleotide
uuucuuguguacaguacug

SEQ ID NO: 1187145 - RNA, 19 nt, Artificial Sequence
  Description of Artificial Sequence: Synthetic oligonucleotide
ucauacguccaguggacgg

SEQ ID NO: 1187146 - RNA, 19 nt, Artificial Sequence
  Description of Artificial Sequence: Synthetic oligonucleotide
aaucauacguccaguggac

SEQ ID NO: 1187147 - RNA, 19 nt, Artificial Sequence
  Description of Artificial Sequence: Synthetic oligonucleotide
acugacugcacuccuggac

SEQ ID NO: 1187148 - RNA, 19 nt, Artificial Sequence
  Description of Artificial Sequence: Synthetic oligonucleotide
gauacuuaguggcuucacc

SEQ ID NO: 1187149 - RNA, 19 nt, Artificial Sequence
  Description of Artificial Sequence: Synthetic oligonucleotide
acuaagauccagcuguacu

SEQ ID NO: 1187150 - RNA, 19 nt, Artificial Sequence
  Description of Artificial Sequence: Synthetic oligonucleotide
uucuacacauuuuauucac

SEQ ID NO: 1187151 - RNA, 19 nt, Artificial Sequence
  Description of Artificial Sequence: Synthetic oligonucleotide
uuguauacaaaauguggaa

SEQ ID NO: 1187152 - RNA, 19 nt, Artificial Sequence
  Description of Artificial Sequence: Synthetic oligonucleotide
acuacagaucguucgauca

SEQ ID NO: 1187153 - RNA, 19 nt, Artificial Sequence
  Description of Artificial Sequence: Synthetic oligonucleotide
agcugucucaauuuugcag

SEQ ID NO: 1187154 - RNA, 19 nt, Artificial Sequence
  Description of Artificial Sequence: Synthetic oligonucleotide
uucacggaugcauuagaag

SEQ ID NO: 1187155 - RNA, 19 nt, Artificial Sequence
  Description of Artificial Sequence: Synthetic oligonucleotide
aaaacauuaugugaagcuu

SEQ ID NO: 1187156 - RNA, 19 nt, Artificial Sequence
  Description of Artificial Sequence: Synthetic oligonucleotide
cacuaagucuucacgaaag

SEQ ID NO: 1187157 - RNA, 19 nt, Artificial Sequence
  Description of Artificial Sequence: Synthetic oligonucleotide
ucaguguuugucacgguga

SEQ ID NO: 1187158 - RNA, 19 nt, Artificial Sequence
  Description of Artificial Sequence: Synthetic oligonucleotide
uuucuugaguuguauacaa

SEQ ID NO: 1187159 - RNA, 19 nt, Artificial Sequence
  Description of Artificial Sequence: Synthetic oligonucleotide
aagccgcgcagcuugaaag

SEQ ID NO: 1187160 - RNA, 19 nt, Artificial Sequence
  Description of Artificial Sequence: Synthetic oligonucleotide
gguacaaauacaaaacggc

SEQ ID NO: 1187161 - RNA, 19 nt, Artificial Sequence
  Description of Artificial Sequence: Synthetic oligonucleotide
acuugguccaaccacacau

SEQ ID NO: 1187162 - RNA, 19 nt, Artificial Sequence
  Description of Artificial Sequence: Synthetic oligonucleotide
auauccaaauugcuacuag

SEQ ID NO: 1187163 - RNA, 19 nt, Artificial Sequence
  Description of Artificial Sequence: Synthetic oligonucleotide
gaucguucgaucauauuug

SEQ ID NO: 1187164 - RNA, 19 nt, Artificial Sequence
  Description of Artificial Sequence: Synthetic oligonucleotide
ugaccagcagaucaggcac

SEQ ID NO: 1187165 - RNA, 19 nt, Artificial Sequence
  Description of Artificial Sequence: Synthetic oligonucleotide
uaucaaaagcuccaaugau

SEQ ID NO: 1187166 - RNA, 19 nt, Artificial Sequence
  Description of Artificial Sequence: Synthetic oligonucleotide
gauuagucauugauagagg

SEQ ID NO: 1187167 - RNA, 19 nt, Artificial Sequence
  Description of Artificial Sequence: Synthetic oligonucleotide
agcuuuacuaagauccagc

SEQ ID NO: 1187168 - RNA, 19 nt, Artificial Sequence
  Description of Artificial Sequence: Synthetic oligonucleotide
acuuugaaugcaaauccac

SEQ ID NO: 1187169 - RNA, 19 nt, Artificial Sequence
  Description of Artificial Sequence: Synthetic oligonucleotide
ugauagaggaagaaacuuu

SEQ ID NO: 1187170 - RNA, 19 nt, Artificial Sequence
  Description of Artificial Sequence: Synthetic oligonucleotide
aguaaauaacucaugucug

SEQ ID NO: 1187171 - RNA, 19 nt, Artificial Sequence
  Description of Artificial Sequence: Synthetic oligonucleotide
uuagucgugaaaacugaaa

SEQ ID NO: 1187172 - RNA, 19 nt, Artificial Sequence
  Description of Artificial Sequence: Synthetic oligonucleotide
uccaaauaagguuggugca

SEQ ID NO: 1187173 - RNA, 19 nt, Artificial Sequence
  Description of Artificial Sequence: Synthetic oligonucleotide
guuguauacaaaaugugga

SEQ ID NO: 1187174 - RNA, 19 nt, Artificial Sequence
  Description of Artificial Sequence: Synthetic oligonucleotide
aaaagagccaggguuuaug

SEQ ID NO: 1187175 - RNA, 19 nt, Artificial Sequence
  Description of Artificial Sequence: Synthetic oligonucleotide
acgcacacaguuucuacac

SEQ ID NO: 1187176 - RNA, 19 nt, Artificial Sequence
  Description of Artificial Sequence: Synthetic oligonucleotide
ucuaacugcaucgaugauc

SEQ ID NO: 1187177 - RNA, 19 nt, Artificial Sequence
  Description of Artificial Sequence: Synthetic oligonucleotide
cacggugaaaggaucauac

SEQ ID NO: 1187178 - RNA, 19 nt, Artificial Sequence
  Description of Artificial Sequence: Synthetic oligonucleotide
acuggguuaucauuccaag

SEQ ID NO: 1187179 - RNA, 19 nt, Artificial Sequence
  Description of Artificial Sequence: Synthetic oligonucleotide
uggaaccaaacccaggguc

SEQ ID NO: 1187180 - RNA, 19 nt, Artificial Sequence
  Description of Artificial Sequence: Synthetic oligonucleotide
aggguuuaugcagaggcac

SEQ ID NO: 1187181 - RNA, 19 nt, Artificial Sequence
  Description of Artificial Sequence: Synthetic oligonucleotide
agacagucuucacaaaaug

SEQ ID NO: 1187182 - RNA, 19 nt, Artificial Sequence
  Description of Artificial Sequence: Synthetic oligonucleotide
augcucuauagucucauca

SEQ ID NO: 1187183 - RNA, 19 nt, Artificial Sequence
  Description of Artificial Sequence: Synthetic oligonucleotide
acacucucaaaguguaauc

SEQ ID NO: 1187184 - RNA, 19 nt, Artificial Sequence
  Description of Artificial Sequence: Synthetic oligonucleotide
auuagaaggcccuccaaaa

SEQ ID NO: 1187185 - RNA, 19 nt, Artificial Sequence
  Description of Artificial Sequence: Synthetic oligonucleotide
agauuaaaauaagaaauuu

SEQ ID NO: 1187186 - RNA, 19 nt, Artificial Sequence
  Description of Artificial Sequence: Synthetic oligonucleotide
cacgccucaguguauaagc

SEQ ID NO: 1187187 - RNA, 19 nt, Artificial Sequence
  Description of Artificial Sequence: Synthetic oligonucleotide
ccacacaucagauacaaac

SEQ ID NO: 1187188 - RNA, 19 nt, Artificial Sequence
  Description of Artificial Sequence: Synthetic oligonucleotide
uacuuaguggcuucacccc

SEQ ID NO: 1187189 - RNA, 19 nt, Artificial Sequence
  Description of Artificial Sequence: Synthetic oligonucleotide
acacuugaucuucaaacca

SEQ ID NO: 1187190 - RNA, 19 nt, Artificial Sequence
  Description of Artificial Sequence: Synthetic oligonucleotide
uugguggauacuuggauau

SEQ ID NO: 1187191 - RNA, 19 nt, Artificial Sequence
  Description of Artificial Sequence: Synthetic oligonucleotide
gaaaacgguacccucuguc

SEQ ID NO: 1187192 - RNA, 19 nt, Artificial Sequence
  Description of Artificial Sequence: Synthetic oligonucleotide
aaauaagguuggugcagca

SEQ ID NO: 1187193 - RNA, 19 nt, Artificial Sequence
  Description of Artificial Sequence: Synthetic oligonucleotide
acguuagagcuucagugag

SEQ ID NO: 1187194 - RNA, 19 nt, Artificial Sequence
  Description of Artificial Sequence: Synthetic oligonucleotide
cacggaugcauuagaaggc

SEQ ID NO: 1187195 - RNA, 19 nt, Artificial Sequence
  Description of Artificial Sequence: Synthetic oligonucleotide
cacgaaagauaauaauuuc

SEQ ID NO: 1187196 - RNA, 19 nt, Artificial Sequence
  Description of Artificial Sequence: Synthetic oligonucleotide
aacuuuggcuguacugccc

SEQ ID NO: 1187197 - RNA, 19 nt, Artificial Sequence
  Description of Artificial Sequence: Synthetic oligonucleotide
uuugguggauacuuggaua

SEQ ID NO: 1187198 - RNA, 19 nt, Artificial Sequence
  Description of Artificial Sequence: Synthetic oligonucleotide
uaucguucacgauacaguu

SEQ ID NO: 1187199 - RNA, 19 nt, Artificial Sequence
  Description of Artificial Sequence: Synthetic oligonucleotide
uguggaacugagcuuuacu

SEQ ID NO: 1187200 - RNA, 19 nt, Artificial Sequence
  Description of Artificial Sequence: Synthetic oligonucleotide
ugcccaauaaaguuucuau

SEQ ID NO: 1187201 - RNA, 19 nt, Artificial Sequence
  Description of Artificial Sequence: Synthetic oligonucleotide
auuaugucugccaaagacu

SEQ ID NO: 1187202 - RNA, 19 nt, Artificial Sequence
  Description of Artificial Sequence: Synthetic oligonucleotide
ugugagccuaucaccgggg

SEQ ID NO: 1187203 - RNA, 19 nt, Artificial Sequence
  Description of Artificial Sequence: Synthetic oligonucleotide
cuggguuaucauuccaagg

SEQ ID NO: 1187204 - RNA, 19 nt, Artificial Sequence
  Description of Artificial Sequence: Synthetic oligonucleotide
aacauuaugugaagcuucu

SEQ ID NO: 1187205 - RNA, 19 nt, Artificial Sequence
  Description of Artificial Sequence: Synthetic oligonucleotide
cuugucugcaaugaccagc

SEQ ID NO: 1187206 - RNA, 19 nt, Artificial Sequence
  Description of Artificial Sequence: Synthetic oligonucleotide
ugagcuuuacuaagaucca

SEQ ID NO: 1187207 - RNA, 19 nt, Artificial Sequence
  Description of Artificial Sequence: Synthetic oligonucleotide
aaagccuggacuugauuuu

SEQ ID NO: 1187208 - RNA, 19 nt, Artificial Sequence
  Description of Artificial Sequence: Synthetic oligonucleotide
gacguuagagcuucaguga

SEQ ID NO: 1187209 - RNA, 19 nt, Artificial Sequence
  Description of Artificial Sequence: Synthetic oligonucleotide
ugcaucgaugaucuuuucu

SEQ ID NO: 1187210 - RNA, 19 nt, Artificial Sequence
  Description of Artificial Sequence: Synthetic oligonucleotide
uccacuacagaucguucga

SEQ ID NO: 1187211 - RNA, 19 nt, Artificial Sequence
  Description of Artificial Sequence: Synthetic oligonucleotide
uuuaagcuggaauuugcuu

SEQ ID NO: 1187212 - RNA, 19 nt, Artificial Sequence
  Description of Artificial Sequence: Synthetic oligonucleotide
caucgaugaucuuuucuag

SEQ ID NO: 1187213 - RNA, 19 nt, Artificial Sequence
  Description of Artificial Sequence: Synthetic oligonucleotide
aauuccugcgugaugcucu

SEQ ID NO: 1187214 - RNA, 19 nt, Artificial Sequence
  Description of Artificial Sequence: Synthetic oligonucleotide
uucagugacagacguuaga

SEQ ID NO: 1187215 - RNA, 19 nt, Artificial Sequence
  Description of Artificial Sequence: Synthetic oligonucleotide
cuccugagucucaaaagcc

SEQ ID NO: 1187216 - RNA, 19 nt, Artificial Sequence
  Description of Artificial Sequence: Synthetic oligonucleotide
guacuagagggcucagugg

SEQ ID NO: 1187217 - RNA, 19 nt, Artificial Sequence
  Description of Artificial Sequence: Synthetic oligonucleotide
aaccgacugacugcacucc

SEQ ID NO: 1187218 - RNA, 19 nt, Artificial Sequence
  Description of Artificial Sequence: Synthetic oligonucleotide
guuuuaagcuggaauuugc

SEQ ID NO: 1187219 - RNA, 19 nt, Artificial Sequence
  Description of Artificial Sequence: Synthetic oligonucleotide
agucucaucaaccgacuga

SEQ ID NO: 1187220 - RNA, 19 nt, Artificial Sequence
  Description of Artificial Sequence: Synthetic oligonucleotide
ucaguguauaagccgcugu

SEQ ID NO: 1187221 - RNA, 19 nt, Artificial Sequence
  Description of Artificial Sequence: Synthetic oligonucleotide
uuaugugaagcuucuccaa

SEQ ID NO: 1187222 - RNA, 19 nt, Artificial Sequence
  Description of Artificial Sequence: Synthetic oligonucleotide
ucauugauagaggaagaaa

SEQ ID NO: 1187223 - RNA, 19 nt, Artificial Sequence
  Description of Artificial Sequence: Synthetic oligonucleotide
ugcucuauagucucaucaa

SEQ ID NO: 1187224 - RNA, 19 nt, Artificial Sequence
  Description of Artificial Sequence: Synthetic oligonucleotide
aacgguacccucugucuga

SEQ ID NO: 1187225 - RNA, 19 nt, Artificial Sequence
  Description of Artificial Sequence: Synthetic oligonucleotide
ggugaaaggaucauacuug

SEQ ID NO: 1187226 - RNA, 19 nt, Artificial Sequence
  Description of Artificial Sequence: Synthetic oligonucleotide
aguuugcuaucuuccacug

SEQ ID NO: 1187227 - RNA, 19 nt, Artificial Sequence
  Description of Artificial Sequence: Synthetic oligonucleotide
ucuucacggaugcauuaga

SEQ ID NO: 1187228 - RNA, 19 nt, Artificial Sequence
  Description of Artificial Sequence: Synthetic oligonucleotide
cuaacugcaucgaugaucu

SEQ ID NO: 1187229 - RNA, 19 nt, Artificial Sequence
  Description of Artificial Sequence: Synthetic oligonucleotide
uauuuccauaguacgcccu

SEQ ID NO: 1187230 - RNA, 19 nt, Artificial Sequence
  Description of Artificial Sequence: Synthetic oligonucleotide
uugauagaggaagaaacuu

SEQ ID NO: 1187231 - RNA, 19 nt, Artificial Sequence
  Description of Artificial Sequence: Synthetic oligonucleotide
guauaagccgcuguggaac

SEQ ID NO: 1187232 - RNA, 19 nt, Artificial Sequence
  Description of Artificial Sequence: Synthetic oligonucleotide
cacucaguguuugucacgg

SEQ ID NO: 1187233 - RNA, 19 nt, Artificial Sequence
  Description of Artificial Sequence: Synthetic oligonucleotide
caaauaagguuggugcagc

SEQ ID NO: 1187234 - RNA, 19 nt, Artificial Sequence
  Description of Artificial Sequence: Synthetic oligonucleotide
acuaagucuucacgaaaga

SEQ ID NO: 1187235 - RNA, 19 nt, Artificial Sequence
  Description of Artificial Sequence: Synthetic oligonucleotide
uguauaagccgcuguggaa

SEQ ID NO: 1187236 - RNA, 19 nt, Artificial Sequence
  Description of Artificial Sequence: Synthetic oligonucleotide
aggauuagucgugaaaacu

SEQ ID NO: 1187237 - RNA, 19 nt, Artificial Sequence
  Description of Artificial Sequence: Synthetic oligonucleotide
uggauacuuggauauucac

SEQ ID NO: 1187238 - RNA, 19 nt, Artificial Sequence
  Description of Artificial Sequence: Synthetic oligonucleotide
caaacacaaacauggcguc

SEQ ID NO: 1187239 - RNA, 19 nt, Artificial Sequence
  Description of Artificial Sequence: Synthetic oligonucleotide
ugagauacuuaguggcuuc

SEQ ID NO: 1187240 - RNA, 19 nt, Artificial Sequence
  Description of Artificial Sequence: Synthetic oligonucleotide
ggauuagucgugaaaacug

SEQ ID NO: 1187241 - RNA, 19 nt, Artificial Sequence
  Description of Artificial Sequence: Synthetic oligonucleotide
uugcuacuaggaaaacgca

SEQ ID NO: 1187242 - RNA, 19 nt, Artificial Sequence
  Description of Artificial Sequence: Synthetic oligonucleotide
augcauuagaaggcccucc

SEQ ID NO: 1187243 - RNA, 19 nt, Artificial Sequence
  Description of Artificial Sequence: Synthetic oligonucleotide
uacacucucaaaguguaau

SEQ ID NO: 1187244 - RNA, 19 nt, Artificial Sequence
  Description of Artificial Sequence: Synthetic oligonucleotide
agccgcgcagcuugaaagc

SEQ ID NO: 1187245 - RNA, 19 nt, Artificial Sequence
  Description of Artificial Sequence: Synthetic oligonucleotide
auaacucaugucugugugu

SEQ ID NO: 1187246 - RNA, 19 nt, Artificial Sequence
  Description of Artificial Sequence: Synthetic oligonucleotide
ucuaucguuuuaagcugga

SEQ ID NO: 1187247 - RNA, 19 nt, Artificial Sequence
  Description of Artificial Sequence: Synthetic oligonucleotide
auaucguucacgauacagu

SEQ ID NO: 1187248 - RNA, 19 nt, Artificial Sequence
  Description of Artificial Sequence: Synthetic oligonucleotide
gauuagucgugaaaacuga

SEQ ID NO: 1187249 - RNA, 19 nt, Artificial Sequence
  Description of Artificial Sequence: Synthetic oligonucleotide
uuucaacuggguuaucauu

SEQ ID NO: 1187250 - RNA, 19 nt, Artificial Sequence
  Description of Artificial Sequence: Synthetic oligonucleotide
gugugagccuaucaccggg

SEQ ID NO: 1187251 - RNA, 19 nt, Artificial Sequence
  Description of Artificial Sequence: Synthetic oligonucleotide
uauaagccgcuguggaacu

SEQ ID NO: 1187252 - RNA, 19 nt, Artificial Sequence
  Description of Artificial Sequence: Synthetic oligonucleotide
guacuguuccaguaggauc

SEQ ID NO: 1187253 - RNA, 19 nt, Artificial Sequence
  Description of Artificial Sequence: Synthetic oligonucleotide
guuccaaauaagguuggug

SEQ ID NO: 1187254 - RNA, 19 nt, Artificial Sequence
  Description of Artificial Sequence: Synthetic oligonucleotide
uccauaguacgcccuugug

SEQ ID NO: 1187255 - RNA, 19 nt, Artificial Sequence
  Description of Artificial Sequence: Synthetic oligonucleotide
uugguaagauggaaccaaa

SEQ ID NO: 1187256 - RNA, 19 nt, Artificial Sequence
  Description of Artificial Sequence: Synthetic oligonucleotide
caaggauuagucgugaaaa

SEQ ID NO: 1187257 - RNA, 19 nt, Artificial Sequence
  Description of Artificial Sequence: Synthetic oligonucleotide
cuugaaagccgagacagca

SEQ ID NO: 1187258 - RNA, 19 nt, Artificial Sequence
  Description of Artificial Sequence: Synthetic oligonucleotide
acuuaguggcuucaccccu

SEQ ID NO: 1187259 - RNA, 19 nt, Artificial Sequence
  Description of Artificial Sequence: Synthetic oligonucleotide
aaguguaaucauacgucca

SEQ ID NO: 1187260 - RNA, 19 nt, Artificial Sequence
  Description of Artificial Sequence: Synthetic oligonucleotide
guaaauaacucaugucugu

SEQ ID NO: 1187261 - RNA, 19 nt, Artificial Sequence
  Description of Artificial Sequence: Synthetic oligonucleotide
uguacuguuccaguaggau

SEQ ID NO: 1187262 - RNA, 19 nt, Artificial Sequence
  Description of Artificial Sequence: Synthetic oligonucleotide
acccaggguccucuggacc

SEQ ID NO: 1187263 - RNA, 19 nt, Artificial Sequence
  Description of Artificial Sequence: Synthetic oligonucleotide
augaguaggaauauccaaa

SEQ ID NO: 1187264 - RNA, 19 nt, Artificial Sequence
  Description of Artificial Sequence: Synthetic oligonucleotide
gucucaauuuugcagaagu

SEQ ID NO: 1187265 - RNA, 19 nt, Artificial Sequence
  Description of Artificial Sequence: Synthetic oligonucleotide
uagucucaucaaccgacug

SEQ ID NO: 1187266 - RNA, 19 nt, Artificial Sequence
  Description of Artificial Sequence: Synthetic oligonucleotide
caguguauaagccgcugug

SEQ ID NO: 1187267 - RNA, 19 nt, Artificial Sequence
  Description of Artificial Sequence: Synthetic oligonucleotide
cauaguacgcccuuguggu

SEQ ID NO: 1187268 - RNA, 19 nt, Artificial Sequence
  Description of Artificial Sequence: Synthetic oligonucleotide
ggacggggcacacauagag

SEQ ID NO: 1187269 - RNA, 19 nt, Artificial Sequence
  Description of Artificial Sequence: Synthetic oligonucleotide
gcugucucaauuuugcaga

SEQ ID NO: 1187270 - RNA, 19 nt, Artificial Sequence
  Description of Artificial Sequence: Synthetic oligonucleotide
cauacguccaguggacggg

SEQ ID NO: 1187271 - RNA, 19 nt, Artificial Sequence
  Description of Artificial Sequence: Synthetic oligonucleotide
aucguucgaucauauuuga

SEQ ID NO: 1187272 - RNA, 19 nt, Artificial Sequence
  Description of Artificial Sequence: Synthetic oligonucleotide
ccauaguacgcccuugugg

SEQ ID NO: 1187273 - RNA, 19 nt, Artificial Sequence
  Description of Artificial Sequence: Synthetic oligonucleotide
gagcuuuacuaagauccag

SEQ ID NO: 1187274 - RNA, 19 nt, Artificial Sequence
  Description of Artificial Sequence: Synthetic oligonucleotide
acaaagcacgccucagugu

SEQ ID NO: 1187275 - RNA, 19 nt, Artificial Sequence
  Description of Artificial Sequence: Synthetic oligonucleotide
ugacagacguuagagcuuc

SEQ ID NO: 1187276 - RNA, 19 nt, Artificial Sequence
  Description of Artificial Sequence: Synthetic oligonucleotide
ggaguaaauaacucauguc

SEQ ID NO: 1187277 - RNA, 19 nt, Artificial Sequence
  Description of Artificial Sequence: Synthetic oligonucleotide
uauugaaaauaugcucuau

SEQ ID NO: 1187278 - RNA, 19 nt, Artificial Sequence
  Description of Artificial Sequence: Synthetic oligonucleotide
gaaagccgagacagcacgg

SEQ ID NO: 1187279 - RNA, 19 nt, Artificial Sequence
  Description of Artificial Sequence: Synthetic oligonucleotide
ugaauucugcaaggauuag

SEQ ID NO: 1187280 - RNA, 19 nt, Artificial Sequence
  Description of Artificial Sequence: Synthetic oligonucleotide
gucugcaaugaccagcaga

SEQ ID NO: 1187281 - RNA, 19 nt, Artificial Sequence
  Description of Artificial Sequence: Synthetic oligonucleotide
cuacuuugguggauacuug

SEQ ID NO: 1187282 - RNA, 19 nt, Artificial Sequence
  Description of Artificial Sequence: Synthetic oligonucleotide
aggaauauccaaauugcua

SEQ ID NO: 1187283 - RNA, 19 nt, Artificial Sequence
  Description of Artificial Sequence: Synthetic oligonucleotide
auuguauaucguucacgau

SEQ ID NO: 1187284 - RNA, 19 nt, Artificial Sequence
  Description of Artificial Sequence: Synthetic oligonucleotide
ucacgauacaguucagcuu

SEQ ID NO: 1187285 - RNA, 19 nt, Artificial Sequence
  Description of Artificial Sequence: Synthetic oligonucleotide
ccaacuuuggcuguacugc

SEQ ID NO: 1187286 - RNA, 19 nt, Artificial Sequence
  Description of Artificial Sequence: Synthetic oligonucleotide
aacuggguuaucauuccaa

SEQ ID NO: 1187287 - RNA, 19 nt, Artificial Sequence
  Description of Artificial Sequence: Synthetic oligonucleotide
cuuuuaaagccuggacuug

SEQ ID NO: 1187288 - RNA, 19 nt, Artificial Sequence
  Description of Artificial Sequence: Synthetic oligonucleotide
cuaauucagugacagacgu

SEQ ID NO: 1187289 - RNA, 19 nt, Artificial Sequence
  Description of Artificial Sequence: Synthetic oligonucleotide
aaacggcuacuuuggugga

SEQ ID NO: 1187290 - RNA, 19 nt, Artificial Sequence
  Description of Artificial Sequence: Synthetic oligonucleotide
acgccucaguguauaagcc

SEQ ID NO: 1187291 - RNA, 19 nt, Artificial Sequence
  Description of Artificial Sequence: Synthetic oligonucleotide
uaguacgcccuugugguac

SEQ ID NO: 1187292 - RNA, 19 nt, Artificial Sequence
  Description of Artificial Sequence: Synthetic oligonucleotide
cauuagaaggcccuccaaa

SEQ ID NO: 1187293 - RNA, 19 nt, Artificial Sequence
  Description of Artificial Sequence: Synthetic oligonucleotide
agugagauacuuaguggcu

SEQ ID NO: 1187294 - RNA, 19 nt, Artificial Sequence
  Description of Artificial Sequence: Synthetic oligonucleotide
ugacaagggcugcuuuucu

SEQ ID NO: 1187295 - RNA, 19 nt, Artificial Sequence
  Description of Artificial Sequence: Synthetic oligonucleotide
aucauacguccaguggacg

SEQ ID NO: 1187296 - RNA, 19 nt, Artificial Sequence
  Description of Artificial Sequence: Synthetic oligonucleotide
auuuccauaguacgcccuu

SEQ ID NO: 1187297 - RNA, 19 nt, Artificial Sequence
  Description of Artificial Sequence: Synthetic oligonucleotide
uuacuaagauccagcugua

SEQ ID NO: 1187298 - RNA, 19 nt, Artificial Sequence
  Description of Artificial Sequence: Synthetic oligonucleotide
aggcacucaguguuuguca

SEQ ID NO: 1187299 - RNA, 19 nt, Artificial Sequence
  Description of Artificial Sequence: Synthetic oligonucleotide
ucguuuuaagcuggaauuu

SEQ ID NO: 1187300 - RNA, 19 nt, Artificial Sequence
  Description of Artificial Sequence: Synthetic oligonucleotide
gggugugagccuaucaccg

SEQ ID NO: 1187301 - RNA, 19 nt, Artificial Sequence
  Description of Artificial Sequence: Synthetic oligonucleotide
cacuacagaucguucgauc

SEQ ID NO: 1187302 - RNA, 19 nt, Artificial Sequence
  Description of Artificial Sequence: Synthetic oligonucleotide
cacuugaucuucaaaccaa

SEQ ID NO: 1187303 - RNA, 19 nt, Artificial Sequence
  Description of Artificial Sequence: Synthetic oligonucleotide
acuugucugcaaugaccag

SEQ ID NO: 1187304 - RNA, 19 nt, Artificial Sequence
  Description of Artificial Sequence: Synthetic oligonucleotide
acggugaaaggaucauacu

SEQ ID NO: 1187305 - RNA, 19 nt, Artificial Sequence
  Description of Artificial Sequence: Synthetic oligonucleotide
cacucucaaaguguaauca

SEQ ID NO: 1187306 - RNA, 19 nt, Artificial Sequence
  Description of Artificial Sequence: Synthetic oligonucleotide
caaccgacugacugcacuc

SEQ ID NO: 1187307 - RNA, 19 nt, Artificial Sequence
  Description of Artificial Sequence: Synthetic oligonucleotide
aucguucacgauacaguuc

SEQ ID NO: 1187308 - RNA, 19 nt, Artificial Sequence
  Description of Artificial Sequence: Synthetic oligonucleotide
uccaaccacacaucagaua

SEQ ID NO: 1187309 - RNA, 19 nt, Artificial Sequence
  Description of Artificial Sequence: Synthetic oligonucleotide
agccaggacaaagcacgcc

SEQ ID NO: 1187310 - RNA, 19 nt, Artificial Sequence
  Description of Artificial Sequence: Synthetic oligonucleotide
ucagcaagcgguggccuug

SEQ ID NO: 1187311 - RNA, 19 nt, Artificial Sequence
  Description of Artificial Sequence: Synthetic oligonucleotide
ggggcacacauagagaggc

SEQ ID NO: 1187312 - RNA, 19 nt, Artificial Sequence
  Description of Artificial Sequence: Synthetic oligonucleotide
gugaaaggaucauacuugu

SEQ ID NO: 1187313 - RNA, 19 nt, Artificial Sequence
  Description of Artificial Sequence: Synthetic oligonucleotide
cucucaaaguguaaucaua

SEQ ID NO: 1187314 - RNA, 19 nt, Artificial Sequence
  Description of Artificial Sequence: Synthetic oligonucleotide
gaugcauuagaaggcccuc

SEQ ID NO: 1187315 - RNA, 19 nt, Artificial Sequence
  Description of Artificial Sequence: Synthetic oligonucleotide
gggaguaaauaacucaugu

SEQ ID NO: 1187316 - RNA, 19 nt, Artificial Sequence
  Description of Artificial Sequence: Synthetic oligonucleotide
gugaugcucucagcaagcg

SEQ ID NO: 1187317 - RNA, 19 nt, Artificial Sequence
  Description of Artificial Sequence: Synthetic oligonucleotide
ggguuaucauuccaaggac

SEQ ID NO: 1187318 - RNA, 19 nt, Artificial Sequence
  Description of Artificial Sequence: Synthetic oligonucleotide
caagggcugcuuuucuaac

SEQ ID NO: 1187319 - RNA, 19 nt, Artificial Sequence
  Description of Artificial Sequence: Synthetic oligonucleotide
ggauacuuggauauucaca

SEQ ID NO: 1187320 - RNA, 19 nt, Artificial Sequence
  Description of Artificial Sequence: Synthetic oligonucleotide
acuccuggacugccgcuuc

SEQ ID NO: 1187321 - RNA, 19 nt, Artificial Sequence
  Description of Artificial Sequence: Synthetic oligonucleotide
aagacuuuagggagucuuu

SEQ ID NO: 1187322 - RNA, 19 nt, Artificial Sequence
  Description of Artificial Sequence: Synthetic oligonucleotide
uacagaucguucgaucaua

SEQ ID NO: 1187323 - RNA, 19 nt, Artificial Sequence
  Description of Artificial Sequence: Synthetic oligonucleotide
auacguccaguggacgggg

SEQ ID NO: 1187324 - RNA, 19 nt, Artificial Sequence
  Description of Artificial Sequence: Synthetic oligonucleotide
gcaucgaugaucuuuucua

SEQ ID NO: 1187325 - RNA, 19 nt, Artificial Sequence
  Description of Artificial Sequence: Synthetic oligonucleotide
ggugugagccuaucaccgg

SEQ ID NO: 1187326 - RNA, 19 nt, Artificial Sequence
  Description of Artificial Sequence: Synthetic oligonucleotide
ucguucgaucauauuugau

SEQ ID NO: 1187327 - RNA, 19 nt, Artificial Sequence
  Description of Artificial Sequence: Synthetic oligonucleotide
uccauauggugcagaugaa

SEQ ID NO: 1187328 - RNA, 19 nt, Artificial Sequence
  Description of Artificial Sequence: Synthetic oligonucleotide
ucggggugugagccuauca

SEQ ID NO: 1187329 - RNA, 19 nt, Artificial Sequence
  Description of Artificial Sequence: Synthetic oligonucleotide
cacgauacaguucagcuuu

SEQ ID NO: 1187330 - RNA, 19 nt, Artificial Sequence
  Description of Artificial Sequence: Synthetic oligonucleotide
cuucacggaugcauuagaa

SEQ ID NO: 1187331 - RNA, 19 nt, Artificial Sequence
  Description of Artificial Sequence: Synthetic oligonucleotide
uccgcuuuccucggggugu

SEQ ID NO: 1187332 - RNA, 19 nt, Artificial Sequence
  Description of Artificial Sequence: Synthetic oligonucleotide
gcucuauagucucaucaac

SEQ ID NO: 1187333 - RNA, 19 nt, Artificial Sequence
  Description of Artificial Sequence: Synthetic oligonucleotide
agucuucacggaugcauua

SEQ ID NO: 1187334 - RNA, 19 nt, Artificial Sequence
  Description of Artificial Sequence: Synthetic oligonucleotide
cugucuuacuggaagggua

SEQ ID NO: 1187335 - RNA, 19 nt, Artificial Sequence
  Description of Artificial Sequence: Synthetic oligonucleotide
ugcaaggauuagucgugaa

SEQ ID NO: 1187336 - RNA, 19 nt, Artificial Sequence
  Description of Artificial Sequence: Synthetic oligonucleotide
ccaaauaagguuggugcag

SEQ ID NO: 1187337 - RNA, 19 nt, Artificial Sequence
  Description of Artificial Sequence: Synthetic oligonucleotide
gagucagaugucccugaga

SEQ ID NO: 1187338 - RNA, 19 nt, Artificial Sequence
  Description of Artificial Sequence: Synthetic oligonucleotide
auuagucgugaaaacugaa

SEQ ID NO: 1187339 - RNA, 19 nt, Artificial Sequence
  Description of Artificial Sequence: Synthetic oligonucleotide
aggacaaagcacgccucag

SEQ ID NO: 1187340 - RNA, 19 nt, Artificial Sequence
  Description of Artificial Sequence: Synthetic oligonucleotide
uacuaagauccagcuguac

SEQ ID NO: 1187341 - RNA, 19 nt, Artificial Sequence
  Description of Artificial Sequence: Synthetic oligonucleotide
agcuccaaugauauugaaa

SEQ ID NO: 1187342 - RNA, 19 nt, Artificial Sequence
  Description of Artificial Sequence: Synthetic oligonucleotide
gcgugaugcucucagcaag

SEQ ID NO: 1187343 - RNA, 19 nt, Artificial Sequence
  Description of Artificial Sequence: Synthetic oligonucleotide
cugguguaaaauuguauau

SEQ ID NO: 1187344 - RNA, 19 nt, Artificial Sequence
  Description of Artificial Sequence: Synthetic oligonucleotide
gcccaauaaaguuucuauc

SEQ ID NO: 1187345 - RNA, 19 nt, Artificial Sequence
  Description of Artificial Sequence: Synthetic oligonucleotide
auucagugacagacguuag

SEQ ID NO: 1187346 - RNA, 19 nt, Artificial Sequence
  Description of Artificial Sequence: Synthetic oligonucleotide
auacuuggauauucacaua

SEQ ID NO: 1187347 - RNA, 19 nt, Artificial Sequence
  Description of Artificial Sequence: Synthetic oligonucleotide
cucaguguauaagccgcug

SEQ ID NO: 1187348 - RNA, 19 nt, Artificial Sequence
  Description of Artificial Sequence: Synthetic oligonucleotide
cagaauaaagcagguugga

SEQ ID NO: 1187349 - RNA, 19 nt, Artificial Sequence
  Description of Artificial Sequence: Synthetic oligonucleotide
ggcacucaguguuugucac

SEQ ID NO: 1187350 - RNA, 19 nt, Artificial Sequence
  Description of Artificial Sequence: Synthetic oligonucleotide
caucaaccgacugacugca

SEQ ID NO: 1187351 - RNA, 19 nt, Artificial Sequence
  Description of Artificial Sequence: Synthetic oligonucleotide
agacuuuagggagucuuuu

SEQ ID NO: 1187352 - RNA, 19 nt, Artificial Sequence
  Description of Artificial Sequence: Synthetic oligonucleotide
caauaaaguuucuaucguu

SEQ ID NO: 1187353 - RNA, 19 nt, Artificial Sequence
  Description of Artificial Sequence: Synthetic oligonucleotide
guacugaauucugcaagga

SEQ ID NO: 1187354 - RNA, 19 nt, Artificial Sequence
  Description of Artificial Sequence: Synthetic oligonucleotide
uggacggggcacacauaga

SEQ ID NO: 1187355 - RNA, 19 nt, Artificial Sequence
  Description of Artificial Sequence: Synthetic oligonucleotide
aguacgcccuugugguacu

SEQ ID NO: 1187356 - RNA, 19 nt, Artificial Sequence
  Description of Artificial Sequence: Synthetic oligonucleotide
gcacucaguguuugucacg

SEQ ID NO: 1187357 - RNA, 19 nt, Artificial Sequence
  Description of Artificial Sequence: Synthetic oligonucleotide
aggaaaacgcacacaguuu

SEQ ID NO: 1187358 - RNA, 19 nt, Artificial Sequence
  Description of Artificial Sequence: Synthetic oligonucleotide
uacgcccuugugguacuag

SEQ ID NO: 1187359 - RNA, 19 nt, Artificial Sequence
  Description of Artificial Sequence: Synthetic oligonucleotide
caggguuuaugcagaggca

SEQ ID NO: 1187360 - RNA, 19 nt, Artificial Sequence
  Description of Artificial Sequence: Synthetic oligonucleotide
ggcuguacugcccaauaaa

SEQ ID NO: 1187361 - RNA, 19 nt, Artificial Sequence
  Description of Artificial Sequence: Synthetic oligonucleotide
cucaguggguggaaaccca

SEQ ID NO: 1187362 - RNA, 19 nt, Artificial Sequence
  Description of Artificial Sequence: Synthetic oligonucleotide
auggcguccuuguucucau

SEQ ID NO: 1187363 - RNA, 19 nt, Artificial Sequence
  Description of Artificial Sequence: Synthetic oligonucleotide
cugacugcacuccuggacu

SEQ ID NO: 1187364 - RNA, 19 nt, Artificial Sequence
  Description of Artificial Sequence: Synthetic oligonucleotide
uggccuugguaagauggaa

SEQ ID NO: 1187365 - RNA, 19 nt, Artificial Sequence
  Description of Artificial Sequence: Synthetic oligonucleotide
gcaaggauuagucgugaaa

SEQ ID NO: 1187366 - RNA, 19 nt, Artificial Sequence
  Description of Artificial Sequence: Synthetic oligonucleotide
ucacggugaaaggaucaua

SEQ ID NO: 1187367 - RNA, 19 nt, Artificial Sequence
  Description of Artificial Sequence: Synthetic oligonucleotide
acagaucguucgaucauau

SEQ ID NO: 1187368 - RNA, 19 nt, Artificial Sequence
  Description of Artificial Sequence: Synthetic oligonucleotide
aaccaaccuucagccagga

SEQ ID NO: 1187369 - RNA, 19 nt, Artificial Sequence
  Description of Artificial Sequence: Synthetic oligonucleotide
aagcacgccucaguguaua

SEQ ID NO: 1187370 - RNA, 19 nt, Artificial Sequence
  Description of Artificial Sequence: Synthetic oligonucleotide
cauggcguccuuguucuca

SEQ ID NO: 1187371 - RNA, 19 nt, Artificial Sequence
  Description of Artificial Sequence: Synthetic oligonucleotide
gacugacugcacuccugga

SEQ ID NO: 1187372 - RNA, 19 nt, Artificial Sequence
  Description of Artificial Sequence: Synthetic oligonucleotide
aacggcuacuuugguggau

SEQ ID NO: 1187373 - RNA, 19 nt, Artificial Sequence
  Description of Artificial Sequence: Synthetic oligonucleotide
auaguacgcccuuguggua

SEQ ID NO: 1187374 - RNA, 19 nt, Artificial Sequence
  Description of Artificial Sequence: Synthetic oligonucleotide
caccccugagcagcaagcc

SEQ ID NO: 1187375 - RNA, 19 nt, Artificial Sequence
  Description of Artificial Sequence: Synthetic oligonucleotide
uuagagcuucagugagaua

SEQ ID NO: 1187376 - RNA, 19 nt, Artificial Sequence
  Description of Artificial Sequence: Synthetic oligonucleotide
ccaacacuugcacuugguc

SEQ ID NO: 1187377 - RNA, 19 nt, Artificial Sequence
  Description of Artificial Sequence: Synthetic oligonucleotide
gacggggcacacauagaga

SEQ ID NO: 1187378 - RNA, 19 nt, Artificial Sequence
  Description of Artificial Sequence: Synthetic oligonucleotide
gaucaggcacaggguacac

SEQ ID NO: 1187379 - RNA, 19 nt, Artificial Sequence
  Description of Artificial Sequence: Synthetic oligonucleotide
acauggcguccuuguucuc

SEQ ID NO: 1187380 - RNA, 19 nt, Artificial Sequence
  Description of Artificial Sequence: Synthetic oligonucleotide
cuaggaaaacgcacacagu

SEQ ID NO: 1187381 - RNA, 19 nt, Artificial Sequence
  Description of Artificial Sequence: Synthetic oligonucleotide
auaagccgcuguggaacug

SEQ ID NO: 1187382 - RNA, 19 nt, Artificial Sequence
  Description of Artificial Sequence: Synthetic oligonucleotide
gguggaaacccaaaggcau

SEQ ID NO: 1187383 - RNA, 19 nt, Artificial Sequence
  Description of Artificial Sequence: Synthetic oligonucleotide
cccucuuucaacuggguua

SEQ ID NO: 1187384 - RNA, 19 nt, Artificial Sequence
  Description of Artificial Sequence: Synthetic oligonucleotide
cgccucaguguauaagccg

SEQ ID NO: 1187385 - RNA, 19 nt, Artificial Sequence
  Description of Artificial Sequence: Synthetic oligonucleotide
cuguggaacugagcuuuac

SEQ ID NO: 1187386 - RNA, 19 nt, Artificial Sequence
  Description of Artificial Sequence: Synthetic oligonucleotide
cgacugacugcacuccugg

SEQ ID NO: 1187387 - RNA, 19 nt, Artificial Sequence
  Description of Artificial Sequence: Synthetic oligonucleotide
ccaaagacuuuagggaguc

SEQ ID NO: 1187388 - RNA, 19 nt, Artificial Sequence
  Description of Artificial Sequence: Synthetic oligonucleotide
ggccuugguaagauggaac

SEQ ID NO: 1187389 - RNA, 19 nt, Artificial Sequence
  Description of Artificial Sequence: Synthetic oligonucleotide
acggcuacuuugguggaua

SEQ ID NO: 1187390 - RNA, 19 nt, Artificial Sequence
  Description of Artificial Sequence: Synthetic oligonucleotide
gcuacuuugguggauacuu

SEQ ID NO: 1187391 - RNA, 19 nt, Artificial Sequence
  Description of Artificial Sequence: Synthetic oligonucleotide
cagacguuagagcuucagu

SEQ ID NO: 1187392 - RNA, 19 nt, Artificial Sequence
  Description of Artificial Sequence: Synthetic oligonucleotide
uuccucggggugugagccu

SEQ ID NO: 1187393 - RNA, 19 nt, Artificial Sequence
  Description of Artificial Sequence: Synthetic oligonucleotide
guuugcuaucuuccacugu

SEQ ID NO: 1187394 - RNA, 19 nt, Artificial Sequence
  Description of Artificial Sequence: Synthetic oligonucleotide
agcacgccucaguguauaa

SEQ ID NO: 1187395 - RNA, 19 nt, Artificial Sequence
  Description of Artificial Sequence: Synthetic oligonucleotide
gucagaugucccugagaua

SEQ ID NO: 1187396 - RNA, 19 nt, Artificial Sequence
  Description of Artificial Sequence: Synthetic oligonucleotide
cacuugguccaaccacaca

SEQ ID NO: 1187397 - RNA, 19 nt, Artificial Sequence
  Description of Artificial Sequence: Synthetic oligonucleotide
ggucucuucaagcucuaau

SEQ ID NO: 1187398 - RNA, 19 nt, Artificial Sequence
  Description of Artificial Sequence: Synthetic oligonucleotide
cagcuguacuguuccagua

SEQ ID NO: 1187399 - RNA, 19 nt, Artificial Sequence
  Description of Artificial Sequence: Synthetic oligonucleotide
ccgcgcagcuugaaagccg

SEQ ID NO: 1187400 - RNA, 19 nt, Artificial Sequence
  Description of Artificial Sequence: Synthetic oligonucleotide
gcuugaaagccgagacagc

SEQ ID NO: 1187401 - RNA, 19 nt, Artificial Sequence
  Description of Artificial Sequence: Synthetic oligonucleotide
ggaugcauuagaaggcccu

SEQ ID NO: 1187402 - RNA, 19 nt, Artificial Sequence
  Description of Artificial Sequence: Synthetic oligonucleotide
gcacgccucaguguauaag

SEQ ID NO: 1187403 - RNA, 19 nt, Artificial Sequence
  Description of Artificial Sequence: Synthetic oligonucleotide
gcucuaauucagugacaga

SEQ ID NO: 1187404 - RNA, 19 nt, Artificial Sequence
  Description of Artificial Sequence: Synthetic oligonucleotide
gugagauacuuaguggcuu

SEQ ID NO: 1187405 - RNA, 19 nt, Artificial Sequence
  Description of Artificial Sequence: Synthetic oligonucleotide
caagccgcgcagcuugaaa

SEQ ID NO: 1187406 - RNA, 19 nt, Artificial Sequence
  Description of Artificial Sequence: Synthetic oligonucleotide
ggacaaagcacgccucagu

SEQ ID NO: 1187407 - RNA, 19 nt, Artificial Sequence
  Description of Artificial Sequence: Synthetic oligonucleotide
gcauuagaaggcccuccaa

SEQ ID NO: 1187408 - RNA, 19 nt, Artificial Sequence
  Description of Artificial Sequence: Synthetic oligonucleotide
cggaugcauuagaaggccc

SEQ ID NO: 1187409 - RNA, 19 nt, Artificial Sequence
  Description of Artificial Sequence: Synthetic oligonucleotide
ccauaacuuuauuacaauu

SEQ ID NO: 1187410 - RNA, 19 nt, Artificial Sequence
  Description of Artificial Sequence: Synthetic oligonucleotide
ccgacugacugcacuccug

SEQ ID NO: 1187411 - RNA, 19 nt, Artificial Sequence
  Description of Artificial Sequence: Synthetic oligonucleotide
gucuuacuggaaggguaaa

SEQ ID NO: 1187412 - RNA, 19 nt, Artificial Sequence
  Description of Artificial Sequence: Synthetic oligonucleotide
gccgcgcagcuugaaagcc

SEQ ID NO: 1187413 - RNA, 19 nt, Artificial Sequence
  Description of Artificial Sequence: Synthetic oligonucleotide
acgguacccucugucugaa

SEQ ID NO: 1187414 - RNA, 19 nt, Artificial Sequence
  Description of Artificial Sequence: Synthetic oligonucleotide
gcacuugguccaaccacac

SEQ ID NO: 1187415 - RNA, 19 nt, Artificial Sequence
  Description of Artificial Sequence: Synthetic oligonucleotide
agcaagcgguggccuuggu

SEQ ID NO: 1187416 - RNA, 19 nt, Artificial Sequence
  Description of Artificial Sequence: Synthetic oligonucleotide
ccauauggugcagaugaaa

SEQ ID NO: 1187417 - RNA, 19 nt, Artificial Sequence
  Description of Artificial Sequence: Synthetic oligonucleotide
caaacauggcguccuuguu

SEQ ID NO: 1187418 - RNA, 19 nt, Artificial Sequence
  Description of Artificial Sequence: Synthetic oligonucleotide
gucacggugaaaggaucau

SEQ ID NO: 1187419 - RNA, 19 nt, Artificial Sequence
  Description of Artificial Sequence: Synthetic oligonucleotide
guccaaccacacaucagau

SEQ ID NO: 1187420 - RNA, 19 nt, Artificial Sequence
  Description of Artificial Sequence: Synthetic oligonucleotide
gcaagcgguggccuuggua

SEQ ID NO: 1187421 - RNA, 19 nt, Artificial Sequence
  Description of Artificial Sequence: Synthetic oligonucleotide
cguuagagcuucagugaga

SEQ ID NO: 1187422 - RNA, 19 nt, Artificial Sequence
  Description of Artificial Sequence: Synthetic oligonucleotide
acgauacaguucagcuuua

SEQ ID NO: 1187423 - RNA, 19 nt, Artificial Sequence
  Description of Artificial Sequence: Synthetic oligonucleotide
cucggggugugagccuauc

SEQ ID NO: 1187424 - RNA, 19 nt, Artificial Sequence
  Description of Artificial Sequence: Synthetic oligonucleotide
gccaaagacuuuagggagu

SEQ ID NO: 1187425 - RNA, 19 nt, Artificial Sequence
  Description of Artificial Sequence: Synthetic oligonucleotide
ggguuuaugcagaggcacu

SEQ ID NO: 1187426 - RNA, 19 nt, Artificial Sequence
  Description of Artificial Sequence: Synthetic oligonucleotide
cgagacagcacggcuccgc

SEQ ID NO: 1187427 - RNA, 19 nt, Artificial Sequence
  Description of Artificial Sequence: Synthetic oligonucleotide
agcaagccgcgcagcuuga

SEQ ID NO: 1187428 - RNA, 19 nt, Artificial Sequence
  Description of Artificial Sequence: Synthetic oligonucleotide
gguuuaccauaacuuuauu

SEQ ID NO: 1187429 - RNA, 19 nt, Artificial Sequence
  Description of Artificial Sequence: Synthetic oligonucleotide
ccagcuguacuguuccagu

SEQ ID NO: 1187430 - RNA, 19 nt, Artificial Sequence
  Description of Artificial Sequence: Synthetic oligonucleotide
caccaacuuuggcuguacu

SEQ ID NO: 1187431 - RNA, 19 nt, Artificial Sequence
  Description of Artificial Sequence: Synthetic oligonucleotide
cagaucguucgaucauauu

SEQ ID NO: 1187432 - RNA, 19 nt, Artificial Sequence
  Description of Artificial Sequence: Synthetic oligonucleotide
cucagcaagcgguggccuu

SEQ ID NO: 1187433 - RNA, 19 nt, Artificial Sequence
  Description of Artificial Sequence: Synthetic oligonucleotide
cggcuacuuugguggauac

SEQ ID NO: 1187434 - RNA, 19 nt, Artificial Sequence
  Description of Artificial Sequence: Synthetic oligonucleotide
gcccugaaguuugcuaucu

SEQ ID NO: 1187435 - RNA, 19 nt, Artificial Sequence
  Description of Artificial Sequence: Synthetic oligonucleotide
gggcacacauagagaggca

SEQ ID NO: 1187436 - RNA, 19 nt, Artificial Sequence
  Description of Artificial Sequence: Synthetic oligonucleotide
cgcacacaguuucuacaca

SEQ ID NO: 1187437 - RNA, 19 nt, Artificial Sequence
  Description of Artificial Sequence: Synthetic oligonucleotide
ggcuacuuugguggauacu

SEQ ID NO: 1187438 - RNA, 19 nt, Artificial Sequence
  Description of Artificial Sequence: Synthetic oligonucleotide
gcgcagcuugaaagccgag

SEQ ID NO: 1187439 - RNA, 19 nt, Artificial Sequence
  Description of Artificial Sequence: Synthetic oligonucleotide
guacgcccuugugguacua

SEQ ID NO: 1187440 - RNA, 19 nt, Artificial Sequence
  Description of Artificial Sequence: Synthetic oligonucleotide
ccacuacagaucguucgau

SEQ ID NO: 1187441 - RNA, 19 nt, Artificial Sequence
  Description of Artificial Sequence: Synthetic oligonucleotide
cgauacaguucagcuuuau

SEQ ID NO: 1187442 - RNA, 19 nt, Artificial Sequence
  Description of Artificial Sequence: Synthetic oligonucleotide
ccucggggugugagccuau

SEQ ID NO: 1187443 - RNA, 19 nt, Artificial Sequence
  Description of Artificial Sequence: Synthetic oligonucleotide
aacacuaacaauuuuaugu

SEQ ID NO: 1187444 - RNA, 19 nt, Artificial Sequence
  Description of Artificial Sequence: Synthetic oligonucleotide
aauagcaucgaacagaagu

SEQ ID NO: 1187445 - RNA, 19 nt, Artificial Sequence
  Description of Artificial Sequence: Synthetic oligonucleotide
aauaauguaucggaguacc

SEQ ID NO: 1187446 - RNA, 19 nt, Artificial Sequence
  Description of Artificial Sequence: Synthetic oligonucleotide
uguaauuuaaauucugaag

SEQ ID NO: 1187447 - RNA, 19 nt, Artificial Sequence
  Description of Artificial Sequence: Synthetic oligonucleotide
aguacuauaauauuugcca

SEQ ID NO: 1187448 - RNA, 19 nt, Artificial Sequence
  Description of Artificial Sequence: Synthetic oligonucleotide
aauguaucggaguaccugg

SEQ ID NO: 1187449 - RNA, 19 nt, Artificial Sequence
  Description of Artificial Sequence: Synthetic oligonucleotide
gacaaguuguaguagacgg

SEQ ID NO: 1187450 - RNA, 19 nt, Artificial Sequence
  Description of Artificial Sequence: Synthetic oligonucleotide
uuaagaagaguacaagaag

SEQ ID NO: 1187451 - RNA, 19 nt, Artificial Sequence
  Description of Artificial Sequence: Synthetic oligonucleotide
ucuaguacuauaauauuug

SEQ ID NO: 1187452 - RNA, 19 nt, Artificial Sequence
  Description of Artificial Sequence: Synthetic oligonucleotide
ucugcuuauguccacaacc

SEQ ID NO: 1187453 - RNA, 19 nt, Artificial Sequence
  Description of Artificial Sequence: Synthetic oligonucleotide
uuuagguacaaccucuugc

SEQ ID NO: 1187454 - RNA, 19 nt, Artificial Sequence
  Description of Artificial Sequence: Synthetic oligonucleotide
ucauauuuggacauccaag

SEQ ID NO: 1187455 - RNA, 19 nt, Artificial Sequence
  Description of Artificial Sequence: Synthetic oligonucleotide
uuauucugcguuaagugag

SEQ ID NO: 1187456 - RNA, 19 nt, Artificial Sequence
  Description of Artificial Sequence: Synthetic oligonucleotide
cauauuuggacauccaagc

SEQ ID NO: 1187457 - RNA, 19 nt, Artificial Sequence
  Description of Artificial Sequence: Synthetic oligonucleotide
uuaugaacaucacacaggu

SEQ ID NO: 1187458 - RNA, 19 nt, Artificial Sequence
  Description of Artificial Sequence: Synthetic oligonucleotide
uuuuguauggccagaagcu

SEQ ID NO: 1187459 - RNA, 19 nt, Artificial Sequence
  Description of Artificial Sequence: Synthetic oligonucleotide
uaacuuagcccuuaaauac

SEQ ID NO: 1187460 - RNA, 19 nt, Artificial Sequence
  Description of Artificial Sequence: Synthetic oligonucleotide
auaacuucauauuuggaca

SEQ ID NO: 1187461 - RNA, 19 nt, Artificial Sequence
  Description of Artificial Sequence: Synthetic oligonucleotide
aagugcuugacacacucuc

SEQ ID NO: 1187462 - RNA, 19 nt, Artificial Sequence
  Description of Artificial Sequence: Synthetic oligonucleotide
aacaauuccucuuugguuu

SEQ ID NO: 1187463 - RNA, 19 nt, Artificial Sequence
  Description of Artificial Sequence: Synthetic oligonucleotide
gagauauuuauaugugggg

SEQ ID NO: 1187464 - RNA, 19 nt, Artificial Sequence
  Description of Artificial Sequence: Synthetic oligonucleotide
acaaccauccgauugucac

SEQ ID NO: 1187465 - RNA, 19 nt, Artificial Sequence
  Description of Artificial Sequence: Synthetic oligonucleotide
auuaauaacuugaggagac

SEQ ID NO: 1187466 - RNA, 19 nt, Artificial Sequence
  Description of Artificial Sequence: Synthetic oligonucleotide
cauuaugccguuuuaagug

SEQ ID NO: 1187467 - RNA, 19 nt, Artificial Sequence
  Description of Artificial Sequence: Synthetic oligonucleotide
auaauauuugccaauagca

SEQ ID NO: 1187468 - RNA, 19 nt, Artificial Sequence
  Description of Artificial Sequence: Synthetic oligonucleotide
agagccgacaaguucagcg

SEQ ID NO: 1187469 - RNA, 19 nt, Artificial Sequence
  Description of Artificial Sequence: Synthetic oligonucleotide
uuuauucugcguuaaguga

SEQ ID NO: 1187470 - RNA, 19 nt, Artificial Sequence
  Description of Artificial Sequence: Synthetic oligonucleotide
ugaagcagucauuaugccg

SEQ ID NO: 1187471 - RNA, 19 nt, Artificial Sequence
  Description of Artificial Sequence: Synthetic oligonucleotide
agagauauuuauauguggg

SEQ ID NO: 1187472 - RNA, 19 nt, Artificial Sequence
  Description of Artificial Sequence: Synthetic oligonucleotide
uaucggaguaccuggaagg

SEQ ID NO: 1187473 - RNA, 19 nt, Artificial Sequence
  Description of Artificial Sequence: Synthetic oligonucleotide
auaguuacugguguugacc

SEQ ID NO: 1187474 - RNA, 19 nt, Artificial Sequence
  Description of Artificial Sequence: Synthetic oligonucleotide
uuuauauguggggaguugg

SEQ ID NO: 1187475 - RNA, 19 nt, Artificial Sequence
  Description of Artificial Sequence: Synthetic oligonucleotide
auuaugccguuuuaagugg

SEQ ID NO: 1187476 - RNA, 19 nt, Artificial Sequence
  Description of Artificial Sequence: Synthetic oligonucleotide
uuuaacagaggcucucuag

SEQ ID NO: 1187477 - RNA, 19 nt, Artificial Sequence
  Description of Artificial Sequence: Synthetic oligonucleotide
acacuuauggaauuggccu

SEQ ID NO: 1187478 - RNA, 19 nt, Artificial Sequence
  Description of Artificial Sequence: Synthetic oligonucleotide
aagaguauuuauaaugcug

SEQ ID NO: 1187479 - RNA, 19 nt, Artificial Sequence
  Description of Artificial Sequence: Synthetic oligonucleotide
aaacgucuuuuggugaucc

SEQ ID NO: 1187480 - RNA, 19 nt, Artificial Sequence
  Description of Artificial Sequence: Synthetic oligonucleotide
ugagagucaccauaggccc

SEQ ID NO: 1187481 - RNA, 19 nt, Artificial Sequence
  Description of Artificial Sequence: Synthetic oligonucleotide
uuagguacaaccucuugcu

SEQ ID NO: 1187482 - RNA, 19 nt, Artificial Sequence
  Description of Artificial Sequence: Synthetic oligonucleotide
uggaaggucgacaaguugu

SEQ ID NO: 1187483 - RNA, 19 nt, Artificial Sequence
  Description of Artificial Sequence: Synthetic oligonucleotide
auuguugugaaucuauaaa

SEQ ID NO: 1187484 - RNA, 19 nt, Artificial Sequence
  Description of Artificial Sequence: Synthetic oligonucleotide
guuaagugagaguaaauga

SEQ ID NO: 1187485 - RNA, 19 nt, Artificial Sequence
  Description of Artificial Sequence: Synthetic oligonucleotide
aauaucgacaucaccgaag

SEQ ID NO: 1187486 - RNA, 19 nt, Artificial Sequence
  Description of Artificial Sequence: Synthetic oligonucleotide
uguucucauugccugauug

SEQ ID NO: 1187487 - RNA, 19 nt, Artificial Sequence
  Description of Artificial Sequence: Synthetic oligonucleotide
ucugcguuaagugagagua

SEQ ID NO: 1187488 - RNA, 19 nt, Artificial Sequence
  Description of Artificial Sequence: Synthetic oligonucleotide
guuucuuagaccgagggac

SEQ ID NO: 1187489 - RNA, 19 nt, Artificial Sequence
  Description of Artificial Sequence: Synthetic oligonucleotide
ucauuaugccguuuuaagu

SEQ ID NO: 1187490 - RNA, 19 nt, Artificial Sequence
  Description of Artificial Sequence: Synthetic oligonucleotide
auuuaaauucugaaggaug

SEQ ID NO: 1187491 - RNA, 19 nt, Artificial Sequence
  Description of Artificial Sequence: Synthetic oligonucleotide
ugagaauacccucuucaca

SEQ ID NO: 1187492 - RNA, 19 nt, Artificial Sequence
  Description of Artificial Sequence: Synthetic oligonucleotide
aacccggaggcuucugugc

SEQ ID NO: 1187493 - RNA, 19 nt, Artificial Sequence
  Description of Artificial Sequence: Synthetic oligonucleotide
acuaagucuguucugucug

SEQ ID NO: 1187494 - RNA, 19 nt, Artificial Sequence
  Description of Artificial Sequence: Synthetic oligonucleotide
gagaauacccucuucacaa

SEQ ID NO: 1187495 - RNA, 19 nt, Artificial Sequence
  Description of Artificial Sequence: Synthetic oligonucleotide
agguccuccaaacuguccg

SEQ ID NO: 1187496 - RNA, 19 nt, Artificial Sequence
  Description of Artificial Sequence: Synthetic oligonucleotide
uucacaaccauccgauugu

SEQ ID NO: 1187497 - RNA, 19 nt, Artificial Sequence
  Description of Artificial Sequence: Synthetic oligonucleotide
uuuggugauccauuaagaa

SEQ ID NO: 1187498 - RNA, 19 nt, Artificial Sequence
  Description of Artificial Sequence: Synthetic oligonucleotide
uucaucaauucucuggcaa

SEQ ID NO: 1187499 - RNA, 19 nt, Artificial Sequence
  Description of Artificial Sequence: Synthetic oligonucleotide
auuuacaaggaguucugcu

SEQ ID NO: 1187500 - RNA, 19 nt, Artificial Sequence
  Description of Artificial Sequence: Synthetic oligonucleotide
auuuauaaugcugcuccac

SEQ ID NO: 1187501 - RNA, 19 nt, Artificial Sequence
  Description of Artificial Sequence: Synthetic oligonucleotide
agaaauggaaggucgacaa

SEQ ID NO: 1187502 - RNA, 19 nt, Artificial Sequence
  Description of Artificial Sequence: Synthetic oligonucleotide
guaaggagucaagaaaugg

SEQ ID NO: 1187503 - RNA, 19 nt, Artificial Sequence
  Description of Artificial Sequence: Synthetic oligonucleotide
uauuuggacauccaagcuu

SEQ ID NO: 1187504 - RNA, 19 nt, Artificial Sequence
  Description of Artificial Sequence: Synthetic oligonucleotide
gugagaguaaaugacgucc

SEQ ID NO: 1187505 - RNA, 19 nt, Artificial Sequence
  Description of Artificial Sequence: Synthetic oligonucleotide
agauauuuauaugugggga

SEQ ID NO: 1187506 - RNA, 19 nt, Artificial Sequence
  Description of Artificial Sequence: Synthetic oligonucleotide
ugagaguaaaugacgucca

SEQ ID NO: 1187507 - RNA, 19 nt, Artificial Sequence
  Description of Artificial Sequence: Synthetic oligonucleotide
uaauguaucggaguaccug

SEQ ID NO: 1187508 - RNA, 19 nt, Artificial Sequence
  Description of Artificial Sequence: Synthetic oligonucleotide
auaucgacaucaccgaaga

SEQ ID NO: 1187509 - RNA, 19 nt, Artificial Sequence
  Description of Artificial Sequence: Synthetic oligonucleotide
guaaaugacguccacagcu

SEQ ID NO: 1187510 - RNA, 19 nt, Artificial Sequence
  Description of Artificial Sequence: Synthetic oligonucleotide
agugagaguaaaugacguc

SEQ ID NO: 1187511 - RNA, 19 nt, Artificial Sequence
  Description of Artificial Sequence: Synthetic oligonucleotide
ucaagaaauggaaggucga

SEQ ID NO: 1187512 - RNA, 19 nt, Artificial Sequence
  Description of Artificial Sequence: Synthetic oligonucleotide
uagaccgagggacuuuagg

SEQ ID NO: 1187513 - RNA, 19 nt, Artificial Sequence
  Description of Artificial Sequence: Synthetic oligonucleotide
caaguuguaguagacggcc

SEQ ID NO: 1187514 - RNA, 19 nt, Artificial Sequence
  Description of Artificial Sequence: Synthetic oligonucleotide
ucugguagagauauuuaua

SEQ ID NO: 1187515 - RNA, 19 nt, Artificial Sequence
  Description of Artificial Sequence: Synthetic oligonucleotide
ucgaacagaaguuccuuca

SEQ ID NO: 1187516 - RNA, 19 nt, Artificial Sequence
  Description of Artificial Sequence: Synthetic oligonucleotide
cuucacaaccauccgauug

SEQ ID NO: 1187517 - RNA, 19 nt, Artificial Sequence
  Description of Artificial Sequence: Synthetic oligonucleotide
gacacuuauggaauuggcc

SEQ ID NO: 1187518 - RNA, 19 nt, Artificial Sequence
  Description of Artificial Sequence: Synthetic oligonucleotide
aacuguccgacuugaucuc

SEQ ID NO: 1187519 - RNA, 19 nt, Artificial Sequence
  Description of Artificial Sequence: Synthetic oligonucleotide
auuuuauguagaguugcag

SEQ ID NO: 1187520 - RNA, 19 nt, Artificial Sequence
  Description of Artificial Sequence: Synthetic oligonucleotide
aagaaauggaaggucgaca

SEQ ID NO: 1187521 - RNA, 19 nt, Artificial Sequence
  Description of Artificial Sequence: Synthetic oligonucleotide
cauuagaaacucaguuucc

SEQ ID NO: 1187522 - RNA, 19 nt, Artificial Sequence
  Description of Artificial Sequence: Synthetic oligonucleotide
uaguagacggccaaucguc

SEQ ID NO: 1187523 - RNA, 19 nt, Artificial Sequence
  Description of Artificial Sequence: Synthetic oligonucleotide
ucgacaucaccgaagaauu

SEQ ID NO: 1187524 - RNA, 19 nt, Artificial Sequence
  Description of Artificial Sequence: Synthetic oligonucleotide
accauaggcccugagaauc

SEQ ID NO: 1187525 - RNA, 19 nt, Artificial Sequence
  Description of Artificial Sequence: Synthetic oligonucleotide
cacuaacaauuuuauguag

SEQ ID NO: 1187526 - RNA, 19 nt, Artificial Sequence
  Description of Artificial Sequence: Synthetic oligonucleotide
agcaucgaacagaaguucc

SEQ ID NO: 1187527 - RNA, 19 nt, Artificial Sequence
  Description of Artificial Sequence: Synthetic oligonucleotide
aagugagaguaaaugacgu

SEQ ID NO: 1187528 - RNA, 19 nt, Artificial Sequence
  Description of Artificial Sequence: Synthetic oligonucleotide
uucccauuuacaaggaguu

SEQ ID NO: 1187529 - RNA, 19 nt, Artificial Sequence
  Description of Artificial Sequence: Synthetic oligonucleotide
aauaacuugaggagacagu

SEQ ID NO: 1187530 - RNA, 19 nt, Artificial Sequence
  Description of Artificial Sequence: Synthetic oligonucleotide
uuuugggaauccagaagcu

SEQ ID NO: 1187531 - RNA, 19 nt, Artificial Sequence
  Description of Artificial Sequence: Synthetic oligonucleotide
caccgaagaauuuauucug

SEQ ID NO: 1187532 - RNA, 19 nt, Artificial Sequence
  Description of Artificial Sequence: Synthetic oligonucleotide
aauuuuauguagaguugca

SEQ ID NO: 1187533 - RNA, 19 nt, Artificial Sequence
  Description of Artificial Sequence: Synthetic oligonucleotide
agaauacccucuucacaac

SEQ ID NO: 1187534 - RNA, 19 nt, Artificial Sequence
  Description of Artificial Sequence: Synthetic oligonucleotide
cugcuauuccauuaugaac

SEQ ID NO: 1187535 - RNA, 19 nt, Artificial Sequence
  Description of Artificial Sequence: Synthetic oligonucleotide
aguaccuggaaggcgaguc

SEQ ID NO: 1187536 - RNA, 19 nt, Artificial Sequence
  Description of Artificial Sequence: Synthetic oligonucleotide
uauuuauaaugcugcucca

SEQ ID NO: 1187537 - RNA, 19 nt, Artificial Sequence
  Description of Artificial Sequence: Synthetic oligonucleotide
agguacaaccucuugcugu

SEQ ID NO: 1187538 - RNA, 19 nt, Artificial Sequence
  Description of Artificial Sequence: Synthetic oligonucleotide
agccgacaaguucagcgcc

SEQ ID NO: 1187539 - RNA, 19 nt, Artificial Sequence
  Description of Artificial Sequence: Synthetic oligonucleotide
gaagaauuuauucugcguu

SEQ ID NO: 1187540 - RNA, 19 nt, Artificial Sequence
  Description of Artificial Sequence: Synthetic oligonucleotide
acaaguuguaguagacggc

SEQ ID NO: 1187541 - RNA, 19 nt, Artificial Sequence
  Description of Artificial Sequence: Synthetic oligonucleotide
guaucggaguaccuggaag

SEQ ID NO: 1187542 - RNA, 19 nt, Artificial Sequence
  Description of Artificial Sequence: Synthetic oligonucleotide
gauccauuaagaagaguac

SEQ ID NO: 1187543 - RNA, 19 nt, Artificial Sequence
  Description of Artificial Sequence: Synthetic oligonucleotide
uaacuucauauuuggacau

SEQ ID NO: 1187544 - RNA, 19 nt, Artificial Sequence
  Description of Artificial Sequence: Synthetic oligonucleotide
ucugaccagguauuguugu

SEQ ID NO: 1187545 - RNA, 19 nt, Artificial Sequence
  Description of Artificial Sequence: Synthetic oligonucleotide
acuaacaauuuuauguaga

SEQ ID NO: 1187546 - RNA, 19 nt, Artificial Sequence
  Description of Artificial Sequence: Synthetic oligonucleotide
ucacacaggugguuuaaca

SEQ ID NO: 1187547 - RNA, 19 nt, Artificial Sequence
  Description of Artificial Sequence: Synthetic oligonucleotide
uuauggaauuggccuagca

SEQ ID NO: 1187548 - RNA, 19 nt, Artificial Sequence
  Description of Artificial Sequence: Synthetic oligonucleotide
uucuaaugcuauuucuguc

SEQ ID NO: 1187549 - RNA, 19 nt, Artificial Sequence
  Description of Artificial Sequence: Synthetic oligonucleotide
aucgacaucaccgaagaau

SEQ ID NO: 1187550 - RNA, 19 nt, Artificial Sequence
  Description of Artificial Sequence: Synthetic oligonucleotide
uauucugcguuaagugaga

SEQ ID NO: 1187551 - RNA, 19 nt, Artificial Sequence
  Description of Artificial Sequence: Synthetic oligonucleotide
uucucuauuuugggaaucc

SEQ ID NO: 1187552 - RNA, 19 nt, Artificial Sequence
  Description of Artificial Sequence: Synthetic oligonucleotide
aggcgagucuacuuuguuc

SEQ ID NO: 1187553 - RNA, 19 nt, Artificial Sequence
  Description of Artificial Sequence: Synthetic oligonucleotide
uuucuuagaccgagggacu

SEQ ID NO: 1187554 - RNA, 19 nt, Artificial Sequence
  Description of Artificial Sequence: Synthetic oligonucleotide
uguauggccagaagcuuaa

SEQ ID NO: 1187555 - RNA, 19 nt, Artificial Sequence
  Description of Artificial Sequence: Synthetic oligonucleotide
aaauauagccugugucuuu

SEQ ID NO: 1187556 - RNA, 19 nt, Artificial Sequence
  Description of Artificial Sequence: Synthetic oligonucleotide
agucuuuaguaaguucaac

SEQ ID NO: 1187557 - RNA, 19 nt, Artificial Sequence
  Description of Artificial Sequence: Synthetic oligonucleotide
ucgacaaguuguaguagac

SEQ ID NO: 1187558 - RNA, 19 nt, Artificial Sequence
  Description of Artificial Sequence: Synthetic oligonucleotide
aacuuagcccuuaaauaca

SEQ ID NO: 1187559 - RNA, 19 nt, Artificial Sequence
  Description of Artificial Sequence: Synthetic oligonucleotide
aauauagccugugucuuua

SEQ ID NO: 1187560 - RNA, 19 nt, Artificial Sequence
  Description of Artificial Sequence: Synthetic oligonucleotide
aauacccucuucacaacca

SEQ ID NO: 1187561 - RNA, 19 nt, Artificial Sequence
  Description of Artificial Sequence: Synthetic oligonucleotide
aauuggccuagcaauuucu

SEQ ID NO: 1187562 - RNA, 19 nt, Artificial Sequence
  Description of Artificial Sequence: Synthetic oligonucleotide
uuuaaguggugucuccguu

SEQ ID NO: 1187563 - RNA, 19 nt, Artificial Sequence
  Description of Artificial Sequence: Synthetic oligonucleotide
cagaauagucacuuucauc

SEQ ID NO: 1187564 - RNA, 19 nt, Artificial Sequence
  Description of Artificial Sequence: Synthetic oligonucleotide
uaaaugacguccacagcuu

SEQ ID NO: 1187565 - RNA, 19 nt, Artificial Sequence
  Description of Artificial Sequence: Synthetic oligonucleotide
aguccauaagugcuugaca

SEQ ID NO: 1187566 - RNA, 19 nt, Artificial Sequence
  Description of Artificial Sequence: Synthetic oligonucleotide
uaugccguuuuaaguggug

SEQ ID NO: 1187567 - RNA, 19 nt, Artificial Sequence
  Description of Artificial Sequence: Synthetic oligonucleotide
acaaggaguucugcuauuc

SEQ ID NO: 1187568 - RNA, 19 nt, Artificial Sequence
  Description of Artificial Sequence: Synthetic oligonucleotide
gagccgacaaguucagcgc

SEQ ID NO: 1187569 - RNA, 19 nt, Artificial Sequence
  Description of Artificial Sequence: Synthetic oligonucleotide
uuguauggccagaagcuua

SEQ ID NO: 1187570 - RNA, 19 nt, Artificial Sequence
  Description of Artificial Sequence: Synthetic oligonucleotide
ucuuuuggugauccauuaa

SEQ ID NO: 1187571 - RNA, 19 nt, Artificial Sequence
  Description of Artificial Sequence: Synthetic oligonucleotide
auuuauauguggggaguug

SEQ ID NO: 1187572 - RNA, 19 nt, Artificial Sequence
  Description of Artificial Sequence: Synthetic oligonucleotide
uagacggccaaucgucucu

SEQ ID NO: 1187573 - RNA, 19 nt, Artificial Sequence
  Description of Artificial Sequence: Synthetic oligonucleotide
cauaacuuagcccuuaaau

SEQ ID NO: 1187574 - RNA, 19 nt, Artificial Sequence
  Description of Artificial Sequence: Synthetic oligonucleotide
gaaggaugugcagcaacag

SEQ ID NO: 1187575 - RNA, 19 nt, Artificial Sequence
  Description of Artificial Sequence: Synthetic oligonucleotide
cuauuuugggaauccagaa

SEQ ID NO: 1187576 - RNA, 19 nt, Artificial Sequence
  Description of Artificial Sequence: Synthetic oligonucleotide
uguccgacuugaucucagg

SEQ ID NO: 1187577 - RNA, 19 nt, Artificial Sequence
  Description of Artificial Sequence: Synthetic oligonucleotide
ugaaucuauaaaggcugca

SEQ ID NO: 1187578 - RNA, 19 nt, Artificial Sequence
  Description of Artificial Sequence: Synthetic oligonucleotide
cgaaccguggccauaaccg

SEQ ID NO: 1187579 - RNA, 19 nt, Artificial Sequence
  Description of Artificial Sequence: Synthetic oligonucleotide
uguaucggaguaccuggaa

SEQ ID NO: 1187580 - RNA, 19 nt, Artificial Sequence
  Description of Artificial Sequence: Synthetic oligonucleotide
gauugacuguucugaccag

SEQ ID NO: 1187581 - RNA, 19 nt, Artificial Sequence
  Description of Artificial Sequence: Synthetic oligonucleotide
uuaaguggugucuccguuu

SEQ ID NO: 1187582 - RNA, 19 nt, Artificial Sequence
  Description of Artificial Sequence: Synthetic oligonucleotide
gucgacaaguuguaguaga

SEQ ID NO: 1187583 - RNA, 19 nt, Artificial Sequence
  Description of Artificial Sequence: Synthetic oligonucleotide
uauuaggaucucuuccuuu

SEQ ID NO: 1187584 - RNA, 19 nt, Artificial Sequence
  Description of Artificial Sequence: Synthetic oligonucleotide
aggaaucuugaaaacgucu

SEQ ID NO: 1187585 - RNA, 19 nt, Artificial Sequence
  Description of Artificial Sequence: Synthetic oligonucleotide
uaguccauaagugcuugac

SEQ ID NO: 1187586 - RNA, 19 nt, Artificial Sequence
  Description of Artificial Sequence: Synthetic oligonucleotide
aaugacguccacagcuucu

SEQ ID NO: 1187587 - RNA, 19 nt, Artificial Sequence
  Description of Artificial Sequence: Synthetic oligonucleotide
cuuuagguacaaccucuug

SEQ ID NO: 1187588 - RNA, 19 nt, Artificial Sequence
  Description of Artificial Sequence: Synthetic oligonucleotide
uacauaacuuagcccuuaa

SEQ ID NO: 1187589 - RNA, 19 nt, Artificial Sequence
  Description of Artificial Sequence: Synthetic oligonucleotide
cucucacuacuuuggcccg

SEQ ID NO: 1187590 - RNA, 19 nt, Artificial Sequence
  Description of Artificial Sequence: Synthetic oligonucleotide
uuguaguccauaagugcuu

SEQ ID NO: 1187591 - RNA, 19 nt, Artificial Sequence
  Description of Artificial Sequence: Synthetic oligonucleotide
aggaaaauuucugcuuaug

SEQ ID NO: 1187592 - RNA, 19 nt, Artificial Sequence
  Description of Artificial Sequence: Synthetic oligonucleotide
cugguagagauauuuauau

SEQ ID NO: 1187593 - RNA, 19 nt, Artificial Sequence
  Description of Artificial Sequence: Synthetic oligonucleotide
uauuuauauguggggaguu

SEQ ID NO: 1187594 - RNA, 19 nt, Artificial Sequence
  Description of Artificial Sequence: Synthetic oligonucleotide
auagcaucgaacagaaguu

SEQ ID NO: 1187595 - RNA, 19 nt, Artificial Sequence
  Description of Artificial Sequence: Synthetic oligonucleotide
cauuuacaaggaguucugc

SEQ ID NO: 1187596 - RNA, 19 nt, Artificial Sequence
  Description of Artificial Sequence: Synthetic oligonucleotide
aaccauccgauugucacuu

SEQ ID NO: 1187597 - RNA, 19 nt, Artificial Sequence
  Description of Artificial Sequence: Synthetic oligonucleotide
uuagaccgagggacuuuag

SEQ ID NO: 1187598 - RNA, 19 nt, Artificial Sequence
  Description of Artificial Sequence: Synthetic oligonucleotide
gaguaaggagucaagaaau

SEQ ID NO: 1187599 - RNA, 19 nt, Artificial Sequence
  Description of Artificial Sequence: Synthetic oligonucleotide
ucuugccauacuucauuaa

SEQ ID NO: 1187600 - RNA, 19 nt, Artificial Sequence
  Description of Artificial Sequence: Synthetic oligonucleotide
gaauaucgacaucaccgaa

SEQ ID NO: 1187601 - RNA, 19 nt, Artificial Sequence
  Description of Artificial Sequence: Synthetic oligonucleotide
cuucuaaugcuauuucugu

SEQ ID NO: 1187602 - RNA, 19 nt, Artificial Sequence
  Description of Artificial Sequence: Synthetic oligonucleotide
uuuguauggccagaagcuu

SEQ ID NO: 1187603 - RNA, 19 nt, Artificial Sequence
  Description of Artificial Sequence: Synthetic oligonucleotide
ucucuauuuugggaaucca

SEQ ID NO: 1187604 - RNA, 19 nt, Artificial Sequence
  Description of Artificial Sequence: Synthetic oligonucleotide
uguucugaccagguauugu

SEQ ID NO: 1187605 - RNA, 19 nt, Artificial Sequence
  Description of Artificial Sequence: Synthetic oligonucleotide
uuguaguagacggccaauc

SEQ ID NO: 1187606 - RNA, 19 nt, Artificial Sequence
  Description of Artificial Sequence: Synthetic oligonucleotide
gacaucaccgaagaauuua

SEQ ID NO: 1187607 - RNA, 19 nt, Artificial Sequence
  Description of Artificial Sequence: Synthetic oligonucleotide
aagauacuccaagcaguca

SEQ ID NO: 1187608 - RNA, 19 nt, Artificial Sequence
  Description of Artificial Sequence: Synthetic oligonucleotide
gaaggucgacaaguuguag

SEQ ID NO: 1187609 - RNA, 19 nt, Artificial Sequence
  Description of Artificial Sequence: Synthetic oligonucleotide
ugacacacucucacuacuu

SEQ ID NO: 1187610 - RNA, 19 nt, Artificial Sequence
  Description of Artificial Sequence: Synthetic oligonucleotide
aacgucuuuuggugaucca

SEQ ID NO: 1187611 - RNA, 19 nt, Artificial Sequence
  Description of Artificial Sequence: Synthetic oligonucleotide
ugcuugacacacucucacu

SEQ ID NO: 1187612 - RNA, 19 nt, Artificial Sequence
  Description of Artificial Sequence: Synthetic oligonucleotide
gugaaucuauaaaggcugc

SEQ ID NO: 1187613 - RNA, 19 nt, Artificial Sequence
  Description of Artificial Sequence: Synthetic oligonucleotide
ugccguuuuaagugguguc

SEQ ID NO: 1187614 - RNA, 19 nt, Artificial Sequence
  Description of Artificial Sequence: Synthetic oligonucleotide
gucaccauaggcccugaga

SEQ ID NO: 1187615 - RNA, 19 nt, Artificial Sequence
  Description of Artificial Sequence: Synthetic oligonucleotide
gcuuauguccacaaccaug

SEQ ID NO: 1187616 - RNA, 19 nt, Artificial Sequence
  Description of Artificial Sequence: Synthetic oligonucleotide
ugagaaucccucgguccag

SEQ ID NO: 1187617 - RNA, 19 nt, Artificial Sequence
  Description of Artificial Sequence: Synthetic oligonucleotide
uggcccgaggaauaucgac

SEQ ID NO: 1187618 - RNA, 19 nt, Artificial Sequence
  Description of Artificial Sequence: Synthetic oligonucleotide
caugaaguaaagcagucuu

SEQ ID NO: 1187619 - RNA, 19 nt, Artificial Sequence
  Description of Artificial Sequence: Synthetic oligonucleotide
uucucccgaaccguggcca

SEQ ID NO: 1187620 - RNA, 19 nt, Artificial Sequence
  Description of Artificial Sequence: Synthetic oligonucleotide
ugaucucaggugacugaaa

SEQ ID NO: 1187621 - RNA, 19 nt, Artificial Sequence
  Description of Artificial Sequence: Synthetic oligonucleotide
ucacuacuuuggcccgagg

SEQ ID NO: 1187622 - RNA, 19 nt, Artificial Sequence
  Description of Artificial Sequence: Synthetic oligonucleotide
agaguacaagaagaucagu

SEQ ID NO: 1187623 - RNA, 19 nt, Artificial Sequence
  Description of Artificial Sequence: Synthetic oligonucleotide
cccuuaaauacacagugca

SEQ ID NO: 1187624 - RNA, 19 nt, Artificial Sequence
  Description of Artificial Sequence: Synthetic oligonucleotide
ggacuuuagguacaaccuc

SEQ ID NO: 1187625 - RNA, 19 nt, Artificial Sequence
  Description of Artificial Sequence: Synthetic oligonucleotide
ugguuuaacagaggcucuc

SEQ ID NO: 1187626 - RNA, 19 nt, Artificial Sequence
  Description of Artificial Sequence: Synthetic oligonucleotide
cguuaagugagaguaaaug

SEQ ID NO: 1187627 - RNA, 19 nt, Artificial Sequence
  Description of Artificial Sequence: Synthetic oligonucleotide
acggccaaucgucucuucu

SEQ ID NO: 1187628 - RNA, 19 nt, Artificial Sequence
  Description of Artificial Sequence: Synthetic oligonucleotide
aaguuguaguagacggcca

SEQ ID NO: 1187629 - RNA, 19 nt, Artificial Sequence
  Description of Artificial Sequence: Synthetic oligonucleotide
cucuggcaauaaauauagc

SEQ ID NO: 1187630 - RNA, 19 nt, Artificial Sequence
  Description of Artificial Sequence: Synthetic oligonucleotide
aaguucagcgccgccgccu

SEQ ID NO: 1187631 - RNA, 19 nt, Artificial Sequence
  Description of Artificial Sequence: Synthetic oligonucleotide
ccauaagugcuugacacac

SEQ ID NO: 1187632 - RNA, 19 nt, Artificial Sequence
  Description of Artificial Sequence: Synthetic oligonucleotide
auacccucuucacaaccau

SEQ ID NO: 1187633 - RNA, 19 nt, Artificial Sequence
  Description of Artificial Sequence: Synthetic oligonucleotide
ccaaucgucucuucuugcc

SEQ ID NO: 1187634 - RNA, 19 nt, Artificial Sequence
  Description of Artificial Sequence: Synthetic oligonucleotide
gaccagguauuguugugaa

SEQ ID NO: 1187635 - RNA, 19 nt, Artificial Sequence
  Description of Artificial Sequence: Synthetic oligonucleotide
ugacuguucugaccaggua

SEQ ID NO: 1187636 - RNA, 19 nt, Artificial Sequence
  Description of Artificial Sequence: Synthetic oligonucleotide
auaauguaucggaguaccu

SEQ ID NO: 1187637 - RNA, 19 nt, Artificial Sequence
  Description of Artificial Sequence: Synthetic oligonucleotide
aucaauucucuggcaauaa

SEQ ID NO: 1187638 - RNA, 19 nt, Artificial Sequence
  Description of Artificial Sequence: Synthetic oligonucleotide
cuugccauacuucauuaau

SEQ ID NO: 1187639 - RNA, 19 nt, Artificial Sequence
  Description of Artificial Sequence: Synthetic oligonucleotide
caaucgucucuucuugcca

SEQ ID NO: 1187640 - RNA, 19 nt, Artificial Sequence
  Description of Artificial Sequence: Synthetic oligonucleotide
ggcgagucuacuuuguucu

SEQ ID NO: 1187641 - RNA, 19 nt, Artificial Sequence
  Description of Artificial Sequence: Synthetic oligonucleotide
uaucgacaucaccgaagaa

SEQ ID NO: 1187642 - RNA, 19 nt, Artificial Sequence
  Description of Artificial Sequence: Synthetic oligonucleotide
acgucuuuuggugauccau

SEQ ID NO: 1187643 - RNA, 19 nt, Artificial Sequence
  Description of Artificial Sequence: Synthetic oligonucleotide
agugcuugacacacucuca

SEQ ID NO: 1187644 - RNA, 19 nt, Artificial Sequence
  Description of Artificial Sequence: Synthetic oligonucleotide
cuuauggaauuggccuagc

SEQ ID NO: 1187645 - RNA, 19 nt, Artificial Sequence
  Description of Artificial Sequence: Synthetic oligonucleotide
accguggccauaaccgcgg

SEQ ID NO: 1187646 - RNA, 19 nt, Artificial Sequence
  Description of Artificial Sequence: Synthetic oligonucleotide
ucugugcggggcugugcag

SEQ ID NO: 1187647 - RNA, 19 nt, Artificial Sequence
  Description of Artificial Sequence: Synthetic oligonucleotide
augccguuuuaaguggugu

SEQ ID NO: 1187648 - RNA, 19 nt, Artificial Sequence
  Description of Artificial Sequence: Synthetic oligonucleotide
ggcccugagaaucccucgg

SEQ ID NO: 1187649 - RNA, 19 nt, Artificial Sequence
  Description of Artificial Sequence: Synthetic oligonucleotide
aguagacggccaaucgucu

SEQ ID NO: 1187650 - RNA, 19 nt, Artificial Sequence
  Description of Artificial Sequence: Synthetic oligonucleotide
ggccaaucgucucuucuug

SEQ ID NO: 1187651 - RNA, 19 nt, Artificial Sequence
  Description of Artificial Sequence: Synthetic oligonucleotide
cauaggcccugagaauccc

SEQ ID NO: 1187652 - RNA, 19 nt, Artificial Sequence
  Description of Artificial Sequence: Synthetic oligonucleotide
guagacggccaaucgucuc

SEQ ID NO: 1187653 - RNA, 19 nt, Artificial Sequence
  Description of Artificial Sequence: Synthetic oligonucleotide
guuuaacagaggcucucua

SEQ ID NO: 1187654 - RNA, 19 nt, Artificial Sequence
  Description of Artificial Sequence: Synthetic oligonucleotide
cacuuauggaauuggccua

SEQ ID NO: 1187655 - RNA, 19 nt, Artificial Sequence
  Description of Artificial Sequence: Synthetic oligonucleotide
uacaaggaguucugcuauu

SEQ ID NO: 1187656 - RNA, 19 nt, Artificial Sequence
  Description of Artificial Sequence: Synthetic oligonucleotide
guucugaccagguauuguu

SEQ ID NO: 1187657 - RNA, 19 nt, Artificial Sequence
  Description of Artificial Sequence: Synthetic oligonucleotide
guagcuucuaaugcuauuu

SEQ ID NO: 1187658 - RNA, 19 nt, Artificial Sequence
  Description of Artificial Sequence: Synthetic oligonucleotide
ucccauuuacaaggaguuc

SEQ ID NO: 1187659 - RNA, 19 nt, Artificial Sequence
  Description of Artificial Sequence: Synthetic oligonucleotide
agucaccauaggcccugag

SEQ ID NO: 1187660 - RNA, 19 nt, Artificial Sequence
  Description of Artificial Sequence: Synthetic oligonucleotide
ggaagauacuccaagcagu

SEQ ID NO: 1187661 - RNA, 19 nt, Artificial Sequence
  Description of Artificial Sequence: Synthetic oligonucleotide
ggccccaaauggcuuuugg

SEQ ID NO: 1187662 - RNA, 19 nt, Artificial Sequence
  Description of Artificial Sequence: Synthetic oligonucleotide
ccgacuugaucucagguga

SEQ ID NO: 1187663 - RNA, 19 nt, Artificial Sequence
  Description of Artificial Sequence: Synthetic oligonucleotide
cucacuacuuuggcccgag

SEQ ID NO: 1187664 - RNA, 19 nt, Artificial Sequence
  Description of Artificial Sequence: Synthetic oligonucleotide
ccgaggaauaucgacauca

SEQ ID NO: 1187665 - RNA, 19 nt, Artificial Sequence
  Description of Artificial Sequence: Synthetic oligonucleotide
ucccgaaccguggccauaa

SEQ ID NO: 1187666 - RNA, 19 nt, Artificial Sequence
  Description of Artificial Sequence: Synthetic oligonucleotide
ucuuagaccgagggacuuu

SEQ ID NO: 1187667 - RNA, 19 nt, Artificial Sequence
  Description of Artificial Sequence: Synthetic oligonucleotide
ggucgacaaguuguaguag

SEQ ID NO: 1187668 - RNA, 19 nt, Artificial Sequence
  Description of Artificial Sequence: Synthetic oligonucleotide
guaguccauaagugcuuga

SEQ ID NO: 1187669 - RNA, 19 nt, Artificial Sequence
  Description of Artificial Sequence: Synthetic oligonucleotide
caaguucagcgccgccgcc

SEQ ID NO: 1187670 - RNA, 19 nt, Artificial Sequence
  Description of Artificial Sequence: Synthetic oligonucleotide
gccaaucgucucuucuugc

SEQ ID NO: 1187671 - RNA, 19 nt, Artificial Sequence
  Description of Artificial Sequence: Synthetic oligonucleotide
cacaaccauccgauuguca

SEQ ID NO: 1187672 - RNA, 19 nt, Artificial Sequence
  Description of Artificial Sequence: Synthetic oligonucleotide
auguaucggaguaccugga

SEQ ID NO: 1187673 - RNA, 19 nt, Artificial Sequence
  Description of Artificial Sequence: Synthetic oligonucleotide
gacacacucucacuacuuu

SEQ ID NO: 1187674 - RNA, 19 nt, Artificial Sequence
  Description of Artificial Sequence: Synthetic oligonucleotide
agguauuguugugaaucua

SEQ ID NO: 1187675 - RNA, 19 nt, Artificial Sequence
  Description of Artificial Sequence: Synthetic oligonucleotide
ccgaaccguggccauaacc

SEQ ID NO: 1187676 - RNA, 19 nt, Artificial Sequence
  Description of Artificial Sequence: Synthetic oligonucleotide
acuuuggcccgaggaauau

SEQ ID NO: 1187677 - RNA, 19 nt, Artificial Sequence
  Description of Artificial Sequence: Synthetic oligonucleotide
cgacaaguuguaguagacg

SEQ ID NO: 1187678 - RNA, 19 nt, Artificial Sequence
  Description of Artificial Sequence: Synthetic oligonucleotide
gaguugcaggaaucuugaa

SEQ ID NO: 1187679 - RNA, 19 nt, Artificial Sequence
  Description of Artificial Sequence: Synthetic oligonucleotide
cuuuggcccgaggaauauc

SEQ ID NO: 1187680 - RNA, 19 nt, Artificial Sequence
  Description of Artificial Sequence: Synthetic oligonucleotide
ccuucacuaagucuguucu

SEQ ID NO: 1187681 - RNA, 19 nt, Artificial Sequence
  Description of Artificial Sequence: Synthetic oligonucleotide
cuacauaacuuagcccuua

SEQ ID NO: 1187682 - RNA, 19 nt, Artificial Sequence
  Description of Artificial Sequence: Synthetic oligonucleotide
ggcccgaggaauaucgaca

SEQ ID NO: 1187683 - RNA, 19 nt, Artificial Sequence
  Description of Artificial Sequence: Synthetic oligonucleotide
gccgacaaguucagcgccg

SEQ ID NO: 1187684 - RNA, 19 nt, Artificial Sequence
  Description of Artificial Sequence: Synthetic oligonucleotide
cauaagugcuugacacacu

SEQ ID NO: 1187685 - RNA, 19 nt, Artificial Sequence
  Description of Artificial Sequence: Synthetic oligonucleotide
ggaaucuugaaaacgucuu

SEQ ID NO: 1187686 - RNA, 19 nt, Artificial Sequence
  Description of Artificial Sequence: Synthetic oligonucleotide
gccaugaaguaaagcaguc

SEQ ID NO: 1187687 - RNA, 19 nt, Artificial Sequence
  Description of Artificial Sequence: Synthetic oligonucleotide
cugcguuaagugagaguaa

SEQ ID NO: 1187688 - RNA, 19 nt, Artificial Sequence
  Description of Artificial Sequence: Synthetic oligonucleotide
ccauccgauugucacuuuc

SEQ ID NO: 1187689 - RNA, 19 nt, Artificial Sequence
  Description of Artificial Sequence: Synthetic oligonucleotide
guaccuggaaggcgagucu

SEQ ID NO: 1187690 - RNA, 19 nt, Artificial Sequence
  Description of Artificial Sequence: Synthetic oligonucleotide
cccauuuacaaggaguucu

SEQ ID NO: 1187691 - RNA, 19 nt, Artificial Sequence
  Description of Artificial Sequence: Synthetic oligonucleotide
cagucugguagagauauuu

SEQ ID NO: 1187692 - RNA, 19 nt, Artificial Sequence
  Description of Artificial Sequence: Synthetic oligonucleotide
gguacaaccucuugcuguu

SEQ ID NO: 1187693 - RNA, 19 nt, Artificial Sequence
  Description of Artificial Sequence: Synthetic oligonucleotide
gccauaaccgcggagggcu

SEQ ID NO: 1187694 - RNA, 19 nt, Artificial Sequence
  Description of Artificial Sequence: Synthetic oligonucleotide
gacggccaaucgucucuuc

SEQ ID NO: 1187695 - RNA, 19 nt, Artificial Sequence
  Description of Artificial Sequence: Synthetic oligonucleotide
cagagccgacaaguucagc

SEQ ID NO: 1187696 - RNA, 19 nt, Artificial Sequence
  Description of Artificial Sequence: Synthetic oligonucleotide
guauggccagaagcuuaac

SEQ ID NO: 1187697 - RNA, 19 nt, Artificial Sequence
  Description of Artificial Sequence: Synthetic oligonucleotide
ggaaggucgacaaguugua

SEQ ID NO: 1187698 - RNA, 19 nt, Artificial Sequence
  Description of Artificial Sequence: Synthetic oligonucleotide
cuguucugucugguugcuc

SEQ ID NO: 1187699 - RNA, 19 nt, Artificial Sequence
  Description of Artificial Sequence: Synthetic oligonucleotide
guuguaguagacggccaau

SEQ ID NO: 1187700 - RNA, 19 nt, Artificial Sequence
  Description of Artificial Sequence: Synthetic oligonucleotide
gguuuaacagaggcucucu

SEQ ID NO: 1187701 - RNA, 19 nt, Artificial Sequence
  Description of Artificial Sequence: Synthetic oligonucleotide
gccguuuuaaguggugucu

SEQ ID NO: 1187702 - RNA, 19 nt, Artificial Sequence
  Description of Artificial Sequence: Synthetic oligonucleotide
guagaguugcaggaaucuu

SEQ ID NO: 1187703 - RNA, 19 nt, Artificial Sequence
  Description of Artificial Sequence: Synthetic oligonucleotide
agacggccaaucgucucuu

SEQ ID NO: 1187704 - RNA, 19 nt, Artificial Sequence
  Description of Artificial Sequence: Synthetic oligonucleotide
cuggaaggcgagucuacuu

SEQ ID NO: 1187705 - RNA, 19 nt, Artificial Sequence
  Description of Artificial Sequence: Synthetic oligonucleotide
accauccgauugucacuuu

SEQ ID NO: 1187706 - RNA, 19 nt, Artificial Sequence
  Description of Artificial Sequence: Synthetic oligonucleotide
ccgacaaguucagcgccgc

SEQ ID NO: 1187707 - RNA, 19 nt, Artificial Sequence
  Description of Artificial Sequence: Synthetic oligonucleotide
gcaucgaacagaaguuccu

SEQ ID NO: 1187708 - RNA, 19 nt, Artificial Sequence
  Description of Artificial Sequence: Synthetic oligonucleotide
caucgaacagaaguuccuu

SEQ ID NO: 1187709 - RNA, 19 nt, Artificial Sequence
  Description of Artificial Sequence: Synthetic oligonucleotide
cgacuugaucucaggugac

SEQ ID NO: 1187710 - RNA, 19 nt, Artificial Sequence
  Description of Artificial Sequence: Synthetic oligonucleotide
ggcucucuaguacuauaau

SEQ ID NO: 1187711 - RNA, 19 nt, Artificial Sequence
  Description of Artificial Sequence: Synthetic oligonucleotide
caccauaggcccugagaau

SEQ ID NO: 1187712 - RNA, 19 nt, Artificial Sequence
  Description of Artificial Sequence: Synthetic oligonucleotide
gcccgaggaauaucgacau

SEQ ID NO: 1187713 - RNA, 19 nt, Artificial Sequence
  Description of Artificial Sequence: Synthetic oligonucleotide
cacacauauguggccccaa

SEQ ID NO: 1187714 - RNA, 19 nt, Artificial Sequence
  Description of Artificial Sequence: Synthetic oligonucleotide
ccagaauagucacuuucau

SEQ ID NO: 1187715 - RNA, 19 nt, Artificial Sequence
  Description of Artificial Sequence: Synthetic oligonucleotide
cugcaacugcugucuucaa

SEQ ID NO: 1187716 - RNA, 19 nt, Artificial Sequence
  Description of Artificial Sequence: Synthetic oligonucleotide
ccgagggacuuuagguaca

SEQ ID NO: 1187717 - RNA, 19 nt, Artificial Sequence
  Description of Artificial Sequence: Synthetic oligonucleotide
guucagcgccgccgccuuc

SEQ ID NO: 1187718 - RNA, 19 nt, Artificial Sequence
  Description of Artificial Sequence: Synthetic oligonucleotide
ccugugucuuuauuaggau

SEQ ID NO: 1187719 - RNA, 19 nt, Artificial Sequence
  Description of Artificial Sequence: Synthetic oligonucleotide
ccaugaaguaaagcagucu

SEQ ID NO: 1187720 - RNA, 19 nt, Artificial Sequence
  Description of Artificial Sequence: Synthetic oligonucleotide
gcagagaguuuugagucuu

SEQ ID NO: 1187721 - RNA, 19 nt, Artificial Sequence
  Description of Artificial Sequence: Synthetic oligonucleotide
aucccucgguccagauagu

SEQ ID NO: 1187722 - RNA, 19 nt, Artificial Sequence
  Description of Artificial Sequence: Synthetic oligonucleotide
cguggccauaaccgcggag

SEQ ID NO: 1187723 - RNA, 19 nt, Artificial Sequence
  Description of Artificial Sequence: Synthetic oligonucleotide
cccgaggaauaucgacauc

SEQ ID NO: 1187724 - RNA, 19 nt, Artificial Sequence
  Description of Artificial Sequence: Synthetic oligonucleotide
cgacaaguucagcgccgcc

SEQ ID NO: 1187725 - RNA, 19 nt, Artificial Sequence
  Description of Artificial Sequence: Synthetic oligonucleotide
ccacacauauguggcccca

SEQ ID NO: 1187726 - RNA, 19 nt, Artificial Sequence
  Description of Artificial Sequence: Synthetic oligonucleotide
ccuggaaggcgagucuacu

SEQ ID NO: 1187727 - RNA, 19 nt, Artificial Sequence
  Description of Artificial Sequence: Synthetic oligonucleotide
cccgaaccguggccauaac

SEQ ID NO: 1187728 - RNA, 19 nt, Artificial Sequence
  Description of Artificial Sequence: Synthetic oligonucleotide
cggccaaucgucucuucuu

SEQ ID NO: 1187729 - RNA, 19 nt, Artificial Sequence
  Description of Artificial Sequence: Synthetic oligonucleotide
ccguggccauaaccgcgga

SEQ ID NO: 1187730 - RNA, 19 nt, Artificial Sequence
  Description of Artificial Sequence: Synthetic oligonucleotide
cgacaucaccgaagaauuu

SEQ ID NO: 1187731 - RNA, 19 nt, Artificial Sequence
  Description of Artificial Sequence: Synthetic oligonucleotide
ccgccuucucccgaaccgu

SEQ ID NO: 1187732 - RNA, 19 nt, Artificial Sequence
  Description of Artificial Sequence: Synthetic oligonucleotide
aauacuuacuguugaauuc

SEQ ID NO: 1187733 - RNA, 19 nt, Artificial Sequence
  Description of Artificial Sequence: Synthetic oligonucleotide
aaggugacugauuaauucc

SEQ ID NO: 1187734 - RNA, 19 nt, Artificial Sequence
  Description of Artificial Sequence: Synthetic oligonucleotide
aaucccuucagauaaaugu

SEQ ID NO: 1187735 - RNA, 19 nt, Artificial Sequence
  Description of Artificial Sequence: Synthetic oligonucleotide
uuugaaaucaagaugaauu

SEQ ID NO: 1187736 - RNA, 19 nt, Artificial Sequence
  Description of Artificial Sequence: Synthetic oligonucleotide
aucaagaugaauuuuaaga

SEQ ID NO: 1187737 - RNA, 19 nt, Artificial Sequence
  Description of Artificial Sequence: Synthetic oligonucleotide
auaacagucagguagucuc

SEQ ID NO: 1187738 - RNA, 19 nt, Artificial Sequence
  Description of Artificial Sequence: Synthetic oligonucleotide
auuaauucccuuucauucc

SEQ ID NO: 1187739 - RNA, 19 nt, Artificial Sequence
  Description of Artificial Sequence: Synthetic oligonucleotide
uauugacauaaauaaaucc

SEQ ID NO: 1187740 - RNA, 19 nt, Artificial Sequence
  Description of Artificial Sequence: Synthetic oligonucleotide
aaaguucacacuuguagag

SEQ ID NO: 1187741 - RNA, 19 nt, Artificial Sequence
  Description of Artificial Sequence: Synthetic oligonucleotide
gauuaauucccuuucauuc

SEQ ID NO: 1187742 - RNA, 19 nt, Artificial Sequence
  Description of Artificial Sequence: Synthetic oligonucleotide
  modified_base (3)..(3): a, c, u, g, unknown or other
uancuuuucaauuugguau

SEQ ID NO: 1187743 - RNA, 19 nt, Artificial Sequence
  Description of Artificial Sequence: Synthetic oligonucleotide
aaccucaucaggcagucac

SEQ ID NO: 1187744 - RNA, 19 nt, Artificial Sequence
  Description of Artificial Sequence: Synthetic oligonucleotide
uauucuaacaugcuggaaa

SEQ ID NO: 1187745 - RNA, 19 nt, Artificial Sequence
  Description of Artificial Sequence: Synthetic oligonucleotide
acagguauugcucaucacg

SEQ ID NO: 1187746 - RNA, 19 nt, Artificial Sequence
  Description of Artificial Sequence: Synthetic oligonucleotide
ugaauuacaggcaaauuuc

SEQ ID NO: 1187747 - RNA, 19 nt, Artificial Sequence
  Description of Artificial Sequence: Synthetic oligonucleotide
uaaaaggcugcacuguccg

SEQ ID NO: 1187748 - RNA, 19 nt, Artificial Sequence
  Description of Artificial Sequence: Synthetic oligonucleotide
acauuuaugaggcaaguca

SEQ ID NO: 1187749 - RNA, 19 nt, Artificial Sequence
  Description of Artificial Sequence: Synthetic oligonucleotide
auagucacaguacuuacag

SEQ ID NO: 1187750 - RNA, 19 nt, Artificial Sequence
  Description of Artificial Sequence: Synthetic oligonucleotide
ugaauaacgagaagggugu

SEQ ID NO: 1187751 - RNA, 19 nt, Artificial Sequence
  Description of Artificial Sequence: Synthetic oligonucleotide
ucgaaauccacauacuuga

SEQ ID NO: 1187752 - RNA, 19 nt, Artificial Sequence
  Description of Artificial Sequence: Synthetic oligonucleotide
  modified_base (7)..(7): a, c, u, g, unknown or other
uucauancuuuucaauuug

SEQ ID NO: 1187753 - RNA, 19 nt, Artificial Sequence
  Description of Artificial Sequence: Synthetic oligonucleotide
aaauacuuacuguugaauu

SEQ ID NO: 1187754 - RNA, 19 nt, Artificial Sequence
  Description of Artificial Sequence: Synthetic oligonucleotide
uguggaaaagacagugugg

SEQ ID NO: 1187755 - RNA, 19 nt, Artificial Sequence
  Description of Artificial Sequence: Synthetic oligonucleotide
  modified_base (6)..(6): a, c, u, g, unknown or other
ucauancuuuucaauuugg

SEQ ID NO: 1187756 - RNA, 19 nt, Artificial Sequence
  Description of Artificial Sequence: Synthetic oligonucleotide
aauauucuaacaugcugga

SEQ ID NO: 1187757 - RNA, 19 nt, Artificial Sequence
  Description of Artificial Sequence: Synthetic oligonucleotide
uucagaaaucgcaugaacu

SEQ ID NO: 1187758 - RNA, 19 nt, Artificial Sequence
  Description of Artificial Sequence: Synthetic oligonucleotide
agcauauugguggaaaagc

SEQ ID NO: 1187759 - RNA, 19 nt, Artificial Sequence
  Description of Artificial Sequence: Synthetic oligonucleotide
uuuuaagaucuucaauuug

SEQ ID NO: 1187760 - RNA, 19 nt, Artificial Sequence
  Description of Artificial Sequence: Synthetic oligonucleotide
cugaauaacgagaagggug

SEQ ID NO: 1187761 - RNA, 19 nt, Artificial Sequence
  Description of Artificial Sequence: Synthetic oligonucleotide
  modified_base (10)..(10): a, c, u, g, unknown or other
ucauucauancuuuucaau

SEQ ID NO: 1187762 - RNA, 19 nt, Artificial Sequence
  Description of Artificial Sequence: Synthetic oligonucleotide
uuagaugcuugcaauauuc

SEQ ID NO: 1187763 - RNA, 19 nt, Artificial Sequence
  Description of Artificial Sequence: Synthetic oligonucleotide
agcucuaucagucuucgag

SEQ ID NO: 1187764 - RNA, 19 nt, Artificial Sequence
  Description of Artificial Sequence: Synthetic oligonucleotide
aaccaacuccgauauaguc

SEQ ID NO: 1187765 - RNA, 19 nt, Artificial Sequence
  Description of Artificial Sequence: Synthetic oligonucleotide
cuugcaauauucuaacaug

SEQ ID NO: 1187766 - RNA, 19 nt, Artificial Sequence
  Description of Artificial Sequence: Synthetic oligonucleotide
ugcuucgaaauccacauac

SEQ ID NO: 1187767 - RNA, 19 nt, Artificial Sequence
  Description of Artificial Sequence: Synthetic oligonucleotide
ucugauuccuauuucugcc

SEQ ID NO: 1187768 - RNA, 19 nt, Artificial Sequence
  Description of Artificial Sequence: Synthetic oligonucleotide
ugaauuuagaugcuugcaa

SEQ ID NO: 1187769 - RNA, 19 nt, Artificial Sequence
  Description of Artificial Sequence: Synthetic oligonucleotide
uuaagcaaugaagaaacca

SEQ ID NO: 1187770 - RNA, 19 nt, Artificial Sequence
  Description of Artificial Sequence: Synthetic oligonucleotide
ggugaucuugcuuaaaagg

SEQ ID NO: 1187771 - RNA, 19 nt, Artificial Sequence
  Description of Artificial Sequence: Synthetic oligonucleotide
augaauuacaggcaaauuu

SEQ ID NO: 1187772 - RNA, 19 nt, Artificial Sequence
  Description of Artificial Sequence: Synthetic oligonucleotide
uucuugaguuugcagaugc

SEQ ID NO: 1187773 - RNA, 19 nt, Artificial Sequence
  Description of Artificial Sequence: Synthetic oligonucleotide
uuaauucccuuucauuccc

SEQ ID NO: 1187774 - RNA, 19 nt, Artificial Sequence
  Description of Artificial Sequence: Synthetic oligonucleotide
cauuuaugaggcaagucag

SEQ ID NO: 1187775 - RNA, 19 nt, Artificial Sequence
  Description of Artificial Sequence: Synthetic oligonucleotide
auauaaggauaacagucag

SEQ ID NO: 1187776 - RNA, 19 nt, Artificial Sequence
  Description of Artificial Sequence: Synthetic oligonucleotide
aacauuauauaaggauaac

SEQ ID NO: 1187777 - RNA, 19 nt, Artificial Sequence
  Description of Artificial Sequence: Synthetic oligonucleotide
ugucuuauagucacaguac

SEQ ID NO: 1187778 - RNA, 19 nt, Artificial Sequence
  Description of Artificial Sequence: Synthetic oligonucleotide
ugucuguucacguuggugu

SEQ ID NO: 1187779 - RNA, 19 nt, Artificial Sequence
  Description of Artificial Sequence: Synthetic oligonucleotide
ggugugaaccucuauaggg

SEQ ID NO: 1187780 - RNA, 19 nt, Artificial Sequence
  Description of Artificial Sequence: Synthetic oligonucleotide
aagaaucugaauaacgaga

SEQ ID NO: 1187781 - RNA, 19 nt, Artificial Sequence
  Description of Artificial Sequence: Synthetic oligonucleotide
aucgcaugaacuucuacag

SEQ ID NO: 1187782 - RNA, 19 nt, Artificial Sequence
  Description of Artificial Sequence: Synthetic oligonucleotide
guaacaauggucagaaaag

SEQ ID NO: 1187783 - RNA, 19 nt, Artificial Sequence
  Description of Artificial Sequence: Synthetic oligonucleotide
aaugccucauuuuaagcaa

SEQ ID NO: 1187784 - RNA, 19 nt, Artificial Sequence
  Description of Artificial Sequence: Synthetic oligonucleotide
ugcuuauuccagaagaauc

SEQ ID NO: 1187785 - RNA, 19 nt, Artificial Sequence
  Description of Artificial Sequence: Synthetic oligonucleotide
gaugcacugacucagggga

SEQ ID NO: 1187786 - RNA, 19 nt, Artificial Sequence
  Description of Artificial Sequence: Synthetic oligonucleotide
ugcucauugaccacguggc

SEQ ID NO: 1187787 - RNA, 19 nt, Artificial Sequence
  Description of Artificial Sequence: Synthetic oligonucleotide
auauugacauaaauaaauc

SEQ ID NO: 1187788 - RNA, 19 nt, Artificial Sequence
  Description of Artificial Sequence: Synthetic oligonucleotide
gaggugugaaccucuauag

SEQ ID NO: 1187789 - RNA, 19 nt, Artificial Sequence
  Description of Artificial Sequence: Synthetic oligonucleotide
aauuugguauaacugucaa

SEQ ID NO: 1187790 - RNA, 19 nt, Artificial Sequence
  Description of Artificial Sequence: Synthetic oligonucleotide
  modified_base (18)..(18): a, c, u, g, unknown or other
agguauauucauucauanc

SEQ ID NO: 1187791 - RNA, 19 nt, Artificial Sequence
  Description of Artificial Sequence: Synthetic oligonucleotide
  modified_base (17)..(17): a, c, u, g, unknown or other
gguauauucauucauancu

SEQ ID NO: 1187792 - RNA, 19 nt, Artificial Sequence
  Description of Artificial Sequence: Synthetic oligonucleotide
auaacugucaauacugcag

SEQ ID NO: 1187793 - RNA, 19 nt, Artificial Sequence
  Description of Artificial Sequence: Synthetic oligonucleotide
aauggggacguccucugag

SEQ ID NO: 1187794 - RNA, 19 nt, Artificial Sequence
  Description of Artificial Sequence: Synthetic oligonucleotide
  modified_base (2)..(2): a, c, u, g, unknown or other
ancuuuucaauuugguaua

SEQ ID NO: 1187795 - RNA, 19 nt, Artificial Sequence
  Description of Artificial Sequence: Synthetic oligonucleotide
ucacuuagcucuaucaguc

SEQ ID NO: 1187796 - RNA, 19 nt, Artificial Sequence
  Description of Artificial Sequence: Synthetic oligonucleotide
uguaaacuugggcaaguca

SEQ ID NO: 1187797 - RNA, 19 nt, Artificial Sequence
  Description of Artificial Sequence: Synthetic oligonucleotide
gaaggugacugauuaauuc

SEQ ID NO: 1187798 - RNA, 19 nt, Artificial Sequence
  Description of Artificial Sequence: Synthetic oligonucleotide
ugguauaacugucaauacu

SEQ ID NO: 1187799 - RNA, 19 nt, Artificial Sequence
  Description of Artificial Sequence: Synthetic oligonucleotide
uauaacugucaauacugca

SEQ ID NO: 1187800 - RNA, 19 nt, Artificial Sequence
  Description of Artificial Sequence: Synthetic oligonucleotide
accaacuccgauauagucc

SEQ ID NO: 1187801 - RNA, 19 nt, Artificial Sequence
  Description of Artificial Sequence: Synthetic oligonucleotide
ugggcaagucauuugaugu

SEQ ID NO: 1187802 - RNA, 19 nt, Artificial Sequence
  Description of Artificial Sequence: Synthetic oligonucleotide
ggcaaauuuccagagaugg

SEQ ID NO: 1187803 - RNA, 19 nt, Artificial Sequence
  Description of Artificial Sequence: Synthetic oligonucleotide
ucaguaaaggccacuucug

SEQ ID NO: 1187804 - RNA, 19 nt, Artificial Sequence
  Description of Artificial Sequence: Synthetic oligonucleotide
cucgacacacauuugaguc

SEQ ID NO: 1187805 - RNA, 19 nt, Artificial Sequence
  Description of Artificial Sequence: Synthetic oligonucleotide
ucagaaaucgcaugaacuu

SEQ ID NO: 1187806 - RNA, 19 nt, Artificial Sequence
  Description of Artificial Sequence: Synthetic oligonucleotide
uguggucuagaauucuaag

SEQ ID NO: 1187807 - RNA, 19 nt, Artificial Sequence
  Description of Artificial Sequence: Synthetic oligonucleotide
aucugaauaacgagaaggg

SEQ ID NO: 1187808 - RNA, 19 nt, Artificial Sequence
  Description of Artificial Sequence: Synthetic oligonucleotide
auuuuaagcaaugaagaaa

SEQ ID NO: 1187809 - RNA, 19 nt, Artificial Sequence
  Description of Artificial Sequence: Synthetic oligonucleotide
  modified_base (19)..(19): a, c, u, g, unknown or other
uagguauauucauucauan

SEQ ID NO: 1187810 - RNA, 19 nt, Artificial Sequence
  Description of Artificial Sequence: Synthetic oligonucleotide
gguauaacugucaauacug

SEQ ID NO: 1187811 - RNA, 19 nt, Artificial Sequence
  Description of Artificial Sequence: Synthetic oligonucleotide
  modified_base (4)..(4): a, c, u, g, unknown or other
auancuuuucaauuuggua

SEQ ID NO: 1187812 - RNA, 19 nt, Artificial Sequence
  Description of Artificial Sequence: Synthetic oligonucleotide
uuuaagcaaugaagaaacc

SEQ ID NO: 1187813 - RNA, 19 nt, Artificial Sequence
  Description of Artificial Sequence: Synthetic oligonucleotide
ugaugucucaggaucagaa

SEQ ID NO: 1187814 - RNA, 19 nt, Artificial Sequence
  Description of Artificial Sequence: Synthetic oligonucleotide
uuuaugaggcaagucagcu

SEQ ID NO: 1187815 - RNA, 19 nt, Artificial Sequence
  Description of Artificial Sequence: Synthetic oligonucleotide
aagcauauugguggaaaag

SEQ ID NO: 1187816 - RNA, 19 nt, Artificial Sequence
  Description of Artificial Sequence: Synthetic oligonucleotide
guggucuagaauucuaagc

SEQ ID NO: 1187817 - RNA, 19 nt, Artificial Sequence
  Description of Artificial Sequence: Synthetic oligonucleotide
cucugucucuauaucauag

SEQ ID NO: 1187818 - RNA, 19 nt, Artificial Sequence
  Description of Artificial Sequence: Synthetic oligonucleotide
uuaguaugcucaauagcaa

SEQ ID NO: 1187819 - RNA, 19 nt, Artificial Sequence
  Description of Artificial Sequence: Synthetic oligonucleotide
gaauuacaggcaaauuucc

SEQ ID NO: 1187820 - RNA, 19 nt, Artificial Sequence
  Description of Artificial Sequence: Synthetic oligonucleotide
acauucaaagcuuggcucu

SEQ ID NO: 1187821 - RNA, 19 nt, Artificial Sequence
  Description of Artificial Sequence: Synthetic oligonucleotide
ugcaauauucuaacaugcu

SEQ ID NO: 1187822 - RNA, 19 nt, Artificial Sequence
  Description of Artificial Sequence: Synthetic oligonucleotide
ugaggugugaaccucuaua

SEQ ID NO: 1187823 - RNA, 19 nt, Artificial Sequence
  Description of Artificial Sequence: Synthetic oligonucleotide
uugucacuuagcucuauca

SEQ ID NO: 1187824 - RNA, 19 nt, Artificial Sequence
  Description of Artificial Sequence: Synthetic oligonucleotide
cuguggaaaagacagugug

SEQ ID NO: 1187825 - RNA, 19 nt, Artificial Sequence
  Description of Artificial Sequence: Synthetic oligonucleotide
agcaacaugucuguucacg

SEQ ID NO: 1187826 - RNA, 19 nt, Artificial Sequence
  Description of Artificial Sequence: Synthetic oligonucleotide
uauuggcucucaguaaagg

SEQ ID NO: 1187827 - RNA, 19 nt, Artificial Sequence
  Description of Artificial Sequence: Synthetic oligonucleotide
auagucuucagaaaucgca

SEQ ID NO: 1187828 - RNA, 19 nt, Artificial Sequence
  Description of Artificial Sequence: Synthetic oligonucleotide
uaguaugcucaauagcaac

SEQ ID NO: 1187829 - RNA, 19 nt, Artificial Sequence
  Description of Artificial Sequence: Synthetic oligonucleotide
  modified_base (11)..(11): a, c, u, g, unknown or other
uucauucauancuuuucaa

SEQ ID NO: 1187830 - RNA, 19 nt, Artificial Sequence
  Description of Artificial Sequence: Synthetic oligonucleotide
agguauugcucaucacggc

SEQ ID NO: 1187831 - RNA, 19 nt, Artificial Sequence
  Description of Artificial Sequence: Synthetic oligonucleotide
ucgaagaucacugucuuau

SEQ ID NO: 1187832 - RNA, 19 nt, Artificial Sequence
  Description of Artificial Sequence: Synthetic oligonucleotide
gucaauacugcagugagga

SEQ ID NO: 1187833 - RNA, 19 nt, Artificial Sequence
  Description of Artificial Sequence: Synthetic oligonucleotide
gaaguggguaucugcaaug

SEQ ID NO: 1187834 - RNA, 19 nt, Artificial Sequence
  Description of Artificial Sequence: Synthetic oligonucleotide
aggugacugauuaauuccc

SEQ ID NO: 1187835 - RNA, 19 nt, Artificial Sequence
  Description of Artificial Sequence: Synthetic oligonucleotide
gaaucaucaucuuuguugu

SEQ ID NO: 1187836 - RNA, 19 nt, Artificial Sequence
  Description of Artificial Sequence: Synthetic oligonucleotide
acuugggcaagucauuuga

SEQ ID NO: 1187837 - RNA, 19 nt, Artificial Sequence
  Description of Artificial Sequence: Synthetic oligonucleotide
gaauucuaagcacagggcu

SEQ ID NO: 1187838 - RNA, 19 nt, Artificial Sequence
  Description of Artificial Sequence: Synthetic oligonucleotide
uaugcagguccucaggguc

SEQ ID NO: 1187839 - RNA, 19 nt, Artificial Sequence
  Description of Artificial Sequence: Synthetic oligonucleotide
uggguaucugcaaugugcu

SEQ ID NO: 1187840 - RNA, 19 nt, Artificial Sequence
  Description of Artificial Sequence: Synthetic oligonucleotide
gaacuucuacagcaauggg

SEQ ID NO: 1187841 - RNA, 19 nt, Artificial Sequence
  Description of Artificial Sequence: Synthetic oligonucleotide
ucuugucaaguauuuuaca

SEQ ID NO: 1187842 - RNA, 19 nt, Artificial Sequence
  Description of Artificial Sequence: Synthetic oligonucleotide
agggaauauuuuaguaugc

SEQ ID NO: 1187843 - RNA, 19 nt, Artificial Sequence
  Description of Artificial Sequence: Synthetic oligonucleotide
ugugaaccucuauagggcu

SEQ ID NO: 1187844 - RNA, 19 nt, Artificial Sequence
  Description of Artificial Sequence: Synthetic oligonucleotide
uucaugaaguuuggcaugc

SEQ ID NO: 1187845 - RNA, 19 nt, Artificial Sequence
  Description of Artificial Sequence: Synthetic oligonucleotide
cauaugcugcuuuagguca

SEQ ID NO: 1187846 - RNA, 19 nt, Artificial Sequence
  Description of Artificial Sequence: Synthetic oligonucleotide
auuugagucagugcgcuug

SEQ ID NO: 1187847 - RNA, 19 nt, Artificial Sequence
  Description of Artificial Sequence: Synthetic oligonucleotide
agaguuuagcuggugguuc

SEQ ID NO: 1187848 - RNA, 19 nt, Artificial Sequence
  Description of Artificial Sequence: Synthetic oligonucleotide
acacucgacacacauuuga

SEQ ID NO: 1187849 - RNA, 19 nt, Artificial Sequence
  Description of Artificial Sequence: Synthetic oligonucleotide
ugaaguggguaucugcaau

SEQ ID NO: 1187850 - RNA, 19 nt, Artificial Sequence
  Description of Artificial Sequence: Synthetic oligonucleotide
ugacugagguucucgaaga

SEQ ID NO: 1187851 - RNA, 19 nt, Artificial Sequence
  Description of Artificial Sequence: Synthetic oligonucleotide
acaucacacugcucgcacc

SEQ ID NO: 1187852 - RNA, 19 nt, Artificial Sequence
  Description of Artificial Sequence: Synthetic oligonucleotide
uacuuacagauguagggau

SEQ ID NO: 1187853 - RNA, 19 nt, Artificial Sequence
  Description of Artificial Sequence: Synthetic oligonucleotide
cuuaaaaggcugcacuguc

SEQ ID NO: 1187854 - RNA, 19 nt, Artificial Sequence
  Description of Artificial Sequence: Synthetic oligonucleotide
acuacauuuaugaggcaag

SEQ ID NO: 1187855 - RNA, 19 nt, Artificial Sequence
  Description of Artificial Sequence: Synthetic oligonucleotide
aggcaagucagcugaaugu

SEQ ID NO: 1187856 - RNA, 19 nt, Artificial Sequence
  Description of Artificial Sequence: Synthetic oligonucleotide
acaugagggaauauuuuag

SEQ ID NO: 1187857 - RNA, 19 nt, Artificial Sequence
  Description of Artificial Sequence: Synthetic oligonucleotide
ucccuuucauucccaaacc

SEQ ID NO: 1187858 - RNA, 19 nt, Artificial Sequence
  Description of Artificial Sequence: Synthetic oligonucleotide
acugcuauuggcucucagu

SEQ ID NO: 1187859 - RNA, 19 nt, Artificial Sequence
  Description of Artificial Sequence: Synthetic oligonucleotide
uaacgagaaggguguaaag

SEQ ID NO: 1187860 - RNA, 19 nt, Artificial Sequence
  Description of Artificial Sequence: Synthetic oligonucleotide
gucauuugaugucucagga

SEQ ID NO: 1187861 - RNA, 19 nt, Artificial Sequence
  Description of Artificial Sequence: Synthetic oligonucleotide
ucugaauaacgagaagggu

SEQ ID NO: 1187862 - RNA, 19 nt, Artificial Sequence
  Description of Artificial Sequence: Synthetic oligonucleotide
uagaugcuugcaauauucu

SEQ ID NO: 1187863 - RNA, 19 nt, Artificial Sequence
  Description of Artificial Sequence: Synthetic oligonucleotide
ucaggcagucacuacauuu

SEQ ID NO: 1187864 - RNA, 19 nt, Artificial Sequence
  Description of Artificial Sequence: Synthetic oligonucleotide
uuuagaugcuugcaauauu

SEQ ID NO: 1187865 - RNA, 19 nt, Artificial Sequence
  Description of Artificial Sequence: Synthetic oligonucleotide
uggucagaaaagaucccac

SEQ ID NO: 1187866 - RNA, 19 nt, Artificial Sequence
  Description of Artificial Sequence: Synthetic oligonucleotide
uuugaugucucaggaucag

SEQ ID NO: 1187867 - RNA, 19 nt, Artificial Sequence
  Description of Artificial Sequence: Synthetic oligonucleotide
ucgacacacauuugaguca

SEQ ID NO: 1187868 - RNA, 19 nt, Artificial Sequence
  Description of Artificial Sequence: Synthetic oligonucleotide
cugucucuauaucauaguc

SEQ ID NO: 1187869 - RNA, 19 nt, Artificial Sequence
  Description of Artificial Sequence: Synthetic oligonucleotide
cacauuugagucagugcgc

SEQ ID NO: 1187870 - RNA, 19 nt, Artificial Sequence
  Description of Artificial Sequence: Synthetic oligonucleotide
ggagucacauucuucauca

SEQ ID NO: 1187871 - RNA, 19 nt, Artificial Sequence
  Description of Artificial Sequence: Synthetic oligonucleotide
uuaaaucuggcugucucau

SEQ ID NO: 1187872 - RNA, 19 nt, Artificial Sequence
  Description of Artificial Sequence: Synthetic oligonucleotide
uauugguggaaaagcuuuc

SEQ ID NO: 1187873 - RNA, 19 nt, Artificial Sequence
  Description of Artificial Sequence: Synthetic oligonucleotide
ucuggcugucucauagagc

SEQ ID NO: 1187874 - RNA, 19 nt, Artificial Sequence
  Description of Artificial Sequence: Synthetic oligonucleotide
uguuugaaaucaagaugaa

SEQ ID NO: 1187875 - RNA, 19 nt, Artificial Sequence
  Description of Artificial Sequence: Synthetic oligonucleotide
caauuuguccuguugaaua

SEQ ID NO: 1187876 - RNA, 19 nt, Artificial Sequence
  Description of Artificial Sequence: Synthetic oligonucleotide
cagguagucucauggacug

SEQ ID NO: 1187877 - RNA, 19 nt, Artificial Sequence
  Description of Artificial Sequence: Synthetic oligonucleotide
cuuagcucuaucagucuuc

SEQ ID NO: 1187878 - RNA, 19 nt, Artificial Sequence
  Description of Artificial Sequence: Synthetic oligonucleotide
ugaagucugcuucgaaauc

SEQ ID NO: 1187879 - RNA, 19 nt, Artificial Sequence
  Description of Artificial Sequence: Synthetic oligonucleotide
gaauuuagaugcuugcaau

SEQ ID NO: 1187880 - RNA, 19 nt, Artificial Sequence
  Description of Artificial Sequence: Synthetic oligonucleotide
augagggaauauuuuagua

SEQ ID NO: 1187881 - RNA, 19 nt, Artificial Sequence
  Description of Artificial Sequence: Synthetic oligonucleotide
uguugggcagucacauuca

SEQ ID NO: 1187882 - RNA, 19 nt, Artificial Sequence
  Description of Artificial Sequence: Synthetic oligonucleotide
ucgcaugaacuucuacagc

SEQ ID NO: 1187883 - RNA, 19 nt, Artificial Sequence
  Description of Artificial Sequence: Synthetic oligonucleotide
ugccucauuuuaagcaaug

SEQ ID NO: 1187884 - RNA, 19 nt, Artificial Sequence
  Description of Artificial Sequence: Synthetic oligonucleotide
aguaugcucaauagcaaca

SEQ ID NO: 1187885 - RNA, 19 nt, Artificial Sequence
  Description of Artificial Sequence: Synthetic oligonucleotide
cugucuuauagucacagua

SEQ ID NO: 1187886 - RNA, 19 nt, Artificial Sequence
  Description of Artificial Sequence: Synthetic oligonucleotide
acucgacacacauuugagu

SEQ ID NO: 1187887 - RNA, 19 nt, Artificial Sequence
  Description of Artificial Sequence: Synthetic oligonucleotide
guauaacugucaauacugc

SEQ ID NO: 1187888 - RNA, 19 nt, Artificial Sequence
  Description of Artificial Sequence: Synthetic oligonucleotide
aaaucccuucagauaaaug

SEQ ID NO: 1187889 - RNA, 19 nt, Artificial Sequence
  Description of Artificial Sequence: Synthetic oligonucleotide
cacucgacacacauuugag

SEQ ID NO: 1187890 - RNA, 19 nt, Artificial Sequence
  Description of Artificial Sequence: Synthetic oligonucleotide
gucagguagucucauggac

SEQ ID NO: 1187891 - RNA, 19 nt, Artificial Sequence
  Description of Artificial Sequence: Synthetic oligonucleotide
aguaaaggccacuucuguu

SEQ ID NO: 1187892 - RNA, 19 nt, Artificial Sequence
  Description of Artificial Sequence: Synthetic oligonucleotide
ucacuacuugaggagaacu

SEQ ID NO: 1187893 - RNA, 19 nt, Artificial Sequence
  Description of Artificial Sequence: Synthetic oligonucleotide
aaaugugaauuuagaugcu

SEQ ID NO: 1187894 - RNA, 19 nt, Artificial Sequence
  Description of Artificial Sequence: Synthetic oligonucleotide
ugaaccucuauagggcucu

SEQ ID NO: 1187895 - RNA, 19 nt, Artificial Sequence
  Description of Artificial Sequence: Synthetic oligonucleotide
cuuauagucacaguacuua

SEQ ID NO: 1187896 - RNA, 19 nt, Artificial Sequence
  Description of Artificial Sequence: Synthetic oligonucleotide
uacugcagugaggaaaaug

SEQ ID NO: 1187897 - RNA, 19 nt, Artificial Sequence
  Description of Artificial Sequence: Synthetic oligonucleotide
auaacgagaaggguguaaa

SEQ ID NO: 1187898 - RNA, 19 nt, Artificial Sequence
  Description of Artificial Sequence: Synthetic oligonucleotide
gugugaaccucuauagggc

SEQ ID NO: 1187899 - RNA, 19 nt, Artificial Sequence
  Description of Artificial Sequence: Synthetic oligonucleotide
acuuacagauguagggauc

SEQ ID NO: 1187900 - RNA, 19 nt, Artificial Sequence
  Description of Artificial Sequence: Synthetic oligonucleotide
aaguggguaucugcaaugu

SEQ ID NO: 1187901 - RNA, 19 nt, Artificial Sequence
  Description of Artificial Sequence: Synthetic oligonucleotide
guaaagguggucgcugaag

SEQ ID NO: 1187902 - RNA, 19 nt, Artificial Sequence
  Description of Artificial Sequence: Synthetic oligonucleotide
ucucgaagaucacugucuu

SEQ ID NO: 1187903 - RNA, 19 nt, Artificial Sequence
  Description of Artificial Sequence: Synthetic oligonucleotide
cagucacuacauuuaugag

SEQ ID NO: 1187904 - RNA, 19 nt, Artificial Sequence
  Description of Artificial Sequence: Synthetic oligonucleotide
ucuaagcacagggcugggg

SEQ ID NO: 1187905 - RNA, 19 nt, Artificial Sequence
  Description of Artificial Sequence: Synthetic oligonucleotide
uaauucccuuucauuccca

SEQ ID NO: 1187906 - RNA, 19 nt, Artificial Sequence
  Description of Artificial Sequence: Synthetic oligonucleotide
auuugaugucucaggauca

SEQ ID NO: 1187907 - RNA, 19 nt, Artificial Sequence
  Description of Artificial Sequence: Synthetic oligonucleotide
uacauuuaugaggcaaguc

SEQ ID NO: 1187908 - RNA, 19 nt, Artificial Sequence
  Description of Artificial Sequence: Synthetic oligonucleotide
agugcgcuugugcuucagg

SEQ ID NO: 1187909 - RNA, 19 nt, Artificial Sequence
  Description of Artificial Sequence: Synthetic oligonucleotide
uacauuugucaaaggugau

SEQ ID NO: 1187910 - RNA, 19 nt, Artificial Sequence
  Description of Artificial Sequence: Synthetic oligonucleotide
agucagguagucucaugga

SEQ ID NO: 1187911 - RNA, 19 nt, Artificial Sequence
  Description of Artificial Sequence: Synthetic oligonucleotide
uccucugaggugugaaccu

SEQ ID NO: 1187912 - RNA, 19 nt, Artificial Sequence
  Description of Artificial Sequence: Synthetic oligonucleotide
agaagcauauugguggaaa

SEQ ID NO: 1187913 - RNA, 19 nt, Artificial Sequence
  Description of Artificial Sequence: Synthetic oligonucleotide
aaaccaacuccgauauagu

SEQ ID NO: 1187914 - RNA, 19 nt, Artificial Sequence
  Description of Artificial Sequence: Synthetic oligonucleotide
cacguuggugugaagucug

SEQ ID NO: 1187915 - RNA, 19 nt, Artificial Sequence
  Description of Artificial Sequence: Synthetic oligonucleotide
auagggcucucuucuugag

SEQ ID NO: 1187916 - RNA, 19 nt, Artificial Sequence
  Description of Artificial Sequence: Synthetic oligonucleotide
ugcuugcaauauucuaaca

SEQ ID NO: 1187917 - RNA, 19 nt, Artificial Sequence
  Description of Artificial Sequence: Synthetic oligonucleotide
ugauuccuauuucugccuu

SEQ ID NO: 1187918 - RNA, 19 nt, Artificial Sequence
  Description of Artificial Sequence: Synthetic oligonucleotide
cuucagauaaaugugaauu

SEQ ID NO: 1187919 - RNA, 19 nt, Artificial Sequence
  Description of Artificial Sequence: Synthetic oligonucleotide
uaaaucccuucagauaaau

SEQ ID NO: 1187920 - RNA, 19 nt, Artificial Sequence
  Description of Artificial Sequence: Synthetic oligonucleotide
  modified_base (5)..(5): a, c, u, g, unknown or other
cauancuuuucaauuuggu

SEQ ID NO: 1187921 - RNA, 19 nt, Artificial Sequence
  Description of Artificial Sequence: Synthetic oligonucleotide
ggaggaauuguucucuguc

SEQ ID NO: 1187922 - RNA, 19 nt, Artificial Sequence
  Description of Artificial Sequence: Synthetic oligonucleotide
cagaaaucgcaugaacuuc

SEQ ID NO: 1187923 - RNA, 19 nt, Artificial Sequence
  Description of Artificial Sequence: Synthetic oligonucleotide
gguaucugcaaugugcuga

SEQ ID NO: 1187924 - RNA, 19 nt, Artificial Sequence
  Description of Artificial Sequence: Synthetic oligonucleotide
cauagagcagacacuguaa

SEQ ID NO: 1187925 - RNA, 19 nt, Artificial Sequence
  Description of Artificial Sequence: Synthetic oligonucleotide
aagucugcuucgaaaucca

SEQ ID NO: 1187926 - RNA, 19 nt, Artificial Sequence
  Description of Artificial Sequence: Synthetic oligonucleotide
ucaccugucucaugcucac

SEQ ID NO: 1187927 - RNA, 19 nt, Artificial Sequence
  Description of Artificial Sequence: Synthetic oligonucleotide
gucuuauagucacaguacu

SEQ ID NO: 1187928 - RNA, 19 nt, Artificial Sequence
  Description of Artificial Sequence: Synthetic oligonucleotide
uaaggauaacagucaggua

SEQ ID NO: 1187929 - RNA, 19 nt, Artificial Sequence
  Description of Artificial Sequence: Synthetic oligonucleotide
caccaguaaagguggucgc

SEQ ID NO: 1187930 - RNA, 19 nt, Artificial Sequence
  Description of Artificial Sequence: Synthetic oligonucleotide
ucggaggaauuguucucug

SEQ ID NO: 1187931 - RNA, 19 nt, Artificial Sequence
  Description of Artificial Sequence: Synthetic oligonucleotide
aggguguaaagucuuccuu

SEQ ID NO: 1187932 - RNA, 19 nt, Artificial Sequence
  Description of Artificial Sequence: Synthetic oligonucleotide
ugcucgcaccaguaaaggu

SEQ ID NO: 1187933 - RNA, 19 nt, Artificial Sequence
  Description of Artificial Sequence: Synthetic oligonucleotide
acugaucccaucugugauu

SEQ ID NO: 1187934 - RNA, 19 nt, Artificial Sequence
  Description of Artificial Sequence: Synthetic oligonucleotide
guccuguugaauauucaca

SEQ ID NO: 1187935 - RNA, 19 nt, Artificial Sequence
  Description of Artificial Sequence: Synthetic oligonucleotide
cugaucccaucugugauuc

SEQ ID NO: 1187936 - RNA, 19 nt, Artificial Sequence
  Description of Artificial Sequence: Synthetic oligonucleotide
augucuguucacguuggug

SEQ ID NO: 1187937 - RNA, 19 nt, Artificial Sequence
  Description of Artificial Sequence: Synthetic oligonucleotide
guggaaaagacaguguggu

SEQ ID NO: 1187938 - RNA, 19 nt, Artificial Sequence
  Description of Artificial Sequence: Synthetic oligonucleotide
agacaguguggucuagaau

SEQ ID NO: 1187939 - RNA, 19 nt, Artificial Sequence
  Description of Artificial Sequence: Synthetic oligonucleotide
uccgugcccaccacugcug

SEQ ID NO: 1187940 - RNA, 19 nt, Artificial Sequence
  Description of Artificial Sequence: Synthetic oligonucleotide
cucuauagggcucucuucu

SEQ ID NO: 1187941 - RNA, 19 nt, Artificial Sequence
  Description of Artificial Sequence: Synthetic oligonucleotide
uguccgugcccaccacugc

SEQ ID NO: 1187942 - RNA, 19 nt, Artificial Sequence
  Description of Artificial Sequence: Synthetic oligonucleotide
caugagggaauauuuuagu

SEQ ID NO: 1187943 - RNA, 19 nt, Artificial Sequence
  Description of Artificial Sequence: Synthetic oligonucleotide
ccaacuccgauauagucca

SEQ ID NO: 1187944 - RNA, 19 nt, Artificial Sequence
  Description of Artificial Sequence: Synthetic oligonucleotide
uacacacucgacacacauu

SEQ ID NO: 1187945 - RNA, 19 nt, Artificial Sequence
  Description of Artificial Sequence: Synthetic oligonucleotide
auauuuuaguaugcucaau

SEQ ID NO: 1187946 - RNA, 19 nt, Artificial Sequence
  Description of Artificial Sequence: Synthetic oligonucleotide
aacagucagguagucucau

SEQ ID NO: 1187947 - RNA, 19 nt, Artificial Sequence
  Description of Artificial Sequence: Synthetic oligonucleotide
uuacagaguuuagcuggug

SEQ ID NO: 1187948 - RNA, 19 nt, Artificial Sequence
  Description of Artificial Sequence: Synthetic oligonucleotide
ccuuucauucccaaaccuc

SEQ ID NO: 1187949 - RNA, 19 nt, Artificial Sequence
  Description of Artificial Sequence: Synthetic oligonucleotide
cugcucgcaccaguaaagg

SEQ ID NO: 1187950 - RNA, 19 nt, Artificial Sequence
  Description of Artificial Sequence: Synthetic oligonucleotide
caaaccucaucaggcaguc

SEQ ID NO: 1187951 - RNA, 19 nt, Artificial Sequence
  Description of Artificial Sequence: Synthetic oligonucleotide
uaaaucuggcugucucaua

SEQ ID NO: 1187952 - RNA, 19 nt, Artificial Sequence
  Description of Artificial Sequence: Synthetic oligonucleotide
guucacacuuguagaggcc

SEQ ID NO: 1187953 - RNA, 19 nt, Artificial Sequence
  Description of Artificial Sequence: Synthetic oligonucleotide
aggcagucacuacauuuau

SEQ ID NO: 1187954 - RNA, 19 nt, Artificial Sequence
  Description of Artificial Sequence: Synthetic oligonucleotide
guguaaagucuuccuuuuc

SEQ ID NO: 1187955 - RNA, 19 nt, Artificial Sequence
  Description of Artificial Sequence: Synthetic oligonucleotide
cuugaggagaacugcacau

SEQ ID NO: 1187956 - RNA, 19 nt, Artificial Sequence
  Description of Artificial Sequence: Synthetic oligonucleotide
augaagaaaccaacuccga

SEQ ID NO: 1187957 - RNA, 19 nt, Artificial Sequence
  Description of Artificial Sequence: Synthetic oligonucleotide
acguuggugugaagucugc

SEQ ID NO: 1187958 - RNA, 19 nt, Artificial Sequence
  Description of Artificial Sequence: Synthetic oligonucleotide
aggcugcacuguccgugcc

SEQ ID NO: 1187959 - RNA, 19 nt, Artificial Sequence
  Description of Artificial Sequence: Synthetic oligonucleotide
accaguaaagguggucgcu

SEQ ID NO: 1187960 - RNA, 19 nt, Artificial Sequence
  Description of Artificial Sequence: Synthetic oligonucleotide
cagugaggaaaaugaauua

SEQ ID NO: 1187961 - RNA, 19 nt, Artificial Sequence
  Description of Artificial Sequence: Synthetic oligonucleotide
uggucgcugaaguggguau

SEQ ID NO: 1187962 - RNA, 19 nt, Artificial Sequence
  Description of Artificial Sequence: Synthetic oligonucleotide
gcuugcaauauucuaacau

SEQ ID NO: 1187963 - RNA, 19 nt, Artificial Sequence
  Description of Artificial Sequence: Synthetic oligonucleotide
gaggagaacugcacaucac

SEQ ID NO: 1187964 - RNA, 19 nt, Artificial Sequence
  Description of Artificial Sequence: Synthetic oligonucleotide
gucagugcgcuugugcuuc

SEQ ID NO: 1187965 - RNA, 19 nt, Artificial Sequence
  Description of Artificial Sequence: Synthetic oligonucleotide
gaguuugcagaugcacuga

SEQ ID NO: 1187966 - RNA, 19 nt, Artificial Sequence
  Description of Artificial Sequence: Synthetic oligonucleotide
auauucuaacaugcuggaa

SEQ ID NO: 1187967 - RNA, 19 nt, Artificial Sequence
  Description of Artificial Sequence: Synthetic oligonucleotide
cacagguauugcucaucac

SEQ ID NO: 1187968 - RNA, 19 nt, Artificial Sequence
  Description of Artificial Sequence: Synthetic oligonucleotide
aaccucuauagggcucucu

SEQ ID NO: 1187969 - RNA, 19 nt, Artificial Sequence
  Description of Artificial Sequence: Synthetic oligonucleotide
caggggagucacauucuuc

SEQ ID NO: 1187970 - RNA, 19 nt, Artificial Sequence
  Description of Artificial Sequence: Synthetic oligonucleotide
cucucggaggaauuguucu

SEQ ID NO: 1187971 - RNA, 19 nt, Artificial Sequence
  Description of Artificial Sequence: Synthetic oligonucleotide
cacacucgacacacauuug

SEQ ID NO: 1187972 - RNA, 19 nt, Artificial Sequence
  Description of Artificial Sequence: Synthetic oligonucleotide
agucagugcgcuugugcuu

SEQ ID NO: 1187973 - RNA, 19 nt, Artificial Sequence
  Description of Artificial Sequence: Synthetic oligonucleotide
gcaaauuuccagagauggc

SEQ ID NO: 1187974 - RNA, 19 nt, Artificial Sequence
  Description of Artificial Sequence: Synthetic oligonucleotide
auuuguccuguugaauauu

SEQ ID NO: 1187975 - RNA, 19 nt, Artificial Sequence
  Description of Artificial Sequence: Synthetic oligonucleotide
gcuuuccuuacacacucga

SEQ ID NO: 1187976 - RNA, 19 nt, Artificial Sequence
  Description of Artificial Sequence: Synthetic oligonucleotide
cuucgaaauccacauacuu

SEQ ID NO: 1187977 - RNA, 19 nt, Artificial Sequence
  Description of Artificial Sequence: Synthetic oligonucleotide
cuguaaacuugggcaaguc

SEQ ID NO: 1187978 - RNA, 19 nt, Artificial Sequence
  Description of Artificial Sequence: Synthetic oligonucleotide
agcuuuccuuacacacucg

SEQ ID NO: 1187979 - RNA, 19 nt, Artificial Sequence
  Description of Artificial Sequence: Synthetic oligonucleotide
agguagucucauggacugg

SEQ ID NO: 1187980 - RNA, 19 nt, Artificial Sequence
  Description of Artificial Sequence: Synthetic oligonucleotide
cugauuaauucccuuucau

SEQ ID NO: 1187981 - RNA, 19 nt, Artificial Sequence
  Description of Artificial Sequence: Synthetic oligonucleotide
guuugaaaucaagaugaau

SEQ ID NO: 1187982 - RNA, 19 nt, Artificial Sequence
  Description of Artificial Sequence: Synthetic oligonucleotide
cuucgagcaugcucauuga

SEQ ID NO: 1187983 - RNA, 19 nt, Artificial Sequence
  Description of Artificial Sequence: Synthetic oligonucleotide
aguguggucuagaauucua

SEQ ID NO: 1187984 - RNA, 19 nt, Artificial Sequence
  Description of Artificial Sequence: Synthetic oligonucleotide
cucauugaccacguggcua

SEQ ID NO: 1187985 - RNA, 19 nt, Artificial Sequence
  Description of Artificial Sequence: Synthetic oligonucleotide
aaaccucaucaggcaguca

SEQ ID NO: 1187986 - RNA, 19 nt, Artificial Sequence
  Description of Artificial Sequence: Synthetic oligonucleotide
guguggucuagaauucuaa

SEQ ID NO: 1187987 - RNA, 19 nt, Artificial Sequence
  Description of Artificial Sequence: Synthetic oligonucleotide
gcucaauagcaacaugucu

SEQ ID NO: 1187988 - RNA, 19 nt, Artificial Sequence
  Description of Artificial Sequence: Synthetic oligonucleotide
caugcucauugaccacgug

SEQ ID NO: 1187989 - RNA, 19 nt, Artificial Sequence
  Description of Artificial Sequence: Synthetic oligonucleotide
uugagucagugcgcuugug

SEQ ID NO: 1187990 - RNA, 19 nt, Artificial Sequence
  Description of Artificial Sequence: Synthetic oligonucleotide
uagcucuaucagucuucga

SEQ ID NO: 1187991 - RNA, 19 nt, Artificial Sequence
  Description of Artificial Sequence: Synthetic oligonucleotide
ggaauuguucucugucucu

SEQ ID NO: 1187992 - RNA, 19 nt, Artificial Sequence
  Description of Artificial Sequence: Synthetic oligonucleotide
cacugcucgcaccaguaaa

SEQ ID NO: 1187993 - RNA, 19 nt, Artificial Sequence
  Description of Artificial Sequence: Synthetic oligonucleotide
gaaaucgcaugaacuucua

SEQ ID NO: 1187994 - RNA, 19 nt, Artificial Sequence
  Description of Artificial Sequence: Synthetic oligonucleotide
ugaucccaucugugauucu

SEQ ID NO: 1187995 - RNA, 19 nt, Artificial Sequence
  Description of Artificial Sequence: Synthetic oligonucleotide
caguaaaggccacuucugu

SEQ ID NO: 1187996 - RNA, 19 nt, Artificial Sequence
  Description of Artificial Sequence: Synthetic oligonucleotide
ucgcugaaguggguaucug

SEQ ID NO: 1187997 - RNA, 19 nt, Artificial Sequence
  Description of Artificial Sequence: Synthetic oligonucleotide
gucucauggacuggaaggu

SEQ ID NO: 1187998 - RNA, 19 nt, Artificial Sequence
  Description of Artificial Sequence: Synthetic oligonucleotide
aucaggcagucacuacauu

SEQ ID NO: 1187999 - RNA, 19 nt, Artificial Sequence
  Description of Artificial Sequence: Synthetic oligonucleotide
gugaaccucuauagggcuc

SEQ ID NO: 1188000 - RNA, 19 nt, Artificial Sequence
  Description of Artificial Sequence: Synthetic oligonucleotide
ccaguaaagguggucgcug

SEQ ID NO: 1188001 - RNA, 19 nt, Artificial Sequence
  Description of Artificial Sequence: Synthetic oligonucleotide
aggcucucggaggaauugu

SEQ ID NO: 1188002 - RNA, 19 nt, Artificial Sequence
  Description of Artificial Sequence: Synthetic oligonucleotide
cuacauuuaugaggcaagu

SEQ ID NO: 1188003 - RNA, 19 nt, Artificial Sequence
  Description of Artificial Sequence: Synthetic oligonucleotide
gcagaugcacugacucagg

SEQ ID NO: 1188004 - RNA, 19 nt, Artificial Sequence
  Description of Artificial Sequence: Synthetic oligonucleotide
cuaugcagguccucagggu

SEQ ID NO: 1188005 - RNA, 19 nt, Artificial Sequence
  Description of Artificial Sequence: Synthetic oligonucleotide
augccucauuuuaagcaau

SEQ ID NO: 1188006 - RNA, 19 nt, Artificial Sequence
  Description of Artificial Sequence: Synthetic oligonucleotide
gcaugcucaaugagaagca

SEQ ID NO: 1188007 - RNA, 19 nt, Artificial Sequence
  Description of Artificial Sequence: Synthetic oligonucleotide
gguguaaagucuuccuuuu

SEQ ID NO: 1188008 - RNA, 19 nt, Artificial Sequence
  Description of Artificial Sequence: Synthetic oligonucleotide
gugacugauuaauucccuu

SEQ ID NO: 1188009 - RNA, 19 nt, Artificial Sequence
  Description of Artificial Sequence: Synthetic oligonucleotide
gucucauagagcagacacu

SEQ ID NO: 1188010 - RNA, 19 nt, Artificial Sequence
  Description of Artificial Sequence: Synthetic oligonucleotide
cucggaggaauuguucucu

SEQ ID NO: 1188011 - RNA, 19 nt, Artificial Sequence
  Description of Artificial Sequence: Synthetic oligonucleotide
cucugaggugugaaccucu

SEQ ID NO: 1188012 - RNA, 19 nt, Artificial Sequence
  Description of Artificial Sequence: Synthetic oligonucleotide
gccucauuuuaagcaauga

SEQ ID NO: 1188013 - RNA, 19 nt, Artificial Sequence
  Description of Artificial Sequence: Synthetic oligonucleotide
cucgaagaucacugucuua

SEQ ID NO: 1188014 - RNA, 19 nt, Artificial Sequence
  Description of Artificial Sequence: Synthetic oligonucleotide
cuguucacguuggugugaa

SEQ ID NO: 1188015 - RNA, 19 nt, Artificial Sequence
  Description of Artificial Sequence: Synthetic oligonucleotide
ggugugaagucugcuucga

SEQ ID NO: 1188016 - RNA, 19 nt, Artificial Sequence
  Description of Artificial Sequence: Synthetic oligonucleotide
gcugacugagguucucgaa

SEQ ID NO: 1188017 - RNA, 19 nt, Artificial Sequence
  Description of Artificial Sequence: Synthetic oligonucleotide
caauggggacguccucuga

SEQ ID NO: 1188018 - RNA, 19 nt, Artificial Sequence
  Description of Artificial Sequence: Synthetic oligonucleotide
cugcuuauuccagaagaau

SEQ ID NO: 1188019 - RNA, 19 nt, Artificial Sequence
  Description of Artificial Sequence: Synthetic oligonucleotide
gucgcugaaguggguaucu

SEQ ID NO: 1188020 - RNA, 19 nt, Artificial Sequence
  Description of Artificial Sequence: Synthetic oligonucleotide
aucugugauucugcuuauu

SEQ ID NO: 1188021 - RNA, 19 nt, Artificial Sequence
  Description of Artificial Sequence: Synthetic oligonucleotide
guggucgcugaagugggua

SEQ ID NO: 1188022 - RNA, 19 nt, Artificial Sequence
  Description of Artificial Sequence: Synthetic oligonucleotide
cuguaacaauggucagaaa

SEQ ID NO: 1188023 - RNA, 19 nt, Artificial Sequence
  Description of Artificial Sequence: Synthetic oligonucleotide
cauugaccacguggcuaug

SEQ ID NO: 1188024 - RNA, 19 nt, Artificial Sequence
  Description of Artificial Sequence: Synthetic oligonucleotide
caggaucauaugcugcuuu

SEQ ID NO: 1188025 - RNA, 19 nt, Artificial Sequence
  Description of Artificial Sequence: Synthetic oligonucleotide
gaaccucuauagggcucuc

SEQ ID NO: 1188026 - RNA, 19 nt, Artificial Sequence
  Description of Artificial Sequence: Synthetic oligonucleotide
auacugcagugaggaaaau

SEQ ID NO: 1188027 - RNA, 19 nt, Artificial Sequence
  Description of Artificial Sequence: Synthetic oligonucleotide
cagugcgcuugugcuucag

SEQ ID NO: 1188028 - RNA, 19 nt, Artificial Sequence
  Description of Artificial Sequence: Synthetic oligonucleotide
cacggcugugcuccuggaa

SEQ ID NO: 1188029 - RNA, 19 nt, Artificial Sequence
  Description of Artificial Sequence: Synthetic oligonucleotide
cugcuucgaaauccacaua

SEQ ID NO: 1188030 - RNA, 19 nt, Artificial Sequence
  Description of Artificial Sequence: Synthetic oligonucleotide
augaggcaagucagcugaa

SEQ ID NO: 1188031 - RNA, 19 nt, Artificial Sequence
  Description of Artificial Sequence: Synthetic oligonucleotide
cagaguuuagcuggugguu

SEQ ID NO: 1188032 - RNA, 19 nt, Artificial Sequence
  Description of Artificial Sequence: Synthetic oligonucleotide
gcuucgaaauccacauacu

SEQ ID NO: 1188033 - RNA, 19 nt, Artificial Sequence
  Description of Artificial Sequence: Synthetic oligonucleotide
cguccucugaggugugaac

SEQ ID NO: 1188034 - RNA, 19 nt, Artificial Sequence
  Description of Artificial Sequence: Synthetic oligonucleotide
caugucuguucacguuggu

SEQ ID NO: 1188035 - RNA, 19 nt, Artificial Sequence
  Description of Artificial Sequence: Synthetic oligonucleotide
ccgugcccaccacugcugc

SEQ ID NO: 1188036 - RNA, 19 nt, Artificial Sequence
  Description of Artificial Sequence: Synthetic oligonucleotide
ggaaggugacugauuaauu

SEQ ID NO: 1188037 - RNA, 19 nt, Artificial Sequence
  Description of Artificial Sequence: Synthetic oligonucleotide
cugaggugugaaccucuau

SEQ ID NO: 1188038 - RNA, 19 nt, Artificial Sequence
  Description of Artificial Sequence: Synthetic oligonucleotide
cauuugagucagugcgcuu

SEQ ID NO: 1188039 - RNA, 19 nt, Artificial Sequence
  Description of Artificial Sequence: Synthetic oligonucleotide
gcaagucagcugaauguuu

SEQ ID NO: 1188040 - RNA, 19 nt, Artificial Sequence
  Description of Artificial Sequence: Synthetic oligonucleotide
cgaagaucacugucuuaua

SEQ ID NO: 1188041 - RNA, 19 nt, Artificial Sequence
  Description of Artificial Sequence: Synthetic oligonucleotide
ggcucucggaggaauuguu

SEQ ID NO: 1188042 - RNA, 19 nt, Artificial Sequence
  Description of Artificial Sequence: Synthetic oligonucleotide
cggaggaauuguucucugu

SEQ ID NO: 1188043 - RNA, 19 nt, Artificial Sequence
  Description of Artificial Sequence: Synthetic oligonucleotide
ccacugcuauuggcucuca

SEQ ID NO: 1188044 - RNA, 19 nt, Artificial Sequence
  Description of Artificial Sequence: Synthetic oligonucleotide
aagggcaugguauaggacc

SEQ ID NO: 1188045 - RNA, 19 nt, Artificial Sequence
  Description of Artificial Sequence: Synthetic oligonucleotide
uauuaaagcacccaggucu

SEQ ID NO: 1188046 - RNA, 19 nt, Artificial Sequence
  Description of Artificial Sequence: Synthetic oligonucleotide
uuuauucucagucugauaa

SEQ ID NO: 1188047 - RNA, 19 nt, Artificial Sequence
  Description of Artificial Sequence: Synthetic oligonucleotide
uuaucuaagagucaucaca

SEQ ID NO: 1188048 - RNA, 19 nt, Artificial Sequence
  Description of Artificial Sequence: Synthetic oligonucleotide
uaucuaagagucaucacag

SEQ ID NO: 1188049 - RNA, 19 nt, Artificial Sequence
  Description of Artificial Sequence: Synthetic oligonucleotide
cuuaagaaagaguaacccg

SEQ ID NO: 1188050 - RNA, 19 nt, Artificial Sequence
  Description of Artificial Sequence: Synthetic oligonucleotide
uuguaguacgucaugacag

SEQ ID NO: 1188051 - RNA, 19 nt, Artificial Sequence
  Description of Artificial Sequence: Synthetic oligonucleotide
ucugauaaucaucugagau

SEQ ID NO: 1188052 - RNA, 19 nt, Artificial Sequence
  Description of Artificial Sequence: Synthetic oligonucleotide
auaaucaucugagaugagc

SEQ ID NO: 1188053 - RNA, 19 nt, Artificial Sequence
  Description of Artificial Sequence: Synthetic oligonucleotide
uaaucaucugagaugagca

SEQ ID NO: 1188054 - RNA, 19 nt, Artificial Sequence
  Description of Artificial Sequence: Synthetic oligonucleotide
ugauaaucaucugagauga

SEQ ID NO: 1188055 - RNA, 19 nt, Artificial Sequence
  Description of Artificial Sequence: Synthetic oligonucleotide
agaacagugguccaaaaga

SEQ ID NO: 1188056 - RNA, 19 nt, Artificial Sequence
  Description of Artificial Sequence: Synthetic oligonucleotide
aacucgaagcaguaaggac

SEQ ID NO: 1188057 - RNA, 19 nt, Artificial Sequence
  Description of Artificial Sequence: Synthetic oligonucleotide
aauccugccacggaacugc

SEQ ID NO: 1188058 - RNA, 19 nt, Artificial Sequence
  Description of Artificial Sequence: Synthetic oligonucleotide
ucaagugccggacagugag

SEQ ID NO: 1188059 - RNA, 19 nt, Artificial Sequence
  Description of Artificial Sequence: Synthetic oligonucleotide
ucagaugggguuuaagaag

SEQ ID NO: 1188060 - RNA, 19 nt, Artificial Sequence
  Description of Artificial Sequence: Synthetic oligonucleotide
ugagcaaagauggaggaag

SEQ ID NO: 1188061 - RNA, 19 nt, Artificial Sequence
  Description of Artificial Sequence: Synthetic oligonucleotide
uccaucauaaaccuccaga

SEQ ID NO: 1188062 - RNA, 19 nt, Artificial Sequence
  Description of Artificial Sequence: Synthetic oligonucleotide
aagaaccuucaccugcccc

SEQ ID NO: 1188063 - RNA, 19 nt, Artificial Sequence
  Description of Artificial Sequence: Synthetic oligonucleotide
ggauuccuuauucagaugg

SEQ ID NO: 1188064 - RNA, 19 nt, Artificial Sequence
  Description of Artificial Sequence: Synthetic oligonucleotide
uuuucuaggacagggaaca

SEQ ID NO: 1188065 - RNA, 19 nt, Artificial Sequence
  Description of Artificial Sequence: Synthetic oligonucleotide
aguccuacguaagagaagg

SEQ ID NO: 1188066 - RNA, 19 nt, Artificial Sequence
  Description of Artificial Sequence: Synthetic oligonucleotide
agguuucuggcguaagucc

SEQ ID NO: 1188067 - RNA, 19 nt, Artificial Sequence
  Description of Artificial Sequence: Synthetic oligonucleotide
ugagaucuuggacuggucc

SEQ ID NO: 1188068 - RNA, 19 nt, Artificial Sequence
  Description of Artificial Sequence: Synthetic oligonucleotide
aacugcacucaguaacucg

SEQ ID NO: 1188069 - RNA, 19 nt, Artificial Sequence
  Description of Artificial Sequence: Synthetic oligonucleotide
ucagcaaaaccacaacucu

SEQ ID NO: 1188070 - RNA, 19 nt, Artificial Sequence
  Description of Artificial Sequence: Synthetic oligonucleotide
uggcacguuaaucacaaug

SEQ ID NO: 1188071 - RNA, 19 nt, Artificial Sequence
  Description of Artificial Sequence: Synthetic oligonucleotide
auucaucacauucggcggc

SEQ ID NO: 1188072 - RNA, 19 nt, Artificial Sequence
  Description of Artificial Sequence: Synthetic oligonucleotide
cugauaaucaucugagaug

SEQ ID NO: 1188073 - RNA, 19 nt, Artificial Sequence
  Description of Artificial Sequence: Synthetic oligonucleotide
uguguaguggcucgaacug

SEQ ID NO: 1188074 - RNA, 19 nt, Artificial Sequence
  Description of Artificial Sequence: Synthetic oligonucleotide
ugagucaccacuccuaguc

SEQ ID NO: 1188075 - RNA, 19 nt, Artificial Sequence
  Description of Artificial Sequence: Synthetic oligonucleotide
aaacauacgcggguccugc

SEQ ID NO: 1188076 - RNA, 19 nt, Artificial Sequence
  Description of Artificial Sequence: Synthetic oligonucleotide
cuucuauuaaagcacccag

SEQ ID NO: 1188077 - RNA, 19 nt, Artificial Sequence
  Description of Artificial Sequence: Synthetic oligonucleotide
uaaguccuacguaagagaa

SEQ ID NO: 1188078 - RNA, 19 nt, Artificial Sequence
  Description of Artificial Sequence: Synthetic oligonucleotide
caauuuuagacagaagaac

SEQ ID NO: 1188079 - RNA, 19 nt, Artificial Sequence
  Description of Artificial Sequence: Synthetic oligonucleotide
ucgcgauuccuccucagcg

SEQ ID NO: 1188080 - RNA, 19 nt, Artificial Sequence
  Description of Artificial Sequence: Synthetic oligonucleotide
uucagaugggguuuaagaa

SEQ ID NO: 1188081 - RNA, 19 nt, Artificial Sequence
  Description of Artificial Sequence: Synthetic oligonucleotide
caugacaguguguaguggc

SEQ ID NO: 1188082 - RNA, 19 nt, Artificial Sequence
  Description of Artificial Sequence: Synthetic oligonucleotide
gaguaucaguuguaguacg

SEQ ID NO: 1188083 - RNA, 19 nt, Artificial Sequence
  Description of Artificial Sequence: Synthetic oligonucleotide
caagugauugaaaagggca

SEQ ID NO: 1188084 - RNA, 19 nt, Artificial Sequence
  Description of Artificial Sequence: Synthetic oligonucleotide
ggauaggacaauuuuagac

SEQ ID NO: 1188085 - RNA, 19 nt, Artificial Sequence
  Description of Artificial Sequence: Synthetic oligonucleotide
aguacgucaugacagugug

SEQ ID NO: 1188086 - RNA, 19 nt, Artificial Sequence
  Description of Artificial Sequence: Synthetic oligonucleotide
cugggauaggaaaagcgcc

SEQ ID NO: 1188087 - RNA, 19 nt, Artificial Sequence
  Description of Artificial Sequence: Synthetic oligonucleotide
acguaagagaaggcgaugc

SEQ ID NO: 1188088 - RNA, 19 nt, Artificial Sequence
  Description of Artificial Sequence: Synthetic oligonucleotide
agcaaaucucccucgauca

SEQ ID NO: 1188089 - RNA, 19 nt, Artificial Sequence
  Description of Artificial Sequence: Synthetic oligonucleotide
ucuugcugguuccuuaucu

SEQ ID NO: 1188090 - RNA, 19 nt, Artificial Sequence
  Description of Artificial Sequence: Synthetic oligonucleotide
uaagaaagaguaacccgac

SEQ ID NO: 1188091 - RNA, 19 nt, Artificial Sequence
  Description of Artificial Sequence: Synthetic oligonucleotide
gagaacagugguccaaaag

SEQ ID NO: 1188092 - RNA, 19 nt, Artificial Sequence
  Description of Artificial Sequence: Synthetic oligonucleotide
ucuggcguaaguccuacgu

SEQ ID NO: 1188093 - RNA, 19 nt, Artificial Sequence
  Description of Artificial Sequence: Synthetic oligonucleotide
agaaagaguaacccgacuu

SEQ ID NO: 1188094 - RNA, 19 nt, Artificial Sequence
  Description of Artificial Sequence: Synthetic oligonucleotide
ugggauaggaaaagcgccc

SEQ ID NO: 1188095 - RNA, 19 nt, Artificial Sequence
  Description of Artificial Sequence: Synthetic oligonucleotide
agucugauaaucaucugag

SEQ ID NO: 1188096 - RNA, 19 nt, Artificial Sequence
  Description of Artificial Sequence: Synthetic oligonucleotide
auaggaaaagcgcccuuuc

SEQ ID NO: 1188097 - RNA, 19 nt, Artificial Sequence
  Description of Artificial Sequence: Synthetic oligonucleotide
aggauuuuauucucagucu

SEQ ID NO: 1188098 - RNA, 19 nt, Artificial Sequence
  Description of Artificial Sequence: Synthetic oligonucleotide
augguauaggaccugggcu

SEQ ID NO: 1188099 - RNA, 19 nt, Artificial Sequence
  Description of Artificial Sequence: Synthetic oligonucleotide
caugguauaggaccugggc

SEQ ID NO: 1188100 - RNA, 19 nt, Artificial Sequence
  Description of Artificial Sequence: Synthetic oligonucleotide
aguaacccgacuucaguug

SEQ ID NO: 1188101 - RNA, 19 nt, Artificial Sequence
  Description of Artificial Sequence: Synthetic oligonucleotide
uuccuuauucagauggggu

SEQ ID NO: 1188102 - RNA, 19 nt, Artificial Sequence
  Description of Artificial Sequence: Synthetic oligonucleotide
ugaguaucaguuguaguac

SEQ ID NO: 1188103 - RNA, 19 nt, Artificial Sequence
  Description of Artificial Sequence: Synthetic oligonucleotide
agaagaaccuucaccugcc

SEQ ID NO: 1188104 - RNA, 19 nt, Artificial Sequence
  Description of Artificial Sequence: Synthetic oligonucleotide
acuuaguggccucaguugu

SEQ ID NO: 1188105 - RNA, 19 nt, Artificial Sequence
  Description of Artificial Sequence: Synthetic oligonucleotide
aacauacgcggguccugcc

SEQ ID NO: 1188106 - RNA, 19 nt, Artificial Sequence
  Description of Artificial Sequence: Synthetic oligonucleotide
auuccuuauucagaugggg

SEQ ID NO: 1188107 - RNA, 19 nt, Artificial Sequence
  Description of Artificial Sequence: Synthetic oligonucleotide
ucaguuguaguacgucaug

SEQ ID NO: 1188108 - RNA, 19 nt, Artificial Sequence
  Description of Artificial Sequence: Synthetic oligonucleotide
agauaaccaaugaugacug

SEQ ID NO: 1188109 - RNA, 19 nt, Artificial Sequence
  Description of Artificial Sequence: Synthetic oligonucleotide
cucgaagcaguaaggacag

SEQ ID NO: 1188110 - RNA, 19 nt, Artificial Sequence
  Description of Artificial Sequence: Synthetic oligonucleotide
ugagugacuuguugcaggc

SEQ ID NO: 1188111 - RNA, 19 nt, Artificial Sequence
  Description of Artificial Sequence: Synthetic oligonucleotide
gugauugaaaagggcaugg

SEQ ID NO: 1188112 - RNA, 19 nt, Artificial Sequence
  Description of Artificial Sequence: Synthetic oligonucleotide
auccauaugaucugggaua

SEQ ID NO: 1188113 - RNA, 19 nt, Artificial Sequence
  Description of Artificial Sequence: Synthetic oligonucleotide
gugaguaucaguuguagua

SEQ ID NO: 1188114 - RNA, 19 nt, Artificial Sequence
  Description of Artificial Sequence: Synthetic oligonucleotide
aguucgagggucgagggag

SEQ ID NO: 1188115 - RNA, 19 nt, Artificial Sequence
  Description of Artificial Sequence: Synthetic oligonucleotide
guaacucgaagcaguaagg

SEQ ID NO: 1188116 - RNA, 19 nt, Artificial Sequence
  Description of Artificial Sequence: Synthetic oligonucleotide
ucggcggcuucuauuaaag

SEQ ID NO: 1188117 - RNA, 19 nt, Artificial Sequence
  Description of Artificial Sequence: Synthetic oligonucleotide
uguaguacgucaugacagu

SEQ ID NO: 1188118 - RNA, 19 nt, Artificial Sequence
  Description of Artificial Sequence: Synthetic oligonucleotide
cuaagagucaucacaggga

SEQ ID NO: 1188119 - RNA, 19 nt, Artificial Sequence
  Description of Artificial Sequence: Synthetic oligonucleotide
guuguaguacgucaugaca

SEQ ID NO: 1188120 - RNA, 19 nt, Artificial Sequence
  Description of Artificial Sequence: Synthetic oligonucleotide
gauuccuuauucagauggg

SEQ ID NO: 1188121 - RNA, 19 nt, Artificial Sequence
  Description of Artificial Sequence: Synthetic oligonucleotide
auauuaguuucaggagagc

SEQ ID NO: 1188122 - RNA, 19 nt, Artificial Sequence
  Description of Artificial Sequence: Synthetic oligonucleotide
acguuaaucacaaugugau

SEQ ID NO: 1188123 - RNA, 19 nt, Artificial Sequence
  Description of Artificial Sequence: Synthetic oligonucleotide
cagcuuaagaaagaguaac

SEQ ID NO: 1188124 - RNA, 19 nt, Artificial Sequence
  Description of Artificial Sequence: Synthetic oligonucleotide
uaguacgucaugacagugu

SEQ ID NO: 1188125 - RNA, 19 nt, Artificial Sequence
  Description of Artificial Sequence: Synthetic oligonucleotide
cuucggaaugcccaucgcc

SEQ ID NO: 1188126 - RNA, 19 nt, Artificial Sequence
  Description of Artificial Sequence: Synthetic oligonucleotide
gauugaaaagggcauggua

SEQ ID NO: 1188127 - RNA, 19 nt, Artificial Sequence
  Description of Artificial Sequence: Synthetic oligonucleotide
agggagaccccucugcgag

SEQ ID NO: 1188128 - RNA, 19 nt, Artificial Sequence
  Description of Artificial Sequence: Synthetic oligonucleotide
caaguucgagggucgaggg

SEQ ID NO: 1188129 - RNA, 19 nt, Artificial Sequence
  Description of Artificial Sequence: Synthetic oligonucleotide
uacgucaugacagugugua

SEQ ID NO: 1188130 - RNA, 19 nt, Artificial Sequence
  Description of Artificial Sequence: Synthetic oligonucleotide
ugguuccuuaucuaagagu

SEQ ID NO: 1188131 - RNA, 19 nt, Artificial Sequence
  Description of Artificial Sequence: Synthetic oligonucleotide
acaauucaucacauucggc

SEQ ID NO: 1188132 - RNA, 19 nt, Artificial Sequence
  Description of Artificial Sequence: Synthetic oligonucleotide
uaacucgaagcaguaagga

SEQ ID NO: 1188133 - RNA, 19 nt, Artificial Sequence
  Description of Artificial Sequence: Synthetic oligonucleotide
uggcguaaguccuacguaa

SEQ ID NO: 1188134 - RNA, 19 nt, Artificial Sequence
  Description of Artificial Sequence: Synthetic oligonucleotide
agaguaacccgacuucagu

SEQ ID NO: 1188135 - RNA, 19 nt, Artificial Sequence
  Description of Artificial Sequence: Synthetic oligonucleotide
guaaguccuacguaagaga

SEQ ID NO: 1188136 - RNA, 19 nt, Artificial Sequence
  Description of Artificial Sequence: Synthetic oligonucleotide
cacguuaaucacaauguga

SEQ ID NO: 1188137 - RNA, 19 nt, Artificial Sequence
  Description of Artificial Sequence: Synthetic oligonucleotide
ugggcucgaauacucaaaa

SEQ ID NO: 1188138 - RNA, 19 nt, Artificial Sequence
  Description of Artificial Sequence: Synthetic oligonucleotide
agugauugaaaagggcaug

SEQ ID NO: 1188139 - RNA, 19 nt, Artificial Sequence
  Description of Artificial Sequence: Synthetic oligonucleotide
guaacccgacuucaguugc

SEQ ID NO: 1188140 - RNA, 19 nt, Artificial Sequence
  Description of Artificial Sequence: Synthetic oligonucleotide
uuccuuaucuaagagucau

SEQ ID NO: 1188141 - RNA, 19 nt, Artificial Sequence
  Description of Artificial Sequence: Synthetic oligonucleotide
uccaugugggugaguauca

SEQ ID NO: 1188142 - RNA, 19 nt, Artificial Sequence
  Description of Artificial Sequence: Synthetic oligonucleotide
ugccggacagugaggaucc

SEQ ID NO: 1188143 - RNA, 19 nt, Artificial Sequence
  Description of Artificial Sequence: Synthetic oligonucleotide
cacuuaguggccucaguug

SEQ ID NO: 1188144 - RNA, 19 nt, Artificial Sequence
  Description of Artificial Sequence: Synthetic oligonucleotide
aaaacauacgcggguccug

SEQ ID NO: 1188145 - RNA, 19 nt, Artificial Sequence
  Description of Artificial Sequence: Synthetic oligonucleotide
acuucggaaugcccaucgc

SEQ ID NO: 1188146 - RNA, 19 nt, Artificial Sequence
  Description of Artificial Sequence: Synthetic oligonucleotide
cccucgaucaucuucauuc

SEQ ID NO: 1188147 - RNA, 19 nt, Artificial Sequence
  Description of Artificial Sequence: Synthetic oligonucleotide
gaggacggcaguccuugcg

SEQ ID NO: 1188148 - RNA, 19 nt, Artificial Sequence
  Description of Artificial Sequence: Synthetic oligonucleotide
cuuguugcaggcuccaaga

SEQ ID NO: 1188149 - RNA, 19 nt, Artificial Sequence
  Description of Artificial Sequence: Synthetic oligonucleotide
ucgagggagaccccucugc

SEQ ID NO: 1188150 - RNA, 19 nt, Artificial Sequence
  Description of Artificial Sequence: Synthetic oligonucleotide
cuauuaaagcacccagguc

SEQ ID NO: 1188151 - RNA, 19 nt, Artificial Sequence
  Description of Artificial Sequence: Synthetic oligonucleotide
gcacaauucaucacauucg

SEQ ID NO: 1188152 - RNA, 19 nt, Artificial Sequence
  Description of Artificial Sequence: Synthetic oligonucleotide
aggauuauucuuccaggau

SEQ ID NO: 1188153 - RNA, 19 nt, Artificial Sequence
  Description of Artificial Sequence: Synthetic oligonucleotide
cacucaguaacucgaagca

SEQ ID NO: 1188154 - RNA, 19 nt, Artificial Sequence
  Description of Artificial Sequence: Synthetic oligonucleotide
cugucaagcuucauuccug

SEQ ID NO: 1188155 - RNA, 19 nt, Artificial Sequence
  Description of Artificial Sequence: Synthetic oligonucleotide
uuuuauucucagucugaua

SEQ ID NO: 1188156 - RNA, 19 nt, Artificial Sequence
  Description of Artificial Sequence: Synthetic oligonucleotide
uuccaggauuccuuauuca

SEQ ID NO: 1188157 - RNA, 19 nt, Artificial Sequence
  Description of Artificial Sequence: Synthetic oligonucleotide
uuaguggccucaguuguga

SEQ ID NO: 1188158 - RNA, 19 nt, Artificial Sequence
  Description of Artificial Sequence: Synthetic oligonucleotide
gcacucaguaacucgaagc

SEQ ID NO: 1188159 - RNA, 19 nt, Artificial Sequence
  Description of Artificial Sequence: Synthetic oligonucleotide
aagugccggacagugagga

SEQ ID NO: 1188160 - RNA, 19 nt, Artificial Sequence
  Description of Artificial Sequence: Synthetic oligonucleotide
aggauaggacaauuuuaga

SEQ ID NO: 1188161 - RNA, 19 nt, Artificial Sequence
  Description of Artificial Sequence: Synthetic oligonucleotide
gacgccucgcgauuccucc

SEQ ID NO: 1188162 - RNA, 19 nt, Artificial Sequence
  Description of Artificial Sequence: Synthetic oligonucleotide
aaguccuacguaagagaag

SEQ ID NO: 1188163 - RNA, 19 nt, Artificial Sequence
  Description of Artificial Sequence: Synthetic oligonucleotide
agagaaggcgaugcucugg

SEQ ID NO: 1188164 - RNA, 19 nt, Artificial Sequence
  Description of Artificial Sequence: Synthetic oligonucleotide
gagucaccacuccuagucc

SEQ ID NO: 1188165 - RNA, 19 nt, Artificial Sequence
  Description of Artificial Sequence: Synthetic oligonucleotide
ugaggauccccaacuuccu

SEQ ID NO: 1188166 - RNA, 19 nt, Artificial Sequence
  Description of Artificial Sequence: Synthetic oligonucleotide
cagcaaaucucccucgauc

SEQ ID NO: 1188167 - RNA, 19 nt, Artificial Sequence
  Description of Artificial Sequence: Synthetic oligonucleotide
acgcgcugagaucuuggac

SEQ ID NO: 1188168 - RNA, 19 nt, Artificial Sequence
  Description of Artificial Sequence: Synthetic oligonucleotide
uccugaugcaguucaccac

SEQ ID NO: 1188169 - RNA, 19 nt, Artificial Sequence
  Description of Artificial Sequence: Synthetic oligonucleotide
ucugcgagcggggagggga

SEQ ID NO: 1188170 - RNA, 19 nt, Artificial Sequence
  Description of Artificial Sequence: Synthetic oligonucleotide
aaguucgagggucgaggga

SEQ ID NO: 1188171 - RNA, 19 nt, Artificial Sequence
  Description of Artificial Sequence: Synthetic oligonucleotide
ggcggcuucuauuaaagca

SEQ ID NO: 1188172 - RNA, 19 nt, Artificial Sequence
  Description of Artificial Sequence: Synthetic oligonucleotide
caggauuauucuuccagga

SEQ ID NO: 1188173 - RNA, 19 nt, Artificial Sequence
  Description of Artificial Sequence: Synthetic oligonucleotide
agcagcuggcacguuaauc

SEQ ID NO: 1188174 - RNA, 19 nt, Artificial Sequence
  Description of Artificial Sequence: Synthetic oligonucleotide
caguugugaggcuuguguc

SEQ ID NO: 1188175 - RNA, 19 nt, Artificial Sequence
  Description of Artificial Sequence: Synthetic oligonucleotide
gaagaaccuucaccugccc

SEQ ID NO: 1188176 - RNA, 19 nt, Artificial Sequence
  Description of Artificial Sequence: Synthetic oligonucleotide
cagugguccaaaagaauca

SEQ ID NO: 1188177 - RNA, 19 nt, Artificial Sequence
  Description of Artificial Sequence: Synthetic oligonucleotide
guaaggacagcaccucauc

SEQ ID NO: 1188178 - RNA, 19 nt, Artificial Sequence
  Description of Artificial Sequence: Synthetic oligonucleotide
uucucuccgcacaggaauc

SEQ ID NO: 1188179 - RNA, 19 nt, Artificial Sequence
  Description of Artificial Sequence: Synthetic oligonucleotide
auucucagucugauaauca

SEQ ID NO: 1188180 - RNA, 19 nt, Artificial Sequence
  Description of Artificial Sequence: Synthetic oligonucleotide
aggacggcaguccuugcgu

SEQ ID NO: 1188181 - RNA, 19 nt, Artificial Sequence
  Description of Artificial Sequence: Synthetic oligonucleotide
cuaggacagggaacaaauc

SEQ ID NO: 1188182 - RNA, 19 nt, Artificial Sequence
  Description of Artificial Sequence: Synthetic oligonucleotide
gcaaguucgagggucgagg

SEQ ID NO: 1188183 - RNA, 19 nt, Artificial Sequence
  Description of Artificial Sequence: Synthetic oligonucleotide
uccuuaucuaagagucauc

SEQ ID NO: 1188184 - RNA, 19 nt, Artificial Sequence
  Description of Artificial Sequence: Synthetic oligonucleotide
aguaucaguuguaguacgu

SEQ ID NO: 1188185 - RNA, 19 nt, Artificial Sequence
  Description of Artificial Sequence: Synthetic oligonucleotide
cuugcguugcccugaccug

SEQ ID NO: 1188186 - RNA, 19 nt, Artificial Sequence
  Description of Artificial Sequence: Synthetic oligonucleotide
uacguaagagaaggcgaug

SEQ ID NO: 1188187 - RNA, 19 nt, Artificial Sequence
  Description of Artificial Sequence: Synthetic oligonucleotide
ugccaaguggcggaggccu

SEQ ID NO: 1188188 - RNA, 19 nt, Artificial Sequence
  Description of Artificial Sequence: Synthetic oligonucleotide
uaguggcucgaacugcauc

SEQ ID NO: 1188189 - RNA, 19 nt, Artificial Sequence
  Description of Artificial Sequence: Synthetic oligonucleotide
ggguuuaagaagccccaag

SEQ ID NO: 1188190 - RNA, 19 nt, Artificial Sequence
  Description of Artificial Sequence: Synthetic oligonucleotide
uucuaggacagggaacaaa

SEQ ID NO: 1188191 - RNA, 19 nt, Artificial Sequence
  Description of Artificial Sequence: Synthetic oligonucleotide
caggcgggagaacucuugg

SEQ ID NO: 1188192 - RNA, 19 nt, Artificial Sequence
  Description of Artificial Sequence: Synthetic oligonucleotide
gcagccucaaccuugccca

SEQ ID NO: 1188193 - RNA, 19 nt, Artificial Sequence
  Description of Artificial Sequence: Synthetic oligonucleotide
augugggugaguaucaguu

SEQ ID NO: 1188194 - RNA, 19 nt, Artificial Sequence
  Description of Artificial Sequence: Synthetic oligonucleotide
aucgccucccucugccuuc

SEQ ID NO: 1188195 - RNA, 19 nt, Artificial Sequence
  Description of Artificial Sequence: Synthetic oligonucleotide
guaguacgucaugacagug

SEQ ID NO: 1188196 - RNA, 19 nt, Artificial Sequence
  Description of Artificial Sequence: Synthetic oligonucleotide
cuuggguggggcugcgagc

SEQ ID NO: 1188197 - RNA, 19 nt, Artificial Sequence
  Description of Artificial Sequence: Synthetic oligonucleotide
cagguuucuggcguaaguc

SEQ ID NO: 1188198 - RNA, 19 nt, Artificial Sequence
  Description of Artificial Sequence: Synthetic oligonucleotide
acauacgcggguccugcca

SEQ ID NO: 1188199 - RNA, 19 nt, Artificial Sequence
  Description of Artificial Sequence: Synthetic oligonucleotide
uguuugacagcaggauuau

SEQ ID NO: 1188200 - RNA, 19 nt, Artificial Sequence
  Description of Artificial Sequence: Synthetic oligonucleotide
cgcacaauucaucacauuc

SEQ ID NO: 1188201 - RNA, 19 nt, Artificial Sequence
  Description of Artificial Sequence: Synthetic oligonucleotide
caagugccggacagugagg

SEQ ID NO: 1188202 - RNA, 19 nt, Artificial Sequence
  Description of Artificial Sequence: Synthetic oligonucleotide
guaucaguuguaguacguc

SEQ ID NO: 1188203 - RNA, 19 nt, Artificial Sequence
  Description of Artificial Sequence: Synthetic oligonucleotide
cucgcgauuccuccucagc

SEQ ID NO: 1188204 - RNA, 19 nt, Artificial Sequence
  Description of Artificial Sequence: Synthetic oligonucleotide
cauucggcggcuucuauua

SEQ ID NO: 1188205 - RNA, 19 nt, Artificial Sequence
  Description of Artificial Sequence: Synthetic oligonucleotide
uucuggcguaaguccuacg

SEQ ID NO: 1188206 - RNA, 19 nt, Artificial Sequence
  Description of Artificial Sequence: Synthetic oligonucleotide
acgucaugacaguguguag

SEQ ID NO: 1188207 - RNA, 19 nt, Artificial Sequence
  Description of Artificial Sequence: Synthetic oligonucleotide
gucugauaaucaucugaga

SEQ ID NO: 1188208 - RNA, 19 nt, Artificial Sequence
  Description of Artificial Sequence: Synthetic oligonucleotide
uaacccgacuucaguugcu

SEQ ID NO: 1188209 - RNA, 19 nt, Artificial Sequence
  Description of Artificial Sequence: Synthetic oligonucleotide
gcacguuaaucacaaugug

SEQ ID NO: 1188210 - RNA, 19 nt, Artificial Sequence
  Description of Artificial Sequence: Synthetic oligonucleotide
guguguaguggcucgaacu

SEQ ID NO: 1188211 - RNA, 19 nt, Artificial Sequence
  Description of Artificial Sequence: Synthetic oligonucleotide
uuucuggcguaaguccuac

SEQ ID NO: 1188212 - RNA, 19 nt, Artificial Sequence
  Description of Artificial Sequence: Synthetic oligonucleotide
uccccucgcacaauucauc

SEQ ID NO: 1188213 - RNA, 19 nt, Artificial Sequence
  Description of Artificial Sequence: Synthetic oligonucleotide
gggcugagugacuuguugc

SEQ ID NO: 1188214 - RNA, 19 nt, Artificial Sequence
  Description of Artificial Sequence: Synthetic oligonucleotide
aguaaggacagcaccucau

SEQ ID NO: 1188215 - RNA, 19 nt, Artificial Sequence
  Description of Artificial Sequence: Synthetic oligonucleotide
caugacaaguuucaggguu

SEQ ID NO: 1188216 - RNA, 19 nt, Artificial Sequence
  Description of Artificial Sequence: Synthetic oligonucleotide
ugacaguguguaguggcuc

SEQ ID NO: 1188217 - RNA, 19 nt, Artificial Sequence
  Description of Artificial Sequence: Synthetic oligonucleotide
ucggaaugcccaucgccuc

SEQ ID NO: 1188218 - RNA, 19 nt, Artificial Sequence
  Description of Artificial Sequence: Synthetic oligonucleotide
acauucggcggcuucuauu

SEQ ID NO: 1188219 - RNA, 19 nt, Artificial Sequence
  Description of Artificial Sequence: Synthetic oligonucleotide
ccuacguaagagaaggcga

SEQ ID NO: 1188220 - RNA, 19 nt, Artificial Sequence
  Description of Artificial Sequence: Synthetic oligonucleotide
gugggugaguaucaguugu

SEQ ID NO: 1188221 - RNA, 19 nt, Artificial Sequence
  Description of Artificial Sequence: Synthetic oligonucleotide
auaugaucugggauaggaa

SEQ ID NO: 1188222 - RNA, 19 nt, Artificial Sequence
  Description of Artificial Sequence: Synthetic oligonucleotide
gcgcugucaagcuucauuc

SEQ ID NO: 1188223 - RNA, 19 nt, Artificial Sequence
  Description of Artificial Sequence: Synthetic oligonucleotide
agaccccucugcgagcggg

SEQ ID NO: 1188224 - RNA, 19 nt, Artificial Sequence
  Description of Artificial Sequence: Synthetic oligonucleotide
cacggaacugcacucagua

SEQ ID NO: 1188225 - RNA, 19 nt, Artificial Sequence
  Description of Artificial Sequence: Synthetic oligonucleotide
ccugaucgcacccgggugg

SEQ ID NO: 1188226 - RNA, 19 nt, Artificial Sequence
  Description of Artificial Sequence: Synthetic oligonucleotide
cggaacugcacucaguaac

SEQ ID NO: 1188227 - RNA, 19 nt, Artificial Sequence
  Description of Artificial Sequence: Synthetic oligonucleotide
gcggcuucuauuaaagcac

SEQ ID NO: 1188228 - RNA, 19 nt, Artificial Sequence
  Description of Artificial Sequence: Synthetic oligonucleotide
ucccuugcuacaucacaua

SEQ ID NO: 1188229 - RNA, 19 nt, Artificial Sequence
  Description of Artificial Sequence: Synthetic oligonucleotide
ggauuauucuuccaggauu

SEQ ID NO: 1188230 - RNA, 19 nt, Artificial Sequence
  Description of Artificial Sequence: Synthetic oligonucleotide
guguaguggcucgaacugc

SEQ ID NO: 1188231 - RNA, 19 nt, Artificial Sequence
  Description of Artificial Sequence: Synthetic oligonucleotide
agcaaguucgagggucgag

SEQ ID NO: 1188232 - RNA, 19 nt, Artificial Sequence
  Description of Artificial Sequence: Synthetic oligonucleotide
aaguggcggaggccugucu

SEQ ID NO: 1188233 - RNA, 19 nt, Artificial Sequence
  Description of Artificial Sequence: Synthetic oligonucleotide
ugcccaucgccucccucug

SEQ ID NO: 1188234 - RNA, 19 nt, Artificial Sequence
  Description of Artificial Sequence: Synthetic oligonucleotide
gggugaguaucaguuguag

SEQ ID NO: 1188235 - RNA, 19 nt, Artificial Sequence
  Description of Artificial Sequence: Synthetic oligonucleotide
gaacugcacucaguaacuc

SEQ ID NO: 1188236 - RNA, 19 nt, Artificial Sequence
  Description of Artificial Sequence: Synthetic oligonucleotide
cguaaguccuacguaagag

SEQ ID NO: 1188237 - RNA, 19 nt, Artificial Sequence
  Description of Artificial Sequence: Synthetic oligonucleotide
cuugcugguuccuuaucua

SEQ ID NO: 1188238 - RNA, 19 nt, Artificial Sequence
  Description of Artificial Sequence: Synthetic oligonucleotide
cauccauaugaucugggau

SEQ ID NO: 1188239 - RNA, 19 nt, Artificial Sequence
  Description of Artificial Sequence: Synthetic oligonucleotide
ggcacguuaaucacaaugu

SEQ ID NO: 1188240 - RNA, 19 nt, Artificial Sequence
  Description of Artificial Sequence: Synthetic oligonucleotide
auacgcggguccugccaag

SEQ ID NO: 1188241 - RNA, 19 nt, Artificial Sequence
  Description of Artificial Sequence: Synthetic oligonucleotide
cuacguaagagaaggcgau

SEQ ID NO: 1188242 - RNA, 19 nt, Artificial Sequence
  Description of Artificial Sequence: Synthetic oligonucleotide
acggaacugcacucaguaa

SEQ ID NO: 1188243 - RNA, 19 nt, Artificial Sequence
  Description of Artificial Sequence: Synthetic oligonucleotide
cagccacuucggaaugccc

SEQ ID NO: 1188244 - RNA, 19 nt, Artificial Sequence
  Description of Artificial Sequence: Synthetic oligonucleotide
caccugucccaggaucucg

SEQ ID NO: 1188245 - RNA, 19 nt, Artificial Sequence
  Description of Artificial Sequence: Synthetic oligonucleotide
gagugagucaccacuccua

SEQ ID NO: 1188246 - RNA, 19 nt, Artificial Sequence
  Description of Artificial Sequence: Synthetic oligonucleotide
cucacaaaagcuggcaggu

SEQ ID NO: 1188247 - RNA, 19 nt, Artificial Sequence
  Description of Artificial Sequence: Synthetic oligonucleotide
caguaaggacagcaccuca

SEQ ID NO: 1188248 - RNA, 19 nt, Artificial Sequence
  Description of Artificial Sequence: Synthetic oligonucleotide
cugccacggaacugcacuc

SEQ ID NO: 1188249 - RNA, 19 nt, Artificial Sequence
  Description of Artificial Sequence: Synthetic oligonucleotide
ccgugcagaaucuuggaga

SEQ ID NO: 1188250 - RNA, 19 nt, Artificial Sequence
  Description of Artificial Sequence: Synthetic oligonucleotide
gaccugggcucuguuguac

SEQ ID NO: 1188251 - RNA, 19 nt, Artificial Sequence
  Description of Artificial Sequence: Synthetic oligonucleotide
ccaagcauacugcaugaca

SEQ ID NO: 1188252 - RNA, 19 nt, Artificial Sequence
  Description of Artificial Sequence: Synthetic oligonucleotide
ucgagggucgagggagacc

SEQ ID NO: 1188253 - RNA, 19 nt, Artificial Sequence
  Description of Artificial Sequence: Synthetic oligonucleotide
ggcguaaguccuacguaag

SEQ ID NO: 1188254 - RNA, 19 nt, Artificial Sequence
  Description of Artificial Sequence: Synthetic oligonucleotide
uucgagggucgagggagac

SEQ ID NO: 1188255 - RNA, 19 nt, Artificial Sequence
  Description of Artificial Sequence: Synthetic oligonucleotide
gcgcugagaucuuggacug

SEQ ID NO: 1188256 - RNA, 19 nt, Artificial Sequence
  Description of Artificial Sequence: Synthetic oligonucleotide
cugggcucgaauacucaaa

SEQ ID NO: 1188257 - RNA, 19 nt, Artificial Sequence
  Description of Artificial Sequence: Synthetic oligonucleotide
gucgagggagaccccucug

SEQ ID NO: 1188258 - RNA, 19 nt, Artificial Sequence
  Description of Artificial Sequence: Synthetic oligonucleotide
cgagggucgagggagaccc

SEQ ID NO: 1188259 - RNA, 19 nt, Artificial Sequence
  Description of Artificial Sequence: Synthetic oligonucleotide
aggggacgccucgcgauuc

SEQ ID NO: 1188260 - RNA, 19 nt, Artificial Sequence
  Description of Artificial Sequence: Synthetic oligonucleotide
cugaucgcacccggguggc

SEQ ID NO: 1188261 - RNA, 19 nt, Artificial Sequence
  Description of Artificial Sequence: Synthetic oligonucleotide
cugcgagcuucuccagggc

SEQ ID NO: 1188262 - RNA, 19 nt, Artificial Sequence
  Description of Artificial Sequence: Synthetic oligonucleotide
ucgcacaauucaucacauu

SEQ ID NO: 1188263 - RNA, 19 nt, Artificial Sequence
  Description of Artificial Sequence: Synthetic oligonucleotide
agcuggcacguuaaucaca

SEQ ID NO: 1188264 - RNA, 19 nt, Artificial Sequence
  Description of Artificial Sequence: Synthetic oligonucleotide
ggcuucuauuaaagcaccc

SEQ ID NO: 1188265 - RNA, 19 nt, Artificial Sequence
  Description of Artificial Sequence: Synthetic oligonucleotide
cguuaaucacaaugugaug

SEQ ID NO: 1188266 - RNA, 19 nt, Artificial Sequence
  Description of Artificial Sequence: Synthetic oligonucleotide
ucacaaaagcuggcagguu

SEQ ID NO: 1188267 - RNA, 19 nt, Artificial Sequence
  Description of Artificial Sequence: Synthetic oligonucleotide
cauacgcggguccugccaa

SEQ ID NO: 1188268 - RNA, 19 nt, Artificial Sequence
  Description of Artificial Sequence: Synthetic oligonucleotide
ucccucgaucaucuucauu

SEQ ID NO: 1188269 - RNA, 19 nt, Artificial Sequence
  Description of Artificial Sequence: Synthetic oligonucleotide
gaccccucugcgagcgggg

SEQ ID NO: 1188270 - RNA, 19 nt, Artificial Sequence
  Description of Artificial Sequence: Synthetic oligonucleotide
gcaugguauaggaccuggg

SEQ ID NO: 1188271 - RNA, 19 nt, Artificial Sequence
  Description of Artificial Sequence: Synthetic oligonucleotide
ccgacuucaguugcuuucc

SEQ ID NO: 1188272 - RNA, 19 nt, Artificial Sequence
  Description of Artificial Sequence: Synthetic oligonucleotide
gagaccccucugcgagcgg

SEQ ID NO: 1188273 - RNA, 19 nt, Artificial Sequence
  Description of Artificial Sequence: Synthetic oligonucleotide
acgcggguccugccaagug

SEQ ID NO: 1188274 - RNA, 19 nt, Artificial Sequence
  Description of Artificial Sequence: Synthetic oligonucleotide
ggugaguaucaguuguagu

SEQ ID NO: 1188275 - RNA, 19 nt, Artificial Sequence
  Description of Artificial Sequence: Synthetic oligonucleotide
gccacggaacugcacucag

SEQ ID NO: 1188276 - RNA, 19 nt, Artificial Sequence
  Description of Artificial Sequence: Synthetic oligonucleotide
ggaacaaaucuaggaggca

SEQ ID NO: 1188277 - RNA, 19 nt, Artificial Sequence
  Description of Artificial Sequence: Synthetic oligonucleotide
gcguaaguccuacguaaga

SEQ ID NO: 1188278 - RNA, 19 nt, Artificial Sequence
  Description of Artificial Sequence: Synthetic oligonucleotide
guccuacguaagagaaggc

SEQ ID NO: 1188279 - RNA, 19 nt, Artificial Sequence
  Description of Artificial Sequence: Synthetic oligonucleotide
cuggcguaaguccuacgua

SEQ ID NO: 1188280 - RNA, 19 nt, Artificial Sequence
  Description of Artificial Sequence: Synthetic oligonucleotide
caugugggugaguaucagu

SEQ ID NO: 1188281 - RNA, 19 nt, Artificial Sequence
  Description of Artificial Sequence: Synthetic oligonucleotide
cggcuucuauuaaagcacc

SEQ ID NO: 1188282 - RNA, 19 nt, Artificial Sequence
  Description of Artificial Sequence: Synthetic oligonucleotide
agugccggacagugaggau

SEQ ID NO: 1188283 - RNA, 19 nt, Artificial Sequence
  Description of Artificial Sequence: Synthetic oligonucleotide
uacgcggguccugccaagu

SEQ ID NO: 1188284 - RNA, 19 nt, Artificial Sequence
  Description of Artificial Sequence: Synthetic oligonucleotide
cacgcgcugagaucuugga

SEQ ID NO: 1188285 - RNA, 19 nt, Artificial Sequence
  Description of Artificial Sequence: Synthetic oligonucleotide
gggccuucgccaccugucc

SEQ ID NO: 1188286 - RNA, 19 nt, Artificial Sequence
  Description of Artificial Sequence: Synthetic oligonucleotide
cagccucaaccuugcccag

SEQ ID NO: 1188287 - RNA, 19 nt, Artificial Sequence
  Description of Artificial Sequence: Synthetic oligonucleotide
cugcgagcggggaggggac

SEQ ID NO: 1188288 - RNA, 19 nt, Artificial Sequence
  Description of Artificial Sequence: Synthetic oligonucleotide
ggaaugcccaucgccuccc

SEQ ID NO: 1188289 - RNA, 19 nt, Artificial Sequence
  Description of Artificial Sequence: Synthetic oligonucleotide
cucgcacaauucaucacau

SEQ ID NO: 1188290 - RNA, 19 nt, Artificial Sequence
  Description of Artificial Sequence: Synthetic oligonucleotide
ccacgcgcugagaucuugg

SEQ ID NO: 1188291 - RNA, 19 nt, Artificial Sequence
  Description of Artificial Sequence: Synthetic oligonucleotide
ggaacugcacucaguaacu

SEQ ID NO: 1188292 - RNA, 19 nt, Artificial Sequence
  Description of Artificial Sequence: Synthetic oligonucleotide
cgcgauuccuccucagcgc

SEQ ID NO: 1188293 - RNA, 19 nt, Artificial Sequence
  Description of Artificial Sequence: Synthetic oligonucleotide
cugcacucaguaacucgaa

SEQ ID NO: 1188294 - RNA, 19 nt, Artificial Sequence
  Description of Artificial Sequence: Synthetic oligonucleotide
acgccucgcgauuccuccu

SEQ ID NO: 1188295 - RNA, 19 nt, Artificial Sequence
  Description of Artificial Sequence: Synthetic oligonucleotide
cuguacacccaggauuuua

SEQ ID NO: 1188296 - RNA, 19 nt, Artificial Sequence
  Description of Artificial Sequence: Synthetic oligonucleotide
ccuugcguugcccugaccu

SEQ ID NO: 1188297 - RNA, 19 nt, Artificial Sequence
  Description of Artificial Sequence: Synthetic oligonucleotide
cugcagcaaaucagcagcu

SEQ ID NO: 1188298 - RNA, 19 nt, Artificial Sequence
  Description of Artificial Sequence: Synthetic oligonucleotide
guccuugcguugcccugac

SEQ ID NO: 1188299 - RNA, 19 nt, Artificial Sequence
  Description of Artificial Sequence: Synthetic oligonucleotide
ggccuucgccaccuguccc

SEQ ID NO: 1188300 - RNA, 19 nt, Artificial Sequence
  Description of Artificial Sequence: Synthetic oligonucleotide
caccugccccugagaacag

SEQ ID NO: 1188301 - RNA, 19 nt, Artificial Sequence
  Description of Artificial Sequence: Synthetic oligonucleotide
cgcggguccugccaagugg

SEQ ID NO: 1188302 - RNA, 19 nt, Artificial Sequence
  Description of Artificial Sequence: Synthetic oligonucleotide
agcggggaggggacgccuc

SEQ ID NO: 1188303 - RNA, 19 nt, Artificial Sequence
  Description of Artificial Sequence: Synthetic oligonucleotide
gcggguccugccaaguggc

SEQ ID NO: 1188304 - RNA, 19 nt, Artificial Sequence
  Description of Artificial Sequence: Synthetic oligonucleotide
ucaggccgugcagaaucuu

SEQ ID NO: 1188305 - RNA, 19 nt, Artificial Sequence
  Description of Artificial Sequence: Synthetic oligonucleotide
cagccacgcgcugagaucu

SEQ ID NO: 1188306 - RNA, 19 nt, Artificial Sequence
  Description of Artificial Sequence: Synthetic oligonucleotide
ccccucgcacaauucauca

SEQ ID NO: 1188307 - RNA, 19 nt, Artificial Sequence
  Description of Artificial Sequence: Synthetic oligonucleotide
ggugcacuuaguggccuca

SEQ ID NO: 1188308 - RNA, 19 nt, Artificial Sequence
  Description of Artificial Sequence: Synthetic oligonucleotide
gccuucgccaccuguccca

SEQ ID NO: 1188309 - RNA, 19 nt, Artificial Sequence
  Description of Artificial Sequence: Synthetic oligonucleotide
gggagaccccucugcgagc

SEQ ID NO: 1188310 - RNA, 19 nt, Artificial Sequence
  Description of Artificial Sequence: Synthetic oligonucleotide
caaguggcggaggccuguc

SEQ ID NO: 1188311 - RNA, 19 nt, Artificial Sequence
  Description of Artificial Sequence: Synthetic oligonucleotide
guucgagggucgagggaga

SEQ ID NO: 1188312 - RNA, 19 nt, Artificial Sequence
  Description of Artificial Sequence: Synthetic oligonucleotide
cgcgcugagaucuuggacu

SEQ ID NO: 1188313 - RNA, 19 nt, Artificial Sequence
  Description of Artificial Sequence: Synthetic oligonucleotide
ggcaguccuugcguugccc

SEQ ID NO: 1188314 - RNA, 19 nt, Artificial Sequence
  Description of Artificial Sequence: Synthetic oligonucleotide
gcggaggccugucuuccac

SEQ ID NO: 1188315 - RNA, 19 nt, Artificial Sequence
  Description of Artificial Sequence: Synthetic oligonucleotide
ugaucgcacccggguggcu

SEQ ID NO: 1188316 - RNA, 19 nt, Artificial Sequence
  Description of Artificial Sequence: Synthetic oligonucleotide
guacacccaggauuuuauu

SEQ ID NO: 1188317 - RNA, 19 nt, Artificial Sequence
  Description of Artificial Sequence: Synthetic oligonucleotide
ggggacgccucgcgauucc

SEQ ID NO: 1188318 - RNA, 19 nt, Artificial Sequence
  Description of Artificial Sequence: Synthetic oligonucleotide
gucaagcuucauuccugau

SEQ ID NO: 1188319 - RNA, 19 nt, Artificial Sequence
  Description of Artificial Sequence: Synthetic oligonucleotide
guggcugggcucgaauacu

SEQ ID NO: 1188320 - RNA, 19 nt, Artificial Sequence
  Description of Artificial Sequence: Synthetic oligonucleotide
cacaacucugcagggaauu

SEQ ID NO: 1188321 - RNA, 19 nt, Artificial Sequence
  Description of Artificial Sequence: Synthetic oligonucleotide
gcgaugcucuggcuccaug

SEQ ID NO: 1188322 - RNA, 19 nt, Artificial Sequence
  Description of Artificial Sequence: Synthetic oligonucleotide
gggauaggaaaagcgcccu

SEQ ID NO: 1188323 - RNA, 19 nt, Artificial Sequence
  Description of Artificial Sequence: Synthetic oligonucleotide
cuucacaggauaggacaau

SEQ ID NO: 1188324 - RNA, 19 nt, Artificial Sequence
  Description of Artificial Sequence: Synthetic oligonucleotide
gggugcacuuaguggccuc

SEQ ID NO: 1188325 - RNA, 19 nt, Artificial Sequence
  Description of Artificial Sequence: Synthetic oligonucleotide
ccacuccuaguccccucgc

SEQ ID NO: 1188326 - RNA, 19 nt, Artificial Sequence
  Description of Artificial Sequence: Synthetic oligonucleotide
gggcugcgagcuucuccag

SEQ ID NO: 1188327 - RNA, 19 nt, Artificial Sequence
  Description of Artificial Sequence: Synthetic oligonucleotide
accccucugcgagcgggga

SEQ ID NO: 1188328 - RNA, 19 nt, Artificial Sequence
  Description of Artificial Sequence: Synthetic oligonucleotide
aggcgaugcucuggcucca

SEQ ID NO: 1188329 - RNA, 19 nt, Artificial Sequence
  Description of Artificial Sequence: Synthetic oligonucleotide
guucaccacugugcggucu

SEQ ID NO: 1188330 - RNA, 19 nt, Artificial Sequence
  Description of Artificial Sequence: Synthetic oligonucleotide
cggcggcuucuauuaaagc

SEQ ID NO: 1188331 - RNA, 19 nt, Artificial Sequence
  Description of Artificial Sequence: Synthetic oligonucleotide
gggguuuaagaagccccaa

SEQ ID NO: 1188332 - RNA, 19 nt, Artificial Sequence
  Description of Artificial Sequence: Synthetic oligonucleotide
guacgucaugacagugugu

SEQ ID NO: 1188333 - RNA, 19 nt, Artificial Sequence
  Description of Artificial Sequence: Synthetic oligonucleotide
ggaggggacgccucgcgau

SEQ ID NO: 1188334 - RNA, 19 nt, Artificial Sequence
  Description of Artificial Sequence: Synthetic oligonucleotide
gaggggacgccucgcgauu

SEQ ID NO: 1188335 - RNA, 19 nt, Artificial Sequence
  Description of Artificial Sequence: Synthetic oligonucleotide
gccacgcgcugagaucuug

SEQ ID NO: 1188336 - RNA, 19 nt, Artificial Sequence
  Description of Artificial Sequence: Synthetic oligonucleotide
ggacgccucgcgauuccuc

SEQ ID NO: 1188337 - RNA, 19 nt, Artificial Sequence
  Description of Artificial Sequence: Synthetic oligonucleotide
cccuugcuacaucacauau

SEQ ID NO: 1188338 - RNA, 19 nt, Artificial Sequence
  Description of Artificial Sequence: Synthetic oligonucleotide
caucgccucccucugccuu

SEQ ID NO: 1188339 - RNA, 19 nt, Artificial Sequence
  Description of Artificial Sequence: Synthetic oligonucleotide
cucuccgcacaggaauccu

SEQ ID NO: 1188340 - RNA, 19 nt, Artificial Sequence
  Description of Artificial Sequence: Synthetic oligonucleotide
cugggcggcucaggccgug

SEQ ID NO: 1188341 - RNA, 19 nt, Artificial Sequence
  Description of Artificial Sequence: Synthetic oligonucleotide
gggucgagggagaccccuc

SEQ ID NO: 1188342 - RNA, 19 nt, Artificial Sequence
  Description of Artificial Sequence: Synthetic oligonucleotide
gagcggggaggggacgccu

SEQ ID NO: 1188343 - RNA, 19 nt, Artificial Sequence
  Description of Artificial Sequence: Synthetic oligonucleotide
cgcugagaucuuggacugg

SEQ ID NO: 1188344 - RNA, 19 nt, Artificial Sequence
  Description of Artificial Sequence: Synthetic oligonucleotide
ggacggcaguccuugcguu

SEQ ID NO: 1188345 - RNA, 19 nt, Artificial Sequence
  Description of Artificial Sequence: Synthetic oligonucleotide
ccacggaacugcacucagu

SEQ ID NO: 1188346 - RNA, 19 nt, Artificial Sequence
  Description of Artificial Sequence: Synthetic oligonucleotide
agccacgcgcugagaucuu

SEQ ID NO: 1188347 - RNA, 19 nt, Artificial Sequence
  Description of Artificial Sequence: Synthetic oligonucleotide
gccggacagugaggauccc

SEQ ID NO: 1188348 - RNA, 19 nt, Artificial Sequence
  Description of Artificial Sequence: Synthetic oligonucleotide
cgagcggggaggggacgcc

SEQ ID NO: 1188349 - RNA, 19 nt, Artificial Sequence
  Description of Artificial Sequence: Synthetic oligonucleotide
gggacgccucgcgauuccu

SEQ ID NO: 1188350 - RNA, 19 nt, Artificial Sequence
  Description of Artificial Sequence: Synthetic oligonucleotide
ccaucgccucccucugccu

SEQ ID NO: 1188351 - RNA, 19 nt, Artificial Sequence
  Description of Artificial Sequence: Synthetic oligonucleotide
cgcacccggguggcugggc

SEQ ID NO: 1188352 - RNA, 19 nt, Artificial Sequence
  Description of Artificial Sequence: Synthetic oligonucleotide
ggcgaugcucuggcuccau

SEQ ID NO: 1188353 - RNA, 19 nt, Artificial Sequence
  Description of Artificial Sequence: Synthetic oligonucleotide
ccuaguccccucgcacaau

SEQ ID NO: 1188354 - RNA, 19 nt, Artificial Sequence
  Description of Artificial Sequence: Synthetic oligonucleotide
acaauuuaaacacagcugg

SEQ ID NO: 1188355 - RNA, 19 nt, Artificial Sequence
  Description of Artificial Sequence: Synthetic oligonucleotide
aguacuauuccacaggacc

SEQ ID NO: 1188356 - RNA, 19 nt, Artificial Sequence
  Description of Artificial Sequence: Synthetic oligonucleotide
uuuaacaucuuauugauac

SEQ ID NO: 1188357 - RNA, 19 nt, Artificial Sequence
  Description of Artificial Sequence: Synthetic oligonucleotide
uacccaaugaauuugaucc

SEQ ID NO: 1188358 - RNA, 19 nt, Artificial Sequence
  Description of Artificial Sequence: Synthetic oligonucleotide
aaugaaucugcuuagagaa

SEQ ID NO: 1188359 - RNA, 19 nt, Artificial Sequence
  Description of Artificial Sequence: Synthetic oligonucleotide
aauaaugucaacauagcag

SEQ ID NO: 1188360 - RNA, 19 nt, Artificial Sequence
  Description of Artificial Sequence: Synthetic oligonucleotide
uucacgauuauuaugccgg

SEQ ID NO: 1188361 - RNA, 19 nt, Artificial Sequence
  Description of Artificial Sequence: Synthetic oligonucleotide
uccaauuuggugaagaagc

SEQ ID NO: 1188362 - RNA, 19 nt, Artificial Sequence
  Description of Artificial Sequence: Synthetic oligonucleotide
uuaagauacaguauuauau

SEQ ID NO: 1188363 - RNA, 19 nt, Artificial Sequence
  Description of Artificial Sequence: Synthetic oligonucleotide
auucauacaacucuucuuc

SEQ ID NO: 1188364 - RNA, 19 nt, Artificial Sequence
  Description of Artificial Sequence: Synthetic oligonucleotide
aaugguacugccaugacuc

SEQ ID NO: 1188365 - RNA, 19 nt, Artificial Sequence
  Description of Artificial Sequence: Synthetic oligonucleotide
auucucaugauuuaacauc

SEQ ID NO: 1188366 - RNA, 19 nt, Artificial Sequence
  Description of Artificial Sequence: Synthetic oligonucleotide
uagagaauccacuagaaga

SEQ ID NO: 1188367 - RNA, 19 nt, Artificial Sequence
  Description of Artificial Sequence: Synthetic oligonucleotide
gagguuaucccuuucaucc

SEQ ID NO: 1188368 - RNA, 19 nt, Artificial Sequence
  Description of Artificial Sequence: Synthetic oligonucleotide
aaaacauacuaagaauugg

SEQ ID NO: 1188369 - RNA, 19 nt, Artificial Sequence
  Description of Artificial Sequence: Synthetic oligonucleotide
caugacuccaaacacagcg

SEQ ID NO: 1188370 - RNA, 19 nt, Artificial Sequence
  Description of Artificial Sequence: Synthetic oligonucleotide
acugguaagauuugucugc

SEQ ID NO: 1188371 - RNA, 19 nt, Artificial Sequence
  Description of Artificial Sequence: Synthetic oligonucleotide
ucagacaauuuaaacacag

SEQ ID NO: 1188372 - RNA, 19 nt, Artificial Sequence
  Description of Artificial Sequence: Synthetic oligonucleotide
uuuucuccagccaacauug

SEQ ID NO: 1188373 - RNA, 19 nt, Artificial Sequence
  Description of Artificial Sequence: Synthetic oligonucleotide
ugaacucuaauccaucacc

SEQ ID NO: 1188374 - RNA, 19 nt, Artificial Sequence
  Description of Artificial Sequence: Synthetic oligonucleotide
uguugauacaguaaccuga

SEQ ID NO: 1188375 - RNA, 19 nt, Artificial Sequence
  Description of Artificial Sequence: Synthetic oligonucleotide
uuuacaggagaaaagucca

SEQ ID NO: 1188376 - RNA, 19 nt, Artificial Sequence
  Description of Artificial Sequence: Synthetic oligonucleotide
uuuaauaucccugugaguu

SEQ ID NO: 1188377 - RNA, 19 nt, Artificial Sequence
  Description of Artificial Sequence: Synthetic oligonucleotide
agaguugacagcuucauca

SEQ ID NO: 1188378 - RNA, 19 nt, Artificial Sequence
  Description of Artificial Sequence: Synthetic oligonucleotide
caacauaagguaaaguacc

SEQ ID NO: 1188379 - RNA, 19 nt, Artificial Sequence
  Description of Artificial Sequence: Synthetic oligonucleotide
agacaauuuaaacacagcu

SEQ ID NO: 1188380 - RNA, 19 nt, Artificial Sequence
  Description of Artificial Sequence: Synthetic oligonucleotide
uuuacaagcauaugaucag

SEQ ID NO: 1188381 - RNA, 19 nt, Artificial Sequence
  Description of Artificial Sequence: Synthetic oligonucleotide
cauacuaagaauuggaaga

SEQ ID NO: 1188382 - RNA, 19 nt, Artificial Sequence
  Description of Artificial Sequence: Synthetic oligonucleotide
aaccaaaccuucuggcugc

SEQ ID NO: 1188383 - RNA, 19 nt, Artificial Sequence
  Description of Artificial Sequence: Synthetic oligonucleotide
aucccuuucauccaagagg

SEQ ID NO: 1188384 - RNA, 19 nt, Artificial Sequence
  Description of Artificial Sequence: Synthetic oligonucleotide
ugugaguuaucccaauucc

SEQ ID NO: 1188385 - RNA, 19 nt, Artificial Sequence
  Description of Artificial Sequence: Synthetic oligonucleotide
aaaccaaaccuucuggcug

SEQ ID NO: 1188386 - RNA, 19 nt, Artificial Sequence
  Description of Artificial Sequence: Synthetic oligonucleotide
aauaucaccgaguuucccu

SEQ ID NO: 1188387 - RNA, 19 nt, Artificial Sequence
  Description of Artificial Sequence: Synthetic oligonucleotide
uacaaguuugucaacauau

SEQ ID NO: 1188388 - RNA, 19 nt, Artificial Sequence
  Description of Artificial Sequence: Synthetic oligonucleotide
acauacuaagaauuggaag

SEQ ID NO: 1188389 - RNA, 19 nt, Artificial Sequence
  Description of Artificial Sequence: Synthetic oligonucleotide
gagauuuugagguuauccc

SEQ ID NO: 1188390 - RNA, 19 nt, Artificial Sequence
  Description of Artificial Sequence: Synthetic oligonucleotide
acgauuauuaugccggaac

SEQ ID NO: 1188391 - RNA, 19 nt, Artificial Sequence
  Description of Artificial Sequence: Synthetic oligonucleotide
auuggaaugaaucugcuua

SEQ ID NO: 1188392 - RNA, 19 nt, Artificial Sequence
  Description of Artificial Sequence: Synthetic oligonucleotide
uaauccaucacccuuugaa

SEQ ID NO: 1188393 - RNA, 19 nt, Artificial Sequence
  Description of Artificial Sequence: Synthetic oligonucleotide
aauccuugcugacggauuc

SEQ ID NO: 1188394 - RNA, 19 nt, Artificial Sequence
  Description of Artificial Sequence: Synthetic oligonucleotide
acuagaauacuucacauuu

SEQ ID NO: 1188395 - RNA, 19 nt, Artificial Sequence
  Description of Artificial Sequence: Synthetic oligonucleotide
uaagcguucacgauuauua

SEQ ID NO: 1188396 - RNA, 19 nt, Artificial Sequence
  Description of Artificial Sequence: Synthetic oligonucleotide
uuuguuguaccaucuaucu

SEQ ID NO: 1188397 - RNA, 19 nt, Artificial Sequence
  Description of Artificial Sequence: Synthetic oligonucleotide
aauuuggugaagaagcgug

SEQ ID NO: 1188398 - RNA, 19 nt, Artificial Sequence
  Description of Artificial Sequence: Synthetic oligonucleotide
aagguaaaguaccacacau

SEQ ID NO: 1188399 - RNA, 19 nt, Artificial Sequence
  Description of Artificial Sequence: Synthetic oligonucleotide
uaugccggaacacuguugc

SEQ ID NO: 1188400 - RNA, 19 nt, Artificial Sequence
  Description of Artificial Sequence: Synthetic oligonucleotide
acaagcauaugaucagggc

SEQ ID NO: 1188401 - RNA, 19 nt, Artificial Sequence
  Description of Artificial Sequence: Synthetic oligonucleotide
auugcaguaaguacuauuc

SEQ ID NO: 1188402 - RNA, 19 nt, Artificial Sequence
  Description of Artificial Sequence: Synthetic oligonucleotide
uguuguaccaucuaucuuu

SEQ ID NO: 1188403 - RNA, 19 nt, Artificial Sequence
  Description of Artificial Sequence: Synthetic oligonucleotide
aaugaauuugauccauccu

SEQ ID NO: 1188404 - RNA, 19 nt, Artificial Sequence
  Description of Artificial Sequence: Synthetic oligonucleotide
uuagagaauccacuagaag

SEQ ID NO: 1188405 - RNA, 19 nt, Artificial Sequence
  Description of Artificial Sequence: Synthetic oligonucleotide
aaagaaucgcugagcaucc

SEQ ID NO: 1188406 - RNA, 19 nt, Artificial Sequence
  Description of Artificial Sequence: Synthetic oligonucleotide
agaauuggaagauguuugg

SEQ ID NO: 1188407 - RNA, 19 nt, Artificial Sequence
  Description of Artificial Sequence: Synthetic oligonucleotide
agaaauagauacuggauau

SEQ ID NO: 1188408 - RNA, 19 nt, Artificial Sequence
  Description of Artificial Sequence: Synthetic oligonucleotide
cucaacuagaauuuuauga

SEQ ID NO: 1188409 - RNA, 19 nt, Artificial Sequence
  Description of Artificial Sequence: Synthetic oligonucleotide
ucucuaggaagaauaaugu

SEQ ID NO: 1188410 - RNA, 19 nt, Artificial Sequence
  Description of Artificial Sequence: Synthetic oligonucleotide
ucugggauaguaauccuug

SEQ ID NO: 1188411 - RNA, 19 nt, Artificial Sequence
  Description of Artificial Sequence: Synthetic oligonucleotide
uguucaguaagcguucacg

SEQ ID NO: 1188412 - RNA, 19 nt, Artificial Sequence
  Description of Artificial Sequence: Synthetic oligonucleotide
uaaguacuauuccacagga

SEQ ID NO: 1188413 - RNA, 19 nt, Artificial Sequence
  Description of Artificial Sequence: Synthetic oligonucleotide
auauucaccaggaaacccc

SEQ ID NO: 1188414 - RNA, 19 nt, Artificial Sequence
  Description of Artificial Sequence: Synthetic oligonucleotide
uccacuagaagacucuggc

SEQ ID NO: 1188415 - RNA, 19 nt, Artificial Sequence
  Description of Artificial Sequence: Synthetic oligonucleotide
ugaugaaagaaucgcugag

SEQ ID NO: 1188416 - RNA, 19 nt, Artificial Sequence
  Description of Artificial Sequence: Synthetic oligonucleotide
uccaaauuggaaugaaucu

SEQ ID NO: 1188417 - RNA, 19 nt, Artificial Sequence
  Description of Artificial Sequence: Synthetic oligonucleotide
agcaacauaagguaaagua

SEQ ID NO: 1188418 - RNA, 19 nt, Artificial Sequence
  Description of Artificial Sequence: Synthetic oligonucleotide
uuauuaugccggaacacug

SEQ ID NO: 1188419 - RNA, 19 nt, Artificial Sequence
  Description of Artificial Sequence: Synthetic oligonucleotide
aguaaccugauucauacaa

SEQ ID NO: 1188420 - RNA, 19 nt, Artificial Sequence
  Description of Artificial Sequence: Synthetic oligonucleotide
agaaacugaugccuuguac

SEQ ID NO: 1188421 - RNA, 19 nt, Artificial Sequence
  Description of Artificial Sequence: Synthetic oligonucleotide
caaugaauuugauccaucc

SEQ ID NO: 1188422 - RNA, 19 nt, Artificial Sequence
  Description of Artificial Sequence: Synthetic oligonucleotide
gaaacugaugccuuguaca

SEQ ID NO: 1188423 - RNA, 19 nt, Artificial Sequence
  Description of Artificial Sequence: Synthetic oligonucleotide
aacuauuguuugcaguuug

SEQ ID NO: 1188424 - RNA, 19 nt, Artificial Sequence
  Description of Artificial Sequence: Synthetic oligonucleotide
ucccuuucauccaagagga

SEQ ID NO: 1188425 - RNA, 19 nt, Artificial Sequence
  Description of Artificial Sequence: Synthetic oligonucleotide
auaagguaaaguaccacac

SEQ ID NO: 1188426 - RNA, 19 nt, Artificial Sequence
  Description of Artificial Sequence: Synthetic oligonucleotide
uuaugaagcaaagccagag

SEQ ID NO: 1188427 - RNA, 19 nt, Artificial Sequence
  Description of Artificial Sequence: Synthetic oligonucleotide
ggaagcauuauuuacagga

SEQ ID NO: 1188428 - RNA, 19 nt, Artificial Sequence
  Description of Artificial Sequence: Synthetic oligonucleotide
uuugucaacauaugaggga

SEQ ID NO: 1188429 - RNA, 19 nt, Artificial Sequence
  Description of Artificial Sequence: Synthetic oligonucleotide
aaaucaacuuauuguuucu

SEQ ID NO: 1188430 - RNA, 19 nt, Artificial Sequence
  Description of Artificial Sequence: Synthetic oligonucleotide
uagaauacuucacauuuuc

SEQ ID NO: 1188431 - RNA, 19 nt, Artificial Sequence
  Description of Artificial Sequence: Synthetic oligonucleotide
aggaccaaacaucaacugg

SEQ ID NO: 1188432 - RNA, 19 nt, Artificial Sequence
  Description of Artificial Sequence: Synthetic oligonucleotide
aagcgugucauucuuuuga

SEQ ID NO: 1188433 - RNA, 19 nt, Artificial Sequence
  Description of Artificial Sequence: Synthetic oligonucleotide
aucaacuuauuguuucuuc

SEQ ID NO: 1188434 - RNA, 19 nt, Artificial Sequence
  Description of Artificial Sequence: Synthetic oligonucleotide
ugaccauagaauuucacua

SEQ ID NO: 1188435 - RNA, 19 nt, Artificial Sequence
  Description of Artificial Sequence: Synthetic oligonucleotide
ugcaguaaguacuauucca

SEQ ID NO: 1188436 - RNA, 19 nt, Artificial Sequence
  Description of Artificial Sequence: Synthetic oligonucleotide
ugcaguacuccagaaauag

SEQ ID NO: 1188437 - RNA, 19 nt, Artificial Sequence
  Description of Artificial Sequence: Synthetic oligonucleotide
aagcauuauuuacaggaga

SEQ ID NO: 1188438 - RNA, 19 nt, Artificial Sequence
  Description of Artificial Sequence: Synthetic oligonucleotide
ucaacuuauuguuucuucu

SEQ ID NO: 1188439 - RNA, 19 nt, Artificial Sequence
  Description of Artificial Sequence: Synthetic oligonucleotide
aaaugguacugccaugacu

SEQ ID NO: 1188440 - RNA, 19 nt, Artificial Sequence
  Description of Artificial Sequence: Synthetic oligonucleotide
aaacauacuaagaauugga

SEQ ID NO: 1188441 - RNA, 19 nt, Artificial Sequence
  Description of Artificial Sequence: Synthetic oligonucleotide
uucuauucacagcaaguug

SEQ ID NO: 1188442 - RNA, 19 nt, Artificial Sequence
  Description of Artificial Sequence: Synthetic oligonucleotide
ugucccacaaggaaagccc

SEQ ID NO: 1188443 - RNA, 19 nt, Artificial Sequence
  Description of Artificial Sequence: Synthetic oligonucleotide
ucaucauguagcaggaaac

SEQ ID NO: 1188444 - RNA, 19 nt, Artificial Sequence
  Description of Artificial Sequence: Synthetic oligonucleotide
auacccaaugaauuugauc

SEQ ID NO: 1188445 - RNA, 19 nt, Artificial Sequence
  Description of Artificial Sequence: Synthetic oligonucleotide
uaaccugauucauacaacu

SEQ ID NO: 1188446 - RNA, 19 nt, Artificial Sequence
  Description of Artificial Sequence: Synthetic oligonucleotide
gaaugaaucugcuuagaga

SEQ ID NO: 1188447 - RNA, 19 nt, Artificial Sequence
  Description of Artificial Sequence: Synthetic oligonucleotide
ugcaaaacauacuaagaau

SEQ ID NO: 1188448 - RNA, 19 nt, Artificial Sequence
  Description of Artificial Sequence: Synthetic oligonucleotide
guuuacaagcauaugauca

SEQ ID NO: 1188449 - RNA, 19 nt, Artificial Sequence
  Description of Artificial Sequence: Synthetic oligonucleotide
gaugccuuguacaaguuug

SEQ ID NO: 1188450 - RNA, 19 nt, Artificial Sequence
  Description of Artificial Sequence: Synthetic oligonucleotide
gguuuaauaucccugugag

SEQ ID NO: 1188451 - RNA, 19 nt, Artificial Sequence
  Description of Artificial Sequence: Synthetic oligonucleotide
uggcauaccaccugaagug

SEQ ID NO: 1188452 - RNA, 19 nt, Artificial Sequence
  Description of Artificial Sequence: Synthetic oligonucleotide
uugaugaaagaaucgcuga

SEQ ID NO: 1188453 - RNA, 19 nt, Artificial Sequence
  Description of Artificial Sequence: Synthetic oligonucleotide
aauuaagauacaguauuau

SEQ ID NO: 1188454 - RNA, 19 nt, Artificial Sequence
  Description of Artificial Sequence: Synthetic oligonucleotide
cuaucaguuguugauacag

SEQ ID NO: 1188455 - RNA, 19 nt, Artificial Sequence
  Description of Artificial Sequence: Synthetic oligonucleotide
gaaauacccaaugaauuug

SEQ ID NO: 1188456 - RNA, 19 nt, Artificial Sequence
  Description of Artificial Sequence: Synthetic oligonucleotide
ugaguuaucccaauuccau

SEQ ID NO: 1188457 - RNA, 19 nt, Artificial Sequence
  Description of Artificial Sequence: Synthetic oligonucleotide
uuugaaagccggaagucaa

SEQ ID NO: 1188458 - RNA, 19 nt, Artificial Sequence
  Description of Artificial Sequence: Synthetic oligonucleotide
uuggaaugaaucugcuuag

SEQ ID NO: 1188459 - RNA, 19 nt, Artificial Sequence
  Description of Artificial Sequence: Synthetic oligonucleotide
ucuauggcccgcuucaugu

SEQ ID NO: 1188460 - RNA, 19 nt, Artificial Sequence
  Description of Artificial Sequence: Synthetic oligonucleotide
aaacugaugccuuguacaa

SEQ ID NO: 1188461 - RNA, 19 nt, Artificial Sequence
  Description of Artificial Sequence: Synthetic oligonucleotide
ugucucuugaacucuaauc

SEQ ID NO: 1188462 - RNA, 19 nt, Artificial Sequence
  Description of Artificial Sequence: Synthetic oligonucleotide
ugcuuagagaauccacuag

SEQ ID NO: 1188463 - RNA, 19 nt, Artificial Sequence
  Description of Artificial Sequence: Synthetic oligonucleotide
gaguugaugaaagaaucgc

SEQ ID NO: 1188464 - RNA, 19 nt, Artificial Sequence
  Description of Artificial Sequence: Synthetic oligonucleotide
guucacgauuauuaugccg

SEQ ID NO: 1188465 - RNA, 19 nt, Artificial Sequence
  Description of Artificial Sequence: Synthetic oligonucleotide
uuuaaugucugggauagua

SEQ ID NO: 1188466 - RNA, 19 nt, Artificial Sequence
  Description of Artificial Sequence: Synthetic oligonucleotide
gaugaaagaaucgcugagc

SEQ ID NO: 1188467 - RNA, 19 nt, Artificial Sequence
  Description of Artificial Sequence: Synthetic oligonucleotide
uucuaucaguuguugauac

SEQ ID NO: 1188468 - RNA, 19 nt, Artificial Sequence
  Description of Artificial Sequence: Synthetic oligonucleotide
cauaagguaaaguaccaca

SEQ ID NO: 1188469 - RNA, 19 nt, Artificial Sequence
  Description of Artificial Sequence: Synthetic oligonucleotide
acuaagaauuggaagaugu

SEQ ID NO: 1188470 - RNA, 19 nt, Artificial Sequence
  Description of Artificial Sequence: Synthetic oligonucleotide
ucaccaggaaaccccagag

SEQ ID NO: 1188471 - RNA, 19 nt, Artificial Sequence
  Description of Artificial Sequence: Synthetic oligonucleotide
auaguaauccuugcugacg

SEQ ID NO: 1188472 - RNA, 19 nt, Artificial Sequence
  Description of Artificial Sequence: Synthetic oligonucleotide
cauaugagggaccaguguc

SEQ ID NO: 1188473 - RNA, 19 nt, Artificial Sequence
  Description of Artificial Sequence: Synthetic oligonucleotide
uauauucaccaggaaaccc

SEQ ID NO: 1188474 - RNA, 19 nt, Artificial Sequence
  Description of Artificial Sequence: Synthetic oligonucleotide
auaucccugugaguuaucc

SEQ ID NO: 1188475 - RNA, 19 nt, Artificial Sequence
  Description of Artificial Sequence: Synthetic oligonucleotide
uguucaggcaugccuaugu

SEQ ID NO: 1188476 - RNA, 19 nt, Artificial Sequence
  Description of Artificial Sequence: Synthetic oligonucleotide
gaauuggaagauguuuggg

SEQ ID NO: 1188477 - RNA, 19 nt, Artificial Sequence
  Description of Artificial Sequence: Synthetic oligonucleotide
gaccauagaauuucacuac

SEQ ID NO: 1188478 - RNA, 19 nt, Artificial Sequence
  Description of Artificial Sequence: Synthetic oligonucleotide
uaauauuuucuggacaguc

SEQ ID NO: 1188479 - RNA, 19 nt, Artificial Sequence
  Description of Artificial Sequence: Synthetic oligonucleotide
gauaguaauccuugcugac

SEQ ID NO: 1188480 - RNA, 19 nt, Artificial Sequence
  Description of Artificial Sequence: Synthetic oligonucleotide
auuauuaugccggaacacu

SEQ ID NO: 1188481 - RNA, 19 nt, Artificial Sequence
  Description of Artificial Sequence: Synthetic oligonucleotide
uuaucccaauuccaugcag

SEQ ID NO: 1188482 - RNA, 19 nt, Artificial Sequence
  Description of Artificial Sequence: Synthetic oligonucleotide
uauuaugccggaacacugu

SEQ ID NO: 1188483 - RNA, 19 nt, Artificial Sequence
  Description of Artificial Sequence: Synthetic oligonucleotide
uggauauugccuucccucc

SEQ ID NO: 1188484 - RNA, 19 nt, Artificial Sequence
  Description of Artificial Sequence: Synthetic oligonucleotide
uguuuacaagcauaugauc

SEQ ID NO: 1188485 - RNA, 19 nt, Artificial Sequence
  Description of Artificial Sequence: Synthetic oligonucleotide
acaucuuguucaguaagcg

SEQ ID NO: 1188486 - RNA, 19 nt, Artificial Sequence
  Description of Artificial Sequence: Synthetic oligonucleotide
aacuagaauacuucacauu

SEQ ID NO: 1188487 - RNA, 19 nt, Artificial Sequence
  Description of Artificial Sequence: Synthetic oligonucleotide
ucuggcauaccaccugaag

SEQ ID NO: 1188488 - RNA, 19 nt, Artificial Sequence
  Description of Artificial Sequence: Synthetic oligonucleotide
ugaauuugauccauccuuu

SEQ ID NO: 1188489 - RNA, 19 nt, Artificial Sequence
  Description of Artificial Sequence: Synthetic oligonucleotide
ucucuugaacucuaaucca

SEQ ID NO: 1188490 - RNA, 19 nt, Artificial Sequence
  Description of Artificial Sequence: Synthetic oligonucleotide
uaaugucugggauaguaau

SEQ ID NO: 1188491 - RNA, 19 nt, Artificial Sequence
  Description of Artificial Sequence: Synthetic oligonucleotide
aggaagugucucuugaacu

SEQ ID NO: 1188492 - RNA, 19 nt, Artificial Sequence
  Description of Artificial Sequence: Synthetic oligonucleotide
ucucaacuagaauuuuaug

SEQ ID NO: 1188493 - RNA, 19 nt, Artificial Sequence
  Description of Artificial Sequence: Synthetic oligonucleotide
ugggaacuagaauacuuca

SEQ ID NO: 1188494 - RNA, 19 nt, Artificial Sequence
  Description of Artificial Sequence: Synthetic oligonucleotide
aacauagcagcacuauauu

SEQ ID NO: 1188495 - RNA, 19 nt, Artificial Sequence
  Description of Artificial Sequence: Synthetic oligonucleotide
uauucaccaggaaacccca

SEQ ID NO: 1188496 - RNA, 19 nt, Artificial Sequence
  Description of Artificial Sequence: Synthetic oligonucleotide
uuuucacugcaacagccuc

SEQ ID NO: 1188497 - RNA, 19 nt, Artificial Sequence
  Description of Artificial Sequence: Synthetic oligonucleotide
cacaucuuguucaguaagc

SEQ ID NO: 1188498 - RNA, 19 nt, Artificial Sequence
  Description of Artificial Sequence: Synthetic oligonucleotide
agcgugucauucuuuugac

SEQ ID NO: 1188499 - RNA, 19 nt, Artificial Sequence
  Description of Artificial Sequence: Synthetic oligonucleotide
gauuauuaugccggaacac

SEQ ID NO: 1188500 - RNA, 19 nt, Artificial Sequence
  Description of Artificial Sequence: Synthetic oligonucleotide
cuuuagaagcucuggagca

SEQ ID NO: 1188501 - RNA, 19 nt, Artificial Sequence
  Description of Artificial Sequence: Synthetic oligonucleotide
auagcccaacuucucaaag

SEQ ID NO: 1188502 - RNA, 19 nt, Artificial Sequence
  Description of Artificial Sequence: Synthetic oligonucleotide
aacauaagguaaaguacca

SEQ ID NO: 1188503 - RNA, 19 nt, Artificial Sequence
  Description of Artificial Sequence: Synthetic oligonucleotide
caagcauaugaucagggca

SEQ ID NO: 1188504 - RNA, 19 nt, Artificial Sequence
  Description of Artificial Sequence: Synthetic oligonucleotide
aacauacuaagaauuggaa

SEQ ID NO: 1188505 - RNA, 19 nt, Artificial Sequence
  Description of Artificial Sequence: Synthetic oligonucleotide
aaauacccaaugaauuuga

SEQ ID NO: 1188506 - RNA, 19 nt, Artificial Sequence
  Description of Artificial Sequence: Synthetic oligonucleotide
aaccugauucauacaacuc

SEQ ID NO: 1188507 - RNA, 19 nt, Artificial Sequence
  Description of Artificial Sequence: Synthetic oligonucleotide
uuucugguuuaauaucccu

SEQ ID NO: 1188508 - RNA, 19 nt, Artificial Sequence
  Description of Artificial Sequence: Synthetic oligonucleotide
gauauugccuucccuccug

SEQ ID NO: 1188509 - RNA, 19 nt, Artificial Sequence
  Description of Artificial Sequence: Synthetic oligonucleotide
guucugugaggauccaggg

SEQ ID NO: 1188510 - RNA, 19 nt, Artificial Sequence
  Description of Artificial Sequence: Synthetic oligonucleotide
aaaguccaaauuggaauga

SEQ ID NO: 1188511 - RNA, 19 nt, Artificial Sequence
  Description of Artificial Sequence: Synthetic oligonucleotide
ucuaauccaucacccuuug

SEQ ID NO: 1188512 - RNA, 19 nt, Artificial Sequence
  Description of Artificial Sequence: Synthetic oligonucleotide
ugacggauucucaacuaga

SEQ ID NO: 1188513 - RNA, 19 nt, Artificial Sequence
  Description of Artificial Sequence: Synthetic oligonucleotide
uggagcaacauaagguaaa

SEQ ID NO: 1188514 - RNA, 19 nt, Artificial Sequence
  Description of Artificial Sequence: Synthetic oligonucleotide
ugaggauccagggguaccg

SEQ ID NO: 1188515 - RNA, 19 nt, Artificial Sequence
  Description of Artificial Sequence: Synthetic oligonucleotide
uggguaauaggaagagaac

SEQ ID NO: 1188516 - RNA, 19 nt, Artificial Sequence
  Description of Artificial Sequence: Synthetic oligonucleotide
cagcacuauauucaccagg

SEQ ID NO: 1188517 - RNA, 19 nt, Artificial Sequence
  Description of Artificial Sequence: Synthetic oligonucleotide
accauagaauuucacuaca

SEQ ID NO: 1188518 - RNA, 19 nt, Artificial Sequence
  Description of Artificial Sequence: Synthetic oligonucleotide
uuucacugcaacagccucu

SEQ ID NO: 1188519 - RNA, 19 nt, Artificial Sequence
  Description of Artificial Sequence: Synthetic oligonucleotide
agaagacucuggcauacca

SEQ ID NO: 1188520 - RNA, 19 nt, Artificial Sequence
  Description of Artificial Sequence: Synthetic oligonucleotide
ucuuguucaguaagcguuc

SEQ ID NO: 1188521 - RNA, 19 nt, Artificial Sequence
  Description of Artificial Sequence: Synthetic oligonucleotide
ugaaagccggaagucaacc

SEQ ID NO: 1188522 - RNA, 19 nt, Artificial Sequence
  Description of Artificial Sequence: Synthetic oligonucleotide
uacuccagaaauagauacu

SEQ ID NO: 1188523 - RNA, 19 nt, Artificial Sequence
  Description of Artificial Sequence: Synthetic oligonucleotide
ugcugacggauucucaacu

SEQ ID NO: 1188524 - RNA, 19 nt, Artificial Sequence
  Description of Artificial Sequence: Synthetic oligonucleotide
ggaaugaaucugcuuagag

SEQ ID NO: 1188525 - RNA, 19 nt, Artificial Sequence
  Description of Artificial Sequence: Synthetic oligonucleotide
acuggaagcauuauuuaca

SEQ ID NO: 1188526 - RNA, 19 nt, Artificial Sequence
  Description of Artificial Sequence: Synthetic oligonucleotide
aaacaucaacugguuccgc

SEQ ID NO: 1188527 - RNA, 19 nt, Artificial Sequence
  Description of Artificial Sequence: Synthetic oligonucleotide
uaucaguuguugauacagu

SEQ ID NO: 1188528 - RNA, 19 nt, Artificial Sequence
  Description of Artificial Sequence: Synthetic oligonucleotide
gggauaguaauccuugcug

SEQ ID NO: 1188529 - RNA, 19 nt, Artificial Sequence
  Description of Artificial Sequence: Synthetic oligonucleotide
uguacaaguuugucaacau

SEQ ID NO: 1188530 - RNA, 19 nt, Artificial Sequence
  Description of Artificial Sequence: Synthetic oligonucleotide
agcguucacgauuauuaug

SEQ ID NO: 1188531 - RNA, 19 nt, Artificial Sequence
  Description of Artificial Sequence: Synthetic oligonucleotide
gaagaauaaugucaacaua

SEQ ID NO: 1188532 - RNA, 19 nt, Artificial Sequence
  Description of Artificial Sequence: Synthetic oligonucleotide
aaguacuauuccacaggac

SEQ ID NO: 1188533 - RNA, 19 nt, Artificial Sequence
  Description of Artificial Sequence: Synthetic oligonucleotide
cugggaacuagaauacuuc

SEQ ID NO: 1188534 - RNA, 19 nt, Artificial Sequence
  Description of Artificial Sequence: Synthetic oligonucleotide
guuuggguaauaggaagag

SEQ ID NO: 1188535 - RNA, 19 nt, Artificial Sequence
  Description of Artificial Sequence: Synthetic oligonucleotide
agggguaccgaguaacuga

SEQ ID NO: 1188536 - RNA, 19 nt, Artificial Sequence
  Description of Artificial Sequence: Synthetic oligonucleotide
caucauguagcaggaaacc

SEQ ID NO: 1188537 - RNA, 19 nt, Artificial Sequence
  Description of Artificial Sequence: Synthetic oligonucleotide
uuccgcaugaaauucuuuu

SEQ ID NO: 1188538 - RNA, 19 nt, Artificial Sequence
  Description of Artificial Sequence: Synthetic oligonucleotide
acagucuauggcccgcuuc

SEQ ID NO: 1188539 - RNA, 19 nt, Artificial Sequence
  Description of Artificial Sequence: Synthetic oligonucleotide
uguuaagugguuuguugua

SEQ ID NO: 1188540 - RNA, 19 nt, Artificial Sequence
  Description of Artificial Sequence: Synthetic oligonucleotide
auccaauuuggugaagaag

SEQ ID NO: 1188541 - RNA, 19 nt, Artificial Sequence
  Description of Artificial Sequence: Synthetic oligonucleotide
ugcaccaagucccagucuu

SEQ ID NO: 1188542 - RNA, 19 nt, Artificial Sequence
  Description of Artificial Sequence: Synthetic oligonucleotide
gguaaaguaccacacaucu

SEQ ID NO: 1188543 - RNA, 19 nt, Artificial Sequence
  Description of Artificial Sequence: Synthetic oligonucleotide
uugaccaagcgcugccagg

SEQ ID NO: 1188544 - RNA, 19 nt, Artificial Sequence
  Description of Artificial Sequence: Synthetic oligonucleotide
cucuaggaagaauaauguc

SEQ ID NO: 1188545 - RNA, 19 nt, Artificial Sequence
  Description of Artificial Sequence: Synthetic oligonucleotide
agcacuauauucaccagga

SEQ ID NO: 1188546 - RNA, 19 nt, Artificial Sequence
  Description of Artificial Sequence: Synthetic oligonucleotide
augguacugccaugacucc

SEQ ID NO: 1188547 - RNA, 19 nt, Artificial Sequence
  Description of Artificial Sequence: Synthetic oligonucleotide
uuaugccggaacacuguug

SEQ ID NO: 1188548 - RNA, 19 nt, Artificial Sequence
  Description of Artificial Sequence: Synthetic oligonucleotide
acauaugagggaccagugu

SEQ ID NO: 1188549 - RNA, 19 nt, Artificial Sequence
  Description of Artificial Sequence: Synthetic oligonucleotide
ucuaucaguuguugauaca

SEQ ID NO: 1188550 - RNA, 19 nt, Artificial Sequence
  Description of Artificial Sequence: Synthetic oligonucleotide
gauacagaucucuuucuua

SEQ ID NO: 1188551 - RNA, 19 nt, Artificial Sequence
  Description of Artificial Sequence: Synthetic oligonucleotide
uugagguuaucccuuucau

SEQ ID NO: 1188552 - RNA, 19 nt, Artificial Sequence
  Description of Artificial Sequence: Synthetic oligonucleotide
aaauuggaaugaaucugcu

SEQ ID NO: 1188553 - RNA, 19 nt, Artificial Sequence
  Description of Artificial Sequence: Synthetic oligonucleotide
cacuauauucaccaggaaa

SEQ ID NO: 1188554 - RNA, 19 nt, Artificial Sequence
  Description of Artificial Sequence: Synthetic oligonucleotide
uuaucccuuucauccaaga

SEQ ID NO: 1188555 - RNA, 19 nt, Artificial Sequence
  Description of Artificial Sequence: Synthetic oligonucleotide
uccacugauagcccaacuu

SEQ ID NO: 1188556 - RNA, 19 nt, Artificial Sequence
  Description of Artificial Sequence: Synthetic oligonucleotide
ucuuauugauacagaucuc

SEQ ID NO: 1188557 - RNA, 19 nt, Artificial Sequence
  Description of Artificial Sequence: Synthetic oligonucleotide
caacauugcaguaaguacu

SEQ ID NO: 1188558 - RNA, 19 nt, Artificial Sequence
  Description of Artificial Sequence: Synthetic oligonucleotide
aagcguucacgauuauuau

SEQ ID NO: 1188559 - RNA, 19 nt, Artificial Sequence
  Description of Artificial Sequence: Synthetic oligonucleotide
gcguucacgauuauuaugc

SEQ ID NO: 1188560 - RNA, 19 nt, Artificial Sequence
  Description of Artificial Sequence: Synthetic oligonucleotide
uuaauaucccugugaguua

SEQ ID NO: 1188561 - RNA, 19 nt, Artificial Sequence
  Description of Artificial Sequence: Synthetic oligonucleotide
cugacggauucucaacuag

SEQ ID NO: 1188562 - RNA, 19 nt, Artificial Sequence
  Description of Artificial Sequence: Synthetic oligonucleotide
agcauuauuuacaggagaa

SEQ ID NO: 1188563 - RNA, 19 nt, Artificial Sequence
  Description of Artificial Sequence: Synthetic oligonucleotide
agaaaaguccaaauuggaa

SEQ ID NO: 1188564 - RNA, 19 nt, Artificial Sequence
  Description of Artificial Sequence: Synthetic oligonucleotide
uugaaagccggaagucaac

SEQ ID NO: 1188565 - RNA, 19 nt, Artificial Sequence
  Description of Artificial Sequence: Synthetic oligonucleotide
gcaacauaagguaaaguac

SEQ ID NO: 1188566 - RNA, 19 nt, Artificial Sequence
  Description of Artificial Sequence: Synthetic oligonucleotide
uaucccugugaguuauccc

SEQ ID NO: 1188567 - RNA, 19 nt, Artificial Sequence
  Description of Artificial Sequence: Synthetic oligonucleotide
uacuaagaauuggaagaug

SEQ ID NO: 1188568 - RNA, 19 nt, Artificial Sequence
  Description of Artificial Sequence: Synthetic oligonucleotide
acugguuccgcaugaaauu

SEQ ID NO: 1188569 - RNA, 19 nt, Artificial Sequence
  Description of Artificial Sequence: Synthetic oligonucleotide
uggcucuauucuaucaaaa

SEQ ID NO: 1188570 - RNA, 19 nt, Artificial Sequence
  Description of Artificial Sequence: Synthetic oligonucleotide
uaauaucccugugaguuau

SEQ ID NO: 1188571 - RNA, 19 nt, Artificial Sequence
  Description of Artificial Sequence: Synthetic oligonucleotide
guuuguuguaccaucuauc

SEQ ID NO: 1188572 - RNA, 19 nt, Artificial Sequence
  Description of Artificial Sequence: Synthetic oligonucleotide
acccuuugaaagccggaag

SEQ ID NO: 1188573 - RNA, 19 nt, Artificial Sequence
  Description of Artificial Sequence: Synthetic oligonucleotide
agaagcgugucauucuuuu

SEQ ID NO: 1188574 - RNA, 19 nt, Artificial Sequence
  Description of Artificial Sequence: Synthetic oligonucleotide
ccaacauugcaguaaguac

SEQ ID NO: 1188575 - RNA, 19 nt, Artificial Sequence
  Description of Artificial Sequence: Synthetic oligonucleotide
uacuggauauugccuuccc

SEQ ID NO: 1188576 - RNA, 19 nt, Artificial Sequence
  Description of Artificial Sequence: Synthetic oligonucleotide
ggauaguaauccuugcuga

SEQ ID NO: 1188577 - RNA, 19 nt, Artificial Sequence
  Description of Artificial Sequence: Synthetic oligonucleotide
agccucuucaguuauucua

SEQ ID NO: 1188578 - RNA, 19 nt, Artificial Sequence
  Description of Artificial Sequence: Synthetic oligonucleotide
agguaaaguaccacacauc

SEQ ID NO: 1188579 - RNA, 19 nt, Artificial Sequence
  Description of Artificial Sequence: Synthetic oligonucleotide
gaagcgugucauucuuuug

SEQ ID NO: 1188580 - RNA, 19 nt, Artificial Sequence
  Description of Artificial Sequence: Synthetic oligonucleotide
ucacuggaagcauuauuua

SEQ ID NO: 1188581 - RNA, 19 nt, Artificial Sequence
  Description of Artificial Sequence: Synthetic oligonucleotide
cuuauugauacagaucucu

SEQ ID NO: 1188582 - RNA, 19 nt, Artificial Sequence
  Description of Artificial Sequence: Synthetic oligonucleotide
gguaauaggaagagaacuc

SEQ ID NO: 1188583 - RNA, 19 nt, Artificial Sequence
  Description of Artificial Sequence: Synthetic oligonucleotide
cagccaacauugcaguaag

SEQ ID NO: 1188584 - RNA, 19 nt, Artificial Sequence
  Description of Artificial Sequence: Synthetic oligonucleotide
gugaagaagcgugucauuc

SEQ ID NO: 1188585 - RNA, 19 nt, Artificial Sequence
  Description of Artificial Sequence: Synthetic oligonucleotide
ggaagugucucuugaacuc

SEQ ID NO: 1188586 - RNA, 19 nt, Artificial Sequence
  Description of Artificial Sequence: Synthetic oligonucleotide
gaagacucuggcauaccac

SEQ ID NO: 1188587 - RNA, 19 nt, Artificial Sequence
  Description of Artificial Sequence: Synthetic oligonucleotide
cugggauaguaauccuugc

SEQ ID NO: 1188588 - RNA, 19 nt, Artificial Sequence
  Description of Artificial Sequence: Synthetic oligonucleotide
auaucaccgaguuucccuu

SEQ ID NO: 1188589 - RNA, 19 nt, Artificial Sequence
  Description of Artificial Sequence: Synthetic oligonucleotide
gcuuagagaauccacuaga

SEQ ID NO: 1188590 - RNA, 19 nt, Artificial Sequence
  Description of Artificial Sequence: Synthetic oligonucleotide
ugccggaacacuguugcca

SEQ ID NO: 1188591 - RNA, 19 nt, Artificial Sequence
  Description of Artificial Sequence: Synthetic oligonucleotide
aaacuauuguuugcaguuu

SEQ ID NO: 1188592 - RNA, 19 nt, Artificial Sequence
  Description of Artificial Sequence: Synthetic oligonucleotide
uuuagaagcucuggagcaa

SEQ ID NO: 1188593 - RNA, 19 nt, Artificial Sequence
  Description of Artificial Sequence: Synthetic oligonucleotide
ugguuccgcaugaaauucu

SEQ ID NO: 1188594 - RNA, 19 nt, Artificial Sequence
  Description of Artificial Sequence: Synthetic oligonucleotide
ucacgauuauuaugccgga

SEQ ID NO: 1188595 - RNA, 19 nt, Artificial Sequence
  Description of Artificial Sequence: Synthetic oligonucleotide
caauuuaaacacagcugga

SEQ ID NO: 1188596 - RNA, 19 nt, Artificial Sequence
  Description of Artificial Sequence: Synthetic oligonucleotide
aacugacuguuuacaagca

SEQ ID NO: 1188597 - RNA, 19 nt, Artificial Sequence
  Description of Artificial Sequence: Synthetic oligonucleotide
gagaaauacccaaugaauu

SEQ ID NO: 1188598 - RNA, 19 nt, Artificial Sequence
  Description of Artificial Sequence: Synthetic oligonucleotide
aggcaugccuaugucuggc

SEQ ID NO: 1188599 - RNA, 19 nt, Artificial Sequence
  Description of Artificial Sequence: Synthetic oligonucleotide
guacuauuccacaggacca

SEQ ID NO: 1188600 - RNA, 19 nt, Artificial Sequence
  Description of Artificial Sequence: Synthetic oligonucleotide
ugucaacauagcagcacua

SEQ ID NO: 1188601 - RNA, 19 nt, Artificial Sequence
  Description of Artificial Sequence: Synthetic oligonucleotide
acuagaagacucuggcaua

SEQ ID NO: 1188602 - RNA, 19 nt, Artificial Sequence
  Description of Artificial Sequence: Synthetic oligonucleotide
uccagggguaccgaguaac

SEQ ID NO: 1188603 - RNA, 19 nt, Artificial Sequence
  Description of Artificial Sequence: Synthetic oligonucleotide
gauagcccaacuucucaaa

SEQ ID NO: 1188604 - RNA, 19 nt, Artificial Sequence
  Description of Artificial Sequence: Synthetic oligonucleotide
acccaaugaauuugaucca

SEQ ID NO: 1188605 - RNA, 19 nt, Artificial Sequence
  Description of Artificial Sequence: Synthetic oligonucleotide
auuaugccggaacacuguu

SEQ ID NO: 1188606 - RNA, 19 nt, Artificial Sequence
  Description of Artificial Sequence: Synthetic oligonucleotide
cauguagcaggaaaccaaa

SEQ ID NO: 1188607 - RNA, 19 nt, Artificial Sequence
  Description of Artificial Sequence: Synthetic oligonucleotide
uagcagcacuauauucacc

SEQ ID NO: 1188608 - RNA, 19 nt, Artificial Sequence
  Description of Artificial Sequence: Synthetic oligonucleotide
cuggacagucuauggcccg

SEQ ID NO: 1188609 - RNA, 19 nt, Artificial Sequence
  Description of Artificial Sequence: Synthetic oligonucleotide
ucaacauaugagggaccag

SEQ ID NO: 1188610 - RNA, 19 nt, Artificial Sequence
  Description of Artificial Sequence: Synthetic oligonucleotide
uugcugacggauucucaac

SEQ ID NO: 1188611 - RNA, 19 nt, Artificial Sequence
  Description of Artificial Sequence: Synthetic oligonucleotide
uuguuguaccaucuaucuu

SEQ ID NO: 1188612 - RNA, 19 nt, Artificial Sequence
  Description of Artificial Sequence: Synthetic oligonucleotide
cuugcugacggauucucaa

SEQ ID NO: 1188613 - RNA, 19 nt, Artificial Sequence
  Description of Artificial Sequence: Synthetic oligonucleotide
guuaucccaauuccaugca

SEQ ID NO: 1188614 - RNA, 19 nt, Artificial Sequence
  Description of Artificial Sequence: Synthetic oligonucleotide
guaaccugauucauacaac

SEQ ID NO: 1188615 - RNA, 19 nt, Artificial Sequence
  Description of Artificial Sequence: Synthetic oligonucleotide
caguaaguacuauuccaca

SEQ ID NO: 1188616 - RNA, 19 nt, Artificial Sequence
  Description of Artificial Sequence: Synthetic oligonucleotide
guaauaggaagagaacucu

SEQ ID NO: 1188617 - RNA, 19 nt, Artificial Sequence
  Description of Artificial Sequence: Synthetic oligonucleotide
ugucugggauaguaauccu

SEQ ID NO: 1188618 - RNA, 19 nt, Artificial Sequence
  Description of Artificial Sequence: Synthetic oligonucleotide
uacuauuccacaggaccaa

SEQ ID NO: 1188619 - RNA, 19 nt, Artificial Sequence
  Description of Artificial Sequence: Synthetic oligonucleotide
aauacccaaugaauuugau

SEQ ID NO: 1188620 - RNA, 19 nt, Artificial Sequence
  Description of Artificial Sequence: Synthetic oligonucleotide
uuuugaccaagcgcugcca

SEQ ID NO: 1188621 - RNA, 19 nt, Artificial Sequence
  Description of Artificial Sequence: Synthetic oligonucleotide
caaccaguaucuucucauc

SEQ ID NO: 1188622 - RNA, 19 nt, Artificial Sequence
  Description of Artificial Sequence: Synthetic oligonucleotide
aaucgcugagcauccuguu

SEQ ID NO: 1188623 - RNA, 19 nt, Artificial Sequence
  Description of Artificial Sequence: Synthetic oligonucleotide
caucaacugguuccgcaug

SEQ ID NO: 1188624 - RNA, 19 nt, Artificial Sequence
  Description of Artificial Sequence: Synthetic oligonucleotide
aggauccagggguaccgag

SEQ ID NO: 1188625 - RNA, 19 nt, Artificial Sequence
  Description of Artificial Sequence: Synthetic oligonucleotide
uaccgaguaacugacuguu

SEQ ID NO: 1188626 - RNA, 19 nt, Artificial Sequence
  Description of Artificial Sequence: Synthetic oligonucleotide
acggauucucaacuagaau

SEQ ID NO: 1188627 - RNA, 19 nt, Artificial Sequence
  Description of Artificial Sequence: Synthetic oligonucleotide
gcaguaaguacuauuccac

SEQ ID NO: 1188628 - RNA, 19 nt, Artificial Sequence
  Description of Artificial Sequence: Synthetic oligonucleotide
gacggauucucaacuagaa

SEQ ID NO: 1188629 - RNA, 19 nt, Artificial Sequence
  Description of Artificial Sequence: Synthetic oligonucleotide
gauccagggguaccgagua

SEQ ID NO: 1188630 - RNA, 19 nt, Artificial Sequence
  Description of Artificial Sequence: Synthetic oligonucleotide
gugaguuaucccaauucca

SEQ ID NO: 1188631 - RNA, 19 nt, Artificial Sequence
  Description of Artificial Sequence: Synthetic oligonucleotide
cacuagaagacucuggcau

SEQ ID NO: 1188632 - RNA, 19 nt, Artificial Sequence
  Description of Artificial Sequence: Synthetic oligonucleotide
auauugccuucccuccugu

SEQ ID NO: 1188633 - RNA, 19 nt, Artificial Sequence
  Description of Artificial Sequence: Synthetic oligonucleotide
ugguuuguuguaccaucua

SEQ ID NO: 1188634 - RNA, 19 nt, Artificial Sequence
  Description of Artificial Sequence: Synthetic oligonucleotide
aguaauccuugcugacgga

SEQ ID NO: 1188635 - RNA, 19 nt, Artificial Sequence
  Description of Artificial Sequence: Synthetic oligonucleotide
aagccggaagucaaccagu

SEQ ID NO: 1188636 - RNA, 19 nt, Artificial Sequence
  Description of Artificial Sequence: Synthetic oligonucleotide
cugauagcccaacuucuca

SEQ ID NO: 1188637 - RNA, 19 nt, Artificial Sequence
  Description of Artificial Sequence: Synthetic oligonucleotide
ucccugugaguuaucccaa

SEQ ID NO: 1188638 - RNA, 19 nt, Artificial Sequence
  Description of Artificial Sequence: Synthetic oligonucleotide
caccugaaguggcucgagg

SEQ ID NO: 1188639 - RNA, 19 nt, Artificial Sequence
  Description of Artificial Sequence: Synthetic oligonucleotide
ucacaauaucaccgaguuu

SEQ ID NO: 1188640 - RNA, 19 nt, Artificial Sequence
  Description of Artificial Sequence: Synthetic oligonucleotide
uggcucgaggccucuuugc

SEQ ID NO: 1188641 - RNA, 19 nt, Artificial Sequence
  Description of Artificial Sequence: Synthetic oligonucleotide
cugguuccgcaugaaauuc

SEQ ID NO: 1188642 - RNA, 19 nt, Artificial Sequence
  Description of Artificial Sequence: Synthetic oligonucleotide
auacaguaaccugauucau

SEQ ID NO: 1188643 - RNA, 19 nt, Artificial Sequence
  Description of Artificial Sequence: Synthetic oligonucleotide
ccuaugucuggcucuauuc

SEQ ID NO: 1188644 - RNA, 19 nt, Artificial Sequence
  Description of Artificial Sequence: Synthetic oligonucleotide
ugucuggcucuauucuauc

SEQ ID NO: 1188645 - RNA, 19 nt, Artificial Sequence
  Description of Artificial Sequence: Synthetic oligonucleotide
guacaaguuugucaacaua

SEQ ID NO: 1188646 - RNA, 19 nt, Artificial Sequence
  Description of Artificial Sequence: Synthetic oligonucleotide
gaccaagcgcugccagggg

SEQ ID NO: 1188647 - RNA, 19 nt, Artificial Sequence
  Description of Artificial Sequence: Synthetic oligonucleotide
uucacugcaacagccucuu

SEQ ID NO: 1188648 - RNA, 19 nt, Artificial Sequence
  Description of Artificial Sequence: Synthetic oligonucleotide
ggcugcucacaauaucacc

SEQ ID NO: 1188649 - RNA, 19 nt, Artificial Sequence
  Description of Artificial Sequence: Synthetic oligonucleotide
guuuaauaucccugugagu

SEQ ID NO: 1188650 - RNA, 19 nt, Artificial Sequence
  Description of Artificial Sequence: Synthetic oligonucleotide
cuggagcaacauaagguaa

SEQ ID NO: 1188651 - RNA, 19 nt, Artificial Sequence
  Description of Artificial Sequence: Synthetic oligonucleotide
ccugaaguggcucgaggcc

SEQ ID NO: 1188652 - RNA, 19 nt, Artificial Sequence
  Description of Artificial Sequence: Synthetic oligonucleotide
cauccaauuuggugaagaa

SEQ ID NO: 1188653 - RNA, 19 nt, Artificial Sequence
  Description of Artificial Sequence: Synthetic oligonucleotide
ccgaguuucccuuugaucu

SEQ ID NO: 1188654 - RNA, 19 nt, Artificial Sequence
  Description of Artificial Sequence: Synthetic oligonucleotide
uugauacaguaaccugauu

SEQ ID NO: 1188655 - RNA, 19 nt, Artificial Sequence
  Description of Artificial Sequence: Synthetic oligonucleotide
gaauccacuagaagacucu

SEQ ID NO: 1188656 - RNA, 19 nt, Artificial Sequence
  Description of Artificial Sequence: Synthetic oligonucleotide
cuaugucuggcucuauucu

SEQ ID NO: 1188657 - RNA, 19 nt, Artificial Sequence
  Description of Artificial Sequence: Synthetic oligonucleotide
agcauaugaucagggcaug

SEQ ID NO: 1188658 - RNA, 19 nt, Artificial Sequence
  Description of Artificial Sequence: Synthetic oligonucleotide
cugcuuagagaauccacua

SEQ ID NO: 1188659 - RNA, 19 nt, Artificial Sequence
  Description of Artificial Sequence: Synthetic oligonucleotide
cagaguugacagcuucauc

SEQ ID NO: 1188660 - RNA, 19 nt, Artificial Sequence
  Description of Artificial Sequence: Synthetic oligonucleotide
cagaucucuuucuuaauau

SEQ ID NO: 1188661 - RNA, 19 nt, Artificial Sequence
  Description of Artificial Sequence: Synthetic oligonucleotide
gaaucgcugagcauccugu

SEQ ID NO: 1188662 - RNA, 19 nt, Artificial Sequence
  Description of Artificial Sequence: Synthetic oligonucleotide
gcaaaacauacuaagaauu

SEQ ID NO: 1188663 - RNA, 19 nt, Artificial Sequence
  Description of Artificial Sequence: Synthetic oligonucleotide
cuggcucuauucuaucaaa

SEQ ID NO: 1188664 - RNA, 19 nt, Artificial Sequence
  Description of Artificial Sequence: Synthetic oligonucleotide
cauagaauuucacuacauu

SEQ ID NO: 1188665 - RNA, 19 nt, Artificial Sequence
  Description of Artificial Sequence: Synthetic oligonucleotide
gaagugucucuugaacucu

SEQ ID NO: 1188666 - RNA, 19 nt, Artificial Sequence
  Description of Artificial Sequence: Synthetic oligonucleotide
ggaccaaacaucaacuggu

SEQ ID NO: 1188667 - RNA, 19 nt, Artificial Sequence
  Description of Artificial Sequence: Synthetic oligonucleotide
caucuuguucaguaagcgu

SEQ ID NO: 1188668 - RNA, 19 nt, Artificial Sequence
  Description of Artificial Sequence: Synthetic oligonucleotide
guugauacaguaaccugau

SEQ ID NO: 1188669 - RNA, 19 nt, Artificial Sequence
  Description of Artificial Sequence: Synthetic oligonucleotide
aagaagcgugucauucuuu

SEQ ID NO: 1188670 - RNA, 19 nt, Artificial Sequence
  Description of Artificial Sequence: Synthetic oligonucleotide
cauaugaucagggcaugua

SEQ ID NO: 1188671 - RNA, 19 nt, Artificial Sequence
  Description of Artificial Sequence: Synthetic oligonucleotide
cagggguaccgaguaacug

SEQ ID NO: 1188672 - RNA, 19 nt, Artificial Sequence
  Description of Artificial Sequence: Synthetic oligonucleotide
gaaauagauacuggauauu

SEQ ID NO: 1188673 - RNA, 19 nt, Artificial Sequence
  Description of Artificial Sequence: Synthetic oligonucleotide
uaucaccgaguuucccuuu

SEQ ID NO: 1188674 - RNA, 19 nt, Artificial Sequence
  Description of Artificial Sequence: Synthetic oligonucleotide
acuauuccacaggaccaaa

SEQ ID NO: 1188675 - RNA, 19 nt, Artificial Sequence
  Description of Artificial Sequence: Synthetic oligonucleotide
cauugcaguaaguacuauu

SEQ ID NO: 1188676 - RNA, 19 nt, Artificial Sequence
  Description of Artificial Sequence: Synthetic oligonucleotide
guaccgaguaacugacugu

SEQ ID NO: 1188677 - RNA, 19 nt, Artificial Sequence
  Description of Artificial Sequence: Synthetic oligonucleotide
gcgugucauucuuuugacc

SEQ ID NO: 1188678 - RNA, 19 nt, Artificial Sequence
  Description of Artificial Sequence: Synthetic oligonucleotide
cuuguucaguaagcguuca

SEQ ID NO: 1188679 - RNA, 19 nt, Artificial Sequence
  Description of Artificial Sequence: Synthetic oligonucleotide
gggaccagugucccacaag

SEQ ID NO: 1188680 - RNA, 19 nt, Artificial Sequence
  Description of Artificial Sequence: Synthetic oligonucleotide
aguaagcguucacgauuau

SEQ ID NO: 1188681 - RNA, 19 nt, Artificial Sequence
  Description of Artificial Sequence: Synthetic oligonucleotide
cucuaauccaucacccuuu

SEQ ID NO: 1188682 - RNA, 19 nt, Artificial Sequence
  Description of Artificial Sequence: Synthetic oligonucleotide
auucaccaggaaaccccag

SEQ ID NO: 1188683 - RNA, 19 nt, Artificial Sequence
  Description of Artificial Sequence: Synthetic oligonucleotide
cgauuauuaugccggaaca

SEQ ID NO: 1188684 - RNA, 19 nt, Artificial Sequence
  Description of Artificial Sequence: Synthetic oligonucleotide
cuaauccaucacccuuuga

SEQ ID NO: 1188685 - RNA, 19 nt, Artificial Sequence
  Description of Artificial Sequence: Synthetic oligonucleotide
gggguaccgaguaacugac

SEQ ID NO: 1188686 - RNA, 19 nt, Artificial Sequence
  Description of Artificial Sequence: Synthetic oligonucleotide
accaccugaaguggcucga

SEQ ID NO: 1188687 - RNA, 19 nt, Artificial Sequence
  Description of Artificial Sequence: Synthetic oligonucleotide
gucaacauagcagcacuau

SEQ ID NO: 1188688 - RNA, 19 nt, Artificial Sequence
  Description of Artificial Sequence: Synthetic oligonucleotide
gagcaacauaagguaaagu

SEQ ID NO: 1188689 - RNA, 19 nt, Artificial Sequence
  Description of Artificial Sequence: Synthetic oligonucleotide
guaauccuugcugacggau

SEQ ID NO: 1188690 - RNA, 19 nt, Artificial Sequence
  Description of Artificial Sequence: Synthetic oligonucleotide
cguucacgauuauuaugcc

SEQ ID NO: 1188691 - RNA, 19 nt, Artificial Sequence
  Description of Artificial Sequence: Synthetic oligonucleotide
gggcauguaggcugugaga

SEQ ID NO: 1188692 - RNA, 19 nt, Artificial Sequence
  Description of Artificial Sequence: Synthetic oligonucleotide
cacccuuugaaagccggaa

SEQ ID NO: 1188693 - RNA, 19 nt, Artificial Sequence
  Description of Artificial Sequence: Synthetic oligonucleotide
augccuaugucuggcucua

SEQ ID NO: 1188694 - RNA, 19 nt, Artificial Sequence
  Description of Artificial Sequence: Synthetic oligonucleotide
ccgaguaacugacuguuua

SEQ ID NO: 1188695 - RNA, 19 nt, Artificial Sequence
  Description of Artificial Sequence: Synthetic oligonucleotide
ccuccugugaccauagaau

SEQ ID NO: 1188696 - RNA, 19 nt, Artificial Sequence
  Description of Artificial Sequence: Synthetic oligonucleotide
cacgauuauuaugccggaa

SEQ ID NO: 1188697 - RNA, 19 nt, Artificial Sequence
  Description of Artificial Sequence: Synthetic oligonucleotide
ucgaggccucuuugcuccu

SEQ ID NO: 1188698 - RNA, 19 nt, Artificial Sequence
  Description of Artificial Sequence: Synthetic oligonucleotide
caagcgcugccagggguuc

SEQ ID NO: 1188699 - RNA, 19 nt, Artificial Sequence
  Description of Artificial Sequence: Synthetic oligonucleotide
gcucgaggccucuuugcuc

SEQ ID NO: 1188700 - RNA, 19 nt, Artificial Sequence
  Description of Artificial Sequence: Synthetic oligonucleotide
gcugacggauucucaacua

SEQ ID NO: 1188701 - RNA, 19 nt, Artificial Sequence
  Description of Artificial Sequence: Synthetic oligonucleotide
aagcgcugccagggguucu

SEQ ID NO: 1188702 - RNA, 19 nt, Artificial Sequence
  Description of Artificial Sequence: Synthetic oligonucleotide
gccggaacacuguugccaa

SEQ ID NO: 1188703 - RNA, 19 nt, Artificial Sequence
  Description of Artificial Sequence: Synthetic oligonucleotide
agucuauggcccgcuucau

SEQ ID NO: 1188704 - RNA, 19 nt, Artificial Sequence
  Description of Artificial Sequence: Synthetic oligonucleotide
gaccaaacaucaacugguu

SEQ ID NO: 1188705 - RNA, 19 nt, Artificial Sequence
  Description of Artificial Sequence: Synthetic oligonucleotide
agccggaagucaaccagua

SEQ ID NO: 1188706 - RNA, 19 nt, Artificial Sequence
  Description of Artificial Sequence: Synthetic oligonucleotide
guaagcguucacgauuauu

SEQ ID NO: 1188707 - RNA, 19 nt, Artificial Sequence
  Description of Artificial Sequence: Synthetic oligonucleotide
gcaguacuccagaaauaga

SEQ ID NO: 1188708 - RNA, 19 nt, Artificial Sequence
  Description of Artificial Sequence: Synthetic oligonucleotide
cuucccuccugugaccaua

SEQ ID NO: 1188709 - RNA, 19 nt, Artificial Sequence
  Description of Artificial Sequence: Synthetic oligonucleotide
cccuuugaaagccggaagu

SEQ ID NO: 1188710 - RNA, 19 nt, Artificial Sequence
  Description of Artificial Sequence: Synthetic oligonucleotide
ccagccaacauugcaguaa

SEQ ID NO: 1188711 - RNA, 19 nt, Artificial Sequence
  Description of Artificial Sequence: Synthetic oligonucleotide
gcacuauauucaccaggaa

SEQ ID NO: 1188712 - RNA, 19 nt, Artificial Sequence
  Description of Artificial Sequence: Synthetic oligonucleotide
gucugggauaguaauccuu

SEQ ID NO: 1188713 - RNA, 19 nt, Artificial Sequence
  Description of Artificial Sequence: Synthetic oligonucleotide
cccuccugugaccauagaa

SEQ ID NO: 1188714 - RNA, 19 nt, Artificial Sequence
  Description of Artificial Sequence: Synthetic oligonucleotide
gcucacaauaucaccgagu

SEQ ID NO: 1188715 - RNA, 19 nt, Artificial Sequence
  Description of Artificial Sequence: Synthetic oligonucleotide
cccaaaguuugcaccaagu

SEQ ID NO: 1188716 - RNA, 19 nt, Artificial Sequence
  Description of Artificial Sequence: Synthetic oligonucleotide
ccggaacacuguugccaag

SEQ ID NO: 1188717 - RNA, 19 nt, Artificial Sequence
  Description of Artificial Sequence: Synthetic oligonucleotide
gacagucuauggcccgcuu

SEQ ID NO: 1188718 - RNA, 19 nt, Artificial Sequence
  Description of Artificial Sequence: Synthetic oligonucleotide
ggauccagggguaccgagu

SEQ ID NO: 1188719 - RNA, 19 nt, Artificial Sequence
  Description of Artificial Sequence: Synthetic oligonucleotide
caccgaguuucccuuugau

SEQ ID NO: 1188720 - RNA, 19 nt, Artificial Sequence
  Description of Artificial Sequence: Synthetic oligonucleotide
ggcaugccuaugucuggcu

SEQ ID NO: 1188721 - RNA, 19 nt, Artificial Sequence
  Description of Artificial Sequence: Synthetic oligonucleotide
ccccgccaugaguugauga

SEQ ID NO: 1188722 - RNA, 19 nt, Artificial Sequence
  Description of Artificial Sequence: Synthetic oligonucleotide
gcauaugaucagggcaugu

SEQ ID NO: 1188723 - RNA, 19 nt, Artificial Sequence
  Description of Artificial Sequence: Synthetic oligonucleotide
gguuccgcaugaaauucuu

SEQ ID NO: 1188724 - RNA, 19 nt, Artificial Sequence
  Description of Artificial Sequence: Synthetic oligonucleotide
gccuaugucuggcucuauu

SEQ ID NO: 1188725 - RNA, 19 nt, Artificial Sequence
  Description of Artificial Sequence: Synthetic oligonucleotide
ccgccaugaguugaugaaa

SEQ ID NO: 1188726 - RNA, 19 nt, Artificial Sequence
  Description of Artificial Sequence: Synthetic oligonucleotide
ccagggguaccgaguaacu

SEQ ID NO: 1188727 - RNA, 19 nt, Artificial Sequence
  Description of Artificial Sequence: Synthetic oligonucleotide
ccugugaguuaucccaauu

SEQ ID NO: 1188728 - RNA, 19 nt, Artificial Sequence
  Description of Artificial Sequence: Synthetic oligonucleotide
ccgcuucaugucuacaauu

SEQ ID NO: 1188729 - RNA, 19 nt, Artificial Sequence
  Description of Artificial Sequence: Synthetic oligonucleotide
ggacagucuauggcccgcu

SEQ ID NO: 1188730 - RNA, 19 nt, Artificial Sequence
  Description of Artificial Sequence: Synthetic oligonucleotide
gccggaagucaaccaguau

SEQ ID NO: 1188731 - RNA, 19 nt, Artificial Sequence
  Description of Artificial Sequence: Synthetic oligonucleotide
cccgcuucaugucuacaau

SEQ ID NO: 1188732 - RNA, 19 nt, Artificial Sequence
  Description of Artificial Sequence: Synthetic oligonucleotide
ccuguucaggcaugccuau

SEQ ID NO: 1188733 - RNA, 19 nt, Artificial Sequence
  Description of Artificial Sequence: Synthetic oligonucleotide
ccaagcgcugccagggguu

SEQ ID NO: 1188734 - RNA, 19 nt, Artificial Sequence
  Description of Artificial Sequence: Synthetic oligonucleotide
ggguaccgaguaacugacu

SEQ ID NO: 1188735 - RNA, 19 nt, Artificial Sequence
  Description of Artificial Sequence: Synthetic oligonucleotide
cgaggccucuuugcuccuc

SEQ ID NO: 1188736 - RNA, 19 nt, Artificial Sequence
  Description of Artificial Sequence: Synthetic oligonucleotide
ccagggguucugugaggau

SEQ ID NO: 1188737 - RNA, 19 nt, Artificial Sequence
  Description of Artificial Sequence: Synthetic oligonucleotide
uagguuaccauuaugagca

SEQ ID NO: 1188738 - RNA, 19 nt, Artificial Sequence
  Description of Artificial Sequence: Synthetic oligonucleotide
uuaaaaucuaacuaagaug

SEQ ID NO: 1188739 - RNA, 19 nt, Artificial Sequence
  Description of Artificial Sequence: Synthetic oligonucleotide
uuuucauugguccucgucg

SEQ ID NO: 1188740 - RNA, 19 nt, Artificial Sequence
  Description of Artificial Sequence: Synthetic oligonucleotide
aaaacuuucauuuggguaa

SEQ ID NO: 1188741 - RNA, 19 nt, Artificial Sequence
  Description of Artificial Sequence: Synthetic oligonucleotide
aauauucaguauuugaccu

SEQ ID NO: 1188742 - RNA, 19 nt, Artificial Sequence
  Description of Artificial Sequence: Synthetic oligonucleotide
uugaaguggaccuaauucg

SEQ ID NO: 1188743 - RNA, 19 nt, Artificial Sequence
  Description of Artificial Sequence: Synthetic oligonucleotide
uccuuaaagaguauuagca

SEQ ID NO: 1188744 - RNA, 19 nt, Artificial Sequence
  Description of Artificial Sequence: Synthetic oligonucleotide
gaaucauccaaacacaaac

SEQ ID NO: 1188745 - RNA, 19 nt, Artificial Sequence
  Description of Artificial Sequence: Synthetic oligonucleotide
acuacuugucucuagcacc

SEQ ID NO: 1188746 - RNA, 19 nt, Artificial Sequence
  Description of Artificial Sequence: Synthetic oligonucleotide
uuuagcuuuuaauuuagcc

SEQ ID NO: 1188747 - RNA, 19 nt, Artificial Sequence
  Description of Artificial Sequence: Synthetic oligonucleotide
uuaaagaguauuagcaggc

SEQ ID NO: 1188748 - RNA, 19 nt, Artificial Sequence
  Description of Artificial Sequence: Synthetic oligonucleotide
ugaauacuaucaaacacag

SEQ ID NO: 1188749 - RNA, 19 nt, Artificial Sequence
  Description of Artificial Sequence: Synthetic oligonucleotide
uuaaagagaauuauucccu

SEQ ID NO: 1188750 - RNA, 19 nt, Artificial Sequence
  Description of Artificial Sequence: Synthetic oligonucleotide
acacagcaaauauugaccc

SEQ ID NO: 1188751 - RNA, 19 nt, Artificial Sequence
  Description of Artificial Sequence: Synthetic oligonucleotide
uuaagaggaagaaucuucc

SEQ ID NO: 1188752 - RNA, 19 nt, Artificial Sequence
  Description of Artificial Sequence: Synthetic oligonucleotide
uuguagguuaccauuauga

SEQ ID NO: 1188753 - RNA, 19 nt, Artificial Sequence
  Description of Artificial Sequence: Synthetic oligonucleotide
auauugaccccuuaaaugu

SEQ ID NO: 1188754 - RNA, 19 nt, Artificial Sequence
  Description of Artificial Sequence: Synthetic oligonucleotide
ugauuuuaguuuuaucugc

SEQ ID NO: 1188755 - RNA, 19 nt, Artificial Sequence
  Description of Artificial Sequence: Synthetic oligonucleotide
uuacaaaggcaauuaagag

SEQ ID NO: 1188756 - RNA, 19 nt, Artificial Sequence
  Description of Artificial Sequence: Synthetic oligonucleotide
ucuaguacuuuccaaguca

SEQ ID NO: 1188757 - RNA, 19 nt, Artificial Sequence
  Description of Artificial Sequence: Synthetic oligonucleotide
ucacauuaaagucuguugu

SEQ ID NO: 1188758 - RNA, 19 nt, Artificial Sequence
  Description of Artificial Sequence: Synthetic oligonucleotide
uuuaguuuuaucugcacuc

SEQ ID NO: 1188759 - RNA, 19 nt, Artificial Sequence
  Description of Artificial Sequence: Synthetic oligonucleotide
agaacaacgacggaagcgc

SEQ ID NO: 1188760 - RNA, 19 nt, Artificial Sequence
  Description of Artificial Sequence: Synthetic oligonucleotide
aaauauugaccccuuaaau

SEQ ID NO: 1188761 - RNA, 19 nt, Artificial Sequence
  Description of Artificial Sequence: Synthetic oligonucleotide
auucugaucccacagucac

SEQ ID NO: 1188762 - RNA, 19 nt, Artificial Sequence
  Description of Artificial Sequence: Synthetic oligonucleotide
uuugaaaacaggaugugua

SEQ ID NO: 1188763 - RNA, 19 nt, Artificial Sequence
  Description of Artificial Sequence: Synthetic oligonucleotide
ucaauuugaugacagauuu

SEQ ID NO: 1188764 - RNA, 19 nt, Artificial Sequence
  Description of Artificial Sequence: Synthetic oligonucleotide
ugcuugaacaaucacauua

SEQ ID NO: 1188765 - RNA, 19 nt, Artificial Sequence
  Description of Artificial Sequence: Synthetic oligonucleotide
caguauuugaccuuuauca

SEQ ID NO: 1188766 - RNA, 19 nt, Artificial Sequence
  Description of Artificial Sequence: Synthetic oligonucleotide
uaaacuacuugucucuagc

SEQ ID NO: 1188767 - RNA, 19 nt, Artificial Sequence
  Description of Artificial Sequence: Synthetic oligonucleotide
uuuguuuagugauucuugc

SEQ ID NO: 1188768 - RNA, 19 nt, Artificial Sequence
  Description of Artificial Sequence: Synthetic oligonucleotide
gugauuugaaaacaggaug

SEQ ID NO: 1188769 - RNA, 19 nt, Artificial Sequence
  Description of Artificial Sequence: Synthetic oligonucleotide
uccauuuuauuucaccgug

SEQ ID NO: 1188770 - RNA, 19 nt, Artificial Sequence
  Description of Artificial Sequence: Synthetic oligonucleotide
uugaccuuuaucaucuagc

SEQ ID NO: 1188771 - RNA, 19 nt, Artificial Sequence
  Description of Artificial Sequence: Synthetic oligonucleotide
ucaucaucgaaucuuguuc

SEQ ID NO: 1188772 - RNA, 19 nt, Artificial Sequence
  Description of Artificial Sequence: Synthetic oligonucleotide
auuaagaggaagaaucuuc

SEQ ID NO: 1188773 - RNA, 19 nt, Artificial Sequence
  Description of Artificial Sequence: Synthetic oligonucleotide
uuuucagccauuuuggcua

SEQ ID NO: 1188774 - RNA, 19 nt, Artificial Sequence
  Description of Artificial Sequence: Synthetic oligonucleotide
aagaacaacgacggaagcg

SEQ ID NO: 1188775 - RNA, 19 nt, Artificial Sequence
  Description of Artificial Sequence: Synthetic oligonucleotide
auuaugagcacuucuggcu

SEQ ID NO: 1188776 - RNA, 19 nt, Artificial Sequence
  Description of Artificial Sequence: Synthetic oligonucleotide
uguagguuaccauuaugag

SEQ ID NO: 1188777 - RNA, 19 nt, Artificial Sequence
  Description of Artificial Sequence: Synthetic oligonucleotide
uuugucucguggcaaauug

SEQ ID NO: 1188778 - RNA, 19 nt, Artificial Sequence
  Description of Artificial Sequence: Synthetic oligonucleotide
uuaauuguagguuaccauu

SEQ ID NO: 1188779 - RNA, 19 nt, Artificial Sequence
  Description of Artificial Sequence: Synthetic oligonucleotide
agauucugaucccacaguc

SEQ ID NO: 1188780 - RNA, 19 nt, Artificial Sequence
  Description of Artificial Sequence: Synthetic oligonucleotide
acaaguuuguacuaauaca

SEQ ID NO: 1188781 - RNA, 19 nt, Artificial Sequence
  Description of Artificial Sequence: Synthetic oligonucleotide
aauugaagucuccaaagua

SEQ ID NO: 1188782 - RNA, 19 nt, Artificial Sequence
  Description of Artificial Sequence: Synthetic oligonucleotide
ucgucgaugaugaugguga

SEQ ID NO: 1188783 - RNA, 19 nt, Artificial Sequence
  Description of Artificial Sequence: Synthetic oligonucleotide
cugauuuuaguuuuaucug

SEQ ID NO: 1188784 - RNA, 19 nt, Artificial Sequence
  Description of Artificial Sequence: Synthetic oligonucleotide
uuggcuaacuguaaaauuu

SEQ ID NO: 1188785 - RNA, 19 nt, Artificial Sequence
  Description of Artificial Sequence: Synthetic oligonucleotide
aucacauuaaagucuguug

SEQ ID NO: 1188786 - RNA, 19 nt, Artificial Sequence
  Description of Artificial Sequence: Synthetic oligonucleotide
ugaccuuuaucaucuagcc

SEQ ID NO: 1188787 - RNA, 19 nt, Artificial Sequence
  Description of Artificial Sequence: Synthetic oligonucleotide
aaagagaauuauucccucu

SEQ ID NO: 1188788 - RNA, 19 nt, Artificial Sequence
  Description of Artificial Sequence: Synthetic oligonucleotide
ugaaguggaccuaauucgc

SEQ ID NO: 1188789 - RNA, 19 nt, Artificial Sequence
  Description of Artificial Sequence: Synthetic oligonucleotide
auguguaaaucuucucuac

SEQ ID NO: 1188790 - RNA, 19 nt, Artificial Sequence
  Description of Artificial Sequence: Synthetic oligonucleotide
guagguuaccauuaugagc

SEQ ID NO: 1188791 - RNA, 19 nt, Artificial Sequence
  Description of Artificial Sequence: Synthetic oligonucleotide
gaagucuccaaaguaauac

SEQ ID NO: 1188792 - RNA, 19 nt, Artificial Sequence
  Description of Artificial Sequence: Synthetic oligonucleotide
aguuuugccuuagauuugc

SEQ ID NO: 1188793 - RNA, 19 nt, Artificial Sequence
  Description of Artificial Sequence: Synthetic oligonucleotide
aaucuaacuaagaugaaua

SEQ ID NO: 1188794 - RNA, 19 nt, Artificial Sequence
  Description of Artificial Sequence: Synthetic oligonucleotide
ugcaaaguaaucuuccuua

SEQ ID NO: 1188795 - RNA, 19 nt, Artificial Sequence
  Description of Artificial Sequence: Synthetic oligonucleotide
uucaccgugauuugaaaac

SEQ ID NO: 1188796 - RNA, 19 nt, Artificial Sequence
  Description of Artificial Sequence: Synthetic oligonucleotide
uaacuguaaaauuucucac

SEQ ID NO: 1188797 - RNA, 19 nt, Artificial Sequence
  Description of Artificial Sequence: Synthetic oligonucleotide
cauccaaacacaaacagaa

SEQ ID NO: 1188798 - RNA, 19 nt, Artificial Sequence
  Description of Artificial Sequence: Synthetic oligonucleotide
aaaucuaacuaagaugaau

SEQ ID NO: 1188799 - RNA, 19 nt, Artificial Sequence
  Description of Artificial Sequence: Synthetic oligonucleotide
ucuuuuauacagguggaca

SEQ ID NO: 1188800 - RNA, 19 nt, Artificial Sequence
  Description of Artificial Sequence: Synthetic oligonucleotide
auuugcucagugcuugaac

SEQ ID NO: 1188801 - RNA, 19 nt, Artificial Sequence
  Description of Artificial Sequence: Synthetic oligonucleotide
cauuaugagcacuucuggc

SEQ ID NO: 1188802 - RNA, 19 nt, Artificial Sequence
  Description of Artificial Sequence: Synthetic oligonucleotide
aacuucaguaagcauccca

SEQ ID NO: 1188803 - RNA, 19 nt, Artificial Sequence
  Description of Artificial Sequence: Synthetic oligonucleotide
aauacucaauuugaugaca

SEQ ID NO: 1188804 - RNA, 19 nt, Artificial Sequence
  Description of Artificial Sequence: Synthetic oligonucleotide
aucauuauguccaaaggca

SEQ ID NO: 1188805 - RNA, 19 nt, Artificial Sequence
  Description of Artificial Sequence: Synthetic oligonucleotide
aaacuacuugucucuagca

SEQ ID NO: 1188806 - RNA, 19 nt, Artificial Sequence
  Description of Artificial Sequence: Synthetic oligonucleotide
uaauuguagguuaccauua

SEQ ID NO: 1188807 - RNA, 19 nt, Artificial Sequence
  Description of Artificial Sequence: Synthetic oligonucleotide
ucuuauacucauccgucac

SEQ ID NO: 1188808 - RNA, 19 nt, Artificial Sequence
  Description of Artificial Sequence: Synthetic oligonucleotide
uuaucaucuagccauucuu

SEQ ID NO: 1188809 - RNA, 19 nt, Artificial Sequence
  Description of Artificial Sequence: Synthetic oligonucleotide
aaacuuucauuuggguaac

SEQ ID NO: 1188810 - RNA, 19 nt, Artificial Sequence
  Description of Artificial Sequence: Synthetic oligonucleotide
cauuauguccaaaggcacc

SEQ ID NO: 1188811 - RNA, 19 nt, Artificial Sequence
  Description of Artificial Sequence: Synthetic oligonucleotide
auucuuauacucauccguc

SEQ ID NO: 1188812 - RNA, 19 nt, Artificial Sequence
  Description of Artificial Sequence: Synthetic oligonucleotide
gcaauuaagaggaagaauc

SEQ ID NO: 1188813 - RNA, 19 nt, Artificial Sequence
  Description of Artificial Sequence: Synthetic oligonucleotide
ucuucgguuccuuuaaauc

SEQ ID NO: 1188814 - RNA, 19 nt, Artificial Sequence
  Description of Artificial Sequence: Synthetic oligonucleotide
gacugaauacuaucaaaca

SEQ ID NO: 1188815 - RNA, 19 nt, Artificial Sequence
  Description of Artificial Sequence: Synthetic oligonucleotide
agcgccucuacuuccgagc

SEQ ID NO: 1188816 - RNA, 19 nt, Artificial Sequence
  Description of Artificial Sequence: Synthetic oligonucleotide
aaagaguauuagcaggcuu

SEQ ID NO: 1188817 - RNA, 19 nt, Artificial Sequence
  Description of Artificial Sequence: Synthetic oligonucleotide
ucuaacuaagaugaauaaa

SEQ ID NO: 1188818 - RNA, 19 nt, Artificial Sequence
  Description of Artificial Sequence: Synthetic oligonucleotide
uguucgucucaucugaaua

SEQ ID NO: 1188819 - RNA, 19 nt, Artificial Sequence
  Description of Artificial Sequence: Synthetic oligonucleotide
aaucauccaaacacaaaca

SEQ ID NO: 1188820 - RNA, 19 nt, Artificial Sequence
  Description of Artificial Sequence: Synthetic oligonucleotide
ucuagccauucuuuuaugu

SEQ ID NO: 1188821 - RNA, 19 nt, Artificial Sequence
  Description of Artificial Sequence: Synthetic oligonucleotide
aauuguagguuaccauuau

SEQ ID NO: 1188822 - RNA, 19 nt, Artificial Sequence
  Description of Artificial Sequence: Synthetic oligonucleotide
ugcugauccuccaugauuu

SEQ ID NO: 1188823 - RNA, 19 nt, Artificial Sequence
  Description of Artificial Sequence: Synthetic oligonucleotide
aaaauuugucucguggcaa

SEQ ID NO: 1188824 - RNA, 19 nt, Artificial Sequence
  Description of Artificial Sequence: Synthetic oligonucleotide
uaaagagaauuauucccuc

SEQ ID NO: 1188825 - RNA, 19 nt, Artificial Sequence
  Description of Artificial Sequence: Synthetic oligonucleotide
uuaguuuuaucugcacuca

SEQ ID NO: 1188826 - RNA, 19 nt, Artificial Sequence
  Description of Artificial Sequence: Synthetic oligonucleotide
cuuaaaaucuaacuaagau

SEQ ID NO: 1188827 - RNA, 19 nt, Artificial Sequence
  Description of Artificial Sequence: Synthetic oligonucleotide
ugaaucauccaaacacaaa

SEQ ID NO: 1188828 - RNA, 19 nt, Artificial Sequence
  Description of Artificial Sequence: Synthetic oligonucleotide
ucguguuucaguacuuccu

SEQ ID NO: 1188829 - RNA, 19 nt, Artificial Sequence
  Description of Artificial Sequence: Synthetic oligonucleotide
uuaauuuagccuccacuuu

SEQ ID NO: 1188830 - RNA, 19 nt, Artificial Sequence
  Description of Artificial Sequence: Synthetic oligonucleotide
cuaguacuuuccaagucac

SEQ ID NO: 1188831 - RNA, 19 nt, Artificial Sequence
  Description of Artificial Sequence: Synthetic oligonucleotide
agcuuaaaaucuaacuaag

SEQ ID NO: 1188832 - RNA, 19 nt, Artificial Sequence
  Description of Artificial Sequence: Synthetic oligonucleotide
uugccuuagauuugcucag

SEQ ID NO: 1188833 - RNA, 19 nt, Artificial Sequence
  Description of Artificial Sequence: Synthetic oligonucleotide
aguugcaucaguggggaag

SEQ ID NO: 1188834 - RNA, 19 nt, Artificial Sequence
  Description of Artificial Sequence: Synthetic oligonucleotide
uagauuugcucagugcuug

SEQ ID NO: 1188835 - RNA, 19 nt, Artificial Sequence
  Description of Artificial Sequence: Synthetic oligonucleotide
uuuggcuaacuguaaaauu

SEQ ID NO: 1188836 - RNA, 19 nt, Artificial Sequence
  Description of Artificial Sequence: Synthetic oligonucleotide
augaguuuugccuuagauu

SEQ ID NO: 1188837 - RNA, 19 nt, Artificial Sequence
  Description of Artificial Sequence: Synthetic oligonucleotide
ugucucguggcaaauugaa

SEQ ID NO: 1188838 - RNA, 19 nt, Artificial Sequence
  Description of Artificial Sequence: Synthetic oligonucleotide
accuaauucgcuuuucuuu

SEQ ID NO: 1188839 - RNA, 19 nt, Artificial Sequence
  Description of Artificial Sequence: Synthetic oligonucleotide
auugaagucuccaaaguaa

SEQ ID NO: 1188840 - RNA, 19 nt, Artificial Sequence
  Description of Artificial Sequence: Synthetic oligonucleotide
aucuaacuaagaugaauaa

SEQ ID NO: 1188841 - RNA, 19 nt, Artificial Sequence
  Description of Artificial Sequence: Synthetic oligonucleotide
auacucaauuugaugacag

SEQ ID NO: 1188842 - RNA, 19 nt, Artificial Sequence
  Description of Artificial Sequence: Synthetic oligonucleotide
ucauuuggguaacaacaaa

SEQ ID NO: 1188843 - RNA, 19 nt, Artificial Sequence
  Description of Artificial Sequence: Synthetic oligonucleotide
ugacuugugucuuccuuca

SEQ ID NO: 1188844 - RNA, 19 nt, Artificial Sequence
  Description of Artificial Sequence: Synthetic oligonucleotide
uaucaucuagccauucuuu

SEQ ID NO: 1188845 - RNA, 19 nt, Artificial Sequence
  Description of Artificial Sequence: Synthetic oligonucleotide
ucuagcaccguucucucuu

SEQ ID NO: 1188846 - RNA, 19 nt, Artificial Sequence
  Description of Artificial Sequence: Synthetic oligonucleotide
auagggaggucuguucccc

SEQ ID NO: 1188847 - RNA, 19 nt, Artificial Sequence
  Description of Artificial Sequence: Synthetic oligonucleotide
acucaauuugaugacagau

SEQ ID NO: 1188848 - RNA, 19 nt, Artificial Sequence
  Description of Artificial Sequence: Synthetic oligonucleotide
uuaugagcacuucuggcuu

SEQ ID NO: 1188849 - RNA, 19 nt, Artificial Sequence
  Description of Artificial Sequence: Synthetic oligonucleotide
cuuagauuugcucagugcu

SEQ ID NO: 1188850 - RNA, 19 nt, Artificial Sequence
  Description of Artificial Sequence: Synthetic oligonucleotide
aggauguguaaaucuucuc

SEQ ID NO: 1188851 - RNA, 19 nt, Artificial Sequence
  Description of Artificial Sequence: Synthetic oligonucleotide
ucuacuuccgagcgccggc

SEQ ID NO: 1188852 - RNA, 19 nt, Artificial Sequence
  Description of Artificial Sequence: Synthetic oligonucleotide
cagcuuaaaaucuaacuaa

SEQ ID NO: 1188853 - RNA, 19 nt, Artificial Sequence
  Description of Artificial Sequence: Synthetic oligonucleotide
uuagauuugcucagugcuu

SEQ ID NO: 1188854 - RNA, 19 nt, Artificial Sequence
  Description of Artificial Sequence: Synthetic oligonucleotide
ccuuaaagaguauuagcag

SEQ ID NO: 1188855 - RNA, 19 nt, Artificial Sequence
  Description of Artificial Sequence: Synthetic oligonucleotide
aggcuugugucuuuguacu

SEQ ID NO: 1188856 - RNA, 19 nt, Artificial Sequence
  Description of Artificial Sequence: Synthetic oligonucleotide
ucaucgaaucuuguucucc

SEQ ID NO: 1188857 - RNA, 19 nt, Artificial Sequence
  Description of Artificial Sequence: Synthetic oligonucleotide
aucaucgaaucuuguucuc

SEQ ID NO: 1188858 - RNA, 19 nt, Artificial Sequence
  Description of Artificial Sequence: Synthetic oligonucleotide
ugaaaacuucaguaagcau

SEQ ID NO: 1188859 - RNA, 19 nt, Artificial Sequence
  Description of Artificial Sequence: Synthetic oligonucleotide
cuuacuaaacuacuugucu

SEQ ID NO: 1188860 - RNA, 19 nt, Artificial Sequence
  Description of Artificial Sequence: Synthetic oligonucleotide
agaggucguguuucaguac

SEQ ID NO: 1188861 - RNA, 19 nt, Artificial Sequence
  Description of Artificial Sequence: Synthetic oligonucleotide
uuauacagguggacauuga

SEQ ID NO: 1188862 - RNA, 19 nt, Artificial Sequence
  Description of Artificial Sequence: Synthetic oligonucleotide
ugcacucacuuccaugagu

SEQ ID NO: 1188863 - RNA, 19 nt, Artificial Sequence
  Description of Artificial Sequence: Synthetic oligonucleotide
uaguuuuaucugcacucac

SEQ ID NO: 1188864 - RNA, 19 nt, Artificial Sequence
  Description of Artificial Sequence: Synthetic oligonucleotide
uugaugcagguucuucucu

SEQ ID NO: 1188865 - RNA, 19 nt, Artificial Sequence
  Description of Artificial Sequence: Synthetic oligonucleotide
uauuagcaggcuugugucu

SEQ ID NO: 1188866 - RNA, 19 nt, Artificial Sequence
  Description of Artificial Sequence: Synthetic oligonucleotide
aaguggaccuaauucgcuu

SEQ ID NO: 1188867 - RNA, 19 nt, Artificial Sequence
  Description of Artificial Sequence: Synthetic oligonucleotide
acggaagcgccucuacuuc

SEQ ID NO: 1188868 - RNA, 19 nt, Artificial Sequence
  Description of Artificial Sequence: Synthetic oligonucleotide
cauccgucacuucuggaag

SEQ ID NO: 1188869 - RNA, 19 nt, Artificial Sequence
  Description of Artificial Sequence: Synthetic oligonucleotide
aucaagaguugcaucagug

SEQ ID NO: 1188870 - RNA, 19 nt, Artificial Sequence
  Description of Artificial Sequence: Synthetic oligonucleotide
uuuagugauucuugcugau

SEQ ID NO: 1188871 - RNA, 19 nt, Artificial Sequence
  Description of Artificial Sequence: Synthetic oligonucleotide
ucaccgugauuugaaaaca

SEQ ID NO: 1188872 - RNA, 19 nt, Artificial Sequence
  Description of Artificial Sequence: Synthetic oligonucleotide
uuauacucauccgucacuu

SEQ ID NO: 1188873 - RNA, 19 nt, Artificial Sequence
  Description of Artificial Sequence: Synthetic oligonucleotide
uaguacuuuccaagucacc

SEQ ID NO: 1188874 - RNA, 19 nt, Artificial Sequence
  Description of Artificial Sequence: Synthetic oligonucleotide
uaaagaguauuagcaggcu

SEQ ID NO: 1188875 - RNA, 19 nt, Artificial Sequence
  Description of Artificial Sequence: Synthetic oligonucleotide
uacucaauuugaugacaga

SEQ ID NO: 1188876 - RNA, 19 nt, Artificial Sequence
  Description of Artificial Sequence: Synthetic oligonucleotide
uugucucguggcaaauuga

SEQ ID NO: 1188877 - RNA, 19 nt, Artificial Sequence
  Description of Artificial Sequence: Synthetic oligonucleotide
caauguucgucucaucuga

SEQ ID NO: 1188878 - RNA, 19 nt, Artificial Sequence
  Description of Artificial Sequence: Synthetic oligonucleotide
uucuuuuauacagguggac

SEQ ID NO: 1188879 - RNA, 19 nt, Artificial Sequence
  Description of Artificial Sequence: Synthetic oligonucleotide
cacagcaaauauugacccc

SEQ ID NO: 1188880 - RNA, 19 nt, Artificial Sequence
  Description of Artificial Sequence: Synthetic oligonucleotide
aagcaucccaucuuuccuu

SEQ ID NO: 1188881 - RNA, 19 nt, Artificial Sequence
  Description of Artificial Sequence: Synthetic oligonucleotide
caagaacaacgacggaagc

SEQ ID NO: 1188882 - RNA, 19 nt, Artificial Sequence
  Description of Artificial Sequence: Synthetic oligonucleotide
ugugcaauguucgucucau

SEQ ID NO: 1188883 - RNA, 19 nt, Artificial Sequence
  Description of Artificial Sequence: Synthetic oligonucleotide
agcaccguucucucuuuuc

SEQ ID NO: 1188884 - RNA, 19 nt, Artificial Sequence
  Description of Artificial Sequence: Synthetic oligonucleotide
cauucuuauacucauccgu

SEQ ID NO: 1188885 - RNA, 19 nt, Artificial Sequence
  Description of Artificial Sequence: Synthetic oligonucleotide
cuucgguuccuuuaaaucu

SEQ ID NO: 1188886 - RNA, 19 nt, Artificial Sequence
  Description of Artificial Sequence: Synthetic oligonucleotide
agccgguuuagccuguuga

SEQ ID NO: 1188887 - RNA, 19 nt, Artificial Sequence
  Description of Artificial Sequence: Synthetic oligonucleotide
uugcugauccuccaugauu

SEQ ID NO: 1188888 - RNA, 19 nt, Artificial Sequence
  Description of Artificial Sequence: Synthetic oligonucleotide
caccgugauuugaaaacag

SEQ ID NO: 1188889 - RNA, 19 nt, Artificial Sequence
  Description of Artificial Sequence: Synthetic oligonucleotide
gcagcuuaaaaucuaacua

SEQ ID NO: 1188890 - RNA, 19 nt, Artificial Sequence
  Description of Artificial Sequence: Synthetic oligonucleotide
acaacgacggaagcgccuc

SEQ ID NO: 1188891 - RNA, 19 nt, Artificial Sequence
  Description of Artificial Sequence: Synthetic oligonucleotide
ggucuggucauccaaguca

SEQ ID NO: 1188892 - RNA, 19 nt, Artificial Sequence
  Description of Artificial Sequence: Synthetic oligonucleotide
uccccugacaaagucaauc

SEQ ID NO: 1188893 - RNA, 19 nt, Artificial Sequence
  Description of Artificial Sequence: Synthetic oligonucleotide
ucgucucaucugaauauuc

SEQ ID NO: 1188894 - RNA, 19 nt, Artificial Sequence
  Description of Artificial Sequence: Synthetic oligonucleotide
uccuuaauuguagguuacc

SEQ ID NO: 1188895 - RNA, 19 nt, Artificial Sequence
  Description of Artificial Sequence: Synthetic oligonucleotide
agugauucuugcugauccu

SEQ ID NO: 1188896 - RNA, 19 nt, Artificial Sequence
  Description of Artificial Sequence: Synthetic oligonucleotide
ugcuccccugacaaaguca

SEQ ID NO: 1188897 - RNA, 19 nt, Artificial Sequence
  Description of Artificial Sequence: Synthetic oligonucleotide
uauugaccccuuaaauguu

SEQ ID NO: 1188898 - RNA, 19 nt, Artificial Sequence
  Description of Artificial Sequence: Synthetic oligonucleotide
aagcgccucuacuuccgag

SEQ ID NO: 1188899 - RNA, 19 nt, Artificial Sequence
  Description of Artificial Sequence: Synthetic oligonucleotide
aaucuucgguuccuuuaaa

SEQ ID NO: 1188900 - RNA, 19 nt, Artificial Sequence
  Description of Artificial Sequence: Synthetic oligonucleotide
gaauacuaucaaacacagc

SEQ ID NO: 1188901 - RNA, 19 nt, Artificial Sequence
  Description of Artificial Sequence: Synthetic oligonucleotide
gaccuuuaucaucuagcca

SEQ ID NO: 1188902 - RNA, 19 nt, Artificial Sequence
  Description of Artificial Sequence: Synthetic oligonucleotide
aucuucgguuccuuuaaau

SEQ ID NO: 1188903 - RNA, 19 nt, Artificial Sequence
  Description of Artificial Sequence: Synthetic oligonucleotide
uggggaagccuuuaauaua

SEQ ID NO: 1188904 - RNA, 19 nt, Artificial Sequence
  Description of Artificial Sequence: Synthetic oligonucleotide
aaaaucuaacuaagaugaa

SEQ ID NO: 1188905 - RNA, 19 nt, Artificial Sequence
  Description of Artificial Sequence: Synthetic oligonucleotide
guuuugugcaauguucguc

SEQ ID NO: 1188906 - RNA, 19 nt, Artificial Sequence
  Description of Artificial Sequence: Synthetic oligonucleotide
aguaagcaucccaucuuuc

SEQ ID NO: 1188907 - RNA, 19 nt, Artificial Sequence
  Description of Artificial Sequence: Synthetic oligonucleotide
cuuuuauacagguggacau

SEQ ID NO: 1188908 - RNA, 19 nt, Artificial Sequence
  Description of Artificial Sequence: Synthetic oligonucleotide
aucuucucuacaggucugg

SEQ ID NO: 1188909 - RNA, 19 nt, Artificial Sequence
  Description of Artificial Sequence: Synthetic oligonucleotide
uuccauuuguuuagugauu

SEQ ID NO: 1188910 - RNA, 19 nt, Artificial Sequence
  Description of Artificial Sequence: Synthetic oligonucleotide
cuucaguaagcaucccauc

SEQ ID NO: 1188911 - RNA, 19 nt, Artificial Sequence
  Description of Artificial Sequence: Synthetic oligonucleotide
ugaccccuuaaauguuuug

SEQ ID NO: 1188912 - RNA, 19 nt, Artificial Sequence
  Description of Artificial Sequence: Synthetic oligonucleotide
acgacggaagcgccucuac

SEQ ID NO: 1188913 - RNA, 19 nt, Artificial Sequence
  Description of Artificial Sequence: Synthetic oligonucleotide
gauucugaucccacaguca

SEQ ID NO: 1188914 - RNA, 19 nt, Artificial Sequence
  Description of Artificial Sequence: Synthetic oligonucleotide
aucuagccauucuuuuaug

SEQ ID NO: 1188915 - RNA, 19 nt, Artificial Sequence
  Description of Artificial Sequence: Synthetic oligonucleotide
agaguauuagcaggcuugu

SEQ ID NO: 1188916 - RNA, 19 nt, Artificial Sequence
  Description of Artificial Sequence: Synthetic oligonucleotide
uuuaaaucuucgguuccuu

SEQ ID NO: 1188917 - RNA, 19 nt, Artificial Sequence
  Description of Artificial Sequence: Synthetic oligonucleotide
ccccuuaaauguuuugugc

SEQ ID NO: 1188918 - RNA, 19 nt, Artificial Sequence
  Description of Artificial Sequence: Synthetic oligonucleotide
uggugaucaucaucaucga

SEQ ID NO: 1188919 - RNA, 19 nt, Artificial Sequence
  Description of Artificial Sequence: Synthetic oligonucleotide
gacauugaaguggaccuaa

SEQ ID NO: 1188920 - RNA, 19 nt, Artificial Sequence
  Description of Artificial Sequence: Synthetic oligonucleotide
aguggaccuaauucgcuuu

SEQ ID NO: 1188921 - RNA, 19 nt, Artificial Sequence
  Description of Artificial Sequence: Synthetic oligonucleotide
uuugugcaauguucgucuc

SEQ ID NO: 1188922 - RNA, 19 nt, Artificial Sequence
  Description of Artificial Sequence: Synthetic oligonucleotide
cucagugcuugaacaauca

SEQ ID NO: 1188923 - RNA, 19 nt, Artificial Sequence
  Description of Artificial Sequence: Synthetic oligonucleotide
ucccaucuuuccuucuaga

SEQ ID NO: 1188924 - RNA, 19 nt, Artificial Sequence
  Description of Artificial Sequence: Synthetic oligonucleotide
gaggucguguuucaguacu

SEQ ID NO: 1188925 - RNA, 19 nt, Artificial Sequence
  Description of Artificial Sequence: Synthetic oligonucleotide
cuuaauuguagguuaccau

SEQ ID NO: 1188926 - RNA, 19 nt, Artificial Sequence
  Description of Artificial Sequence: Synthetic oligonucleotide
caucaucgaaucuuguucu

SEQ ID NO: 1188927 - RNA, 19 nt, Artificial Sequence
  Description of Artificial Sequence: Synthetic oligonucleotide
uauacucauccgucacuuc

SEQ ID NO: 1188928 - RNA, 19 nt, Artificial Sequence
  Description of Artificial Sequence: Synthetic oligonucleotide
aacaacgacggaagcgccu

SEQ ID NO: 1188929 - RNA, 19 nt, Artificial Sequence
  Description of Artificial Sequence: Synthetic oligonucleotide
ccuuuaaaucuucgguucc

SEQ ID NO: 1188930 - RNA, 19 nt, Artificial Sequence
  Description of Artificial Sequence: Synthetic oligonucleotide
ccuuuaauauaaacagauc

SEQ ID NO: 1188931 - RNA, 19 nt, Artificial Sequence
  Description of Artificial Sequence: Synthetic oligonucleotide
cugcauggccuucuaguac

SEQ ID NO: 1188932 - RNA, 19 nt, Artificial Sequence
  Description of Artificial Sequence: Synthetic oligonucleotide
gcaaauauugaccccuuaa

SEQ ID NO: 1188933 - RNA, 19 nt, Artificial Sequence
  Description of Artificial Sequence: Synthetic oligonucleotide
gaguuuugccuuagauuug

SEQ ID NO: 1188934 - RNA, 19 nt, Artificial Sequence
  Description of Artificial Sequence: Synthetic oligonucleotide
agccuuuaauauaaacaga

SEQ ID NO: 1188935 - RNA, 19 nt, Artificial Sequence
  Description of Artificial Sequence: Synthetic oligonucleotide
guacuaauacauucucaua

SEQ ID NO: 1188936 - RNA, 19 nt, Artificial Sequence
  Description of Artificial Sequence: Synthetic oligonucleotide
auuagcaggcuugugucuu

SEQ ID NO: 1188937 - RNA, 19 nt, Artificial Sequence
  Description of Artificial Sequence: Synthetic oligonucleotide
accguucucucuuuucuua

SEQ ID NO: 1188938 - RNA, 19 nt, Artificial Sequence
  Description of Artificial Sequence: Synthetic oligonucleotide
uugaccccuuaaauguuuu

SEQ ID NO: 1188939 - RNA, 19 nt, Artificial Sequence
  Description of Artificial Sequence: Synthetic oligonucleotide
gaggucuguuccccuuucc

SEQ ID NO: 1188940 - RNA, 19 nt, Artificial Sequence
  Description of Artificial Sequence: Synthetic oligonucleotide
auguucgucucaucugaau

SEQ ID NO: 1188941 - RNA, 19 nt, Artificial Sequence
  Description of Artificial Sequence: Synthetic oligonucleotide
ccauagggaggucuguucc

SEQ ID NO: 1188942 - RNA, 19 nt, Artificial Sequence
  Description of Artificial Sequence: Synthetic oligonucleotide
gaacaacgacggaagcgcc

SEQ ID NO: 1188943 - RNA, 19 nt, Artificial Sequence
  Description of Artificial Sequence: Synthetic oligonucleotide
uugcuccccugacaaaguc

SEQ ID NO: 1188944 - RNA, 19 nt, Artificial Sequence
  Description of Artificial Sequence: Synthetic oligonucleotide
aggcaauuaagaggaagaa

SEQ ID NO: 1188945 - RNA, 19 nt, Artificial Sequence
  Description of Artificial Sequence: Synthetic oligonucleotide
ccccugacaaagucaaucc

SEQ ID NO: 1188946 - RNA, 19 nt, Artificial Sequence
  Description of Artificial Sequence: Synthetic oligonucleotide
cucgucgaugaugauggug

SEQ ID NO: 1188947 - RNA, 19 nt, Artificial Sequence
  Description of Artificial Sequence: Synthetic oligonucleotide
cacuuccaugaguuuugcc

SEQ ID NO: 1188948 - RNA, 19 nt, Artificial Sequence
  Description of Artificial Sequence: Synthetic oligonucleotide
cuuuaucaucuagccauuc

SEQ ID NO: 1188949 - RNA, 19 nt, Artificial Sequence
  Description of Artificial Sequence: Synthetic oligonucleotide
acagaacuauacauuuuaa

SEQ ID NO: 1188950 - RNA, 19 nt, Artificial Sequence
  Description of Artificial Sequence: Synthetic oligonucleotide
aauguucgucucaucugaa

SEQ ID NO: 1188951 - RNA, 19 nt, Artificial Sequence
  Description of Artificial Sequence: Synthetic oligonucleotide
gucucguggcaaauugaag

SEQ ID NO: 1188952 - RNA, 19 nt, Artificial Sequence
  Description of Artificial Sequence: Synthetic oligonucleotide
cccuuaaauguuuugugca

SEQ ID NO: 1188953 - RNA, 19 nt, Artificial Sequence
  Description of Artificial Sequence: Synthetic oligonucleotide
agcauauauuuuacaaguu

SEQ ID NO: 1188954 - RNA, 19 nt, Artificial Sequence
  Description of Artificial Sequence: Synthetic oligonucleotide
gucaccugaaaacuucagu

SEQ ID NO: 1188955 - RNA, 19 nt, Artificial Sequence
  Description of Artificial Sequence: Synthetic oligonucleotide
uucgucucaucugaauauu

SEQ ID NO: 1188956 - RNA, 19 nt, Artificial Sequence
  Description of Artificial Sequence: Synthetic oligonucleotide
uuccuucuagaggucgugu

SEQ ID NO: 1188957 - RNA, 19 nt, Artificial Sequence
  Description of Artificial Sequence: Synthetic oligonucleotide
cuuccuuugggugccccac

SEQ ID NO: 1188958 - RNA, 19 nt, Artificial Sequence
  Description of Artificial Sequence: Synthetic oligonucleotide
gcuaacuguaaaauuucuc

SEQ ID NO: 1188959 - RNA, 19 nt, Artificial Sequence
  Description of Artificial Sequence: Synthetic oligonucleotide
agcaaauauugaccccuua

SEQ ID NO: 1188960 - RNA, 19 nt, Artificial Sequence
  Description of Artificial Sequence: Synthetic oligonucleotide
ccgugauuugaaaacagga

SEQ ID NO: 1188961 - RNA, 19 nt, Artificial Sequence
  Description of Artificial Sequence: Synthetic oligonucleotide
caugaguuuugccuuagau

SEQ ID NO: 1188962 - RNA, 19 nt, Artificial Sequence
  Description of Artificial Sequence: Synthetic oligonucleotide
caggauguguaaaucuucu

SEQ ID NO: 1188963 - RNA, 19 nt, Artificial Sequence
  Description of Artificial Sequence: Synthetic oligonucleotide
aucuuccuuaaagaguauu

SEQ ID NO: 1188964 - RNA, 19 nt, Artificial Sequence
  Description of Artificial Sequence: Synthetic oligonucleotide
acuugucucuagcaccguu

SEQ ID NO: 1188965 - RNA, 19 nt, Artificial Sequence
  Description of Artificial Sequence: Synthetic oligonucleotide
aacuuucauuuggguaaca

SEQ ID NO: 1188966 - RNA, 19 nt, Artificial Sequence
  Description of Artificial Sequence: Synthetic oligonucleotide
acuaaacuacuugucucua

SEQ ID NO: 1188967 - RNA, 19 nt, Artificial Sequence
  Description of Artificial Sequence: Synthetic oligonucleotide
cuuauacucauccgucacu

SEQ ID NO: 1188968 - RNA, 19 nt, Artificial Sequence
  Description of Artificial Sequence: Synthetic oligonucleotide
gcuuacuaaacuacuuguc

SEQ ID NO: 1188969 - RNA, 19 nt, Artificial Sequence
  Description of Artificial Sequence: Synthetic oligonucleotide
caucuagccauucuuuuau

SEQ ID NO: 1188970 - RNA, 19 nt, Artificial Sequence
  Description of Artificial Sequence: Synthetic oligonucleotide
auugaccccuuaaauguuu

SEQ ID NO: 1188971 - RNA, 19 nt, Artificial Sequence
  Description of Artificial Sequence: Synthetic oligonucleotide
gacggaagcgccucuacuu

SEQ ID NO: 1188972 - RNA, 19 nt, Artificial Sequence
  Description of Artificial Sequence: Synthetic oligonucleotide
ggaagcgccucuacuuccg

SEQ ID NO: 1188973 - RNA, 19 nt, Artificial Sequence
  Description of Artificial Sequence: Synthetic oligonucleotide
gccuuagauuugcucagug

SEQ ID NO: 1188974 - RNA, 19 nt, Artificial Sequence
  Description of Artificial Sequence: Synthetic oligonucleotide
cugcacucacuuccaugag

SEQ ID NO: 1188975 - RNA, 19 nt, Artificial Sequence
  Description of Artificial Sequence: Synthetic oligonucleotide
uggaccuaauucgcuuuuc

SEQ ID NO: 1188976 - RNA, 19 nt, Artificial Sequence
  Description of Artificial Sequence: Synthetic oligonucleotide
gcuugaacaaucacauuaa

SEQ ID NO: 1188977 - RNA, 19 nt, Artificial Sequence
  Description of Artificial Sequence: Synthetic oligonucleotide
gaaguggaccuaauucgcu

SEQ ID NO: 1188978 - RNA, 19 nt, Artificial Sequence
  Description of Artificial Sequence: Synthetic oligonucleotide
ugccuuagauuugcucagu

SEQ ID NO: 1188979 - RNA, 19 nt, Artificial Sequence
  Description of Artificial Sequence: Synthetic oligonucleotide
ccuuaaauguuuugugcaa

SEQ ID NO: 1188980 - RNA, 19 nt, Artificial Sequence
  Description of Artificial Sequence: Synthetic oligonucleotide
gaccuaauucgcuuuucuu

SEQ ID NO: 1188981 - RNA, 19 nt, Artificial Sequence
  Description of Artificial Sequence: Synthetic oligonucleotide
cuuuaaaucuucgguuccu

SEQ ID NO: 1188982 - RNA, 19 nt, Artificial Sequence
  Description of Artificial Sequence: Synthetic oligonucleotide
aacgacggaagcgccucua

SEQ ID NO: 1188983 - RNA, 19 nt, Artificial Sequence
  Description of Artificial Sequence: Synthetic oligonucleotide
agggaggucuguuccccuu

SEQ ID NO: 1188984 - RNA, 19 nt, Artificial Sequence
  Description of Artificial Sequence: Synthetic oligonucleotide
guacuuuccaagucaccuu

SEQ ID NO: 1188985 - RNA, 19 nt, Artificial Sequence
  Description of Artificial Sequence: Synthetic oligonucleotide
caucccaucuuuccuucua

SEQ ID NO: 1188986 - RNA, 19 nt, Artificial Sequence
  Description of Artificial Sequence: Synthetic oligonucleotide
auugguccucgucgaugau

SEQ ID NO: 1188987 - RNA, 19 nt, Artificial Sequence
  Description of Artificial Sequence: Synthetic oligonucleotide
ggaccuaauucgcuuuucu

SEQ ID NO: 1188988 - RNA, 19 nt, Artificial Sequence
  Description of Artificial Sequence: Synthetic oligonucleotide
gguauccacaaacuucuuu

SEQ ID NO: 1188989 - RNA, 19 nt, Artificial Sequence
  Description of Artificial Sequence: Synthetic oligonucleotide
cucuacaggucuggucauc

SEQ ID NO: 1188990 - RNA, 19 nt, Artificial Sequence
  Description of Artificial Sequence: Synthetic oligonucleotide
gguuuagccuguugaauuu

SEQ ID NO: 1188991 - RNA, 19 nt, Artificial Sequence
  Description of Artificial Sequence: Synthetic oligonucleotide
ggucguguuucaguacuuc

SEQ ID NO: 1188992 - RNA, 19 nt, Artificial Sequence
  Description of Artificial Sequence: Synthetic oligonucleotide
ccucuuuucauugguccuc

SEQ ID NO: 1188993 - RNA, 19 nt, Artificial Sequence
  Description of Artificial Sequence: Synthetic oligonucleotide
guacuucuggccaggggua

SEQ ID NO: 1188994 - RNA, 19 nt, Artificial Sequence
  Description of Artificial Sequence: Synthetic oligonucleotide
caucaucaucgaaucuugu

SEQ ID NO: 1188995 - RNA, 19 nt, Artificial Sequence
  Description of Artificial Sequence: Synthetic oligonucleotide
ccuaauucgcuuuucuuuu

SEQ ID NO: 1188996 - RNA, 19 nt, Artificial Sequence
  Description of Artificial Sequence: Synthetic oligonucleotide
gugcaauguucgucucauc

SEQ ID NO: 1188997 - RNA, 19 nt, Artificial Sequence
  Description of Artificial Sequence: Synthetic oligonucleotide
cguucucucuuuucuuaug

SEQ ID NO: 1188998 - RNA, 19 nt, Artificial Sequence
  Description of Artificial Sequence: Synthetic oligonucleotide
gccgguuuagccuguugaa

SEQ ID NO: 1188999 - RNA, 19 nt, Artificial Sequence
  Description of Artificial Sequence: Synthetic oligonucleotide
gcaccguucucucuuuucu

SEQ ID NO: 1189000 - RNA, 19 nt, Artificial Sequence
  Description of Artificial Sequence: Synthetic oligonucleotide
ggcuaacuguaaaauuucu

SEQ ID NO: 1189001 - RNA, 19 nt, Artificial Sequence
  Description of Artificial Sequence: Synthetic oligonucleotide
ggccuccuccuccuccucc

SEQ ID NO: 1189002 - RNA, 19 nt, Artificial Sequence
  Description of Artificial Sequence: Synthetic oligonucleotide
cccugaaacuguccucuuc

SEQ ID NO: 1189003 - RNA, 19 nt, Artificial Sequence
  Description of Artificial Sequence: Synthetic oligonucleotide
caaucacauuaaagucugu

SEQ ID NO: 1189004 - RNA, 19 nt, Artificial Sequence
  Description of Artificial Sequence: Synthetic oligonucleotide
gguuaccauuaugagcacu

SEQ ID NO: 1189005 - RNA, 19 nt, Artificial Sequence
  Description of Artificial Sequence: Synthetic oligonucleotide
gacuugugucuuccuucau

SEQ ID NO: 1189006 - RNA, 19 nt, Artificial Sequence
  Description of Artificial Sequence: Synthetic oligonucleotide
ccucuacuuccgagcgccg

SEQ ID NO: 1189007 - RNA, 19 nt, Artificial Sequence
  Description of Artificial Sequence: Synthetic oligonucleotide
aggucguguuucaguacuu

SEQ ID NO: 1189008 - RNA, 19 nt, Artificial Sequence
  Description of Artificial Sequence: Synthetic oligonucleotide
gggugccccaccauaggga

SEQ ID NO: 1189009 - RNA, 19 nt, Artificial Sequence
  Description of Artificial Sequence: Synthetic oligonucleotide
gcacucacuuccaugaguu

SEQ ID NO: 1189010 - RNA, 19 nt, Artificial Sequence
  Description of Artificial Sequence: Synthetic oligonucleotide
cucuagcaccguucucucu

SEQ ID NO: 1189011 - RNA, 19 nt, Artificial Sequence
  Description of Artificial Sequence: Synthetic oligonucleotide
cuagcaccguucucucuuu

SEQ ID NO: 1189012 - RNA, 19 nt, Artificial Sequence
  Description of Artificial Sequence: Synthetic oligonucleotide
caccguucucucuuuucuu

SEQ ID NO: 1189013 - RNA, 19 nt, Artificial Sequence
  Description of Artificial Sequence: Synthetic oligonucleotide
cgucacuucuggaaggggu

SEQ ID NO: 1189014 - RNA, 19 nt, Artificial Sequence
  Description of Artificial Sequence: Synthetic oligonucleotide
ccuucuagaggucguguuu

SEQ ID NO: 1189015 - RNA, 19 nt, Artificial Sequence
  Description of Artificial Sequence: Synthetic oligonucleotide
caacgacggaagcgccucu

SEQ ID NO: 1189016 - RNA, 19 nt, Artificial Sequence
  Description of Artificial Sequence: Synthetic oligonucleotide
gccuccuccuccuccuccu

SEQ ID NO: 1189017 - RNA, 19 nt, Artificial Sequence
  Description of Artificial Sequence: Synthetic oligonucleotide
cuccuccuccuccuccuuu

SEQ ID NO: 1189018 - RNA, 19 nt, Artificial Sequence
  Description of Artificial Sequence: Synthetic oligonucleotide
ccgguuuagccuguugaau

SEQ ID NO: 1189019 - RNA, 19 nt, Artificial Sequence
  Description of Artificial Sequence: Synthetic oligonucleotide
cgacggaagcgccucuacu

SEQ ID NO: 1189020 - RNA, 19 nt, Artificial Sequence
  Description of Artificial Sequence: Synthetic oligonucleotide
gguccucgucgaugaugau

SEQ ID NO: 1189021 - RNA, 19 nt, Artificial Sequence
  Description of Artificial Sequence: Synthetic oligonucleotide
ccccaccauagggaggucu

SEQ ID NO: 1189022 - RNA, 19 nt, Artificial Sequence
  Description of Artificial Sequence: Synthetic oligonucleotide
ccucgucgaugaugauggu

SEQ ID NO: 1189023 - RNA, 19 nt, Artificial Sequence
  Description of Artificial Sequence: Synthetic oligonucleotide
ccuccuccuccuccuccuu

SEQ ID NO: 1189024 - RNA, 19 nt, Artificial Sequence
  Description of Artificial Sequence: Synthetic oligonucleotide
aacucuauuaacuuggcag

SEQ ID NO: 1189025 - RNA, 19 nt, Artificial Sequence
  Description of Artificial Sequence: Synthetic oligonucleotide
uuuacugcagcccagacgu

SEQ ID NO: 1189026 - RNA, 19 nt, Artificial Sequence
  Description of Artificial Sequence: Synthetic oligonucleotide
uccuaaaugccccaaauag

SEQ ID NO: 1189027 - RNA, 19 nt, Artificial Sequence
  Description of Artificial Sequence: Synthetic oligonucleotide
acuaagaccaaaguguucc

SEQ ID NO: 1189028 - RNA, 19 nt, Artificial Sequence
  Description of Artificial Sequence: Synthetic oligonucleotide
uuaaauugcagcacacgcg

SEQ ID NO: 1189029 - RNA, 19 nt, Artificial Sequence
  Description of Artificial Sequence: Synthetic oligonucleotide
aaugauauggacuggucca

SEQ ID NO: 1189030 - RNA, 19 nt, Artificial Sequence
  Description of Artificial Sequence: Synthetic oligonucleotide
aagugcauccucuguaacc

SEQ ID NO: 1189031 - RNA, 19 nt, Artificial Sequence
  Description of Artificial Sequence: Synthetic oligonucleotide
uguuagaaaaugcaucuug

SEQ ID NO: 1189032 - RNA, 19 nt, Artificial Sequence
  Description of Artificial Sequence: Synthetic oligonucleotide
acuauagacacugugcagc

SEQ ID NO: 1189033 - RNA, 19 nt, Artificial Sequence
  Description of Artificial Sequence: Synthetic oligonucleotide
uuagaguucuaccuaagca

SEQ ID NO: 1189034 - RNA, 19 nt, Artificial Sequence
  Description of Artificial Sequence: Synthetic oligonucleotide
aauauagauguuauuagca

SEQ ID NO: 1189035 - RNA, 19 nt, Artificial Sequence
  Description of Artificial Sequence: Synthetic oligonucleotide
cuuaaauugcagcacacgc

SEQ ID NO: 1189036 - RNA, 19 nt, Artificial Sequence
  Description of Artificial Sequence: Synthetic oligonucleotide
uccgagauguuuuacauug

SEQ ID NO: 1189037 - RNA, 19 nt, Artificial Sequence
  Description of Artificial Sequence: Synthetic oligonucleotide
aaaagggacugauuuacug

SEQ ID NO: 1189038 - RNA, 19 nt, Artificial Sequence
  Description of Artificial Sequence: Synthetic oligonucleotide
aggacuaaacucuauuaac

SEQ ID NO: 1189039 - RNA, 19 nt, Artificial Sequence
  Description of Artificial Sequence: Synthetic oligonucleotide
uuuacauuguuuguuuagg

SEQ ID NO: 1189040 - RNA, 19 nt, Artificial Sequence
  Description of Artificial Sequence: Synthetic oligonucleotide
uguuauuagcacuaguacu

SEQ ID NO: 1189041 - RNA, 19 nt, Artificial Sequence
  Description of Artificial Sequence: Synthetic oligonucleotide
ucgaacauaaaacuugggu

SEQ ID NO: 1189042 - RNA, 19 nt, Artificial Sequence
  Description of Artificial Sequence: Synthetic oligonucleotide
uugauaauagcaaucgcuc

SEQ ID NO: 1189043 - RNA, 19 nt, Artificial Sequence
  Description of Artificial Sequence: Synthetic oligonucleotide
agucgugaaccuuuggccc

SEQ ID NO: 1189044 - RNA, 19 nt, Artificial Sequence
  Description of Artificial Sequence: Synthetic oligonucleotide
uugguagcaaacaagcugu

SEQ ID NO: 1189045 - RNA, 19 nt, Artificial Sequence
  Description of Artificial Sequence: Synthetic oligonucleotide
cuaagcauauccuuggcug

SEQ ID NO: 1189046 - RNA, 19 nt, Artificial Sequence
  Description of Artificial Sequence: Synthetic oligonucleotide
uauagauguuauuagcacu

SEQ ID NO: 1189047 - RNA, 19 nt, Artificial Sequence
  Description of Artificial Sequence: Synthetic oligonucleotide
guuauuagcacuaguacug

SEQ ID NO: 1189048 - RNA, 19 nt, Artificial Sequence
  Description of Artificial Sequence: Synthetic oligonucleotide
guaauaagcuucaugcacg

SEQ ID NO: 1189049 - RNA, 19 nt, Artificial Sequence
  Description of Artificial Sequence: Synthetic oligonucleotide
acauuguuuguuuaggccu

SEQ ID NO: 1189050 - RNA, 19 nt, Artificial Sequence
  Description of Artificial Sequence: Synthetic oligonucleotide
uuaagagagaaaagcaguc

SEQ ID NO: 1189051 - RNA, 19 nt, Artificial Sequence
  Description of Artificial Sequence: Synthetic oligonucleotide
uacauuguuuguuuaggcc

SEQ ID NO: 1189052 - RNA, 19 nt, Artificial Sequence
  Description of Artificial Sequence: Synthetic oligonucleotide
acuaaacucuauuaacuug

SEQ ID NO: 1189053 - RNA, 19 nt, Artificial Sequence
  Description of Artificial Sequence: Synthetic oligonucleotide
ugagucgugaaccuuuggc

SEQ ID NO: 1189054 - RNA, 19 nt, Artificial Sequence
  Description of Artificial Sequence: Synthetic oligonucleotide
agcacuaguacugaaaucu

SEQ ID NO: 1189055 - RNA, 19 nt, Artificial Sequence
  Description of Artificial Sequence: Synthetic oligonucleotide
ucucagucguacuuuagag

SEQ ID NO: 1189056 - RNA, 19 nt, Artificial Sequence
  Description of Artificial Sequence: Synthetic oligonucleotide
uuagcacuaguacugaaau

SEQ ID NO: 1189057 - RNA, 19 nt, Artificial Sequence
  Description of Artificial Sequence: Synthetic oligonucleotide
cagacuuacuccuaguuug

SEQ ID NO: 1189058 - RNA, 19 nt, Artificial Sequence
  Description of Artificial Sequence: Synthetic oligonucleotide
uuugcacuucuucuagccg

SEQ ID NO: 1189059 - RNA, 19 nt, Artificial Sequence
  Description of Artificial Sequence: Synthetic oligonucleotide
ugauaauagcaaucgcucc

SEQ ID NO: 1189060 - RNA, 19 nt, Artificial Sequence
  Description of Artificial Sequence: Synthetic oligonucleotide
uauuagcaugucuuguucc

SEQ ID NO: 1189061 - RNA, 19 nt, Artificial Sequence
  Description of Artificial Sequence: Synthetic oligonucleotide
aagggguuuguauuggcca

SEQ ID NO: 1189062 - RNA, 19 nt, Artificial Sequence
  Description of Artificial Sequence: Synthetic oligonucleotide
ucaguuuaauuguagcagu

SEQ ID NO: 1189063 - RNA, 19 nt, Artificial Sequence
  Description of Artificial Sequence: Synthetic oligonucleotide
agcaaggaccuuugcagcc

SEQ ID NO: 1189064 - RNA, 19 nt, Artificial Sequence
  Description of Artificial Sequence: Synthetic oligonucleotide
ucagucguacuuuagaguu

SEQ ID NO: 1189065 - RNA, 19 nt, Artificial Sequence
  Description of Artificial Sequence: Synthetic oligonucleotide
ugcaucaguuuaauuguag

SEQ ID NO: 1189066 - RNA, 19 nt, Artificial Sequence
  Description of Artificial Sequence: Synthetic oligonucleotide
gauagacucauucccaaca

SEQ ID NO: 1189067 - RNA, 19 nt, Artificial Sequence
  Description of Artificial Sequence: Synthetic oligonucleotide
auaggguucagcaugaagu

SEQ ID NO: 1189068 - RNA, 19 nt, Artificial Sequence
  Description of Artificial Sequence: Synthetic oligonucleotide
guauuggccagcuggagag

SEQ ID NO: 1189069 - RNA, 19 nt, Artificial Sequence
  Description of Artificial Sequence: Synthetic oligonucleotide
augggaagaacugaguauc

SEQ ID NO: 1189070 - RNA, 19 nt, Artificial Sequence
  Description of Artificial Sequence: Synthetic oligonucleotide
uagccguaggacuuuaucc

SEQ ID NO: 1189071 - RNA, 19 nt, Artificial Sequence
  Description of Artificial Sequence: Synthetic oligonucleotide
uauguaacgcucacucuug

SEQ ID NO: 1189072 - RNA, 19 nt, Artificial Sequence
  Description of Artificial Sequence: Synthetic oligonucleotide
gagucgugaaccuuuggcc

SEQ ID NO: 1189073 - RNA, 19 nt, Artificial Sequence
  Description of Artificial Sequence: Synthetic oligonucleotide
gaguauguguuuucacagg

SEQ ID NO: 1189074 - RNA, 19 nt, Artificial Sequence
  Description of Artificial Sequence: Synthetic oligonucleotide
uauuauguugacucuuccu

SEQ ID NO: 1189075 - RNA, 19 nt, Artificial Sequence
  Description of Artificial Sequence: Synthetic oligonucleotide
auauggacugguccaugcc

SEQ ID NO: 1189076 - RNA, 19 nt, Artificial Sequence
  Description of Artificial Sequence: Synthetic oligonucleotide
cugacguugaaaugggaag

SEQ ID NO: 1189077 - RNA, 19 nt, Artificial Sequence
  Description of Artificial Sequence: Synthetic oligonucleotide
ugugagagucacuagccca

SEQ ID NO: 1189078 - RNA, 19 nt, Artificial Sequence
  Description of Artificial Sequence: Synthetic oligonucleotide
gagaguauguguuuucaca

SEQ ID NO: 1189079 - RNA, 19 nt, Artificial Sequence
  Description of Artificial Sequence: Synthetic oligonucleotide
uguuuaggccucaaggaaa

SEQ ID NO: 1189080 - RNA, 19 nt, Artificial Sequence
  Description of Artificial Sequence: Synthetic oligonucleotide
uggggcucgaacauaaaac

SEQ ID NO: 1189081 - RNA, 19 nt, Artificial Sequence
  Description of Artificial Sequence: Synthetic oligonucleotide
uugaguauuuggacucagg

SEQ ID NO: 1189082 - RNA, 19 nt, Artificial Sequence
  Description of Artificial Sequence: Synthetic oligonucleotide
aacacugugagagucacua

SEQ ID NO: 1189083 - RNA, 19 nt, Artificial Sequence
  Description of Artificial Sequence: Synthetic oligonucleotide
gguaauaagcuucaugcac

SEQ ID NO: 1189084 - RNA, 19 nt, Artificial Sequence
  Description of Artificial Sequence: Synthetic oligonucleotide
uuguuuaggccucaaggaa

SEQ ID NO: 1189085 - RNA, 19 nt, Artificial Sequence
  Description of Artificial Sequence: Synthetic oligonucleotide
caauaaaucucagucguac

SEQ ID NO: 1189086 - RNA, 19 nt, Artificial Sequence
  Description of Artificial Sequence: Synthetic oligonucleotide
ucauuaugaagcauagcuu

SEQ ID NO: 1189087 - RNA, 19 nt, Artificial Sequence
  Description of Artificial Sequence: Synthetic oligonucleotide
acguuugugaggaagcugg

SEQ ID NO: 1189088 - RNA, 19 nt, Artificial Sequence
  Description of Artificial Sequence: Synthetic oligonucleotide
uggacucaggauuugggug

SEQ ID NO: 1189089 - RNA, 19 nt, Artificial Sequence
  Description of Artificial Sequence: Synthetic oligonucleotide
auugucgggugcuucuucg

SEQ ID NO: 1189090 - RNA, 19 nt, Artificial Sequence
  Description of Artificial Sequence: Synthetic oligonucleotide
cacuguuagaaaaugcauc

SEQ ID NO: 1189091 - RNA, 19 nt, Artificial Sequence
  Description of Artificial Sequence: Synthetic oligonucleotide
cacuaguacugaaaucugg

SEQ ID NO: 1189092 - RNA, 19 nt, Artificial Sequence
  Description of Artificial Sequence: Synthetic oligonucleotide
uguuuguuuaggccucaag

SEQ ID NO: 1189093 - RNA, 19 nt, Artificial Sequence
  Description of Artificial Sequence: Synthetic oligonucleotide
gucaauauagauguuauua

SEQ ID NO: 1189094 - RNA, 19 nt, Artificial Sequence
  Description of Artificial Sequence: Synthetic oligonucleotide
auaaaucucagucguacuu

SEQ ID NO: 1189095 - RNA, 19 nt, Artificial Sequence
  Description of Artificial Sequence: Synthetic oligonucleotide
auaaaacuuggguguggac

SEQ ID NO: 1189096 - RNA, 19 nt, Artificial Sequence
  Description of Artificial Sequence: Synthetic oligonucleotide
ucaugcacguuugugagga

SEQ ID NO: 1189097 - RNA, 19 nt, Artificial Sequence
  Description of Artificial Sequence: Synthetic oligonucleotide
uucagugccuauguaacgc

SEQ ID NO: 1189098 - RNA, 19 nt, Artificial Sequence
  Description of Artificial Sequence: Synthetic oligonucleotide
uccacuagggaguuuuaca

SEQ ID NO: 1189099 - RNA, 19 nt, Artificial Sequence
  Description of Artificial Sequence: Synthetic oligonucleotide
aacccuuuguguuuagcaa

SEQ ID NO: 1189100 - RNA, 19 nt, Artificial Sequence
  Description of Artificial Sequence: Synthetic oligonucleotide
cuauagacacugugcagcc

SEQ ID NO: 1189101 - RNA, 19 nt, Artificial Sequence
  Description of Artificial Sequence: Synthetic oligonucleotide
cuuuaucccauugcaaccc

SEQ ID NO: 1189102 - RNA, 19 nt, Artificial Sequence
  Description of Artificial Sequence: Synthetic oligonucleotide
auaauagcaaucgcuccuc

SEQ ID NO: 1189103 - RNA, 19 nt, Artificial Sequence
  Description of Artificial Sequence: Synthetic oligonucleotide
gauaauagcaaucgcuccu

SEQ ID NO: 1189104 - RNA, 19 nt, Artificial Sequence
  Description of Artificial Sequence: Synthetic oligonucleotide
auaggaaguaguugugcca

SEQ ID NO: 1189105 - RNA, 19 nt, Artificial Sequence
  Description of Artificial Sequence: Synthetic oligonucleotide
uaugaagcauagcuuucac

SEQ ID NO: 1189106 - RNA, 19 nt, Artificial Sequence
  Description of Artificial Sequence: Synthetic oligonucleotide
aaucgcuccucauaacaaa

SEQ ID NO: 1189107 - RNA, 19 nt, Artificial Sequence
  Description of Artificial Sequence: Synthetic oligonucleotide
uacuuuagaguucuaccua

SEQ ID NO: 1189108 - RNA, 19 nt, Artificial Sequence
  Description of Artificial Sequence: Synthetic oligonucleotide
cuauuauguugacucuucc

SEQ ID NO: 1189109 - RNA, 19 nt, Artificial Sequence
  Description of Artificial Sequence: Synthetic oligonucleotide
acuuuagaguucuaccuaa

SEQ ID NO: 1189110 - RNA, 19 nt, Artificial Sequence
  Description of Artificial Sequence: Synthetic oligonucleotide
gaggacuaaacucuauuaa

SEQ ID NO: 1189111 - RNA, 19 nt, Artificial Sequence
  Description of Artificial Sequence: Synthetic oligonucleotide
ugcacucauacaugucccg

SEQ ID NO: 1189112 - RNA, 19 nt, Artificial Sequence
  Description of Artificial Sequence: Synthetic oligonucleotide
accuaagcauauccuuggc

SEQ ID NO: 1189113 - RNA, 19 nt, Artificial Sequence
  Description of Artificial Sequence: Synthetic oligonucleotide
gauauaagggguuuguauu

SEQ ID NO: 1189114 - RNA, 19 nt, Artificial Sequence
  Description of Artificial Sequence: Synthetic oligonucleotide
caggcuaauucccaggcac

SEQ ID NO: 1189115 - RNA, 19 nt, Artificial Sequence
  Description of Artificial Sequence: Synthetic oligonucleotide
guaacgcucacucuuggca

SEQ ID NO: 1189116 - RNA, 19 nt, Artificial Sequence
  Description of Artificial Sequence: Synthetic oligonucleotide
cgaacauaaaacuugggug

SEQ ID NO: 1189117 - RNA, 19 nt, Artificial Sequence
  Description of Artificial Sequence: Synthetic oligonucleotide
aauagcaaucgcuccucau

SEQ ID NO: 1189118 - RNA, 19 nt, Artificial Sequence
  Description of Artificial Sequence: Synthetic oligonucleotide
ugaagugcauccucuguaa

SEQ ID NO: 1189119 - RNA, 19 nt, Artificial Sequence
  Description of Artificial Sequence: Synthetic oligonucleotide
ugcuuaaauugcagcacac

SEQ ID NO: 1189120 - RNA, 19 nt, Artificial Sequence
  Description of Artificial Sequence: Synthetic oligonucleotide
cuauuagcaugucuuguuc

SEQ ID NO: 1189121 - RNA, 19 nt, Artificial Sequence
  Description of Artificial Sequence: Synthetic oligonucleotide
aguugugccauagagguuu

SEQ ID NO: 1189122 - RNA, 19 nt, Artificial Sequence
  Description of Artificial Sequence: Synthetic oligonucleotide
uaacgcucacucuuggcac

SEQ ID NO: 1189123 - RNA, 19 nt, Artificial Sequence
  Description of Artificial Sequence: Synthetic oligonucleotide
auagcaaucgcuccucaua

SEQ ID NO: 1189124 - RNA, 19 nt, Artificial Sequence
  Description of Artificial Sequence: Synthetic oligonucleotide
cauuguuuguuuaggccuc

SEQ ID NO: 1189125 - RNA, 19 nt, Artificial Sequence
  Description of Artificial Sequence: Synthetic oligonucleotide
acuaguacugaaaucugga

SEQ ID NO: 1189126 - RNA, 19 nt, Artificial Sequence
  Description of Artificial Sequence: Synthetic oligonucleotide
uuauuagcacuaguacuga

SEQ ID NO: 1189127 - RNA, 19 nt, Artificial Sequence
  Description of Artificial Sequence: Synthetic oligonucleotide
aaggugagcucgucuugag

SEQ ID NO: 1189128 - RNA, 19 nt, Artificial Sequence
  Description of Artificial Sequence: Synthetic oligonucleotide
uguaacgcucacucuuggc

SEQ ID NO: 1189129 - RNA, 19 nt, Artificial Sequence
  Description of Artificial Sequence: Synthetic oligonucleotide
agcuuacuaagaccaaagu

SEQ ID NO: 1189130 - RNA, 19 nt, Artificial Sequence
  Description of Artificial Sequence: Synthetic oligonucleotide
gauuugggugcggaguucc

SEQ ID NO: 1189131 - RNA, 19 nt, Artificial Sequence
  Description of Artificial Sequence: Synthetic oligonucleotide
auugcagcacacgcgcagc

SEQ ID NO: 1189132 - RNA, 19 nt, Artificial Sequence
  Description of Artificial Sequence: Synthetic oligonucleotide
ucaggauuugggugcggag

SEQ ID NO: 1189133 - RNA, 19 nt, Artificial Sequence
  Description of Artificial Sequence: Synthetic oligonucleotide
auguaacgcucacucuugg

SEQ ID NO: 1189134 - RNA, 19 nt, Artificial Sequence
  Description of Artificial Sequence: Synthetic oligonucleotide
ucaauaaaucucagucgua

SEQ ID NO: 1189135 - RNA, 19 nt, Artificial Sequence
  Description of Artificial Sequence: Synthetic oligonucleotide
gagucacuagcccagcaca

SEQ ID NO: 1189136 - RNA, 19 nt, Artificial Sequence
  Description of Artificial Sequence: Synthetic oligonucleotide
guacuuuagaguucuaccu

SEQ ID NO: 1189137 - RNA, 19 nt, Artificial Sequence
  Description of Artificial Sequence: Synthetic oligonucleotide
auagauguuauuagcacua

SEQ ID NO: 1189138 - RNA, 19 nt, Artificial Sequence
  Description of Artificial Sequence: Synthetic oligonucleotide
cucgucuugaguauuugga

SEQ ID NO: 1189139 - RNA, 19 nt, Artificial Sequence
  Description of Artificial Sequence: Synthetic oligonucleotide
uugguuugcacuucuucua

SEQ ID NO: 1189140 - RNA, 19 nt, Artificial Sequence
  Description of Artificial Sequence: Synthetic oligonucleotide
uacugaaaucuggauauaa

SEQ ID NO: 1189141 - RNA, 19 nt, Artificial Sequence
  Description of Artificial Sequence: Synthetic oligonucleotide
ucccauugcaacccuuugu

SEQ ID NO: 1189142 - RNA, 19 nt, Artificial Sequence
  Description of Artificial Sequence: Synthetic oligonucleotide
cacuauagacacugugcag

SEQ ID NO: 1189143 - RNA, 19 nt, Artificial Sequence
  Description of Artificial Sequence: Synthetic oligonucleotide
uaauagcaaucgcuccuca

SEQ ID NO: 1189144 - RNA, 19 nt, Artificial Sequence
  Description of Artificial Sequence: Synthetic oligonucleotide
auugcaacccuuuguguuu

SEQ ID NO: 1189145 - RNA, 19 nt, Artificial Sequence
  Description of Artificial Sequence: Synthetic oligonucleotide
ucguacuuuagaguucuac

SEQ ID NO: 1189146 - RNA, 19 nt, Artificial Sequence
  Description of Artificial Sequence: Synthetic oligonucleotide
uaagaccaaaguguuccug

SEQ ID NO: 1189147 - RNA, 19 nt, Artificial Sequence
  Description of Artificial Sequence: Synthetic oligonucleotide
agucguacuuuagaguucu

SEQ ID NO: 1189148 - RNA, 19 nt, Artificial Sequence
  Description of Artificial Sequence: Synthetic oligonucleotide
agcaaucgcuccucauaac

SEQ ID NO: 1189149 - RNA, 19 nt, Artificial Sequence
  Description of Artificial Sequence: Synthetic oligonucleotide
uccagacuuacuccuaguu

SEQ ID NO: 1189150 - RNA, 19 nt, Artificial Sequence
  Description of Artificial Sequence: Synthetic oligonucleotide
cacauaggaaguaguugug

SEQ ID NO: 1189151 - RNA, 19 nt, Artificial Sequence
  Description of Artificial Sequence: Synthetic oligonucleotide
uaaucgauguguucuccua

SEQ ID NO: 1189152 - RNA, 19 nt, Artificial Sequence
  Description of Artificial Sequence: Synthetic oligonucleotide
ggcacuauagacacugugc

SEQ ID NO: 1189153 - RNA, 19 nt, Artificial Sequence
  Description of Artificial Sequence: Synthetic oligonucleotide
cauuaugaagcauagcuuu

SEQ ID NO: 1189154 - RNA, 19 nt, Artificial Sequence
  Description of Artificial Sequence: Synthetic oligonucleotide
augcaucuugauaauagca

SEQ ID NO: 1189155 - RNA, 19 nt, Artificial Sequence
  Description of Artificial Sequence: Synthetic oligonucleotide
cguacuuuagaguucuacc

SEQ ID NO: 1189156 - RNA, 19 nt, Artificial Sequence
  Description of Artificial Sequence: Synthetic oligonucleotide
gaaaugauauggacugguc

SEQ ID NO: 1189157 - RNA, 19 nt, Artificial Sequence
  Description of Artificial Sequence: Synthetic oligonucleotide
cugauuuacugcagcccag

SEQ ID NO: 1189158 - RNA, 19 nt, Artificial Sequence
  Description of Artificial Sequence: Synthetic oligonucleotide
ugauuuacugcagcccaga

SEQ ID NO: 1189159 - RNA, 19 nt, Artificial Sequence
  Description of Artificial Sequence: Synthetic oligonucleotide
uauuagcacuaguacugaa

SEQ ID NO: 1189160 - RNA, 19 nt, Artificial Sequence
  Description of Artificial Sequence: Synthetic oligonucleotide
aaucucagucguacuuuag

SEQ ID NO: 1189161 - RNA, 19 nt, Artificial Sequence
  Description of Artificial Sequence: Synthetic oligonucleotide
ugucgggugcuucuucgca

SEQ ID NO: 1189162 - RNA, 19 nt, Artificial Sequence
  Description of Artificial Sequence: Synthetic oligonucleotide
aagcauauccuuggcugug

SEQ ID NO: 1189163 - RNA, 19 nt, Artificial Sequence
  Description of Artificial Sequence: Synthetic oligonucleotide
uaucccauugcaacccuuu

SEQ ID NO: 1189164 - RNA, 19 nt, Artificial Sequence
  Description of Artificial Sequence: Synthetic oligonucleotide
uguguucuccuauuauguu

SEQ ID NO: 1189165 - RNA, 19 nt, Artificial Sequence
  Description of Artificial Sequence: Synthetic oligonucleotide
aaugccccaaauaguuucu

SEQ ID NO: 1189166 - RNA, 19 nt, Artificial Sequence
  Description of Artificial Sequence: Synthetic oligonucleotide
agacuuacuccuaguuugg

SEQ ID NO: 1189167 - RNA, 19 nt, Artificial Sequence
  Description of Artificial Sequence: Synthetic oligonucleotide
ucgcuccucauaacaaaac

SEQ ID NO: 1189168 - RNA, 19 nt, Artificial Sequence
  Description of Artificial Sequence: Synthetic oligonucleotide
gucgugaaccuuuggcccc

SEQ ID NO: 1189169 - RNA, 19 nt, Artificial Sequence
  Description of Artificial Sequence: Synthetic oligonucleotide
gcucgaacauaaaacuugg

SEQ ID NO: 1189170 - RNA, 19 nt, Artificial Sequence
  Description of Artificial Sequence: Synthetic oligonucleotide
ucgauguguucuccuauua

SEQ ID NO: 1189171 - RNA, 19 nt, Artificial Sequence
  Description of Artificial Sequence: Synthetic oligonucleotide
acuuacuccuaguuugguu

SEQ ID NO: 1189172 - RNA, 19 nt, Artificial Sequence
  Description of Artificial Sequence: Synthetic oligonucleotide
aguauccacaguaaucgau

SEQ ID NO: 1189173 - RNA, 19 nt, Artificial Sequence
  Description of Artificial Sequence: Synthetic oligonucleotide
gcacuauagacacugugca

SEQ ID NO: 1189174 - RNA, 19 nt, Artificial Sequence
  Description of Artificial Sequence: Synthetic oligonucleotide
uuguauuggccagcuggag

SEQ ID NO: 1189175 - RNA, 19 nt, Artificial Sequence
  Description of Artificial Sequence: Synthetic oligonucleotide
gaaguaguugugccauaga

SEQ ID NO: 1189176 - RNA, 19 nt, Artificial Sequence
  Description of Artificial Sequence: Synthetic oligonucleotide
agcuauuagcaugucuugu

SEQ ID NO: 1189177 - RNA, 19 nt, Artificial Sequence
  Description of Artificial Sequence: Synthetic oligonucleotide
ugguagcaaacaagcugug

SEQ ID NO: 1189178 - RNA, 19 nt, Artificial Sequence
  Description of Artificial Sequence: Synthetic oligonucleotide
uaauucccaggcaccugca

SEQ ID NO: 1189179 - RNA, 19 nt, Artificial Sequence
  Description of Artificial Sequence: Synthetic oligonucleotide
ucuucgcacaccugcuuaa

SEQ ID NO: 1189180 - RNA, 19 nt, Artificial Sequence
  Description of Artificial Sequence: Synthetic oligonucleotide
cacuagggaguuuuacauc

SEQ ID NO: 1189181 - RNA, 19 nt, Artificial Sequence
  Description of Artificial Sequence: Synthetic oligonucleotide
uucuccuauuauguugacu

SEQ ID NO: 1189182 - RNA, 19 nt, Artificial Sequence
  Description of Artificial Sequence: Synthetic oligonucleotide
cauaaaacuugggugugga

SEQ ID NO: 1189183 - RNA, 19 nt, Artificial Sequence
  Description of Artificial Sequence: Synthetic oligonucleotide
aggauuugggugcggaguu

SEQ ID NO: 1189184 - RNA, 19 nt, Artificial Sequence
  Description of Artificial Sequence: Synthetic oligonucleotide
cacacgcgcagccucacug

SEQ ID NO: 1189185 - RNA, 19 nt, Artificial Sequence
  Description of Artificial Sequence: Synthetic oligonucleotide
gcaaucgcuccucauaaca

SEQ ID NO: 1189186 - RNA, 19 nt, Artificial Sequence
  Description of Artificial Sequence: Synthetic oligonucleotide
ucgggugcuucuucgcaca

SEQ ID NO: 1189187 - RNA, 19 nt, Artificial Sequence
  Description of Artificial Sequence: Synthetic oligonucleotide
augggaaguggcugccuug

SEQ ID NO: 1189188 - RNA, 19 nt, Artificial Sequence
  Description of Artificial Sequence: Synthetic oligonucleotide
gcucgucuugaguauuugg

SEQ ID NO: 1189189 - RNA, 19 nt, Artificial Sequence
  Description of Artificial Sequence: Synthetic oligonucleotide
ggugagcucgucuugagua

SEQ ID NO: 1189190 - RNA, 19 nt, Artificial Sequence
  Description of Artificial Sequence: Synthetic oligonucleotide
uugucgggugcuucuucgc

SEQ ID NO: 1189191 - RNA, 19 nt, Artificial Sequence
  Description of Artificial Sequence: Synthetic oligonucleotide
ccuauuauguugacucuuc

SEQ ID NO: 1189192 - RNA, 19 nt, Artificial Sequence
  Description of Artificial Sequence: Synthetic oligonucleotide
ugcuccacuagggaguuuu

SEQ ID NO: 1189193 - RNA, 19 nt, Artificial Sequence
  Description of Artificial Sequence: Synthetic oligonucleotide
agugccuauguaacgcuca

SEQ ID NO: 1189194 - RNA, 19 nt, Artificial Sequence
  Description of Artificial Sequence: Synthetic oligonucleotide
gaaaaccaaggccccaccu

SEQ ID NO: 1189195 - RNA, 19 nt, Artificial Sequence
  Description of Artificial Sequence: Synthetic oligonucleotide
cuauguaacgcucacucuu

SEQ ID NO: 1189196 - RNA, 19 nt, Artificial Sequence
  Description of Artificial Sequence: Synthetic oligonucleotide
ugggaaguggcugccuugu

SEQ ID NO: 1189197 - RNA, 19 nt, Artificial Sequence
  Description of Artificial Sequence: Synthetic oligonucleotide
uuccucugguaauaagcuu

SEQ ID NO: 1189198 - RNA, 19 nt, Artificial Sequence
  Description of Artificial Sequence: Synthetic oligonucleotide
cuuuggccccaaacuuccg

SEQ ID NO: 1189199 - RNA, 19 nt, Artificial Sequence
  Description of Artificial Sequence: Synthetic oligonucleotide
cacaugcuuugcccgcugg

SEQ ID NO: 1189200 - RNA, 19 nt, Artificial Sequence
  Description of Artificial Sequence: Synthetic oligonucleotide
caaucgcuccucauaacaa

SEQ ID NO: 1189201 - RNA, 19 nt, Artificial Sequence
  Description of Artificial Sequence: Synthetic oligonucleotide
cacuagcccagcacagcag

SEQ ID NO: 1189202 - RNA, 19 nt, Artificial Sequence
  Description of Artificial Sequence: Synthetic oligonucleotide
ggauauaagggguuuguau

SEQ ID NO: 1189203 - RNA, 19 nt, Artificial Sequence
  Description of Artificial Sequence: Synthetic oligonucleotide
cagcagaccagagcacugg

SEQ ID NO: 1189204 - RNA, 19 nt, Artificial Sequence
  Description of Artificial Sequence: Synthetic oligonucleotide
uccucccugcuauaggguu

SEQ ID NO: 1189205 - RNA, 19 nt, Artificial Sequence
  Description of Artificial Sequence: Synthetic oligonucleotide
agcagaccagagcacugga

SEQ ID NO: 1189206 - RNA, 19 nt, Artificial Sequence
  Description of Artificial Sequence: Synthetic oligonucleotide
cccaaauaguuucuccgag

SEQ ID NO: 1189207 - RNA, 19 nt, Artificial Sequence
  Description of Artificial Sequence: Synthetic oligonucleotide
uggauauaagggguuugua

SEQ ID NO: 1189208 - RNA, 19 nt, Artificial Sequence
  Description of Artificial Sequence: Synthetic oligonucleotide
uuucuccgagauguuuuac

SEQ ID NO: 1189209 - RNA, 19 nt, Artificial Sequence
  Description of Artificial Sequence: Synthetic oligonucleotide
cagucguacuuuagaguuc

SEQ ID NO: 1189210 - RNA, 19 nt, Artificial Sequence
  Description of Artificial Sequence: Synthetic oligonucleotide
ggaccuuugcagccagccg

SEQ ID NO: 1189211 - RNA, 19 nt, Artificial Sequence
  Description of Artificial Sequence: Synthetic oligonucleotide
ggacuaaacucuauuaacu

SEQ ID NO: 1189212 - RNA, 19 nt, Artificial Sequence
  Description of Artificial Sequence: Synthetic oligonucleotide
uuugggugcggaguuccuc

SEQ ID NO: 1189213 - RNA, 19 nt, Artificial Sequence
  Description of Artificial Sequence: Synthetic oligonucleotide
ugcuccagugagucgugaa

SEQ ID NO: 1189214 - RNA, 19 nt, Artificial Sequence
  Description of Artificial Sequence: Synthetic oligonucleotide
gucgggugcuucuucgcac

SEQ ID NO: 1189215 - RNA, 19 nt, Artificial Sequence
  Description of Artificial Sequence: Synthetic oligonucleotide
ggauagacucauucccaac

SEQ ID NO: 1189216 - RNA, 19 nt, Artificial Sequence
  Description of Artificial Sequence: Synthetic oligonucleotide
gugcggaguuccuccaggc

SEQ ID NO: 1189217 - RNA, 19 nt, Artificial Sequence
  Description of Artificial Sequence: Synthetic oligonucleotide
gugccuauguaacgcucac

SEQ ID NO: 1189218 - RNA, 19 nt, Artificial Sequence
  Description of Artificial Sequence: Synthetic oligonucleotide
guuucuccgagauguuuua

SEQ ID NO: 1189219 - RNA, 19 nt, Artificial Sequence
  Description of Artificial Sequence: Synthetic oligonucleotide
ucuagccguaggacuuuau

SEQ ID NO: 1189220 - RNA, 19 nt, Artificial Sequence
  Description of Artificial Sequence: Synthetic oligonucleotide
agcuccuaaaugccccaaa

SEQ ID NO: 1189221 - RNA, 19 nt, Artificial Sequence
  Description of Artificial Sequence: Synthetic oligonucleotide
cucagucguacuuuagagu

SEQ ID NO: 1189222 - RNA, 19 nt, Artificial Sequence
  Description of Artificial Sequence: Synthetic oligonucleotide
cuggggcucgaacauaaaa

SEQ ID NO: 1189223 - RNA, 19 nt, Artificial Sequence
  Description of Artificial Sequence: Synthetic oligonucleotide
ccacauaggaaguaguugu

SEQ ID NO: 1189224 - RNA, 19 nt, Artificial Sequence
  Description of Artificial Sequence: Synthetic oligonucleotide
agcauauccuuggcuguga

SEQ ID NO: 1189225 - RNA, 19 nt, Artificial Sequence
  Description of Artificial Sequence: Synthetic oligonucleotide
cauuccagucagcuuacua

SEQ ID NO: 1189226 - RNA, 19 nt, Artificial Sequence
  Description of Artificial Sequence: Synthetic oligonucleotide
ugccuauguaacgcucacu

SEQ ID NO: 1189227 - RNA, 19 nt, Artificial Sequence
  Description of Artificial Sequence: Synthetic oligonucleotide
gaaaagggacugauuuacu

SEQ ID NO: 1189228 - RNA, 19 nt, Artificial Sequence
  Description of Artificial Sequence: Synthetic oligonucleotide
gcuccagugagucgugaac

SEQ ID NO: 1189229 - RNA, 19 nt, Artificial Sequence
  Description of Artificial Sequence: Synthetic oligonucleotide
agcucgucuugaguauuug

SEQ ID NO: 1189230 - RNA, 19 nt, Artificial Sequence
  Description of Artificial Sequence: Synthetic oligonucleotide
ucgugaaccuuuggcccca

SEQ ID NO: 1189231 - RNA, 19 nt, Artificial Sequence
  Description of Artificial Sequence: Synthetic oligonucleotide
gacucauucccaacacugu

SEQ ID NO: 1189232 - RNA, 19 nt, Artificial Sequence
  Description of Artificial Sequence: Synthetic oligonucleotide
ggccccaaacuuccggcag

SEQ ID NO: 1189233 - RNA, 19 nt, Artificial Sequence
  Description of Artificial Sequence: Synthetic oligonucleotide
agcacacgcgcagccucac

SEQ ID NO: 1189234 - RNA, 19 nt, Artificial Sequence
  Description of Artificial Sequence: Synthetic oligonucleotide
uuguuuguuuaggccucaa

SEQ ID NO: 1189235 - RNA, 19 nt, Artificial Sequence
  Description of Artificial Sequence: Synthetic oligonucleotide
cacagccaugggaagaacu

SEQ ID NO: 1189236 - RNA, 19 nt, Artificial Sequence
  Description of Artificial Sequence: Synthetic oligonucleotide
cucaggauuugggugcgga

SEQ ID NO: 1189237 - RNA, 19 nt, Artificial Sequence
  Description of Artificial Sequence: Synthetic oligonucleotide
acgcgcagccucacuguac

SEQ ID NO: 1189238 - RNA, 19 nt, Artificial Sequence
  Description of Artificial Sequence: Synthetic oligonucleotide
gaccaaaguguuccuggau

SEQ ID NO: 1189239 - RNA, 19 nt, Artificial Sequence
  Description of Artificial Sequence: Synthetic oligonucleotide
ccuaaaugccccaaauagu

SEQ ID NO: 1189240 - RNA, 19 nt, Artificial Sequence
  Description of Artificial Sequence: Synthetic oligonucleotide
cuuugcccgcugguagagc

SEQ ID NO: 1189241 - RNA, 19 nt, Artificial Sequence
  Description of Artificial Sequence: Synthetic oligonucleotide
ccaacacugugagagucac

SEQ ID NO: 1189242 - RNA, 19 nt, Artificial Sequence
  Description of Artificial Sequence: Synthetic oligonucleotide
cuggauauaagggguuugu

SEQ ID NO: 1189243 - RNA, 19 nt, Artificial Sequence
  Description of Artificial Sequence: Synthetic oligonucleotide
cacaucagugggcacuaua

SEQ ID NO: 1189244 - RNA, 19 nt, Artificial Sequence
  Description of Artificial Sequence: Synthetic oligonucleotide
uuccaucuaccaggcaauu

SEQ ID NO: 1189245 - RNA, 19 nt, Artificial Sequence
  Description of Artificial Sequence: Synthetic oligonucleotide
agcauagcuuucacuguua

SEQ ID NO: 1189246 - RNA, 19 nt, Artificial Sequence
  Description of Artificial Sequence: Synthetic oligonucleotide
caugcuuugcccgcuggua

SEQ ID NO: 1189247 - RNA, 19 nt, Artificial Sequence
  Description of Artificial Sequence: Synthetic oligonucleotide
cucccugcuauaggguuca

SEQ ID NO: 1189248 - RNA, 19 nt, Artificial Sequence
  Description of Artificial Sequence: Synthetic oligonucleotide
gcuggaccgcauugucggg

SEQ ID NO: 1189249 - RNA, 19 nt, Artificial Sequence
  Description of Artificial Sequence: Synthetic oligonucleotide
uucuagccguaggacuuua

SEQ ID NO: 1189250 - RNA, 19 nt, Artificial Sequence
  Description of Artificial Sequence: Synthetic oligonucleotide
caggauuugggugcggagu

SEQ ID NO: 1189251 - RNA, 19 nt, Artificial Sequence
  Description of Artificial Sequence: Synthetic oligonucleotide
ccgacacuccaucacucug

SEQ ID NO: 1189252 - RNA, 19 nt, Artificial Sequence
  Description of Artificial Sequence: Synthetic oligonucleotide
aucuaccaggcaauucauu

SEQ ID NO: 1189253 - RNA, 19 nt, Artificial Sequence
  Description of Artificial Sequence: Synthetic oligonucleotide
gcagcccagacgucucgcc

SEQ ID NO: 1189254 - RNA, 19 nt, Artificial Sequence
  Description of Artificial Sequence: Synthetic oligonucleotide
gacuuacuccuaguuuggu

SEQ ID NO: 1189255 - RNA, 19 nt, Artificial Sequence
  Description of Artificial Sequence: Synthetic oligonucleotide
agacgucucgccagcuccu

SEQ ID NO: 1189256 - RNA, 19 nt, Artificial Sequence
  Description of Artificial Sequence: Synthetic oligonucleotide
gcaacccuuuguguuuagc

SEQ ID NO: 1189257 - RNA, 19 nt, Artificial Sequence
  Description of Artificial Sequence: Synthetic oligonucleotide
caugucccggcagcuucug

SEQ ID NO: 1189258 - RNA, 19 nt, Artificial Sequence
  Description of Artificial Sequence: Synthetic oligonucleotide
gucagcuuacuaagaccaa

SEQ ID NO: 1189259 - RNA, 19 nt, Artificial Sequence
  Description of Artificial Sequence: Synthetic oligonucleotide
acgucucgccagcuccuaa

SEQ ID NO: 1189260 - RNA, 19 nt, Artificial Sequence
  Description of Artificial Sequence: Synthetic oligonucleotide
ccuuguucaucuccacgca

SEQ ID NO: 1189261 - RNA, 19 nt, Artificial Sequence
  Description of Artificial Sequence: Synthetic oligonucleotide
cgcuccucauaacaaaaca

SEQ ID NO: 1189262 - RNA, 19 nt, Artificial Sequence
  Description of Artificial Sequence: Synthetic oligonucleotide
cccaacacugugagaguca

SEQ ID NO: 1189263 - RNA, 19 nt, Artificial Sequence
  Description of Artificial Sequence: Synthetic oligonucleotide
gaccgcauugucgggugcu

SEQ ID NO: 1189264 - RNA, 19 nt, Artificial Sequence
  Description of Artificial Sequence: Synthetic oligonucleotide
cuucgcacaccugcuuaaa

SEQ ID NO: 1189265 - RNA, 19 nt, Artificial Sequence
  Description of Artificial Sequence: Synthetic oligonucleotide
ccauagagguuuggucuug

SEQ ID NO: 1189266 - RNA, 19 nt, Artificial Sequence
  Description of Artificial Sequence: Synthetic oligonucleotide
acgcagcuguuggcaauca

SEQ ID NO: 1189267 - RNA, 19 nt, Artificial Sequence
  Description of Artificial Sequence: Synthetic oligonucleotide
ggauuugggugcggaguuc

SEQ ID NO: 1189268 - RNA, 19 nt, Artificial Sequence
  Description of Artificial Sequence: Synthetic oligonucleotide
cauauccuuggcugugauu

SEQ ID NO: 1189269 - RNA, 19 nt, Artificial Sequence
  Description of Artificial Sequence: Synthetic oligonucleotide
cuccgagauguuuuacauu

SEQ ID NO: 1189270 - RNA, 19 nt, Artificial Sequence
  Description of Artificial Sequence: Synthetic oligonucleotide
gccccaaacuuccggcaga

SEQ ID NO: 1189271 - RNA, 19 nt, Artificial Sequence
  Description of Artificial Sequence: Synthetic oligonucleotide
gcccagacgucucgccagc

SEQ ID NO: 1189272 - RNA, 19 nt, Artificial Sequence
  Description of Artificial Sequence: Synthetic oligonucleotide
ccuauguaacgcucacucu

SEQ ID NO: 1189273 - RNA, 19 nt, Artificial Sequence
  Description of Artificial Sequence: Synthetic oligonucleotide
ccagacgucucgccagcuc

SEQ ID NO: 1189274 - RNA, 19 nt, Artificial Sequence
  Description of Artificial Sequence: Synthetic oligonucleotide
caugcacguuugugaggaa

SEQ ID NO: 1189275 - RNA, 19 nt, Artificial Sequence
  Description of Artificial Sequence: Synthetic oligonucleotide
cuccucccugcuauagggu

SEQ ID NO: 1189276 - RNA, 19 nt, Artificial Sequence
  Description of Artificial Sequence: Synthetic oligonucleotide
accgcauugucgggugcuu

SEQ ID NO: 1189277 - RNA, 19 nt, Artificial Sequence
  Description of Artificial Sequence: Synthetic oligonucleotide
caacacugugagagucacu

SEQ ID NO: 1189278 - RNA, 19 nt, Artificial Sequence
  Description of Artificial Sequence: Synthetic oligonucleotide
cacgcgcagccucacugua

SEQ ID NO: 1189279 - RNA, 19 nt, Artificial Sequence
  Description of Artificial Sequence: Synthetic oligonucleotide
gacgucucgccagcuccua

SEQ ID NO: 1189280 - RNA, 19 nt, Artificial Sequence
  Description of Artificial Sequence: Synthetic oligonucleotide
ccagacuuacuccuaguuu

SEQ ID NO: 1189281 - RNA, 19 nt, Artificial Sequence
  Description of Artificial Sequence: Synthetic oligonucleotide
cuggaccgcauugucgggu

SEQ ID NO: 1189282 - RNA, 19 nt, Artificial Sequence
  Description of Artificial Sequence: Synthetic oligonucleotide
gagcucgucuugaguauuu

SEQ ID NO: 1189283 - RNA, 19 nt, Artificial Sequence
  Description of Artificial Sequence: Synthetic oligonucleotide
cgcgcagccucacuguaca

SEQ ID NO: 1189284 - RNA, 19 nt, Artificial Sequence
  Description of Artificial Sequence: Synthetic oligonucleotide
cagcuccuaaaugccccaa

SEQ ID NO: 1189285 - RNA, 19 nt, Artificial Sequence
  Description of Artificial Sequence: Synthetic oligonucleotide
gccaugggaagaacugagu

SEQ ID NO: 1189286 - RNA, 19 nt, Artificial Sequence
  Description of Artificial Sequence: Synthetic oligonucleotide
gcgcagccucacuguacac

SEQ ID NO: 1189287 - RNA, 19 nt, Artificial Sequence
  Description of Artificial Sequence: Synthetic oligonucleotide
ggguguggacccaaacuuu

SEQ ID NO: 1189288 - RNA, 19 nt, Artificial Sequence
  Description of Artificial Sequence: Synthetic oligonucleotide
ccgagauguuuuacauugu

SEQ ID NO: 1189289 - RNA, 19 nt, Artificial Sequence
  Description of Artificial Sequence: Synthetic oligonucleotide
cgucucgccagcuccuaaa

SEQ ID NO: 1189290 - RNA, 19 nt, Artificial Sequence
  Description of Artificial Sequence: Synthetic oligonucleotide
cgcauugucgggugcuucu

SEQ ID NO: 1189291 - RNA, 19 nt, Artificial Sequence
  Description of Artificial Sequence: Synthetic oligonucleotide
ccguaggacuuuaucccau

SEQ ID NO: 1189292 - RNA, 19 nt, Artificial Sequence
  Description of Artificial Sequence: Synthetic oligonucleotide
ccuggggcucgaacauaaa

SEQ ID NO: 1189293 - RNA, 19 nt, Artificial Sequence
  Description of Artificial Sequence: Synthetic oligonucleotide
gggaaguggcugccuuguu

SEQ ID NO: 1189294 - RNA, 19 nt, Artificial Sequence
  Description of Artificial Sequence: Synthetic oligonucleotide
gcacacgcgcagccucacu

SEQ ID NO: 1189295 - RNA, 19 nt, Artificial Sequence
  Description of Artificial Sequence: Synthetic oligonucleotide
cccagacgucucgccagcu

SEQ ID NO: 1189296 - RNA, 19 nt, Artificial Sequence
  Description of Artificial Sequence: Synthetic oligonucleotide
ucagauaucaaauagaacu

SEQ ID NO: 1189297 - RNA, 19 nt, Artificial Sequence
  Description of Artificial Sequence: Synthetic oligonucleotide
uauaauagaaggcacauac

SEQ ID NO: 1189298 - RNA, 19 nt, Artificial Sequence
  Description of Artificial Sequence: Synthetic oligonucleotide
uacuaaaugaauuaguuca

SEQ ID NO: 1189299 - RNA, 19 nt, Artificial Sequence
  Description of Artificial Sequence: Synthetic oligonucleotide
uaaagauucacgcauaaca

SEQ ID NO: 1189300 - RNA, 19 nt, Artificial Sequence
  Description of Artificial Sequence: Synthetic oligonucleotide
uuuauguccgaacuuaucc

SEQ ID NO: 1189301 - RNA, 19 nt, Artificial Sequence
  Description of Artificial Sequence: Synthetic oligonucleotide
auuuuagauaauccaaagc

SEQ ID NO: 1189302 - RNA, 19 nt, Artificial Sequence
  Description of Artificial Sequence: Synthetic oligonucleotide
uuaucuagagcucaagugc

SEQ ID NO: 1189303 - RNA, 19 nt, Artificial Sequence
  Description of Artificial Sequence: Synthetic oligonucleotide
aaccauauuagcuauaaau

SEQ ID NO: 1189304 - RNA, 19 nt, Artificial Sequence
  Description of Artificial Sequence: Synthetic oligonucleotide
uuuaacucuagcuuuagcu

SEQ ID NO: 1189305 - RNA, 19 nt, Artificial Sequence
  Description of Artificial Sequence: Synthetic oligonucleotide
aauuaguucagauaucaaa

SEQ ID NO: 1189306 - RNA, 19 nt, Artificial Sequence
  Description of Artificial Sequence: Synthetic oligonucleotide
aaugaguagacuccaaacu

SEQ ID NO: 1189307 - RNA, 19 nt, Artificial Sequence
  Description of Artificial Sequence: Synthetic oligonucleotide
agcuuaauauguucuaacc

SEQ ID NO: 1189308 - RNA, 19 nt, Artificial Sequence
  Description of Artificial Sequence: Synthetic oligonucleotide
aaaauuucacuucauacua

SEQ ID NO: 1189309 - RNA, 19 nt, Artificial Sequence
  Description of Artificial Sequence: Synthetic oligonucleotide
acuucaaguaauaaugugc

SEQ ID NO: 1189310 - RNA, 19 nt, Artificial Sequence
  Description of Artificial Sequence: Synthetic oligonucleotide
uaagcugugacauaaaaua

SEQ ID NO: 1189311 - RNA, 19 nt, Artificial Sequence
  Description of Artificial Sequence: Synthetic oligonucleotide
uucuguaccaauauucaag

SEQ ID NO: 1189312 - RNA, 19 nt, Artificial Sequence
  Description of Artificial Sequence: Synthetic oligonucleotide
uuuauacuuacaaaaucca

SEQ ID NO: 1189313 - RNA, 19 nt, Artificial Sequence
  Description of Artificial Sequence: Synthetic oligonucleotide
agugaguuugcauaugggg

SEQ ID NO: 1189314 - RNA, 19 nt, Artificial Sequence
  Description of Artificial Sequence: Synthetic oligonucleotide
uaauagaaggcacauacuc

SEQ ID NO: 1189315 - RNA, 19 nt, Artificial Sequence
  Description of Artificial Sequence: Synthetic oligonucleotide
uuuuacauuaccacuuaug

SEQ ID NO: 1189316 - RNA, 19 nt, Artificial Sequence
  Description of Artificial Sequence: Synthetic oligonucleotide
ugagauucuucaauguuag

SEQ ID NO: 1189317 - RNA, 19 nt, Artificial Sequence
  Description of Artificial Sequence: Synthetic oligonucleotide
aaacuggacaaccaaugag

SEQ ID NO: 1189318 - RNA, 19 nt, Artificial Sequence
  Description of Artificial Sequence: Synthetic oligonucleotide
ucuagaugcgaauuuaugu

SEQ ID NO: 1189319 - RNA, 19 nt, Artificial Sequence
  Description of Artificial Sequence: Synthetic oligonucleotide
uacaaagauaaauuuaauc

SEQ ID NO: 1189320 - RNA, 19 nt, Artificial Sequence
  Description of Artificial Sequence: Synthetic oligonucleotide
ucaguguuagaccagcuca

SEQ ID NO: 1189321 - RNA, 19 nt, Artificial Sequence
  Description of Artificial Sequence: Synthetic oligonucleotide
uauacuuacaaaauccaua

SEQ ID NO: 1189322 - RNA, 19 nt, Artificial Sequence
  Description of Artificial Sequence: Synthetic oligonucleotide
ugauacuuuuaauuuauga

SEQ ID NO: 1189323 - RNA, 19 nt, Artificial Sequence
  Description of Artificial Sequence: Synthetic oligonucleotide
auauuagcuauaaauaauc

SEQ ID NO: 1189324 - RNA, 19 nt, Artificial Sequence
  Description of Artificial Sequence: Synthetic oligonucleotide
aaaucuacucuguacacau

SEQ ID NO: 1189325 - RNA, 19 nt, Artificial Sequence
  Description of Artificial Sequence: Synthetic oligonucleotide
caugaccuauucuagaugc

SEQ ID NO: 1189326 - RNA, 19 nt, Artificial Sequence
  Description of Artificial Sequence: Synthetic oligonucleotide
augaaugucuaagaaagac

SEQ ID NO: 1189327 - RNA, 19 nt, Artificial Sequence
  Description of Artificial Sequence: Synthetic oligonucleotide
caaagauaaauuuaaucuc

SEQ ID NO: 1189328 - RNA, 19 nt, Artificial Sequence
  Description of Artificial Sequence: Synthetic oligonucleotide
uaguuauuaguuuauuucu

SEQ ID NO: 1189329 - RNA, 19 nt, Artificial Sequence
  Description of Artificial Sequence: Synthetic oligonucleotide
uuuggauucauuuuagaua

SEQ ID NO: 1189330 - RNA, 19 nt, Artificial Sequence
  Description of Artificial Sequence: Synthetic oligonucleotide
auguauuuuauucaccaug

SEQ ID NO: 1189331 - RNA, 19 nt, Artificial Sequence
  Description of Artificial Sequence: Synthetic oligonucleotide
uuuagauaauccaaagcaa

SEQ ID NO: 1189332 - RNA, 19 nt, Artificial Sequence
  Description of Artificial Sequence: Synthetic oligonucleotide
ucuguaccaauauucaagc

SEQ ID NO: 1189333 - RNA, 19 nt, Artificial Sequence
  Description of Artificial Sequence: Synthetic oligonucleotide
uuauauaaucagcaucagc

SEQ ID NO: 1189334 - RNA, 19 nt, Artificial Sequence
  Description of Artificial Sequence: Synthetic oligonucleotide
uguuagaccagcucauggg

SEQ ID NO: 1189335 - RNA, 19 nt, Artificial Sequence
  Description of Artificial Sequence: Synthetic oligonucleotide
ugaauuaguucagauauca

SEQ ID NO: 1189336 - RNA, 19 nt, Artificial Sequence
  Description of Artificial Sequence: Synthetic oligonucleotide
uuguaauauauauaauaga

SEQ ID NO: 1189337 - RNA, 19 nt, Artificial Sequence
  Description of Artificial Sequence: Synthetic oligonucleotide
cuuaucuagagcucaagug

SEQ ID NO: 1189338 - RNA, 19 nt, Artificial Sequence
  Description of Artificial Sequence: Synthetic oligonucleotide
gaaagcagagcuugcaaag

SEQ ID NO: 1189339 - RNA, 19 nt, Artificial Sequence
  Description of Artificial Sequence: Synthetic oligonucleotide
uaugaaauauuuacagcgu

SEQ ID NO: 1189340 - RNA, 19 nt, Artificial Sequence
  Description of Artificial Sequence: Synthetic oligonucleotide
uuuggagugauacuuuuaa

SEQ ID NO: 1189341 - RNA, 19 nt, Artificial Sequence
  Description of Artificial Sequence: Synthetic oligonucleotide
uauuagcuauaaauaaucu

SEQ ID NO: 1189342 - RNA, 19 nt, Artificial Sequence
  Description of Artificial Sequence: Synthetic oligonucleotide
uauuucacuuaucuagagc

SEQ ID NO: 1189343 - RNA, 19 nt, Artificial Sequence
  Description of Artificial Sequence: Synthetic oligonucleotide
aaagcaacugucguaagca

SEQ ID NO: 1189344 - RNA, 19 nt, Artificial Sequence
  Description of Artificial Sequence: Synthetic oligonucleotide
acuuaugaugguauaaaac

SEQ ID NO: 1189345 - RNA, 19 nt, Artificial Sequence
  Description of Artificial Sequence: Synthetic oligonucleotide
uuaguucaacuucuaaaug

SEQ ID NO: 1189346 - RNA, 19 nt, Artificial Sequence
  Description of Artificial Sequence: Synthetic oligonucleotide
uuaggauaaacaaugucuu

SEQ ID NO: 1189347 - RNA, 19 nt, Artificial Sequence
  Description of Artificial Sequence: Synthetic oligonucleotide
auuugguagaccaguaagc

SEQ ID NO: 1189348 - RNA, 19 nt, Artificial Sequence
  Description of Artificial Sequence: Synthetic oligonucleotide
ugucguaagcagcuggagg

SEQ ID NO: 1189349 - RNA, 19 nt, Artificial Sequence
  Description of Artificial Sequence: Synthetic oligonucleotide
uguucuaaccaaugaguag

SEQ ID NO: 1189350 - RNA, 19 nt, Artificial Sequence
  Description of Artificial Sequence: Synthetic oligonucleotide
aacugucguaagcagcugg

SEQ ID NO: 1189351 - RNA, 19 nt, Artificial Sequence
  Description of Artificial Sequence: Synthetic oligonucleotide
uuggcaguaauacccaucu

SEQ ID NO: 1189352 - RNA, 19 nt, Artificial Sequence
  Description of Artificial Sequence: Synthetic oligonucleotide
ugaauauuaugaaugucua

SEQ ID NO: 1189353 - RNA, 19 nt, Artificial Sequence
  Description of Artificial Sequence: Synthetic oligonucleotide
aggugcaauuccucgagcc

SEQ ID NO: 1189354 - RNA, 19 nt, Artificial Sequence
  Description of Artificial Sequence: Synthetic oligonucleotide
uuuugccucaaccugagua

SEQ ID NO: 1189355 - RNA, 19 nt, Artificial Sequence
  Description of Artificial Sequence: Synthetic oligonucleotide
uaugacucaguguuagacc

SEQ ID NO: 1189356 - RNA, 19 nt, Artificial Sequence
  Description of Artificial Sequence: Synthetic oligonucleotide
cuuaugaugguauaaaacu

SEQ ID NO: 1189357 - RNA, 19 nt, Artificial Sequence
  Description of Artificial Sequence: Synthetic oligonucleotide
uagaugcgaauuuaugucc

SEQ ID NO: 1189358 - RNA, 19 nt, Artificial Sequence
  Description of Artificial Sequence: Synthetic oligonucleotide
cuagaugcgaauuuauguc

SEQ ID NO: 1189359 - RNA, 19 nt, Artificial Sequence
  Description of Artificial Sequence: Synthetic oligonucleotide
cuuaauauguucuaaccaa

SEQ ID NO: 1189360 - RNA, 19 nt, Artificial Sequence
  Description of Artificial Sequence: Synthetic oligonucleotide
ugaguuugcauauggggca

SEQ ID NO: 1189361 - RNA, 19 nt, Artificial Sequence
  Description of Artificial Sequence: Synthetic oligonucleotide
auauuaugaaugucuaaga

SEQ ID NO: 1189362 - RNA, 19 nt, Artificial Sequence
  Description of Artificial Sequence: Synthetic oligonucleotide
aaauuucacuucauacuac

SEQ ID NO: 1189363 - RNA, 19 nt, Artificial Sequence
  Description of Artificial Sequence: Synthetic oligonucleotide
auacucaagagucuaagau

SEQ ID NO: 1189364 - RNA, 19 nt, Artificial Sequence
  Description of Artificial Sequence: Synthetic oligonucleotide
uaagauguuaguucaacuu

SEQ ID NO: 1189365 - RNA, 19 nt, Artificial Sequence
  Description of Artificial Sequence: Synthetic oligonucleotide
gaaggcacauacucaagag

SEQ ID NO: 1189366 - RNA, 19 nt, Artificial Sequence
  Description of Artificial Sequence: Synthetic oligonucleotide
ucaaauagaacugugcauu

SEQ ID NO: 1189367 - RNA, 19 nt, Artificial Sequence
  Description of Artificial Sequence: Synthetic oligonucleotide
ggcguuaugauacgcaucg

SEQ ID NO: 1189368 - RNA, 19 nt, Artificial Sequence
  Description of Artificial Sequence: Synthetic oligonucleotide
uucauacuacaaaacaaaa

SEQ ID NO: 1189369 - RNA, 19 nt, Artificial Sequence
  Description of Artificial Sequence: Synthetic oligonucleotide
acaucacacuacuauauug

SEQ ID NO: 1189370 - RNA, 19 nt, Artificial Sequence
  Description of Artificial Sequence: Synthetic oligonucleotide
uucuuuaaagauucacgca

SEQ ID NO: 1189371 - RNA, 19 nt, Artificial Sequence
  Description of Artificial Sequence: Synthetic oligonucleotide
aucggagugcaauuuuggc

SEQ ID NO: 1189372 - RNA, 19 nt, Artificial Sequence
  Description of Artificial Sequence: Synthetic oligonucleotide
auaaucuuuacaaaucacu

SEQ ID NO: 1189373 - RNA, 19 nt, Artificial Sequence
  Description of Artificial Sequence: Synthetic oligonucleotide
cuucaaguaauaaugugca

SEQ ID NO: 1189374 - RNA, 19 nt, Artificial Sequence
  Description of Artificial Sequence: Synthetic oligonucleotide
uuauacuuacaaaauccau

SEQ ID NO: 1189375 - RNA, 19 nt, Artificial Sequence
  Description of Artificial Sequence: Synthetic oligonucleotide
aauaaugugcagaaccagu

SEQ ID NO: 1189376 - RNA, 19 nt, Artificial Sequence
  Description of Artificial Sequence: Synthetic oligonucleotide
aaaugaugaaaugcucauc

SEQ ID NO: 1189377 - RNA, 19 nt, Artificial Sequence
  Description of Artificial Sequence: Synthetic oligonucleotide
uuaaaucuacucuguacac

SEQ ID NO: 1189378 - RNA, 19 nt, Artificial Sequence
  Description of Artificial Sequence: Synthetic oligonucleotide
uguuaggauaaacaauguc

SEQ ID NO: 1189379 - RNA, 19 nt, Artificial Sequence
  Description of Artificial Sequence: Synthetic oligonucleotide
cucaaccugaguaugacuc

SEQ ID NO: 1189380 - RNA, 19 nt, Artificial Sequence
  Description of Artificial Sequence: Synthetic oligonucleotide
aucuuuacaaaucacugua

SEQ ID NO: 1189381 - RNA, 19 nt, Artificial Sequence
  Description of Artificial Sequence: Synthetic oligonucleotide
uacuucaaguaauaaugug

SEQ ID NO: 1189382 - RNA, 19 nt, Artificial Sequence
  Description of Artificial Sequence: Synthetic oligonucleotide
caaaauccauacaucacac

SEQ ID NO: 1189383 - RNA, 19 nt, Artificial Sequence
  Description of Artificial Sequence: Synthetic oligonucleotide
agcuuuagcuuuuacaaau

SEQ ID NO: 1189384 - RNA, 19 nt, Artificial Sequence
  Description of Artificial Sequence: Synthetic oligonucleotide
uggagugauacuuuuaauu

SEQ ID NO: 1189385 - RNA, 19 nt, Artificial Sequence
  Description of Artificial Sequence: Synthetic oligonucleotide
uauauaauagaaggcacau

SEQ ID NO: 1189386 - RNA, 19 nt, Artificial Sequence
  Description of Artificial Sequence: Synthetic oligonucleotide
uucuagaugcgaauuuaug

SEQ ID NO: 1189387 - RNA, 19 nt, Artificial Sequence
  Description of Artificial Sequence: Synthetic oligonucleotide
aaagauucacgcauaacau

SEQ ID NO: 1189388 - RNA, 19 nt, Artificial Sequence
  Description of Artificial Sequence: Synthetic oligonucleotide
uuauguccgaacuuaucca

SEQ ID NO: 1189389 - RNA, 19 nt, Artificial Sequence
  Description of Artificial Sequence: Synthetic oligonucleotide
acuccugugaaacugucca

SEQ ID NO: 1189390 - RNA, 19 nt, Artificial Sequence
  Description of Artificial Sequence: Synthetic oligonucleotide
auuaguucagauaucaaau

SEQ ID NO: 1189391 - RNA, 19 nt, Artificial Sequence
  Description of Artificial Sequence: Synthetic oligonucleotide
ucuuauuugguagaccagu

SEQ ID NO: 1189392 - RNA, 19 nt, Artificial Sequence
  Description of Artificial Sequence: Synthetic oligonucleotide
auacccaucuuucacauuu

SEQ ID NO: 1189393 - RNA, 19 nt, Artificial Sequence
  Description of Artificial Sequence: Synthetic oligonucleotide
uuucguauccgccuccugu

SEQ ID NO: 1189394 - RNA, 19 nt, Artificial Sequence
  Description of Artificial Sequence: Synthetic oligonucleotide
uccggauugccacacagac

SEQ ID NO: 1189395 - RNA, 19 nt, Artificial Sequence
  Description of Artificial Sequence: Synthetic oligonucleotide
caaugaguagacuccaaac

SEQ ID NO: 1189396 - RNA, 19 nt, Artificial Sequence
  Description of Artificial Sequence: Synthetic oligonucleotide
uuugguagaccaguaagcu

SEQ ID NO: 1189397 - RNA, 19 nt, Artificial Sequence
  Description of Artificial Sequence: Synthetic oligonucleotide
uaauaaugugcagaaccag

SEQ ID NO: 1189398 - RNA, 19 nt, Artificial Sequence
  Description of Artificial Sequence: Synthetic oligonucleotide
uauccacucuuucuguacc

SEQ ID NO: 1189399 - RNA, 19 nt, Artificial Sequence
  Description of Artificial Sequence: Synthetic oligonucleotide
aaucggagugcaauuuugg

SEQ ID NO: 1189400 - RNA, 19 nt, Artificial Sequence
  Description of Artificial Sequence: Synthetic oligonucleotide
ucaccaugaccuauucuag

SEQ ID NO: 1189401 - RNA, 19 nt, Artificial Sequence
  Description of Artificial Sequence: Synthetic oligonucleotide
uucaacgccucgcucuugg

SEQ ID NO: 1189402 - RNA, 19 nt, Artificial Sequence
  Description of Artificial Sequence: Synthetic oligonucleotide
uucacgcauaacaugaaua

SEQ ID NO: 1189403 - RNA, 19 nt, Artificial Sequence
  Description of Artificial Sequence: Synthetic oligonucleotide
aucacacuacuauauugag

SEQ ID NO: 1189404 - RNA, 19 nt, Artificial Sequence
  Description of Artificial Sequence: Synthetic oligonucleotide
acuuaucuagagcucaagu

SEQ ID NO: 1189405 - RNA, 19 nt, Artificial Sequence
  Description of Artificial Sequence: Synthetic oligonucleotide
uuuauauaaucagcaucag

SEQ ID NO: 1189406 - RNA, 19 nt, Artificial Sequence
  Description of Artificial Sequence: Synthetic oligonucleotide
uagaccaguaagcugugac

SEQ ID NO: 1189407 - RNA, 19 nt, Artificial Sequence
  Description of Artificial Sequence: Synthetic oligonucleotide
cucuuaauucauugaaaac

SEQ ID NO: 1189408 - RNA, 19 nt, Artificial Sequence
  Description of Artificial Sequence: Synthetic oligonucleotide
ugagaugucuuauuuggua

SEQ ID NO: 1189409 - RNA, 19 nt, Artificial Sequence
  Description of Artificial Sequence: Synthetic oligonucleotide
acaaaaccauauuagcuau

SEQ ID NO: 1189410 - RNA, 19 nt, Artificial Sequence
  Description of Artificial Sequence: Synthetic oligonucleotide
agauaauccaaagcaacug

SEQ ID NO: 1189411 - RNA, 19 nt, Artificial Sequence
  Description of Artificial Sequence: Synthetic oligonucleotide
acucaagagucuaagaugu

SEQ ID NO: 1189412 - RNA, 19 nt, Artificial Sequence
  Description of Artificial Sequence: Synthetic oligonucleotide
uucacuuaucuagagcuca

SEQ ID NO: 1189413 - RNA, 19 nt, Artificial Sequence
  Description of Artificial Sequence: Synthetic oligonucleotide
uaugauacgcaucgucacu

SEQ ID NO: 1189414 - RNA, 19 nt, Artificial Sequence
  Description of Artificial Sequence: Synthetic oligonucleotide
uauguccgaacuuauccac

SEQ ID NO: 1189415 - RNA, 19 nt, Artificial Sequence
  Description of Artificial Sequence: Synthetic oligonucleotide
ucuaagauguuaguucaac

SEQ ID NO: 1189416 - RNA, 19 nt, Artificial Sequence
  Description of Artificial Sequence: Synthetic oligonucleotide
agauucacgcauaacauga

SEQ ID NO: 1189417 - RNA, 19 nt, Artificial Sequence
  Description of Artificial Sequence: Synthetic oligonucleotide
ucggagugcaauuuuggcu

SEQ ID NO: 1189418 - RNA, 19 nt, Artificial Sequence
  Description of Artificial Sequence: Synthetic oligonucleotide
cauggguuuugccucaacc

SEQ ID NO: 1189419 - RNA, 19 nt, Artificial Sequence
  Description of Artificial Sequence: Synthetic oligonucleotide
aagcaacugucguaagcag

SEQ ID NO: 1189420 - RNA, 19 nt, Artificial Sequence
  Description of Artificial Sequence: Synthetic oligonucleotide
cuaagaaagacagcucggc

SEQ ID NO: 1189421 - RNA, 19 nt, Artificial Sequence
  Description of Artificial Sequence: Synthetic oligonucleotide
guguuagaccagcucaugg

SEQ ID NO: 1189422 - RNA, 19 nt, Artificial Sequence
  Description of Artificial Sequence: Synthetic oligonucleotide
cuauuucacuuaucuagag

SEQ ID NO: 1189423 - RNA, 19 nt, Artificial Sequence
  Description of Artificial Sequence: Synthetic oligonucleotide
aagagucuaagauguuagu

SEQ ID NO: 1189424 - RNA, 19 nt, Artificial Sequence
  Description of Artificial Sequence: Synthetic oligonucleotide
guucuaaccaaugaguaga

SEQ ID NO: 1189425 - RNA, 19 nt, Artificial Sequence
  Description of Artificial Sequence: Synthetic oligonucleotide
gagcuugcaaaguuaagga

SEQ ID NO: 1189426 - RNA, 19 nt, Artificial Sequence
  Description of Artificial Sequence: Synthetic oligonucleotide
caaagcaacugucguaagc

SEQ ID NO: 1189427 - RNA, 19 nt, Artificial Sequence
  Description of Artificial Sequence: Synthetic oligonucleotide
uugaauggcuccugucagg

SEQ ID NO: 1189428 - RNA, 19 nt, Artificial Sequence
  Description of Artificial Sequence: Synthetic oligonucleotide
ucuccggauugccacacag

SEQ ID NO: 1189429 - RNA, 19 nt, Artificial Sequence
  Description of Artificial Sequence: Synthetic oligonucleotide
agcaaaagaaugucuaaua

SEQ ID NO: 1189430 - RNA, 19 nt, Artificial Sequence
  Description of Artificial Sequence: Synthetic oligonucleotide
acuaaaugaauuaguucag

SEQ ID NO: 1189431 - RNA, 19 nt, Artificial Sequence
  Description of Artificial Sequence: Synthetic oligonucleotide
ugucaggacaagcuuaaua

SEQ ID NO: 1189432 - RNA, 19 nt, Artificial Sequence
  Description of Artificial Sequence: Synthetic oligonucleotide
auauaaucagcaucagcau

SEQ ID NO: 1189433 - RNA, 19 nt, Artificial Sequence
  Description of Artificial Sequence: Synthetic oligonucleotide
guuaguucaacuucuaaau

SEQ ID NO: 1189434 - RNA, 19 nt, Artificial Sequence
  Description of Artificial Sequence: Synthetic oligonucleotide
ugaugggagaaccuuuuau

SEQ ID NO: 1189435 - RNA, 19 nt, Artificial Sequence
  Description of Artificial Sequence: Synthetic oligonucleotide
gaaucugcggaggaaucgg

SEQ ID NO: 1189436 - RNA, 19 nt, Artificial Sequence
  Description of Artificial Sequence: Synthetic oligonucleotide
aguaagcugugacauaaaa

SEQ ID NO: 1189437 - RNA, 19 nt, Artificial Sequence
  Description of Artificial Sequence: Synthetic oligonucleotide
caucacacuacuauauuga

SEQ ID NO: 1189438 - RNA, 19 nt, Artificial Sequence
  Description of Artificial Sequence: Synthetic oligonucleotide
cacacuacuauauugagau

SEQ ID NO: 1189439 - RNA, 19 nt, Artificial Sequence
  Description of Artificial Sequence: Synthetic oligonucleotide
cugacaaagcaaacugccc

SEQ ID NO: 1189440 - RNA, 19 nt, Artificial Sequence
  Description of Artificial Sequence: Synthetic oligonucleotide
uuggcaaggugcaauuccu

SEQ ID NO: 1189441 - RNA, 19 nt, Artificial Sequence
  Description of Artificial Sequence: Synthetic oligonucleotide
gucguaagcagcuggagga

SEQ ID NO: 1189442 - RNA, 19 nt, Artificial Sequence
  Description of Artificial Sequence: Synthetic oligonucleotide
gauaauccaaagcaacugu

SEQ ID NO: 1189443 - RNA, 19 nt, Artificial Sequence
  Description of Artificial Sequence: Synthetic oligonucleotide
agcaacugucguaagcagc

SEQ ID NO: 1189444 - RNA, 19 nt, Artificial Sequence
  Description of Artificial Sequence: Synthetic oligonucleotide
uaauacccaucuuucacau

SEQ ID NO: 1189445 - RNA, 19 nt, Artificial Sequence
  Description of Artificial Sequence: Synthetic oligonucleotide
aacgccucgcucuuggaau

SEQ ID NO: 1189446 - RNA, 19 nt, Artificial Sequence
  Description of Artificial Sequence: Synthetic oligonucleotide
ugcgaauuuauguccgaac

SEQ ID NO: 1189447 - RNA, 19 nt, Artificial Sequence
  Description of Artificial Sequence: Synthetic oligonucleotide
uuuggcaguaauacccauc

SEQ ID NO: 1189448 - RNA, 19 nt, Artificial Sequence
  Description of Artificial Sequence: Synthetic oligonucleotide
ugggagaauuuagaaagca

SEQ ID NO: 1189449 - RNA, 19 nt, Artificial Sequence
  Description of Artificial Sequence: Synthetic oligonucleotide
uaacucuagcuuuagcuuu

SEQ ID NO: 1189450 - RNA, 19 nt, Artificial Sequence
  Description of Artificial Sequence: Synthetic oligonucleotide
agauaucaaauagaacugu

SEQ ID NO: 1189451 - RNA, 19 nt, Artificial Sequence
  Description of Artificial Sequence: Synthetic oligonucleotide
acaaccaaugagauucuuc

SEQ ID NO: 1189452 - RNA, 19 nt, Artificial Sequence
  Description of Artificial Sequence: Synthetic oligonucleotide
ugccacacagacaccguag

SEQ ID NO: 1189453 - RNA, 19 nt, Artificial Sequence
  Description of Artificial Sequence: Synthetic oligonucleotide
uucuaaccaaugaguagac

SEQ ID NO: 1189454 - RNA, 19 nt, Artificial Sequence
  Description of Artificial Sequence: Synthetic oligonucleotide
acauacucaagagucuaag

SEQ ID NO: 1189455 - RNA, 19 nt, Artificial Sequence
  Description of Artificial Sequence: Synthetic oligonucleotide
accauauuagcuauaaaua

SEQ ID NO: 1189456 - RNA, 19 nt, Artificial Sequence
  Description of Artificial Sequence: Synthetic oligonucleotide
ugucuaagaaagacagcuc

SEQ ID NO: 1189457 - RNA, 19 nt, Artificial Sequence
  Description of Artificial Sequence: Synthetic oligonucleotide
augguauaaaacuggcaau

SEQ ID NO: 1189458 - RNA, 19 nt, Artificial Sequence
  Description of Artificial Sequence: Synthetic oligonucleotide
agaugcgaauuuauguccg

SEQ ID NO: 1189459 - RNA, 19 nt, Artificial Sequence
  Description of Artificial Sequence: Synthetic oligonucleotide
caauacuccugugaaacug

SEQ ID NO: 1189460 - RNA, 19 nt, Artificial Sequence
  Description of Artificial Sequence: Synthetic oligonucleotide
agauaaauuuaaucucuua

SEQ ID NO: 1189461 - RNA, 19 nt, Artificial Sequence
  Description of Artificial Sequence: Synthetic oligonucleotide
ugaccuauucuagaugcga

SEQ ID NO: 1189462 - RNA, 19 nt, Artificial Sequence
  Description of Artificial Sequence: Synthetic oligonucleotide
acuacuauauugagauguc

SEQ ID NO: 1189463 - RNA, 19 nt, Artificial Sequence
  Description of Artificial Sequence: Synthetic oligonucleotide
ucuuggaaucugcggagga

SEQ ID NO: 1189464 - RNA, 19 nt, Artificial Sequence
  Description of Artificial Sequence: Synthetic oligonucleotide
uccugugaaacuguccagc

SEQ ID NO: 1189465 - RNA, 19 nt, Artificial Sequence
  Description of Artificial Sequence: Synthetic oligonucleotide
cuugcaaaguuaaggagaa

SEQ ID NO: 1189466 - RNA, 19 nt, Artificial Sequence
  Description of Artificial Sequence: Synthetic oligonucleotide
uccucgagccucuuuauau

SEQ ID NO: 1189467 - RNA, 19 nt, Artificial Sequence
  Description of Artificial Sequence: Synthetic oligonucleotide
gaugucuuauuugguagac

SEQ ID NO: 1189468 - RNA, 19 nt, Artificial Sequence
  Description of Artificial Sequence: Synthetic oligonucleotide
agaccaguaagcugugaca

SEQ ID NO: 1189469 - RNA, 19 nt, Artificial Sequence
  Description of Artificial Sequence: Synthetic oligonucleotide
uuauucaccaugaccuauu

SEQ ID NO: 1189470 - RNA, 19 nt, Artificial Sequence
  Description of Artificial Sequence: Synthetic oligonucleotide
auuuauguccgaacuuauc

SEQ ID NO: 1189471 - RNA, 19 nt, Artificial Sequence
  Description of Artificial Sequence: Synthetic oligonucleotide
auacgcaucgucacuuucg

SEQ ID NO: 1189472 - RNA, 19 nt, Artificial Sequence
  Description of Artificial Sequence: Synthetic oligonucleotide
gaaucggagugcaauuuug

SEQ ID NO: 1189473 - RNA, 19 nt, Artificial Sequence
  Description of Artificial Sequence: Synthetic oligonucleotide
ucaauacuccugugaaacu

SEQ ID NO: 1189474 - RNA, 19 nt, Artificial Sequence
  Description of Artificial Sequence: Synthetic oligonucleotide
acuauuucacuuaucuaga

SEQ ID NO: 1189475 - RNA, 19 nt, Artificial Sequence
  Description of Artificial Sequence: Synthetic oligonucleotide
aaaacaccugacaaagcaa

SEQ ID NO: 1189476 - RNA, 19 nt, Artificial Sequence
  Description of Artificial Sequence: Synthetic oligonucleotide
acagacaccguagauuucu

SEQ ID NO: 1189477 - RNA, 19 nt, Artificial Sequence
  Description of Artificial Sequence: Synthetic oligonucleotide
cagcucggcguuaugauac

SEQ ID NO: 1189478 - RNA, 19 nt, Artificial Sequence
  Description of Artificial Sequence: Synthetic oligonucleotide
accaugaccuauucuagau

SEQ ID NO: 1189479 - RNA, 19 nt, Artificial Sequence
  Description of Artificial Sequence: Synthetic oligonucleotide
ucgcucuuggaaucugcgg

SEQ ID NO: 1189480 - RNA, 19 nt, Artificial Sequence
  Description of Artificial Sequence: Synthetic oligonucleotide
agaaugucuaauaaacuuu

SEQ ID NO: 1189481 - RNA, 19 nt, Artificial Sequence
  Description of Artificial Sequence: Synthetic oligonucleotide
guagauuucuuguaauaua

SEQ ID NO: 1189482 - RNA, 19 nt, Artificial Sequence
  Description of Artificial Sequence: Synthetic oligonucleotide
uacuccugugaaacugucc

SEQ ID NO: 1189483 - RNA, 19 nt, Artificial Sequence
  Description of Artificial Sequence: Synthetic oligonucleotide
aagcagagcuugcaaaguu

SEQ ID NO: 1189484 - RNA, 19 nt, Artificial Sequence
  Description of Artificial Sequence: Synthetic oligonucleotide
ggcaaggugcaauuccucg

SEQ ID NO: 1189485 - RNA, 19 nt, Artificial Sequence
  Description of Artificial Sequence: Synthetic oligonucleotide
uuauuucaacgccucgcuc

SEQ ID NO: 1189486 - RNA, 19 nt, Artificial Sequence
  Description of Artificial Sequence: Synthetic oligonucleotide
uauucaccaugaccuauuc

SEQ ID NO: 1189487 - RNA, 19 nt, Artificial Sequence
  Description of Artificial Sequence: Synthetic oligonucleotide
acgcauaacaugaauauua

SEQ ID NO: 1189488 - RNA, 19 nt, Artificial Sequence
  Description of Artificial Sequence: Synthetic oligonucleotide
aauuuauguccgaacuuau

SEQ ID NO: 1189489 - RNA, 19 nt, Artificial Sequence
  Description of Artificial Sequence: Synthetic oligonucleotide
ugcuauacauggguuuugc

SEQ ID NO: 1189490 - RNA, 19 nt, Artificial Sequence
  Description of Artificial Sequence: Synthetic oligonucleotide
ucugcggaggaaucggagu

SEQ ID NO: 1189491 - RNA, 19 nt, Artificial Sequence
  Description of Artificial Sequence: Synthetic oligonucleotide
cucgcucuuggaaucugcg

SEQ ID NO: 1189492 - RNA, 19 nt, Artificial Sequence
  Description of Artificial Sequence: Synthetic oligonucleotide
uguccgaacuuauccacuc

SEQ ID NO: 1189493 - RNA, 19 nt, Artificial Sequence
  Description of Artificial Sequence: Synthetic oligonucleotide
uaaugugcagaaccaguuu

SEQ ID NO: 1189494 - RNA, 19 nt, Artificial Sequence
  Description of Artificial Sequence: Synthetic oligonucleotide
caaacugcccaguacuuca

SEQ ID NO: 1189495 - RNA, 19 nt, Artificial Sequence
  Description of Artificial Sequence: Synthetic oligonucleotide
aaccaaugaguagacucca

SEQ ID NO: 1189496 - RNA, 19 nt, Artificial Sequence
  Description of Artificial Sequence: Synthetic oligonucleotide
gaacuuauccacucuuucu

SEQ ID NO: 1189497 - RNA, 19 nt, Artificial Sequence
  Description of Artificial Sequence: Synthetic oligonucleotide
gacaccguagauuucuugu

SEQ ID NO: 1189498 - RNA, 19 nt, Artificial Sequence
  Description of Artificial Sequence: Synthetic oligonucleotide
ugacucaguguuagaccag

SEQ ID NO: 1189499 - RNA, 19 nt, Artificial Sequence
  Description of Artificial Sequence: Synthetic oligonucleotide
agucaacuauuucacuuau

SEQ ID NO: 1189500 - RNA, 19 nt, Artificial Sequence
  Description of Artificial Sequence: Synthetic oligonucleotide
uauggggcaucaccuguga

SEQ ID NO: 1189501 - RNA, 19 nt, Artificial Sequence
  Description of Artificial Sequence: Synthetic oligonucleotide
auucacgcauaacaugaau

SEQ ID NO: 1189502 - RNA, 19 nt, Artificial Sequence
  Description of Artificial Sequence: Synthetic oligonucleotide
gacucaguguuagaccagc

SEQ ID NO: 1189503 - RNA, 19 nt, Artificial Sequence
  Description of Artificial Sequence: Synthetic oligonucleotide
auacaucacacuacuauau

SEQ ID NO: 1189504 - RNA, 19 nt, Artificial Sequence
  Description of Artificial Sequence: Synthetic oligonucleotide
agagucuaagauguuaguu

SEQ ID NO: 1189505 - RNA, 19 nt, Artificial Sequence
  Description of Artificial Sequence: Synthetic oligonucleotide
cuucaauguuaggauaaac

SEQ ID NO: 1189506 - RNA, 19 nt, Artificial Sequence
  Description of Artificial Sequence: Synthetic oligonucleotide
guucaacuucuaaauggag

SEQ ID NO: 1189507 - RNA, 19 nt, Artificial Sequence
  Description of Artificial Sequence: Synthetic oligonucleotide
auaauagaaggcacauacu

SEQ ID NO: 1189508 - RNA, 19 nt, Artificial Sequence
  Description of Artificial Sequence: Synthetic oligonucleotide
augagauucuucaauguua

SEQ ID NO: 1189509 - RNA, 19 nt, Artificial Sequence
  Description of Artificial Sequence: Synthetic oligonucleotide
cauacucaagagucuaaga

SEQ ID NO: 1189510 - RNA, 19 nt, Artificial Sequence
  Description of Artificial Sequence: Synthetic oligonucleotide
ucacuuaucuagagcucaa

SEQ ID NO: 1189511 - RNA, 19 nt, Artificial Sequence
  Description of Artificial Sequence: Synthetic oligonucleotide
cuggauuuaaaauaauguu

SEQ ID NO: 1189512 - RNA, 19 nt, Artificial Sequence
  Description of Artificial Sequence: Synthetic oligonucleotide
cucaguguuagaccagcuc

SEQ ID NO: 1189513 - RNA, 19 nt, Artificial Sequence
  Description of Artificial Sequence: Synthetic oligonucleotide
ucggcguuaugauacgcau

SEQ ID NO: 1189514 - RNA, 19 nt, Artificial Sequence
  Description of Artificial Sequence: Synthetic oligonucleotide
auguuaguucaacuucuaa

SEQ ID NO: 1189515 - RNA, 19 nt, Artificial Sequence
  Description of Artificial Sequence: Synthetic oligonucleotide
aaucagcaucagcauguau

SEQ ID NO: 1189516 - RNA, 19 nt, Artificial Sequence
  Description of Artificial Sequence: Synthetic oligonucleotide
cacuacuauauugagaugu

SEQ ID NO: 1189517 - RNA, 19 nt, Artificial Sequence
  Description of Artificial Sequence: Synthetic oligonucleotide
caucgucacuuucguaucc

SEQ ID NO: 1189518 - RNA, 19 nt, Artificial Sequence
  Description of Artificial Sequence: Synthetic oligonucleotide
ugaguaugacucaguguua

SEQ ID NO: 1189519 - RNA, 19 nt, Artificial Sequence
  Description of Artificial Sequence: Synthetic oligonucleotide
auaaugugcagaaccaguu

SEQ ID NO: 1189520 - RNA, 19 nt, Artificial Sequence
  Description of Artificial Sequence: Synthetic oligonucleotide
uuggagugauacuuuuaau

SEQ ID NO: 1189521 - RNA, 19 nt, Artificial Sequence
  Description of Artificial Sequence: Synthetic oligonucleotide
uuggaaucugcggaggaau

SEQ ID NO: 1189522 - RNA, 19 nt, Artificial Sequence
  Description of Artificial Sequence: Synthetic oligonucleotide
agacaccguagauuucuug

SEQ ID NO: 1189523 - RNA, 19 nt, Artificial Sequence
  Description of Artificial Sequence: Synthetic oligonucleotide
accuauucuagaugcgaau

SEQ ID NO: 1189524 - RNA, 19 nt, Artificial Sequence
  Description of Artificial Sequence: Synthetic oligonucleotide
cugcggaggaaucggagug

SEQ ID NO: 1189525 - RNA, 19 nt, Artificial Sequence
  Description of Artificial Sequence: Synthetic oligonucleotide
auacauggguuuugccuca

SEQ ID NO: 1189526 - RNA, 19 nt, Artificial Sequence
  Description of Artificial Sequence: Synthetic oligonucleotide
ugccucaaccugaguauga

SEQ ID NO: 1189527 - RNA, 19 nt, Artificial Sequence
  Description of Artificial Sequence: Synthetic oligonucleotide
uacccaucuuucacauuug

SEQ ID NO: 1189528 - RNA, 19 nt, Artificial Sequence
  Description of Artificial Sequence: Synthetic oligonucleotide
aguaugacucaguguuaga

SEQ ID NO: 1189529 - RNA, 19 nt, Artificial Sequence
  Description of Artificial Sequence: Synthetic oligonucleotide
accguagauuucuuguaau

SEQ ID NO: 1189530 - RNA, 19 nt, Artificial Sequence
  Description of Artificial Sequence: Synthetic oligonucleotide
ggaaucugcggaggaaucg

SEQ ID NO: 1189531 - RNA, 19 nt, Artificial Sequence
  Description of Artificial Sequence: Synthetic oligonucleotide
ucgucacuuucguauccgc

SEQ ID NO: 1189532 - RNA, 19 nt, Artificial Sequence
  Description of Artificial Sequence: Synthetic oligonucleotide
ucuaaccaaugaguagacu

SEQ ID NO: 1189533 - RNA, 19 nt, Artificial Sequence
  Description of Artificial Sequence: Synthetic oligonucleotide
caaccugaguaugacucag

SEQ ID NO: 1189534 - RNA, 19 nt, Artificial Sequence
  Description of Artificial Sequence: Synthetic oligonucleotide
cugcaacuugaauggcucc

SEQ ID NO: 1189535 - RNA, 19 nt, Artificial Sequence
  Description of Artificial Sequence: Synthetic oligonucleotide
cuuauuugguagaccagua

SEQ ID NO: 1189536 - RNA, 19 nt, Artificial Sequence
  Description of Artificial Sequence: Synthetic oligonucleotide
acacuacuauauugagaug

SEQ ID NO: 1189537 - RNA, 19 nt, Artificial Sequence
  Description of Artificial Sequence: Synthetic oligonucleotide
agugcuauacauggguuuu

SEQ ID NO: 1189538 - RNA, 19 nt, Artificial Sequence
  Description of Artificial Sequence: Synthetic oligonucleotide
gcagugauccucucagaag

SEQ ID NO: 1189539 - RNA, 19 nt, Artificial Sequence
  Description of Artificial Sequence: Synthetic oligonucleotide
aauacccaucuuucacauu

SEQ ID NO: 1189540 - RNA, 19 nt, Artificial Sequence
  Description of Artificial Sequence: Synthetic oligonucleotide
acauggguuuugccucaac

SEQ ID NO: 1189541 - RNA, 19 nt, Artificial Sequence
  Description of Artificial Sequence: Synthetic oligonucleotide
cuaagauguuaguucaacu

SEQ ID NO: 1189542 - RNA, 19 nt, Artificial Sequence
  Description of Artificial Sequence: Synthetic oligonucleotide
aaucuacucuguacacaug

SEQ ID NO: 1189543 - RNA, 19 nt, Artificial Sequence
  Description of Artificial Sequence: Synthetic oligonucleotide
gaguagacuccaaacugga

SEQ ID NO: 1189544 - RNA, 19 nt, Artificial Sequence
  Description of Artificial Sequence: Synthetic oligonucleotide
caauguuaggauaaacaau

SEQ ID NO: 1189545 - RNA, 19 nt, Artificial Sequence
  Description of Artificial Sequence: Synthetic oligonucleotide
augaccuauucuagaugcg

SEQ ID NO: 1189546 - RNA, 19 nt, Artificial Sequence
  Description of Artificial Sequence: Synthetic oligonucleotide
gccucuuuauauaaucagc

SEQ ID NO: 1189547 - RNA, 19 nt, Artificial Sequence
  Description of Artificial Sequence: Synthetic oligonucleotide
gucuuauuugguagaccag

SEQ ID NO: 1189548 - RNA, 19 nt, Artificial Sequence
  Description of Artificial Sequence: Synthetic oligonucleotide
auuucaacgccucgcucuu

SEQ ID NO: 1189549 - RNA, 19 nt, Artificial Sequence
  Description of Artificial Sequence: Synthetic oligonucleotide
aguguuagaccagcucaug

SEQ ID NO: 1189550 - RNA, 19 nt, Artificial Sequence
  Description of Artificial Sequence: Synthetic oligonucleotide
agcucggcguuaugauacg

SEQ ID NO: 1189551 - RNA, 19 nt, Artificial Sequence
  Description of Artificial Sequence: Synthetic oligonucleotide
uugccucaaccugaguaug

SEQ ID NO: 1189552 - RNA, 19 nt, Artificial Sequence
  Description of Artificial Sequence: Synthetic oligonucleotide
agacagcucggcguuauga

SEQ ID NO: 1189553 - RNA, 19 nt, Artificial Sequence
  Description of Artificial Sequence: Synthetic oligonucleotide
acuggacaaccaaugagau

SEQ ID NO: 1189554 - RNA, 19 nt, Artificial Sequence
  Description of Artificial Sequence: Synthetic oligonucleotide
auguuaggauaaacaaugu

SEQ ID NO: 1189555 - RNA, 19 nt, Artificial Sequence
  Description of Artificial Sequence: Synthetic oligonucleotide
aaucugcggaggaaucgga

SEQ ID NO: 1189556 - RNA, 19 nt, Artificial Sequence
  Description of Artificial Sequence: Synthetic oligonucleotide
augauacgcaucgucacuu

SEQ ID NO: 1189557 - RNA, 19 nt, Artificial Sequence
  Description of Artificial Sequence: Synthetic oligonucleotide
ugauuccuuucuccggauu

SEQ ID NO: 1189558 - RNA, 19 nt, Artificial Sequence
  Description of Artificial Sequence: Synthetic oligonucleotide
aacucuagcuuuagcuuuu

SEQ ID NO: 1189559 - RNA, 19 nt, Artificial Sequence
  Description of Artificial Sequence: Synthetic oligonucleotide
uggcaaggugcaauuccuc

SEQ ID NO: 1189560 - RNA, 19 nt, Artificial Sequence
  Description of Artificial Sequence: Synthetic oligonucleotide
acgcacacucacacagugc

SEQ ID NO: 1189561 - RNA, 19 nt, Artificial Sequence
  Description of Artificial Sequence: Synthetic oligonucleotide
auccucucagaagugaguu

SEQ ID NO: 1189562 - RNA, 19 nt, Artificial Sequence
  Description of Artificial Sequence: Synthetic oligonucleotide
uuugcauauggggcaucac

SEQ ID NO: 1189563 - RNA, 19 nt, Artificial Sequence
  Description of Artificial Sequence: Synthetic oligonucleotide
gcuauacauggguuuugcc

SEQ ID NO: 1189564 - RNA, 19 nt, Artificial Sequence
  Description of Artificial Sequence: Synthetic oligonucleotide
uaccacuuaugaugguaua

SEQ ID NO: 1189565 - RNA, 19 nt, Artificial Sequence
  Description of Artificial Sequence: Synthetic oligonucleotide
cacagugcuauacaugggu

SEQ ID NO: 1189566 - RNA, 19 nt, Artificial Sequence
  Description of Artificial Sequence: Synthetic oligonucleotide
gcaauuauuucaacgccuc

SEQ ID NO: 1189567 - RNA, 19 nt, Artificial Sequence
  Description of Artificial Sequence: Synthetic oligonucleotide
caguacuucaaguaauaau

SEQ ID NO: 1189568 - RNA, 19 nt, Artificial Sequence
  Description of Artificial Sequence: Synthetic oligonucleotide
acaaagcaaacugcccagu

SEQ ID NO: 1189569 - RNA, 19 nt, Artificial Sequence
  Description of Artificial Sequence: Synthetic oligonucleotide
acacagugcuauacauggg

SEQ ID NO: 1189570 - RNA, 19 nt, Artificial Sequence
  Description of Artificial Sequence: Synthetic oligonucleotide
gaccuauucuagaugcgaa

SEQ ID NO: 1189571 - RNA, 19 nt, Artificial Sequence
  Description of Artificial Sequence: Synthetic oligonucleotide
cacuuucguauccgccucc

SEQ ID NO: 1189572 - RNA, 19 nt, Artificial Sequence
  Description of Artificial Sequence: Synthetic oligonucleotide
auuccucgagccucuuuau

SEQ ID NO: 1189573 - RNA, 19 nt, Artificial Sequence
  Description of Artificial Sequence: Synthetic oligonucleotide
auggggcaucaccugugag

SEQ ID NO: 1189574 - RNA, 19 nt, Artificial Sequence
  Description of Artificial Sequence: Synthetic oligonucleotide
cucgagccucuuuauauaa

SEQ ID NO: 1189575 - RNA, 19 nt, Artificial Sequence
  Description of Artificial Sequence: Synthetic oligonucleotide
cucggcguuaugauacgca

SEQ ID NO: 1189576 - RNA, 19 nt, Artificial Sequence
  Description of Artificial Sequence: Synthetic oligonucleotide
auuucacuucauacuacaa

SEQ ID NO: 1189577 - RNA, 19 nt, Artificial Sequence
  Description of Artificial Sequence: Synthetic oligonucleotide
uuccucgagccucuuuaua

SEQ ID NO: 1189578 - RNA, 19 nt, Artificial Sequence
  Description of Artificial Sequence: Synthetic oligonucleotide
cuuauccacucuuucugua

SEQ ID NO: 1189579 - RNA, 19 nt, Artificial Sequence
  Description of Artificial Sequence: Synthetic oligonucleotide
acagcucggcguuaugaua

SEQ ID NO: 1189580 - RNA, 19 nt, Artificial Sequence
  Description of Artificial Sequence: Synthetic oligonucleotide
gcgaauuuauguccgaacu

SEQ ID NO: 1189581 - RNA, 19 nt, Artificial Sequence
  Description of Artificial Sequence: Synthetic oligonucleotide
gaccaguaagcugugacau

SEQ ID NO: 1189582 - RNA, 19 nt, Artificial Sequence
  Description of Artificial Sequence: Synthetic oligonucleotide
aucugcggaggaaucggag

SEQ ID NO: 1189583 - RNA, 19 nt, Artificial Sequence
  Description of Artificial Sequence: Synthetic oligonucleotide
caccaugaccuauucuaga

SEQ ID NO: 1189584 - RNA, 19 nt, Artificial Sequence
  Description of Artificial Sequence: Synthetic oligonucleotide
gcagugcacaagcacugag

SEQ ID NO: 1189585 - RNA, 19 nt, Artificial Sequence
  Description of Artificial Sequence: Synthetic oligonucleotide
cucuuuauauaaucagcau

SEQ ID NO: 1189586 - RNA, 19 nt, Artificial Sequence
  Description of Artificial Sequence: Synthetic oligonucleotide
aaccugaguaugacucagu

SEQ ID NO: 1189587 - RNA, 19 nt, Artificial Sequence
  Description of Artificial Sequence: Synthetic oligonucleotide
cugucguaagcagcuggag

SEQ ID NO: 1189588 - RNA, 19 nt, Artificial Sequence
  Description of Artificial Sequence: Synthetic oligonucleotide
uccacucuuucuguaccaa

SEQ ID NO: 1189589 - RNA, 19 nt, Artificial Sequence
  Description of Artificial Sequence: Synthetic oligonucleotide
guaagcugugacauaaaau

SEQ ID NO: 1189590 - RNA, 19 nt, Artificial Sequence
  Description of Artificial Sequence: Synthetic oligonucleotide
gauucacgcauaacaugaa

SEQ ID NO: 1189591 - RNA, 19 nt, Artificial Sequence
  Description of Artificial Sequence: Synthetic oligonucleotide
gcauauggggcaucaccug

SEQ ID NO: 1189592 - RNA, 19 nt, Artificial Sequence
  Description of Artificial Sequence: Synthetic oligonucleotide
uccucucagaagugaguuu

SEQ ID NO: 1189593 - RNA, 19 nt, Artificial Sequence
  Description of Artificial Sequence: Synthetic oligonucleotide
ggcagugauccucucagaa

SEQ ID NO: 1189594 - RNA, 19 nt, Artificial Sequence
  Description of Artificial Sequence: Synthetic oligonucleotide
aggacaagcuuaauauguu

SEQ ID NO: 1189595 - RNA, 19 nt, Artificial Sequence
  Description of Artificial Sequence: Synthetic oligonucleotide
uaaucagcaucagcaugua

SEQ ID NO: 1189596 - RNA, 19 nt, Artificial Sequence
  Description of Artificial Sequence: Synthetic oligonucleotide
caccguagauuucuuguaa

SEQ ID NO: 1189597 - RNA, 19 nt, Artificial Sequence
  Description of Artificial Sequence: Synthetic oligonucleotide
cguuaugauacgcaucguc

SEQ ID NO: 1189598 - RNA, 19 nt, Artificial Sequence
  Description of Artificial Sequence: Synthetic oligonucleotide
ucguaagcagcuggaggaa

SEQ ID NO: 1189599 - RNA, 19 nt, Artificial Sequence
  Description of Artificial Sequence: Synthetic oligonucleotide
caaagcaaacugcccagua

SEQ ID NO: 1189600 - RNA, 19 nt, Artificial Sequence
  Description of Artificial Sequence: Synthetic oligonucleotide
acuuucguauccgccuccu

SEQ ID NO: 1189601 - RNA, 19 nt, Artificial Sequence
  Description of Artificial Sequence: Synthetic oligonucleotide
gcaaggugcaauuccucga

SEQ ID NO: 1189602 - RNA, 19 nt, Artificial Sequence
  Description of Artificial Sequence: Synthetic oligonucleotide
auguccgaacuuauccacu

SEQ ID NO: 1189603 - RNA, 19 nt, Artificial Sequence
  Description of Artificial Sequence: Synthetic oligonucleotide
cuuucguauccgccuccug

SEQ ID NO: 1189604 - RNA, 19 nt, Artificial Sequence
  Description of Artificial Sequence: Synthetic oligonucleotide
accaguaagcugugacaua

SEQ ID NO: 1189605 - RNA, 19 nt, Artificial Sequence
  Description of Artificial Sequence: Synthetic oligonucleotide
augcgaauuuauguccgaa

SEQ ID NO: 1189606 - RNA, 19 nt, Artificial Sequence
  Description of Artificial Sequence: Synthetic oligonucleotide
gcuuuaacucuagcuuuag

SEQ ID NO: 1189607 - RNA, 19 nt, Artificial Sequence
  Description of Artificial Sequence: Synthetic oligonucleotide
gugcuauacauggguuuug

SEQ ID NO: 1189608 - RNA, 19 nt, Artificial Sequence
  Description of Artificial Sequence: Synthetic oligonucleotide
acagugcuauacauggguu

SEQ ID NO: 1189609 - RNA, 19 nt, Artificial Sequence
  Description of Artificial Sequence: Synthetic oligonucleotide
ccaugaccuauucuagaug

SEQ ID NO: 1189610 - RNA, 19 nt, Artificial Sequence
  Description of Artificial Sequence: Synthetic oligonucleotide
gaggaaucggagugcaauu

SEQ ID NO: 1189611 - RNA, 19 nt, Artificial Sequence
  Description of Artificial Sequence: Synthetic oligonucleotide
ggcaauuauuucaacgccu

SEQ ID NO: 1189612 - RNA, 19 nt, Artificial Sequence
  Description of Artificial Sequence: Synthetic oligonucleotide
cucagaagugaguuugcau

SEQ ID NO: 1189613 - RNA, 19 nt, Artificial Sequence
  Description of Artificial Sequence: Synthetic oligonucleotide
caucaccugugagggacug

SEQ ID NO: 1189614 - RNA, 19 nt, Artificial Sequence
  Description of Artificial Sequence: Synthetic oligonucleotide
ccauacaucacacuacuau

SEQ ID NO: 1189615 - RNA, 19 nt, Artificial Sequence
  Description of Artificial Sequence: Synthetic oligonucleotide
cuacuauauugagaugucu

SEQ ID NO: 1189616 - RNA, 19 nt, Artificial Sequence
  Description of Artificial Sequence: Synthetic oligonucleotide
uggcaguaauacccaucuu

SEQ ID NO: 1189617 - RNA, 19 nt, Artificial Sequence
  Description of Artificial Sequence: Synthetic oligonucleotide
cgucacuuucguauccgcc

SEQ ID NO: 1189618 - RNA, 19 nt, Artificial Sequence
  Description of Artificial Sequence: Synthetic oligonucleotide
ccaguaagcugugacauaa

SEQ ID NO: 1189619 - RNA, 19 nt, Artificial Sequence
  Description of Artificial Sequence: Synthetic oligonucleotide
gcaacugucguaagcagcu

SEQ ID NO: 1189620 - RNA, 19 nt, Artificial Sequence
  Description of Artificial Sequence: Synthetic oligonucleotide
gaguuggcaaggugcaauu

SEQ ID NO: 1189621 - RNA, 19 nt, Artificial Sequence
  Description of Artificial Sequence: Synthetic oligonucleotide
caacugucguaagcagcug

SEQ ID NO: 1189622 - RNA, 19 nt, Artificial Sequence
  Description of Artificial Sequence: Synthetic oligonucleotide
caacgccucgcucuuggaa

SEQ ID NO: 1189623 - RNA, 19 nt, Artificial Sequence
  Description of Artificial Sequence: Synthetic oligonucleotide
gucuaagauguuaguucaa

SEQ ID NO: 1189624 - RNA, 19 nt, Artificial Sequence
  Description of Artificial Sequence: Synthetic oligonucleotide
gcaaacugcccaguacuuc

SEQ ID NO: 1189625 - RNA, 19 nt, Artificial Sequence
  Description of Artificial Sequence: Synthetic oligonucleotide
cagcucaugggagaauuua

SEQ ID NO: 1189626 - RNA, 19 nt, Artificial Sequence
  Description of Artificial Sequence: Synthetic oligonucleotide
cccaucuuucacauuugga

SEQ ID NO: 1189627 - RNA, 19 nt, Artificial Sequence
  Description of Artificial Sequence: Synthetic oligonucleotide
gguagaccaguaagcugug

SEQ ID NO: 1189628 - RNA, 19 nt, Artificial Sequence
  Description of Artificial Sequence: Synthetic oligonucleotide
accaaugaguagacuccaa

SEQ ID NO: 1189629 - RNA, 19 nt, Artificial Sequence
  Description of Artificial Sequence: Synthetic oligonucleotide
ggaggaaucggagugcaau

SEQ ID NO: 1189630 - RNA, 19 nt, Artificial Sequence
  Description of Artificial Sequence: Synthetic oligonucleotide
caguguuagaccagcucau

SEQ ID NO: 1189631 - RNA, 19 nt, Artificial Sequence
  Description of Artificial Sequence: Synthetic oligonucleotide
caguaagcugugacauaaa

SEQ ID NO: 1189632 - RNA, 19 nt, Artificial Sequence
  Description of Artificial Sequence: Synthetic oligonucleotide
cagugcuauacauggguuu

SEQ ID NO: 1189633 - RNA, 19 nt, Artificial Sequence
  Description of Artificial Sequence: Synthetic oligonucleotide
ccugucaggacaagcuuaa

SEQ ID NO: 1189634 - RNA, 19 nt, Artificial Sequence
  Description of Artificial Sequence: Synthetic oligonucleotide
guagaccaguaagcuguga

SEQ ID NO: 1189635 - RNA, 19 nt, Artificial Sequence
  Description of Artificial Sequence: Synthetic oligonucleotide
cuggaggaaaauccauuuu

SEQ ID NO: 1189636 - RNA, 19 nt, Artificial Sequence
  Description of Artificial Sequence: Synthetic oligonucleotide
ccguagauuucuuguaaua

SEQ ID NO: 1189637 - RNA, 19 nt, Artificial Sequence
  Description of Artificial Sequence: Synthetic oligonucleotide
ggaaucggagugcaauuuu

SEQ ID NO: 1189638 - RNA, 19 nt, Artificial Sequence
  Description of Artificial Sequence: Synthetic oligonucleotide
cugugaaacuguccagcau

SEQ ID NO: 1189639 - RNA, 19 nt, Artificial Sequence
  Description of Artificial Sequence: Synthetic oligonucleotide
gcucggcguuaugauacgc

SEQ ID NO: 1189640 - RNA, 19 nt, Artificial Sequence
  Description of Artificial Sequence: Synthetic oligonucleotide
guuuugccucaaccugagu

SEQ ID NO: 1189641 - RNA, 19 nt, Artificial Sequence
  Description of Artificial Sequence: Synthetic oligonucleotide
ccggauugccacacagaca

SEQ ID NO: 1189642 - RNA, 19 nt, Artificial Sequence
  Description of Artificial Sequence: Synthetic oligonucleotide
gcggaggaaucggagugca

SEQ ID NO: 1189643 - RNA, 19 nt, Artificial Sequence
  Description of Artificial Sequence: Synthetic oligonucleotide
ccucgagccucuuuauaua

SEQ ID NO: 1189644 - RNA, 19 nt, Artificial Sequence
  Description of Artificial Sequence: Synthetic oligonucleotide
cggcguuaugauacgcauc

SEQ ID NO: 1189645 - RNA, 19 nt, Artificial Sequence
  Description of Artificial Sequence: Synthetic oligonucleotide
ccuauucuagaugcgaauu

SEQ ID NO: 1189646 - RNA, 19 nt, Artificial Sequence
  Description of Artificial Sequence: Synthetic oligonucleotide
cgcauaacaugaauauuau

SEQ ID NO: 1189647 - RNA, 19 nt, Artificial Sequence
  Description of Artificial Sequence: Synthetic oligonucleotide
cgaauuuauguccgaacuu

SEQ ID NO: 1189648 - RNA, 19 nt, Artificial Sequence
  Description of Artificial Sequence: Synthetic oligonucleotide
ggagugcaauuuuggcuuu

SEQ ID NO: 1189649 - RNA, 19 nt, Artificial Sequence
  Description of Artificial Sequence: Synthetic oligonucleotide
ccgaacuuauccacucuuu

SEQ ID NO: 1189650 - RNA, 19 nt, Artificial Sequence
  Description of Artificial Sequence: Synthetic oligonucleotide
ccacucuuucuguaccaau

SEQ ID NO: 1189651 - RNA, 19 nt, Artificial Sequence
  Description of Artificial Sequence: Synthetic oligonucleotide
ccacacagacaccguagau

SEQ ID NO: 1189652 - RNA, 19 nt, Artificial Sequence
  Description of Artificial Sequence: Synthetic oligonucleotide
cugucaggacaagcuuaau

SEQ ID NO: 1189653 - RNA, 19 nt, Artificial Sequence
  Description of Artificial Sequence: Synthetic oligonucleotide
gcguuaugauacgcaucgu

SEQ ID NO: 1189654 - RNA, 19 nt, Artificial Sequence
  Description of Artificial Sequence: Synthetic oligonucleotide
cggaggaaucggagugcaa

SEQ ID NO: 1189655 - RNA, 19 nt, Artificial Sequence
  Description of Artificial Sequence: Synthetic oligonucleotide
ucgauaacaaacaugaugc

SEQ ID NO: 1189656 - RNA, 19 nt, Artificial Sequence
  Description of Artificial Sequence: Synthetic oligonucleotide
aacauaaucuuccugcggg

SEQ ID NO: 1189657 - RNA, 19 nt, Artificial Sequence
  Description of Artificial Sequence: Synthetic oligonucleotide
aaguauuuuggccuggagg

SEQ ID NO: 1189658 - RNA, 19 nt, Artificial Sequence
  Description of Artificial Sequence: Synthetic oligonucleotide
ugaguauagagucugaaac

SEQ ID NO: 1189659 - RNA, 19 nt, Artificial Sequence
  Description of Artificial Sequence: Synthetic oligonucleotide
gauuugaucacucuccucc

SEQ ID NO: 1189660 - RNA, 19 nt, Artificial Sequence
  Description of Artificial Sequence: Synthetic oligonucleotide
uauagagucugaaacacug

SEQ ID NO: 1189661 - RNA, 19 nt, Artificial Sequence
  Description of Artificial Sequence: Synthetic oligonucleotide
agaggcuuccucuuuagcc

SEQ ID NO: 1189662 - RNA, 19 nt, Artificial Sequence
  Description of Artificial Sequence: Synthetic oligonucleotide
aacaugaugccaucaacag

SEQ ID NO: 1189663 - RNA, 19 nt, Artificial Sequence
  Description of Artificial Sequence: Synthetic oligonucleotide
aacgauacacuuccggacg

SEQ ID NO: 1189664 - RNA, 19 nt, Artificial Sequence
  Description of Artificial Sequence: Synthetic oligonucleotide
uuuaacuugcaguagccag

SEQ ID NO: 1189665 - RNA, 19 nt, Artificial Sequence
  Description of Artificial Sequence: Synthetic oligonucleotide
augaaauggucauugcacc

SEQ ID NO: 1189666 - RNA, 19 nt, Artificial Sequence
  Description of Artificial Sequence: Synthetic oligonucleotide
aauuauuguucuuccacug

SEQ ID NO: 1189667 - RNA, 19 nt, Artificial Sequence
  Description of Artificial Sequence: Synthetic oligonucleotide
aguauuuuggccuggaggu

SEQ ID NO: 1189668 - RNA, 19 nt, Artificial Sequence
  Description of Artificial Sequence: Synthetic oligonucleotide
agagcuuagagcucaguac

SEQ ID NO: 1189669 - RNA, 19 nt, Artificial Sequence
  Description of Artificial Sequence: Synthetic oligonucleotide
aguauagagucugaaacac

SEQ ID NO: 1189670 - RNA, 19 nt, Artificial Sequence
  Description of Artificial Sequence: Synthetic oligonucleotide
guagcaacgauacacuucc

SEQ ID NO: 1189671 - RNA, 19 nt, Artificial Sequence
  Description of Artificial Sequence: Synthetic oligonucleotide
accaugauauccuugagcu

SEQ ID NO: 1189672 - RNA, 19 nt, Artificial Sequence
  Description of Artificial Sequence: Synthetic oligonucleotide
cauuuucugacaauguccc

SEQ ID NO: 1189673 - RNA, 19 nt, Artificial Sequence
  Description of Artificial Sequence: Synthetic oligonucleotide
gaugguagaguaauuauug

SEQ ID NO: 1189674 - RNA, 19 nt, Artificial Sequence
  Description of Artificial Sequence: Synthetic oligonucleotide
guaauuauuguucuuccac

SEQ ID NO: 1189675 - RNA, 19 nt, Artificial Sequence
  Description of Artificial Sequence: Synthetic oligonucleotide
gagucgauaacaaacauga

SEQ ID NO: 1189676 - RNA, 19 nt, Artificial Sequence
  Description of Artificial Sequence: Synthetic oligonucleotide
ugugcggauauucacauau

SEQ ID NO: 1189677 - RNA, 19 nt, Artificial Sequence
  Description of Artificial Sequence: Synthetic oligonucleotide
agauuugccggccugcuuc

SEQ ID NO: 1189678 - RNA, 19 nt, Artificial Sequence
  Description of Artificial Sequence: Synthetic oligonucleotide
uaauuauuguucuuccacu

SEQ ID NO: 1189679 - RNA, 19 nt, Artificial Sequence
  Description of Artificial Sequence: Synthetic oligonucleotide
gagcuuagagcucaguacc

SEQ ID NO: 1189680 - RNA, 19 nt, Artificial Sequence
  Description of Artificial Sequence: Synthetic oligonucleotide
auaaggauguccccagggg

SEQ ID NO: 1189681 - RNA, 19 nt, Artificial Sequence
  Description of Artificial Sequence: Synthetic oligonucleotide
uuaacuugcaguagccaga

SEQ ID NO: 1189682 - RNA, 19 nt, Artificial Sequence
  Description of Artificial Sequence: Synthetic oligonucleotide
acacuguagaacauggggc

SEQ ID NO: 1189683 - RNA, 19 nt, Artificial Sequence
  Description of Artificial Sequence: Synthetic oligonucleotide
cucgugauacacaauguag

SEQ ID NO: 1189684 - RNA, 19 nt, Artificial Sequence
  Description of Artificial Sequence: Synthetic oligonucleotide
uguagcccauuccaaagag

SEQ ID NO: 1189685 - RNA, 19 nt, Artificial Sequence
  Description of Artificial Sequence: Synthetic oligonucleotide
agguaagucagauggucac

SEQ ID NO: 1189686 - RNA, 19 nt, Artificial Sequence
  Description of Artificial Sequence: Synthetic oligonucleotide
ucgugauacacaauguagu

SEQ ID NO: 1189687 - RNA, 19 nt, Artificial Sequence
  Description of Artificial Sequence: Synthetic oligonucleotide
guugaagaccuuuaacuug

SEQ ID NO: 1189688 - RNA, 19 nt, Artificial Sequence
  Description of Artificial Sequence: Synthetic oligonucleotide
uggaguguagaucuuugug

SEQ ID NO: 1189689 - RNA, 19 nt, Artificial Sequence
  Description of Artificial Sequence: Synthetic oligonucleotide
guugguagcaacgauacac

SEQ ID NO: 1189690 - RNA, 19 nt, Artificial Sequence
  Description of Artificial Sequence: Synthetic oligonucleotide
cuucguaggaaguauuuug

SEQ ID NO: 1189691 - RNA, 19 nt, Artificial Sequence
  Description of Artificial Sequence: Synthetic oligonucleotide
uggcuaauuggguaaaucu

SEQ ID NO: 1189692 - RNA, 19 nt, Artificial Sequence
  Description of Artificial Sequence: Synthetic oligonucleotide
uucuuguaagcacucugag

SEQ ID NO: 1189693 - RNA, 19 nt, Artificial Sequence
  Description of Artificial Sequence: Synthetic oligonucleotide
agcaacgauacacuuccgg

SEQ ID NO: 1189694 - RNA, 19 nt, Artificial Sequence
  Description of Artificial Sequence: Synthetic oligonucleotide
ucugaaacacugaccuggg

SEQ ID NO: 1189695 - RNA, 19 nt, Artificial Sequence
  Description of Artificial Sequence: Synthetic oligonucleotide
ucagauggucacuuucagg

SEQ ID NO: 1189696 - RNA, 19 nt, Artificial Sequence
  Description of Artificial Sequence: Synthetic oligonucleotide
uguugcaccaugauauccu

SEQ ID NO: 1189697 - RNA, 19 nt, Artificial Sequence
  Description of Artificial Sequence: Synthetic oligonucleotide
acaaugucccagucagugc

SEQ ID NO: 1189698 - RNA, 19 nt, Artificial Sequence
  Description of Artificial Sequence: Synthetic oligonucleotide
gauaacaaacaugaugcca

SEQ ID NO: 1189699 - RNA, 19 nt, Artificial Sequence
  Description of Artificial Sequence: Synthetic oligonucleotide
cugaagaggaugucaacag

SEQ ID NO: 1189700 - RNA, 19 nt, Artificial Sequence
  Description of Artificial Sequence: Synthetic oligonucleotide
ucuccugucgagauuugcc

SEQ ID NO: 1189701 - RNA, 19 nt, Artificial Sequence
  Description of Artificial Sequence: Synthetic oligonucleotide
uaauuggguaaaucugcag

SEQ ID NO: 1189702 - RNA, 19 nt, Artificial Sequence
  Description of Artificial Sequence: Synthetic oligonucleotide
ugaaauggucauugcacca

SEQ ID NO: 1189703 - RNA, 19 nt, Artificial Sequence
  Description of Artificial Sequence: Synthetic oligonucleotide
uuccucuuuagcccgacga

SEQ ID NO: 1189704 - RNA, 19 nt, Artificial Sequence
  Description of Artificial Sequence: Synthetic oligonucleotide
ugcggauauucacauauuc

SEQ ID NO: 1189705 - RNA, 19 nt, Artificial Sequence
  Description of Artificial Sequence: Synthetic oligonucleotide
agaccuuuaacuugcagua

SEQ ID NO: 1189706 - RNA, 19 nt, Artificial Sequence
  Description of Artificial Sequence: Synthetic oligonucleotide
ugggguguaaauggcaggg

SEQ ID NO: 1189707 - RNA, 19 nt, Artificial Sequence
  Description of Artificial Sequence: Synthetic oligonucleotide
uuuagcccgacgacgauuc

SEQ ID NO: 1189708 - RNA, 19 nt, Artificial Sequence
  Description of Artificial Sequence: Synthetic oligonucleotide
agacaagugcaccugcaag

SEQ ID NO: 1189709 - RNA, 19 nt, Artificial Sequence
  Description of Artificial Sequence: Synthetic oligonucleotide
aguaauuauuguucuucca

SEQ ID NO: 1189710 - RNA, 19 nt, Artificial Sequence
  Description of Artificial Sequence: Synthetic oligonucleotide
agcauguuguccucugggg

SEQ ID NO: 1189711 - RNA, 19 nt, Artificial Sequence
  Description of Artificial Sequence: Synthetic oligonucleotide
ucagaaggcaacugggagu

SEQ ID NO: 1189712 - RNA, 19 nt, Artificial Sequence
  Description of Artificial Sequence: Synthetic oligonucleotide
aauguccucuugaccaggc

SEQ ID NO: 1189713 - RNA, 19 nt, Artificial Sequence
  Description of Artificial Sequence: Synthetic oligonucleotide
agagucugaaacacugacc

SEQ ID NO: 1189714 - RNA, 19 nt, Artificial Sequence
  Description of Artificial Sequence: Synthetic oligonucleotide
gugauacacaauguagucg

SEQ ID NO: 1189715 - RNA, 19 nt, Artificial Sequence
  Description of Artificial Sequence: Synthetic oligonucleotide
cacuacguuggcaagguug

SEQ ID NO: 1189716 - RNA, 19 nt, Artificial Sequence
  Description of Artificial Sequence: Synthetic oligonucleotide
uugguagcaacgauacacu

SEQ ID NO: 1189717 - RNA, 19 nt, Artificial Sequence
  Description of Artificial Sequence: Synthetic oligonucleotide
acgauacacuuccggacgc

SEQ ID NO: 1189718 - RNA, 19 nt, Artificial Sequence
  Description of Artificial Sequence: Synthetic oligonucleotide
aaauggucauugcaccaga

SEQ ID NO: 1189719 - RNA, 19 nt, Artificial Sequence
  Description of Artificial Sequence: Synthetic oligonucleotide
gucagaaggcaacugggag

SEQ ID NO: 1189720 - RNA, 19 nt, Artificial Sequence
  Description of Artificial Sequence: Synthetic oligonucleotide
acuacguuggcaagguugg

SEQ ID NO: 1189721 - RNA, 19 nt, Artificial Sequence
  Description of Artificial Sequence: Synthetic oligonucleotide
cuccugucgagauuugccg

SEQ ID NO: 1189722 - RNA, 19 nt, Artificial Sequence
  Description of Artificial Sequence: Synthetic oligonucleotide
gaggauccagagcugauac

SEQ ID NO: 1189723 - RNA, 19 nt, Artificial Sequence
  Description of Artificial Sequence: Synthetic oligonucleotide
ucccgaaccuuccgcaugg

SEQ ID NO: 1189724 - RNA, 19 nt, Artificial Sequence
  Description of Artificial Sequence: Synthetic oligonucleotide
uccugucgagauuugccgg

SEQ ID NO: 1189725 - RNA, 19 nt, Artificial Sequence
  Description of Artificial Sequence: Synthetic oligonucleotide
auacacaauguagucgggg

SEQ ID NO: 1189726 - RNA, 19 nt, Artificial Sequence
  Description of Artificial Sequence: Synthetic oligonucleotide
guauguggaagauggguac

SEQ ID NO: 1189727 - RNA, 19 nt, Artificial Sequence
  Description of Artificial Sequence: Synthetic oligonucleotide
agggacagcaaacuucucu

SEQ ID NO: 1189728 - RNA, 19 nt, Artificial Sequence
  Description of Artificial Sequence: Synthetic oligonucleotide
caacgauacacuuccggac

SEQ ID NO: 1189729 - RNA, 19 nt, Artificial Sequence
  Description of Artificial Sequence: Synthetic oligonucleotide
cagcucgugauacacaaug

SEQ ID NO: 1189730 - RNA, 19 nt, Artificial Sequence
  Description of Artificial Sequence: Synthetic oligonucleotide
uguuauccagggcuccgag

SEQ ID NO: 1189731 - RNA, 19 nt, Artificial Sequence
  Description of Artificial Sequence: Synthetic oligonucleotide
caacauaaucuuccugcgg

SEQ ID NO: 1189732 - RNA, 19 nt, Artificial Sequence
  Description of Artificial Sequence: Synthetic oligonucleotide
agugagaccaccuguguua

SEQ ID NO: 1189733 - RNA, 19 nt, Artificial Sequence
  Description of Artificial Sequence: Synthetic oligonucleotide
gaagaccuuuaacuugcag

SEQ ID NO: 1189734 - RNA, 19 nt, Artificial Sequence
  Description of Artificial Sequence: Synthetic oligonucleotide
aagugaaacugcaggaggu

SEQ ID NO: 1189735 - RNA, 19 nt, Artificial Sequence
  Description of Artificial Sequence: Synthetic oligonucleotide
aagugcaccugcaaggacu

SEQ ID NO: 1189736 - RNA, 19 nt, Artificial Sequence
  Description of Artificial Sequence: Synthetic oligonucleotide
ucaacagggaagguacgcc

SEQ ID NO: 1189737 - RNA, 19 nt, Artificial Sequence
  Description of Artificial Sequence: Synthetic oligonucleotide
cugccugguggaaauaggc

SEQ ID NO: 1189738 - RNA, 19 nt, Artificial Sequence
  Description of Artificial Sequence: Synthetic oligonucleotide
gguacgcccagguaugugg

SEQ ID NO: 1189739 - RNA, 19 nt, Artificial Sequence
  Description of Artificial Sequence: Synthetic oligonucleotide
uuggcauuggccuggcuaa

SEQ ID NO: 1189740 - RNA, 19 nt, Artificial Sequence
  Description of Artificial Sequence: Synthetic oligonucleotide
gacgacgauucuccugucg

SEQ ID NO: 1189741 - RNA, 19 nt, Artificial Sequence
  Description of Artificial Sequence: Synthetic oligonucleotide
aguagccagagucgauaac

SEQ ID NO: 1189742 - RNA, 19 nt, Artificial Sequence
  Description of Artificial Sequence: Synthetic oligonucleotide
ucuuuguggaccugacacu

SEQ ID NO: 1189743 - RNA, 19 nt, Artificial Sequence
  Description of Artificial Sequence: Synthetic oligonucleotide
uguccucuugaccaggcau

SEQ ID NO: 1189744 - RNA, 19 nt, Artificial Sequence
  Description of Artificial Sequence: Synthetic oligonucleotide
gcuaauuggguaaaucugc

SEQ ID NO: 1189745 - RNA, 19 nt, Artificial Sequence
  Description of Artificial Sequence: Synthetic oligonucleotide
cuuuguggaccugacacug

SEQ ID NO: 1189746 - RNA, 19 nt, Artificial Sequence
  Description of Artificial Sequence: Synthetic oligonucleotide
agagaugucucagcaaugu

SEQ ID NO: 1189747 - RNA, 19 nt, Artificial Sequence
  Description of Artificial Sequence: Synthetic oligonucleotide
uccaaagcgggcuggugug

SEQ ID NO: 1189748 - RNA, 19 nt, Artificial Sequence
  Description of Artificial Sequence: Synthetic oligonucleotide
agagucgauaacaaacaug

SEQ ID NO: 1189749 - RNA, 19 nt, Artificial Sequence
  Description of Artificial Sequence: Synthetic oligonucleotide
uggaugaaauggucauugc

SEQ ID NO: 1189750 - RNA, 19 nt, Artificial Sequence
  Description of Artificial Sequence: Synthetic oligonucleotide
guagccagagucgauaaca

SEQ ID NO: 1189751 - RNA, 19 nt, Artificial Sequence
  Description of Artificial Sequence: Synthetic oligonucleotide
agugaaacugcaggagguc

SEQ ID NO: 1189752 - RNA, 19 nt, Artificial Sequence
  Description of Artificial Sequence: Synthetic oligonucleotide
agcccgacgacgauucucc

SEQ ID NO: 1189753 - RNA, 19 nt, Artificial Sequence
  Description of Artificial Sequence: Synthetic oligonucleotide
ugugcgacgaggugucaug

SEQ ID NO: 1189754 - RNA, 19 nt, Artificial Sequence
  Description of Artificial Sequence: Synthetic oligonucleotide
uccucuuuagcccgacgac

SEQ ID NO: 1189755 - RNA, 19 nt, Artificial Sequence
  Description of Artificial Sequence: Synthetic oligonucleotide
acgacgauucuccugucga

SEQ ID NO: 1189756 - RNA, 19 nt, Artificial Sequence
  Description of Artificial Sequence: Synthetic oligonucleotide
caauccugggguugaagac

SEQ ID NO: 1189757 - RNA, 19 nt, Artificial Sequence
  Description of Artificial Sequence: Synthetic oligonucleotide
uaaaucugcagagcaucca

SEQ ID NO: 1189758 - RNA, 19 nt, Artificial Sequence
  Description of Artificial Sequence: Synthetic oligonucleotide
auauuccccaauccccuug

SEQ ID NO: 1189759 - RNA, 19 nt, Artificial Sequence
  Description of Artificial Sequence: Synthetic oligonucleotide
aaacacugaccugggcccg

SEQ ID NO: 1189760 - RNA, 19 nt, Artificial Sequence
  Description of Artificial Sequence: Synthetic oligonucleotide
gucagauggucacuuucag

SEQ ID NO: 1189761 - RNA, 19 nt, Artificial Sequence
  Description of Artificial Sequence: Synthetic oligonucleotide
cucggauuugaucacucuc

SEQ ID NO: 1189762 - RNA, 19 nt, Artificial Sequence
  Description of Artificial Sequence: Synthetic oligonucleotide
cucacaguccaaagcgggc

SEQ ID NO: 1189763 - RNA, 19 nt, Artificial Sequence
  Description of Artificial Sequence: Synthetic oligonucleotide
ugcucuuuccggccuggag

SEQ ID NO: 1189764 - RNA, 19 nt, Artificial Sequence
  Description of Artificial Sequence: Synthetic oligonucleotide
ucugaguauagagucugaa

SEQ ID NO: 1189765 - RNA, 19 nt, Artificial Sequence
  Description of Artificial Sequence: Synthetic oligonucleotide
gguggaaauaggcagcaca

SEQ ID NO: 1189766 - RNA, 19 nt, Artificial Sequence
  Description of Artificial Sequence: Synthetic oligonucleotide
cucuuuccggccuggagug

SEQ ID NO: 1189767 - RNA, 19 nt, Artificial Sequence
  Description of Artificial Sequence: Synthetic oligonucleotide
ccaacauaaucuuccugcg

SEQ ID NO: 1189768 - RNA, 19 nt, Artificial Sequence
  Description of Artificial Sequence: Synthetic oligonucleotide
uccagagcugauacaugga

SEQ ID NO: 1189769 - RNA, 19 nt, Artificial Sequence
  Description of Artificial Sequence: Synthetic oligonucleotide
gaugucaacagggaaggua

SEQ ID NO: 1189770 - RNA, 19 nt, Artificial Sequence
  Description of Artificial Sequence: Synthetic oligonucleotide
guaagcacucugaguauag

SEQ ID NO: 1189771 - RNA, 19 nt, Artificial Sequence
  Description of Artificial Sequence: Synthetic oligonucleotide
agcacucugaguauagagu

SEQ ID NO: 1189772 - RNA, 19 nt, Artificial Sequence
  Description of Artificial Sequence: Synthetic oligonucleotide
ggaugaaauggucauugca

SEQ ID NO: 1189773 - RNA, 19 nt, Artificial Sequence
  Description of Artificial Sequence: Synthetic oligonucleotide
uagccagagucgauaacaa

SEQ ID NO: 1189774 - RNA, 19 nt, Artificial Sequence
  Description of Artificial Sequence: Synthetic oligonucleotide
ucacaguccaaagcgggcu

SEQ ID NO: 1189775 - RNA, 19 nt, Artificial Sequence
  Description of Artificial Sequence: Synthetic oligonucleotide
ugcgacgaggugucauggg

SEQ ID NO: 1189776 - RNA, 19 nt, Artificial Sequence
  Description of Artificial Sequence: Synthetic oligonucleotide
ugggguugaagaccuuuaa

SEQ ID NO: 1189777 - RNA, 19 nt, Artificial Sequence
  Description of Artificial Sequence: Synthetic oligonucleotide
guccacugcggucacacac

SEQ ID NO: 1189778 - RNA, 19 nt, Artificial Sequence
  Description of Artificial Sequence: Synthetic oligonucleotide
uggauccaugaagugaaac

SEQ ID NO: 1189779 - RNA, 19 nt, Artificial Sequence
  Description of Artificial Sequence: Synthetic oligonucleotide
gccuguagaagauggcagg

SEQ ID NO: 1189780 - RNA, 19 nt, Artificial Sequence
  Description of Artificial Sequence: Synthetic oligonucleotide
uuggccuggcuaauugggu

SEQ ID NO: 1189781 - RNA, 19 nt, Artificial Sequence
  Description of Artificial Sequence: Synthetic oligonucleotide
uguugguagcaacgauaca

SEQ ID NO: 1189782 - RNA, 19 nt, Artificial Sequence
  Description of Artificial Sequence: Synthetic oligonucleotide
ggcuaauuggguaaaucug

SEQ ID NO: 1189783 - RNA, 19 nt, Artificial Sequence
  Description of Artificial Sequence: Synthetic oligonucleotide
gccagagucgauaacaaac

SEQ ID NO: 1189784 - RNA, 19 nt, Artificial Sequence
  Description of Artificial Sequence: Synthetic oligonucleotide
agucugaaacacugaccug

SEQ ID NO: 1189785 - RNA, 19 nt, Artificial Sequence
  Description of Artificial Sequence: Synthetic oligonucleotide
agauggucacuuucaggga

SEQ ID NO: 1189786 - RNA, 19 nt, Artificial Sequence
  Description of Artificial Sequence: Synthetic oligonucleotide
cguaggaaguauuuuggcc

SEQ ID NO: 1189787 - RNA, 19 nt, Artificial Sequence
  Description of Artificial Sequence: Synthetic oligonucleotide
uacacuuccggacgccauc

SEQ ID NO: 1189788 - RNA, 19 nt, Artificial Sequence
  Description of Artificial Sequence: Synthetic oligonucleotide
ccuuuaacuugcaguagcc

SEQ ID NO: 1189789 - RNA, 19 nt, Artificial Sequence
  Description of Artificial Sequence: Synthetic oligonucleotide
guuggcauuggccuggcua

SEQ ID NO: 1189790 - RNA, 19 nt, Artificial Sequence
  Description of Artificial Sequence: Synthetic oligonucleotide
guagcccauuccaaagagg

SEQ ID NO: 1189791 - RNA, 19 nt, Artificial Sequence
  Description of Artificial Sequence: Synthetic oligonucleotide
gagggccggguccaguggg

SEQ ID NO: 1189792 - RNA, 19 nt, Artificial Sequence
  Description of Artificial Sequence: Synthetic oligonucleotide
gcaggaacugaaagcaugg

SEQ ID NO: 1189793 - RNA, 19 nt, Artificial Sequence
  Description of Artificial Sequence: Synthetic oligonucleotide
aagcgggcuggugugcgac

SEQ ID NO: 1189794 - RNA, 19 nt, Artificial Sequence
  Description of Artificial Sequence: Synthetic oligonucleotide
uuguaagcacucugaguau

SEQ ID NO: 1189795 - RNA, 19 nt, Artificial Sequence
  Description of Artificial Sequence: Synthetic oligonucleotide
gucaacagggaagguacgc

SEQ ID NO: 1189796 - RNA, 19 nt, Artificial Sequence
  Description of Artificial Sequence: Synthetic oligonucleotide
uuccggacgccaucuggag

SEQ ID NO: 1189797 - RNA, 19 nt, Artificial Sequence
  Description of Artificial Sequence: Synthetic oligonucleotide
acgauucuccugucgagau

SEQ ID NO: 1189798 - RNA, 19 nt, Artificial Sequence
  Description of Artificial Sequence: Synthetic oligonucleotide
uguuucacugcagccucca

SEQ ID NO: 1189799 - RNA, 19 nt, Artificial Sequence
  Description of Artificial Sequence: Synthetic oligonucleotide
uagcaacgauacacuuccg

SEQ ID NO: 1189800 - RNA, 19 nt, Artificial Sequence
  Description of Artificial Sequence: Synthetic oligonucleotide
gacgaggugucaugggcuc

SEQ ID NO: 1189801 - RNA, 19 nt, Artificial Sequence
  Description of Artificial Sequence: Synthetic oligonucleotide
ucccugugcggauauucac

SEQ ID NO: 1189802 - RNA, 19 nt, Artificial Sequence
  Description of Artificial Sequence: Synthetic oligonucleotide
gcaacgauacacuuccgga

SEQ ID NO: 1189803 - RNA, 19 nt, Artificial Sequence
  Description of Artificial Sequence: Synthetic oligonucleotide
ucugcccuugggccuguag

SEQ ID NO: 1189804 - RNA, 19 nt, Artificial Sequence
  Description of Artificial Sequence: Synthetic oligonucleotide
uugaccaggcaugaagaua

SEQ ID NO: 1189805 - RNA, 19 nt, Artificial Sequence
  Description of Artificial Sequence: Synthetic oligonucleotide
gcaaggacuguuucacugc

SEQ ID NO: 1189806 - RNA, 19 nt, Artificial Sequence
  Description of Artificial Sequence: Synthetic oligonucleotide
guggaccugacacugccca

SEQ ID NO: 1189807 - RNA, 19 nt, Artificial Sequence
  Description of Artificial Sequence: Synthetic oligonucleotide
ucgagauuugccggccugc

SEQ ID NO: 1189808 - RNA, 19 nt, Artificial Sequence
  Description of Artificial Sequence: Synthetic oligonucleotide
gcggauauucacauauucc

SEQ ID NO: 1189809 - RNA, 19 nt, Artificial Sequence
  Description of Artificial Sequence: Synthetic oligonucleotide
gacgauucuccugucgaga

SEQ ID NO: 1189810 - RNA, 19 nt, Artificial Sequence
  Description of Artificial Sequence: Synthetic oligonucleotide
gauacacuuccggacgcca

SEQ ID NO: 1189811 - RNA, 19 nt, Artificial Sequence
  Description of Artificial Sequence: Synthetic oligonucleotide
ugguagcaacgauacacuu

SEQ ID NO: 1189812 - RNA, 19 nt, Artificial Sequence
  Description of Artificial Sequence: Synthetic oligonucleotide
uggaccugacacugcccag

SEQ ID NO: 1189813 - RNA, 19 nt, Artificial Sequence
  Description of Artificial Sequence: Synthetic oligonucleotide
agcuggugggguguaaaug

SEQ ID NO: 1189814 - RNA, 19 nt, Artificial Sequence
  Description of Artificial Sequence: Synthetic oligonucleotide
aaagcgggcuggugugcga

SEQ ID NO: 1189815 - RNA, 19 nt, Artificial Sequence
  Description of Artificial Sequence: Synthetic oligonucleotide
gcaacugggaguagauggg

SEQ ID NO: 1189816 - RNA, 19 nt, Artificial Sequence
  Description of Artificial Sequence: Synthetic oligonucleotide
gauucuccugucgagauuu

SEQ ID NO: 1189817 - RNA, 19 nt, Artificial Sequence
  Description of Artificial Sequence: Synthetic oligonucleotide
gauuugccggccugcuuca

SEQ ID NO: 1189818 - RNA, 19 nt, Artificial Sequence
  Description of Artificial Sequence: Synthetic oligonucleotide
gucgagauuugccggccug

SEQ ID NO: 1189819 - RNA, 19 nt, Artificial Sequence
  Description of Artificial Sequence: Synthetic oligonucleotide
cuuuaacuugcaguagcca

SEQ ID NO: 1189820 - RNA, 19 nt, Artificial Sequence
  Description of Artificial Sequence: Synthetic oligonucleotide
ugucgagauuugccggccu

SEQ ID NO: 1189821 - RNA, 19 nt, Artificial Sequence
  Description of Artificial Sequence: Synthetic oligonucleotide
cagcacuacguuggcaagg

SEQ ID NO: 1189822 - RNA, 19 nt, Artificial Sequence
  Description of Artificial Sequence: Synthetic oligonucleotide
uggccuggcuaauugggua

SEQ ID NO: 1189823 - RNA, 19 nt, Artificial Sequence
  Description of Artificial Sequence: Synthetic oligonucleotide
caaagcgggcuggugugcg

SEQ ID NO: 1189824 - RNA, 19 nt, Artificial Sequence
  Description of Artificial Sequence: Synthetic oligonucleotide
uaagucagauggucacuuu

SEQ ID NO: 1189825 - RNA, 19 nt, Artificial Sequence
  Description of Artificial Sequence: Synthetic oligonucleotide
accucccgaaccuuccgca

SEQ ID NO: 1189826 - RNA, 19 nt, Artificial Sequence
  Description of Artificial Sequence: Synthetic oligonucleotide
cuuccggacgccaucugga

SEQ ID NO: 1189827 - RNA, 19 nt, Artificial Sequence
  Description of Artificial Sequence: Synthetic oligonucleotide
cacucuccguccacugcgg

SEQ ID NO: 1189828 - RNA, 19 nt, Artificial Sequence
  Description of Artificial Sequence: Synthetic oligonucleotide
ucuuuagcccgacgacgau

SEQ ID NO: 1189829 - RNA, 19 nt, Artificial Sequence
  Description of Artificial Sequence: Synthetic oligonucleotide
acgaggugucaugggcucc

SEQ ID NO: 1189830 - RNA, 19 nt, Artificial Sequence
  Description of Artificial Sequence: Synthetic oligonucleotide
cagaggcuuccucuuuagc

SEQ ID NO: 1189831 - RNA, 19 nt, Artificial Sequence
  Description of Artificial Sequence: Synthetic oligonucleotide
ggaagguacgcccagguau

SEQ ID NO: 1189832 - RNA, 19 nt, Artificial Sequence
  Description of Artificial Sequence: Synthetic oligonucleotide
caggagcucauucuuguaa

SEQ ID NO: 1189833 - RNA, 19 nt, Artificial Sequence
  Description of Artificial Sequence: Synthetic oligonucleotide
ccagagucgauaacaaaca

SEQ ID NO: 1189834 - RNA, 19 nt, Artificial Sequence
  Description of Artificial Sequence: Synthetic oligonucleotide
ucaugaccagcucgugaua

SEQ ID NO: 1189835 - RNA, 19 nt, Artificial Sequence
  Description of Artificial Sequence: Synthetic oligonucleotide
gguagcaacgauacacuuc

SEQ ID NO: 1189836 - RNA, 19 nt, Artificial Sequence
  Description of Artificial Sequence: Synthetic oligonucleotide
caagugcaccugcaaggac

SEQ ID NO: 1189837 - RNA, 19 nt, Artificial Sequence
  Description of Artificial Sequence: Synthetic oligonucleotide
cuguguuauccagggcucc

SEQ ID NO: 1189838 - RNA, 19 nt, Artificial Sequence
  Description of Artificial Sequence: Synthetic oligonucleotide
cgugauacacaauguaguc

SEQ ID NO: 1189839 - RNA, 19 nt, Artificial Sequence
  Description of Artificial Sequence: Synthetic oligonucleotide
caggcucauccgcuguugc

SEQ ID NO: 1189840 - RNA, 19 nt, Artificial Sequence
  Description of Artificial Sequence: Synthetic oligonucleotide
gugcgacgaggugucaugg

SEQ ID NO: 1189841 - RNA, 19 nt, Artificial Sequence
  Description of Artificial Sequence: Synthetic oligonucleotide
gcgacgaggugucaugggc

SEQ ID NO: 1189842 - RNA, 19 nt, Artificial Sequence
  Description of Artificial Sequence: Synthetic oligonucleotide
agccagagucgauaacaaa

SEQ ID NO: 1189843 - RNA, 19 nt, Artificial Sequence
  Description of Artificial Sequence: Synthetic oligonucleotide
ccugucgagauuugccggc

SEQ ID NO: 1189844 - RNA, 19 nt, Artificial Sequence
  Description of Artificial Sequence: Synthetic oligonucleotide
gguugaagaccuuuaacuu

SEQ ID NO: 1189845 - RNA, 19 nt, Artificial Sequence
  Description of Artificial Sequence: Synthetic oligonucleotide
aggcucauccgcuguugca

SEQ ID NO: 1189846 - RNA, 19 nt, Artificial Sequence
  Description of Artificial Sequence: Synthetic oligonucleotide
agcucgugauacacaaugu

SEQ ID NO: 1189847 - RNA, 19 nt, Artificial Sequence
  Description of Artificial Sequence: Synthetic oligonucleotide
cugucgagauuugccggcc

SEQ ID NO: 1189848 - RNA, 19 nt, Artificial Sequence
  Description of Artificial Sequence: Synthetic oligonucleotide
cgauaacaaacaugaugcc

SEQ ID NO: 1189849 - RNA, 19 nt, Artificial Sequence
  Description of Artificial Sequence: Synthetic oligonucleotide
acacuuccggacgccaucu

SEQ ID NO: 1189850 - RNA, 19 nt, Artificial Sequence
  Description of Artificial Sequence: Synthetic oligonucleotide
agcgggcuggugugcgacg

SEQ ID NO: 1189851 - RNA, 19 nt, Artificial Sequence
  Description of Artificial Sequence: Synthetic oligonucleotide
aacuucucucggauuugau

SEQ ID NO: 1189852 - RNA, 19 nt, Artificial Sequence
  Description of Artificial Sequence: Synthetic oligonucleotide
cucuccguccacugcgguc

SEQ ID NO: 1189853 - RNA, 19 nt, Artificial Sequence
  Description of Artificial Sequence: Synthetic oligonucleotide
ggucaugaccagcucguga

SEQ ID NO: 1189854 - RNA, 19 nt, Artificial Sequence
  Description of Artificial Sequence: Synthetic oligonucleotide
aacacugaccugggcccgu

SEQ ID NO: 1189855 - RNA, 19 nt, Artificial Sequence
  Description of Artificial Sequence: Synthetic oligonucleotide
uuagcccgacgacgauucu

SEQ ID NO: 1189856 - RNA, 19 nt, Artificial Sequence
  Description of Artificial Sequence: Synthetic oligonucleotide
aucagccgccccguggaag

SEQ ID NO: 1189857 - RNA, 19 nt, Artificial Sequence
  Description of Artificial Sequence: Synthetic oligonucleotide
ugucccagucagugccaca

SEQ ID NO: 1189858 - RNA, 19 nt, Artificial Sequence
  Description of Artificial Sequence: Synthetic oligonucleotide
ccuguguuauccagggcuc

SEQ ID NO: 1189859 - RNA, 19 nt, Artificial Sequence
  Description of Artificial Sequence: Synthetic oligonucleotide
ucaguaccuggcugccauc

SEQ ID NO: 1189860 - RNA, 19 nt, Artificial Sequence
  Description of Artificial Sequence: Synthetic oligonucleotide
ggauuugaucacucuccuc

SEQ ID NO: 1189861 - RNA, 19 nt, Artificial Sequence
  Description of Artificial Sequence: Synthetic oligonucleotide
uagcccgacgacgauucuc

SEQ ID NO: 1189862 - RNA, 19 nt, Artificial Sequence
  Description of Artificial Sequence: Synthetic oligonucleotide
cauccgcuguugcaccaug

SEQ ID NO: 1189863 - RNA, 19 nt, Artificial Sequence
  Description of Artificial Sequence: Synthetic oligonucleotide
cagacaagugcaccugcaa

SEQ ID NO: 1189864 - RNA, 19 nt, Artificial Sequence
  Description of Artificial Sequence: Synthetic oligonucleotide
caguagccagagucgauaa

SEQ ID NO: 1189865 - RNA, 19 nt, Artificial Sequence
  Description of Artificial Sequence: Synthetic oligonucleotide
cucugaguauagagucuga

SEQ ID NO: 1189866 - RNA, 19 nt, Artificial Sequence
  Description of Artificial Sequence: Synthetic oligonucleotide
uacgcccagguauguggaa

SEQ ID NO: 1189867 - RNA, 19 nt, Artificial Sequence
  Description of Artificial Sequence: Synthetic oligonucleotide
gcucauccgcuguugcacc

SEQ ID NO: 1189868 - RNA, 19 nt, Artificial Sequence
  Description of Artificial Sequence: Synthetic oligonucleotide
acgccaucuggagccuucg

SEQ ID NO: 1189869 - RNA, 19 nt, Artificial Sequence
  Description of Artificial Sequence: Synthetic oligonucleotide
caucuuggagagggccggg

SEQ ID NO: 1189870 - RNA, 19 nt, Artificial Sequence
  Description of Artificial Sequence: Synthetic oligonucleotide
gcucgugauacacaaugua

SEQ ID NO: 1189871 - RNA, 19 nt, Artificial Sequence
  Description of Artificial Sequence: Synthetic oligonucleotide
ucccugaccucugguuggc

SEQ ID NO: 1189872 - RNA, 19 nt, Artificial Sequence
  Description of Artificial Sequence: Synthetic oligonucleotide
ccaugauauccuugagcug

SEQ ID NO: 1189873 - RNA, 19 nt, Artificial Sequence
  Description of Artificial Sequence: Synthetic oligonucleotide
caauccccuugaguuuggc

SEQ ID NO: 1189874 - RNA, 19 nt, Artificial Sequence
  Description of Artificial Sequence: Synthetic oligonucleotide
gcucuuuccggccuggagu

SEQ ID NO: 1189875 - RNA, 19 nt, Artificial Sequence
  Description of Artificial Sequence: Synthetic oligonucleotide
gcuguugcaccaugauauc

SEQ ID NO: 1189876 - RNA, 19 nt, Artificial Sequence
  Description of Artificial Sequence: Synthetic oligonucleotide
cuguagaagauggcaggaa

SEQ ID NO: 1189877 - RNA, 19 nt, Artificial Sequence
  Description of Artificial Sequence: Synthetic oligonucleotide
cuccgccagccacucuccg

SEQ ID NO: 1189878 - RNA, 19 nt, Artificial Sequence
  Description of Artificial Sequence: Synthetic oligonucleotide
agggcaucccugugcggau

SEQ ID NO: 1189879 - RNA, 19 nt, Artificial Sequence
  Description of Artificial Sequence: Synthetic oligonucleotide
agguacgcccagguaugug

SEQ ID NO: 1189880 - RNA, 19 nt, Artificial Sequence
  Description of Artificial Sequence: Synthetic oligonucleotide
auacacuuccggacgccau

SEQ ID NO: 1189881 - RNA, 19 nt, Artificial Sequence
  Description of Artificial Sequence: Synthetic oligonucleotide
guacgcccagguaugugga

SEQ ID NO: 1189882 - RNA, 19 nt, Artificial Sequence
  Description of Artificial Sequence: Synthetic oligonucleotide
ucuuuccggccuggagugu

SEQ ID NO: 1189883 - RNA, 19 nt, Artificial Sequence
  Description of Artificial Sequence: Synthetic oligonucleotide
cacugaccugggcccgucc

SEQ ID NO: 1189884 - RNA, 19 nt, Artificial Sequence
  Description of Artificial Sequence: Synthetic oligonucleotide
cagagucgauaacaaacau

SEQ ID NO: 1189885 - RNA, 19 nt, Artificial Sequence
  Description of Artificial Sequence: Synthetic oligonucleotide
guugcaccaugauauccuu

SEQ ID NO: 1189886 - RNA, 19 nt, Artificial Sequence
  Description of Artificial Sequence: Synthetic oligonucleotide
cgcuguugcaccaugauau

SEQ ID NO: 1189887 - RNA, 19 nt, Artificial Sequence
  Description of Artificial Sequence: Synthetic oligonucleotide
ggccuggcuaauuggguaa

SEQ ID NO: 1189888 - RNA, 19 nt, Artificial Sequence
  Description of Artificial Sequence: Synthetic oligonucleotide
ccgaaccuuccgcauggcc

SEQ ID NO: 1189889 - RNA, 19 nt, Artificial Sequence
  Description of Artificial Sequence: Synthetic oligonucleotide
cacuuccggacgccaucug

SEQ ID NO: 1189890 - RNA, 19 nt, Artificial Sequence
  Description of Artificial Sequence: Synthetic oligonucleotide
accagaugguagaguaauu

SEQ ID NO: 1189891 - RNA, 19 nt, Artificial Sequence
  Description of Artificial Sequence: Synthetic oligonucleotide
ccccguggaagugagacca

SEQ ID NO: 1189892 - RNA, 19 nt, Artificial Sequence
  Description of Artificial Sequence: Synthetic oligonucleotide
cgacgauucuccugucgag

SEQ ID NO: 1189893 - RNA, 19 nt, Artificial Sequence
  Description of Artificial Sequence: Synthetic oligonucleotide
gcaguagccagagucgaua

SEQ ID NO: 1189894 - RNA, 19 nt, Artificial Sequence
  Description of Artificial Sequence: Synthetic oligonucleotide
ggagccuucguaggaagua

SEQ ID NO: 1189895 - RNA, 19 nt, Artificial Sequence
  Description of Artificial Sequence: Synthetic oligonucleotide
gagccuucguaggaaguau

SEQ ID NO: 1189896 - RNA, 19 nt, Artificial Sequence
  Description of Artificial Sequence: Synthetic oligonucleotide
cccgacgacgauucuccug

SEQ ID NO: 1189897 - RNA, 19 nt, Artificial Sequence
  Description of Artificial Sequence: Synthetic oligonucleotide
agccuucguaggaaguauu

SEQ ID NO: 1189898 - RNA, 19 nt, Artificial Sequence
  Description of Artificial Sequence: Synthetic oligonucleotide
ccuguagaagauggcagga

SEQ ID NO: 1189899 - RNA, 19 nt, Artificial Sequence
  Description of Artificial Sequence: Synthetic oligonucleotide
cugggcccguccugccagc

SEQ ID NO: 1189900 - RNA, 19 nt, Artificial Sequence
  Description of Artificial Sequence: Synthetic oligonucleotide
uggcauuggccuggcuaau

SEQ ID NO: 1189901 - RNA, 19 nt, Artificial Sequence
  Description of Artificial Sequence: Synthetic oligonucleotide
gccccguggaagugagacc

SEQ ID NO: 1189902 - RNA, 19 nt, Artificial Sequence
  Description of Artificial Sequence: Synthetic oligonucleotide
ccgccagccacucuccguc

SEQ ID NO: 1189903 - RNA, 19 nt, Artificial Sequence
  Description of Artificial Sequence: Synthetic oligonucleotide
gagauuugccggccugcuu

SEQ ID NO: 1189904 - RNA, 19 nt, Artificial Sequence
  Description of Artificial Sequence: Synthetic oligonucleotide
gcggucacacacugcaugu

SEQ ID NO: 1189905 - RNA, 19 nt, Artificial Sequence
  Description of Artificial Sequence: Synthetic oligonucleotide
cugcaaggacuguuucacu

SEQ ID NO: 1189906 - RNA, 19 nt, Artificial Sequence
  Description of Artificial Sequence: Synthetic oligonucleotide
cauauuccccaauccccuu

SEQ ID NO: 1189907 - RNA, 19 nt, Artificial Sequence
  Description of Artificial Sequence: Synthetic oligonucleotide
gugagaccaccuguguuau

SEQ ID NO: 1189908 - RNA, 19 nt, Artificial Sequence
  Description of Artificial Sequence: Synthetic oligonucleotide
cugugcggauauucacaua

SEQ ID NO: 1189909 - RNA, 19 nt, Artificial Sequence
  Description of Artificial Sequence: Synthetic oligonucleotide
ccaaagcgggcuggugugc

SEQ ID NO: 1189910 - RNA, 19 nt, Artificial Sequence
  Description of Artificial Sequence: Synthetic oligonucleotide
ugggcccguccugccagcu

SEQ ID NO: 1189911 - RNA, 19 nt, Artificial Sequence
  Description of Artificial Sequence: Synthetic oligonucleotide
gggaagguacgcccaggua

SEQ ID NO: 1189912 - RNA, 19 nt, Artificial Sequence
  Description of Artificial Sequence: Synthetic oligonucleotide
cgaggugucaugggcuccc

SEQ ID NO: 1189913 - RNA, 19 nt, Artificial Sequence
  Description of Artificial Sequence: Synthetic oligonucleotide
agccgccccguggaaguga

SEQ ID NO: 1189914 - RNA, 19 nt, Artificial Sequence
  Description of Artificial Sequence: Synthetic oligonucleotide
cuuuagcccgacgacgauu

SEQ ID NO: 1189915 - RNA, 19 nt, Artificial Sequence
  Description of Artificial Sequence: Synthetic oligonucleotide
guggauccaugaagugaaa

SEQ ID NO: 1189916 - RNA, 19 nt, Artificial Sequence
  Description of Artificial Sequence: Synthetic oligonucleotide
ccggccuggaguguagauc

SEQ ID NO: 1189917 - RNA, 19 nt, Artificial Sequence
  Description of Artificial Sequence: Synthetic oligonucleotide
cugaaagcauggagacgau

SEQ ID NO: 1189918 - RNA, 19 nt, Artificial Sequence
  Description of Artificial Sequence: Synthetic oligonucleotide
gggguguagcccauuccaa

SEQ ID NO: 1189919 - RNA, 19 nt, Artificial Sequence
  Description of Artificial Sequence: Synthetic oligonucleotide
ggaccugacacugcccagu

SEQ ID NO: 1189920 - RNA, 19 nt, Artificial Sequence
  Description of Artificial Sequence: Synthetic oligonucleotide
cgauacacuuccggacgcc

SEQ ID NO: 1189921 - RNA, 19 nt, Artificial Sequence
  Description of Artificial Sequence: Synthetic oligonucleotide
uggcugccugguggaaaua

SEQ ID NO: 1189922 - RNA, 19 nt, Artificial Sequence
  Description of Artificial Sequence: Synthetic oligonucleotide
gguagacauucagguaagu

SEQ ID NO: 1189923 - RNA, 19 nt, Artificial Sequence
  Description of Artificial Sequence: Synthetic oligonucleotide
gccgccccguggaagugag

SEQ ID NO: 1189924 - RNA, 19 nt, Artificial Sequence
  Description of Artificial Sequence: Synthetic oligonucleotide
cccguggaagugagaccac

SEQ ID NO: 1189925 - RNA, 19 nt, Artificial Sequence
  Description of Artificial Sequence: Synthetic oligonucleotide
gugugcgacgaggugucau

SEQ ID NO: 1189926 - RNA, 19 nt, Artificial Sequence
  Description of Artificial Sequence: Synthetic oligonucleotide
ccgcaccucccgaaccuuc

SEQ ID NO: 1189927 - RNA, 19 nt, Artificial Sequence
  Description of Artificial Sequence: Synthetic oligonucleotide
ggcaucccugugcggauau

SEQ ID NO: 1189928 - RNA, 19 nt, Artificial Sequence
  Description of Artificial Sequence: Synthetic oligonucleotide
gugcggauauucacauauu

SEQ ID NO: 1189929 - RNA, 19 nt, Artificial Sequence
  Description of Artificial Sequence: Synthetic oligonucleotide
gcaggaucucagagcugca

SEQ ID NO: 1189930 - RNA, 19 nt, Artificial Sequence
  Description of Artificial Sequence: Synthetic oligonucleotide
gccuucguaggaaguauuu

SEQ ID NO: 1189931 - RNA, 19 nt, Artificial Sequence
  Description of Artificial Sequence: Synthetic oligonucleotide
cggauuugaucacucuccu

SEQ ID NO: 1189932 - RNA, 19 nt, Artificial Sequence
  Description of Artificial Sequence: Synthetic oligonucleotide
cuacguuggcaagguuggu

SEQ ID NO: 1189933 - RNA, 19 nt, Artificial Sequence
  Description of Artificial Sequence: Synthetic oligonucleotide
gcgggcuggugugcgacga

SEQ ID NO: 1189934 - RNA, 19 nt, Artificial Sequence
  Description of Artificial Sequence: Synthetic oligonucleotide
cgacgaggugucaugggcu

SEQ ID NO: 1189935 - RNA, 19 nt, Artificial Sequence
  Description of Artificial Sequence: Synthetic oligonucleotide
gggcccguccugccagcuc

SEQ ID NO: 1189936 - RNA, 19 nt, Artificial Sequence
  Description of Artificial Sequence: Synthetic oligonucleotide
ccuucguaggaaguauuuu

SEQ ID NO: 1189937 - RNA, 19 nt, Artificial Sequence
  Description of Artificial Sequence: Synthetic oligonucleotide
cccgaaccuuccgcauggc

SEQ ID NO: 1189938 - RNA, 19 nt, Artificial Sequence
  Description of Artificial Sequence: Synthetic oligonucleotide
ggcauuggccuggcuaauu

SEQ ID NO: 1189939 - RNA, 19 nt, Artificial Sequence
  Description of Artificial Sequence: Synthetic oligonucleotide
cgacgacgauucuccuguc

SEQ ID NO: 1189940 - RNA, 19 nt, Artificial Sequence
  Description of Artificial Sequence: Synthetic oligonucleotide
gggcaucccugugcggaua

SEQ ID NO: 1189941 - RNA, 19 nt, Artificial Sequence
  Description of Artificial Sequence: Synthetic oligonucleotide
gggagcuggugggguguaa

SEQ ID NO: 1189942 - RNA, 19 nt, Artificial Sequence
  Description of Artificial Sequence: Synthetic oligonucleotide
ccccaauccccuugaguuu

SEQ ID NO: 1189943 - RNA, 19 nt, Artificial Sequence
  Description of Artificial Sequence: Synthetic oligonucleotide
ccagcucgugauacacaau

SEQ ID NO: 1189944 - RNA, 19 nt, Artificial Sequence
  Description of Artificial Sequence: Synthetic oligonucleotide
ccucuugaccaggcaugaa

SEQ ID NO: 1189945 - RNA, 19 nt, Artificial Sequence
  Description of Artificial Sequence: Synthetic oligonucleotide
ccgaggauccagagcugau

SEQ ID NO: 1189946 - RNA, 19 nt, Artificial Sequence
  Description of Artificial Sequence: Synthetic oligonucleotide
gcccgacgacgauucuccu

SEQ ID NO: 1189947 - RNA, 19 nt, Artificial Sequence
  Description of Artificial Sequence: Synthetic oligonucleotide
gcacuacguuggcaagguu

SEQ ID NO: 1189948 - RNA, 19 nt, Artificial Sequence
  Description of Artificial Sequence: Synthetic oligonucleotide
cccugaccucugguuggca

SEQ ID NO: 1189949 - RNA, 19 nt, Artificial Sequence
  Description of Artificial Sequence: Synthetic oligonucleotide
cgauucuccugucgagauu

SEQ ID NO: 1189950 - RNA, 19 nt, Artificial Sequence
  Description of Artificial Sequence: Synthetic oligonucleotide
ggacgccaucuggagccuu

SEQ ID NO: 1189951 - RNA, 19 nt, Artificial Sequence
  Description of Artificial Sequence: Synthetic oligonucleotide
ccgccccguggaagugaga

SEQ ID NO: 1189952 - RNA, 19 nt, Artificial Sequence
  Description of Artificial Sequence: Synthetic oligonucleotide
gcaucccugugcggauauu

SEQ ID NO: 1189953 - RNA, 19 nt, Artificial Sequence
  Description of Artificial Sequence: Synthetic oligonucleotide
  modified_base (16)..(16): a, c, u, g, unknown or other
aaaaccgagagaaaanagg

SEQ ID NO: 1189954 - RNA, 19 nt, Artificial Sequence
  Description of Artificial Sequence: Synthetic oligonucleotide
aaucacauagcacuugggg

SEQ ID NO: 1189955 - RNA, 19 nt, Artificial Sequence
  Description of Artificial Sequence: Synthetic oligonucleotide
  modified_base (7)..(7): a, c, u, g, unknown or other
agaaaanaggggcugccgc

SEQ ID NO: 1189956 - RNA, 19 nt, Artificial Sequence
  Description of Artificial Sequence: Synthetic oligonucleotide
uguuauagccaccuagagg

SEQ ID NO: 1189957 - RNA, 19 nt, Artificial Sequence
  Description of Artificial Sequence: Synthetic oligonucleotide
ugauguuauagccaccuag

SEQ ID NO: 1189958 - RNA, 19 nt, Artificial Sequence
  Description of Artificial Sequence: Synthetic oligonucleotide
aagacggcaaaaccgagag

SEQ ID NO: 1189959 - RNA, 19 nt, Artificial Sequence
  Description of Artificial Sequence: Synthetic oligonucleotide
uguguuagcuguuaguagc

SEQ ID NO: 1189960 - RNA, 19 nt, Artificial Sequence
  Description of Artificial Sequence: Synthetic oligonucleotide
uucguuauaguucuccggc

SEQ ID NO: 1189961 - RNA, 19 nt, Artificial Sequence
  Description of Artificial Sequence: Synthetic oligonucleotide
aggucucagagguacaucc

SEQ ID NO: 1189962 - RNA, 19 nt, Artificial Sequence
  Description of Artificial Sequence: Synthetic oligonucleotide
gaaguaaccgcugaagccg

SEQ ID NO: 1189963 - RNA, 19 nt, Artificial Sequence
  Description of Artificial Sequence: Synthetic oligonucleotide
ucgagaaucaccagauggg

SEQ ID NO: 1189964 - RNA, 19 nt, Artificial Sequence
  Description of Artificial Sequence: Synthetic oligonucleotide
uacgaaguugagaagcagg

SEQ ID NO: 1189965 - RNA, 19 nt, Artificial Sequence
  Description of Artificial Sequence: Synthetic oligonucleotide
acaucgaacagcucauacc

SEQ ID NO: 1189966 - RNA, 19 nt, Artificial Sequence
  Description of Artificial Sequence: Synthetic oligonucleotide
uguggaguuguuuaucucc

SEQ ID NO: 1189967 - RNA, 19 nt, Artificial Sequence
  Description of Artificial Sequence: Synthetic oligonucleotide
uuuaugucuagcugaacug

SEQ ID NO: 1189968 - RNA, 19 nt, Artificial Sequence
  Description of Artificial Sequence: Synthetic oligonucleotide
uugguggagaacuugaaga

SEQ ID NO: 1189969 - RNA, 19 nt, Artificial Sequence
  Description of Artificial Sequence: Synthetic oligonucleotide
cucgagaaucaccagaugg

SEQ ID NO: 1189970 - RNA, 19 nt, Artificial Sequence
  Description of Artificial Sequence: Synthetic oligonucleotide
caucgaacagcucauaccc

SEQ ID NO: 1189971 - RNA, 19 nt, Artificial Sequence
  Description of Artificial Sequence: Synthetic oligonucleotide
cuuauuuaugucuagcuga

SEQ ID NO: 1189972 - RNA, 19 nt, Artificial Sequence
  Description of Artificial Sequence: Synthetic oligonucleotide
auuuucgucuuauuuaugu

SEQ ID NO: 1189973 - RNA, 19 nt, Artificial Sequence
  Description of Artificial Sequence: Synthetic oligonucleotide
uggugagacagucuugugg

SEQ ID NO: 1189974 - RNA, 19 nt, Artificial Sequence
  Description of Artificial Sequence: Synthetic oligonucleotide
  modified_base (13)..(13): a, c, u, g, unknown or other
accgagagaaaanaggggc

SEQ ID NO: 1189975 - RNA, 19 nt, Artificial Sequence
  Description of Artificial Sequence: Synthetic oligonucleotide
uuucgucuuauuuaugucu

SEQ ID NO: 1189976 - RNA, 19 nt, Artificial Sequence
  Description of Artificial Sequence: Synthetic oligonucleotide
  modified_base (4)..(4): a, c, u, g, unknown or other
aaanaggggcugccgcagc

SEQ ID NO: 1189977 - RNA, 19 nt, Artificial Sequence
  Description of Artificial Sequence: Synthetic oligonucleotide
uuaugucuagcugaacugg

SEQ ID NO: 1189978 - RNA, 19 nt, Artificial Sequence
  Description of Artificial Sequence: Synthetic oligonucleotide
uagaaugugggguaccuug

SEQ ID NO: 1189979 - RNA, 19 nt, Artificial Sequence
  Description of Artificial Sequence: Synthetic oligonucleotide
aaacgcauggccuggaaaa

SEQ ID NO: 1189980 - RNA, 19 nt, Artificial Sequence
  Description of Artificial Sequence: Synthetic oligonucleotide
aauaguugugaagaucucu

SEQ ID NO: 1189981 - RNA, 19 nt, Artificial Sequence
  Description of Artificial Sequence: Synthetic oligonucleotide
aaguguucggcguuguuga

SEQ ID NO: 1189982 - RNA, 19 nt, Artificial Sequence
  Description of Artificial Sequence: Synthetic oligonucleotide
agaagcugcaacuccccgc

SEQ ID NO: 1189983 - RNA, 19 nt, Artificial Sequence
  Description of Artificial Sequence: Synthetic oligonucleotide
aaaguguucggcguuguug

SEQ ID NO: 1189984 - RNA, 19 nt, Artificial Sequence
  Description of Artificial Sequence: Synthetic oligonucleotide
aaggagcggauugucaggc

SEQ ID NO: 1189985 - RNA, 19 nt, Artificial Sequence
  Description of Artificial Sequence: Synthetic oligonucleotide
cagaauggaggccugaaag

SEQ ID NO: 1189986 - RNA, 19 nt, Artificial Sequence
  Description of Artificial Sequence: Synthetic oligonucleotide
uuggcuucguuauaguucu

SEQ ID NO: 1189987 - RNA, 19 nt, Artificial Sequence
  Description of Artificial Sequence: Synthetic oligonucleotide
uuauuuaugucuagcugaa

SEQ ID NO: 1189988 - RNA, 19 nt, Artificial Sequence
  Description of Artificial Sequence: Synthetic oligonucleotide
aucaaacgccacuguaucc

SEQ ID NO: 1189989 - RNA, 19 nt, Artificial Sequence
  Description of Artificial Sequence: Synthetic oligonucleotide
guugagaaaggucccagcc

SEQ ID NO: 1189990 - RNA, 19 nt, Artificial Sequence
  Description of Artificial Sequence: Synthetic oligonucleotide
ugggcgagcacccucagug

SEQ ID NO: 1189991 - RNA, 19 nt, Artificial Sequence
  Description of Artificial Sequence: Synthetic oligonucleotide
acgaaguugagaagcaggc

SEQ ID NO: 1189992 - RNA, 19 nt, Artificial Sequence
  Description of Artificial Sequence: Synthetic oligonucleotide
acggccggcaaguagcugc

SEQ ID NO: 1189993 - RNA, 19 nt, Artificial Sequence
  Description of Artificial Sequence: Synthetic oligonucleotide
auggacguggugaagaagg

SEQ ID NO: 1189994 - RNA, 19 nt, Artificial Sequence
  Description of Artificial Sequence: Synthetic oligonucleotide
ucuuguugagaaagguccc

SEQ ID NO: 1189995 - RNA, 19 nt, Artificial Sequence
  Description of Artificial Sequence: Synthetic oligonucleotide
  modified_base (5)..(5): a, c, u, g, unknown or other
aaaanaggggcugccgcag

SEQ ID NO: 1189996 - RNA, 19 nt, Artificial Sequence
  Description of Artificial Sequence: Synthetic oligonucleotide
uagacggccggcaaguagc

SEQ ID NO: 1189997 - RNA, 19 nt, Artificial Sequence
  Description of Artificial Sequence: Synthetic oligonucleotide
aaguggaccguggagcugg

SEQ ID NO: 1189998 - RNA, 19 nt, Artificial Sequence
  Description of Artificial Sequence: Synthetic oligonucleotide
  modified_base (9)..(9): a, c, u, g, unknown or other
agagaaaanaggggcugcc

SEQ ID NO: 1189999 - RNA, 19 nt, Artificial Sequence
  Description of Artificial Sequence: Synthetic oligonucleotide
ugccgcagcaagcaugugg

SEQ ID NO: 1190000 - RNA, 19 nt, Artificial Sequence
  Description of Artificial Sequence: Synthetic oligonucleotide
ugugcacucgagaaucacc

SEQ ID NO: 1190001 - RNA, 19 nt, Artificial Sequence
  Description of Artificial Sequence: Synthetic oligonucleotide
cuucguuauaguucuccgg

SEQ ID NO: 1190002 - RNA, 19 nt, Artificial Sequence
  Description of Artificial Sequence: Synthetic oligonucleotide
uacacauuggcagacucug

SEQ ID NO: 1190003 - RNA, 19 nt, Artificial Sequence
  Description of Artificial Sequence: Synthetic oligonucleotide
guagccauggccauugaag

SEQ ID NO: 1190004 - RNA, 19 nt, Artificial Sequence
  Description of Artificial Sequence: Synthetic oligonucleotide
aguuggaaggagcggauug

SEQ ID NO: 1190005 - RNA, 19 nt, Artificial Sequence
  Description of Artificial Sequence: Synthetic oligonucleotide
uuaguagcaccagagagau

SEQ ID NO: 1190006 - RNA, 19 nt, Artificial Sequence
  Description of Artificial Sequence: Synthetic oligonucleotide
ugucuagcugaacuggaga

SEQ ID NO: 1190007 - RNA, 19 nt, Artificial Sequence
  Description of Artificial Sequence: Synthetic oligonucleotide
cugguuguucuuuccaugc

SEQ ID NO: 1190008 - RNA, 19 nt, Artificial Sequence
  Description of Artificial Sequence: Synthetic oligonucleotide
ucagagguacaucccagga

SEQ ID NO: 1190009 - RNA, 19 nt, Artificial Sequence
  Description of Artificial Sequence: Synthetic oligonucleotide
auguuauagccaccuagag

SEQ ID NO: 1190010 - RNA, 19 nt, Artificial Sequence
  Description of Artificial Sequence: Synthetic oligonucleotide
aguggugacagcaugguca

SEQ ID NO: 1190011 - RNA, 19 nt, Artificial Sequence
  Description of Artificial Sequence: Synthetic oligonucleotide
uugugaagaucucucugca

SEQ ID NO: 1190012 - RNA, 19 nt, Artificial Sequence
  Description of Artificial Sequence: Synthetic oligonucleotide
uaugucuagcugaacugga

SEQ ID NO: 1190013 - RNA, 19 nt, Artificial Sequence
  Description of Artificial Sequence: Synthetic oligonucleotide
agaguugaccucugugcac

SEQ ID NO: 1190014 - RNA, 19 nt, Artificial Sequence
  Description of Artificial Sequence: Synthetic oligonucleotide
gaaggugacacauuuggcu

SEQ ID NO: 1190015 - RNA, 19 nt, Artificial Sequence
  Description of Artificial Sequence: Synthetic oligonucleotide
acacauuuggcuucguuau

SEQ ID NO: 1190016 - RNA, 19 nt, Artificial Sequence
  Description of Artificial Sequence: Synthetic oligonucleotide
ucucagagguacaucccag

SEQ ID NO: 1190017 - RNA, 19 nt, Artificial Sequence
  Description of Artificial Sequence: Synthetic oligonucleotide
uccuuacccagguagcugc

SEQ ID NO: 1190018 - RNA, 19 nt, Artificial Sequence
  Description of Artificial Sequence: Synthetic oligonucleotide
ucgaacagcucauacccca

SEQ ID NO: 1190019 - RNA, 19 nt, Artificial Sequence
  Description of Artificial Sequence: Synthetic oligonucleotide
  modified_base (6)..(6): a, c, u, g, unknown or other
gaaaanaggggcugccgca

SEQ ID NO: 1190020 - RNA, 19 nt, Artificial Sequence
  Description of Artificial Sequence: Synthetic oligonucleotide
agaauggaggccugaaagu

SEQ ID NO: 1190021 - RNA, 19 nt, Artificial Sequence
  Description of Artificial Sequence: Synthetic oligonucleotide
uccugccaagccaagaacu

SEQ ID NO: 1190022 - RNA, 19 nt, Artificial Sequence
  Description of Artificial Sequence: Synthetic oligonucleotide
gauguuauagccaccuaga

SEQ ID NO: 1190023 - RNA, 19 nt, Artificial Sequence
  Description of Artificial Sequence: Synthetic oligonucleotide
  modified_base (8)..(8): a, c, u, g, unknown or other
gagaaaanaggggcugccg

SEQ ID NO: 1190024 - RNA, 19 nt, Artificial Sequence
  Description of Artificial Sequence: Synthetic oligonucleotide
uucgucuuauuuaugucua

SEQ ID NO: 1190025 - RNA, 19 nt, Artificial Sequence
  Description of Artificial Sequence: Synthetic oligonucleotide
aagccaagaacuccacggu

SEQ ID NO: 1190026 - RNA, 19 nt, Artificial Sequence
  Description of Artificial Sequence: Synthetic oligonucleotide
ugcaacuccccgcaggcca

SEQ ID NO: 1190027 - RNA, 19 nt, Artificial Sequence
  Description of Artificial Sequence: Synthetic oligonucleotide
ugucaggcccgauaagugc

SEQ ID NO: 1190028 - RNA, 19 nt, Artificial Sequence
  Description of Artificial Sequence: Synthetic oligonucleotide
cucguguaguccagaaugg

SEQ ID NO: 1190029 - RNA, 19 nt, Artificial Sequence
  Description of Artificial Sequence: Synthetic oligonucleotide
aucucuagguggcccgucc

SEQ ID NO: 1190030 - RNA, 19 nt, Artificial Sequence
  Description of Artificial Sequence: Synthetic oligonucleotide
uuuucgucuuauuuauguc

SEQ ID NO: 1190031 - RNA, 19 nt, Artificial Sequence
  Description of Artificial Sequence: Synthetic oligonucleotide
  modified_base (10)..(10): a, c, u, g, unknown or other
gagagaaaanaggggcugc

SEQ ID NO: 1190032 - RNA, 19 nt, Artificial Sequence
  Description of Artificial Sequence: Synthetic oligonucleotide
uucggcguuguugaggucc

SEQ ID NO: 1190033 - RNA, 19 nt, Artificial Sequence
  Description of Artificial Sequence: Synthetic oligonucleotide
auuggcagacucugagcac

SEQ ID NO: 1190034 - RNA, 19 nt, Artificial Sequence
  Description of Artificial Sequence: Synthetic oligonucleotide
ugcaucucuagguggcccg

SEQ ID NO: 1190035 - RNA, 19 nt, Artificial Sequence
  Description of Artificial Sequence: Synthetic oligonucleotide
aaguaaccgcugaagccgc

SEQ ID NO: 1190036 - RNA, 19 nt, Artificial Sequence
  Description of Artificial Sequence: Synthetic oligonucleotide
gcggcagagaaucacauag

SEQ ID NO: 1190037 - RNA, 19 nt, Artificial Sequence
  Description of Artificial Sequence: Synthetic oligonucleotide
cacauuggcagacucugag

SEQ ID NO: 1190038 - RNA, 19 nt, Artificial Sequence
  Description of Artificial Sequence: Synthetic oligonucleotide
uugucaggcccgauaagug

SEQ ID NO: 1190039 - RNA, 19 nt, Artificial Sequence
  Description of Artificial Sequence: Synthetic oligonucleotide
ggauacgaaguugagaagc

SEQ ID NO: 1190040 - RNA, 19 nt, Artificial Sequence
  Description of Artificial Sequence: Synthetic oligonucleotide
acucgaagcaacaauggug

SEQ ID NO: 1190041 - RNA, 19 nt, Artificial Sequence
  Description of Artificial Sequence: Synthetic oligonucleotide
ugcgugggaagcaagucgu

SEQ ID NO: 1190042 - RNA, 19 nt, Artificial Sequence
  Description of Artificial Sequence: Synthetic oligonucleotide
  modified_base (3)..(3): a, c, u, g, unknown or other
aanaggggcugccgcagca

SEQ ID NO: 1190043 - RNA, 19 nt, Artificial Sequence
  Description of Artificial Sequence: Synthetic oligonucleotide
agcaguaguguguuagcug

SEQ ID NO: 1190044 - RNA, 19 nt, Artificial Sequence
  Description of Artificial Sequence: Synthetic oligonucleotide
ugguauucccuggugggcg

SEQ ID NO: 1190045 - RNA, 19 nt, Artificial Sequence
  Description of Artificial Sequence: Synthetic oligonucleotide
ugugguagaauguggggua

SEQ ID NO: 1190046 - RNA, 19 nt, Artificial Sequence
  Description of Artificial Sequence: Synthetic oligonucleotide
auagccaccuagagggucc

SEQ ID NO: 1190047 - RNA, 19 nt, Artificial Sequence
  Description of Artificial Sequence: Synthetic oligonucleotide
gacacauuuggcuucguua

SEQ ID NO: 1190048 - RNA, 19 nt, Artificial Sequence
  Description of Artificial Sequence: Synthetic oligonucleotide
auagaagcugcaacucccc

SEQ ID NO: 1190049 - RNA, 19 nt, Artificial Sequence
  Description of Artificial Sequence: Synthetic oligonucleotide
aagcaagucgugcuucccu

SEQ ID NO: 1190050 - RNA, 19 nt, Artificial Sequence
  Description of Artificial Sequence: Synthetic oligonucleotide
guuauaguucuccggcagc

SEQ ID NO: 1190051 - RNA, 19 nt, Artificial Sequence
  Description of Artificial Sequence: Synthetic oligonucleotide
cagcucauaccccagggag

SEQ ID NO: 1190052 - RNA, 19 nt, Artificial Sequence
  Description of Artificial Sequence: Synthetic oligonucleotide
ugagcaaguggaccgugga

SEQ ID NO: 1190053 - RNA, 19 nt, Artificial Sequence
  Description of Artificial Sequence: Synthetic oligonucleotide
gaacagcucauaccccagg

SEQ ID NO: 1190054 - RNA, 19 nt, Artificial Sequence
  Description of Artificial Sequence: Synthetic oligonucleotide
gaagcugcaacuccccgca

SEQ ID NO: 1190055 - RNA, 19 nt, Artificial Sequence
  Description of Artificial Sequence: Synthetic oligonucleotide
ggaaggagcggauugucag

SEQ ID NO: 1190056 - RNA, 19 nt, Artificial Sequence
  Description of Artificial Sequence: Synthetic oligonucleotide
guguguuagcuguuaguag

SEQ ID NO: 1190057 - RNA, 19 nt, Artificial Sequence
  Description of Artificial Sequence: Synthetic oligonucleotide
gugcgugggaagcaagucg

SEQ ID NO: 1190058 - RNA, 19 nt, Artificial Sequence
  Description of Artificial Sequence: Synthetic oligonucleotide
acucugagcacacaucgaa

SEQ ID NO: 1190059 - RNA, 19 nt, Artificial Sequence
  Description of Artificial Sequence: Synthetic oligonucleotide
caucaaacgccacuguauc

SEQ ID NO: 1190060 - RNA, 19 nt, Artificial Sequence
  Description of Artificial Sequence: Synthetic oligonucleotide
cucagagguacaucccagg

SEQ ID NO: 1190061 - RNA, 19 nt, Artificial Sequence
  Description of Artificial Sequence: Synthetic oligonucleotide
auagacggccggcaaguag

SEQ ID NO: 1190062 - RNA, 19 nt, Artificial Sequence
  Description of Artificial Sequence: Synthetic oligonucleotide
accuagaggguccccauug

SEQ ID NO: 1190063 - RNA, 19 nt, Artificial Sequence
  Description of Artificial Sequence: Synthetic oligonucleotide
aagucgugcuucccucggg

SEQ ID NO: 1190064 - RNA, 19 nt, Artificial Sequence
  Description of Artificial Sequence: Synthetic oligonucleotide
gguacacacagauguaggc

SEQ ID NO: 1190065 - RNA, 19 nt, Artificial Sequence
  Description of Artificial Sequence: Synthetic oligonucleotide
ugguuguucuuuccaugcc

SEQ ID NO: 1190066 - RNA, 19 nt, Artificial Sequence
  Description of Artificial Sequence: Synthetic oligonucleotide
guuaguagcaccagagaga

SEQ ID NO: 1190067 - RNA, 19 nt, Artificial Sequence
  Description of Artificial Sequence: Synthetic oligonucleotide
ucgucuuauuuaugucuag

SEQ ID NO: 1190068 - RNA, 19 nt, Artificial Sequence
  Description of Artificial Sequence: Synthetic oligonucleotide
guggagaugccuugcaaac

SEQ ID NO: 1190069 - RNA, 19 nt, Artificial Sequence
  Description of Artificial Sequence: Synthetic oligonucleotide
guaguguguuagcuguuag

SEQ ID NO: 1190070 - RNA, 19 nt, Artificial Sequence
  Description of Artificial Sequence: Synthetic oligonucleotide
ugaccucaaaaguccauuc

SEQ ID NO: 1190071 - RNA, 19 nt, Artificial Sequence
  Description of Artificial Sequence: Synthetic oligonucleotide
aagcgcugguauucccugg

SEQ ID NO: 1190072 - RNA, 19 nt, Artificial Sequence
  Description of Artificial Sequence: Synthetic oligonucleotide
gauacgaaguugagaagca

SEQ ID NO: 1190073 - RNA, 19 nt, Artificial Sequence
  Description of Artificial Sequence: Synthetic oligonucleotide
agcugcaacuccccgcagg

SEQ ID NO: 1190074 - RNA, 19 nt, Artificial Sequence
  Description of Artificial Sequence: Synthetic oligonucleotide
aacgcauggccuggaaaag

SEQ ID NO: 1190075 - RNA, 19 nt, Artificial Sequence
  Description of Artificial Sequence: Synthetic oligonucleotide
aggauacgaaguugagaag

SEQ ID NO: 1190076 - RNA, 19 nt, Artificial Sequence
  Description of Artificial Sequence: Synthetic oligonucleotide
gaugauguuauagccaccu

SEQ ID NO: 1190077 - RNA, 19 nt, Artificial Sequence
  Description of Artificial Sequence: Synthetic oligonucleotide
aaugcacucgaagcaacaa

SEQ ID NO: 1190078 - RNA, 19 nt, Artificial Sequence
  Description of Artificial Sequence: Synthetic oligonucleotide
cugagcacacaucgaacag

SEQ ID NO: 1190079 - RNA, 19 nt, Artificial Sequence
  Description of Artificial Sequence: Synthetic oligonucleotide
cagagguacaucccaggag

SEQ ID NO: 1190080 - RNA, 19 nt, Artificial Sequence
  Description of Artificial Sequence: Synthetic oligonucleotide
ccucguguaguccagaaug

SEQ ID NO: 1190081 - RNA, 19 nt, Artificial Sequence
  Description of Artificial Sequence: Synthetic oligonucleotide
gcugguauucccugguggg

SEQ ID NO: 1190082 - RNA, 19 nt, Artificial Sequence
  Description of Artificial Sequence: Synthetic oligonucleotide
ucggcguuguugagguccg

SEQ ID NO: 1190083 - RNA, 19 nt, Artificial Sequence
  Description of Artificial Sequence: Synthetic oligonucleotide
gcuucguuauaguucuccg

SEQ ID NO: 1190084 - RNA, 19 nt, Artificial Sequence
  Description of Artificial Sequence: Synthetic oligonucleotide
gaagcagagccaaugaccu

SEQ ID NO: 1190085 - RNA, 19 nt, Artificial Sequence
  Description of Artificial Sequence: Synthetic oligonucleotide
gagcaaguggaccguggag

SEQ ID NO: 1190086 - RNA, 19 nt, Artificial Sequence
  Description of Artificial Sequence: Synthetic oligonucleotide
gcuguuaguagcaccagag

SEQ ID NO: 1190087 - RNA, 19 nt, Artificial Sequence
  Description of Artificial Sequence: Synthetic oligonucleotide
uuggaggaauaguugugaa

SEQ ID NO: 1190088 - RNA, 19 nt, Artificial Sequence
  Description of Artificial Sequence: Synthetic oligonucleotide
aacaauggugagacagucu

SEQ ID NO: 1190089 - RNA, 19 nt, Artificial Sequence
  Description of Artificial Sequence: Synthetic oligonucleotide
ugugguacacacagaugua

SEQ ID NO: 1190090 - RNA, 19 nt, Artificial Sequence
  Description of Artificial Sequence: Synthetic oligonucleotide
agaacuccacggugcgugg

SEQ ID NO: 1190091 - RNA, 19 nt, Artificial Sequence
  Description of Artificial Sequence: Synthetic oligonucleotide
gucuuauuuaugucuagcu

SEQ ID NO: 1190092 - RNA, 19 nt, Artificial Sequence
  Description of Artificial Sequence: Synthetic oligonucleotide
aggaagacggcaaaaccga

SEQ ID NO: 1190093 - RNA, 19 nt, Artificial Sequence
  Description of Artificial Sequence: Synthetic oligonucleotide
agcugccagggguagacug

SEQ ID NO: 1190094 - RNA, 19 nt, Artificial Sequence
  Description of Artificial Sequence: Synthetic oligonucleotide
gagguacaucccaggagcg

SEQ ID NO: 1190095 - RNA, 19 nt, Artificial Sequence
  Description of Artificial Sequence: Synthetic oligonucleotide
aucgaacagcucauacccc

SEQ ID NO: 1190096 - RNA, 19 nt, Artificial Sequence
  Description of Artificial Sequence: Synthetic oligonucleotide
aacuccacggugcguggga

SEQ ID NO: 1190097 - RNA, 19 nt, Artificial Sequence
  Description of Artificial Sequence: Synthetic oligonucleotide
caccuuggaggaauaguug

SEQ ID NO: 1190098 - RNA, 19 nt, Artificial Sequence
  Description of Artificial Sequence: Synthetic oligonucleotide
auacgaaguugagaagcag

SEQ ID NO: 1190099 - RNA, 19 nt, Artificial Sequence
  Description of Artificial Sequence: Synthetic oligonucleotide
auguggagaucacucuugu

SEQ ID NO: 1190100 - RNA, 19 nt, Artificial Sequence
  Description of Artificial Sequence: Synthetic oligonucleotide
ggcagagaaucacauagca

SEQ ID NO: 1190101 - RNA, 19 nt, Artificial Sequence
  Description of Artificial Sequence: Synthetic oligonucleotide
aguguugucaggcccgaua

SEQ ID NO: 1190102 - RNA, 19 nt, Artificial Sequence
  Description of Artificial Sequence: Synthetic oligonucleotide
agacagaccggcaccgugg

SEQ ID NO: 1190103 - RNA, 19 nt, Artificial Sequence
  Description of Artificial Sequence: Synthetic oligonucleotide
caagucgugcuucccucgg

SEQ ID NO: 1190104 - RNA, 19 nt, Artificial Sequence
  Description of Artificial Sequence: Synthetic oligonucleotide
ugauggacguggugaagaa

SEQ ID NO: 1190105 - RNA, 19 nt, Artificial Sequence
  Description of Artificial Sequence: Synthetic oligonucleotide
guccauucaggcccauucc

SEQ ID NO: 1190106 - RNA, 19 nt, Artificial Sequence
  Description of Artificial Sequence: Synthetic oligonucleotide
ucgaagcaacaauggugag

SEQ ID NO: 1190107 - RNA, 19 nt, Artificial Sequence
  Description of Artificial Sequence: Synthetic oligonucleotide
ggaggccugaaaguguucg

SEQ ID NO: 1190108 - RNA, 19 nt, Artificial Sequence
  Description of Artificial Sequence: Synthetic oligonucleotide
gaaacgcauggccuggaaa

SEQ ID NO: 1190109 - RNA, 19 nt, Artificial Sequence
  Description of Artificial Sequence: Synthetic oligonucleotide
ugaccucugugcacucgag

SEQ ID NO: 1190110 - RNA, 19 nt, Artificial Sequence
  Description of Artificial Sequence: Synthetic oligonucleotide
gaugaccaguuggaaggag

SEQ ID NO: 1190111 - RNA, 19 nt, Artificial Sequence
  Description of Artificial Sequence: Synthetic oligonucleotide
guacacacagauguaggca

SEQ ID NO: 1190112 - RNA, 19 nt, Artificial Sequence
  Description of Artificial Sequence: Synthetic oligonucleotide
ggauugucaggcaggagag

SEQ ID NO: 1190113 - RNA, 19 nt, Artificial Sequence
  Description of Artificial Sequence: Synthetic oligonucleotide
acauagacggccggcaagu

SEQ ID NO: 1190114 - RNA, 19 nt, Artificial Sequence
  Description of Artificial Sequence: Synthetic oligonucleotide
ugccaacuggauuuucguc

SEQ ID NO: 1190115 - RNA, 19 nt, Artificial Sequence
  Description of Artificial Sequence: Synthetic oligonucleotide
caauggugagacagucuug

SEQ ID NO: 1190116 - RNA, 19 nt, Artificial Sequence
  Description of Artificial Sequence: Synthetic oligonucleotide
ggaguuguuuaucuccuca

SEQ ID NO: 1190117 - RNA, 19 nt, Artificial Sequence
  Description of Artificial Sequence: Synthetic oligonucleotide
gaagacggcaaaaccgaga

SEQ ID NO: 1190118 - RNA, 19 nt, Artificial Sequence
  Description of Artificial Sequence: Synthetic oligonucleotide
cagaguugaccucugugca

SEQ ID NO: 1190119 - RNA, 19 nt, Artificial Sequence
  Description of Artificial Sequence: Synthetic oligonucleotide
cacauagcacuuggggagg

SEQ ID NO: 1190120 - RNA, 19 nt, Artificial Sequence
  Description of Artificial Sequence: Synthetic oligonucleotide
auccaggauacgaaguuga

SEQ ID NO: 1190121 - RNA, 19 nt, Artificial Sequence
  Description of Artificial Sequence: Synthetic oligonucleotide
gaagcccgcagaguugacc

SEQ ID NO: 1190122 - RNA, 19 nt, Artificial Sequence
  Description of Artificial Sequence: Synthetic oligonucleotide
gucaggcccgauaagugcc

SEQ ID NO: 1190123 - RNA, 19 nt, Artificial Sequence
  Description of Artificial Sequence: Synthetic oligonucleotide
ugcaaacaggccagugguc

SEQ ID NO: 1190124 - RNA, 19 nt, Artificial Sequence
  Description of Artificial Sequence: Synthetic oligonucleotide
aucacauagacggccggca

SEQ ID NO: 1190125 - RNA, 19 nt, Artificial Sequence
  Description of Artificial Sequence: Synthetic oligonucleotide
cagcccggccaucacauag

SEQ ID NO: 1190126 - RNA, 19 nt, Artificial Sequence
  Description of Artificial Sequence: Synthetic oligonucleotide
uguuagcuguuaguagcac

SEQ ID NO: 1190127 - RNA, 19 nt, Artificial Sequence
  Description of Artificial Sequence: Synthetic oligonucleotide
ugaaacgcauggccuggaa

SEQ ID NO: 1190128 - RNA, 19 nt, Artificial Sequence
  Description of Artificial Sequence: Synthetic oligonucleotide
ggcgauccaggauacgaag

SEQ ID NO: 1190129 - RNA, 19 nt, Artificial Sequence
  Description of Artificial Sequence: Synthetic oligonucleotide
auaggacacagaugagcaa

SEQ ID NO: 1190130 - RNA, 19 nt, Artificial Sequence
  Description of Artificial Sequence: Synthetic oligonucleotide
gcauggucaguguugucag

SEQ ID NO: 1190131 - RNA, 19 nt, Artificial Sequence
  Description of Artificial Sequence: Synthetic oligonucleotide
ucaggcccgauaagugcca

SEQ ID NO: 1190132 - RNA, 19 nt, Artificial Sequence
  Description of Artificial Sequence: Synthetic oligonucleotide
caaugcugaaacgcauggc

SEQ ID NO: 1190133 - RNA, 19 nt, Artificial Sequence
  Description of Artificial Sequence: Synthetic oligonucleotide
cuccccgcaggccagggag

SEQ ID NO: 1190134 - RNA, 19 nt, Artificial Sequence
  Description of Artificial Sequence: Synthetic oligonucleotide
guguucggcguuguugagg

SEQ ID NO: 1190135 - RNA, 19 nt, Artificial Sequence
  Description of Artificial Sequence: Synthetic oligonucleotide
ucguguaguccagaaugga

SEQ ID NO: 1190136 - RNA, 19 nt, Artificial Sequence
  Description of Artificial Sequence: Synthetic oligonucleotide
guguugucaggcccgauaa

SEQ ID NO: 1190137 - RNA, 19 nt, Artificial Sequence
  Description of Artificial Sequence: Synthetic oligonucleotide
ggugagacagucuuguggu

SEQ ID NO: 1190138 - RNA, 19 nt, Artificial Sequence
  Description of Artificial Sequence: Synthetic oligonucleotide
uaaccgcugaagccgccac

SEQ ID NO: 1190139 - RNA, 19 nt, Artificial Sequence
  Description of Artificial Sequence: Synthetic oligonucleotide
uacacggccugcuuaccau

SEQ ID NO: 1190140 - RNA, 19 nt, Artificial Sequence
  Description of Artificial Sequence: Synthetic oligonucleotide
augucuagcugaacuggag

SEQ ID NO: 1190141 - RNA, 19 nt, Artificial Sequence
  Description of Artificial Sequence: Synthetic oligonucleotide
gaugagcaaguggaccgug

SEQ ID NO: 1190142 - RNA, 19 nt, Artificial Sequence
  Description of Artificial Sequence: Synthetic oligonucleotide
gaauaguugugaagaucuc

SEQ ID NO: 1190143 - RNA, 19 nt, Artificial Sequence
  Description of Artificial Sequence: Synthetic oligonucleotide
augagcaaguggaccgugg

SEQ ID NO: 1190144 - RNA, 19 nt, Artificial Sequence
  Description of Artificial Sequence: Synthetic oligonucleotide
aguguucggcguuguugag

SEQ ID NO: 1190145 - RNA, 19 nt, Artificial Sequence
  Description of Artificial Sequence: Synthetic oligonucleotide
gccgcagcaagcauguggg

SEQ ID NO: 1190146 - RNA, 19 nt, Artificial Sequence
  Description of Artificial Sequence: Synthetic oligonucleotide
cccgaagaagccauagaag

SEQ ID NO: 1190147 - RNA, 19 nt, Artificial Sequence
  Description of Artificial Sequence: Synthetic oligonucleotide
gaaugcacucgaagcaaca

SEQ ID NO: 1190148 - RNA, 19 nt, Artificial Sequence
  Description of Artificial Sequence: Synthetic oligonucleotide
gguacaucccaggagcgug

SEQ ID NO: 1190149 - RNA, 19 nt, Artificial Sequence
  Description of Artificial Sequence: Synthetic oligonucleotide
ggaagcaagucgugcuucc

SEQ ID NO: 1190150 - RNA, 19 nt, Artificial Sequence
  Description of Artificial Sequence: Synthetic oligonucleotide
agcgcugguauucccuggu

SEQ ID NO: 1190151 - RNA, 19 nt, Artificial Sequence
  Description of Artificial Sequence: Synthetic oligonucleotide
accaccuuggaggaauagu

SEQ ID NO: 1190152 - RNA, 19 nt, Artificial Sequence
  Description of Artificial Sequence: Synthetic oligonucleotide
ggugaacgccagcaggaag

SEQ ID NO: 1190153 - RNA, 19 nt, Artificial Sequence
  Description of Artificial Sequence: Synthetic oligonucleotide
guugaccucugugcacucg

SEQ ID NO: 1190154 - RNA, 19 nt, Artificial Sequence
  Description of Artificial Sequence: Synthetic oligonucleotide
ugcgccucguguaguccag

SEQ ID NO: 1190155 - RNA, 19 nt, Artificial Sequence
  Description of Artificial Sequence: Synthetic oligonucleotide
ugaaaguguucggcguugu

SEQ ID NO: 1190156 - RNA, 19 nt, Artificial Sequence
  Description of Artificial Sequence: Synthetic oligonucleotide
cugaaaguguucggcguug

SEQ ID NO: 1190157 - RNA, 19 nt, Artificial Sequence
  Description of Artificial Sequence: Synthetic oligonucleotide
cccgauaagugccaccacc

SEQ ID NO: 1190158 - RNA, 19 nt, Artificial Sequence
  Description of Artificial Sequence: Synthetic oligonucleotide
gcacucgaagcaacaaugg

SEQ ID NO: 1190159 - RNA, 19 nt, Artificial Sequence
  Description of Artificial Sequence: Synthetic oligonucleotide
uagcuguuaguagcaccag

SEQ ID NO: 1190160 - RNA, 19 nt, Artificial Sequence
  Description of Artificial Sequence: Synthetic oligonucleotide
ggauguugugggugaacgc

SEQ ID NO: 1190161 - RNA, 19 nt, Artificial Sequence
  Description of Artificial Sequence: Synthetic oligonucleotide
uaagugccaccaccuugga

SEQ ID NO: 1190162 - RNA, 19 nt, Artificial Sequence
  Description of Artificial Sequence: Synthetic oligonucleotide
augaccucaaaaguccauu

SEQ ID NO: 1190163 - RNA, 19 nt, Artificial Sequence
  Description of Artificial Sequence: Synthetic oligonucleotide
aguaguguguuagcuguua

SEQ ID NO: 1190164 - RNA, 19 nt, Artificial Sequence
  Description of Artificial Sequence: Synthetic oligonucleotide
agagaaucacauagcacuu

SEQ ID NO: 1190165 - RNA, 19 nt, Artificial Sequence
  Description of Artificial Sequence: Synthetic oligonucleotide
guugucaggcccgauaagu

SEQ ID NO: 1190166 - RNA, 19 nt, Artificial Sequence
  Description of Artificial Sequence: Synthetic oligonucleotide
gcaagucgugcuucccucg

SEQ ID NO: 1190167 - RNA, 19 nt, Artificial Sequence
  Description of Artificial Sequence: Synthetic oligonucleotide
gcaguaguguguuagcugu

SEQ ID NO: 1190168 - RNA, 19 nt, Artificial Sequence
  Description of Artificial Sequence: Synthetic oligonucleotide
aguaaccgcugaagccgcc

SEQ ID NO: 1190169 - RNA, 19 nt, Artificial Sequence
  Description of Artificial Sequence: Synthetic oligonucleotide
acggccugcuuaccauggg

SEQ ID NO: 1190170 - RNA, 19 nt, Artificial Sequence
  Description of Artificial Sequence: Synthetic oligonucleotide
gaccucugugcacucgaga

SEQ ID NO: 1190171 - RNA, 19 nt, Artificial Sequence
  Description of Artificial Sequence: Synthetic oligonucleotide
gagcacacaucgaacagcu

SEQ ID NO: 1190172 - RNA, 19 nt, Artificial Sequence
  Description of Artificial Sequence: Synthetic oligonucleotide
uguggagaucacucuuguu

SEQ ID NO: 1190173 - RNA, 19 nt, Artificial Sequence
  Description of Artificial Sequence: Synthetic oligonucleotide
ccccauugucaucaaacgc

SEQ ID NO: 1190174 - RNA, 19 nt, Artificial Sequence
  Description of Artificial Sequence: Synthetic oligonucleotide
uccgacacugcaagccaua

SEQ ID NO: 1190175 - RNA, 19 nt, Artificial Sequence
  Description of Artificial Sequence: Synthetic oligonucleotide
auaccccagggagauguug

SEQ ID NO: 1190176 - RNA, 19 nt, Artificial Sequence
  Description of Artificial Sequence: Synthetic oligonucleotide
guacacggccugcuuacca

SEQ ID NO: 1190177 - RNA, 19 nt, Artificial Sequence
  Description of Artificial Sequence: Synthetic oligonucleotide
agcguacacggccugcuua

SEQ ID NO: 1190178 - RNA, 19 nt, Artificial Sequence
  Description of Artificial Sequence: Synthetic oligonucleotide
uggcagugacagacagacc

SEQ ID NO: 1190179 - RNA, 19 nt, Artificial Sequence
  Description of Artificial Sequence: Synthetic oligonucleotide
agaugagcaaguggaccgu

SEQ ID NO: 1190180 - RNA, 19 nt, Artificial Sequence
  Description of Artificial Sequence: Synthetic oligonucleotide
cuuacccagguagcugcag

SEQ ID NO: 1190181 - RNA, 19 nt, Artificial Sequence
  Description of Artificial Sequence: Synthetic oligonucleotide
agguccgggcggcagagaa

SEQ ID NO: 1190182 - RNA, 19 nt, Artificial Sequence
  Description of Artificial Sequence: Synthetic oligonucleotide
agcggauugucaggcagga

SEQ ID NO: 1190183 - RNA, 19 nt, Artificial Sequence
  Description of Artificial Sequence: Synthetic oligonucleotide
aacuccccgcaggccaggg

SEQ ID NO: 1190184 - RNA, 19 nt, Artificial Sequence
  Description of Artificial Sequence: Synthetic oligonucleotide
cugacggagaggaggaugu

SEQ ID NO: 1190185 - RNA, 19 nt, Artificial Sequence
  Description of Artificial Sequence: Synthetic oligonucleotide
  modified_base (2)..(2): a, c, u, g, unknown or other
anaggggcugccgcagcaa

SEQ ID NO: 1190186 - RNA, 19 nt, Artificial Sequence
  Description of Artificial Sequence: Synthetic oligonucleotide
augauguuauagccaccua

SEQ ID NO: 1190187 - RNA, 19 nt, Artificial Sequence
  Description of Artificial Sequence: Synthetic oligonucleotide
ccugguuguucuuuccaug

SEQ ID NO: 1190188 - RNA, 19 nt, Artificial Sequence
  Description of Artificial Sequence: Synthetic oligonucleotide
ggguccgacacugcaagcc

SEQ ID NO: 1190189 - RNA, 19 nt, Artificial Sequence
  Description of Artificial Sequence: Synthetic oligonucleotide
cuccuuacccagguagcug

SEQ ID NO: 1190190 - RNA, 19 nt, Artificial Sequence
  Description of Artificial Sequence: Synthetic oligonucleotide
uaguagcaccagagagaug

SEQ ID NO: 1190191 - RNA, 19 nt, Artificial Sequence
  Description of Artificial Sequence: Synthetic oligonucleotide
gccaucacauagacggccg

SEQ ID NO: 1190192 - RNA, 19 nt, Artificial Sequence
  Description of Artificial Sequence: Synthetic oligonucleotide
ggccuggaaaaggugguag

SEQ ID NO: 1190193 - RNA, 19 nt, Artificial Sequence
  Description of Artificial Sequence: Synthetic oligonucleotide
gcagagaaucacauagcac

SEQ ID NO: 1190194 - RNA, 19 nt, Artificial Sequence
  Description of Artificial Sequence: Synthetic oligonucleotide
ggccaucacauagacggcc

SEQ ID NO: 1190195 - RNA, 19 nt, Artificial Sequence
  Description of Artificial Sequence: Synthetic oligonucleotide
agcaagcaugugggcaccg

SEQ ID NO: 1190196 - RNA, 19 nt, Artificial Sequence
  Description of Artificial Sequence: Synthetic oligonucleotide
acagcguacacggccugcu

SEQ ID NO: 1190197 - RNA, 19 nt, Artificial Sequence
  Description of Artificial Sequence: Synthetic oligonucleotide
cacucgagaaucaccagau

SEQ ID NO: 1190198 - RNA, 19 nt, Artificial Sequence
  Description of Artificial Sequence: Synthetic oligonucleotide
ccaagccaagaacuccacg

SEQ ID NO: 1190199 - RNA, 19 nt, Artificial Sequence
  Description of Artificial Sequence: Synthetic oligonucleotide
agcccgcagaguugaccuc

SEQ ID NO: 1190200 - RNA, 19 nt, Artificial Sequence
  Description of Artificial Sequence: Synthetic oligonucleotide
cugaccucaccacaggcgu

SEQ ID NO: 1190201 - RNA, 19 nt, Artificial Sequence
  Description of Artificial Sequence: Synthetic oligonucleotide
ggcgagugggguccgacac

SEQ ID NO: 1190202 - RNA, 19 nt, Artificial Sequence
  Description of Artificial Sequence: Synthetic oligonucleotide
ugcaggcaaaggugcugac

SEQ ID NO: 1190203 - RNA, 19 nt, Artificial Sequence
  Description of Artificial Sequence: Synthetic oligonucleotide
guccgggcggcagagaauc

SEQ ID NO: 1190204 - RNA, 19 nt, Artificial Sequence
  Description of Artificial Sequence: Synthetic oligonucleotide
aucccaggagcguggugga

SEQ ID NO: 1190205 - RNA, 19 nt, Artificial Sequence
  Description of Artificial Sequence: Synthetic oligonucleotide
ggcguuguugagguccggg

SEQ ID NO: 1190206 - RNA, 19 nt, Artificial Sequence
  Description of Artificial Sequence: Synthetic oligonucleotide
ggcauacacauuggcagac

SEQ ID NO: 1190207 - RNA, 19 nt, Artificial Sequence
  Description of Artificial Sequence: Synthetic oligonucleotide
cugugcacucgagaaucac

SEQ ID NO: 1190208 - RNA, 19 nt, Artificial Sequence
  Description of Artificial Sequence: Synthetic oligonucleotide
agguacaucccaggagcgu

SEQ ID NO: 1190209 - RNA, 19 nt, Artificial Sequence
  Description of Artificial Sequence: Synthetic oligonucleotide
ggaagacggcaaaaccgag

SEQ ID NO: 1190210 - RNA, 19 nt, Artificial Sequence
  Description of Artificial Sequence: Synthetic oligonucleotide
gagaaaggucccagccuca

SEQ ID NO: 1190211 - RNA, 19 nt, Artificial Sequence
  Description of Artificial Sequence: Synthetic oligonucleotide
ggcgagcacccucagugug

SEQ ID NO: 1190212 - RNA, 19 nt, Artificial Sequence
  Description of Artificial Sequence: Synthetic oligonucleotide
ggaaugcacucgaagcaac

SEQ ID NO: 1190213 - RNA, 19 nt, Artificial Sequence
  Description of Artificial Sequence: Synthetic oligonucleotide
uggaggccugaaaguguuc

SEQ ID NO: 1190214 - RNA, 19 nt, Artificial Sequence
  Description of Artificial Sequence: Synthetic oligonucleotide
cggauugucaggcaggaga

SEQ ID NO: 1190215 - RNA, 19 nt, Artificial Sequence
  Description of Artificial Sequence: Synthetic oligonucleotide
cgucuuauuuaugucuagc

SEQ ID NO: 1190216 - RNA, 19 nt, Artificial Sequence
  Description of Artificial Sequence: Synthetic oligonucleotide
auggaggccugaaaguguu

SEQ ID NO: 1190217 - RNA, 19 nt, Artificial Sequence
  Description of Artificial Sequence: Synthetic oligonucleotide
gguccgacacugcaagcca

SEQ ID NO: 1190218 - RNA, 19 nt, Artificial Sequence
  Description of Artificial Sequence: Synthetic oligonucleotide
ccucacagggaaugcacuc

SEQ ID NO: 1190219 - RNA, 19 nt, Artificial Sequence
  Description of Artificial Sequence: Synthetic oligonucleotide
acauagcacuuggggagga

SEQ ID NO: 1190220 - RNA, 19 nt, Artificial Sequence
  Description of Artificial Sequence: Synthetic oligonucleotide
ucgggugcccauucuucuu

SEQ ID NO: 1190221 - RNA, 19 nt, Artificial Sequence
  Description of Artificial Sequence: Synthetic oligonucleotide
cacagcguacacggccugc

SEQ ID NO: 1190222 - RNA, 19 nt, Artificial Sequence
  Description of Artificial Sequence: Synthetic oligonucleotide
  modified_base (11)..(11): a, c, u, g, unknown or other
cgagagaaaanaggggcug

SEQ ID NO: 1190223 - RNA, 19 nt, Artificial Sequence
  Description of Artificial Sequence: Synthetic oligonucleotide
ccaucacauagacggccgg

SEQ ID NO: 1190224 - RNA, 19 nt, Artificial Sequence
  Description of Artificial Sequence: Synthetic oligonucleotide
guggaguuguuuaucuccu

SEQ ID NO: 1190225 - RNA, 19 nt, Artificial Sequence
  Description of Artificial Sequence: Synthetic oligonucleotide
cacucgaagcaacaauggu

SEQ ID NO: 1190226 - RNA, 19 nt, Artificial Sequence
  Description of Artificial Sequence: Synthetic oligonucleotide
ggugcccauucuucuuuug

SEQ ID NO: 1190227 - RNA, 19 nt, Artificial Sequence
  Description of Artificial Sequence: Synthetic oligonucleotide
uauucccuggugggcgagu

SEQ ID NO: 1190228 - RNA, 19 nt, Artificial Sequence
  Description of Artificial Sequence: Synthetic oligonucleotide
agcacacaucgaacagcuc

SEQ ID NO: 1190229 - RNA, 19 nt, Artificial Sequence
  Description of Artificial Sequence: Synthetic oligonucleotide
guaaccgcugaagccgcca

SEQ ID NO: 1190230 - RNA, 19 nt, Artificial Sequence
  Description of Artificial Sequence: Synthetic oligonucleotide
ggcccgauaagugccacca

SEQ ID NO: 1190231 - RNA, 19 nt, Artificial Sequence
  Description of Artificial Sequence: Synthetic oligonucleotide
guauucccuggugggcgag

SEQ ID NO: 1190232 - RNA, 19 nt, Artificial Sequence
  Description of Artificial Sequence: Synthetic oligonucleotide
cugcgccucguguagucca

SEQ ID NO: 1190233 - RNA, 19 nt, Artificial Sequence
  Description of Artificial Sequence: Synthetic oligonucleotide
uccgggcggcagagaauca

SEQ ID NO: 1190234 - RNA, 19 nt, Artificial Sequence
  Description of Artificial Sequence: Synthetic oligonucleotide
gcgagcacccucagugugg

SEQ ID NO: 1190235 - RNA, 19 nt, Artificial Sequence
  Description of Artificial Sequence: Synthetic oligonucleotide
gacagaccggcaccguggu

SEQ ID NO: 1190236 - RNA, 19 nt, Artificial Sequence
  Description of Artificial Sequence: Synthetic oligonucleotide
gguauucccuggugggcga

SEQ ID NO: 1190237 - RNA, 19 nt, Artificial Sequence
  Description of Artificial Sequence: Synthetic oligonucleotide
ccugguaaaugauggacgu

SEQ ID NO: 1190238 - RNA, 19 nt, Artificial Sequence
  Description of Artificial Sequence: Synthetic oligonucleotide
aggcgauccaggauacgaa

SEQ ID NO: 1190239 - RNA, 19 nt, Artificial Sequence
  Description of Artificial Sequence: Synthetic oligonucleotide
gaccucaccacaggcgugu

SEQ ID NO: 1190240 - RNA, 19 nt, Artificial Sequence
  Description of Artificial Sequence: Synthetic oligonucleotide
agccaccuagagggucccc

SEQ ID NO: 1190241 - RNA, 19 nt, Artificial Sequence
  Description of Artificial Sequence: Synthetic oligonucleotide
agaccggcaccgugguuuu

SEQ ID NO: 1190242 - RNA, 19 nt, Artificial Sequence
  Description of Artificial Sequence: Synthetic oligonucleotide
ugggcgagugggguccgac

SEQ ID NO: 1190243 - RNA, 19 nt, Artificial Sequence
  Description of Artificial Sequence: Synthetic oligonucleotide
gccgcugcgccucguguag

SEQ ID NO: 1190244 - RNA, 19 nt, Artificial Sequence
  Description of Artificial Sequence: Synthetic oligonucleotide
ggugcgugggaagcaaguc

SEQ ID NO: 1190245 - RNA, 19 nt, Artificial Sequence
  Description of Artificial Sequence: Synthetic oligonucleotide
aaaguccauucaggcccau

SEQ ID NO: 1190246 - RNA, 19 nt, Artificial Sequence
  Description of Artificial Sequence: Synthetic oligonucleotide
gcaaguggaccguggagcu

SEQ ID NO: 1190247 - RNA, 19 nt, Artificial Sequence
  Description of Artificial Sequence: Synthetic oligonucleotide
cucgggugcccauucuucu

SEQ ID NO: 1190248 - RNA, 19 nt, Artificial Sequence
  Description of Artificial Sequence: Synthetic oligonucleotide
ccucgggugcccauucuuc

SEQ ID NO: 1190249 - RNA, 19 nt, Artificial Sequence
  Description of Artificial Sequence: Synthetic oligonucleotide
acggugcgugggaagcaag

SEQ ID NO: 1190250 - RNA, 19 nt, Artificial Sequence
  Description of Artificial Sequence: Synthetic oligonucleotide
uggcuucguuauaguucuc

SEQ ID NO: 1190251 - RNA, 19 nt, Artificial Sequence
  Description of Artificial Sequence: Synthetic oligonucleotide
acggcaaaaccgagagaaa

SEQ ID NO: 1190252 - RNA, 19 nt, Artificial Sequence
  Description of Artificial Sequence: Synthetic oligonucleotide
agacggccggcaaguagcu

SEQ ID NO: 1190253 - RNA, 19 nt, Artificial Sequence
  Description of Artificial Sequence: Synthetic oligonucleotide
ggggaggaaguaaccgcug

SEQ ID NO: 1190254 - RNA, 19 nt, Artificial Sequence
  Description of Artificial Sequence: Synthetic oligonucleotide
caucucuagguggcccguc

SEQ ID NO: 1190255 - RNA, 19 nt, Artificial Sequence
  Description of Artificial Sequence: Synthetic oligonucleotide
ccggcaaguagcugcccug

SEQ ID NO: 1190256 - RNA, 19 nt, Artificial Sequence
  Description of Artificial Sequence: Synthetic oligonucleotide
gacggccggcaaguagcug

SEQ ID NO: 1190257 - RNA, 19 nt, Artificial Sequence
  Description of Artificial Sequence: Synthetic oligonucleotide
caacuccccgcaggccagg

SEQ ID NO: 1190258 - RNA, 19 nt, Artificial Sequence
  Description of Artificial Sequence: Synthetic oligonucleotide
ccuugcaaacaggccagug

SEQ ID NO: 1190259 - RNA, 19 nt, Artificial Sequence
  Description of Artificial Sequence: Synthetic oligonucleotide
  modified_base (12)..(12): a, c, u, g, unknown or other
ccgagagaaaanaggggcu

SEQ ID NO: 1190260 - RNA, 19 nt, Artificial Sequence
  Description of Artificial Sequence: Synthetic oligonucleotide
cagcaguaguguguuagcu

SEQ ID NO: 1190261 - RNA, 19 nt, Artificial Sequence
  Description of Artificial Sequence: Synthetic oligonucleotide
cccggccaucacauagacg

SEQ ID NO: 1190262 - RNA, 19 nt, Artificial Sequence
  Description of Artificial Sequence: Synthetic oligonucleotide
gggguccgacacugcaagc

SEQ ID NO: 1190263 - RNA, 19 nt, Artificial Sequence
  Description of Artificial Sequence: Synthetic oligonucleotide
ccgacacugcaagccauag

SEQ ID NO: 1190264 - RNA, 19 nt, Artificial Sequence
  Description of Artificial Sequence: Synthetic oligonucleotide
ugacggagaggaggauguu

SEQ ID NO: 1190265 - RNA, 19 nt, Artificial Sequence
  Description of Artificial Sequence: Synthetic oligonucleotide
ccgauaagugccaccaccu

SEQ ID NO: 1190266 - RNA, 19 nt, Artificial Sequence
  Description of Artificial Sequence: Synthetic oligonucleotide
cagaccggcaccgugguuu

SEQ ID NO: 1190267 - RNA, 19 nt, Artificial Sequence
  Description of Artificial Sequence: Synthetic oligonucleotide
ugcuucccucgggugccca

SEQ ID NO: 1190268 - RNA, 19 nt, Artificial Sequence
  Description of Artificial Sequence: Synthetic oligonucleotide
caggcccgauaagugccac

SEQ ID NO: 1190269 - RNA, 19 nt, Artificial Sequence
  Description of Artificial Sequence: Synthetic oligonucleotide
gcccggccaucacauagac

SEQ ID NO: 1190270 - RNA, 19 nt, Artificial Sequence
  Description of Artificial Sequence: Synthetic oligonucleotide
cgaagcaacaauggugaga

SEQ ID NO: 1190271 - RNA, 19 nt, Artificial Sequence
  Description of Artificial Sequence: Synthetic oligonucleotide
gcgcugguauucccuggug

SEQ ID NO: 1190272 - RNA, 19 nt, Artificial Sequence
  Description of Artificial Sequence: Synthetic oligonucleotide
acagaccggcaccgugguu

SEQ ID NO: 1190273 - RNA, 19 nt, Artificial Sequence
  Description of Artificial Sequence: Synthetic oligonucleotide
accgugguuuugggcccag

SEQ ID NO: 1190274 - RNA, 19 nt, Artificial Sequence
  Description of Artificial Sequence: Synthetic oligonucleotide
gccaccuagagggucccca

SEQ ID NO: 1190275 - RNA, 19 nt, Artificial Sequence
  Description of Artificial Sequence: Synthetic oligonucleotide
accucaccacaggcgugug

SEQ ID NO: 1190276 - RNA, 19 nt, Artificial Sequence
  Description of Artificial Sequence: Synthetic oligonucleotide
ccggcaccgugguuuuggg

SEQ ID NO: 1190277 - RNA, 19 nt, Artificial Sequence
  Description of Artificial Sequence: Synthetic oligonucleotide
cauagcacuuggggaggaa

SEQ ID NO: 1190278 - RNA, 19 nt, Artificial Sequence
  Description of Artificial Sequence: Synthetic oligonucleotide
guucggcguuguugagguc

SEQ ID NO: 1190279 - RNA, 19 nt, Artificial Sequence
  Description of Artificial Sequence: Synthetic oligonucleotide
cggcaaaaccgagagaaaa

SEQ ID NO: 1190280 - RNA, 19 nt, Artificial Sequence
  Description of Artificial Sequence: Synthetic oligonucleotide
gggcgagugggguccgaca

SEQ ID NO: 1190281 - RNA, 19 nt, Artificial Sequence
  Description of Artificial Sequence: Synthetic oligonucleotide
ggccagcccggccaucaca

SEQ ID NO: 1190282 - RNA, 19 nt, Artificial Sequence
  Description of Artificial Sequence: Synthetic oligonucleotide
gcccgauaagugccaccac

SEQ ID NO: 1190283 - RNA, 19 nt, Artificial Sequence
  Description of Artificial Sequence: Synthetic oligonucleotide
ccgcagcaagcaugugggc

SEQ ID NO: 1190284 - RNA, 19 nt, Artificial Sequence
  Description of Artificial Sequence: Synthetic oligonucleotide
ggugggcgagugggguccg

SEQ ID NO: 1190285 - RNA, 19 nt, Artificial Sequence
  Description of Artificial Sequence: Synthetic oligonucleotide
gcggauugucaggcaggag

SEQ ID NO: 1190286 - RNA, 19 nt, Artificial Sequence
  Description of Artificial Sequence: Synthetic oligonucleotide
gcgauccaggauacgaagu

SEQ ID NO: 1190287 - RNA, 19 nt, Artificial Sequence
  Description of Artificial Sequence: Synthetic oligonucleotide
cauagacggccggcaagua

SEQ ID NO: 1190288 - RNA, 19 nt, Artificial Sequence
  Description of Artificial Sequence: Synthetic oligonucleotide
gaccggcaccgugguuuug

SEQ ID NO: 1190289 - RNA, 19 nt, Artificial Sequence
  Description of Artificial Sequence: Synthetic oligonucleotide
gcuccuuacccagguagcu

SEQ ID NO: 1190290 - RNA, 19 nt, Artificial Sequence
  Description of Artificial Sequence: Synthetic oligonucleotide
ccgggcggcagagaaucac

SEQ ID NO: 1190291 - RNA, 19 nt, Artificial Sequence
  Description of Artificial Sequence: Synthetic oligonucleotide
ccuuacccagguagcugca

SEQ ID NO: 1190292 - RNA, 19 nt, Artificial Sequence
  Description of Artificial Sequence: Synthetic oligonucleotide
cggccaucacauagacggc

SEQ ID NO: 1190293 - RNA, 19 nt, Artificial Sequence
  Description of Artificial Sequence: Synthetic oligonucleotide
gcgugggaagcaagucgug

SEQ ID NO: 1190294 - RNA, 19 nt, Artificial Sequence
  Description of Artificial Sequence: Synthetic oligonucleotide
gccggcaaguagcugcccu

SEQ ID NO: 1190295 - RNA, 19 nt, Artificial Sequence
  Description of Artificial Sequence: Synthetic oligonucleotide
ggaggauguugugggugaa

SEQ ID NO: 1190296 - RNA, 19 nt, Artificial Sequence
  Description of Artificial Sequence: Synthetic oligonucleotide
ccaacuggauuuucgucuu

SEQ ID NO: 1190297 - RNA, 19 nt, Artificial Sequence
  Description of Artificial Sequence: Synthetic oligonucleotide
caguaguguguuagcuguu

SEQ ID NO: 1190298 - RNA, 19 nt, Artificial Sequence
  Description of Artificial Sequence: Synthetic oligonucleotide
cguguggagaugccuugca

SEQ ID NO: 1190299 - RNA, 19 nt, Artificial Sequence
  Description of Artificial Sequence: Synthetic oligonucleotide
ccccggcugaccucaccac

SEQ ID NO: 1190300 - RNA, 19 nt, Artificial Sequence
  Description of Artificial Sequence: Synthetic oligonucleotide
cguggugaagaaggcgauc

SEQ ID NO: 1190301 - RNA, 19 nt, Artificial Sequence
  Description of Artificial Sequence: Synthetic oligonucleotide
guccgacacugcaagccau

SEQ ID NO: 1190302 - RNA, 19 nt, Artificial Sequence
  Description of Artificial Sequence: Synthetic oligonucleotide
ccgccacucagaguggcca

SEQ ID NO: 1190303 - RNA, 19 nt, Artificial Sequence
  Description of Artificial Sequence: Synthetic oligonucleotide
cguacacggccugcuuacc

SEQ ID NO: 1190304 - RNA, 19 nt, Artificial Sequence
  Description of Artificial Sequence: Synthetic oligonucleotide
caccgugguuuugggccca

SEQ ID NO: 1190305 - RNA, 19 nt, Artificial Sequence
  Description of Artificial Sequence: Synthetic oligonucleotide
ccugaaaguguucggcguu

SEQ ID NO: 1190306 - RNA, 19 nt, Artificial Sequence
  Description of Artificial Sequence: Synthetic oligonucleotide
gccucacagggaaugcacu

SEQ ID NO: 1190307 - RNA, 19 nt, Artificial Sequence
  Description of Artificial Sequence: Synthetic oligonucleotide
gggcgagcacccucagugu

SEQ ID NO: 1190308 - RNA, 19 nt, Artificial Sequence
  Description of Artificial Sequence: Synthetic oligonucleotide
cgggcggcagagaaucaca

SEQ ID NO: 1190309 - RNA, 19 nt, Artificial Sequence
  Description of Artificial Sequence: Synthetic oligonucleotide
ggaagcccgcagaguugac

SEQ ID NO: 1190310 - RNA, 19 nt, Artificial Sequence
  Description of Artificial Sequence: Synthetic oligonucleotide
gccucguguaguccagaau

SEQ ID NO: 1190311 - RNA, 19 nt, Artificial Sequence
  Description of Artificial Sequence: Synthetic oligonucleotide
cgauccaggauacgaaguu

SEQ ID NO: 1190312 - RNA, 19 nt, Artificial Sequence
  Description of Artificial Sequence: Synthetic oligonucleotide
ccaguuggaaggagcggau

SEQ ID NO: 1190313 - RNA, 19 nt, Artificial Sequence
  Description of Artificial Sequence: Synthetic oligonucleotide
gcgagugggguccgacacu

SEQ ID NO: 1190314 - RNA, 19 nt, Artificial Sequence
  Description of Artificial Sequence: Synthetic oligonucleotide
cugggcgagcacccucagu

SEQ ID NO: 1190315 - RNA, 19 nt, Artificial Sequence
  Description of Artificial Sequence: Synthetic oligonucleotide
caguuggaaggagcggauu

SEQ ID NO: 1190316 - RNA, 19 nt, Artificial Sequence
  Description of Artificial Sequence: Synthetic oligonucleotide
caccuagaggguccccauu

SEQ ID NO: 1190317 - RNA, 19 nt, Artificial Sequence
  Description of Artificial Sequence: Synthetic oligonucleotide
ccacaggcguguggagaug

SEQ ID NO: 1190318 - RNA, 19 nt, Artificial Sequence
  Description of Artificial Sequence: Synthetic oligonucleotide
cgcugggcgagcacccuca

SEQ ID NO: 1190319 - RNA, 19 nt, Artificial Sequence
  Description of Artificial Sequence: Synthetic oligonucleotide
ggccggcaaguagcugccc

SEQ ID NO: 1190320 - RNA, 19 nt, Artificial Sequence
  Description of Artificial Sequence: Synthetic oligonucleotide
ccgugguuuugggcccagg

SEQ ID NO: 1190321 - RNA, 19 nt, Artificial Sequence
  Description of Artificial Sequence: Synthetic oligonucleotide
gcaagcaugugggcaccgu

SEQ ID NO: 1190322 - RNA, 19 nt, Artificial Sequence
  Description of Artificial Sequence: Synthetic oligonucleotide
ccucugugcacucgagaau

SEQ ID NO: 1190323 - RNA, 19 nt, Artificial Sequence
  Description of Artificial Sequence: Synthetic oligonucleotide
gggcggcagagaaucacau

SEQ ID NO: 1190324 - RNA, 19 nt, Artificial Sequence
  Description of Artificial Sequence: Synthetic oligonucleotide
gggugcccauucuucuuuu

SEQ ID NO: 1190325 - RNA, 19 nt, Artificial Sequence
  Description of Artificial Sequence: Synthetic oligonucleotide
gcaucucuagguggcccgu

SEQ ID NO: 1190326 - RNA, 19 nt, Artificial Sequence
  Description of Artificial Sequence: Synthetic oligonucleotide
gugggcgagugggguccga

SEQ ID NO: 1190327 - RNA, 19 nt, Artificial Sequence
  Description of Artificial Sequence: Synthetic oligonucleotide
cagcguacacggccugcuu

SEQ ID NO: 1190328 - RNA, 19 nt, Artificial Sequence
  Description of Artificial Sequence: Synthetic oligonucleotide
cgccucguguaguccagaa

SEQ ID NO: 1190329 - RNA, 19 nt, Artificial Sequence
  Description of Artificial Sequence: Synthetic oligonucleotide
ccaccuagaggguccccau

SEQ ID NO: 1190330 - RNA, 19 nt, Artificial Sequence
  Description of Artificial Sequence: Synthetic oligonucleotide
cggugcgugggaagcaagu

SEQ ID NO: 1190331 - RNA, 19 nt, Artificial Sequence
  Description of Artificial Sequence: Synthetic oligonucleotide
ccgugggcuccccgaagaa

SEQ ID NO: 1190332 - RNA, 19 nt, Artificial Sequence
  Description of Artificial Sequence: Synthetic oligonucleotide
gcgccucguguaguccaga

SEQ ID NO: 1190333 - RNA, 19 nt, Artificial Sequence
  Description of Artificial Sequence: Synthetic oligonucleotide
gccuugcaaacaggccagu

SEQ ID NO: 1190334 - RNA, 19 nt, Artificial Sequence
  Description of Artificial Sequence: Synthetic oligonucleotide
gguccgggcggcagagaau

SEQ ID NO: 1190335 - RNA, 19 nt, Artificial Sequence
  Description of Artificial Sequence: Synthetic oligonucleotide
ggagcgugguggaggccau

SEQ ID NO: 1190336 - RNA, 19 nt, Artificial Sequence
  Description of Artificial Sequence: Synthetic oligonucleotide
gcuccccgaagaagccaua

SEQ ID NO: 1190337 - RNA, 19 nt, Artificial Sequence
  Description of Artificial Sequence: Synthetic oligonucleotide
caguguugucaggcccgau

SEQ ID NO: 1190338 - RNA, 19 nt, Artificial Sequence
  Description of Artificial Sequence: Synthetic oligonucleotide
cggcguuguugagguccgg

SEQ ID NO: 1190339 - RNA, 19 nt, Artificial Sequence
  Description of Artificial Sequence: Synthetic oligonucleotide
cccgcugggcgagcacccu

SEQ ID NO: 1190340 - RNA, 19 nt, Artificial Sequence
  Description of Artificial Sequence: Synthetic oligonucleotide
ccgcugcgccucguguagu

SEQ ID NO: 1190341 - RNA, 19 nt, Artificial Sequence
  Description of Artificial Sequence: Synthetic oligonucleotide
aaaaguguaggacuaaggc

SEQ ID NO: 1190342 - RNA, 19 nt, Artificial Sequence
  Description of Artificial Sequence: Synthetic oligonucleotide
auacauucaucauagacuc

SEQ ID NO: 1190343 - RNA, 19 nt, Artificial Sequence
  Description of Artificial Sequence: Synthetic oligonucleotide
aauggcaguucguauaaac

SEQ ID NO: 1190344 - RNA, 19 nt, Artificial Sequence
  Description of Artificial Sequence: Synthetic oligonucleotide
aaguccucucguuuaaucc

SEQ ID NO: 1190345 - RNA, 19 nt, Artificial Sequence
  Description of Artificial Sequence: Synthetic oligonucleotide
aaccucaugauuuuccggg

SEQ ID NO: 1190346 - RNA, 19 nt, Artificial Sequence
  Description of Artificial Sequence: Synthetic oligonucleotide
gauguuuaauggcaguucg

SEQ ID NO: 1190347 - RNA, 19 nt, Artificial Sequence
  Description of Artificial Sequence: Synthetic oligonucleotide
aguucguauaaaccaagcc

SEQ ID NO: 1190348 - RNA, 19 nt, Artificial Sequence
  Description of Artificial Sequence: Synthetic oligonucleotide
aguauguacaaaccccucc

SEQ ID NO: 1190349 - RNA, 19 nt, Artificial Sequence
  Description of Artificial Sequence: Synthetic oligonucleotide
aaaguguaggacuaaggcu

SEQ ID NO: 1190350 - RNA, 19 nt, Artificial Sequence
  Description of Artificial Sequence: Synthetic oligonucleotide
guucguauaaaccaagccc

SEQ ID NO: 1190351 - RNA, 19 nt, Artificial Sequence
  Description of Artificial Sequence: Synthetic oligonucleotide
ucgaacaaauaaauaaggc

SEQ ID NO: 1190352 - RNA, 19 nt, Artificial Sequence
  Description of Artificial Sequence: Synthetic oligonucleotide
aacggugccugucugcucc

SEQ ID NO: 1190353 - RNA, 19 nt, Artificial Sequence
  Description of Artificial Sequence: Synthetic oligonucleotide
uccauagugauuucagagg

SEQ ID NO: 1190354 - RNA, 19 nt, Artificial Sequence
  Description of Artificial Sequence: Synthetic oligonucleotide
uccugguuaagacagcccg

SEQ ID NO: 1190355 - RNA, 19 nt, Artificial Sequence
  Description of Artificial Sequence: Synthetic oligonucleotide
ucgucgaacaaauaaauaa

SEQ ID NO: 1190356 - RNA, 19 nt, Artificial Sequence
  Description of Artificial Sequence: Synthetic oligonucleotide
aacagacgcaaacaugcgg

SEQ ID NO: 1190357 - RNA, 19 nt, Artificial Sequence
  Description of Artificial Sequence: Synthetic oligonucleotide
ugcacaaguagaaagugcu

SEQ ID NO: 1190358 - RNA, 19 nt, Artificial Sequence
  Description of Artificial Sequence: Synthetic oligonucleotide
gacauggucucacugagcc

SEQ ID NO: 1190359 - RNA, 19 nt, Artificial Sequence
  Description of Artificial Sequence: Synthetic oligonucleotide
uucacuauacucuguaugu

SEQ ID NO: 1190360 - RNA, 19 nt, Artificial Sequence
  Description of Artificial Sequence: Synthetic oligonucleotide
auaaaccaagcccaugcac

SEQ ID NO: 1190361 - RNA, 19 nt, Artificial Sequence
  Description of Artificial Sequence: Synthetic oligonucleotide
aucaggugcaggcaggagc

SEQ ID NO: 1190362 - RNA, 19 nt, Artificial Sequence
  Description of Artificial Sequence: Synthetic oligonucleotide
ugcuggauaaguacagccg

SEQ ID NO: 1190363 - RNA, 19 nt, Artificial Sequence
  Description of Artificial Sequence: Synthetic oligonucleotide
uccaucuugccacugguag

SEQ ID NO: 1190364 - RNA, 19 nt, Artificial Sequence
  Description of Artificial Sequence: Synthetic oligonucleotide
auucaucauagacucgucg

SEQ ID NO: 1190365 - RNA, 19 nt, Artificial Sequence
  Description of Artificial Sequence: Synthetic oligonucleotide
aacaugcggagucagggug

SEQ ID NO: 1190366 - RNA, 19 nt, Artificial Sequence
  Description of Artificial Sequence: Synthetic oligonucleotide
uucaucauagacucgucga

SEQ ID NO: 1190367 - RNA, 19 nt, Artificial Sequence
  Description of Artificial Sequence: Synthetic oligonucleotide
ugagaucauguccaccggg

SEQ ID NO: 1190368 - RNA, 19 nt, Artificial Sequence
  Description of Artificial Sequence: Synthetic oligonucleotide
uggcaguucguauaaacca

SEQ ID NO: 1190369 - RNA, 19 nt, Artificial Sequence
  Description of Artificial Sequence: Synthetic oligonucleotide
ucaaagggcaguucacuag

SEQ ID NO: 1190370 - RNA, 19 nt, Artificial Sequence
  Description of Artificial Sequence: Synthetic oligonucleotide
cacaaguagaaagugcucg

SEQ ID NO: 1190371 - RNA, 19 nt, Artificial Sequence
  Description of Artificial Sequence: Synthetic oligonucleotide
uccucuuuggaacccgagg

SEQ ID NO: 1190372 - RNA, 19 nt, Artificial Sequence
  Description of Artificial Sequence: Synthetic oligonucleotide
accgggaucacauccacag

SEQ ID NO: 1190373 - RNA, 19 nt, Artificial Sequence
  Description of Artificial Sequence: Synthetic oligonucleotide
aggaggcacgaccagaagg

SEQ ID NO: 1190374 - RNA, 19 nt, Artificial Sequence
  Description of Artificial Sequence: Synthetic oligonucleotide
acuauacucuguauguuac

SEQ ID NO: 1190375 - RNA, 19 nt, Artificial Sequence
  Description of Artificial Sequence: Synthetic oligonucleotide
cuucacuauacucuguaug

SEQ ID NO: 1190376 - RNA, 19 nt, Artificial Sequence
  Description of Artificial Sequence: Synthetic oligonucleotide
aucucguggcuucauaguc

SEQ ID NO: 1190377 - RNA, 19 nt, Artificial Sequence
  Description of Artificial Sequence: Synthetic oligonucleotide
auggcaguucguauaaacc

SEQ ID NO: 1190378 - RNA, 19 nt, Artificial Sequence
  Description of Artificial Sequence: Synthetic oligonucleotide
ugaaacacgagggcgcgcg

SEQ ID NO: 1190379 - RNA, 19 nt, Artificial Sequence
  Description of Artificial Sequence: Synthetic oligonucleotide
gauagcuagacguccucgc

SEQ ID NO: 1190380 - RNA, 19 nt, Artificial Sequence
  Description of Artificial Sequence: Synthetic oligonucleotide
gccgaugugacagagaagg

SEQ ID NO: 1190381 - RNA, 19 nt, Artificial Sequence
  Description of Artificial Sequence: Synthetic oligonucleotide
cuaguaggggcugagcugg

SEQ ID NO: 1190382 - RNA, 19 nt, Artificial Sequence
  Description of Artificial Sequence: Synthetic oligonucleotide
agacucgucgaacaaauaa

SEQ ID NO: 1190383 - RNA, 19 nt, Artificial Sequence
  Description of Artificial Sequence: Synthetic oligonucleotide
aucauagacucgucgaaca

SEQ ID NO: 1190384 - RNA, 19 nt, Artificial Sequence
  Description of Artificial Sequence: Synthetic oligonucleotide
gacgcaaacaugcggaguc

SEQ ID NO: 1190385 - RNA, 19 nt, Artificial Sequence
  Description of Artificial Sequence: Synthetic oligonucleotide
uugaguaggccgaugugac

SEQ ID NO: 1190386 - RNA, 19 nt, Artificial Sequence
  Description of Artificial Sequence: Synthetic oligonucleotide
acauucaucauagacucgu

SEQ ID NO: 1190387 - RNA, 19 nt, Artificial Sequence
  Description of Artificial Sequence: Synthetic oligonucleotide
aggacugccaucugcagca

SEQ ID NO: 1190388 - RNA, 19 nt, Artificial Sequence
  Description of Artificial Sequence: Synthetic oligonucleotide
ucucguggcuucauagucc

SEQ ID NO: 1190389 - RNA, 19 nt, Artificial Sequence
  Description of Artificial Sequence: Synthetic oligonucleotide
gaguaagggugucucggcg

SEQ ID NO: 1190390 - RNA, 19 nt, Artificial Sequence
  Description of Artificial Sequence: Synthetic oligonucleotide
ucaucauagacucgucgaa

SEQ ID NO: 1190391 - RNA, 19 nt, Artificial Sequence
  Description of Artificial Sequence: Synthetic oligonucleotide
uuuaauccgcucuggugug

SEQ ID NO: 1190392 - RNA, 19 nt, Artificial Sequence
  Description of Artificial Sequence: Synthetic oligonucleotide
guuuaauccgcucuggugu

SEQ ID NO: 1190393 - RNA, 19 nt, Artificial Sequence
  Description of Artificial Sequence: Synthetic oligonucleotide
uguaggacuaaggcugggg

SEQ ID NO: 1190394 - RNA, 19 nt, Artificial Sequence
  Description of Artificial Sequence: Synthetic oligonucleotide
uaaguacagccgcucugcg

SEQ ID NO: 1190395 - RNA, 19 nt, Artificial Sequence
  Description of Artificial Sequence: Synthetic oligonucleotide
aaacaugcggagucagggu

SEQ ID NO: 1190396 - RNA, 19 nt, Artificial Sequence
  Description of Artificial Sequence: Synthetic oligonucleotide
caugaucugagagugucag

SEQ ID NO: 1190397 - RNA, 19 nt, Artificial Sequence
  Description of Artificial Sequence: Synthetic oligonucleotide
uguacuucgaaggcugucu

SEQ ID NO: 1190398 - RNA, 19 nt, Artificial Sequence
  Description of Artificial Sequence: Synthetic oligonucleotide
acuaguaggggcugagcug

SEQ ID NO: 1190399 - RNA, 19 nt, Artificial Sequence
  Description of Artificial Sequence: Synthetic oligonucleotide
aaacagacgcaaacaugcg

SEQ ID NO: 1190400 - RNA, 19 nt, Artificial Sequence
  Description of Artificial Sequence: Synthetic oligonucleotide
ugagagugucagcagggca

SEQ ID NO: 1190401 - RNA, 19 nt, Artificial Sequence
  Description of Artificial Sequence: Synthetic oligonucleotide
acaaguagaaagugcucgu

SEQ ID NO: 1190402 - RNA, 19 nt, Artificial Sequence
  Description of Artificial Sequence: Synthetic oligonucleotide
aggaguaagggugucucgg

SEQ ID NO: 1190403 - RNA, 19 nt, Artificial Sequence
  Description of Artificial Sequence: Synthetic oligonucleotide
gucucacugagcccaacgg

SEQ ID NO: 1190404 - RNA, 19 nt, Artificial Sequence
  Description of Artificial Sequence: Synthetic oligonucleotide
ucacugagcccaacggugc

SEQ ID NO: 1190405 - RNA, 19 nt, Artificial Sequence
  Description of Artificial Sequence: Synthetic oligonucleotide
auaaggcaagucaggaagg

SEQ ID NO: 1190406 - RNA, 19 nt, Artificial Sequence
  Description of Artificial Sequence: Synthetic oligonucleotide
gaccaaaccaggaggcacg

SEQ ID NO: 1190407 - RNA, 19 nt, Artificial Sequence
  Description of Artificial Sequence: Synthetic oligonucleotide
caguucguauaaaccaagc

SEQ ID NO: 1190408 - RNA, 19 nt, Artificial Sequence
  Description of Artificial Sequence: Synthetic oligonucleotide
uucagguaaccccgagaag

SEQ ID NO: 1190409 - RNA, 19 nt, Artificial Sequence
  Description of Artificial Sequence: Synthetic oligonucleotide
ucuccugguuaagacagcc

SEQ ID NO: 1190410 - RNA, 19 nt, Artificial Sequence
  Description of Artificial Sequence: Synthetic oligonucleotide
ucuacgaagggcucccaaa

SEQ ID NO: 1190411 - RNA, 19 nt, Artificial Sequence
  Description of Artificial Sequence: Synthetic oligonucleotide
gaggaguaagggugucucg

SEQ ID NO: 1190412 - RNA, 19 nt, Artificial Sequence
  Description of Artificial Sequence: Synthetic oligonucleotide
ucauucugugucggcagcg

SEQ ID NO: 1190413 - RNA, 19 nt, Artificial Sequence
  Description of Artificial Sequence: Synthetic oligonucleotide
aacacgagggcgcgcgcag

SEQ ID NO: 1190414 - RNA, 19 nt, Artificial Sequence
  Description of Artificial Sequence: Synthetic oligonucleotide
ugguuaagacagcccgggg

SEQ ID NO: 1190415 - RNA, 19 nt, Artificial Sequence
  Description of Artificial Sequence: Synthetic oligonucleotide
cugguuaagacagcccggg

SEQ ID NO: 1190416 - RNA, 19 nt, Artificial Sequence
  Description of Artificial Sequence: Synthetic oligonucleotide
gagccuucggcccuuguac

SEQ ID NO: 1190417 - RNA, 19 nt, Artificial Sequence
  Description of Artificial Sequence: Synthetic oligonucleotide
gaccgaggcggauacauuc

SEQ ID NO: 1190418 - RNA, 19 nt, Artificial Sequence
  Description of Artificial Sequence: Synthetic oligonucleotide
cucgugcugccucauagag

SEQ ID NO: 1190419 - RNA, 19 nt, Artificial Sequence
  Description of Artificial Sequence: Synthetic oligonucleotide
gcaggcaugggucuucugg

SEQ ID NO: 1190420 - RNA, 19 nt, Artificial Sequence
  Description of Artificial Sequence: Synthetic oligonucleotide
cuucagguaaccccgagaa

SEQ ID NO: 1190421 - RNA, 19 nt, Artificial Sequence
  Description of Artificial Sequence: Synthetic oligonucleotide
gcuggauaaguacagccgc

SEQ ID NO: 1190422 - RNA, 19 nt, Artificial Sequence
  Description of Artificial Sequence: Synthetic oligonucleotide
cucgcgauccuauguacac

SEQ ID NO: 1190423 - RNA, 19 nt, Artificial Sequence
  Description of Artificial Sequence: Synthetic oligonucleotide
agcuagacguccucgcuca

SEQ ID NO: 1190424 - RNA, 19 nt, Artificial Sequence
  Description of Artificial Sequence: Synthetic oligonucleotide
acgggagcgggacuccgcc

SEQ ID NO: 1190425 - RNA, 19 nt, Artificial Sequence
  Description of Artificial Sequence: Synthetic oligonucleotide
ggagcgguagugcugcugg

SEQ ID NO: 1190426 - RNA, 19 nt, Artificial Sequence
  Description of Artificial Sequence: Synthetic oligonucleotide
gagggauagcuagacgucc

SEQ ID NO: 1190427 - RNA, 19 nt, Artificial Sequence
  Description of Artificial Sequence: Synthetic oligonucleotide
auagcuagacguccucgcu

SEQ ID NO: 1190428 - RNA, 19 nt, Artificial Sequence
  Description of Artificial Sequence: Synthetic oligonucleotide
ggcuagugagaucaugucc

SEQ ID NO: 1190429 - RNA, 19 nt, Artificial Sequence
  Description of Artificial Sequence: Synthetic oligonucleotide
ggaggcacgaccagaaggg

SEQ ID NO: 1190430 - RNA, 19 nt, Artificial Sequence
  Description of Artificial Sequence: Synthetic oligonucleotide
ggaucucguggcuucauag

SEQ ID NO: 1190431 - RNA, 19 nt, Artificial Sequence
  Description of Artificial Sequence: Synthetic oligonucleotide
agccccuuuguuuccgggg

SEQ ID NO: 1190432 - RNA, 19 nt, Artificial Sequence
  Description of Artificial Sequence: Synthetic oligonucleotide
agguaaccccgagaagucc

SEQ ID NO: 1190433 - RNA, 19 nt, Artificial Sequence
  Description of Artificial Sequence: Synthetic oligonucleotide
acuugaguaggccgaugug

SEQ ID NO: 1190434 - RNA, 19 nt, Artificial Sequence
  Description of Artificial Sequence: Synthetic oligonucleotide
guaagggugucucggcggc

SEQ ID NO: 1190435 - RNA, 19 nt, Artificial Sequence
  Description of Artificial Sequence: Synthetic oligonucleotide
guaggagcgguagugcugc

SEQ ID NO: 1190436 - RNA, 19 nt, Artificial Sequence
  Description of Artificial Sequence: Synthetic oligonucleotide
cuugaguaggccgauguga

SEQ ID NO: 1190437 - RNA, 19 nt, Artificial Sequence
  Description of Artificial Sequence: Synthetic oligonucleotide
auagacucgucgaacaaau

SEQ ID NO: 1190438 - RNA, 19 nt, Artificial Sequence
  Description of Artificial Sequence: Synthetic oligonucleotide
gaagggccgggguucuacg

SEQ ID NO: 1190439 - RNA, 19 nt, Artificial Sequence
  Description of Artificial Sequence: Synthetic oligonucleotide
gaaccagacgcccggccgc

SEQ ID NO: 1190440 - RNA, 19 nt, Artificial Sequence
  Description of Artificial Sequence: Synthetic oligonucleotide
uagcuagacguccucgcuc

SEQ ID NO: 1190441 - RNA, 19 nt, Artificial Sequence
  Description of Artificial Sequence: Synthetic oligonucleotide
uuaauccgcucuggugugg

SEQ ID NO: 1190442 - RNA, 19 nt, Artificial Sequence
  Description of Artificial Sequence: Synthetic oligonucleotide
caucauagacucgucgaac

SEQ ID NO: 1190443 - RNA, 19 nt, Artificial Sequence
  Description of Artificial Sequence: Synthetic oligonucleotide
ucguauaaaccaagcccau

SEQ ID NO: 1190444 - RNA, 19 nt, Artificial Sequence
  Description of Artificial Sequence: Synthetic oligonucleotide
gggcaguucacuaguaggg

SEQ ID NO: 1190445 - RNA, 19 nt, Artificial Sequence
  Description of Artificial Sequence: Synthetic oligonucleotide
ggaaaaguguaggacuaag

SEQ ID NO: 1190446 - RNA, 19 nt, Artificial Sequence
  Description of Artificial Sequence: Synthetic oligonucleotide
uguuuccggggccgguuag

SEQ ID NO: 1190447 - RNA, 19 nt, Artificial Sequence
  Description of Artificial Sequence: Synthetic oligonucleotide
ucuggaggagucccauccu

SEQ ID NO: 1190448 - RNA, 19 nt, Artificial Sequence
  Description of Artificial Sequence: Synthetic oligonucleotide
aacagacucuuuggaucuc

SEQ ID NO: 1190449 - RNA, 19 nt, Artificial Sequence
  Description of Artificial Sequence: Synthetic oligonucleotide
gcuagugagaucaugucca

SEQ ID NO: 1190450 - RNA, 19 nt, Artificial Sequence
  Description of Artificial Sequence: Synthetic oligonucleotide
guguggagaaaggcggugg

SEQ ID NO: 1190451 - RNA, 19 nt, Artificial Sequence
  Description of Artificial Sequence: Synthetic oligonucleotide
caaguagaaagugcucgug

SEQ ID NO: 1190452 - RNA, 19 nt, Artificial Sequence
  Description of Artificial Sequence: Synthetic oligonucleotide
gagagugucagcagggcaa

SEQ ID NO: 1190453 - RNA, 19 nt, Artificial Sequence
  Description of Artificial Sequence: Synthetic oligonucleotide
ggcacgaccagaagggagg

SEQ ID NO: 1190454 - RNA, 19 nt, Artificial Sequence
  Description of Artificial Sequence: Synthetic oligonucleotide
uggauaaguacagccgcuc

SEQ ID NO: 1190455 - RNA, 19 nt, Artificial Sequence
  Description of Artificial Sequence: Synthetic oligonucleotide
acucgucgaacaaauaaau

SEQ ID NO: 1190456 - RNA, 19 nt, Artificial Sequence
  Description of Artificial Sequence: Synthetic oligonucleotide
cagacgcaaacaugcggag

SEQ ID NO: 1190457 - RNA, 19 nt, Artificial Sequence
  Description of Artificial Sequence: Synthetic oligonucleotide
uucuacgaagggcucccaa

SEQ ID NO: 1190458 - RNA, 19 nt, Artificial Sequence
  Description of Artificial Sequence: Synthetic oligonucleotide
gaaaggagccccuuuguuu

SEQ ID NO: 1190459 - RNA, 19 nt, Artificial Sequence
  Description of Artificial Sequence: Synthetic oligonucleotide
cuccugguuaagacagccc

SEQ ID NO: 1190460 - RNA, 19 nt, Artificial Sequence
  Description of Artificial Sequence: Synthetic oligonucleotide
gaggaaaaguguaggacua

SEQ ID NO: 1190461 - RNA, 19 nt, Artificial Sequence
  Description of Artificial Sequence: Synthetic oligonucleotide
cauucaucauagacucguc

SEQ ID NO: 1190462 - RNA, 19 nt, Artificial Sequence
  Description of Artificial Sequence: Synthetic oligonucleotide
aacccgaggugggugacca

SEQ ID NO: 1190463 - RNA, 19 nt, Artificial Sequence
  Description of Artificial Sequence: Synthetic oligonucleotide
gcgccagggaaccagacgc

SEQ ID NO: 1190464 - RNA, 19 nt, Artificial Sequence
  Description of Artificial Sequence: Synthetic oligonucleotide
cacuauacucuguauguua

SEQ ID NO: 1190465 - RNA, 19 nt, Artificial Sequence
  Description of Artificial Sequence: Synthetic oligonucleotide
acaugcggagucagggugg

SEQ ID NO: 1190466 - RNA, 19 nt, Artificial Sequence
  Description of Artificial Sequence: Synthetic oligonucleotide
ucccgaaagccuucuccug

SEQ ID NO: 1190467 - RNA, 19 nt, Artificial Sequence
  Description of Artificial Sequence: Synthetic oligonucleotide
uagugcugcuggauaagua

SEQ ID NO: 1190468 - RNA, 19 nt, Artificial Sequence
  Description of Artificial Sequence: Synthetic oligonucleotide
caggagcgggguuauggag

SEQ ID NO: 1190469 - RNA, 19 nt, Artificial Sequence
  Description of Artificial Sequence: Synthetic oligonucleotide
aaaccccuccccacgggag

SEQ ID NO: 1190470 - RNA, 19 nt, Artificial Sequence
  Description of Artificial Sequence: Synthetic oligonucleotide
ugugucggcagcgccgcag

SEQ ID NO: 1190471 - RNA, 19 nt, Artificial Sequence
  Description of Artificial Sequence: Synthetic oligonucleotide
uggggaccgaggcggauac

SEQ ID NO: 1190472 - RNA, 19 nt, Artificial Sequence
  Description of Artificial Sequence: Synthetic oligonucleotide
acgaccagaagggaggaaa

SEQ ID NO: 1190473 - RNA, 19 nt, Artificial Sequence
  Description of Artificial Sequence: Synthetic oligonucleotide
uccgaaucaggugcaggca

SEQ ID NO: 1190474 - RNA, 19 nt, Artificial Sequence
  Description of Artificial Sequence: Synthetic oligonucleotide
aaacacgagggcgcgcgca

SEQ ID NO: 1190475 - RNA, 19 nt, Artificial Sequence
  Description of Artificial Sequence: Synthetic oligonucleotide
uaauccgcucugguguggc

SEQ ID NO: 1190476 - RNA, 19 nt, Artificial Sequence
  Description of Artificial Sequence: Synthetic oligonucleotide
caguauguacaaaccccuc

SEQ ID NO: 1190477 - RNA, 19 nt, Artificial Sequence
  Description of Artificial Sequence: Synthetic oligonucleotide
aagggccgggguucuacga

SEQ ID NO: 1190478 - RNA, 19 nt, Artificial Sequence
  Description of Artificial Sequence: Synthetic oligonucleotide
ggauagcuagacguccucg

SEQ ID NO: 1190479 - RNA, 19 nt, Artificial Sequence
  Description of Artificial Sequence: Synthetic oligonucleotide
guaacuggcuagccaggac

SEQ ID NO: 1190480 - RNA, 19 nt, Artificial Sequence
  Description of Artificial Sequence: Synthetic oligonucleotide
aaccaagcccaugcacaag

SEQ ID NO: 1190481 - RNA, 19 nt, Artificial Sequence
  Description of Artificial Sequence: Synthetic oligonucleotide
cucguggcuucauagucca

SEQ ID NO: 1190482 - RNA, 19 nt, Artificial Sequence
  Description of Artificial Sequence: Synthetic oligonucleotide
aaccagacgcccggccgcg

SEQ ID NO: 1190483 - RNA, 19 nt, Artificial Sequence
  Description of Artificial Sequence: Synthetic oligonucleotide
ggaguaagggugucucggc

SEQ ID NO: 1190484 - RNA, 19 nt, Artificial Sequence
  Description of Artificial Sequence: Synthetic oligonucleotide
ggagucccauccuucuggg

SEQ ID NO: 1190485 - RNA, 19 nt, Artificial Sequence
  Description of Artificial Sequence: Synthetic oligonucleotide
ucucggcggcaccaggaga

SEQ ID NO: 1190486 - RNA, 19 nt, Artificial Sequence
  Description of Artificial Sequence: Synthetic oligonucleotide
gcagucaccccugaaacac

SEQ ID NO: 1190487 - RNA, 19 nt, Artificial Sequence
  Description of Artificial Sequence: Synthetic oligonucleotide
guaggccgaugugacagag

SEQ ID NO: 1190488 - RNA, 19 nt, Artificial Sequence
  Description of Artificial Sequence: Synthetic oligonucleotide
cugagagugucagcagggc

SEQ ID NO: 1190489 - RNA, 19 nt, Artificial Sequence
  Description of Artificial Sequence: Synthetic oligonucleotide
cuacgaagggcucccaaaa

SEQ ID NO: 1190490 - RNA, 19 nt, Artificial Sequence
  Description of Artificial Sequence: Synthetic oligonucleotide
gaucucguggcuucauagu

SEQ ID NO: 1190491 - RNA, 19 nt, Artificial Sequence
  Description of Artificial Sequence: Synthetic oligonucleotide
gaaacacgagggcgcgcgc

SEQ ID NO: 1190492 - RNA, 19 nt, Artificial Sequence
  Description of Artificial Sequence: Synthetic oligonucleotide
guuuaauggcaguucguau

SEQ ID NO: 1190493 - RNA, 19 nt, Artificial Sequence
  Description of Artificial Sequence: Synthetic oligonucleotide
ucgcgauccuauguacacc

SEQ ID NO: 1190494 - RNA, 19 nt, Artificial Sequence
  Description of Artificial Sequence: Synthetic oligonucleotide
uccucucguuuaauccgcu

SEQ ID NO: 1190495 - RNA, 19 nt, Artificial Sequence
  Description of Artificial Sequence: Synthetic oligonucleotide
ccugguuaagacagcccgg

SEQ ID NO: 1190496 - RNA, 19 nt, Artificial Sequence
  Description of Artificial Sequence: Synthetic oligonucleotide
cucgucgaacaaauaaaua

SEQ ID NO: 1190497 - RNA, 19 nt, Artificial Sequence
  Description of Artificial Sequence: Synthetic oligonucleotide
agcccaacggugccugucu

SEQ ID NO: 1190498 - RNA, 19 nt, Artificial Sequence
  Description of Artificial Sequence: Synthetic oligonucleotide
cccugaaacacgagggcgc

SEQ ID NO: 1190499 - RNA, 19 nt, Artificial Sequence
  Description of Artificial Sequence: Synthetic oligonucleotide
aguaggccgaugugacaga

SEQ ID NO: 1190500 - RNA, 19 nt, Artificial Sequence
  Description of Artificial Sequence: Synthetic oligonucleotide
cgcgcagcgccuuaaauag

SEQ ID NO: 1190501 - RNA, 19 nt, Artificial Sequence
  Description of Artificial Sequence: Synthetic oligonucleotide
auguuuaauggcaguucgu

SEQ ID NO: 1190502 - RNA, 19 nt, Artificial Sequence
  Description of Artificial Sequence: Synthetic oligonucleotide
gggcagucaccccugaaac

SEQ ID NO: 1190503 - RNA, 19 nt, Artificial Sequence
  Description of Artificial Sequence: Synthetic oligonucleotide
gugucggcagcgccgcagg

SEQ ID NO: 1190504 - RNA, 19 nt, Artificial Sequence
  Description of Artificial Sequence: Synthetic oligonucleotide
uagacucgucgaacaaaua

SEQ ID NO: 1190505 - RNA, 19 nt, Artificial Sequence
  Description of Artificial Sequence: Synthetic oligonucleotide
uuguacuucgaaggcuguc

SEQ ID NO: 1190506 - RNA, 19 nt, Artificial Sequence
  Description of Artificial Sequence: Synthetic oligonucleotide
cacgagggcgcgcgcagcg

SEQ ID NO: 1190507 - RNA, 19 nt, Artificial Sequence
  Description of Artificial Sequence: Synthetic oligonucleotide
cagcacuugaguaggccga

SEQ ID NO: 1190508 - RNA, 19 nt, Artificial Sequence
  Description of Artificial Sequence: Synthetic oligonucleotide
caugcggagucaggguggg

SEQ ID NO: 1190509 - RNA, 19 nt, Artificial Sequence
  Description of Artificial Sequence: Synthetic oligonucleotide
gcaguucguauaaaccaag

SEQ ID NO: 1190510 - RNA, 19 nt, Artificial Sequence
  Description of Artificial Sequence: Synthetic oligonucleotide
cuguauguuacaguaugua

SEQ ID NO: 1190511 - RNA, 19 nt, Artificial Sequence
  Description of Artificial Sequence: Synthetic oligonucleotide
gguucuacgaagggcuccc

SEQ ID NO: 1190512 - RNA, 19 nt, Artificial Sequence
  Description of Artificial Sequence: Synthetic oligonucleotide
acggugccugucugcuccc

SEQ ID NO: 1190513 - RNA, 19 nt, Artificial Sequence
  Description of Artificial Sequence: Synthetic oligonucleotide
agccuucggcccuuguacu

SEQ ID NO: 1190514 - RNA, 19 nt, Artificial Sequence
  Description of Artificial Sequence: Synthetic oligonucleotide
uuguuuccggggccgguua

SEQ ID NO: 1190515 - RNA, 19 nt, Artificial Sequence
  Description of Artificial Sequence: Synthetic oligonucleotide
gugcucguggagccagccg

SEQ ID NO: 1190516 - RNA, 19 nt, Artificial Sequence
  Description of Artificial Sequence: Synthetic oligonucleotide
cgcgauccuauguacaccc

SEQ ID NO: 1190517 - RNA, 19 nt, Artificial Sequence
  Description of Artificial Sequence: Synthetic oligonucleotide
aggcacgaccagaagggag

SEQ ID NO: 1190518 - RNA, 19 nt, Artificial Sequence
  Description of Artificial Sequence: Synthetic oligonucleotide
uuuguuuccggggccgguu

SEQ ID NO: 1190519 - RNA, 19 nt, Artificial Sequence
  Description of Artificial Sequence: Synthetic oligonucleotide
cauagaguucccgcugcuc

SEQ ID NO: 1190520 - RNA, 19 nt, Artificial Sequence
  Description of Artificial Sequence: Synthetic oligonucleotide
cacuaguaggggcugagcu

SEQ ID NO: 1190521 - RNA, 19 nt, Artificial Sequence
  Description of Artificial Sequence: Synthetic oligonucleotide
cauagacucgucgaacaaa

SEQ ID NO: 1190522 - RNA, 19 nt, Artificial Sequence
  Description of Artificial Sequence: Synthetic oligonucleotide
gcuccccuagucccgaaag

SEQ ID NO: 1190523 - RNA, 19 nt, Artificial Sequence
  Description of Artificial Sequence: Synthetic oligonucleotide
agacgcaaacaugcggagu

SEQ ID NO: 1190524 - RNA, 19 nt, Artificial Sequence
  Description of Artificial Sequence: Synthetic oligonucleotide
uccgcucugguguggcuuc

SEQ ID NO: 1190525 - RNA, 19 nt, Artificial Sequence
  Description of Artificial Sequence: Synthetic oligonucleotide
ccucauucugugucggcag

SEQ ID NO: 1190526 - RNA, 19 nt, Artificial Sequence
  Description of Artificial Sequence: Synthetic oligonucleotide
ucggcccuuguacuucgaa

SEQ ID NO: 1190527 - RNA, 19 nt, Artificial Sequence
  Description of Artificial Sequence: Synthetic oligonucleotide
gguuauggagaaggugcag

SEQ ID NO: 1190528 - RNA, 19 nt, Artificial Sequence
  Description of Artificial Sequence: Synthetic oligonucleotide
aggcggauacauucaucau

SEQ ID NO: 1190529 - RNA, 19 nt, Artificial Sequence
  Description of Artificial Sequence: Synthetic oligonucleotide
agggauagcuagacguccu

SEQ ID NO: 1190530 - RNA, 19 nt, Artificial Sequence
  Description of Artificial Sequence: Synthetic oligonucleotide
gguccgaaucaggugcagg

SEQ ID NO: 1190531 - RNA, 19 nt, Artificial Sequence
  Description of Artificial Sequence: Synthetic oligonucleotide
ggcgguaggagcgguagug

SEQ ID NO: 1190532 - RNA, 19 nt, Artificial Sequence
  Description of Artificial Sequence: Synthetic oligonucleotide
cacuugaguaggccgaugu

SEQ ID NO: 1190533 - RNA, 19 nt, Artificial Sequence
  Description of Artificial Sequence: Synthetic oligonucleotide
agggccgggguucuacgaa

SEQ ID NO: 1190534 - RNA, 19 nt, Artificial Sequence
  Description of Artificial Sequence: Synthetic oligonucleotide
agggcgcgcgcagcgaagg

SEQ ID NO: 1190535 - RNA, 19 nt, Artificial Sequence
  Description of Artificial Sequence: Synthetic oligonucleotide
cugagcccaacggugccug

SEQ ID NO: 1190536 - RNA, 19 nt, Artificial Sequence
  Description of Artificial Sequence: Synthetic oligonucleotide
ccccugaaacacgagggcg

SEQ ID NO: 1190537 - RNA, 19 nt, Artificial Sequence
  Description of Artificial Sequence: Synthetic oligonucleotide
gggaucacauccacagcug

SEQ ID NO: 1190538 - RNA, 19 nt, Artificial Sequence
  Description of Artificial Sequence: Synthetic oligonucleotide
cacgggagcgggacuccgc

SEQ ID NO: 1190539 - RNA, 19 nt, Artificial Sequence
  Description of Artificial Sequence: Synthetic oligonucleotide
gggccgguugagcaggccc

SEQ ID NO: 1190540 - RNA, 19 nt, Artificial Sequence
  Description of Artificial Sequence: Synthetic oligonucleotide
uccguaggucacagcugaa

SEQ ID NO: 1190541 - RNA, 19 nt, Artificial Sequence
  Description of Artificial Sequence: Synthetic oligonucleotide
cuggauaaguacagccgcu

SEQ ID NO: 1190542 - RNA, 19 nt, Artificial Sequence
  Description of Artificial Sequence: Synthetic oligonucleotide
ggcggcaccaggagaaagc

SEQ ID NO: 1190543 - RNA, 19 nt, Artificial Sequence
  Description of Artificial Sequence: Synthetic oligonucleotide
ggcaguucguauaaaccaa

SEQ ID NO: 1190544 - RNA, 19 nt, Artificial Sequence
  Description of Artificial Sequence: Synthetic oligonucleotide
accgaggcggauacauuca

SEQ ID NO: 1190545 - RNA, 19 nt, Artificial Sequence
  Description of Artificial Sequence: Synthetic oligonucleotide
agacgcccggccgcgcagc

SEQ ID NO: 1190546 - RNA, 19 nt, Artificial Sequence
  Description of Artificial Sequence: Synthetic oligonucleotide
gcuucagguaaccccgaga

SEQ ID NO: 1190547 - RNA, 19 nt, Artificial Sequence
  Description of Artificial Sequence: Synthetic oligonucleotide
acgcaaacaugcggaguca

SEQ ID NO: 1190548 - RNA, 19 nt, Artificial Sequence
  Description of Artificial Sequence: Synthetic oligonucleotide
uaagggugucucggcggca

SEQ ID NO: 1190549 - RNA, 19 nt, Artificial Sequence
  Description of Artificial Sequence: Synthetic oligonucleotide
caggaaccucaugauuuuc

SEQ ID NO: 1190550 - RNA, 19 nt, Artificial Sequence
  Description of Artificial Sequence: Synthetic oligonucleotide
ggagccccuuuguuuccgg

SEQ ID NO: 1190551 - RNA, 19 nt, Artificial Sequence
  Description of Artificial Sequence: Synthetic oligonucleotide
gugggugaccagagucagg

SEQ ID NO: 1190552 - RNA, 19 nt, Artificial Sequence
  Description of Artificial Sequence: Synthetic oligonucleotide
ugacucgugcugccucaua

SEQ ID NO: 1190553 - RNA, 19 nt, Artificial Sequence
  Description of Artificial Sequence: Synthetic oligonucleotide
ggggcagucaccccugaaa

SEQ ID NO: 1190554 - RNA, 19 nt, Artificial Sequence
  Description of Artificial Sequence: Synthetic oligonucleotide
cucguggagccagccgggg

SEQ ID NO: 1190555 - RNA, 19 nt, Artificial Sequence
  Description of Artificial Sequence: Synthetic oligonucleotide
uucggcccuuguacuucga

SEQ ID NO: 1190556 - RNA, 19 nt, Artificial Sequence
  Description of Artificial Sequence: Synthetic oligonucleotide
gggccgggguucuacgaag

SEQ ID NO: 1190557 - RNA, 19 nt, Artificial Sequence
  Description of Artificial Sequence: Synthetic oligonucleotide
ggauaaguacagccgcucu

SEQ ID NO: 1190558 - RNA, 19 nt, Artificial Sequence
  Description of Artificial Sequence: Synthetic oligonucleotide
gccgggguucuacgaaggg

SEQ ID NO: 1190559 - RNA, 19 nt, Artificial Sequence
  Description of Artificial Sequence: Synthetic oligonucleotide
ggguuauggagaaggugca

SEQ ID NO: 1190560 - RNA, 19 nt, Artificial Sequence
  Description of Artificial Sequence: Synthetic oligonucleotide
cucgcucaaagggcaguuc

SEQ ID NO: 1190561 - RNA, 19 nt, Artificial Sequence
  Description of Artificial Sequence: Synthetic oligonucleotide
ugagcccaacggugccugu

SEQ ID NO: 1190562 - RNA, 19 nt, Artificial Sequence
  Description of Artificial Sequence: Synthetic oligonucleotide
guagugcugcuggauaagu

SEQ ID NO: 1190563 - RNA, 19 nt, Artificial Sequence
  Description of Artificial Sequence: Synthetic oligonucleotide
gagcccaacggugccuguc

SEQ ID NO: 1190564 - RNA, 19 nt, Artificial Sequence
  Description of Artificial Sequence: Synthetic oligonucleotide
caacggugccugucugcuc

SEQ ID NO: 1190565 - RNA, 19 nt, Artificial Sequence
  Description of Artificial Sequence: Synthetic oligonucleotide
ccguaggucacagcugaag

SEQ ID NO: 1190566 - RNA, 19 nt, Artificial Sequence
  Description of Artificial Sequence: Synthetic oligonucleotide
gccucgcgauccuauguac

SEQ ID NO: 1190567 - RNA, 19 nt, Artificial Sequence
  Description of Artificial Sequence: Synthetic oligonucleotide
ggacauggucucacugagc

SEQ ID NO: 1190568 - RNA, 19 nt, Artificial Sequence
  Description of Artificial Sequence: Synthetic oligonucleotide
ggaggagucccauccuucu

SEQ ID NO: 1190569 - RNA, 19 nt, Artificial Sequence
  Description of Artificial Sequence: Synthetic oligonucleotide
ggccgggguucuacgaagg

SEQ ID NO: 1190570 - RNA, 19 nt, Artificial Sequence
  Description of Artificial Sequence: Synthetic oligonucleotide
ggucagguggccaguccug

SEQ ID NO: 1190571 - RNA, 19 nt, Artificial Sequence
  Description of Artificial Sequence: Synthetic oligonucleotide
gcgguggagaggucaggug

SEQ ID NO: 1190572 - RNA, 19 nt, Artificial Sequence
  Description of Artificial Sequence: Synthetic oligonucleotide
gagggcgcgcgcagcgaag

SEQ ID NO: 1190573 - RNA, 19 nt, Artificial Sequence
  Description of Artificial Sequence: Synthetic oligonucleotide
ccgggguucuacgaagggc

SEQ ID NO: 1190574 - RNA, 19 nt, Artificial Sequence
  Description of Artificial Sequence: Synthetic oligonucleotide
cguauaaaccaagcccaug

SEQ ID NO: 1190575 - RNA, 19 nt, Artificial Sequence
  Description of Artificial Sequence: Synthetic oligonucleotide
gguaaccccgagaaguccu

SEQ ID NO: 1190576 - RNA, 19 nt, Artificial Sequence
  Description of Artificial Sequence: Synthetic oligonucleotide
ggugucucggcggcaccag

SEQ ID NO: 1190577 - RNA, 19 nt, Artificial Sequence
  Description of Artificial Sequence: Synthetic oligonucleotide
acccgaggugggugaccag

SEQ ID NO: 1190578 - RNA, 19 nt, Artificial Sequence
  Description of Artificial Sequence: Synthetic oligonucleotide
caccgggaucacauccaca

SEQ ID NO: 1190579 - RNA, 19 nt, Artificial Sequence
  Description of Artificial Sequence: Synthetic oligonucleotide
gcgguaggagcgguagugc

SEQ ID NO: 1190580 - RNA, 19 nt, Artificial Sequence
  Description of Artificial Sequence: Synthetic oligonucleotide
guguggcuucgaugaucug

SEQ ID NO: 1190581 - RNA, 19 nt, Artificial Sequence
  Description of Artificial Sequence: Synthetic oligonucleotide
cggcucugagccuucggcc

SEQ ID NO: 1190582 - RNA, 19 nt, Artificial Sequence
  Description of Artificial Sequence: Synthetic oligonucleotide
caauucccucauucugugu

SEQ ID NO: 1190583 - RNA, 19 nt, Artificial Sequence
  Description of Artificial Sequence: Synthetic oligonucleotide
augacucgugcugccucau

SEQ ID NO: 1190584 - RNA, 19 nt, Artificial Sequence
  Description of Artificial Sequence: Synthetic oligonucleotide
ccucgcgauccuauguaca

SEQ ID NO: 1190585 - RNA, 19 nt, Artificial Sequence
  Description of Artificial Sequence: Synthetic oligonucleotide
ccucucguuuaauccgcuc

SEQ ID NO: 1190586 - RNA, 19 nt, Artificial Sequence
  Description of Artificial Sequence: Synthetic oligonucleotide
ggacuccgccucgcgaucc

SEQ ID NO: 1190587 - RNA, 19 nt, Artificial Sequence
  Description of Artificial Sequence: Synthetic oligonucleotide
ccgggaucacauccacagc

SEQ ID NO: 1190588 - RNA, 19 nt, Artificial Sequence
  Description of Artificial Sequence: Synthetic oligonucleotide
cagacucuuuggaucucgu

SEQ ID NO: 1190589 - RNA, 19 nt, Artificial Sequence
  Description of Artificial Sequence: Synthetic oligonucleotide
gcgcgcgcagcgaaggcag

SEQ ID NO: 1190590 - RNA, 19 nt, Artificial Sequence
  Description of Artificial Sequence: Synthetic oligonucleotide
cgcgccagggaaccagacg

SEQ ID NO: 1190591 - RNA, 19 nt, Artificial Sequence
  Description of Artificial Sequence: Synthetic oligonucleotide
gaaaggcgguggagagguc

SEQ ID NO: 1190592 - RNA, 19 nt, Artificial Sequence
  Description of Artificial Sequence: Synthetic oligonucleotide
gggaccaaaccaggaggca

SEQ ID NO: 1190593 - RNA, 19 nt, Artificial Sequence
  Description of Artificial Sequence: Synthetic oligonucleotide
cuucgaaggcugucuggau

SEQ ID NO: 1190594 - RNA, 19 nt, Artificial Sequence
  Description of Artificial Sequence: Synthetic oligonucleotide
guucuacgaagggcuccca

SEQ ID NO: 1190595 - RNA, 19 nt, Artificial Sequence
  Description of Artificial Sequence: Synthetic oligonucleotide
cgcaaacaugcggagucag

SEQ ID NO: 1190596 - RNA, 19 nt, Artificial Sequence
  Description of Artificial Sequence: Synthetic oligonucleotide
gcgauccuauguacacccc

SEQ ID NO: 1190597 - RNA, 19 nt, Artificial Sequence
  Description of Artificial Sequence: Synthetic oligonucleotide
cuagucccgaaagccuucu

SEQ ID NO: 1190598 - RNA, 19 nt, Artificial Sequence
  Description of Artificial Sequence: Synthetic oligonucleotide
cgggguucuacgaagggcu

SEQ ID NO: 1190599 - RNA, 19 nt, Artificial Sequence
  Description of Artificial Sequence: Synthetic oligonucleotide
ccgcgcagcgccuuaaaua

SEQ ID NO: 1190600 - RNA, 19 nt, Artificial Sequence
  Description of Artificial Sequence: Synthetic oligonucleotide
gggacuccgccucgcgauc

SEQ ID NO: 1190601 - RNA, 19 nt, Artificial Sequence
  Description of Artificial Sequence: Synthetic oligonucleotide
gacuccgccucgcgauccu

SEQ ID NO: 1190602 - RNA, 19 nt, Artificial Sequence
  Description of Artificial Sequence: Synthetic oligonucleotide
gggguucuacgaagggcuc

SEQ ID NO: 1190603 - RNA, 19 nt, Artificial Sequence
  Description of Artificial Sequence: Synthetic oligonucleotide
gggaccgaggcggauacau

SEQ ID NO: 1190604 - RNA, 19 nt, Artificial Sequence
  Description of Artificial Sequence: Synthetic oligonucleotide
ggcgcgcgcagcgaaggca

SEQ ID NO: 1190605 - RNA, 19 nt, Artificial Sequence
  Description of Artificial Sequence: Synthetic oligonucleotide
guacagccgcucugcggcu

SEQ ID NO: 1190606 - RNA, 19 nt, Artificial Sequence
  Description of Artificial Sequence: Synthetic oligonucleotide
gggugucucggcggcacca

SEQ ID NO: 1190607 - RNA, 19 nt, Artificial Sequence
  Description of Artificial Sequence: Synthetic oligonucleotide
gcacgaccagaagggagga

SEQ ID NO: 1190608 - RNA, 19 nt, Artificial Sequence
  Description of Artificial Sequence: Synthetic oligonucleotide
ccucaugauuuuccgggcu

SEQ ID NO: 1190609 - RNA, 19 nt, Artificial Sequence
  Description of Artificial Sequence: Synthetic oligonucleotide
cgcagcgaaggcagcggug

SEQ ID NO: 1190610 - RNA, 19 nt, Artificial Sequence
  Description of Artificial Sequence: Synthetic oligonucleotide
cgaccagaagggaggaaaa

SEQ ID NO: 1190611 - RNA, 19 nt, Artificial Sequence
  Description of Artificial Sequence: Synthetic oligonucleotide
ggcgguggagaggucaggu

SEQ ID NO: 1190612 - RNA, 19 nt, Artificial Sequence
  Description of Artificial Sequence: Synthetic oligonucleotide
cccgaggugggugaccaga

SEQ ID NO: 1190613 - RNA, 19 nt, Artificial Sequence
  Description of Artificial Sequence: Synthetic oligonucleotide
gcgggacuccgccucgcga

SEQ ID NO: 1190614 - RNA, 19 nt, Artificial Sequence
  Description of Artificial Sequence: Synthetic oligonucleotide
ggcuccccuagucccgaaa

SEQ ID NO: 1190615 - RNA, 19 nt, Artificial Sequence
  Description of Artificial Sequence: Synthetic oligonucleotide
gggcgcgcgcagcgaaggc

SEQ ID NO: 1190616 - RNA, 19 nt, Artificial Sequence
  Description of Artificial Sequence: Synthetic oligonucleotide
ccacgggagcgggacuccg

SEQ ID NO: 1190617 - RNA, 19 nt, Artificial Sequence
  Description of Artificial Sequence: Synthetic oligonucleotide
cacgaccagaagggaggaa

SEQ ID NO: 1190618 - RNA, 19 nt, Artificial Sequence
  Description of Artificial Sequence: Synthetic oligonucleotide
gccaggacauggucucacu

SEQ ID NO: 1190619 - RNA, 19 nt, Artificial Sequence
  Description of Artificial Sequence: Synthetic oligonucleotide
cgcagcgccuuaaauagau

SEQ ID NO: 1190620 - RNA, 19 nt, Artificial Sequence
  Description of Artificial Sequence: Synthetic oligonucleotide
ccccuagucccgaaagccu

SEQ ID NO: 1190621 - RNA, 19 nt, Artificial Sequence
  Description of Artificial Sequence: Synthetic oligonucleotide
ccaacggugccugucugcu

SEQ ID NO: 1190622 - RNA, 19 nt, Artificial Sequence
  Description of Artificial Sequence: Synthetic oligonucleotide
ggggagggaacagacucuu

SEQ ID NO: 1190623 - RNA, 19 nt, Artificial Sequence
  Description of Artificial Sequence: Synthetic oligonucleotide
ccgcgccagggaaccagac

SEQ ID NO: 1190624 - RNA, 19 nt, Artificial Sequence
  Description of Artificial Sequence: Synthetic oligonucleotide
ggccgguugagcaggcccu

SEQ ID NO: 1190625 - RNA, 19 nt, Artificial Sequence
  Description of Artificial Sequence: Synthetic oligonucleotide
gcuagacguccucgcucaa

SEQ ID NO: 1190626 - RNA, 19 nt, Artificial Sequence
  Description of Artificial Sequence: Synthetic oligonucleotide
cccuagucccgaaagccuu

SEQ ID NO: 1190627 - RNA, 19 nt, Artificial Sequence
  Description of Artificial Sequence: Synthetic oligonucleotide
cugugucggcagcgccgca

SEQ ID NO: 1190628 - RNA, 19 nt, Artificial Sequence
  Description of Artificial Sequence: Synthetic oligonucleotide
ggugcaggcagggcuccgu

SEQ ID NO: 1190629 - RNA, 19 nt, Artificial Sequence
  Description of Artificial Sequence: Synthetic oligonucleotide
gcgccgcaggaaccucaug

SEQ ID NO: 1190630 - RNA, 19 nt, Artificial Sequence
  Description of Artificial Sequence: Synthetic oligonucleotide
ccgaugugacagagaaggu

SEQ ID NO: 1190631 - RNA, 19 nt, Artificial Sequence
  Description of Artificial Sequence: Synthetic oligonucleotide
ccgcucugguguggcuucg

SEQ ID NO: 1190632 - RNA, 19 nt, Artificial Sequence
  Description of Artificial Sequence: Synthetic oligonucleotide
gcgcagcgccuuaaauaga

SEQ ID NO: 1190633 - RNA, 19 nt, Artificial Sequence
  Description of Artificial Sequence: Synthetic oligonucleotide
cagccgcucugcggcucug

SEQ ID NO: 1190634 - RNA, 19 nt, Artificial Sequence
  Description of Artificial Sequence: Synthetic oligonucleotide
gcgcagcgaaggcagcggu

SEQ ID NO: 1190635 - RNA, 19 nt, Artificial Sequence
  Description of Artificial Sequence: Synthetic oligonucleotide
gccgcgcagcgccuuaaau

SEQ ID NO: 1190636 - RNA, 19 nt, Artificial Sequence
  Description of Artificial Sequence: Synthetic oligonucleotide
gcgggguuauggagaaggu

SEQ ID NO: 1190637 - RNA, 19 nt, Artificial Sequence
  Description of Artificial Sequence: Synthetic oligonucleotide
gccgcgccagggaaccaga

SEQ ID NO: 1190638 - RNA, 19 nt, Artificial Sequence
  Description of Artificial Sequence: Synthetic oligonucleotide
ggccgcgcagcgccuuaaa

SEQ ID NO: 1190639 - RNA, 19 nt, Artificial Sequence
  Description of Artificial Sequence: Synthetic oligonucleotide
cgccgcgccagggaaccag

SEQ ID NO: 1190640 - RNA, 19 nt, Artificial Sequence
  Description of Artificial Sequence: Synthetic oligonucleotide
cgccucgcgauccuaugua

SEQ ID NO: 1190641 - RNA, 19 nt, Artificial Sequence
  Description of Artificial Sequence: Synthetic oligonucleotide
ccgaggcggauacauucau

SEQ ID NO: 1190642 - RNA, 19 nt, Artificial Sequence
  Description of Artificial Sequence: Synthetic oligonucleotide
ccgccucgcgauccuaugu

SEQ ID NO: 1190643 - RNA, 19 nt, Artificial Sequence
  Description of Artificial Sequence: Synthetic oligonucleotide
ggggaccgaggcggauaca

SEQ ID NO: 1190644 - RNA, 19 nt, Artificial Sequence
  Description of Artificial Sequence: Synthetic oligonucleotide
ggaccgaggcggauacauu

SEQ ID NO: 1190645 - RNA, 19 nt, Artificial Sequence
  Description of Artificial Sequence: Synthetic oligonucleotide
gcagcgccuuaaauagauu

SEQ ID NO: 1190646 - RNA, 19 nt, Artificial Sequence
  Description of Artificial Sequence: Synthetic oligonucleotide
cgggacuccgccucgcgau

SEQ ID NO: 1190647 - RNA, 19 nt, Artificial Sequence
  Description of Artificial Sequence: Synthetic oligonucleotide
gggcuccccuagucccgaa

SEQ ID NO: 1190648 - RNA, 19 nt, Artificial Sequence
  Description of Artificial Sequence: Synthetic oligonucleotide
gggagggaacagacucuuu

SEQ ID NO: 1190649 - RNA, 19 nt, Artificial Sequence
  Description of Artificial Sequence: Synthetic oligonucleotide
gguggggaccgaggcggau

SEQ ID NO: 1190650 - RNA, 19 nt, Artificial Sequence
  Description of Artificial Sequence: Synthetic oligonucleotide
ccucgcucaaagggcaguu

SEQ ID NO: 1190651 - RNA, 19 nt, Artificial Sequence
  Description of Artificial Sequence: Synthetic oligonucleotide
cgguggggaccgaggcgga

SEQ ID NO: 1190652 - RNA, 19 nt, Artificial Sequence
  Description of Artificial Sequence: Synthetic oligonucleotide
cgggagcgggacuccgccu

SEQ ID NO: 1190653 - RNA, 19 nt, Artificial Sequence
  Description of Artificial Sequence: Synthetic oligonucleotide
cggcgguaggagcgguagu

SEQ ID NO: 1190654 - RNA, 19 nt, Artificial Sequence
  Description of Artificial Sequence: Synthetic oligonucleotide
aaagccgugaucaagaucc

SEQ ID NO: 1190655 - RNA, 19 nt, Artificial Sequence
  Description of Artificial Sequence: Synthetic oligonucleotide
uguuaugugacccaucagg

SEQ ID NO: 1190656 - RNA, 19 nt, Artificial Sequence
  Description of Artificial Sequence: Synthetic oligonucleotide
uauuuaugcuuauaaaugg

SEQ ID NO: 1190657 - RNA, 19 nt, Artificial Sequence
  Description of Artificial Sequence: Synthetic oligonucleotide
aaaauugacagaaaagcac

SEQ ID NO: 1190658 - RNA, 19 nt, Artificial Sequence
  Description of Artificial Sequence: Synthetic oligonucleotide
aaauugacagaaaagcacc

SEQ ID NO: 1190659 - RNA, 19 nt, Artificial Sequence
  Description of Artificial Sequence: Synthetic oligonucleotide
uaagaaaggaaucuaacga

SEQ ID NO: 1190660 - RNA, 19 nt, Artificial Sequence
  Description of Artificial Sequence: Synthetic oligonucleotide
aguaagugggccuuggagc

SEQ ID NO: 1190661 - RNA, 19 nt, Artificial Sequence
  Description of Artificial Sequence: Synthetic oligonucleotide
aaccauacggucucuaugg

SEQ ID NO: 1190662 - RNA, 19 nt, Artificial Sequence
  Description of Artificial Sequence: Synthetic oligonucleotide
acuucgaccacauggaugg

SEQ ID NO: 1190663 - RNA, 19 nt, Artificial Sequence
  Description of Artificial Sequence: Synthetic oligonucleotide
cuaagaaaggaaucuaacg

SEQ ID NO: 1190664 - RNA, 19 nt, Artificial Sequence
  Description of Artificial Sequence: Synthetic oligonucleotide
gaaucuaacgagugcaugg

SEQ ID NO: 1190665 - RNA, 19 nt, Artificial Sequence
  Description of Artificial Sequence: Synthetic oligonucleotide
guuguagucgcauaagagg

SEQ ID NO: 1190666 - RNA, 19 nt, Artificial Sequence
  Description of Artificial Sequence: Synthetic oligonucleotide
uuaugcuuauaaaugggag

SEQ ID NO: 1190667 - RNA, 19 nt, Artificial Sequence
  Description of Artificial Sequence: Synthetic oligonucleotide
ucuuucacacaccaguuag

SEQ ID NO: 1190668 - RNA, 19 nt, Artificial Sequence
  Description of Artificial Sequence: Synthetic oligonucleotide
aacugcuuaaacuuguggu

SEQ ID NO: 1190669 - RNA, 19 nt, Artificial Sequence
  Description of Artificial Sequence: Synthetic oligonucleotide
uuauaaaugggagagggga

SEQ ID NO: 1190670 - RNA, 19 nt, Artificial Sequence
  Description of Artificial Sequence: Synthetic oligonucleotide
uuuaugcuuauaaauggga

SEQ ID NO: 1190671 - RNA, 19 nt, Artificial Sequence
  Description of Artificial Sequence: Synthetic oligonucleotide
aaacgaguuucuaagaaag

SEQ ID NO: 1190672 - RNA, 19 nt, Artificial Sequence
  Description of Artificial Sequence: Synthetic oligonucleotide
uuuaugaggaucacuccag

SEQ ID NO: 1190673 - RNA, 19 nt, Artificial Sequence
  Description of Artificial Sequence: Synthetic oligonucleotide
uguuguagucgcauaagag

SEQ ID NO: 1190674 - RNA, 19 nt, Artificial Sequence
  Description of Artificial Sequence: Synthetic oligonucleotide
aaucuaacgagugcauggc

SEQ ID NO: 1190675 - RNA, 19 nt, Artificial Sequence
  Description of Artificial Sequence: Synthetic oligonucleotide
aguauggaggcucaaguag

SEQ ID NO: 1190676 - RNA, 19 nt, Artificial Sequence
  Description of Artificial Sequence: Synthetic oligonucleotide
agggauagcgucaagagac

SEQ ID NO: 1190677 - RNA, 19 nt, Artificial Sequence
  Description of Artificial Sequence: Synthetic oligonucleotide
uuuuacaccaauguaacaa

SEQ ID NO: 1190678 - RNA, 19 nt, Artificial Sequence
  Description of Artificial Sequence: Synthetic oligonucleotide
cagaaaacgaguuucuaag

SEQ ID NO: 1190679 - RNA, 19 nt, Artificial Sequence
  Description of Artificial Sequence: Synthetic oligonucleotide
uggucgaaggcauuguugg

SEQ ID NO: 1190680 - RNA, 19 nt, Artificial Sequence
  Description of Artificial Sequence: Synthetic oligonucleotide
uaugcuuauaaaugggaga

SEQ ID NO: 1190681 - RNA, 19 nt, Artificial Sequence
  Description of Artificial Sequence: Synthetic oligonucleotide
uuguagucgcauaagaggu

SEQ ID NO: 1190682 - RNA, 19 nt, Artificial Sequence
  Description of Artificial Sequence: Synthetic oligonucleotide
aaaacgaguuucuaagaaa

SEQ ID NO: 1190683 - RNA, 19 nt, Artificial Sequence
  Description of Artificial Sequence: Synthetic oligonucleotide
aaacuucgcaguaaguggg

SEQ ID NO: 1190684 - RNA, 19 nt, Artificial Sequence
  Description of Artificial Sequence: Synthetic oligonucleotide
acaagagaucuucacacag

SEQ ID NO: 1190685 - RNA, 19 nt, Artificial Sequence
  Description of Artificial Sequence: Synthetic oligonucleotide
ucgggcuuuauucuugggg

SEQ ID NO: 1190686 - RNA, 19 nt, Artificial Sequence
  Description of Artificial Sequence: Synthetic oligonucleotide
aucggcucaauuaucaggc

SEQ ID NO: 1190687 - RNA, 19 nt, Artificial Sequence
  Description of Artificial Sequence: Synthetic oligonucleotide
gaucggcucaauuaucagg

SEQ ID NO: 1190688 - RNA, 19 nt, Artificial Sequence
  Description of Artificial Sequence: Synthetic oligonucleotide
ugcugaucgcucauggugg

SEQ ID NO: 1190689 - RNA, 19 nt, Artificial Sequence
  Description of Artificial Sequence: Synthetic oligonucleotide
aaaccauacggucucuaug

SEQ ID NO: 1190690 - RNA, 19 nt, Artificial Sequence
  Description of Artificial Sequence: Synthetic oligonucleotide
ucaaguagaagauguagau

SEQ ID NO: 1190691 - RNA, 19 nt, Artificial Sequence
  Description of Artificial Sequence: Synthetic oligonucleotide
uguuuguuuaagcuuuaca

SEQ ID NO: 1190692 - RNA, 19 nt, Artificial Sequence
  Description of Artificial Sequence: Synthetic oligonucleotide
cauacuuguuacuccacgg

SEQ ID NO: 1190693 - RNA, 19 nt, Artificial Sequence
  Description of Artificial Sequence: Synthetic oligonucleotide
ucuauggaaacuucgcagu

SEQ ID NO: 1190694 - RNA, 19 nt, Artificial Sequence
  Description of Artificial Sequence: Synthetic oligonucleotide
uugcugaucgcucauggug

SEQ ID NO: 1190695 - RNA, 19 nt, Artificial Sequence
  Description of Artificial Sequence: Synthetic oligonucleotide
agaucccagagguagacag

SEQ ID NO: 1190696 - RNA, 19 nt, Artificial Sequence
  Description of Artificial Sequence: Synthetic oligonucleotide
cagcacuugagaaagcucc

SEQ ID NO: 1190697 - RNA, 19 nt, Artificial Sequence
  Description of Artificial Sequence: Synthetic oligonucleotide
auuuaugcuuauaaauggg

SEQ ID NO: 1190698 - RNA, 19 nt, Artificial Sequence
  Description of Artificial Sequence: Synthetic oligonucleotide
guuaugugacccaucaggg

SEQ ID NO: 1190699 - RNA, 19 nt, Artificial Sequence
  Description of Artificial Sequence: Synthetic oligonucleotide
uguuacuccacggugaccu

SEQ ID NO: 1190700 - RNA, 19 nt, Artificial Sequence
  Description of Artificial Sequence: Synthetic oligonucleotide
cagacuggggaccaggucg

SEQ ID NO: 1190701 - RNA, 19 nt, Artificial Sequence
  Description of Artificial Sequence: Synthetic oligonucleotide
ugauuugucugcaaauguc

SEQ ID NO: 1190702 - RNA, 19 nt, Artificial Sequence
  Description of Artificial Sequence: Synthetic oligonucleotide
ugagaaagcucccucugca

SEQ ID NO: 1190703 - RNA, 19 nt, Artificial Sequence
  Description of Artificial Sequence: Synthetic oligonucleotide
gugguugucagggauagcg

SEQ ID NO: 1190704 - RNA, 19 nt, Artificial Sequence
  Description of Artificial Sequence: Synthetic oligonucleotide
ucuaacgagugcauggcgu

SEQ ID NO: 1190705 - RNA, 19 nt, Artificial Sequence
  Description of Artificial Sequence: Synthetic oligonucleotide
aucucauucaguguacuuc

SEQ ID NO: 1190706 - RNA, 19 nt, Artificial Sequence
  Description of Artificial Sequence: Synthetic oligonucleotide
uauaggaguccccaucucu

SEQ ID NO: 1190707 - RNA, 19 nt, Artificial Sequence
  Description of Artificial Sequence: Synthetic oligonucleotide
aguugcugaucgcucaugg

SEQ ID NO: 1190708 - RNA, 19 nt, Artificial Sequence
  Description of Artificial Sequence: Synthetic oligonucleotide
ugaagacaucucuuggucc

SEQ ID NO: 1190709 - RNA, 19 nt, Artificial Sequence
  Description of Artificial Sequence: Synthetic oligonucleotide
aggaucauacuuguuacuc

SEQ ID NO: 1190710 - RNA, 19 nt, Artificial Sequence
  Description of Artificial Sequence: Synthetic oligonucleotide
aaaacuccuuuugcauucc

SEQ ID NO: 1190711 - RNA, 19 nt, Artificial Sequence
  Description of Artificial Sequence: Synthetic oligonucleotide
gauguuggcuauguguggg

SEQ ID NO: 1190712 - RNA, 19 nt, Artificial Sequence
  Description of Artificial Sequence: Synthetic oligonucleotide
aggaagacggggccaaggc

SEQ ID NO: 1190713 - RNA, 19 nt, Artificial Sequence
  Description of Artificial Sequence: Synthetic oligonucleotide
auaaaugggagaggggagg

SEQ ID NO: 1190714 - RNA, 19 nt, Artificial Sequence
  Description of Artificial Sequence: Synthetic oligonucleotide
ugguuaucgggcuuuauuc

SEQ ID NO: 1190715 - RNA, 19 nt, Artificial Sequence
  Description of Artificial Sequence: Synthetic oligonucleotide
ucgagcagaaggcauggcc

SEQ ID NO: 1190716 - RNA, 19 nt, Artificial Sequence
  Description of Artificial Sequence: Synthetic oligonucleotide
gaaaacgaguuucuaagaa

SEQ ID NO: 1190717 - RNA, 19 nt, Artificial Sequence
  Description of Artificial Sequence: Synthetic oligonucleotide
uggaucggcucaauuauca

SEQ ID NO: 1190718 - RNA, 19 nt, Artificial Sequence
  Description of Artificial Sequence: Synthetic oligonucleotide
uuagguccaaggcacaguc

SEQ ID NO: 1190719 - RNA, 19 nt, Artificial Sequence
  Description of Artificial Sequence: Synthetic oligonucleotide
ugcacuucgaccacaugga

SEQ ID NO: 1190720 - RNA, 19 nt, Artificial Sequence
  Description of Artificial Sequence: Synthetic oligonucleotide
gcuuauaaaugggagaggg

SEQ ID NO: 1190721 - RNA, 19 nt, Artificial Sequence
  Description of Artificial Sequence: Synthetic oligonucleotide
agcgucaagagaccucagc

SEQ ID NO: 1190722 - RNA, 19 nt, Artificial Sequence
  Description of Artificial Sequence: Synthetic oligonucleotide
gucaacuuguaaugggcgg

SEQ ID NO: 1190723 - RNA, 19 nt, Artificial Sequence
  Description of Artificial Sequence: Synthetic oligonucleotide
aguuucuaagaaaggaauc

SEQ ID NO: 1190724 - RNA, 19 nt, Artificial Sequence
  Description of Artificial Sequence: Synthetic oligonucleotide
uuggucaacagaagacaag

SEQ ID NO: 1190725 - RNA, 19 nt, Artificial Sequence
  Description of Artificial Sequence: Synthetic oligonucleotide
aaaaccauacggucucuau

SEQ ID NO: 1190726 - RNA, 19 nt, Artificial Sequence
  Description of Artificial Sequence: Synthetic oligonucleotide
ucuuugacccgucuccagc

SEQ ID NO: 1190727 - RNA, 19 nt, Artificial Sequence
  Description of Artificial Sequence: Synthetic oligonucleotide
ucgcauaagagguaauccu

SEQ ID NO: 1190728 - RNA, 19 nt, Artificial Sequence
  Description of Artificial Sequence: Synthetic oligonucleotide
uuaucgggcuuuauucuug

SEQ ID NO: 1190729 - RNA, 19 nt, Artificial Sequence
  Description of Artificial Sequence: Synthetic oligonucleotide
uuuucucgaucuguugugg

SEQ ID NO: 1190730 - RNA, 19 nt, Artificial Sequence
  Description of Artificial Sequence: Synthetic oligonucleotide
uuggucgaaggcauuguug

SEQ ID NO: 1190731 - RNA, 19 nt, Artificial Sequence
  Description of Artificial Sequence: Synthetic oligonucleotide
uuaugaggaucacuccagc

SEQ ID NO: 1190732 - RNA, 19 nt, Artificial Sequence
  Description of Artificial Sequence: Synthetic oligonucleotide
aacgaguuucuaagaaagg

SEQ ID NO: 1190733 - RNA, 19 nt, Artificial Sequence
  Description of Artificial Sequence: Synthetic oligonucleotide
accuauaggaguccccauc

SEQ ID NO: 1190734 - RNA, 19 nt, Artificial Sequence
  Description of Artificial Sequence: Synthetic oligonucleotide
ugaggaucacuccagcaaa

SEQ ID NO: 1190735 - RNA, 19 nt, Artificial Sequence
  Description of Artificial Sequence: Synthetic oligonucleotide
agaaaacgaguuucuaaga

SEQ ID NO: 1190736 - RNA, 19 nt, Artificial Sequence
  Description of Artificial Sequence: Synthetic oligonucleotide
ggcguguccaguuagcgcg

SEQ ID NO: 1190737 - RNA, 19 nt, Artificial Sequence
  Description of Artificial Sequence: Synthetic oligonucleotide
aggaggaucauacuuguua

SEQ ID NO: 1190738 - RNA, 19 nt, Artificial Sequence
  Description of Artificial Sequence: Synthetic oligonucleotide
uucuuggggagcgauggcg

SEQ ID NO: 1190739 - RNA, 19 nt, Artificial Sequence
  Description of Artificial Sequence: Synthetic oligonucleotide
gcugacaguguauuuaugc

SEQ ID NO: 1190740 - RNA, 19 nt, Artificial Sequence
  Description of Artificial Sequence: Synthetic oligonucleotide
uaucgggcuuuauucuugg

SEQ ID NO: 1190741 - RNA, 19 nt, Artificial Sequence
  Description of Artificial Sequence: Synthetic oligonucleotide
aaguauggaggcucaagua

SEQ ID NO: 1190742 - RNA, 19 nt, Artificial Sequence
  Description of Artificial Sequence: Synthetic oligonucleotide
cuugucucuggcaauuuuc

SEQ ID NO: 1190743 - RNA, 19 nt, Artificial Sequence
  Description of Artificial Sequence: Synthetic oligonucleotide
uggauguagaccuggcgcu

SEQ ID NO: 1190744 - RNA, 19 nt, Artificial Sequence
  Description of Artificial Sequence: Synthetic oligonucleotide
uuauucuuggggagcgaug

SEQ ID NO: 1190745 - RNA, 19 nt, Artificial Sequence
  Description of Artificial Sequence: Synthetic oligonucleotide
ugaucgcucaugguggcgg

SEQ ID NO: 1190746 - RNA, 19 nt, Artificial Sequence
  Description of Artificial Sequence: Synthetic oligonucleotide
acugcuuaaacuugugguu

SEQ ID NO: 1190747 - RNA, 19 nt, Artificial Sequence
  Description of Artificial Sequence: Synthetic oligonucleotide
aucuaacgagugcauggcg

SEQ ID NO: 1190748 - RNA, 19 nt, Artificial Sequence
  Description of Artificial Sequence: Synthetic oligonucleotide
acgaguuucuaagaaagga

SEQ ID NO: 1190749 - RNA, 19 nt, Artificial Sequence
  Description of Artificial Sequence: Synthetic oligonucleotide
acuugagaaagcucccucu

SEQ ID NO: 1190750 - RNA, 19 nt, Artificial Sequence
  Description of Artificial Sequence: Synthetic oligonucleotide
agguccaaggcacagucca

SEQ ID NO: 1190751 - RNA, 19 nt, Artificial Sequence
  Description of Artificial Sequence: Synthetic oligonucleotide
ggaaacuucgcaguaagug

SEQ ID NO: 1190752 - RNA, 19 nt, Artificial Sequence
  Description of Artificial Sequence: Synthetic oligonucleotide
agucgcauaagagguaauc

SEQ ID NO: 1190753 - RNA, 19 nt, Artificial Sequence
  Description of Artificial Sequence: Synthetic oligonucleotide
aacuucgcaguaagugggc

SEQ ID NO: 1190754 - RNA, 19 nt, Artificial Sequence
  Description of Artificial Sequence: Synthetic oligonucleotide
cuuugacccgucuccagcc

SEQ ID NO: 1190755 - RNA, 19 nt, Artificial Sequence
  Description of Artificial Sequence: Synthetic oligonucleotide
ucuguuguagucgcauaag

SEQ ID NO: 1190756 - RNA, 19 nt, Artificial Sequence
  Description of Artificial Sequence: Synthetic oligonucleotide
ucgaugcaaacuguuaugu

SEQ ID NO: 1190757 - RNA, 19 nt, Artificial Sequence
  Description of Artificial Sequence: Synthetic oligonucleotide
ucgguauuggucgaaggca

SEQ ID NO: 1190758 - RNA, 19 nt, Artificial Sequence
  Description of Artificial Sequence: Synthetic oligonucleotide
caguaagugggccuuggag

SEQ ID NO: 1190759 - RNA, 19 nt, Artificial Sequence
  Description of Artificial Sequence: Synthetic oligonucleotide
guuagcgcgaagcagaggu

SEQ ID NO: 1190760 - RNA, 19 nt, Artificial Sequence
  Description of Artificial Sequence: Synthetic oligonucleotide
ugaccuauaggagucccca

SEQ ID NO: 1190761 - RNA, 19 nt, Artificial Sequence
  Description of Artificial Sequence: Synthetic oligonucleotide
ugcuuauaaaugggagagg

SEQ ID NO: 1190762 - RNA, 19 nt, Artificial Sequence
  Description of Artificial Sequence: Synthetic oligonucleotide
auugacgauauccuuuguu

SEQ ID NO: 1190763 - RNA, 19 nt, Artificial Sequence
  Description of Artificial Sequence: Synthetic oligonucleotide
agaaaggaaucuaacgagu

SEQ ID NO: 1190764 - RNA, 19 nt, Artificial Sequence
  Description of Artificial Sequence: Synthetic oligonucleotide
cuaacgagugcauggcgug

SEQ ID NO: 1190765 - RNA, 19 nt, Artificial Sequence
  Description of Artificial Sequence: Synthetic oligonucleotide
auagcgucaagagaccuca

SEQ ID NO: 1190766 - RNA, 19 nt, Artificial Sequence
  Description of Artificial Sequence: Synthetic oligonucleotide
gucgcauaagagguaaucc

SEQ ID NO: 1190767 - RNA, 19 nt, Artificial Sequence
  Description of Artificial Sequence: Synthetic oligonucleotide
uccaguuagcgcgaagcag

SEQ ID NO: 1190768 - RNA, 19 nt, Artificial Sequence
  Description of Artificial Sequence: Synthetic oligonucleotide
agagguuuuaacacugcug

SEQ ID NO: 1190769 - RNA, 19 nt, Artificial Sequence
  Description of Artificial Sequence: Synthetic oligonucleotide
ucaagaucccagagguaga

SEQ ID NO: 1190770 - RNA, 19 nt, Artificial Sequence
  Description of Artificial Sequence: Synthetic oligonucleotide
aacgagugcauggcguguc

SEQ ID NO: 1190771 - RNA, 19 nt, Artificial Sequence
  Description of Artificial Sequence: Synthetic oligonucleotide
gguccuucaaagcuguccc

SEQ ID NO: 1190772 - RNA, 19 nt, Artificial Sequence
  Description of Artificial Sequence: Synthetic oligonucleotide
uguaaugggcgguccggcc

SEQ ID NO: 1190773 - RNA, 19 nt, Artificial Sequence
  Description of Artificial Sequence: Synthetic oligonucleotide
cuuguaaugggcgguccgg

SEQ ID NO: 1190774 - RNA, 19 nt, Artificial Sequence
  Description of Artificial Sequence: Synthetic oligonucleotide
ugcaaacuguuaugugacc

SEQ ID NO: 1190775 - RNA, 19 nt, Artificial Sequence
  Description of Artificial Sequence: Synthetic oligonucleotide
uuggcuauguguggggagc

SEQ ID NO: 1190776 - RNA, 19 nt, Artificial Sequence
  Description of Artificial Sequence: Synthetic oligonucleotide
acuucgcaguaagugggcc

SEQ ID NO: 1190777 - RNA, 19 nt, Artificial Sequence
  Description of Artificial Sequence: Synthetic oligonucleotide
cuugggaugggcacaucug

SEQ ID NO: 1190778 - RNA, 19 nt, Artificial Sequence
  Description of Artificial Sequence: Synthetic oligonucleotide
cucgaucuguuguggaggc

SEQ ID NO: 1190779 - RNA, 19 nt, Artificial Sequence
  Description of Artificial Sequence: Synthetic oligonucleotide
ggaggaucauacuuguuac

SEQ ID NO: 1190780 - RNA, 19 nt, Artificial Sequence
  Description of Artificial Sequence: Synthetic oligonucleotide
guuucuaagaaaggaaucu

SEQ ID NO: 1190781 - RNA, 19 nt, Artificial Sequence
  Description of Artificial Sequence: Synthetic oligonucleotide
ggaucauacuuguuacucc

SEQ ID NO: 1190782 - RNA, 19 nt, Artificial Sequence
  Description of Artificial Sequence: Synthetic oligonucleotide
uuuauucuuggggagcgau

SEQ ID NO: 1190783 - RNA, 19 nt, Artificial Sequence
  Description of Artificial Sequence: Synthetic oligonucleotide
cugcuuaaacuugugguug

SEQ ID NO: 1190784 - RNA, 19 nt, Artificial Sequence
  Description of Artificial Sequence: Synthetic oligonucleotide
auugacagaaaagcaccug

SEQ ID NO: 1190785 - RNA, 19 nt, Artificial Sequence
  Description of Artificial Sequence: Synthetic oligonucleotide
caaacacacauggaaucag

SEQ ID NO: 1190786 - RNA, 19 nt, Artificial Sequence
  Description of Artificial Sequence: Synthetic oligonucleotide
gauguagaccuggcgcugg

SEQ ID NO: 1190787 - RNA, 19 nt, Artificial Sequence
  Description of Artificial Sequence: Synthetic oligonucleotide
uuucucgaucuguugugga

SEQ ID NO: 1190788 - RNA, 19 nt, Artificial Sequence
  Description of Artificial Sequence: Synthetic oligonucleotide
gaagacggggccaaggcga

SEQ ID NO: 1190789 - RNA, 19 nt, Artificial Sequence
  Description of Artificial Sequence: Synthetic oligonucleotide
aaacuguuaugugacccau

SEQ ID NO: 1190790 - RNA, 19 nt, Artificial Sequence
  Description of Artificial Sequence: Synthetic oligonucleotide
gugguuggucaacagaaga

SEQ ID NO: 1190791 - RNA, 19 nt, Artificial Sequence
  Description of Artificial Sequence: Synthetic oligonucleotide
uucuuugacccgucuccag

SEQ ID NO: 1190792 - RNA, 19 nt, Artificial Sequence
  Description of Artificial Sequence: Synthetic oligonucleotide
acaggucucgguauugguc

SEQ ID NO: 1190793 - RNA, 19 nt, Artificial Sequence
  Description of Artificial Sequence: Synthetic oligonucleotide
uauggaaacuucgcaguaa

SEQ ID NO: 1190794 - RNA, 19 nt, Artificial Sequence
  Description of Artificial Sequence: Synthetic oligonucleotide
auacaggucucgguauugg

SEQ ID NO: 1190795 - RNA, 19 nt, Artificial Sequence
  Description of Artificial Sequence: Synthetic oligonucleotide
aaacuccuuuugcauucca

SEQ ID NO: 1190796 - RNA, 19 nt, Artificial Sequence
  Description of Artificial Sequence: Synthetic oligonucleotide
guagacagaugagacacca

SEQ ID NO: 1190797 - RNA, 19 nt, Artificial Sequence
  Description of Artificial Sequence: Synthetic oligonucleotide
cucccaaacacacauggaa

SEQ ID NO: 1190798 - RNA, 19 nt, Artificial Sequence
  Description of Artificial Sequence: Synthetic oligonucleotide
caauuaucaggcuggaugu

SEQ ID NO: 1190799 - RNA, 19 nt, Artificial Sequence
  Description of Artificial Sequence: Synthetic oligonucleotide
guauuggucgaaggcauug

SEQ ID NO: 1190800 - RNA, 19 nt, Artificial Sequence
  Description of Artificial Sequence: Synthetic oligonucleotide
caaacuguuaugugaccca

SEQ ID NO: 1190801 - RNA, 19 nt, Artificial Sequence
  Description of Artificial Sequence: Synthetic oligonucleotide
aacuguuaugugacccauc

SEQ ID NO: 1190802 - RNA, 19 nt, Artificial Sequence
  Description of Artificial Sequence: Synthetic oligonucleotide
agcaaagccgugaucaaga

SEQ ID NO: 1190803 - RNA, 19 nt, Artificial Sequence
  Description of Artificial Sequence: Synthetic oligonucleotide
aagagaccucagcccauug

SEQ ID NO: 1190804 - RNA, 19 nt, Artificial Sequence
  Description of Artificial Sequence: Synthetic oligonucleotide
uguagucgcauaagaggua

SEQ ID NO: 1190805 - RNA, 19 nt, Artificial Sequence
  Description of Artificial Sequence: Synthetic oligonucleotide
agucgagcagaaggcaugg

SEQ ID NO: 1190806 - RNA, 19 nt, Artificial Sequence
  Description of Artificial Sequence: Synthetic oligonucleotide
accuggaucggcucaauua

SEQ ID NO: 1190807 - RNA, 19 nt, Artificial Sequence
  Description of Artificial Sequence: Synthetic oligonucleotide
gcgucaagagaccucagcc

SEQ ID NO: 1190808 - RNA, 19 nt, Artificial Sequence
  Description of Artificial Sequence: Synthetic oligonucleotide
uggaaacuucgcaguaagu

SEQ ID NO: 1190809 - RNA, 19 nt, Artificial Sequence
  Description of Artificial Sequence: Synthetic oligonucleotide
uugagagcuuccugcuuug

SEQ ID NO: 1190810 - RNA, 19 nt, Artificial Sequence
  Description of Artificial Sequence: Synthetic oligonucleotide
uucacacaccaguuaguuc

SEQ ID NO: 1190811 - RNA, 19 nt, Artificial Sequence
  Description of Artificial Sequence: Synthetic oligonucleotide
accaguuaguucauaaaau

SEQ ID NO: 1190812 - RNA, 19 nt, Artificial Sequence
  Description of Artificial Sequence: Synthetic oligonucleotide
agcagucacucacgguuuc

SEQ ID NO: 1190813 - RNA, 19 nt, Artificial Sequence
  Description of Artificial Sequence: Synthetic oligonucleotide
agagaccucagcccauuga

SEQ ID NO: 1190814 - RNA, 19 nt, Artificial Sequence
  Description of Artificial Sequence: Synthetic oligonucleotide
ugguugucagggauagcgu

SEQ ID NO: 1190815 - RNA, 19 nt, Artificial Sequence
  Description of Artificial Sequence: Synthetic oligonucleotide
uguguggggagcagucacu

SEQ ID NO: 1190816 - RNA, 19 nt, Artificial Sequence
  Description of Artificial Sequence: Synthetic oligonucleotide
caauuuucagugguugguc

SEQ ID NO: 1190817 - RNA, 19 nt, Artificial Sequence
  Description of Artificial Sequence: Synthetic oligonucleotide
aggcucaaguagaagaugu

SEQ ID NO: 1190818 - RNA, 19 nt, Artificial Sequence
  Description of Artificial Sequence: Synthetic oligonucleotide
auaggaguccccaucucug

SEQ ID NO: 1190819 - RNA, 19 nt, Artificial Sequence
  Description of Artificial Sequence: Synthetic oligonucleotide
cugcaacugcuuaaacuug

SEQ ID NO: 1190820 - RNA, 19 nt, Artificial Sequence
  Description of Artificial Sequence: Synthetic oligonucleotide
gcaaacuguuaugugaccc

SEQ ID NO: 1190821 - RNA, 19 nt, Artificial Sequence
  Description of Artificial Sequence: Synthetic oligonucleotide
auggcguguccaguuagcg

SEQ ID NO: 1190822 - RNA, 19 nt, Artificial Sequence
  Description of Artificial Sequence: Synthetic oligonucleotide
acaccaguuaguucauaaa

SEQ ID NO: 1190823 - RNA, 19 nt, Artificial Sequence
  Description of Artificial Sequence: Synthetic oligonucleotide
cuucucuuucacacaccag

SEQ ID NO: 1190824 - RNA, 19 nt, Artificial Sequence
  Description of Artificial Sequence: Synthetic oligonucleotide
aguccaguugcugaucgcu

SEQ ID NO: 1190825 - RNA, 19 nt, Artificial Sequence
  Description of Artificial Sequence: Synthetic oligonucleotide
agguuuuaacacugcugcu

SEQ ID NO: 1190826 - RNA, 19 nt, Artificial Sequence
  Description of Artificial Sequence: Synthetic oligonucleotide
uagacagaugagacaccac

SEQ ID NO: 1190827 - RNA, 19 nt, Artificial Sequence
  Description of Artificial Sequence: Synthetic oligonucleotide
cauuagguccaaggcacag

SEQ ID NO: 1190828 - RNA, 19 nt, Artificial Sequence
  Description of Artificial Sequence: Synthetic oligonucleotide
uggcguguccaguuagcgc

SEQ ID NO: 1190829 - RNA, 19 nt, Artificial Sequence
  Description of Artificial Sequence: Synthetic oligonucleotide
uacaggucucgguauuggu

SEQ ID NO: 1190830 - RNA, 19 nt, Artificial Sequence
  Description of Artificial Sequence: Synthetic oligonucleotide
uuguaaugggcgguccggc

SEQ ID NO: 1190831 - RNA, 19 nt, Artificial Sequence
  Description of Artificial Sequence: Synthetic oligonucleotide
cagucgagcagaaggcaug

SEQ ID NO: 1190832 - RNA, 19 nt, Artificial Sequence
  Description of Artificial Sequence: Synthetic oligonucleotide
uaaugggcgguccggccac

SEQ ID NO: 1190833 - RNA, 19 nt, Artificial Sequence
  Description of Artificial Sequence: Synthetic oligonucleotide
uuugacccgucuccagccu

SEQ ID NO: 1190834 - RNA, 19 nt, Artificial Sequence
  Description of Artificial Sequence: Synthetic oligonucleotide
gaaagcucccucugcaacu

SEQ ID NO: 1190835 - RNA, 19 nt, Artificial Sequence
  Description of Artificial Sequence: Synthetic oligonucleotide
acagaccuggaucggcuca

SEQ ID NO: 1190836 - RNA, 19 nt, Artificial Sequence
  Description of Artificial Sequence: Synthetic oligonucleotide
uguuggcuaugugugggga

SEQ ID NO: 1190837 - RNA, 19 nt, Artificial Sequence
  Description of Artificial Sequence: Synthetic oligonucleotide
uauuggucgaaggcauugu

SEQ ID NO: 1190838 - RNA, 19 nt, Artificial Sequence
  Description of Artificial Sequence: Synthetic oligonucleotide
caguuagcgcgaagcagag

SEQ ID NO: 1190839 - RNA, 19 nt, Artificial Sequence
  Description of Artificial Sequence: Synthetic oligonucleotide
gauagcgucaagagaccuc

SEQ ID NO: 1190840 - RNA, 19 nt, Artificial Sequence
  Description of Artificial Sequence: Synthetic oligonucleotide
guauggaggcucaaguaga

SEQ ID NO: 1190841 - RNA, 19 nt, Artificial Sequence
  Description of Artificial Sequence: Synthetic oligonucleotide
cacuugagaaagcucccuc

SEQ ID NO: 1190842 - RNA, 19 nt, Artificial Sequence
  Description of Artificial Sequence: Synthetic oligonucleotide
auguagaccuggcgcuggg

SEQ ID NO: 1190843 - RNA, 19 nt, Artificial Sequence
  Description of Artificial Sequence: Synthetic oligonucleotide
aagccgugaucaagauccc

SEQ ID NO: 1190844 - RNA, 19 nt, Artificial Sequence
  Description of Artificial Sequence: Synthetic oligonucleotide
ugaucuucuuugacccguc

SEQ ID NO: 1190845 - RNA, 19 nt, Artificial Sequence
  Description of Artificial Sequence: Synthetic oligonucleotide
agugguuggucaacagaag

SEQ ID NO: 1190846 - RNA, 19 nt, Artificial Sequence
  Description of Artificial Sequence: Synthetic oligonucleotide
auuggucgaaggcauuguu

SEQ ID NO: 1190847 - RNA, 19 nt, Artificial Sequence
  Description of Artificial Sequence: Synthetic oligonucleotide
ccauugacgauauccuuug

SEQ ID NO: 1190848 - RNA, 19 nt, Artificial Sequence
  Description of Artificial Sequence: Synthetic oligonucleotide
guaaugggcgguccggcca

SEQ ID NO: 1190849 - RNA, 19 nt, Artificial Sequence
  Description of Artificial Sequence: Synthetic oligonucleotide
ggcgcaguggcugacagug

SEQ ID NO: 1190850 - RNA, 19 nt, Artificial Sequence
  Description of Artificial Sequence: Synthetic oligonucleotide
aucgggcuuuauucuuggg

SEQ ID NO: 1190851 - RNA, 19 nt, Artificial Sequence
  Description of Artificial Sequence: Synthetic oligonucleotide
ugcgcggucgaugcaaacu

SEQ ID NO: 1190852 - RNA, 19 nt, Artificial Sequence
  Description of Artificial Sequence: Synthetic oligonucleotide
caaagccgugaucaagauc

SEQ ID NO: 1190853 - RNA, 19 nt, Artificial Sequence
  Description of Artificial Sequence: Synthetic oligonucleotide
aauuaucaggcuggaugua

SEQ ID NO: 1190854 - RNA, 19 nt, Artificial Sequence
  Description of Artificial Sequence: Synthetic oligonucleotide
ucacucacgguuucaucuu

SEQ ID NO: 1190855 - RNA, 19 nt, Artificial Sequence
  Description of Artificial Sequence: Synthetic oligonucleotide
gguugucagggauagcguc

SEQ ID NO: 1190856 - RNA, 19 nt, Artificial Sequence
  Description of Artificial Sequence: Synthetic oligonucleotide
cugacaguguauuuaugcu

SEQ ID NO: 1190857 - RNA, 19 nt, Artificial Sequence
  Description of Artificial Sequence: Synthetic oligonucleotide
guagucgcauaagagguaa

SEQ ID NO: 1190858 - RNA, 19 nt, Artificial Sequence
  Description of Artificial Sequence: Synthetic oligonucleotide
gaucgcucaugguggcggc

SEQ ID NO: 1190859 - RNA, 19 nt, Artificial Sequence
  Description of Artificial Sequence: Synthetic oligonucleotide
cccaaacacacauggaauc

SEQ ID NO: 1190860 - RNA, 19 nt, Artificial Sequence
  Description of Artificial Sequence: Synthetic oligonucleotide
ucucuguuguagucgcaua

SEQ ID NO: 1190861 - RNA, 19 nt, Artificial Sequence
  Description of Artificial Sequence: Synthetic oligonucleotide
gacggucccugucccggcg

SEQ ID NO: 1190862 - RNA, 19 nt, Artificial Sequence
  Description of Artificial Sequence: Synthetic oligonucleotide
cucuugguccuucaaagcu

SEQ ID NO: 1190863 - RNA, 19 nt, Artificial Sequence
  Description of Artificial Sequence: Synthetic oligonucleotide
cucuguuguagucgcauaa

SEQ ID NO: 1190864 - RNA, 19 nt, Artificial Sequence
  Description of Artificial Sequence: Synthetic oligonucleotide
aucucuguuguagucgcau

SEQ ID NO: 1190865 - RNA, 19 nt, Artificial Sequence
  Description of Artificial Sequence: Synthetic oligonucleotide
ggaucggcucaauuaucag

SEQ ID NO: 1190866 - RNA, 19 nt, Artificial Sequence
  Description of Artificial Sequence: Synthetic oligonucleotide
agccggauuuguuggucug

SEQ ID NO: 1190867 - RNA, 19 nt, Artificial Sequence
  Description of Artificial Sequence: Synthetic oligonucleotide
acucacgguuucaucuuuc

SEQ ID NO: 1190868 - RNA, 19 nt, Artificial Sequence
  Description of Artificial Sequence: Synthetic oligonucleotide
cuauaggaguccccaucuc

SEQ ID NO: 1190869 - RNA, 19 nt, Artificial Sequence
  Description of Artificial Sequence: Synthetic oligonucleotide
gggcuuuauucuuggggag

SEQ ID NO: 1190870 - RNA, 19 nt, Artificial Sequence
  Description of Artificial Sequence: Synthetic oligonucleotide
uucgcaguaagugggccuu

SEQ ID NO: 1190871 - RNA, 19 nt, Artificial Sequence
  Description of Artificial Sequence: Synthetic oligonucleotide
ugcuuugauuugucugcaa

SEQ ID NO: 1190872 - RNA, 19 nt, Artificial Sequence
  Description of Artificial Sequence: Synthetic oligonucleotide
ucggcucaauuaucaggcu

SEQ ID NO: 1190873 - RNA, 19 nt, Artificial Sequence
  Description of Artificial Sequence: Synthetic oligonucleotide
ccaguuagcgcgaagcaga

SEQ ID NO: 1190874 - RNA, 19 nt, Artificial Sequence
  Description of Artificial Sequence: Synthetic oligonucleotide
ugacccgucuccagccuuc

SEQ ID NO: 1190875 - RNA, 19 nt, Artificial Sequence
  Description of Artificial Sequence: Synthetic oligonucleotide
aguuagcgcgaagcagagg

SEQ ID NO: 1190876 - RNA, 19 nt, Artificial Sequence
  Description of Artificial Sequence: Synthetic oligonucleotide
guccaguuagcgcgaagca

SEQ ID NO: 1190877 - RNA, 19 nt, Artificial Sequence
  Description of Artificial Sequence: Synthetic oligonucleotide
uaacgagugcauggcgugu

SEQ ID NO: 1190878 - RNA, 19 nt, Artificial Sequence
  Description of Artificial Sequence: Synthetic oligonucleotide
ccagcuuucucagucgagc

SEQ ID NO: 1190879 - RNA, 19 nt, Artificial Sequence
  Description of Artificial Sequence: Synthetic oligonucleotide
uagcgucaagagaccucag

SEQ ID NO: 1190880 - RNA, 19 nt, Artificial Sequence
  Description of Artificial Sequence: Synthetic oligonucleotide
uuagcgcgaagcagagguu

SEQ ID NO: 1190881 - RNA, 19 nt, Artificial Sequence
  Description of Artificial Sequence: Synthetic oligonucleotide
gacggggccaaggcgaaca

SEQ ID NO: 1190882 - RNA, 19 nt, Artificial Sequence
  Description of Artificial Sequence: Synthetic oligonucleotide
ggcgcugcgcggucgaugc

SEQ ID NO: 1190883 - RNA, 19 nt, Artificial Sequence
  Description of Artificial Sequence: Synthetic oligonucleotide
cauggccccaucuuccaaa

SEQ ID NO: 1190884 - RNA, 19 nt, Artificial Sequence
  Description of Artificial Sequence: Synthetic oligonucleotide
ccggagccggauuuguugg

SEQ ID NO: 1190885 - RNA, 19 nt, Artificial Sequence
  Description of Artificial Sequence: Synthetic oligonucleotide
gugaccuauaggagucccc

SEQ ID NO: 1190886 - RNA, 19 nt, Artificial Sequence
  Description of Artificial Sequence: Synthetic oligonucleotide
gguuaucgggcuuuauucu

SEQ ID NO: 1190887 - RNA, 19 nt, Artificial Sequence
  Description of Artificial Sequence: Synthetic oligonucleotide
guuaucgggcuuuauucuu

SEQ ID NO: 1190888 - RNA, 19 nt, Artificial Sequence
  Description of Artificial Sequence: Synthetic oligonucleotide
uggcuauguguggggagca

SEQ ID NO: 1190889 - RNA, 19 nt, Artificial Sequence
  Description of Artificial Sequence: Synthetic oligonucleotide
uagucgcauaagagguaau

SEQ ID NO: 1190890 - RNA, 19 nt, Artificial Sequence
  Description of Artificial Sequence: Synthetic oligonucleotide
cugaucgcucaugguggcg

SEQ ID NO: 1190891 - RNA, 19 nt, Artificial Sequence
  Description of Artificial Sequence: Synthetic oligonucleotide
uugacccgucuccagccuu

SEQ ID NO: 1190892 - RNA, 19 nt, Artificial Sequence
  Description of Artificial Sequence: Synthetic oligonucleotide
aggaaucuaacgagugcau

SEQ ID NO: 1190893 - RNA, 19 nt, Artificial Sequence
  Description of Artificial Sequence: Synthetic oligonucleotide
ggugaccuauaggaguccc

SEQ ID NO: 1190894 - RNA, 19 nt, Artificial Sequence
  Description of Artificial Sequence: Synthetic oligonucleotide
gcgcggucgaugcaaacug

SEQ ID NO: 1190895 - RNA, 19 nt, Artificial Sequence
  Description of Artificial Sequence: Synthetic oligonucleotide
cuucuuugacccgucucca

SEQ ID NO: 1190896 - RNA, 19 nt, Artificial Sequence
  Description of Artificial Sequence: Synthetic oligonucleotide
cgccucauuagguccaagg

SEQ ID NO: 1190897 - RNA, 19 nt, Artificial Sequence
  Description of Artificial Sequence: Synthetic oligonucleotide
cucuuucacacaccaguua

SEQ ID NO: 1190898 - RNA, 19 nt, Artificial Sequence
  Description of Artificial Sequence: Synthetic oligonucleotide
ggucgaugcaaacuguuau

SEQ ID NO: 1190899 - RNA, 19 nt, Artificial Sequence
  Description of Artificial Sequence: Synthetic oligonucleotide
aagacaucucuugguccuu

SEQ ID NO: 1190900 - RNA, 19 nt, Artificial Sequence
  Description of Artificial Sequence: Synthetic oligonucleotide
gauggcgcugcgcggucga

SEQ ID NO: 1190901 - RNA, 19 nt, Artificial Sequence
  Description of Artificial Sequence: Synthetic oligonucleotide
gugguuaucgggcuuuauu

SEQ ID NO: 1190902 - RNA, 19 nt, Artificial Sequence
  Description of Artificial Sequence: Synthetic oligonucleotide
cagugcugaagacaucucu

SEQ ID NO: 1190903 - RNA, 19 nt, Artificial Sequence
  Description of Artificial Sequence: Synthetic oligonucleotide
gcugaucgcucaugguggc

SEQ ID NO: 1190904 - RNA, 19 nt, Artificial Sequence
  Description of Artificial Sequence: Synthetic oligonucleotide
guguccaguuagcgcgaag

SEQ ID NO: 1190905 - RNA, 19 nt, Artificial Sequence
  Description of Artificial Sequence: Synthetic oligonucleotide
gguagacagaugagacacc

SEQ ID NO: 1190906 - RNA, 19 nt, Artificial Sequence
  Description of Artificial Sequence: Synthetic oligonucleotide
ucgaucuguuguggaggca

SEQ ID NO: 1190907 - RNA, 19 nt, Artificial Sequence
  Description of Artificial Sequence: Synthetic oligonucleotide
gagccggauuuguuggucu

SEQ ID NO: 1190908 - RNA, 19 nt, Artificial Sequence
  Description of Artificial Sequence: Synthetic oligonucleotide
caggucguucuugagagcu

SEQ ID NO: 1190909 - RNA, 19 nt, Artificial Sequence
  Description of Artificial Sequence: Synthetic oligonucleotide
ggucguucuugagagcuuc

SEQ ID NO: 1190910 - RNA, 19 nt, Artificial Sequence
  Description of Artificial Sequence: Synthetic oligonucleotide
ggaggcaggcgccucauua

SEQ ID NO: 1190911 - RNA, 19 nt, Artificial Sequence
  Description of Artificial Sequence: Synthetic oligonucleotide
aagacggggccaaggcgaa

SEQ ID NO: 1190912 - RNA, 19 nt, Artificial Sequence
  Description of Artificial Sequence: Synthetic oligonucleotide
guugcugaucgcucauggu

SEQ ID NO: 1190913 - RNA, 19 nt, Artificial Sequence
  Description of Artificial Sequence: Synthetic oligonucleotide
cacuccaagcaacucccaa

SEQ ID NO: 1190914 - RNA, 19 nt, Artificial Sequence
  Description of Artificial Sequence: Synthetic oligonucleotide
caggucgaucaggucacug

SEQ ID NO: 1190915 - RNA, 19 nt, Artificial Sequence
  Description of Artificial Sequence: Synthetic oligonucleotide
ccuucaaagcuguccccug

SEQ ID NO: 1190916 - RNA, 19 nt, Artificial Sequence
  Description of Artificial Sequence: Synthetic oligonucleotide
gggauagcgucaagagacc

SEQ ID NO: 1190917 - RNA, 19 nt, Artificial Sequence
  Description of Artificial Sequence: Synthetic oligonucleotide
ugcccaccaccuugucucu

SEQ ID NO: 1190918 - RNA, 19 nt, Artificial Sequence
  Description of Artificial Sequence: Synthetic oligonucleotide
gguuuuaacacugcugcuu

SEQ ID NO: 1190919 - RNA, 19 nt, Artificial Sequence
  Description of Artificial Sequence: Synthetic oligonucleotide
cucacgguuucaucuuucu

SEQ ID NO: 1190920 - RNA, 19 nt, Artificial Sequence
  Description of Artificial Sequence: Synthetic oligonucleotide
cuucgcaguaagugggccu

SEQ ID NO: 1190921 - RNA, 19 nt, Artificial Sequence
  Description of Artificial Sequence: Synthetic oligonucleotide
gcaggcgccucauuagguc

SEQ ID NO: 1190922 - RNA, 19 nt, Artificial Sequence
  Description of Artificial Sequence: Synthetic oligonucleotide
ccggccacuggacuucucc

SEQ ID NO: 1190923 - RNA, 19 nt, Artificial Sequence
  Description of Artificial Sequence: Synthetic oligonucleotide
caguugcugaucgcucaug

SEQ ID NO: 1190924 - RNA, 19 nt, Artificial Sequence
  Description of Artificial Sequence: Synthetic oligonucleotide
cuuuauucuuggggagcga

SEQ ID NO: 1190925 - RNA, 19 nt, Artificial Sequence
  Description of Artificial Sequence: Synthetic oligonucleotide
ucgcaguaagugggccuug

SEQ ID NO: 1190926 - RNA, 19 nt, Artificial Sequence
  Description of Artificial Sequence: Synthetic oligonucleotide
ucagcccauugacgauauc

SEQ ID NO: 1190927 - RNA, 19 nt, Artificial Sequence
  Description of Artificial Sequence: Synthetic oligonucleotide
gcgacggucccugucccgg

SEQ ID NO: 1190928 - RNA, 19 nt, Artificial Sequence
  Description of Artificial Sequence: Synthetic oligonucleotide
ugcgcaggacagugcugaa

SEQ ID NO: 1190929 - RNA, 19 nt, Artificial Sequence
  Description of Artificial Sequence: Synthetic oligonucleotide
gguccaaggcacaguccag

SEQ ID NO: 1190930 - RNA, 19 nt, Artificial Sequence
  Description of Artificial Sequence: Synthetic oligonucleotide
ugccggagccggauuuguu

SEQ ID NO: 1190931 - RNA, 19 nt, Artificial Sequence
  Description of Artificial Sequence: Synthetic oligonucleotide
acggucccugucccggcgu

SEQ ID NO: 1190932 - RNA, 19 nt, Artificial Sequence
  Description of Artificial Sequence: Synthetic oligonucleotide
agacggggccaaggcgaac

SEQ ID NO: 1190933 - RNA, 19 nt, Artificial Sequence
  Description of Artificial Sequence: Synthetic oligonucleotide
gucgagcagaaggcauggc

SEQ ID NO: 1190934 - RNA, 19 nt, Artificial Sequence
  Description of Artificial Sequence: Synthetic oligonucleotide
ccuauaggaguccccaucu

SEQ ID NO: 1190935 - RNA, 19 nt, Artificial Sequence
  Description of Artificial Sequence: Synthetic oligonucleotide
aaugggcgguccggccacu

SEQ ID NO: 1190936 - RNA, 19 nt, Artificial Sequence
  Description of Artificial Sequence: Synthetic oligonucleotide
cugcgcggucgaugcaaac

SEQ ID NO: 1190937 - RNA, 19 nt, Artificial Sequence
  Description of Artificial Sequence: Synthetic oligonucleotide
gaccuauaggaguccccau

SEQ ID NO: 1190938 - RNA, 19 nt, Artificial Sequence
  Description of Artificial Sequence: Synthetic oligonucleotide
ggcgacggucccugucccg

SEQ ID NO: 1190939 - RNA, 19 nt, Artificial Sequence
  Description of Artificial Sequence: Synthetic oligonucleotide
gcuuaaacuugugguuguc

SEQ ID NO: 1190940 - RNA, 19 nt, Artificial Sequence
  Description of Artificial Sequence: Synthetic oligonucleotide
gccggauuuguuggucugc

SEQ ID NO: 1190941 - RNA, 19 nt, Artificial Sequence
  Description of Artificial Sequence: Synthetic oligonucleotide
guuacuccacggugaccua

SEQ ID NO: 1190942 - RNA, 19 nt, Artificial Sequence
  Description of Artificial Sequence: Synthetic oligonucleotide
acggggccaaggcgaacaa

SEQ ID NO: 1190943 - RNA, 19 nt, Artificial Sequence
  Description of Artificial Sequence: Synthetic oligonucleotide
ggagccggauuuguugguc

SEQ ID NO: 1190944 - RNA, 19 nt, Artificial Sequence
  Description of Artificial Sequence: Synthetic oligonucleotide
ccgugaucaagaucccaga

SEQ ID NO: 1190945 - RNA, 19 nt, Artificial Sequence
  Description of Artificial Sequence: Synthetic oligonucleotide
ccuggaucggcucaauuau

SEQ ID NO: 1190946 - RNA, 19 nt, Artificial Sequence
  Description of Artificial Sequence: Synthetic oligonucleotide
ggugccggagccggauuug

SEQ ID NO: 1190947 - RNA, 19 nt, Artificial Sequence
  Description of Artificial Sequence: Synthetic oligonucleotide
gcgcaggacagugcugaag

SEQ ID NO: 1190948 - RNA, 19 nt, Artificial Sequence
  Description of Artificial Sequence: Synthetic oligonucleotide
agcgcgaagcagagguuuu

SEQ ID NO: 1190949 - RNA, 19 nt, Artificial Sequence
  Description of Artificial Sequence: Synthetic oligonucleotide
gagggcgcaguggcugaca

SEQ ID NO: 1190950 - RNA, 19 nt, Artificial Sequence
  Description of Artificial Sequence: Synthetic oligonucleotide
cauugacgauauccuuugu

SEQ ID NO: 1190951 - RNA, 19 nt, Artificial Sequence
  Description of Artificial Sequence: Synthetic oligonucleotide
ggauagcgucaagagaccu

SEQ ID NO: 1190952 - RNA, 19 nt, Artificial Sequence
  Description of Artificial Sequence: Synthetic oligonucleotide
guuguggaggcaggcgccu

SEQ ID NO: 1190953 - RNA, 19 nt, Artificial Sequence
  Description of Artificial Sequence: Synthetic oligonucleotide
gguccggccacuggacuuc

SEQ ID NO: 1190954 - RNA, 19 nt, Artificial Sequence
  Description of Artificial Sequence: Synthetic oligonucleotide
gggcgguccggccacugga

SEQ ID NO: 1190955 - RNA, 19 nt, Artificial Sequence
  Description of Artificial Sequence: Synthetic oligonucleotide
cagaccuggaucggcucaa

SEQ ID NO: 1190956 - RNA, 19 nt, Artificial Sequence
  Description of Artificial Sequence: Synthetic oligonucleotide
agaccuggaucggcucaau

SEQ ID NO: 1190957 - RNA, 19 nt, Artificial Sequence
  Description of Artificial Sequence: Synthetic oligonucleotide
augggcgguccggccacug

SEQ ID NO: 1190958 - RNA, 19 nt, Artificial Sequence
  Description of Artificial Sequence: Synthetic oligonucleotide
ggcucaaguagaagaugua

SEQ ID NO: 1190959 - RNA, 19 nt, Artificial Sequence
  Description of Artificial Sequence: Synthetic oligonucleotide
aggucguucuugagagcuu

SEQ ID NO: 1190960 - RNA, 19 nt, Artificial Sequence
  Description of Artificial Sequence: Synthetic oligonucleotide
gcuauguguggggagcagu

SEQ ID NO: 1190961 - RNA, 19 nt, Artificial Sequence
  Description of Artificial Sequence: Synthetic oligonucleotide
gcaaagccgugaucaagau

SEQ ID NO: 1190962 - RNA, 19 nt, Artificial Sequence
  Description of Artificial Sequence: Synthetic oligonucleotide
gcccgauguuggcuaugug

SEQ ID NO: 1190963 - RNA, 19 nt, Artificial Sequence
  Description of Artificial Sequence: Synthetic oligonucleotide
ccugcacuucgaccacaug

SEQ ID NO: 1190964 - RNA, 19 nt, Artificial Sequence
  Description of Artificial Sequence: Synthetic oligonucleotide
ccggauuuguuggucugca

SEQ ID NO: 1190965 - RNA, 19 nt, Artificial Sequence
  Description of Artificial Sequence: Synthetic oligonucleotide
cacucacgguuucaucuuu

SEQ ID NO: 1190966 - RNA, 19 nt, Artificial Sequence
  Description of Artificial Sequence: Synthetic oligonucleotide
gcacuugagaaagcucccu

SEQ ID NO: 1190967 - RNA, 19 nt, Artificial Sequence
  Description of Artificial Sequence: Synthetic oligonucleotide
ggcgguccggccacuggac

SEQ ID NO: 1190968 - RNA, 19 nt, Artificial Sequence
  Description of Artificial Sequence: Synthetic oligonucleotide
caguggcugacaguguauu

SEQ ID NO: 1190969 - RNA, 19 nt, Artificial Sequence
  Description of Artificial Sequence: Synthetic oligonucleotide
gggagcagucacucacggu

SEQ ID NO: 1190970 - RNA, 19 nt, Artificial Sequence
  Description of Artificial Sequence: Synthetic oligonucleotide
ccucagcccauugacgaua

SEQ ID NO: 1190971 - RNA, 19 nt, Artificial Sequence
  Description of Artificial Sequence: Synthetic oligonucleotide
gguauuggucgaaggcauu

SEQ ID NO: 1190972 - RNA, 19 nt, Artificial Sequence
  Description of Artificial Sequence: Synthetic oligonucleotide
gugccggagccggauuugu

SEQ ID NO: 1190973 - RNA, 19 nt, Artificial Sequence
  Description of Artificial Sequence: Synthetic oligonucleotide
cgguauuggucgaaggcau

SEQ ID NO: 1190974 - RNA, 19 nt, Artificial Sequence
  Description of Artificial Sequence: Synthetic oligonucleotide
gcgcugggucagcacuuga

SEQ ID NO: 1190975 - RNA, 19 nt, Artificial Sequence
  Description of Artificial Sequence: Synthetic oligonucleotide
auggcgcugcgcggucgau

SEQ ID NO: 1190976 - RNA, 19 nt, Artificial Sequence
  Description of Artificial Sequence: Synthetic oligonucleotide
gcccaccaccuugucucug

SEQ ID NO: 1190977 - RNA, 19 nt, Artificial Sequence
  Description of Artificial Sequence: Synthetic oligonucleotide
cgauggcgcugcgcggucg

SEQ ID NO: 1190978 - RNA, 19 nt, Artificial Sequence
  Description of Artificial Sequence: Synthetic oligonucleotide
cggcgacggucccuguccc

SEQ ID NO: 1190979 - RNA, 19 nt, Artificial Sequence
  Description of Artificial Sequence: Synthetic oligonucleotide
gcugcgcggucgaugcaaa

SEQ ID NO: 1190980 - RNA, 19 nt, Artificial Sequence
  Description of Artificial Sequence: Synthetic oligonucleotide
gcaguggcugacaguguau

SEQ ID NO: 1190981 - RNA, 19 nt, Artificial Sequence
  Description of Artificial Sequence: Synthetic oligonucleotide
gcgcgaagcagagguuuua

SEQ ID NO: 1190982 - RNA, 19 nt, Artificial Sequence
  Description of Artificial Sequence: Synthetic oligonucleotide
ggugguuaucgggcuuuau

SEQ ID NO: 1190983 - RNA, 19 nt, Artificial Sequence
  Description of Artificial Sequence: Synthetic oligonucleotide
gcggucgaugcaaacuguu

SEQ ID NO: 1190984 - RNA, 19 nt, Artificial Sequence
  Description of Artificial Sequence: Synthetic oligonucleotide
gcgguccggccacuggacu

SEQ ID NO: 1190985 - RNA, 19 nt, Artificial Sequence
  Description of Artificial Sequence: Synthetic oligonucleotide
gcgcccgauguuggcuaug

SEQ ID NO: 1190986 - RNA, 19 nt, Artificial Sequence
  Description of Artificial Sequence: Synthetic oligonucleotide
ccaguugcugaucgcucau

SEQ ID NO: 1190987 - RNA, 19 nt, Artificial Sequence
  Description of Artificial Sequence: Synthetic oligonucleotide
ggcgccucauuagguccaa

SEQ ID NO: 1190988 - RNA, 19 nt, Artificial Sequence
  Description of Artificial Sequence: Synthetic oligonucleotide
cgagugcauggcgugucca

SEQ ID NO: 1190989 - RNA, 19 nt, Artificial Sequence
  Description of Artificial Sequence: Synthetic oligonucleotide
gggcgcaguggcugacagu

SEQ ID NO: 1190990 - RNA, 19 nt, Artificial Sequence
  Description of Artificial Sequence: Synthetic oligonucleotide
ggcgcccgauguuggcuau

SEQ ID NO: 1190991 - RNA, 19 nt, Artificial Sequence
  Description of Artificial Sequence: Synthetic oligonucleotide
cggccacuggacuucuccu

SEQ ID NO: 1190992 - RNA, 19 nt, Artificial Sequence
  Description of Artificial Sequence: Synthetic oligonucleotide
cgcggucgaugcaaacugu

SEQ ID NO: 1190993 - RNA, 19 nt, Artificial Sequence
  Description of Artificial Sequence: Synthetic oligonucleotide
gcgcugcgcggucgaugca

SEQ ID NO: 1190994 - RNA, 19 nt, Artificial Sequence
  Description of Artificial Sequence: Synthetic oligonucleotide
cggagccggauuuguuggu

SEQ ID NO: 1190995 - RNA, 19 nt, Artificial Sequence
  Description of Artificial Sequence: Synthetic oligonucleotide
gcgcaguggcugacagugu

SEQ ID NO: 1190996 - RNA, 19 nt, Artificial Sequence
  Description of Artificial Sequence: Synthetic oligonucleotide
cguguccaguuagcgcgaa

SEQ ID NO: 1190997 - RNA, 19 nt, Artificial Sequence
  Description of Artificial Sequence: Synthetic oligonucleotide
cgguccggccacuggacuu

SEQ ID NO: 1190998 - RNA, 19 nt, Artificial Sequence
  Description of Artificial Sequence: Synthetic oligonucleotide
ggcugccucccagguucau

SEQ ID NO: 1190999 - RNA, 19 nt, Artificial Sequence
  Description of Artificial Sequence: Synthetic oligonucleotide
aauaccaccacuaaaacac

SEQ ID NO: 1191000 - RNA, 19 nt, Artificial Sequence
  Description of Artificial Sequence: Synthetic oligonucleotide
aauugaaugucucaagaac

SEQ ID NO: 1191001 - RNA, 19 nt, Artificial Sequence
  Description of Artificial Sequence: Synthetic oligonucleotide
aaagcuaaugcucucacuc

SEQ ID NO: 1191002 - RNA, 19 nt, Artificial Sequence
  Description of Artificial Sequence: Synthetic oligonucleotide
ucaaauagauuccauuggg

SEQ ID NO: 1191003 - RNA, 19 nt, Artificial Sequence
  Description of Artificial Sequence: Synthetic oligonucleotide
uugguucugaauuagacag

SEQ ID NO: 1191004 - RNA, 19 nt, Artificial Sequence
  Description of Artificial Sequence: Synthetic oligonucleotide
uauuguaacaggaagugug

SEQ ID NO: 1191005 - RNA, 19 nt, Artificial Sequence
  Description of Artificial Sequence: Synthetic oligonucleotide
uguugguucacacaaauac

SEQ ID NO: 1191006 - RNA, 19 nt, Artificial Sequence
  Description of Artificial Sequence: Synthetic oligonucleotide
uaauaaaugacuugccucc

SEQ ID NO: 1191007 - RNA, 19 nt, Artificial Sequence
  Description of Artificial Sequence: Synthetic oligonucleotide
aaugagcuaccauagaaug

SEQ ID NO: 1191008 - RNA, 19 nt, Artificial Sequence
  Description of Artificial Sequence: Synthetic oligonucleotide
auaacuauagucugcauca

SEQ ID NO: 1191009 - RNA, 19 nt, Artificial Sequence
  Description of Artificial Sequence: Synthetic oligonucleotide
auagauagguucuacaucu

SEQ ID NO: 1191010 - RNA, 19 nt, Artificial Sequence
  Description of Artificial Sequence: Synthetic oligonucleotide
accaauaugagcuggauca

SEQ ID NO: 1191011 - RNA, 19 nt, Artificial Sequence
  Description of Artificial Sequence: Synthetic oligonucleotide
uguaucauagggauccacg

SEQ ID NO: 1191012 - RNA, 19 nt, Artificial Sequence
  Description of Artificial Sequence: Synthetic oligonucleotide
auagugauugcuuagauua

SEQ ID NO: 1191013 - RNA, 19 nt, Artificial Sequence
  Description of Artificial Sequence: Synthetic oligonucleotide
uaagucagcagcuaaaccu

SEQ ID NO: 1191014 - RNA, 19 nt, Artificial Sequence
  Description of Artificial Sequence: Synthetic oligonucleotide
aauuagacaguccaaguaa

SEQ ID NO: 1191015 - RNA, 19 nt, Artificial Sequence
  Description of Artificial Sequence: Synthetic oligonucleotide
ucuaauggagcagucaugg

SEQ ID NO: 1191016 - RNA, 19 nt, Artificial Sequence
  Description of Artificial Sequence: Synthetic oligonucleotide
aguuaaacccaagaaauac

SEQ ID NO: 1191017 - RNA, 19 nt, Artificial Sequence
  Description of Artificial Sequence: Synthetic oligonucleotide
aaaaugacuacguagugua

SEQ ID NO: 1191018 - RNA, 19 nt, Artificial Sequence
  Description of Artificial Sequence: Synthetic oligonucleotide
ucgaaaggcaucuuuauug

SEQ ID NO: 1191019 - RNA, 19 nt, Artificial Sequence
  Description of Artificial Sequence: Synthetic oligonucleotide
aaauagauuccauugggau

SEQ ID NO: 1191020 - RNA, 19 nt, Artificial Sequence
  Description of Artificial Sequence: Synthetic oligonucleotide
ucguaauucuuuuaguugc

SEQ ID NO: 1191021 - RNA, 19 nt, Artificial Sequence
  Description of Artificial Sequence: Synthetic oligonucleotide
aaggcaucuuuauuggccg

SEQ ID NO: 1191022 - RNA, 19 nt, Artificial Sequence
  Description of Artificial Sequence: Synthetic oligonucleotide
auaucaguaaccuucuuga

SEQ ID NO: 1191023 - RNA, 19 nt, Artificial Sequence
  Description of Artificial Sequence: Synthetic oligonucleotide
uuuauuggccggcaaauca

SEQ ID NO: 1191024 - RNA, 19 nt, Artificial Sequence
  Description of Artificial Sequence: Synthetic oligonucleotide
aacuaauagcuaaugaaag

SEQ ID NO: 1191025 - RNA, 19 nt, Artificial Sequence
  Description of Artificial Sequence: Synthetic oligonucleotide
uccaaaugagcuaccauag

SEQ ID NO: 1191026 - RNA, 19 nt, Artificial Sequence
  Description of Artificial Sequence: Synthetic oligonucleotide
gcuuagauuaguuaaaccc

SEQ ID NO: 1191027 - RNA, 19 nt, Artificial Sequence
  Description of Artificial Sequence: Synthetic oligonucleotide
agaacuaauagcuaaugaa

SEQ ID NO: 1191028 - RNA, 19 nt, Artificial Sequence
  Description of Artificial Sequence: Synthetic oligonucleotide
aaaacuuugaugugucuau

SEQ ID NO: 1191029 - RNA, 19 nt, Artificial Sequence
  Description of Artificial Sequence: Synthetic oligonucleotide
agaacaucaccagagggcc

SEQ ID NO: 1191030 - RNA, 19 nt, Artificial Sequence
  Description of Artificial Sequence: Synthetic oligonucleotide
ucuuguggauuccauaacc

SEQ ID NO: 1191031 - RNA, 19 nt, Artificial Sequence
  Description of Artificial Sequence: Synthetic oligonucleotide
aauacuaccugugaggaaa

SEQ ID NO: 1191032 - RNA, 19 nt, Artificial Sequence
  Description of Artificial Sequence: Synthetic oligonucleotide
ucauauguaucauagggau

SEQ ID NO: 1191033 - RNA, 19 nt, Artificial Sequence
  Description of Artificial Sequence: Synthetic oligonucleotide
ugagcaguuauuguaacag

SEQ ID NO: 1191034 - RNA, 19 nt, Artificial Sequence
  Description of Artificial Sequence: Synthetic oligonucleotide
auagaauggaucauuuuac

SEQ ID NO: 1191035 - RNA, 19 nt, Artificial Sequence
  Description of Artificial Sequence: Synthetic oligonucleotide
uuaccgucaagucugcaag

SEQ ID NO: 1191036 - RNA, 19 nt, Artificial Sequence
  Description of Artificial Sequence: Synthetic oligonucleotide
acguuauugguucagcauc

SEQ ID NO: 1191037 - RNA, 19 nt, Artificial Sequence
  Description of Artificial Sequence: Synthetic oligonucleotide
cuucuauggauccauuugg

SEQ ID NO: 1191038 - RNA, 19 nt, Artificial Sequence
  Description of Artificial Sequence: Synthetic oligonucleotide
augacuacguaguguauac

SEQ ID NO: 1191039 - RNA, 19 nt, Artificial Sequence
  Description of Artificial Sequence: Synthetic oligonucleotide
gauugcuuagauuaguuaa

SEQ ID NO: 1191040 - RNA, 19 nt, Artificial Sequence
  Description of Artificial Sequence: Synthetic oligonucleotide
uagcuaaugaaagaacagg

SEQ ID NO: 1191041 - RNA, 19 nt, Artificial Sequence
  Description of Artificial Sequence: Synthetic oligonucleotide
cuccauuagaacuaauagc

SEQ ID NO: 1191042 - RNA, 19 nt, Artificial Sequence
  Description of Artificial Sequence: Synthetic oligonucleotide
uguagugucauaucaguaa

SEQ ID NO: 1191043 - RNA, 19 nt, Artificial Sequence
  Description of Artificial Sequence: Synthetic oligonucleotide
accuaauagugccaucugc

SEQ ID NO: 1191044 - RNA, 19 nt, Artificial Sequence
  Description of Artificial Sequence: Synthetic oligonucleotide
uaagaaauugaaugucuca

SEQ ID NO: 1191045 - RNA, 19 nt, Artificial Sequence
  Description of Artificial Sequence: Synthetic oligonucleotide
uuuaccuguuuuauuguca

SEQ ID NO: 1191046 - RNA, 19 nt, Artificial Sequence
  Description of Artificial Sequence: Synthetic oligonucleotide
guuaauagugauugcuuag

SEQ ID NO: 1191047 - RNA, 19 nt, Artificial Sequence
  Description of Artificial Sequence: Synthetic oligonucleotide
uauggauccauuugguucu

SEQ ID NO: 1191048 - RNA, 19 nt, Artificial Sequence
  Description of Artificial Sequence: Synthetic oligonucleotide
uuagauuaguuaaacccaa

SEQ ID NO: 1191049 - RNA, 19 nt, Artificial Sequence
  Description of Artificial Sequence: Synthetic oligonucleotide
cuacguaguguauacuugg

SEQ ID NO: 1191050 - RNA, 19 nt, Artificial Sequence
  Description of Artificial Sequence: Synthetic oligonucleotide
uaauagcuaaugaaagaac

SEQ ID NO: 1191051 - RNA, 19 nt, Artificial Sequence
  Description of Artificial Sequence: Synthetic oligonucleotide
acuaauagcuaaugaaaga

SEQ ID NO: 1191052 - RNA, 19 nt, Artificial Sequence
  Description of Artificial Sequence: Synthetic oligonucleotide
cuuagauuaguuaaaccca

SEQ ID NO: 1191053 - RNA, 19 nt, Artificial Sequence
  Description of Artificial Sequence: Synthetic oligonucleotide
uguauagauagguucuaca

SEQ ID NO: 1191054 - RNA, 19 nt, Artificial Sequence
  Description of Artificial Sequence: Synthetic oligonucleotide
ugcuuauugauccgaagcu

SEQ ID NO: 1191055 - RNA, 19 nt, Artificial Sequence
  Description of Artificial Sequence: Synthetic oligonucleotide
cuuauugauccgaagcuug

SEQ ID NO: 1191056 - RNA, 19 nt, Artificial Sequence
  Description of Artificial Sequence: Synthetic oligonucleotide
guuaggacuaggcauauuc

SEQ ID NO: 1191057 - RNA, 19 nt, Artificial Sequence
  Description of Artificial Sequence: Synthetic oligonucleotide
aaacguuauugguucagca

SEQ ID NO: 1191058 - RNA, 19 nt, Artificial Sequence
  Description of Artificial Sequence: Synthetic oligonucleotide
aaugucucaagaacaucac

SEQ ID NO: 1191059 - RNA, 19 nt, Artificial Sequence
  Description of Artificial Sequence: Synthetic oligonucleotide
ugagcuaccauagaaugga

SEQ ID NO: 1191060 - RNA, 19 nt, Artificial Sequence
  Description of Artificial Sequence: Synthetic oligonucleotide
auuugacucauauguauca

SEQ ID NO: 1191061 - RNA, 19 nt, Artificial Sequence
  Description of Artificial Sequence: Synthetic oligonucleotide
uaagugcaaauacauggca

SEQ ID NO: 1191062 - RNA, 19 nt, Artificial Sequence
  Description of Artificial Sequence: Synthetic oligonucleotide
caaaucauaacuauagucu

SEQ ID NO: 1191063 - RNA, 19 nt, Artificial Sequence
  Description of Artificial Sequence: Synthetic oligonucleotide
aaguaaugaccuuacccgu

SEQ ID NO: 1191064 - RNA, 19 nt, Artificial Sequence
  Description of Artificial Sequence: Synthetic oligonucleotide
uuaggacuaggcauauucc

SEQ ID NO: 1191065 - RNA, 19 nt, Artificial Sequence
  Description of Artificial Sequence: Synthetic oligonucleotide
agauuaguuaaacccaaga

SEQ ID NO: 1191066 - RNA, 19 nt, Artificial Sequence
  Description of Artificial Sequence: Synthetic oligonucleotide
cauaacuauagucugcauc

SEQ ID NO: 1191067 - RNA, 19 nt, Artificial Sequence
  Description of Artificial Sequence: Synthetic oligonucleotide
aaaacaucaucagaaccca

SEQ ID NO: 1191068 - RNA, 19 nt, Artificial Sequence
  Description of Artificial Sequence: Synthetic oligonucleotide
gaaugucucaagaacauca

SEQ ID NO: 1191069 - RNA, 19 nt, Artificial Sequence
  Description of Artificial Sequence: Synthetic oligonucleotide
aauagugauugcuuagauu

SEQ ID NO: 1191070 - RNA, 19 nt, Artificial Sequence
  Description of Artificial Sequence: Synthetic oligonucleotide
ucauuaccuauuuugugcu

SEQ ID NO: 1191071 - RNA, 19 nt, Artificial Sequence
  Description of Artificial Sequence: Synthetic oligonucleotide
uuccucaguaucaggauca

SEQ ID NO: 1191072 - RNA, 19 nt, Artificial Sequence
  Description of Artificial Sequence: Synthetic oligonucleotide
aacguuauugguucagcau

SEQ ID NO: 1191073 - RNA, 19 nt, Artificial Sequence
  Description of Artificial Sequence: Synthetic oligonucleotide
uuaauagugauugcuuaga

SEQ ID NO: 1191074 - RNA, 19 nt, Artificial Sequence
  Description of Artificial Sequence: Synthetic oligonucleotide
agaucguacaucuaguauu

SEQ ID NO: 1191075 - RNA, 19 nt, Artificial Sequence
  Description of Artificial Sequence: Synthetic oligonucleotide
uguuaauagugauugcuua

SEQ ID NO: 1191076 - RNA, 19 nt, Artificial Sequence
  Description of Artificial Sequence: Synthetic oligonucleotide
aacugauguagguauucca

SEQ ID NO: 1191077 - RNA, 19 nt, Artificial Sequence
  Description of Artificial Sequence: Synthetic oligonucleotide
uauugguucagcaucccau

SEQ ID NO: 1191078 - RNA, 19 nt, Artificial Sequence
  Description of Artificial Sequence: Synthetic oligonucleotide
uacguaguguauacuuggg

SEQ ID NO: 1191079 - RNA, 19 nt, Artificial Sequence
  Description of Artificial Sequence: Synthetic oligonucleotide
uuguaagugcaaauacaug

SEQ ID NO: 1191080 - RNA, 19 nt, Artificial Sequence
  Description of Artificial Sequence: Synthetic oligonucleotide
ucuaucuucaugagcaguu

SEQ ID NO: 1191081 - RNA, 19 nt, Artificial Sequence
  Description of Artificial Sequence: Synthetic oligonucleotide
ucuaaagaggcacucuuuu

SEQ ID NO: 1191082 - RNA, 19 nt, Artificial Sequence
  Description of Artificial Sequence: Synthetic oligonucleotide
uaaccuaauagugccaucu

SEQ ID NO: 1191083 - RNA, 19 nt, Artificial Sequence
  Description of Artificial Sequence: Synthetic oligonucleotide
uagguucuacaucuaaaga

SEQ ID NO: 1191084 - RNA, 19 nt, Artificial Sequence
  Description of Artificial Sequence: Synthetic oligonucleotide
auacuugggguuccaaguc

SEQ ID NO: 1191085 - RNA, 19 nt, Artificial Sequence
  Description of Artificial Sequence: Synthetic oligonucleotide
auaugagcuggaucacagc

SEQ ID NO: 1191086 - RNA, 19 nt, Artificial Sequence
  Description of Artificial Sequence: Synthetic oligonucleotide
guuccaagucuuucgaaag

SEQ ID NO: 1191087 - RNA, 19 nt, Artificial Sequence
  Description of Artificial Sequence: Synthetic oligonucleotide
uccacguuaggacuaggca

SEQ ID NO: 1191088 - RNA, 19 nt, Artificial Sequence
  Description of Artificial Sequence: Synthetic oligonucleotide
uaggacuaggcauauucca

SEQ ID NO: 1191089 - RNA, 19 nt, Artificial Sequence
  Description of Artificial Sequence: Synthetic oligonucleotide
ucuguugguucacacaaau

SEQ ID NO: 1191090 - RNA, 19 nt, Artificial Sequence
  Description of Artificial Sequence: Synthetic oligonucleotide
auuguaacaggaagugugg

SEQ ID NO: 1191091 - RNA, 19 nt, Artificial Sequence
  Description of Artificial Sequence: Synthetic oligonucleotide
accuuacccguugagaucg

SEQ ID NO: 1191092 - RNA, 19 nt, Artificial Sequence
  Description of Artificial Sequence: Synthetic oligonucleotide
aagucguaauucuuuuagu

SEQ ID NO: 1191093 - RNA, 19 nt, Artificial Sequence
  Description of Artificial Sequence: Synthetic oligonucleotide
acguaguguauacuugggg

SEQ ID NO: 1191094 - RNA, 19 nt, Artificial Sequence
  Description of Artificial Sequence: Synthetic oligonucleotide
cugaauuagacaguccaag

SEQ ID NO: 1191095 - RNA, 19 nt, Artificial Sequence
  Description of Artificial Sequence: Synthetic oligonucleotide
uagauuaguuaaacccaag

SEQ ID NO: 1191096 - RNA, 19 nt, Artificial Sequence
  Description of Artificial Sequence: Synthetic oligonucleotide
acuaccugugaggaaagac

SEQ ID NO: 1191097 - RNA, 19 nt, Artificial Sequence
  Description of Artificial Sequence: Synthetic oligonucleotide
auccaaaugagcuaccaua

SEQ ID NO: 1191098 - RNA, 19 nt, Artificial Sequence
  Description of Artificial Sequence: Synthetic oligonucleotide
gaucguacaucuaguauug

SEQ ID NO: 1191099 - RNA, 19 nt, Artificial Sequence
  Description of Artificial Sequence: Synthetic oligonucleotide
aguuauuguaacaggaagu

SEQ ID NO: 1191100 - RNA, 19 nt, Artificial Sequence
  Description of Artificial Sequence: Synthetic oligonucleotide
aaaccuucauuaccuauuu

SEQ ID NO: 1191101 - RNA, 19 nt, Artificial Sequence
  Description of Artificial Sequence: Synthetic oligonucleotide
uuuaugccacuauaggcaa

SEQ ID NO: 1191102 - RNA, 19 nt, Artificial Sequence
  Description of Artificial Sequence: Synthetic oligonucleotide
agucguaauucuuuuaguu

SEQ ID NO: 1191103 - RNA, 19 nt, Artificial Sequence
  Description of Artificial Sequence: Synthetic oligonucleotide
auaaaugacuugccuccuc

SEQ ID NO: 1191104 - RNA, 19 nt, Artificial Sequence
  Description of Artificial Sequence: Synthetic oligonucleotide
ugaccuuacccguugagau

SEQ ID NO: 1191105 - RNA, 19 nt, Artificial Sequence
  Description of Artificial Sequence: Synthetic oligonucleotide
ccaaguaaugaccuuaccc

SEQ ID NO: 1191106 - RNA, 19 nt, Artificial Sequence
  Description of Artificial Sequence: Synthetic oligonucleotide
gcaaaucauaacuauaguc

SEQ ID NO: 1191107 - RNA, 19 nt, Artificial Sequence
  Description of Artificial Sequence: Synthetic oligonucleotide
uacacaugucuuacugucc

SEQ ID NO: 1191108 - RNA, 19 nt, Artificial Sequence
  Description of Artificial Sequence: Synthetic oligonucleotide
caggaucuguucuaaauuc

SEQ ID NO: 1191109 - RNA, 19 nt, Artificial Sequence
  Description of Artificial Sequence: Synthetic oligonucleotide
uguacacaugucuuacugu

SEQ ID NO: 1191110 - RNA, 19 nt, Artificial Sequence
  Description of Artificial Sequence: Synthetic oligonucleotide
uuauugauccgaagcuugu

SEQ ID NO: 1191111 - RNA, 19 nt, Artificial Sequence
  Description of Artificial Sequence: Synthetic oligonucleotide
uagggauccacguuaggac

SEQ ID NO: 1191112 - RNA, 19 nt, Artificial Sequence
  Description of Artificial Sequence: Synthetic oligonucleotide
aaccuaauagugccaucug

SEQ ID NO: 1191113 - RNA, 19 nt, Artificial Sequence
  Description of Artificial Sequence: Synthetic oligonucleotide
guacacaugucuuacuguc

SEQ ID NO: 1191114 - RNA, 19 nt, Artificial Sequence
  Description of Artificial Sequence: Synthetic oligonucleotide
aguaucaggaucaucaguu

SEQ ID NO: 1191115 - RNA, 19 nt, Artificial Sequence
  Description of Artificial Sequence: Synthetic oligonucleotide
uaaugcucucacuccauca

SEQ ID NO: 1191116 - RNA, 19 nt, Artificial Sequence
  Description of Artificial Sequence: Synthetic oligonucleotide
uucuauggauccauuuggu

SEQ ID NO: 1191117 - RNA, 19 nt, Artificial Sequence
  Description of Artificial Sequence: Synthetic oligonucleotide
uugagaucguacaucuagu

SEQ ID NO: 1191118 - RNA, 19 nt, Artificial Sequence
  Description of Artificial Sequence: Synthetic oligonucleotide
acuccgucgcuucaccggc

SEQ ID NO: 1191119 - RNA, 19 nt, Artificial Sequence
  Description of Artificial Sequence: Synthetic oligonucleotide
gcuaccauagaauggauca

SEQ ID NO: 1191120 - RNA, 19 nt, Artificial Sequence
  Description of Artificial Sequence: Synthetic oligonucleotide
uauaugccuuugauggaug

SEQ ID NO: 1191121 - RNA, 19 nt, Artificial Sequence
  Description of Artificial Sequence: Synthetic oligonucleotide
uuauugguucagcauccca

SEQ ID NO: 1191122 - RNA, 19 nt, Artificial Sequence
  Description of Artificial Sequence: Synthetic oligonucleotide
uuauuggccggcaaaucau

SEQ ID NO: 1191123 - RNA, 19 nt, Artificial Sequence
  Description of Artificial Sequence: Synthetic oligonucleotide
accauucaggaucuguucu

SEQ ID NO: 1191124 - RNA, 19 nt, Artificial Sequence
  Description of Artificial Sequence: Synthetic oligonucleotide
aauaaaugacuugccuccu

SEQ ID NO: 1191125 - RNA, 19 nt, Artificial Sequence
  Description of Artificial Sequence: Synthetic oligonucleotide
aaaugacuugccuccucca

SEQ ID NO: 1191126 - RNA, 19 nt, Artificial Sequence
  Description of Artificial Sequence: Synthetic oligonucleotide
guaaugaccuuacccguug

SEQ ID NO: 1191127 - RNA, 19 nt, Artificial Sequence
  Description of Artificial Sequence: Synthetic oligonucleotide
ggauuccauaaccuaauag

SEQ ID NO: 1191128 - RNA, 19 nt, Artificial Sequence
  Description of Artificial Sequence: Synthetic oligonucleotide
auguauagauagguucuac

SEQ ID NO: 1191129 - RNA, 19 nt, Artificial Sequence
  Description of Artificial Sequence: Synthetic oligonucleotide
uaguuaaacccaagaaaua

SEQ ID NO: 1191130 - RNA, 19 nt, Artificial Sequence
  Description of Artificial Sequence: Synthetic oligonucleotide
ucuuccuaugagcuguuau

SEQ ID NO: 1191131 - RNA, 19 nt, Artificial Sequence
  Description of Artificial Sequence: Synthetic oligonucleotide
ucaggaucaucaguuaagu

SEQ ID NO: 1191132 - RNA, 19 nt, Artificial Sequence
  Description of Artificial Sequence: Synthetic oligonucleotide
agcuaaaccuucauuaccu

SEQ ID NO: 1191133 - RNA, 19 nt, Artificial Sequence
  Description of Artificial Sequence: Synthetic oligonucleotide
cacauguagugucauauca

SEQ ID NO: 1191134 - RNA, 19 nt, Artificial Sequence
  Description of Artificial Sequence: Synthetic oligonucleotide
uccauuguaagugcaaaua

SEQ ID NO: 1191135 - RNA, 19 nt, Artificial Sequence
  Description of Artificial Sequence: Synthetic oligonucleotide
uuacccguugagaucguac

SEQ ID NO: 1191136 - RNA, 19 nt, Artificial Sequence
  Description of Artificial Sequence: Synthetic oligonucleotide
cuaccugugaggaaagaca

SEQ ID NO: 1191137 - RNA, 19 nt, Artificial Sequence
  Description of Artificial Sequence: Synthetic oligonucleotide
uacuuuguuaauagugauu

SEQ ID NO: 1191138 - RNA, 19 nt, Artificial Sequence
  Description of Artificial Sequence: Synthetic oligonucleotide
ugugagucucuguugguuc

SEQ ID NO: 1191139 - RNA, 19 nt, Artificial Sequence
  Description of Artificial Sequence: Synthetic oligonucleotide
ucaccagagggccuuuuga

SEQ ID NO: 1191140 - RNA, 19 nt, Artificial Sequence
  Description of Artificial Sequence: Synthetic oligonucleotide
gauauaugccuuugaugga

SEQ ID NO: 1191141 - RNA, 19 nt, Artificial Sequence
  Description of Artificial Sequence: Synthetic oligonucleotide
ugauugcuuagauuaguua

SEQ ID NO: 1191142 - RNA, 19 nt, Artificial Sequence
  Description of Artificial Sequence: Synthetic oligonucleotide
aggacuaggcauauuccac

SEQ ID NO: 1191143 - RNA, 19 nt, Artificial Sequence
  Description of Artificial Sequence: Synthetic oligonucleotide
gaaacguuauugguucagc

SEQ ID NO: 1191144 - RNA, 19 nt, Artificial Sequence
  Description of Artificial Sequence: Synthetic oligonucleotide
uguuuaggagauucaccac

SEQ ID NO: 1191145 - RNA, 19 nt, Artificial Sequence
  Description of Artificial Sequence: Synthetic oligonucleotide
aauggagcagucauggcuu

SEQ ID NO: 1191146 - RNA, 19 nt, Artificial Sequence
  Description of Artificial Sequence: Synthetic oligonucleotide
uacccguugagaucguaca

SEQ ID NO: 1191147 - RNA, 19 nt, Artificial Sequence
  Description of Artificial Sequence: Synthetic oligonucleotide
acuauagucugcaucauuu

SEQ ID NO: 1191148 - RNA, 19 nt, Artificial Sequence
  Description of Artificial Sequence: Synthetic oligonucleotide
uuauuguaacaggaagugu

SEQ ID NO: 1191149 - RNA, 19 nt, Artificial Sequence
  Description of Artificial Sequence: Synthetic oligonucleotide
aacuauagucugcaucauu

SEQ ID NO: 1191150 - RNA, 19 nt, Artificial Sequence
  Description of Artificial Sequence: Synthetic oligonucleotide
aucaggaucaucaguuaag

SEQ ID NO: 1191151 - RNA, 19 nt, Artificial Sequence
  Description of Artificial Sequence: Synthetic oligonucleotide
acuaggcauauuccaccac

SEQ ID NO: 1191152 - RNA, 19 nt, Artificial Sequence
  Description of Artificial Sequence: Synthetic oligonucleotide
caaauagauuccauuggga

SEQ ID NO: 1191153 - RNA, 19 nt, Artificial Sequence
  Description of Artificial Sequence: Synthetic oligonucleotide
guuaagucagcagcuaaac

SEQ ID NO: 1191154 - RNA, 19 nt, Artificial Sequence
  Description of Artificial Sequence: Synthetic oligonucleotide
ugggaucuacugcuaaacu

SEQ ID NO: 1191155 - RNA, 19 nt, Artificial Sequence
  Description of Artificial Sequence: Synthetic oligonucleotide
uccaaguaaugaccuuacc

SEQ ID NO: 1191156 - RNA, 19 nt, Artificial Sequence
  Description of Artificial Sequence: Synthetic oligonucleotide
agcuaaugcucucacucca

SEQ ID NO: 1191157 - RNA, 19 nt, Artificial Sequence
  Description of Artificial Sequence: Synthetic oligonucleotide
ugagaucguacaucuagua

SEQ ID NO: 1191158 - RNA, 19 nt, Artificial Sequence
  Description of Artificial Sequence: Synthetic oligonucleotide
cauccaauuucuuccuaug

SEQ ID NO: 1191159 - RNA, 19 nt, Artificial Sequence
  Description of Artificial Sequence: Synthetic oligonucleotide
augagcuaccauagaaugg

SEQ ID NO: 1191160 - RNA, 19 nt, Artificial Sequence
  Description of Artificial Sequence: Synthetic oligonucleotide
cuuugauggauggaaagca

SEQ ID NO: 1191161 - RNA, 19 nt, Artificial Sequence
  Description of Artificial Sequence: Synthetic oligonucleotide
cagcaucccauucuguacc

SEQ ID NO: 1191162 - RNA, 19 nt, Artificial Sequence
  Description of Artificial Sequence: Synthetic oligonucleotide
gaagugugggaugacuuac

SEQ ID NO: 1191163 - RNA, 19 nt, Artificial Sequence
  Description of Artificial Sequence: Synthetic oligonucleotide
acauguagugucauaucag

SEQ ID NO: 1191164 - RNA, 19 nt, Artificial Sequence
  Description of Artificial Sequence: Synthetic oligonucleotide
agcaacuaaagugccagcu

SEQ ID NO: 1191165 - RNA, 19 nt, Artificial Sequence
  Description of Artificial Sequence: Synthetic oligonucleotide
ucguacaucuaguauugua

SEQ ID NO: 1191166 - RNA, 19 nt, Artificial Sequence
  Description of Artificial Sequence: Synthetic oligonucleotide
agauagguucuacaucuaa

SEQ ID NO: 1191167 - RNA, 19 nt, Artificial Sequence
  Description of Artificial Sequence: Synthetic oligonucleotide
gugaggaaagacaucacca

SEQ ID NO: 1191168 - RNA, 19 nt, Artificial Sequence
  Description of Artificial Sequence: Synthetic oligonucleotide
auccacguuaggacuaggc

SEQ ID NO: 1191169 - RNA, 19 nt, Artificial Sequence
  Description of Artificial Sequence: Synthetic oligonucleotide
uuaugccacuauaggcaag

SEQ ID NO: 1191170 - RNA, 19 nt, Artificial Sequence
  Description of Artificial Sequence: Synthetic oligonucleotide
ucugaccaagaaaaucuuu

SEQ ID NO: 1191171 - RNA, 19 nt, Artificial Sequence
  Description of Artificial Sequence: Synthetic oligonucleotide
gaacuccgucgcuucaccg

SEQ ID NO: 1191172 - RNA, 19 nt, Artificial Sequence
  Description of Artificial Sequence: Synthetic oligonucleotide
ugcaaauacauggcaauuu

SEQ ID NO: 1191173 - RNA, 19 nt, Artificial Sequence
  Description of Artificial Sequence: Synthetic oligonucleotide
agggauccacguuaggacu

SEQ ID NO: 1191174 - RNA, 19 nt, Artificial Sequence
  Description of Artificial Sequence: Synthetic oligonucleotide
acuacguaguguauacuug

SEQ ID NO: 1191175 - RNA, 19 nt, Artificial Sequence
  Description of Artificial Sequence: Synthetic oligonucleotide
auuagaacuaauagcuaau

SEQ ID NO: 1191176 - RNA, 19 nt, Artificial Sequence
  Description of Artificial Sequence: Synthetic oligonucleotide
aucauuuguuaccgucaag

SEQ ID NO: 1191177 - RNA, 19 nt, Artificial Sequence
  Description of Artificial Sequence: Synthetic oligonucleotide
gacuaggcauauuccacca

SEQ ID NO: 1191178 - RNA, 19 nt, Artificial Sequence
  Description of Artificial Sequence: Synthetic oligonucleotide
gauagguucuacaucuaaa

SEQ ID NO: 1191179 - RNA, 19 nt, Artificial Sequence
  Description of Artificial Sequence: Synthetic oligonucleotide
uacaucuaaagaggcacuc

SEQ ID NO: 1191180 - RNA, 19 nt, Artificial Sequence
  Description of Artificial Sequence: Synthetic oligonucleotide
augugucuaucuucaugag

SEQ ID NO: 1191181 - RNA, 19 nt, Artificial Sequence
  Description of Artificial Sequence: Synthetic oligonucleotide
gguugcaucaauaccacca

SEQ ID NO: 1191182 - RNA, 19 nt, Artificial Sequence
  Description of Artificial Sequence: Synthetic oligonucleotide
uccuaugagcuguuauuuc

SEQ ID NO: 1191183 - RNA, 19 nt, Artificial Sequence
  Description of Artificial Sequence: Synthetic oligonucleotide
cuaauggagcagucauggc

SEQ ID NO: 1191184 - RNA, 19 nt, Artificial Sequence
  Description of Artificial Sequence: Synthetic oligonucleotide
uaguguauacuugggguuc

SEQ ID NO: 1191185 - RNA, 19 nt, Artificial Sequence
  Description of Artificial Sequence: Synthetic oligonucleotide
gggaugacuuacuacuuug

SEQ ID NO: 1191186 - RNA, 19 nt, Artificial Sequence
  Description of Artificial Sequence: Synthetic oligonucleotide
ggacuaggcauauuccacc

SEQ ID NO: 1191187 - RNA, 19 nt, Artificial Sequence
  Description of Artificial Sequence: Synthetic oligonucleotide
uuugacucauauguaucau

SEQ ID NO: 1191188 - RNA, 19 nt, Artificial Sequence
  Description of Artificial Sequence: Synthetic oligonucleotide
caccacuaaaacacuguuc

SEQ ID NO: 1191189 - RNA, 19 nt, Artificial Sequence
  Description of Artificial Sequence: Synthetic oligonucleotide
acuaaagugccagcuaaaa

SEQ ID NO: 1191190 - RNA, 19 nt, Artificial Sequence
  Description of Artificial Sequence: Synthetic oligonucleotide
guuaccgucaagucugcaa

SEQ ID NO: 1191191 - RNA, 19 nt, Artificial Sequence
  Description of Artificial Sequence: Synthetic oligonucleotide
uaaugaccuuacccguuga

SEQ ID NO: 1191192 - RNA, 19 nt, Artificial Sequence
  Description of Artificial Sequence: Synthetic oligonucleotide
auugguucagcaucccauu

SEQ ID NO: 1191193 - RNA, 19 nt, Artificial Sequence
  Description of Artificial Sequence: Synthetic oligonucleotide
ccauuguaagugcaaauac

SEQ ID NO: 1191194 - RNA, 19 nt, Artificial Sequence
  Description of Artificial Sequence: Synthetic oligonucleotide
agguucuacaggaugaaaa

SEQ ID NO: 1191195 - RNA, 19 nt, Artificial Sequence
  Description of Artificial Sequence: Synthetic oligonucleotide
uugguucagcaucccauuc

SEQ ID NO: 1191196 - RNA, 19 nt, Artificial Sequence
  Description of Artificial Sequence: Synthetic oligonucleotide
uauuggccggcaaaucaua

SEQ ID NO: 1191197 - RNA, 19 nt, Artificial Sequence
  Description of Artificial Sequence: Synthetic oligonucleotide
aguugcuuccucaguauca

SEQ ID NO: 1191198 - RNA, 19 nt, Artificial Sequence
  Description of Artificial Sequence: Synthetic oligonucleotide
auuagacaguccaaguaau

SEQ ID NO: 1191199 - RNA, 19 nt, Artificial Sequence
  Description of Artificial Sequence: Synthetic oligonucleotide
acuauaggcaagaccccag

SEQ ID NO: 1191200 - RNA, 19 nt, Artificial Sequence
  Description of Artificial Sequence: Synthetic oligonucleotide
ugccuuugauggauggaaa

SEQ ID NO: 1191201 - RNA, 19 nt, Artificial Sequence
  Description of Artificial Sequence: Synthetic oligonucleotide
gacuacguaguguauacuu

SEQ ID NO: 1191202 - RNA, 19 nt, Artificial Sequence
  Description of Artificial Sequence: Synthetic oligonucleotide
cgaaaggcaucuuuauugg

SEQ ID NO: 1191203 - RNA, 19 nt, Artificial Sequence
  Description of Artificial Sequence: Synthetic oligonucleotide
ugcuucuauggauccauuu

SEQ ID NO: 1191204 - RNA, 19 nt, Artificial Sequence
  Description of Artificial Sequence: Synthetic oligonucleotide
auccgaagcuugucuuuuc

SEQ ID NO: 1191205 - RNA, 19 nt, Artificial Sequence
  Description of Artificial Sequence: Synthetic oligonucleotide
uggaaacguuauugguuca

SEQ ID NO: 1191206 - RNA, 19 nt, Artificial Sequence
  Description of Artificial Sequence: Synthetic oligonucleotide
ucacuccaucaaaaugacu

SEQ ID NO: 1191207 - RNA, 19 nt, Artificial Sequence
  Description of Artificial Sequence: Synthetic oligonucleotide
cauguagugucauaucagu

SEQ ID NO: 1191208 - RNA, 19 nt, Artificial Sequence
  Description of Artificial Sequence: Synthetic oligonucleotide
augaccuuacccguugaga

SEQ ID NO: 1191209 - RNA, 19 nt, Artificial Sequence
  Description of Artificial Sequence: Synthetic oligonucleotide
uggauuccauaaccuaaua

SEQ ID NO: 1191210 - RNA, 19 nt, Artificial Sequence
  Description of Artificial Sequence: Synthetic oligonucleotide
uaccauagaauggaucauu

SEQ ID NO: 1191211 - RNA, 19 nt, Artificial Sequence
  Description of Artificial Sequence: Synthetic oligonucleotide
aguuaagucagcagcuaaa

SEQ ID NO: 1191212 - RNA, 19 nt, Artificial Sequence
  Description of Artificial Sequence: Synthetic oligonucleotide
gagcaacuaaagugccagc

SEQ ID NO: 1191213 - RNA, 19 nt, Artificial Sequence
  Description of Artificial Sequence: Synthetic oligonucleotide
acacuuaacaaaacaucau

SEQ ID NO: 1191214 - RNA, 19 nt, Artificial Sequence
  Description of Artificial Sequence: Synthetic oligonucleotide
uauugauccgaagcuuguc

SEQ ID NO: 1191215 - RNA, 19 nt, Artificial Sequence
  Description of Artificial Sequence: Synthetic oligonucleotide
caccaauaugagcuggauc

SEQ ID NO: 1191216 - RNA, 19 nt, Artificial Sequence
  Description of Artificial Sequence: Synthetic oligonucleotide
cauuugguucugaauuaga

SEQ ID NO: 1191217 - RNA, 19 nt, Artificial Sequence
  Description of Artificial Sequence: Synthetic oligonucleotide
gaccuuacccguugagauc

SEQ ID NO: 1191218 - RNA, 19 nt, Artificial Sequence
  Description of Artificial Sequence: Synthetic oligonucleotide
aacuaaagugccagcuaaa

SEQ ID NO: 1191219 - RNA, 19 nt, Artificial Sequence
  Description of Artificial Sequence: Synthetic oligonucleotide
gagaucguacaucuaguau

SEQ ID NO: 1191220 - RNA, 19 nt, Artificial Sequence
  Description of Artificial Sequence: Synthetic oligonucleotide
cuuuauuggccggcaaauc

SEQ ID NO: 1191221 - RNA, 19 nt, Artificial Sequence
  Description of Artificial Sequence: Synthetic oligonucleotide
cguuauugguucagcaucc

SEQ ID NO: 1191222 - RNA, 19 nt, Artificial Sequence
  Description of Artificial Sequence: Synthetic oligonucleotide
caaaguuucaggguguggu

SEQ ID NO: 1191223 - RNA, 19 nt, Artificial Sequence
  Description of Artificial Sequence: Synthetic oligonucleotide
ggaaacguuauugguucag

SEQ ID NO: 1191224 - RNA, 19 nt, Artificial Sequence
  Description of Artificial Sequence: Synthetic oligonucleotide
aaccuucauuaccuauuuu

SEQ ID NO: 1191225 - RNA, 19 nt, Artificial Sequence
  Description of Artificial Sequence: Synthetic oligonucleotide
guuauugguucagcauccc

SEQ ID NO: 1191226 - RNA, 19 nt, Artificial Sequence
  Description of Artificial Sequence: Synthetic oligonucleotide
auacuuuggcaagggcauc

SEQ ID NO: 1191227 - RNA, 19 nt, Artificial Sequence
  Description of Artificial Sequence: Synthetic oligonucleotide
ugugggcccuaaauguaua

SEQ ID NO: 1191228 - RNA, 19 nt, Artificial Sequence
  Description of Artificial Sequence: Synthetic oligonucleotide
guaccauccccucgaacuc

SEQ ID NO: 1191229 - RNA, 19 nt, Artificial Sequence
  Description of Artificial Sequence: Synthetic oligonucleotide
cacguuaggacuaggcaua

SEQ ID NO: 1191230 - RNA, 19 nt, Artificial Sequence
  Description of Artificial Sequence: Synthetic oligonucleotide
aaaugacuacguaguguau

SEQ ID NO: 1191231 - RNA, 19 nt, Artificial Sequence
  Description of Artificial Sequence: Synthetic oligonucleotide
uaccauccccucgaacucc

SEQ ID NO: 1191232 - RNA, 19 nt, Artificial Sequence
  Description of Artificial Sequence: Synthetic oligonucleotide
guaacaggaagugugggau

SEQ ID NO: 1191233 - RNA, 19 nt, Artificial Sequence
  Description of Artificial Sequence: Synthetic oligonucleotide
cuauaggcaagaccccaga

SEQ ID NO: 1191234 - RNA, 19 nt, Artificial Sequence
  Description of Artificial Sequence: Synthetic oligonucleotide
guccaaguaaugaccuuac

SEQ ID NO: 1191235 - RNA, 19 nt, Artificial Sequence
  Description of Artificial Sequence: Synthetic oligonucleotide
auacuaccugugaggaaag

SEQ ID NO: 1191236 - RNA, 19 nt, Artificial Sequence
  Description of Artificial Sequence: Synthetic oligonucleotide
ugacuacguaguguauacu

SEQ ID NO: 1191237 - RNA, 19 nt, Artificial Sequence
  Description of Artificial Sequence: Synthetic oligonucleotide
accgucaagucugcaaggu

SEQ ID NO: 1191238 - RNA, 19 nt, Artificial Sequence
  Description of Artificial Sequence: Synthetic oligonucleotide
gaucacauguagugucaua

SEQ ID NO: 1191239 - RNA, 19 nt, Artificial Sequence
  Description of Artificial Sequence: Synthetic oligonucleotide
aguaaugaccuuacccguu

SEQ ID NO: 1191240 - RNA, 19 nt, Artificial Sequence
  Description of Artificial Sequence: Synthetic oligonucleotide
uaacuauagucugcaucau

SEQ ID NO: 1191241 - RNA, 19 nt, Artificial Sequence
  Description of Artificial Sequence: Synthetic oligonucleotide
gauccacguuaggacuagg

SEQ ID NO: 1191242 - RNA, 19 nt, Artificial Sequence
  Description of Artificial Sequence: Synthetic oligonucleotide
cuacuuuguuaauagugau

SEQ ID NO: 1191243 - RNA, 19 nt, Artificial Sequence
  Description of Artificial Sequence: Synthetic oligonucleotide
acccguugagaucguacau

SEQ ID NO: 1191244 - RNA, 19 nt, Artificial Sequence
  Description of Artificial Sequence: Synthetic oligonucleotide
ggcaguaaccagcacaggu

SEQ ID NO: 1191245 - RNA, 19 nt, Artificial Sequence
  Description of Artificial Sequence: Synthetic oligonucleotide
cuaaaccuucauuaccuau

SEQ ID NO: 1191246 - RNA, 19 nt, Artificial Sequence
  Description of Artificial Sequence: Synthetic oligonucleotide
augagcaacuaaagugcca

SEQ ID NO: 1191247 - RNA, 19 nt, Artificial Sequence
  Description of Artificial Sequence: Synthetic oligonucleotide
auguagugucauaucagua

SEQ ID NO: 1191248 - RNA, 19 nt, Artificial Sequence
  Description of Artificial Sequence: Synthetic oligonucleotide
cacuauaggcaagacccca

SEQ ID NO: 1191249 - RNA, 19 nt, Artificial Sequence
  Description of Artificial Sequence: Synthetic oligonucleotide
caucuguaugagcaacuaa

SEQ ID NO: 1191250 - RNA, 19 nt, Artificial Sequence
  Description of Artificial Sequence: Synthetic oligonucleotide
aucuaaagaggcacucuuu

SEQ ID NO: 1191251 - RNA, 19 nt, Artificial Sequence
  Description of Artificial Sequence: Synthetic oligonucleotide
gcccaguacacuuaacaaa

SEQ ID NO: 1191252 - RNA, 19 nt, Artificial Sequence
  Description of Artificial Sequence: Synthetic oligonucleotide
ccaaauuccauaaucuaau

SEQ ID NO: 1191253 - RNA, 19 nt, Artificial Sequence
  Description of Artificial Sequence: Synthetic oligonucleotide
gaugugagucucuguuggu

SEQ ID NO: 1191254 - RNA, 19 nt, Artificial Sequence
  Description of Artificial Sequence: Synthetic oligonucleotide
ggcccaguacacuuaacaa

SEQ ID NO: 1191255 - RNA, 19 nt, Artificial Sequence
  Description of Artificial Sequence: Synthetic oligonucleotide
uguuaccgucaagucugca

SEQ ID NO: 1191256 - RNA, 19 nt, Artificial Sequence
  Description of Artificial Sequence: Synthetic oligonucleotide
auuggccggcaaaucauaa

SEQ ID NO: 1191257 - RNA, 19 nt, Artificial Sequence
  Description of Artificial Sequence: Synthetic oligonucleotide
ccacuauaggcaagacccc

SEQ ID NO: 1191258 - RNA, 19 nt, Artificial Sequence
  Description of Artificial Sequence: Synthetic oligonucleotide
ggaagugugggaugacuua

SEQ ID NO: 1191259 - RNA, 19 nt, Artificial Sequence
  Description of Artificial Sequence: Synthetic oligonucleotide
augugggcccuaaauguau

SEQ ID NO: 1191260 - RNA, 19 nt, Artificial Sequence
  Description of Artificial Sequence: Synthetic oligonucleotide
cuuguacacaugucuuacu

SEQ ID NO: 1191261 - RNA, 19 nt, Artificial Sequence
  Description of Artificial Sequence: Synthetic oligonucleotide
guaaccagcacagguucua

SEQ ID NO: 1191262 - RNA, 19 nt, Artificial Sequence
  Description of Artificial Sequence: Synthetic oligonucleotide
agagggccuuuugauuucu

SEQ ID NO: 1191263 - RNA, 19 nt, Artificial Sequence
  Description of Artificial Sequence: Synthetic oligonucleotide
ccuaugagcuguuauuucu

SEQ ID NO: 1191264 - RNA, 19 nt, Artificial Sequence
  Description of Artificial Sequence: Synthetic oligonucleotide
gcaacuaaagugccagcua

SEQ ID NO: 1191265 - RNA, 19 nt, Artificial Sequence
  Description of Artificial Sequence: Synthetic oligonucleotide
aucguacaucuaguauugu

SEQ ID NO: 1191266 - RNA, 19 nt, Artificial Sequence
  Description of Artificial Sequence: Synthetic oligonucleotide
gggguuccaagucuuucga

SEQ ID NO: 1191267 - RNA, 19 nt, Artificial Sequence
  Description of Artificial Sequence: Synthetic oligonucleotide
ggcgauauaugccuuugau

SEQ ID NO: 1191268 - RNA, 19 nt, Artificial Sequence
  Description of Artificial Sequence: Synthetic oligonucleotide
ggauccacguuaggacuag

SEQ ID NO: 1191269 - RNA, 19 nt, Artificial Sequence
  Description of Artificial Sequence: Synthetic oligonucleotide
cguaguguauacuuggggu

SEQ ID NO: 1191270 - RNA, 19 nt, Artificial Sequence
  Description of Artificial Sequence: Synthetic oligonucleotide
acguuaggacuaggcauau

SEQ ID NO: 1191271 - RNA, 19 nt, Artificial Sequence
  Description of Artificial Sequence: Synthetic oligonucleotide
cuaaaacacuguucuccau

SEQ ID NO: 1191272 - RNA, 19 nt, Artificial Sequence
  Description of Artificial Sequence: Synthetic oligonucleotide
gacuuacuacuuuguuaau

SEQ ID NO: 1191273 - RNA, 19 nt, Artificial Sequence
  Description of Artificial Sequence: Synthetic oligonucleotide
cauccaaaugagcuaccau

SEQ ID NO: 1191274 - RNA, 19 nt, Artificial Sequence
  Description of Artificial Sequence: Synthetic oligonucleotide
gcuaaaccuucauuaccua

SEQ ID NO: 1191275 - RNA, 19 nt, Artificial Sequence
  Description of Artificial Sequence: Synthetic oligonucleotide
cucgaacuccgucgcuuca

SEQ ID NO: 1191276 - RNA, 19 nt, Artificial Sequence
  Description of Artificial Sequence: Synthetic oligonucleotide
ccacguuaggacuaggcau

SEQ ID NO: 1191277 - RNA, 19 nt, Artificial Sequence
  Description of Artificial Sequence: Synthetic oligonucleotide
gcaucuuuauuggccggca

SEQ ID NO: 1191278 - RNA, 19 nt, Artificial Sequence
  Description of Artificial Sequence: Synthetic oligonucleotide
ccguugagaucguacaucu

SEQ ID NO: 1191279 - RNA, 19 nt, Artificial Sequence
  Description of Artificial Sequence: Synthetic oligonucleotide
ccucgaacuccgucgcuuc

SEQ ID NO: 1191280 - RNA, 19 nt, Artificial Sequence
  Description of Artificial Sequence: Synthetic oligonucleotide
cgaacuccgucgcuucacc

SEQ ID NO: 1191281 - RNA, 19 nt, Artificial Sequence
  Description of Artificial Sequence: Synthetic oligonucleotide
ggguuccaagucuuucgaa

SEQ ID NO: 1191282 - RNA, 19 nt, Artificial Sequence
  Description of Artificial Sequence: Synthetic oligonucleotide
gugcaaauacauggcaauu

SEQ ID NO: 1191283 - RNA, 19 nt, Artificial Sequence
  Description of Artificial Sequence: Synthetic oligonucleotide
cugggaugcccucaaucau

SEQ ID NO: 1191284 - RNA, 19 nt, Artificial Sequence
  Description of Artificial Sequence: Synthetic oligonucleotide
ccgucaagucugcaagguc

SEQ ID NO: 1191285 - RNA, 19 nt, Artificial Sequence
  Description of Artificial Sequence: Synthetic oligonucleotide
gaacaucaccagagggccu

SEQ ID NO: 1191286 - RNA, 19 nt, Artificial Sequence
  Description of Artificial Sequence: Synthetic oligonucleotide
gcaucuguaugagcaacua

SEQ ID NO: 1191287 - RNA, 19 nt, Artificial Sequence
  Description of Artificial Sequence: Synthetic oligonucleotide
ccggcaaaucauaacuaua

SEQ ID NO: 1191288 - RNA, 19 nt, Artificial Sequence
  Description of Artificial Sequence: Synthetic oligonucleotide
cuaccauagaauggaucau

SEQ ID NO: 1191289 - RNA, 19 nt, Artificial Sequence
  Description of Artificial Sequence: Synthetic oligonucleotide
ccagagggccuuuugauuu

SEQ ID NO: 1191290 - RNA, 19 nt, Artificial Sequence
  Description of Artificial Sequence: Synthetic oligonucleotide
gcuuauugauccgaagcuu

SEQ ID NO: 1191291 - RNA, 19 nt, Artificial Sequence
  Description of Artificial Sequence: Synthetic oligonucleotide
ccccuuucugaccaagaaa

SEQ ID NO: 1191292 - RNA, 19 nt, Artificial Sequence
  Description of Artificial Sequence: Synthetic oligonucleotide
accccagacugcaucugua

SEQ ID NO: 1191293 - RNA, 19 nt, Artificial Sequence
  Description of Artificial Sequence: Synthetic oligonucleotide
gggauccacguuaggacua

SEQ ID NO: 1191294 - RNA, 19 nt, Artificial Sequence
  Description of Artificial Sequence: Synthetic oligonucleotide
cuuacccguugagaucgua

SEQ ID NO: 1191295 - RNA, 19 nt, Artificial Sequence
  Description of Artificial Sequence: Synthetic oligonucleotide
ggccggcaaaucauaacua

SEQ ID NO: 1191296 - RNA, 19 nt, Artificial Sequence
  Description of Artificial Sequence: Synthetic oligonucleotide
ccaccauucaggaucuguu

SEQ ID NO: 1191297 - RNA, 19 nt, Artificial Sequence
  Description of Artificial Sequence: Synthetic oligonucleotide
caccggcuccuucgccauc

SEQ ID NO: 1191298 - RNA, 19 nt, Artificial Sequence
  Description of Artificial Sequence: Synthetic oligonucleotide
ggccaaugugggcccuaaa

SEQ ID NO: 1191299 - RNA, 19 nt, Artificial Sequence
  Description of Artificial Sequence: Synthetic oligonucleotide
cccucgaacuccgucgcuu

SEQ ID NO: 1191300 - RNA, 19 nt, Artificial Sequence
  Description of Artificial Sequence: Synthetic oligonucleotide
ccuuacccguugagaucgu

SEQ ID NO: 1191301 - RNA, 19 nt, Artificial Sequence
  Description of Artificial Sequence: Synthetic oligonucleotide
ccccucgaacuccgucgcu

SEQ ID NO: 1191302 - RNA, 19 nt, Artificial Sequence
  Description of Artificial Sequence: Synthetic oligonucleotide
cguuaggacuaggcauauu

SEQ ID NO: 1191303 - RNA, 19 nt, Artificial Sequence
  Description of Artificial Sequence: Synthetic oligonucleotide
uguauuauaaauaugaccu

SEQ ID NO: 1191304 - RNA, 19 nt, Artificial Sequence
  Description of Artificial Sequence: Synthetic oligonucleotide
aaugauagagcuuuucuac

SEQ ID NO: 1191305 - RNA, 19 nt, Artificial Sequence
  Description of Artificial Sequence: Synthetic oligonucleotide
ugagauaucaaucacaaac

SEQ ID NO: 1191306 - RNA, 19 nt, Artificial Sequence
  Description of Artificial Sequence: Synthetic oligonucleotide
uuuaauuaaucucauacug

SEQ ID NO: 1191307 - RNA, 19 nt, Artificial Sequence
  Description of Artificial Sequence: Synthetic oligonucleotide
aaacguuuuaccuauucac

SEQ ID NO: 1191308 - RNA, 19 nt, Artificial Sequence
  Description of Artificial Sequence: Synthetic oligonucleotide
uaaaccauugcauaaaugc

SEQ ID NO: 1191309 - RNA, 19 nt, Artificial Sequence
  Description of Artificial Sequence: Synthetic oligonucleotide
uauaaauaugaccuucugg

SEQ ID NO: 1191310 - RNA, 19 nt, Artificial Sequence
  Description of Artificial Sequence: Synthetic oligonucleotide
aguuccuagacccaggggc

SEQ ID NO: 1191311 - RNA, 19 nt, Artificial Sequence
  Description of Artificial Sequence: Synthetic oligonucleotide
guuuuaauuaaucucauac

SEQ ID NO: 1191312 - RNA, 19 nt, Artificial Sequence
  Description of Artificial Sequence: Synthetic oligonucleotide
acaaacauuguccuguuac

SEQ ID NO: 1191313 - RNA, 19 nt, Artificial Sequence
  Description of Artificial Sequence: Synthetic oligonucleotide
ucacauaacauucucaacu

SEQ ID NO: 1191314 - RNA, 19 nt, Artificial Sequence
  Description of Artificial Sequence: Synthetic oligonucleotide
uaccuuauuaaguaguggg

SEQ ID NO: 1191315 - RNA, 19 nt, Artificial Sequence
  Description of Artificial Sequence: Synthetic oligonucleotide
acuaaaaccaggucaauag

SEQ ID NO: 1191316 - RNA, 19 nt, Artificial Sequence
  Description of Artificial Sequence: Synthetic oligonucleotide
aaaccaugguaacaguagc

SEQ ID NO: 1191317 - RNA, 19 nt, Artificial Sequence
  Description of Artificial Sequence: Synthetic oligonucleotide
uuaauacuuaacacuagag

SEQ ID NO: 1191318 - RNA, 19 nt, Artificial Sequence
  Description of Artificial Sequence: Synthetic oligonucleotide
uaauacuuaacacuagaga

SEQ ID NO: 1191319 - RNA, 19 nt, Artificial Sequence
  Description of Artificial Sequence: Synthetic oligonucleotide
agaguuaaaagacaaucag

SEQ ID NO: 1191320 - RNA, 19 nt, Artificial Sequence
  Description of Artificial Sequence: Synthetic oligonucleotide
auacauucuaauuugguca

SEQ ID NO: 1191321 - RNA, 19 nt, Artificial Sequence
  Description of Artificial Sequence: Synthetic oligonucleotide
aauucacuaaguaaauggg

SEQ ID NO: 1191322 - RNA, 19 nt, Artificial Sequence
  Description of Artificial Sequence: Synthetic oligonucleotide
uaaguagugggcuagcugc

SEQ ID NO: 1191323 - RNA, 19 nt, Artificial Sequence
  Description of Artificial Sequence: Synthetic oligonucleotide
uuaauuaaucucauacuga

SEQ ID NO: 1191324 - RNA, 19 nt, Artificial Sequence
  Description of Artificial Sequence: Synthetic oligonucleotide
uaaaccaugguaacaguag

SEQ ID NO: 1191325 - RNA, 19 nt, Artificial Sequence
  Description of Artificial Sequence: Synthetic oligonucleotide
agagaguuaaaagacaauc

SEQ ID NO: 1191326 - RNA, 19 nt, Artificial Sequence
  Description of Artificial Sequence: Synthetic oligonucleotide
ucuuaaaccaugguaacag

SEQ ID NO: 1191327 - RNA, 19 nt, Artificial Sequence
  Description of Artificial Sequence: Synthetic oligonucleotide
uaaguuaauccacaugcgc

SEQ ID NO: 1191328 - RNA, 19 nt, Artificial Sequence
  Description of Artificial Sequence: Synthetic oligonucleotide
aauaguuaccuuauuaagu

SEQ ID NO: 1191329 - RNA, 19 nt, Artificial Sequence
  Description of Artificial Sequence: Synthetic oligonucleotide
guauguauuauaaauauga

SEQ ID NO: 1191330 - RNA, 19 nt, Artificial Sequence
  Description of Artificial Sequence: Synthetic oligonucleotide
aauaugaccuucuggauua

SEQ ID NO: 1191331 - RNA, 19 nt, Artificial Sequence
  Description of Artificial Sequence: Synthetic oligonucleotide
aguuaaaagacaaucagca

SEQ ID NO: 1191332 - RNA, 19 nt, Artificial Sequence
  Description of Artificial Sequence: Synthetic oligonucleotide
aagcuuaaugcuuaacugu

SEQ ID NO: 1191333 - RNA, 19 nt, Artificial Sequence
  Description of Artificial Sequence: Synthetic oligonucleotide
aauaugggaaacaagugca

SEQ ID NO: 1191334 - RNA, 19 nt, Artificial Sequence
  Description of Artificial Sequence: Synthetic oligonucleotide
uuuuaaaucuccuaccaua

SEQ ID NO: 1191335 - RNA, 19 nt, Artificial Sequence
  Description of Artificial Sequence: Synthetic oligonucleotide
aggucugccaaccaaguac

SEQ ID NO: 1191336 - RNA, 19 nt, Artificial Sequence
  Description of Artificial Sequence: Synthetic oligonucleotide
auuagcaugaaauugucuu

SEQ ID NO: 1191337 - RNA, 19 nt, Artificial Sequence
  Description of Artificial Sequence: Synthetic oligonucleotide
aaugcuuaacugucacaac

SEQ ID NO: 1191338 - RNA, 19 nt, Artificial Sequence
  Description of Artificial Sequence: Synthetic oligonucleotide
uaccuauucacuuugcacu

SEQ ID NO: 1191339 - RNA, 19 nt, Artificial Sequence
  Description of Artificial Sequence: Synthetic oligonucleotide
uuaacugucacaacuugaa

SEQ ID NO: 1191340 - RNA, 19 nt, Artificial Sequence
  Description of Artificial Sequence: Synthetic oligonucleotide
acacuagagaguuaaaaga

SEQ ID NO: 1191341 - RNA, 19 nt, Artificial Sequence
  Description of Artificial Sequence: Synthetic oligonucleotide
aaaugaaccaauuccuuua

SEQ ID NO: 1191342 - RNA, 19 nt, Artificial Sequence
  Description of Artificial Sequence: Synthetic oligonucleotide
acggcagucccauagcugc

SEQ ID NO: 1191343 - RNA, 19 nt, Artificial Sequence
  Description of Artificial Sequence: Synthetic oligonucleotide
aauaaaucauuaucacuau

SEQ ID NO: 1191344 - RNA, 19 nt, Artificial Sequence
  Description of Artificial Sequence: Synthetic oligonucleotide
gaguaguuuauacacaauc

SEQ ID NO: 1191345 - RNA, 19 nt, Artificial Sequence
  Description of Artificial Sequence: Synthetic oligonucleotide
gauccuagagcucacagga

SEQ ID NO: 1191346 - RNA, 19 nt, Artificial Sequence
  Description of Artificial Sequence: Synthetic oligonucleotide
aacuugcagguguaauacc

SEQ ID NO: 1191347 - RNA, 19 nt, Artificial Sequence
  Description of Artificial Sequence: Synthetic oligonucleotide
caucauuuacuguuaauac

SEQ ID NO: 1191348 - RNA, 19 nt, Artificial Sequence
  Description of Artificial Sequence: Synthetic oligonucleotide
aaccaaguacacaaaacuc

SEQ ID NO: 1191349 - RNA, 19 nt, Artificial Sequence
  Description of Artificial Sequence: Synthetic oligonucleotide
agguguaauaccugccugc

SEQ ID NO: 1191350 - RNA, 19 nt, Artificial Sequence
  Description of Artificial Sequence: Synthetic oligonucleotide
aaaauauccagaugagaua

SEQ ID NO: 1191351 - RNA, 19 nt, Artificial Sequence
  Description of Artificial Sequence: Synthetic oligonucleotide
ugaauucuguaaaccauug

SEQ ID NO: 1191352 - RNA, 19 nt, Artificial Sequence
  Description of Artificial Sequence: Synthetic oligonucleotide
aaaggcuaauaugggaaac

SEQ ID NO: 1191353 - RNA, 19 nt, Artificial Sequence
  Description of Artificial Sequence: Synthetic oligonucleotide
uucacuaaguaaaugggua

SEQ ID NO: 1191354 - RNA, 19 nt, Artificial Sequence
  Description of Artificial Sequence: Synthetic oligonucleotide
auaguuaccuuauuaagua

SEQ ID NO: 1191355 - RNA, 19 nt, Artificial Sequence
  Description of Artificial Sequence: Synthetic oligonucleotide
cacuagagaguuaaaagac

SEQ ID NO: 1191356 - RNA, 19 nt, Artificial Sequence
  Description of Artificial Sequence: Synthetic oligonucleotide
cauugcauaaaugcuauag

SEQ ID NO: 1191357 - RNA, 19 nt, Artificial Sequence
  Description of Artificial Sequence: Synthetic oligonucleotide
ugucuuucaagggagaaga

SEQ ID NO: 1191358 - RNA, 19 nt, Artificial Sequence
  Description of Artificial Sequence: Synthetic oligonucleotide
acaaucuuaaaccauggua

SEQ ID NO: 1191359 - RNA, 19 nt, Artificial Sequence
  Description of Artificial Sequence: Synthetic oligonucleotide
uguaauaccugccugccua

SEQ ID NO: 1191360 - RNA, 19 nt, Artificial Sequence
  Description of Artificial Sequence: Synthetic oligonucleotide
cuaauaugggaaacaagug

SEQ ID NO: 1191361 - RNA, 19 nt, Artificial Sequence
  Description of Artificial Sequence: Synthetic oligonucleotide
uaaugcuuaacugucacaa

SEQ ID NO: 1191362 - RNA, 19 nt, Artificial Sequence
  Description of Artificial Sequence: Synthetic oligonucleotide
ugcgcauccauacugggga

SEQ ID NO: 1191363 - RNA, 19 nt, Artificial Sequence
  Description of Artificial Sequence: Synthetic oligonucleotide
uuaccuauucacuuugcac

SEQ ID NO: 1191364 - RNA, 19 nt, Artificial Sequence
  Description of Artificial Sequence: Synthetic oligonucleotide
ucuguaaaccauugcauaa

SEQ ID NO: 1191365 - RNA, 19 nt, Artificial Sequence
  Description of Artificial Sequence: Synthetic oligonucleotide
ugucacaacuugaaaauau

SEQ ID NO: 1191366 - RNA, 19 nt, Artificial Sequence
  Description of Artificial Sequence: Synthetic oligonucleotide
uuauuaaguagugggcuag

SEQ ID NO: 1191367 - RNA, 19 nt, Artificial Sequence
  Description of Artificial Sequence: Synthetic oligonucleotide
auugcauaaaugcuauagu

SEQ ID NO: 1191368 - RNA, 19 nt, Artificial Sequence
  Description of Artificial Sequence: Synthetic oligonucleotide
acaauggugaaccucaguu

SEQ ID NO: 1191369 - RNA, 19 nt, Artificial Sequence
  Description of Artificial Sequence: Synthetic oligonucleotide
aaguuaauccacaugcgca

SEQ ID NO: 1191370 - RNA, 19 nt, Artificial Sequence
  Description of Artificial Sequence: Synthetic oligonucleotide
cacaaucuaaagcuuaaug

SEQ ID NO: 1191371 - RNA, 19 nt, Artificial Sequence
  Description of Artificial Sequence: Synthetic oligonucleotide
aacucugacaccaucauuu

SEQ ID NO: 1191372 - RNA, 19 nt, Artificial Sequence
  Description of Artificial Sequence: Synthetic oligonucleotide
aacaaucuuaaaccauggu

SEQ ID NO: 1191373 - RNA, 19 nt, Artificial Sequence
  Description of Artificial Sequence: Synthetic oligonucleotide
ugagcuaauaaaucauuau

SEQ ID NO: 1191374 - RNA, 19 nt, Artificial Sequence
  Description of Artificial Sequence: Synthetic oligonucleotide
uuaccuuauuaaguagugg

SEQ ID NO: 1191375 - RNA, 19 nt, Artificial Sequence
  Description of Artificial Sequence: Synthetic oligonucleotide
uacauucuaauuuggucac

SEQ ID NO: 1191376 - RNA, 19 nt, Artificial Sequence
  Description of Artificial Sequence: Synthetic oligonucleotide
uggguauguauuauaaaua

SEQ ID NO: 1191377 - RNA, 19 nt, Artificial Sequence
  Description of Artificial Sequence: Synthetic oligonucleotide
aauggguauguauuauaaa

SEQ ID NO: 1191378 - RNA, 19 nt, Artificial Sequence
  Description of Artificial Sequence: Synthetic oligonucleotide
uuccauaaguuaauccaca

SEQ ID NO: 1191379 - RNA, 19 nt, Artificial Sequence
  Description of Artificial Sequence: Synthetic oligonucleotide
cuaauuuggucacugauaa

SEQ ID NO: 1191380 - RNA, 19 nt, Artificial Sequence
  Description of Artificial Sequence: Synthetic oligonucleotide
ucacacggcagucccauag

SEQ ID NO: 1191381 - RNA, 19 nt, Artificial Sequence
  Description of Artificial Sequence: Synthetic oligonucleotide
gaugagauaucaaucacaa

SEQ ID NO: 1191382 - RNA, 19 nt, Artificial Sequence
  Description of Artificial Sequence: Synthetic oligonucleotide
guuuuaccuauucacuuug

SEQ ID NO: 1191383 - RNA, 19 nt, Artificial Sequence
  Description of Artificial Sequence: Synthetic oligonucleotide
aaaccauugcauaaaugcu

SEQ ID NO: 1191384 - RNA, 19 nt, Artificial Sequence
  Description of Artificial Sequence: Synthetic oligonucleotide
uguccuguuaccacagaga

SEQ ID NO: 1191385 - RNA, 19 nt, Artificial Sequence
  Description of Artificial Sequence: Synthetic oligonucleotide
uguaaaccauugcauaaau

SEQ ID NO: 1191386 - RNA, 19 nt, Artificial Sequence
  Description of Artificial Sequence: Synthetic oligonucleotide
ugaaugucugauuccuuug

SEQ ID NO: 1191387 - RNA, 19 nt, Artificial Sequence
  Description of Artificial Sequence: Synthetic oligonucleotide
ucccagccagcauagaucc

SEQ ID NO: 1191388 - RNA, 19 nt, Artificial Sequence
  Description of Artificial Sequence: Synthetic oligonucleotide
guacugagcuaauaaauca

SEQ ID NO: 1191389 - RNA, 19 nt, Artificial Sequence
  Description of Artificial Sequence: Synthetic oligonucleotide
accaugguaacaguagcac

SEQ ID NO: 1191390 - RNA, 19 nt, Artificial Sequence
  Description of Artificial Sequence: Synthetic oligonucleotide
auaaguuaauccacaugcg

SEQ ID NO: 1191391 - RNA, 19 nt, Artificial Sequence
  Description of Artificial Sequence: Synthetic oligonucleotide
aauaccugccugccuaggu

SEQ ID NO: 1191392 - RNA, 19 nt, Artificial Sequence
  Description of Artificial Sequence: Synthetic oligonucleotide
acauaacauucucaacuag

SEQ ID NO: 1191393 - RNA, 19 nt, Artificial Sequence
  Description of Artificial Sequence: Synthetic oligonucleotide
agcuuaaugcuuaacuguc

SEQ ID NO: 1191394 - RNA, 19 nt, Artificial Sequence
  Description of Artificial Sequence: Synthetic oligonucleotide
acaaauguuaacaacuuua

SEQ ID NO: 1191395 - RNA, 19 nt, Artificial Sequence
  Description of Artificial Sequence: Synthetic oligonucleotide
uuuuaccuauucacuuugc

SEQ ID NO: 1191396 - RNA, 19 nt, Artificial Sequence
  Description of Artificial Sequence: Synthetic oligonucleotide
gagaguuaaaagacaauca

SEQ ID NO: 1191397 - RNA, 19 nt, Artificial Sequence
  Description of Artificial Sequence: Synthetic oligonucleotide
uacacaaucuaaagcuuaa

SEQ ID NO: 1191398 - RNA, 19 nt, Artificial Sequence
  Description of Artificial Sequence: Synthetic oligonucleotide
gaacuugcagguguaauac

SEQ ID NO: 1191399 - RNA, 19 nt, Artificial Sequence
  Description of Artificial Sequence: Synthetic oligonucleotide
ucauuagcaugaaauuguc

SEQ ID NO: 1191400 - RNA, 19 nt, Artificial Sequence
  Description of Artificial Sequence: Synthetic oligonucleotide
aguuaauccacaugcgcau

SEQ ID NO: 1191401 - RNA, 19 nt, Artificial Sequence
  Description of Artificial Sequence: Synthetic oligonucleotide
cuagagaguuaaaagacaa

SEQ ID NO: 1191402 - RNA, 19 nt, Artificial Sequence
  Description of Artificial Sequence: Synthetic oligonucleotide
gaggaguucaccagaguag

SEQ ID NO: 1191403 - RNA, 19 nt, Artificial Sequence
  Description of Artificial Sequence: Synthetic oligonucleotide
uccuaccauauuaaauaca

SEQ ID NO: 1191404 - RNA, 19 nt, Artificial Sequence
  Description of Artificial Sequence: Synthetic oligonucleotide
ucacuaaguaaauggguau

SEQ ID NO: 1191405 - RNA, 19 nt, Artificial Sequence
  Description of Artificial Sequence: Synthetic oligonucleotide
agaggagaaccacuucuag

SEQ ID NO: 1191406 - RNA, 19 nt, Artificial Sequence
  Description of Artificial Sequence: Synthetic oligonucleotide
ucacccuagacacauucuc

SEQ ID NO: 1191407 - RNA, 19 nt, Artificial Sequence
  Description of Artificial Sequence: Synthetic oligonucleotide
ucccuagauuuccaggacc

SEQ ID NO: 1191408 - RNA, 19 nt, Artificial Sequence
  Description of Artificial Sequence: Synthetic oligonucleotide
acccuagacacauucucag

SEQ ID NO: 1191409 - RNA, 19 nt, Artificial Sequence
  Description of Artificial Sequence: Synthetic oligonucleotide
gaagucucagguucacagc

SEQ ID NO: 1191410 - RNA, 19 nt, Artificial Sequence
  Description of Artificial Sequence: Synthetic oligonucleotide
cuguuaauacuuaacacua

SEQ ID NO: 1191411 - RNA, 19 nt, Artificial Sequence
  Description of Artificial Sequence: Synthetic oligonucleotide
aaggcuaauaugggaaaca

SEQ ID NO: 1191412 - RNA, 19 nt, Artificial Sequence
  Description of Artificial Sequence: Synthetic oligonucleotide
gaugucaagaaagcucccc

SEQ ID NO: 1191413 - RNA, 19 nt, Artificial Sequence
  Description of Artificial Sequence: Synthetic oligonucleotide
auuuacuguuaauacuuaa

SEQ ID NO: 1191414 - RNA, 19 nt, Artificial Sequence
  Description of Artificial Sequence: Synthetic oligonucleotide
uagacacauucucagcaga

SEQ ID NO: 1191415 - RNA, 19 nt, Artificial Sequence
  Description of Artificial Sequence: Synthetic oligonucleotide
ggcgauucaggguacaaag

SEQ ID NO: 1191416 - RNA, 19 nt, Artificial Sequence
  Description of Artificial Sequence: Synthetic oligonucleotide
guccuguuaccacagagac

SEQ ID NO: 1191417 - RNA, 19 nt, Artificial Sequence
  Description of Artificial Sequence: Synthetic oligonucleotide
agcuagaggugagugaggg

SEQ ID NO: 1191418 - RNA, 19 nt, Artificial Sequence
  Description of Artificial Sequence: Synthetic oligonucleotide
gcuuccauaaguuaaucca

SEQ ID NO: 1191419 - RNA, 19 nt, Artificial Sequence
  Description of Artificial Sequence: Synthetic oligonucleotide
auaccugccugccuagguc

SEQ ID NO: 1191420 - RNA, 19 nt, Artificial Sequence
  Description of Artificial Sequence: Synthetic oligonucleotide
ugucugauuccuuugugua

SEQ ID NO: 1191421 - RNA, 19 nt, Artificial Sequence
  Description of Artificial Sequence: Synthetic oligonucleotide
uccucccuagauuuccagg

SEQ ID NO: 1191422 - RNA, 19 nt, Artificial Sequence
  Description of Artificial Sequence: Synthetic oligonucleotide
uucacauaacauucucaac

SEQ ID NO: 1191423 - RNA, 19 nt, Artificial Sequence
  Description of Artificial Sequence: Synthetic oligonucleotide
guuaccuuauuaaguagug

SEQ ID NO: 1191424 - RNA, 19 nt, Artificial Sequence
  Description of Artificial Sequence: Synthetic oligonucleotide
uacacaugaucuagguacu

SEQ ID NO: 1191425 - RNA, 19 nt, Artificial Sequence
  Description of Artificial Sequence: Synthetic oligonucleotide
uuagcaugaaauugucuuu

SEQ ID NO: 1191426 - RNA, 19 nt, Artificial Sequence
  Description of Artificial Sequence: Synthetic oligonucleotide
aaucuccuaccauauuaaa

SEQ ID NO: 1191427 - RNA, 19 nt, Artificial Sequence
  Description of Artificial Sequence: Synthetic oligonucleotide
aaaaccaggucaauaguua

SEQ ID NO: 1191428 - RNA, 19 nt, Artificial Sequence
  Description of Artificial Sequence: Synthetic oligonucleotide
auucucagcagaauuugag

SEQ ID NO: 1191429 - RNA, 19 nt, Artificial Sequence
  Description of Artificial Sequence: Synthetic oligonucleotide
agcugcggaauguugagga

SEQ ID NO: 1191430 - RNA, 19 nt, Artificial Sequence
  Description of Artificial Sequence: Synthetic oligonucleotide
aguuaccuuauuaaguagu

SEQ ID NO: 1191431 - RNA, 19 nt, Artificial Sequence
  Description of Artificial Sequence: Synthetic oligonucleotide
cuaauaaaucauuaucacu

SEQ ID NO: 1191432 - RNA, 19 nt, Artificial Sequence
  Description of Artificial Sequence: Synthetic oligonucleotide
uacuguagaggcugaaguc

SEQ ID NO: 1191433 - RNA, 19 nt, Artificial Sequence
  Description of Artificial Sequence: Synthetic oligonucleotide
ugcagguguaauaccugcc

SEQ ID NO: 1191434 - RNA, 19 nt, Artificial Sequence
  Description of Artificial Sequence: Synthetic oligonucleotide
uaggucugccaccaagggc

SEQ ID NO: 1191435 - RNA, 19 nt, Artificial Sequence
  Description of Artificial Sequence: Synthetic oligonucleotide
agcaccguugccauuacag

SEQ ID NO: 1191436 - RNA, 19 nt, Artificial Sequence
  Description of Artificial Sequence: Synthetic oligonucleotide
acaaucagcaacaggacaa

SEQ ID NO: 1191437 - RNA, 19 nt, Artificial Sequence
  Description of Artificial Sequence: Synthetic oligonucleotide
aaccauugcauaaaugcua

SEQ ID NO: 1191438 - RNA, 19 nt, Artificial Sequence
  Description of Artificial Sequence: Synthetic oligonucleotide
gauucaggguacaaagcac

SEQ ID NO: 1191439 - RNA, 19 nt, Artificial Sequence
  Description of Artificial Sequence: Synthetic oligonucleotide
uuaaucucauacugauaaa

SEQ ID NO: 1191440 - RNA, 19 nt, Artificial Sequence
  Description of Artificial Sequence: Synthetic oligonucleotide
cuuaacugucacaacuuga

SEQ ID NO: 1191441 - RNA, 19 nt, Artificial Sequence
  Description of Artificial Sequence: Synthetic oligonucleotide
agagaccaaaggcuaauau

SEQ ID NO: 1191442 - RNA, 19 nt, Artificial Sequence
  Description of Artificial Sequence: Synthetic oligonucleotide
uccauaaguuaauccacau

SEQ ID NO: 1191443 - RNA, 19 nt, Artificial Sequence
  Description of Artificial Sequence: Synthetic oligonucleotide
ugcuuaacugucacaacuu

SEQ ID NO: 1191444 - RNA, 19 nt, Artificial Sequence
  Description of Artificial Sequence: Synthetic oligonucleotide
cuaggucugccaccaaggg

SEQ ID NO: 1191445 - RNA, 19 nt, Artificial Sequence
  Description of Artificial Sequence: Synthetic oligonucleotide
aggacaauggugaaccuca

SEQ ID NO: 1191446 - RNA, 19 nt, Artificial Sequence
  Description of Artificial Sequence: Synthetic oligonucleotide
ugaagucaucacccuagac

SEQ ID NO: 1191447 - RNA, 19 nt, Artificial Sequence
  Description of Artificial Sequence: Synthetic oligonucleotide
acguuuuaccuauucacuu

SEQ ID NO: 1191448 - RNA, 19 nt, Artificial Sequence
  Description of Artificial Sequence: Synthetic oligonucleotide
uacaaagcaccguugccau

SEQ ID NO: 1191449 - RNA, 19 nt, Artificial Sequence
  Description of Artificial Sequence: Synthetic oligonucleotide
cuagcugcggaauguugag

SEQ ID NO: 1191450 - RNA, 19 nt, Artificial Sequence
  Description of Artificial Sequence: Synthetic oligonucleotide
uagagaguuaaaagacaau

SEQ ID NO: 1191451 - RNA, 19 nt, Artificial Sequence
  Description of Artificial Sequence: Synthetic oligonucleotide
acuagagaguuaaaagaca

SEQ ID NO: 1191452 - RNA, 19 nt, Artificial Sequence
  Description of Artificial Sequence: Synthetic oligonucleotide
gaucagcuagaggugagug

SEQ ID NO: 1191453 - RNA, 19 nt, Artificial Sequence
  Description of Artificial Sequence: Synthetic oligonucleotide
auaacauucucaacuaguu

SEQ ID NO: 1191454 - RNA, 19 nt, Artificial Sequence
  Description of Artificial Sequence: Synthetic oligonucleotide
gaaccucaguuccuagacc

SEQ ID NO: 1191455 - RNA, 19 nt, Artificial Sequence
  Description of Artificial Sequence: Synthetic oligonucleotide
uccuguuaccacagagacc

SEQ ID NO: 1191456 - RNA, 19 nt, Artificial Sequence
  Description of Artificial Sequence: Synthetic oligonucleotide
auucuaauuuggucacuga

SEQ ID NO: 1191457 - RNA, 19 nt, Artificial Sequence
  Description of Artificial Sequence: Synthetic oligonucleotide
ugucaagaaagcuccccuc

SEQ ID NO: 1191458 - RNA, 19 nt, Artificial Sequence
  Description of Artificial Sequence: Synthetic oligonucleotide
gaucuagguacugagcuaa

SEQ ID NO: 1191459 - RNA, 19 nt, Artificial Sequence
  Description of Artificial Sequence: Synthetic oligonucleotide
aaucagcaacaggacaaug

SEQ ID NO: 1191460 - RNA, 19 nt, Artificial Sequence
  Description of Artificial Sequence: Synthetic oligonucleotide
caucacccuagacacauuc

SEQ ID NO: 1191461 - RNA, 19 nt, Artificial Sequence
  Description of Artificial Sequence: Synthetic oligonucleotide
uauuaaguagugggcuagc

SEQ ID NO: 1191462 - RNA, 19 nt, Artificial Sequence
  Description of Artificial Sequence: Synthetic oligonucleotide
aguuuuaauuaaucucaua

SEQ ID NO: 1191463 - RNA, 19 nt, Artificial Sequence
  Description of Artificial Sequence: Synthetic oligonucleotide
guacaaagcaccguugcca

SEQ ID NO: 1191464 - RNA, 19 nt, Artificial Sequence
  Description of Artificial Sequence: Synthetic oligonucleotide
gagcagaugucaagaaagc

SEQ ID NO: 1191465 - RNA, 19 nt, Artificial Sequence
  Description of Artificial Sequence: Synthetic oligonucleotide
gccagcauagauccuagag

SEQ ID NO: 1191466 - RNA, 19 nt, Artificial Sequence
  Description of Artificial Sequence: Synthetic oligonucleotide
guaaaccauugcauaaaug

SEQ ID NO: 1191467 - RNA, 19 nt, Artificial Sequence
  Description of Artificial Sequence: Synthetic oligonucleotide
gaacacagcuccuucccga

SEQ ID NO: 1191468 - RNA, 19 nt, Artificial Sequence
  Description of Artificial Sequence: Synthetic oligonucleotide
caugcgcauccauacuggg

SEQ ID NO: 1191469 - RNA, 19 nt, Artificial Sequence
  Description of Artificial Sequence: Synthetic oligonucleotide
guaauaccugccugccuag

SEQ ID NO: 1191470 - RNA, 19 nt, Artificial Sequence
  Description of Artificial Sequence: Synthetic oligonucleotide
cacuaaguaaauggguaug

SEQ ID NO: 1191471 - RNA, 19 nt, Artificial Sequence
  Description of Artificial Sequence: Synthetic oligonucleotide
agaggcuuccauaaguuaa

SEQ ID NO: 1191472 - RNA, 19 nt, Artificial Sequence
  Description of Artificial Sequence: Synthetic oligonucleotide
gcaaggguugccuggacag

SEQ ID NO: 1191473 - RNA, 19 nt, Artificial Sequence
  Description of Artificial Sequence: Synthetic oligonucleotide
cuuauuaaguagugggcua

SEQ ID NO: 1191474 - RNA, 19 nt, Artificial Sequence
  Description of Artificial Sequence: Synthetic oligonucleotide
aguuugucuuauauuaaaa

SEQ ID NO: 1191475 - RNA, 19 nt, Artificial Sequence
  Description of Artificial Sequence: Synthetic oligonucleotide
uuagccguucccagccagc

SEQ ID NO: 1191476 - RNA, 19 nt, Artificial Sequence
  Description of Artificial Sequence: Synthetic oligonucleotide
ugccuuccuagccaucaca

SEQ ID NO: 1191477 - RNA, 19 nt, Artificial Sequence
  Description of Artificial Sequence: Synthetic oligonucleotide
ugaucuagguacugagcua

SEQ ID NO: 1191478 - RNA, 19 nt, Artificial Sequence
  Description of Artificial Sequence: Synthetic oligonucleotide
auuaaguagugggcuagcu

SEQ ID NO: 1191479 - RNA, 19 nt, Artificial Sequence
  Description of Artificial Sequence: Synthetic oligonucleotide
uuacccacauacaggccuc

SEQ ID NO: 1191480 - RNA, 19 nt, Artificial Sequence
  Description of Artificial Sequence: Synthetic oligonucleotide
acaugcgcauccauacugg

SEQ ID NO: 1191481 - RNA, 19 nt, Artificial Sequence
  Description of Artificial Sequence: Synthetic oligonucleotide
gguacugagcuaauaaauc

SEQ ID NO: 1191482 - RNA, 19 nt, Artificial Sequence
  Description of Artificial Sequence: Synthetic oligonucleotide
agcagaugucaagaaagcu

SEQ ID NO: 1191483 - RNA, 19 nt, Artificial Sequence
  Description of Artificial Sequence: Synthetic oligonucleotide
gguacaaagcaccguugcc

SEQ ID NO: 1191484 - RNA, 19 nt, Artificial Sequence
  Description of Artificial Sequence: Synthetic oligonucleotide
guagaggcugaagucauca

SEQ ID NO: 1191485 - RNA, 19 nt, Artificial Sequence
  Description of Artificial Sequence: Synthetic oligonucleotide
uaauaccugccugccuagg

SEQ ID NO: 1191486 - RNA, 19 nt, Artificial Sequence
  Description of Artificial Sequence: Synthetic oligonucleotide
aggauggcccagugggcac

SEQ ID NO: 1191487 - RNA, 19 nt, Artificial Sequence
  Description of Artificial Sequence: Synthetic oligonucleotide
uaccaguuugucuuauauu

SEQ ID NO: 1191488 - RNA, 19 nt, Artificial Sequence
  Description of Artificial Sequence: Synthetic oligonucleotide
cuuagccguucccagccag

SEQ ID NO: 1191489 - RNA, 19 nt, Artificial Sequence
  Description of Artificial Sequence: Synthetic oligonucleotide
uccuccuuagccguuccca

SEQ ID NO: 1191490 - RNA, 19 nt, Artificial Sequence
  Description of Artificial Sequence: Synthetic oligonucleotide
cuaaagcuuaaugcuuaac

SEQ ID NO: 1191491 - RNA, 19 nt, Artificial Sequence
  Description of Artificial Sequence: Synthetic oligonucleotide
aaggguugccuggacagau

SEQ ID NO: 1191492 - RNA, 19 nt, Artificial Sequence
  Description of Artificial Sequence: Synthetic oligonucleotide
cagguguaauaccugccug

SEQ ID NO: 1191493 - RNA, 19 nt, Artificial Sequence
  Description of Artificial Sequence: Synthetic oligonucleotide
cauagauccuagagcucac

SEQ ID NO: 1191494 - RNA, 19 nt, Artificial Sequence
  Description of Artificial Sequence: Synthetic oligonucleotide
gucacaacuugaaaauauc

SEQ ID NO: 1191495 - RNA, 19 nt, Artificial Sequence
  Description of Artificial Sequence: Synthetic oligonucleotide
guuccuagacccaggggcc

SEQ ID NO: 1191496 - RNA, 19 nt, Artificial Sequence
  Description of Artificial Sequence: Synthetic oligonucleotide
aaggucugccaaccaagua

SEQ ID NO: 1191497 - RNA, 19 nt, Artificial Sequence
  Description of Artificial Sequence: Synthetic oligonucleotide
aguccaguccuuacuguag

SEQ ID NO: 1191498 - RNA, 19 nt, Artificial Sequence
  Description of Artificial Sequence: Synthetic oligonucleotide
augaauucuguaaaccauu

SEQ ID NO: 1191499 - RNA, 19 nt, Artificial Sequence
  Description of Artificial Sequence: Synthetic oligonucleotide
auguuagccccagaggagu

SEQ ID NO: 1191500 - RNA, 19 nt, Artificial Sequence
  Description of Artificial Sequence: Synthetic oligonucleotide
caaguacacaaaacucuga

SEQ ID NO: 1191501 - RNA, 19 nt, Artificial Sequence
  Description of Artificial Sequence: Synthetic oligonucleotide
cauacuggggaaggucugc

SEQ ID NO: 1191502 - RNA, 19 nt, Artificial Sequence
  Description of Artificial Sequence: Synthetic oligonucleotide
accauugcauaaaugcuau

SEQ ID NO: 1191503 - RNA, 19 nt, Artificial Sequence
  Description of Artificial Sequence: Synthetic oligonucleotide
uagcugcggaauguugagg

SEQ ID NO: 1191504 - RNA, 19 nt, Artificial Sequence
  Description of Artificial Sequence: Synthetic oligonucleotide
accaucauuuacuguuaau

SEQ ID NO: 1191505 - RNA, 19 nt, Artificial Sequence
  Description of Artificial Sequence: Synthetic oligonucleotide
caaaggcuaauaugggaaa

SEQ ID NO: 1191506 - RNA, 19 nt, Artificial Sequence
  Description of Artificial Sequence: Synthetic oligonucleotide
acacggcagucccauagcu

SEQ ID NO: 1191507 - RNA, 19 nt, Artificial Sequence
  Description of Artificial Sequence: Synthetic oligonucleotide
uguagaggcugaagucauc

SEQ ID NO: 1191508 - RNA, 19 nt, Artificial Sequence
  Description of Artificial Sequence: Synthetic oligonucleotide
cagccugauuccagaagag

SEQ ID NO: 1191509 - RNA, 19 nt, Artificial Sequence
  Description of Artificial Sequence: Synthetic oligonucleotide
ccaugaauucuguaaacca

SEQ ID NO: 1191510 - RNA, 19 nt, Artificial Sequence
  Description of Artificial Sequence: Synthetic oligonucleotide
cuuccugugcacaccuguc

SEQ ID NO: 1191511 - RNA, 19 nt, Artificial Sequence
  Description of Artificial Sequence: Synthetic oligonucleotide
ucuagguacugagcuaaua

SEQ ID NO: 1191512 - RNA, 19 nt, Artificial Sequence
  Description of Artificial Sequence: Synthetic oligonucleotide
aggucaauaguuaccuuau

SEQ ID NO: 1191513 - RNA, 19 nt, Artificial Sequence
  Description of Artificial Sequence: Synthetic oligonucleotide
ggagaaccacuucuaggcc

SEQ ID NO: 1191514 - RNA, 19 nt, Artificial Sequence
  Description of Artificial Sequence: Synthetic oligonucleotide
gguguaauaccugccugcc

SEQ ID NO: 1191515 - RNA, 19 nt, Artificial Sequence
  Description of Artificial Sequence: Synthetic oligonucleotide
aggcuaauaugggaaacaa

SEQ ID NO: 1191516 - RNA, 19 nt, Artificial Sequence
  Description of Artificial Sequence: Synthetic oligonucleotide
augagauaucaaucacaaa

SEQ ID NO: 1191517 - RNA, 19 nt, Artificial Sequence
  Description of Artificial Sequence: Synthetic oligonucleotide
accguugccauuacagaca

SEQ ID NO: 1191518 - RNA, 19 nt, Artificial Sequence
  Description of Artificial Sequence: Synthetic oligonucleotide
gcauagauccuagagcuca

SEQ ID NO: 1191519 - RNA, 19 nt, Artificial Sequence
  Description of Artificial Sequence: Synthetic oligonucleotide
augcgcauccauacugggg

SEQ ID NO: 1191520 - RNA, 19 nt, Artificial Sequence
  Description of Artificial Sequence: Synthetic oligonucleotide
ucuaccaguuugucuuaua

SEQ ID NO: 1191521 - RNA, 19 nt, Artificial Sequence
  Description of Artificial Sequence: Synthetic oligonucleotide
cacccuagacacauucuca

SEQ ID NO: 1191522 - RNA, 19 nt, Artificial Sequence
  Description of Artificial Sequence: Synthetic oligonucleotide
caagaaagcuccccucaca

SEQ ID NO: 1191523 - RNA, 19 nt, Artificial Sequence
  Description of Artificial Sequence: Synthetic oligonucleotide
cucccuagauuuccaggac

SEQ ID NO: 1191524 - RNA, 19 nt, Artificial Sequence
  Description of Artificial Sequence: Synthetic oligonucleotide
agcauagauccuagagcuc

SEQ ID NO: 1191525 - RNA, 19 nt, Artificial Sequence
  Description of Artificial Sequence: Synthetic oligonucleotide
cacacggcagucccauagc

SEQ ID NO: 1191526 - RNA, 19 nt, Artificial Sequence
  Description of Artificial Sequence: Synthetic oligonucleotide
cuagccaucacacggcagu

SEQ ID NO: 1191527 - RNA, 19 nt, Artificial Sequence
  Description of Artificial Sequence: Synthetic oligonucleotide
ccaaaggcuaauaugggaa

SEQ ID NO: 1191528 - RNA, 19 nt, Artificial Sequence
  Description of Artificial Sequence: Synthetic oligonucleotide
cacggcagucccauagcug

SEQ ID NO: 1191529 - RNA, 19 nt, Artificial Sequence
  Description of Artificial Sequence: Synthetic oligonucleotide
ggagaggagaaccacuucu

SEQ ID NO: 1191530 - RNA, 19 nt, Artificial Sequence
  Description of Artificial Sequence: Synthetic oligonucleotide
aguagaucuuggacuccuc

SEQ ID NO: 1191531 - RNA, 19 nt, Artificial Sequence
  Description of Artificial Sequence: Synthetic oligonucleotide
cuggggaaggucugccaac

SEQ ID NO: 1191532 - RNA, 19 nt, Artificial Sequence
  Description of Artificial Sequence: Synthetic oligonucleotide
uguuagccccagaggaguu

SEQ ID NO: 1191533 - RNA, 19 nt, Artificial Sequence
  Description of Artificial Sequence: Synthetic oligonucleotide
ccgaguagaucuuggacuc

SEQ ID NO: 1191534 - RNA, 19 nt, Artificial Sequence
  Description of Artificial Sequence: Synthetic oligonucleotide
aagcaccguugccauuaca

SEQ ID NO: 1191535 - RNA, 19 nt, Artificial Sequence
  Description of Artificial Sequence: Synthetic oligonucleotide
caggacaauggugaaccuc

SEQ ID NO: 1191536 - RNA, 19 nt, Artificial Sequence
  Description of Artificial Sequence: Synthetic oligonucleotide
cuccuucccgaguagaucu

SEQ ID NO: 1191537 - RNA, 19 nt, Artificial Sequence
  Description of Artificial Sequence: Synthetic oligonucleotide
auagauccuagagcucaca

SEQ ID NO: 1191538 - RNA, 19 nt, Artificial Sequence
  Description of Artificial Sequence: Synthetic oligonucleotide
cuguaaaccauugcauaaa

SEQ ID NO: 1191539 - RNA, 19 nt, Artificial Sequence
  Description of Artificial Sequence: Synthetic oligonucleotide
uuccuagacccaggggccc

SEQ ID NO: 1191540 - RNA, 19 nt, Artificial Sequence
  Description of Artificial Sequence: Synthetic oligonucleotide
cauuagcaugaaauugucu

SEQ ID NO: 1191541 - RNA, 19 nt, Artificial Sequence
  Description of Artificial Sequence: Synthetic oligonucleotide
cacaagcuaggaugcccug

SEQ ID NO: 1191542 - RNA, 19 nt, Artificial Sequence
  Description of Artificial Sequence: Synthetic oligonucleotide
aaagcuccccucacaggau

SEQ ID NO: 1191543 - RNA, 19 nt, Artificial Sequence
  Description of Artificial Sequence: Synthetic oligonucleotide
cuagagcucacaggagguc

SEQ ID NO: 1191544 - RNA, 19 nt, Artificial Sequence
  Description of Artificial Sequence: Synthetic oligonucleotide
acacaaucuaaagcuuaau

SEQ ID NO: 1191545 - RNA, 19 nt, Artificial Sequence
  Description of Artificial Sequence: Synthetic oligonucleotide
agaguaguuuauacacaau

SEQ ID NO: 1191546 - RNA, 19 nt, Artificial Sequence
  Description of Artificial Sequence: Synthetic oligonucleotide
gagaaguagccccuucuuu

SEQ ID NO: 1191547 - RNA, 19 nt, Artificial Sequence
  Description of Artificial Sequence: Synthetic oligonucleotide
ccaguccuuacuguagagg

SEQ ID NO: 1191548 - RNA, 19 nt, Artificial Sequence
  Description of Artificial Sequence: Synthetic oligonucleotide
aucacccuagacacauucu

SEQ ID NO: 1191549 - RNA, 19 nt, Artificial Sequence
  Description of Artificial Sequence: Synthetic oligonucleotide
uucuaccaguuugucuuau

SEQ ID NO: 1191550 - RNA, 19 nt, Artificial Sequence
  Description of Artificial Sequence: Synthetic oligonucleotide
cuuggacuccucugaaugu

SEQ ID NO: 1191551 - RNA, 19 nt, Artificial Sequence
  Description of Artificial Sequence: Synthetic oligonucleotide
agucccauagcugccccaa

SEQ ID NO: 1191552 - RNA, 19 nt, Artificial Sequence
  Description of Artificial Sequence: Synthetic oligonucleotide
gcuagcugcggaauguuga

SEQ ID NO: 1191553 - RNA, 19 nt, Artificial Sequence
  Description of Artificial Sequence: Synthetic oligonucleotide
gguaacaguagcacaaaau

SEQ ID NO: 1191554 - RNA, 19 nt, Artificial Sequence
  Description of Artificial Sequence: Synthetic oligonucleotide
ggaauguugaggauccacu

SEQ ID NO: 1191555 - RNA, 19 nt, Artificial Sequence
  Description of Artificial Sequence: Synthetic oligonucleotide
cccuagauuuccaggacca

SEQ ID NO: 1191556 - RNA, 19 nt, Artificial Sequence
  Description of Artificial Sequence: Synthetic oligonucleotide
auagcugccccaagcccca

SEQ ID NO: 1191557 - RNA, 19 nt, Artificial Sequence
  Description of Artificial Sequence: Synthetic oligonucleotide
gcgauucaggguacaaagc

SEQ ID NO: 1191558 - RNA, 19 nt, Artificial Sequence
  Description of Artificial Sequence: Synthetic oligonucleotide
ccuccuuagccguucccag

SEQ ID NO: 1191559 - RNA, 19 nt, Artificial Sequence
  Description of Artificial Sequence: Synthetic oligonucleotide
ggugagugaggguggucac

SEQ ID NO: 1191560 - RNA, 19 nt, Artificial Sequence
  Description of Artificial Sequence: Synthetic oligonucleotide
ccugccuaggucugccacc

SEQ ID NO: 1191561 - RNA, 19 nt, Artificial Sequence
  Description of Artificial Sequence: Synthetic oligonucleotide
gcuuaaugcuuaacuguca

SEQ ID NO: 1191562 - RNA, 19 nt, Artificial Sequence
  Description of Artificial Sequence: Synthetic oligonucleotide
agccagcauagauccuaga

SEQ ID NO: 1191563 - RNA, 19 nt, Artificial Sequence
  Description of Artificial Sequence: Synthetic oligonucleotide
caagccgugagcucuggau

SEQ ID NO: 1191564 - RNA, 19 nt, Artificial Sequence
  Description of Artificial Sequence: Synthetic oligonucleotide
cagaggcuuccauaaguua

SEQ ID NO: 1191565 - RNA, 19 nt, Artificial Sequence
  Description of Artificial Sequence: Synthetic oligonucleotide
ugggcgauucaggguacaa

SEQ ID NO: 1191566 - RNA, 19 nt, Artificial Sequence
  Description of Artificial Sequence: Synthetic oligonucleotide
gcagguguaauaccugccu

SEQ ID NO: 1191567 - RNA, 19 nt, Artificial Sequence
  Description of Artificial Sequence: Synthetic oligonucleotide
uccuucccgaguagaucuu

SEQ ID NO: 1191568 - RNA, 19 nt, Artificial Sequence
  Description of Artificial Sequence: Synthetic oligonucleotide
auccacaugcgcauccaua

SEQ ID NO: 1191569 - RNA, 19 nt, Artificial Sequence
  Description of Artificial Sequence: Synthetic oligonucleotide
caaaugcacacagaggcuu

SEQ ID NO: 1191570 - RNA, 19 nt, Artificial Sequence
  Description of Artificial Sequence: Synthetic oligonucleotide
ggaccaguccaguccuuac

SEQ ID NO: 1191571 - RNA, 19 nt, Artificial Sequence
  Description of Artificial Sequence: Synthetic oligonucleotide
cugccugccuaggucugcc

SEQ ID NO: 1191572 - RNA, 19 nt, Artificial Sequence
  Description of Artificial Sequence: Synthetic oligonucleotide
cugccuuccuagccaucac

SEQ ID NO: 1191573 - RNA, 19 nt, Artificial Sequence
  Description of Artificial Sequence: Synthetic oligonucleotide
cccgaguagaucuuggacu

SEQ ID NO: 1191574 - RNA, 19 nt, Artificial Sequence
  Description of Artificial Sequence: Synthetic oligonucleotide
caggguacaaagcaccguu

SEQ ID NO: 1191575 - RNA, 19 nt, Artificial Sequence
  Description of Artificial Sequence: Synthetic oligonucleotide
agucaucacccuagacaca

SEQ ID NO: 1191576 - RNA, 19 nt, Artificial Sequence
  Description of Artificial Sequence: Synthetic oligonucleotide
ugccugccuaggucugcca

SEQ ID NO: 1191577 - RNA, 19 nt, Artificial Sequence
  Description of Artificial Sequence: Synthetic oligonucleotide
ccccagaggaguucaccag

SEQ ID NO: 1191578 - RNA, 19 nt, Artificial Sequence
  Description of Artificial Sequence: Synthetic oligonucleotide
agugggcacugccuuccua

SEQ ID NO: 1191579 - RNA, 19 nt, Artificial Sequence
  Description of Artificial Sequence: Synthetic oligonucleotide
ggacaauggugaaccucag

SEQ ID NO: 1191580 - RNA, 19 nt, Artificial Sequence
  Description of Artificial Sequence: Synthetic oligonucleotide
cccagccugauuccagaag

SEQ ID NO: 1191581 - RNA, 19 nt, Artificial Sequence
  Description of Artificial Sequence: Synthetic oligonucleotide
accucaguuccuagaccca

SEQ ID NO: 1191582 - RNA, 19 nt, Artificial Sequence
  Description of Artificial Sequence: Synthetic oligonucleotide
cagacugaagucucagguu

SEQ ID NO: 1191583 - RNA, 19 nt, Artificial Sequence
  Description of Artificial Sequence: Synthetic oligonucleotide
guugaggauccacuuucuu

SEQ ID NO: 1191584 - RNA, 19 nt, Artificial Sequence
  Description of Artificial Sequence: Synthetic oligonucleotide
ccugagcccaagccgugag

SEQ ID NO: 1191585 - RNA, 19 nt, Artificial Sequence
  Description of Artificial Sequence: Synthetic oligonucleotide
ggcuagcugcggaauguug

SEQ ID NO: 1191586 - RNA, 19 nt, Artificial Sequence
  Description of Artificial Sequence: Synthetic oligonucleotide
ccuagauuuccaggaccag

SEQ ID NO: 1191587 - RNA, 19 nt, Artificial Sequence
  Description of Artificial Sequence: Synthetic oligonucleotide
ccagaagagcagaugucaa

SEQ ID NO: 1191588 - RNA, 19 nt, Artificial Sequence
  Description of Artificial Sequence: Synthetic oligonucleotide
gccugccuaggucugccac

SEQ ID NO: 1191589 - RNA, 19 nt, Artificial Sequence
  Description of Artificial Sequence: Synthetic oligonucleotide
caaggguugccuggacaga

SEQ ID NO: 1191590 - RNA, 19 nt, Artificial Sequence
  Description of Artificial Sequence: Synthetic oligonucleotide
cccagaggaguucaccaga

SEQ ID NO: 1191591 - RNA, 19 nt, Artificial Sequence
  Description of Artificial Sequence: Synthetic oligonucleotide
cuggaauguuagccccaga

SEQ ID NO: 1191592 - RNA, 19 nt, Artificial Sequence
  Description of Artificial Sequence: Synthetic oligonucleotide
aucuagguacugagcuaau

SEQ ID NO: 1191593 - RNA, 19 nt, Artificial Sequence
  Description of Artificial Sequence: Synthetic oligonucleotide
cggaauguugaggauccac

SEQ ID NO: 1191594 - RNA, 19 nt, Artificial Sequence
  Description of Artificial Sequence: Synthetic oligonucleotide
ggguugccuggacagauau

SEQ ID NO: 1191595 - RNA, 19 nt, Artificial Sequence
  Description of Artificial Sequence: Synthetic oligonucleotide
uaggaugcccugggcgauu

SEQ ID NO: 1191596 - RNA, 19 nt, Artificial Sequence
  Description of Artificial Sequence: Synthetic oligonucleotide
accugccugccuaggucug

SEQ ID NO: 1191597 - RNA, 19 nt, Artificial Sequence
  Description of Artificial Sequence: Synthetic oligonucleotide
ccuagagcucacaggaggu

SEQ ID NO: 1191598 - RNA, 19 nt, Artificial Sequence
  Description of Artificial Sequence: Synthetic oligonucleotide
ccuucccgaguagaucuug

SEQ ID NO: 1191599 - RNA, 19 nt, Artificial Sequence
  Description of Artificial Sequence: Synthetic oligonucleotide
caucagaacacagcuccuu

SEQ ID NO: 1191600 - RNA, 19 nt, Artificial Sequence
  Description of Artificial Sequence: Synthetic oligonucleotide
ccugggcgauucaggguac

SEQ ID NO: 1191601 - RNA, 19 nt, Artificial Sequence
  Description of Artificial Sequence: Synthetic oligonucleotide
guucaccagaguaguuuau

SEQ ID NO: 1191602 - RNA, 19 nt, Artificial Sequence
  Description of Artificial Sequence: Synthetic oligonucleotide
ccagccagcauagauccua

SEQ ID NO: 1191603 - RNA, 19 nt, Artificial Sequence
  Description of Artificial Sequence: Synthetic oligonucleotide
gggcgauucaggguacaaa

SEQ ID NO: 1191604 - RNA, 19 nt, Artificial Sequence
  Description of Artificial Sequence: Synthetic oligonucleotide
ccguugccauuacagacaa

SEQ ID NO: 1191605 - RNA, 19 nt, Artificial Sequence
  Description of Artificial Sequence: Synthetic oligonucleotide
aggguugccuggacagaua

SEQ ID NO: 1191606 - RNA, 19 nt, Artificial Sequence
  Description of Artificial Sequence: Synthetic oligonucleotide
gccgugagcucuggaucag

SEQ ID NO: 1191607 - RNA, 19 nt, Artificial Sequence
  Description of Artificial Sequence: Synthetic oligonucleotide
ggucaauaguuaccuuauu

SEQ ID NO: 1191608 - RNA, 19 nt, Artificial Sequence
  Description of Artificial Sequence: Synthetic oligonucleotide
gcuagaggugagugagggu

SEQ ID NO: 1191609 - RNA, 19 nt, Artificial Sequence
  Description of Artificial Sequence: Synthetic oligonucleotide
ggaucagcuagaggugagu

SEQ ID NO: 1191610 - RNA, 19 nt, Artificial Sequence
  Description of Artificial Sequence: Synthetic oligonucleotide
cgcauccauacuggggaag

SEQ ID NO: 1191611 - RNA, 19 nt, Artificial Sequence
  Description of Artificial Sequence: Synthetic oligonucleotide
cugggcgauucaggguaca

SEQ ID NO: 1191612 - RNA, 19 nt, Artificial Sequence
  Description of Artificial Sequence: Synthetic oligonucleotide
gggcaaggguugccuggac

SEQ ID NO: 1191613 - RNA, 19 nt, Artificial Sequence
  Description of Artificial Sequence: Synthetic oligonucleotide
ccgugagcucuggaucagc

SEQ ID NO: 1191614 - RNA, 19 nt, Artificial Sequence
  Description of Artificial Sequence: Synthetic oligonucleotide
gcgcauccauacuggggaa

SEQ ID NO: 1191615 - RNA, 19 nt, Artificial Sequence
  Description of Artificial Sequence: Synthetic oligonucleotide
gcugcggaauguugaggau

SEQ ID NO: 1191616 - RNA, 19 nt, Artificial Sequence
  Description of Artificial Sequence: Synthetic oligonucleotide
cguugccauuacagacaag

SEQ ID NO: 1191617 - RNA, 19 nt, Artificial Sequence
  Description of Artificial Sequence: Synthetic oligonucleotide
ccauugcauaaaugcuaua

SEQ ID NO: 1191618 - RNA, 19 nt, Artificial Sequence
  Description of Artificial Sequence: Synthetic oligonucleotide
cccaagccgugagcucugg

SEQ ID NO: 1191619 - RNA, 19 nt, Artificial Sequence
  Description of Artificial Sequence: Synthetic oligonucleotide
ccuauucacuuugcacuua

SEQ ID NO: 1191620 - RNA, 19 nt, Artificial Sequence
  Description of Artificial Sequence: Synthetic oligonucleotide
ccaagccgugagcucugga

SEQ ID NO: 1191621 - RNA, 19 nt, Artificial Sequence
  Description of Artificial Sequence: Synthetic oligonucleotide
ggaguucaccagaguaguu

SEQ ID NO: 1191622 - RNA, 19 nt, Artificial Sequence
  Description of Artificial Sequence: Synthetic oligonucleotide
gcggaauguugaggaucca

SEQ ID NO: 1191623 - RNA, 19 nt, Artificial Sequence
  Description of Artificial Sequence: Synthetic oligonucleotide
caccuccauuacccacaua

SEQ ID NO: 1191624 - RNA, 19 nt, Artificial Sequence
  Description of Artificial Sequence: Synthetic oligonucleotide
caggaccaguccaguccuu

SEQ ID NO: 1191625 - RNA, 19 nt, Artificial Sequence
  Description of Artificial Sequence: Synthetic oligonucleotide
ccaggggcccaccuccauu

SEQ ID NO: 1191626 - RNA, 19 nt, Artificial Sequence
  Description of Artificial Sequence: Synthetic oligonucleotide
cccagccagcauagauccu

SEQ ID NO: 1191627 - RNA, 19 nt, Artificial Sequence
  Description of Artificial Sequence: Synthetic oligonucleotide
uuaaguacaaaucagauga

SEQ ID NO: 1191628 - RNA, 19 nt, Artificial Sequence
  Description of Artificial Sequence: Synthetic oligonucleotide
aauauucugagacaggauc

SEQ ID NO: 1191629 - RNA, 19 nt, Artificial Sequence
  Description of Artificial Sequence: Synthetic oligonucleotide
uuagucauugucucgaugg

SEQ ID NO: 1191630 - RNA, 19 nt, Artificial Sequence
  Description of Artificial Sequence: Synthetic oligonucleotide
uaaaucagugacuugaagc

SEQ ID NO: 1191631 - RNA, 19 nt, Artificial Sequence
  Description of Artificial Sequence: Synthetic oligonucleotide
gacaacauaaaucagugac

SEQ ID NO: 1191632 - RNA, 19 nt, Artificial Sequence
  Description of Artificial Sequence: Synthetic oligonucleotide
aauaucucuuuguaaauca

SEQ ID NO: 1191633 - RNA, 19 nt, Artificial Sequence
  Description of Artificial Sequence: Synthetic oligonucleotide
aguuuugucgugcugggcc

SEQ ID NO: 1191634 - RNA, 19 nt, Artificial Sequence
  Description of Artificial Sequence: Synthetic oligonucleotide
uuuagcuuugucagaaacg

SEQ ID NO: 1191635 - RNA, 19 nt, Artificial Sequence
  Description of Artificial Sequence: Synthetic oligonucleotide
aauguaaauaucucuuugu

SEQ ID NO: 1191636 - RNA, 19 nt, Artificial Sequence
  Description of Artificial Sequence: Synthetic oligonucleotide
cagaagagaaucuuuaugc

SEQ ID NO: 1191637 - RNA, 19 nt, Artificial Sequence
  Description of Artificial Sequence: Synthetic oligonucleotide
auuaaucccguguauacuc

SEQ ID NO: 1191638 - RNA, 19 nt, Artificial Sequence
  Description of Artificial Sequence: Synthetic oligonucleotide
uguaacaguuucuaccugg

SEQ ID NO: 1191639 - RNA, 19 nt, Artificial Sequence
  Description of Artificial Sequence: Synthetic oligonucleotide
ucagauuguggcaugcugg

SEQ ID NO: 1191640 - RNA, 19 nt, Artificial Sequence
  Description of Artificial Sequence: Synthetic oligonucleotide
uagaguagagacaacauaa

SEQ ID NO: 1191641 - RNA, 19 nt, Artificial Sequence
  Description of Artificial Sequence: Synthetic oligonucleotide
uucaagauccuuuugagau

SEQ ID NO: 1191642 - RNA, 19 nt, Artificial Sequence
  Description of Artificial Sequence: Synthetic oligonucleotide
auuacugaggcuuugcuga

SEQ ID NO: 1191643 - RNA, 19 nt, Artificial Sequence
  Description of Artificial Sequence: Synthetic oligonucleotide
aguagagacaacauaaauc

SEQ ID NO: 1191644 - RNA, 19 nt, Artificial Sequence
  Description of Artificial Sequence: Synthetic oligonucleotide
agucgaacuauuucugacc

SEQ ID NO: 1191645 - RNA, 19 nt, Artificial Sequence
  Description of Artificial Sequence: Synthetic oligonucleotide
auuaaguacaaaucagaug

SEQ ID NO: 1191646 - RNA, 19 nt, Artificial Sequence
  Description of Artificial Sequence: Synthetic oligonucleotide
gaaucuuuaugcuucaguc

SEQ ID NO: 1191647 - RNA, 19 nt, Artificial Sequence
  Description of Artificial Sequence: Synthetic oligonucleotide
ucaaaguuggcuuccucgg

SEQ ID NO: 1191648 - RNA, 19 nt, Artificial Sequence
  Description of Artificial Sequence: Synthetic oligonucleotide
uguuuauaggcacuugucu

SEQ ID NO: 1191649 - RNA, 19 nt, Artificial Sequence
  Description of Artificial Sequence: Synthetic oligonucleotide
uguaaaucauuuauuucac

SEQ ID NO: 1191650 - RNA, 19 nt, Artificial Sequence
  Description of Artificial Sequence: Synthetic oligonucleotide
aucgcauuucuccacacac

SEQ ID NO: 1191651 - RNA, 19 nt, Artificial Sequence
  Description of Artificial Sequence: Synthetic oligonucleotide
gcacauuucaaacagaggc

SEQ ID NO: 1191652 - RNA, 19 nt, Artificial Sequence
  Description of Artificial Sequence: Synthetic oligonucleotide
ucauuuucaguuuugucgu

SEQ ID NO: 1191653 - RNA, 19 nt, Artificial Sequence
  Description of Artificial Sequence: Synthetic oligonucleotide
aaucuuuaugcuucagucu

SEQ ID NO: 1191654 - RNA, 19 nt, Artificial Sequence
  Description of Artificial Sequence: Synthetic oligonucleotide
cuuugcuucauuacugagg

SEQ ID NO: 1191655 - RNA, 19 nt, Artificial Sequence
  Description of Artificial Sequence: Synthetic oligonucleotide
uucuaguugauugacagcu

SEQ ID NO: 1191656 - RNA, 19 nt, Artificial Sequence
  Description of Artificial Sequence: Synthetic oligonucleotide
uuauuaaucccguguauac

SEQ ID NO: 1191657 - RNA, 19 nt, Artificial Sequence
  Description of Artificial Sequence: Synthetic oligonucleotide
ugauugacagcugaaaucu

SEQ ID NO: 1191658 - RNA, 19 nt, Artificial Sequence
  Description of Artificial Sequence: Synthetic oligonucleotide
acugagucgaacuauuucu

SEQ ID NO: 1191659 - RNA, 19 nt, Artificial Sequence
  Description of Artificial Sequence: Synthetic oligonucleotide
auauacauuuucucuugac

SEQ ID NO: 1191660 - RNA, 19 nt, Artificial Sequence
  Description of Artificial Sequence: Synthetic oligonucleotide
acauaaaucagugacuuga

SEQ ID NO: 1191661 - RNA, 19 nt, Artificial Sequence
  Description of Artificial Sequence: Synthetic oligonucleotide
aggaucaacaucuuugacu

SEQ ID NO: 1191662 - RNA, 19 nt, Artificial Sequence
  Description of Artificial Sequence: Synthetic oligonucleotide
uguaaauaucucuuuguaa

SEQ ID NO: 1191663 - RNA, 19 nt, Artificial Sequence
  Description of Artificial Sequence: Synthetic oligonucleotide
ucaaacagaggccaccuac

SEQ ID NO: 1191664 - RNA, 19 nt, Artificial Sequence
  Description of Artificial Sequence: Synthetic oligonucleotide
uuuauaggcacuugucucu

SEQ ID NO: 1191665 - RNA, 19 nt, Artificial Sequence
  Description of Artificial Sequence: Synthetic oligonucleotide
aacagaggccaccuacucg

SEQ ID NO: 1191666 - RNA, 19 nt, Artificial Sequence
  Description of Artificial Sequence: Synthetic oligonucleotide
uuagcuuugucagaaacgu

SEQ ID NO: 1191667 - RNA, 19 nt, Artificial Sequence
  Description of Artificial Sequence: Synthetic oligonucleotide
aaagaacagccucaugcug

SEQ ID NO: 1191668 - RNA, 19 nt, Artificial Sequence
  Description of Artificial Sequence: Synthetic oligonucleotide
uccaacuagcccaagccag

SEQ ID NO: 1191669 - RNA, 19 nt, Artificial Sequence
  Description of Artificial Sequence: Synthetic oligonucleotide
uuucucuugacugagucga

SEQ ID NO: 1191670 - RNA, 19 nt, Artificial Sequence
  Description of Artificial Sequence: Synthetic oligonucleotide
cuugaagcuguuuugagca

SEQ ID NO: 1191671 - RNA, 19 nt, Artificial Sequence
  Description of Artificial Sequence: Synthetic oligonucleotide
uugagcacacuccaacuag

SEQ ID NO: 1191672 - RNA, 19 nt, Artificial Sequence
  Description of Artificial Sequence: Synthetic oligonucleotide
agcuucuuggcuaacgugc

SEQ ID NO: 1191673 - RNA, 19 nt, Artificial Sequence
  Description of Artificial Sequence: Synthetic oligonucleotide
uaacugggcucgcagacgg

SEQ ID NO: 1191674 - RNA, 19 nt, Artificial Sequence
  Description of Artificial Sequence: Synthetic oligonucleotide
auuucaaacagaggccacc

SEQ ID NO: 1191675 - RNA, 19 nt, Artificial Sequence
  Description of Artificial Sequence: Synthetic oligonucleotide
uuauucagcugaaaucgca

SEQ ID NO: 1191676 - RNA, 19 nt, Artificial Sequence
  Description of Artificial Sequence: Synthetic oligonucleotide
cugucuguagcacaggggc

SEQ ID NO: 1191677 - RNA, 19 nt, Artificial Sequence
  Description of Artificial Sequence: Synthetic oligonucleotide
aaaucgcauuucuccacac

SEQ ID NO: 1191678 - RNA, 19 nt, Artificial Sequence
  Description of Artificial Sequence: Synthetic oligonucleotide
cacauuucaaacagaggcc

SEQ ID NO: 1191679 - RNA, 19 nt, Artificial Sequence
  Description of Artificial Sequence: Synthetic oligonucleotide
uccaauucaucauuucucu

SEQ ID NO: 1191680 - RNA, 19 nt, Artificial Sequence
  Description of Artificial Sequence: Synthetic oligonucleotide
uuggcuaacgugcagcacu

SEQ ID NO: 1191681 - RNA, 19 nt, Artificial Sequence
  Description of Artificial Sequence: Synthetic oligonucleotide
acauauacauuuucucuug

SEQ ID NO: 1191682 - RNA, 19 nt, Artificial Sequence
  Description of Artificial Sequence: Synthetic oligonucleotide
ugauucugcuuguugagca

SEQ ID NO: 1191683 - RNA, 19 nt, Artificial Sequence
  Description of Artificial Sequence: Synthetic oligonucleotide
aauuucucuauuuccugau

SEQ ID NO: 1191684 - RNA, 19 nt, Artificial Sequence
  Description of Artificial Sequence: Synthetic oligonucleotide
cauggcaugaggaccagcc

SEQ ID NO: 1191685 - RNA, 19 nt, Artificial Sequence
  Description of Artificial Sequence: Synthetic oligonucleotide
uucacucuguuucauccag

SEQ ID NO: 1191686 - RNA, 19 nt, Artificial Sequence
  Description of Artificial Sequence: Synthetic oligonucleotide
uugauugacagcugaaauc

SEQ ID NO: 1191687 - RNA, 19 nt, Artificial Sequence
  Description of Artificial Sequence: Synthetic oligonucleotide
uguauacucuagaguagag

SEQ ID NO: 1191688 - RNA, 19 nt, Artificial Sequence
  Description of Artificial Sequence: Synthetic oligonucleotide
ucuuuagucauugucucga

SEQ ID NO: 1191689 - RNA, 19 nt, Artificial Sequence
  Description of Artificial Sequence: Synthetic oligonucleotide
uacucuagaguagagacaa

SEQ ID NO: 1191690 - RNA, 19 nt, Artificial Sequence
  Description of Artificial Sequence: Synthetic oligonucleotide
uaacgugcagcacucuucc

SEQ ID NO: 1191691 - RNA, 19 nt, Artificial Sequence
  Description of Artificial Sequence: Synthetic oligonucleotide
uccagcuugucacacauau

SEQ ID NO: 1191692 - RNA, 19 nt, Artificial Sequence
  Description of Artificial Sequence: Synthetic oligonucleotide
ucuagucucaauuucucua

SEQ ID NO: 1191693 - RNA, 19 nt, Artificial Sequence
  Description of Artificial Sequence: Synthetic oligonucleotide
aacauaaaucagugacuug

SEQ ID NO: 1191694 - RNA, 19 nt, Artificial Sequence
  Description of Artificial Sequence: Synthetic oligonucleotide
ucucuugcugagcagcaag

SEQ ID NO: 1191695 - RNA, 19 nt, Artificial Sequence
  Description of Artificial Sequence: Synthetic oligonucleotide
ucagaaacguauucuggga

SEQ ID NO: 1191696 - RNA, 19 nt, Artificial Sequence
  Description of Artificial Sequence: Synthetic oligonucleotide
agaaucuuuaugcuucagu

SEQ ID NO: 1191697 - RNA, 19 nt, Artificial Sequence
  Description of Artificial Sequence: Synthetic oligonucleotide
uuucaagauccuuuugaga

SEQ ID NO: 1191698 - RNA, 19 nt, Artificial Sequence
  Description of Artificial Sequence: Synthetic oligonucleotide
ggaucaacaucuuugacuc

SEQ ID NO: 1191699 - RNA, 19 nt, Artificial Sequence
  Description of Artificial Sequence: Synthetic oligonucleotide
agaaacguauucugggaug

SEQ ID NO: 1191700 - RNA, 19 nt, Artificial Sequence
  Description of Artificial Sequence: Synthetic oligonucleotide
gauaugcacguugcuaugg

SEQ ID NO: 1191701 - RNA, 19 nt, Artificial Sequence
  Description of Artificial Sequence: Synthetic oligonucleotide
cucggauucgcccagcagc

SEQ ID NO: 1191702 - RNA, 19 nt, Artificial Sequence
  Description of Artificial Sequence: Synthetic oligonucleotide
uggauaugcacguugcuau

SEQ ID NO: 1191703 - RNA, 19 nt, Artificial Sequence
  Description of Artificial Sequence: Synthetic oligonucleotide
uuuauuaaucccguguaua

SEQ ID NO: 1191704 - RNA, 19 nt, Artificial Sequence
  Description of Artificial Sequence: Synthetic oligonucleotide
uggcaauauucugagacag

SEQ ID NO: 1191705 - RNA, 19 nt, Artificial Sequence
  Description of Artificial Sequence: Synthetic oligonucleotide
ucaguuuugucgugcuggg

SEQ ID NO: 1191706 - RNA, 19 nt, Artificial Sequence
  Description of Artificial Sequence: Synthetic oligonucleotide
uuuagucauugucucgaug

SEQ ID NO: 1191707 - RNA, 19 nt, Artificial Sequence
  Description of Artificial Sequence: Synthetic oligonucleotide
uagugcagacauuaaguca

SEQ ID NO: 1191708 - RNA, 19 nt, Artificial Sequence
  Description of Artificial Sequence: Synthetic oligonucleotide
cuagugcagacauuaaguc

SEQ ID NO: 1191709 - RNA, 19 nt, Artificial Sequence
  Description of Artificial Sequence: Synthetic oligonucleotide
ucaugcugggcacauuuca

SEQ ID NO: 1191710 - RNA, 19 nt, Artificial Sequence
  Description of Artificial Sequence: Synthetic oligonucleotide
gagguuuuggugcacugug

SEQ ID NO: 1191711 - RNA, 19 nt, Artificial Sequence
  Description of Artificial Sequence: Synthetic oligonucleotide
auaugcacguugcuauggg

SEQ ID NO: 1191712 - RNA, 19 nt, Artificial Sequence
  Description of Artificial Sequence: Synthetic oligonucleotide
uucaccuguuuauaggcac

SEQ ID NO: 1191713 - RNA, 19 nt, Artificial Sequence
  Description of Artificial Sequence: Synthetic oligonucleotide
acuagcccaagccaguuca

SEQ ID NO: 1191714 - RNA, 19 nt, Artificial Sequence
  Description of Artificial Sequence: Synthetic oligonucleotide
ucugagacaggaucaacau

SEQ ID NO: 1191715 - RNA, 19 nt, Artificial Sequence
  Description of Artificial Sequence: Synthetic oligonucleotide
acuagugcagacauuaagu

SEQ ID NO: 1191716 - RNA, 19 nt, Artificial Sequence
  Description of Artificial Sequence: Synthetic oligonucleotide
agcugauucugcuuguuga

SEQ ID NO: 1191717 - RNA, 19 nt, Artificial Sequence
  Description of Artificial Sequence: Synthetic oligonucleotide
ugagcaacugcaccagcug

SEQ ID NO: 1191718 - RNA, 19 nt, Artificial Sequence
  Description of Artificial Sequence: Synthetic oligonucleotide
uuggcaauauucugagaca

SEQ ID NO: 1191719 - RNA, 19 nt, Artificial Sequence
  Description of Artificial Sequence: Synthetic oligonucleotide
uccaggucagcaaucagau

SEQ ID NO: 1191720 - RNA, 19 nt, Artificial Sequence
  Description of Artificial Sequence: Synthetic oligonucleotide
guacaaaucagaugaaugu

SEQ ID NO: 1191721 - RNA, 19 nt, Artificial Sequence
  Description of Artificial Sequence: Synthetic oligonucleotide
cauuacugaggcuuugcug

SEQ ID NO: 1191722 - RNA, 19 nt, Artificial Sequence
  Description of Artificial Sequence: Synthetic oligonucleotide
agaacagccucaugcuggg

SEQ ID NO: 1191723 - RNA, 19 nt, Artificial Sequence
  Description of Artificial Sequence: Synthetic oligonucleotide
acauuaaguacaaaucaga

SEQ ID NO: 1191724 - RNA, 19 nt, Artificial Sequence
  Description of Artificial Sequence: Synthetic oligonucleotide
ucauuacugaggcuuugcu

SEQ ID NO: 1191725 - RNA, 19 nt, Artificial Sequence
  Description of Artificial Sequence: Synthetic oligonucleotide
aucagauuguggcaugcug

SEQ ID NO: 1191726 - RNA, 19 nt, Artificial Sequence
  Description of Artificial Sequence: Synthetic oligonucleotide
auguaaauaucucuuugua

SEQ ID NO: 1191727 - RNA, 19 nt, Artificial Sequence
  Description of Artificial Sequence: Synthetic oligonucleotide
aacguauucugggauguca

SEQ ID NO: 1191728 - RNA, 19 nt, Artificial Sequence
  Description of Artificial Sequence: Synthetic oligonucleotide
aacuagcccaagccaguuc

SEQ ID NO: 1191729 - RNA, 19 nt, Artificial Sequence
  Description of Artificial Sequence: Synthetic oligonucleotide
gagucgaacuauuucugac

SEQ ID NO: 1191730 - RNA, 19 nt, Artificial Sequence
  Description of Artificial Sequence: Synthetic oligonucleotide
aaucgcauuucuccacaca

SEQ ID NO: 1191731 - RNA, 19 nt, Artificial Sequence
  Description of Artificial Sequence: Synthetic oligonucleotide
ugagucgaacuauuucuga

SEQ ID NO: 1191732 - RNA, 19 nt, Artificial Sequence
  Description of Artificial Sequence: Synthetic oligonucleotide
uuaaucccguguauacucu

SEQ ID NO: 1191733 - RNA, 19 nt, Artificial Sequence
  Description of Artificial Sequence: Synthetic oligonucleotide
ucuaguugauugacagcug

SEQ ID NO: 1191734 - RNA, 19 nt, Artificial Sequence
  Description of Artificial Sequence: Synthetic oligonucleotide
ucccguguauacucuagag

SEQ ID NO: 1191735 - RNA, 19 nt, Artificial Sequence
  Description of Artificial Sequence: Synthetic oligonucleotide
uaugggucugggaaagaac

SEQ ID NO: 1191736 - RNA, 19 nt, Artificial Sequence
  Description of Artificial Sequence: Synthetic oligonucleotide
cacuagugcagacauuaag

SEQ ID NO: 1191737 - RNA, 19 nt, Artificial Sequence
  Description of Artificial Sequence: Synthetic oligonucleotide
ucacucuguuucauccagg

SEQ ID NO: 1191738 - RNA, 19 nt, Artificial Sequence
  Description of Artificial Sequence: Synthetic oligonucleotide
ucaguucuagucucaauuu

SEQ ID NO: 1191739 - RNA, 19 nt, Artificial Sequence
  Description of Artificial Sequence: Synthetic oligonucleotide
uauuaaucccguguauacu

SEQ ID NO: 1191740 - RNA, 19 nt, Artificial Sequence
  Description of Artificial Sequence: Synthetic oligonucleotide
uagucauugucucgauggc

SEQ ID NO: 1191741 - RNA, 19 nt, Artificial Sequence
  Description of Artificial Sequence: Synthetic oligonucleotide
uacaaaucagaugaaugua

SEQ ID NO: 1191742 - RNA, 19 nt, Artificial Sequence
  Description of Artificial Sequence: Synthetic oligonucleotide
guaacaguuucuaccuggg

SEQ ID NO: 1191743 - RNA, 19 nt, Artificial Sequence
  Description of Artificial Sequence: Synthetic oligonucleotide
uggguaacugggcucgcag

SEQ ID NO: 1191744 - RNA, 19 nt, Artificial Sequence
  Description of Artificial Sequence: Synthetic oligonucleotide
ugcuggguaacugggcucg

SEQ ID NO: 1191745 - RNA, 19 nt, Artificial Sequence
  Description of Artificial Sequence: Synthetic oligonucleotide
cuuugucagaaacguauuc

SEQ ID NO: 1191746 - RNA, 19 nt, Artificial Sequence
  Description of Artificial Sequence: Synthetic oligonucleotide
uuucuucuaguugauugac

SEQ ID NO: 1191747 - RNA, 19 nt, Artificial Sequence
  Description of Artificial Sequence: Synthetic oligonucleotide
uguggcacauuaaguacaa

SEQ ID NO: 1191748 - RNA, 19 nt, Artificial Sequence
  Description of Artificial Sequence: Synthetic oligonucleotide
acucucccgugcuggaugc

SEQ ID NO: 1191749 - RNA, 19 nt, Artificial Sequence
  Description of Artificial Sequence: Synthetic oligonucleotide
uaacaguuucuaccugggc

SEQ ID NO: 1191750 - RNA, 19 nt, Artificial Sequence
  Description of Artificial Sequence: Synthetic oligonucleotide
auauucugagacaggauca

SEQ ID NO: 1191751 - RNA, 19 nt, Artificial Sequence
  Description of Artificial Sequence: Synthetic oligonucleotide
ucuuggcuaacgugcagca

SEQ ID NO: 1191752 - RNA, 19 nt, Artificial Sequence
  Description of Artificial Sequence: Synthetic oligonucleotide
uauucugggaugucagcaa

SEQ ID NO: 1191753 - RNA, 19 nt, Artificial Sequence
  Description of Artificial Sequence: Synthetic oligonucleotide
uuucaaacagaggccaccu

SEQ ID NO: 1191754 - RNA, 19 nt, Artificial Sequence
  Description of Artificial Sequence: Synthetic oligonucleotide
ucgcauuucuccacacacc

SEQ ID NO: 1191755 - RNA, 19 nt, Artificial Sequence
  Description of Artificial Sequence: Synthetic oligonucleotide
uuuuccagucuggugaggu

SEQ ID NO: 1191756 - RNA, 19 nt, Artificial Sequence
  Description of Artificial Sequence: Synthetic oligonucleotide
caugcugaagcacucccug

SEQ ID NO: 1191757 - RNA, 19 nt, Artificial Sequence
  Description of Artificial Sequence: Synthetic oligonucleotide
auucugcuuguugagcaac

SEQ ID NO: 1191758 - RNA, 19 nt, Artificial Sequence
  Description of Artificial Sequence: Synthetic oligonucleotide
agcuuugucagaaacguau

SEQ ID NO: 1191759 - RNA, 19 nt, Artificial Sequence
  Description of Artificial Sequence: Synthetic oligonucleotide
cuaacgugcagcacucuuc

SEQ ID NO: 1191760 - RNA, 19 nt, Artificial Sequence
  Description of Artificial Sequence: Synthetic oligonucleotide
cugagucgaacuauuucug

SEQ ID NO: 1191761 - RNA, 19 nt, Artificial Sequence
  Description of Artificial Sequence: Synthetic oligonucleotide
ugcacguugcuaugggucu

SEQ ID NO: 1191762 - RNA, 19 nt, Artificial Sequence
  Description of Artificial Sequence: Synthetic oligonucleotide
uauuucacucuguuucauc

SEQ ID NO: 1191763 - RNA, 19 nt, Artificial Sequence
  Description of Artificial Sequence: Synthetic oligonucleotide
gauuguggcaugcugggua

SEQ ID NO: 1191764 - RNA, 19 nt, Artificial Sequence
  Description of Artificial Sequence: Synthetic oligonucleotide
ugcagcacucuuccuuuag

SEQ ID NO: 1191765 - RNA, 19 nt, Artificial Sequence
  Description of Artificial Sequence: Synthetic oligonucleotide
uucauuacugaggcuuugc

SEQ ID NO: 1191766 - RNA, 19 nt, Artificial Sequence
  Description of Artificial Sequence: Synthetic oligonucleotide
ucuucccucuccuugguua

SEQ ID NO: 1191767 - RNA, 19 nt, Artificial Sequence
  Description of Artificial Sequence: Synthetic oligonucleotide
ucgacucaugcacucuccc

SEQ ID NO: 1191768 - RNA, 19 nt, Artificial Sequence
  Description of Artificial Sequence: Synthetic oligonucleotide
cuggaugcacuguuccucc

SEQ ID NO: 1191769 - RNA, 19 nt, Artificial Sequence
  Description of Artificial Sequence: Synthetic oligonucleotide
ucuugagaagcaagcuggu

SEQ ID NO: 1191770 - RNA, 19 nt, Artificial Sequence
  Description of Artificial Sequence: Synthetic oligonucleotide
aaucccguguauacucuag

SEQ ID NO: 1191771 - RNA, 19 nt, Artificial Sequence
  Description of Artificial Sequence: Synthetic oligonucleotide
uugguuuuauucagcugaa

SEQ ID NO: 1191772 - RNA, 19 nt, Artificial Sequence
  Description of Artificial Sequence: Synthetic oligonucleotide
caagcugcuccgcacagac

SEQ ID NO: 1191773 - RNA, 19 nt, Artificial Sequence
  Description of Artificial Sequence: Synthetic oligonucleotide
uccagcuucuuggcuaacg

SEQ ID NO: 1191774 - RNA, 19 nt, Artificial Sequence
  Description of Artificial Sequence: Synthetic oligonucleotide
aagcacucccugucuguag

SEQ ID NO: 1191775 - RNA, 19 nt, Artificial Sequence
  Description of Artificial Sequence: Synthetic oligonucleotide
cuaguugauugacagcuga

SEQ ID NO: 1191776 - RNA, 19 nt, Artificial Sequence
  Description of Artificial Sequence: Synthetic oligonucleotide
ucaccuguuuauaggcacu

SEQ ID NO: 1191777 - RNA, 19 nt, Artificial Sequence
  Description of Artificial Sequence: Synthetic oligonucleotide
ccuucaucgacucaugcac

SEQ ID NO: 1191778 - RNA, 19 nt, Artificial Sequence
  Description of Artificial Sequence: Synthetic oligonucleotide
cugucugagucuuuccuuc

SEQ ID NO: 1191779 - RNA, 19 nt, Artificial Sequence
  Description of Artificial Sequence: Synthetic oligonucleotide
uucaucgacucaugcacuc

SEQ ID NO: 1191780 - RNA, 19 nt, Artificial Sequence
  Description of Artificial Sequence: Synthetic oligonucleotide
augcacguugcuauggguc

SEQ ID NO: 1191781 - RNA, 19 nt, Artificial Sequence
  Description of Artificial Sequence: Synthetic oligonucleotide
agacaacauaaaucaguga

SEQ ID NO: 1191782 - RNA, 19 nt, Artificial Sequence
  Description of Artificial Sequence: Synthetic oligonucleotide
acuccaguagccagaagag

SEQ ID NO: 1191783 - RNA, 19 nt, Artificial Sequence
  Description of Artificial Sequence: Synthetic oligonucleotide
uaugcacguugcuaugggu

SEQ ID NO: 1191784 - RNA, 19 nt, Artificial Sequence
  Description of Artificial Sequence: Synthetic oligonucleotide
ugcagacauuaagucaucc

SEQ ID NO: 1191785 - RNA, 19 nt, Artificial Sequence
  Description of Artificial Sequence: Synthetic oligonucleotide
aaacguauucugggauguc

SEQ ID NO: 1191786 - RNA, 19 nt, Artificial Sequence
  Description of Artificial Sequence: Synthetic oligonucleotide
cauuaagucaucccguucu

SEQ ID NO: 1191787 - RNA, 19 nt, Artificial Sequence
  Description of Artificial Sequence: Synthetic oligonucleotide
cucgauggccuggauaugc

SEQ ID NO: 1191788 - RNA, 19 nt, Artificial Sequence
  Description of Artificial Sequence: Synthetic oligonucleotide
agucucaauuucucuauuu

SEQ ID NO: 1191789 - RNA, 19 nt, Artificial Sequence
  Description of Artificial Sequence: Synthetic oligonucleotide
ugaagcacucccugucugu

SEQ ID NO: 1191790 - RNA, 19 nt, Artificial Sequence
  Description of Artificial Sequence: Synthetic oligonucleotide
cauuucaaacagaggccac

SEQ ID NO: 1191791 - RNA, 19 nt, Artificial Sequence
  Description of Artificial Sequence: Synthetic oligonucleotide
acuugcaggcacuccucuc

SEQ ID NO: 1191792 - RNA, 19 nt, Artificial Sequence
  Description of Artificial Sequence: Synthetic oligonucleotide
cucuagaguagagacaaca

SEQ ID NO: 1191793 - RNA, 19 nt, Artificial Sequence
  Description of Artificial Sequence: Synthetic oligonucleotide
uuuccugaucuuucauuuc

SEQ ID NO: 1191794 - RNA, 19 nt, Artificial Sequence
  Description of Artificial Sequence: Synthetic oligonucleotide
agucaucccguucuuuagu

SEQ ID NO: 1191795 - RNA, 19 nt, Artificial Sequence
  Description of Artificial Sequence: Synthetic oligonucleotide
aaucagauuguggcaugcu

SEQ ID NO: 1191796 - RNA, 19 nt, Artificial Sequence
  Description of Artificial Sequence: Synthetic oligonucleotide
ucaagauccuuuugagauu

SEQ ID NO: 1191797 - RNA, 19 nt, Artificial Sequence
  Description of Artificial Sequence: Synthetic oligonucleotide
ucaucccguucuuuaguca

SEQ ID NO: 1191798 - RNA, 19 nt, Artificial Sequence
  Description of Artificial Sequence: Synthetic oligonucleotide
caguucuagucucaauuuc

SEQ ID NO: 1191799 - RNA, 19 nt, Artificial Sequence
  Description of Artificial Sequence: Synthetic oligonucleotide
cucucgcucaguucuaguc

SEQ ID NO: 1191800 - RNA, 19 nt, Artificial Sequence
  Description of Artificial Sequence: Synthetic oligonucleotide
uuggcgcucggauucgccc

SEQ ID NO: 1191801 - RNA, 19 nt, Artificial Sequence
  Description of Artificial Sequence: Synthetic oligonucleotide
aguucaugcugaagcacuc

SEQ ID NO: 1191802 - RNA, 19 nt, Artificial Sequence
  Description of Artificial Sequence: Synthetic oligonucleotide
aguugauugacagcugaaa

SEQ ID NO: 1191803 - RNA, 19 nt, Artificial Sequence
  Description of Artificial Sequence: Synthetic oligonucleotide
ggcacauuaaguacaaauc

SEQ ID NO: 1191804 - RNA, 19 nt, Artificial Sequence
  Description of Artificial Sequence: Synthetic oligonucleotide
aucgacucaugcacucucc

SEQ ID NO: 1191805 - RNA, 19 nt, Artificial Sequence
  Description of Artificial Sequence: Synthetic oligonucleotide
agacauuaagucaucccgu

SEQ ID NO: 1191806 - RNA, 19 nt, Artificial Sequence
  Description of Artificial Sequence: Synthetic oligonucleotide
accuuucugacauccacuu

SEQ ID NO: 1191807 - RNA, 19 nt, Artificial Sequence
  Description of Artificial Sequence: Synthetic oligonucleotide
gaagagaaucuuuaugcuu

SEQ ID NO: 1191808 - RNA, 19 nt, Artificial Sequence
  Description of Artificial Sequence: Synthetic oligonucleotide
gaagcaagcugguucugaa

SEQ ID NO: 1191809 - RNA, 19 nt, Artificial Sequence
  Description of Artificial Sequence: Synthetic oligonucleotide
gcagacauuaagucauccc

SEQ ID NO: 1191810 - RNA, 19 nt, Artificial Sequence
  Description of Artificial Sequence: Synthetic oligonucleotide
cuccgcacagacacuagug

SEQ ID NO: 1191811 - RNA, 19 nt, Artificial Sequence
  Description of Artificial Sequence: Synthetic oligonucleotide
augcuggguaacugggcuc

SEQ ID NO: 1191812 - RNA, 19 nt, Artificial Sequence
  Description of Artificial Sequence: Synthetic oligonucleotide
cuagaguagagacaacaua

SEQ ID NO: 1191813 - RNA, 19 nt, Artificial Sequence
  Description of Artificial Sequence: Synthetic oligonucleotide
aagcaagcugguucugaau

SEQ ID NO: 1191814 - RNA, 19 nt, Artificial Sequence
  Description of Artificial Sequence: Synthetic oligonucleotide
ucccguucuuuagucauug

SEQ ID NO: 1191815 - RNA, 19 nt, Artificial Sequence
  Description of Artificial Sequence: Synthetic oligonucleotide
uggucuucucaaaguuggc

SEQ ID NO: 1191816 - RNA, 19 nt, Artificial Sequence
  Description of Artificial Sequence: Synthetic oligonucleotide
caaagcccguuucucuugc

SEQ ID NO: 1191817 - RNA, 19 nt, Artificial Sequence
  Description of Artificial Sequence: Synthetic oligonucleotide
guauacucuagaguagaga

SEQ ID NO: 1191818 - RNA, 19 nt, Artificial Sequence
  Description of Artificial Sequence: Synthetic oligonucleotide
gcaauauucugagacagga

SEQ ID NO: 1191819 - RNA, 19 nt, Artificial Sequence
  Description of Artificial Sequence: Synthetic oligonucleotide
guugauugacagcugaaau

SEQ ID NO: 1191820 - RNA, 19 nt, Artificial Sequence
  Description of Artificial Sequence: Synthetic oligonucleotide
gggcacauuucaaacagag

SEQ ID NO: 1191821 - RNA, 19 nt, Artificial Sequence
  Description of Artificial Sequence: Synthetic oligonucleotide
cacuccaacuagcccaagc

SEQ ID NO: 1191822 - RNA, 19 nt, Artificial Sequence
  Description of Artificial Sequence: Synthetic oligonucleotide
ucgaacuauuucugaccug

SEQ ID NO: 1191823 - RNA, 19 nt, Artificial Sequence
  Description of Artificial Sequence: Synthetic oligonucleotide
gaguagagacaacauaaau

SEQ ID NO: 1191824 - RNA, 19 nt, Artificial Sequence
  Description of Artificial Sequence: Synthetic oligonucleotide
caaucagauuguggcaugc

SEQ ID NO: 1191825 - RNA, 19 nt, Artificial Sequence
  Description of Artificial Sequence: Synthetic oligonucleotide
cucgcucaguucuagucuc

SEQ ID NO: 1191826 - RNA, 19 nt, Artificial Sequence
  Description of Artificial Sequence: Synthetic oligonucleotide
guaacugggcucgcagacg

SEQ ID NO: 1191827 - RNA, 19 nt, Artificial Sequence
  Description of Artificial Sequence: Synthetic oligonucleotide
agcccguuucucuugcuga

SEQ ID NO: 1191828 - RNA, 19 nt, Artificial Sequence
  Description of Artificial Sequence: Synthetic oligonucleotide
cagaaccauggcaugagga

SEQ ID NO: 1191829 - RNA, 19 nt, Artificial Sequence
  Description of Artificial Sequence: Synthetic oligonucleotide
ucgauggccuggauaugca

SEQ ID NO: 1191830 - RNA, 19 nt, Artificial Sequence
  Description of Artificial Sequence: Synthetic oligonucleotide
acguauucugggaugucag

SEQ ID NO: 1191831 - RNA, 19 nt, Artificial Sequence
  Description of Artificial Sequence: Synthetic oligonucleotide
gagcacacuccaacuagcc

SEQ ID NO: 1191832 - RNA, 19 nt, Artificial Sequence
  Description of Artificial Sequence: Synthetic oligonucleotide
cauuuucaguuuugucgug

SEQ ID NO: 1191833 - RNA, 19 nt, Artificial Sequence
  Description of Artificial Sequence: Synthetic oligonucleotide
gucaucccguucuuuaguc

SEQ ID NO: 1191834 - RNA, 19 nt, Artificial Sequence
  Description of Artificial Sequence: Synthetic oligonucleotide
gucgaacuauuucugaccu

SEQ ID NO: 1191835 - RNA, 19 nt, Artificial Sequence
  Description of Artificial Sequence: Synthetic oligonucleotide
auuaagucaucccguucuu

SEQ ID NO: 1191836 - RNA, 19 nt, Artificial Sequence
  Description of Artificial Sequence: Synthetic oligonucleotide
uccacuucuugagaagcaa

SEQ ID NO: 1191837 - RNA, 19 nt, Artificial Sequence
  Description of Artificial Sequence: Synthetic oligonucleotide
gucagcaacaaauacuguu

SEQ ID NO: 1191838 - RNA, 19 nt, Artificial Sequence
  Description of Artificial Sequence: Synthetic oligonucleotide
ugcuccacgugcugcuugc

SEQ ID NO: 1191839 - RNA, 19 nt, Artificial Sequence
  Description of Artificial Sequence: Synthetic oligonucleotide
uuauaggcacuugucucuc

SEQ ID NO: 1191840 - RNA, 19 nt, Artificial Sequence
  Description of Artificial Sequence: Synthetic oligonucleotide
uccagucuuucugucugcc

SEQ ID NO: 1191841 - RNA, 19 nt, Artificial Sequence
  Description of Artificial Sequence: Synthetic oligonucleotide
gaaacguauucugggaugu

SEQ ID NO: 1191842 - RNA, 19 nt, Artificial Sequence
  Description of Artificial Sequence: Synthetic oligonucleotide
cgaacuauuucugaccugc

SEQ ID NO: 1191843 - RNA, 19 nt, Artificial Sequence
  Description of Artificial Sequence: Synthetic oligonucleotide
gagaaucuuuaugcuucag

SEQ ID NO: 1191844 - RNA, 19 nt, Artificial Sequence
  Description of Artificial Sequence: Synthetic oligonucleotide
caacaaauacuguucauuu

SEQ ID NO: 1191845 - RNA, 19 nt, Artificial Sequence
  Description of Artificial Sequence: Synthetic oligonucleotide
uggcuaacgugcagcacuc

SEQ ID NO: 1191846 - RNA, 19 nt, Artificial Sequence
  Description of Artificial Sequence: Synthetic oligonucleotide
gauucugcuuguugagcaa

SEQ ID NO: 1191847 - RNA, 19 nt, Artificial Sequence
  Description of Artificial Sequence: Synthetic oligonucleotide
cugaagcacucccugucug

SEQ ID NO: 1191848 - RNA, 19 nt, Artificial Sequence
  Description of Artificial Sequence: Synthetic oligonucleotide
aucccguguauacucuaga

SEQ ID NO: 1191849 - RNA, 19 nt, Artificial Sequence
  Description of Artificial Sequence: Synthetic oligonucleotide
gcucacacuggaucaaagc

SEQ ID NO: 1191850 - RNA, 19 nt, Artificial Sequence
  Description of Artificial Sequence: Synthetic oligonucleotide
caucgacucaugcacucuc

SEQ ID NO: 1191851 - RNA, 19 nt, Artificial Sequence
  Description of Artificial Sequence: Synthetic oligonucleotide
auacucuagaguagagaca

SEQ ID NO: 1191852 - RNA, 19 nt, Artificial Sequence
  Description of Artificial Sequence: Synthetic oligonucleotide
cagcaacaaauacuguuca

SEQ ID NO: 1191853 - RNA, 19 nt, Artificial Sequence
  Description of Artificial Sequence: Synthetic oligonucleotide
agucuggugaggugcaguu

SEQ ID NO: 1191854 - RNA, 19 nt, Artificial Sequence
  Description of Artificial Sequence: Synthetic oligonucleotide
acucccugucuguagcaca

SEQ ID NO: 1191855 - RNA, 19 nt, Artificial Sequence
  Description of Artificial Sequence: Synthetic oligonucleotide
aaagcccguuucucuugcu

SEQ ID NO: 1191856 - RNA, 19 nt, Artificial Sequence
  Description of Artificial Sequence: Synthetic oligonucleotide
cagcuucuuggcuaacgug

SEQ ID NO: 1191857 - RNA, 19 nt, Artificial Sequence
  Description of Artificial Sequence: Synthetic oligonucleotide
aguagccagaagagaaucu

SEQ ID NO: 1191858 - RNA, 19 nt, Artificial Sequence
  Description of Artificial Sequence: Synthetic oligonucleotide
caguagccagaagagaauc

SEQ ID NO: 1191859 - RNA, 19 nt, Artificial Sequence
  Description of Artificial Sequence: Synthetic oligonucleotide
caggaucaacaucuuugac

SEQ ID NO: 1191860 - RNA, 19 nt, Artificial Sequence
  Description of Artificial Sequence: Synthetic oligonucleotide
uuacugaggcuuugcugaa

SEQ ID NO: 1191861 - RNA, 19 nt, Artificial Sequence
  Description of Artificial Sequence: Synthetic oligonucleotide
acgugcagcacucuuccuu

SEQ ID NO: 1191862 - RNA, 19 nt, Artificial Sequence
  Description of Artificial Sequence: Synthetic oligonucleotide
uaaucccguguauacucua

SEQ ID NO: 1191863 - RNA, 19 nt, Artificial Sequence
  Description of Artificial Sequence: Synthetic oligonucleotide
uucaaacagaggccaccua

SEQ ID NO: 1191864 - RNA, 19 nt, Artificial Sequence
  Description of Artificial Sequence: Synthetic oligonucleotide
aacgugcagcacucuuccu

SEQ ID NO: 1191865 - RNA, 19 nt, Artificial Sequence
  Description of Artificial Sequence: Synthetic oligonucleotide
cucaguucuagucucaauu

SEQ ID NO: 1191866 - RNA, 19 nt, Artificial Sequence
  Description of Artificial Sequence: Synthetic oligonucleotide
ugcuccgcacagacacuag

SEQ ID NO: 1191867 - RNA, 19 nt, Artificial Sequence
  Description of Artificial Sequence: Synthetic oligonucleotide
gcaguuggcgcucggauuc

SEQ ID NO: 1191868 - RNA, 19 nt, Artificial Sequence
  Description of Artificial Sequence: Synthetic oligonucleotide
ccguguauacucuagagua

SEQ ID NO: 1191869 - RNA, 19 nt, Artificial Sequence
  Description of Artificial Sequence: Synthetic oligonucleotide
ucaucgacucaugcacucu

SEQ ID NO: 1191870 - RNA, 19 nt, Artificial Sequence
  Description of Artificial Sequence: Synthetic oligonucleotide
ggcaauauucugagacagg

SEQ ID NO: 1191871 - RNA, 19 nt, Artificial Sequence
  Description of Artificial Sequence: Synthetic oligonucleotide
augcugaagcacucccugu

SEQ ID NO: 1191872 - RNA, 19 nt, Artificial Sequence
  Description of Artificial Sequence: Synthetic oligonucleotide
ugcaguuggcgcucggauu

SEQ ID NO: 1191873 - RNA, 19 nt, Artificial Sequence
  Description of Artificial Sequence: Synthetic oligonucleotide
cacucucccgugcuggaug

SEQ ID NO: 1191874 - RNA, 19 nt, Artificial Sequence
  Description of Artificial Sequence: Synthetic oligonucleotide
agacaggaucaacaucuuu

SEQ ID NO: 1191875 - RNA, 19 nt, Artificial Sequence
  Description of Artificial Sequence: Synthetic oligonucleotide
ucgugcugggccuccauuu

SEQ ID NO: 1191876 - RNA, 19 nt, Artificial Sequence
  Description of Artificial Sequence: Synthetic oligonucleotide
uagcuuugucagaaacgua

SEQ ID NO: 1191877 - RNA, 19 nt, Artificial Sequence
  Description of Artificial Sequence: Synthetic oligonucleotide
gacauuaagucaucccguu

SEQ ID NO: 1191878 - RNA, 19 nt, Artificial Sequence
  Description of Artificial Sequence: Synthetic oligonucleotide
ggauaugcacguugcuaug

SEQ ID NO: 1191879 - RNA, 19 nt, Artificial Sequence
  Description of Artificial Sequence: Synthetic oligonucleotide
ucgcucaguucuagucuca

SEQ ID NO: 1191880 - RNA, 19 nt, Artificial Sequence
  Description of Artificial Sequence: Synthetic oligonucleotide
uucucuugacugagucgaa

SEQ ID NO: 1191881 - RNA, 19 nt, Artificial Sequence
  Description of Artificial Sequence: Synthetic oligonucleotide
cucaugcugggcacauuuc

SEQ ID NO: 1191882 - RNA, 19 nt, Artificial Sequence
  Description of Artificial Sequence: Synthetic oligonucleotide
uggcgcucggauucgccca

SEQ ID NO: 1191883 - RNA, 19 nt, Artificial Sequence
  Description of Artificial Sequence: Synthetic oligonucleotide
aguuggcgcucggauucgc

SEQ ID NO: 1191884 - RNA, 19 nt, Artificial Sequence
  Description of Artificial Sequence: Synthetic oligonucleotide
caugcacucucccgugcug

SEQ ID NO: 1191885 - RNA, 19 nt, Artificial Sequence
  Description of Artificial Sequence: Synthetic oligonucleotide
caacauaaaucagugacuu

SEQ ID NO: 1191886 - RNA, 19 nt, Artificial Sequence
  Description of Artificial Sequence: Synthetic oligonucleotide
caucuuugacucugcaucu

SEQ ID NO: 1191887 - RNA, 19 nt, Artificial Sequence
  Description of Artificial Sequence: Synthetic oligonucleotide
uggaugcacuguuccucca

SEQ ID NO: 1191888 - RNA, 19 nt, Artificial Sequence
  Description of Artificial Sequence: Synthetic oligonucleotide
caaacagaggccaccuacu

SEQ ID NO: 1191889 - RNA, 19 nt, Artificial Sequence
  Description of Artificial Sequence: Synthetic oligonucleotide
ucugucgcuccaggagaag

SEQ ID NO: 1191890 - RNA, 19 nt, Artificial Sequence
  Description of Artificial Sequence: Synthetic oligonucleotide
ugaggugcaguuggcgcuc

SEQ ID NO: 1191891 - RNA, 19 nt, Artificial Sequence
  Description of Artificial Sequence: Synthetic oligonucleotide
ucuguagcacaggggcaga

SEQ ID NO: 1191892 - RNA, 19 nt, Artificial Sequence
  Description of Artificial Sequence: Synthetic oligonucleotide
ggccuggauaugcacguug

SEQ ID NO: 1191893 - RNA, 19 nt, Artificial Sequence
  Description of Artificial Sequence: Synthetic oligonucleotide
cagacacuagugcagacau

SEQ ID NO: 1191894 - RNA, 19 nt, Artificial Sequence
  Description of Artificial Sequence: Synthetic oligonucleotide
accuguuuauaggcacuug

SEQ ID NO: 1191895 - RNA, 19 nt, Artificial Sequence
  Description of Artificial Sequence: Synthetic oligonucleotide
cuggauaugcacguugcua

SEQ ID NO: 1191896 - RNA, 19 nt, Artificial Sequence
  Description of Artificial Sequence: Synthetic oligonucleotide
ggucaucugcacagcaugc

SEQ ID NO: 1191897 - RNA, 19 nt, Artificial Sequence
  Description of Artificial Sequence: Synthetic oligonucleotide
cuaugggucugggaaagaa

SEQ ID NO: 1191898 - RNA, 19 nt, Artificial Sequence
  Description of Artificial Sequence: Synthetic oligonucleotide
guuuugucgugcugggccu

SEQ ID NO: 1191899 - RNA, 19 nt, Artificial Sequence
  Description of Artificial Sequence: Synthetic oligonucleotide
caacaucuuugacucugca

SEQ ID NO: 1191900 - RNA, 19 nt, Artificial Sequence
  Description of Artificial Sequence: Synthetic oligonucleotide
gaugcacuguuccuccaau

SEQ ID NO: 1191901 - RNA, 19 nt, Artificial Sequence
  Description of Artificial Sequence: Synthetic oligonucleotide
ucccagguggugucucccu

SEQ ID NO: 1191902 - RNA, 19 nt, Artificial Sequence
  Description of Artificial Sequence: Synthetic oligonucleotide
cucgcagacgguccaccuc

SEQ ID NO: 1191903 - RNA, 19 nt, Artificial Sequence
  Description of Artificial Sequence: Synthetic oligonucleotide
cuauuucugaccugcuuuu

SEQ ID NO: 1191904 - RNA, 19 nt, Artificial Sequence
  Description of Artificial Sequence: Synthetic oligonucleotide
agauuguggcaugcugggu

SEQ ID NO: 1191905 - RNA, 19 nt, Artificial Sequence
  Description of Artificial Sequence: Synthetic oligonucleotide
caguuuugucgugcugggc

SEQ ID NO: 1191906 - RNA, 19 nt, Artificial Sequence
  Description of Artificial Sequence: Synthetic oligonucleotide
ucucgauggccuggauaug

SEQ ID NO: 1191907 - RNA, 19 nt, Artificial Sequence
  Description of Artificial Sequence: Synthetic oligonucleotide
cagaggccaccuacucggc

SEQ ID NO: 1191908 - RNA, 19 nt, Artificial Sequence
  Description of Artificial Sequence: Synthetic oligonucleotide
cagaaacguauucugggau

SEQ ID NO: 1191909 - RNA, 19 nt, Artificial Sequence
  Description of Artificial Sequence: Synthetic oligonucleotide
gaagcacucccugucugua

SEQ ID NO: 1191910 - RNA, 19 nt, Artificial Sequence
  Description of Artificial Sequence: Synthetic oligonucleotide
caucccguucuuuagucau

SEQ ID NO: 1191911 - RNA, 19 nt, Artificial Sequence
  Description of Artificial Sequence: Synthetic oligonucleotide
cuucaucgacucaugcacu

SEQ ID NO: 1191912 - RNA, 19 nt, Artificial Sequence
  Description of Artificial Sequence: Synthetic oligonucleotide
gaggugcaguuggcgcucg

SEQ ID NO: 1191913 - RNA, 19 nt, Artificial Sequence
  Description of Artificial Sequence: Synthetic oligonucleotide
cguauucugggaugucagc

SEQ ID NO: 1191914 - RNA, 19 nt, Artificial Sequence
  Description of Artificial Sequence: Synthetic oligonucleotide
guuggcgcucggauucgcc

SEQ ID NO: 1191915 - RNA, 19 nt, Artificial Sequence
  Description of Artificial Sequence: Synthetic oligonucleotide
gcccguuucucuugcugag

SEQ ID NO: 1191916 - RNA, 19 nt, Artificial Sequence
  Description of Artificial Sequence: Synthetic oligonucleotide
ccaaagcccguuucucuug

SEQ ID NO: 1191917 - RNA, 19 nt, Artificial Sequence
  Description of Artificial Sequence: Synthetic oligonucleotide
gccuggauaugcacguugc

SEQ ID NO: 1191918 - RNA, 19 nt, Artificial Sequence
  Description of Artificial Sequence: Synthetic oligonucleotide
ggggcagaaccauggcaug

SEQ ID NO: 1191919 - RNA, 19 nt, Artificial Sequence
  Description of Artificial Sequence: Synthetic oligonucleotide
ugucgugcugggccuccau

SEQ ID NO: 1191920 - RNA, 19 nt, Artificial Sequence
  Description of Artificial Sequence: Synthetic oligonucleotide
guagccagaagagaaucuu

SEQ ID NO: 1191921 - RNA, 19 nt, Artificial Sequence
  Description of Artificial Sequence: Synthetic oligonucleotide
cgacucaugcacucucccg

SEQ ID NO: 1191922 - RNA, 19 nt, Artificial Sequence
  Description of Artificial Sequence: Synthetic oligonucleotide
gggccugaagggcuugggc

SEQ ID NO: 1191923 - RNA, 19 nt, Artificial Sequence
  Description of Artificial Sequence: Synthetic oligonucleotide
acguugcuaugggucuggg

SEQ ID NO: 1191924 - RNA, 19 nt, Artificial Sequence
  Description of Artificial Sequence: Synthetic oligonucleotide
cuugacugagucgaacuau

SEQ ID NO: 1191925 - RNA, 19 nt, Artificial Sequence
  Description of Artificial Sequence: Synthetic oligonucleotide
cccuuguaacaguuucuac

SEQ ID NO: 1191926 - RNA, 19 nt, Artificial Sequence
  Description of Artificial Sequence: Synthetic oligonucleotide
cucugucgcuccaggagaa

SEQ ID NO: 1191927 - RNA, 19 nt, Artificial Sequence
  Description of Artificial Sequence: Synthetic oligonucleotide
cacgugcugcuugcucucg

SEQ ID NO: 1191928 - RNA, 19 nt, Artificial Sequence
  Description of Artificial Sequence: Synthetic oligonucleotide
cacacaccuuucugacauc

SEQ ID NO: 1191929 - RNA, 19 nt, Artificial Sequence
  Description of Artificial Sequence: Synthetic oligonucleotide
caguuggcgcucggauucg

SEQ ID NO: 1191930 - RNA, 19 nt, Artificial Sequence
  Description of Artificial Sequence: Synthetic oligonucleotide
caaaguuggcuuccucggu

SEQ ID NO: 1191931 - RNA, 19 nt, Artificial Sequence
  Description of Artificial Sequence: Synthetic oligonucleotide
ggguaacugggcucgcaga

SEQ ID NO: 1191932 - RNA, 19 nt, Artificial Sequence
  Description of Artificial Sequence: Synthetic oligonucleotide
gcuggacacuccaguagcc

SEQ ID NO: 1191933 - RNA, 19 nt, Artificial Sequence
  Description of Artificial Sequence: Synthetic oligonucleotide
ggcuuugcugaaugcuauc

SEQ ID NO: 1191934 - RNA, 19 nt, Artificial Sequence
  Description of Artificial Sequence: Synthetic oligonucleotide
ggauucgcccagcagcucu

SEQ ID NO: 1191935 - RNA, 19 nt, Artificial Sequence
  Description of Artificial Sequence: Synthetic oligonucleotide
gcaugcuucaccuguuuau

SEQ ID NO: 1191936 - RNA, 19 nt, Artificial Sequence
  Description of Artificial Sequence: Synthetic oligonucleotide
acacuagugcagacauuaa

SEQ ID NO: 1191937 - RNA, 19 nt, Artificial Sequence
  Description of Artificial Sequence: Synthetic oligonucleotide
ggaugcacuguuccuccaa

SEQ ID NO: 1191938 - RNA, 19 nt, Artificial Sequence
  Description of Artificial Sequence: Synthetic oligonucleotide
cuuuagucauugucucgau

SEQ ID NO: 1191939 - RNA, 19 nt, Artificial Sequence
  Description of Artificial Sequence: Synthetic oligonucleotide
ccguuucucuugcugagca

SEQ ID NO: 1191940 - RNA, 19 nt, Artificial Sequence
  Description of Artificial Sequence: Synthetic oligonucleotide
gcaugcuggguaacugggc

SEQ ID NO: 1191941 - RNA, 19 nt, Artificial Sequence
  Description of Artificial Sequence: Synthetic oligonucleotide
ccgcacagacacuagugca

SEQ ID NO: 1191942 - RNA, 19 nt, Artificial Sequence
  Description of Artificial Sequence: Synthetic oligonucleotide
gcuuugcugaaugcuaucu

SEQ ID NO: 1191943 - RNA, 19 nt, Artificial Sequence
  Description of Artificial Sequence: Synthetic oligonucleotide
ccaagccaguucaugcuga

SEQ ID NO: 1191944 - RNA, 19 nt, Artificial Sequence
  Description of Artificial Sequence: Synthetic oligonucleotide
gcacagacacuagugcaga

SEQ ID NO: 1191945 - RNA, 19 nt, Artificial Sequence
  Description of Artificial Sequence: Synthetic oligonucleotide
ggcgcucggauucgcccag

SEQ ID NO: 1191946 - RNA, 19 nt, Artificial Sequence
  Description of Artificial Sequence: Synthetic oligonucleotide
gugcagacauuaagucauc

SEQ ID NO: 1191947 - RNA, 19 nt, Artificial Sequence
  Description of Artificial Sequence: Synthetic oligonucleotide
cugggaugucagcaacaaa

SEQ ID NO: 1191948 - RNA, 19 nt, Artificial Sequence
  Description of Artificial Sequence: Synthetic oligonucleotide
uugucgugcugggccucca

SEQ ID NO: 1191949 - RNA, 19 nt, Artificial Sequence
  Description of Artificial Sequence: Synthetic oligonucleotide
gggcagaaccauggcauga

SEQ ID NO: 1191950 - RNA, 19 nt, Artificial Sequence
  Description of Artificial Sequence: Synthetic oligonucleotide
caugcuuguccagcugucu

SEQ ID NO: 1191951 - RNA, 19 nt, Artificial Sequence
  Description of Artificial Sequence: Synthetic oligonucleotide
ggugcaguuggcgcucgga

SEQ ID NO: 1191952 - RNA, 19 nt, Artificial Sequence
  Description of Artificial Sequence: Synthetic oligonucleotide
cugcuccgcacagacacua

SEQ ID NO: 1191953 - RNA, 19 nt, Artificial Sequence
  Description of Artificial Sequence: Synthetic oligonucleotide
cuggguaacugggcucgca

SEQ ID NO: 1191954 - RNA, 19 nt, Artificial Sequence
  Description of Artificial Sequence: Synthetic oligonucleotide
agacacuagugcagacauu

SEQ ID NO: 1191955 - RNA, 19 nt, Artificial Sequence
  Description of Artificial Sequence: Synthetic oligonucleotide
aucccguucuuuagucauu

SEQ ID NO: 1191956 - RNA, 19 nt, Artificial Sequence
  Description of Artificial Sequence: Synthetic oligonucleotide
gcuaacgugcagcacucuu

SEQ ID NO: 1191957 - RNA, 19 nt, Artificial Sequence
  Description of Artificial Sequence: Synthetic oligonucleotide
cccguguauacucuagagu

SEQ ID NO: 1191958 - RNA, 19 nt, Artificial Sequence
  Description of Artificial Sequence: Synthetic oligonucleotide
ccagcuucuuggcuaacgu

SEQ ID NO: 1191959 - RNA, 19 nt, Artificial Sequence
  Description of Artificial Sequence: Synthetic oligonucleotide
gcuccgcacagacacuagu

SEQ ID NO: 1191960 - RNA, 19 nt, Artificial Sequence
  Description of Artificial Sequence: Synthetic oligonucleotide
ccaacuagcccaagccagu

SEQ ID NO: 1191961 - RNA, 19 nt, Artificial Sequence
  Description of Artificial Sequence: Synthetic oligonucleotide
cuccagcuucuuggcuaac

SEQ ID NO: 1191962 - RNA, 19 nt, Artificial Sequence
  Description of Artificial Sequence: Synthetic oligonucleotide
ccucggucaucugcacagc

SEQ ID NO: 1191963 - RNA, 19 nt, Artificial Sequence
  Description of Artificial Sequence: Synthetic oligonucleotide
ccaguagccagaagagaau

SEQ ID NO: 1191964 - RNA, 19 nt, Artificial Sequence
  Description of Artificial Sequence: Synthetic oligonucleotide
gcuuugucagaaacguauu

SEQ ID NO: 1191965 - RNA, 19 nt, Artificial Sequence
  Description of Artificial Sequence: Synthetic oligonucleotide
gcuaugggucugggaaaga

SEQ ID NO: 1191966 - RNA, 19 nt, Artificial Sequence
  Description of Artificial Sequence: Synthetic oligonucleotide
caacuagcccaagccaguu

SEQ ID NO: 1191967 - RNA, 19 nt, Artificial Sequence
  Description of Artificial Sequence: Synthetic oligonucleotide
ccaauucaucauuucucuu

SEQ ID NO: 1191968 - RNA, 19 nt, Artificial Sequence
  Description of Artificial Sequence: Synthetic oligonucleotide
gcucgcagacgguccaccu

SEQ ID NO: 1191969 - RNA, 19 nt, Artificial Sequence
  Description of Artificial Sequence: Synthetic oligonucleotide
cguugcuaugggucuggga

SEQ ID NO: 1191970 - RNA, 19 nt, Artificial Sequence
  Description of Artificial Sequence: Synthetic oligonucleotide
ccuggauaugcacguugcu

SEQ ID NO: 1191971 - RNA, 19 nt, Artificial Sequence
  Description of Artificial Sequence: Synthetic oligonucleotide
cucucccgugcuggaugca

SEQ ID NO: 1191972 - RNA, 19 nt, Artificial Sequence
  Description of Artificial Sequence: Synthetic oligonucleotide
cuugggccuuugcuucauu

SEQ ID NO: 1191973 - RNA, 19 nt, Artificial Sequence
  Description of Artificial Sequence: Synthetic oligonucleotide
ggcuaacgugcagcacucu

SEQ ID NO: 1191974 - RNA, 19 nt, Artificial Sequence
  Description of Artificial Sequence: Synthetic oligonucleotide
gcgcucggauucgcccagc

SEQ ID NO: 1191975 - RNA, 19 nt, Artificial Sequence
  Description of Artificial Sequence: Synthetic oligonucleotide
cgcucggauucgcccagca

SEQ ID NO: 1191976 - RNA, 19 nt, Artificial Sequence
  Description of Artificial Sequence: Synthetic oligonucleotide
cccguucuuuagucauugu

SEQ ID NO: 1191977 - RNA, 19 nt, Artificial Sequence
  Description of Artificial Sequence: Synthetic oligonucleotide
gcugcuccgcacagacacu

SEQ ID NO: 1191978 - RNA, 19 nt, Artificial Sequence
  Description of Artificial Sequence: Synthetic oligonucleotide
cgcucaguucuagucucaa

SEQ ID NO: 1191979 - RNA, 19 nt, Artificial Sequence
  Description of Artificial Sequence: Synthetic oligonucleotide
gcuugggccuuugcuucau

SEQ ID NO: 1191980 - RNA, 19 nt, Artificial Sequence
  Description of Artificial Sequence: Synthetic oligonucleotide
cggauucgcccagcagcuc

SEQ ID NO: 1191981 - RNA, 19 nt, Artificial Sequence
  Description of Artificial Sequence: Synthetic oligonucleotide
cccgugcuggaugcacugu

SEQ ID NO: 1191982 - RNA, 19 nt, Artificial Sequence
  Description of Artificial Sequence: Synthetic oligonucleotide
agaacuauggcccuuuucc

SEQ ID NO: 1191983 - RNA, 19 nt, Artificial Sequence
  Description of Artificial Sequence: Synthetic oligonucleotide
aacgaaugaguccuaagac

SEQ ID NO: 1191984 - RNA, 19 nt, Artificial Sequence
  Description of Artificial Sequence: Synthetic oligonucleotide
gauaaucugaaucaguaug

SEQ ID NO: 1191985 - RNA, 19 nt, Artificial Sequence
  Description of Artificial Sequence: Synthetic oligonucleotide
aacucuagaacguacgcag

SEQ ID NO: 1191986 - RNA, 19 nt, Artificial Sequence
  Description of Artificial Sequence: Synthetic oligonucleotide
uacuuaaacagccuuaaac

SEQ ID NO: 1191987 - RNA, 19 nt, Artificial Sequence
  Description of Artificial Sequence: Synthetic oligonucleotide
aucaagagaacuauggccc

SEQ ID NO: 1191988 - RNA, 19 nt, Artificial Sequence
  Description of Artificial Sequence: Synthetic oligonucleotide
ugcccuaugaaccacaaca

SEQ ID NO: 1191989 - RNA, 19 nt, Artificial Sequence
  Description of Artificial Sequence: Synthetic oligonucleotide
aaagccaucaguaauagaa

SEQ ID NO: 1191990 - RNA, 19 nt, Artificial Sequence
  Description of Artificial Sequence: Synthetic oligonucleotide
aaacgaaugaguccuaaga

SEQ ID NO: 1191991 - RNA, 19 nt, Artificial Sequence
  Description of Artificial Sequence: Synthetic oligonucleotide
uguaaugggagauaaucug

SEQ ID NO: 1191992 - RNA, 19 nt, Artificial Sequence
  Description of Artificial Sequence: Synthetic oligonucleotide
aucaguauggaacaguuga

SEQ ID NO: 1191993 - RNA, 19 nt, Artificial Sequence
  Description of Artificial Sequence: Synthetic oligonucleotide
uccuaagacuuucuaaagg

SEQ ID NO: 1191994 - RNA, 19 nt, Artificial Sequence
  Description of Artificial Sequence: Synthetic oligonucleotide
agaaagacaaggugagggc

SEQ ID NO: 1191995 - RNA, 19 nt, Artificial Sequence
  Description of Artificial Sequence: Synthetic oligonucleotide
caacugucaaacaagaaac

SEQ ID NO: 1191996 - RNA, 19 nt, Artificial Sequence
  Description of Artificial Sequence: Synthetic oligonucleotide
uuuucuacaacugacugcu

SEQ ID NO: 1191997 - RNA, 19 nt, Artificial Sequence
  Description of Artificial Sequence: Synthetic oligonucleotide
aaaggauggaccucgauua

SEQ ID NO: 1191998 - RNA, 19 nt, Artificial Sequence
  Description of Artificial Sequence: Synthetic oligonucleotide
uucaauacccacaauaauu

SEQ ID NO: 1191999 - RNA, 19 nt, Artificial Sequence
  Description of Artificial Sequence: Synthetic oligonucleotide
cagcuaaccaaauaaacag

SEQ ID NO: 1192000 - RNA, 19 nt, Artificial Sequence
  Description of Artificial Sequence: Synthetic oligonucleotide
aaaacgugagucccgccac

SEQ ID NO: 1192001 - RNA, 19 nt, Artificial Sequence
  Description of Artificial Sequence: Synthetic oligonucleotide
uuuaauugugaccagcuuu

SEQ ID NO: 1192002 - RNA, 19 nt, Artificial Sequence
  Description of Artificial Sequence: Synthetic oligonucleotide
ugguuuuaauuucuauugg

SEQ ID NO: 1192003 - RNA, 19 nt, Artificial Sequence
  Description of Artificial Sequence: Synthetic oligonucleotide
aggaauauggaacuugaug

SEQ ID NO: 1192004 - RNA, 19 nt, Artificial Sequence
  Description of Artificial Sequence: Synthetic oligonucleotide
acuuucuaaaggauggacc

SEQ ID NO: 1192005 - RNA, 19 nt, Artificial Sequence
  Description of Artificial Sequence: Synthetic oligonucleotide
ucauauuugauccucucua

SEQ ID NO: 1192006 - RNA, 19 nt, Artificial Sequence
  Description of Artificial Sequence: Synthetic oligonucleotide
agaaaagccaccuagucuu

SEQ ID NO: 1192007 - RNA, 19 nt, Artificial Sequence
  Description of Artificial Sequence: Synthetic oligonucleotide
uucuaaaggauggaccucg

SEQ ID NO: 1192008 - RNA, 19 nt, Artificial Sequence
  Description of Artificial Sequence: Synthetic oligonucleotide
ucaauacccacaauaauuu

SEQ ID NO: 1192009 - RNA, 19 nt, Artificial Sequence
  Description of Artificial Sequence: Synthetic oligonucleotide
auuugauccucucuauuag

SEQ ID NO: 1192010 - RNA, 19 nt, Artificial Sequence
  Description of Artificial Sequence: Synthetic oligonucleotide
guauuuguaguagaagccg

SEQ ID NO: 1192011 - RNA, 19 nt, Artificial Sequence
  Description of Artificial Sequence: Synthetic oligonucleotide
ugauguuuuagcgaaaguc

SEQ ID NO: 1192012 - RNA, 19 nt, Artificial Sequence
  Description of Artificial Sequence: Synthetic oligonucleotide
uuguaaugggagauaaucu

SEQ ID NO: 1192013 - RNA, 19 nt, Artificial Sequence
  Description of Artificial Sequence: Synthetic oligonucleotide
agaacaaaccagcuaacca

SEQ ID NO: 1192014 - RNA, 19 nt, Artificial Sequence
  Description of Artificial Sequence: Synthetic oligonucleotide
uaccaaaggaaguacugag

SEQ ID NO: 1192015 - RNA, 19 nt, Artificial Sequence
  Description of Artificial Sequence: Synthetic oligonucleotide
aaaauggacgugugaagga

SEQ ID NO: 1192016 - RNA, 19 nt, Artificial Sequence
  Description of Artificial Sequence: Synthetic oligonucleotide
gauguuuuagcgaaaguca

SEQ ID NO: 1192017 - RNA, 19 nt, Artificial Sequence
  Description of Artificial Sequence: Synthetic oligonucleotide
uuaaagguucaugugaggu

SEQ ID NO: 1192018 - RNA, 19 nt, Artificial Sequence
  Description of Artificial Sequence: Synthetic oligonucleotide
cuuguaaugggagauaauc

SEQ ID NO: 1192019 - RNA, 19 nt, Artificial Sequence
  Description of Artificial Sequence: Synthetic oligonucleotide
auuauuggguccccuuuac

SEQ ID NO: 1192020 - RNA, 19 nt, Artificial Sequence
  Description of Artificial Sequence: Synthetic oligonucleotide
cucaucaaacgaaugaguc

SEQ ID NO: 1192021 - RNA, 19 nt, Artificial Sequence
  Description of Artificial Sequence: Synthetic oligonucleotide
acgcuagucauauuugauc

SEQ ID NO: 1192022 - RNA, 19 nt, Artificial Sequence
  Description of Artificial Sequence: Synthetic oligonucleotide
ucuucuaguuucaucggcu

SEQ ID NO: 1192023 - RNA, 19 nt, Artificial Sequence
  Description of Artificial Sequence: Synthetic oligonucleotide
aggagucagccauaaggcc

SEQ ID NO: 1192024 - RNA, 19 nt, Artificial Sequence
  Description of Artificial Sequence: Synthetic oligonucleotide
uguuaaguuacaagcuagu

SEQ ID NO: 1192025 - RNA, 19 nt, Artificial Sequence
  Description of Artificial Sequence: Synthetic oligonucleotide
cuagucuucuugcuaaggc

SEQ ID NO: 1192026 - RNA, 19 nt, Artificial Sequence
  Description of Artificial Sequence: Synthetic oligonucleotide
uacuuuaggaacucuguaa

SEQ ID NO: 1192027 - RNA, 19 nt, Artificial Sequence
  Description of Artificial Sequence: Synthetic oligonucleotide
auaugugaacauguuguac

SEQ ID NO: 1192028 - RNA, 19 nt, Artificial Sequence
  Description of Artificial Sequence: Synthetic oligonucleotide
auggaccucgauuauuggg

SEQ ID NO: 1192029 - RNA, 19 nt, Artificial Sequence
  Description of Artificial Sequence: Synthetic oligonucleotide
uauggaacaguugaucaga

SEQ ID NO: 1192030 - RNA, 19 nt, Artificial Sequence
  Description of Artificial Sequence: Synthetic oligonucleotide
accagcuuuauaugugaac

SEQ ID NO: 1192031 - RNA, 19 nt, Artificial Sequence
  Description of Artificial Sequence: Synthetic oligonucleotide
acuuuaggaacucuguaaa

SEQ ID NO: 1192032 - RNA, 19 nt, Artificial Sequence
  Description of Artificial Sequence: Synthetic oligonucleotide
gaacaagggaacuuuucac

SEQ ID NO: 1192033 - RNA, 19 nt, Artificial Sequence
  Description of Artificial Sequence: Synthetic oligonucleotide
guuuuagcgaaagucacug

SEQ ID NO: 1192034 - RNA, 19 nt, Artificial Sequence
  Description of Artificial Sequence: Synthetic oligonucleotide
acgaaugaguccuaagacu

SEQ ID NO: 1192035 - RNA, 19 nt, Artificial Sequence
  Description of Artificial Sequence: Synthetic oligonucleotide
uagacguugggcgugagca

SEQ ID NO: 1192036 - RNA, 19 nt, Artificial Sequence
  Description of Artificial Sequence: Synthetic oligonucleotide
uugaaacucuagaacguac

SEQ ID NO: 1192037 - RNA, 19 nt, Artificial Sequence
  Description of Artificial Sequence: Synthetic oligonucleotide
gaaguagggagagaaguug

SEQ ID NO: 1192038 - RNA, 19 nt, Artificial Sequence
  Description of Artificial Sequence: Synthetic oligonucleotide
aagggaacuuuucaccaga

SEQ ID NO: 1192039 - RNA, 19 nt, Artificial Sequence
  Description of Artificial Sequence: Synthetic oligonucleotide
ggaauauggaacuugaugu

SEQ ID NO: 1192040 - RNA, 19 nt, Artificial Sequence
  Description of Artificial Sequence: Synthetic oligonucleotide
uauuggguccccuuuacau

SEQ ID NO: 1192041 - RNA, 19 nt, Artificial Sequence
  Description of Artificial Sequence: Synthetic oligonucleotide
uagugaggaauauggaacu

SEQ ID NO: 1192042 - RNA, 19 nt, Artificial Sequence
  Description of Artificial Sequence: Synthetic oligonucleotide
uguuuuagcgaaagucacu

SEQ ID NO: 1192043 - RNA, 19 nt, Artificial Sequence
  Description of Artificial Sequence: Synthetic oligonucleotide
uaaugggagauaaucugaa

SEQ ID NO: 1192044 - RNA, 19 nt, Artificial Sequence
  Description of Artificial Sequence: Synthetic oligonucleotide
agccacuacuuaaacagcc

SEQ ID NO: 1192045 - RNA, 19 nt, Artificial Sequence
  Description of Artificial Sequence: Synthetic oligonucleotide
cucccaaccguauuuguag

SEQ ID NO: 1192046 - RNA, 19 nt, Artificial Sequence
  Description of Artificial Sequence: Synthetic oligonucleotide
accagcuaaccaaauaaac

SEQ ID NO: 1192047 - RNA, 19 nt, Artificial Sequence
  Description of Artificial Sequence: Synthetic oligonucleotide
aguuacaagcuagugagga

SEQ ID NO: 1192048 - RNA, 19 nt, Artificial Sequence
  Description of Artificial Sequence: Synthetic oligonucleotide
guauggaacaguugaucag

SEQ ID NO: 1192049 - RNA, 19 nt, Artificial Sequence
  Description of Artificial Sequence: Synthetic oligonucleotide
ucuauuaggugccgguccu

SEQ ID NO: 1192050 - RNA, 19 nt, Artificial Sequence
  Description of Artificial Sequence: Synthetic oligonucleotide
aacacugcuaggaaacaug

SEQ ID NO: 1192051 - RNA, 19 nt, Artificial Sequence
  Description of Artificial Sequence: Synthetic oligonucleotide
caggagauccagaacacac

SEQ ID NO: 1192052 - RNA, 19 nt, Artificial Sequence
  Description of Artificial Sequence: Synthetic oligonucleotide
aauauggaacuugauguuu

SEQ ID NO: 1192053 - RNA, 19 nt, Artificial Sequence
  Description of Artificial Sequence: Synthetic oligonucleotide
acaaugagcuguuaaguua

SEQ ID NO: 1192054 - RNA, 19 nt, Artificial Sequence
  Description of Artificial Sequence: Synthetic oligonucleotide
cuuaaacagccuuaaacaa

SEQ ID NO: 1192055 - RNA, 19 nt, Artificial Sequence
  Description of Artificial Sequence: Synthetic oligonucleotide
aaacgugagucccgccacg

SEQ ID NO: 1192056 - RNA, 19 nt, Artificial Sequence
  Description of Artificial Sequence: Synthetic oligonucleotide
guuucaucggcucuucaac

SEQ ID NO: 1192057 - RNA, 19 nt, Artificial Sequence
  Description of Artificial Sequence: Synthetic oligonucleotide
aagccacuacuuaaacagc

SEQ ID NO: 1192058 - RNA, 19 nt, Artificial Sequence
  Description of Artificial Sequence: Synthetic oligonucleotide
aacuauggcccuuuuccaa

SEQ ID NO: 1192059 - RNA, 19 nt, Artificial Sequence
  Description of Artificial Sequence: Synthetic oligonucleotide
acggcuacgaagagcagcc

SEQ ID NO: 1192060 - RNA, 19 nt, Artificial Sequence
  Description of Artificial Sequence: Synthetic oligonucleotide
cuucucaucaaacgaauga

SEQ ID NO: 1192061 - RNA, 19 nt, Artificial Sequence
  Description of Artificial Sequence: Synthetic oligonucleotide
aggaacaaacacugcuagg

SEQ ID NO: 1192062 - RNA, 19 nt, Artificial Sequence
  Description of Artificial Sequence: Synthetic oligonucleotide
acaaggugagggcggaagg

SEQ ID NO: 1192063 - RNA, 19 nt, Artificial Sequence
  Description of Artificial Sequence: Synthetic oligonucleotide
cucuauuaggugccggucc

SEQ ID NO: 1192064 - RNA, 19 nt, Artificial Sequence
  Description of Artificial Sequence: Synthetic oligonucleotide
agauccagaacacacgcua

SEQ ID NO: 1192065 - RNA, 19 nt, Artificial Sequence
  Description of Artificial Sequence: Synthetic oligonucleotide
uuacaagcuagugaggaau

SEQ ID NO: 1192066 - RNA, 19 nt, Artificial Sequence
  Description of Artificial Sequence: Synthetic oligonucleotide
agcaaagaaaagccaucag

SEQ ID NO: 1192067 - RNA, 19 nt, Artificial Sequence
  Description of Artificial Sequence: Synthetic oligonucleotide
gagggcggaagguacaaug

SEQ ID NO: 1192068 - RNA, 19 nt, Artificial Sequence
  Description of Artificial Sequence: Synthetic oligonucleotide
uuucaucggcucuucaacu

SEQ ID NO: 1192069 - RNA, 19 nt, Artificial Sequence
  Description of Artificial Sequence: Synthetic oligonucleotide
uuagcgaaagucacuguuu

SEQ ID NO: 1192070 - RNA, 19 nt, Artificial Sequence
  Description of Artificial Sequence: Synthetic oligonucleotide
uagaacguacgcaggaguc

SEQ ID NO: 1192071 - RNA, 19 nt, Artificial Sequence
  Description of Artificial Sequence: Synthetic oligonucleotide
aaugggagauaaucugaau

SEQ ID NO: 1192072 - RNA, 19 nt, Artificial Sequence
  Description of Artificial Sequence: Synthetic oligonucleotide
guuaaguuacaagcuagug

SEQ ID NO: 1192073 - RNA, 19 nt, Artificial Sequence
  Description of Artificial Sequence: Synthetic oligonucleotide
gagauaaucugaaucagua

SEQ ID NO: 1192074 - RNA, 19 nt, Artificial Sequence
  Description of Artificial Sequence: Synthetic oligonucleotide
uucuacaacugacugcuuu

SEQ ID NO: 1192075 - RNA, 19 nt, Artificial Sequence
  Description of Artificial Sequence: Synthetic oligonucleotide
acaacaucaagagaacuau

SEQ ID NO: 1192076 - RNA, 19 nt, Artificial Sequence
  Description of Artificial Sequence: Synthetic oligonucleotide
ucuagaacguacgcaggag

SEQ ID NO: 1192077 - RNA, 19 nt, Artificial Sequence
  Description of Artificial Sequence: Synthetic oligonucleotide
uugcuaaggccaaauccca

SEQ ID NO: 1192078 - RNA, 19 nt, Artificial Sequence
  Description of Artificial Sequence: Synthetic oligonucleotide
uuuuaauugugaccagcuu

SEQ ID NO: 1192079 - RNA, 19 nt, Artificial Sequence
  Description of Artificial Sequence: Synthetic oligonucleotide
agcuuuauaugugaacaug

SEQ ID NO: 1192080 - RNA, 19 nt, Artificial Sequence
  Description of Artificial Sequence: Synthetic oligonucleotide
agcucgcugagguagacgu

SEQ ID NO: 1192081 - RNA, 19 nt, Artificial Sequence
  Description of Artificial Sequence: Synthetic oligonucleotide
acacacgcuagucauauuu

SEQ ID NO: 1192082 - RNA, 19 nt, Artificial Sequence
  Description of Artificial Sequence: Synthetic oligonucleotide
cagagugcgguccuggaag

SEQ ID NO: 1192083 - RNA, 19 nt, Artificial Sequence
  Description of Artificial Sequence: Synthetic oligonucleotide
agauaaucugaaucaguau

SEQ ID NO: 1192084 - RNA, 19 nt, Artificial Sequence
  Description of Artificial Sequence: Synthetic oligonucleotide
acguacgcaggagucagcc

SEQ ID NO: 1192085 - RNA, 19 nt, Artificial Sequence
  Description of Artificial Sequence: Synthetic oligonucleotide
uggcgguacacuguaacag

SEQ ID NO: 1192086 - RNA, 19 nt, Artificial Sequence
  Description of Artificial Sequence: Synthetic oligonucleotide
guccuaagacuuucuaaag

SEQ ID NO: 1192087 - RNA, 19 nt, Artificial Sequence
  Description of Artificial Sequence: Synthetic oligonucleotide
uuagaauguucagggagga

SEQ ID NO: 1192088 - RNA, 19 nt, Artificial Sequence
  Description of Artificial Sequence: Synthetic oligonucleotide
cuuucuaaaggauggaccu

SEQ ID NO: 1192089 - RNA, 19 nt, Artificial Sequence
  Description of Artificial Sequence: Synthetic oligonucleotide
aaauaaacaggaagguguu

SEQ ID NO: 1192090 - RNA, 19 nt, Artificial Sequence
  Description of Artificial Sequence: Synthetic oligonucleotide
guaauuggaaagccacuac

SEQ ID NO: 1192091 - RNA, 19 nt, Artificial Sequence
  Description of Artificial Sequence: Synthetic oligonucleotide
uaaucugaaucaguaugga

SEQ ID NO: 1192092 - RNA, 19 nt, Artificial Sequence
  Description of Artificial Sequence: Synthetic oligonucleotide
aacaguugaucagaagaaa

SEQ ID NO: 1192093 - RNA, 19 nt, Artificial Sequence
  Description of Artificial Sequence: Synthetic oligonucleotide
caaacgaaugaguccuaag

SEQ ID NO: 1192094 - RNA, 19 nt, Artificial Sequence
  Description of Artificial Sequence: Synthetic oligonucleotide
aacacgugguaguccacgu

SEQ ID NO: 1192095 - RNA, 19 nt, Artificial Sequence
  Description of Artificial Sequence: Synthetic oligonucleotide
cugcuaggaaacaugucug

SEQ ID NO: 1192096 - RNA, 19 nt, Artificial Sequence
  Description of Artificial Sequence: Synthetic oligonucleotide
ucuacaacugacugcuuuu

SEQ ID NO: 1192097 - RNA, 19 nt, Artificial Sequence
  Description of Artificial Sequence: Synthetic oligonucleotide
uggaacaagggaacuuuuc

SEQ ID NO: 1192098 - RNA, 19 nt, Artificial Sequence
  Description of Artificial Sequence: Synthetic oligonucleotide
uuauuggguccccuuuaca

SEQ ID NO: 1192099 - RNA, 19 nt, Artificial Sequence
  Description of Artificial Sequence: Synthetic oligonucleotide
cugagaggugcaaacuuug

SEQ ID NO: 1192100 - RNA, 19 nt, Artificial Sequence
  Description of Artificial Sequence: Synthetic oligonucleotide
uugauguuuuagcgaaagu

SEQ ID NO: 1192101 - RNA, 19 nt, Artificial Sequence
  Description of Artificial Sequence: Synthetic oligonucleotide
cuguaaauucucacagcug

SEQ ID NO: 1192102 - RNA, 19 nt, Artificial Sequence
  Description of Artificial Sequence: Synthetic oligonucleotide
aaacucccaaccguauuug

SEQ ID NO: 1192103 - RNA, 19 nt, Artificial Sequence
  Description of Artificial Sequence: Synthetic oligonucleotide
ucaucggcucuucaacugu

SEQ ID NO: 1192104 - RNA, 19 nt, Artificial Sequence
  Description of Artificial Sequence: Synthetic oligonucleotide
ugauagaaguaggugugcu

SEQ ID NO: 1192105 - RNA, 19 nt, Artificial Sequence
  Description of Artificial Sequence: Synthetic oligonucleotide
gaacguacgcaggagucag

SEQ ID NO: 1192106 - RNA, 19 nt, Artificial Sequence
  Description of Artificial Sequence: Synthetic oligonucleotide
aaucaguauggaacaguug

SEQ ID NO: 1192107 - RNA, 19 nt, Artificial Sequence
  Description of Artificial Sequence: Synthetic oligonucleotide
cuagucauauuugauccuc

SEQ ID NO: 1192108 - RNA, 19 nt, Artificial Sequence
  Description of Artificial Sequence: Synthetic oligonucleotide
uaccgcaccagcagagugc

SEQ ID NO: 1192109 - RNA, 19 nt, Artificial Sequence
  Description of Artificial Sequence: Synthetic oligonucleotide
cagccuuaaacaaugagcu

SEQ ID NO: 1192110 - RNA, 19 nt, Artificial Sequence
  Description of Artificial Sequence: Synthetic oligonucleotide
aaguagggagagaaguugu

SEQ ID NO: 1192111 - RNA, 19 nt, Artificial Sequence
  Description of Artificial Sequence: Synthetic oligonucleotide
acuacuuaaacagccuuaa

SEQ ID NO: 1192112 - RNA, 19 nt, Artificial Sequence
  Description of Artificial Sequence: Synthetic oligonucleotide
agcgaaagucacuguuuuc

SEQ ID NO: 1192113 - RNA, 19 nt, Artificial Sequence
  Description of Artificial Sequence: Synthetic oligonucleotide
uccacgucgguguaccgca

SEQ ID NO: 1192114 - RNA, 19 nt, Artificial Sequence
  Description of Artificial Sequence: Synthetic oligonucleotide
ugcuaggaaacaugucugu

SEQ ID NO: 1192115 - RNA, 19 nt, Artificial Sequence
  Description of Artificial Sequence: Synthetic oligonucleotide
uacguggcccucagguacg

SEQ ID NO: 1192116 - RNA, 19 nt, Artificial Sequence
  Description of Artificial Sequence: Synthetic oligonucleotide
aggaggucgcagcugauga

SEQ ID NO: 1192117 - RNA, 19 nt, Artificial Sequence
  Description of Artificial Sequence: Synthetic oligonucleotide
uccgugaacacgugguagu

SEQ ID NO: 1192118 - RNA, 19 nt, Artificial Sequence
  Description of Artificial Sequence: Synthetic oligonucleotide
gaacaguugaucagaagaa

SEQ ID NO: 1192119 - RNA, 19 nt, Artificial Sequence
  Description of Artificial Sequence: Synthetic oligonucleotide
guacguggcccucagguac

SEQ ID NO: 1192120 - RNA, 19 nt, Artificial Sequence
  Description of Artificial Sequence: Synthetic oligonucleotide
aacgugagucccgccacgg

SEQ ID NO: 1192121 - RNA, 19 nt, Artificial Sequence
  Description of Artificial Sequence: Synthetic oligonucleotide
acacgcuagucauauuuga

SEQ ID NO: 1192122 - RNA, 19 nt, Artificial Sequence
  Description of Artificial Sequence: Synthetic oligonucleotide
auggacgugugaaggaaac

SEQ ID NO: 1192123 - RNA, 19 nt, Artificial Sequence
  Description of Artificial Sequence: Synthetic oligonucleotide
gugaacacgugguagucca

SEQ ID NO: 1192124 - RNA, 19 nt, Artificial Sequence
  Description of Artificial Sequence: Synthetic oligonucleotide
guaaugggagauaaucuga

SEQ ID NO: 1192125 - RNA, 19 nt, Artificial Sequence
  Description of Artificial Sequence: Synthetic oligonucleotide
aaccuuuacuucucaucaa

SEQ ID NO: 1192126 - RNA, 19 nt, Artificial Sequence
  Description of Artificial Sequence: Synthetic oligonucleotide
gaaugcggcaagccccagg

SEQ ID NO: 1192127 - RNA, 19 nt, Artificial Sequence
  Description of Artificial Sequence: Synthetic oligonucleotide
gaguccuaagacuuucuaa

SEQ ID NO: 1192128 - RNA, 19 nt, Artificial Sequence
  Description of Artificial Sequence: Synthetic oligonucleotide
gccguagaagaccagcgcg

SEQ ID NO: 1192129 - RNA, 19 nt, Artificial Sequence
  Description of Artificial Sequence: Synthetic oligonucleotide
cuuuuaauugugaccagcu

SEQ ID NO: 1192130 - RNA, 19 nt, Artificial Sequence
  Description of Artificial Sequence: Synthetic oligonucleotide
auauuugauccucucuauu

SEQ ID NO: 1192131 - RNA, 19 nt, Artificial Sequence
  Description of Artificial Sequence: Synthetic oligonucleotide
cacacgcuagucauauuug

SEQ ID NO: 1192132 - RNA, 19 nt, Artificial Sequence
  Description of Artificial Sequence: Synthetic oligonucleotide
uuuuagcgaaagucacugu

SEQ ID NO: 1192133 - RNA, 19 nt, Artificial Sequence
  Description of Artificial Sequence: Synthetic oligonucleotide
acgccgaacacgccggccg

SEQ ID NO: 1192134 - RNA, 19 nt, Artificial Sequence
  Description of Artificial Sequence: Synthetic oligonucleotide
uacaagcuagugaggaaua

SEQ ID NO: 1192135 - RNA, 19 nt, Artificial Sequence
  Description of Artificial Sequence: Synthetic oligonucleotide
uauggcccuuuuccaaggc

SEQ ID NO: 1192136 - RNA, 19 nt, Artificial Sequence
  Description of Artificial Sequence: Synthetic oligonucleotide
acgugugaaggaaacagca

SEQ ID NO: 1192137 - RNA, 19 nt, Artificial Sequence
  Description of Artificial Sequence: Synthetic oligonucleotide
agguacaauggcgguacac

SEQ ID NO: 1192138 - RNA, 19 nt, Artificial Sequence
  Description of Artificial Sequence: Synthetic oligonucleotide
aagaccagcgcgacccggg

SEQ ID NO: 1192139 - RNA, 19 nt, Artificial Sequence
  Description of Artificial Sequence: Synthetic oligonucleotide
ggcgguacacuguaacagg

SEQ ID NO: 1192140 - RNA, 19 nt, Artificial Sequence
  Description of Artificial Sequence: Synthetic oligonucleotide
agaguccuuagaauguuca

SEQ ID NO: 1192141 - RNA, 19 nt, Artificial Sequence
  Description of Artificial Sequence: Synthetic oligonucleotide
agccuuaaacaaugagcug

SEQ ID NO: 1192142 - RNA, 19 nt, Artificial Sequence
  Description of Artificial Sequence: Synthetic oligonucleotide
acaauggcgguacacugua

SEQ ID NO: 1192143 - RNA, 19 nt, Artificial Sequence
  Description of Artificial Sequence: Synthetic oligonucleotide
guagccgcaggcccggcgg

SEQ ID NO: 1192144 - RNA, 19 nt, Artificial Sequence
  Description of Artificial Sequence: Synthetic oligonucleotide
aaccagcuaaccaaauaaa

SEQ ID NO: 1192145 - RNA, 19 nt, Artificial Sequence
  Description of Artificial Sequence: Synthetic oligonucleotide
agaaaccuuuacuucucau

SEQ ID NO: 1192146 - RNA, 19 nt, Artificial Sequence
  Description of Artificial Sequence: Synthetic oligonucleotide
gacgccguagaagaccagc

SEQ ID NO: 1192147 - RNA, 19 nt, Artificial Sequence
  Description of Artificial Sequence: Synthetic oligonucleotide
uauuggaacaagggaacuu

SEQ ID NO: 1192148 - RNA, 19 nt, Artificial Sequence
  Description of Artificial Sequence: Synthetic oligonucleotide
uguagcgguacguggcccu

SEQ ID NO: 1192149 - RNA, 19 nt, Artificial Sequence
  Description of Artificial Sequence: Synthetic oligonucleotide
acacgugguaguccacguc

SEQ ID NO: 1192150 - RNA, 19 nt, Artificial Sequence
  Description of Artificial Sequence: Synthetic oligonucleotide
gcuaaccaaauaaacagga

SEQ ID NO: 1192151 - RNA, 19 nt, Artificial Sequence
  Description of Artificial Sequence: Synthetic oligonucleotide
aaccguauuuguaguagaa

SEQ ID NO: 1192152 - RNA, 19 nt, Artificial Sequence
  Description of Artificial Sequence: Synthetic oligonucleotide
auuggguccccuuuacauu

SEQ ID NO: 1192153 - RNA, 19 nt, Artificial Sequence
  Description of Artificial Sequence: Synthetic oligonucleotide
agggcggaagguacaaugg

SEQ ID NO: 1192154 - RNA, 19 nt, Artificial Sequence
  Description of Artificial Sequence: Synthetic oligonucleotide
uaguccacgucgguguacc

SEQ ID NO: 1192155 - RNA, 19 nt, Artificial Sequence
  Description of Artificial Sequence: Synthetic oligonucleotide
gaagaggaacuugccgaag

SEQ ID NO: 1192156 - RNA, 19 nt, Artificial Sequence
  Description of Artificial Sequence: Synthetic oligonucleotide
gaacuguggcaggaaugcg

SEQ ID NO: 1192157 - RNA, 19 nt, Artificial Sequence
  Description of Artificial Sequence: Synthetic oligonucleotide
aacguacgcaggagucagc

SEQ ID NO: 1192158 - RNA, 19 nt, Artificial Sequence
  Description of Artificial Sequence: Synthetic oligonucleotide
gagguaccaaaggaaguac

SEQ ID NO: 1192159 - RNA, 19 nt, Artificial Sequence
  Description of Artificial Sequence: Synthetic oligonucleotide
agaaacucccaaccguauu

SEQ ID NO: 1192160 - RNA, 19 nt, Artificial Sequence
  Description of Artificial Sequence: Synthetic oligonucleotide
uuucuaaaggauggaccuc

SEQ ID NO: 1192161 - RNA, 19 nt, Artificial Sequence
  Description of Artificial Sequence: Synthetic oligonucleotide
gucgguguaccgcaccagc

SEQ ID NO: 1192162 - RNA, 19 nt, Artificial Sequence
  Description of Artificial Sequence: Synthetic oligonucleotide
ggauggaccucgauuauug

SEQ ID NO: 1192163 - RNA, 19 nt, Artificial Sequence
  Description of Artificial Sequence: Synthetic oligonucleotide
aaggccaacacugguuuua

SEQ ID NO: 1192164 - RNA, 19 nt, Artificial Sequence
  Description of Artificial Sequence: Synthetic oligonucleotide
cucagguacggggagcgcc

SEQ ID NO: 1192165 - RNA, 19 nt, Artificial Sequence
  Description of Artificial Sequence: Synthetic oligonucleotide
aauggacgugugaaggaaa

SEQ ID NO: 1192166 - RNA, 19 nt, Artificial Sequence
  Description of Artificial Sequence: Synthetic oligonucleotide
gacgcaguagccgcaggcc

SEQ ID NO: 1192167 - RNA, 19 nt, Artificial Sequence
  Description of Artificial Sequence: Synthetic oligonucleotide
aagacaaggugagggcgga

SEQ ID NO: 1192168 - RNA, 19 nt, Artificial Sequence
  Description of Artificial Sequence: Synthetic oligonucleotide
guaccgcaccagcagagug

SEQ ID NO: 1192169 - RNA, 19 nt, Artificial Sequence
  Description of Artificial Sequence: Synthetic oligonucleotide
acucuagaacguacgcagg

SEQ ID NO: 1192170 - RNA, 19 nt, Artificial Sequence
  Description of Artificial Sequence: Synthetic oligonucleotide
acgugagucccgccacggc

SEQ ID NO: 1192171 - RNA, 19 nt, Artificial Sequence
  Description of Artificial Sequence: Synthetic oligonucleotide
ucccaaccguauuuguagu

SEQ ID NO: 1192172 - RNA, 19 nt, Artificial Sequence
  Description of Artificial Sequence: Synthetic oligonucleotide
accuagucuucuugcuaag

SEQ ID NO: 1192173 - RNA, 19 nt, Artificial Sequence
  Description of Artificial Sequence: Synthetic oligonucleotide
uaggugccgguccuccuug

SEQ ID NO: 1192174 - RNA, 19 nt, Artificial Sequence
  Description of Artificial Sequence: Synthetic oligonucleotide
ucgauuauuggguccccuu

SEQ ID NO: 1192175 - RNA, 19 nt, Artificial Sequence
  Description of Artificial Sequence: Synthetic oligonucleotide
agaacguacgcaggaguca

SEQ ID NO: 1192176 - RNA, 19 nt, Artificial Sequence
  Description of Artificial Sequence: Synthetic oligonucleotide
ggcgugagcagccagcuca

SEQ ID NO: 1192177 - RNA, 19 nt, Artificial Sequence
  Description of Artificial Sequence: Synthetic oligonucleotide
acuucucaucaaacgaaug

SEQ ID NO: 1192178 - RNA, 19 nt, Artificial Sequence
  Description of Artificial Sequence: Synthetic oligonucleotide
gguucaugugagguaauug

SEQ ID NO: 1192179 - RNA, 19 nt, Artificial Sequence
  Description of Artificial Sequence: Synthetic oligonucleotide
uuaggugccgguccuccuu

SEQ ID NO: 1192180 - RNA, 19 nt, Artificial Sequence
  Description of Artificial Sequence: Synthetic oligonucleotide
guccgugaacacgugguag

SEQ ID NO: 1192181 - RNA, 19 nt, Artificial Sequence
  Description of Artificial Sequence: Synthetic oligonucleotide
agagugcgguccuggaaga

SEQ ID NO: 1192182 - RNA, 19 nt, Artificial Sequence
  Description of Artificial Sequence: Synthetic oligonucleotide
uacggggagcgcccuuccg

SEQ ID NO: 1192183 - RNA, 19 nt, Artificial Sequence
  Description of Artificial Sequence: Synthetic oligonucleotide
acgccguagaagaccagcg

SEQ ID NO: 1192184 - RNA, 19 nt, Artificial Sequence
  Description of Artificial Sequence: Synthetic oligonucleotide
caacugacugcuuuucuua

SEQ ID NO: 1192185 - RNA, 19 nt, Artificial Sequence
  Description of Artificial Sequence: Synthetic oligonucleotide
uguggcggauaucccgccu

SEQ ID NO: 1192186 - RNA, 19 nt, Artificial Sequence
  Description of Artificial Sequence: Synthetic oligonucleotide
caccuagucuucuugcuaa

SEQ ID NO: 1192187 - RNA, 19 nt, Artificial Sequence
  Description of Artificial Sequence: Synthetic oligonucleotide
uugcucucggcagucaaau

SEQ ID NO: 1192188 - RNA, 19 nt, Artificial Sequence
  Description of Artificial Sequence: Synthetic oligonucleotide
uccucucuauuaggugccg

SEQ ID NO: 1192189 - RNA, 19 nt, Artificial Sequence
  Description of Artificial Sequence: Synthetic oligonucleotide
ucccgccacggcuacgaag

SEQ ID NO: 1192190 - RNA, 19 nt, Artificial Sequence
  Description of Artificial Sequence: Synthetic oligonucleotide
cuacaacugacugcuuuuc

SEQ ID NO: 1192191 - RNA, 19 nt, Artificial Sequence
  Description of Artificial Sequence: Synthetic oligonucleotide
aagguacaauggcgguaca

SEQ ID NO: 1192192 - RNA, 19 nt, Artificial Sequence
  Description of Artificial Sequence: Synthetic oligonucleotide
gauaucccgccuggucagg

SEQ ID NO: 1192193 - RNA, 19 nt, Artificial Sequence
  Description of Artificial Sequence: Synthetic oligonucleotide
uggacgugugaaggaaaca

SEQ ID NO: 1192194 - RNA, 19 nt, Artificial Sequence
  Description of Artificial Sequence: Synthetic oligonucleotide
cacuacuuaaacagccuua

SEQ ID NO: 1192195 - RNA, 19 nt, Artificial Sequence
  Description of Artificial Sequence: Synthetic oligonucleotide
gaggaggucgcagcugaug

SEQ ID NO: 1192196 - RNA, 19 nt, Artificial Sequence
  Description of Artificial Sequence: Synthetic oligonucleotide
agagcucgcugagguagac

SEQ ID NO: 1192197 - RNA, 19 nt, Artificial Sequence
  Description of Artificial Sequence: Synthetic oligonucleotide
agguaccaaaggaaguacu

SEQ ID NO: 1192198 - RNA, 19 nt, Artificial Sequence
  Description of Artificial Sequence: Synthetic oligonucleotide
guggcggauaucccgccug

SEQ ID NO: 1192199 - RNA, 19 nt, Artificial Sequence
  Description of Artificial Sequence: Synthetic oligonucleotide
gguguagcgguacguggcc

SEQ ID NO: 1192200 - RNA, 19 nt, Artificial Sequence
  Description of Artificial Sequence: Synthetic oligonucleotide
guugggcgugagcagccag

SEQ ID NO: 1192201 - RNA, 19 nt, Artificial Sequence
  Description of Artificial Sequence: Synthetic oligonucleotide
aucccgccuggucagguga

SEQ ID NO: 1192202 - RNA, 19 nt, Artificial Sequence
  Description of Artificial Sequence: Synthetic oligonucleotide
caucggcucuucaacuguc

SEQ ID NO: 1192203 - RNA, 19 nt, Artificial Sequence
  Description of Artificial Sequence: Synthetic oligonucleotide
uaucccgccuggucaggug

SEQ ID NO: 1192204 - RNA, 19 nt, Artificial Sequence
  Description of Artificial Sequence: Synthetic oligonucleotide
uuccgagacgaagcgcgcc

SEQ ID NO: 1192205 - RNA, 19 nt, Artificial Sequence
  Description of Artificial Sequence: Synthetic oligonucleotide
guguaccgcaccagcagag

SEQ ID NO: 1192206 - RNA, 19 nt, Artificial Sequence
  Description of Artificial Sequence: Synthetic oligonucleotide
ccaaccguauuuguaguag

SEQ ID NO: 1192207 - RNA, 19 nt, Artificial Sequence
  Description of Artificial Sequence: Synthetic oligonucleotide
gugcgguccuggaagacgc

SEQ ID NO: 1192208 - RNA, 19 nt, Artificial Sequence
  Description of Artificial Sequence: Synthetic oligonucleotide
aguccacgucgguguaccg

SEQ ID NO: 1192209 - RNA, 19 nt, Artificial Sequence
  Description of Artificial Sequence: Synthetic oligonucleotide
agcgguacguggcccucag

SEQ ID NO: 1192210 - RNA, 19 nt, Artificial Sequence
  Description of Artificial Sequence: Synthetic oligonucleotide
cauauuugauccucucuau

SEQ ID NO: 1192211 - RNA, 19 nt, Artificial Sequence
  Description of Artificial Sequence: Synthetic oligonucleotide
cacccgcagguucaggaac

SEQ ID NO: 1192212 - RNA, 19 nt, Artificial Sequence
  Description of Artificial Sequence: Synthetic oligonucleotide
gccuuaaacaaugagcugu

SEQ ID NO: 1192213 - RNA, 19 nt, Artificial Sequence
  Description of Artificial Sequence: Synthetic oligonucleotide
cagaacacacgcuagucau

SEQ ID NO: 1192214 - RNA, 19 nt, Artificial Sequence
  Description of Artificial Sequence: Synthetic oligonucleotide
agccauaaggccugcccua

SEQ ID NO: 1192215 - RNA, 19 nt, Artificial Sequence
  Description of Artificial Sequence: Synthetic oligonucleotide
augagcuguuaaguuacaa

SEQ ID NO: 1192216 - RNA, 19 nt, Artificial Sequence
  Description of Artificial Sequence: Synthetic oligonucleotide
ugagucccgccacggcuac

SEQ ID NO: 1192217 - RNA, 19 nt, Artificial Sequence
  Description of Artificial Sequence: Synthetic oligonucleotide
cuagaacguacgcaggagu

SEQ ID NO: 1192218 - RNA, 19 nt, Artificial Sequence
  Description of Artificial Sequence: Synthetic oligonucleotide
uagaauguucagggaggaa

SEQ ID NO: 1192219 - RNA, 19 nt, Artificial Sequence
  Description of Artificial Sequence: Synthetic oligonucleotide
aacacacgcuagucauauu

SEQ ID NO: 1192220 - RNA, 19 nt, Artificial Sequence
  Description of Artificial Sequence: Synthetic oligonucleotide
cacgucgguguaccgcacc

SEQ ID NO: 1192221 - RNA, 19 nt, Artificial Sequence
  Description of Artificial Sequence: Synthetic oligonucleotide
agugaggaauauggaacuu

SEQ ID NO: 1192222 - RNA, 19 nt, Artificial Sequence
  Description of Artificial Sequence: Synthetic oligonucleotide
guccacgucgguguaccgc

SEQ ID NO: 1192223 - RNA, 19 nt, Artificial Sequence
  Description of Artificial Sequence: Synthetic oligonucleotide
agucccgccacggcuacga

SEQ ID NO: 1192224 - RNA, 19 nt, Artificial Sequence
  Description of Artificial Sequence: Synthetic oligonucleotide
aggaaugcggcaagcccca

SEQ ID NO: 1192225 - RNA, 19 nt, Artificial Sequence
  Description of Artificial Sequence: Synthetic oligonucleotide
gguguaccgcaccagcaga

SEQ ID NO: 1192226 - RNA, 19 nt, Artificial Sequence
  Description of Artificial Sequence: Synthetic oligonucleotide
ggcgguacaggaggaaggc

SEQ ID NO: 1192227 - RNA, 19 nt, Artificial Sequence
  Description of Artificial Sequence: Synthetic oligonucleotide
cuacgaagagcagccagaa

SEQ ID NO: 1192228 - RNA, 19 nt, Artificial Sequence
  Description of Artificial Sequence: Synthetic oligonucleotide
cagagguaccaaaggaagu

SEQ ID NO: 1192229 - RNA, 19 nt, Artificial Sequence
  Description of Artificial Sequence: Synthetic oligonucleotide
agagaacuauggcccuuuu

SEQ ID NO: 1192230 - RNA, 19 nt, Artificial Sequence
  Description of Artificial Sequence: Synthetic oligonucleotide
acgaagcgcgccgcguccg

SEQ ID NO: 1192231 - RNA, 19 nt, Artificial Sequence
  Description of Artificial Sequence: Synthetic oligonucleotide
agguucaugugagguaauu

SEQ ID NO: 1192232 - RNA, 19 nt, Artificial Sequence
  Description of Artificial Sequence: Synthetic oligonucleotide
auaucccgccuggucaggu

SEQ ID NO: 1192233 - RNA, 19 nt, Artificial Sequence
  Description of Artificial Sequence: Synthetic oligonucleotide
gcuacgaagagcagccaga

SEQ ID NO: 1192234 - RNA, 19 nt, Artificial Sequence
  Description of Artificial Sequence: Synthetic oligonucleotide
aagguucaugugagguaau

SEQ ID NO: 1192235 - RNA, 19 nt, Artificial Sequence
  Description of Artificial Sequence: Synthetic oligonucleotide
cugcccuaugaaccacaac

SEQ ID NO: 1192236 - RNA, 19 nt, Artificial Sequence
  Description of Artificial Sequence: Synthetic oligonucleotide
ugcucucggcagucaaaua

SEQ ID NO: 1192237 - RNA, 19 nt, Artificial Sequence
  Description of Artificial Sequence: Synthetic oligonucleotide
gcggugaggaggucgcagc

SEQ ID NO: 1192238 - RNA, 19 nt, Artificial Sequence
  Description of Artificial Sequence: Synthetic oligonucleotide
guguagcgguacguggccc

SEQ ID NO: 1192239 - RNA, 19 nt, Artificial Sequence
  Description of Artificial Sequence: Synthetic oligonucleotide
aucggcucuucaacuguca

SEQ ID NO: 1192240 - RNA, 19 nt, Artificial Sequence
  Description of Artificial Sequence: Synthetic oligonucleotide
cuauuaggugccgguccuc

SEQ ID NO: 1192241 - RNA, 19 nt, Artificial Sequence
  Description of Artificial Sequence: Synthetic oligonucleotide
acuugauguuuuagcgaaa

SEQ ID NO: 1192242 - RNA, 19 nt, Artificial Sequence
  Description of Artificial Sequence: Synthetic oligonucleotide
cccgccacggcuacgaaga

SEQ ID NO: 1192243 - RNA, 19 nt, Artificial Sequence
  Description of Artificial Sequence: Synthetic oligonucleotide
cacgcuagucauauuugau

SEQ ID NO: 1192244 - RNA, 19 nt, Artificial Sequence
  Description of Artificial Sequence: Synthetic oligonucleotide
cuauuggaacaagggaacu

SEQ ID NO: 1192245 - RNA, 19 nt, Artificial Sequence
  Description of Artificial Sequence: Synthetic oligonucleotide
cgcccuuccgagacgaagc

SEQ ID NO: 1192246 - RNA, 19 nt, Artificial Sequence
  Description of Artificial Sequence: Synthetic oligonucleotide
ccgguccuccuuguaaugg

SEQ ID NO: 1192247 - RNA, 19 nt, Artificial Sequence
  Description of Artificial Sequence: Synthetic oligonucleotide
gagauccagaacacacgcu

SEQ ID NO: 1192248 - RNA, 19 nt, Artificial Sequence
  Description of Artificial Sequence: Synthetic oligonucleotide
ggagcgcccuuccgagacg

SEQ ID NO: 1192249 - RNA, 19 nt, Artificial Sequence
  Description of Artificial Sequence: Synthetic oligonucleotide
gagcgcccuuccgagacga

SEQ ID NO: 1192250 - RNA, 19 nt, Artificial Sequence
  Description of Artificial Sequence: Synthetic oligonucleotide
cagccauaaggccugcccu

SEQ ID NO: 1192251 - RNA, 19 nt, Artificial Sequence
  Description of Artificial Sequence: Synthetic oligonucleotide
ugagggcggaagguacaau

SEQ ID NO: 1192252 - RNA, 19 nt, Artificial Sequence
  Description of Artificial Sequence: Synthetic oligonucleotide
ucccgccuggucaggugau

SEQ ID NO: 1192253 - RNA, 19 nt, Artificial Sequence
  Description of Artificial Sequence: Synthetic oligonucleotide
cacgccgaacacgccggcc

SEQ ID NO: 1192254 - RNA, 19 nt, Artificial Sequence
  Description of Artificial Sequence: Synthetic oligonucleotide
gaagcgcgccgcguccgug

SEQ ID NO: 1192255 - RNA, 19 nt, Artificial Sequence
  Description of Artificial Sequence: Synthetic oligonucleotide
gccacgccgaacacgccgg

SEQ ID NO: 1192256 - RNA, 19 nt, Artificial Sequence
  Description of Artificial Sequence: Synthetic oligonucleotide
ggaagacgccguagaagac

SEQ ID NO: 1192257 - RNA, 19 nt, Artificial Sequence
  Description of Artificial Sequence: Synthetic oligonucleotide
gcgguacacuguaacagga

SEQ ID NO: 1192258 - RNA, 19 nt, Artificial Sequence
  Description of Artificial Sequence: Synthetic oligonucleotide
augcggcaagccccagggu

SEQ ID NO: 1192259 - RNA, 19 nt, Artificial Sequence
  Description of Artificial Sequence: Synthetic oligonucleotide
ggaagguacaauggcggua

SEQ ID NO: 1192260 - RNA, 19 nt, Artificial Sequence
  Description of Artificial Sequence: Synthetic oligonucleotide
gcgacccgggccaggaagg

SEQ ID NO: 1192261 - RNA, 19 nt, Artificial Sequence
  Description of Artificial Sequence: Synthetic oligonucleotide
aucaaacgaaugaguccua

SEQ ID NO: 1192262 - RNA, 19 nt, Artificial Sequence
  Description of Artificial Sequence: Synthetic oligonucleotide
cggauaucccgccugguca

SEQ ID NO: 1192263 - RNA, 19 nt, Artificial Sequence
  Description of Artificial Sequence: Synthetic oligonucleotide
cgaaugaguccuaagacuu

SEQ ID NO: 1192264 - RNA, 19 nt, Artificial Sequence
  Description of Artificial Sequence: Synthetic oligonucleotide
cgugaacacgugguagucc

SEQ ID NO: 1192265 - RNA, 19 nt, Artificial Sequence
  Description of Artificial Sequence: Synthetic oligonucleotide
gguacggggagcgcccuuc

SEQ ID NO: 1192266 - RNA, 19 nt, Artificial Sequence
  Description of Artificial Sequence: Synthetic oligonucleotide
caauggcgguacacuguaa

SEQ ID NO: 1192267 - RNA, 19 nt, Artificial Sequence
  Description of Artificial Sequence: Synthetic oligonucleotide
guagcgguacguggcccuc

SEQ ID NO: 1192268 - RNA, 19 nt, Artificial Sequence
  Description of Artificial Sequence: Synthetic oligonucleotide
cgccguagaagaccagcgc

SEQ ID NO: 1192269 - RNA, 19 nt, Artificial Sequence
  Description of Artificial Sequence: Synthetic oligonucleotide
gcgcccuuccgagacgaag

SEQ ID NO: 1192270 - RNA, 19 nt, Artificial Sequence
  Description of Artificial Sequence: Synthetic oligonucleotide
cguagaagaccagcgcgac

SEQ ID NO: 1192271 - RNA, 19 nt, Artificial Sequence
  Description of Artificial Sequence: Synthetic oligonucleotide
gagacgaagcgcgccgcgu

SEQ ID NO: 1192272 - RNA, 19 nt, Artificial Sequence
  Description of Artificial Sequence: Synthetic oligonucleotide
ccaucaguaauagaacuuu

SEQ ID NO: 1192273 - RNA, 19 nt, Artificial Sequence
  Description of Artificial Sequence: Synthetic oligonucleotide
ccgccuggucaggugauag

SEQ ID NO: 1192274 - RNA, 19 nt, Artificial Sequence
  Description of Artificial Sequence: Synthetic oligonucleotide
cgagacgaagcgcgccgcg

SEQ ID NO: 1192275 - RNA, 19 nt, Artificial Sequence
  Description of Artificial Sequence: Synthetic oligonucleotide
cgcguccgugaacacgugg

SEQ ID NO: 1192276 - RNA, 19 nt, Artificial Sequence
  Description of Artificial Sequence: Synthetic oligonucleotide
cgcgacccgggccaggaag

SEQ ID NO: 1192277 - RNA, 19 nt, Artificial Sequence
  Description of Artificial Sequence: Synthetic oligonucleotide
ccuuaaacaaugagcuguu

SEQ ID NO: 1192278 - RNA, 19 nt, Artificial Sequence
  Description of Artificial Sequence: Synthetic oligonucleotide
cucgauuauuggguccccu

SEQ ID NO: 1192279 - RNA, 19 nt, Artificial Sequence
  Description of Artificial Sequence: Synthetic oligonucleotide
ccgugaacacgugguaguc

SEQ ID NO: 1192280 - RNA, 19 nt, Artificial Sequence
  Description of Artificial Sequence: Synthetic oligonucleotide
agugccggcugcagcucau

SEQ ID NO: 1192281 - RNA, 19 nt, Artificial Sequence
  Description of Artificial Sequence: Synthetic oligonucleotide
agguacggggagcgcccuu

SEQ ID NO: 1192282 - RNA, 19 nt, Artificial Sequence
  Description of Artificial Sequence: Synthetic oligonucleotide
ccucgauuauugggucccc

SEQ ID NO: 1192283 - RNA, 19 nt, Artificial Sequence
  Description of Artificial Sequence: Synthetic oligonucleotide
ccaccuagucuucuugcua

SEQ ID NO: 1192284 - RNA, 19 nt, Artificial Sequence
  Description of Artificial Sequence: Synthetic oligonucleotide
acacgccggccggcggcac

SEQ ID NO: 1192285 - RNA, 19 nt, Artificial Sequence
  Description of Artificial Sequence: Synthetic oligonucleotide
gcuaggaaacaugucuguu

SEQ ID NO: 1192286 - RNA, 19 nt, Artificial Sequence
  Description of Artificial Sequence: Synthetic oligonucleotide
cccaaccguauuuguagua

SEQ ID NO: 1192287 - RNA, 19 nt, Artificial Sequence
  Description of Artificial Sequence: Synthetic oligonucleotide
ggaaugcggcaagccccag

SEQ ID NO: 1192288 - RNA, 19 nt, Artificial Sequence
  Description of Artificial Sequence: Synthetic oligonucleotide
gcccuaugaaccacaacau

SEQ ID NO: 1192289 - RNA, 19 nt, Artificial Sequence
  Description of Artificial Sequence: Synthetic oligonucleotide
gcguccgugaacacguggu

SEQ ID NO: 1192290 - RNA, 19 nt, Artificial Sequence
  Description of Artificial Sequence: Synthetic oligonucleotide
ccacuacuuaaacagccuu

SEQ ID NO: 1192291 - RNA, 19 nt, Artificial Sequence
  Description of Artificial Sequence: Synthetic oligonucleotide
ccuccuuguaaugggagau

SEQ ID NO: 1192292 - RNA, 19 nt, Artificial Sequence
  Description of Artificial Sequence: Synthetic oligonucleotide
cgggguguagcgguacgug

SEQ ID NO: 1192293 - RNA, 19 nt, Artificial Sequence
  Description of Artificial Sequence: Synthetic oligonucleotide
ccacgucgguguaccgcac

SEQ ID NO: 1192294 - RNA, 19 nt, Artificial Sequence
  Description of Artificial Sequence: Synthetic oligonucleotide
ccacgccgaacacgccggc

SEQ ID NO: 1192295 - RNA, 19 nt, Artificial Sequence
  Description of Artificial Sequence: Synthetic oligonucleotide
cgccgcguccgugaacacg

SEQ ID NO: 1192296 - RNA, 19 nt, Artificial Sequence
  Description of Artificial Sequence: Synthetic oligonucleotide
gccgaacacgccggccggc

SEQ ID NO: 1192297 - RNA, 19 nt, Artificial Sequence
  Description of Artificial Sequence: Synthetic oligonucleotide
cgugagucccgccacggcu

SEQ ID NO: 1192298 - RNA, 19 nt, Artificial Sequence
  Description of Artificial Sequence: Synthetic oligonucleotide
cguacgcaggagucagcca

SEQ ID NO: 1192299 - RNA, 19 nt, Artificial Sequence
  Description of Artificial Sequence: Synthetic oligonucleotide
gucccgccacggcuacgaa

SEQ ID NO: 1192300 - RNA, 19 nt, Artificial Sequence
  Description of Artificial Sequence: Synthetic oligonucleotide
ccgccacggcuacgaagag

SEQ ID NO: 1192301 - RNA, 19 nt, Artificial Sequence
  Description of Artificial Sequence: Synthetic oligonucleotide
gccauaaggccugcccuau

SEQ ID NO: 1192302 - RNA, 19 nt, Artificial Sequence
  Description of Artificial Sequence: Synthetic oligonucleotide
ccgcaccagcagagugcgg

SEQ ID NO: 1192303 - RNA, 19 nt, Artificial Sequence
  Description of Artificial Sequence: Synthetic oligonucleotide
agcgcccuuccgagacgaa

SEQ ID NO: 1192304 - RNA, 19 nt, Artificial Sequence
  Description of Artificial Sequence: Synthetic oligonucleotide
ccgcguccgugaacacgug

SEQ ID NO: 1192305 - RNA, 19 nt, Artificial Sequence
  Description of Artificial Sequence: Synthetic oligonucleotide
gcgggguguagcgguacgu

SEQ ID NO: 1192306 - RNA, 19 nt, Artificial Sequence
  Description of Artificial Sequence: Synthetic oligonucleotide
gcgccgcguccgugaacac

SEQ ID NO: 1192307 - RNA, 19 nt, Artificial Sequence
  Description of Artificial Sequence: Synthetic oligonucleotide
gcgcgccgcguccgugaac

SEQ ID NO: 1192308 - RNA, 19 nt, Artificial Sequence
  Description of Artificial Sequence: Synthetic oligonucleotide
gcucgcugagguagacguu

SEQ ID NO: 1192309 - RNA, 19 nt, Artificial Sequence
  Description of Artificial Sequence: Synthetic oligonucleotide
gcgcgacccgggccaggaa

SEQ ID NO: 1192310 - RNA, 19 nt, Artificial Sequence
  Description of Artificial Sequence: Synthetic oligonucleotide
cccgccuggucaggugaua

SEQ ID NO: 1192311 - RNA, 19 nt, Artificial Sequence
  Description of Artificial Sequence: Synthetic oligonucleotide
cgaagcgcgccgcguccgu

SEQ ID NO: 1192312 - RNA, 19 nt, Artificial Sequence
  Description of Artificial Sequence: Synthetic oligonucleotide
auuacuaucaaauuuagcu

SEQ ID NO: 1192313 - RNA, 19 nt, Artificial Sequence
  Description of Artificial Sequence: Synthetic oligonucleotide
ugugaaaauauaacgaggg

SEQ ID NO: 1192314 - RNA, 19 nt, Artificial Sequence
  Description of Artificial Sequence: Synthetic oligonucleotide
aaaaccauagggauuaugg

SEQ ID NO: 1192315 - RNA, 19 nt, Artificial Sequence
  Description of Artificial Sequence: Synthetic oligonucleotide
acauugugaaaauauaacg

SEQ ID NO: 1192316 - RNA, 19 nt, Artificial Sequence
  Description of Artificial Sequence: Synthetic oligonucleotide
uuaaucaaaaccauaggga

SEQ ID NO: 1192317 - RNA, 19 nt, Artificial Sequence
  Description of Artificial Sequence: Synthetic oligonucleotide
auugugaaaauauaacgag

SEQ ID NO: 1192318 - RNA, 19 nt, Artificial Sequence
  Description of Artificial Sequence: Synthetic oligonucleotide
uuaucauuccucuugaaac

SEQ ID NO: 1192319 - RNA, 19 nt, Artificial Sequence
  Description of Artificial Sequence: Synthetic oligonucleotide
aaaccauagggauuauggg

SEQ ID NO: 1192320 - RNA, 19 nt, Artificial Sequence
  Description of Artificial Sequence: Synthetic oligonucleotide
aacaaaacuuuucguuggc

SEQ ID NO: 1192321 - RNA, 19 nt, Artificial Sequence
  Description of Artificial Sequence: Synthetic oligonucleotide
ucuuggaauaaccacaggu

SEQ ID NO: 1192322 - RNA, 19 nt, Artificial Sequence
  Description of Artificial Sequence: Synthetic oligonucleotide
aguuaauguuguuacugcc

SEQ ID NO: 1192323 - RNA, 19 nt, Artificial Sequence
  Description of Artificial Sequence: Synthetic oligonucleotide
ugauuaucaucauaaagga

SEQ ID NO: 1192324 - RNA, 19 nt, Artificial Sequence
  Description of Artificial Sequence: Synthetic oligonucleotide
uuuuacuucuuuccuagcc

SEQ ID NO: 1192325 - RNA, 19 nt, Artificial Sequence
  Description of Artificial Sequence: Synthetic oligonucleotide
uuacuaucaaauuuagcug

SEQ ID NO: 1192326 - RNA, 19 nt, Artificial Sequence
  Description of Artificial Sequence: Synthetic oligonucleotide
aauucugagccaaauuuac

SEQ ID NO: 1192327 - RNA, 19 nt, Artificial Sequence
  Description of Artificial Sequence: Synthetic oligonucleotide
gagaauaugaaggaaauga

SEQ ID NO: 1192328 - RNA, 19 nt, Artificial Sequence
  Description of Artificial Sequence: Synthetic oligonucleotide
uguacuuaggucuuucagc

SEQ ID NO: 1192329 - RNA, 19 nt, Artificial Sequence
  Description of Artificial Sequence: Synthetic oligonucleotide
aucacauuaaauaagccag

SEQ ID NO: 1192330 - RNA, 19 nt, Artificial Sequence
  Description of Artificial Sequence: Synthetic oligonucleotide
ugguauagaucucucauug

SEQ ID NO: 1192331 - RNA, 19 nt, Artificial Sequence
  Description of Artificial Sequence: Synthetic oligonucleotide
uuugccaccaugaagccga

SEQ ID NO: 1192332 - RNA, 19 nt, Artificial Sequence
  Description of Artificial Sequence: Synthetic oligonucleotide
uuaaauaagccagauguac

SEQ ID NO: 1192333 - RNA, 19 nt, Artificial Sequence
  Description of Artificial Sequence: Synthetic oligonucleotide
aaauguucgugcucuuugg

SEQ ID NO: 1192334 - RNA, 19 nt, Artificial Sequence
  Description of Artificial Sequence: Synthetic oligonucleotide
aucaaaagauguuuucuuc

SEQ ID NO: 1192335 - RNA, 19 nt, Artificial Sequence
  Description of Artificial Sequence: Synthetic oligonucleotide
uucugagaaaucaaaggug

SEQ ID NO: 1192336 - RNA, 19 nt, Artificial Sequence
  Description of Artificial Sequence: Synthetic oligonucleotide
uuaauguuguuacugccca

SEQ ID NO: 1192337 - RNA, 19 nt, Artificial Sequence
  Description of Artificial Sequence: Synthetic oligonucleotide
uaaucaaaaccauagggau

SEQ ID NO: 1192338 - RNA, 19 nt, Artificial Sequence
  Description of Artificial Sequence: Synthetic oligonucleotide
uuuacaggagcugaugggg

SEQ ID NO: 1192339 - RNA, 19 nt, Artificial Sequence
  Description of Artificial Sequence: Synthetic oligonucleotide
ugaauccugaucaaaagau

SEQ ID NO: 1192340 - RNA, 19 nt, Artificial Sequence
  Description of Artificial Sequence: Synthetic oligonucleotide
uauaacgagggcuugcagc

SEQ ID NO: 1192341 - RNA, 19 nt, Artificial Sequence
  Description of Artificial Sequence: Synthetic oligonucleotide
ucagaagugaagucugagg

SEQ ID NO: 1192342 - RNA, 19 nt, Artificial Sequence
  Description of Artificial Sequence: Synthetic oligonucleotide
ucugagucagaguuuacag

SEQ ID NO: 1192343 - RNA, 19 nt, Artificial Sequence
  Description of Artificial Sequence: Synthetic oligonucleotide
uuuucuacuggcaucugca

SEQ ID NO: 1192344 - RNA, 19 nt, Artificial Sequence
  Description of Artificial Sequence: Synthetic oligonucleotide
uguuuaggugcucucuugg

SEQ ID NO: 1192345 - RNA, 19 nt, Artificial Sequence
  Description of Artificial Sequence: Synthetic oligonucleotide
aauguucgugcucuuuggg

SEQ ID NO: 1192346 - RNA, 19 nt, Artificial Sequence
  Description of Artificial Sequence: Synthetic oligonucleotide
ucauuacuaucaaauuuag

SEQ ID NO: 1192347 - RNA, 19 nt, Artificial Sequence
  Description of Artificial Sequence: Synthetic oligonucleotide
ugagucagaguuuacaguc

SEQ ID NO: 1192348 - RNA, 19 nt, Artificial Sequence
  Description of Artificial Sequence: Synthetic oligonucleotide
uuaucuaagccaucugaag

SEQ ID NO: 1192349 - RNA, 19 nt, Artificial Sequence
  Description of Artificial Sequence: Synthetic oligonucleotide
uuuaucuaagccaucugaa

SEQ ID NO: 1192350 - RNA, 19 nt, Artificial Sequence
  Description of Artificial Sequence: Synthetic oligonucleotide
uuuguuaugggagaugccu

SEQ ID NO: 1192351 - RNA, 19 nt, Artificial Sequence
  Description of Artificial Sequence: Synthetic oligonucleotide
uaagccaucugaaggaaca

SEQ ID NO: 1192352 - RNA, 19 nt, Artificial Sequence
  Description of Artificial Sequence: Synthetic oligonucleotide
auuuacaggagcugauggg

SEQ ID NO: 1192353 - RNA, 19 nt, Artificial Sequence
  Description of Artificial Sequence: Synthetic oligonucleotide
uuaccuuuuagcagcaacu

SEQ ID NO: 1192354 - RNA, 19 nt, Artificial Sequence
  Description of Artificial Sequence: Synthetic oligonucleotide
aauccugaucaaaagaugu

SEQ ID NO: 1192355 - RNA, 19 nt, Artificial Sequence
  Description of Artificial Sequence: Synthetic oligonucleotide
uuuaggugcucucuuggcc

SEQ ID NO: 1192356 - RNA, 19 nt, Artificial Sequence
  Description of Artificial Sequence: Synthetic oligonucleotide
uuaacauugugaaaauaua

SEQ ID NO: 1192357 - RNA, 19 nt, Artificial Sequence
  Description of Artificial Sequence: Synthetic oligonucleotide
auuauggggauauaccacu

SEQ ID NO: 1192358 - RNA, 19 nt, Artificial Sequence
  Description of Artificial Sequence: Synthetic oligonucleotide
  modified_base (5)..(5): a, c, u, g, unknown or other
caagngaugguauagaucu

SEQ ID NO: 1192359 - RNA, 19 nt, Artificial Sequence
  Description of Artificial Sequence: Synthetic oligonucleotide
agaguuuacagucucuaca

SEQ ID NO: 1192360 - RNA, 19 nt, Artificial Sequence
  Description of Artificial Sequence: Synthetic oligonucleotide
auucccaaaauccugacuu

SEQ ID NO: 1192361 - RNA, 19 nt, Artificial Sequence
  Description of Artificial Sequence: Synthetic oligonucleotide
auguucgugcucuuugggc

SEQ ID NO: 1192362 - RNA, 19 nt, Artificial Sequence
  Description of Artificial Sequence: Synthetic oligonucleotide
uacuucacguuuaucauuc

SEQ ID NO: 1192363 - RNA, 19 nt, Artificial Sequence
  Description of Artificial Sequence: Synthetic oligonucleotide
caucaucacauuaaauaag

SEQ ID NO: 1192364 - RNA, 19 nt, Artificial Sequence
  Description of Artificial Sequence: Synthetic oligonucleotide
uauggggauauaccacucg

SEQ ID NO: 1192365 - RNA, 19 nt, Artificial Sequence
  Description of Artificial Sequence: Synthetic oligonucleotide
acguuuaucauuccucuug

SEQ ID NO: 1192366 - RNA, 19 nt, Artificial Sequence
  Description of Artificial Sequence: Synthetic oligonucleotide
auagaucucucauugucug

SEQ ID NO: 1192367 - RNA, 19 nt, Artificial Sequence
  Description of Artificial Sequence: Synthetic oligonucleotide
agcaaguuaucauccacag

SEQ ID NO: 1192368 - RNA, 19 nt, Artificial Sequence
  Description of Artificial Sequence: Synthetic oligonucleotide
ucaucacauuaaauaagcc

SEQ ID NO: 1192369 - RNA, 19 nt, Artificial Sequence
  Description of Artificial Sequence: Synthetic oligonucleotide
guuuuagaugguuuccucc

SEQ ID NO: 1192370 - RNA, 19 nt, Artificial Sequence
  Description of Artificial Sequence: Synthetic oligonucleotide
uaugggagaugccuuaacu

SEQ ID NO: 1192371 - RNA, 19 nt, Artificial Sequence
  Description of Artificial Sequence: Synthetic oligonucleotide
uugucugaauuugagaaga

SEQ ID NO: 1192372 - RNA, 19 nt, Artificial Sequence
  Description of Artificial Sequence: Synthetic oligonucleotide
uucacguuuaucauuccuc

SEQ ID NO: 1192373 - RNA, 19 nt, Artificial Sequence
  Description of Artificial Sequence: Synthetic oligonucleotide
ugagaaaucaaagguguac

SEQ ID NO: 1192374 - RNA, 19 nt, Artificial Sequence
  Description of Artificial Sequence: Synthetic oligonucleotide
augaagccgaguuccaaac

SEQ ID NO: 1192375 - RNA, 19 nt, Artificial Sequence
  Description of Artificial Sequence: Synthetic oligonucleotide
auaacgagggcuugcagca

SEQ ID NO: 1192376 - RNA, 19 nt, Artificial Sequence
  Description of Artificial Sequence: Synthetic oligonucleotide
augauaggcagacauuuca

SEQ ID NO: 1192377 - RNA, 19 nt, Artificial Sequence
  Description of Artificial Sequence: Synthetic oligonucleotide
guuugcuucagaccaaaug

SEQ ID NO: 1192378 - RNA, 19 nt, Artificial Sequence
  Description of Artificial Sequence: Synthetic oligonucleotide
ucgguuuaccagcugaugu

SEQ ID NO: 1192379 - RNA, 19 nt, Artificial Sequence
  Description of Artificial Sequence: Synthetic oligonucleotide
uguucgugcucuuugggca

SEQ ID NO: 1192380 - RNA, 19 nt, Artificial Sequence
  Description of Artificial Sequence: Synthetic oligonucleotide
aauauaacgagggcuugca

SEQ ID NO: 1192381 - RNA, 19 nt, Artificial Sequence
  Description of Artificial Sequence: Synthetic oligonucleotide
auggggauauaccacucgg

SEQ ID NO: 1192382 - RNA, 19 nt, Artificial Sequence
  Description of Artificial Sequence: Synthetic oligonucleotide
aaugccaaauucagaaucu

SEQ ID NO: 1192383 - RNA, 19 nt, Artificial Sequence
  Description of Artificial Sequence: Synthetic oligonucleotide
uaucuguuugcuucagacc

SEQ ID NO: 1192384 - RNA, 19 nt, Artificial Sequence
  Description of Artificial Sequence: Synthetic oligonucleotide
agggauuauggggauauac

SEQ ID NO: 1192385 - RNA, 19 nt, Artificial Sequence
  Description of Artificial Sequence: Synthetic oligonucleotide
agccagauguacaaaauuc

SEQ ID NO: 1192386 - RNA, 19 nt, Artificial Sequence
  Description of Artificial Sequence: Synthetic oligonucleotide
  modified_base (9)..(9): a, c, u, g, unknown or other
uccacaagngaugguauag

SEQ ID NO: 1192387 - RNA, 19 nt, Artificial Sequence
  Description of Artificial Sequence: Synthetic oligonucleotide
guuacugcccacaaaauuc

SEQ ID NO: 1192388 - RNA, 19 nt, Artificial Sequence
  Description of Artificial Sequence: Synthetic oligonucleotide
cugaccaaugggcugaagc

SEQ ID NO: 1192389 - RNA, 19 nt, Artificial Sequence
  Description of Artificial Sequence: Synthetic oligonucleotide
acuuaauuaaacauugcaa

SEQ ID NO: 1192390 - RNA, 19 nt, Artificial Sequence
  Description of Artificial Sequence: Synthetic oligonucleotide
aggaucacccuucuucuuc

SEQ ID NO: 1192391 - RNA, 19 nt, Artificial Sequence
  Description of Artificial Sequence: Synthetic oligonucleotide
ucacguuuaucauuccucu

SEQ ID NO: 1192392 - RNA, 19 nt, Artificial Sequence
  Description of Artificial Sequence: Synthetic oligonucleotide
guuaauguuguuacugccc

SEQ ID NO: 1192393 - RNA, 19 nt, Artificial Sequence
  Description of Artificial Sequence: Synthetic oligonucleotide
acauuaaauaagccagaug

SEQ ID NO: 1192394 - RNA, 19 nt, Artificial Sequence
  Description of Artificial Sequence: Synthetic oligonucleotide
uggggauauaccacucggg

SEQ ID NO: 1192395 - RNA, 19 nt, Artificial Sequence
  Description of Artificial Sequence: Synthetic oligonucleotide
cauuacuaucaaauuuagc

SEQ ID NO: 1192396 - RNA, 19 nt, Artificial Sequence
  Description of Artificial Sequence: Synthetic oligonucleotide
ugggcacuuaauuaaacau

SEQ ID NO: 1192397 - RNA, 19 nt, Artificial Sequence
  Description of Artificial Sequence: Synthetic oligonucleotide
auaagccagauguacaaaa

SEQ ID NO: 1192398 - RNA, 19 nt, Artificial Sequence
  Description of Artificial Sequence: Synthetic oligonucleotide
cacuuaauuaaacauugca

SEQ ID NO: 1192399 - RNA, 19 nt, Artificial Sequence
  Description of Artificial Sequence: Synthetic oligonucleotide
uguaucugaaggugguuac

SEQ ID NO: 1192400 - RNA, 19 nt, Artificial Sequence
  Description of Artificial Sequence: Synthetic oligonucleotide
aggugguuaccuuuuagca

SEQ ID NO: 1192401 - RNA, 19 nt, Artificial Sequence
  Description of Artificial Sequence: Synthetic oligonucleotide
aaagaugucuacaucugaa

SEQ ID NO: 1192402 - RNA, 19 nt, Artificial Sequence
  Description of Artificial Sequence: Synthetic oligonucleotide
gguguuguagucuucuuug

SEQ ID NO: 1192403 - RNA, 19 nt, Artificial Sequence
  Description of Artificial Sequence: Synthetic oligonucleotide
gugaaaauauaacgagggc

SEQ ID NO: 1192404 - RNA, 19 nt, Artificial Sequence
  Description of Artificial Sequence: Synthetic oligonucleotide
aacccugguaccaggcucc

SEQ ID NO: 1192405 - RNA, 19 nt, Artificial Sequence
  Description of Artificial Sequence: Synthetic oligonucleotide
aggaacuuaagcaaguuau

SEQ ID NO: 1192406 - RNA, 19 nt, Artificial Sequence
  Description of Artificial Sequence: Synthetic oligonucleotide
aacagguaaacaaaacuuu

SEQ ID NO: 1192407 - RNA, 19 nt, Artificial Sequence
  Description of Artificial Sequence: Synthetic oligonucleotide
uuugggcacuuaauuaaac

SEQ ID NO: 1192408 - RNA, 19 nt, Artificial Sequence
  Description of Artificial Sequence: Synthetic oligonucleotide
gaguuuacagucucuacaa

SEQ ID NO: 1192409 - RNA, 19 nt, Artificial Sequence
  Description of Artificial Sequence: Synthetic oligonucleotide
gggaccuuuauuuacagga

SEQ ID NO: 1192410 - RNA, 19 nt, Artificial Sequence
  Description of Artificial Sequence: Synthetic oligonucleotide
gaaggugguuaccuuuuag

SEQ ID NO: 1192411 - RNA, 19 nt, Artificial Sequence
  Description of Artificial Sequence: Synthetic oligonucleotide
gcccacaaaauucugagcc

SEQ ID NO: 1192412 - RNA, 19 nt, Artificial Sequence
  Description of Artificial Sequence: Synthetic oligonucleotide
aggaaaugaaagagauucc

SEQ ID NO: 1192413 - RNA, 19 nt, Artificial Sequence
  Description of Artificial Sequence: Synthetic oligonucleotide
uccuguaccuucuacuggu

SEQ ID NO: 1192414 - RNA, 19 nt, Artificial Sequence
  Description of Artificial Sequence: Synthetic oligonucleotide
gauuauggggauauaccac

SEQ ID NO: 1192415 - RNA, 19 nt, Artificial Sequence
  Description of Artificial Sequence: Synthetic oligonucleotide
uguaaaacagaagcaguau

SEQ ID NO: 1192416 - RNA, 19 nt, Artificial Sequence
  Description of Artificial Sequence: Synthetic oligonucleotide
uucagaccaaaugauggug

SEQ ID NO: 1192417 - RNA, 19 nt, Artificial Sequence
  Description of Artificial Sequence: Synthetic oligonucleotide
ugucugaauuugagaagag

SEQ ID NO: 1192418 - RNA, 19 nt, Artificial Sequence
  Description of Artificial Sequence: Synthetic oligonucleotide
ucucauugucugaauuuga

SEQ ID NO: 1192419 - RNA, 19 nt, Artificial Sequence
  Description of Artificial Sequence: Synthetic oligonucleotide
  modified_base (6)..(6): a, c, u, g, unknown or other
acaagngaugguauagauc

SEQ ID NO: 1192420 - RNA, 19 nt, Artificial Sequence
  Description of Artificial Sequence: Synthetic oligonucleotide
gaauccugaucaaaagaug

SEQ ID NO: 1192421 - RNA, 19 nt, Artificial Sequence
  Description of Artificial Sequence: Synthetic oligonucleotide
ugagaauaugaaggaaaug

SEQ ID NO: 1192422 - RNA, 19 nt, Artificial Sequence
  Description of Artificial Sequence: Synthetic oligonucleotide
auaaccacagguucuguuu

SEQ ID NO: 1192423 - RNA, 19 nt, Artificial Sequence
  Description of Artificial Sequence: Synthetic oligonucleotide
caaagguguacuuaggucu

SEQ ID NO: 1192424 - RNA, 19 nt, Artificial Sequence
  Description of Artificial Sequence: Synthetic oligonucleotide
  modified_base (3)..(3): a, c, u, g, unknown or other
agngaugguauagaucucu

SEQ ID NO: 1192425 - RNA, 19 nt, Artificial Sequence
  Description of Artificial Sequence: Synthetic oligonucleotide
  modified_base (16)..(16): a, c, u, g, unknown or other
gaagccauccacaagngau

SEQ ID NO: 1192426 - RNA, 19 nt, Artificial Sequence
  Description of Artificial Sequence: Synthetic oligonucleotide
uuguuuaggugcucucuug

SEQ ID NO: 1192427 - RNA, 19 nt, Artificial Sequence
  Description of Artificial Sequence: Synthetic oligonucleotide
ggauuauggggauauacca

SEQ ID NO: 1192428 - RNA, 19 nt, Artificial Sequence
  Description of Artificial Sequence: Synthetic oligonucleotide
uaucugaaggugguuaccu

SEQ ID NO: 1192429 - RNA, 19 nt, Artificial Sequence
  Description of Artificial Sequence: Synthetic oligonucleotide
uccucuugaaacagguaaa

SEQ ID NO: 1192430 - RNA, 19 nt, Artificial Sequence
  Description of Artificial Sequence: Synthetic oligonucleotide
gaugguauagaucucucau

SEQ ID NO: 1192431 - RNA, 19 nt, Artificial Sequence
  Description of Artificial Sequence: Synthetic oligonucleotide
gaaucucuuggaauaacca

SEQ ID NO: 1192432 - RNA, 19 nt, Artificial Sequence
  Description of Artificial Sequence: Synthetic oligonucleotide
uucuaacccugguaccagg

SEQ ID NO: 1192433 - RNA, 19 nt, Artificial Sequence
  Description of Artificial Sequence: Synthetic oligonucleotide
aaugcuuguucuccaugau

SEQ ID NO: 1192434 - RNA, 19 nt, Artificial Sequence
  Description of Artificial Sequence: Synthetic oligonucleotide
uugggaccuuuauuuacag

SEQ ID NO: 1192435 - RNA, 19 nt, Artificial Sequence
  Description of Artificial Sequence: Synthetic oligonucleotide
  modified_base (14)..(14): a, c, u, g, unknown or other
agccauccacaagngaugg

SEQ ID NO: 1192436 - RNA, 19 nt, Artificial Sequence
  Description of Artificial Sequence: Synthetic oligonucleotide
acuucacguuuaucauucc

SEQ ID NO: 1192437 - RNA, 19 nt, Artificial Sequence
  Description of Artificial Sequence: Synthetic oligonucleotide
ggauauaccacucgggcuc

SEQ ID NO: 1192438 - RNA, 19 nt, Artificial Sequence
  Description of Artificial Sequence: Synthetic oligonucleotide
gacucaucaucugaccaag

SEQ ID NO: 1192439 - RNA, 19 nt, Artificial Sequence
  Description of Artificial Sequence: Synthetic oligonucleotide
aggguuauaaucaccuuca

SEQ ID NO: 1192440 - RNA, 19 nt, Artificial Sequence
  Description of Artificial Sequence: Synthetic oligonucleotide
aagcaaguuaauguuguua

SEQ ID NO: 1192441 - RNA, 19 nt, Artificial Sequence
  Description of Artificial Sequence: Synthetic oligonucleotide
ugaccaaggguuccguuuc

SEQ ID NO: 1192442 - RNA, 19 nt, Artificial Sequence
  Description of Artificial Sequence: Synthetic oligonucleotide
ucuacugguguuccacuaa

SEQ ID NO: 1192443 - RNA, 19 nt, Artificial Sequence
  Description of Artificial Sequence: Synthetic oligonucleotide
ugggaccuuuauuuacagg

SEQ ID NO: 1192444 - RNA, 19 nt, Artificial Sequence
  Description of Artificial Sequence: Synthetic oligonucleotide
ugcucuccggagcagagaa

SEQ ID NO: 1192445 - RNA, 19 nt, Artificial Sequence
  Description of Artificial Sequence: Synthetic oligonucleotide
ucuacaucugaauccugau

SEQ ID NO: 1192446 - RNA, 19 nt, Artificial Sequence
  Description of Artificial Sequence: Synthetic oligonucleotide
auuuguuaugggagaugcc

SEQ ID NO: 1192447 - RNA, 19 nt, Artificial Sequence
  Description of Artificial Sequence: Synthetic oligonucleotide
ucuuguuuaggugcucucu

SEQ ID NO: 1192448 - RNA, 19 nt, Artificial Sequence
  Description of Artificial Sequence: Synthetic oligonucleotide
auauaacgagggcuugcag

SEQ ID NO: 1192449 - RNA, 19 nt, Artificial Sequence
  Description of Artificial Sequence: Synthetic oligonucleotide
agaugccuuaacuuucagu

SEQ ID NO: 1192450 - RNA, 19 nt, Artificial Sequence
  Description of Artificial Sequence: Synthetic oligonucleotide
uguaccuucuacugguguu

SEQ ID NO: 1192451 - RNA, 19 nt, Artificial Sequence
  Description of Artificial Sequence: Synthetic oligonucleotide
uguuaugggagaugccuua

SEQ ID NO: 1192452 - RNA, 19 nt, Artificial Sequence
  Description of Artificial Sequence: Synthetic oligonucleotide
uuucuaacccugguaccag

SEQ ID NO: 1192453 - RNA, 19 nt, Artificial Sequence
  Description of Artificial Sequence: Synthetic oligonucleotide
uuaugggagaugccuuaac

SEQ ID NO: 1192454 - RNA, 19 nt, Artificial Sequence
  Description of Artificial Sequence: Synthetic oligonucleotide
agcugggcgacuuuuacuu

SEQ ID NO: 1192455 - RNA, 19 nt, Artificial Sequence
  Description of Artificial Sequence: Synthetic oligonucleotide
ucuuugccaccaugaagcc

SEQ ID NO: 1192456 - RNA, 19 nt, Artificial Sequence
  Description of Artificial Sequence: Synthetic oligonucleotide
ggggauauaccacucgggc

SEQ ID NO: 1192457 - RNA, 19 nt, Artificial Sequence
  Description of Artificial Sequence: Synthetic oligonucleotide
  modified_base (4)..(4): a, c, u, g, unknown or other
aagngaugguauagaucuc

SEQ ID NO: 1192458 - RNA, 19 nt, Artificial Sequence
  Description of Artificial Sequence: Synthetic oligonucleotide
uuucuacuggcaucugcac

SEQ ID NO: 1192459 - RNA, 19 nt, Artificial Sequence
  Description of Artificial Sequence: Synthetic oligonucleotide
aaguuaucauccacagcug

SEQ ID NO: 1192460 - RNA, 19 nt, Artificial Sequence
  Description of Artificial Sequence: Synthetic oligonucleotide
caaugcuuguucuccauga

SEQ ID NO: 1192461 - RNA, 19 nt, Artificial Sequence
  Description of Artificial Sequence: Synthetic oligonucleotide
  modified_base (15)..(15): a, c, u, g, unknown or other
aagccauccacaagngaug

SEQ ID NO: 1192462 - RNA, 19 nt, Artificial Sequence
  Description of Artificial Sequence: Synthetic oligonucleotide
ugcauucgguuuaccagcu

SEQ ID NO: 1192463 - RNA, 19 nt, Artificial Sequence
  Description of Artificial Sequence: Synthetic oligonucleotide
uccugaucaaaagauguuu

SEQ ID NO: 1192464 - RNA, 19 nt, Artificial Sequence
  Description of Artificial Sequence: Synthetic oligonucleotide
ugguguuguagucuucuuu

SEQ ID NO: 1192465 - RNA, 19 nt, Artificial Sequence
  Description of Artificial Sequence: Synthetic oligonucleotide
acuacugggguaucaggau

SEQ ID NO: 1192466 - RNA, 19 nt, Artificial Sequence
  Description of Artificial Sequence: Synthetic oligonucleotide
cuacaucugaauccugauc

SEQ ID NO: 1192467 - RNA, 19 nt, Artificial Sequence
  Description of Artificial Sequence: Synthetic oligonucleotide
uuuccuagccccgaccagu

SEQ ID NO: 1192468 - RNA, 19 nt, Artificial Sequence
  Description of Artificial Sequence: Synthetic oligonucleotide
uuuccucccaggguuauaa

SEQ ID NO: 1192469 - RNA, 19 nt, Artificial Sequence
  Description of Artificial Sequence: Synthetic oligonucleotide
ugcucuuugggcacuuaau

SEQ ID NO: 1192470 - RNA, 19 nt, Artificial Sequence
  Description of Artificial Sequence: Synthetic oligonucleotide
agagagcuuaacauuguga

SEQ ID NO: 1192471 - RNA, 19 nt, Artificial Sequence
  Description of Artificial Sequence: Synthetic oligonucleotide
cagaguuuacagucucuac

SEQ ID NO: 1192472 - RNA, 19 nt, Artificial Sequence
  Description of Artificial Sequence: Synthetic oligonucleotide
cuaagccaucugaaggaac

SEQ ID NO: 1192473 - RNA, 19 nt, Artificial Sequence
  Description of Artificial Sequence: Synthetic oligonucleotide
augguauagaucucucauu

SEQ ID NO: 1192474 - RNA, 19 nt, Artificial Sequence
  Description of Artificial Sequence: Synthetic oligonucleotide
agcuuaacauugugaaaau

SEQ ID NO: 1192475 - RNA, 19 nt, Artificial Sequence
  Description of Artificial Sequence: Synthetic oligonucleotide
accaguccguggcagagca

SEQ ID NO: 1192476 - RNA, 19 nt, Artificial Sequence
  Description of Artificial Sequence: Synthetic oligonucleotide
cacuacugggguaucagga

SEQ ID NO: 1192477 - RNA, 19 nt, Artificial Sequence
  Description of Artificial Sequence: Synthetic oligonucleotide
gggauuauggggauauacc

SEQ ID NO: 1192478 - RNA, 19 nt, Artificial Sequence
  Description of Artificial Sequence: Synthetic oligonucleotide
agucuugccagagagcuua

SEQ ID NO: 1192479 - RNA, 19 nt, Artificial Sequence
  Description of Artificial Sequence: Synthetic oligonucleotide
uaauguuguuacugcccac

SEQ ID NO: 1192480 - RNA, 19 nt, Artificial Sequence
  Description of Artificial Sequence: Synthetic oligonucleotide
auuaaauaagccagaugua

SEQ ID NO: 1192481 - RNA, 19 nt, Artificial Sequence
  Description of Artificial Sequence: Synthetic oligonucleotide
ucuaagccaucugaaggaa

SEQ ID NO: 1192482 - RNA, 19 nt, Artificial Sequence
  Description of Artificial Sequence: Synthetic oligonucleotide
cacuaaauucuucaucaaa

SEQ ID NO: 1192483 - RNA, 19 nt, Artificial Sequence
  Description of Artificial Sequence: Synthetic oligonucleotide
aucaucugaccaaggguuc

SEQ ID NO: 1192484 - RNA, 19 nt, Artificial Sequence
  Description of Artificial Sequence: Synthetic oligonucleotide
uucgguuuaccagcugaug

SEQ ID NO: 1192485 - RNA, 19 nt, Artificial Sequence
  Description of Artificial Sequence: Synthetic oligonucleotide
cuacugggguaucaggauc

SEQ ID NO: 1192486 - RNA, 19 nt, Artificial Sequence
  Description of Artificial Sequence: Synthetic oligonucleotide
uggguuugggaccuuuauu

SEQ ID NO: 1192487 - RNA, 19 nt, Artificial Sequence
  Description of Artificial Sequence: Synthetic oligonucleotide
aaggacaacacaagauauu

SEQ ID NO: 1192488 - RNA, 19 nt, Artificial Sequence
  Description of Artificial Sequence: Synthetic oligonucleotide
ugucuacaucugaauccug

SEQ ID NO: 1192489 - RNA, 19 nt, Artificial Sequence
  Description of Artificial Sequence: Synthetic oligonucleotide
aaagguguacuuaggucuu

SEQ ID NO: 1192490 - RNA, 19 nt, Artificial Sequence
  Description of Artificial Sequence: Synthetic oligonucleotide
uucuacugguguuccacua

SEQ ID NO: 1192491 - RNA, 19 nt, Artificial Sequence
  Description of Artificial Sequence: Synthetic oligonucleotide
cucuccggagcagagaauc

SEQ ID NO: 1192492 - RNA, 19 nt, Artificial Sequence
  Description of Artificial Sequence: Synthetic oligonucleotide
gagaugccuuaacuuucag

SEQ ID NO: 1192493 - RNA, 19 nt, Artificial Sequence
  Description of Artificial Sequence: Synthetic oligonucleotide
ccaaaugaugguguaaaac

SEQ ID NO: 1192494 - RNA, 19 nt, Artificial Sequence
  Description of Artificial Sequence: Synthetic oligonucleotide
cuuggaauaaccacagguu

SEQ ID NO: 1192495 - RNA, 19 nt, Artificial Sequence
  Description of Artificial Sequence: Synthetic oligonucleotide
ccgaguuccaaacugacca

SEQ ID NO: 1192496 - RNA, 19 nt, Artificial Sequence
  Description of Artificial Sequence: Synthetic oligonucleotide
cucuuugggcacuuaauua

SEQ ID NO: 1192497 - RNA, 19 nt, Artificial Sequence
  Description of Artificial Sequence: Synthetic oligonucleotide
ucuccggagcagagaaucu

SEQ ID NO: 1192498 - RNA, 19 nt, Artificial Sequence
  Description of Artificial Sequence: Synthetic oligonucleotide
uggggucaaugucucuucu

SEQ ID NO: 1192499 - RNA, 19 nt, Artificial Sequence
  Description of Artificial Sequence: Synthetic oligonucleotide
aagccgaguuccaaacuga

SEQ ID NO: 1192500 - RNA, 19 nt, Artificial Sequence
  Description of Artificial Sequence: Synthetic oligonucleotide
guaucugaaggugguuacc

SEQ ID NO: 1192501 - RNA, 19 nt, Artificial Sequence
  Description of Artificial Sequence: Synthetic oligonucleotide
agguguacuuaggucuuuc

SEQ ID NO: 1192502 - RNA, 19 nt, Artificial Sequence
  Description of Artificial Sequence: Synthetic oligonucleotide
cucuuggaauaaccacagg

SEQ ID NO: 1192503 - RNA, 19 nt, Artificial Sequence
  Description of Artificial Sequence: Synthetic oligonucleotide
gcccuuuuaccuuuuggug

SEQ ID NO: 1192504 - RNA, 19 nt, Artificial Sequence
  Description of Artificial Sequence: Synthetic oligonucleotide
uaccagcugaugugggugu

SEQ ID NO: 1192505 - RNA, 19 nt, Artificial Sequence
  Description of Artificial Sequence: Synthetic oligonucleotide
caaaaccauagggauuaug

SEQ ID NO: 1192506 - RNA, 19 nt, Artificial Sequence
  Description of Artificial Sequence: Synthetic oligonucleotide
caucagauucugcaaaaua

SEQ ID NO: 1192507 - RNA, 19 nt, Artificial Sequence
  Description of Artificial Sequence: Synthetic oligonucleotide
caucugaccaaggguuccg

SEQ ID NO: 1192508 - RNA, 19 nt, Artificial Sequence
  Description of Artificial Sequence: Synthetic oligonucleotide
agccgaguuccaaacugac

SEQ ID NO: 1192509 - RNA, 19 nt, Artificial Sequence
  Description of Artificial Sequence: Synthetic oligonucleotide
cuuugggcacuuaauuaaa

SEQ ID NO: 1192510 - RNA, 19 nt, Artificial Sequence
  Description of Artificial Sequence: Synthetic oligonucleotide
agagaaucucuuggaauaa

SEQ ID NO: 1192511 - RNA, 19 nt, Artificial Sequence
  Description of Artificial Sequence: Synthetic oligonucleotide
aggugguucagaagugaag

SEQ ID NO: 1192512 - RNA, 19 nt, Artificial Sequence
  Description of Artificial Sequence: Synthetic oligonucleotide
  modified_base (2)..(2): a, c, u, g, unknown or other
gngaugguauagaucucuc

SEQ ID NO: 1192513 - RNA, 19 nt, Artificial Sequence
  Description of Artificial Sequence: Synthetic oligonucleotide
ugggcgacuuuuacuucac

SEQ ID NO: 1192514 - RNA, 19 nt, Artificial Sequence
  Description of Artificial Sequence: Synthetic oligonucleotide
acugcccacaaaauucuga

SEQ ID NO: 1192515 - RNA, 19 nt, Artificial Sequence
  Description of Artificial Sequence: Synthetic oligonucleotide
uguuugcuucagaccaaau

SEQ ID NO: 1192516 - RNA, 19 nt, Artificial Sequence
  Description of Artificial Sequence: Synthetic oligonucleotide
guucgugcucuuugggcac

SEQ ID NO: 1192517 - RNA, 19 nt, Artificial Sequence
  Description of Artificial Sequence: Synthetic oligonucleotide
gguuugaagccauccacaa

SEQ ID NO: 1192518 - RNA, 19 nt, Artificial Sequence
  Description of Artificial Sequence: Synthetic oligonucleotide
uuccuagccccgaccaguc

SEQ ID NO: 1192519 - RNA, 19 nt, Artificial Sequence
  Description of Artificial Sequence: Synthetic oligonucleotide
  modified_base (7)..(7): a, c, u, g, unknown or other
cacaagngaugguauagau

SEQ ID NO: 1192520 - RNA, 19 nt, Artificial Sequence
  Description of Artificial Sequence: Synthetic oligonucleotide
gguaucaggaucacccuuc

SEQ ID NO: 1192521 - RNA, 19 nt, Artificial Sequence
  Description of Artificial Sequence: Synthetic oligonucleotide
aacuuuucguuggccuggu

SEQ ID NO: 1192522 - RNA, 19 nt, Artificial Sequence
  Description of Artificial Sequence: Synthetic oligonucleotide
uauaccacucgggcucuac

SEQ ID NO: 1192523 - RNA, 19 nt, Artificial Sequence
  Description of Artificial Sequence: Synthetic oligonucleotide
gcaaguuaucauccacagc

SEQ ID NO: 1192524 - RNA, 19 nt, Artificial Sequence
  Description of Artificial Sequence: Synthetic oligonucleotide
uuucguuggccugguuuga

SEQ ID NO: 1192525 - RNA, 19 nt, Artificial Sequence
  Description of Artificial Sequence: Synthetic oligonucleotide
ccuagccccgaccaguccg

SEQ ID NO: 1192526 - RNA, 19 nt, Artificial Sequence
  Description of Artificial Sequence: Synthetic oligonucleotide
cuucauuuucugagccuga

SEQ ID NO: 1192527 - RNA, 19 nt, Artificial Sequence
  Description of Artificial Sequence: Synthetic oligonucleotide
ggugguucagaagugaagu

SEQ ID NO: 1192528 - RNA, 19 nt, Artificial Sequence
  Description of Artificial Sequence: Synthetic oligonucleotide
ggggcuguaucugaaggug

SEQ ID NO: 1192529 - RNA, 19 nt, Artificial Sequence
  Description of Artificial Sequence: Synthetic oligonucleotide
agaccaaaugaugguguaa

SEQ ID NO: 1192530 - RNA, 19 nt, Artificial Sequence
  Description of Artificial Sequence: Synthetic oligonucleotide
cugagucagaguuuacagu

SEQ ID NO: 1192531 - RNA, 19 nt, Artificial Sequence
  Description of Artificial Sequence: Synthetic oligonucleotide
cuacugguguuccacuaaa

SEQ ID NO: 1192532 - RNA, 19 nt, Artificial Sequence
  Description of Artificial Sequence: Synthetic oligonucleotide
aagcaguaucuuccucauu

SEQ ID NO: 1192533 - RNA, 19 nt, Artificial Sequence
  Description of Artificial Sequence: Synthetic oligonucleotide
ggacucaucaucugaccaa

SEQ ID NO: 1192534 - RNA, 19 nt, Artificial Sequence
  Description of Artificial Sequence: Synthetic oligonucleotide
agccccgaccaguccgugg

SEQ ID NO: 1192535 - RNA, 19 nt, Artificial Sequence
  Description of Artificial Sequence: Synthetic oligonucleotide
cuuuucguuggccugguuu

SEQ ID NO: 1192536 - RNA, 19 nt, Artificial Sequence
  Description of Artificial Sequence: Synthetic oligonucleotide
cugcaccauuaaucaaaac

SEQ ID NO: 1192537 - RNA, 19 nt, Artificial Sequence
  Description of Artificial Sequence: Synthetic oligonucleotide
uugguguuguagucuucuu

SEQ ID NO: 1192538 - RNA, 19 nt, Artificial Sequence
  Description of Artificial Sequence: Synthetic oligonucleotide
gaacuuuaucuguuugcuu

SEQ ID NO: 1192539 - RNA, 19 nt, Artificial Sequence
  Description of Artificial Sequence: Synthetic oligonucleotide
ugguuuccucccaggguua

SEQ ID NO: 1192540 - RNA, 19 nt, Artificial Sequence
  Description of Artificial Sequence: Synthetic oligonucleotide
auucgguuuaccagcugau

SEQ ID NO: 1192541 - RNA, 19 nt, Artificial Sequence
  Description of Artificial Sequence: Synthetic oligonucleotide
ucgggcucuacacgcugau

SEQ ID NO: 1192542 - RNA, 19 nt, Artificial Sequence
  Description of Artificial Sequence: Synthetic oligonucleotide
cugagaaaucaaaggugua

SEQ ID NO: 1192543 - RNA, 19 nt, Artificial Sequence
  Description of Artificial Sequence: Synthetic oligonucleotide
cguuggccugguuugaagc

SEQ ID NO: 1192544 - RNA, 19 nt, Artificial Sequence
  Description of Artificial Sequence: Synthetic oligonucleotide
cuuuuaccuuuugguguug

SEQ ID NO: 1192545 - RNA, 19 nt, Artificial Sequence
  Description of Artificial Sequence: Synthetic oligonucleotide
ccucuugaaacagguaaac

SEQ ID NO: 1192546 - RNA, 19 nt, Artificial Sequence
  Description of Artificial Sequence: Synthetic oligonucleotide
ggcgacuuuuacuucacgu

SEQ ID NO: 1192547 - RNA, 19 nt, Artificial Sequence
  Description of Artificial Sequence: Synthetic oligonucleotide
ucuugccagagagcuuaac

SEQ ID NO: 1192548 - RNA, 19 nt, Artificial Sequence
  Description of Artificial Sequence: Synthetic oligonucleotide
guuaugggagaugccuuaa

SEQ ID NO: 1192549 - RNA, 19 nt, Artificial Sequence
  Description of Artificial Sequence: Synthetic oligonucleotide
aagguguacuuaggucuuu

SEQ ID NO: 1192550 - RNA, 19 nt, Artificial Sequence
  Description of Artificial Sequence: Synthetic oligonucleotide
cugaaucaucuucugacuu

SEQ ID NO: 1192551 - RNA, 19 nt, Artificial Sequence
  Description of Artificial Sequence: Synthetic oligonucleotide
gggauauaccacucgggcu

SEQ ID NO: 1192552 - RNA, 19 nt, Artificial Sequence
  Description of Artificial Sequence: Synthetic oligonucleotide
guaucaggaucacccuucu

SEQ ID NO: 1192553 - RNA, 19 nt, Artificial Sequence
  Description of Artificial Sequence: Synthetic oligonucleotide
uucgugcucuuugggcacu

SEQ ID NO: 1192554 - RNA, 19 nt, Artificial Sequence
  Description of Artificial Sequence: Synthetic oligonucleotide
gauauaccacucgggcucu

SEQ ID NO: 1192555 - RNA, 19 nt, Artificial Sequence
  Description of Artificial Sequence: Synthetic oligonucleotide
  modified_base (11)..(11): a, c, u, g, unknown or other
cauccacaagngaugguau

SEQ ID NO: 1192556 - RNA, 19 nt, Artificial Sequence
  Description of Artificial Sequence: Synthetic oligonucleotide
gccccgaccaguccguggc

SEQ ID NO: 1192557 - RNA, 19 nt, Artificial Sequence
  Description of Artificial Sequence: Synthetic oligonucleotide
gggcgacuuuuacuucacg

SEQ ID NO: 1192558 - RNA, 19 nt, Artificial Sequence
  Description of Artificial Sequence: Synthetic oligonucleotide
cccuuuuaccuuuuggugu

SEQ ID NO: 1192559 - RNA, 19 nt, Artificial Sequence
  Description of Artificial Sequence: Synthetic oligonucleotide
ccucauuacuaucaaauuu

SEQ ID NO: 1192560 - RNA, 19 nt, Artificial Sequence
  Description of Artificial Sequence: Synthetic oligonucleotide
auuccucuugaaacaggua

SEQ ID NO: 1192561 - RNA, 19 nt, Artificial Sequence
  Description of Artificial Sequence: Synthetic oligonucleotide
cccaggguuauaaucaccu

SEQ ID NO: 1192562 - RNA, 19 nt, Artificial Sequence
  Description of Artificial Sequence: Synthetic oligonucleotide
accaugaagccgaguucca

SEQ ID NO: 1192563 - RNA, 19 nt, Artificial Sequence
  Description of Artificial Sequence: Synthetic oligonucleotide
acugaccaaugggcugaag

SEQ ID NO: 1192564 - RNA, 19 nt, Artificial Sequence
  Description of Artificial Sequence: Synthetic oligonucleotide
gccgaguuccaaacugacc

SEQ ID NO: 1192565 - RNA, 19 nt, Artificial Sequence
  Description of Artificial Sequence: Synthetic oligonucleotide
cuguuugcuucagaccaaa

SEQ ID NO: 1192566 - RNA, 19 nt, Artificial Sequence
  Description of Artificial Sequence: Synthetic oligonucleotide
cucgggcucuacacgcuga

SEQ ID NO: 1192567 - RNA, 19 nt, Artificial Sequence
  Description of Artificial Sequence: Synthetic oligonucleotide
gagggcuugcagcaucuuu

SEQ ID NO: 1192568 - RNA, 19 nt, Artificial Sequence
  Description of Artificial Sequence: Synthetic oligonucleotide
gcucuuugggcacuuaauu

SEQ ID NO: 1192569 - RNA, 19 nt, Artificial Sequence
  Description of Artificial Sequence: Synthetic oligonucleotide
ggaucacccuucuucuucu

SEQ ID NO: 1192570 - RNA, 19 nt, Artificial Sequence
  Description of Artificial Sequence: Synthetic oligonucleotide
uaacgagggcuugcagcau

SEQ ID NO: 1192571 - RNA, 19 nt, Artificial Sequence
  Description of Artificial Sequence: Synthetic oligonucleotide
cuguaccuucuacuggugu

SEQ ID NO: 1192572 - RNA, 19 nt, Artificial Sequence
  Description of Artificial Sequence: Synthetic oligonucleotide
gcgacuuuuacuucacguu

SEQ ID NO: 1192573 - RNA, 19 nt, Artificial Sequence
  Description of Artificial Sequence: Synthetic oligonucleotide
uucggcccuuuuaccuuuu

SEQ ID NO: 1192574 - RNA, 19 nt, Artificial Sequence
  Description of Artificial Sequence: Synthetic oligonucleotide
uagggauuauggggauaua

SEQ ID NO: 1192575 - RNA, 19 nt, Artificial Sequence
  Description of Artificial Sequence: Synthetic oligonucleotide
ccuguaccuucuacuggug

SEQ ID NO: 1192576 - RNA, 19 nt, Artificial Sequence
  Description of Artificial Sequence: Synthetic oligonucleotide
gcauucgguuuaccagcug

SEQ ID NO: 1192577 - RNA, 19 nt, Artificial Sequence
  Description of Artificial Sequence: Synthetic oligonucleotide
gaccaaggguuccguuucu

SEQ ID NO: 1192578 - RNA, 19 nt, Artificial Sequence
  Description of Artificial Sequence: Synthetic oligonucleotide
gcucuacacgcugauuauc

SEQ ID NO: 1192579 - RNA, 19 nt, Artificial Sequence
  Description of Artificial Sequence: Synthetic oligonucleotide
ccugaucaaaagauguuuu

SEQ ID NO: 1192580 - RNA, 19 nt, Artificial Sequence
  Description of Artificial Sequence: Synthetic oligonucleotide
gcugggcgacuuuuacuuc

SEQ ID NO: 1192581 - RNA, 19 nt, Artificial Sequence
  Description of Artificial Sequence: Synthetic oligonucleotide
cagcugggcgacuuuuacu

SEQ ID NO: 1192582 - RNA, 19 nt, Artificial Sequence
  Description of Artificial Sequence: Synthetic oligonucleotide
  modified_base (8)..(8): a, c, u, g, unknown or other
ccacaagngaugguauaga

SEQ ID NO: 1192583 - RNA, 19 nt, Artificial Sequence
  Description of Artificial Sequence: Synthetic oligonucleotide
ccccuucggcccuuuuacc

SEQ ID NO: 1192584 - RNA, 19 nt, Artificial Sequence
  Description of Artificial Sequence: Synthetic oligonucleotide
cuagccccgaccaguccgu

SEQ ID NO: 1192585 - RNA, 19 nt, Artificial Sequence
  Description of Artificial Sequence: Synthetic oligonucleotide
uagccccgaccaguccgug

SEQ ID NO: 1192586 - RNA, 19 nt, Artificial Sequence
  Description of Artificial Sequence: Synthetic oligonucleotide
ugccaccaugaagccgagu

SEQ ID NO: 1192587 - RNA, 19 nt, Artificial Sequence
  Description of Artificial Sequence: Synthetic oligonucleotide
gguuccguuucuucacuuu

SEQ ID NO: 1192588 - RNA, 19 nt, Artificial Sequence
  Description of Artificial Sequence: Synthetic oligonucleotide
cugcucuccggagcagaga

SEQ ID NO: 1192589 - RNA, 19 nt, Artificial Sequence
  Description of Artificial Sequence: Synthetic oligonucleotide
cccgaccaguccguggcag

SEQ ID NO: 1192590 - RNA, 19 nt, Artificial Sequence
  Description of Artificial Sequence: Synthetic oligonucleotide
auauaccacucgggcucua

SEQ ID NO: 1192591 - RNA, 19 nt, Artificial Sequence
  Description of Artificial Sequence: Synthetic oligonucleotide
cgacuuuuacuucacguuu

SEQ ID NO: 1192592 - RNA, 19 nt, Artificial Sequence
  Description of Artificial Sequence: Synthetic oligonucleotide
cgcugauuaucaucauaaa

SEQ ID NO: 1192593 - RNA, 19 nt, Artificial Sequence
  Description of Artificial Sequence: Synthetic oligonucleotide
gguuaccuuuuagcagcaa

SEQ ID NO: 1192594 - RNA, 19 nt, Artificial Sequence
  Description of Artificial Sequence: Synthetic oligonucleotide
cgaguuccaaacugaccaa

SEQ ID NO: 1192595 - RNA, 19 nt, Artificial Sequence
  Description of Artificial Sequence: Synthetic oligonucleotide
caggaucacccuucuucuu

SEQ ID NO: 1192596 - RNA, 19 nt, Artificial Sequence
  Description of Artificial Sequence: Synthetic oligonucleotide
cagcugauguggguguuuu

SEQ ID NO: 1192597 - RNA, 19 nt, Artificial Sequence
  Description of Artificial Sequence: Synthetic oligonucleotide
cagucuugccagagagcuu

SEQ ID NO: 1192598 - RNA, 19 nt, Artificial Sequence
  Description of Artificial Sequence: Synthetic oligonucleotide
ccauagggauuauggggau

SEQ ID NO: 1192599 - RNA, 19 nt, Artificial Sequence
  Description of Artificial Sequence: Synthetic oligonucleotide
gguuuccucccaggguuau

SEQ ID NO: 1192600 - RNA, 19 nt, Artificial Sequence
  Description of Artificial Sequence: Synthetic oligonucleotide
ccguggcagagcagguggu

SEQ ID NO: 1192601 - RNA, 19 nt, Artificial Sequence
  Description of Artificial Sequence: Synthetic oligonucleotide
ccccgaccaguccguggca

SEQ ID NO: 1192602 - RNA, 19 nt, Artificial Sequence
  Description of Artificial Sequence: Synthetic oligonucleotide
cgagggcuugcagcaucuu

SEQ ID NO: 1192603 - RNA, 19 nt, Artificial Sequence
  Description of Artificial Sequence: Synthetic oligonucleotide
  modified_base (1)..(1): a, c, u, g, unknown or other
ngaugguauagaucucuca

SEQ ID NO: 1192604 - RNA, 19 nt, Artificial Sequence
  Description of Artificial Sequence: Synthetic oligonucleotide
aaagaauaauaauugcugg

SEQ ID NO: 1192605 - RNA, 19 nt, Artificial Sequence
  Description of Artificial Sequence: Synthetic oligonucleotide
aagaauaauaauugcuggc

SEQ ID NO: 1192606 - RNA, 19 nt, Artificial Sequence
  Description of Artificial Sequence: Synthetic oligonucleotide
uuucuuuauauauaguugg

SEQ ID NO: 1192607 - RNA, 19 nt, Artificial Sequence
  Description of Artificial Sequence: Synthetic oligonucleotide
gaugaauucacauuguaag

SEQ ID NO: 1192608 - RNA, 19 nt, Artificial Sequence
  Description of Artificial Sequence: Synthetic oligonucleotide
aagucauuauucuuaaacg

SEQ ID NO: 1192609 - RNA, 19 nt, Artificial Sequence
  Description of Artificial Sequence: Synthetic oligonucleotide
uggaauaauauucauagca

SEQ ID NO: 1192610 - RNA, 19 nt, Artificial Sequence
  Description of Artificial Sequence: Synthetic oligonucleotide
uuaaacuugauguucuucg

SEQ ID NO: 1192611 - RNA, 19 nt, Artificial Sequence
  Description of Artificial Sequence: Synthetic oligonucleotide
aauacaacucauaaaauuc

SEQ ID NO: 1192612 - RNA, 19 nt, Artificial Sequence
  Description of Artificial Sequence: Synthetic oligonucleotide
aagauuauguccuuggugu

SEQ ID NO: 1192613 - RNA, 19 nt, Artificial Sequence
  Description of Artificial Sequence: Synthetic oligonucleotide
uguacaacaaagauuaugu

SEQ ID NO: 1192614 - RNA, 19 nt, Artificial Sequence
  Description of Artificial Sequence: Synthetic oligonucleotide
agucauuauucuuaaacgc

SEQ ID NO: 1192615 - RNA, 19 nt, Artificial Sequence
  Description of Artificial Sequence: Synthetic oligonucleotide
aaauccuuuaagugguugc

SEQ ID NO: 1192616 - RNA, 19 nt, Artificial Sequence
  Description of Artificial Sequence: Synthetic oligonucleotide
uugucaaccauuuauauac

SEQ ID NO: 1192617 - RNA, 19 nt, Artificial Sequence
  Description of Artificial Sequence: Synthetic oligonucleotide
aaguucaagaucuuauagg

SEQ ID NO: 1192618 - RNA, 19 nt, Artificial Sequence
  Description of Artificial Sequence: Synthetic oligonucleotide
aauguuauaggaugccagg

SEQ ID NO: 1192619 - RNA, 19 nt, Artificial Sequence
  Description of Artificial Sequence: Synthetic oligonucleotide
agaauaauaauugcuggcc

SEQ ID NO: 1192620 - RNA, 19 nt, Artificial Sequence
  Description of Artificial Sequence: Synthetic oligonucleotide
aacauaacagcucuggagu

SEQ ID NO: 1192621 - RNA, 19 nt, Artificial Sequence
  Description of Artificial Sequence: Synthetic oligonucleotide
ucuaaauuauagaaugccc

SEQ ID NO: 1192622 - RNA, 19 nt, Artificial Sequence
  Description of Artificial Sequence: Synthetic oligonucleotide
ucuauguuuagccauauau

SEQ ID NO: 1192623 - RNA, 19 nt, Artificial Sequence
  Description of Artificial Sequence: Synthetic oligonucleotide
cauuacuuugagaaaaugg

SEQ ID NO: 1192624 - RNA, 19 nt, Artificial Sequence
  Description of Artificial Sequence: Synthetic oligonucleotide
uauguuuagccauauaugu

SEQ ID NO: 1192625 - RNA, 19 nt, Artificial Sequence
  Description of Artificial Sequence: Synthetic oligonucleotide
aaugucugcauauguuggc

SEQ ID NO: 1192626 - RNA, 19 nt, Artificial Sequence
  Description of Artificial Sequence: Synthetic oligonucleotide
ucuauguaaauccuuuaag

SEQ ID NO: 1192627 - RNA, 19 nt, Artificial Sequence
  Description of Artificial Sequence: Synthetic oligonucleotide
uacauuauuaaaauacaac

SEQ ID NO: 1192628 - RNA, 19 nt, Artificial Sequence
  Description of Artificial Sequence: Synthetic oligonucleotide
ucuuaaacgcuucauaacu

SEQ ID NO: 1192629 - RNA, 19 nt, Artificial Sequence
  Description of Artificial Sequence: Synthetic oligonucleotide
uacacuacagcauaaggcc

SEQ ID NO: 1192630 - RNA, 19 nt, Artificial Sequence
  Description of Artificial Sequence: Synthetic oligonucleotide
uauacacuacagcauaagg

SEQ ID NO: 1192631 - RNA, 19 nt, Artificial Sequence
  Description of Artificial Sequence: Synthetic oligonucleotide
aaugaaccaauguuauagg

SEQ ID NO: 1192632 - RNA, 19 nt, Artificial Sequence
  Description of Artificial Sequence: Synthetic oligonucleotide
aaagauuauguccuuggug

SEQ ID NO: 1192633 - RNA, 19 nt, Artificial Sequence
  Description of Artificial Sequence: Synthetic oligonucleotide
uauauaguuggugagauac

SEQ ID NO: 1192634 - RNA, 19 nt, Artificial Sequence
  Description of Artificial Sequence: Synthetic oligonucleotide
uauugcuuuaaugagguag

SEQ ID NO: 1192635 - RNA, 19 nt, Artificial Sequence
  Description of Artificial Sequence: Synthetic oligonucleotide
auaauugcuggccauauug

SEQ ID NO: 1192636 - RNA, 19 nt, Artificial Sequence
  Description of Artificial Sequence: Synthetic oligonucleotide
aauguaaaaguuuggcaca

SEQ ID NO: 1192637 - RNA, 19 nt, Artificial Sequence
  Description of Artificial Sequence: Synthetic oligonucleotide
ugguguaaauguaacaaag

SEQ ID NO: 1192638 - RNA, 19 nt, Artificial Sequence
  Description of Artificial Sequence: Synthetic oligonucleotide
uuaaacgcuucauaacugg

SEQ ID NO: 1192639 - RNA, 19 nt, Artificial Sequence
  Description of Artificial Sequence: Synthetic oligonucleotide
uaauauucauagcacacca

SEQ ID NO: 1192640 - RNA, 19 nt, Artificial Sequence
  Description of Artificial Sequence: Synthetic oligonucleotide
agaguccugaauaaaaugc

SEQ ID NO: 1192641 - RNA, 19 nt, Artificial Sequence
  Description of Artificial Sequence: Synthetic oligonucleotide
auaauauucauagcacacc

SEQ ID NO: 1192642 - RNA, 19 nt, Artificial Sequence
  Description of Artificial Sequence: Synthetic oligonucleotide
gauaccugauugcagaugc

SEQ ID NO: 1192643 - RNA, 19 nt, Artificial Sequence
  Description of Artificial Sequence: Synthetic oligonucleotide
aguucaagaucuuauagga

SEQ ID NO: 1192644 - RNA, 19 nt, Artificial Sequence
  Description of Artificial Sequence: Synthetic oligonucleotide
uauaggauugucuauguaa

SEQ ID NO: 1192645 - RNA, 19 nt, Artificial Sequence
  Description of Artificial Sequence: Synthetic oligonucleotide
uaacauaacagcucuggag

SEQ ID NO: 1192646 - RNA, 19 nt, Artificial Sequence
  Description of Artificial Sequence: Synthetic oligonucleotide
aauccuuuaagugguugcc

SEQ ID NO: 1192647 - RNA, 19 nt, Artificial Sequence
  Description of Artificial Sequence: Synthetic oligonucleotide
auacacuacagcauaaggc

SEQ ID NO: 1192648 - RNA, 19 nt, Artificial Sequence
  Description of Artificial Sequence: Synthetic oligonucleotide
aacauaaagauaaggaaga

SEQ ID NO: 1192649 - RNA, 19 nt, Artificial Sequence
  Description of Artificial Sequence: Synthetic oligonucleotide
uaauuuacuuacauuauua

SEQ ID NO: 1192650 - RNA, 19 nt, Artificial Sequence
  Description of Artificial Sequence: Synthetic oligonucleotide
uguacuacaguugaagaug

SEQ ID NO: 1192651 - RNA, 19 nt, Artificial Sequence
  Description of Artificial Sequence: Synthetic oligonucleotide
cucuauuggacaaucuugg

SEQ ID NO: 1192652 - RNA, 19 nt, Artificial Sequence
  Description of Artificial Sequence: Synthetic oligonucleotide
ugaggaacuggcauucugg

SEQ ID NO: 1192653 - RNA, 19 nt, Artificial Sequence
  Description of Artificial Sequence: Synthetic oligonucleotide
uuauagaaugcccauuacu

SEQ ID NO: 1192654 - RNA, 19 nt, Artificial Sequence
  Description of Artificial Sequence: Synthetic oligonucleotide
uugguuaucacaucccacc

SEQ ID NO: 1192655 - RNA, 19 nt, Artificial Sequence
  Description of Artificial Sequence: Synthetic oligonucleotide
uguuuagccauauauguau

SEQ ID NO: 1192656 - RNA, 19 nt, Artificial Sequence
  Description of Artificial Sequence: Synthetic oligonucleotide
ucaagaucuuauaggauug

SEQ ID NO: 1192657 - RNA, 19 nt, Artificial Sequence
  Description of Artificial Sequence: Synthetic oligonucleotide
cacuguaacacaaauuuug

SEQ ID NO: 1192658 - RNA, 19 nt, Artificial Sequence
  Description of Artificial Sequence: Synthetic oligonucleotide
aguguaacauaacagcucu

SEQ ID NO: 1192659 - RNA, 19 nt, Artificial Sequence
  Description of Artificial Sequence: Synthetic oligonucleotide
uugaggaguacaaaugucu

SEQ ID NO: 1192660 - RNA, 19 nt, Artificial Sequence
  Description of Artificial Sequence: Synthetic oligonucleotide
aauaauaauugcuggccau

SEQ ID NO: 1192661 - RNA, 19 nt, Artificial Sequence
  Description of Artificial Sequence: Synthetic oligonucleotide
caaugcuugaccucaaagc

SEQ ID NO: 1192662 - RNA, 19 nt, Artificial Sequence
  Description of Artificial Sequence: Synthetic oligonucleotide
auuacuuugagaaaauggu

SEQ ID NO: 1192663 - RNA, 19 nt, Artificial Sequence
  Description of Artificial Sequence: Synthetic oligonucleotide
auuucggcaacccagugug

SEQ ID NO: 1192664 - RNA, 19 nt, Artificial Sequence
  Description of Artificial Sequence: Synthetic oligonucleotide
auuuaaauauacacuacag

SEQ ID NO: 1192665 - RNA, 19 nt, Artificial Sequence
  Description of Artificial Sequence: Synthetic oligonucleotide
ugaauucacauuguaagca

SEQ ID NO: 1192666 - RNA, 19 nt, Artificial Sequence
  Description of Artificial Sequence: Synthetic oligonucleotide
ucaaugcuugaccucaaag

SEQ ID NO: 1192667 - RNA, 19 nt, Artificial Sequence
  Description of Artificial Sequence: Synthetic oligonucleotide
aacacacccauaguggaac

SEQ ID NO: 1192668 - RNA, 19 nt, Artificial Sequence
  Description of Artificial Sequence: Synthetic oligonucleotide
uuuagugacagguucuacu

SEQ ID NO: 1192669 - RNA, 19 nt, Artificial Sequence
  Description of Artificial Sequence: Synthetic oligonucleotide
ucuuguacuacaguugaag

SEQ ID NO: 1192670 - RNA, 19 nt, Artificial Sequence
  Description of Artificial Sequence: Synthetic oligonucleotide
ucuuauaggauugucuaug

SEQ ID NO: 1192671 - RNA, 19 nt, Artificial Sequence
  Description of Artificial Sequence: Synthetic oligonucleotide
auuauagaaugcccauuac

SEQ ID NO: 1192672 - RNA, 19 nt, Artificial Sequence
  Description of Artificial Sequence: Synthetic oligonucleotide
uuguaagcauuguuggagg

SEQ ID NO: 1192673 - RNA, 19 nt, Artificial Sequence
  Description of Artificial Sequence: Synthetic oligonucleotide
ucagauucgggcacuacug

SEQ ID NO: 1192674 - RNA, 19 nt, Artificial Sequence
  Description of Artificial Sequence: Synthetic oligonucleotide
ucaaccauuuauauacagu

SEQ ID NO: 1192675 - RNA, 19 nt, Artificial Sequence
  Description of Artificial Sequence: Synthetic oligonucleotide
ucaucguuggaauucuuug

SEQ ID NO: 1192676 - RNA, 19 nt, Artificial Sequence
  Description of Artificial Sequence: Synthetic oligonucleotide
aaccaauguuauaggaugc

SEQ ID NO: 1192677 - RNA, 19 nt, Artificial Sequence
  Description of Artificial Sequence: Synthetic oligonucleotide
ugagaaaaugguugaggag

SEQ ID NO: 1192678 - RNA, 19 nt, Artificial Sequence
  Description of Artificial Sequence: Synthetic oligonucleotide
gaagcacucuauuugugcc

SEQ ID NO: 1192679 - RNA, 19 nt, Artificial Sequence
  Description of Artificial Sequence: Synthetic oligonucleotide
gagugcauaaauaauuuac

SEQ ID NO: 1192680 - RNA, 19 nt, Artificial Sequence
  Description of Artificial Sequence: Synthetic oligonucleotide
gagagcuucagauuugaac

SEQ ID NO: 1192681 - RNA, 19 nt, Artificial Sequence
  Description of Artificial Sequence: Synthetic oligonucleotide
uaaauuauagaaugcccau

SEQ ID NO: 1192682 - RNA, 19 nt, Artificial Sequence
  Description of Artificial Sequence: Synthetic oligonucleotide
cuccuuagaagcaucagac

SEQ ID NO: 1192683 - RNA, 19 nt, Artificial Sequence
  Description of Artificial Sequence: Synthetic oligonucleotide
aagcacucuauuugugccg

SEQ ID NO: 1192684 - RNA, 19 nt, Artificial Sequence
  Description of Artificial Sequence: Synthetic oligonucleotide
uugacuguuggaaucagau

SEQ ID NO: 1192685 - RNA, 19 nt, Artificial Sequence
  Description of Artificial Sequence: Synthetic oligonucleotide
uacaaaugucugcauaugu

SEQ ID NO: 1192686 - RNA, 19 nt, Artificial Sequence
  Description of Artificial Sequence: Synthetic oligonucleotide
auaacuggcuuuuaaacuu

SEQ ID NO: 1192687 - RNA, 19 nt, Artificial Sequence
  Description of Artificial Sequence: Synthetic oligonucleotide
ggauugucuauguaaaucc

SEQ ID NO: 1192688 - RNA, 19 nt, Artificial Sequence
  Description of Artificial Sequence: Synthetic oligonucleotide
auauguuggccacagaaau

SEQ ID NO: 1192689 - RNA, 19 nt, Artificial Sequence
  Description of Artificial Sequence: Synthetic oligonucleotide
agaugcaguaccgagguuc

SEQ ID NO: 1192690 - RNA, 19 nt, Artificial Sequence
  Description of Artificial Sequence: Synthetic oligonucleotide
caauguuauaggaugccag

SEQ ID NO: 1192691 - RNA, 19 nt, Artificial Sequence
  Description of Artificial Sequence: Synthetic oligonucleotide
gucuaaauuauagaaugcc

SEQ ID NO: 1192692 - RNA, 19 nt, Artificial Sequence
  Description of Artificial Sequence: Synthetic oligonucleotide
agucuaaauuauagaaugc

SEQ ID NO: 1192693 - RNA, 19 nt, Artificial Sequence
  Description of Artificial Sequence: Synthetic oligonucleotide
cauagguccagucaacuug

SEQ ID NO: 1192694 - RNA, 19 nt, Artificial Sequence
  Description of Artificial Sequence: Synthetic oligonucleotide
agaauauaccuguugaaua

SEQ ID NO: 1192695 - RNA, 19 nt, Artificial Sequence
  Description of Artificial Sequence: Synthetic oligonucleotide
uuaagguugucaugagugc

SEQ ID NO: 1192696 - RNA, 19 nt, Artificial Sequence
  Description of Artificial Sequence: Synthetic oligonucleotide
uauaauuuagugacagguu

SEQ ID NO: 1192697 - RNA, 19 nt, Artificial Sequence
  Description of Artificial Sequence: Synthetic oligonucleotide
uagaguccugaauaaaaug

SEQ ID NO: 1192698 - RNA, 19 nt, Artificial Sequence
  Description of Artificial Sequence: Synthetic oligonucleotide
uaggauaccugauugcaga

SEQ ID NO: 1192699 - RNA, 19 nt, Artificial Sequence
  Description of Artificial Sequence: Synthetic oligonucleotide
aggauugucuauguaaauc

SEQ ID NO: 1192700 - RNA, 19 nt, Artificial Sequence
  Description of Artificial Sequence: Synthetic oligonucleotide
uucauuugggucauagguc

SEQ ID NO: 1192701 - RNA, 19 nt, Artificial Sequence
  Description of Artificial Sequence: Synthetic oligonucleotide
cuaacuggaauaauauuca

SEQ ID NO: 1192702 - RNA, 19 nt, Artificial Sequence
  Description of Artificial Sequence: Synthetic oligonucleotide
ugguugaggaguacaaaug

SEQ ID NO: 1192703 - RNA, 19 nt, Artificial Sequence
  Description of Artificial Sequence: Synthetic oligonucleotide
uuggaaucagauucgggca

SEQ ID NO: 1192704 - RNA, 19 nt, Artificial Sequence
  Description of Artificial Sequence: Synthetic oligonucleotide
ugauugcagaugcaguacc

SEQ ID NO: 1192705 - RNA, 19 nt, Artificial Sequence
  Description of Artificial Sequence: Synthetic oligonucleotide
uucugucaagccaacacac

SEQ ID NO: 1192706 - RNA, 19 nt, Artificial Sequence
  Description of Artificial Sequence: Synthetic oligonucleotide
uauauauaguuggugagau

SEQ ID NO: 1192707 - RNA, 19 nt, Artificial Sequence
  Description of Artificial Sequence: Synthetic oligonucleotide
ucuauuugugccgacugcc

SEQ ID NO: 1192708 - RNA, 19 nt, Artificial Sequence
  Description of Artificial Sequence: Synthetic oligonucleotide
cuguauggugagaaguugg

SEQ ID NO: 1192709 - RNA, 19 nt, Artificial Sequence
  Description of Artificial Sequence: Synthetic oligonucleotide
acaugcagcagaauauacc

SEQ ID NO: 1192710 - RNA, 19 nt, Artificial Sequence
  Description of Artificial Sequence: Synthetic oligonucleotide
auucgggcacuacuguugc

SEQ ID NO: 1192711 - RNA, 19 nt, Artificial Sequence
  Description of Artificial Sequence: Synthetic oligonucleotide
cuuaaacgcuucauaacug

SEQ ID NO: 1192712 - RNA, 19 nt, Artificial Sequence
  Description of Artificial Sequence: Synthetic oligonucleotide
uggacaaucuugguuauca

SEQ ID NO: 1192713 - RNA, 19 nt, Artificial Sequence
  Description of Artificial Sequence: Synthetic oligonucleotide
uucauaacuggcuuuuaaa

SEQ ID NO: 1192714 - RNA, 19 nt, Artificial Sequence
  Description of Artificial Sequence: Synthetic oligonucleotide
uaaacgcuucauaacuggc

SEQ ID NO: 1192715 - RNA, 19 nt, Artificial Sequence
  Description of Artificial Sequence: Synthetic oligonucleotide
cuuagaagcaucagacgug

SEQ ID NO: 1192716 - RNA, 19 nt, Artificial Sequence
  Description of Artificial Sequence: Synthetic oligonucleotide
uucuuaaacgcuucauaac

SEQ ID NO: 1192717 - RNA, 19 nt, Artificial Sequence
  Description of Artificial Sequence: Synthetic oligonucleotide
cugucaagccaacacaccc

SEQ ID NO: 1192718 - RNA, 19 nt, Artificial Sequence
  Description of Artificial Sequence: Synthetic oligonucleotide
uuggugagauacucaaugc

SEQ ID NO: 1192719 - RNA, 19 nt, Artificial Sequence
  Description of Artificial Sequence: Synthetic oligonucleotide
uuacuuugagaaaaugguu

SEQ ID NO: 1192720 - RNA, 19 nt, Artificial Sequence
  Description of Artificial Sequence: Synthetic oligonucleotide
uggugagauacucaaugcu

SEQ ID NO: 1192721 - RNA, 19 nt, Artificial Sequence
  Description of Artificial Sequence: Synthetic oligonucleotide
uuuaaugagguaguucuau

SEQ ID NO: 1192722 - RNA, 19 nt, Artificial Sequence
  Description of Artificial Sequence: Synthetic oligonucleotide
guggaauuauuauuucggc

SEQ ID NO: 1192723 - RNA, 19 nt, Artificial Sequence
  Description of Artificial Sequence: Synthetic oligonucleotide
uggugauugccccugcacc

SEQ ID NO: 1192724 - RNA, 19 nt, Artificial Sequence
  Description of Artificial Sequence: Synthetic oligonucleotide
uauaguuggugagauacuc

SEQ ID NO: 1192725 - RNA, 19 nt, Artificial Sequence
  Description of Artificial Sequence: Synthetic oligonucleotide
uacuguugcuugcugggag

SEQ ID NO: 1192726 - RNA, 19 nt, Artificial Sequence
  Description of Artificial Sequence: Synthetic oligonucleotide
uugucuauguaaauccuuu

SEQ ID NO: 1192727 - RNA, 19 nt, Artificial Sequence
  Description of Artificial Sequence: Synthetic oligonucleotide
aacaaagauuauguccuug

SEQ ID NO: 1192728 - RNA, 19 nt, Artificial Sequence
  Description of Artificial Sequence: Synthetic oligonucleotide
uccuuuaagugguugccug

SEQ ID NO: 1192729 - RNA, 19 nt, Artificial Sequence
  Description of Artificial Sequence: Synthetic oligonucleotide
uauuucggcaacccagugu

SEQ ID NO: 1192730 - RNA, 19 nt, Artificial Sequence
  Description of Artificial Sequence: Synthetic oligonucleotide
gauacucaaugcuugaccu

SEQ ID NO: 1192731 - RNA, 19 nt, Artificial Sequence
  Description of Artificial Sequence: Synthetic oligonucleotide
cuuucuagaguccugaaua

SEQ ID NO: 1192732 - RNA, 19 nt, Artificial Sequence
  Description of Artificial Sequence: Synthetic oligonucleotide
ucuggguuaagguugucau

SEQ ID NO: 1192733 - RNA, 19 nt, Artificial Sequence
  Description of Artificial Sequence: Synthetic oligonucleotide
aucacaucccaccaucuca

SEQ ID NO: 1192734 - RNA, 19 nt, Artificial Sequence
  Description of Artificial Sequence: Synthetic oligonucleotide
uggcuugaagacuuggugu

SEQ ID NO: 1192735 - RNA, 19 nt, Artificial Sequence
  Description of Artificial Sequence: Synthetic oligonucleotide
aacgcuucauaacuggcuu

SEQ ID NO: 1192736 - RNA, 19 nt, Artificial Sequence
  Description of Artificial Sequence: Synthetic oligonucleotide
ucaacuugacuguuggaau

SEQ ID NO: 1192737 - RNA, 19 nt, Artificial Sequence
  Description of Artificial Sequence: Synthetic oligonucleotide
guucauuugggucauaggu

SEQ ID NO: 1192738 - RNA, 19 nt, Artificial Sequence
  Description of Artificial Sequence: Synthetic oligonucleotide
uuagugacagguucuacuu

SEQ ID NO: 1192739 - RNA, 19 nt, Artificial Sequence
  Description of Artificial Sequence: Synthetic oligonucleotide
gagaaaaugguugaggagu

SEQ ID NO: 1192740 - RNA, 19 nt, Artificial Sequence
  Description of Artificial Sequence: Synthetic oligonucleotide
gucaaccauuuauauacag

SEQ ID NO: 1192741 - RNA, 19 nt, Artificial Sequence
  Description of Artificial Sequence: Synthetic oligonucleotide
guuaucacaucccaccauc

SEQ ID NO: 1192742 - RNA, 19 nt, Artificial Sequence
  Description of Artificial Sequence: Synthetic oligonucleotide
gaaacugugaacucacacu

SEQ ID NO: 1192743 - RNA, 19 nt, Artificial Sequence
  Description of Artificial Sequence: Synthetic oligonucleotide
uaguuggugagauacucaa

SEQ ID NO: 1192744 - RNA, 19 nt, Artificial Sequence
  Description of Artificial Sequence: Synthetic oligonucleotide
gaguccugaauaaaaugcc

SEQ ID NO: 1192745 - RNA, 19 nt, Artificial Sequence
  Description of Artificial Sequence: Synthetic oligonucleotide
ucugucaagccaacacacc

SEQ ID NO: 1192746 - RNA, 19 nt, Artificial Sequence
  Description of Artificial Sequence: Synthetic oligonucleotide
uauaggaugccagggguug

SEQ ID NO: 1192747 - RNA, 19 nt, Artificial Sequence
  Description of Artificial Sequence: Synthetic oligonucleotide
cagcugaaagucauuauuc

SEQ ID NO: 1192748 - RNA, 19 nt, Artificial Sequence
  Description of Artificial Sequence: Synthetic oligonucleotide
ugagauacucaaugcuuga

SEQ ID NO: 1192749 - RNA, 19 nt, Artificial Sequence
  Description of Artificial Sequence: Synthetic oligonucleotide
uuucuagaguccugaauaa

SEQ ID NO: 1192750 - RNA, 19 nt, Artificial Sequence
  Description of Artificial Sequence: Synthetic oligonucleotide
uaguucuauguuuagccau

SEQ ID NO: 1192751 - RNA, 19 nt, Artificial Sequence
  Description of Artificial Sequence: Synthetic oligonucleotide
agugugcucuccuuagaag

SEQ ID NO: 1192752 - RNA, 19 nt, Artificial Sequence
  Description of Artificial Sequence: Synthetic oligonucleotide
gcuaacuggaauaauauuc

SEQ ID NO: 1192753 - RNA, 19 nt, Artificial Sequence
  Description of Artificial Sequence: Synthetic oligonucleotide
auggugagaaguuggauua

SEQ ID NO: 1192754 - RNA, 19 nt, Artificial Sequence
  Description of Artificial Sequence: Synthetic oligonucleotide
auagccagcuguuucucug

SEQ ID NO: 1192755 - RNA, 19 nt, Artificial Sequence
  Description of Artificial Sequence: Synthetic oligonucleotide
ucucgagucagcugcugag

SEQ ID NO: 1192756 - RNA, 19 nt, Artificial Sequence
  Description of Artificial Sequence: Synthetic oligonucleotide
ugguuaucacaucccacca

SEQ ID NO: 1192757 - RNA, 19 nt, Artificial Sequence
  Description of Artificial Sequence: Synthetic oligonucleotide
aagcauuguuggaggaagc

SEQ ID NO: 1192758 - RNA, 19 nt, Artificial Sequence
  Description of Artificial Sequence: Synthetic oligonucleotide
uuaucacaucccaccaucu

SEQ ID NO: 1192759 - RNA, 19 nt, Artificial Sequence
  Description of Artificial Sequence: Synthetic oligonucleotide
gaugacugcuggcuugaag

SEQ ID NO: 1192760 - RNA, 19 nt, Artificial Sequence
  Description of Artificial Sequence: Synthetic oligonucleotide
accaccuagaaacugugaa

SEQ ID NO: 1192761 - RNA, 19 nt, Artificial Sequence
  Description of Artificial Sequence: Synthetic oligonucleotide
ucagacgugaggguggaca

SEQ ID NO: 1192762 - RNA, 19 nt, Artificial Sequence
  Description of Artificial Sequence: Synthetic oligonucleotide
uggccauauugcuuuaaug

SEQ ID NO: 1192763 - RNA, 19 nt, Artificial Sequence
  Description of Artificial Sequence: Synthetic oligonucleotide
cuggaauaauauucauagc

SEQ ID NO: 1192764 - RNA, 19 nt, Artificial Sequence
  Description of Artificial Sequence: Synthetic oligonucleotide
cuugguguaaauguaacaa

SEQ ID NO: 1192765 - RNA, 19 nt, Artificial Sequence
  Description of Artificial Sequence: Synthetic oligonucleotide
aaacgcuucauaacuggcu

SEQ ID NO: 1192766 - RNA, 19 nt, Artificial Sequence
  Description of Artificial Sequence: Synthetic oligonucleotide
uuauuucggcaacccagug

SEQ ID NO: 1192767 - RNA, 19 nt, Artificial Sequence
  Description of Artificial Sequence: Synthetic oligonucleotide
cuugguuaucacaucccac

SEQ ID NO: 1192768 - RNA, 19 nt, Artificial Sequence
  Description of Artificial Sequence: Synthetic oligonucleotide
gccauauugcuuuaaugag

SEQ ID NO: 1192769 - RNA, 19 nt, Artificial Sequence
  Description of Artificial Sequence: Synthetic oligonucleotide
aaauuauagaaugcccauu

SEQ ID NO: 1192770 - RNA, 19 nt, Artificial Sequence
  Description of Artificial Sequence: Synthetic oligonucleotide
gucaugagugccgaugagg

SEQ ID NO: 1192771 - RNA, 19 nt, Artificial Sequence
  Description of Artificial Sequence: Synthetic oligonucleotide
ugagaaguuggauuauauu

SEQ ID NO: 1192772 - RNA, 19 nt, Artificial Sequence
  Description of Artificial Sequence: Synthetic oligonucleotide
gauucgggcacuacuguug

SEQ ID NO: 1192773 - RNA, 19 nt, Artificial Sequence
  Description of Artificial Sequence: Synthetic oligonucleotide
auugcuuuaaugagguagu

SEQ ID NO: 1192774 - RNA, 19 nt, Artificial Sequence
  Description of Artificial Sequence: Synthetic oligonucleotide
aaggcuaacuggaauaaua

SEQ ID NO: 1192775 - RNA, 19 nt, Artificial Sequence
  Description of Artificial Sequence: Synthetic oligonucleotide
ugaucuguugcuguauggu

SEQ ID NO: 1192776 - RNA, 19 nt, Artificial Sequence
  Description of Artificial Sequence: Synthetic oligonucleotide
ucuauuggacaaucuuggu

SEQ ID NO: 1192777 - RNA, 19 nt, Artificial Sequence
  Description of Artificial Sequence: Synthetic oligonucleotide
auagaaugcccauuacuuu

SEQ ID NO: 1192778 - RNA, 19 nt, Artificial Sequence
  Description of Artificial Sequence: Synthetic oligonucleotide
ugucaaccauuuauauaca

SEQ ID NO: 1192779 - RNA, 19 nt, Artificial Sequence
  Description of Artificial Sequence: Synthetic oligonucleotide
ucacauuguaagcauuguu

SEQ ID NO: 1192780 - RNA, 19 nt, Artificial Sequence
  Description of Artificial Sequence: Synthetic oligonucleotide
auuuagugacagguucuac

SEQ ID NO: 1192781 - RNA, 19 nt, Artificial Sequence
  Description of Artificial Sequence: Synthetic oligonucleotide
caacuugacuguuggaauc

SEQ ID NO: 1192782 - RNA, 19 nt, Artificial Sequence
  Description of Artificial Sequence: Synthetic oligonucleotide
acuacagcauaaggccucc

SEQ ID NO: 1192783 - RNA, 19 nt, Artificial Sequence
  Description of Artificial Sequence: Synthetic oligonucleotide
ugagugccgaugaggagga

SEQ ID NO: 1192784 - RNA, 19 nt, Artificial Sequence
  Description of Artificial Sequence: Synthetic oligonucleotide
cagcuauauaauuuaguga

SEQ ID NO: 1192785 - RNA, 19 nt, Artificial Sequence
  Description of Artificial Sequence: Synthetic oligonucleotide
uugcuguauggugagaagu

SEQ ID NO: 1192786 - RNA, 19 nt, Artificial Sequence
  Description of Artificial Sequence: Synthetic oligonucleotide
ggaagcacucuauuugugc

SEQ ID NO: 1192787 - RNA, 19 nt, Artificial Sequence
  Description of Artificial Sequence: Synthetic oligonucleotide
cagaaauaauccaaggcua

SEQ ID NO: 1192788 - RNA, 19 nt, Artificial Sequence
  Description of Artificial Sequence: Synthetic oligonucleotide
ucgagucagcugcugagga

SEQ ID NO: 1192789 - RNA, 19 nt, Artificial Sequence
  Description of Artificial Sequence: Synthetic oligonucleotide
ugaccucaaagcuugcuuu

SEQ ID NO: 1192790 - RNA, 19 nt, Artificial Sequence
  Description of Artificial Sequence: Synthetic oligonucleotide
auaggauugucuauguaaa

SEQ ID NO: 1192791 - RNA, 19 nt, Artificial Sequence
  Description of Artificial Sequence: Synthetic oligonucleotide
acacccauaguggaaccac

SEQ ID NO: 1192792 - RNA, 19 nt, Artificial Sequence
  Description of Artificial Sequence: Synthetic oligonucleotide
ccgaugaggaggaauagcc

SEQ ID NO: 1192793 - RNA, 19 nt, Artificial Sequence
  Description of Artificial Sequence: Synthetic oligonucleotide
aauauaccuguugaauaua

SEQ ID NO: 1192794 - RNA, 19 nt, Artificial Sequence
  Description of Artificial Sequence: Synthetic oligonucleotide
aaugguugaggaguacaaa

SEQ ID NO: 1192795 - RNA, 19 nt, Artificial Sequence
  Description of Artificial Sequence: Synthetic oligonucleotide
gucuauguaaauccuuuaa

SEQ ID NO: 1192796 - RNA, 19 nt, Artificial Sequence
  Description of Artificial Sequence: Synthetic oligonucleotide
uuauaggauugucuaugua

SEQ ID NO: 1192797 - RNA, 19 nt, Artificial Sequence
  Description of Artificial Sequence: Synthetic oligonucleotide
ugcuguauggugagaaguu

SEQ ID NO: 1192798 - RNA, 19 nt, Artificial Sequence
  Description of Artificial Sequence: Synthetic oligonucleotide
uaucacaucccaccaucuc

SEQ ID NO: 1192799 - RNA, 19 nt, Artificial Sequence
  Description of Artificial Sequence: Synthetic oligonucleotide
agcuucagauuugaacuuc

SEQ ID NO: 1192800 - RNA, 19 nt, Artificial Sequence
  Description of Artificial Sequence: Synthetic oligonucleotide
cucgugucuuucuuucuag

SEQ ID NO: 1192801 - RNA, 19 nt, Artificial Sequence
  Description of Artificial Sequence: Synthetic oligonucleotide
cucuauuugugccgacugc

SEQ ID NO: 1192802 - RNA, 19 nt, Artificial Sequence
  Description of Artificial Sequence: Synthetic oligonucleotide
auuauuucggcaacccagu

SEQ ID NO: 1192803 - RNA, 19 nt, Artificial Sequence
  Description of Artificial Sequence: Synthetic oligonucleotide
uuuaagugguugccuggaa

SEQ ID NO: 1192804 - RNA, 19 nt, Artificial Sequence
  Description of Artificial Sequence: Synthetic oligonucleotide
ugucuauguaaauccuuua

SEQ ID NO: 1192805 - RNA, 19 nt, Artificial Sequence
  Description of Artificial Sequence: Synthetic oligonucleotide
agcaucagacgugagggug

SEQ ID NO: 1192806 - RNA, 19 nt, Artificial Sequence
  Description of Artificial Sequence: Synthetic oligonucleotide
aagugguugccuggaaaug

SEQ ID NO: 1192807 - RNA, 19 nt, Artificial Sequence
  Description of Artificial Sequence: Synthetic oligonucleotide
auaaugaaccaauguuaua

SEQ ID NO: 1192808 - RNA, 19 nt, Artificial Sequence
  Description of Artificial Sequence: Synthetic oligonucleotide
cucugggcauugaaaauuc

SEQ ID NO: 1192809 - RNA, 19 nt, Artificial Sequence
  Description of Artificial Sequence: Synthetic oligonucleotide
agaaauaauccaaggcuaa

SEQ ID NO: 1192810 - RNA, 19 nt, Artificial Sequence
  Description of Artificial Sequence: Synthetic oligonucleotide
gguucauuugggucauagg

SEQ ID NO: 1192811 - RNA, 19 nt, Artificial Sequence
  Description of Artificial Sequence: Synthetic oligonucleotide
ugcuuuaaugagguaguuc

SEQ ID NO: 1192812 - RNA, 19 nt, Artificial Sequence
  Description of Artificial Sequence: Synthetic oligonucleotide
gaagucuaaauuauagaau

SEQ ID NO: 1192813 - RNA, 19 nt, Artificial Sequence
  Description of Artificial Sequence: Synthetic oligonucleotide
ugaagaugacgaacauaaa

SEQ ID NO: 1192814 - RNA, 19 nt, Artificial Sequence
  Description of Artificial Sequence: Synthetic oligonucleotide
gacuucuuguacuacaguu

SEQ ID NO: 1192815 - RNA, 19 nt, Artificial Sequence
  Description of Artificial Sequence: Synthetic oligonucleotide
cacuacagcauaaggccuc

SEQ ID NO: 1192816 - RNA, 19 nt, Artificial Sequence
  Description of Artificial Sequence: Synthetic oligonucleotide
cacaaauuuuguacaacaa

SEQ ID NO: 1192817 - RNA, 19 nt, Artificial Sequence
  Description of Artificial Sequence: Synthetic oligonucleotide
caucguuggaauucuuuga

SEQ ID NO: 1192818 - RNA, 19 nt, Artificial Sequence
  Description of Artificial Sequence: Synthetic oligonucleotide
guaccgagguucauuuggg

SEQ ID NO: 1192819 - RNA, 19 nt, Artificial Sequence
  Description of Artificial Sequence: Synthetic oligonucleotide
ucccuuucggcgcuucugu

SEQ ID NO: 1192820 - RNA, 19 nt, Artificial Sequence
  Description of Artificial Sequence: Synthetic oligonucleotide
acuguugcuugcugggaga

SEQ ID NO: 1192821 - RNA, 19 nt, Artificial Sequence
  Description of Artificial Sequence: Synthetic oligonucleotide
cauaacagcucuggaguac

SEQ ID NO: 1192822 - RNA, 19 nt, Artificial Sequence
  Description of Artificial Sequence: Synthetic oligonucleotide
uacagcauaaggccuccuu

SEQ ID NO: 1192823 - RNA, 19 nt, Artificial Sequence
  Description of Artificial Sequence: Synthetic oligonucleotide
guuuagccauauauguaug

SEQ ID NO: 1192824 - RNA, 19 nt, Artificial Sequence
  Description of Artificial Sequence: Synthetic oligonucleotide
guacaaaugucugcauaug

SEQ ID NO: 1192825 - RNA, 19 nt, Artificial Sequence
  Description of Artificial Sequence: Synthetic oligonucleotide
gaugacgaacauaaagaua

SEQ ID NO: 1192826 - RNA, 19 nt, Artificial Sequence
  Description of Artificial Sequence: Synthetic oligonucleotide
auauaccuguugaauauaa

SEQ ID NO: 1192827 - RNA, 19 nt, Artificial Sequence
  Description of Artificial Sequence: Synthetic oligonucleotide
ucgugucuuucuuucuaga

SEQ ID NO: 1192828 - RNA, 19 nt, Artificial Sequence
  Description of Artificial Sequence: Synthetic oligonucleotide
auggcagcggugcacugug

SEQ ID NO: 1192829 - RNA, 19 nt, Artificial Sequence
  Description of Artificial Sequence: Synthetic oligonucleotide
ucauagguccagucaacuu

SEQ ID NO: 1192830 - RNA, 19 nt, Artificial Sequence
  Description of Artificial Sequence: Synthetic oligonucleotide
acacagcuauauaauuuag

SEQ ID NO: 1192831 - RNA, 19 nt, Artificial Sequence
  Description of Artificial Sequence: Synthetic oligonucleotide
auuggacaaucuugguuau

SEQ ID NO: 1192832 - RNA, 19 nt, Artificial Sequence
  Description of Artificial Sequence: Synthetic oligonucleotide
cagucccugaagauaauga

SEQ ID NO: 1192833 - RNA, 19 nt, Artificial Sequence
  Description of Artificial Sequence: Synthetic oligonucleotide
uucggcaacccagugugcu

SEQ ID NO: 1192834 - RNA, 19 nt, Artificial Sequence
  Description of Artificial Sequence: Synthetic oligonucleotide
auagguccagucaacuuga

SEQ ID NO: 1192835 - RNA, 19 nt, Artificial Sequence
  Description of Artificial Sequence: Synthetic oligonucleotide
uucggcgcuucugucaagc

SEQ ID NO: 1192836 - RNA, 19 nt, Artificial Sequence
  Description of Artificial Sequence: Synthetic oligonucleotide
uucuuguacuacaguugaa

SEQ ID NO: 1192837 - RNA, 19 nt, Artificial Sequence
  Description of Artificial Sequence: Synthetic oligonucleotide
guugaggaguacaaauguc

SEQ ID NO: 1192838 - RNA, 19 nt, Artificial Sequence
  Description of Artificial Sequence: Synthetic oligonucleotide
auugcagaugcaguaccga

SEQ ID NO: 1192839 - RNA, 19 nt, Artificial Sequence
  Description of Artificial Sequence: Synthetic oligonucleotide
acauaacagcucuggagua

SEQ ID NO: 1192840 - RNA, 19 nt, Artificial Sequence
  Description of Artificial Sequence: Synthetic oligonucleotide
ugggagacuucuuguacua

SEQ ID NO: 1192841 - RNA, 19 nt, Artificial Sequence
  Description of Artificial Sequence: Synthetic oligonucleotide
uucuagaguccugaauaaa

SEQ ID NO: 1192842 - RNA, 19 nt, Artificial Sequence
  Description of Artificial Sequence: Synthetic oligonucleotide
acauaaagauaaggaagaa

SEQ ID NO: 1192843 - RNA, 19 nt, Artificial Sequence
  Description of Artificial Sequence: Synthetic oligonucleotide
gaugcaguaccgagguuca

SEQ ID NO: 1192844 - RNA, 19 nt, Artificial Sequence
  Description of Artificial Sequence: Synthetic oligonucleotide
ggagacuucuuguacuaca

SEQ ID NO: 1192845 - RNA, 19 nt, Artificial Sequence
  Description of Artificial Sequence: Synthetic oligonucleotide
auauauaguuggugagaua

SEQ ID NO: 1192846 - RNA, 19 nt, Artificial Sequence
  Description of Artificial Sequence: Synthetic oligonucleotide
acccauaguggaaccacuc

SEQ ID NO: 1192847 - RNA, 19 nt, Artificial Sequence
  Description of Artificial Sequence: Synthetic oligonucleotide
uggaaaugaguuguuucuu

SEQ ID NO: 1192848 - RNA, 19 nt, Artificial Sequence
  Description of Artificial Sequence: Synthetic oligonucleotide
auaguggaaccacucuauu

SEQ ID NO: 1192849 - RNA, 19 nt, Artificial Sequence
  Description of Artificial Sequence: Synthetic oligonucleotide
ccuuuaagugguugccugg

SEQ ID NO: 1192850 - RNA, 19 nt, Artificial Sequence
  Description of Artificial Sequence: Synthetic oligonucleotide
aauccaaggcuaacuggaa

SEQ ID NO: 1192851 - RNA, 19 nt, Artificial Sequence
  Description of Artificial Sequence: Synthetic oligonucleotide
auguaaaaguuuggcacau

SEQ ID NO: 1192852 - RNA, 19 nt, Artificial Sequence
  Description of Artificial Sequence: Synthetic oligonucleotide
agguccagucaacuugacu

SEQ ID NO: 1192853 - RNA, 19 nt, Artificial Sequence
  Description of Artificial Sequence: Synthetic oligonucleotide
ugaggguggacaggagagc

SEQ ID NO: 1192854 - RNA, 19 nt, Artificial Sequence
  Description of Artificial Sequence: Synthetic oligonucleotide
cuuauaggauugucuaugu

SEQ ID NO: 1192855 - RNA, 19 nt, Artificial Sequence
  Description of Artificial Sequence: Synthetic oligonucleotide
ugcccauuacuuugagaaa

SEQ ID NO: 1192856 - RNA, 19 nt, Artificial Sequence
  Description of Artificial Sequence: Synthetic oligonucleotide
agguucuacuuguuucuaa

SEQ ID NO: 1192857 - RNA, 19 nt, Artificial Sequence
  Description of Artificial Sequence: Synthetic oligonucleotide
gguugaggaguacaaaugu

SEQ ID NO: 1192858 - RNA, 19 nt, Artificial Sequence
  Description of Artificial Sequence: Synthetic oligonucleotide
agauucgggcacuacuguu

SEQ ID NO: 1192859 - RNA, 19 nt, Artificial Sequence
  Description of Artificial Sequence: Synthetic oligonucleotide
agcacucuauuugugccga

SEQ ID NO: 1192860 - RNA, 19 nt, Artificial Sequence
  Description of Artificial Sequence: Synthetic oligonucleotide
auauaguuggugagauacu

SEQ ID NO: 1192861 - RNA, 19 nt, Artificial Sequence
  Description of Artificial Sequence: Synthetic oligonucleotide
gauugucuauguaaauccu

SEQ ID NO: 1192862 - RNA, 19 nt, Artificial Sequence
  Description of Artificial Sequence: Synthetic oligonucleotide
uaccgagguucauuugggu

SEQ ID NO: 1192863 - RNA, 19 nt, Artificial Sequence
  Description of Artificial Sequence: Synthetic oligonucleotide
acuugggccuuuugugcca

SEQ ID NO: 1192864 - RNA, 19 nt, Artificial Sequence
  Description of Artificial Sequence: Synthetic oligonucleotide
cuuuucggggaugugaucu

SEQ ID NO: 1192865 - RNA, 19 nt, Artificial Sequence
  Description of Artificial Sequence: Synthetic oligonucleotide
ucuuuucggggaugugauc

SEQ ID NO: 1192866 - RNA, 19 nt, Artificial Sequence
  Description of Artificial Sequence: Synthetic oligonucleotide
auccuuuaagugguugccu

SEQ ID NO: 1192867 - RNA, 19 nt, Artificial Sequence
  Description of Artificial Sequence: Synthetic oligonucleotide
uucccuuucggcgcuucug

SEQ ID NO: 1192868 - RNA, 19 nt, Artificial Sequence
  Description of Artificial Sequence: Synthetic oligonucleotide
acacuacagcauaaggccu

SEQ ID NO: 1192869 - RNA, 19 nt, Artificial Sequence
  Description of Artificial Sequence: Synthetic oligonucleotide
uuugggucauagguccagu

SEQ ID NO: 1192870 - RNA, 19 nt, Artificial Sequence
  Description of Artificial Sequence: Synthetic oligonucleotide
ugauugccccugcaccagu

SEQ ID NO: 1192871 - RNA, 19 nt, Artificial Sequence
  Description of Artificial Sequence: Synthetic oligonucleotide
agauaaggaagaagaggaa

SEQ ID NO: 1192872 - RNA, 19 nt, Artificial Sequence
  Description of Artificial Sequence: Synthetic oligonucleotide
aguucuauguuuagccaua

SEQ ID NO: 1192873 - RNA, 19 nt, Artificial Sequence
  Description of Artificial Sequence: Synthetic oligonucleotide
uuucggggaugugaucugu

SEQ ID NO: 1192874 - RNA, 19 nt, Artificial Sequence
  Description of Artificial Sequence: Synthetic oligonucleotide
ccaccuagaaacugugaac

SEQ ID NO: 1192875 - RNA, 19 nt, Artificial Sequence
  Description of Artificial Sequence: Synthetic oligonucleotide
ugcaguaccgagguucauu

SEQ ID NO: 1192876 - RNA, 19 nt, Artificial Sequence
  Description of Artificial Sequence: Synthetic oligonucleotide
uucguccuucuuucaucug

SEQ ID NO: 1192877 - RNA, 19 nt, Artificial Sequence
  Description of Artificial Sequence: Synthetic oligonucleotide
auguuuagccauauaugua

SEQ ID NO: 1192878 - RNA, 19 nt, Artificial Sequence
  Description of Artificial Sequence: Synthetic oligonucleotide
uguuggccacagaaauaau

SEQ ID NO: 1192879 - RNA, 19 nt, Artificial Sequence
  Description of Artificial Sequence: Synthetic oligonucleotide
aacccagugugcucuccuu

SEQ ID NO: 1192880 - RNA, 19 nt, Artificial Sequence
  Description of Artificial Sequence: Synthetic oligonucleotide
cauaguggaaccacucuau

SEQ ID NO: 1192881 - RNA, 19 nt, Artificial Sequence
  Description of Artificial Sequence: Synthetic oligonucleotide
ggaacuggcauucuggguu

SEQ ID NO: 1192882 - RNA, 19 nt, Artificial Sequence
  Description of Artificial Sequence: Synthetic oligonucleotide
agugccgaugaggaggaau

SEQ ID NO: 1192883 - RNA, 19 nt, Artificial Sequence
  Description of Artificial Sequence: Synthetic oligonucleotide
gcaucagacgugagggugg

SEQ ID NO: 1192884 - RNA, 19 nt, Artificial Sequence
  Description of Artificial Sequence: Synthetic oligonucleotide
gaacuggcauucuggguua

SEQ ID NO: 1192885 - RNA, 19 nt, Artificial Sequence
  Description of Artificial Sequence: Synthetic oligonucleotide
cuuucggcgcuucugucaa

SEQ ID NO: 1192886 - RNA, 19 nt, Artificial Sequence
  Description of Artificial Sequence: Synthetic oligonucleotide
ccuuagaagcaucagacgu

SEQ ID NO: 1192887 - RNA, 19 nt, Artificial Sequence
  Description of Artificial Sequence: Synthetic oligonucleotide
ucggcgcuucugucaagcc

SEQ ID NO: 1192888 - RNA, 19 nt, Artificial Sequence
  Description of Artificial Sequence: Synthetic oligonucleotide
uguaaaaguuuggcacauu

SEQ ID NO: 1192889 - RNA, 19 nt, Artificial Sequence
  Description of Artificial Sequence: Synthetic oligonucleotide
ggagugcauaaauaauuua

SEQ ID NO: 1192890 - RNA, 19 nt, Artificial Sequence
  Description of Artificial Sequence: Synthetic oligonucleotide
ggguuaagguugucaugag

SEQ ID NO: 1192891 - RNA, 19 nt, Artificial Sequence
  Description of Artificial Sequence: Synthetic oligonucleotide
uuucggcgcuucugucaag

SEQ ID NO: 1192892 - RNA, 19 nt, Artificial Sequence
  Description of Artificial Sequence: Synthetic oligonucleotide
ggauaccugauugcagaug

SEQ ID NO: 1192893 - RNA, 19 nt, Artificial Sequence
  Description of Artificial Sequence: Synthetic oligonucleotide
guguaacauaacagcucug

SEQ ID NO: 1192894 - RNA, 19 nt, Artificial Sequence
  Description of Artificial Sequence: Synthetic oligonucleotide
ucaagccaacacacccaua

SEQ ID NO: 1192895 - RNA, 19 nt, Artificial Sequence
  Description of Artificial Sequence: Synthetic oligonucleotide
caguaccgagguucauuug

SEQ ID NO: 1192896 - RNA, 19 nt, Artificial Sequence
  Description of Artificial Sequence: Synthetic oligonucleotide
cugggagacuucuuguacu

SEQ ID NO: 1192897 - RNA, 19 nt, Artificial Sequence
  Description of Artificial Sequence: Synthetic oligonucleotide
uuggacaaucuugguuauc

SEQ ID NO: 1192898 - RNA, 19 nt, Artificial Sequence
  Description of Artificial Sequence: Synthetic oligonucleotide
gccauauauguauguaugu

SEQ ID NO: 1192899 - RNA, 19 nt, Artificial Sequence
  Description of Artificial Sequence: Synthetic oligonucleotide
acgcuucauaacuggcuuu

SEQ ID NO: 1192900 - RNA, 19 nt, Artificial Sequence
  Description of Artificial Sequence: Synthetic oligonucleotide
ccagucaacuugacuguug

SEQ ID NO: 1192901 - RNA, 19 nt, Artificial Sequence
  Description of Artificial Sequence: Synthetic oligonucleotide
gauugccccugcaccaguc

SEQ ID NO: 1192902 - RNA, 19 nt, Artificial Sequence
  Description of Artificial Sequence: Synthetic oligonucleotide
uccagucaacuugacuguu

SEQ ID NO: 1192903 - RNA, 19 nt, Artificial Sequence
  Description of Artificial Sequence: Synthetic oligonucleotide
gggaugaauucacauugua

SEQ ID NO: 1192904 - RNA, 19 nt, Artificial Sequence
  Description of Artificial Sequence: Synthetic oligonucleotide
caccaucucaccauaggau

SEQ ID NO: 1192905 - RNA, 19 nt, Artificial Sequence
  Description of Artificial Sequence: Synthetic oligonucleotide
acccagugugcucuccuua

SEQ ID NO: 1192906 - RNA, 19 nt, Artificial Sequence
  Description of Artificial Sequence: Synthetic oligonucleotide
gguuaagguugucaugagu

SEQ ID NO: 1192907 - RNA, 19 nt, Artificial Sequence
  Description of Artificial Sequence: Synthetic oligonucleotide
aguuggugagauacucaau

SEQ ID NO: 1192908 - RNA, 19 nt, Artificial Sequence
  Description of Artificial Sequence: Synthetic oligonucleotide
cuugggccuuuugugccac

SEQ ID NO: 1192909 - RNA, 19 nt, Artificial Sequence
  Description of Artificial Sequence: Synthetic oligonucleotide
gugccgaugaggaggaaua

SEQ ID NO: 1192910 - RNA, 19 nt, Artificial Sequence
  Description of Artificial Sequence: Synthetic oligonucleotide
gucauagguccagucaacu

SEQ ID NO: 1192911 - RNA, 19 nt, Artificial Sequence
  Description of Artificial Sequence: Synthetic oligonucleotide
gugagaaguuggauuauau

SEQ ID NO: 1192912 - RNA, 19 nt, Artificial Sequence
  Description of Artificial Sequence: Synthetic oligonucleotide
auaccugauugcagaugca

SEQ ID NO: 1192913 - RNA, 19 nt, Artificial Sequence
  Description of Artificial Sequence: Synthetic oligonucleotide
cagcggugcacugugggca

SEQ ID NO: 1192914 - RNA, 19 nt, Artificial Sequence
  Description of Artificial Sequence: Synthetic oligonucleotide
ggguggacaggagagcuuc

SEQ ID NO: 1192915 - RNA, 19 nt, Artificial Sequence
  Description of Artificial Sequence: Synthetic oligonucleotide
gcagcggugcacugugggc

SEQ ID NO: 1192916 - RNA, 19 nt, Artificial Sequence
  Description of Artificial Sequence: Synthetic oligonucleotide
ggggaagcacucuauuugu

SEQ ID NO: 1192917 - RNA, 19 nt, Artificial Sequence
  Description of Artificial Sequence: Synthetic oligonucleotide
caccaccuagaaacuguga

SEQ ID NO: 1192918 - RNA, 19 nt, Artificial Sequence
  Description of Artificial Sequence: Synthetic oligonucleotide
gcuugaagacuugguguug

SEQ ID NO: 1192919 - RNA, 19 nt, Artificial Sequence
  Description of Artificial Sequence: Synthetic oligonucleotide
ggcgcuucugucaagccaa

SEQ ID NO: 1192920 - RNA, 19 nt, Artificial Sequence
  Description of Artificial Sequence: Synthetic oligonucleotide
aucagacgugaggguggac

SEQ ID NO: 1192921 - RNA, 19 nt, Artificial Sequence
  Description of Artificial Sequence: Synthetic oligonucleotide
gggaagcacucuauuugug

SEQ ID NO: 1192922 - RNA, 19 nt, Artificial Sequence
  Description of Artificial Sequence: Synthetic oligonucleotide
ggcauucuggguuaagguu

SEQ ID NO: 1192923 - RNA, 19 nt, Artificial Sequence
  Description of Artificial Sequence: Synthetic oligonucleotide
uccuccggggaagcacucu

SEQ ID NO: 1192924 - RNA, 19 nt, Artificial Sequence
  Description of Artificial Sequence: Synthetic oligonucleotide
ggcuugaagacuugguguu

SEQ ID NO: 1192925 - RNA, 19 nt, Artificial Sequence
  Description of Artificial Sequence: Synthetic oligonucleotide
cagauucgggcacuacugu

SEQ ID NO: 1192926 - RNA, 19 nt, Artificial Sequence
  Description of Artificial Sequence: Synthetic oligonucleotide
cagcauaaggccuccuuuu

SEQ ID NO: 1192927 - RNA, 19 nt, Artificial Sequence
  Description of Artificial Sequence: Synthetic oligonucleotide
ggugagaaguuggauuaua

SEQ ID NO: 1192928 - RNA, 19 nt, Artificial Sequence
  Description of Artificial Sequence: Synthetic oligonucleotide
guauggugagaaguuggau

SEQ ID NO: 1192929 - RNA, 19 nt, Artificial Sequence
  Description of Artificial Sequence: Synthetic oligonucleotide
caucagacgugagggugga

SEQ ID NO: 1192930 - RNA, 19 nt, Artificial Sequence
  Description of Artificial Sequence: Synthetic oligonucleotide
gcaguaccgagguucauuu

SEQ ID NO: 1192931 - RNA, 19 nt, Artificial Sequence
  Description of Artificial Sequence: Synthetic oligonucleotide
ggcuaacuggaauaauauu

SEQ ID NO: 1192932 - RNA, 19 nt, Artificial Sequence
  Description of Artificial Sequence: Synthetic oligonucleotide
gggagacuucuuguacuac

SEQ ID NO: 1192933 - RNA, 19 nt, Artificial Sequence
  Description of Artificial Sequence: Synthetic oligonucleotide
cacccauaguggaaccacu

SEQ ID NO: 1192934 - RNA, 19 nt, Artificial Sequence
  Description of Artificial Sequence: Synthetic oligonucleotide
cacccacuguaacacaaau

SEQ ID NO: 1192935 - RNA, 19 nt, Artificial Sequence
  Description of Artificial Sequence: Synthetic oligonucleotide
acgugaggguggacaggag

SEQ ID NO: 1192936 - RNA, 19 nt, Artificial Sequence
  Description of Artificial Sequence: Synthetic oligonucleotide
ccagcugaaagucauuauu

SEQ ID NO: 1192937 - RNA, 19 nt, Artificial Sequence
  Description of Artificial Sequence: Synthetic oligonucleotide
ggaguacaaaugucugcau

SEQ ID NO: 1192938 - RNA, 19 nt, Artificial Sequence
  Description of Artificial Sequence: Synthetic oligonucleotide
ccaaggcuaacuggaauaa

SEQ ID NO: 1192939 - RNA, 19 nt, Artificial Sequence
  Description of Artificial Sequence: Synthetic oligonucleotide
gaacucacacuugggccuu

SEQ ID NO: 1192940 - RNA, 19 nt, Artificial Sequence
  Description of Artificial Sequence: Synthetic oligonucleotide
cauggcagcggugcacugu

SEQ ID NO: 1192941 - RNA, 19 nt, Artificial Sequence
  Description of Artificial Sequence: Synthetic oligonucleotide
gcacucuauuugugccgac

SEQ ID NO: 1192942 - RNA, 19 nt, Artificial Sequence
  Description of Artificial Sequence: Synthetic oligonucleotide
caaggcuaacuggaauaau

SEQ ID NO: 1192943 - RNA, 19 nt, Artificial Sequence
  Description of Artificial Sequence: Synthetic oligonucleotide
augcaguaccgagguucau

SEQ ID NO: 1192944 - RNA, 19 nt, Artificial Sequence
  Description of Artificial Sequence: Synthetic oligonucleotide
cccuuucggcgcuucuguc

SEQ ID NO: 1192945 - RNA, 19 nt, Artificial Sequence
  Description of Artificial Sequence: Synthetic oligonucleotide
cccauaguggaaccacucu

SEQ ID NO: 1192946 - RNA, 19 nt, Artificial Sequence
  Description of Artificial Sequence: Synthetic oligonucleotide
ccagugugcucuccuuaga

SEQ ID NO: 1192947 - RNA, 19 nt, Artificial Sequence
  Description of Artificial Sequence: Synthetic oligonucleotide
cccauuacuuugagaaaau

SEQ ID NO: 1192948 - RNA, 19 nt, Artificial Sequence
  Description of Artificial Sequence: Synthetic oligonucleotide
gcuggccauauugcuuuaa

SEQ ID NO: 1192949 - RNA, 19 nt, Artificial Sequence
  Description of Artificial Sequence: Synthetic oligonucleotide
gccuuuugugccacccacu

SEQ ID NO: 1192950 - RNA, 19 nt, Artificial Sequence
  Description of Artificial Sequence: Synthetic oligonucleotide
gguugucaugagugccgau

SEQ ID NO: 1192951 - RNA, 19 nt, Artificial Sequence
  Description of Artificial Sequence: Synthetic oligonucleotide
ccggggaagcacucuauuu

SEQ ID NO: 1192952 - RNA, 19 nt, Artificial Sequence
  Description of Artificial Sequence: Synthetic oligonucleotide
cgagguucauuugggucau

SEQ ID NO: 1192953 - RNA, 19 nt, Artificial Sequence
  Description of Artificial Sequence: Synthetic oligonucleotide
gcggugcacugugggcagu

SEQ ID NO: 1192954 - RNA, 19 nt, Artificial Sequence
  Description of Artificial Sequence: Synthetic oligonucleotide
acagaguacauacugaagc

SEQ ID NO: 1192955 - RNA, 19 nt, Artificial Sequence
  Description of Artificial Sequence: Synthetic oligonucleotide
aaaagcacaaaguggcgcc

SEQ ID NO: 1192956 - RNA, 19 nt, Artificial Sequence
  Description of Artificial Sequence: Synthetic oligonucleotide
aggauaguaauuuccagcc

SEQ ID NO: 1192957 - RNA, 19 nt, Artificial Sequence
  Description of Artificial Sequence: Synthetic oligonucleotide
uuuucaaucaucaucaaua

SEQ ID NO: 1192958 - RNA, 19 nt, Artificial Sequence
  Description of Artificial Sequence: Synthetic oligonucleotide
guuguaaauaguuaccugg

SEQ ID NO: 1192959 - RNA, 19 nt, Artificial Sequence
  Description of Artificial Sequence: Synthetic oligonucleotide
auguguuucaccuuccggc

SEQ ID NO: 1192960 - RNA, 19 nt, Artificial Sequence
  Description of Artificial Sequence: Synthetic oligonucleotide
uuaaauguagcccggauau

SEQ ID NO: 1192961 - RNA, 19 nt, Artificial Sequence
  Description of Artificial Sequence: Synthetic oligonucleotide
agcccaacggcuuacaggc

SEQ ID NO: 1192962 - RNA, 19 nt, Artificial Sequence
  Description of Artificial Sequence: Synthetic oligonucleotide
auaauauggacugccaccc

SEQ ID NO: 1192963 - RNA, 19 nt, Artificial Sequence
  Description of Artificial Sequence: Synthetic oligonucleotide
auauacucauuuucaaugg

SEQ ID NO: 1192964 - RNA, 19 nt, Artificial Sequence
  Description of Artificial Sequence: Synthetic oligonucleotide
ugccauugaacccagacca

SEQ ID NO: 1192965 - RNA, 19 nt, Artificial Sequence
  Description of Artificial Sequence: Synthetic oligonucleotide
aaaucuugcauugggauug

SEQ ID NO: 1192966 - RNA, 19 nt, Artificial Sequence
  Description of Artificial Sequence: Synthetic oligonucleotide
cagaguuaaauguagcccg

SEQ ID NO: 1192967 - RNA, 19 nt, Artificial Sequence
  Description of Artificial Sequence: Synthetic oligonucleotide
agaacucaaaagcacaaag

SEQ ID NO: 1192968 - RNA, 19 nt, Artificial Sequence
  Description of Artificial Sequence: Synthetic oligonucleotide
agugaauugauguuccaag

SEQ ID NO: 1192969 - RNA, 19 nt, Artificial Sequence
  Description of Artificial Sequence: Synthetic oligonucleotide
ugggugauaguaaaggccc

SEQ ID NO: 1192970 - RNA, 19 nt, Artificial Sequence
  Description of Artificial Sequence: Synthetic oligonucleotide
guaaauaguuaccuggaag

SEQ ID NO: 1192971 - RNA, 19 nt, Artificial Sequence
  Description of Artificial Sequence: Synthetic oligonucleotide
gaauugauguuccaagcgc

SEQ ID NO: 1192972 - RNA, 19 nt, Artificial Sequence
  Description of Artificial Sequence: Synthetic oligonucleotide
aggaauaauauggacugcc

SEQ ID NO: 1192973 - RNA, 19 nt, Artificial Sequence
  Description of Artificial Sequence: Synthetic oligonucleotide
agugggucgauagucaugc

SEQ ID NO: 1192974 - RNA, 19 nt, Artificial Sequence
  Description of Artificial Sequence: Synthetic oligonucleotide
aaaguggcgcccucgcacc

SEQ ID NO: 1192975 - RNA, 19 nt, Artificial Sequence
  Description of Artificial Sequence: Synthetic oligonucleotide
ucgaguguugacaggauag

SEQ ID NO: 1192976 - RNA, 19 nt, Artificial Sequence
  Description of Artificial Sequence: Synthetic oligonucleotide
uguuuguuguagcugagcu

SEQ ID NO: 1192977 - RNA, 19 nt, Artificial Sequence
  Description of Artificial Sequence: Synthetic oligonucleotide
auaguaaaggcccggaaca

SEQ ID NO: 1192978 - RNA, 19 nt, Artificial Sequence
  Description of Artificial Sequence: Synthetic oligonucleotide
uugguuuagaauguuuggg

SEQ ID NO: 1192979 - RNA, 19 nt, Artificial Sequence
  Description of Artificial Sequence: Synthetic oligonucleotide
ucaucggggugucaaagcg

SEQ ID NO: 1192980 - RNA, 19 nt, Artificial Sequence
  Description of Artificial Sequence: Synthetic oligonucleotide
gauaguaaaggcccggaac

SEQ ID NO: 1192981 - RNA, 19 nt, Artificial Sequence
  Description of Artificial Sequence: Synthetic oligonucleotide
ucagaguuaaauguagccc

SEQ ID NO: 1192982 - RNA, 19 nt, Artificial Sequence
  Description of Artificial Sequence: Synthetic oligonucleotide
aagguacguauuuccauag

SEQ ID NO: 1192983 - RNA, 19 nt, Artificial Sequence
  Description of Artificial Sequence: Synthetic oligonucleotide
cacuguaccaaaagaagcc

SEQ ID NO: 1192984 - RNA, 19 nt, Artificial Sequence
  Description of Artificial Sequence: Synthetic oligonucleotide
uuguaaauaguuaccugga

SEQ ID NO: 1192985 - RNA, 19 nt, Artificial Sequence
  Description of Artificial Sequence: Synthetic oligonucleotide
uuuccaagugggucgauag

SEQ ID NO: 1192986 - RNA, 19 nt, Artificial Sequence
  Description of Artificial Sequence: Synthetic oligonucleotide
caggauaguaauuuccagc

SEQ ID NO: 1192987 - RNA, 19 nt, Artificial Sequence
  Description of Artificial Sequence: Synthetic oligonucleotide
aguaauuuccagccacggg

SEQ ID NO: 1192988 - RNA, 19 nt, Artificial Sequence
  Description of Artificial Sequence: Synthetic oligonucleotide
agaguacauacugaagccc

SEQ ID NO: 1192989 - RNA, 19 nt, Artificial Sequence
  Description of Artificial Sequence: Synthetic oligonucleotide
agugagccauccuucagac

SEQ ID NO: 1192990 - RNA, 19 nt, Artificial Sequence
  Description of Artificial Sequence: Synthetic oligonucleotide
aaagguacguauuuccaua

SEQ ID NO: 1192991 - RNA, 19 nt, Artificial Sequence
  Description of Artificial Sequence: Synthetic oligonucleotide
aggcgaaucacuugagaac

SEQ ID NO: 1192992 - RNA, 19 nt, Artificial Sequence
  Description of Artificial Sequence: Synthetic oligonucleotide
gucagaguuaaauguagcc

SEQ ID NO: 1192993 - RNA, 19 nt, Artificial Sequence
  Description of Artificial Sequence: Synthetic oligonucleotide
aguccggagaacugugucc

SEQ ID NO: 1192994 - RNA, 19 nt, Artificial Sequence
  Description of Artificial Sequence: Synthetic oligonucleotide
acccagaccacaaagguac

SEQ ID NO: 1192995 - RNA, 19 nt, Artificial Sequence
  Description of Artificial Sequence: Synthetic oligonucleotide
ggauucuugccauugaacc

SEQ ID NO: 1192996 - RNA, 19 nt, Artificial Sequence
  Description of Artificial Sequence: Synthetic oligonucleotide
aaguccggagaacuguguc

SEQ ID NO: 1192997 - RNA, 19 nt, Artificial Sequence
  Description of Artificial Sequence: Synthetic oligonucleotide
auagucaugccuccucuuc

SEQ ID NO: 1192998 - RNA, 19 nt, Artificial Sequence
  Description of Artificial Sequence: Synthetic oligonucleotide
uguuugggucugaagaugu

SEQ ID NO: 1192999 - RNA, 19 nt, Artificial Sequence
  Description of Artificial Sequence: Synthetic oligonucleotide
aagaugccuucacugacug

SEQ ID NO: 1193000 - RNA, 19 nt, Artificial Sequence
  Description of Artificial Sequence: Synthetic oligonucleotide
ugucagaguuaaauguagc

SEQ ID NO: 1193001 - RNA, 19 nt, Artificial Sequence
  Description of Artificial Sequence: Synthetic oligonucleotide
uuuagaauguuugggucug

SEQ ID NO: 1193002 - RNA, 19 nt, Artificial Sequence
  Description of Artificial Sequence: Synthetic oligonucleotide
uggaucucagcccaacggc

SEQ ID NO: 1193003 - RNA, 19 nt, Artificial Sequence
  Description of Artificial Sequence: Synthetic oligonucleotide
ugugucagaguuaaaugua

SEQ ID NO: 1193004 - RNA, 19 nt, Artificial Sequence
  Description of Artificial Sequence: Synthetic oligonucleotide
gcugauguugaguucacgg

SEQ ID NO: 1193005 - RNA, 19 nt, Artificial Sequence
  Description of Artificial Sequence: Synthetic oligonucleotide
ugcaucacuaacagaacuc

SEQ ID NO: 1193006 - RNA, 19 nt, Artificial Sequence
  Description of Artificial Sequence: Synthetic oligonucleotide
aauuuccagccacggguuc

SEQ ID NO: 1193007 - RNA, 19 nt, Artificial Sequence
  Description of Artificial Sequence: Synthetic oligonucleotide
uguaaauaguuaccuggaa

SEQ ID NO: 1193008 - RNA, 19 nt, Artificial Sequence
  Description of Artificial Sequence: Synthetic oligonucleotide
auguagcccggauauacuc

SEQ ID NO: 1193009 - RNA, 19 nt, Artificial Sequence
  Description of Artificial Sequence: Synthetic oligonucleotide
acguauuuccauaggauuc

SEQ ID NO: 1193010 - RNA, 19 nt, Artificial Sequence
  Description of Artificial Sequence: Synthetic oligonucleotide
acaggauaguaauuuccag

SEQ ID NO: 1193011 - RNA, 19 nt, Artificial Sequence
  Description of Artificial Sequence: Synthetic oligonucleotide
auacaugggaccuggauuu

SEQ ID NO: 1193012 - RNA, 19 nt, Artificial Sequence
  Description of Artificial Sequence: Synthetic oligonucleotide
uccgagauguagauucgag

SEQ ID NO: 1193013 - RNA, 19 nt, Artificial Sequence
  Description of Artificial Sequence: Synthetic oligonucleotide
gauggaucucagcccaacg

SEQ ID NO: 1193014 - RNA, 19 nt, Artificial Sequence
  Description of Artificial Sequence: Synthetic oligonucleotide
uguccauccgagauguaga

SEQ ID NO: 1193015 - RNA, 19 nt, Artificial Sequence
  Description of Artificial Sequence: Synthetic oligonucleotide
aauucccugccguugcugu

SEQ ID NO: 1193016 - RNA, 19 nt, Artificial Sequence
  Description of Artificial Sequence: Synthetic oligonucleotide
uggcacuguaccaaaagaa

SEQ ID NO: 1193017 - RNA, 19 nt, Artificial Sequence
  Description of Artificial Sequence: Synthetic oligonucleotide
auugggauuggucccacca

SEQ ID NO: 1193018 - RNA, 19 nt, Artificial Sequence
  Description of Artificial Sequence: Synthetic oligonucleotide
guuaccuggaaguucucug

SEQ ID NO: 1193019 - RNA, 19 nt, Artificial Sequence
  Description of Artificial Sequence: Synthetic oligonucleotide
ucaccuuggccacagagua

SEQ ID NO: 1193020 - RNA, 19 nt, Artificial Sequence
  Description of Artificial Sequence: Synthetic oligonucleotide
cuugccauugaacccagac

SEQ ID NO: 1193021 - RNA, 19 nt, Artificial Sequence
  Description of Artificial Sequence: Synthetic oligonucleotide
uacguauuuccauaggauu

SEQ ID NO: 1193022 - RNA, 19 nt, Artificial Sequence
  Description of Artificial Sequence: Synthetic oligonucleotide
uguuccaagcgcagcaaca

SEQ ID NO: 1193023 - RNA, 19 nt, Artificial Sequence
  Description of Artificial Sequence: Synthetic oligonucleotide
uaguaauuuccagccacgg

SEQ ID NO: 1193024 - RNA, 19 nt, Artificial Sequence
  Description of Artificial Sequence: Synthetic oligonucleotide
cacauuacugggcacaguc

SEQ ID NO: 1193025 - RNA, 19 nt, Artificial Sequence
  Description of Artificial Sequence: Synthetic oligonucleotide
guaauuuccagccacgggu

SEQ ID NO: 1193026 - RNA, 19 nt, Artificial Sequence
  Description of Artificial Sequence: Synthetic oligonucleotide
uucaaucaucaucaauaac

SEQ ID NO: 1193027 - RNA, 19 nt, Artificial Sequence
  Description of Artificial Sequence: Synthetic oligonucleotide
auaguuaccuggaaguucu

SEQ ID NO: 1193028 - RNA, 19 nt, Artificial Sequence
  Description of Artificial Sequence: Synthetic oligonucleotide
auugagguaggguccaacu

SEQ ID NO: 1193029 - RNA, 19 nt, Artificial Sequence
  Description of Artificial Sequence: Synthetic oligonucleotide
auaacccugugucagaguu

SEQ ID NO: 1193030 - RNA, 19 nt, Artificial Sequence
  Description of Artificial Sequence: Synthetic oligonucleotide
uguagauucgaguguugac

SEQ ID NO: 1193031 - RNA, 19 nt, Artificial Sequence
  Description of Artificial Sequence: Synthetic oligonucleotide
ccaggaauaauauggacug

SEQ ID NO: 1193032 - RNA, 19 nt, Artificial Sequence
  Description of Artificial Sequence: Synthetic oligonucleotide
ucaucaccgauguuggcac

SEQ ID NO: 1193033 - RNA, 19 nt, Artificial Sequence
  Description of Artificial Sequence: Synthetic oligonucleotide
cauuaccacauuacugggc

SEQ ID NO: 1193034 - RNA, 19 nt, Artificial Sequence
  Description of Artificial Sequence: Synthetic oligonucleotide
guuggcacuguaccaaaag

SEQ ID NO: 1193035 - RNA, 19 nt, Artificial Sequence
  Description of Artificial Sequence: Synthetic oligonucleotide
gauucgaguguugacagga

SEQ ID NO: 1193036 - RNA, 19 nt, Artificial Sequence
  Description of Artificial Sequence: Synthetic oligonucleotide
caaaagcacaaaguggcgc

SEQ ID NO: 1193037 - RNA, 19 nt, Artificial Sequence
  Description of Artificial Sequence: Synthetic oligonucleotide
uggacaauacaugggaccu

SEQ ID NO: 1193038 - RNA, 19 nt, Artificial Sequence
  Description of Artificial Sequence: Synthetic oligonucleotide
uguagcccggauauacuca

SEQ ID NO: 1193039 - RNA, 19 nt, Artificial Sequence
  Description of Artificial Sequence: Synthetic oligonucleotide
auaguaauuuccagccacg

SEQ ID NO: 1193040 - RNA, 19 nt, Artificial Sequence
  Description of Artificial Sequence: Synthetic oligonucleotide
ugggucgauagucaugccu

SEQ ID NO: 1193041 - RNA, 19 nt, Artificial Sequence
  Description of Artificial Sequence: Synthetic oligonucleotide
guuguagcugagcugugcc

SEQ ID NO: 1193042 - RNA, 19 nt, Artificial Sequence
  Description of Artificial Sequence: Synthetic oligonucleotide
uuucaucggggugucaaag

SEQ ID NO: 1193043 - RNA, 19 nt, Artificial Sequence
  Description of Artificial Sequence: Synthetic oligonucleotide
uggacuugcccgaaaggcu

SEQ ID NO: 1193044 - RNA, 19 nt, Artificial Sequence
  Description of Artificial Sequence: Synthetic oligonucleotide
uccuggacuugcccgaaag

SEQ ID NO: 1193045 - RNA, 19 nt, Artificial Sequence
  Description of Artificial Sequence: Synthetic oligonucleotide
auucuugccauugaaccca

SEQ ID NO: 1193046 - RNA, 19 nt, Artificial Sequence
  Description of Artificial Sequence: Synthetic oligonucleotide
guagauucgaguguugaca

SEQ ID NO: 1193047 - RNA, 19 nt, Artificial Sequence
  Description of Artificial Sequence: Synthetic oligonucleotide
uguuucaccuuccggccca

SEQ ID NO: 1193048 - RNA, 19 nt, Artificial Sequence
  Description of Artificial Sequence: Synthetic oligonucleotide
gagcagaugcacuugggga

SEQ ID NO: 1193049 - RNA, 19 nt, Artificial Sequence
  Description of Artificial Sequence: Synthetic oligonucleotide
ucagugugauugagguagg

SEQ ID NO: 1193050 - RNA, 19 nt, Artificial Sequence
  Description of Artificial Sequence: Synthetic oligonucleotide
ucacaaagaagaugccuuc

SEQ ID NO: 1193051 - RNA, 19 nt, Artificial Sequence
  Description of Artificial Sequence: Synthetic oligonucleotide
ucugguguaccuccugcac

SEQ ID NO: 1193052 - RNA, 19 nt, Artificial Sequence
  Description of Artificial Sequence: Synthetic oligonucleotide
uucaucggggugucaaagc

SEQ ID NO: 1193053 - RNA, 19 nt, Artificial Sequence
  Description of Artificial Sequence: Synthetic oligonucleotide
gaagcauuaccacauuacu

SEQ ID NO: 1193054 - RNA, 19 nt, Artificial Sequence
  Description of Artificial Sequence: Synthetic oligonucleotide
ucaauaacccugugucaga

SEQ ID NO: 1193055 - RNA, 19 nt, Artificial Sequence
  Description of Artificial Sequence: Synthetic oligonucleotide
uuaccguaggagcugggaa

SEQ ID NO: 1193056 - RNA, 19 nt, Artificial Sequence
  Description of Artificial Sequence: Synthetic oligonucleotide
aauaacccugugucagagu

SEQ ID NO: 1193057 - RNA, 19 nt, Artificial Sequence
  Description of Artificial Sequence: Synthetic oligonucleotide
ugauaguaaaggcccggaa

SEQ ID NO: 1193058 - RNA, 19 nt, Artificial Sequence
  Description of Artificial Sequence: Synthetic oligonucleotide
aguaaaggcccggaacagg

SEQ ID NO: 1193059 - RNA, 19 nt, Artificial Sequence
  Description of Artificial Sequence: Synthetic oligonucleotide
ucuuugguccccagcgggc

SEQ ID NO: 1193060 - RNA, 19 nt, Artificial Sequence
  Description of Artificial Sequence: Synthetic oligonucleotide
aggagacgggaccaguguc

SEQ ID NO: 1193061 - RNA, 19 nt, Artificial Sequence
  Description of Artificial Sequence: Synthetic oligonucleotide
ucugccaauagccgucggu

SEQ ID NO: 1193062 - RNA, 19 nt, Artificial Sequence
  Description of Artificial Sequence: Synthetic oligonucleotide
auuuccuggacuugcccga

SEQ ID NO: 1193063 - RNA, 19 nt, Artificial Sequence
  Description of Artificial Sequence: Synthetic oligonucleotide
uccaagugggucgauaguc

SEQ ID NO: 1193064 - RNA, 19 nt, Artificial Sequence
  Description of Artificial Sequence: Synthetic oligonucleotide
aguuaaauguagcccggau

SEQ ID NO: 1193065 - RNA, 19 nt, Artificial Sequence
  Description of Artificial Sequence: Synthetic oligonucleotide
agaguuaaauguagcccgg

SEQ ID NO: 1193066 - RNA, 19 nt, Artificial Sequence
  Description of Artificial Sequence: Synthetic oligonucleotide
agguacguauuuccauagg

SEQ ID NO: 1193067 - RNA, 19 nt, Artificial Sequence
  Description of Artificial Sequence: Synthetic oligonucleotide
uggauuuccuggacuugcc

SEQ ID NO: 1193068 - RNA, 19 nt, Artificial Sequence
  Description of Artificial Sequence: Synthetic oligonucleotide
aaucuugcauugggauugg

SEQ ID NO: 1193069 - RNA, 19 nt, Artificial Sequence
  Description of Artificial Sequence: Synthetic oligonucleotide
guuaaauguagcccggaua

SEQ ID NO: 1193070 - RNA, 19 nt, Artificial Sequence
  Description of Artificial Sequence: Synthetic oligonucleotide
gaguacauacugaagccca

SEQ ID NO: 1193071 - RNA, 19 nt, Artificial Sequence
  Description of Artificial Sequence: Synthetic oligonucleotide
uaguaaaggcccggaacag

SEQ ID NO: 1193072 - RNA, 19 nt, Artificial Sequence
  Description of Artificial Sequence: Synthetic oligonucleotide
guuuagaauguuugggucu

SEQ ID NO: 1193073 - RNA, 19 nt, Artificial Sequence
  Description of Artificial Sequence: Synthetic oligonucleotide
cagcccaacggcuuacagg

SEQ ID NO: 1193074 - RNA, 19 nt, Artificial Sequence
  Description of Artificial Sequence: Synthetic oligonucleotide
caucggggugucaaagcgg

SEQ ID NO: 1193075 - RNA, 19 nt, Artificial Sequence
  Description of Artificial Sequence: Synthetic oligonucleotide
cauguguccauccgagaug

SEQ ID NO: 1193076 - RNA, 19 nt, Artificial Sequence
  Description of Artificial Sequence: Synthetic oligonucleotide
ugggauuggucccaccauc

SEQ ID NO: 1193077 - RNA, 19 nt, Artificial Sequence
  Description of Artificial Sequence: Synthetic oligonucleotide
ucgauagucaugccuccuc

SEQ ID NO: 1193078 - RNA, 19 nt, Artificial Sequence
  Description of Artificial Sequence: Synthetic oligonucleotide
aguguugacaggauaguaa

SEQ ID NO: 1193079 - RNA, 19 nt, Artificial Sequence
  Description of Artificial Sequence: Synthetic oligonucleotide
cauccgagauguagauucg

SEQ ID NO: 1193080 - RNA, 19 nt, Artificial Sequence
  Description of Artificial Sequence: Synthetic oligonucleotide
uacaggcgaaucacuugag

SEQ ID NO: 1193081 - RNA, 19 nt, Artificial Sequence
  Description of Artificial Sequence: Synthetic oligonucleotide
uauggacugccacccugag

SEQ ID NO: 1193082 - RNA, 19 nt, Artificial Sequence
  Description of Artificial Sequence: Synthetic oligonucleotide
cugguguaccuccugcacc

SEQ ID NO: 1193083 - RNA, 19 nt, Artificial Sequence
  Description of Artificial Sequence: Synthetic oligonucleotide
uccccagcgggccagugug

SEQ ID NO: 1193084 - RNA, 19 nt, Artificial Sequence
  Description of Artificial Sequence: Synthetic oligonucleotide
ugcggccugaaucuucugu

SEQ ID NO: 1193085 - RNA, 19 nt, Artificial Sequence
  Description of Artificial Sequence: Synthetic oligonucleotide
aauguagcccggauauacu

SEQ ID NO: 1193086 - RNA, 19 nt, Artificial Sequence
  Description of Artificial Sequence: Synthetic oligonucleotide
cgagauguagauucgagug

SEQ ID NO: 1193087 - RNA, 19 nt, Artificial Sequence
  Description of Artificial Sequence: Synthetic oligonucleotide
ugccaauagccgucggugc

SEQ ID NO: 1193088 - RNA, 19 nt, Artificial Sequence
  Description of Artificial Sequence: Synthetic oligonucleotide
uucgaguguugacaggaua

SEQ ID NO: 1193089 - RNA, 19 nt, Artificial Sequence
  Description of Artificial Sequence: Synthetic oligonucleotide
caauaacccugugucagag

SEQ ID NO: 1193090 - RNA, 19 nt, Artificial Sequence
  Description of Artificial Sequence: Synthetic oligonucleotide
ggcacuguaccaaaagaag

SEQ ID NO: 1193091 - RNA, 19 nt, Artificial Sequence
  Description of Artificial Sequence: Synthetic oligonucleotide
uaccuggaaguucucugac

SEQ ID NO: 1193092 - RNA, 19 nt, Artificial Sequence
  Description of Artificial Sequence: Synthetic oligonucleotide
uaauuuccaagugggucga

SEQ ID NO: 1193093 - RNA, 19 nt, Artificial Sequence
  Description of Artificial Sequence: Synthetic oligonucleotide
agauggaucucagcccaac

SEQ ID NO: 1193094 - RNA, 19 nt, Artificial Sequence
  Description of Artificial Sequence: Synthetic oligonucleotide
agcaggauaggagacggga

SEQ ID NO: 1193095 - RNA, 19 nt, Artificial Sequence
  Description of Artificial Sequence: Synthetic oligonucleotide
guacauacugaagcccagg

SEQ ID NO: 1193096 - RNA, 19 nt, Artificial Sequence
  Description of Artificial Sequence: Synthetic oligonucleotide
caagugacgcuguccuggg

SEQ ID NO: 1193097 - RNA, 19 nt, Artificial Sequence
  Description of Artificial Sequence: Synthetic oligonucleotide
acaaagguacguauuucca

SEQ ID NO: 1193098 - RNA, 19 nt, Artificial Sequence
  Description of Artificial Sequence: Synthetic oligonucleotide
ccaacuuggaaggagcagg

SEQ ID NO: 1193099 - RNA, 19 nt, Artificial Sequence
  Description of Artificial Sequence: Synthetic oligonucleotide
auuuaauuuccaagugggu

SEQ ID NO: 1193100 - RNA, 19 nt, Artificial Sequence
  Description of Artificial Sequence: Synthetic oligonucleotide
agugugauugagguagggu

SEQ ID NO: 1193101 - RNA, 19 nt, Artificial Sequence
  Description of Artificial Sequence: Synthetic oligonucleotide
uuuucaucggggugucaaa

SEQ ID NO: 1193102 - RNA, 19 nt, Artificial Sequence
  Description of Artificial Sequence: Synthetic oligonucleotide
gcauuaccacauuacuggg

SEQ ID NO: 1193103 - RNA, 19 nt, Artificial Sequence
  Description of Artificial Sequence: Synthetic oligonucleotide
cugugucagaguuaaaugu

SEQ ID NO: 1193104 - RNA, 19 nt, Artificial Sequence
  Description of Artificial Sequence: Synthetic oligonucleotide
uaauauggacugccacccu

SEQ ID NO: 1193105 - RNA, 19 nt, Artificial Sequence
  Description of Artificial Sequence: Synthetic oligonucleotide
auguagauucgaguguuga

SEQ ID NO: 1193106 - RNA, 19 nt, Artificial Sequence
  Description of Artificial Sequence: Synthetic oligonucleotide
ucuuaccguaggagcuggg

SEQ ID NO: 1193107 - RNA, 19 nt, Artificial Sequence
  Description of Artificial Sequence: Synthetic oligonucleotide
uacucgcagccccugacuc

SEQ ID NO: 1193108 - RNA, 19 nt, Artificial Sequence
  Description of Artificial Sequence: Synthetic oligonucleotide
acaggcgaaucacuugaga

SEQ ID NO: 1193109 - RNA, 19 nt, Artificial Sequence
  Description of Artificial Sequence: Synthetic oligonucleotide
aaguggcgcccucgcaccg

SEQ ID NO: 1193110 - RNA, 19 nt, Artificial Sequence
  Description of Artificial Sequence: Synthetic oligonucleotide
auguuugggucugaagaug

SEQ ID NO: 1193111 - RNA, 19 nt, Artificial Sequence
  Description of Artificial Sequence: Synthetic oligonucleotide
aggagcaggauaggagacg

SEQ ID NO: 1193112 - RNA, 19 nt, Artificial Sequence
  Description of Artificial Sequence: Synthetic oligonucleotide
cugacuggcagccggacca

SEQ ID NO: 1193113 - RNA, 19 nt, Artificial Sequence
  Description of Artificial Sequence: Synthetic oligonucleotide
uuccaagugggucgauagu

SEQ ID NO: 1193114 - RNA, 19 nt, Artificial Sequence
  Description of Artificial Sequence: Synthetic oligonucleotide
caggcgaaucacuugagaa

SEQ ID NO: 1193115 - RNA, 19 nt, Artificial Sequence
  Description of Artificial Sequence: Synthetic oligonucleotide
ugagaacagcagaucccac

SEQ ID NO: 1193116 - RNA, 19 nt, Artificial Sequence
  Description of Artificial Sequence: Synthetic oligonucleotide
caucaauaacccuguguca

SEQ ID NO: 1193117 - RNA, 19 nt, Artificial Sequence
  Description of Artificial Sequence: Synthetic oligonucleotide
gauguagauucgaguguug

SEQ ID NO: 1193118 - RNA, 19 nt, Artificial Sequence
  Description of Artificial Sequence: Synthetic oligonucleotide
cugccaauagccgucggug

SEQ ID NO: 1193119 - RNA, 19 nt, Artificial Sequence
  Description of Artificial Sequence: Synthetic oligonucleotide
ggauucagugugauugagg

SEQ ID NO: 1193120 - RNA, 19 nt, Artificial Sequence
  Description of Artificial Sequence: Synthetic oligonucleotide
ggugauaguaaaggcccgg

SEQ ID NO: 1193121 - RNA, 19 nt, Artificial Sequence
  Description of Artificial Sequence: Synthetic oligonucleotide
cccgaaaucuugcauuggg

SEQ ID NO: 1193122 - RNA, 19 nt, Artificial Sequence
  Description of Artificial Sequence: Synthetic oligonucleotide
guuacaggggagcucaggu

SEQ ID NO: 1193123 - RNA, 19 nt, Artificial Sequence
  Description of Artificial Sequence: Synthetic oligonucleotide
agugcauugcucaccagaa

SEQ ID NO: 1193124 - RNA, 19 nt, Artificial Sequence
  Description of Artificial Sequence: Synthetic oligonucleotide
agcccggauauacucauuu

SEQ ID NO: 1193125 - RNA, 19 nt, Artificial Sequence
  Description of Artificial Sequence: Synthetic oligonucleotide
uguuggcacuguaccaaaa

SEQ ID NO: 1193126 - RNA, 19 nt, Artificial Sequence
  Description of Artificial Sequence: Synthetic oligonucleotide
aaauucugguguaccuccu

SEQ ID NO: 1193127 - RNA, 19 nt, Artificial Sequence
  Description of Artificial Sequence: Synthetic oligonucleotide
ccgauguuggcacuguacc

SEQ ID NO: 1193128 - RNA, 19 nt, Artificial Sequence
  Description of Artificial Sequence: Synthetic oligonucleotide
gagcugggaagcauuacca

SEQ ID NO: 1193129 - RNA, 19 nt, Artificial Sequence
  Description of Artificial Sequence: Synthetic oligonucleotide
cucaucaccgauguuggca

SEQ ID NO: 1193130 - RNA, 19 nt, Artificial Sequence
  Description of Artificial Sequence: Synthetic oligonucleotide
aguuaccuggaaguucucu

SEQ ID NO: 1193131 - RNA, 19 nt, Artificial Sequence
  Description of Artificial Sequence: Synthetic oligonucleotide
ugcuucacagggagcgaga

SEQ ID NO: 1193132 - RNA, 19 nt, Artificial Sequence
  Description of Artificial Sequence: Synthetic oligonucleotide
aauagccgucggugcacca

SEQ ID NO: 1193133 - RNA, 19 nt, Artificial Sequence
  Description of Artificial Sequence: Synthetic oligonucleotide
ggcgaaucacuugagaaca

SEQ ID NO: 1193134 - RNA, 19 nt, Artificial Sequence
  Description of Artificial Sequence: Synthetic oligonucleotide
cccuuuguuuucaucgggg

SEQ ID NO: 1193135 - RNA, 19 nt, Artificial Sequence
  Description of Artificial Sequence: Synthetic oligonucleotide
auaggagacgggaccagug

SEQ ID NO: 1193136 - RNA, 19 nt, Artificial Sequence
  Description of Artificial Sequence: Synthetic oligonucleotide
aagugggucgauagucaug

SEQ ID NO: 1193137 - RNA, 19 nt, Artificial Sequence
  Description of Artificial Sequence: Synthetic oligonucleotide
cagugcauugcucaccaga

SEQ ID NO: 1193138 - RNA, 19 nt, Artificial Sequence
  Description of Artificial Sequence: Synthetic oligonucleotide
gacgggaccagugucuguc

SEQ ID NO: 1193139 - RNA, 19 nt, Artificial Sequence
  Description of Artificial Sequence: Synthetic oligonucleotide
uuaccacauuacugggcac

SEQ ID NO: 1193140 - RNA, 19 nt, Artificial Sequence
  Description of Artificial Sequence: Synthetic oligonucleotide
uuacaggggagcucagguu

SEQ ID NO: 1193141 - RNA, 19 nt, Artificial Sequence
  Description of Artificial Sequence: Synthetic oligonucleotide
ucggugcaccaugaguucc

SEQ ID NO: 1193142 - RNA, 19 nt, Artificial Sequence
  Description of Artificial Sequence: Synthetic oligonucleotide
acagucuuuccauguggau

SEQ ID NO: 1193143 - RNA, 19 nt, Artificial Sequence
  Description of Artificial Sequence: Synthetic oligonucleotide
uagaauguuugggucugaa

SEQ ID NO: 1193144 - RNA, 19 nt, Artificial Sequence
  Description of Artificial Sequence: Synthetic oligonucleotide
ccaagugacgcuguccugg

SEQ ID NO: 1193145 - RNA, 19 nt, Artificial Sequence
  Description of Artificial Sequence: Synthetic oligonucleotide
acgucuuaccguaggagcu

SEQ ID NO: 1193146 - RNA, 19 nt, Artificial Sequence
  Description of Artificial Sequence: Synthetic oligonucleotide
gggguuguaaauaguuacc

SEQ ID NO: 1193147 - RNA, 19 nt, Artificial Sequence
  Description of Artificial Sequence: Synthetic oligonucleotide
gucuuaccguaggagcugg

SEQ ID NO: 1193148 - RNA, 19 nt, Artificial Sequence
  Description of Artificial Sequence: Synthetic oligonucleotide
cuuugguccccagcgggcc

SEQ ID NO: 1193149 - RNA, 19 nt, Artificial Sequence
  Description of Artificial Sequence: Synthetic oligonucleotide
uccaagugacgcuguccug

SEQ ID NO: 1193150 - RNA, 19 nt, Artificial Sequence
  Description of Artificial Sequence: Synthetic oligonucleotide
ucgcaccguacucgcagcc

SEQ ID NO: 1193151 - RNA, 19 nt, Artificial Sequence
  Description of Artificial Sequence: Synthetic oligonucleotide
gaacucuccucaucaccga

SEQ ID NO: 1193152 - RNA, 19 nt, Artificial Sequence
  Description of Artificial Sequence: Synthetic oligonucleotide
cacggguucagucugauuu

SEQ ID NO: 1193153 - RNA, 19 nt, Artificial Sequence
  Description of Artificial Sequence: Synthetic oligonucleotide
gguccaacuuggaaggagc

SEQ ID NO: 1193154 - RNA, 19 nt, Artificial Sequence
  Description of Artificial Sequence: Synthetic oligonucleotide
caggaauucccugccguug

SEQ ID NO: 1193155 - RNA, 19 nt, Artificial Sequence
  Description of Artificial Sequence: Synthetic oligonucleotide
aucaccgauguuggcacug

SEQ ID NO: 1193156 - RNA, 19 nt, Artificial Sequence
  Description of Artificial Sequence: Synthetic oligonucleotide
caucugccaauagccgucg

SEQ ID NO: 1193157 - RNA, 19 nt, Artificial Sequence
  Description of Artificial Sequence: Synthetic oligonucleotide
cugggagcggucagucacc

SEQ ID NO: 1193158 - RNA, 19 nt, Artificial Sequence
  Description of Artificial Sequence: Synthetic oligonucleotide
accgggacgucuuaccgua

SEQ ID NO: 1193159 - RNA, 19 nt, Artificial Sequence
  Description of Artificial Sequence: Synthetic oligonucleotide
gagacgggaccagugucug

SEQ ID NO: 1193160 - RNA, 19 nt, Artificial Sequence
  Description of Artificial Sequence: Synthetic oligonucleotide
uaacccugugucagaguua

SEQ ID NO: 1193161 - RNA, 19 nt, Artificial Sequence
  Description of Artificial Sequence: Synthetic oligonucleotide
uccuccgccagcagucggu

SEQ ID NO: 1193162 - RNA, 19 nt, Artificial Sequence
  Description of Artificial Sequence: Synthetic oligonucleotide
uguaggcaccagaggccug

SEQ ID NO: 1193163 - RNA, 19 nt, Artificial Sequence
  Description of Artificial Sequence: Synthetic oligonucleotide
uacggacagucaccuuggc

SEQ ID NO: 1193164 - RNA, 19 nt, Artificial Sequence
  Description of Artificial Sequence: Synthetic oligonucleotide
uuagaauguuugggucuga

SEQ ID NO: 1193165 - RNA, 19 nt, Artificial Sequence
  Description of Artificial Sequence: Synthetic oligonucleotide
cagcugggugauaguaaag

SEQ ID NO: 1193166 - RNA, 19 nt, Artificial Sequence
  Description of Artificial Sequence: Synthetic oligonucleotide
ugagaacaccaggaugaaa

SEQ ID NO: 1193167 - RNA, 19 nt, Artificial Sequence
  Description of Artificial Sequence: Synthetic oligonucleotide
gaagccuuggacaggggcu

SEQ ID NO: 1193168 - RNA, 19 nt, Artificial Sequence
  Description of Artificial Sequence: Synthetic oligonucleotide
cccggauauacucauuuuc

SEQ ID NO: 1193169 - RNA, 19 nt, Artificial Sequence
  Description of Artificial Sequence: Synthetic oligonucleotide
ccggauauacucauuuuca

SEQ ID NO: 1193170 - RNA, 19 nt, Artificial Sequence
  Description of Artificial Sequence: Synthetic oligonucleotide
cucgcaccguacucgcagc

SEQ ID NO: 1193171 - RNA, 19 nt, Artificial Sequence
  Description of Artificial Sequence: Synthetic oligonucleotide
cauugcucaccagaaccuc

SEQ ID NO: 1193172 - RNA, 19 nt, Artificial Sequence
  Description of Artificial Sequence: Synthetic oligonucleotide
ggaauaauauggacugcca

SEQ ID NO: 1193173 - RNA, 19 nt, Artificial Sequence
  Description of Artificial Sequence: Synthetic oligonucleotide
guccuggcgaaguccggag

SEQ ID NO: 1193174 - RNA, 19 nt, Artificial Sequence
  Description of Artificial Sequence: Synthetic oligonucleotide
cagugugauugagguaggg

SEQ ID NO: 1193175 - RNA, 19 nt, Artificial Sequence
  Description of Artificial Sequence: Synthetic oligonucleotide
ggacuugcccgaaaggcug

SEQ ID NO: 1193176 - RNA, 19 nt, Artificial Sequence
  Description of Artificial Sequence: Synthetic oligonucleotide
caucaucaauaacccugug

SEQ ID NO: 1193177 - RNA, 19 nt, Artificial Sequence
  Description of Artificial Sequence: Synthetic oligonucleotide
ggucgauagucaugccucc

SEQ ID NO: 1193178 - RNA, 19 nt, Artificial Sequence
  Description of Artificial Sequence: Synthetic oligonucleotide
aucugccaauagccgucgg

SEQ ID NO: 1193179 - RNA, 19 nt, Artificial Sequence
  Description of Artificial Sequence: Synthetic oligonucleotide
ggauaguaauuuccagcca

SEQ ID NO: 1193180 - RNA, 19 nt, Artificial Sequence
  Description of Artificial Sequence: Synthetic oligonucleotide
aggcauugguuuagaaugu

SEQ ID NO: 1193181 - RNA, 19 nt, Artificial Sequence
  Description of Artificial Sequence: Synthetic oligonucleotide
caaagguacguauuuccau

SEQ ID NO: 1193182 - RNA, 19 nt, Artificial Sequence
  Description of Artificial Sequence: Synthetic oligonucleotide
guaaaggcccggaacaggu

SEQ ID NO: 1193183 - RNA, 19 nt, Artificial Sequence
  Description of Artificial Sequence: Synthetic oligonucleotide
acucgcagccccugacucu

SEQ ID NO: 1193184 - RNA, 19 nt, Artificial Sequence
  Description of Artificial Sequence: Synthetic oligonucleotide
ggauauacucauuuucaau

SEQ ID NO: 1193185 - RNA, 19 nt, Artificial Sequence
  Description of Artificial Sequence: Synthetic oligonucleotide
ggacgucuuaccguaggag

SEQ ID NO: 1193186 - RNA, 19 nt, Artificial Sequence
  Description of Artificial Sequence: Synthetic oligonucleotide
acggguucagucugauuua

SEQ ID NO: 1193187 - RNA, 19 nt, Artificial Sequence
  Description of Artificial Sequence: Synthetic oligonucleotide
gaguguugacaggauagua

SEQ ID NO: 1193188 - RNA, 19 nt, Artificial Sequence
  Description of Artificial Sequence: Synthetic oligonucleotide
gggucgauagucaugccuc

SEQ ID NO: 1193189 - RNA, 19 nt, Artificial Sequence
  Description of Artificial Sequence: Synthetic oligonucleotide
gugcauugcucaccagaac

SEQ ID NO: 1193190 - RNA, 19 nt, Artificial Sequence
  Description of Artificial Sequence: Synthetic oligonucleotide
gugauaguaaaggcccgga

SEQ ID NO: 1193191 - RNA, 19 nt, Artificial Sequence
  Description of Artificial Sequence: Synthetic oligonucleotide
cccugacucuaucagggcc

SEQ ID NO: 1193192 - RNA, 19 nt, Artificial Sequence
  Description of Artificial Sequence: Synthetic oligonucleotide
gcagaugcacuuggggagg

SEQ ID NO: 1193193 - RNA, 19 nt, Artificial Sequence
  Description of Artificial Sequence: Synthetic oligonucleotide
auuuccaagugggucgaua

SEQ ID NO: 1193194 - RNA, 19 nt, Artificial Sequence
  Description of Artificial Sequence: Synthetic oligonucleotide
cuuaccguaggagcuggga

SEQ ID NO: 1193195 - RNA, 19 nt, Artificial Sequence
  Description of Artificial Sequence: Synthetic oligonucleotide
ggccuagcuggauucuugc

SEQ ID NO: 1193196 - RNA, 19 nt, Artificial Sequence
  Description of Artificial Sequence: Synthetic oligonucleotide
gggauuggucccaccaucc

SEQ ID NO: 1193197 - RNA, 19 nt, Artificial Sequence
  Description of Artificial Sequence: Synthetic oligonucleotide
cuccaagugacgcuguccu

SEQ ID NO: 1193198 - RNA, 19 nt, Artificial Sequence
  Description of Artificial Sequence: Synthetic oligonucleotide
ccucacaggguccccagcc

SEQ ID NO: 1193199 - RNA, 19 nt, Artificial Sequence
  Description of Artificial Sequence: Synthetic oligonucleotide
gucggugcaccaugaguuc

SEQ ID NO: 1193200 - RNA, 19 nt, Artificial Sequence
  Description of Artificial Sequence: Synthetic oligonucleotide
ggugccuugcagcugcauc

SEQ ID NO: 1193201 - RNA, 19 nt, Artificial Sequence
  Description of Artificial Sequence: Synthetic oligonucleotide
ucccugccguugcugucag

SEQ ID NO: 1193202 - RNA, 19 nt, Artificial Sequence
  Description of Artificial Sequence: Synthetic oligonucleotide
ucuugccauugaacccaga

SEQ ID NO: 1193203 - RNA, 19 nt, Artificial Sequence
  Description of Artificial Sequence: Synthetic oligonucleotide
cuagcuggauucuugccau

SEQ ID NO: 1193204 - RNA, 19 nt, Artificial Sequence
  Description of Artificial Sequence: Synthetic oligonucleotide
guacguauuuccauaggau

SEQ ID NO: 1193205 - RNA, 19 nt, Artificial Sequence
  Description of Artificial Sequence: Synthetic oligonucleotide
caacggcuuacaggcauug

SEQ ID NO: 1193206 - RNA, 19 nt, Artificial Sequence
  Description of Artificial Sequence: Synthetic oligonucleotide
ggucagucaccacggucag

SEQ ID NO: 1193207 - RNA, 19 nt, Artificial Sequence
  Description of Artificial Sequence: Synthetic oligonucleotide
gcugcauguguccauccga

SEQ ID NO: 1193208 - RNA, 19 nt, Artificial Sequence
  Description of Artificial Sequence: Synthetic oligonucleotide
aucucagcccaacggcuua

SEQ ID NO: 1193209 - RNA, 19 nt, Artificial Sequence
  Description of Artificial Sequence: Synthetic oligonucleotide
agagggucuguuccauguu

SEQ ID NO: 1193210 - RNA, 19 nt, Artificial Sequence
  Description of Artificial Sequence: Synthetic oligonucleotide
uccggagaacuguguccug

SEQ ID NO: 1193211 - RNA, 19 nt, Artificial Sequence
  Description of Artificial Sequence: Synthetic oligonucleotide
ucaccgauguuggcacugu

SEQ ID NO: 1193212 - RNA, 19 nt, Artificial Sequence
  Description of Artificial Sequence: Synthetic oligonucleotide
gcaccguacucgcagcccc

SEQ ID NO: 1193213 - RNA, 19 nt, Artificial Sequence
  Description of Artificial Sequence: Synthetic oligonucleotide
ccagauggaucucagccca

SEQ ID NO: 1193214 - RNA, 19 nt, Artificial Sequence
  Description of Artificial Sequence: Synthetic oligonucleotide
gcagcugggugauaguaaa

SEQ ID NO: 1193215 - RNA, 19 nt, Artificial Sequence
  Description of Artificial Sequence: Synthetic oligonucleotide
uugguccccagcgggccag

SEQ ID NO: 1193216 - RNA, 19 nt, Artificial Sequence
  Description of Artificial Sequence: Synthetic oligonucleotide
uaguuaccuggaaguucuc

SEQ ID NO: 1193217 - RNA, 19 nt, Artificial Sequence
  Description of Artificial Sequence: Synthetic oligonucleotide
cccaggaauaauauggacu

SEQ ID NO: 1193218 - RNA, 19 nt, Artificial Sequence
  Description of Artificial Sequence: Synthetic oligonucleotide
gcccaggaauaauauggac

SEQ ID NO: 1193219 - RNA, 19 nt, Artificial Sequence
  Description of Artificial Sequence: Synthetic oligonucleotide
ggugucaaagcggcugaug

SEQ ID NO: 1193220 - RNA, 19 nt, Artificial Sequence
  Description of Artificial Sequence: Synthetic oligonucleotide
gccagugcauugcucacca

SEQ ID NO: 1193221 - RNA, 19 nt, Artificial Sequence
  Description of Artificial Sequence: Synthetic oligonucleotide
ccucgcaccguacucgcag

SEQ ID NO: 1193222 - RNA, 19 nt, Artificial Sequence
  Description of Artificial Sequence: Synthetic oligonucleotide
uuuccuggacuugcccgaa

SEQ ID NO: 1193223 - RNA, 19 nt, Artificial Sequence
  Description of Artificial Sequence: Synthetic oligonucleotide
ggguuguaaauaguuaccu

SEQ ID NO: 1193224 - RNA, 19 nt, Artificial Sequence
  Description of Artificial Sequence: Synthetic oligonucleotide
ccaccgggacgucuuaccg

SEQ ID NO: 1193225 - RNA, 19 nt, Artificial Sequence
  Description of Artificial Sequence: Synthetic oligonucleotide
aauuuccaagugggucgau

SEQ ID NO: 1193226 - RNA, 19 nt, Artificial Sequence
  Description of Artificial Sequence: Synthetic oligonucleotide
acgggaccagugucuguca

SEQ ID NO: 1193227 - RNA, 19 nt, Artificial Sequence
  Description of Artificial Sequence: Synthetic oligonucleotide
gcggccugaaucuucuguc

SEQ ID NO: 1193228 - RNA, 19 nt, Artificial Sequence
  Description of Artificial Sequence: Synthetic oligonucleotide
gauagucaugccuccucuu

SEQ ID NO: 1193229 - RNA, 19 nt, Artificial Sequence
  Description of Artificial Sequence: Synthetic oligonucleotide
auagccgucggugcaccau

SEQ ID NO: 1193230 - RNA, 19 nt, Artificial Sequence
  Description of Artificial Sequence: Synthetic oligonucleotide
uacaugggaccuggauuuc

SEQ ID NO: 1193231 - RNA, 19 nt, Artificial Sequence
  Description of Artificial Sequence: Synthetic oligonucleotide
uuccuggacuugcccgaaa

SEQ ID NO: 1193232 - RNA, 19 nt, Artificial Sequence
  Description of Artificial Sequence: Synthetic oligonucleotide
gccaauagccgucggugca

SEQ ID NO: 1193233 - RNA, 19 nt, Artificial Sequence
  Description of Artificial Sequence: Synthetic oligonucleotide
acagcagaucccaccggga

SEQ ID NO: 1193234 - RNA, 19 nt, Artificial Sequence
  Description of Artificial Sequence: Synthetic oligonucleotide
guagcccggauauacucau

SEQ ID NO: 1193235 - RNA, 19 nt, Artificial Sequence
  Description of Artificial Sequence: Synthetic oligonucleotide
ucggggugucaaagcggcu

SEQ ID NO: 1193236 - RNA, 19 nt, Artificial Sequence
  Description of Artificial Sequence: Synthetic oligonucleotide
cgaaucacuugagaacacc

SEQ ID NO: 1193237 - RNA, 19 nt, Artificial Sequence
  Description of Artificial Sequence: Synthetic oligonucleotide
ugacucuaucagggccucc

SEQ ID NO: 1193238 - RNA, 19 nt, Artificial Sequence
  Description of Artificial Sequence: Synthetic oligonucleotide
uccauccgagauguagauu

SEQ ID NO: 1193239 - RNA, 19 nt, Artificial Sequence
  Description of Artificial Sequence: Synthetic oligonucleotide
cagaccacaaagguacgua

SEQ ID NO: 1193240 - RNA, 19 nt, Artificial Sequence
  Description of Artificial Sequence: Synthetic oligonucleotide
gccuagcuggauucuugcc

SEQ ID NO: 1193241 - RNA, 19 nt, Artificial Sequence
  Description of Artificial Sequence: Synthetic oligonucleotide
ccaagugggucgauaguca

SEQ ID NO: 1193242 - RNA, 19 nt, Artificial Sequence
  Description of Artificial Sequence: Synthetic oligonucleotide
ggacaauacaugggaccug

SEQ ID NO: 1193243 - RNA, 19 nt, Artificial Sequence
  Description of Artificial Sequence: Synthetic oligonucleotide
ccggagaacuguguccugg

SEQ ID NO: 1193244 - RNA, 19 nt, Artificial Sequence
  Description of Artificial Sequence: Synthetic oligonucleotide
cagggagcgagagggucug

SEQ ID NO: 1193245 - RNA, 19 nt, Artificial Sequence
  Description of Artificial Sequence: Synthetic oligonucleotide
agacgggaccagugucugu

SEQ ID NO: 1193246 - RNA, 19 nt, Artificial Sequence
  Description of Artificial Sequence: Synthetic oligonucleotide
ccgaaaucuugcauuggga

SEQ ID NO: 1193247 - RNA, 19 nt, Artificial Sequence
  Description of Artificial Sequence: Synthetic oligonucleotide
ggauuggucccaccaucca

SEQ ID NO: 1193248 - RNA, 19 nt, Artificial Sequence
  Description of Artificial Sequence: Synthetic oligonucleotide
gcauguguccauccgagau

SEQ ID NO: 1193249 - RNA, 19 nt, Artificial Sequence
  Description of Artificial Sequence: Synthetic oligonucleotide
guccggagaacuguguccu

SEQ ID NO: 1193250 - RNA, 19 nt, Artificial Sequence
  Description of Artificial Sequence: Synthetic oligonucleotide
gugggucgauagucaugcc

SEQ ID NO: 1193251 - RNA, 19 nt, Artificial Sequence
  Description of Artificial Sequence: Synthetic oligonucleotide
cagccggaccauguguuuc

SEQ ID NO: 1193252 - RNA, 19 nt, Artificial Sequence
  Description of Artificial Sequence: Synthetic oligonucleotide
gccacagaguacauacuga

SEQ ID NO: 1193253 - RNA, 19 nt, Artificial Sequence
  Description of Artificial Sequence: Synthetic oligonucleotide
gaaguccggagaacugugu

SEQ ID NO: 1193254 - RNA, 19 nt, Artificial Sequence
  Description of Artificial Sequence: Synthetic oligonucleotide
guugcggccugaaucuucu

SEQ ID NO: 1193255 - RNA, 19 nt, Artificial Sequence
  Description of Artificial Sequence: Synthetic oligonucleotide
gggacgucuuaccguagga

SEQ ID NO: 1193256 - RNA, 19 nt, Artificial Sequence
  Description of Artificial Sequence: Synthetic oligonucleotide
cccaccgggacgucuuacc

SEQ ID NO: 1193257 - RNA, 19 nt, Artificial Sequence
  Description of Artificial Sequence: Synthetic oligonucleotide
guccauccgagauguagau

SEQ ID NO: 1193258 - RNA, 19 nt, Artificial Sequence
  Description of Artificial Sequence: Synthetic oligonucleotide
cgaaguccggagaacugug

SEQ ID NO: 1193259 - RNA, 19 nt, Artificial Sequence
  Description of Artificial Sequence: Synthetic oligonucleotide
gguguacggacagucaccu

SEQ ID NO: 1193260 - RNA, 19 nt, Artificial Sequence
  Description of Artificial Sequence: Synthetic oligonucleotide
ggcgaaguccggagaacug

SEQ ID NO: 1193261 - RNA, 19 nt, Artificial Sequence
  Description of Artificial Sequence: Synthetic oligonucleotide
cccagaccacaaagguacg

SEQ ID NO: 1193262 - RNA, 19 nt, Artificial Sequence
  Description of Artificial Sequence: Synthetic oligonucleotide
caagugggucgauagucau

SEQ ID NO: 1193263 - RNA, 19 nt, Artificial Sequence
  Description of Artificial Sequence: Synthetic oligonucleotide
guacucgcagccccugacu

SEQ ID NO: 1193264 - RNA, 19 nt, Artificial Sequence
  Description of Artificial Sequence: Synthetic oligonucleotide
ucggugccuugcagcugca

SEQ ID NO: 1193265 - RNA, 19 nt, Artificial Sequence
  Description of Artificial Sequence: Synthetic oligonucleotide
ucccaccgggacgucuuac

SEQ ID NO: 1193266 - RNA, 19 nt, Artificial Sequence
  Description of Artificial Sequence: Synthetic oligonucleotide
gcggucagucaccacgguc

SEQ ID NO: 1193267 - RNA, 19 nt, Artificial Sequence
  Description of Artificial Sequence: Synthetic oligonucleotide
ccaauagccgucggugcac

SEQ ID NO: 1193268 - RNA, 19 nt, Artificial Sequence
  Description of Artificial Sequence: Synthetic oligonucleotide
ccauugaacccagaccaca

SEQ ID NO: 1193269 - RNA, 19 nt, Artificial Sequence
  Description of Artificial Sequence: Synthetic oligonucleotide
aucuugcauugggauuggu

SEQ ID NO: 1193270 - RNA, 19 nt, Artificial Sequence
  Description of Artificial Sequence: Synthetic oligonucleotide
ugacuggcagccggaccau

SEQ ID NO: 1193271 - RNA, 19 nt, Artificial Sequence
  Description of Artificial Sequence: Synthetic oligonucleotide
cggaccauguguuucaccu

SEQ ID NO: 1193272 - RNA, 19 nt, Artificial Sequence
  Description of Artificial Sequence: Synthetic oligonucleotide
gguugcggccugaaucuuc

SEQ ID NO: 1193273 - RNA, 19 nt, Artificial Sequence
  Description of Artificial Sequence: Synthetic oligonucleotide
cgggacgucuuaccguagg

SEQ ID NO: 1193274 - RNA, 19 nt, Artificial Sequence
  Description of Artificial Sequence: Synthetic oligonucleotide
cggauauacucauuuucaa

SEQ ID NO: 1193275 - RNA, 19 nt, Artificial Sequence
  Description of Artificial Sequence: Synthetic oligonucleotide
ccccugacucuaucagggc

SEQ ID NO: 1193276 - RNA, 19 nt, Artificial Sequence
  Description of Artificial Sequence: Synthetic oligonucleotide
ggaucucagcccaacggcu

SEQ ID NO: 1193277 - RNA, 19 nt, Artificial Sequence
  Description of Artificial Sequence: Synthetic oligonucleotide
ccggaccauguguuucacc

SEQ ID NO: 1193278 - RNA, 19 nt, Artificial Sequence
  Description of Artificial Sequence: Synthetic oligonucleotide
gcccucgcaccguacucgc

SEQ ID NO: 1193279 - RNA, 19 nt, Artificial Sequence
  Description of Artificial Sequence: Synthetic oligonucleotide
aguggcgcccucgcaccgu

SEQ ID NO: 1193280 - RNA, 19 nt, Artificial Sequence
  Description of Artificial Sequence: Synthetic oligonucleotide
cgauguuggcacuguacca

SEQ ID NO: 1193281 - RNA, 19 nt, Artificial Sequence
  Description of Artificial Sequence: Synthetic oligonucleotide
gcgaaucacuugagaacac

SEQ ID NO: 1193282 - RNA, 19 nt, Artificial Sequence
  Description of Artificial Sequence: Synthetic oligonucleotide
ccgagauguagauucgagu

SEQ ID NO: 1193283 - RNA, 19 nt, Artificial Sequence
  Description of Artificial Sequence: Synthetic oligonucleotide
ggagacgggaccagugucu

SEQ ID NO: 1193284 - RNA, 19 nt, Artificial Sequence
  Description of Artificial Sequence: Synthetic oligonucleotide
cacggcagaaggagaaguu

SEQ ID NO: 1193285 - RNA, 19 nt, Artificial Sequence
  Description of Artificial Sequence: Synthetic oligonucleotide
gucgauagucaugccuccu

SEQ ID NO: 1193286 - RNA, 19 nt, Artificial Sequence
  Description of Artificial Sequence: Synthetic oligonucleotide
ggagaacuguguccugggu

SEQ ID NO: 1193287 - RNA, 19 nt, Artificial Sequence
  Description of Artificial Sequence: Synthetic oligonucleotide
gccgucggugcaccaugag

SEQ ID NO: 1193288 - RNA, 19 nt, Artificial Sequence
  Description of Artificial Sequence: Synthetic oligonucleotide
caccgggacgucuuaccgu

SEQ ID NO: 1193289 - RNA, 19 nt, Artificial Sequence
  Description of Artificial Sequence: Synthetic oligonucleotide
ccccgaaaucuugcauugg

SEQ ID NO: 1193290 - RNA, 19 nt, Artificial Sequence
  Description of Artificial Sequence: Synthetic oligonucleotide
agccgucggugcaccauga

SEQ ID NO: 1193291 - RNA, 19 nt, Artificial Sequence
  Description of Artificial Sequence: Synthetic oligonucleotide
cggggugucaaagcggcug

SEQ ID NO: 1193292 - RNA, 19 nt, Artificial Sequence
  Description of Artificial Sequence: Synthetic oligonucleotide
uggcgcccucgcaccguac

SEQ ID NO: 1193293 - RNA, 19 nt, Artificial Sequence
  Description of Artificial Sequence: Synthetic oligonucleotide
aucccaccgggacgucuua

SEQ ID NO: 1193294 - RNA, 19 nt, Artificial Sequence
  Description of Artificial Sequence: Synthetic oligonucleotide
agcucagguugcggccuga

SEQ ID NO: 1193295 - RNA, 19 nt, Artificial Sequence
  Description of Artificial Sequence: Synthetic oligonucleotide
ccgaaaggcuggaggccug

SEQ ID NO: 1193296 - RNA, 19 nt, Artificial Sequence
  Description of Artificial Sequence: Synthetic oligonucleotide
ucgcagccccugacucuau

SEQ ID NO: 1193297 - RNA, 19 nt, Artificial Sequence
  Description of Artificial Sequence: Synthetic oligonucleotide
cucagcccaacggcuuaca

SEQ ID NO: 1193298 - RNA, 19 nt, Artificial Sequence
  Description of Artificial Sequence: Synthetic oligonucleotide
cgucuuaccguaggagcug

SEQ ID NO: 1193299 - RNA, 19 nt, Artificial Sequence
  Description of Artificial Sequence: Synthetic oligonucleotide
gcgaaguccggagaacugu

SEQ ID NO: 1193300 - RNA, 19 nt, Artificial Sequence
  Description of Artificial Sequence: Synthetic oligonucleotide
ccagcgggccagugugagc

SEQ ID NO: 1193301 - RNA, 19 nt, Artificial Sequence
  Description of Artificial Sequence: Synthetic oligonucleotide
ggaauucccugccguugcu

SEQ ID NO: 1193302 - RNA, 19 nt, Artificial Sequence
  Description of Artificial Sequence: Synthetic oligonucleotide
agccacggguucagucuga

SEQ ID NO: 1193303 - RNA, 19 nt, Artificial Sequence
  Description of Artificial Sequence: Synthetic oligonucleotide
caucaccgauguuggcacu

SEQ ID NO: 1193304 - RNA, 19 nt, Artificial Sequence
  Description of Artificial Sequence: Synthetic oligonucleotide
agguugcggccugaaucuu

SEQ ID NO: 1193305 - RNA, 19 nt, Artificial Sequence
  Description of Artificial Sequence: Synthetic oligonucleotide
cgucggugcaccaugaguu

SEQ ID NO: 1193306 - RNA, 19 nt, Artificial Sequence
  Description of Artificial Sequence: Synthetic oligonucleotide
gcauugggauuggucccac

SEQ ID NO: 1193307 - RNA, 19 nt, Artificial Sequence
  Description of Artificial Sequence: Synthetic oligonucleotide
guccccagcgggccagugu

SEQ ID NO: 1193308 - RNA, 19 nt, Artificial Sequence
  Description of Artificial Sequence: Synthetic oligonucleotide
cgcccucgcaccguacucg

SEQ ID NO: 1193309 - RNA, 19 nt, Artificial Sequence
  Description of Artificial Sequence: Synthetic oligonucleotide
caccgauguuggcacugua

SEQ ID NO: 1193310 - RNA, 19 nt, Artificial Sequence
  Description of Artificial Sequence: Synthetic oligonucleotide
cucagguugcggccugaau

SEQ ID NO: 1193311 - RNA, 19 nt, Artificial Sequence
  Description of Artificial Sequence: Synthetic oligonucleotide
ccgggacgucuuaccguag

SEQ ID NO: 1193312 - RNA, 19 nt, Artificial Sequence
  Description of Artificial Sequence: Synthetic oligonucleotide
ggaccauguguuucaccuu

SEQ ID NO: 1193313 - RNA, 19 nt, Artificial Sequence
  Description of Artificial Sequence: Synthetic oligonucleotide
caccguacucgcagccccu

SEQ ID NO: 1193314 - RNA, 19 nt, Artificial Sequence
  Description of Artificial Sequence: Synthetic oligonucleotide
gcgcccucgcaccguacuc

SEQ ID NO: 1193315 - RNA, 19 nt, Artificial Sequence
  Description of Artificial Sequence: Synthetic oligonucleotide
ggcauugguuuagaauguu

SEQ ID NO: 1193316 - RNA, 19 nt, Artificial Sequence
  Description of Artificial Sequence: Synthetic oligonucleotide
cgauagucaugccuccucu

SEQ ID NO: 1193317 - RNA, 19 nt, Artificial Sequence
  Description of Artificial Sequence: Synthetic oligonucleotide
cccaacggcuuacaggcau

SEQ ID NO: 1193318 - RNA, 19 nt, Artificial Sequence
  Description of Artificial Sequence: Synthetic oligonucleotide
cagcuccaagugacgcugu

SEQ ID NO: 1193319 - RNA, 19 nt, Artificial Sequence
  Description of Artificial Sequence: Synthetic oligonucleotide
ggcgcccucgcaccguacu

SEQ ID NO: 1193320 - RNA, 19 nt, Artificial Sequence
  Description of Artificial Sequence: Synthetic oligonucleotide
ccgucggugcaccaugagu

SEQ ID NO: 1193321 - RNA, 19 nt, Artificial Sequence
  Description of Artificial Sequence: Synthetic oligonucleotide
ggcagccggaccauguguu

SEQ ID NO: 1193322 - RNA, 19 nt, Artificial Sequence
  Description of Artificial Sequence: Synthetic oligonucleotide
gguguaccuccugcaccaa

SEQ ID NO: 1193323 - RNA, 19 nt, Artificial Sequence
  Description of Artificial Sequence: Synthetic oligonucleotide
gccugagaacucuccucau

SEQ ID NO: 1193324 - RNA, 19 nt, Artificial Sequence
  Description of Artificial Sequence: Synthetic oligonucleotide
acccugugucagaguuaaa

SEQ ID NO: 1193325 - RNA, 19 nt, Artificial Sequence
  Description of Artificial Sequence: Synthetic oligonucleotide
gcagccggaccauguguuu

SEQ ID NO: 1193326 - RNA, 19 nt, Artificial Sequence
  Description of Artificial Sequence: Synthetic oligonucleotide
ccguacucgcagccccuga

SEQ ID NO: 1193327 - RNA, 19 nt, Artificial Sequence
  Description of Artificial Sequence: Synthetic oligonucleotide
gggagcgagagggucuguu

SEQ ID NO: 1193328 - RNA, 19 nt, Artificial Sequence
  Description of Artificial Sequence: Synthetic oligonucleotide
gcccaacggcuuacaggca

SEQ ID NO: 1193329 - RNA, 19 nt, Artificial Sequence
  Description of Artificial Sequence: Synthetic oligonucleotide
ccaacggcuuacaggcauu

SEQ ID NO: 1193330 - RNA, 19 nt, Artificial Sequence
  Description of Artificial Sequence: Synthetic oligonucleotide
ccguaggagcugggaagca

SEQ ID NO: 1193331 - RNA, 19 nt, Artificial Sequence
  Description of Artificial Sequence: Synthetic oligonucleotide
cccucgcaccguacucgca

SEQ ID NO: 1193332 - RNA, 19 nt, Artificial Sequence
  Description of Artificial Sequence: Synthetic oligonucleotide
gccacggguucagucugau

SEQ ID NO: 1193333 - RNA, 19 nt, Artificial Sequence
  Description of Artificial Sequence: Synthetic oligonucleotide
ccacggguucagucugauu

SEQ ID NO: 1193334 - RNA, 19 nt, Artificial Sequence
  Description of Artificial Sequence: Synthetic oligonucleotide
ccgccagcagucggugccu

SEQ ID NO: 1193335 - RNA, 19 nt, Artificial Sequence
  Description of Artificial Sequence: Synthetic oligonucleotide
cggugccuugcagcugcau

SEQ ID NO: 1193336 - RNA, 19 nt, Artificial Sequence
  Description of Artificial Sequence: Synthetic oligonucleotide
ucagugaugacuaagaggg

SEQ ID NO: 1193337 - RNA, 19 nt, Artificial Sequence
  Description of Artificial Sequence: Synthetic oligonucleotide
aaauauaauuguuaaacuc

SEQ ID NO: 1193338 - RNA, 19 nt, Artificial Sequence
  Description of Artificial Sequence: Synthetic oligonucleotide
aaagaugcagcccagacuc

SEQ ID NO: 1193339 - RNA, 19 nt, Artificial Sequence
  Description of Artificial Sequence: Synthetic oligonucleotide
aauugcauuacaaaauucc

SEQ ID NO: 1193340 - RNA, 19 nt, Artificial Sequence
  Description of Artificial Sequence: Synthetic oligonucleotide
aacaaauagcucuugauga

SEQ ID NO: 1193341 - RNA, 19 nt, Artificial Sequence
  Description of Artificial Sequence: Synthetic oligonucleotide
uuugcuaaaaucuugccga

SEQ ID NO: 1193342 - RNA, 19 nt, Artificial Sequence
  Description of Artificial Sequence: Synthetic oligonucleotide
cuuuuauagaaaauguccc

SEQ ID NO: 1193343 - RNA, 19 nt, Artificial Sequence
  Description of Artificial Sequence: Synthetic oligonucleotide
auagaagugacucccggcc

SEQ ID NO: 1193344 - RNA, 19 nt, Artificial Sequence
  Description of Artificial Sequence: Synthetic oligonucleotide
uugauaagcagauucuggg

SEQ ID NO: 1193345 - RNA, 19 nt, Artificial Sequence
  Description of Artificial Sequence: Synthetic oligonucleotide
guacuugcagccuagaagg

SEQ ID NO: 1193346 - RNA, 19 nt, Artificial Sequence
  Description of Artificial Sequence: Synthetic oligonucleotide
uuuguuuugcauaccaacc

SEQ ID NO: 1193347 - RNA, 19 nt, Artificial Sequence
  Description of Artificial Sequence: Synthetic oligonucleotide
uuugcgauaacaagcuccg

SEQ ID NO: 1193348 - RNA, 19 nt, Artificial Sequence
  Description of Artificial Sequence: Synthetic oligonucleotide
aguauaaguacgaacaggg

SEQ ID NO: 1193349 - RNA, 19 nt, Artificial Sequence
  Description of Artificial Sequence: Synthetic oligonucleotide
cuugaaacaauguugccgc

SEQ ID NO: 1193350 - RNA, 19 nt, Artificial Sequence
  Description of Artificial Sequence: Synthetic oligonucleotide
agagagaucucucggaugg

SEQ ID NO: 1193351 - RNA, 19 nt, Artificial Sequence
  Description of Artificial Sequence: Synthetic oligonucleotide
ucaagucagaccaagggug

SEQ ID NO: 1193352 - RNA, 19 nt, Artificial Sequence
  Description of Artificial Sequence: Synthetic oligonucleotide
uuguacaccacuccguacg

SEQ ID NO: 1193353 - RNA, 19 nt, Artificial Sequence
  Description of Artificial Sequence: Synthetic oligonucleotide
gaacaaauagcucuugaug

SEQ ID NO: 1193354 - RNA, 19 nt, Artificial Sequence
  Description of Artificial Sequence: Synthetic oligonucleotide
acuacuauaacuugaaaua

SEQ ID NO: 1193355 - RNA, 19 nt, Artificial Sequence
  Description of Artificial Sequence: Synthetic oligonucleotide
aauauuagggugauuaagu

SEQ ID NO: 1193356 - RNA, 19 nt, Artificial Sequence
  Description of Artificial Sequence: Synthetic oligonucleotide
auuugcgauaacaagcucc

SEQ ID NO: 1193357 - RNA, 19 nt, Artificial Sequence
  Description of Artificial Sequence: Synthetic oligonucleotide
uuaaguuccuuaagcagag

SEQ ID NO: 1193358 - RNA, 19 nt, Artificial Sequence
  Description of Artificial Sequence: Synthetic oligonucleotide
aacaaucaaaucacuacac

SEQ ID NO: 1193359 - RNA, 19 nt, Artificial Sequence
  Description of Artificial Sequence: Synthetic oligonucleotide
aacuugaaacaauguugcc

SEQ ID NO: 1193360 - RNA, 19 nt, Artificial Sequence
  Description of Artificial Sequence: Synthetic oligonucleotide
cuuugcuaaaaucuugccg

SEQ ID NO: 1193361 - RNA, 19 nt, Artificial Sequence
  Description of Artificial Sequence: Synthetic oligonucleotide
aucuccgggaaacagggcc

SEQ ID NO: 1193362 - RNA, 19 nt, Artificial Sequence
  Description of Artificial Sequence: Synthetic oligonucleotide
agucaagucagaccaaggg

SEQ ID NO: 1193363 - RNA, 19 nt, Artificial Sequence
  Description of Artificial Sequence: Synthetic oligonucleotide
auggcagaaugcuaggccc

SEQ ID NO: 1193364 - RNA, 19 nt, Artificial Sequence
  Description of Artificial Sequence: Synthetic oligonucleotide
acuugaaacaauguugccg

SEQ ID NO: 1193365 - RNA, 19 nt, Artificial Sequence
  Description of Artificial Sequence: Synthetic oligonucleotide
aaauccauccacacugccc

SEQ ID NO: 1193366 - RNA, 19 nt, Artificial Sequence
  Description of Artificial Sequence: Synthetic oligonucleotide
ugaguauaaguacgaacag

SEQ ID NO: 1193367 - RNA, 19 nt, Artificial Sequence
  Description of Artificial Sequence: Synthetic oligonucleotide
auccauaaauuucuugagg

SEQ ID NO: 1193368 - RNA, 19 nt, Artificial Sequence
  Description of Artificial Sequence: Synthetic oligonucleotide
uuaacagaacacuggagga

SEQ ID NO: 1193369 - RNA, 19 nt, Artificial Sequence
  Description of Artificial Sequence: Synthetic oligonucleotide
cuuagucacauccuggaag

SEQ ID NO: 1193370 - RNA, 19 nt, Artificial Sequence
  Description of Artificial Sequence: Synthetic oligonucleotide
agcuggaacaaauagcucu

SEQ ID NO: 1193371 - RNA, 19 nt, Artificial Sequence
  Description of Artificial Sequence: Synthetic oligonucleotide
gauccggaagaguuggucg

SEQ ID NO: 1193372 - RNA, 19 nt, Artificial Sequence
  Description of Artificial Sequence: Synthetic oligonucleotide
uucaguuucagugucgagc

SEQ ID NO: 1193373 - RNA, 19 nt, Artificial Sequence
  Description of Artificial Sequence: Synthetic oligonucleotide
acuuugcuaaaaucuugcc

SEQ ID NO: 1193374 - RNA, 19 nt, Artificial Sequence
  Description of Artificial Sequence: Synthetic oligonucleotide
aaccaaguaaagcuuauuu

SEQ ID NO: 1193375 - RNA, 19 nt, Artificial Sequence
  Description of Artificial Sequence: Synthetic oligonucleotide
acgcaagcaaagcucagcc

SEQ ID NO: 1193376 - RNA, 19 nt, Artificial Sequence
  Description of Artificial Sequence: Synthetic oligonucleotide
acuugauggaccccucugc

SEQ ID NO: 1193377 - RNA, 19 nt, Artificial Sequence
  Description of Artificial Sequence: Synthetic oligonucleotide
uccauggagcacuagugcg

SEQ ID NO: 1193378 - RNA, 19 nt, Artificial Sequence
  Description of Artificial Sequence: Synthetic oligonucleotide
aauuucuugagguccuggu

SEQ ID NO: 1193379 - RNA, 19 nt, Artificial Sequence
  Description of Artificial Sequence: Synthetic oligonucleotide
aacgcaagcaaagcucagc

SEQ ID NO: 1193380 - RNA, 19 nt, Artificial Sequence
  Description of Artificial Sequence: Synthetic oligonucleotide
gaaucuccgggaaacaggg

SEQ ID NO: 1193381 - RNA, 19 nt, Artificial Sequence
  Description of Artificial Sequence: Synthetic oligonucleotide
acaaauagcucuugaugag

SEQ ID NO: 1193382 - RNA, 19 nt, Artificial Sequence
  Description of Artificial Sequence: Synthetic oligonucleotide
gaguauaaguacgaacagg

SEQ ID NO: 1193383 - RNA, 19 nt, Artificial Sequence
  Description of Artificial Sequence: Synthetic oligonucleotide
ucggcuuauaaucaggcau

SEQ ID NO: 1193384 - RNA, 19 nt, Artificial Sequence
  Description of Artificial Sequence: Synthetic oligonucleotide
caugaguauaaguacgaac

SEQ ID NO: 1193385 - RNA, 19 nt, Artificial Sequence
  Description of Artificial Sequence: Synthetic oligonucleotide
gacaauauuagggugauua

SEQ ID NO: 1193386 - RNA, 19 nt, Artificial Sequence
  Description of Artificial Sequence: Synthetic oligonucleotide
gaagauccggaagaguugg

SEQ ID NO: 1193387 - RNA, 19 nt, Artificial Sequence
  Description of Artificial Sequence: Synthetic oligonucleotide
auaacuugaaauauaaaua

SEQ ID NO: 1193388 - RNA, 19 nt, Artificial Sequence
  Description of Artificial Sequence: Synthetic oligonucleotide
ugcaucugauaccaaaacu

SEQ ID NO: 1193389 - RNA, 19 nt, Artificial Sequence
  Description of Artificial Sequence: Synthetic oligonucleotide
aaacucggcuuauaaucag

SEQ ID NO: 1193390 - RNA, 19 nt, Artificial Sequence
  Description of Artificial Sequence: Synthetic oligonucleotide
agccggauuuucuuaagcg

SEQ ID NO: 1193391 - RNA, 19 nt, Artificial Sequence
  Description of Artificial Sequence: Synthetic oligonucleotide
cuugcuaguccaaagucug

SEQ ID NO: 1193392 - RNA, 19 nt, Artificial Sequence
  Description of Artificial Sequence: Synthetic oligonucleotide
uguuuugcauaccaacccu

SEQ ID NO: 1193393 - RNA, 19 nt, Artificial Sequence
  Description of Artificial Sequence: Synthetic oligonucleotide
uauuagggugauuaaguuc

SEQ ID NO: 1193394 - RNA, 19 nt, Artificial Sequence
  Description of Artificial Sequence: Synthetic oligonucleotide
uaaucaggcauagaaguga

SEQ ID NO: 1193395 - RNA, 19 nt, Artificial Sequence
  Description of Artificial Sequence: Synthetic oligonucleotide
uaaaaucuugccgagccca

SEQ ID NO: 1193396 - RNA, 19 nt, Artificial Sequence
  Description of Artificial Sequence: Synthetic oligonucleotide
aggcauagaagugacuccc

SEQ ID NO: 1193397 - RNA, 19 nt, Artificial Sequence
  Description of Artificial Sequence: Synthetic oligonucleotide
aaucaggcauagaagugac

SEQ ID NO: 1193398 - RNA, 19 nt, Artificial Sequence
  Description of Artificial Sequence: Synthetic oligonucleotide
uuccaaagugcacauggca

SEQ ID NO: 1193399 - RNA, 19 nt, Artificial Sequence
  Description of Artificial Sequence: Synthetic oligonucleotide
ggaaacucggcuuauaauc

SEQ ID NO: 1193400 - RNA, 19 nt, Artificial Sequence
  Description of Artificial Sequence: Synthetic oligonucleotide
auaaguacgaacagggacu

SEQ ID NO: 1193401 - RNA, 19 nt, Artificial Sequence
  Description of Artificial Sequence: Synthetic oligonucleotide
caaaccaccucaucagggg

SEQ ID NO: 1193402 - RNA, 19 nt, Artificial Sequence
  Description of Artificial Sequence: Synthetic oligonucleotide
aagccuuucaaaguuuugu

SEQ ID NO: 1193403 - RNA, 19 nt, Artificial Sequence
  Description of Artificial Sequence: Synthetic oligonucleotide
aguaaagcuuauuuuccgu

SEQ ID NO: 1193404 - RNA, 19 nt, Artificial Sequence
  Description of Artificial Sequence: Synthetic oligonucleotide
caauauuagggugauuaag

SEQ ID NO: 1193405 - RNA, 19 nt, Artificial Sequence
  Description of Artificial Sequence: Synthetic oligonucleotide
acuauaacuugaaauauaa

SEQ ID NO: 1193406 - RNA, 19 nt, Artificial Sequence
  Description of Artificial Sequence: Synthetic oligonucleotide
agugacucccggccaaacc

SEQ ID NO: 1193407 - RNA, 19 nt, Artificial Sequence
  Description of Artificial Sequence: Synthetic oligonucleotide
gcuaaaaucuugccgagcc

SEQ ID NO: 1193408 - RNA, 19 nt, Artificial Sequence
  Description of Artificial Sequence: Synthetic oligonucleotide
uggaacgcaagcaaagcuc

SEQ ID NO: 1193409 - RNA, 19 nt, Artificial Sequence
  Description of Artificial Sequence: Synthetic oligonucleotide
uacaccacuccguacgugc

SEQ ID NO: 1193410 - RNA, 19 nt, Artificial Sequence
  Description of Artificial Sequence: Synthetic oligonucleotide
aagugcaucugauaccaaa

SEQ ID NO: 1193411 - RNA, 19 nt, Artificial Sequence
  Description of Artificial Sequence: Synthetic oligonucleotide
aggacaucacagccgaagg

SEQ ID NO: 1193412 - RNA, 19 nt, Artificial Sequence
  Description of Artificial Sequence: Synthetic oligonucleotide
gaagaggaaugccagugac

SEQ ID NO: 1193413 - RNA, 19 nt, Artificial Sequence
  Description of Artificial Sequence: Synthetic oligonucleotide
uacuauaacuugaaauaua

SEQ ID NO: 1193414 - RNA, 19 nt, Artificial Sequence
  Description of Artificial Sequence: Synthetic oligonucleotide
aguuucagugucgagccgg

SEQ ID NO: 1193415 - RNA, 19 nt, Artificial Sequence
  Description of Artificial Sequence: Synthetic oligonucleotide
agcgccaccacuucucccg

SEQ ID NO: 1193416 - RNA, 19 nt, Artificial Sequence
  Description of Artificial Sequence: Synthetic oligonucleotide
agaauggcagaaugcuagg

SEQ ID NO: 1193417 - RNA, 19 nt, Artificial Sequence
  Description of Artificial Sequence: Synthetic oligonucleotide
ugggguacuggcuuaguca

SEQ ID NO: 1193418 - RNA, 19 nt, Artificial Sequence
  Description of Artificial Sequence: Synthetic oligonucleotide
caacaauugcauuacaaaa

SEQ ID NO: 1193419 - RNA, 19 nt, Artificial Sequence
  Description of Artificial Sequence: Synthetic oligonucleotide
ucucccgucaacuuguuuu

SEQ ID NO: 1193420 - RNA, 19 nt, Artificial Sequence
  Description of Artificial Sequence: Synthetic oligonucleotide
acucuuuuauagaaaaugu

SEQ ID NO: 1193421 - RNA, 19 nt, Artificial Sequence
  Description of Artificial Sequence: Synthetic oligonucleotide
caaauagcucuugaugagg

SEQ ID NO: 1193422 - RNA, 19 nt, Artificial Sequence
  Description of Artificial Sequence: Synthetic oligonucleotide
uuccguguggaugacaucu

SEQ ID NO: 1193423 - RNA, 19 nt, Artificial Sequence
  Description of Artificial Sequence: Synthetic oligonucleotide
ucgaucucagaaucuccgg

SEQ ID NO: 1193424 - RNA, 19 nt, Artificial Sequence
  Description of Artificial Sequence: Synthetic oligonucleotide
ucagugucgagccggauuu

SEQ ID NO: 1193425 - RNA, 19 nt, Artificial Sequence
  Description of Artificial Sequence: Synthetic oligonucleotide
agacuccagauauccacgg

SEQ ID NO: 1193426 - RNA, 19 nt, Artificial Sequence
  Description of Artificial Sequence: Synthetic oligonucleotide
gaccugaccaggucaaagc

SEQ ID NO: 1193427 - RNA, 19 nt, Artificial Sequence
  Description of Artificial Sequence: Synthetic oligonucleotide
gaagaguuggucgaucuca

SEQ ID NO: 1193428 - RNA, 19 nt, Artificial Sequence
  Description of Artificial Sequence: Synthetic oligonucleotide
aaacuacuauaacuugaaa

SEQ ID NO: 1193429 - RNA, 19 nt, Artificial Sequence
  Description of Artificial Sequence: Synthetic oligonucleotide
uuaagcgccaccacuucuc

SEQ ID NO: 1193430 - RNA, 19 nt, Artificial Sequence
  Description of Artificial Sequence: Synthetic oligonucleotide
auggaacgcaagcaaagcu

SEQ ID NO: 1193431 - RNA, 19 nt, Artificial Sequence
  Description of Artificial Sequence: Synthetic oligonucleotide
uuuggaaguucuccaugga

SEQ ID NO: 1193432 - RNA, 19 nt, Artificial Sequence
  Description of Artificial Sequence: Synthetic oligonucleotide
aacucggcuuauaaucagg

SEQ ID NO: 1193433 - RNA, 19 nt, Artificial Sequence
  Description of Artificial Sequence: Synthetic oligonucleotide
agugcuaagacagccagaa

SEQ ID NO: 1193434 - RNA, 19 nt, Artificial Sequence
  Description of Artificial Sequence: Synthetic oligonucleotide
agaaucuccgggaaacagg

SEQ ID NO: 1193435 - RNA, 19 nt, Artificial Sequence
  Description of Artificial Sequence: Synthetic oligonucleotide
cagcauuugcgauaacaag

SEQ ID NO: 1193436 - RNA, 19 nt, Artificial Sequence
  Description of Artificial Sequence: Synthetic oligonucleotide
ugucaccucaucuuucccu

SEQ ID NO: 1193437 - RNA, 19 nt, Artificial Sequence
  Description of Artificial Sequence: Synthetic oligonucleotide
auauccacggcuguggagu

SEQ ID NO: 1193438 - RNA, 19 nt, Artificial Sequence
  Description of Artificial Sequence: Synthetic oligonucleotide
gauggaacgcaagcaaagc

SEQ ID NO: 1193439 - RNA, 19 nt, Artificial Sequence
  Description of Artificial Sequence: Synthetic oligonucleotide
uuuauccaacuugaaacaa

SEQ ID NO: 1193440 - RNA, 19 nt, Artificial Sequence
  Description of Artificial Sequence: Synthetic oligonucleotide
gaaaagaguagaaggcuga

SEQ ID NO: 1193441 - RNA, 19 nt, Artificial Sequence
  Description of Artificial Sequence: Synthetic oligonucleotide
gaaacucggcuuauaauca

SEQ ID NO: 1193442 - RNA, 19 nt, Artificial Sequence
  Description of Artificial Sequence: Synthetic oligonucleotide
gucgaucucagaaucuccg

SEQ ID NO: 1193443 - RNA, 19 nt, Artificial Sequence
  Description of Artificial Sequence: Synthetic oligonucleotide
uugcuaaaaucuugccgag

SEQ ID NO: 1193444 - RNA, 19 nt, Artificial Sequence
  Description of Artificial Sequence: Synthetic oligonucleotide
cacauccuggaagaaaggg

SEQ ID NO: 1193445 - RNA, 19 nt, Artificial Sequence
  Description of Artificial Sequence: Synthetic oligonucleotide
gaucucagaaucuccggga

SEQ ID NO: 1193446 - RNA, 19 nt, Artificial Sequence
  Description of Artificial Sequence: Synthetic oligonucleotide
guuggucgaucucagaauc

SEQ ID NO: 1193447 - RNA, 19 nt, Artificial Sequence
  Description of Artificial Sequence: Synthetic oligonucleotide
agucccgggaacuggcugg

SEQ ID NO: 1193448 - RNA, 19 nt, Artificial Sequence
  Description of Artificial Sequence: Synthetic oligonucleotide
ccucaugaguauaaguacg

SEQ ID NO: 1193449 - RNA, 19 nt, Artificial Sequence
  Description of Artificial Sequence: Synthetic oligonucleotide
cuaaaaucuugccgagccc

SEQ ID NO: 1193450 - RNA, 19 nt, Artificial Sequence
  Description of Artificial Sequence: Synthetic oligonucleotide
uggagcacuagugcggcgg

SEQ ID NO: 1193451 - RNA, 19 nt, Artificial Sequence
  Description of Artificial Sequence: Synthetic oligonucleotide
gauauccacggcuguggag

SEQ ID NO: 1193452 - RNA, 19 nt, Artificial Sequence
  Description of Artificial Sequence: Synthetic oligonucleotide
gaguuggucgaucucagaa

SEQ ID NO: 1193453 - RNA, 19 nt, Artificial Sequence
  Description of Artificial Sequence: Synthetic oligonucleotide
acaaacuaaauuacaaaua

SEQ ID NO: 1193454 - RNA, 19 nt, Artificial Sequence
  Description of Artificial Sequence: Synthetic oligonucleotide
acccugaagaaagcgggcc

SEQ ID NO: 1193455 - RNA, 19 nt, Artificial Sequence
  Description of Artificial Sequence: Synthetic oligonucleotide
ugacuaagagggagagaag

SEQ ID NO: 1193456 - RNA, 19 nt, Artificial Sequence
  Description of Artificial Sequence: Synthetic oligonucleotide
caaacuacuauaacuugaa

SEQ ID NO: 1193457 - RNA, 19 nt, Artificial Sequence
  Description of Artificial Sequence: Synthetic oligonucleotide
gacccggugagaauggcag

SEQ ID NO: 1193458 - RNA, 19 nt, Artificial Sequence
  Description of Artificial Sequence: Synthetic oligonucleotide
agagucaagucagaccaag

SEQ ID NO: 1193459 - RNA, 19 nt, Artificial Sequence
  Description of Artificial Sequence: Synthetic oligonucleotide
auagcucuugaugagggga

SEQ ID NO: 1193460 - RNA, 19 nt, Artificial Sequence
  Description of Artificial Sequence: Synthetic oligonucleotide
uggguuaagugcaucugau

SEQ ID NO: 1193461 - RNA, 19 nt, Artificial Sequence
  Description of Artificial Sequence: Synthetic oligonucleotide
uaacagaacacuggaggac

SEQ ID NO: 1193462 - RNA, 19 nt, Artificial Sequence
  Description of Artificial Sequence: Synthetic oligonucleotide
uggcuuuguacaccacucc

SEQ ID NO: 1193463 - RNA, 19 nt, Artificial Sequence
  Description of Artificial Sequence: Synthetic oligonucleotide
ugagaauggcagaaugcua

SEQ ID NO: 1193464 - RNA, 19 nt, Artificial Sequence
  Description of Artificial Sequence: Synthetic oligonucleotide
uagaagugacucccggcca

SEQ ID NO: 1193465 - RNA, 19 nt, Artificial Sequence
  Description of Artificial Sequence: Synthetic oligonucleotide
aagaguuggucgaucucag

SEQ ID NO: 1193466 - RNA, 19 nt, Artificial Sequence
  Description of Artificial Sequence: Synthetic oligonucleotide
uugccgagcccacuucggg

SEQ ID NO: 1193467 - RNA, 19 nt, Artificial Sequence
  Description of Artificial Sequence: Synthetic oligonucleotide
aagcgggcccaacacucgg

SEQ ID NO: 1193468 - RNA, 19 nt, Artificial Sequence
  Description of Artificial Sequence: Synthetic oligonucleotide
cagccuagaaggauuucag

SEQ ID NO: 1193469 - RNA, 19 nt, Artificial Sequence
  Description of Artificial Sequence: Synthetic oligonucleotide
auaacaagcuccgcccauc

SEQ ID NO: 1193470 - RNA, 19 nt, Artificial Sequence
  Description of Artificial Sequence: Synthetic oligonucleotide
agaaugcuaggcccuggag

SEQ ID NO: 1193471 - RNA, 19 nt, Artificial Sequence
  Description of Artificial Sequence: Synthetic oligonucleotide
cagauauccacggcugugg

SEQ ID NO: 1193472 - RNA, 19 nt, Artificial Sequence
  Description of Artificial Sequence: Synthetic oligonucleotide
cuacacuaaaauauccaaa

SEQ ID NO: 1193473 - RNA, 19 nt, Artificial Sequence
  Description of Artificial Sequence: Synthetic oligonucleotide
uaagcgccaccacuucucc

SEQ ID NO: 1193474 - RNA, 19 nt, Artificial Sequence
  Description of Artificial Sequence: Synthetic oligonucleotide
gauggaccccucugcauug

SEQ ID NO: 1193475 - RNA, 19 nt, Artificial Sequence
  Description of Artificial Sequence: Synthetic oligonucleotide
cucaugaguauaaguacga

SEQ ID NO: 1193476 - RNA, 19 nt, Artificial Sequence
  Description of Artificial Sequence: Synthetic oligonucleotide
ugaccugaccaggucaaag

SEQ ID NO: 1193477 - RNA, 19 nt, Artificial Sequence
  Description of Artificial Sequence: Synthetic oligonucleotide
auauaauuguuaaacucuu

SEQ ID NO: 1193478 - RNA, 19 nt, Artificial Sequence
  Description of Artificial Sequence: Synthetic oligonucleotide
caccucaugaguauaagua

SEQ ID NO: 1193479 - RNA, 19 nt, Artificial Sequence
  Description of Artificial Sequence: Synthetic oligonucleotide
gagccggauuuucuuaagc

SEQ ID NO: 1193480 - RNA, 19 nt, Artificial Sequence
  Description of Artificial Sequence: Synthetic oligonucleotide
uaacaagcuccgcccaucu

SEQ ID NO: 1193481 - RNA, 19 nt, Artificial Sequence
  Description of Artificial Sequence: Synthetic oligonucleotide
caccuuuuggaaguucucc

SEQ ID NO: 1193482 - RNA, 19 nt, Artificial Sequence
  Description of Artificial Sequence: Synthetic oligonucleotide
gaaagcgggcccaacacuc

SEQ ID NO: 1193483 - RNA, 19 nt, Artificial Sequence
  Description of Artificial Sequence: Synthetic oligonucleotide
gagucaagucagaccaagg

SEQ ID NO: 1193484 - RNA, 19 nt, Artificial Sequence
  Description of Artificial Sequence: Synthetic oligonucleotide
uuaaggucucggugcagga

SEQ ID NO: 1193485 - RNA, 19 nt, Artificial Sequence
  Description of Artificial Sequence: Synthetic oligonucleotide
uaguacuugcagccuagaa

SEQ ID NO: 1193486 - RNA, 19 nt, Artificial Sequence
  Description of Artificial Sequence: Synthetic oligonucleotide
uucagugucgagccggauu

SEQ ID NO: 1193487 - RNA, 19 nt, Artificial Sequence
  Description of Artificial Sequence: Synthetic oligonucleotide
aaagcgggcccaacacucg

SEQ ID NO: 1193488 - RNA, 19 nt, Artificial Sequence
  Description of Artificial Sequence: Synthetic oligonucleotide
aaguacgaacagggacucc

SEQ ID NO: 1193489 - RNA, 19 nt, Artificial Sequence
  Description of Artificial Sequence: Synthetic oligonucleotide
ccggauuuucuuaagcgcc

SEQ ID NO: 1193490 - RNA, 19 nt, Artificial Sequence
  Description of Artificial Sequence: Synthetic oligonucleotide
uugaaacaauguugccgcc

SEQ ID NO: 1193491 - RNA, 19 nt, Artificial Sequence
  Description of Artificial Sequence: Synthetic oligonucleotide
acaaacaaucaaaucacua

SEQ ID NO: 1193492 - RNA, 19 nt, Artificial Sequence
  Description of Artificial Sequence: Synthetic oligonucleotide
ccuagaaggauuucaggug

SEQ ID NO: 1193493 - RNA, 19 nt, Artificial Sequence
  Description of Artificial Sequence: Synthetic oligonucleotide
ggaacccugaagaaagcgg

SEQ ID NO: 1193494 - RNA, 19 nt, Artificial Sequence
  Description of Artificial Sequence: Synthetic oligonucleotide
uuggucgaucucagaaucu

SEQ ID NO: 1193495 - RNA, 19 nt, Artificial Sequence
  Description of Artificial Sequence: Synthetic oligonucleotide
ucuuaagcgccaccacuuc

SEQ ID NO: 1193496 - RNA, 19 nt, Artificial Sequence
  Description of Artificial Sequence: Synthetic oligonucleotide
caaagcucagcccuugaca

SEQ ID NO: 1193497 - RNA, 19 nt, Artificial Sequence
  Description of Artificial Sequence: Synthetic oligonucleotide
uacgugcccucuccgaucu

SEQ ID NO: 1193498 - RNA, 19 nt, Artificial Sequence
  Description of Artificial Sequence: Synthetic oligonucleotide
gaggcauccauaaauuucu

SEQ ID NO: 1193499 - RNA, 19 nt, Artificial Sequence
  Description of Artificial Sequence: Synthetic oligonucleotide
uaaguacgaacagggacuc

SEQ ID NO: 1193500 - RNA, 19 nt, Artificial Sequence
  Description of Artificial Sequence: Synthetic oligonucleotide
aagaggaaugccagugaca

SEQ ID NO: 1193501 - RNA, 19 nt, Artificial Sequence
  Description of Artificial Sequence: Synthetic oligonucleotide
agucagaccaagggugagg

SEQ ID NO: 1193502 - RNA, 19 nt, Artificial Sequence
  Description of Artificial Sequence: Synthetic oligonucleotide
agaucucucggauggcagu

SEQ ID NO: 1193503 - RNA, 19 nt, Artificial Sequence
  Description of Artificial Sequence: Synthetic oligonucleotide
gagaucucucggauggcag

SEQ ID NO: 1193504 - RNA, 19 nt, Artificial Sequence
  Description of Artificial Sequence: Synthetic oligonucleotide
ucucagaaucuccgggaaa

SEQ ID NO: 1193505 - RNA, 19 nt, Artificial Sequence
  Description of Artificial Sequence: Synthetic oligonucleotide
aagugacucccggccaaac

SEQ ID NO: 1193506 - RNA, 19 nt, Artificial Sequence
  Description of Artificial Sequence: Synthetic oligonucleotide
ugcuaaaaucuugccgagc

SEQ ID NO: 1193507 - RNA, 19 nt, Artificial Sequence
  Description of Artificial Sequence: Synthetic oligonucleotide
acagccgaaggugggguac

SEQ ID NO: 1193508 - RNA, 19 nt, Artificial Sequence
  Description of Artificial Sequence: Synthetic oligonucleotide
gacuccagauauccacggc

SEQ ID NO: 1193509 - RNA, 19 nt, Artificial Sequence
  Description of Artificial Sequence: Synthetic oligonucleotide
ucaugaguauaaguacgaa

SEQ ID NO: 1193510 - RNA, 19 nt, Artificial Sequence
  Description of Artificial Sequence: Synthetic oligonucleotide
ggccaaaccaccucaucag

SEQ ID NO: 1193511 - RNA, 19 nt, Artificial Sequence
  Description of Artificial Sequence: Synthetic oligonucleotide
auagugcagcauuugcgau

SEQ ID NO: 1193512 - RNA, 19 nt, Artificial Sequence
  Description of Artificial Sequence: Synthetic oligonucleotide
agugucgagccggauuuuc

SEQ ID NO: 1193513 - RNA, 19 nt, Artificial Sequence
  Description of Artificial Sequence: Synthetic oligonucleotide
cccacuucgggaaacucgg

SEQ ID NO: 1193514 - RNA, 19 nt, Artificial Sequence
  Description of Artificial Sequence: Synthetic oligonucleotide
uuagggugauuaaguuccu

SEQ ID NO: 1193515 - RNA, 19 nt, Artificial Sequence
  Description of Artificial Sequence: Synthetic oligonucleotide
uagugcagcauuugcgaua

SEQ ID NO: 1193516 - RNA, 19 nt, Artificial Sequence
  Description of Artificial Sequence: Synthetic oligonucleotide
aguggaagcuggguuaagu

SEQ ID NO: 1193517 - RNA, 19 nt, Artificial Sequence
  Description of Artificial Sequence: Synthetic oligonucleotide
cauggagcacuagugcggc

SEQ ID NO: 1193518 - RNA, 19 nt, Artificial Sequence
  Description of Artificial Sequence: Synthetic oligonucleotide
gccggauuuucuuaagcgc

SEQ ID NO: 1193519 - RNA, 19 nt, Artificial Sequence
  Description of Artificial Sequence: Synthetic oligonucleotide
ucgagccggauuuucuuaa

SEQ ID NO: 1193520 - RNA, 19 nt, Artificial Sequence
  Description of Artificial Sequence: Synthetic oligonucleotide
uacuugcagccuagaagga

SEQ ID NO: 1193521 - RNA, 19 nt, Artificial Sequence
  Description of Artificial Sequence: Synthetic oligonucleotide
aucuugccgagcccacuuc

SEQ ID NO: 1193522 - RNA, 19 nt, Artificial Sequence
  Description of Artificial Sequence: Synthetic oligonucleotide
aaaccaaguaaagcuuauu

SEQ ID NO: 1193523 - RNA, 19 nt, Artificial Sequence
  Description of Artificial Sequence: Synthetic oligonucleotide
cuuugggaaggacaucaca

SEQ ID NO: 1193524 - RNA, 19 nt, Artificial Sequence
  Description of Artificial Sequence: Synthetic oligonucleotide
aacacucggggcggaggac

SEQ ID NO: 1193525 - RNA, 19 nt, Artificial Sequence
  Description of Artificial Sequence: Synthetic oligonucleotide
cuugauggaccccucugca

SEQ ID NO: 1193526 - RNA, 19 nt, Artificial Sequence
  Description of Artificial Sequence: Synthetic oligonucleotide
ccgggaacccugaagaaag

SEQ ID NO: 1193527 - RNA, 19 nt, Artificial Sequence
  Description of Artificial Sequence: Synthetic oligonucleotide
uacgaacagggacuccaaa

SEQ ID NO: 1193528 - RNA, 19 nt, Artificial Sequence
  Description of Artificial Sequence: Synthetic oligonucleotide
cauaccaacccucagugau

SEQ ID NO: 1193529 - RNA, 19 nt, Artificial Sequence
  Description of Artificial Sequence: Synthetic oligonucleotide
agcacuagugcggcggcuc

SEQ ID NO: 1193530 - RNA, 19 nt, Artificial Sequence
  Description of Artificial Sequence: Synthetic oligonucleotide
aagcaaagcucagcccuug

SEQ ID NO: 1193531 - RNA, 19 nt, Artificial Sequence
  Description of Artificial Sequence: Synthetic oligonucleotide
agagaucucucggauggca

SEQ ID NO: 1193532 - RNA, 19 nt, Artificial Sequence
  Description of Artificial Sequence: Synthetic oligonucleotide
ucccggccaaaccaccuca

SEQ ID NO: 1193533 - RNA, 19 nt, Artificial Sequence
  Description of Artificial Sequence: Synthetic oligonucleotide
cuggguuaagugcaucuga

SEQ ID NO: 1193534 - RNA, 19 nt, Artificial Sequence
  Description of Artificial Sequence: Synthetic oligonucleotide
ccauggagcacuagugcgg

SEQ ID NO: 1193535 - RNA, 19 nt, Artificial Sequence
  Description of Artificial Sequence: Synthetic oligonucleotide
acuagugcggcggcucagg

SEQ ID NO: 1193536 - RNA, 19 nt, Artificial Sequence
  Description of Artificial Sequence: Synthetic oligonucleotide
uugauggaccccucugcau

SEQ ID NO: 1193537 - RNA, 19 nt, Artificial Sequence
  Description of Artificial Sequence: Synthetic oligonucleotide
acaccacuccguacgugcc

SEQ ID NO: 1193538 - RNA, 19 nt, Artificial Sequence
  Description of Artificial Sequence: Synthetic oligonucleotide
ugucgagccggauuuucuu

SEQ ID NO: 1193539 - RNA, 19 nt, Artificial Sequence
  Description of Artificial Sequence: Synthetic oligonucleotide
augacaucuagcagcuuga

SEQ ID NO: 1193540 - RNA, 19 nt, Artificial Sequence
  Description of Artificial Sequence: Synthetic oligonucleotide
gccaaaccaccucaucagg

SEQ ID NO: 1193541 - RNA, 19 nt, Artificial Sequence
  Description of Artificial Sequence: Synthetic oligonucleotide
gggaacccugaagaaagcg

SEQ ID NO: 1193542 - RNA, 19 nt, Artificial Sequence
  Description of Artificial Sequence: Synthetic oligonucleotide
caacccucagugaugacua

SEQ ID NO: 1193543 - RNA, 19 nt, Artificial Sequence
  Description of Artificial Sequence: Synthetic oligonucleotide
caggacccggugagaaugg

SEQ ID NO: 1193544 - RNA, 19 nt, Artificial Sequence
  Description of Artificial Sequence: Synthetic oligonucleotide
uaaggucucggugcaggac

SEQ ID NO: 1193545 - RNA, 19 nt, Artificial Sequence
  Description of Artificial Sequence: Synthetic oligonucleotide
gaugaccugaccaggucaa

SEQ ID NO: 1193546 - RNA, 19 nt, Artificial Sequence
  Description of Artificial Sequence: Synthetic oligonucleotide
cauuugcgauaacaagcuc

SEQ ID NO: 1193547 - RNA, 19 nt, Artificial Sequence
  Description of Artificial Sequence: Synthetic oligonucleotide
accaccucaugaguauaag

SEQ ID NO: 1193548 - RNA, 19 nt, Artificial Sequence
  Description of Artificial Sequence: Synthetic oligonucleotide
uagugcggcggcucaggcc

SEQ ID NO: 1193549 - RNA, 19 nt, Artificial Sequence
  Description of Artificial Sequence: Synthetic oligonucleotide
uugcagccuagaaggauuu

SEQ ID NO: 1193550 - RNA, 19 nt, Artificial Sequence
  Description of Artificial Sequence: Synthetic oligonucleotide
gcaagcaaagcucagcccu

SEQ ID NO: 1193551 - RNA, 19 nt, Artificial Sequence
  Description of Artificial Sequence: Synthetic oligonucleotide
gucagaccaagggugagga

SEQ ID NO: 1193552 - RNA, 19 nt, Artificial Sequence
  Description of Artificial Sequence: Synthetic oligonucleotide
cuccguacgugcccucucc

SEQ ID NO: 1193553 - RNA, 19 nt, Artificial Sequence
  Description of Artificial Sequence: Synthetic oligonucleotide
gaacgcaagcaaagcucag

SEQ ID NO: 1193554 - RNA, 19 nt, Artificial Sequence
  Description of Artificial Sequence: Synthetic oligonucleotide
ggcuuagucacauccugga

SEQ ID NO: 1193555 - RNA, 19 nt, Artificial Sequence
  Description of Artificial Sequence: Synthetic oligonucleotide
acccucagugaugacuaag

SEQ ID NO: 1193556 - RNA, 19 nt, Artificial Sequence
  Description of Artificial Sequence: Synthetic oligonucleotide
ugacaucuagcagcuugac

SEQ ID NO: 1193557 - RNA, 19 nt, Artificial Sequence
  Description of Artificial Sequence: Synthetic oligonucleotide
auggagcacuagugcggcg

SEQ ID NO: 1193558 - RNA, 19 nt, Artificial Sequence
  Description of Artificial Sequence: Synthetic oligonucleotide
ggaacgcaagcaaagcuca

SEQ ID NO: 1193559 - RNA, 19 nt, Artificial Sequence
  Description of Artificial Sequence: Synthetic oligonucleotide
caguuucagugucgagccg

SEQ ID NO: 1193560 - RNA, 19 nt, Artificial Sequence
  Description of Artificial Sequence: Synthetic oligonucleotide
cuagugcggcggcucaggc

SEQ ID NO: 1193561 - RNA, 19 nt, Artificial Sequence
  Description of Artificial Sequence: Synthetic oligonucleotide
cucggcuuauaaucaggca

SEQ ID NO: 1193562 - RNA, 19 nt, Artificial Sequence
  Description of Artificial Sequence: Synthetic oligonucleotide
acaagggguagagggagaa

SEQ ID NO: 1193563 - RNA, 19 nt, Artificial Sequence
  Description of Artificial Sequence: Synthetic oligonucleotide
ggaagaggaaugccaguga

SEQ ID NO: 1193564 - RNA, 19 nt, Artificial Sequence
  Description of Artificial Sequence: Synthetic oligonucleotide
ucggaagauccggaagagu

SEQ ID NO: 1193565 - RNA, 19 nt, Artificial Sequence
  Description of Artificial Sequence: Synthetic oligonucleotide
agcaaagcucagcccuuga

SEQ ID NO: 1193566 - RNA, 19 nt, Artificial Sequence
  Description of Artificial Sequence: Synthetic oligonucleotide
gauaacaagcuccgcccau

SEQ ID NO: 1193567 - RNA, 19 nt, Artificial Sequence
  Description of Artificial Sequence: Synthetic oligonucleotide
cuuaagcagagagaucucu

SEQ ID NO: 1193568 - RNA, 19 nt, Artificial Sequence
  Description of Artificial Sequence: Synthetic oligonucleotide
caccacuccguacgugccc

SEQ ID NO: 1193569 - RNA, 19 nt, Artificial Sequence
  Description of Artificial Sequence: Synthetic oligonucleotide
cagcuggaacaaauagcuc

SEQ ID NO: 1193570 - RNA, 19 nt, Artificial Sequence
  Description of Artificial Sequence: Synthetic oligonucleotide
gcacauggcaacaaaucca

SEQ ID NO: 1193571 - RNA, 19 nt, Artificial Sequence
  Description of Artificial Sequence: Synthetic oligonucleotide
uccguguggaugacaucua

SEQ ID NO: 1193572 - RNA, 19 nt, Artificial Sequence
  Description of Artificial Sequence: Synthetic oligonucleotide
ggcccgggaacccugaaga

SEQ ID NO: 1193573 - RNA, 19 nt, Artificial Sequence
  Description of Artificial Sequence: Synthetic oligonucleotide
aacccucagugaugacuaa

SEQ ID NO: 1193574 - RNA, 19 nt, Artificial Sequence
  Description of Artificial Sequence: Synthetic oligonucleotide
gcccacuucgggaaacucg

SEQ ID NO: 1193575 - RNA, 19 nt, Artificial Sequence
  Description of Artificial Sequence: Synthetic oligonucleotide
accaacccucagugaugac

SEQ ID NO: 1193576 - RNA, 19 nt, Artificial Sequence
  Description of Artificial Sequence: Synthetic oligonucleotide
auuuuccguguggaugaca

SEQ ID NO: 1193577 - RNA, 19 nt, Artificial Sequence
  Description of Artificial Sequence: Synthetic oligonucleotide
gcaaagcucagcccuugac

SEQ ID NO: 1193578 - RNA, 19 nt, Artificial Sequence
  Description of Artificial Sequence: Synthetic oligonucleotide
guacgugcccucuccgauc

SEQ ID NO: 1193579 - RNA, 19 nt, Artificial Sequence
  Description of Artificial Sequence: Synthetic oligonucleotide
gcagcauuugcgauaacaa

SEQ ID NO: 1193580 - RNA, 19 nt, Artificial Sequence
  Description of Artificial Sequence: Synthetic oligonucleotide
ucagaccaagggugaggaa

SEQ ID NO: 1193581 - RNA, 19 nt, Artificial Sequence
  Description of Artificial Sequence: Synthetic oligonucleotide
gaccaagggugaggaaggc

SEQ ID NO: 1193582 - RNA, 19 nt, Artificial Sequence
  Description of Artificial Sequence: Synthetic oligonucleotide
uauccacggcuguggagua

SEQ ID NO: 1193583 - RNA, 19 nt, Artificial Sequence
  Description of Artificial Sequence: Synthetic oligonucleotide
ugagcaccgcagccccagc

SEQ ID NO: 1193584 - RNA, 19 nt, Artificial Sequence
  Description of Artificial Sequence: Synthetic oligonucleotide
caacacucggggcggagga

SEQ ID NO: 1193585 - RNA, 19 nt, Artificial Sequence
  Description of Artificial Sequence: Synthetic oligonucleotide
uugcgauaacaagcuccgc

SEQ ID NO: 1193586 - RNA, 19 nt, Artificial Sequence
  Description of Artificial Sequence: Synthetic oligonucleotide
agcccacuucgggaaacuc

SEQ ID NO: 1193587 - RNA, 19 nt, Artificial Sequence
  Description of Artificial Sequence: Synthetic oligonucleotide
aggcacaacuuugcuaaaa

SEQ ID NO: 1193588 - RNA, 19 nt, Artificial Sequence
  Description of Artificial Sequence: Synthetic oligonucleotide
caagggguagagggagaag

SEQ ID NO: 1193589 - RNA, 19 nt, Artificial Sequence
  Description of Artificial Sequence: Synthetic oligonucleotide
aagauccggaagaguuggu

SEQ ID NO: 1193590 - RNA, 19 nt, Artificial Sequence
  Description of Artificial Sequence: Synthetic oligonucleotide
uaguggaagcuggguuaag

SEQ ID NO: 1193591 - RNA, 19 nt, Artificial Sequence
  Description of Artificial Sequence: Synthetic oligonucleotide
cuucgggaaacucggcuua

SEQ ID NO: 1193592 - RNA, 19 nt, Artificial Sequence
  Description of Artificial Sequence: Synthetic oligonucleotide
guaguggaagcuggguuaa

SEQ ID NO: 1193593 - RNA, 19 nt, Artificial Sequence
  Description of Artificial Sequence: Synthetic oligonucleotide
accacuccguacgugcccu

SEQ ID NO: 1193594 - RNA, 19 nt, Artificial Sequence
  Description of Artificial Sequence: Synthetic oligonucleotide
cagcccuugacaauuuuau

SEQ ID NO: 1193595 - RNA, 19 nt, Artificial Sequence
  Description of Artificial Sequence: Synthetic oligonucleotide
cccugaagaaagcgggccc

SEQ ID NO: 1193596 - RNA, 19 nt, Artificial Sequence
  Description of Artificial Sequence: Synthetic oligonucleotide
cuuaagcgccaccacuucu

SEQ ID NO: 1193597 - RNA, 19 nt, Artificial Sequence
  Description of Artificial Sequence: Synthetic oligonucleotide
guagagggagaagaucaua

SEQ ID NO: 1193598 - RNA, 19 nt, Artificial Sequence
  Description of Artificial Sequence: Synthetic oligonucleotide
acccggugagaauggcaga

SEQ ID NO: 1193599 - RNA, 19 nt, Artificial Sequence
  Description of Artificial Sequence: Synthetic oligonucleotide
gucgagccggauuuucuua

SEQ ID NO: 1193600 - RNA, 19 nt, Artificial Sequence
  Description of Artificial Sequence: Synthetic oligonucleotide
cacggcuguggaguaguac

SEQ ID NO: 1193601 - RNA, 19 nt, Artificial Sequence
  Description of Artificial Sequence: Synthetic oligonucleotide
gucaccaccucaugaguau

SEQ ID NO: 1193602 - RNA, 19 nt, Artificial Sequence
  Description of Artificial Sequence: Synthetic oligonucleotide
caccaccucaugaguauaa

SEQ ID NO: 1193603 - RNA, 19 nt, Artificial Sequence
  Description of Artificial Sequence: Synthetic oligonucleotide
cccucagugaugacuaaga

SEQ ID NO: 1193604 - RNA, 19 nt, Artificial Sequence
  Description of Artificial Sequence: Synthetic oligonucleotide
ggagcacuagugcggcggc

SEQ ID NO: 1193605 - RNA, 19 nt, Artificial Sequence
  Description of Artificial Sequence: Synthetic oligonucleotide
gcgggcccaacacucgggg

SEQ ID NO: 1193606 - RNA, 19 nt, Artificial Sequence
  Description of Artificial Sequence: Synthetic oligonucleotide
uccggaagaguuggucgau

SEQ ID NO: 1193607 - RNA, 19 nt, Artificial Sequence
  Description of Artificial Sequence: Synthetic oligonucleotide
uucgggaaacucggcuuau

SEQ ID NO: 1193608 - RNA, 19 nt, Artificial Sequence
  Description of Artificial Sequence: Synthetic oligonucleotide
uagggugauuaaguuccuu

SEQ ID NO: 1193609 - RNA, 19 nt, Artificial Sequence
  Description of Artificial Sequence: Synthetic oligonucleotide
agcgggcccaacacucggg

SEQ ID NO: 1193610 - RNA, 19 nt, Artificial Sequence
  Description of Artificial Sequence: Synthetic oligonucleotide
ugaccaggucaaagccuuu

SEQ ID NO: 1193611 - RNA, 19 nt, Artificial Sequence
  Description of Artificial Sequence: Synthetic oligonucleotide
aucaggcauagaagugacu

SEQ ID NO: 1193612 - RNA, 19 nt, Artificial Sequence
  Description of Artificial Sequence: Synthetic oligonucleotide
guaguacuugcagccuaga

SEQ ID NO: 1193613 - RNA, 19 nt, Artificial Sequence
  Description of Artificial Sequence: Synthetic oligonucleotide
cucccggccaaaccaccuc

SEQ ID NO: 1193614 - RNA, 19 nt, Artificial Sequence
  Description of Artificial Sequence: Synthetic oligonucleotide
ugcagccuagaaggauuuc

SEQ ID NO: 1193615 - RNA, 19 nt, Artificial Sequence
  Description of Artificial Sequence: Synthetic oligonucleotide
cggugagaauggcagaaug

SEQ ID NO: 1193616 - RNA, 19 nt, Artificial Sequence
  Description of Artificial Sequence: Synthetic oligonucleotide
gaagugacucccggccaaa

SEQ ID NO: 1193617 - RNA, 19 nt, Artificial Sequence
  Description of Artificial Sequence: Synthetic oligonucleotide
acucccggccaaaccaccu

SEQ ID NO: 1193618 - RNA, 19 nt, Artificial Sequence
  Description of Artificial Sequence: Synthetic oligonucleotide
ggaaugccagugacagcag

SEQ ID NO: 1193619 - RNA, 19 nt, Artificial Sequence
  Description of Artificial Sequence: Synthetic oligonucleotide
ugacaauauuagggugauu

SEQ ID NO: 1193620 - RNA, 19 nt, Artificial Sequence
  Description of Artificial Sequence: Synthetic oligonucleotide
gcuuagucacauccuggaa

SEQ ID NO: 1193621 - RNA, 19 nt, Artificial Sequence
  Description of Artificial Sequence: Synthetic oligonucleotide
ggcccaacacucggggcgg

SEQ ID NO: 1193622 - RNA, 19 nt, Artificial Sequence
  Description of Artificial Sequence: Synthetic oligonucleotide
cacuagugcggcggcucag

SEQ ID NO: 1193623 - RNA, 19 nt, Artificial Sequence
  Description of Artificial Sequence: Synthetic oligonucleotide
ggcagaaugcuaggcccug

SEQ ID NO: 1193624 - RNA, 19 nt, Artificial Sequence
  Description of Artificial Sequence: Synthetic oligonucleotide
ucgggaaacucggcuuaua

SEQ ID NO: 1193625 - RNA, 19 nt, Artificial Sequence
  Description of Artificial Sequence: Synthetic oligonucleotide
gguacuggcuuagucacau

SEQ ID NO: 1193626 - RNA, 19 nt, Artificial Sequence
  Description of Artificial Sequence: Synthetic oligonucleotide
ccaacacucggggcggagg

SEQ ID NO: 1193627 - RNA, 19 nt, Artificial Sequence
  Description of Artificial Sequence: Synthetic oligonucleotide
ccgcuuguuggggucauag

SEQ ID NO: 1193628 - RNA, 19 nt, Artificial Sequence
  Description of Artificial Sequence: Synthetic oligonucleotide
cagagucaagucagaccaa

SEQ ID NO: 1193629 - RNA, 19 nt, Artificial Sequence
  Description of Artificial Sequence: Synthetic oligonucleotide
gggaaacucggcuuauaau

SEQ ID NO: 1193630 - RNA, 19 nt, Artificial Sequence
  Description of Artificial Sequence: Synthetic oligonucleotide
gcauaccaacccucaguga

SEQ ID NO: 1193631 - RNA, 19 nt, Artificial Sequence
  Description of Artificial Sequence: Synthetic oligonucleotide
cagaggcauccauaaauuu

SEQ ID NO: 1193632 - RNA, 19 nt, Artificial Sequence
  Description of Artificial Sequence: Synthetic oligonucleotide
ggggucauagugcagcauu

SEQ ID NO: 1193633 - RNA, 19 nt, Artificial Sequence
  Description of Artificial Sequence: Synthetic oligonucleotide
uccgggaaacagggcccgc

SEQ ID NO: 1193634 - RNA, 19 nt, Artificial Sequence
  Description of Artificial Sequence: Synthetic oligonucleotide
caacuugauggaccccucu

SEQ ID NO: 1193635 - RNA, 19 nt, Artificial Sequence
  Description of Artificial Sequence: Synthetic oligonucleotide
caccucugagucccgggaa

SEQ ID NO: 1193636 - RNA, 19 nt, Artificial Sequence
  Description of Artificial Sequence: Synthetic oligonucleotide
auggaccccucugcauuga

SEQ ID NO: 1193637 - RNA, 19 nt, Artificial Sequence
  Description of Artificial Sequence: Synthetic oligonucleotide
ccaaaggcucuugcuaguc

SEQ ID NO: 1193638 - RNA, 19 nt, Artificial Sequence
  Description of Artificial Sequence: Synthetic oligonucleotide
ggaaggcuuugggaaggac

SEQ ID NO: 1193639 - RNA, 19 nt, Artificial Sequence
  Description of Artificial Sequence: Synthetic oligonucleotide
augaccugaccaggucaaa

SEQ ID NO: 1193640 - RNA, 19 nt, Artificial Sequence
  Description of Artificial Sequence: Synthetic oligonucleotide
cgaugaccugaccagguca

SEQ ID NO: 1193641 - RNA, 19 nt, Artificial Sequence
  Description of Artificial Sequence: Synthetic oligonucleotide
ccacuucgggaaacucggc

SEQ ID NO: 1193642 - RNA, 19 nt, Artificial Sequence
  Description of Artificial Sequence: Synthetic oligonucleotide
gcccagagucaagucagac

SEQ ID NO: 1193643 - RNA, 19 nt, Artificial Sequence
  Description of Artificial Sequence: Synthetic oligonucleotide
ccgaugaccugaccagguc

SEQ ID NO: 1193644 - RNA, 19 nt, Artificial Sequence
  Description of Artificial Sequence: Synthetic oligonucleotide
gugucgagccggauuuucu

SEQ ID NO: 1193645 - RNA, 19 nt, Artificial Sequence
  Description of Artificial Sequence: Synthetic oligonucleotide
ucccgggaacuggcuggcc

SEQ ID NO: 1193646 - RNA, 19 nt, Artificial Sequence
  Description of Artificial Sequence: Synthetic oligonucleotide
ccccgaugaccugaccagg

SEQ ID NO: 1193647 - RNA, 19 nt, Artificial Sequence
  Description of Artificial Sequence: Synthetic oligonucleotide
ggacccggugagaauggca

SEQ ID NO: 1193648 - RNA, 19 nt, Artificial Sequence
  Description of Artificial Sequence: Synthetic oligonucleotide
ggaguaguacuugcagccu

SEQ ID NO: 1193649 - RNA, 19 nt, Artificial Sequence
  Description of Artificial Sequence: Synthetic oligonucleotide
agggguccccagaguucgg

SEQ ID NO: 1193650 - RNA, 19 nt, Artificial Sequence
  Description of Artificial Sequence: Synthetic oligonucleotide
cggaagauccggaagaguu

SEQ ID NO: 1193651 - RNA, 19 nt, Artificial Sequence
  Description of Artificial Sequence: Synthetic oligonucleotide
cacagccgaagguggggua

SEQ ID NO: 1193652 - RNA, 19 nt, Artificial Sequence
  Description of Artificial Sequence: Synthetic oligonucleotide
ccaacccucagugaugacu

SEQ ID NO: 1193653 - RNA, 19 nt, Artificial Sequence
  Description of Artificial Sequence: Synthetic oligonucleotide
cgauaacaagcuccgccca

SEQ ID NO: 1193654 - RNA, 19 nt, Artificial Sequence
  Description of Artificial Sequence: Synthetic oligonucleotide
cgggaaacucggcuuauaa

SEQ ID NO: 1193655 - RNA, 19 nt, Artificial Sequence
  Description of Artificial Sequence: Synthetic oligonucleotide
gagcccacuucgggaaacu

SEQ ID NO: 1193656 - RNA, 19 nt, Artificial Sequence
  Description of Artificial Sequence: Synthetic oligonucleotide
uccgcuuguuggggucaua

SEQ ID NO: 1193657 - RNA, 19 nt, Artificial Sequence
  Description of Artificial Sequence: Synthetic oligonucleotide
ggguacuggcuuagucaca

SEQ ID NO: 1193658 - RNA, 19 nt, Artificial Sequence
  Description of Artificial Sequence: Synthetic oligonucleotide
cacucggggcggaggaccu

SEQ ID NO: 1193659 - RNA, 19 nt, Artificial Sequence
  Description of Artificial Sequence: Synthetic oligonucleotide
ccggaagaguuggucgauc

SEQ ID NO: 1193660 - RNA, 19 nt, Artificial Sequence
  Description of Artificial Sequence: Synthetic oligonucleotide
gagcacuagugcggcggcu

SEQ ID NO: 1193661 - RNA, 19 nt, Artificial Sequence
  Description of Artificial Sequence: Synthetic oligonucleotide
cggaagaguuggucgaucu

SEQ ID NO: 1193662 - RNA, 19 nt, Artificial Sequence
  Description of Artificial Sequence: Synthetic oligonucleotide
cucagcccuugacaauuuu

SEQ ID NO: 1193663 - RNA, 19 nt, Artificial Sequence
  Description of Artificial Sequence: Synthetic oligonucleotide
cccgggaacccugaagaaa

SEQ ID NO: 1193664 - RNA, 19 nt, Artificial Sequence
  Description of Artificial Sequence: Synthetic oligonucleotide
gcccgggaacccugaagaa

SEQ ID NO: 1193665 - RNA, 19 nt, Artificial Sequence
  Description of Artificial Sequence: Synthetic oligonucleotide
gggucauagugcagcauuu

SEQ ID NO: 1193666 - RNA, 19 nt, Artificial Sequence
  Description of Artificial Sequence: Synthetic oligonucleotide
ggaccccucugcauugaua

SEQ ID NO: 1193667 - RNA, 19 nt, Artificial Sequence
  Description of Artificial Sequence: Synthetic oligonucleotide
ccgggaacuggcuggccaa

SEQ ID NO: 1193668 - RNA, 19 nt, Artificial Sequence
  Description of Artificial Sequence: Synthetic oligonucleotide
cgggcccaacacucggggc

SEQ ID NO: 1193669 - RNA, 19 nt, Artificial Sequence
  Description of Artificial Sequence: Synthetic oligonucleotide
cccgaugaccugaccaggu

SEQ ID NO: 1193670 - RNA, 19 nt, Artificial Sequence
  Description of Artificial Sequence: Synthetic oligonucleotide
cccaacacucggggcggag

SEQ ID NO: 1193671 - RNA, 19 nt, Artificial Sequence
  Description of Artificial Sequence: Synthetic oligonucleotide
ggcccagagucaagucaga

SEQ ID NO: 1193672 - RNA, 19 nt, Artificial Sequence
  Description of Artificial Sequence: Synthetic oligonucleotide
cgagcccacuucgggaaac

SEQ ID NO: 1193673 - RNA, 19 nt, Artificial Sequence
  Description of Artificial Sequence: Synthetic oligonucleotide
cccgccgggucaccauuuc

SEQ ID NO: 1193674 - RNA, 19 nt, Artificial Sequence
  Description of Artificial Sequence: Synthetic oligonucleotide
cagccgaaggugggguacu

SEQ ID NO: 1193675 - RNA, 19 nt, Artificial Sequence
  Description of Artificial Sequence: Synthetic oligonucleotide
ccgccgggucaccauuuca

SEQ ID NO: 1193676 - RNA, 19 nt, Artificial Sequence
  Description of Artificial Sequence: Synthetic oligonucleotide
ccacuccguacgugcccuc

SEQ ID NO: 1193677 - RNA, 19 nt, Artificial Sequence
  Description of Artificial Sequence: Synthetic oligonucleotide
ggugggguacuggcuuagu

SEQ ID NO: 1193678 - RNA, 19 nt, Artificial Sequence
  Description of Artificial Sequence: Synthetic oligonucleotide
cguacgugcccucuccgau

SEQ ID NO: 1193679 - RNA, 19 nt, Artificial Sequence
  Description of Artificial Sequence: Synthetic oligonucleotide
gcgccaccacuucucccgu

SEQ ID NO: 1193680 - RNA, 19 nt, Artificial Sequence
  Description of Artificial Sequence: Synthetic oligonucleotide
ccgagcccacuucgggaaa

SEQ ID NO: 1193681 - RNA, 19 nt, Artificial Sequence
  Description of Artificial Sequence: Synthetic oligonucleotide
ccacggcuguggaguagua

SEQ ID NO: 1193682 - RNA, 19 nt, Artificial Sequence
  Description of Artificial Sequence: Synthetic oligonucleotide
cagugucgagccggauuuu

SEQ ID NO: 1193683 - RNA, 19 nt, Artificial Sequence
  Description of Artificial Sequence: Synthetic oligonucleotide
cccggccaaaccaccucau

SEQ ID NO: 1193684 - RNA, 19 nt, Artificial Sequence
  Description of Artificial Sequence: Synthetic oligonucleotide
gcccgccgggucaccauuu

SEQ ID NO: 1193685 - RNA, 19 nt, Artificial Sequence
  Description of Artificial Sequence: Synthetic oligonucleotide
ucaauaaucuuauugaugc

SEQ ID NO: 1193686 - RNA, 19 nt, Artificial Sequence
  Description of Artificial Sequence: Synthetic oligonucleotide
agaacaugcagacagacac

SEQ ID NO: 1193687 - RNA, 19 nt, Artificial Sequence
  Description of Artificial Sequence: Synthetic oligonucleotide
uuauaaauggugaaauagg

SEQ ID NO: 1193688 - RNA, 19 nt, Artificial Sequence
  Description of Artificial Sequence: Synthetic oligonucleotide
ucuaacuauuuauaaaugg

SEQ ID NO: 1193689 - RNA, 19 nt, Artificial Sequence
  Description of Artificial Sequence: Synthetic oligonucleotide
gauauuuuagaacaugcag

SEQ ID NO: 1193690 - RNA, 19 nt, Artificial Sequence
  Description of Artificial Sequence: Synthetic oligonucleotide
uuuauaaauggugaaauag

SEQ ID NO: 1193691 - RNA, 19 nt, Artificial Sequence
  Description of Artificial Sequence: Synthetic oligonucleotide
aagacuuggacaugcaacg

SEQ ID NO: 1193692 - RNA, 19 nt, Artificial Sequence
  Description of Artificial Sequence: Synthetic oligonucleotide
agaauuauuuccuucagug

SEQ ID NO: 1193693 - RNA, 19 nt, Artificial Sequence
  Description of Artificial Sequence: Synthetic oligonucleotide
aaucucuuucguucaaccc

SEQ ID NO: 1193694 - RNA, 19 nt, Artificial Sequence
  Description of Artificial Sequence: Synthetic oligonucleotide
acuguaaagcaacaguuac

SEQ ID NO: 1193695 - RNA, 19 nt, Artificial Sequence
  Description of Artificial Sequence: Synthetic oligonucleotide
aacgcuucaauauacuucu

SEQ ID NO: 1193696 - RNA, 19 nt, Artificial Sequence
  Description of Artificial Sequence: Synthetic oligonucleotide
agccuaguaauuuuguagc

SEQ ID NO: 1193697 - RNA, 19 nt, Artificial Sequence
  Description of Artificial Sequence: Synthetic oligonucleotide
uauuuuagaacaugcagac

SEQ ID NO: 1193698 - RNA, 19 nt, Artificial Sequence
  Description of Artificial Sequence: Synthetic oligonucleotide
uuuaaacacuccuuugggg

SEQ ID NO: 1193699 - RNA, 19 nt, Artificial Sequence
  Description of Artificial Sequence: Synthetic oligonucleotide
uaaauggugaaauaggaua

SEQ ID NO: 1193700 - RNA, 19 nt, Artificial Sequence
  Description of Artificial Sequence: Synthetic oligonucleotide
ugucuaacuauuuauaaau

SEQ ID NO: 1193701 - RNA, 19 nt, Artificial Sequence
  Description of Artificial Sequence: Synthetic oligonucleotide
ucguucaacccucucaucg

SEQ ID NO: 1193702 - RNA, 19 nt, Artificial Sequence
  Description of Artificial Sequence: Synthetic oligonucleotide
uauucauguaagcagcuug

SEQ ID NO: 1193703 - RNA, 19 nt, Artificial Sequence
  Description of Artificial Sequence: Synthetic oligonucleotide
uuaaacacuccuuugggga

SEQ ID NO: 1193704 - RNA, 19 nt, Artificial Sequence
  Description of Artificial Sequence: Synthetic oligonucleotide
agcaucacgucucauuugc

SEQ ID NO: 1193705 - RNA, 19 nt, Artificial Sequence
  Description of Artificial Sequence: Synthetic oligonucleotide
uuauucaagacuuggacau

SEQ ID NO: 1193706 - RNA, 19 nt, Artificial Sequence
  Description of Artificial Sequence: Synthetic oligonucleotide
ucgaacuugcuccaggucc

SEQ ID NO: 1193707 - RNA, 19 nt, Artificial Sequence
  Description of Artificial Sequence: Synthetic oligonucleotide
acuuucaugcuuuagucug

SEQ ID NO: 1193708 - RNA, 19 nt, Artificial Sequence
  Description of Artificial Sequence: Synthetic oligonucleotide
aguucagguuuccagcugc

SEQ ID NO: 1193709 - RNA, 19 nt, Artificial Sequence
  Description of Artificial Sequence: Synthetic oligonucleotide
aggauauuuuagaacaugc

SEQ ID NO: 1193710 - RNA, 19 nt, Artificial Sequence
  Description of Artificial Sequence: Synthetic oligonucleotide
uagccuaguaauuuuguag

SEQ ID NO: 1193711 - RNA, 19 nt, Artificial Sequence
  Description of Artificial Sequence: Synthetic oligonucleotide
agacuuucaugcuuuaguc

SEQ ID NO: 1193712 - RNA, 19 nt, Artificial Sequence
  Description of Artificial Sequence: Synthetic oligonucleotide
cuuuagucuggccaguucg

SEQ ID NO: 1193713 - RNA, 19 nt, Artificial Sequence
  Description of Artificial Sequence: Synthetic oligonucleotide
auaaucuuauugaugcagc

SEQ ID NO: 1193714 - RNA, 19 nt, Artificial Sequence
  Description of Artificial Sequence: Synthetic oligonucleotide
uaacuuauucaagacuugg

SEQ ID NO: 1193715 - RNA, 19 nt, Artificial Sequence
  Description of Artificial Sequence: Synthetic oligonucleotide
ugaucacuucucuucaccg

SEQ ID NO: 1193716 - RNA, 19 nt, Artificial Sequence
  Description of Artificial Sequence: Synthetic oligonucleotide
uucacgaccugauucuugg

SEQ ID NO: 1193717 - RNA, 19 nt, Artificial Sequence
  Description of Artificial Sequence: Synthetic oligonucleotide
aagcugucgauccuucaac

SEQ ID NO: 1193718 - RNA, 19 nt, Artificial Sequence
  Description of Artificial Sequence: Synthetic oligonucleotide
uuguuugucugcaaggaac

SEQ ID NO: 1193719 - RNA, 19 nt, Artificial Sequence
  Description of Artificial Sequence: Synthetic oligonucleotide
ugucgauccuucaacaucu

SEQ ID NO: 1193720 - RNA, 19 nt, Artificial Sequence
  Description of Artificial Sequence: Synthetic oligonucleotide
auucaagacuuggacaugc

SEQ ID NO: 1193721 - RNA, 19 nt, Artificial Sequence
  Description of Artificial Sequence: Synthetic oligonucleotide
ucaugaguuucucuuuuag

SEQ ID NO: 1193722 - RNA, 19 nt, Artificial Sequence
  Description of Artificial Sequence: Synthetic oligonucleotide
aaacucuaugauuuuccug

SEQ ID NO: 1193723 - RNA, 19 nt, Artificial Sequence
  Description of Artificial Sequence: Synthetic oligonucleotide
uaguaauuuuguagcaugc

SEQ ID NO: 1193724 - RNA, 19 nt, Artificial Sequence
  Description of Artificial Sequence: Synthetic oligonucleotide
auuugcggaaguuuucguc

SEQ ID NO: 1193725 - RNA, 19 nt, Artificial Sequence
  Description of Artificial Sequence: Synthetic oligonucleotide
uaaucuuauugaugcagcc

SEQ ID NO: 1193726 - RNA, 19 nt, Artificial Sequence
  Description of Artificial Sequence: Synthetic oligonucleotide
uuugcggaaguuuucgucu

SEQ ID NO: 1193727 - RNA, 19 nt, Artificial Sequence
  Description of Artificial Sequence: Synthetic oligonucleotide
ugcaauuucugcuccaacu

SEQ ID NO: 1193728 - RNA, 19 nt, Artificial Sequence
  Description of Artificial Sequence: Synthetic oligonucleotide
ucaccaacuguaaagcaac

SEQ ID NO: 1193729 - RNA, 19 nt, Artificial Sequence
  Description of Artificial Sequence: Synthetic oligonucleotide
ucaauauacuucugaguug

SEQ ID NO: 1193730 - RNA, 19 nt, Artificial Sequence
  Description of Artificial Sequence: Synthetic oligonucleotide
gaaucucuuucguucaacc

SEQ ID NO: 1193731 - RNA, 19 nt, Artificial Sequence
  Description of Artificial Sequence: Synthetic oligonucleotide
auucauguaagcagcuugc

SEQ ID NO: 1193732 - RNA, 19 nt, Artificial Sequence
  Description of Artificial Sequence: Synthetic oligonucleotide
cauucaugagcucuauccg

SEQ ID NO: 1193733 - RNA, 19 nt, Artificial Sequence
  Description of Artificial Sequence: Synthetic oligonucleotide
uccucauagaucuuccuga

SEQ ID NO: 1193734 - RNA, 19 nt, Artificial Sequence
  Description of Artificial Sequence: Synthetic oligonucleotide
uggugcuuuucacugaagc

SEQ ID NO: 1193735 - RNA, 19 nt, Artificial Sequence
  Description of Artificial Sequence: Synthetic oligonucleotide
uauuucagcaucacgucuc

SEQ ID NO: 1193736 - RNA, 19 nt, Artificial Sequence
  Description of Artificial Sequence: Synthetic oligonucleotide
aagucuugcuucaucuccc

SEQ ID NO: 1193737 - RNA, 19 nt, Artificial Sequence
  Description of Artificial Sequence: Synthetic oligonucleotide
uuuauucauguaagcagcu

SEQ ID NO: 1193738 - RNA, 19 nt, Artificial Sequence
  Description of Artificial Sequence: Synthetic oligonucleotide
aucucuuucguucaacccu

SEQ ID NO: 1193739 - RNA, 19 nt, Artificial Sequence
  Description of Artificial Sequence: Synthetic oligonucleotide
ucauccucucuuuuaaaca

SEQ ID NO: 1193740 - RNA, 19 nt, Artificial Sequence
  Description of Artificial Sequence: Synthetic oligonucleotide
agucuggccaguucguucg

SEQ ID NO: 1193741 - RNA, 19 nt, Artificial Sequence
  Description of Artificial Sequence: Synthetic oligonucleotide
guagcaugcucuuugagga

SEQ ID NO: 1193742 - RNA, 19 nt, Artificial Sequence
  Description of Artificial Sequence: Synthetic oligonucleotide
acaugcaacgauuugcgga

SEQ ID NO: 1193743 - RNA, 19 nt, Artificial Sequence
  Description of Artificial Sequence: Synthetic oligonucleotide
caugcuuuagucuggccag

SEQ ID NO: 1193744 - RNA, 19 nt, Artificial Sequence
  Description of Artificial Sequence: Synthetic oligonucleotide
uugcucauauuugauggcg

SEQ ID NO: 1193745 - RNA, 19 nt, Artificial Sequence
  Description of Artificial Sequence: Synthetic oligonucleotide
uguguuuaauucuugucua

SEQ ID NO: 1193746 - RNA, 19 nt, Artificial Sequence
  Description of Artificial Sequence: Synthetic oligonucleotide
guacugauguguuuaauuc

SEQ ID NO: 1193747 - RNA, 19 nt, Artificial Sequence
  Description of Artificial Sequence: Synthetic oligonucleotide
aaauggugaaauaggauau

SEQ ID NO: 1193748 - RNA, 19 nt, Artificial Sequence
  Description of Artificial Sequence: Synthetic oligonucleotide
gugaaauaggauauuuuag

SEQ ID NO: 1193749 - RNA, 19 nt, Artificial Sequence
  Description of Artificial Sequence: Synthetic oligonucleotide
uugucuaacuauuuauaaa

SEQ ID NO: 1193750 - RNA, 19 nt, Artificial Sequence
  Description of Artificial Sequence: Synthetic oligonucleotide
ucuugucuaacuauuuaua

SEQ ID NO: 1193751 - RNA, 19 nt, Artificial Sequence
  Description of Artificial Sequence: Synthetic oligonucleotide
uggacaugcaacgauuugc

SEQ ID NO: 1193752 - RNA, 19 nt, Artificial Sequence
  Description of Artificial Sequence: Synthetic oligonucleotide
ucaguuucagcaucucagc

SEQ ID NO: 1193753 - RNA, 19 nt, Artificial Sequence
  Description of Artificial Sequence: Synthetic oligonucleotide
cuccugucgaacuugcucc

SEQ ID NO: 1193754 - RNA, 19 nt, Artificial Sequence
  Description of Artificial Sequence: Synthetic oligonucleotide
cauccucucuuuuaaacac

SEQ ID NO: 1193755 - RNA, 19 nt, Artificial Sequence
  Description of Artificial Sequence: Synthetic oligonucleotide
uccaagucuugcuucaucu

SEQ ID NO: 1193756 - RNA, 19 nt, Artificial Sequence
  Description of Artificial Sequence: Synthetic oligonucleotide
cauuugcucauauuugaug

SEQ ID NO: 1193757 - RNA, 19 nt, Artificial Sequence
  Description of Artificial Sequence: Synthetic oligonucleotide
cuucuaacuuauucaagac

SEQ ID NO: 1193758 - RNA, 19 nt, Artificial Sequence
  Description of Artificial Sequence: Synthetic oligonucleotide
cagauucugacgcugggcc

SEQ ID NO: 1193759 - RNA, 19 nt, Artificial Sequence
  Description of Artificial Sequence: Synthetic oligonucleotide
guagaauuauuuccuucag

SEQ ID NO: 1193760 - RNA, 19 nt, Artificial Sequence
  Description of Artificial Sequence: Synthetic oligonucleotide
agauucugacgcugggccc

SEQ ID NO: 1193761 - RNA, 19 nt, Artificial Sequence
  Description of Artificial Sequence: Synthetic oligonucleotide
uuucauccguuguuucugg

SEQ ID NO: 1193762 - RNA, 19 nt, Artificial Sequence
  Description of Artificial Sequence: Synthetic oligonucleotide
uacacugccaucugguggu

SEQ ID NO: 1193763 - RNA, 19 nt, Artificial Sequence
  Description of Artificial Sequence: Synthetic oligonucleotide
cugcuugacacucucuucc

SEQ ID NO: 1193764 - RNA, 19 nt, Artificial Sequence
  Description of Artificial Sequence: Synthetic oligonucleotide
uuugccucuucuaacuuau

SEQ ID NO: 1193765 - RNA, 19 nt, Artificial Sequence
  Description of Artificial Sequence: Synthetic oligonucleotide
ucuucaccgacuucacucc

SEQ ID NO: 1193766 - RNA, 19 nt, Artificial Sequence
  Description of Artificial Sequence: Synthetic oligonucleotide
acguuguuugucugcaagg

SEQ ID NO: 1193767 - RNA, 19 nt, Artificial Sequence
  Description of Artificial Sequence: Synthetic oligonucleotide
aacaucauccucucuuuua

SEQ ID NO: 1193768 - RNA, 19 nt, Artificial Sequence
  Description of Artificial Sequence: Synthetic oligonucleotide
ucagcaucacgucucauuu

SEQ ID NO: 1193769 - RNA, 19 nt, Artificial Sequence
  Description of Artificial Sequence: Synthetic oligonucleotide
cugacaauuucaucaauca

SEQ ID NO: 1193770 - RNA, 19 nt, Artificial Sequence
  Description of Artificial Sequence: Synthetic oligonucleotide
uuccuucagugcuauuugg

SEQ ID NO: 1193771 - RNA, 19 nt, Artificial Sequence
  Description of Artificial Sequence: Synthetic oligonucleotide
caaacugcucauucuguag

SEQ ID NO: 1193772 - RNA, 19 nt, Artificial Sequence
  Description of Artificial Sequence: Synthetic oligonucleotide
guuuucgucuacuaacuuc

SEQ ID NO: 1193773 - RNA, 19 nt, Artificial Sequence
  Description of Artificial Sequence: Synthetic oligonucleotide
auggcuuucuuaaaggucu

SEQ ID NO: 1193774 - RNA, 19 nt, Artificial Sequence
  Description of Artificial Sequence: Synthetic oligonucleotide
cucugaggaaucucuuucg

SEQ ID NO: 1193775 - RNA, 19 nt, Artificial Sequence
  Description of Artificial Sequence: Synthetic oligonucleotide
aacugcucauucuguagca

SEQ ID NO: 1193776 - RNA, 19 nt, Artificial Sequence
  Description of Artificial Sequence: Synthetic oligonucleotide
uuuguagccuguagaauua

SEQ ID NO: 1193777 - RNA, 19 nt, Artificial Sequence
  Description of Artificial Sequence: Synthetic oligonucleotide
uauccggucgucuucugca

SEQ ID NO: 1193778 - RNA, 19 nt, Artificial Sequence
  Description of Artificial Sequence: Synthetic oligonucleotide
ucuggaacgcuucaauaua

SEQ ID NO: 1193779 - RNA, 19 nt, Artificial Sequence
  Description of Artificial Sequence: Synthetic oligonucleotide
uuuagcagcugcucauaug

SEQ ID NO: 1193780 - RNA, 19 nt, Artificial Sequence
  Description of Artificial Sequence: Synthetic oligonucleotide
ucauccguuguuucugggc

SEQ ID NO: 1193781 - RNA, 19 nt, Artificial Sequence
  Description of Artificial Sequence: Synthetic oligonucleotide
ucauguaagcagcuugcaa

SEQ ID NO: 1193782 - RNA, 19 nt, Artificial Sequence
  Description of Artificial Sequence: Synthetic oligonucleotide
cuugucuaacuauuuauaa

SEQ ID NO: 1193783 - RNA, 19 nt, Artificial Sequence
  Description of Artificial Sequence: Synthetic oligonucleotide
gaacgcuucaauauacuuc

SEQ ID NO: 1193784 - RNA, 19 nt, Artificial Sequence
  Description of Artificial Sequence: Synthetic oligonucleotide
cucuagcucacguuguuug

SEQ ID NO: 1193785 - RNA, 19 nt, Artificial Sequence
  Description of Artificial Sequence: Synthetic oligonucleotide
caacaucuuguucucugcg

SEQ ID NO: 1193786 - RNA, 19 nt, Artificial Sequence
  Description of Artificial Sequence: Synthetic oligonucleotide
ucaagacuuggacaugcaa

SEQ ID NO: 1193787 - RNA, 19 nt, Artificial Sequence
  Description of Artificial Sequence: Synthetic oligonucleotide
gacaugcaacgauuugcgg

SEQ ID NO: 1193788 - RNA, 19 nt, Artificial Sequence
  Description of Artificial Sequence: Synthetic oligonucleotide
cucucuugaacucuggcca

SEQ ID NO: 1193789 - RNA, 19 nt, Artificial Sequence
  Description of Artificial Sequence: Synthetic oligonucleotide
aacuuauucaagacuugga

SEQ ID NO: 1193790 - RNA, 19 nt, Artificial Sequence
  Description of Artificial Sequence: Synthetic oligonucleotide
cugaucacuucucuucacc

SEQ ID NO: 1193791 - RNA, 19 nt, Artificial Sequence
  Description of Artificial Sequence: Synthetic oligonucleotide
gcaaacuuagccagcaugg

SEQ ID NO: 1193792 - RNA, 19 nt, Artificial Sequence
  Description of Artificial Sequence: Synthetic oligonucleotide
cucauuugcucauauuuga

SEQ ID NO: 1193793 - RNA, 19 nt, Artificial Sequence
  Description of Artificial Sequence: Synthetic oligonucleotide
uuuagucuggccaguucgu

SEQ ID NO: 1193794 - RNA, 19 nt, Artificial Sequence
  Description of Artificial Sequence: Synthetic oligonucleotide
agcuccauacuguucucuc

SEQ ID NO: 1193795 - RNA, 19 nt, Artificial Sequence
  Description of Artificial Sequence: Synthetic oligonucleotide
uuucacgaccugauucuug

SEQ ID NO: 1193796 - RNA, 19 nt, Artificial Sequence
  Description of Artificial Sequence: Synthetic oligonucleotide
uuggacaugcaacgauuug

SEQ ID NO: 1193797 - RNA, 19 nt, Artificial Sequence
  Description of Artificial Sequence: Synthetic oligonucleotide
ggugaaauaggauauuuua

SEQ ID NO: 1193798 - RNA, 19 nt, Artificial Sequence
  Description of Artificial Sequence: Synthetic oligonucleotide
cuggaacgcuucaauauac

SEQ ID NO: 1193799 - RNA, 19 nt, Artificial Sequence
  Description of Artificial Sequence: Synthetic oligonucleotide
guucgcaagucucucuucc

SEQ ID NO: 1193800 - RNA, 19 nt, Artificial Sequence
  Description of Artificial Sequence: Synthetic oligonucleotide
aggaguuucagccuuucuu

SEQ ID NO: 1193801 - RNA, 19 nt, Artificial Sequence
  Description of Artificial Sequence: Synthetic oligonucleotide
aguaauuuuguagcaugcu

SEQ ID NO: 1193802 - RNA, 19 nt, Artificial Sequence
  Description of Artificial Sequence: Synthetic oligonucleotide
ggaucagcagauucugacg

SEQ ID NO: 1193803 - RNA, 19 nt, Artificial Sequence
  Description of Artificial Sequence: Synthetic oligonucleotide
ugcucauauuugauggcgu

SEQ ID NO: 1193804 - RNA, 19 nt, Artificial Sequence
  Description of Artificial Sequence: Synthetic oligonucleotide
ugucaccaacuguaaagca

SEQ ID NO: 1193805 - RNA, 19 nt, Artificial Sequence
  Description of Artificial Sequence: Synthetic oligonucleotide
uugguuugccucuucuaac

SEQ ID NO: 1193806 - RNA, 19 nt, Artificial Sequence
  Description of Artificial Sequence: Synthetic oligonucleotide
gucuaacuauuuauaaaug

SEQ ID NO: 1193807 - RNA, 19 nt, Artificial Sequence
  Description of Artificial Sequence: Synthetic oligonucleotide
cacguuguuugucugcaag

SEQ ID NO: 1193808 - RNA, 19 nt, Artificial Sequence
  Description of Artificial Sequence: Synthetic oligonucleotide
uggggagauagccuaguaa

SEQ ID NO: 1193809 - RNA, 19 nt, Artificial Sequence
  Description of Artificial Sequence: Synthetic oligonucleotide
cugauucuugguuugccuc

SEQ ID NO: 1193810 - RNA, 19 nt, Artificial Sequence
  Description of Artificial Sequence: Synthetic oligonucleotide
ucgcaagucucucuuccug

SEQ ID NO: 1193811 - RNA, 19 nt, Artificial Sequence
  Description of Artificial Sequence: Synthetic oligonucleotide
cucauauuugauggcgucc

SEQ ID NO: 1193812 - RNA, 19 nt, Artificial Sequence
  Description of Artificial Sequence: Synthetic oligonucleotide
cuuauugaugcagcccugc

SEQ ID NO: 1193813 - RNA, 19 nt, Artificial Sequence
  Description of Artificial Sequence: Synthetic oligonucleotide
ugucgaacuugcuccaggu

SEQ ID NO: 1193814 - RNA, 19 nt, Artificial Sequence
  Description of Artificial Sequence: Synthetic oligonucleotide
cuuucguucaacccucuca

SEQ ID NO: 1193815 - RNA, 19 nt, Artificial Sequence
  Description of Artificial Sequence: Synthetic oligonucleotide
uucauccguuguuucuggg

SEQ ID NO: 1193816 - RNA, 19 nt, Artificial Sequence
  Description of Artificial Sequence: Synthetic oligonucleotide
acuggggaccugcugucac

SEQ ID NO: 1193817 - RNA, 19 nt, Artificial Sequence
  Description of Artificial Sequence: Synthetic oligonucleotide
agugcuauuuggucuucca

SEQ ID NO: 1193818 - RNA, 19 nt, Artificial Sequence
  Description of Artificial Sequence: Synthetic oligonucleotide
ucagcagauucugacgcug

SEQ ID NO: 1193819 - RNA, 19 nt, Artificial Sequence
  Description of Artificial Sequence: Synthetic oligonucleotide
uggaacgcuucaauauacu

SEQ ID NO: 1193820 - RNA, 19 nt, Artificial Sequence
  Description of Artificial Sequence: Synthetic oligonucleotide
uucagcaucacgucucauu

SEQ ID NO: 1193821 - RNA, 19 nt, Artificial Sequence
  Description of Artificial Sequence: Synthetic oligonucleotide
aacccucucaucguuuuga

SEQ ID NO: 1193822 - RNA, 19 nt, Artificial Sequence
  Description of Artificial Sequence: Synthetic oligonucleotide
auaaauggugaaauaggau

SEQ ID NO: 1193823 - RNA, 19 nt, Artificial Sequence
  Description of Artificial Sequence: Synthetic oligonucleotide
uucagugcuauuuggucuu

SEQ ID NO: 1193824 - RNA, 19 nt, Artificial Sequence
  Description of Artificial Sequence: Synthetic oligonucleotide
gaggaaucucuuucguuca

SEQ ID NO: 1193825 - RNA, 19 nt, Artificial Sequence
  Description of Artificial Sequence: Synthetic oligonucleotide
uucuuuacccucucguguu

SEQ ID NO: 1193826 - RNA, 19 nt, Artificial Sequence
  Description of Artificial Sequence: Synthetic oligonucleotide
caugcaacgauuugcggaa

SEQ ID NO: 1193827 - RNA, 19 nt, Artificial Sequence
  Description of Artificial Sequence: Synthetic oligonucleotide
gaucacuucucuucaccga

SEQ ID NO: 1193828 - RNA, 19 nt, Artificial Sequence
  Description of Artificial Sequence: Synthetic oligonucleotide
ggacaugcaacgauuugcg

SEQ ID NO: 1193829 - RNA, 19 nt, Artificial Sequence
  Description of Artificial Sequence: Synthetic oligonucleotide
uucaagacuuggacaugca

SEQ ID NO: 1193830 - RNA, 19 nt, Artificial Sequence
  Description of Artificial Sequence: Synthetic oligonucleotide
agcccguuugugcuccagc

SEQ ID NO: 1193831 - RNA, 19 nt, Artificial Sequence
  Description of Artificial Sequence: Synthetic oligonucleotide
cugucgauccuucaacauc

SEQ ID NO: 1193832 - RNA, 19 nt, Artificial Sequence
  Description of Artificial Sequence: Synthetic oligonucleotide
ucuagcucacguuguuugu

SEQ ID NO: 1193833 - RNA, 19 nt, Artificial Sequence
  Description of Artificial Sequence: Synthetic oligonucleotide
auuucagcaucacgucuca

SEQ ID NO: 1193834 - RNA, 19 nt, Artificial Sequence
  Description of Artificial Sequence: Synthetic oligonucleotide
uacuguucucucucacuug

SEQ ID NO: 1193835 - RNA, 19 nt, Artificial Sequence
  Description of Artificial Sequence: Synthetic oligonucleotide
auguaagcagcuugcaauu

SEQ ID NO: 1193836 - RNA, 19 nt, Artificial Sequence
  Description of Artificial Sequence: Synthetic oligonucleotide
uguagcugcaguuccucua

SEQ ID NO: 1193837 - RNA, 19 nt, Artificial Sequence
  Description of Artificial Sequence: Synthetic oligonucleotide
agauagccuaguaauuuug

SEQ ID NO: 1193838 - RNA, 19 nt, Artificial Sequence
  Description of Artificial Sequence: Synthetic oligonucleotide
cauguaagcagcuugcaau

SEQ ID NO: 1193839 - RNA, 19 nt, Artificial Sequence
  Description of Artificial Sequence: Synthetic oligonucleotide
uagcucacguuguuugucu

SEQ ID NO: 1193840 - RNA, 19 nt, Artificial Sequence
  Description of Artificial Sequence: Synthetic oligonucleotide
ugcaacgauuugcggaagu

SEQ ID NO: 1193841 - RNA, 19 nt, Artificial Sequence
  Description of Artificial Sequence: Synthetic oligonucleotide
acaguuacacugccaucug

SEQ ID NO: 1193842 - RNA, 19 nt, Artificial Sequence
  Description of Artificial Sequence: Synthetic oligonucleotide
uuucgucuacuaacuucug

SEQ ID NO: 1193843 - RNA, 19 nt, Artificial Sequence
  Description of Artificial Sequence: Synthetic oligonucleotide
aauggugaaauaggauauu

SEQ ID NO: 1193844 - RNA, 19 nt, Artificial Sequence
  Description of Artificial Sequence: Synthetic oligonucleotide
gcuguauguucauaaacuc

SEQ ID NO: 1193845 - RNA, 19 nt, Artificial Sequence
  Description of Artificial Sequence: Synthetic oligonucleotide
agcugucgauccuucaaca

SEQ ID NO: 1193846 - RNA, 19 nt, Artificial Sequence
  Description of Artificial Sequence: Synthetic oligonucleotide
cugucgaacuugcuccagg

SEQ ID NO: 1193847 - RNA, 19 nt, Artificial Sequence
  Description of Artificial Sequence: Synthetic oligonucleotide
ucuugaacucuggccaccc

SEQ ID NO: 1193848 - RNA, 19 nt, Artificial Sequence
  Description of Artificial Sequence: Synthetic oligonucleotide
aaacacuccuuuggggaga

SEQ ID NO: 1193849 - RNA, 19 nt, Artificial Sequence
  Description of Artificial Sequence: Synthetic oligonucleotide
acgaccugauucuugguuu

SEQ ID NO: 1193850 - RNA, 19 nt, Artificial Sequence
  Description of Artificial Sequence: Synthetic oligonucleotide
cauccguuguuucugggca

SEQ ID NO: 1193851 - RNA, 19 nt, Artificial Sequence
  Description of Artificial Sequence: Synthetic oligonucleotide
auaugccuccugcuuucuc

SEQ ID NO: 1193852 - RNA, 19 nt, Artificial Sequence
  Description of Artificial Sequence: Synthetic oligonucleotide
uagcaugcucuuugaggag

SEQ ID NO: 1193853 - RNA, 19 nt, Artificial Sequence
  Description of Artificial Sequence: Synthetic oligonucleotide
ucuguagcacucugaggaa

SEQ ID NO: 1193854 - RNA, 19 nt, Artificial Sequence
  Description of Artificial Sequence: Synthetic oligonucleotide
ggugucuggaaaguucagg

SEQ ID NO: 1193855 - RNA, 19 nt, Artificial Sequence
  Description of Artificial Sequence: Synthetic oligonucleotide
cagcagauucugacgcugg

SEQ ID NO: 1193856 - RNA, 19 nt, Artificial Sequence
  Description of Artificial Sequence: Synthetic oligonucleotide
ucacuucucuucaccgacu

SEQ ID NO: 1193857 - RNA, 19 nt, Artificial Sequence
  Description of Artificial Sequence: Synthetic oligonucleotide
uggugcugaucacuucucu

SEQ ID NO: 1193858 - RNA, 19 nt, Artificial Sequence
  Description of Artificial Sequence: Synthetic oligonucleotide
gacuuucaugcuuuagucu

SEQ ID NO: 1193859 - RNA, 19 nt, Artificial Sequence
  Description of Artificial Sequence: Synthetic oligonucleotide
cuauccggucgucuucugc

SEQ ID NO: 1193860 - RNA, 19 nt, Artificial Sequence
  Description of Artificial Sequence: Synthetic oligonucleotide
ugcuugacacucucuuccu

SEQ ID NO: 1193861 - RNA, 19 nt, Artificial Sequence
  Description of Artificial Sequence: Synthetic oligonucleotide
ucuuuacccucucguguuc

SEQ ID NO: 1193862 - RNA, 19 nt, Artificial Sequence
  Description of Artificial Sequence: Synthetic oligonucleotide
uucaugcuuuagucuggcc

SEQ ID NO: 1193863 - RNA, 19 nt, Artificial Sequence
  Description of Artificial Sequence: Synthetic oligonucleotide
cuaacuucuggugcuuuuc

SEQ ID NO: 1193864 - RNA, 19 nt, Artificial Sequence
  Description of Artificial Sequence: Synthetic oligonucleotide
uucgcaagucucucuuccu

SEQ ID NO: 1193865 - RNA, 19 nt, Artificial Sequence
  Description of Artificial Sequence: Synthetic oligonucleotide
uucguucgcaagucucucu

SEQ ID NO: 1193866 - RNA, 19 nt, Artificial Sequence
  Description of Artificial Sequence: Synthetic oligonucleotide
caguucguucgcaagucuc

SEQ ID NO: 1193867 - RNA, 19 nt, Artificial Sequence
  Description of Artificial Sequence: Synthetic oligonucleotide
uagucuggccaguucguuc

SEQ ID NO: 1193868 - RNA, 19 nt, Artificial Sequence
  Description of Artificial Sequence: Synthetic oligonucleotide
ucguucgcaagucucucuu

SEQ ID NO: 1193869 - RNA, 19 nt, Artificial Sequence
  Description of Artificial Sequence: Synthetic oligonucleotide
uggccaguucguucgcaag

SEQ ID NO: 1193870 - RNA, 19 nt, Artificial Sequence
  Description of Artificial Sequence: Synthetic oligonucleotide
augacccuggcuauuucag

SEQ ID NO: 1193871 - RNA, 19 nt, Artificial Sequence
  Description of Artificial Sequence: Synthetic oligonucleotide
aucagcagauucugacgcu

SEQ ID NO: 1193872 - RNA, 19 nt, Artificial Sequence
  Description of Artificial Sequence: Synthetic oligonucleotide
cuuuacccucucguguucc

SEQ ID NO: 1193873 - RNA, 19 nt, Artificial Sequence
  Description of Artificial Sequence: Synthetic oligonucleotide
cuguauguucauaaacucu

SEQ ID NO: 1193874 - RNA, 19 nt, Artificial Sequence
  Description of Artificial Sequence: Synthetic oligonucleotide
uuuacccucucguguuccu

SEQ ID NO: 1193875 - RNA, 19 nt, Artificial Sequence
  Description of Artificial Sequence: Synthetic oligonucleotide
uuauucauguaagcagcuu

SEQ ID NO: 1193876 - RNA, 19 nt, Artificial Sequence
  Description of Artificial Sequence: Synthetic oligonucleotide
acgauuugcggaaguuuuc

SEQ ID NO: 1193877 - RNA, 19 nt, Artificial Sequence
  Description of Artificial Sequence: Synthetic oligonucleotide
ggauauuuuagaacaugca

SEQ ID NO: 1193878 - RNA, 19 nt, Artificial Sequence
  Description of Artificial Sequence: Synthetic oligonucleotide
cuugaacucuggccacccg

SEQ ID NO: 1193879 - RNA, 19 nt, Artificial Sequence
  Description of Artificial Sequence: Synthetic oligonucleotide
caacuguaaagcaacaguu

SEQ ID NO: 1193880 - RNA, 19 nt, Artificial Sequence
  Description of Artificial Sequence: Synthetic oligonucleotide
uuuggggagauagccuagu

SEQ ID NO: 1193881 - RNA, 19 nt, Artificial Sequence
  Description of Artificial Sequence: Synthetic oligonucleotide
gaacuggcugcgccgcucc

SEQ ID NO: 1193882 - RNA, 19 nt, Artificial Sequence
  Description of Artificial Sequence: Synthetic oligonucleotide
aguucguucgcaagucucu

SEQ ID NO: 1193883 - RNA, 19 nt, Artificial Sequence
  Description of Artificial Sequence: Synthetic oligonucleotide
ugcucaagcugucgauccu

SEQ ID NO: 1193884 - RNA, 19 nt, Artificial Sequence
  Description of Artificial Sequence: Synthetic oligonucleotide
cuggcugcgccgcuccucg

SEQ ID NO: 1193885 - RNA, 19 nt, Artificial Sequence
  Description of Artificial Sequence: Synthetic oligonucleotide
ucaccgacuucacuccuuu

SEQ ID NO: 1193886 - RNA, 19 nt, Artificial Sequence
  Description of Artificial Sequence: Synthetic oligonucleotide
ugcggaaguuuucgucuac

SEQ ID NO: 1193887 - RNA, 19 nt, Artificial Sequence
  Description of Artificial Sequence: Synthetic oligonucleotide
guguuuaauucuugucuaa

SEQ ID NO: 1193888 - RNA, 19 nt, Artificial Sequence
  Description of Artificial Sequence: Synthetic oligonucleotide
auuauuuccuucagugcua

SEQ ID NO: 1193889 - RNA, 19 nt, Artificial Sequence
  Description of Artificial Sequence: Synthetic oligonucleotide
auaggauauuuuagaacau

SEQ ID NO: 1193890 - RNA, 19 nt, Artificial Sequence
  Description of Artificial Sequence: Synthetic oligonucleotide
agcucacguuguuugucug

SEQ ID NO: 1193891 - RNA, 19 nt, Artificial Sequence
  Description of Artificial Sequence: Synthetic oligonucleotide
ucaugagcucuauccgguc

SEQ ID NO: 1193892 - RNA, 19 nt, Artificial Sequence
  Description of Artificial Sequence: Synthetic oligonucleotide
cucaagcugucgauccuuc

SEQ ID NO: 1193893 - RNA, 19 nt, Artificial Sequence
  Description of Artificial Sequence: Synthetic oligonucleotide
cuugcucccucuggaacgc

SEQ ID NO: 1193894 - RNA, 19 nt, Artificial Sequence
  Description of Artificial Sequence: Synthetic oligonucleotide
caacaguuacacugccauc

SEQ ID NO: 1193895 - RNA, 19 nt, Artificial Sequence
  Description of Artificial Sequence: Synthetic oligonucleotide
agcucuauccggucgucuu

SEQ ID NO: 1193896 - RNA, 19 nt, Artificial Sequence
  Description of Artificial Sequence: Synthetic oligonucleotide
cuagcucacguuguuuguc

SEQ ID NO: 1193897 - RNA, 19 nt, Artificial Sequence
  Description of Artificial Sequence: Synthetic oligonucleotide
ucaugacccuggcuauuuc

SEQ ID NO: 1193898 - RNA, 19 nt, Artificial Sequence
  Description of Artificial Sequence: Synthetic oligonucleotide
agcaucucagcuuguucuu

SEQ ID NO: 1193899 - RNA, 19 nt, Artificial Sequence
  Description of Artificial Sequence: Synthetic oligonucleotide
uguaagcagcuugcaauuu

SEQ ID NO: 1193900 - RNA, 19 nt, Artificial Sequence
  Description of Artificial Sequence: Synthetic oligonucleotide
ccuucuuuacccucucgug

SEQ ID NO: 1193901 - RNA, 19 nt, Artificial Sequence
  Description of Artificial Sequence: Synthetic oligonucleotide
cuauuucagcaucacgucu

SEQ ID NO: 1193902 - RNA, 19 nt, Artificial Sequence
  Description of Artificial Sequence: Synthetic oligonucleotide
uguuccgccgguccugcuu

SEQ ID NO: 1193903 - RNA, 19 nt, Artificial Sequence
  Description of Artificial Sequence: Synthetic oligonucleotide
uugcggaaguuuucgucua

SEQ ID NO: 1193904 - RNA, 19 nt, Artificial Sequence
  Description of Artificial Sequence: Synthetic oligonucleotide
gagauagccuaguaauuuu

SEQ ID NO: 1193905 - RNA, 19 nt, Artificial Sequence
  Description of Artificial Sequence: Synthetic oligonucleotide
caagcugucgauccuucaa

SEQ ID NO: 1193906 - RNA, 19 nt, Artificial Sequence
  Description of Artificial Sequence: Synthetic oligonucleotide
cuggggaccugcugucacc

SEQ ID NO: 1193907 - RNA, 19 nt, Artificial Sequence
  Description of Artificial Sequence: Synthetic oligonucleotide
acuuggacaugcaacgauu

SEQ ID NO: 1193908 - RNA, 19 nt, Artificial Sequence
  Description of Artificial Sequence: Synthetic oligonucleotide
gauuugcggaaguuuucgu

SEQ ID NO: 1193909 - RNA, 19 nt, Artificial Sequence
  Description of Artificial Sequence: Synthetic oligonucleotide
ggggagauagccuaguaau

SEQ ID NO: 1193910 - RNA, 19 nt, Artificial Sequence
  Description of Artificial Sequence: Synthetic oligonucleotide
uucaccgacuucacuccuu

SEQ ID NO: 1193911 - RNA, 19 nt, Artificial Sequence
  Description of Artificial Sequence: Synthetic oligonucleotide
cucuggaacgcuucaauau

SEQ ID NO: 1193912 - RNA, 19 nt, Artificial Sequence
  Description of Artificial Sequence: Synthetic oligonucleotide
cagcaucacgucucauuug

SEQ ID NO: 1193913 - RNA, 19 nt, Artificial Sequence
  Description of Artificial Sequence: Synthetic oligonucleotide
acgucucauuugcucauau

SEQ ID NO: 1193914 - RNA, 19 nt, Artificial Sequence
  Description of Artificial Sequence: Synthetic oligonucleotide
uccucuagcucacguuguu

SEQ ID NO: 1193915 - RNA, 19 nt, Artificial Sequence
  Description of Artificial Sequence: Synthetic oligonucleotide
gaccugauucuugguuugc

SEQ ID NO: 1193916 - RNA, 19 nt, Artificial Sequence
  Description of Artificial Sequence: Synthetic oligonucleotide
aggaaucucuuucguucaa

SEQ ID NO: 1193917 - RNA, 19 nt, Artificial Sequence
  Description of Artificial Sequence: Synthetic oligonucleotide
gacuuggacaugcaacgau

SEQ ID NO: 1193918 - RNA, 19 nt, Artificial Sequence
  Description of Artificial Sequence: Synthetic oligonucleotide
cauacuguucucucucacu

SEQ ID NO: 1193919 - RNA, 19 nt, Artificial Sequence
  Description of Artificial Sequence: Synthetic oligonucleotide
agacuuggacaugcaacga

SEQ ID NO: 1193920 - RNA, 19 nt, Artificial Sequence
  Description of Artificial Sequence: Synthetic oligonucleotide
acguuucuuuugucuccag

SEQ ID NO: 1193921 - RNA, 19 nt, Artificial Sequence
  Description of Artificial Sequence: Synthetic oligonucleotide
gugcuauuuggucuuccaa

SEQ ID NO: 1193922 - RNA, 19 nt, Artificial Sequence
  Description of Artificial Sequence: Synthetic oligonucleotide
aacacuccuuuggggagau

SEQ ID NO: 1193923 - RNA, 19 nt, Artificial Sequence
  Description of Artificial Sequence: Synthetic oligonucleotide
cuggugcuuuucacugaag

SEQ ID NO: 1193924 - RNA, 19 nt, Artificial Sequence
  Description of Artificial Sequence: Synthetic oligonucleotide
ccucauagaucuuccugac

SEQ ID NO: 1193925 - RNA, 19 nt, Artificial Sequence
  Description of Artificial Sequence: Synthetic oligonucleotide
gauucugacgcugggcccu

SEQ ID NO: 1193926 - RNA, 19 nt, Artificial Sequence
  Description of Artificial Sequence: Synthetic oligonucleotide
guagccuguagaauuauuu

SEQ ID NO: 1193927 - RNA, 19 nt, Artificial Sequence
  Description of Artificial Sequence: Synthetic oligonucleotide
ugcgccgcuccucgaugag

SEQ ID NO: 1193928 - RNA, 19 nt, Artificial Sequence
  Description of Artificial Sequence: Synthetic oligonucleotide
gucgaacuugcuccagguc

SEQ ID NO: 1193929 - RNA, 19 nt, Artificial Sequence
  Description of Artificial Sequence: Synthetic oligonucleotide
auggcguccuucucagcaa

SEQ ID NO: 1193930 - RNA, 19 nt, Artificial Sequence
  Description of Artificial Sequence: Synthetic oligonucleotide
ccagcuguuucauccguug

SEQ ID NO: 1193931 - RNA, 19 nt, Artificial Sequence
  Description of Artificial Sequence: Synthetic oligonucleotide
ugcugucuuuccagcuggu

SEQ ID NO: 1193932 - RNA, 19 nt, Artificial Sequence
  Description of Artificial Sequence: Synthetic oligonucleotide
gcucacguuguuugucugc

SEQ ID NO: 1193933 - RNA, 19 nt, Artificial Sequence
  Description of Artificial Sequence: Synthetic oligonucleotide
ucucucucacuugcugccu

SEQ ID NO: 1193934 - RNA, 19 nt, Artificial Sequence
  Description of Artificial Sequence: Synthetic oligonucleotide
uccucacguuucuuuuguc

SEQ ID NO: 1193935 - RNA, 19 nt, Artificial Sequence
  Description of Artificial Sequence: Synthetic oligonucleotide
gccuaguaauuuuguagca

SEQ ID NO: 1193936 - RNA, 19 nt, Artificial Sequence
  Description of Artificial Sequence: Synthetic oligonucleotide
cgauuugcggaaguuuucg

SEQ ID NO: 1193937 - RNA, 19 nt, Artificial Sequence
  Description of Artificial Sequence: Synthetic oligonucleotide
aucaugacccuggcuauuu

SEQ ID NO: 1193938 - RNA, 19 nt, Artificial Sequence
  Description of Artificial Sequence: Synthetic oligonucleotide
cuugcaauuucugcuccaa

SEQ ID NO: 1193939 - RNA, 19 nt, Artificial Sequence
  Description of Artificial Sequence: Synthetic oligonucleotide
gacacucucuuccuucuuu

SEQ ID NO: 1193940 - RNA, 19 nt, Artificial Sequence
  Description of Artificial Sequence: Synthetic oligonucleotide
cagugcuauuuggucuucc

SEQ ID NO: 1193941 - RNA, 19 nt, Artificial Sequence
  Description of Artificial Sequence: Synthetic oligonucleotide
ggaaucucuuucguucaac

SEQ ID NO: 1193942 - RNA, 19 nt, Artificial Sequence
  Description of Artificial Sequence: Synthetic oligonucleotide
guucguucgcaagucucuc

SEQ ID NO: 1193943 - RNA, 19 nt, Artificial Sequence
  Description of Artificial Sequence: Synthetic oligonucleotide
gaacaugcagacagacacu

SEQ ID NO: 1193944 - RNA, 19 nt, Artificial Sequence
  Description of Artificial Sequence: Synthetic oligonucleotide
aacuggcugcgccgcuccu

SEQ ID NO: 1193945 - RNA, 19 nt, Artificial Sequence
  Description of Artificial Sequence: Synthetic oligonucleotide
cuuggacaugcaacgauuu

SEQ ID NO: 1193946 - RNA, 19 nt, Artificial Sequence
  Description of Artificial Sequence: Synthetic oligonucleotide
cacguuucuuuugucucca

SEQ ID NO: 1193947 - RNA, 19 nt, Artificial Sequence
  Description of Artificial Sequence: Synthetic oligonucleotide
auccggucgucuucugcaa

SEQ ID NO: 1193948 - RNA, 19 nt, Artificial Sequence
  Description of Artificial Sequence: Synthetic oligonucleotide
auucugacgcugggcccuc

SEQ ID NO: 1193949 - RNA, 19 nt, Artificial Sequence
  Description of Artificial Sequence: Synthetic oligonucleotide
ugagcucuauccggucguc

SEQ ID NO: 1193950 - RNA, 19 nt, Artificial Sequence
  Description of Artificial Sequence: Synthetic oligonucleotide
augcaacgauuugcggaag

SEQ ID NO: 1193951 - RNA, 19 nt, Artificial Sequence
  Description of Artificial Sequence: Synthetic oligonucleotide
caguuucagcaucucagcu

SEQ ID NO: 1193952 - RNA, 19 nt, Artificial Sequence
  Description of Artificial Sequence: Synthetic oligonucleotide
ccaagucuugcuucaucuc

SEQ ID NO: 1193953 - RNA, 19 nt, Artificial Sequence
  Description of Artificial Sequence: Synthetic oligonucleotide
cugacgcugggcccucuuc

SEQ ID NO: 1193954 - RNA, 19 nt, Artificial Sequence
  Description of Artificial Sequence: Synthetic oligonucleotide
ucugacgcugggcccucuu

SEQ ID NO: 1193955 - RNA, 19 nt, Artificial Sequence
  Description of Artificial Sequence: Synthetic oligonucleotide
ggagauagccuaguaauuu

SEQ ID NO: 1193956 - RNA, 19 nt, Artificial Sequence
  Description of Artificial Sequence: Synthetic oligonucleotide
cuuuuagcagcugcucaua

SEQ ID NO: 1193957 - RNA, 19 nt, Artificial Sequence
  Description of Artificial Sequence: Synthetic oligonucleotide
ggcccucuucucuucacuc

SEQ ID NO: 1193958 - RNA, 19 nt, Artificial Sequence
  Description of Artificial Sequence: Synthetic oligonucleotide
augcuuuagucuggccagu

SEQ ID NO: 1193959 - RNA, 19 nt, Artificial Sequence
  Description of Artificial Sequence: Synthetic oligonucleotide
ccuuuggggagauagccua

SEQ ID NO: 1193960 - RNA, 19 nt, Artificial Sequence
  Description of Artificial Sequence: Synthetic oligonucleotide
caucuuguucucugcggcu

SEQ ID NO: 1193961 - RNA, 19 nt, Artificial Sequence
  Description of Artificial Sequence: Synthetic oligonucleotide
ggaacgcuucaauauacuu

SEQ ID NO: 1193962 - RNA, 19 nt, Artificial Sequence
  Description of Artificial Sequence: Synthetic oligonucleotide
cuccucacguuucuuuugu

SEQ ID NO: 1193963 - RNA, 19 nt, Artificial Sequence
  Description of Artificial Sequence: Synthetic oligonucleotide
cuggccaguucguucgcaa

SEQ ID NO: 1193964 - RNA, 19 nt, Artificial Sequence
  Description of Artificial Sequence: Synthetic oligonucleotide
cucagccuuucuuccaacu

SEQ ID NO: 1193965 - RNA, 19 nt, Artificial Sequence
  Description of Artificial Sequence: Synthetic oligonucleotide
gucuggccaguucguucgc

SEQ ID NO: 1193966 - RNA, 19 nt, Artificial Sequence
  Description of Artificial Sequence: Synthetic oligonucleotide
ccggucgucuucugcaaac

SEQ ID NO: 1193967 - RNA, 19 nt, Artificial Sequence
  Description of Artificial Sequence: Synthetic oligonucleotide
caucuccucacguuucuuu

SEQ ID NO: 1193968 - RNA, 19 nt, Artificial Sequence
  Description of Artificial Sequence: Synthetic oligonucleotide
cugaggaaucucuuucguu

SEQ ID NO: 1193969 - RNA, 19 nt, Artificial Sequence
  Description of Artificial Sequence: Synthetic oligonucleotide
guagcacucugaggaaucu

SEQ ID NO: 1193970 - RNA, 19 nt, Artificial Sequence
  Description of Artificial Sequence: Synthetic oligonucleotide
cgaccugauucuugguuug

SEQ ID NO: 1193971 - RNA, 19 nt, Artificial Sequence
  Description of Artificial Sequence: Synthetic oligonucleotide
cacgaccugauucuugguu

SEQ ID NO: 1193972 - RNA, 19 nt, Artificial Sequence
  Description of Artificial Sequence: Synthetic oligonucleotide
gccaguucguucgcaaguc

SEQ ID NO: 1193973 - RNA, 19 nt, Artificial Sequence
  Description of Artificial Sequence: Synthetic oligonucleotide
gagcuccauacuguucucu

SEQ ID NO: 1193974 - RNA, 19 nt, Artificial Sequence
  Description of Artificial Sequence: Synthetic oligonucleotide
ccugcucaagcugucgauc

SEQ ID NO: 1193975 - RNA, 19 nt, Artificial Sequence
  Description of Artificial Sequence: Synthetic oligonucleotide
cccguuugugcuccagcug

SEQ ID NO: 1193976 - RNA, 19 nt, Artificial Sequence
  Description of Artificial Sequence: Synthetic oligonucleotide
uuguuccgccgguccugcu

SEQ ID NO: 1193977 - RNA, 19 nt, Artificial Sequence
  Description of Artificial Sequence: Synthetic oligonucleotide
uuccgccgguccugcuuga

SEQ ID NO: 1193978 - RNA, 19 nt, Artificial Sequence
  Description of Artificial Sequence: Synthetic oligonucleotide
ccucucguguuccuccauc

SEQ ID NO: 1193979 - RNA, 19 nt, Artificial Sequence
  Description of Artificial Sequence: Synthetic oligonucleotide
cgccgguccugcuugacac

SEQ ID NO: 1193980 - RNA, 19 nt, Artificial Sequence
  Description of Artificial Sequence: Synthetic oligonucleotide
ccucacguuucuuuugucu

SEQ ID NO: 1193981 - RNA, 19 nt, Artificial Sequence
  Description of Artificial Sequence: Synthetic oligonucleotide
cguuguuugucugcaagga

SEQ ID NO: 1193982 - RNA, 19 nt, Artificial Sequence
  Description of Artificial Sequence: Synthetic oligonucleotide
cucucaucguuuugauuuu

SEQ ID NO: 1193983 - RNA, 19 nt, Artificial Sequence
  Description of Artificial Sequence: Synthetic oligonucleotide
caacgauuugcggaaguuu

SEQ ID NO: 1193984 - RNA, 19 nt, Artificial Sequence
  Description of Artificial Sequence: Synthetic oligonucleotide
cuucaccgacuucacuccu

SEQ ID NO: 1193985 - RNA, 19 nt, Artificial Sequence
  Description of Artificial Sequence: Synthetic oligonucleotide
ccguuugugcuccagcugu

SEQ ID NO: 1193986 - RNA, 19 nt, Artificial Sequence
  Description of Artificial Sequence: Synthetic oligonucleotide
cagcuguuucauccguugu

SEQ ID NO: 1193987 - RNA, 19 nt, Artificial Sequence
  Description of Artificial Sequence: Synthetic oligonucleotide
ccucagccuuucuuccaac

SEQ ID NO: 1193988 - RNA, 19 nt, Artificial Sequence
  Description of Artificial Sequence: Synthetic oligonucleotide
gcugucuuuccagcugguc

SEQ ID NO: 1193989 - RNA, 19 nt, Artificial Sequence
  Description of Artificial Sequence: Synthetic oligonucleotide
uccgccgguccugcuugac

SEQ ID NO: 1193990 - RNA, 19 nt, Artificial Sequence
  Description of Artificial Sequence: Synthetic oligonucleotide
gcccguuugugcuccagcu

SEQ ID NO: 1193991 - RNA, 19 nt, Artificial Sequence
  Description of Artificial Sequence: Synthetic oligonucleotide
gagcucuauccggucgucu

SEQ ID NO: 1193992 - RNA, 19 nt, Artificial Sequence
  Description of Artificial Sequence: Synthetic oligonucleotide
cagcccguuugugcuccag

SEQ ID NO: 1193993 - RNA, 19 nt, Artificial Sequence
  Description of Artificial Sequence: Synthetic oligonucleotide
ccugucgaacuugcuccag

SEQ ID NO: 1193994 - RNA, 19 nt, Artificial Sequence
  Description of Artificial Sequence: Synthetic oligonucleotide
uucugacgcugggcccucu

SEQ ID NO: 1193995 - RNA, 19 nt, Artificial Sequence
  Description of Artificial Sequence: Synthetic oligonucleotide
ccuaguaauuuuguagcau

SEQ ID NO: 1193996 - RNA, 19 nt, Artificial Sequence
  Description of Artificial Sequence: Synthetic oligonucleotide
cugcaguuucugcuccacu

SEQ ID NO: 1193997 - RNA, 19 nt, Artificial Sequence
  Description of Artificial Sequence: Synthetic oligonucleotide
cccgcuccucuucucuuug

SEQ ID NO: 1193998 - RNA, 19 nt, Artificial Sequence
  Description of Artificial Sequence: Synthetic oligonucleotide
gguuugccucuucuaacuu

SEQ ID NO: 1193999 - RNA, 19 nt, Artificial Sequence
  Description of Artificial Sequence: Synthetic oligonucleotide
cguucgcaagucucucuuc

SEQ ID NO: 1194000 - RNA, 19 nt, Artificial Sequence
  Description of Artificial Sequence: Synthetic oligonucleotide
cacuggggaccugcuguca

SEQ ID NO: 1194001 - RNA, 19 nt, Artificial Sequence
  Description of Artificial Sequence: Synthetic oligonucleotide
cuccaucaugacccuggcu

SEQ ID NO: 1194002 - RNA, 19 nt, Artificial Sequence
  Description of Artificial Sequence: Synthetic oligonucleotide
ccgguccugcuugacacuc

SEQ ID NO: 1194003 - RNA, 19 nt, Artificial Sequence
  Description of Artificial Sequence: Synthetic oligonucleotide
gcucauucuguagcacucu

SEQ ID NO: 1194004 - RNA, 19 nt, Artificial Sequence
  Description of Artificial Sequence: Synthetic oligonucleotide
ggcuuucuuaaaggucucu

SEQ ID NO: 1194005 - RNA, 19 nt, Artificial Sequence
  Description of Artificial Sequence: Synthetic oligonucleotide
cugcaaacuuagccagcau

SEQ ID NO: 1194006 - RNA, 19 nt, Artificial Sequence
  Description of Artificial Sequence: Synthetic oligonucleotide
gcaacgauuugcggaaguu

SEQ ID NO: 1194007 - RNA, 19 nt, Artificial Sequence
  Description of Artificial Sequence: Synthetic oligonucleotide
cggaaguuuucgucuacua

SEQ ID NO: 1194008 - RNA, 19 nt, Artificial Sequence
  Description of Artificial Sequence: Synthetic oligonucleotide
gcggaaguuuucgucuacu

SEQ ID NO: 1194009 - RNA, 19 nt, Artificial Sequence
  Description of Artificial Sequence: Synthetic oligonucleotide
gcgccgcuccucgaugagc

SEQ ID NO: 1194010 - RNA, 19 nt, Artificial Sequence
  Description of Artificial Sequence: Synthetic oligonucleotide
cguuguuucugggcauuca

SEQ ID NO: 1194011 - RNA, 19 nt, Artificial Sequence
  Description of Artificial Sequence: Synthetic oligonucleotide
caucaugacccuggcuauu

SEQ ID NO: 1194012 - RNA, 19 nt, Artificial Sequence
  Description of Artificial Sequence: Synthetic oligonucleotide
ccaguucguucgcaagucu

SEQ ID NO: 1194013 - RNA, 19 nt, Artificial Sequence
  Description of Artificial Sequence: Synthetic oligonucleotide
gcucaagcugucgauccuu

SEQ ID NO: 1194014 - RNA, 19 nt, Artificial Sequence
  Description of Artificial Sequence: Synthetic oligonucleotide
ggcugcgccgcuccucgau

SEQ ID NO: 1194015 - RNA, 19 nt, Artificial Sequence
  Description of Artificial Sequence: Synthetic oligonucleotide
gccgguccugcuugacacu

SEQ ID NO: 1194016 - RNA, 19 nt, Artificial Sequence
  Description of Artificial Sequence: Synthetic oligonucleotide
caccgacuucacuccuuuu

SEQ ID NO: 1194017 - RNA, 19 nt, Artificial Sequence
  Description of Artificial Sequence: Synthetic oligonucleotide
ccucuagcucacguuguuu

SEQ ID NO: 1194018 - RNA, 19 nt, Artificial Sequence
  Description of Artificial Sequence: Synthetic oligonucleotide
cguuugugcuccagcuguu

SEQ ID NO: 1194019 - RNA, 19 nt, Artificial Sequence
  Description of Artificial Sequence: Synthetic oligonucleotide
cggucgucuucugcaaacu

SEQ ID NO: 1194020 - RNA, 19 nt, Artificial Sequence
  Description of Artificial Sequence: Synthetic oligonucleotide
cccucucguguuccuccau

SEQ ID NO: 1194021 - RNA, 19 nt, Artificial Sequence
  Description of Artificial Sequence: Synthetic oligonucleotide
aauaucaagagcucugagc

SEQ ID NO: 1194022 - RNA, 19 nt, Artificial Sequence
  Description of Artificial Sequence: Synthetic oligonucleotide
aaucaguagggguuuaugg

SEQ ID NO: 1194023 - RNA, 19 nt, Artificial Sequence
  Description of Artificial Sequence: Synthetic oligonucleotide
ucuauugucaaguccagag

SEQ ID NO: 1194024 - RNA, 19 nt, Artificial Sequence
  Description of Artificial Sequence: Synthetic oligonucleotide
aaauacucaauguauuaug

SEQ ID NO: 1194025 - RNA, 19 nt, Artificial Sequence
  Description of Artificial Sequence: Synthetic oligonucleotide
aaauuaaauaugccuacug

SEQ ID NO: 1194026 - RNA, 19 nt, Artificial Sequence
  Description of Artificial Sequence: Synthetic oligonucleotide
uguauuaugaauucaugac

SEQ ID NO: 1194027 - RNA, 19 nt, Artificial Sequence
  Description of Artificial Sequence: Synthetic oligonucleotide
uauugucaaguccagagag

SEQ ID NO: 1194028 - RNA, 19 nt, Artificial Sequence
  Description of Artificial Sequence: Synthetic oligonucleotide
auaucaagagcucugagcu

SEQ ID NO: 1194029 - RNA, 19 nt, Artificial Sequence
  Description of Artificial Sequence: Synthetic oligonucleotide
cauacguagaucaaagacc

SEQ ID NO: 1194030 - RNA, 19 nt, Artificial Sequence
  Description of Artificial Sequence: Synthetic oligonucleotide
ucguuguugagaauguugg

SEQ ID NO: 1194031 - RNA, 19 nt, Artificial Sequence
  Description of Artificial Sequence: Synthetic oligonucleotide
aauggaaagggucaacuga

SEQ ID NO: 1194032 - RNA, 19 nt, Artificial Sequence
  Description of Artificial Sequence: Synthetic oligonucleotide
ucauacguagaucaaagac

SEQ ID NO: 1194033 - RNA, 19 nt, Artificial Sequence
  Description of Artificial Sequence: Synthetic oligonucleotide
aggacuaugagcuucauau

SEQ ID NO: 1194034 - RNA, 19 nt, Artificial Sequence
  Description of Artificial Sequence: Synthetic oligonucleotide
uaaaagguggugaaguaug

SEQ ID NO: 1194035 - RNA, 19 nt, Artificial Sequence
  Description of Artificial Sequence: Synthetic oligonucleotide
aaguauggaucauaauuag

SEQ ID NO: 1194036 - RNA, 19 nt, Artificial Sequence
  Description of Artificial Sequence: Synthetic oligonucleotide
uuagguacaaaauacucaa

SEQ ID NO: 1194037 - RNA, 19 nt, Artificial Sequence
  Description of Artificial Sequence: Synthetic oligonucleotide
gaucauaauuaggaaaugg

SEQ ID NO: 1194038 - RNA, 19 nt, Artificial Sequence
  Description of Artificial Sequence: Synthetic oligonucleotide
uguugaguggauaggauga

SEQ ID NO: 1194039 - RNA, 19 nt, Artificial Sequence
  Description of Artificial Sequence: Synthetic oligonucleotide
uggaucauaauuaggaaau

SEQ ID NO: 1194040 - RNA, 19 nt, Artificial Sequence
  Description of Artificial Sequence: Synthetic oligonucleotide
auguauuaugaauucauga

SEQ ID NO: 1194041 - RNA, 19 nt, Artificial Sequence
  Description of Artificial Sequence: Synthetic oligonucleotide
aacggcucugcccuuaggg

SEQ ID NO: 1194042 - RNA, 19 nt, Artificial Sequence
  Description of Artificial Sequence: Synthetic oligonucleotide
aucaguagggguuuauggg

SEQ ID NO: 1194043 - RNA, 19 nt, Artificial Sequence
  Description of Artificial Sequence: Synthetic oligonucleotide
gaucucauuaggcuuaaug

SEQ ID NO: 1194044 - RNA, 19 nt, Artificial Sequence
  Description of Artificial Sequence: Synthetic oligonucleotide
aagugcgguaggcagaguc

SEQ ID NO: 1194045 - RNA, 19 nt, Artificial Sequence
  Description of Artificial Sequence: Synthetic oligonucleotide
uaggaaauggaaaggguca

SEQ ID NO: 1194046 - RNA, 19 nt, Artificial Sequence
  Description of Artificial Sequence: Synthetic oligonucleotide
cucauuaggcuuaaugggc

SEQ ID NO: 1194047 - RNA, 19 nt, Artificial Sequence
  Description of Artificial Sequence: Synthetic oligonucleotide
uaccaucauacguagauca

SEQ ID NO: 1194048 - RNA, 19 nt, Artificial Sequence
  Description of Artificial Sequence: Synthetic oligonucleotide
ugagauuuccagaacugca

SEQ ID NO: 1194049 - RNA, 19 nt, Artificial Sequence
  Description of Artificial Sequence: Synthetic oligonucleotide
aauacucaauguauuauga

SEQ ID NO: 1194050 - RNA, 19 nt, Artificial Sequence
  Description of Artificial Sequence: Synthetic oligonucleotide
ucauuaggcuuaaugggcc

SEQ ID NO: 1194051 - RNA, 19 nt, Artificial Sequence
  Description of Artificial Sequence: Synthetic oligonucleotide
aaagacguccuugauacca

SEQ ID NO: 1194052 - RNA, 19 nt, Artificial Sequence
  Description of Artificial Sequence: Synthetic oligonucleotide
gaugauaaagaagagcaga

SEQ ID NO: 1194053 - RNA, 19 nt, Artificial Sequence
  Description of Artificial Sequence: Synthetic oligonucleotide
gaaagggucaacugaggcc

SEQ ID NO: 1194054 - RNA, 19 nt, Artificial Sequence
  Description of Artificial Sequence: Synthetic oligonucleotide
aacugauacgcacaaugga

SEQ ID NO: 1194055 - RNA, 19 nt, Artificial Sequence
  Description of Artificial Sequence: Synthetic oligonucleotide
ugaguggauaggaugauaa

SEQ ID NO: 1194056 - RNA, 19 nt, Artificial Sequence
  Description of Artificial Sequence: Synthetic oligonucleotide
caucauacguagaucaaag

SEQ ID NO: 1194057 - RNA, 19 nt, Artificial Sequence
  Description of Artificial Sequence: Synthetic oligonucleotide
aguggauaggaugauaaag

SEQ ID NO: 1194058 - RNA, 19 nt, Artificial Sequence
  Description of Artificial Sequence: Synthetic oligonucleotide
ugccugaaauuguaggugg

SEQ ID NO: 1194059 - RNA, 19 nt, Artificial Sequence
  Description of Artificial Sequence: Synthetic oligonucleotide
gaauucaugaccaaauuaa

SEQ ID NO: 1194060 - RNA, 19 nt, Artificial Sequence
  Description of Artificial Sequence: Synthetic oligonucleotide
gacuaugagcuucauauca

SEQ ID NO: 1194061 - RNA, 19 nt, Artificial Sequence
  Description of Artificial Sequence: Synthetic oligonucleotide
aauguauuaugaauucaug

SEQ ID NO: 1194062 - RNA, 19 nt, Artificial Sequence
  Description of Artificial Sequence: Synthetic oligonucleotide
aaaauacucaauguauuau

SEQ ID NO: 1194063 - RNA, 19 nt, Artificial Sequence
  Description of Artificial Sequence: Synthetic oligonucleotide
aguacuccugguuuucugg

SEQ ID NO: 1194064 - RNA, 19 nt, Artificial Sequence
  Description of Artificial Sequence: Synthetic oligonucleotide
uacucaauguauuaugaau

SEQ ID NO: 1194065 - RNA, 19 nt, Artificial Sequence
  Description of Artificial Sequence: Synthetic oligonucleotide
aauaugguaaaagguggug

SEQ ID NO: 1194066 - RNA, 19 nt, Artificial Sequence
  Description of Artificial Sequence: Synthetic oligonucleotide
gguuuaugggcgcugaugg

SEQ ID NO: 1194067 - RNA, 19 nt, Artificial Sequence
  Description of Artificial Sequence: Synthetic oligonucleotide
cauaauuaggaaauggaaa

SEQ ID NO: 1194068 - RNA, 19 nt, Artificial Sequence
  Description of Artificial Sequence: Synthetic oligonucleotide
aguagaacucuccacaaau

SEQ ID NO: 1194069 - RNA, 19 nt, Artificial Sequence
  Description of Artificial Sequence: Synthetic oligonucleotide
agauuuccagaacugcagg

SEQ ID NO: 1194070 - RNA, 19 nt, Artificial Sequence
  Description of Artificial Sequence: Synthetic oligonucleotide
guauggaucauaauuagga

SEQ ID NO: 1194071 - RNA, 19 nt, Artificial Sequence
  Description of Artificial Sequence: Synthetic oligonucleotide
gugagagcgaccaagugcg

SEQ ID NO: 1194072 - RNA, 19 nt, Artificial Sequence
  Description of Artificial Sequence: Synthetic oligonucleotide
aaauaugccuacugccuca

SEQ ID NO: 1194073 - RNA, 19 nt, Artificial Sequence
  Description of Artificial Sequence: Synthetic oligonucleotide
caacugauacgcacaaugg

SEQ ID NO: 1194074 - RNA, 19 nt, Artificial Sequence
  Description of Artificial Sequence: Synthetic oligonucleotide
uacggaaacaccaccuccc

SEQ ID NO: 1194075 - RNA, 19 nt, Artificial Sequence
  Description of Artificial Sequence: Synthetic oligonucleotide
augagauuuccagaacugc

SEQ ID NO: 1194076 - RNA, 19 nt, Artificial Sequence
  Description of Artificial Sequence: Synthetic oligonucleotide
uguguacggaaacaccacc

SEQ ID NO: 1194077 - RNA, 19 nt, Artificial Sequence
  Description of Artificial Sequence: Synthetic oligonucleotide
guuggcuaggacuaugagc

SEQ ID NO: 1194078 - RNA, 19 nt, Artificial Sequence
  Description of Artificial Sequence: Synthetic oligonucleotide
aacacaaggacauccccau

SEQ ID NO: 1194079 - RNA, 19 nt, Artificial Sequence
  Description of Artificial Sequence: Synthetic oligonucleotide
gaucagaagacgguggcag

SEQ ID NO: 1194080 - RNA, 19 nt, Artificial Sequence
  Description of Artificial Sequence: Synthetic oligonucleotide
auguuggcuaccaucauac

SEQ ID NO: 1194081 - RNA, 19 nt, Artificial Sequence
  Description of Artificial Sequence: Synthetic oligonucleotide
aaaagguggugaaguaugg

SEQ ID NO: 1194082 - RNA, 19 nt, Artificial Sequence
  Description of Artificial Sequence: Synthetic oligonucleotide
uuggcuaccaucauacgua

SEQ ID NO: 1194083 - RNA, 19 nt, Artificial Sequence
  Description of Artificial Sequence: Synthetic oligonucleotide
uaugguaaaagguggugaa

SEQ ID NO: 1194084 - RNA, 19 nt, Artificial Sequence
  Description of Artificial Sequence: Synthetic oligonucleotide
auaaagaagagcagaagga

SEQ ID NO: 1194085 - RNA, 19 nt, Artificial Sequence
  Description of Artificial Sequence: Synthetic oligonucleotide
cucaauguauuaugaauuc

SEQ ID NO: 1194086 - RNA, 19 nt, Artificial Sequence
  Description of Artificial Sequence: Synthetic oligonucleotide
uggguugcuuccaucagcc

SEQ ID NO: 1194087 - RNA, 19 nt, Artificial Sequence
  Description of Artificial Sequence: Synthetic oligonucleotide
uuucagaccacagccgagg

SEQ ID NO: 1194088 - RNA, 19 nt, Artificial Sequence
  Description of Artificial Sequence: Synthetic oligonucleotide
aggaugggaaacucuauug

SEQ ID NO: 1194089 - RNA, 19 nt, Artificial Sequence
  Description of Artificial Sequence: Synthetic oligonucleotide
aggacggggacgccgagcc

SEQ ID NO: 1194090 - RNA, 19 nt, Artificial Sequence
  Description of Artificial Sequence: Synthetic oligonucleotide
auggaucauaauuaggaaa

SEQ ID NO: 1194091 - RNA, 19 nt, Artificial Sequence
  Description of Artificial Sequence: Synthetic oligonucleotide
uucauaucauccaggucug

SEQ ID NO: 1194092 - RNA, 19 nt, Artificial Sequence
  Description of Artificial Sequence: Synthetic oligonucleotide
uauggaucauaauuaggaa

SEQ ID NO: 1194093 - RNA, 19 nt, Artificial Sequence
  Description of Artificial Sequence: Synthetic oligonucleotide
uuucucacguuccuuucgc

SEQ ID NO: 1194094 - RNA, 19 nt, Artificial Sequence
  Description of Artificial Sequence: Synthetic oligonucleotide
accuccuaaaucuaaaaua

SEQ ID NO: 1194095 - RNA, 19 nt, Artificial Sequence
  Description of Artificial Sequence: Synthetic oligonucleotide
cuuguguacggaaacacca

SEQ ID NO: 1194096 - RNA, 19 nt, Artificial Sequence
  Description of Artificial Sequence: Synthetic oligonucleotide
auacguagaucaaagaccu

SEQ ID NO: 1194097 - RNA, 19 nt, Artificial Sequence
  Description of Artificial Sequence: Synthetic oligonucleotide
ggaaacaccaccucccuag

SEQ ID NO: 1194098 - RNA, 19 nt, Artificial Sequence
  Description of Artificial Sequence: Synthetic oligonucleotide
aggcuuaaugggccuagcc

SEQ ID NO: 1194099 - RNA, 19 nt, Artificial Sequence
  Description of Artificial Sequence: Synthetic oligonucleotide
uggauaggaugauaaagaa

SEQ ID NO: 1194100 - RNA, 19 nt, Artificial Sequence
  Description of Artificial Sequence: Synthetic oligonucleotide
cuuucgcgcacgcugauag

SEQ ID NO: 1194101 - RNA, 19 nt, Artificial Sequence
  Description of Artificial Sequence: Synthetic oligonucleotide
ugguaaaagguggugaagu

SEQ ID NO: 1194102 - RNA, 19 nt, Artificial Sequence
  Description of Artificial Sequence: Synthetic oligonucleotide
aaauaugguaaaagguggu

SEQ ID NO: 1194103 - RNA, 19 nt, Artificial Sequence
  Description of Artificial Sequence: Synthetic oligonucleotide
cugauacgcacaauggaac

SEQ ID NO: 1194104 - RNA, 19 nt, Artificial Sequence
  Description of Artificial Sequence: Synthetic oligonucleotide
gguuaggugaguucccucg

SEQ ID NO: 1194105 - RNA, 19 nt, Artificial Sequence
  Description of Artificial Sequence: Synthetic oligonucleotide
aaggacauccccaucgaug

SEQ ID NO: 1194106 - RNA, 19 nt, Artificial Sequence
  Description of Artificial Sequence: Synthetic oligonucleotide
aaugggccuagccaagggu

SEQ ID NO: 1194107 - RNA, 19 nt, Artificial Sequence
  Description of Artificial Sequence: Synthetic oligonucleotide
acuggucucguaguaaggg

SEQ ID NO: 1194108 - RNA, 19 nt, Artificial Sequence
  Description of Artificial Sequence: Synthetic oligonucleotide
aguauggaucauaauuagg

SEQ ID NO: 1194109 - RNA, 19 nt, Artificial Sequence
  Description of Artificial Sequence: Synthetic oligonucleotide
ugauacgcacaauggaacu

SEQ ID NO: 1194110 - RNA, 19 nt, Artificial Sequence
  Description of Artificial Sequence: Synthetic oligonucleotide
aucagaagacgguggcagc

SEQ ID NO: 1194111 - RNA, 19 nt, Artificial Sequence
  Description of Artificial Sequence: Synthetic oligonucleotide
aggaggacggugaugaggg

SEQ ID NO: 1194112 - RNA, 19 nt, Artificial Sequence
  Description of Artificial Sequence: Synthetic oligonucleotide
uuguugagaauguuggcua

SEQ ID NO: 1194113 - RNA, 19 nt, Artificial Sequence
  Description of Artificial Sequence: Synthetic oligonucleotide
gagggaggaucucauuagg

SEQ ID NO: 1194114 - RNA, 19 nt, Artificial Sequence
  Description of Artificial Sequence: Synthetic oligonucleotide
uuaacggcuuccaggucag

SEQ ID NO: 1194115 - RNA, 19 nt, Artificial Sequence
  Description of Artificial Sequence: Synthetic oligonucleotide
cugaaauuguagguggacc

SEQ ID NO: 1194116 - RNA, 19 nt, Artificial Sequence
  Description of Artificial Sequence: Synthetic oligonucleotide
guugguccggcgaacaugg

SEQ ID NO: 1194117 - RNA, 19 nt, Artificial Sequence
  Description of Artificial Sequence: Synthetic oligonucleotide
ucugugagagcgaccaagu

SEQ ID NO: 1194118 - RNA, 19 nt, Artificial Sequence
  Description of Artificial Sequence: Synthetic oligonucleotide
aaauuguagguggacccug

SEQ ID NO: 1194119 - RNA, 19 nt, Artificial Sequence
  Description of Artificial Sequence: Synthetic oligonucleotide
augaggacaacagcaacag

SEQ ID NO: 1194120 - RNA, 19 nt, Artificial Sequence
  Description of Artificial Sequence: Synthetic oligonucleotide
ugcccuguugaguggauag

SEQ ID NO: 1194121 - RNA, 19 nt, Artificial Sequence
  Description of Artificial Sequence: Synthetic oligonucleotide
accaaauuaaauaugccua

SEQ ID NO: 1194122 - RNA, 19 nt, Artificial Sequence
  Description of Artificial Sequence: Synthetic oligonucleotide
gaaugacaggagcucgggg

SEQ ID NO: 1194123 - RNA, 19 nt, Artificial Sequence
  Description of Artificial Sequence: Synthetic oligonucleotide
acggcucugcccuuagggc

SEQ ID NO: 1194124 - RNA, 19 nt, Artificial Sequence
  Description of Artificial Sequence: Synthetic oligonucleotide
auaugguaaaaggugguga

SEQ ID NO: 1194125 - RNA, 19 nt, Artificial Sequence
  Description of Artificial Sequence: Synthetic oligonucleotide
cuuucucacguuccuuucg

SEQ ID NO: 1194126 - RNA, 19 nt, Artificial Sequence
  Description of Artificial Sequence: Synthetic oligonucleotide
ucucacguuccuuucgcgc

SEQ ID NO: 1194127 - RNA, 19 nt, Artificial Sequence
  Description of Artificial Sequence: Synthetic oligonucleotide
caguagggguuuaugggcg

SEQ ID NO: 1194128 - RNA, 19 nt, Artificial Sequence
  Description of Artificial Sequence: Synthetic oligonucleotide
acguccuugauaccaaacu

SEQ ID NO: 1194129 - RNA, 19 nt, Artificial Sequence
  Description of Artificial Sequence: Synthetic oligonucleotide
uccgcagguguaaauaguc

SEQ ID NO: 1194130 - RNA, 19 nt, Artificial Sequence
  Description of Artificial Sequence: Synthetic oligonucleotide
uugucaaguccagagagaa

SEQ ID NO: 1194131 - RNA, 19 nt, Artificial Sequence
  Description of Artificial Sequence: Synthetic oligonucleotide
uguacggaaacaccaccuc

SEQ ID NO: 1194132 - RNA, 19 nt, Artificial Sequence
  Description of Artificial Sequence: Synthetic oligonucleotide
ugaggacaacagcaacagg

SEQ ID NO: 1194133 - RNA, 19 nt, Artificial Sequence
  Description of Artificial Sequence: Synthetic oligonucleotide
ugcacauugcgcagaugag

SEQ ID NO: 1194134 - RNA, 19 nt, Artificial Sequence
  Description of Artificial Sequence: Synthetic oligonucleotide
caggaucagaagacggugg

SEQ ID NO: 1194135 - RNA, 19 nt, Artificial Sequence
  Description of Artificial Sequence: Synthetic oligonucleotide
uggagggaggaucucauua

SEQ ID NO: 1194136 - RNA, 19 nt, Artificial Sequence
  Description of Artificial Sequence: Synthetic oligonucleotide
gaacaugcccguguagagg

SEQ ID NO: 1194137 - RNA, 19 nt, Artificial Sequence
  Description of Artificial Sequence: Synthetic oligonucleotide
ccuguuaacggcuuccagg

SEQ ID NO: 1194138 - RNA, 19 nt, Artificial Sequence
  Description of Artificial Sequence: Synthetic oligonucleotide
cuuaaugggccuagccaag

SEQ ID NO: 1194139 - RNA, 19 nt, Artificial Sequence
  Description of Artificial Sequence: Synthetic oligonucleotide
cagaaugacaggagcucgg

SEQ ID NO: 1194140 - RNA, 19 nt, Artificial Sequence
  Description of Artificial Sequence: Synthetic oligonucleotide
guggauaggaugauaaaga

SEQ ID NO: 1194141 - RNA, 19 nt, Artificial Sequence
  Description of Artificial Sequence: Synthetic oligonucleotide
uuguguacggaaacaccac

SEQ ID NO: 1194142 - RNA, 19 nt, Artificial Sequence
  Description of Artificial Sequence: Synthetic oligonucleotide
ggcaaugugaggaagggug

SEQ ID NO: 1194143 - RNA, 19 nt, Artificial Sequence
  Description of Artificial Sequence: Synthetic oligonucleotide
aacaggaucagaagacggu

SEQ ID NO: 1194144 - RNA, 19 nt, Artificial Sequence
  Description of Artificial Sequence: Synthetic oligonucleotide
ucggcaaugugaggaaggg

SEQ ID NO: 1194145 - RNA, 19 nt, Artificial Sequence
  Description of Artificial Sequence: Synthetic oligonucleotide
uuaggugaguucccucgug

SEQ ID NO: 1194146 - RNA, 19 nt, Artificial Sequence
  Description of Artificial Sequence: Synthetic oligonucleotide
agggaggaucucauuaggc

SEQ ID NO: 1194147 - RNA, 19 nt, Artificial Sequence
  Description of Artificial Sequence: Synthetic oligonucleotide
gauacgcacaauggaacug

SEQ ID NO: 1194148 - RNA, 19 nt, Artificial Sequence
  Description of Artificial Sequence: Synthetic oligonucleotide
guaguaagggauccccagc

SEQ ID NO: 1194149 - RNA, 19 nt, Artificial Sequence
  Description of Artificial Sequence: Synthetic oligonucleotide
cuccuaaaucuaaaauaug

SEQ ID NO: 1194150 - RNA, 19 nt, Artificial Sequence
  Description of Artificial Sequence: Synthetic oligonucleotide
caagcacuccuucacccgg

SEQ ID NO: 1194151 - RNA, 19 nt, Artificial Sequence
  Description of Artificial Sequence: Synthetic oligonucleotide
aagaccucuagcagcucgg

SEQ ID NO: 1194152 - RNA, 19 nt, Artificial Sequence
  Description of Artificial Sequence: Synthetic oligonucleotide
ccaaauuaaauaugccuac

SEQ ID NO: 1194153 - RNA, 19 nt, Artificial Sequence
  Description of Artificial Sequence: Synthetic oligonucleotide
uguuggcuaccaucauacg

SEQ ID NO: 1194154 - RNA, 19 nt, Artificial Sequence
  Description of Artificial Sequence: Synthetic oligonucleotide
ccaacugauacgcacaaug

SEQ ID NO: 1194155 - RNA, 19 nt, Artificial Sequence
  Description of Artificial Sequence: Synthetic oligonucleotide
gguugcuuccaucagcccc

SEQ ID NO: 1194156 - RNA, 19 nt, Artificial Sequence
  Description of Artificial Sequence: Synthetic oligonucleotide
uucucacguuccuuucgcg

SEQ ID NO: 1194157 - RNA, 19 nt, Artificial Sequence
  Description of Artificial Sequence: Synthetic oligonucleotide
cucccuaguagaacucucc

SEQ ID NO: 1194158 - RNA, 19 nt, Artificial Sequence
  Description of Artificial Sequence: Synthetic oligonucleotide
uuaggcuuaaugggccuag

SEQ ID NO: 1194159 - RNA, 19 nt, Artificial Sequence
  Description of Artificial Sequence: Synthetic oligonucleotide
ggaaagggucaacugaggc

SEQ ID NO: 1194160 - RNA, 19 nt, Artificial Sequence
  Description of Artificial Sequence: Synthetic oligonucleotide
acugauacgcacaauggaa

SEQ ID NO: 1194161 - RNA, 19 nt, Artificial Sequence
  Description of Artificial Sequence: Synthetic oligonucleotide
ucggccaacugauacgcac

SEQ ID NO: 1194162 - RNA, 19 nt, Artificial Sequence
  Description of Artificial Sequence: Synthetic oligonucleotide
accucuagcagcucggcaa

SEQ ID NO: 1194163 - RNA, 19 nt, Artificial Sequence
  Description of Artificial Sequence: Synthetic oligonucleotide
ucacagcuggaaaucagua

SEQ ID NO: 1194164 - RNA, 19 nt, Artificial Sequence
  Description of Artificial Sequence: Synthetic oligonucleotide
ugagggacuguuccagaac

SEQ ID NO: 1194165 - RNA, 19 nt, Artificial Sequence
  Description of Artificial Sequence: Synthetic oligonucleotide
gacgguggcagcauuucag

SEQ ID NO: 1194166 - RNA, 19 nt, Artificial Sequence
  Description of Artificial Sequence: Synthetic oligonucleotide
uggcuaccaucauacguag

SEQ ID NO: 1194167 - RNA, 19 nt, Artificial Sequence
  Description of Artificial Sequence: Synthetic oligonucleotide
uuggcuggugagaacggcu

SEQ ID NO: 1194168 - RNA, 19 nt, Artificial Sequence
  Description of Artificial Sequence: Synthetic oligonucleotide
cucguaguaagggaucccc

SEQ ID NO: 1194169 - RNA, 19 nt, Artificial Sequence
  Description of Artificial Sequence: Synthetic oligonucleotide
acaggaucagaagacggug

SEQ ID NO: 1194170 - RNA, 19 nt, Artificial Sequence
  Description of Artificial Sequence: Synthetic oligonucleotide
augggaaacucuauuguca

SEQ ID NO: 1194171 - RNA, 19 nt, Artificial Sequence
  Description of Artificial Sequence: Synthetic oligonucleotide
auaggaugauaaagaagag

SEQ ID NO: 1194172 - RNA, 19 nt, Artificial Sequence
  Description of Artificial Sequence: Synthetic oligonucleotide
gguggcagcauuucagacc

SEQ ID NO: 1194173 - RNA, 19 nt, Artificial Sequence
  Description of Artificial Sequence: Synthetic oligonucleotide
ucgcgcacgcugauagugg

SEQ ID NO: 1194174 - RNA, 19 nt, Artificial Sequence
  Description of Artificial Sequence: Synthetic oligonucleotide
agggcuaaugaggacaaca

SEQ ID NO: 1194175 - RNA, 19 nt, Artificial Sequence
  Description of Artificial Sequence: Synthetic oligonucleotide
ugcuuguguacggaaacac

SEQ ID NO: 1194176 - RNA, 19 nt, Artificial Sequence
  Description of Artificial Sequence: Synthetic oligonucleotide
ucaccuccuaaaucuaaaa

SEQ ID NO: 1194177 - RNA, 19 nt, Artificial Sequence
  Description of Artificial Sequence: Synthetic oligonucleotide
ucguaguaagggaucccca

SEQ ID NO: 1194178 - RNA, 19 nt, Artificial Sequence
  Description of Artificial Sequence: Synthetic oligonucleotide
uucgcgcacgcugauagug

SEQ ID NO: 1194179 - RNA, 19 nt, Artificial Sequence
  Description of Artificial Sequence: Synthetic oligonucleotide
uaguagaacucuccacaaa

SEQ ID NO: 1194180 - RNA, 19 nt, Artificial Sequence
  Description of Artificial Sequence: Synthetic oligonucleotide
ggauaggaugauaaagaag

SEQ ID NO: 1194181 - RNA, 19 nt, Artificial Sequence
  Description of Artificial Sequence: Synthetic oligonucleotide
uuccuuucgcgcacgcuga

SEQ ID NO: 1194182 - RNA, 19 nt, Artificial Sequence
  Description of Artificial Sequence: Synthetic oligonucleotide
cuggguugcuuccaucagc

SEQ ID NO: 1194183 - RNA, 19 nt, Artificial Sequence
  Description of Artificial Sequence: Synthetic oligonucleotide
cagucggccaacugauacg

SEQ ID NO: 1194184 - RNA, 19 nt, Artificial Sequence
  Description of Artificial Sequence: Synthetic oligonucleotide
gacggggacgccgagcccg

SEQ ID NO: 1194185 - RNA, 19 nt, Artificial Sequence
  Description of Artificial Sequence: Synthetic oligonucleotide
cauuucagaccacagccga

SEQ ID NO: 1194186 - RNA, 19 nt, Artificial Sequence
  Description of Artificial Sequence: Synthetic oligonucleotide
guagaacucuccacaaaug

SEQ ID NO: 1194187 - RNA, 19 nt, Artificial Sequence
  Description of Artificial Sequence: Synthetic oligonucleotide
cucugugagagcgaccaag

SEQ ID NO: 1194188 - RNA, 19 nt, Artificial Sequence
  Description of Artificial Sequence: Synthetic oligonucleotide
cauuggcuggugagaacgg

SEQ ID NO: 1194189 - RNA, 19 nt, Artificial Sequence
  Description of Artificial Sequence: Synthetic oligonucleotide
auacgcacaauggaacugu

SEQ ID NO: 1194190 - RNA, 19 nt, Artificial Sequence
  Description of Artificial Sequence: Synthetic oligonucleotide
uucccgacccuucucugga

SEQ ID NO: 1194191 - RNA, 19 nt, Artificial Sequence
  Description of Artificial Sequence: Synthetic oligonucleotide
agagucgguuggcuaggac

SEQ ID NO: 1194192 - RNA, 19 nt, Artificial Sequence
  Description of Artificial Sequence: Synthetic oligonucleotide
ucuggagggaggaucucau

SEQ ID NO: 1194193 - RNA, 19 nt, Artificial Sequence
  Description of Artificial Sequence: Synthetic oligonucleotide
agaacucuccacaaauggu

SEQ ID NO: 1194194 - RNA, 19 nt, Artificial Sequence
  Description of Artificial Sequence: Synthetic oligonucleotide
augguaaaagguggugaag

SEQ ID NO: 1194195 - RNA, 19 nt, Artificial Sequence
  Description of Artificial Sequence: Synthetic oligonucleotide
ugacggcgggagaugagug

SEQ ID NO: 1194196 - RNA, 19 nt, Artificial Sequence
  Description of Artificial Sequence: Synthetic oligonucleotide
uagguacaaaauacucaau

SEQ ID NO: 1194197 - RNA, 19 nt, Artificial Sequence
  Description of Artificial Sequence: Synthetic oligonucleotide
guuggcuaccaucauacgu

SEQ ID NO: 1194198 - RNA, 19 nt, Artificial Sequence
  Description of Artificial Sequence: Synthetic oligonucleotide
uuccuacccugccugaaau

SEQ ID NO: 1194199 - RNA, 19 nt, Artificial Sequence
  Description of Artificial Sequence: Synthetic oligonucleotide
aauuguagguggacccugu

SEQ ID NO: 1194200 - RNA, 19 nt, Artificial Sequence
  Description of Artificial Sequence: Synthetic oligonucleotide
ggaacacaaggacaucccc

SEQ ID NO: 1194201 - RNA, 19 nt, Artificial Sequence
  Description of Artificial Sequence: Synthetic oligonucleotide
uacgcacaauggaacugug

SEQ ID NO: 1194202 - RNA, 19 nt, Artificial Sequence
  Description of Artificial Sequence: Synthetic oligonucleotide
gagucgguuggcuaggacu

SEQ ID NO: 1194203 - RNA, 19 nt, Artificial Sequence
  Description of Artificial Sequence: Synthetic oligonucleotide
uucccucgugcccuguuga

SEQ ID NO: 1194204 - RNA, 19 nt, Artificial Sequence
  Description of Artificial Sequence: Synthetic oligonucleotide
agcauagcgcagguccagc

SEQ ID NO: 1194205 - RNA, 19 nt, Artificial Sequence
  Description of Artificial Sequence: Synthetic oligonucleotide
ugagagcgaccaagugcgg

SEQ ID NO: 1194206 - RNA, 19 nt, Artificial Sequence
  Description of Artificial Sequence: Synthetic oligonucleotide
uaucaagagcucugagcuc

SEQ ID NO: 1194207 - RNA, 19 nt, Artificial Sequence
  Description of Artificial Sequence: Synthetic oligonucleotide
ugguccggcgaacauggaa

SEQ ID NO: 1194208 - RNA, 19 nt, Artificial Sequence
  Description of Artificial Sequence: Synthetic oligonucleotide
guccggcgaacauggaagg

SEQ ID NO: 1194209 - RNA, 19 nt, Artificial Sequence
  Description of Artificial Sequence: Synthetic oligonucleotide
cuaguagaacucuccacaa

SEQ ID NO: 1194210 - RNA, 19 nt, Artificial Sequence
  Description of Artificial Sequence: Synthetic oligonucleotide
acgcacaauggaacugugc

SEQ ID NO: 1194211 - RNA, 19 nt, Artificial Sequence
  Description of Artificial Sequence: Synthetic oligonucleotide
ugggccuagccaagggucu

SEQ ID NO: 1194212 - RNA, 19 nt, Artificial Sequence
  Description of Artificial Sequence: Synthetic oligonucleotide
gugagaacggcucugcccu

SEQ ID NO: 1194213 - RNA, 19 nt, Artificial Sequence
  Description of Artificial Sequence: Synthetic oligonucleotide
ccuaguagaacucuccaca

SEQ ID NO: 1194214 - RNA, 19 nt, Artificial Sequence
  Description of Artificial Sequence: Synthetic oligonucleotide
gcuuaaugggccuagccaa

SEQ ID NO: 1194215 - RNA, 19 nt, Artificial Sequence
  Description of Artificial Sequence: Synthetic oligonucleotide
ucacguuccuuucgcgcac

SEQ ID NO: 1194216 - RNA, 19 nt, Artificial Sequence
  Description of Artificial Sequence: Synthetic oligonucleotide
ggcuuaaugggccuagcca

SEQ ID NO: 1194217 - RNA, 19 nt, Artificial Sequence
  Description of Artificial Sequence: Synthetic oligonucleotide
gauaccaaacugggccacc

SEQ ID NO: 1194218 - RNA, 19 nt, Artificial Sequence
  Description of Artificial Sequence: Synthetic oligonucleotide
uugcuuguguacggaaaca

SEQ ID NO: 1194219 - RNA, 19 nt, Artificial Sequence
  Description of Artificial Sequence: Synthetic oligonucleotide
uugcggcacacguuguugu

SEQ ID NO: 1194220 - RNA, 19 nt, Artificial Sequence
  Description of Artificial Sequence: Synthetic oligonucleotide
cucacguuccuuucgcgca

SEQ ID NO: 1194221 - RNA, 19 nt, Artificial Sequence
  Description of Artificial Sequence: Synthetic oligonucleotide
agaccucuagcagcucggc

SEQ ID NO: 1194222 - RNA, 19 nt, Artificial Sequence
  Description of Artificial Sequence: Synthetic oligonucleotide
aauaugccuacugccucau

SEQ ID NO: 1194223 - RNA, 19 nt, Artificial Sequence
  Description of Artificial Sequence: Synthetic oligonucleotide
gacccuucucuggagggag

SEQ ID NO: 1194224 - RNA, 19 nt, Artificial Sequence
  Description of Artificial Sequence: Synthetic oligonucleotide
uacccugccugaaauugua

SEQ ID NO: 1194225 - RNA, 19 nt, Artificial Sequence
  Description of Artificial Sequence: Synthetic oligonucleotide
gguccggcgaacauggaag

SEQ ID NO: 1194226 - RNA, 19 nt, Artificial Sequence
  Description of Artificial Sequence: Synthetic oligonucleotide
cuguuaacggcuuccaggu

SEQ ID NO: 1194227 - RNA, 19 nt, Artificial Sequence
  Description of Artificial Sequence: Synthetic oligonucleotide
auugucaaguccagagaga

SEQ ID NO: 1194228 - RNA, 19 nt, Artificial Sequence
  Description of Artificial Sequence: Synthetic oligonucleotide
aagggcuaaugaggacaac

SEQ ID NO: 1194229 - RNA, 19 nt, Artificial Sequence
  Description of Artificial Sequence: Synthetic oligonucleotide
agagcgaccaagugcggua

SEQ ID NO: 1194230 - RNA, 19 nt, Artificial Sequence
  Description of Artificial Sequence: Synthetic oligonucleotide
agguaccagacagguggcc

SEQ ID NO: 1194231 - RNA, 19 nt, Artificial Sequence
  Description of Artificial Sequence: Synthetic oligonucleotide
agccccgucacuguguacu

SEQ ID NO: 1194232 - RNA, 19 nt, Artificial Sequence
  Description of Artificial Sequence: Synthetic oligonucleotide
cuuugccaagcacuccuuc

SEQ ID NO: 1194233 - RNA, 19 nt, Artificial Sequence
  Description of Artificial Sequence: Synthetic oligonucleotide
auuucagaccacagccgag

SEQ ID NO: 1194234 - RNA, 19 nt, Artificial Sequence
  Description of Artificial Sequence: Synthetic oligonucleotide
acggaaacaccaccucccu

SEQ ID NO: 1194235 - RNA, 19 nt, Artificial Sequence
  Description of Artificial Sequence: Synthetic oligonucleotide
ucucguaguaagggauccc

SEQ ID NO: 1194236 - RNA, 19 nt, Artificial Sequence
  Description of Artificial Sequence: Synthetic oligonucleotide
ggcagaugguuuccuaccc

SEQ ID NO: 1194237 - RNA, 19 nt, Artificial Sequence
  Description of Artificial Sequence: Synthetic oligonucleotide
acguuccuuucgcgcacgc

SEQ ID NO: 1194238 - RNA, 19 nt, Artificial Sequence
  Description of Artificial Sequence: Synthetic oligonucleotide
caaagacguccuugauacc

SEQ ID NO: 1194239 - RNA, 19 nt, Artificial Sequence
  Description of Artificial Sequence: Synthetic oligonucleotide
uguuaacggcuuccagguc

SEQ ID NO: 1194240 - RNA, 19 nt, Artificial Sequence
  Description of Artificial Sequence: Synthetic oligonucleotide
gcauuucagaccacagccg

SEQ ID NO: 1194241 - RNA, 19 nt, Artificial Sequence
  Description of Artificial Sequence: Synthetic oligonucleotide
ggugaguucccucgugccc

SEQ ID NO: 1194242 - RNA, 19 nt, Artificial Sequence
  Description of Artificial Sequence: Synthetic oligonucleotide
guggagacaccagucggcc

SEQ ID NO: 1194243 - RNA, 19 nt, Artificial Sequence
  Description of Artificial Sequence: Synthetic oligonucleotide
agaacggcucugcccuuag

SEQ ID NO: 1194244 - RNA, 19 nt, Artificial Sequence
  Description of Artificial Sequence: Synthetic oligonucleotide
cuaccaucauacguagauc

SEQ ID NO: 1194245 - RNA, 19 nt, Artificial Sequence
  Description of Artificial Sequence: Synthetic oligonucleotide
aggcccggugucaaaaguc

SEQ ID NO: 1194246 - RNA, 19 nt, Artificial Sequence
  Description of Artificial Sequence: Synthetic oligonucleotide
cccugccugaaauuguagg

SEQ ID NO: 1194247 - RNA, 19 nt, Artificial Sequence
  Description of Artificial Sequence: Synthetic oligonucleotide
gacguccuugauaccaaac

SEQ ID NO: 1194248 - RNA, 19 nt, Artificial Sequence
  Description of Artificial Sequence: Synthetic oligonucleotide
guagguggacccuguucug

SEQ ID NO: 1194249 - RNA, 19 nt, Artificial Sequence
  Description of Artificial Sequence: Synthetic oligonucleotide
auaccaaacugggccacca

SEQ ID NO: 1194250 - RNA, 19 nt, Artificial Sequence
  Description of Artificial Sequence: Synthetic oligonucleotide
ggugaaguauggaucauaa

SEQ ID NO: 1194251 - RNA, 19 nt, Artificial Sequence
  Description of Artificial Sequence: Synthetic oligonucleotide
gaacggcucugcccuuagg

SEQ ID NO: 1194252 - RNA, 19 nt, Artificial Sequence
  Description of Artificial Sequence: Synthetic oligonucleotide
uggugaaguauggaucaua

SEQ ID NO: 1194253 - RNA, 19 nt, Artificial Sequence
  Description of Artificial Sequence: Synthetic oligonucleotide
gaaauuguagguggacccu

SEQ ID NO: 1194254 - RNA, 19 nt, Artificial Sequence
  Description of Artificial Sequence: Synthetic oligonucleotide
aggaaauggaaagggucaa

SEQ ID NO: 1194255 - RNA, 19 nt, Artificial Sequence
  Description of Artificial Sequence: Synthetic oligonucleotide
aagacguccuugauaccaa

SEQ ID NO: 1194256 - RNA, 19 nt, Artificial Sequence
  Description of Artificial Sequence: Synthetic oligonucleotide
gggcagaugguuuccuacc

SEQ ID NO: 1194257 - RNA, 19 nt, Artificial Sequence
  Description of Artificial Sequence: Synthetic oligonucleotide
ggaucauaauuaggaaaug

SEQ ID NO: 1194258 - RNA, 19 nt, Artificial Sequence
  Description of Artificial Sequence: Synthetic oligonucleotide
ugguuaggugaguucccuc

SEQ ID NO: 1194259 - RNA, 19 nt, Artificial Sequence
  Description of Artificial Sequence: Synthetic oligonucleotide
gcuaccaucauacguagau

SEQ ID NO: 1194260 - RNA, 19 nt, Artificial Sequence
  Description of Artificial Sequence: Synthetic oligonucleotide
gagcgaccaagugcgguag

SEQ ID NO: 1194261 - RNA, 19 nt, Artificial Sequence
  Description of Artificial Sequence: Synthetic oligonucleotide
cuggugagaacggcucugc

SEQ ID NO: 1194262 - RNA, 19 nt, Artificial Sequence
  Description of Artificial Sequence: Synthetic oligonucleotide
ucccucgugcccuguugag

SEQ ID NO: 1194263 - RNA, 19 nt, Artificial Sequence
  Description of Artificial Sequence: Synthetic oligonucleotide
uacguagaucaaagaccuc

SEQ ID NO: 1194264 - RNA, 19 nt, Artificial Sequence
  Description of Artificial Sequence: Synthetic oligonucleotide
uggagacaccagucggcca

SEQ ID NO: 1194265 - RNA, 19 nt, Artificial Sequence
  Description of Artificial Sequence: Synthetic oligonucleotide
guucccucgugcccuguug

SEQ ID NO: 1194266 - RNA, 19 nt, Artificial Sequence
  Description of Artificial Sequence: Synthetic oligonucleotide
cugauucaugaaggccucg

SEQ ID NO: 1194267 - RNA, 19 nt, Artificial Sequence
  Description of Artificial Sequence: Synthetic oligonucleotide
ccagucggccaacugauac

SEQ ID NO: 1194268 - RNA, 19 nt, Artificial Sequence
  Description of Artificial Sequence: Synthetic oligonucleotide
aagggucaacugaggcccg

SEQ ID NO: 1194269 - RNA, 19 nt, Artificial Sequence
  Description of Artificial Sequence: Synthetic oligonucleotide
aggacggugaugagggacu

SEQ ID NO: 1194270 - RNA, 19 nt, Artificial Sequence
  Description of Artificial Sequence: Synthetic oligonucleotide
cucgugcccuguugagugg

SEQ ID NO: 1194271 - RNA, 19 nt, Artificial Sequence
  Description of Artificial Sequence: Synthetic oligonucleotide
ccaucgauguccaccauca

SEQ ID NO: 1194272 - RNA, 19 nt, Artificial Sequence
  Description of Artificial Sequence: Synthetic oligonucleotide
ucgguuggcuaggacuaug

SEQ ID NO: 1194273 - RNA, 19 nt, Artificial Sequence
  Description of Artificial Sequence: Synthetic oligonucleotide
agucgguuggcuaggacua

SEQ ID NO: 1194274 - RNA, 19 nt, Artificial Sequence
  Description of Artificial Sequence: Synthetic oligonucleotide
guaaaagguggugaaguau

SEQ ID NO: 1194275 - RNA, 19 nt, Artificial Sequence
  Description of Artificial Sequence: Synthetic oligonucleotide
uggacccuguucugaucug

SEQ ID NO: 1194276 - RNA, 19 nt, Artificial Sequence
  Description of Artificial Sequence: Synthetic oligonucleotide
ggaugggaaacucuauugu

SEQ ID NO: 1194277 - RNA, 19 nt, Artificial Sequence
  Description of Artificial Sequence: Synthetic oligonucleotide
ccuccuaaaucuaaaauau

SEQ ID NO: 1194278 - RNA, 19 nt, Artificial Sequence
  Description of Artificial Sequence: Synthetic oligonucleotide
ccucgugcccuguugagug

SEQ ID NO: 1194279 - RNA, 19 nt, Artificial Sequence
  Description of Artificial Sequence: Synthetic oligonucleotide
cccugguuaggugaguucc

SEQ ID NO: 1194280 - RNA, 19 nt, Artificial Sequence
  Description of Artificial Sequence: Synthetic oligonucleotide
caaauuaaauaugccuacu

SEQ ID NO: 1194281 - RNA, 19 nt, Artificial Sequence
  Description of Artificial Sequence: Synthetic oligonucleotide
auuguagguggacccuguu

SEQ ID NO: 1194282 - RNA, 19 nt, Artificial Sequence
  Description of Artificial Sequence: Synthetic oligonucleotide
ccuccgcagguguaaauag

SEQ ID NO: 1194283 - RNA, 19 nt, Artificial Sequence
  Description of Artificial Sequence: Synthetic oligonucleotide
ccuacccugccugaaauug

SEQ ID NO: 1194284 - RNA, 19 nt, Artificial Sequence
  Description of Artificial Sequence: Synthetic oligonucleotide
gcugauagugguccucuuc

SEQ ID NO: 1194285 - RNA, 19 nt, Artificial Sequence
  Description of Artificial Sequence: Synthetic oligonucleotide
uccggcgaacauggaaggc

SEQ ID NO: 1194286 - RNA, 19 nt, Artificial Sequence
  Description of Artificial Sequence: Synthetic oligonucleotide
gaccucuagcagcucggca

SEQ ID NO: 1194287 - RNA, 19 nt, Artificial Sequence
  Description of Artificial Sequence: Synthetic oligonucleotide
uuucgcgcacgcugauagu

SEQ ID NO: 1194288 - RNA, 19 nt, Artificial Sequence
  Description of Artificial Sequence: Synthetic oligonucleotide
acaauggaacugugccaau

SEQ ID NO: 1194289 - RNA, 19 nt, Artificial Sequence
  Description of Artificial Sequence: Synthetic oligonucleotide
ggacuaugagcuucauauc

SEQ ID NO: 1194290 - RNA, 19 nt, Artificial Sequence
  Description of Artificial Sequence: Synthetic oligonucleotide
agggacuguuccagaacag

SEQ ID NO: 1194291 - RNA, 19 nt, Artificial Sequence
  Description of Artificial Sequence: Synthetic oligonucleotide
auaugccuacugccucaug

SEQ ID NO: 1194292 - RNA, 19 nt, Artificial Sequence
  Description of Artificial Sequence: Synthetic oligonucleotide
accucccuaguagaacucu

SEQ ID NO: 1194293 - RNA, 19 nt, Artificial Sequence
  Description of Artificial Sequence: Synthetic oligonucleotide
cagaugugguggagacacc

SEQ ID NO: 1194294 - RNA, 19 nt, Artificial Sequence
  Description of Artificial Sequence: Synthetic oligonucleotide
cauugcgcagaugagauuu

SEQ ID NO: 1194295 - RNA, 19 nt, Artificial Sequence
  Description of Artificial Sequence: Synthetic oligonucleotide
acgcugauagugguccucu

SEQ ID NO: 1194296 - RNA, 19 nt, Artificial Sequence
  Description of Artificial Sequence: Synthetic oligonucleotide
agacguccuugauaccaaa

SEQ ID NO: 1194297 - RNA, 19 nt, Artificial Sequence
  Description of Artificial Sequence: Synthetic oligonucleotide
gucaacugaggcccggugu

SEQ ID NO: 1194298 - RNA, 19 nt, Artificial Sequence
  Description of Artificial Sequence: Synthetic oligonucleotide
gcacaauggaacugugcca

SEQ ID NO: 1194299 - RNA, 19 nt, Artificial Sequence
  Description of Artificial Sequence: Synthetic oligonucleotide
auuaggcuuaaugggccua

SEQ ID NO: 1194300 - RNA, 19 nt, Artificial Sequence
  Description of Artificial Sequence: Synthetic oligonucleotide
ccgcagguguaaauagucc

SEQ ID NO: 1194301 - RNA, 19 nt, Artificial Sequence
  Description of Artificial Sequence: Synthetic oligonucleotide
gugucaaaagucugaggau

SEQ ID NO: 1194302 - RNA, 19 nt, Artificial Sequence
  Description of Artificial Sequence: Synthetic oligonucleotide
gguugguccggcgaacaug

SEQ ID NO: 1194303 - RNA, 19 nt, Artificial Sequence
  Description of Artificial Sequence: Synthetic oligonucleotide
ucgugcccuguugagugga

SEQ ID NO: 1194304 - RNA, 19 nt, Artificial Sequence
  Description of Artificial Sequence: Synthetic oligonucleotide
ccuucacccgguugguccg

SEQ ID NO: 1194305 - RNA, 19 nt, Artificial Sequence
  Description of Artificial Sequence: Synthetic oligonucleotide
aagcacuccuucacccggu

SEQ ID NO: 1194306 - RNA, 19 nt, Artificial Sequence
  Description of Artificial Sequence: Synthetic oligonucleotide
uccuacccugccugaaauu

SEQ ID NO: 1194307 - RNA, 19 nt, Artificial Sequence
  Description of Artificial Sequence: Synthetic oligonucleotide
ccugaaauuguagguggac

SEQ ID NO: 1194308 - RNA, 19 nt, Artificial Sequence
  Description of Artificial Sequence: Synthetic oligonucleotide
guuaggugaguucccucgu

SEQ ID NO: 1194309 - RNA, 19 nt, Artificial Sequence
  Description of Artificial Sequence: Synthetic oligonucleotide
agggucaacugaggcccgg

SEQ ID NO: 1194310 - RNA, 19 nt, Artificial Sequence
  Description of Artificial Sequence: Synthetic oligonucleotide
agaggccgcugcacauugc

SEQ ID NO: 1194311 - RNA, 19 nt, Artificial Sequence
  Description of Artificial Sequence: Synthetic oligonucleotide
uaguccucuuucucacguu

SEQ ID NO: 1194312 - RNA, 19 nt, Artificial Sequence
  Description of Artificial Sequence: Synthetic oligonucleotide
gguaccagacagguggcca

SEQ ID NO: 1194313 - RNA, 19 nt, Artificial Sequence
  Description of Artificial Sequence: Synthetic oligonucleotide
ugcggcacacguuguugua

SEQ ID NO: 1194314 - RNA, 19 nt, Artificial Sequence
  Description of Artificial Sequence: Synthetic oligonucleotide
ggucaacugaggcccggug

SEQ ID NO: 1194315 - RNA, 19 nt, Artificial Sequence
  Description of Artificial Sequence: Synthetic oligonucleotide
guguacggaaacaccaccu

SEQ ID NO: 1194316 - RNA, 19 nt, Artificial Sequence
  Description of Artificial Sequence: Synthetic oligonucleotide
ccaagugcgguaggcagag

SEQ ID NO: 1194317 - RNA, 19 nt, Artificial Sequence
  Description of Artificial Sequence: Synthetic oligonucleotide
cacguuccuuucgcgcacg

SEQ ID NO: 1194318 - RNA, 19 nt, Artificial Sequence
  Description of Artificial Sequence: Synthetic oligonucleotide
ccgacccuucucuggaggg

SEQ ID NO: 1194319 - RNA, 19 nt, Artificial Sequence
  Description of Artificial Sequence: Synthetic oligonucleotide
cauuaggcuuaaugggccu

SEQ ID NO: 1194320 - RNA, 19 nt, Artificial Sequence
  Description of Artificial Sequence: Synthetic oligonucleotide
uccuuucgcgcacgcugau

SEQ ID NO: 1194321 - RNA, 19 nt, Artificial Sequence
  Description of Artificial Sequence: Synthetic oligonucleotide
aggugacggcgggagauga

SEQ ID NO: 1194322 - RNA, 19 nt, Artificial Sequence
  Description of Artificial Sequence: Synthetic oligonucleotide
caccuccuaaaucuaaaau

SEQ ID NO: 1194323 - RNA, 19 nt, Artificial Sequence
  Description of Artificial Sequence: Synthetic oligonucleotide
gaaaucaguagggguuuau

SEQ ID NO: 1194324 - RNA, 19 nt, Artificial Sequence
  Description of Artificial Sequence: Synthetic oligonucleotide
acccugccugaaauuguag

SEQ ID NO: 1194325 - RNA, 19 nt, Artificial Sequence
  Description of Artificial Sequence: Synthetic oligonucleotide
gcgaacauggaaggccuug

SEQ ID NO: 1194326 - RNA, 19 nt, Artificial Sequence
  Description of Artificial Sequence: Synthetic oligonucleotide
gccgcuuaggcugccuccg

SEQ ID NO: 1194327 - RNA, 19 nt, Artificial Sequence
  Description of Artificial Sequence: Synthetic oligonucleotide
uugguccggcgaacaugga

SEQ ID NO: 1194328 - RNA, 19 nt, Artificial Sequence
  Description of Artificial Sequence: Synthetic oligonucleotide
cgcacgcugauaguggucc

SEQ ID NO: 1194329 - RNA, 19 nt, Artificial Sequence
  Description of Artificial Sequence: Synthetic oligonucleotide
acccgguugguccggcgaa

SEQ ID NO: 1194330 - RNA, 19 nt, Artificial Sequence
  Description of Artificial Sequence: Synthetic oligonucleotide
ugcccguguagagguacuc

SEQ ID NO: 1194331 - RNA, 19 nt, Artificial Sequence
  Description of Artificial Sequence: Synthetic oligonucleotide
gagacaccagucggccaac

SEQ ID NO: 1194332 - RNA, 19 nt, Artificial Sequence
  Description of Artificial Sequence: Synthetic oligonucleotide
ugccuccgcagguguaaau

SEQ ID NO: 1194333 - RNA, 19 nt, Artificial Sequence
  Description of Artificial Sequence: Synthetic oligonucleotide
cuacccugccugaaauugu

SEQ ID NO: 1194334 - RNA, 19 nt, Artificial Sequence
  Description of Artificial Sequence: Synthetic oligonucleotide
gagagcgaccaagugcggu

SEQ ID NO: 1194335 - RNA, 19 nt, Artificial Sequence
  Description of Artificial Sequence: Synthetic oligonucleotide
gacgccgagcccgcugcug

SEQ ID NO: 1194336 - RNA, 19 nt, Artificial Sequence
  Description of Artificial Sequence: Synthetic oligonucleotide
gcggcacacguuguuguag

SEQ ID NO: 1194337 - RNA, 19 nt, Artificial Sequence
  Description of Artificial Sequence: Synthetic oligonucleotide
agcacuccuucacccgguu

SEQ ID NO: 1194338 - RNA, 19 nt, Artificial Sequence
  Description of Artificial Sequence: Synthetic oligonucleotide
ggaucagaagacgguggca

SEQ ID NO: 1194339 - RNA, 19 nt, Artificial Sequence
  Description of Artificial Sequence: Synthetic oligonucleotide
gguuuccuacccugccuga

SEQ ID NO: 1194340 - RNA, 19 nt, Artificial Sequence
  Description of Artificial Sequence: Synthetic oligonucleotide
cccggugucaaaagucuga

SEQ ID NO: 1194341 - RNA, 19 nt, Artificial Sequence
  Description of Artificial Sequence: Synthetic oligonucleotide
gaagacgguggcagcauuu

SEQ ID NO: 1194342 - RNA, 19 nt, Artificial Sequence
  Description of Artificial Sequence: Synthetic oligonucleotide
ccucccuaguagaacucuc

SEQ ID NO: 1194343 - RNA, 19 nt, Artificial Sequence
  Description of Artificial Sequence: Synthetic oligonucleotide
cuccgcagguguaaauagu

SEQ ID NO: 1194344 - RNA, 19 nt, Artificial Sequence
  Description of Artificial Sequence: Synthetic oligonucleotide
aggugcccuuugccaagca

SEQ ID NO: 1194345 - RNA, 19 nt, Artificial Sequence
  Description of Artificial Sequence: Synthetic oligonucleotide
ugggcgcugauggucccau

SEQ ID NO: 1194346 - RNA, 19 nt, Artificial Sequence
  Description of Artificial Sequence: Synthetic oligonucleotide
gcucggcaaugugaggaag

SEQ ID NO: 1194347 - RNA, 19 nt, Artificial Sequence
  Description of Artificial Sequence: Synthetic oligonucleotide
cagacagguggccaccggu

SEQ ID NO: 1194348 - RNA, 19 nt, Artificial Sequence
  Description of Artificial Sequence: Synthetic oligonucleotide
gugacggcgggagaugagu

SEQ ID NO: 1194349 - RNA, 19 nt, Artificial Sequence
  Description of Artificial Sequence: Synthetic oligonucleotide
caugggacuucaccuccua

SEQ ID NO: 1194350 - RNA, 19 nt, Artificial Sequence
  Description of Artificial Sequence: Synthetic oligonucleotide
gagaacggcucugcccuua

SEQ ID NO: 1194351 - RNA, 19 nt, Artificial Sequence
  Description of Artificial Sequence: Synthetic oligonucleotide
guugaguggauaggaugau

SEQ ID NO: 1194352 - RNA, 19 nt, Artificial Sequence
  Description of Artificial Sequence: Synthetic oligonucleotide
caacugaggcccgguguca

SEQ ID NO: 1194353 - RNA, 19 nt, Artificial Sequence
  Description of Artificial Sequence: Synthetic oligonucleotide
ggugacggcgggagaugag

SEQ ID NO: 1194354 - RNA, 19 nt, Artificial Sequence
  Description of Artificial Sequence: Synthetic oligonucleotide
ggacggugaugagggacug

SEQ ID NO: 1194355 - RNA, 19 nt, Artificial Sequence
  Description of Artificial Sequence: Synthetic oligonucleotide
cccuguugaguggauagga

SEQ ID NO: 1194356 - RNA, 19 nt, Artificial Sequence
  Description of Artificial Sequence: Synthetic oligonucleotide
accucggggcagaugguuu

SEQ ID NO: 1194357 - RNA, 19 nt, Artificial Sequence
  Description of Artificial Sequence: Synthetic oligonucleotide
ggccuagccaagggucucc

SEQ ID NO: 1194358 - RNA, 19 nt, Artificial Sequence
  Description of Artificial Sequence: Synthetic oligonucleotide
ggggcagaaaugcuugauu

SEQ ID NO: 1194359 - RNA, 19 nt, Artificial Sequence
  Description of Artificial Sequence: Synthetic oligonucleotide
ccaccucccuaguagaacu

SEQ ID NO: 1194360 - RNA, 19 nt, Artificial Sequence
  Description of Artificial Sequence: Synthetic oligonucleotide
ggaggacggggacgccgag

SEQ ID NO: 1194361 - RNA, 19 nt, Artificial Sequence
  Description of Artificial Sequence: Synthetic oligonucleotide
guagggguuuaugggcgcu

SEQ ID NO: 1194362 - RNA, 19 nt, Artificial Sequence
  Description of Artificial Sequence: Synthetic oligonucleotide
gcccugguuaggugaguuc

SEQ ID NO: 1194363 - RNA, 19 nt, Artificial Sequence
  Description of Artificial Sequence: Synthetic oligonucleotide
gcauagcgcagguccagcu

SEQ ID NO: 1194364 - RNA, 19 nt, Artificial Sequence
  Description of Artificial Sequence: Synthetic oligonucleotide
gcccggugucaaaagucug

SEQ ID NO: 1194365 - RNA, 19 nt, Artificial Sequence
  Description of Artificial Sequence: Synthetic oligonucleotide
cagccccgucacuguguac

SEQ ID NO: 1194366 - RNA, 19 nt, Artificial Sequence
  Description of Artificial Sequence: Synthetic oligonucleotide
ggcccggugucaaaagucu

SEQ ID NO: 1194367 - RNA, 19 nt, Artificial Sequence
  Description of Artificial Sequence: Synthetic oligonucleotide
gucggccaacugauacgca

SEQ ID NO: 1194368 - RNA, 19 nt, Artificial Sequence
  Description of Artificial Sequence: Synthetic oligonucleotide
gccuccgcagguguaaaua

SEQ ID NO: 1194369 - RNA, 19 nt, Artificial Sequence
  Description of Artificial Sequence: Synthetic oligonucleotide
gcagcccaccagaaugaca

SEQ ID NO: 1194370 - RNA, 19 nt, Artificial Sequence
  Description of Artificial Sequence: Synthetic oligonucleotide
ggacggggacgccgagccc

SEQ ID NO: 1194371 - RNA, 19 nt, Artificial Sequence
  Description of Artificial Sequence: Synthetic oligonucleotide
accagucggccaacugaua

SEQ ID NO: 1194372 - RNA, 19 nt, Artificial Sequence
  Description of Artificial Sequence: Synthetic oligonucleotide
cggccaacugauacgcaca

SEQ ID NO: 1194373 - RNA, 19 nt, Artificial Sequence
  Description of Artificial Sequence: Synthetic oligonucleotide
gcccuguuaacggcuucca

SEQ ID NO: 1194374 - RNA, 19 nt, Artificial Sequence
  Description of Artificial Sequence: Synthetic oligonucleotide
ggcuaccaucauacguaga

SEQ ID NO: 1194375 - RNA, 19 nt, Artificial Sequence
  Description of Artificial Sequence: Synthetic oligonucleotide
ccgcuuaggcugccuccgc

SEQ ID NO: 1194376 - RNA, 19 nt, Artificial Sequence
  Description of Artificial Sequence: Synthetic oligonucleotide
acaugcccguguagaggua

SEQ ID NO: 1194377 - RNA, 19 nt, Artificial Sequence
  Description of Artificial Sequence: Synthetic oligonucleotide
gggccuagccaagggucuc

SEQ ID NO: 1194378 - RNA, 19 nt, Artificial Sequence
  Description of Artificial Sequence: Synthetic oligonucleotide
caucgauguccaccaucau

SEQ ID NO: 1194379 - RNA, 19 nt, Artificial Sequence
  Description of Artificial Sequence: Synthetic oligonucleotide
ccacacuggucucguagua

SEQ ID NO: 1194380 - RNA, 19 nt, Artificial Sequence
  Description of Artificial Sequence: Synthetic oligonucleotide
cugcccuuagggcccuggu

SEQ ID NO: 1194381 - RNA, 19 nt, Artificial Sequence
  Description of Artificial Sequence: Synthetic oligonucleotide
cuaggacuaugagcuucau

SEQ ID NO: 1194382 - RNA, 19 nt, Artificial Sequence
  Description of Artificial Sequence: Synthetic oligonucleotide
gucgguuggcuaggacuau

SEQ ID NO: 1194383 - RNA, 19 nt, Artificial Sequence
  Description of Artificial Sequence: Synthetic oligonucleotide
cgcuuaggcugccuccgca

SEQ ID NO: 1194384 - RNA, 19 nt, Artificial Sequence
  Description of Artificial Sequence: Synthetic oligonucleotide
ccgguugguccggcgaaca

SEQ ID NO: 1194385 - RNA, 19 nt, Artificial Sequence
  Description of Artificial Sequence: Synthetic oligonucleotide
gcgguaggcagagucgguu

SEQ ID NO: 1194386 - RNA, 19 nt, Artificial Sequence
  Description of Artificial Sequence: Synthetic oligonucleotide
cggcacacguuguuguagu

SEQ ID NO: 1194387 - RNA, 19 nt, Artificial Sequence
  Description of Artificial Sequence: Synthetic oligonucleotide
ggcccugguuaggugaguu

SEQ ID NO: 1194388 - RNA, 19 nt, Artificial Sequence
  Description of Artificial Sequence: Synthetic oligonucleotide
cgccgagcccgcugcugag

SEQ ID NO: 1194389 - RNA, 19 nt, Artificial Sequence
  Description of Artificial Sequence: Synthetic oligonucleotide
cuacugccucaugggacuu

SEQ ID NO: 1194390 - RNA, 19 nt, Artificial Sequence
  Description of Artificial Sequence: Synthetic oligonucleotide
caagugcgguaggcagagu

SEQ ID NO: 1194391 - RNA, 19 nt, Artificial Sequence
  Description of Artificial Sequence: Synthetic oligonucleotide
ccuuucgcgcacgcugaua

SEQ ID NO: 1194392 - RNA, 19 nt, Artificial Sequence
  Description of Artificial Sequence: Synthetic oligonucleotide
cgcgcacgcugauaguggu

SEQ ID NO: 1194393 - RNA, 19 nt, Artificial Sequence
  Description of Artificial Sequence: Synthetic oligonucleotide
ggaucucauuaggcuuaau

SEQ ID NO: 1194394 - RNA, 19 nt, Artificial Sequence
  Description of Artificial Sequence: Synthetic oligonucleotide
cccucgugcccuguugagu

SEQ ID NO: 1194395 - RNA, 19 nt, Artificial Sequence
  Description of Artificial Sequence: Synthetic oligonucleotide
cggggcagaugguuuccua

SEQ ID NO: 1194396 - RNA, 19 nt, Artificial Sequence
  Description of Artificial Sequence: Synthetic oligonucleotide
ggcgaacauggaaggccuu

SEQ ID NO: 1194397 - RNA, 19 nt, Artificial Sequence
  Description of Artificial Sequence: Synthetic oligonucleotide
cguuccuuucgcgcacgcu

SEQ ID NO: 1194398 - RNA, 19 nt, Artificial Sequence
  Description of Artificial Sequence: Synthetic oligonucleotide
ccgagccacauuggcuggu

SEQ ID NO: 1194399 - RNA, 19 nt, Artificial Sequence
  Description of Artificial Sequence: Synthetic oligonucleotide
cgguugguccggcgaacau

SEQ ID NO: 1194400 - RNA, 19 nt, Artificial Sequence
  Description of Artificial Sequence: Synthetic oligonucleotide
cgcugauagugguccucuu

SEQ ID NO: 1194401 - RNA, 19 nt, Artificial Sequence
  Description of Artificial Sequence: Synthetic oligonucleotide
ugaacaguagcauagaggg

SEQ ID NO: 1194402 - RNA, 19 nt, Artificial Sequence
  Description of Artificial Sequence: Synthetic oligonucleotide
guuacuuugaagcauaggg

SEQ ID NO: 1194403 - RNA, 19 nt, Artificial Sequence
  Description of Artificial Sequence: Synthetic oligonucleotide
uguaggaagaauaaggugu

SEQ ID NO: 1194404 - RNA, 19 nt, Artificial Sequence
  Description of Artificial Sequence: Synthetic oligonucleotide
uuaauggggaagaacaggg

SEQ ID NO: 1194405 - RNA, 19 nt, Artificial Sequence
  Description of Artificial Sequence: Synthetic oligonucleotide
aagaauaagguguggcagc

SEQ ID NO: 1194406 - RNA, 19 nt, Artificial Sequence
  Description of Artificial Sequence: Synthetic oligonucleotide
aaaauaaaagaucuuccgu

SEQ ID NO: 1194407 - RNA, 19 nt, Artificial Sequence
  Description of Artificial Sequence: Synthetic oligonucleotide
aauaagguguggcagccac

SEQ ID NO: 1194408 - RNA, 19 nt, Artificial Sequence
  Description of Artificial Sequence: Synthetic oligonucleotide
auauaugagauguacuggg

SEQ ID NO: 1194409 - RNA, 19 nt, Artificial Sequence
  Description of Artificial Sequence: Synthetic oligonucleotide
uuacuuugaagcauagggg

SEQ ID NO: 1194410 - RNA, 19 nt, Artificial Sequence
  Description of Artificial Sequence: Synthetic oligonucleotide
agaaaauaaaagaucuucc

SEQ ID NO: 1194411 - RNA, 19 nt, Artificial Sequence
  Description of Artificial Sequence: Synthetic oligonucleotide
aauuggauacgggauaugg

SEQ ID NO: 1194412 - RNA, 19 nt, Artificial Sequence
  Description of Artificial Sequence: Synthetic oligonucleotide
guauauaugagauguacug

SEQ ID NO: 1194413 - RNA, 19 nt, Artificial Sequence
  Description of Artificial Sequence: Synthetic oligonucleotide
ucauggaggucucaggucg

SEQ ID NO: 1194414 - RNA, 19 nt, Artificial Sequence
  Description of Artificial Sequence: Synthetic oligonucleotide
ugagguauauaugagaugu

SEQ ID NO: 1194415 - RNA, 19 nt, Artificial Sequence
  Description of Artificial Sequence: Synthetic oligonucleotide
uguagcaugguguggauag

SEQ ID NO: 1194416 - RNA, 19 nt, Artificial Sequence
  Description of Artificial Sequence: Synthetic oligonucleotide
uacuuugaagcauaggggc

SEQ ID NO: 1194417 - RNA, 19 nt, Artificial Sequence
  Description of Artificial Sequence: Synthetic oligonucleotide
ugugacuccaguuuggaca

SEQ ID NO: 1194418 - RNA, 19 nt, Artificial Sequence
  Description of Artificial Sequence: Synthetic oligonucleotide
gauauggauacaucugagg

SEQ ID NO: 1194419 - RNA, 19 nt, Artificial Sequence
  Description of Artificial Sequence: Synthetic oligonucleotide
aggacacucaaguuaaugg

SEQ ID NO: 1194420 - RNA, 19 nt, Artificial Sequence
  Description of Artificial Sequence: Synthetic oligonucleotide
agacauagaucacucuucc

SEQ ID NO: 1194421 - RNA, 19 nt, Artificial Sequence
  Description of Artificial Sequence: Synthetic oligonucleotide
aaguuaauggggaagaaca

SEQ ID NO: 1194422 - RNA, 19 nt, Artificial Sequence
  Description of Artificial Sequence: Synthetic oligonucleotide
agaucuuccgucuccagcg

SEQ ID NO: 1194423 - RNA, 19 nt, Artificial Sequence
  Description of Artificial Sequence: Synthetic oligonucleotide
gagguuauaaauaauagaa

SEQ ID NO: 1194424 - RNA, 19 nt, Artificial Sequence
  Description of Artificial Sequence: Synthetic oligonucleotide
aagugagccuuuugcaccc

SEQ ID NO: 1194425 - RNA, 19 nt, Artificial Sequence
  Description of Artificial Sequence: Synthetic oligonucleotide
uauaugagauguacugggg

SEQ ID NO: 1194426 - RNA, 19 nt, Artificial Sequence
  Description of Artificial Sequence: Synthetic oligonucleotide
auggauacaucugaggcgc

SEQ ID NO: 1194427 - RNA, 19 nt, Artificial Sequence
  Description of Artificial Sequence: Synthetic oligonucleotide
ucguggguuacuuugaagc

SEQ ID NO: 1194428 - RNA, 19 nt, Artificial Sequence
  Description of Artificial Sequence: Synthetic oligonucleotide
agcagcaucaccuggggcg

SEQ ID NO: 1194429 - RNA, 19 nt, Artificial Sequence
  Description of Artificial Sequence: Synthetic oligonucleotide
ucugagguauauaugagau

SEQ ID NO: 1194430 - RNA, 19 nt, Artificial Sequence
  Description of Artificial Sequence: Synthetic oligonucleotide
uguugagugaguucggggc

SEQ ID NO: 1194431 - RNA, 19 nt, Artificial Sequence
  Description of Artificial Sequence: Synthetic oligonucleotide
aagcauaggggcaaacacc

SEQ ID NO: 1194432 - RNA, 19 nt, Artificial Sequence
  Description of Artificial Sequence: Synthetic oligonucleotide
gaagaauaagguguggcag

SEQ ID NO: 1194433 - RNA, 19 nt, Artificial Sequence
  Description of Artificial Sequence: Synthetic oligonucleotide
guaacaugggccauguugg

SEQ ID NO: 1194434 - RNA, 19 nt, Artificial Sequence
  Description of Artificial Sequence: Synthetic oligonucleotide
auggauggcauacacagca

SEQ ID NO: 1194435 - RNA, 19 nt, Artificial Sequence
  Description of Artificial Sequence: Synthetic oligonucleotide
guauggaagguguugagug

SEQ ID NO: 1194436 - RNA, 19 nt, Artificial Sequence
  Description of Artificial Sequence: Synthetic oligonucleotide
agguauauaugagauguac

SEQ ID NO: 1194437 - RNA, 19 nt, Artificial Sequence
  Description of Artificial Sequence: Synthetic oligonucleotide
aggacuaggggccgcaugc

SEQ ID NO: 1194438 - RNA, 19 nt, Artificial Sequence
  Description of Artificial Sequence: Synthetic oligonucleotide
gaagugagccuuuugcacc

SEQ ID NO: 1194439 - RNA, 19 nt, Artificial Sequence
  Description of Artificial Sequence: Synthetic oligonucleotide
auagaucacucuucccucc

SEQ ID NO: 1194440 - RNA, 19 nt, Artificial Sequence
  Description of Artificial Sequence: Synthetic oligonucleotide
uguuagggccccuggaugg

SEQ ID NO: 1194441 - RNA, 19 nt, Artificial Sequence
  Description of Artificial Sequence: Synthetic oligonucleotide
auacacagcagcuggcugg

SEQ ID NO: 1194442 - RNA, 19 nt, Artificial Sequence
  Description of Artificial Sequence: Synthetic oligonucleotide
gaagcauaggggcaaacac

SEQ ID NO: 1194443 - RNA, 19 nt, Artificial Sequence
  Description of Artificial Sequence: Synthetic oligonucleotide
uaugagauguacuggggac

SEQ ID NO: 1194444 - RNA, 19 nt, Artificial Sequence
  Description of Artificial Sequence: Synthetic oligonucleotide
aggguagugugccaugggc

SEQ ID NO: 1194445 - RNA, 19 nt, Artificial Sequence
  Description of Artificial Sequence: Synthetic oligonucleotide
gguaacaugggccauguug

SEQ ID NO: 1194446 - RNA, 19 nt, Artificial Sequence
  Description of Artificial Sequence: Synthetic oligonucleotide
agaauaagguguggcagcc

SEQ ID NO: 1194447 - RNA, 19 nt, Artificial Sequence
  Description of Artificial Sequence: Synthetic oligonucleotide
acauucguggguuacuuug

SEQ ID NO: 1194448 - RNA, 19 nt, Artificial Sequence
  Description of Artificial Sequence: Synthetic oligonucleotide
aagaugaaacaauggccug

SEQ ID NO: 1194449 - RNA, 19 nt, Artificial Sequence
  Description of Artificial Sequence: Synthetic oligonucleotide
uuggauacgggauauggau

SEQ ID NO: 1194450 - RNA, 19 nt, Artificial Sequence
  Description of Artificial Sequence: Synthetic oligonucleotide
gaugaaacaauggccuggg

SEQ ID NO: 1194451 - RNA, 19 nt, Artificial Sequence
  Description of Artificial Sequence: Synthetic oligonucleotide
guuaauggggaagaacagg

SEQ ID NO: 1194452 - RNA, 19 nt, Artificial Sequence
  Description of Artificial Sequence: Synthetic oligonucleotide
ucaucggaggggcugaggc

SEQ ID NO: 1194453 - RNA, 19 nt, Artificial Sequence
  Description of Artificial Sequence: Synthetic oligonucleotide
uagcauagagggcuugggg

SEQ ID NO: 1194454 - RNA, 19 nt, Artificial Sequence
  Description of Artificial Sequence: Synthetic oligonucleotide
auguaggaagaauaaggug

SEQ ID NO: 1194455 - RNA, 19 nt, Artificial Sequence
  Description of Artificial Sequence: Synthetic oligonucleotide
agcauaggggcaaacaccg

SEQ ID NO: 1194456 - RNA, 19 nt, Artificial Sequence
  Description of Artificial Sequence: Synthetic oligonucleotide
ggacacucaaguuaauggg

SEQ ID NO: 1194457 - RNA, 19 nt, Artificial Sequence
  Description of Artificial Sequence: Synthetic oligonucleotide
agugcaggcaccccacucg

SEQ ID NO: 1194458 - RNA, 19 nt, Artificial Sequence
  Description of Artificial Sequence: Synthetic oligonucleotide
auaugagauguacugggga

SEQ ID NO: 1194459 - RNA, 19 nt, Artificial Sequence
  Description of Artificial Sequence: Synthetic oligonucleotide
gugaacaguagcauagagg

SEQ ID NO: 1194460 - RNA, 19 nt, Artificial Sequence
  Description of Artificial Sequence: Synthetic oligonucleotide
uguuggugaagccgugggg

SEQ ID NO: 1194461 - RNA, 19 nt, Artificial Sequence
  Description of Artificial Sequence: Synthetic oligonucleotide
uucccgaugucaacauucg

SEQ ID NO: 1194462 - RNA, 19 nt, Artificial Sequence
  Description of Artificial Sequence: Synthetic oligonucleotide
agaugaaacaauggccugg

SEQ ID NO: 1194463 - RNA, 19 nt, Artificial Sequence
  Description of Artificial Sequence: Synthetic oligonucleotide
gacuguagagcccacucug

SEQ ID NO: 1194464 - RNA, 19 nt, Artificial Sequence
  Description of Artificial Sequence: Synthetic oligonucleotide
acgggauauggauacaucu

SEQ ID NO: 1194465 - RNA, 19 nt, Artificial Sequence
  Description of Artificial Sequence: Synthetic oligonucleotide
aguaaaaguccuugaggca

SEQ ID NO: 1194466 - RNA, 19 nt, Artificial Sequence
  Description of Artificial Sequence: Synthetic oligonucleotide
ucaaaguggacuucuuuua

SEQ ID NO: 1194467 - RNA, 19 nt, Artificial Sequence
  Description of Artificial Sequence: Synthetic oligonucleotide
gaugggaggacaagacugg

SEQ ID NO: 1194468 - RNA, 19 nt, Artificial Sequence
  Description of Artificial Sequence: Synthetic oligonucleotide
acaagacugggugggaccc

SEQ ID NO: 1194469 - RNA, 19 nt, Artificial Sequence
  Description of Artificial Sequence: Synthetic oligonucleotide
acaugggccauguugguga

SEQ ID NO: 1194470 - RNA, 19 nt, Artificial Sequence
  Description of Artificial Sequence: Synthetic oligonucleotide
ugagagugcaggcacccca

SEQ ID NO: 1194471 - RNA, 19 nt, Artificial Sequence
  Description of Artificial Sequence: Synthetic oligonucleotide
auacaucugaggcgccugc

SEQ ID NO: 1194472 - RNA, 19 nt, Artificial Sequence
  Description of Artificial Sequence: Synthetic oligonucleotide
aaggcggcgugccuguuag

SEQ ID NO: 1194473 - RNA, 19 nt, Artificial Sequence
  Description of Artificial Sequence: Synthetic oligonucleotide
gaggaguggaagaugaaac

SEQ ID NO: 1194474 - RNA, 19 nt, Artificial Sequence
  Description of Artificial Sequence: Synthetic oligonucleotide
cugucggucucucacacag

SEQ ID NO: 1194475 - RNA, 19 nt, Artificial Sequence
  Description of Artificial Sequence: Synthetic oligonucleotide
gacugguccgagcugcugg

SEQ ID NO: 1194476 - RNA, 19 nt, Artificial Sequence
  Description of Artificial Sequence: Synthetic oligonucleotide
agcagcagcagcagcagcc

SEQ ID NO: 1194477 - RNA, 19 nt, Artificial Sequence
  Description of Artificial Sequence: Synthetic oligonucleotide
aaaagaucuuccgucucca

SEQ ID NO: 1194478 - RNA, 19 nt, Artificial Sequence
  Description of Artificial Sequence: Synthetic oligonucleotide
uggaagcugagagugcagg

SEQ ID NO: 1194479 - RNA, 19 nt, Artificial Sequence
  Description of Artificial Sequence: Synthetic oligonucleotide
ucccauucaaggugcuugg

SEQ ID NO: 1194480 - RNA, 19 nt, Artificial Sequence
  Description of Artificial Sequence: Synthetic oligonucleotide
aggacaaucuucaguuccc

SEQ ID NO: 1194481 - RNA, 19 nt, Artificial Sequence
  Description of Artificial Sequence: Synthetic oligonucleotide
aagucugagguuauaaaua

SEQ ID NO: 1194482 - RNA, 19 nt, Artificial Sequence
  Description of Artificial Sequence: Synthetic oligonucleotide
gaagagacauagaucacuc

SEQ ID NO: 1194483 - RNA, 19 nt, Artificial Sequence
  Description of Artificial Sequence: Synthetic oligonucleotide
ugaagcauaggggcaaaca

SEQ ID NO: 1194484 - RNA, 19 nt, Artificial Sequence
  Description of Artificial Sequence: Synthetic oligonucleotide
gauuguggcugacucccag

SEQ ID NO: 1194485 - RNA, 19 nt, Artificial Sequence
  Description of Artificial Sequence: Synthetic oligonucleotide
uggguuguaggggauguag

SEQ ID NO: 1194486 - RNA, 19 nt, Artificial Sequence
  Description of Artificial Sequence: Synthetic oligonucleotide
acacaggacacucaaguua

SEQ ID NO: 1194487 - RNA, 19 nt, Artificial Sequence
  Description of Artificial Sequence: Synthetic oligonucleotide
uaagguguggcagccacca

SEQ ID NO: 1194488 - RNA, 19 nt, Artificial Sequence
  Description of Artificial Sequence: Synthetic oligonucleotide
ugagccuuuugcaccccgg

SEQ ID NO: 1194489 - RNA, 19 nt, Artificial Sequence
  Description of Artificial Sequence: Synthetic oligonucleotide
ucaggucgcggccaggaca

SEQ ID NO: 1194490 - RNA, 19 nt, Artificial Sequence
  Description of Artificial Sequence: Synthetic oligonucleotide
guuggugaagccguggggc

SEQ ID NO: 1194491 - RNA, 19 nt, Artificial Sequence
  Description of Artificial Sequence: Synthetic oligonucleotide
gauguaggaagaauaaggu

SEQ ID NO: 1194492 - RNA, 19 nt, Artificial Sequence
  Description of Artificial Sequence: Synthetic oligonucleotide
guugagugaguucggggcc

SEQ ID NO: 1194493 - RNA, 19 nt, Artificial Sequence
  Description of Artificial Sequence: Synthetic oligonucleotide
uguggauaggacuggugaa

SEQ ID NO: 1194494 - RNA, 19 nt, Artificial Sequence
  Description of Artificial Sequence: Synthetic oligonucleotide
ccgaugucaacauucgugg

SEQ ID NO: 1194495 - RNA, 19 nt, Artificial Sequence
  Description of Artificial Sequence: Synthetic oligonucleotide
gucccggugguagagaagg

SEQ ID NO: 1194496 - RNA, 19 nt, Artificial Sequence
  Description of Artificial Sequence: Synthetic oligonucleotide
gcaggaauuccccagcucc

SEQ ID NO: 1194497 - RNA, 19 nt, Artificial Sequence
  Description of Artificial Sequence: Synthetic oligonucleotide
guguugagugaguucgggg

SEQ ID NO: 1194498 - RNA, 19 nt, Artificial Sequence
  Description of Artificial Sequence: Synthetic oligonucleotide
gacauagaucacucuuccc

SEQ ID NO: 1194499 - RNA, 19 nt, Artificial Sequence
  Description of Artificial Sequence: Synthetic oligonucleotide
caggcaccgaauuggauac

SEQ ID NO: 1194500 - RNA, 19 nt, Artificial Sequence
  Description of Artificial Sequence: Synthetic oligonucleotide
ugagauguacuggggacug

SEQ ID NO: 1194501 - RNA, 19 nt, Artificial Sequence
  Description of Artificial Sequence: Synthetic oligonucleotide
aguuaauggggaagaacag

SEQ ID NO: 1194502 - RNA, 19 nt, Artificial Sequence
  Description of Artificial Sequence: Synthetic oligonucleotide
uuugcaccccgguacuugc

SEQ ID NO: 1194503 - RNA, 19 nt, Artificial Sequence
  Description of Artificial Sequence: Synthetic oligonucleotide
ggauacgggauauggauac

SEQ ID NO: 1194504 - RNA, 19 nt, Artificial Sequence
  Description of Artificial Sequence: Synthetic oligonucleotide
aguagcauagagggcuugg

SEQ ID NO: 1194505 - RNA, 19 nt, Artificial Sequence
  Description of Artificial Sequence: Synthetic oligonucleotide
uucguggguuacuuugaag

SEQ ID NO: 1194506 - RNA, 19 nt, Artificial Sequence
  Description of Artificial Sequence: Synthetic oligonucleotide
caaguuaauggggaagaac

SEQ ID NO: 1194507 - RNA, 19 nt, Artificial Sequence
  Description of Artificial Sequence: Synthetic oligonucleotide
uggguuacuuugaagcaua

SEQ ID NO: 1194508 - RNA, 19 nt, Artificial Sequence
  Description of Artificial Sequence: Synthetic oligonucleotide
uaaaaguccuugaggcauc

SEQ ID NO: 1194509 - RNA, 19 nt, Artificial Sequence
  Description of Artificial Sequence: Synthetic oligonucleotide
ugaacaggacuaggggccg

SEQ ID NO: 1194510 - RNA, 19 nt, Artificial Sequence
  Description of Artificial Sequence: Synthetic oligonucleotide
ggggaagugagccuuuugc

SEQ ID NO: 1194511 - RNA, 19 nt, Artificial Sequence
  Description of Artificial Sequence: Synthetic oligonucleotide
aggaauuccccagcucccc

SEQ ID NO: 1194512 - RNA, 19 nt, Artificial Sequence
  Description of Artificial Sequence: Synthetic oligonucleotide
cugagguauauaugagaug

SEQ ID NO: 1194513 - RNA, 19 nt, Artificial Sequence
  Description of Artificial Sequence: Synthetic oligonucleotide
ggaagaauaagguguggca

SEQ ID NO: 1194514 - RNA, 19 nt, Artificial Sequence
  Description of Artificial Sequence: Synthetic oligonucleotide
gaucuuccgucuccagcgg

SEQ ID NO: 1194515 - RNA, 19 nt, Artificial Sequence
  Description of Artificial Sequence: Synthetic oligonucleotide
uguuggucugagcgcugcg

SEQ ID NO: 1194516 - RNA, 19 nt, Artificial Sequence
  Description of Artificial Sequence: Synthetic oligonucleotide
ggugaacaguagcauagag

SEQ ID NO: 1194517 - RNA, 19 nt, Artificial Sequence
  Description of Artificial Sequence: Synthetic oligonucleotide
uggccauggagcuguguag

SEQ ID NO: 1194518 - RNA, 19 nt, Artificial Sequence
  Description of Artificial Sequence: Synthetic oligonucleotide
uggauacgggauauggaua

SEQ ID NO: 1194519 - RNA, 19 nt, Artificial Sequence
  Description of Artificial Sequence: Synthetic oligonucleotide
ugguagagaaggcggcgug

SEQ ID NO: 1194520 - RNA, 19 nt, Artificial Sequence
  Description of Artificial Sequence: Synthetic oligonucleotide
agguuauaaauaauagaaa

SEQ ID NO: 1194521 - RNA, 19 nt, Artificial Sequence
  Description of Artificial Sequence: Synthetic oligonucleotide
ggugaggugccccagggug

SEQ ID NO: 1194522 - RNA, 19 nt, Artificial Sequence
  Description of Artificial Sequence: Synthetic oligonucleotide
cacucauggaggucucagg

SEQ ID NO: 1194523 - RNA, 19 nt, Artificial Sequence
  Description of Artificial Sequence: Synthetic oligonucleotide
caguaggcgugguagccgg

SEQ ID NO: 1194524 - RNA, 19 nt, Artificial Sequence
  Description of Artificial Sequence: Synthetic oligonucleotide
acuggugaacaguagcaua

SEQ ID NO: 1194525 - RNA, 19 nt, Artificial Sequence
  Description of Artificial Sequence: Synthetic oligonucleotide
gauacaucugaggcgccug

SEQ ID NO: 1194526 - RNA, 19 nt, Artificial Sequence
  Description of Artificial Sequence: Synthetic oligonucleotide
guagcauagagggcuuggg

SEQ ID NO: 1194527 - RNA, 19 nt, Artificial Sequence
  Description of Artificial Sequence: Synthetic oligonucleotide
gguacugaggaguggaaga

SEQ ID NO: 1194528 - RNA, 19 nt, Artificial Sequence
  Description of Artificial Sequence: Synthetic oligonucleotide
uacgggauauggauacauc

SEQ ID NO: 1194529 - RNA, 19 nt, Artificial Sequence
  Description of Artificial Sequence: Synthetic oligonucleotide
aggcgugguagccggcugc

SEQ ID NO: 1194530 - RNA, 19 nt, Artificial Sequence
  Description of Artificial Sequence: Synthetic oligonucleotide
uucaaggugcuuggcagga

SEQ ID NO: 1194531 - RNA, 19 nt, Artificial Sequence
  Description of Artificial Sequence: Synthetic oligonucleotide
cugcccacuucaaggaccc

SEQ ID NO: 1194532 - RNA, 19 nt, Artificial Sequence
  Description of Artificial Sequence: Synthetic oligonucleotide
gauguagggguagggugag

SEQ ID NO: 1194533 - RNA, 19 nt, Artificial Sequence
  Description of Artificial Sequence: Synthetic oligonucleotide
ugcaccccgguacuugccc

SEQ ID NO: 1194534 - RNA, 19 nt, Artificial Sequence
  Description of Artificial Sequence: Synthetic oligonucleotide
ugucugucggucucucaca

SEQ ID NO: 1194535 - RNA, 19 nt, Artificial Sequence
  Description of Artificial Sequence: Synthetic oligonucleotide
gcugucagcaccgguaugg

SEQ ID NO: 1194536 - RNA, 19 nt, Artificial Sequence
  Description of Artificial Sequence: Synthetic oligonucleotide
ugucggucucucacacagg

SEQ ID NO: 1194537 - RNA, 19 nt, Artificial Sequence
  Description of Artificial Sequence: Synthetic oligonucleotide
auaagguguggcagccacc

SEQ ID NO: 1194538 - RNA, 19 nt, Artificial Sequence
  Description of Artificial Sequence: Synthetic oligonucleotide
augaaacaauggccugggg

SEQ ID NO: 1194539 - RNA, 19 nt, Artificial Sequence
  Description of Artificial Sequence: Synthetic oligonucleotide
gauucugcuguggcugucc

SEQ ID NO: 1194540 - RNA, 19 nt, Artificial Sequence
  Description of Artificial Sequence: Synthetic oligonucleotide
cccuggaugguacagauuc

SEQ ID NO: 1194541 - RNA, 19 nt, Artificial Sequence
  Description of Artificial Sequence: Synthetic oligonucleotide
gcaaacaccggcugugaag

SEQ ID NO: 1194542 - RNA, 19 nt, Artificial Sequence
  Description of Artificial Sequence: Synthetic oligonucleotide
ugccuguuagggccccugg

SEQ ID NO: 1194543 - RNA, 19 nt, Artificial Sequence
  Description of Artificial Sequence: Synthetic oligonucleotide
cugacucccaguaggcgug

SEQ ID NO: 1194544 - RNA, 19 nt, Artificial Sequence
  Description of Artificial Sequence: Synthetic oligonucleotide
agcaugguguggauaggac

SEQ ID NO: 1194545 - RNA, 19 nt, Artificial Sequence
  Description of Artificial Sequence: Synthetic oligonucleotide
aacauucguggguuacuuu

SEQ ID NO: 1194546 - RNA, 19 nt, Artificial Sequence
  Description of Artificial Sequence: Synthetic oligonucleotide
uggcugacucccaguaggc

SEQ ID NO: 1194547 - RNA, 19 nt, Artificial Sequence
  Description of Artificial Sequence: Synthetic oligonucleotide
ugggaggacaagacugggu

SEQ ID NO: 1194548 - RNA, 19 nt, Artificial Sequence
  Description of Artificial Sequence: Synthetic oligonucleotide
uguccgauguagggguagg

SEQ ID NO: 1194549 - RNA, 19 nt, Artificial Sequence
  Description of Artificial Sequence: Synthetic oligonucleotide
guuggucugagcgcugcgg

SEQ ID NO: 1194550 - RNA, 19 nt, Artificial Sequence
  Description of Artificial Sequence: Synthetic oligonucleotide
acacucaaguuaaugggga

SEQ ID NO: 1194551 - RNA, 19 nt, Artificial Sequence
  Description of Artificial Sequence: Synthetic oligonucleotide
caccgaauuggauacggga

SEQ ID NO: 1194552 - RNA, 19 nt, Artificial Sequence
  Description of Artificial Sequence: Synthetic oligonucleotide
aguuuggacaugggccugg

SEQ ID NO: 1194553 - RNA, 19 nt, Artificial Sequence
  Description of Artificial Sequence: Synthetic oligonucleotide
ucucucacacaggacacuc

SEQ ID NO: 1194554 - RNA, 19 nt, Artificial Sequence
  Description of Artificial Sequence: Synthetic oligonucleotide
guggaucugagguauauau

SEQ ID NO: 1194555 - RNA, 19 nt, Artificial Sequence
  Description of Artificial Sequence: Synthetic oligonucleotide
uagcaugguguggauagga

SEQ ID NO: 1194556 - RNA, 19 nt, Artificial Sequence
  Description of Artificial Sequence: Synthetic oligonucleotide
uugagugaguucggggccc

SEQ ID NO: 1194557 - RNA, 19 nt, Artificial Sequence
  Description of Artificial Sequence: Synthetic oligonucleotide
cuguuagggccccuggaug

SEQ ID NO: 1194558 - RNA, 19 nt, Artificial Sequence
  Description of Artificial Sequence: Synthetic oligonucleotide
auggcauacacagcagcug

SEQ ID NO: 1194559 - RNA, 19 nt, Artificial Sequence
  Description of Artificial Sequence: Synthetic oligonucleotide
auuggauacgggauaugga

SEQ ID NO: 1194560 - RNA, 19 nt, Artificial Sequence
  Description of Artificial Sequence: Synthetic oligonucleotide
caggggcagagcaggaacc

SEQ ID NO: 1194561 - RNA, 19 nt, Artificial Sequence
  Description of Artificial Sequence: Synthetic oligonucleotide
gaugagaggaugggaggac

SEQ ID NO: 1194562 - RNA, 19 nt, Artificial Sequence
  Description of Artificial Sequence: Synthetic oligonucleotide
augagauguacuggggacu

SEQ ID NO: 1194563 - RNA, 19 nt, Artificial Sequence
  Description of Artificial Sequence: Synthetic oligonucleotide
aucggaggggcugaggcug

SEQ ID NO: 1194564 - RNA, 19 nt, Artificial Sequence
  Description of Artificial Sequence: Synthetic oligonucleotide
gaaggucccggugguagag

SEQ ID NO: 1194565 - RNA, 19 nt, Artificial Sequence
  Description of Artificial Sequence: Synthetic oligonucleotide
guaaaaguccuugaggcau

SEQ ID NO: 1194566 - RNA, 19 nt, Artificial Sequence
  Description of Artificial Sequence: Synthetic oligonucleotide
guagagaaggcggcgugcc

SEQ ID NO: 1194567 - RNA, 19 nt, Artificial Sequence
  Description of Artificial Sequence: Synthetic oligonucleotide
cucauggaggucucagguc

SEQ ID NO: 1194568 - RNA, 19 nt, Artificial Sequence
  Description of Artificial Sequence: Synthetic oligonucleotide
gguuguaggggauguagga

SEQ ID NO: 1194569 - RNA, 19 nt, Artificial Sequence
  Description of Artificial Sequence: Synthetic oligonucleotide
aaggaccccucccauucaa

SEQ ID NO: 1194570 - RNA, 19 nt, Artificial Sequence
  Description of Artificial Sequence: Synthetic oligonucleotide
ggauauggauacaucugag

SEQ ID NO: 1194571 - RNA, 19 nt, Artificial Sequence
  Description of Artificial Sequence: Synthetic oligonucleotide
uccgauguagggguagggu

SEQ ID NO: 1194572 - RNA, 19 nt, Artificial Sequence
  Description of Artificial Sequence: Synthetic oligonucleotide
uugaggcaucugucugucg

SEQ ID NO: 1194573 - RNA, 19 nt, Artificial Sequence
  Description of Artificial Sequence: Synthetic oligonucleotide
caggacacucaaguuaaug

SEQ ID NO: 1194574 - RNA, 19 nt, Artificial Sequence
  Description of Artificial Sequence: Synthetic oligonucleotide
ggcugugaaggguagugug

SEQ ID NO: 1194575 - RNA, 19 nt, Artificial Sequence
  Description of Artificial Sequence: Synthetic oligonucleotide
guggauaggacuggugaac

SEQ ID NO: 1194576 - RNA, 19 nt, Artificial Sequence
  Description of Artificial Sequence: Synthetic oligonucleotide
uaacaugggccauguuggu

SEQ ID NO: 1194577 - RNA, 19 nt, Artificial Sequence
  Description of Artificial Sequence: Synthetic oligonucleotide
gggaugagauugaacuugg

SEQ ID NO: 1194578 - RNA, 19 nt, Artificial Sequence
  Description of Artificial Sequence: Synthetic oligonucleotide
uccccagcuccccaaggga

SEQ ID NO: 1194579 - RNA, 19 nt, Artificial Sequence
  Description of Artificial Sequence: Synthetic oligonucleotide
uggaagguguugagugagu

SEQ ID NO: 1194580 - RNA, 19 nt, Artificial Sequence
  Description of Artificial Sequence: Synthetic oligonucleotide
ugccaugggcugcaucaug

SEQ ID NO: 1194581 - RNA, 19 nt, Artificial Sequence
  Description of Artificial Sequence: Synthetic oligonucleotide
augguguggauaggacugg

SEQ ID NO: 1194582 - RNA, 19 nt, Artificial Sequence
  Description of Artificial Sequence: Synthetic oligonucleotide
accgguauggaagguguug

SEQ ID NO: 1194583 - RNA, 19 nt, Artificial Sequence
  Description of Artificial Sequence: Synthetic oligonucleotide
augucaacauucguggguu

SEQ ID NO: 1194584 - RNA, 19 nt, Artificial Sequence
  Description of Artificial Sequence: Synthetic oligonucleotide
cauggaggucucaggucgc

SEQ ID NO: 1194585 - RNA, 19 nt, Artificial Sequence
  Description of Artificial Sequence: Synthetic oligonucleotide
acuggggacuguagagccc

SEQ ID NO: 1194586 - RNA, 19 nt, Artificial Sequence
  Description of Artificial Sequence: Synthetic oligonucleotide
auucguggguuacuuugaa

SEQ ID NO: 1194587 - RNA, 19 nt, Artificial Sequence
  Description of Artificial Sequence: Synthetic oligonucleotide
auacgggauauggauacau

SEQ ID NO: 1194588 - RNA, 19 nt, Artificial Sequence
  Description of Artificial Sequence: Synthetic oligonucleotide
gauggcauacacagcagcu

SEQ ID NO: 1194589 - RNA, 19 nt, Artificial Sequence
  Description of Artificial Sequence: Synthetic oligonucleotide
gguguugagugaguucggg

SEQ ID NO: 1194590 - RNA, 19 nt, Artificial Sequence
  Description of Artificial Sequence: Synthetic oligonucleotide
cauucguggguuacuuuga

SEQ ID NO: 1194591 - RNA, 19 nt, Artificial Sequence
  Description of Artificial Sequence: Synthetic oligonucleotide
gccuuuugcaccccgguac

SEQ ID NO: 1194592 - RNA, 19 nt, Artificial Sequence
  Description of Artificial Sequence: Synthetic oligonucleotide
gaauuggauacgggauaug

SEQ ID NO: 1194593 - RNA, 19 nt, Artificial Sequence
  Description of Artificial Sequence: Synthetic oligonucleotide
ucucaggucgcggccagga

SEQ ID NO: 1194594 - RNA, 19 nt, Artificial Sequence
  Description of Artificial Sequence: Synthetic oligonucleotide
agggguacugaggagugga

SEQ ID NO: 1194595 - RNA, 19 nt, Artificial Sequence
  Description of Artificial Sequence: Synthetic oligonucleotide
ggcaccgaauuggauacgg

SEQ ID NO: 1194596 - RNA, 19 nt, Artificial Sequence
  Description of Artificial Sequence: Synthetic oligonucleotide
uggguaacaugggccaugu

SEQ ID NO: 1194597 - RNA, 19 nt, Artificial Sequence
  Description of Artificial Sequence: Synthetic oligonucleotide
auaggggcaaacaccggcu

SEQ ID NO: 1194598 - RNA, 19 nt, Artificial Sequence
  Description of Artificial Sequence: Synthetic oligonucleotide
gucugucggucucucacac

SEQ ID NO: 1194599 - RNA, 19 nt, Artificial Sequence
  Description of Artificial Sequence: Synthetic oligonucleotide
cacucuggccugcugucag

SEQ ID NO: 1194600 - RNA, 19 nt, Artificial Sequence
  Description of Artificial Sequence: Synthetic oligonucleotide
cugugacuccaguuuggac

SEQ ID NO: 1194601 - RNA, 19 nt, Artificial Sequence
  Description of Artificial Sequence: Synthetic oligonucleotide
gugagccuuuugcaccccg

SEQ ID NO: 1194602 - RNA, 19 nt, Artificial Sequence
  Description of Artificial Sequence: Synthetic oligonucleotide
ucugucggucucucacaca

SEQ ID NO: 1194603 - RNA, 19 nt, Artificial Sequence
  Description of Artificial Sequence: Synthetic oligonucleotide
ucccgaugucaacauucgu

SEQ ID NO: 1194604 - RNA, 19 nt, Artificial Sequence
  Description of Artificial Sequence: Synthetic oligonucleotide
uggauacaucugaggcgcc

SEQ ID NO: 1194605 - RNA, 19 nt, Artificial Sequence
  Description of Artificial Sequence: Synthetic oligonucleotide
gggaagugagccuuuugca

SEQ ID NO: 1194606 - RNA, 19 nt, Artificial Sequence
  Description of Artificial Sequence: Synthetic oligonucleotide
gguaggcugcucugcagag

SEQ ID NO: 1194607 - RNA, 19 nt, Artificial Sequence
  Description of Artificial Sequence: Synthetic oligonucleotide
aacaggacuaggggccgca

SEQ ID NO: 1194608 - RNA, 19 nt, Artificial Sequence
  Description of Artificial Sequence: Synthetic oligonucleotide
uuugaagcauaggggcaaa

SEQ ID NO: 1194609 - RNA, 19 nt, Artificial Sequence
  Description of Artificial Sequence: Synthetic oligonucleotide
uggaggucucaggucgcgg

SEQ ID NO: 1194610 - RNA, 19 nt, Artificial Sequence
  Description of Artificial Sequence: Synthetic oligonucleotide
guaggcugcucugcagagg

SEQ ID NO: 1194611 - RNA, 19 nt, Artificial Sequence
  Description of Artificial Sequence: Synthetic oligonucleotide
ucggucucucacacaggac

SEQ ID NO: 1194612 - RNA, 19 nt, Artificial Sequence
  Description of Artificial Sequence: Synthetic oligonucleotide
ggaggucucaggucgcggc

SEQ ID NO: 1194613 - RNA, 19 nt, Artificial Sequence
  Description of Artificial Sequence: Synthetic oligonucleotide
aggggcaaacaccggcugu

SEQ ID NO: 1194614 - RNA, 19 nt, Artificial Sequence
  Description of Artificial Sequence: Synthetic oligonucleotide
ugcugucagcaccgguaug

SEQ ID NO: 1194615 - RNA, 19 nt, Artificial Sequence
  Description of Artificial Sequence: Synthetic oligonucleotide
cuaggacugguccgagcug

SEQ ID NO: 1194616 - RNA, 19 nt, Artificial Sequence
  Description of Artificial Sequence: Synthetic oligonucleotide
agugagccuuuugcacccc

SEQ ID NO: 1194617 - RNA, 19 nt, Artificial Sequence
  Description of Artificial Sequence: Synthetic oligonucleotide
gaauuccccagcuccccaa

SEQ ID NO: 1194618 - RNA, 19 nt, Artificial Sequence
  Description of Artificial Sequence: Synthetic oligonucleotide
ggaguggaagaugaaacaa

SEQ ID NO: 1194619 - RNA, 19 nt, Artificial Sequence
  Description of Artificial Sequence: Synthetic oligonucleotide
guuuggacaugggccuggg

SEQ ID NO: 1194620 - RNA, 19 nt, Artificial Sequence
  Description of Artificial Sequence: Synthetic oligonucleotide
gaucacucuucccuccacu

SEQ ID NO: 1194621 - RNA, 19 nt, Artificial Sequence
  Description of Artificial Sequence: Synthetic oligonucleotide
agauguacuggggacugua

SEQ ID NO: 1194622 - RNA, 19 nt, Artificial Sequence
  Description of Artificial Sequence: Synthetic oligonucleotide
uugaagcauaggggcaaac

SEQ ID NO: 1194623 - RNA, 19 nt, Artificial Sequence
  Description of Artificial Sequence: Synthetic oligonucleotide
guagugugccaugggcugc

SEQ ID NO: 1194624 - RNA, 19 nt, Artificial Sequence
  Description of Artificial Sequence: Synthetic oligonucleotide
gggguguccgauguagggg

SEQ ID NO: 1194625 - RNA, 19 nt, Artificial Sequence
  Description of Artificial Sequence: Synthetic oligonucleotide
ggcggcgugccuguuaggg

SEQ ID NO: 1194626 - RNA, 19 nt, Artificial Sequence
  Description of Artificial Sequence: Synthetic oligonucleotide
gguauauaugagauguacu

SEQ ID NO: 1194627 - RNA, 19 nt, Artificial Sequence
  Description of Artificial Sequence: Synthetic oligonucleotide
gguacuugcccugcugccc

SEQ ID NO: 1194628 - RNA, 19 nt, Artificial Sequence
  Description of Artificial Sequence: Synthetic oligonucleotide
aucaccuggggcgggugag

SEQ ID NO: 1194629 - RNA, 19 nt, Artificial Sequence
  Description of Artificial Sequence: Synthetic oligonucleotide
ugacucccaguaggcgugg

SEQ ID NO: 1194630 - RNA, 19 nt, Artificial Sequence
  Description of Artificial Sequence: Synthetic oligonucleotide
cuggguaacaugggccaug

SEQ ID NO: 1194631 - RNA, 19 nt, Artificial Sequence
  Description of Artificial Sequence: Synthetic oligonucleotide
aggucccggugguagagaa

SEQ ID NO: 1194632 - RNA, 19 nt, Artificial Sequence
  Description of Artificial Sequence: Synthetic oligonucleotide
gauacgggauauggauaca

SEQ ID NO: 1194633 - RNA, 19 nt, Artificial Sequence
  Description of Artificial Sequence: Synthetic oligonucleotide
gacugggugggacccggca

SEQ ID NO: 1194634 - RNA, 19 nt, Artificial Sequence
  Description of Artificial Sequence: Synthetic oligonucleotide
ggaagagacauagaucacu

SEQ ID NO: 1194635 - RNA, 19 nt, Artificial Sequence
  Description of Artificial Sequence: Synthetic oligonucleotide
aguucggggcccuggugaa

SEQ ID NO: 1194636 - RNA, 19 nt, Artificial Sequence
  Description of Artificial Sequence: Synthetic oligonucleotide
guccgauguagggguaggg

SEQ ID NO: 1194637 - RNA, 19 nt, Artificial Sequence
  Description of Artificial Sequence: Synthetic oligonucleotide
ggacuggugaacaguagca

SEQ ID NO: 1194638 - RNA, 19 nt, Artificial Sequence
  Description of Artificial Sequence: Synthetic oligonucleotide
gaauaagguguggcagcca

SEQ ID NO: 1194639 - RNA, 19 nt, Artificial Sequence
  Description of Artificial Sequence: Synthetic oligonucleotide
guggcuucccgaugucaac

SEQ ID NO: 1194640 - RNA, 19 nt, Artificial Sequence
  Description of Artificial Sequence: Synthetic oligonucleotide
agagugcaggcaccccacu

SEQ ID NO: 1194641 - RNA, 19 nt, Artificial Sequence
  Description of Artificial Sequence: Synthetic oligonucleotide
gccugcaucaucggagggg

SEQ ID NO: 1194642 - RNA, 19 nt, Artificial Sequence
  Description of Artificial Sequence: Synthetic oligonucleotide
agguguugagugaguucgg

SEQ ID NO: 1194643 - RNA, 19 nt, Artificial Sequence
  Description of Artificial Sequence: Synthetic oligonucleotide
cacucaaguuaauggggaa

SEQ ID NO: 1194644 - RNA, 19 nt, Artificial Sequence
  Description of Artificial Sequence: Synthetic oligonucleotide
aguaggcgugguagccggc

SEQ ID NO: 1194645 - RNA, 19 nt, Artificial Sequence
  Description of Artificial Sequence: Synthetic oligonucleotide
gguagagaaggcggcgugc

SEQ ID NO: 1194646 - RNA, 19 nt, Artificial Sequence
  Description of Artificial Sequence: Synthetic oligonucleotide
ggucccauguggaucugag

SEQ ID NO: 1194647 - RNA, 19 nt, Artificial Sequence
  Description of Artificial Sequence: Synthetic oligonucleotide
accccgguacuugcccugc

SEQ ID NO: 1194648 - RNA, 19 nt, Artificial Sequence
  Description of Artificial Sequence: Synthetic oligonucleotide
uggggauggauggcauaca

SEQ ID NO: 1194649 - RNA, 19 nt, Artificial Sequence
  Description of Artificial Sequence: Synthetic oligonucleotide
ugcucugcagagggguacu

SEQ ID NO: 1194650 - RNA, 19 nt, Artificial Sequence
  Description of Artificial Sequence: Synthetic oligonucleotide
guucaaaguggacuucuuu

SEQ ID NO: 1194651 - RNA, 19 nt, Artificial Sequence
  Description of Artificial Sequence: Synthetic oligonucleotide
ugguguggauaggacuggu

SEQ ID NO: 1194652 - RNA, 19 nt, Artificial Sequence
  Description of Artificial Sequence: Synthetic oligonucleotide
agccuuuugcaccccggua

SEQ ID NO: 1194653 - RNA, 19 nt, Artificial Sequence
  Description of Artificial Sequence: Synthetic oligonucleotide
gcuaggacugguccgagcu

SEQ ID NO: 1194654 - RNA, 19 nt, Artificial Sequence
  Description of Artificial Sequence: Synthetic oligonucleotide
ggccauggagcuguguagc

SEQ ID NO: 1194655 - RNA, 19 nt, Artificial Sequence
  Description of Artificial Sequence: Synthetic oligonucleotide
gcggcugguggccauggag

SEQ ID NO: 1194656 - RNA, 19 nt, Artificial Sequence
  Description of Artificial Sequence: Synthetic oligonucleotide
gaacaggacuaggggccgc

SEQ ID NO: 1194657 - RNA, 19 nt, Artificial Sequence
  Description of Artificial Sequence: Synthetic oligonucleotide
caggucgcggccaggacaa

SEQ ID NO: 1194658 - RNA, 19 nt, Artificial Sequence
  Description of Artificial Sequence: Synthetic oligonucleotide
ggucucucacacaggacac

SEQ ID NO: 1194659 - RNA, 19 nt, Artificial Sequence
  Description of Artificial Sequence: Synthetic oligonucleotide
ccgcaugcugggauugugg

SEQ ID NO: 1194660 - RNA, 19 nt, Artificial Sequence
  Description of Artificial Sequence: Synthetic oligonucleotide
gagguauauaugagaugua

SEQ ID NO: 1194661 - RNA, 19 nt, Artificial Sequence
  Description of Artificial Sequence: Synthetic oligonucleotide
ugguagccggcugcggcug

SEQ ID NO: 1194662 - RNA, 19 nt, Artificial Sequence
  Description of Artificial Sequence: Synthetic oligonucleotide
cagcagcagcagcagcagc

SEQ ID NO: 1194663 - RNA, 19 nt, Artificial Sequence
  Description of Artificial Sequence: Synthetic oligonucleotide
gcaucugucugucggucuc

SEQ ID NO: 1194664 - RNA, 19 nt, Artificial Sequence
  Description of Artificial Sequence: Synthetic oligonucleotide
ggggcaaacaccggcugug

SEQ ID NO: 1194665 - RNA, 19 nt, Artificial Sequence
  Description of Artificial Sequence: Synthetic oligonucleotide
ggcugacucccaguaggcg

SEQ ID NO: 1194666 - RNA, 19 nt, Artificial Sequence
  Description of Artificial Sequence: Synthetic oligonucleotide
ccauucaaggugcuuggca

SEQ ID NO: 1194667 - RNA, 19 nt, Artificial Sequence
  Description of Artificial Sequence: Synthetic oligonucleotide
aggggccgcaugcugggau

SEQ ID NO: 1194668 - RNA, 19 nt, Artificial Sequence
  Description of Artificial Sequence: Synthetic oligonucleotide
gguguggauaggacuggug

SEQ ID NO: 1194669 - RNA, 19 nt, Artificial Sequence
  Description of Artificial Sequence: Synthetic oligonucleotide
gcggggcuaggacuggucc

SEQ ID NO: 1194670 - RNA, 19 nt, Artificial Sequence
  Description of Artificial Sequence: Synthetic oligonucleotide
caccggcugugaaggguag

SEQ ID NO: 1194671 - RNA, 19 nt, Artificial Sequence
  Description of Artificial Sequence: Synthetic oligonucleotide
gagccuuuugcaccccggu

SEQ ID NO: 1194672 - RNA, 19 nt, Artificial Sequence
  Description of Artificial Sequence: Synthetic oligonucleotide
uggucccauguggaucuga

SEQ ID NO: 1194673 - RNA, 19 nt, Artificial Sequence
  Description of Artificial Sequence: Synthetic oligonucleotide
cgcaugcugggauuguggc

SEQ ID NO: 1194674 - RNA, 19 nt, Artificial Sequence
  Description of Artificial Sequence: Synthetic oligonucleotide
ggguuacuuugaagcauag

SEQ ID NO: 1194675 - RNA, 19 nt, Artificial Sequence
  Description of Artificial Sequence: Synthetic oligonucleotide
gacuggugaacaguagcau

SEQ ID NO: 1194676 - RNA, 19 nt, Artificial Sequence
  Description of Artificial Sequence: Synthetic oligonucleotide
aggcaccgaauuggauacg

SEQ ID NO: 1194677 - RNA, 19 nt, Artificial Sequence
  Description of Artificial Sequence: Synthetic oligonucleotide
acucccaguaggcguggua

SEQ ID NO: 1194678 - RNA, 19 nt, Artificial Sequence
  Description of Artificial Sequence: Synthetic oligonucleotide
gcugacucccaguaggcgu

SEQ ID NO: 1194679 - RNA, 19 nt, Artificial Sequence
  Description of Artificial Sequence: Synthetic oligonucleotide
caguuuggacaugggccug

SEQ ID NO: 1194680 - RNA, 19 nt, Artificial Sequence
  Description of Artificial Sequence: Synthetic oligonucleotide
cucaggucgcggccaggac

SEQ ID NO: 1194681 - RNA, 19 nt, Artificial Sequence
  Description of Artificial Sequence: Synthetic oligonucleotide
aagcugcucugaggggacu

SEQ ID NO: 1194682 - RNA, 19 nt, Artificial Sequence
  Description of Artificial Sequence: Synthetic oligonucleotide
gcaccgaauuggauacggg

SEQ ID NO: 1194683 - RNA, 19 nt, Artificial Sequence
  Description of Artificial Sequence: Synthetic oligonucleotide
gacaugggccuggguaaca

SEQ ID NO: 1194684 - RNA, 19 nt, Artificial Sequence
  Description of Artificial Sequence: Synthetic oligonucleotide
gaaggcggcgugccuguua

SEQ ID NO: 1194685 - RNA, 19 nt, Artificial Sequence
  Description of Artificial Sequence: Synthetic oligonucleotide
ggaauuccccagcucccca

SEQ ID NO: 1194686 - RNA, 19 nt, Artificial Sequence
  Description of Artificial Sequence: Synthetic oligonucleotide
caguagcauagagggcuug

SEQ ID NO: 1194687 - RNA, 19 nt, Artificial Sequence
  Description of Artificial Sequence: Synthetic oligonucleotide
ccccucccauucaaggugc

SEQ ID NO: 1194688 - RNA, 19 nt, Artificial Sequence
  Description of Artificial Sequence: Synthetic oligonucleotide
cagagggguacugaggagu

SEQ ID NO: 1194689 - RNA, 19 nt, Artificial Sequence
  Description of Artificial Sequence: Synthetic oligonucleotide
cggcgugccuguuagggcc

SEQ ID NO: 1194690 - RNA, 19 nt, Artificial Sequence
  Description of Artificial Sequence: Synthetic oligonucleotide
cggucucucacacaggaca

SEQ ID NO: 1194691 - RNA, 19 nt, Artificial Sequence
  Description of Artificial Sequence: Synthetic oligonucleotide
gguauggaagguguugagu

SEQ ID NO: 1194692 - RNA, 19 nt, Artificial Sequence
  Description of Artificial Sequence: Synthetic oligonucleotide
acucuucccuccacucaug

SEQ ID NO: 1194693 - RNA, 19 nt, Artificial Sequence
  Description of Artificial Sequence: Synthetic oligonucleotide
cugguccgagcugcugggg

SEQ ID NO: 1194694 - RNA, 19 nt, Artificial Sequence
  Description of Artificial Sequence: Synthetic oligonucleotide
ggguguccgauguaggggu

SEQ ID NO: 1194695 - RNA, 19 nt, Artificial Sequence
  Description of Artificial Sequence: Synthetic oligonucleotide
gccagcagcagcagcagca

SEQ ID NO: 1194696 - RNA, 19 nt, Artificial Sequence
  Description of Artificial Sequence: Synthetic oligonucleotide
uggggacuguagagcccac

SEQ ID NO: 1194697 - RNA, 19 nt, Artificial Sequence
  Description of Artificial Sequence: Synthetic oligonucleotide
guacugaggaguggaagau

SEQ ID NO: 1194698 - RNA, 19 nt, Artificial Sequence
  Description of Artificial Sequence: Synthetic oligonucleotide
acaccggcugugaagggua

SEQ ID NO: 1194699 - RNA, 19 nt, Artificial Sequence
  Description of Artificial Sequence: Synthetic oligonucleotide
ggcagagcaggaaccuccc

SEQ ID NO: 1194700 - RNA, 19 nt, Artificial Sequence
  Description of Artificial Sequence: Synthetic oligonucleotide
ggcaggaauuccccagcuc

SEQ ID NO: 1194701 - RNA, 19 nt, Artificial Sequence
  Description of Artificial Sequence: Synthetic oligonucleotide
guggguuacuuugaagcau

SEQ ID NO: 1194702 - RNA, 19 nt, Artificial Sequence
  Description of Artificial Sequence: Synthetic oligonucleotide
uuagggccccuggauggua

SEQ ID NO: 1194703 - RNA, 19 nt, Artificial Sequence
  Description of Artificial Sequence: Synthetic oligonucleotide
cgugguagccggcugcggc

SEQ ID NO: 1194704 - RNA, 19 nt, Artificial Sequence
  Description of Artificial Sequence: Synthetic oligonucleotide
cgauguagggguaggguga

SEQ ID NO: 1194705 - RNA, 19 nt, Artificial Sequence
  Description of Artificial Sequence: Synthetic oligonucleotide
ggcuaggacugguccgagc

SEQ ID NO: 1194706 - RNA, 19 nt, Artificial Sequence
  Description of Artificial Sequence: Synthetic oligonucleotide
caucaucggaggggcugag

SEQ ID NO: 1194707 - RNA, 19 nt, Artificial Sequence
  Description of Artificial Sequence: Synthetic oligonucleotide
gggaagagacauagaucac

SEQ ID NO: 1194708 - RNA, 19 nt, Artificial Sequence
  Description of Artificial Sequence: Synthetic oligonucleotide
ggcgugguagccggcugcg

SEQ ID NO: 1194709 - RNA, 19 nt, Artificial Sequence
  Description of Artificial Sequence: Synthetic oligonucleotide
guagggguagggugagggu

SEQ ID NO: 1194710 - RNA, 19 nt, Artificial Sequence
  Description of Artificial Sequence: Synthetic oligonucleotide
cacucuucccuccacucau

SEQ ID NO: 1194711 - RNA, 19 nt, Artificial Sequence
  Description of Artificial Sequence: Synthetic oligonucleotide
ggccugcccggccuggugc

SEQ ID NO: 1194712 - RNA, 19 nt, Artificial Sequence
  Description of Artificial Sequence: Synthetic oligonucleotide
cguggguuacuuugaagca

SEQ ID NO: 1194713 - RNA, 19 nt, Artificial Sequence
  Description of Artificial Sequence: Synthetic oligonucleotide
gcauaggggcaaacaccgg

SEQ ID NO: 1194714 - RNA, 19 nt, Artificial Sequence
  Description of Artificial Sequence: Synthetic oligonucleotide
gugaaggguagugugccau

SEQ ID NO: 1194715 - RNA, 19 nt, Artificial Sequence
  Description of Artificial Sequence: Synthetic oligonucleotide
cacacaggacacucaaguu

SEQ ID NO: 1194716 - RNA, 19 nt, Artificial Sequence
  Description of Artificial Sequence: Synthetic oligonucleotide
gguagccggcugcggcugg

SEQ ID NO: 1194717 - RNA, 19 nt, Artificial Sequence
  Description of Artificial Sequence: Synthetic oligonucleotide
gucgcggccaggacaaucu

SEQ ID NO: 1194718 - RNA, 19 nt, Artificial Sequence
  Description of Artificial Sequence: Synthetic oligonucleotide
aggcggcgugccuguuagg

SEQ ID NO: 1194719 - RNA, 19 nt, Artificial Sequence
  Description of Artificial Sequence: Synthetic oligonucleotide
gugccuguuagggccccug

SEQ ID NO: 1194720 - RNA, 19 nt, Artificial Sequence
  Description of Artificial Sequence: Synthetic oligonucleotide
gugguagccggcugcggcu

SEQ ID NO: 1194721 - RNA, 19 nt, Artificial Sequence
  Description of Artificial Sequence: Synthetic oligonucleotide
ggacuguagagcccacucu

SEQ ID NO: 1194722 - RNA, 19 nt, Artificial Sequence
  Description of Artificial Sequence: Synthetic oligonucleotide
guucggggcccuggugaag

SEQ ID NO: 1194723 - RNA, 19 nt, Artificial Sequence
  Description of Artificial Sequence: Synthetic oligonucleotide
gcggcgugccuguuagggc

SEQ ID NO: 1194724 - RNA, 19 nt, Artificial Sequence
  Description of Artificial Sequence: Synthetic oligonucleotide
gcugugacuccaguuugga

SEQ ID NO: 1194725 - RNA, 19 nt, Artificial Sequence
  Description of Artificial Sequence: Synthetic oligonucleotide
gugugccaugggcugcauc

SEQ ID NO: 1194726 - RNA, 19 nt, Artificial Sequence
  Description of Artificial Sequence: Synthetic oligonucleotide
cauguggaucugagguaua

SEQ ID NO: 1194727 - RNA, 19 nt, Artificial Sequence
  Description of Artificial Sequence: Synthetic oligonucleotide
caugggccauguuggugaa

SEQ ID NO: 1194728 - RNA, 19 nt, Artificial Sequence
  Description of Artificial Sequence: Synthetic oligonucleotide
gucucaggucgcggccagg

SEQ ID NO: 1194729 - RNA, 19 nt, Artificial Sequence
  Description of Artificial Sequence: Synthetic oligonucleotide
cugucagcaccgguaugga

SEQ ID NO: 1194730 - RNA, 19 nt, Artificial Sequence
  Description of Artificial Sequence: Synthetic oligonucleotide
cggggcuaggacugguccg

SEQ ID NO: 1194731 - RNA, 19 nt, Artificial Sequence
  Description of Artificial Sequence: Synthetic oligonucleotide
ccagcagcagcagcagcag

SEQ ID NO: 1194732 - RNA, 19 nt, Artificial Sequence
  Description of Artificial Sequence: Synthetic oligonucleotide
gggcccaagucugagguua

SEQ ID NO: 1194733 - RNA, 19 nt, Artificial Sequence
  Description of Artificial Sequence: Synthetic oligonucleotide
ggggcuaggacugguccga

SEQ ID NO: 1194734 - RNA, 19 nt, Artificial Sequence
  Description of Artificial Sequence: Synthetic oligonucleotide
guguagcaugguguggaua

SEQ ID NO: 1194735 - RNA, 19 nt, Artificial Sequence
  Description of Artificial Sequence: Synthetic oligonucleotide
caucggaggggcugaggcu

SEQ ID NO: 1194736 - RNA, 19 nt, Artificial Sequence
  Description of Artificial Sequence: Synthetic oligonucleotide
gagugaguucggggcccug

SEQ ID NO: 1194737 - RNA, 19 nt, Artificial Sequence
  Description of Artificial Sequence: Synthetic oligonucleotide
ucggggcccuggugaaguc

SEQ ID NO: 1194738 - RNA, 19 nt, Artificial Sequence
  Description of Artificial Sequence: Synthetic oligonucleotide
uagccggcugcggcuggug

SEQ ID NO: 1194739 - RNA, 19 nt, Artificial Sequence
  Description of Artificial Sequence: Synthetic oligonucleotide
ggacaugggccuggguaac

SEQ ID NO: 1194740 - RNA, 19 nt, Artificial Sequence
  Description of Artificial Sequence: Synthetic oligonucleotide
gccggcugcggcugguggc

SEQ ID NO: 1194741 - RNA, 19 nt, Artificial Sequence
  Description of Artificial Sequence: Synthetic oligonucleotide
accggcugugaaggguagu

SEQ ID NO: 1194742 - RNA, 19 nt, Artificial Sequence
  Description of Artificial Sequence: Synthetic oligonucleotide
acaggacacucaaguuaau

SEQ ID NO: 1194743 - RNA, 19 nt, Artificial Sequence
  Description of Artificial Sequence: Synthetic oligonucleotide
guaggcgugguagccggcu

SEQ ID NO: 1194744 - RNA, 19 nt, Artificial Sequence
  Description of Artificial Sequence: Synthetic oligonucleotide
ugcccacuucaaggacccc

SEQ ID NO: 1194745 - RNA, 19 nt, Artificial Sequence
  Description of Artificial Sequence: Synthetic oligonucleotide
ggucccggugguagagaag

SEQ ID NO: 1194746 - RNA, 19 nt, Artificial Sequence
  Description of Artificial Sequence: Synthetic oligonucleotide
ccgguauggaagguguuga

SEQ ID NO: 1194747 - RNA, 19 nt, Artificial Sequence
  Description of Artificial Sequence: Synthetic oligonucleotide
cugcugucagcaccgguau

SEQ ID NO: 1194748 - RNA, 19 nt, Artificial Sequence
  Description of Artificial Sequence: Synthetic oligonucleotide
gcaucaucggaggggcuga

SEQ ID NO: 1194749 - RNA, 19 nt, Artificial Sequence
  Description of Artificial Sequence: Synthetic oligonucleotide
cccauucaaggugcuuggc

SEQ ID NO: 1194750 - RNA, 19 nt, Artificial Sequence
  Description of Artificial Sequence: Synthetic oligonucleotide
uaggggccgcaugcuggga

SEQ ID NO: 1194751 - RNA, 19 nt, Artificial Sequence
  Description of Artificial Sequence: Synthetic oligonucleotide
uggggcgggugaggugccc

SEQ ID NO: 1194752 - RNA, 19 nt, Artificial Sequence
  Description of Artificial Sequence: Synthetic oligonucleotide
ggcaucugucugucggucu

SEQ ID NO: 1194753 - RNA, 19 nt, Artificial Sequence
  Description of Artificial Sequence: Synthetic oligonucleotide
cccgguacuugcccugcug

SEQ ID NO: 1194754 - RNA, 19 nt, Artificial Sequence
  Description of Artificial Sequence: Synthetic oligonucleotide
gagauguacuggggacugu

SEQ ID NO: 1194755 - RNA, 19 nt, Artificial Sequence
  Description of Artificial Sequence: Synthetic oligonucleotide
ggauacaucugaggcgccu

SEQ ID NO: 1194756 - RNA, 19 nt, Artificial Sequence
  Description of Artificial Sequence: Synthetic oligonucleotide
gccgcaugcugggauugug

SEQ ID NO: 1194757 - RNA, 19 nt, Artificial Sequence
  Description of Artificial Sequence: Synthetic oligonucleotide
ggggcccuggugaagucuc

SEQ ID NO: 1194758 - RNA, 19 nt, Artificial Sequence
  Description of Artificial Sequence: Synthetic oligonucleotide
ggacugguccgagcugcug

SEQ ID NO: 1194759 - RNA, 19 nt, Artificial Sequence
  Description of Artificial Sequence: Synthetic oligonucleotide
ggucgcggccaggacaauc

SEQ ID NO: 1194760 - RNA, 19 nt, Artificial Sequence
  Description of Artificial Sequence: Synthetic oligonucleotide
ggcgugccuguuagggccc

SEQ ID NO: 1194761 - RNA, 19 nt, Artificial Sequence
  Description of Artificial Sequence: Synthetic oligonucleotide
guuagggccccuggauggu

SEQ ID NO: 1194762 - RNA, 19 nt, Artificial Sequence
  Description of Artificial Sequence: Synthetic oligonucleotide
cccggccuggugcugaaca

SEQ ID NO: 1194763 - RNA, 19 nt, Artificial Sequence
  Description of Artificial Sequence: Synthetic oligonucleotide
gggccgcaugcugggauug

SEQ ID NO: 1194764 - RNA, 19 nt, Artificial Sequence
  Description of Artificial Sequence: Synthetic oligonucleotide
ggggcgggugaggugcccc

SEQ ID NO: 1194765 - RNA, 19 nt, Artificial Sequence
  Description of Artificial Sequence: Synthetic oligonucleotide
ccauguggaucugagguau

SEQ ID NO: 1194766 - RNA, 19 nt, Artificial Sequence
  Description of Artificial Sequence: Synthetic oligonucleotide
gggcuaggacugguccgag

SEQ ID NO: 1194767 - RNA, 19 nt, Artificial Sequence
  Description of Artificial Sequence: Synthetic oligonucleotide
ccuguuagggccccuggau

SEQ ID NO: 1194768 - RNA, 19 nt, Artificial Sequence
  Description of Artificial Sequence: Synthetic oligonucleotide
ggcgggugaggugccccag

SEQ ID NO: 1194769 - RNA, 19 nt, Artificial Sequence
  Description of Artificial Sequence: Synthetic oligonucleotide
cgcggccaggacaaucuuc

SEQ ID NO: 1194770 - RNA, 19 nt, Artificial Sequence
  Description of Artificial Sequence: Synthetic oligonucleotide
gcccacuucaaggaccccu

SEQ ID NO: 1194771 - RNA, 19 nt, Artificial Sequence
  Description of Artificial Sequence: Synthetic oligonucleotide
gggugggacccggcagggg

SEQ ID NO: 1194772 - RNA, 19 nt, Artificial Sequence
  Description of Artificial Sequence: Synthetic oligonucleotide
caucugucugucggucucu

SEQ ID NO: 1194773 - RNA, 19 nt, Artificial Sequence
  Description of Artificial Sequence: Synthetic oligonucleotide
ccuuuugcaccccgguacu

SEQ ID NO: 1194774 - RNA, 19 nt, Artificial Sequence
  Description of Artificial Sequence: Synthetic oligonucleotide
guggguuguaggggaugua

SEQ ID NO: 1194775 - RNA, 19 nt, Artificial Sequence
  Description of Artificial Sequence: Synthetic oligonucleotide
cccagcccugcccacuuca

SEQ ID NO: 1194776 - RNA, 19 nt, Artificial Sequence
  Description of Artificial Sequence: Synthetic oligonucleotide
ggaacugcuguggguugua

SEQ ID NO: 1194777 - RNA, 19 nt, Artificial Sequence
  Description of Artificial Sequence: Synthetic oligonucleotide
gcgugguagccggcugcgg

SEQ ID NO: 1194778 - RNA, 19 nt, Artificial Sequence
  Description of Artificial Sequence: Synthetic oligonucleotide
ccuggaugguacagauucu

SEQ ID NO: 1194779 - RNA, 19 nt, Artificial Sequence
  Description of Artificial Sequence: Synthetic oligonucleotide
cugcccggccuggugcuga

SEQ ID NO: 1194780 - RNA, 19 nt, Artificial Sequence
  Description of Artificial Sequence: Synthetic oligonucleotide
gccugcacagcugguccca

SEQ ID NO: 1194781 - RNA, 19 nt, Artificial Sequence
  Description of Artificial Sequence: Synthetic oligonucleotide
gcccaggcaccgaauugga

SEQ ID NO: 1194782 - RNA, 19 nt, Artificial Sequence
  Description of Artificial Sequence: Synthetic oligonucleotide
gcagcagcagcagcagccu

SEQ ID NO: 1194783 - RNA, 19 nt, Artificial Sequence
  Description of Artificial Sequence: Synthetic oligonucleotide
ggcggggcuaggacugguc

SEQ ID NO: 1194784 - RNA, 19 nt, Artificial Sequence
  Description of Artificial Sequence: Synthetic oligonucleotide
cugcaucaucggaggggcu

SEQ ID NO: 1194785 - RNA, 19 nt, Artificial Sequence
  Description of Artificial Sequence: Synthetic oligonucleotide
cuuuugcaccccgguacuu

SEQ ID NO: 1194786 - RNA, 19 nt, Artificial Sequence
  Description of Artificial Sequence: Synthetic oligonucleotide
ggacuaggggccgcaugcu

SEQ ID NO: 1194787 - RNA, 19 nt, Artificial Sequence
  Description of Artificial Sequence: Synthetic oligonucleotide
guagccggcugcggcuggu

SEQ ID NO: 1194788 - RNA, 19 nt, Artificial Sequence
  Description of Artificial Sequence: Synthetic oligonucleotide
ccgcuggaccccagcccug

SEQ ID NO: 1194789 - RNA, 19 nt, Artificial Sequence
  Description of Artificial Sequence: Synthetic oligonucleotide
ggggccgcaugcugggauu

SEQ ID NO: 1194790 - RNA, 19 nt, Artificial Sequence
  Description of Artificial Sequence: Synthetic oligonucleotide
aggucgcggccaggacaau

SEQ ID NO: 1194791 - RNA, 19 nt, Artificial Sequence
  Description of Artificial Sequence: Synthetic oligonucleotide
ggggcccaagucugagguu

SEQ ID NO: 1194792 - RNA, 19 nt, Artificial Sequence
  Description of Artificial Sequence: Synthetic oligonucleotide
cagcaccgguauggaaggu

SEQ ID NO: 1194793 - RNA, 19 nt, Artificial Sequence
  Description of Artificial Sequence: Synthetic oligonucleotide
ggcccaagucugagguuau

SEQ ID NO: 1194794 - RNA, 19 nt, Artificial Sequence
  Description of Artificial Sequence: Synthetic oligonucleotide
ggguaacaugggccauguu

SEQ ID NO: 1194795 - RNA, 19 nt, Artificial Sequence
  Description of Artificial Sequence: Synthetic oligonucleotide
ccuggguaacaugggccau

SEQ ID NO: 1194796 - RNA, 19 nt, Artificial Sequence
  Description of Artificial Sequence: Synthetic oligonucleotide
ccucccauucaaggugcuu

SEQ ID NO: 1194797 - RNA, 19 nt, Artificial Sequence
  Description of Artificial Sequence: Synthetic oligonucleotide
ccccgguacuugcccugcu

SEQ ID NO: 1194798 - RNA, 19 nt, Artificial Sequence
  Description of Artificial Sequence: Synthetic oligonucleotide
cgugccuguuagggccccu

SEQ ID NO: 1194799 - RNA, 19 nt, Artificial Sequence
  Description of Artificial Sequence: Synthetic oligonucleotide
uaugacaaaagaacgaacg

SEQ ID NO: 1194800 - RNA, 19 nt, Artificial Sequence
  Description of Artificial Sequence: Synthetic oligonucleotide
aacgaaaccacccuugccg

SEQ ID NO: 1194801 - RNA, 19 nt, Artificial Sequence
  Description of Artificial Sequence: Synthetic oligonucleotide
aguguuauuaauuuggugu

SEQ ID NO: 1194802 - RNA, 19 nt, Artificial Sequence
  Description of Artificial Sequence: Synthetic oligonucleotide
ucuacugaaagcacaagag

SEQ ID NO: 1194803 - RNA, 19 nt, Artificial Sequence
  Description of Artificial Sequence: Synthetic oligonucleotide
auuaauuuggugucuacug

SEQ ID NO: 1194804 - RNA, 19 nt, Artificial Sequence
  Description of Artificial Sequence: Synthetic oligonucleotide
uccuggugaagcuugaggg

SEQ ID NO: 1194805 - RNA, 19 nt, Artificial Sequence
  Description of Artificial Sequence: Synthetic oligonucleotide
uuagggucuggcuaggagg

SEQ ID NO: 1194806 - RNA, 19 nt, Artificial Sequence
  Description of Artificial Sequence: Synthetic oligonucleotide
gaggaauugaucauguugc

SEQ ID NO: 1194807 - RNA, 19 nt, Artificial Sequence
  Description of Artificial Sequence: Synthetic oligonucleotide
ucucgguuuaccuuaauga

SEQ ID NO: 1194808 - RNA, 19 nt, Artificial Sequence
  Description of Artificial Sequence: Synthetic oligonucleotide
gaauugaucauguugcgga

SEQ ID NO: 1194809 - RNA, 19 nt, Artificial Sequence
  Description of Artificial Sequence: Synthetic oligonucleotide
acggguuuggcucuuaggg

SEQ ID NO: 1194810 - RNA, 19 nt, Artificial Sequence
  Description of Artificial Sequence: Synthetic oligonucleotide
uuaauuuggugucuacuga

SEQ ID NO: 1194811 - RNA, 19 nt, Artificial Sequence
  Description of Artificial Sequence: Synthetic oligonucleotide
agaacgaacgaaaccaccc

SEQ ID NO: 1194812 - RNA, 19 nt, Artificial Sequence
  Description of Artificial Sequence: Synthetic oligonucleotide
caaaagaacgaacgaaacc

SEQ ID NO: 1194813 - RNA, 19 nt, Artificial Sequence
  Description of Artificial Sequence: Synthetic oligonucleotide
cugacaucaggacugaggc

SEQ ID NO: 1194814 - RNA, 19 nt, Artificial Sequence
  Description of Artificial Sequence: Synthetic oligonucleotide
ugcucaauacugaugcucc

SEQ ID NO: 1194815 - RNA, 19 nt, Artificial Sequence
  Description of Artificial Sequence: Synthetic oligonucleotide
uuuaccuuaaugacucgga

SEQ ID NO: 1194816 - RNA, 19 nt, Artificial Sequence
  Description of Artificial Sequence: Synthetic oligonucleotide
aagaacgaacgaaaccacc

SEQ ID NO: 1194817 - RNA, 19 nt, Artificial Sequence
  Description of Artificial Sequence: Synthetic oligonucleotide
aaagaacgaacgaaaccac

SEQ ID NO: 1194818 - RNA, 19 nt, Artificial Sequence
  Description of Artificial Sequence: Synthetic oligonucleotide
gacaucaggacugaggcug

SEQ ID NO: 1194819 - RNA, 19 nt, Artificial Sequence
  Description of Artificial Sequence: Synthetic oligonucleotide
caucguauagggcugcugg

SEQ ID NO: 1194820 - RNA, 19 nt, Artificial Sequence
  Description of Artificial Sequence: Synthetic oligonucleotide
ugcugguuccucauacucg

SEQ ID NO: 1194821 - RNA, 19 nt, Artificial Sequence
  Description of Artificial Sequence: Synthetic oligonucleotide
ugagauuugggagugccgc

SEQ ID NO: 1194822 - RNA, 19 nt, Artificial Sequence
  Description of Artificial Sequence: Synthetic oligonucleotide
ugaaaugaccagccgcucc

SEQ ID NO: 1194823 - RNA, 19 nt, Artificial Sequence
  Description of Artificial Sequence: Synthetic oligonucleotide
gggguuauugcucagggag

SEQ ID NO: 1194824 - RNA, 19 nt, Artificial Sequence
  Description of Artificial Sequence: Synthetic oligonucleotide
aaugacucggaagcugagg

SEQ ID NO: 1194825 - RNA, 19 nt, Artificial Sequence
  Description of Artificial Sequence: Synthetic oligonucleotide
gguuucucaguucugacgc

SEQ ID NO: 1194826 - RNA, 19 nt, Artificial Sequence
  Description of Artificial Sequence: Synthetic oligonucleotide
ucaucuacauuuccaccgc

SEQ ID NO: 1194827 - RNA, 19 nt, Artificial Sequence
  Description of Artificial Sequence: Synthetic oligonucleotide
cacucggugaagcaggucc

SEQ ID NO: 1194828 - RNA, 19 nt, Artificial Sequence
  Description of Artificial Sequence: Synthetic oligonucleotide
uauuaauuuggugucuacu

SEQ ID NO: 1194829 - RNA, 19 nt, Artificial Sequence
  Description of Artificial Sequence: Synthetic oligonucleotide
acgaaaccacccuugccgc

SEQ ID NO: 1194830 - RNA, 19 nt, Artificial Sequence
  Description of Artificial Sequence: Synthetic oligonucleotide
gaagcugaggugucgccgg

SEQ ID NO: 1194831 - RNA, 19 nt, Artificial Sequence
  Description of Artificial Sequence: Synthetic oligonucleotide
ggaggaauugaucauguug

SEQ ID NO: 1194832 - RNA, 19 nt, Artificial Sequence
  Description of Artificial Sequence: Synthetic oligonucleotide
cucgguuuaccuuaaugac

SEQ ID NO: 1194833 - RNA, 19 nt, Artificial Sequence
  Description of Artificial Sequence: Synthetic oligonucleotide
uaauuuggugucuacugaa

SEQ ID NO: 1194834 - RNA, 19 nt, Artificial Sequence
  Description of Artificial Sequence: Synthetic oligonucleotide
acugaaagcacaagagggg

SEQ ID NO: 1194835 - RNA, 19 nt, Artificial Sequence
  Description of Artificial Sequence: Synthetic oligonucleotide
uaguguuauuaauuuggug

SEQ ID NO: 1194836 - RNA, 19 nt, Artificial Sequence
  Description of Artificial Sequence: Synthetic oligonucleotide
gacuccacuucccacuggg

SEQ ID NO: 1194837 - RNA, 19 nt, Artificial Sequence
  Description of Artificial Sequence: Synthetic oligonucleotide
gaucauguugcggagugcc

SEQ ID NO: 1194838 - RNA, 19 nt, Artificial Sequence
  Description of Artificial Sequence: Synthetic oligonucleotide
uuauugcucagggagguca

SEQ ID NO: 1194839 - RNA, 19 nt, Artificial Sequence
  Description of Artificial Sequence: Synthetic oligonucleotide
caggcuaaagagaccagcc

SEQ ID NO: 1194840 - RNA, 19 nt, Artificial Sequence
  Description of Artificial Sequence: Synthetic oligonucleotide
ugaagcuugagggccaugc

SEQ ID NO: 1194841 - RNA, 19 nt, Artificial Sequence
  Description of Artificial Sequence: Synthetic oligonucleotide
acauuuccaccgcuauugc

SEQ ID NO: 1194842 - RNA, 19 nt, Artificial Sequence
  Description of Artificial Sequence: Synthetic oligonucleotide
ucuacauuuccaccgcuau

SEQ ID NO: 1194843 - RNA, 19 nt, Artificial Sequence
  Description of Artificial Sequence: Synthetic oligonucleotide
cauaucagcaaagacccac

SEQ ID NO: 1194844 - RNA, 19 nt, Artificial Sequence
  Description of Artificial Sequence: Synthetic oligonucleotide
guuuaccuuaaugacucgg

SEQ ID NO: 1194845 - RNA, 19 nt, Artificial Sequence
  Description of Artificial Sequence: Synthetic oligonucleotide
cuuuggggcucccugaggc

SEQ ID NO: 1194846 - RNA, 19 nt, Artificial Sequence
  Description of Artificial Sequence: Synthetic oligonucleotide
ggcugcucaauacugaugc

SEQ ID NO: 1194847 - RNA, 19 nt, Artificial Sequence
  Description of Artificial Sequence: Synthetic oligonucleotide
uuauuaauuuggugucuac

SEQ ID NO: 1194848 - RNA, 19 nt, Artificial Sequence
  Description of Artificial Sequence: Synthetic oligonucleotide
ugcugccucaauuuagggc

SEQ ID NO: 1194849 - RNA, 19 nt, Artificial Sequence
  Description of Artificial Sequence: Synthetic oligonucleotide
cuugccgcaugucaggccc

SEQ ID NO: 1194850 - RNA, 19 nt, Artificial Sequence
  Description of Artificial Sequence: Synthetic oligonucleotide
gcaauggcaucguauaggg

SEQ ID NO: 1194851 - RNA, 19 nt, Artificial Sequence
  Description of Artificial Sequence: Synthetic oligonucleotide
uuaccuuaaugacucggaa

SEQ ID NO: 1194852 - RNA, 19 nt, Artificial Sequence
  Description of Artificial Sequence: Synthetic oligonucleotide
auggcacccaggcugacag

SEQ ID NO: 1194853 - RNA, 19 nt, Artificial Sequence
  Description of Artificial Sequence: Synthetic oligonucleotide
cucaugugaaaugaccagc

SEQ ID NO: 1194854 - RNA, 19 nt, Artificial Sequence
  Description of Artificial Sequence: Synthetic oligonucleotide
ugacgcugccucaaguagc

SEQ ID NO: 1194855 - RNA, 19 nt, Artificial Sequence
  Description of Artificial Sequence: Synthetic oligonucleotide
ucaaguagccagagaccag

SEQ ID NO: 1194856 - RNA, 19 nt, Artificial Sequence
  Description of Artificial Sequence: Synthetic oligonucleotide
gaacugaggagaccagggc

SEQ ID NO: 1194857 - RNA, 19 nt, Artificial Sequence
  Description of Artificial Sequence: Synthetic oligonucleotide
ugcgcaggagccaucgggc

SEQ ID NO: 1194858 - RNA, 19 nt, Artificial Sequence
  Description of Artificial Sequence: Synthetic oligonucleotide
ugacaggaccaccccacag

SEQ ID NO: 1194859 - RNA, 19 nt, Artificial Sequence
  Description of Artificial Sequence: Synthetic oligonucleotide
gaacgaaaccacccuugcc

SEQ ID NO: 1194860 - RNA, 19 nt, Artificial Sequence
  Description of Artificial Sequence: Synthetic oligonucleotide
aacgaacgaaaccacccuu

SEQ ID NO: 1194861 - RNA, 19 nt, Artificial Sequence
  Description of Artificial Sequence: Synthetic oligonucleotide
auguggugagaggugacac

SEQ ID NO: 1194862 - RNA, 19 nt, Artificial Sequence
  Description of Artificial Sequence: Synthetic oligonucleotide
cuggugaagcuugagggcc

SEQ ID NO: 1194863 - RNA, 19 nt, Artificial Sequence
  Description of Artificial Sequence: Synthetic oligonucleotide
ggcuaaagagaccagccug

SEQ ID NO: 1194864 - RNA, 19 nt, Artificial Sequence
  Description of Artificial Sequence: Synthetic oligonucleotide
agcgccacagcccuuguga

SEQ ID NO: 1194865 - RNA, 19 nt, Artificial Sequence
  Description of Artificial Sequence: Synthetic oligonucleotide
agagagggcguguugcuga

SEQ ID NO: 1194866 - RNA, 19 nt, Artificial Sequence
  Description of Artificial Sequence: Synthetic oligonucleotide
cugagauuugggagugccg

SEQ ID NO: 1194867 - RNA, 19 nt, Artificial Sequence
  Description of Artificial Sequence: Synthetic oligonucleotide
ggugagaggugacacguag

SEQ ID NO: 1194868 - RNA, 19 nt, Artificial Sequence
  Description of Artificial Sequence: Synthetic oligonucleotide
ucgccgguuaagcaugaug

SEQ ID NO: 1194869 - RNA, 19 nt, Artificial Sequence
  Description of Artificial Sequence: Synthetic oligonucleotide
cucucgguuuaccuuaaug

SEQ ID NO: 1194870 - RNA, 19 nt, Artificial Sequence
  Description of Artificial Sequence: Synthetic oligonucleotide
gagauuugggagugccgcc

SEQ ID NO: 1194871 - RNA, 19 nt, Artificial Sequence
  Description of Artificial Sequence: Synthetic oligonucleotide
uacucgucaggagauguga

SEQ ID NO: 1194872 - RNA, 19 nt, Artificial Sequence
  Description of Artificial Sequence: Synthetic oligonucleotide
agaccagggugcaaaugcc

SEQ ID NO: 1194873 - RNA, 19 nt, Artificial Sequence
  Description of Artificial Sequence: Synthetic oligonucleotide
ucugacgcugccucaagua

SEQ ID NO: 1194874 - RNA, 19 nt, Artificial Sequence
  Description of Artificial Sequence: Synthetic oligonucleotide
gaggauggcacugcgccag

SEQ ID NO: 1194875 - RNA, 19 nt, Artificial Sequence
  Description of Artificial Sequence: Synthetic oligonucleotide
cugacgcugccucaaguag

SEQ ID NO: 1194876 - RNA, 19 nt, Artificial Sequence
  Description of Artificial Sequence: Synthetic oligonucleotide
cucaaguagccagagacca

SEQ ID NO: 1194877 - RNA, 19 nt, Artificial Sequence
  Description of Artificial Sequence: Synthetic oligonucleotide
gggugcaaaugccaaagcc

SEQ ID NO: 1194878 - RNA, 19 nt, Artificial Sequence
  Description of Artificial Sequence: Synthetic oligonucleotide
cucaauacugaugcuccag

SEQ ID NO: 1194879 - RNA, 19 nt, Artificial Sequence
  Description of Artificial Sequence: Synthetic oligonucleotide
auuuagggcagcuguggau

SEQ ID NO: 1194880 - RNA, 19 nt, Artificial Sequence
  Description of Artificial Sequence: Synthetic oligonucleotide
ggaauugaucauguugcgg

SEQ ID NO: 1194881 - RNA, 19 nt, Artificial Sequence
  Description of Artificial Sequence: Synthetic oligonucleotide
cuuguacucgucagaagca

SEQ ID NO: 1194882 - RNA, 19 nt, Artificial Sequence
  Description of Artificial Sequence: Synthetic oligonucleotide
cucaauuuagggcagcugu

SEQ ID NO: 1194883 - RNA, 19 nt, Artificial Sequence
  Description of Artificial Sequence: Synthetic oligonucleotide
cugcgcaggagccaucggg

SEQ ID NO: 1194884 - RNA, 19 nt, Artificial Sequence
  Description of Artificial Sequence: Synthetic oligonucleotide
ucgucaggagaugugaaau

SEQ ID NO: 1194885 - RNA, 19 nt, Artificial Sequence
  Description of Artificial Sequence: Synthetic oligonucleotide
guauagggcugcugguucc

SEQ ID NO: 1194886 - RNA, 19 nt, Artificial Sequence
  Description of Artificial Sequence: Synthetic oligonucleotide
aggcuaaagagaccagccu

SEQ ID NO: 1194887 - RNA, 19 nt, Artificial Sequence
  Description of Artificial Sequence: Synthetic oligonucleotide
ugaggugucgccgguuaag

SEQ ID NO: 1194888 - RNA, 19 nt, Artificial Sequence
  Description of Artificial Sequence: Synthetic oligonucleotide
ggagagucugguuucucag

SEQ ID NO: 1194889 - RNA, 19 nt, Artificial Sequence
  Description of Artificial Sequence: Synthetic oligonucleotide
acacucucgguuuaccuua

SEQ ID NO: 1194890 - RNA, 19 nt, Artificial Sequence
  Description of Artificial Sequence: Synthetic oligonucleotide
gucuagaggagccugagau

SEQ ID NO: 1194891 - RNA, 19 nt, Artificial Sequence
  Description of Artificial Sequence: Synthetic oligonucleotide
acacacucucgguuuaccu

SEQ ID NO: 1194892 - RNA, 19 nt, Artificial Sequence
  Description of Artificial Sequence: Synthetic oligonucleotide
gaaaugaccagccgcuccu

SEQ ID NO: 1194893 - RNA, 19 nt, Artificial Sequence
  Description of Artificial Sequence: Synthetic oligonucleotide
cugggaugagauccaguag

SEQ ID NO: 1194894 - RNA, 19 nt, Artificial Sequence
  Description of Artificial Sequence: Synthetic oligonucleotide
gagggcguguugcugagga

SEQ ID NO: 1194895 - RNA, 19 nt, Artificial Sequence
  Description of Artificial Sequence: Synthetic oligonucleotide
uucugacgcugccucaagu

SEQ ID NO: 1194896 - RNA, 19 nt, Artificial Sequence
  Description of Artificial Sequence: Synthetic oligonucleotide
guagcggccaggcugcuca

SEQ ID NO: 1194897 - RNA, 19 nt, Artificial Sequence
  Description of Artificial Sequence: Synthetic oligonucleotide
caauacugaugcuccagca

SEQ ID NO: 1194898 - RNA, 19 nt, Artificial Sequence
  Description of Artificial Sequence: Synthetic oligonucleotide
agcccacgcacacacucuc

SEQ ID NO: 1194899 - RNA, 19 nt, Artificial Sequence
  Description of Artificial Sequence: Synthetic oligonucleotide
cacggguuuggcucuuagg

SEQ ID NO: 1194900 - RNA, 19 nt, Artificial Sequence
  Description of Artificial Sequence: Synthetic oligonucleotide
ucuagaggagccugagauu

SEQ ID NO: 1194901 - RNA, 19 nt, Artificial Sequence
  Description of Artificial Sequence: Synthetic oligonucleotide
aucguauagggcugcuggu

SEQ ID NO: 1194902 - RNA, 19 nt, Artificial Sequence
  Description of Artificial Sequence: Synthetic oligonucleotide
ucgcccucaugugaaauga

SEQ ID NO: 1194903 - RNA, 19 nt, Artificial Sequence
  Description of Artificial Sequence: Synthetic oligonucleotide
uaaagagaccagccuggua

SEQ ID NO: 1194904 - RNA, 19 nt, Artificial Sequence
  Description of Artificial Sequence: Synthetic oligonucleotide
acccuugccgcaugucagg

SEQ ID NO: 1194905 - RNA, 19 nt, Artificial Sequence
  Description of Artificial Sequence: Synthetic oligonucleotide
gcucuuagggucuggcuag

SEQ ID NO: 1194906 - RNA, 19 nt, Artificial Sequence
  Description of Artificial Sequence: Synthetic oligonucleotide
cacccuugccgcaugucag

SEQ ID NO: 1194907 - RNA, 19 nt, Artificial Sequence
  Description of Artificial Sequence: Synthetic oligonucleotide
ugaggauggcacugcgcca

SEQ ID NO: 1194908 - RNA, 19 nt, Artificial Sequence
  Description of Artificial Sequence: Synthetic oligonucleotide
gaggugacacguagauggg

SEQ ID NO: 1194909 - RNA, 19 nt, Artificial Sequence
  Description of Artificial Sequence: Synthetic oligonucleotide
cagcccacggguuuggcuc

SEQ ID NO: 1194910 - RNA, 19 nt, Artificial Sequence
  Description of Artificial Sequence: Synthetic oligonucleotide
cugcugccucaauuuaggg

SEQ ID NO: 1194911 - RNA, 19 nt, Artificial Sequence
  Description of Artificial Sequence: Synthetic oligonucleotide
cucguuccucaacagggac

SEQ ID NO: 1194912 - RNA, 19 nt, Artificial Sequence
  Description of Artificial Sequence: Synthetic oligonucleotide
aggugacacguagaugggg

SEQ ID NO: 1194913 - RNA, 19 nt, Artificial Sequence
  Description of Artificial Sequence: Synthetic oligonucleotide
gguccauaucagcaaagac

SEQ ID NO: 1194914 - RNA, 19 nt, Artificial Sequence
  Description of Artificial Sequence: Synthetic oligonucleotide
gauguggugagaggugaca

SEQ ID NO: 1194915 - RNA, 19 nt, Artificial Sequence
  Description of Artificial Sequence: Synthetic oligonucleotide
auugaucauguugcggagu

SEQ ID NO: 1194916 - RNA, 19 nt, Artificial Sequence
  Description of Artificial Sequence: Synthetic oligonucleotide
agauccaguagcggccagg

SEQ ID NO: 1194917 - RNA, 19 nt, Artificial Sequence
  Description of Artificial Sequence: Synthetic oligonucleotide
acgaacgaaaccacccuug

SEQ ID NO: 1194918 - RNA, 19 nt, Artificial Sequence
  Description of Artificial Sequence: Synthetic oligonucleotide
agucucucccagcugcgca

SEQ ID NO: 1194919 - RNA, 19 nt, Artificial Sequence
  Description of Artificial Sequence: Synthetic oligonucleotide
ucgggguugcgguugcgca

SEQ ID NO: 1194920 - RNA, 19 nt, Artificial Sequence
  Description of Artificial Sequence: Synthetic oligonucleotide
gaggugucgccgguuaagc

SEQ ID NO: 1194921 - RNA, 19 nt, Artificial Sequence
  Description of Artificial Sequence: Synthetic oligonucleotide
agagauguggugagaggug

SEQ ID NO: 1194922 - RNA, 19 nt, Artificial Sequence
  Description of Artificial Sequence: Synthetic oligonucleotide
gucgcccucaugugaaaug

SEQ ID NO: 1194923 - RNA, 19 nt, Artificial Sequence
  Description of Artificial Sequence: Synthetic oligonucleotide
agucaguccuggccauggg

SEQ ID NO: 1194924 - RNA, 19 nt, Artificial Sequence
  Description of Artificial Sequence: Synthetic oligonucleotide
agauuugggagugccgccu

SEQ ID NO: 1194925 - RNA, 19 nt, Artificial Sequence
  Description of Artificial Sequence: Synthetic oligonucleotide
gaacgaacgaaaccacccu

SEQ ID NO: 1194926 - RNA, 19 nt, Artificial Sequence
  Description of Artificial Sequence: Synthetic oligonucleotide
ucauacucgucaggagaug

SEQ ID NO: 1194927 - RNA, 19 nt, Artificial Sequence
  Description of Artificial Sequence: Synthetic oligonucleotide
ugucaggcccggcccaggc

SEQ ID NO: 1194928 - RNA, 19 nt, Artificial Sequence
  Description of Artificial Sequence: Synthetic oligonucleotide
gagucugguuucucaguuc

SEQ ID NO: 1194929 - RNA, 19 nt, Artificial Sequence
  Description of Artificial Sequence: Synthetic oligonucleotide
gagccaucgggcaauggca

SEQ ID NO: 1194930 - RNA, 19 nt, Artificial Sequence
  Description of Artificial Sequence: Synthetic oligonucleotide
gagagggcguguugcugag

SEQ ID NO: 1194931 - RNA, 19 nt, Artificial Sequence
  Description of Artificial Sequence: Synthetic oligonucleotide
agauguggugagaggugac

SEQ ID NO: 1194932 - RNA, 19 nt, Artificial Sequence
  Description of Artificial Sequence: Synthetic oligonucleotide
gagaggugacacguagaug

SEQ ID NO: 1194933 - RNA, 19 nt, Artificial Sequence
  Description of Artificial Sequence: Synthetic oligonucleotide
agcuugagggccaugcgga

SEQ ID NO: 1194934 - RNA, 19 nt, Artificial Sequence
  Description of Artificial Sequence: Synthetic oligonucleotide
agcugcgcaggagccaucg

SEQ ID NO: 1194935 - RNA, 19 nt, Artificial Sequence
  Description of Artificial Sequence: Synthetic oligonucleotide
cgguuuaccuuaaugacuc

SEQ ID NO: 1194936 - RNA, 19 nt, Artificial Sequence
  Description of Artificial Sequence: Synthetic oligonucleotide
uuccaccgcuauugcagcc

SEQ ID NO: 1194937 - RNA, 19 nt, Artificial Sequence
  Description of Artificial Sequence: Synthetic oligonucleotide
gguuuaccuuaaugacucg

SEQ ID NO: 1194938 - RNA, 19 nt, Artificial Sequence
  Description of Artificial Sequence: Synthetic oligonucleotide
ggguuauugcucagggagg

SEQ ID NO: 1194939 - RNA, 19 nt, Artificial Sequence
  Description of Artificial Sequence: Synthetic oligonucleotide
cugguaggcagugcaggcc

SEQ ID NO: 1194940 - RNA, 19 nt, Artificial Sequence
  Description of Artificial Sequence: Synthetic oligonucleotide
gacucggaagcugaggugu

SEQ ID NO: 1194941 - RNA, 19 nt, Artificial Sequence
  Description of Artificial Sequence: Synthetic oligonucleotide
gucacaggaggaauugauc

SEQ ID NO: 1194942 - RNA, 19 nt, Artificial Sequence
  Description of Artificial Sequence: Synthetic oligonucleotide
gugaaaugguccuggugaa

SEQ ID NO: 1194943 - RNA, 19 nt, Artificial Sequence
  Description of Artificial Sequence: Synthetic oligonucleotide
uugccgcaugucaggcccg

SEQ ID NO: 1194944 - RNA, 19 nt, Artificial Sequence
  Description of Artificial Sequence: Synthetic oligonucleotide
guggaucagggagagucug

SEQ ID NO: 1194945 - RNA, 19 nt, Artificial Sequence
  Description of Artificial Sequence: Synthetic oligonucleotide
ccuggugaagcuugagggc

SEQ ID NO: 1194946 - RNA, 19 nt, Artificial Sequence
  Description of Artificial Sequence: Synthetic oligonucleotide
auggcaucguauagggcug

SEQ ID NO: 1194947 - RNA, 19 nt, Artificial Sequence
  Description of Artificial Sequence: Synthetic oligonucleotide
cugccucaauuuagggcag

SEQ ID NO: 1194948 - RNA, 19 nt, Artificial Sequence
  Description of Artificial Sequence: Synthetic oligonucleotide
cucggaagcugaggugucg

SEQ ID NO: 1194949 - RNA, 19 nt, Artificial Sequence
  Description of Artificial Sequence: Synthetic oligonucleotide
aggugucgccgguuaagca

SEQ ID NO: 1194950 - RNA, 19 nt, Artificial Sequence
  Description of Artificial Sequence: Synthetic oligonucleotide
cacacacucucgguuuacc

SEQ ID NO: 1194951 - RNA, 19 nt, Artificial Sequence
  Description of Artificial Sequence: Synthetic oligonucleotide
gccagagauguggugagag

SEQ ID NO: 1194952 - RNA, 19 nt, Artificial Sequence
  Description of Artificial Sequence: Synthetic oligonucleotide
aaccacccuugccgcaugu

SEQ ID NO: 1194953 - RNA, 19 nt, Artificial Sequence
  Description of Artificial Sequence: Synthetic oligonucleotide
ucguauagggcugcugguu

SEQ ID NO: 1194954 - RNA, 19 nt, Artificial Sequence
  Description of Artificial Sequence: Synthetic oligonucleotide
ugucgccgguuaagcauga

SEQ ID NO: 1194955 - RNA, 19 nt, Artificial Sequence
  Description of Artificial Sequence: Synthetic oligonucleotide
ccuggguuguucuggcagg

SEQ ID NO: 1194956 - RNA, 19 nt, Artificial Sequence
  Description of Artificial Sequence: Synthetic oligonucleotide
gugucgccgguuaagcaug

SEQ ID NO: 1194957 - RNA, 19 nt, Artificial Sequence
  Description of Artificial Sequence: Synthetic oligonucleotide
gaccaccccacagcgcccg

SEQ ID NO: 1194958 - RNA, 19 nt, Artificial Sequence
  Description of Artificial Sequence: Synthetic oligonucleotide
auacucgucaggagaugug

SEQ ID NO: 1194959 - RNA, 19 nt, Artificial Sequence
  Description of Artificial Sequence: Synthetic oligonucleotide
aguucugacgcugccucaa

SEQ ID NO: 1194960 - RNA, 19 nt, Artificial Sequence
  Description of Artificial Sequence: Synthetic oligonucleotide
acgcacacacucucgguuu

SEQ ID NO: 1194961 - RNA, 19 nt, Artificial Sequence
  Description of Artificial Sequence: Synthetic oligonucleotide
gcccuugugaagucucucc

SEQ ID NO: 1194962 - RNA, 19 nt, Artificial Sequence
  Description of Artificial Sequence: Synthetic oligonucleotide
gagauccaguagcggccag

SEQ ID NO: 1194963 - RNA, 19 nt, Artificial Sequence
  Description of Artificial Sequence: Synthetic oligonucleotide
ugcggagugccugcuuggc

SEQ ID NO: 1194964 - RNA, 19 nt, Artificial Sequence
  Description of Artificial Sequence: Synthetic oligonucleotide
cagagauguggugagaggu

SEQ ID NO: 1194965 - RNA, 19 nt, Artificial Sequence
  Description of Artificial Sequence: Synthetic oligonucleotide
ggugaagcagguccauauc

SEQ ID NO: 1194966 - RNA, 19 nt, Artificial Sequence
  Description of Artificial Sequence: Synthetic oligonucleotide
ccucauacucgucaggaga

SEQ ID NO: 1194967 - RNA, 19 nt, Artificial Sequence
  Description of Artificial Sequence: Synthetic oligonucleotide
gcucucucguuccucaaca

SEQ ID NO: 1194968 - RNA, 19 nt, Artificial Sequence
  Description of Artificial Sequence: Synthetic oligonucleotide
gggagagucugguuucuca

SEQ ID NO: 1194969 - RNA, 19 nt, Artificial Sequence
  Description of Artificial Sequence: Synthetic oligonucleotide
ugccucaauuuagggcagc

SEQ ID NO: 1194970 - RNA, 19 nt, Artificial Sequence
  Description of Artificial Sequence: Synthetic oligonucleotide
agggagagucugguuucuc

SEQ ID NO: 1194971 - RNA, 19 nt, Artificial Sequence
  Description of Artificial Sequence: Synthetic oligonucleotide
ugccgcaugucaggcccgg

SEQ ID NO: 1194972 - RNA, 19 nt, Artificial Sequence
  Description of Artificial Sequence: Synthetic oligonucleotide
uggcaucguauagggcugc

SEQ ID NO: 1194973 - RNA, 19 nt, Artificial Sequence
  Description of Artificial Sequence: Synthetic oligonucleotide
agaguccaaguuacugagu

SEQ ID NO: 1194974 - RNA, 19 nt, Artificial Sequence
  Description of Artificial Sequence: Synthetic oligonucleotide
cguuccucaacagggacag

SEQ ID NO: 1194975 - RNA, 19 nt, Artificial Sequence
  Description of Artificial Sequence: Synthetic oligonucleotide
cgccgguuaagcaugauga

SEQ ID NO: 1194976 - RNA, 19 nt, Artificial Sequence
  Description of Artificial Sequence: Synthetic oligonucleotide
uguugcggagugccugcuu

SEQ ID NO: 1194977 - RNA, 19 nt, Artificial Sequence
  Description of Artificial Sequence: Synthetic oligonucleotide
acucggugaagcaggucca

SEQ ID NO: 1194978 - RNA, 19 nt, Artificial Sequence
  Description of Artificial Sequence: Synthetic oligonucleotide
gggguugcgguugcgcagg

SEQ ID NO: 1194979 - RNA, 19 nt, Artificial Sequence
  Description of Artificial Sequence: Synthetic oligonucleotide
cagagagggcguguugcug

SEQ ID NO: 1194980 - RNA, 19 nt, Artificial Sequence
  Description of Artificial Sequence: Synthetic oligonucleotide
caguccauucuguggucca

SEQ ID NO: 1194981 - RNA, 19 nt, Artificial Sequence
  Description of Artificial Sequence: Synthetic oligonucleotide
cgaacgaaaccacccuugc

SEQ ID NO: 1194982 - RNA, 19 nt, Artificial Sequence
  Description of Artificial Sequence: Synthetic oligonucleotide
aguagcggccaggcugcuc

SEQ ID NO: 1194983 - RNA, 19 nt, Artificial Sequence
  Description of Artificial Sequence: Synthetic oligonucleotide
cauacucgucaggagaugu

SEQ ID NO: 1194984 - RNA, 19 nt, Artificial Sequence
  Description of Artificial Sequence: Synthetic oligonucleotide
cagcugggcucucucguuc

SEQ ID NO: 1194985 - RNA, 19 nt, Artificial Sequence
  Description of Artificial Sequence: Synthetic oligonucleotide
agcccacggguuuggcucu

SEQ ID NO: 1194986 - RNA, 19 nt, Artificial Sequence
  Description of Artificial Sequence: Synthetic oligonucleotide
aucauguugcggagugccu

SEQ ID NO: 1194987 - RNA, 19 nt, Artificial Sequence
  Description of Artificial Sequence: Synthetic oligonucleotide
gcugguuccucauacucgu

SEQ ID NO: 1194988 - RNA, 19 nt, Artificial Sequence
  Description of Artificial Sequence: Synthetic oligonucleotide
guuauugcucagggagguc

SEQ ID NO: 1194989 - RNA, 19 nt, Artificial Sequence
  Description of Artificial Sequence: Synthetic oligonucleotide
gugaaaugaccagccgcuc

SEQ ID NO: 1194990 - RNA, 19 nt, Artificial Sequence
  Description of Artificial Sequence: Synthetic oligonucleotide
gcccaggcuaaagagacca

SEQ ID NO: 1194991 - RNA, 19 nt, Artificial Sequence
  Description of Artificial Sequence: Synthetic oligonucleotide
auccaguagcggccaggcu

SEQ ID NO: 1194992 - RNA, 19 nt, Artificial Sequence
  Description of Artificial Sequence: Synthetic oligonucleotide
ggaauguccuggguuguuc

SEQ ID NO: 1194993 - RNA, 19 nt, Artificial Sequence
  Description of Artificial Sequence: Synthetic oligonucleotide
cagggucgcccucauguga

SEQ ID NO: 1194994 - RNA, 19 nt, Artificial Sequence
  Description of Artificial Sequence: Synthetic oligonucleotide
gucaggcccggcccaggcc

SEQ ID NO: 1194995 - RNA, 19 nt, Artificial Sequence
  Description of Artificial Sequence: Synthetic oligonucleotide
ggugucgccgguuaagcau

SEQ ID NO: 1194996 - RNA, 19 nt, Artificial Sequence
  Description of Artificial Sequence: Synthetic oligonucleotide
ccaucgggcaauggcaccc

SEQ ID NO: 1194997 - RNA, 19 nt, Artificial Sequence
  Description of Artificial Sequence: Synthetic oligonucleotide
gaaaccacccuugccgcau

SEQ ID NO: 1194998 - RNA, 19 nt, Artificial Sequence
  Description of Artificial Sequence: Synthetic oligonucleotide
gguuauugcucagggaggu

SEQ ID NO: 1194999 - RNA, 19 nt, Artificial Sequence
  Description of Artificial Sequence: Synthetic oligonucleotide
cgucaggagaugugaaaug

SEQ ID NO: 1195000 - RNA, 19 nt, Artificial Sequence
  Description of Artificial Sequence: Synthetic oligonucleotide
cccucagaacugaggagac

SEQ ID NO: 1195001 - RNA, 19 nt, Artificial Sequence
  Description of Artificial Sequence: Synthetic oligonucleotide
guuucucaguucugacgcu

SEQ ID NO: 1195002 - RNA, 19 nt, Artificial Sequence
  Description of Artificial Sequence: Synthetic oligonucleotide
ggcucucucguuccucaac

SEQ ID NO: 1195003 - RNA, 19 nt, Artificial Sequence
  Description of Artificial Sequence: Synthetic oligonucleotide
agggucgcccucaugugaa

SEQ ID NO: 1195004 - RNA, 19 nt, Artificial Sequence
  Description of Artificial Sequence: Synthetic oligonucleotide
ggugacacguagauggggu

SEQ ID NO: 1195005 - RNA, 19 nt, Artificial Sequence
  Description of Artificial Sequence: Synthetic oligonucleotide
cacaggaggaauugaucau

SEQ ID NO: 1195006 - RNA, 19 nt, Artificial Sequence
  Description of Artificial Sequence: Synthetic oligonucleotide
caccgcuauugcagccagc

SEQ ID NO: 1195007 - RNA, 19 nt, Artificial Sequence
  Description of Artificial Sequence: Synthetic oligonucleotide
gcucaauacugaugcucca

SEQ ID NO: 1195008 - RNA, 19 nt, Artificial Sequence
  Description of Artificial Sequence: Synthetic oligonucleotide
ggugucagugggugugcca

SEQ ID NO: 1195009 - RNA, 19 nt, Artificial Sequence
  Description of Artificial Sequence: Synthetic oligonucleotide
gcagggucgcccucaugug

SEQ ID NO: 1195010 - RNA, 19 nt, Artificial Sequence
  Description of Artificial Sequence: Synthetic oligonucleotide
acucucgguuuaccuuaau

SEQ ID NO: 1195011 - RNA, 19 nt, Artificial Sequence
  Description of Artificial Sequence: Synthetic oligonucleotide
ccgcaugucaggcccggcc

SEQ ID NO: 1195012 - RNA, 19 nt, Artificial Sequence
  Description of Artificial Sequence: Synthetic oligonucleotide
augggguagcccaguggcu

SEQ ID NO: 1195013 - RNA, 19 nt, Artificial Sequence
  Description of Artificial Sequence: Synthetic oligonucleotide
gggccaugcggaccccagg

SEQ ID NO: 1195014 - RNA, 19 nt, Artificial Sequence
  Description of Artificial Sequence: Synthetic oligonucleotide
accacucggugaagcaggu

SEQ ID NO: 1195015 - RNA, 19 nt, Artificial Sequence
  Description of Artificial Sequence: Synthetic oligonucleotide
agggcguguugcugaggau

SEQ ID NO: 1195016 - RNA, 19 nt, Artificial Sequence
  Description of Artificial Sequence: Synthetic oligonucleotide
gauuugggagugccgccuu

SEQ ID NO: 1195017 - RNA, 19 nt, Artificial Sequence
  Description of Artificial Sequence: Synthetic oligonucleotide
cuaaagagaccagccuggu

SEQ ID NO: 1195018 - RNA, 19 nt, Artificial Sequence
  Description of Artificial Sequence: Synthetic oligonucleotide
aggaauguccuggguuguu

SEQ ID NO: 1195019 - RNA, 19 nt, Artificial Sequence
  Description of Artificial Sequence: Synthetic oligonucleotide
caucuacauuuccaccgcu

SEQ ID NO: 1195020 - RNA, 19 nt, Artificial Sequence
  Description of Artificial Sequence: Synthetic oligonucleotide
caacagggacaggccaguc

SEQ ID NO: 1195021 - RNA, 19 nt, Artificial Sequence
  Description of Artificial Sequence: Synthetic oligonucleotide
gccaugcggaccccaggug

SEQ ID NO: 1195022 - RNA, 19 nt, Artificial Sequence
  Description of Artificial Sequence: Synthetic oligonucleotide
gcaucguauagggcugcug

SEQ ID NO: 1195023 - RNA, 19 nt, Artificial Sequence
  Description of Artificial Sequence: Synthetic oligonucleotide
ccaccgcuauugcagccag

SEQ ID NO: 1195024 - RNA, 19 nt, Artificial Sequence
  Description of Artificial Sequence: Synthetic oligonucleotide
cacucucgguuuaccuuaa

SEQ ID NO: 1195025 - RNA, 19 nt, Artificial Sequence
  Description of Artificial Sequence: Synthetic oligonucleotide
gcugcgcaggagccaucgg

SEQ ID NO: 1195026 - RNA, 19 nt, Artificial Sequence
  Description of Artificial Sequence: Synthetic oligonucleotide
cacgcacacacucucgguu

SEQ ID NO: 1195027 - RNA, 19 nt, Artificial Sequence
  Description of Artificial Sequence: Synthetic oligonucleotide
ccacccuugccgcauguca

SEQ ID NO: 1195028 - RNA, 19 nt, Artificial Sequence
  Description of Artificial Sequence: Synthetic oligonucleotide
cuacauuuccaccgcuauu

SEQ ID NO: 1195029 - RNA, 19 nt, Artificial Sequence
  Description of Artificial Sequence: Synthetic oligonucleotide
ugagggccaugcggacccc

SEQ ID NO: 1195030 - RNA, 19 nt, Artificial Sequence
  Description of Artificial Sequence: Synthetic oligonucleotide
gugaagcuugagggccaug

SEQ ID NO: 1195031 - RNA, 19 nt, Artificial Sequence
  Description of Artificial Sequence: Synthetic oligonucleotide
gccacgcucgggguugcgg

SEQ ID NO: 1195032 - RNA, 19 nt, Artificial Sequence
  Description of Artificial Sequence: Synthetic oligonucleotide
gcaugucaggcccggccca

SEQ ID NO: 1195033 - RNA, 19 nt, Artificial Sequence
  Description of Artificial Sequence: Synthetic oligonucleotide
aggcggucuugagggccgg

SEQ ID NO: 1195034 - RNA, 19 nt, Artificial Sequence
  Description of Artificial Sequence: Synthetic oligonucleotide
ugccacgcucgggguugcg

SEQ ID NO: 1195035 - RNA, 19 nt, Artificial Sequence
  Description of Artificial Sequence: Synthetic oligonucleotide
cugaggugucgccgguuaa

SEQ ID NO: 1195036 - RNA, 19 nt, Artificial Sequence
  Description of Artificial Sequence: Synthetic oligonucleotide
ccacggguuuggcucuuag

SEQ ID NO: 1195037 - RNA, 19 nt, Artificial Sequence
  Description of Artificial Sequence: Synthetic oligonucleotide
ggccaugcggaccccaggu

SEQ ID NO: 1195038 - RNA, 19 nt, Artificial Sequence
  Description of Artificial Sequence: Synthetic oligonucleotide
ggggugucagugggugugc

SEQ ID NO: 1195039 - RNA, 19 nt, Artificial Sequence
  Description of Artificial Sequence: Synthetic oligonucleotide
caucgggcaauggcaccca

SEQ ID NO: 1195040 - RNA, 19 nt, Artificial Sequence
  Description of Artificial Sequence: Synthetic oligonucleotide
cgggguugcgguugcgcag

SEQ ID NO: 1195041 - RNA, 19 nt, Artificial Sequence
  Description of Artificial Sequence: Synthetic oligonucleotide
gcgcaggagccaucgggca

SEQ ID NO: 1195042 - RNA, 19 nt, Artificial Sequence
  Description of Artificial Sequence: Synthetic oligonucleotide
ccauaucagcaaagaccca

SEQ ID NO: 1195043 - RNA, 19 nt, Artificial Sequence
  Description of Artificial Sequence: Synthetic oligonucleotide
agcugaggugucgccgguu

SEQ ID NO: 1195044 - RNA, 19 nt, Artificial Sequence
  Description of Artificial Sequence: Synthetic oligonucleotide
cugcgccaggcagggucgc

SEQ ID NO: 1195045 - RNA, 19 nt, Artificial Sequence
  Description of Artificial Sequence: Synthetic oligonucleotide
gcggccaggcugcucaaua

SEQ ID NO: 1195046 - RNA, 19 nt, Artificial Sequence
  Description of Artificial Sequence: Synthetic oligonucleotide
gccgguuaagcaugaugau

SEQ ID NO: 1195047 - RNA, 19 nt, Artificial Sequence
  Description of Artificial Sequence: Synthetic oligonucleotide
ggaccaccccacagcgccc

SEQ ID NO: 1195048 - RNA, 19 nt, Artificial Sequence
  Description of Artificial Sequence: Synthetic oligonucleotide
gcgccacagcccuugugaa

SEQ ID NO: 1195049 - RNA, 19 nt, Artificial Sequence
  Description of Artificial Sequence: Synthetic oligonucleotide
ggcggucuugagggccggg

SEQ ID NO: 1195050 - RNA, 19 nt, Artificial Sequence
  Description of Artificial Sequence: Synthetic oligonucleotide
gucaggccgccagccccac

SEQ ID NO: 1195051 - RNA, 19 nt, Artificial Sequence
  Description of Artificial Sequence: Synthetic oligonucleotide
cgaaaccacccuugccgca

SEQ ID NO: 1195052 - RNA, 19 nt, Artificial Sequence
  Description of Artificial Sequence: Synthetic oligonucleotide
ggcuaggaggcugcugccu

SEQ ID NO: 1195053 - RNA, 19 nt, Artificial Sequence
  Description of Artificial Sequence: Synthetic oligonucleotide
ggcuggcuccccaucagau

SEQ ID NO: 1195054 - RNA, 19 nt, Artificial Sequence
  Description of Artificial Sequence: Synthetic oligonucleotide
gggucgcccucaugugaaa

SEQ ID NO: 1195055 - RNA, 19 nt, Artificial Sequence
  Description of Artificial Sequence: Synthetic oligonucleotide
ggcuggucacaggaggaau

SEQ ID NO: 1195056 - RNA, 19 nt, Artificial Sequence
  Description of Artificial Sequence: Synthetic oligonucleotide
ccggggacccucaguggga

SEQ ID NO: 1195057 - RNA, 19 nt, Artificial Sequence
  Description of Artificial Sequence: Synthetic oligonucleotide
cucggugaagcagguccau

SEQ ID NO: 1195058 - RNA, 19 nt, Artificial Sequence
  Description of Artificial Sequence: Synthetic oligonucleotide
cggggacccucagugggag

SEQ ID NO: 1195059 - RNA, 19 nt, Artificial Sequence
  Description of Artificial Sequence: Synthetic oligonucleotide
caggggcacugcuguccaa

SEQ ID NO: 1195060 - RNA, 19 nt, Artificial Sequence
  Description of Artificial Sequence: Synthetic oligonucleotide
ggguugcgguugcgcagga

SEQ ID NO: 1195061 - RNA, 19 nt, Artificial Sequence
  Description of Artificial Sequence: Synthetic oligonucleotide
gugccgccuuuggggcucc

SEQ ID NO: 1195062 - RNA, 19 nt, Artificial Sequence
  Description of Artificial Sequence: Synthetic oligonucleotide
ugccgccuuuggggcuccc

SEQ ID NO: 1195063 - RNA, 19 nt, Artificial Sequence
  Description of Artificial Sequence: Synthetic oligonucleotide
cggagugccugcuuggcau

SEQ ID NO: 1195064 - RNA, 19 nt, Artificial Sequence
  Description of Artificial Sequence: Synthetic oligonucleotide
ggucgcccucaugugaaau

SEQ ID NO: 1195065 - RNA, 19 nt, Artificial Sequence
  Description of Artificial Sequence: Synthetic oligonucleotide
ccccagcuagggccuggug

SEQ ID NO: 1195066 - RNA, 19 nt, Artificial Sequence
  Description of Artificial Sequence: Synthetic oligonucleotide
cagggaggucaggccgcca

SEQ ID NO: 1195067 - RNA, 19 nt, Artificial Sequence
  Description of Artificial Sequence: Synthetic oligonucleotide
ggcaucguauagggcugcu

SEQ ID NO: 1195068 - RNA, 19 nt, Artificial Sequence
  Description of Artificial Sequence: Synthetic oligonucleotide
gccgcaugucaggcccggc

SEQ ID NO: 1195069 - RNA, 19 nt, Artificial Sequence
  Description of Artificial Sequence: Synthetic oligonucleotide
gucgccgguuaagcaugau

SEQ ID NO: 1195070 - RNA, 19 nt, Artificial Sequence
  Description of Artificial Sequence: Synthetic oligonucleotide
aacgauuccgaucacaggc

SEQ ID NO: 1195071 - RNA, 19 nt, Artificial Sequence
  Description of Artificial Sequence: Synthetic oligonucleotide
aaugaugaggcguagaaag

SEQ ID NO: 1195072 - RNA, 19 nt, Artificial Sequence
  Description of Artificial Sequence: Synthetic oligonucleotide
acuaugaccaccaagaaac

SEQ ID NO: 1195073 - RNA, 19 nt, Artificial Sequence
  Description of Artificial Sequence: Synthetic oligonucleotide
aacaaucuccgucucaggc

SEQ ID NO: 1195074 - RNA, 19 nt, Artificial Sequence
  Description of Artificial Sequence: Synthetic oligonucleotide
auuacagaacuagagaacc

SEQ ID NO: 1195075 - RNA, 19 nt, Artificial Sequence
  Description of Artificial Sequence: Synthetic oligonucleotide
agaacuagagaacccaggc

SEQ ID NO: 1195076 - RNA, 19 nt, Artificial Sequence
  Description of Artificial Sequence: Synthetic oligonucleotide
uaauuaauuacagaacuag

SEQ ID NO: 1195077 - RNA, 19 nt, Artificial Sequence
  Description of Artificial Sequence: Synthetic oligonucleotide
aaguccucgccauugaggg

SEQ ID NO: 1195078 - RNA, 19 nt, Artificial Sequence
  Description of Artificial Sequence: Synthetic oligonucleotide
aacugcauaaaguccucgc

SEQ ID NO: 1195079 - RNA, 19 nt, Artificial Sequence
  Description of Artificial Sequence: Synthetic oligonucleotide
gaaaccaagaacgauuccg

SEQ ID NO: 1195080 - RNA, 19 nt, Artificial Sequence
  Description of Artificial Sequence: Synthetic oligonucleotide
acuacgaaggaaucguagc

SEQ ID NO: 1195081 - RNA, 19 nt, Artificial Sequence
  Description of Artificial Sequence: Synthetic oligonucleotide
gguauuugcaccaugaggg

SEQ ID NO: 1195082 - RNA, 19 nt, Artificial Sequence
  Description of Artificial Sequence: Synthetic oligonucleotide
ucuagguccacagugagag

SEQ ID NO: 1195083 - RNA, 19 nt, Artificial Sequence
  Description of Artificial Sequence: Synthetic oligonucleotide
aucaccaacaaucuccguc

SEQ ID NO: 1195084 - RNA, 19 nt, Artificial Sequence
  Description of Artificial Sequence: Synthetic oligonucleotide
uccaagaugacaagagugc

SEQ ID NO: 1195085 - RNA, 19 nt, Artificial Sequence
  Description of Artificial Sequence: Synthetic oligonucleotide
aaggaaucguagcuucagc

SEQ ID NO: 1195086 - RNA, 19 nt, Artificial Sequence
  Description of Artificial Sequence: Synthetic oligonucleotide
aagaaaccaagaacgauuc

SEQ ID NO: 1195087 - RNA, 19 nt, Artificial Sequence
  Description of Artificial Sequence: Synthetic oligonucleotide
agguauuugcaccaugagg

SEQ ID NO: 1195088 - RNA, 19 nt, Artificial Sequence
  Description of Artificial Sequence: Synthetic oligonucleotide
uuucccaauaccaggacac

SEQ ID NO: 1195089 - RNA, 19 nt, Artificial Sequence
  Description of Artificial Sequence: Synthetic oligonucleotide
uccgcauagaccaggacgc

SEQ ID NO: 1195090 - RNA, 19 nt, Artificial Sequence
  Description of Artificial Sequence: Synthetic oligonucleotide
ugaacuuucaccucaucau

SEQ ID NO: 1195091 - RNA, 19 nt, Artificial Sequence
  Description of Artificial Sequence: Synthetic oligonucleotide
ugcaauguguauuggaggu

SEQ ID NO: 1195092 - RNA, 19 nt, Artificial Sequence
  Description of Artificial Sequence: Synthetic oligonucleotide
gacaucaggaaguggcugg

SEQ ID NO: 1195093 - RNA, 19 nt, Artificial Sequence
  Description of Artificial Sequence: Synthetic oligonucleotide
ugaggugguacaucagugg

SEQ ID NO: 1195094 - RNA, 19 nt, Artificial Sequence
  Description of Artificial Sequence: Synthetic oligonucleotide
uugguaaugguguucgucu

SEQ ID NO: 1195095 - RNA, 19 nt, Artificial Sequence
  Description of Artificial Sequence: Synthetic oligonucleotide
aacaagaggcugaggaccc

SEQ ID NO: 1195096 - RNA, 19 nt, Artificial Sequence
  Description of Artificial Sequence: Synthetic oligonucleotide
ugaccuccagcaaugauga

SEQ ID NO: 1195097 - RNA, 19 nt, Artificial Sequence
  Description of Artificial Sequence: Synthetic oligonucleotide
aauuaauuacagaacuaga

SEQ ID NO: 1195098 - RNA, 19 nt, Artificial Sequence
  Description of Artificial Sequence: Synthetic oligonucleotide
augagggucggccucaggg

SEQ ID NO: 1195099 - RNA, 19 nt, Artificial Sequence
  Description of Artificial Sequence: Synthetic oligonucleotide
acauugguaaugguguucg

SEQ ID NO: 1195100 - RNA, 19 nt, Artificial Sequence
  Description of Artificial Sequence: Synthetic oligonucleotide
aaagguauuugcaccauga

SEQ ID NO: 1195101 - RNA, 19 nt, Artificial Sequence
  Description of Artificial Sequence: Synthetic oligonucleotide
uuuggacccaaauuuugug

SEQ ID NO: 1195102 - RNA, 19 nt, Artificial Sequence
  Description of Artificial Sequence: Synthetic oligonucleotide
accaagaacgauuccgauc

SEQ ID NO: 1195103 - RNA, 19 nt, Artificial Sequence
  Description of Artificial Sequence: Synthetic oligonucleotide
cuccgcauagaccaggacg

SEQ ID NO: 1195104 - RNA, 19 nt, Artificial Sequence
  Description of Artificial Sequence: Synthetic oligonucleotide
ugcugauucuucacaaggc

SEQ ID NO: 1195105 - RNA, 19 nt, Artificial Sequence
  Description of Artificial Sequence: Synthetic oligonucleotide
uugagggcgaacacagccg

SEQ ID NO: 1195106 - RNA, 19 nt, Artificial Sequence
  Description of Artificial Sequence: Synthetic oligonucleotide
ugugaggugguacaucagu

SEQ ID NO: 1195107 - RNA, 19 nt, Artificial Sequence
  Description of Artificial Sequence: Synthetic oligonucleotide
ugaugaggcguagaaagag

SEQ ID NO: 1195108 - RNA, 19 nt, Artificial Sequence
  Description of Artificial Sequence: Synthetic oligonucleotide
cugauucuucacaaggccc

SEQ ID NO: 1195109 - RNA, 19 nt, Artificial Sequence
  Description of Artificial Sequence: Synthetic oligonucleotide
uccucuuuugaccuccagc

SEQ ID NO: 1195110 - RNA, 19 nt, Artificial Sequence
  Description of Artificial Sequence: Synthetic oligonucleotide
uuacagaacuagagaaccc

SEQ ID NO: 1195111 - RNA, 19 nt, Artificial Sequence
  Description of Artificial Sequence: Synthetic oligonucleotide
augaggcguagaaagagcc

SEQ ID NO: 1195112 - RNA, 19 nt, Artificial Sequence
  Description of Artificial Sequence: Synthetic oligonucleotide
cugagggaaagccaugggg

SEQ ID NO: 1195113 - RNA, 19 nt, Artificial Sequence
  Description of Artificial Sequence: Synthetic oligonucleotide
gaaucguagcuucagcuca

SEQ ID NO: 1195114 - RNA, 19 nt, Artificial Sequence
  Description of Artificial Sequence: Synthetic oligonucleotide
aagccauggggcuggcagc

SEQ ID NO: 1195115 - RNA, 19 nt, Artificial Sequence
  Description of Artificial Sequence: Synthetic oligonucleotide
auuugcaccaugagggucg

SEQ ID NO: 1195116 - RNA, 19 nt, Artificial Sequence
  Description of Artificial Sequence: Synthetic oligonucleotide
ugaggcguagaaagagccg

SEQ ID NO: 1195117 - RNA, 19 nt, Artificial Sequence
  Description of Artificial Sequence: Synthetic oligonucleotide
aggacgggccuucaggcgc

SEQ ID NO: 1195118 - RNA, 19 nt, Artificial Sequence
  Description of Artificial Sequence: Synthetic oligonucleotide
auugguaaugguguucguc

SEQ ID NO: 1195119 - RNA, 19 nt, Artificial Sequence
  Description of Artificial Sequence: Synthetic oligonucleotide
ugaccaccaagaaaccaag

SEQ ID NO: 1195120 - RNA, 19 nt, Artificial Sequence
  Description of Artificial Sequence: Synthetic oligonucleotide
uguguuccaccugacauug

SEQ ID NO: 1195121 - RNA, 19 nt, Artificial Sequence
  Description of Artificial Sequence: Synthetic oligonucleotide
ucuuacauccugucuguac

SEQ ID NO: 1195122 - RNA, 19 nt, Artificial Sequence
  Description of Artificial Sequence: Synthetic oligonucleotide
gaugacaagagugcccugc

SEQ ID NO: 1195123 - RNA, 19 nt, Artificial Sequence
  Description of Artificial Sequence: Synthetic oligonucleotide
agaacgauuccgaucacag

SEQ ID NO: 1195124 - RNA, 19 nt, Artificial Sequence
  Description of Artificial Sequence: Synthetic oligonucleotide
gucucugcaccccaggucc

SEQ ID NO: 1195125 - RNA, 19 nt, Artificial Sequence
  Description of Artificial Sequence: Synthetic oligonucleotide
aaauuuuguggagauggaa

SEQ ID NO: 1195126 - RNA, 19 nt, Artificial Sequence
  Description of Artificial Sequence: Synthetic oligonucleotide
aaagagccgucaccauugg

SEQ ID NO: 1195127 - RNA, 19 nt, Artificial Sequence
  Description of Artificial Sequence: Synthetic oligonucleotide
aaccugaagugggagggac

SEQ ID NO: 1195128 - RNA, 19 nt, Artificial Sequence
  Description of Artificial Sequence: Synthetic oligonucleotide
caguccaagaugacaagag

SEQ ID NO: 1195129 - RNA, 19 nt, Artificial Sequence
  Description of Artificial Sequence: Synthetic oligonucleotide
cagaacuagagaacccagg

SEQ ID NO: 1195130 - RNA, 19 nt, Artificial Sequence
  Description of Artificial Sequence: Synthetic oligonucleotide
cccaauauggguuuccagg

SEQ ID NO: 1195131 - RNA, 19 nt, Artificial Sequence
  Description of Artificial Sequence: Synthetic oligonucleotide
agaguugcuaggacgggcc

SEQ ID NO: 1195132 - RNA, 19 nt, Artificial Sequence
  Description of Artificial Sequence: Synthetic oligonucleotide
aaaccaagaacgauuccga

SEQ ID NO: 1195133 - RNA, 19 nt, Artificial Sequence
  Description of Artificial Sequence: Synthetic oligonucleotide
uguucgucuccucuuuuga

SEQ ID NO: 1195134 - RNA, 19 nt, Artificial Sequence
  Description of Artificial Sequence: Synthetic oligonucleotide
gaacgauuccgaucacagg

SEQ ID NO: 1195135 - RNA, 19 nt, Artificial Sequence
  Description of Artificial Sequence: Synthetic oligonucleotide
ccacagaucaccaacaauc

SEQ ID NO: 1195136 - RNA, 19 nt, Artificial Sequence
  Description of Artificial Sequence: Synthetic oligonucleotide
uuccaccugacauugguaa

SEQ ID NO: 1195137 - RNA, 19 nt, Artificial Sequence
  Description of Artificial Sequence: Synthetic oligonucleotide
ugagggucggccucagggg

SEQ ID NO: 1195138 - RNA, 19 nt, Artificial Sequence
  Description of Artificial Sequence: Synthetic oligonucleotide
uguggacuccgcauagacc

SEQ ID NO: 1195139 - RNA, 19 nt, Artificial Sequence
  Description of Artificial Sequence: Synthetic oligonucleotide
cuaggacgggccuucaggc

SEQ ID NO: 1195140 - RNA, 19 nt, Artificial Sequence
  Description of Artificial Sequence: Synthetic oligonucleotide
gaaagguauuugcaccaug

SEQ ID NO: 1195141 - RNA, 19 nt, Artificial Sequence
  Description of Artificial Sequence: Synthetic oligonucleotide
cacuacgaaggaaucguag

SEQ ID NO: 1195142 - RNA, 19 nt, Artificial Sequence
  Description of Artificial Sequence: Synthetic oligonucleotide
agagaacccaggccuuggc

SEQ ID NO: 1195143 - RNA, 19 nt, Artificial Sequence
  Description of Artificial Sequence: Synthetic oligonucleotide
ccaauauggguuuccaggg

SEQ ID NO: 1195144 - RNA, 19 nt, Artificial Sequence
  Description of Artificial Sequence: Synthetic oligonucleotide
aguccaagaugacaagagu

SEQ ID NO: 1195145 - RNA, 19 nt, Artificial Sequence
  Description of Artificial Sequence: Synthetic oligonucleotide
uccgucucaggccacuccc

SEQ ID NO: 1195146 - RNA, 19 nt, Artificial Sequence
  Description of Artificial Sequence: Synthetic oligonucleotide
ugcauaaaguccucgccau

SEQ ID NO: 1195147 - RNA, 19 nt, Artificial Sequence
  Description of Artificial Sequence: Synthetic oligonucleotide
aagagccgucaccauuggg

SEQ ID NO: 1195148 - RNA, 19 nt, Artificial Sequence
  Description of Artificial Sequence: Synthetic oligonucleotide
cuuguuugcuuuucagguc

SEQ ID NO: 1195149 - RNA, 19 nt, Artificial Sequence
  Description of Artificial Sequence: Synthetic oligonucleotide
gaugaggcguagaaagagc

SEQ ID NO: 1195150 - RNA, 19 nt, Artificial Sequence
  Description of Artificial Sequence: Synthetic oligonucleotide
uguuguagcucagguacug

SEQ ID NO: 1195151 - RNA, 19 nt, Artificial Sequence
  Description of Artificial Sequence: Synthetic oligonucleotide
uggaggucugaguugacau

SEQ ID NO: 1195152 - RNA, 19 nt, Artificial Sequence
  Description of Artificial Sequence: Synthetic oligonucleotide
ugagggcgaacacagccgu

SEQ ID NO: 1195153 - RNA, 19 nt, Artificial Sequence
  Description of Artificial Sequence: Synthetic oligonucleotide
cugacauugguaauggugu

SEQ ID NO: 1195154 - RNA, 19 nt, Artificial Sequence
  Description of Artificial Sequence: Synthetic oligonucleotide
gagggacuccccuuggaug

SEQ ID NO: 1195155 - RNA, 19 nt, Artificial Sequence
  Description of Artificial Sequence: Synthetic oligonucleotide
cacgugacuccucuggccc

SEQ ID NO: 1195156 - RNA, 19 nt, Artificial Sequence
  Description of Artificial Sequence: Synthetic oligonucleotide
agagccgucaccauuggga

SEQ ID NO: 1195157 - RNA, 19 nt, Artificial Sequence
  Description of Artificial Sequence: Synthetic oligonucleotide
ccaagaacgauuccgauca

SEQ ID NO: 1195158 - RNA, 19 nt, Artificial Sequence
  Description of Artificial Sequence: Synthetic oligonucleotide
cuaugaccaccaagaaacc

SEQ ID NO: 1195159 - RNA, 19 nt, Artificial Sequence
  Description of Artificial Sequence: Synthetic oligonucleotide
aaccaagaacgauuccgau

SEQ ID NO: 1195160 - RNA, 19 nt, Artificial Sequence
  Description of Artificial Sequence: Synthetic oligonucleotide
caggaaguggcuggaaagg

SEQ ID NO: 1195161 - RNA, 19 nt, Artificial Sequence
  Description of Artificial Sequence: Synthetic oligonucleotide
caucuagguccacagugag

SEQ ID NO: 1195162 - RNA, 19 nt, Artificial Sequence
  Description of Artificial Sequence: Synthetic oligonucleotide
ugaacugcauaaaguccuc

SEQ ID NO: 1195163 - RNA, 19 nt, Artificial Sequence
  Description of Artificial Sequence: Synthetic oligonucleotide
uaggacgggccuucaggcg

SEQ ID NO: 1195164 - RNA, 19 nt, Artificial Sequence
  Description of Artificial Sequence: Synthetic oligonucleotide
ggacacgugacuccucugg

SEQ ID NO: 1195165 - RNA, 19 nt, Artificial Sequence
  Description of Artificial Sequence: Synthetic oligonucleotide
aaucguagcuucagcucag

SEQ ID NO: 1195166 - RNA, 19 nt, Artificial Sequence
  Description of Artificial Sequence: Synthetic oligonucleotide
gaaguucccuuccugccca

SEQ ID NO: 1195167 - RNA, 19 nt, Artificial Sequence
  Description of Artificial Sequence: Synthetic oligonucleotide
ucaccgcugagggaaagcc

SEQ ID NO: 1195168 - RNA, 19 nt, Artificial Sequence
  Description of Artificial Sequence: Synthetic oligonucleotide
agggcgaacacagccgugg

SEQ ID NO: 1195169 - RNA, 19 nt, Artificial Sequence
  Description of Artificial Sequence: Synthetic oligonucleotide
guauggaggagccagaguu

SEQ ID NO: 1195170 - RNA, 19 nt, Artificial Sequence
  Description of Artificial Sequence: Synthetic oligonucleotide
ugacaucaggaaguggcug

SEQ ID NO: 1195171 - RNA, 19 nt, Artificial Sequence
  Description of Artificial Sequence: Synthetic oligonucleotide
caaguugccaccgggcagc

SEQ ID NO: 1195172 - RNA, 19 nt, Artificial Sequence
  Description of Artificial Sequence: Synthetic oligonucleotide
uccacagaucaccaacaau

SEQ ID NO: 1195173 - RNA, 19 nt, Artificial Sequence
  Description of Artificial Sequence: Synthetic oligonucleotide
gcuaggacgggccuucagg

SEQ ID NO: 1195174 - RNA, 19 nt, Artificial Sequence
  Description of Artificial Sequence: Synthetic oligonucleotide
ugcuucauccacagaucac

SEQ ID NO: 1195175 - RNA, 19 nt, Artificial Sequence
  Description of Artificial Sequence: Synthetic oligonucleotide
aguccucgccauugagggc

SEQ ID NO: 1195176 - RNA, 19 nt, Artificial Sequence
  Description of Artificial Sequence: Synthetic oligonucleotide
gagccgucaccauugggac

SEQ ID NO: 1195177 - RNA, 19 nt, Artificial Sequence
  Description of Artificial Sequence: Synthetic oligonucleotide
cagauuuggacccaaauuu

SEQ ID NO: 1195178 - RNA, 19 nt, Artificial Sequence
  Description of Artificial Sequence: Synthetic oligonucleotide
aaagcagcacaggucagua

SEQ ID NO: 1195179 - RNA, 19 nt, Artificial Sequence
  Description of Artificial Sequence: Synthetic oligonucleotide
agccgucaccauugggacc

SEQ ID NO: 1195180 - RNA, 19 nt, Artificial Sequence
  Description of Artificial Sequence: Synthetic oligonucleotide
acaagagugcccugcuccu

SEQ ID NO: 1195181 - RNA, 19 nt, Artificial Sequence
  Description of Artificial Sequence: Synthetic oligonucleotide
acccaaauuuuguggagau

SEQ ID NO: 1195182 - RNA, 19 nt, Artificial Sequence
  Description of Artificial Sequence: Synthetic oligonucleotide
caccugacauugguaaugg

SEQ ID NO: 1195183 - RNA, 19 nt, Artificial Sequence
  Description of Artificial Sequence: Synthetic oligonucleotide
gucaucaccgcugagggaa

SEQ ID NO: 1195184 - RNA, 19 nt, Artificial Sequence
  Description of Artificial Sequence: Synthetic oligonucleotide
uguuugcuuuucaggucca

SEQ ID NO: 1195185 - RNA, 19 nt, Artificial Sequence
  Description of Artificial Sequence: Synthetic oligonucleotide
gguaaugguguucgucucc

SEQ ID NO: 1195186 - RNA, 19 nt, Artificial Sequence
  Description of Artificial Sequence: Synthetic oligonucleotide
uggcccaaaaggagggacu

SEQ ID NO: 1195187 - RNA, 19 nt, Artificial Sequence
  Description of Artificial Sequence: Synthetic oligonucleotide
uuccugcccaauauggguu

SEQ ID NO: 1195188 - RNA, 19 nt, Artificial Sequence
  Description of Artificial Sequence: Synthetic oligonucleotide
ugggcaaccugaaguggga

SEQ ID NO: 1195189 - RNA, 19 nt, Artificial Sequence
  Description of Artificial Sequence: Synthetic oligonucleotide
augaccaccaagaaaccaa

SEQ ID NO: 1195190 - RNA, 19 nt, Artificial Sequence
  Description of Artificial Sequence: Synthetic oligonucleotide
aucaccgcugagggaaagc

SEQ ID NO: 1195191 - RNA, 19 nt, Artificial Sequence
  Description of Artificial Sequence: Synthetic oligonucleotide
agggacacgugacuccucu

SEQ ID NO: 1195192 - RNA, 19 nt, Artificial Sequence
  Description of Artificial Sequence: Synthetic oligonucleotide
ucucugcaccccagguccg

SEQ ID NO: 1195193 - RNA, 19 nt, Artificial Sequence
  Description of Artificial Sequence: Synthetic oligonucleotide
caggucucccucagaaggc

SEQ ID NO: 1195194 - RNA, 19 nt, Artificial Sequence
  Description of Artificial Sequence: Synthetic oligonucleotide
gacauugguaaugguguuc

SEQ ID NO: 1195195 - RNA, 19 nt, Artificial Sequence
  Description of Artificial Sequence: Synthetic oligonucleotide
caaucuccgucucaggcca

SEQ ID NO: 1195196 - RNA, 19 nt, Artificial Sequence
  Description of Artificial Sequence: Synthetic oligonucleotide
ggcaggaggaccaacaaga

SEQ ID NO: 1195197 - RNA, 19 nt, Artificial Sequence
  Description of Artificial Sequence: Synthetic oligonucleotide
uuggaggucugaguugaca

SEQ ID NO: 1195198 - RNA, 19 nt, Artificial Sequence
  Description of Artificial Sequence: Synthetic oligonucleotide
ggcaaccugaagugggagg

SEQ ID NO: 1195199 - RNA, 19 nt, Artificial Sequence
  Description of Artificial Sequence: Synthetic oligonucleotide
uucaggcgcauggagggug

SEQ ID NO: 1195200 - RNA, 19 nt, Artificial Sequence
  Description of Artificial Sequence: Synthetic oligonucleotide
guguucgucuccucuuuug

SEQ ID NO: 1195201 - RNA, 19 nt, Artificial Sequence
  Description of Artificial Sequence: Synthetic oligonucleotide
caaauuuuguggagaugga

SEQ ID NO: 1195202 - RNA, 19 nt, Artificial Sequence
  Description of Artificial Sequence: Synthetic oligonucleotide
aauguguauuggaggucug

SEQ ID NO: 1195203 - RNA, 19 nt, Artificial Sequence
  Description of Artificial Sequence: Synthetic oligonucleotide
ugguaaugguguucgucuc

SEQ ID NO: 1195204 - RNA, 19 nt, Artificial Sequence
  Description of Artificial Sequence: Synthetic oligonucleotide
ccucuuuugaccuccagca

SEQ ID NO: 1195205 - RNA, 19 nt, Artificial Sequence
  Description of Artificial Sequence: Synthetic oligonucleotide
ucguagcuucagcucagga

SEQ ID NO: 1195206 - RNA, 19 nt, Artificial Sequence
  Description of Artificial Sequence: Synthetic oligonucleotide
ggaaucguagcuucagcuc

SEQ ID NO: 1195207 - RNA, 19 nt, Artificial Sequence
  Description of Artificial Sequence: Synthetic oligonucleotide
ugguacaucuagguccaca

SEQ ID NO: 1195208 - RNA, 19 nt, Artificial Sequence
  Description of Artificial Sequence: Synthetic oligonucleotide
cuuguguuccaccugacau

SEQ ID NO: 1195209 - RNA, 19 nt, Artificial Sequence
  Description of Artificial Sequence: Synthetic oligonucleotide
agcucagguacugcugagg

SEQ ID NO: 1195210 - RNA, 19 nt, Artificial Sequence
  Description of Artificial Sequence: Synthetic oligonucleotide
acuccgcauagaccaggac

SEQ ID NO: 1195211 - RNA, 19 nt, Artificial Sequence
  Description of Artificial Sequence: Synthetic oligonucleotide
gccagaguugcuaggacgg

SEQ ID NO: 1195212 - RNA, 19 nt, Artificial Sequence
  Description of Artificial Sequence: Synthetic oligonucleotide
gauggggacccaguccaag

SEQ ID NO: 1195213 - RNA, 19 nt, Artificial Sequence
  Description of Artificial Sequence: Synthetic oligonucleotide
uacgaaggaaucguagcuu

SEQ ID NO: 1195214 - RNA, 19 nt, Artificial Sequence
  Description of Artificial Sequence: Synthetic oligonucleotide
gccgucaccauugggaccg

SEQ ID NO: 1195215 - RNA, 19 nt, Artificial Sequence
  Description of Artificial Sequence: Synthetic oligonucleotide
accaacaaucuccgucuca

SEQ ID NO: 1195216 - RNA, 19 nt, Artificial Sequence
  Description of Artificial Sequence: Synthetic oligonucleotide
ggaccgaugcugcuguucc

SEQ ID NO: 1195217 - RNA, 19 nt, Artificial Sequence
  Description of Artificial Sequence: Synthetic oligonucleotide
caaaaggaggaguccacaa

SEQ ID NO: 1195218 - RNA, 19 nt, Artificial Sequence
  Description of Artificial Sequence: Synthetic oligonucleotide
cagguacugcugaggaccc

SEQ ID NO: 1195219 - RNA, 19 nt, Artificial Sequence
  Description of Artificial Sequence: Synthetic oligonucleotide
agguacuggagaccccucu

SEQ ID NO: 1195220 - RNA, 19 nt, Artificial Sequence
  Description of Artificial Sequence: Synthetic oligonucleotide
ugacauugguaaugguguu

SEQ ID NO: 1195221 - RNA, 19 nt, Artificial Sequence
  Description of Artificial Sequence: Synthetic oligonucleotide
cuuugccuguagcuugcag

SEQ ID NO: 1195222 - RNA, 19 nt, Artificial Sequence
  Description of Artificial Sequence: Synthetic oligonucleotide
uggacuccgcauagaccag

SEQ ID NO: 1195223 - RNA, 19 nt, Artificial Sequence
  Description of Artificial Sequence: Synthetic oligonucleotide
ugcuaggacgggccuucag

SEQ ID NO: 1195224 - RNA, 19 nt, Artificial Sequence
  Description of Artificial Sequence: Synthetic oligonucleotide
cagaguugcuaggacgggc

SEQ ID NO: 1195225 - RNA, 19 nt, Artificial Sequence
  Description of Artificial Sequence: Synthetic oligonucleotide
auggggacccaguccaaga

SEQ ID NO: 1195226 - RNA, 19 nt, Artificial Sequence
  Description of Artificial Sequence: Synthetic oligonucleotide
ugacaagagugcccugcuc

SEQ ID NO: 1195227 - RNA, 19 nt, Artificial Sequence
  Description of Artificial Sequence: Synthetic oligonucleotide
acccaguccaagaugacaa

SEQ ID NO: 1195228 - RNA, 19 nt, Artificial Sequence
  Description of Artificial Sequence: Synthetic oligonucleotide
cucagguacugcugaggac

SEQ ID NO: 1195229 - RNA, 19 nt, Artificial Sequence
  Description of Artificial Sequence: Synthetic oligonucleotide
ggacccaaauuuuguggag

SEQ ID NO: 1195230 - RNA, 19 nt, Artificial Sequence
  Description of Artificial Sequence: Synthetic oligonucleotide
cacuaugaccaccaagaaa

SEQ ID NO: 1195231 - RNA, 19 nt, Artificial Sequence
  Description of Artificial Sequence: Synthetic oligonucleotide
uccaccugacauugguaau

SEQ ID NO: 1195232 - RNA, 19 nt, Artificial Sequence
  Description of Artificial Sequence: Synthetic oligonucleotide
cuacgaaggaaucguagcu

SEQ ID NO: 1195233 - RNA, 19 nt, Artificial Sequence
  Description of Artificial Sequence: Synthetic oligonucleotide
guguuguucacagaagccu

SEQ ID NO: 1195234 - RNA, 19 nt, Artificial Sequence
  Description of Artificial Sequence: Synthetic oligonucleotide
acuccccuuggauggguug

SEQ ID NO: 1195235 - RNA, 19 nt, Artificial Sequence
  Description of Artificial Sequence: Synthetic oligonucleotide
ugcccaauauggguuucca

SEQ ID NO: 1195236 - RNA, 19 nt, Artificial Sequence
  Description of Artificial Sequence: Synthetic oligonucleotide
gacccaguccaagaugaca

SEQ ID NO: 1195237 - RNA, 19 nt, Artificial Sequence
  Description of Artificial Sequence: Synthetic oligonucleotide
gacgcuggguggugggaug

SEQ ID NO: 1195238 - RNA, 19 nt, Artificial Sequence
  Description of Artificial Sequence: Synthetic oligonucleotide
cacagaucaccaacaaucu

SEQ ID NO: 1195239 - RNA, 19 nt, Artificial Sequence
  Description of Artificial Sequence: Synthetic oligonucleotide
ugguguucgucuccucuuu

SEQ ID NO: 1195240 - RNA, 19 nt, Artificial Sequence
  Description of Artificial Sequence: Synthetic oligonucleotide
cguagaaagagccgucacc

SEQ ID NO: 1195241 - RNA, 19 nt, Artificial Sequence
  Description of Artificial Sequence: Synthetic oligonucleotide
gcucagagaugccaguuca

SEQ ID NO: 1195242 - RNA, 19 nt, Artificial Sequence
  Description of Artificial Sequence: Synthetic oligonucleotide
cuuccugcccaauaugggu

SEQ ID NO: 1195243 - RNA, 19 nt, Artificial Sequence
  Description of Artificial Sequence: Synthetic oligonucleotide
uucccaauaccaggacacu

SEQ ID NO: 1195244 - RNA, 19 nt, Artificial Sequence
  Description of Artificial Sequence: Synthetic oligonucleotide
guugcuaggacgggccuuc

SEQ ID NO: 1195245 - RNA, 19 nt, Artificial Sequence
  Description of Artificial Sequence: Synthetic oligonucleotide
aaacugaggcaggccacaa

SEQ ID NO: 1195246 - RNA, 19 nt, Artificial Sequence
  Description of Artificial Sequence: Synthetic oligonucleotide
accgaugcugcuguuccca

SEQ ID NO: 1195247 - RNA, 19 nt, Artificial Sequence
  Description of Artificial Sequence: Synthetic oligonucleotide
caauguguauuggaggucu

SEQ ID NO: 1195248 - RNA, 19 nt, Artificial Sequence
  Description of Artificial Sequence: Synthetic oligonucleotide
aucguagcuucagcucagg

SEQ ID NO: 1195249 - RNA, 19 nt, Artificial Sequence
  Description of Artificial Sequence: Synthetic oligonucleotide
gaccgaugcugcuguuccc

SEQ ID NO: 1195250 - RNA, 19 nt, Artificial Sequence
  Description of Artificial Sequence: Synthetic oligonucleotide
agggaaagccauggggcug

SEQ ID NO: 1195251 - RNA, 19 nt, Artificial Sequence
  Description of Artificial Sequence: Synthetic oligonucleotide
ucccaauaccaggacacuu

SEQ ID NO: 1195252 - RNA, 19 nt, Artificial Sequence
  Description of Artificial Sequence: Synthetic oligonucleotide
agucaucaccgcugaggga

SEQ ID NO: 1195253 - RNA, 19 nt, Artificial Sequence
  Description of Artificial Sequence: Synthetic oligonucleotide
aaucuccgucucaggccac

SEQ ID NO: 1195254 - RNA, 19 nt, Artificial Sequence
  Description of Artificial Sequence: Synthetic oligonucleotide
caggacgcugggugguggg

SEQ ID NO: 1195255 - RNA, 19 nt, Artificial Sequence
  Description of Artificial Sequence: Synthetic oligonucleotide
acgauuccgaucacaggca

SEQ ID NO: 1195256 - RNA, 19 nt, Artificial Sequence
  Description of Artificial Sequence: Synthetic oligonucleotide
accgcugagggaaagccau

SEQ ID NO: 1195257 - RNA, 19 nt, Artificial Sequence
  Description of Artificial Sequence: Synthetic oligonucleotide
ggccccgcaggguugagcc

SEQ ID NO: 1195258 - RNA, 19 nt, Artificial Sequence
  Description of Artificial Sequence: Synthetic oligonucleotide
uugccaccgggcagcaggu

SEQ ID NO: 1195259 - RNA, 19 nt, Artificial Sequence
  Description of Artificial Sequence: Synthetic oligonucleotide
cagcucaggaggguagaag

SEQ ID NO: 1195260 - RNA, 19 nt, Artificial Sequence
  Description of Artificial Sequence: Synthetic oligonucleotide
cuccgucucaggccacucc

SEQ ID NO: 1195261 - RNA, 19 nt, Artificial Sequence
  Description of Artificial Sequence: Synthetic oligonucleotide
ugcggccagcccacuacga

SEQ ID NO: 1195262 - RNA, 19 nt, Artificial Sequence
  Description of Artificial Sequence: Synthetic oligonucleotide
gaaagcagcacaggucagu

SEQ ID NO: 1195263 - RNA, 19 nt, Artificial Sequence
  Description of Artificial Sequence: Synthetic oligonucleotide
ggcaaguugccaccgggca

SEQ ID NO: 1195264 - RNA, 19 nt, Artificial Sequence
  Description of Artificial Sequence: Synthetic oligonucleotide
ggauggguuggacacagcu

SEQ ID NO: 1195265 - RNA, 19 nt, Artificial Sequence
  Description of Artificial Sequence: Synthetic oligonucleotide
agcccacuacgaaggaauc

SEQ ID NO: 1195266 - RNA, 19 nt, Artificial Sequence
  Description of Artificial Sequence: Synthetic oligonucleotide
aggcguagaaagagccguc

SEQ ID NO: 1195267 - RNA, 19 nt, Artificial Sequence
  Description of Artificial Sequence: Synthetic oligonucleotide
auuggaggucugaguugac

SEQ ID NO: 1195268 - RNA, 19 nt, Artificial Sequence
  Description of Artificial Sequence: Synthetic oligonucleotide
ggaccaacaagaggcugag

SEQ ID NO: 1195269 - RNA, 19 nt, Artificial Sequence
  Description of Artificial Sequence: Synthetic oligonucleotide
agguccgaggcaggaggac

SEQ ID NO: 1195270 - RNA, 19 nt, Artificial Sequence
  Description of Artificial Sequence: Synthetic oligonucleotide
gggacccaguccaagauga

SEQ ID NO: 1195271 - RNA, 19 nt, Artificial Sequence
  Description of Artificial Sequence: Synthetic oligonucleotide
accugacauugguaauggu

SEQ ID NO: 1195272 - RNA, 19 nt, Artificial Sequence
  Description of Artificial Sequence: Synthetic oligonucleotide
gccacaaaaggaggagucc

SEQ ID NO: 1195273 - RNA, 19 nt, Artificial Sequence
  Description of Artificial Sequence: Synthetic oligonucleotide
caagaacgauuccgaucac

SEQ ID NO: 1195274 - RNA, 19 nt, Artificial Sequence
  Description of Artificial Sequence: Synthetic oligonucleotide
aucuagguccacagugaga

SEQ ID NO: 1195275 - RNA, 19 nt, Artificial Sequence
  Description of Artificial Sequence: Synthetic oligonucleotide
gcccaauauggguuuccag

SEQ ID NO: 1195276 - RNA, 19 nt, Artificial Sequence
  Description of Artificial Sequence: Synthetic oligonucleotide
guaaugguguucgucuccu

SEQ ID NO: 1195277 - RNA, 19 nt, Artificial Sequence
  Description of Artificial Sequence: Synthetic oligonucleotide
gcccacuacgaaggaaucg

SEQ ID NO: 1195278 - RNA, 19 nt, Artificial Sequence
  Description of Artificial Sequence: Synthetic oligonucleotide
cucaucauuugauccacuu

SEQ ID NO: 1195279 - RNA, 19 nt, Artificial Sequence
  Description of Artificial Sequence: Synthetic oligonucleotide
gacgggucucugcacccca

SEQ ID NO: 1195280 - RNA, 19 nt, Artificial Sequence
  Description of Artificial Sequence: Synthetic oligonucleotide
cagccccuuguguuccacc

SEQ ID NO: 1195281 - RNA, 19 nt, Artificial Sequence
  Description of Artificial Sequence: Synthetic oligonucleotide
auagaccaggacgcugggu

SEQ ID NO: 1195282 - RNA, 19 nt, Artificial Sequence
  Description of Artificial Sequence: Synthetic oligonucleotide
gacuccgcauagaccagga

SEQ ID NO: 1195283 - RNA, 19 nt, Artificial Sequence
  Description of Artificial Sequence: Synthetic oligonucleotide
gcaggaggaccaacaagag

SEQ ID NO: 1195284 - RNA, 19 nt, Artificial Sequence
  Description of Artificial Sequence: Synthetic oligonucleotide
ggcuggaaagguauuugca

SEQ ID NO: 1195285 - RNA, 19 nt, Artificial Sequence
  Description of Artificial Sequence: Synthetic oligonucleotide
ccaccugacauugguaaug

SEQ ID NO: 1195286 - RNA, 19 nt, Artificial Sequence
  Description of Artificial Sequence: Synthetic oligonucleotide
cacuugguuuucccacauc

SEQ ID NO: 1195287 - RNA, 19 nt, Artificial Sequence
  Description of Artificial Sequence: Synthetic oligonucleotide
aaguucccuuccugcccaa

SEQ ID NO: 1195288 - RNA, 19 nt, Artificial Sequence
  Description of Artificial Sequence: Synthetic oligonucleotide
uucuuacauccugucugua

SEQ ID NO: 1195289 - RNA, 19 nt, Artificial Sequence
  Description of Artificial Sequence: Synthetic oligonucleotide
aggucugaguugacaucag

SEQ ID NO: 1195290 - RNA, 19 nt, Artificial Sequence
  Description of Artificial Sequence: Synthetic oligonucleotide
cagcccacuacgaaggaau

SEQ ID NO: 1195291 - RNA, 19 nt, Artificial Sequence
  Description of Artificial Sequence: Synthetic oligonucleotide
gagccccuaguucuuuucu

SEQ ID NO: 1195292 - RNA, 19 nt, Artificial Sequence
  Description of Artificial Sequence: Synthetic oligonucleotide
ccccuaguucuuuucuuac

SEQ ID NO: 1195293 - RNA, 19 nt, Artificial Sequence
  Description of Artificial Sequence: Synthetic oligonucleotide
cacagccgugggcaaugag

SEQ ID NO: 1195294 - RNA, 19 nt, Artificial Sequence
  Description of Artificial Sequence: Synthetic oligonucleotide
caucaccgcugagggaaag

SEQ ID NO: 1195295 - RNA, 19 nt, Artificial Sequence
  Description of Artificial Sequence: Synthetic oligonucleotide
gcguagaaagagccgucac

SEQ ID NO: 1195296 - RNA, 19 nt, Artificial Sequence
  Description of Artificial Sequence: Synthetic oligonucleotide
uccccuuggauggguugga

SEQ ID NO: 1195297 - RNA, 19 nt, Artificial Sequence
  Description of Artificial Sequence: Synthetic oligonucleotide
cucgccauugagggcgaac

SEQ ID NO: 1195298 - RNA, 19 nt, Artificial Sequence
  Description of Artificial Sequence: Synthetic oligonucleotide
aaguugccaccgggcagca

SEQ ID NO: 1195299 - RNA, 19 nt, Artificial Sequence
  Description of Artificial Sequence: Synthetic oligonucleotide
uggagccccuaguucuuuu

SEQ ID NO: 1195300 - RNA, 19 nt, Artificial Sequence
  Description of Artificial Sequence: Synthetic oligonucleotide
cucaggccacuccccacuc

SEQ ID NO: 1195301 - RNA, 19 nt, Artificial Sequence
  Description of Artificial Sequence: Synthetic oligonucleotide
ccacuuuuaguuaauuaau

SEQ ID NO: 1195302 - RNA, 19 nt, Artificial Sequence
  Description of Artificial Sequence: Synthetic oligonucleotide
gccauugagggcgaacaca

SEQ ID NO: 1195303 - RNA, 19 nt, Artificial Sequence
  Description of Artificial Sequence: Synthetic oligonucleotide
cagcaaugaugaggcguag

SEQ ID NO: 1195304 - RNA, 19 nt, Artificial Sequence
  Description of Artificial Sequence: Synthetic oligonucleotide
caccgcugagggaaagcca

SEQ ID NO: 1195305 - RNA, 19 nt, Artificial Sequence
  Description of Artificial Sequence: Synthetic oligonucleotide
guggccuagcagccgcuca

SEQ ID NO: 1195306 - RNA, 19 nt, Artificial Sequence
  Description of Artificial Sequence: Synthetic oligonucleotide
ggagccccuaguucuuuuc

SEQ ID NO: 1195307 - RNA, 19 nt, Artificial Sequence
  Description of Artificial Sequence: Synthetic oligonucleotide
gguccacagugagaggcug

SEQ ID NO: 1195308 - RNA, 19 nt, Artificial Sequence
  Description of Artificial Sequence: Synthetic oligonucleotide
ggcguagaaagagccguca

SEQ ID NO: 1195309 - RNA, 19 nt, Artificial Sequence
  Description of Artificial Sequence: Synthetic oligonucleotide
gauccacuuuuaguuaauu

SEQ ID NO: 1195310 - RNA, 19 nt, Artificial Sequence
  Description of Artificial Sequence: Synthetic oligonucleotide
ggggcauccccauccugac

SEQ ID NO: 1195311 - RNA, 19 nt, Artificial Sequence
  Description of Artificial Sequence: Synthetic oligonucleotide
gcaauguguauuggagguc

SEQ ID NO: 1195312 - RNA, 19 nt, Artificial Sequence
  Description of Artificial Sequence: Synthetic oligonucleotide
ggcccaaaaggagggacuc

SEQ ID NO: 1195313 - RNA, 19 nt, Artificial Sequence
  Description of Artificial Sequence: Synthetic oligonucleotide
ccuaguucuuuucuuacau

SEQ ID NO: 1195314 - RNA, 19 nt, Artificial Sequence
  Description of Artificial Sequence: Synthetic oligonucleotide
ccugcggccagcccacuac

SEQ ID NO: 1195315 - RNA, 19 nt, Artificial Sequence
  Description of Artificial Sequence: Synthetic oligonucleotide
gggcaaccugaagugggag

SEQ ID NO: 1195316 - RNA, 19 nt, Artificial Sequence
  Description of Artificial Sequence: Synthetic oligonucleotide
ggcgcauggaggguggcuc

SEQ ID NO: 1195317 - RNA, 19 nt, Artificial Sequence
  Description of Artificial Sequence: Synthetic oligonucleotide
cccuguggacuccgcauag

SEQ ID NO: 1195318 - RNA, 19 nt, Artificial Sequence
  Description of Artificial Sequence: Synthetic oligonucleotide
gugggagggacacgugacu

SEQ ID NO: 1195319 - RNA, 19 nt, Artificial Sequence
  Description of Artificial Sequence: Synthetic oligonucleotide
accaggacgcuggguggug

SEQ ID NO: 1195320 - RNA, 19 nt, Artificial Sequence
  Description of Artificial Sequence: Synthetic oligonucleotide
gccuccuccgacccucagc

SEQ ID NO: 1195321 - RNA, 19 nt, Artificial Sequence
  Description of Artificial Sequence: Synthetic oligonucleotide
ccagaguugcuaggacggg

SEQ ID NO: 1195322 - RNA, 19 nt, Artificial Sequence
  Description of Artificial Sequence: Synthetic oligonucleotide
gggacacgugacuccucug

SEQ ID NO: 1195323 - RNA, 19 nt, Artificial Sequence
  Description of Artificial Sequence: Synthetic oligonucleotide
cccaaauuuuguggagaug

SEQ ID NO: 1195324 - RNA, 19 nt, Artificial Sequence
  Description of Artificial Sequence: Synthetic oligonucleotide
uugcuaggacgggccuuca

SEQ ID NO: 1195325 - RNA, 19 nt, Artificial Sequence
  Description of Artificial Sequence: Synthetic oligonucleotide
gccccuaguucuuuucuua

SEQ ID NO: 1195326 - RNA, 19 nt, Artificial Sequence
  Description of Artificial Sequence: Synthetic oligonucleotide
acgggucucugcaccccag

SEQ ID NO: 1195327 - RNA, 19 nt, Artificial Sequence
  Description of Artificial Sequence: Synthetic oligonucleotide
cgauuccgaucacaggcac

SEQ ID NO: 1195328 - RNA, 19 nt, Artificial Sequence
  Description of Artificial Sequence: Synthetic oligonucleotide
aggacgcugggugguggga

SEQ ID NO: 1195329 - RNA, 19 nt, Artificial Sequence
  Description of Artificial Sequence: Synthetic oligonucleotide
aggcgcauggaggguggcu

SEQ ID NO: 1195330 - RNA, 19 nt, Artificial Sequence
  Description of Artificial Sequence: Synthetic oligonucleotide
ccgucucaggccacucccc

SEQ ID NO: 1195331 - RNA, 19 nt, Artificial Sequence
  Description of Artificial Sequence: Synthetic oligonucleotide
cauugguaaugguguucgu

SEQ ID NO: 1195332 - RNA, 19 nt, Artificial Sequence
  Description of Artificial Sequence: Synthetic oligonucleotide
ccaccgggcagcaggucac

SEQ ID NO: 1195333 - RNA, 19 nt, Artificial Sequence
  Description of Artificial Sequence: Synthetic oligonucleotide
aguugccaccgggcagcag

SEQ ID NO: 1195334 - RNA, 19 nt, Artificial Sequence
  Description of Artificial Sequence: Synthetic oligonucleotide
acacagccgugggcaauga

SEQ ID NO: 1195335 - RNA, 19 nt, Artificial Sequence
  Description of Artificial Sequence: Synthetic oligonucleotide
cccugcugauucuucacaa

SEQ ID NO: 1195336 - RNA, 19 nt, Artificial Sequence
  Description of Artificial Sequence: Synthetic oligonucleotide
gagggacacgugacuccuc

SEQ ID NO: 1195337 - RNA, 19 nt, Artificial Sequence
  Description of Artificial Sequence: Synthetic oligonucleotide
cauugggaccgaugcugcu

SEQ ID NO: 1195338 - RNA, 19 nt, Artificial Sequence
  Description of Artificial Sequence: Synthetic oligonucleotide
gggaccgaugcugcuguuc

SEQ ID NO: 1195339 - RNA, 19 nt, Artificial Sequence
  Description of Artificial Sequence: Synthetic oligonucleotide
ggacgggucucugcacccc

SEQ ID NO: 1195340 - RNA, 19 nt, Artificial Sequence
  Description of Artificial Sequence: Synthetic oligonucleotide
gaccaggacgcuggguggu

SEQ ID NO: 1195341 - RNA, 19 nt, Artificial Sequence
  Description of Artificial Sequence: Synthetic oligonucleotide
cagccgcucagggcaggag

SEQ ID NO: 1195342 - RNA, 19 nt, Artificial Sequence
  Description of Artificial Sequence: Synthetic oligonucleotide
cccacuacgaaggaaucgu

SEQ ID NO: 1195343 - RNA, 19 nt, Artificial Sequence
  Description of Artificial Sequence: Synthetic oligonucleotide
caccauugggaccgaugcu

SEQ ID NO: 1195344 - RNA, 19 nt, Artificial Sequence
  Description of Artificial Sequence: Synthetic oligonucleotide
ggagggacacgugacuccu

SEQ ID NO: 1195345 - RNA, 19 nt, Artificial Sequence
  Description of Artificial Sequence: Synthetic oligonucleotide
caggcgcauggaggguggc

SEQ ID NO: 1195346 - RNA, 19 nt, Artificial Sequence
  Description of Artificial Sequence: Synthetic oligonucleotide
ccacuaugaccaccaagaa

SEQ ID NO: 1195347 - RNA, 19 nt, Artificial Sequence
  Description of Artificial Sequence: Synthetic oligonucleotide
cccuuguguuccaccugac

SEQ ID NO: 1195348 - RNA, 19 nt, Artificial Sequence
  Description of Artificial Sequence: Synthetic oligonucleotide
cccgcugcgcauccuguuc

SEQ ID NO: 1195349 - RNA, 19 nt, Artificial Sequence
  Description of Artificial Sequence: Synthetic oligonucleotide
ggaaagguauuugcaccau

SEQ ID NO: 1195350 - RNA, 19 nt, Artificial Sequence
  Description of Artificial Sequence: Synthetic oligonucleotide
gccgugggcaaugaggaau

SEQ ID NO: 1195351 - RNA, 19 nt, Artificial Sequence
  Description of Artificial Sequence: Synthetic oligonucleotide
gcggccagcccacuacgaa

SEQ ID NO: 1195352 - RNA, 19 nt, Artificial Sequence
  Description of Artificial Sequence: Synthetic oligonucleotide
cccgcaggguugagccucc

SEQ ID NO: 1195353 - RNA, 19 nt, Artificial Sequence
  Description of Artificial Sequence: Synthetic oligonucleotide
ccgcugagggaaagccaug

SEQ ID NO: 1195354 - RNA, 19 nt, Artificial Sequence
  Description of Artificial Sequence: Synthetic oligonucleotide
ggccuguguuguucacaga

SEQ ID NO: 1195355 - RNA, 19 nt, Artificial Sequence
  Description of Artificial Sequence: Synthetic oligonucleotide
gguggccuagcagccgcuc

SEQ ID NO: 1195356 - RNA, 19 nt, Artificial Sequence
  Description of Artificial Sequence: Synthetic oligonucleotide
ccccgcaggguugagccuc

SEQ ID NO: 1195357 - RNA, 19 nt, Artificial Sequence
  Description of Artificial Sequence: Synthetic oligonucleotide
ugccaccgggcagcagguc

SEQ ID NO: 1195358 - RNA, 19 nt, Artificial Sequence
  Description of Artificial Sequence: Synthetic oligonucleotide
ccacuacgaaggaaucgua

SEQ ID NO: 1195359 - RNA, 19 nt, Artificial Sequence
  Description of Artificial Sequence: Synthetic oligonucleotide
agccugggccuguguuguu

SEQ ID NO: 1195360 - RNA, 19 nt, Artificial Sequence
  Description of Artificial Sequence: Synthetic oligonucleotide
gguguucgucuccucuuuu

SEQ ID NO: 1195361 - RNA, 19 nt, Artificial Sequence
  Description of Artificial Sequence: Synthetic oligonucleotide
ggacgggccuucaggcgca

SEQ ID NO: 1195362 - RNA, 19 nt, Artificial Sequence
  Description of Artificial Sequence: Synthetic oligonucleotide
acgggccuucaggcgcaug

SEQ ID NO: 1195363 - RNA, 19 nt, Artificial Sequence
  Description of Artificial Sequence: Synthetic oligonucleotide
ccugcccaauauggguuuc

SEQ ID NO: 1195364 - RNA, 19 nt, Artificial Sequence
  Description of Artificial Sequence: Synthetic oligonucleotide
cuucaggcgcauggagggu

SEQ ID NO: 1195365 - RNA, 19 nt, Artificial Sequence
  Description of Artificial Sequence: Synthetic oligonucleotide
cgucucaggccacucccca

SEQ ID NO: 1195366 - RNA, 19 nt, Artificial Sequence
  Description of Artificial Sequence: Synthetic oligonucleotide
cuccugccgcaggcuguug

SEQ ID NO: 1195367 - RNA, 19 nt, Artificial Sequence
  Description of Artificial Sequence: Synthetic oligonucleotide
cgcaggguugagccuccug

SEQ ID NO: 1195368 - RNA, 19 nt, Artificial Sequence
  Description of Artificial Sequence: Synthetic oligonucleotide
ccccuguggacuccgcaua

SEQ ID NO: 1195369 - RNA, 19 nt, Artificial Sequence
  Description of Artificial Sequence: Synthetic oligonucleotide
ggacgcuggguggugggau

SEQ ID NO: 1195370 - RNA, 19 nt, Artificial Sequence
  Description of Artificial Sequence: Synthetic oligonucleotide
ccgugggcaaugaggaauu

SEQ ID NO: 1195371 - RNA, 19 nt, Artificial Sequence
  Description of Artificial Sequence: Synthetic oligonucleotide
cgcugcgcauccuguucca

SEQ ID NO: 1195372 - RNA, 19 nt, Artificial Sequence
  Description of Artificial Sequence: Synthetic oligonucleotide
ccccagguccgaggcagga

SEQ ID NO: 1195373 - RNA, 19 nt, Artificial Sequence
  Description of Artificial Sequence: Synthetic oligonucleotide
gacgggccuucaggcgcau

SEQ ID NO: 1195374 - RNA, 19 nt, Artificial Sequence
  Description of Artificial Sequence: Synthetic oligonucleotide
gccccgcaggguugagccu

SEQ ID NO: 1195375 - RNA, 19 nt, Artificial Sequence
  Description of Artificial Sequence: Synthetic oligonucleotide
ccgucaccauugggaccga

SEQ ID NO: 1195376 - RNA, 19 nt, Artificial Sequence
  Description of Artificial Sequence: Synthetic oligonucleotide
ccucgccauugagggcgaa

SEQ ID NO: 1195377 - RNA, 19 nt, Artificial Sequence
  Description of Artificial Sequence: Synthetic oligonucleotide
cgugacuccucuggcccuu

SEQ ID NO: 1195378 - RNA, 19 nt, Artificial Sequence
  Description of Artificial Sequence: Synthetic oligonucleotide
ccgcaggguugagccuccu

SEQ ID NO: 1195379 - RNA, 19 nt, Artificial Sequence
  Description of Artificial Sequence: Synthetic oligonucleotide
aaugaauaugcuuugagcc

SEQ ID NO: 1195380 - RNA, 19 nt, Artificial Sequence
  Description of Artificial Sequence: Synthetic oligonucleotide
aaaagaaccuugcagaugg

SEQ ID NO: 1195381 - RNA, 19 nt, Artificial Sequence
  Description of Artificial Sequence: Synthetic oligonucleotide
aaguuuguaaaauaauagc

SEQ ID NO: 1195382 - RNA, 19 nt, Artificial Sequence
  Description of Artificial Sequence: Synthetic oligonucleotide
aaaaccucuacauucaguc

SEQ ID NO: 1195383 - RNA, 19 nt, Artificial Sequence
  Description of Artificial Sequence: Synthetic oligonucleotide
cuagauuuaaauuuggccc

SEQ ID NO: 1195384 - RNA, 19 nt, Artificial Sequence
  Description of Artificial Sequence: Synthetic oligonucleotide
gaagauugaaaucacaugc

SEQ ID NO: 1195385 - RNA, 19 nt, Artificial Sequence
  Description of Artificial Sequence: Synthetic oligonucleotide
ucauaaaugguuauacugg

SEQ ID NO: 1195386 - RNA, 19 nt, Artificial Sequence
  Description of Artificial Sequence: Synthetic oligonucleotide
agagacuuugucuagugcc

SEQ ID NO: 1195387 - RNA, 19 nt, Artificial Sequence
  Description of Artificial Sequence: Synthetic oligonucleotide
ucaacuguuguuaaguugc

SEQ ID NO: 1195388 - RNA, 19 nt, Artificial Sequence
  Description of Artificial Sequence: Synthetic oligonucleotide
ugcuaaaugaacuugugcc

SEQ ID NO: 1195389 - RNA, 19 nt, Artificial Sequence
  Description of Artificial Sequence: Synthetic oligonucleotide
uuuagacacacuaaccagg

SEQ ID NO: 1195390 - RNA, 19 nt, Artificial Sequence
  Description of Artificial Sequence: Synthetic oligonucleotide
acugauauccucuaccugg

SEQ ID NO: 1195391 - RNA, 19 nt, Artificial Sequence
  Description of Artificial Sequence: Synthetic oligonucleotide
uaugcuuugagccaggccu

SEQ ID NO: 1195392 - RNA, 19 nt, Artificial Sequence
  Description of Artificial Sequence: Synthetic oligonucleotide
gguaggauuagucagaagg

SEQ ID NO: 1195393 - RNA, 19 nt, Artificial Sequence
  Description of Artificial Sequence: Synthetic oligonucleotide
agaacugauauccucuacc

SEQ ID NO: 1195394 - RNA, 19 nt, Artificial Sequence
  Description of Artificial Sequence: Synthetic oligonucleotide
ucagagacuuccuagaugc

SEQ ID NO: 1195395 - RNA, 19 nt, Artificial Sequence
  Description of Artificial Sequence: Synthetic oligonucleotide
augaacuugugccagaagg

SEQ ID NO: 1195396 - RNA, 19 nt, Artificial Sequence
  Description of Artificial Sequence: Synthetic oligonucleotide
aucauaaaugguuauacug

SEQ ID NO: 1195397 - RNA, 19 nt, Artificial Sequence
  Description of Artificial Sequence: Synthetic oligonucleotide
gauguauucacacuaccag

SEQ ID NO: 1195398 - RNA, 19 nt, Artificial Sequence
  Description of Artificial Sequence: Synthetic oligonucleotide
uauuagaagaauccaaacu

SEQ ID NO: 1195399 - RNA, 19 nt, Artificial Sequence
  Description of Artificial Sequence: Synthetic oligonucleotide
uuauacaagcuuaaaguca

SEQ ID NO: 1195400 - RNA, 19 nt, Artificial Sequence
  Description of Artificial Sequence: Synthetic oligonucleotide
uaaaugguuauacuggcca

SEQ ID NO: 1195401 - RNA, 19 nt, Artificial Sequence
  Description of Artificial Sequence: Synthetic oligonucleotide
uaaaucauuaaaacuuccc

SEQ ID NO: 1195402 - RNA, 19 nt, Artificial Sequence
  Description of Artificial Sequence: Synthetic oligonucleotide
auuuuagacacacuaacca

SEQ ID NO: 1195403 - RNA, 19 nt, Artificial Sequence
  Description of Artificial Sequence: Synthetic oligonucleotide
uguuaaguugcuuauacaa

SEQ ID NO: 1195404 - RNA, 19 nt, Artificial Sequence
  Description of Artificial Sequence: Synthetic oligonucleotide
acauugaucagagacuucc

SEQ ID NO: 1195405 - RNA, 19 nt, Artificial Sequence
  Description of Artificial Sequence: Synthetic oligonucleotide
ugcuuauacaagcuuaaag

SEQ ID NO: 1195406 - RNA, 19 nt, Artificial Sequence
  Description of Artificial Sequence: Synthetic oligonucleotide
aagguauugagcuuucuga

SEQ ID NO: 1195407 - RNA, 19 nt, Artificial Sequence
  Description of Artificial Sequence: Synthetic oligonucleotide
acaugaaauuguuucacgg

SEQ ID NO: 1195408 - RNA, 19 nt, Artificial Sequence
  Description of Artificial Sequence: Synthetic oligonucleotide
uacaagggaagaaauacug

SEQ ID NO: 1195409 - RNA, 19 nt, Artificial Sequence
  Description of Artificial Sequence: Synthetic oligonucleotide
uuuuagacacacuaaccag

SEQ ID NO: 1195410 - RNA, 19 nt, Artificial Sequence
  Description of Artificial Sequence: Synthetic oligonucleotide
ucagucucauuuuagacac

SEQ ID NO: 1195411 - RNA, 19 nt, Artificial Sequence
  Description of Artificial Sequence: Synthetic oligonucleotide
ucucauuuuagacacacua

SEQ ID NO: 1195412 - RNA, 19 nt, Artificial Sequence
  Description of Artificial Sequence: Synthetic oligonucleotide
ugagauuaagugcugacuc

SEQ ID NO: 1195413 - RNA, 19 nt, Artificial Sequence
  Description of Artificial Sequence: Synthetic oligonucleotide
auuaagugcugacucugcc

SEQ ID NO: 1195414 - RNA, 19 nt, Artificial Sequence
  Description of Artificial Sequence: Synthetic oligonucleotide
ucuuauuagaagaauccaa

SEQ ID NO: 1195415 - RNA, 19 nt, Artificial Sequence
  Description of Artificial Sequence: Synthetic oligonucleotide
gacucaacaagguauugag

SEQ ID NO: 1195416 - RNA, 19 nt, Artificial Sequence
  Description of Artificial Sequence: Synthetic oligonucleotide
uguauucacacuaccaggu

SEQ ID NO: 1195417 - RNA, 19 nt, Artificial Sequence
  Description of Artificial Sequence: Synthetic oligonucleotide
uguuucacggaugagaacu

SEQ ID NO: 1195418 - RNA, 19 nt, Artificial Sequence
  Description of Artificial Sequence: Synthetic oligonucleotide
agugcuuuaacuaagcagu

SEQ ID NO: 1195419 - RNA, 19 nt, Artificial Sequence
  Description of Artificial Sequence: Synthetic oligonucleotide
auguauucacacuaccagg

SEQ ID NO: 1195420 - RNA, 19 nt, Artificial Sequence
  Description of Artificial Sequence: Synthetic oligonucleotide
ucuguugaauguauggaga

SEQ ID NO: 1195421 - RNA, 19 nt, Artificial Sequence
  Description of Artificial Sequence: Synthetic oligonucleotide
uguauggagagucuucuac

SEQ ID NO: 1195422 - RNA, 19 nt, Artificial Sequence
  Description of Artificial Sequence: Synthetic oligonucleotide
uuugggaguugaaacauga

SEQ ID NO: 1195423 - RNA, 19 nt, Artificial Sequence
  Description of Artificial Sequence: Synthetic oligonucleotide
uuagacacacuaaccaggc

SEQ ID NO: 1195424 - RNA, 19 nt, Artificial Sequence
  Description of Artificial Sequence: Synthetic oligonucleotide
uuauuagaagaauccaaac

SEQ ID NO: 1195425 - RNA, 19 nt, Artificial Sequence
  Description of Artificial Sequence: Synthetic oligonucleotide
uuuggggaaaagaaccuug

SEQ ID NO: 1195426 - RNA, 19 nt, Artificial Sequence
  Description of Artificial Sequence: Synthetic oligonucleotide
acuaccagguaauuuuggg

SEQ ID NO: 1195427 - RNA, 19 nt, Artificial Sequence
  Description of Artificial Sequence: Synthetic oligonucleotide
aaugcaggaccuuucuucu

SEQ ID NO: 1195428 - RNA, 19 nt, Artificial Sequence
  Description of Artificial Sequence: Synthetic oligonucleotide
ucgucuaaaacuacauuga

SEQ ID NO: 1195429 - RNA, 19 nt, Artificial Sequence
  Description of Artificial Sequence: Synthetic oligonucleotide
uccucuagauuuaaauuug

SEQ ID NO: 1195430 - RNA, 19 nt, Artificial Sequence
  Description of Artificial Sequence: Synthetic oligonucleotide
ugaucauaaaugguuauac

SEQ ID NO: 1195431 - RNA, 19 nt, Artificial Sequence
  Description of Artificial Sequence: Synthetic oligonucleotide
auauccucuaccuggguag

SEQ ID NO: 1195432 - RNA, 19 nt, Artificial Sequence
  Description of Artificial Sequence: Synthetic oligonucleotide
gggagguucaaccaaaggg

SEQ ID NO: 1195433 - RNA, 19 nt, Artificial Sequence
  Description of Artificial Sequence: Synthetic oligonucleotide
aaugaccucgagcacucuc

SEQ ID NO: 1195434 - RNA, 19 nt, Artificial Sequence
  Description of Artificial Sequence: Synthetic oligonucleotide
ugaaagcacacuauccucu

SEQ ID NO: 1195435 - RNA, 19 nt, Artificial Sequence
  Description of Artificial Sequence: Synthetic oligonucleotide
ucggauauuucaauugugu

SEQ ID NO: 1195436 - RNA, 19 nt, Artificial Sequence
  Description of Artificial Sequence: Synthetic oligonucleotide
gagaaguaggcucaggcac

SEQ ID NO: 1195437 - RNA, 19 nt, Artificial Sequence
  Description of Artificial Sequence: Synthetic oligonucleotide
cugguuuucacacuaauca

SEQ ID NO: 1195438 - RNA, 19 nt, Artificial Sequence
  Description of Artificial Sequence: Synthetic oligonucleotide
aggauguauucacacuacc

SEQ ID NO: 1195439 - RNA, 19 nt, Artificial Sequence
  Description of Artificial Sequence: Synthetic oligonucleotide
cucauagucguuagcagcc

SEQ ID NO: 1195440 - RNA, 19 nt, Artificial Sequence
  Description of Artificial Sequence: Synthetic oligonucleotide
gaagaauccaaacugagau

SEQ ID NO: 1195441 - RNA, 19 nt, Artificial Sequence
  Description of Artificial Sequence: Synthetic oligonucleotide
uucaucacucuuauuagaa

SEQ ID NO: 1195442 - RNA, 19 nt, Artificial Sequence
  Description of Artificial Sequence: Synthetic oligonucleotide
augaaagcacacuauccuc

SEQ ID NO: 1195443 - RNA, 19 nt, Artificial Sequence
  Description of Artificial Sequence: Synthetic oligonucleotide
ugaauaugcuuugagccag

SEQ ID NO: 1195444 - RNA, 19 nt, Artificial Sequence
  Description of Artificial Sequence: Synthetic oligonucleotide
uuaaaacuucccaggaggu

SEQ ID NO: 1195445 - RNA, 19 nt, Artificial Sequence
  Description of Artificial Sequence: Synthetic oligonucleotide
cuaccagguaauuuugggg

SEQ ID NO: 1195446 - RNA, 19 nt, Artificial Sequence
  Description of Artificial Sequence: Synthetic oligonucleotide
uaggauuagucagaaggcg

SEQ ID NO: 1195447 - RNA, 19 nt, Artificial Sequence
  Description of Artificial Sequence: Synthetic oligonucleotide
aauccaaacugagauuaag

SEQ ID NO: 1195448 - RNA, 19 nt, Artificial Sequence
  Description of Artificial Sequence: Synthetic oligonucleotide
ugagauucagacucaacaa

SEQ ID NO: 1195449 - RNA, 19 nt, Artificial Sequence
  Description of Artificial Sequence: Synthetic oligonucleotide
acaucggauauuucaauug

SEQ ID NO: 1195450 - RNA, 19 nt, Artificial Sequence
  Description of Artificial Sequence: Synthetic oligonucleotide
uaacuaagcaguugagagc

SEQ ID NO: 1195451 - RNA, 19 nt, Artificial Sequence
  Description of Artificial Sequence: Synthetic oligonucleotide
ucaagugcuuuaacuaagc

SEQ ID NO: 1195452 - RNA, 19 nt, Artificial Sequence
  Description of Artificial Sequence: Synthetic oligonucleotide
aauaugcuuugagccaggc

SEQ ID NO: 1195453 - RNA, 19 nt, Artificial Sequence
  Description of Artificial Sequence: Synthetic oligonucleotide
acggaugagaacugaaaag

SEQ ID NO: 1195454 - RNA, 19 nt, Artificial Sequence
  Description of Artificial Sequence: Synthetic oligonucleotide
uggaauuagcugcagggcu

SEQ ID NO: 1195455 - RNA, 19 nt, Artificial Sequence
  Description of Artificial Sequence: Synthetic oligonucleotide
agucucauuuuagacacac

SEQ ID NO: 1195456 - RNA, 19 nt, Artificial Sequence
  Description of Artificial Sequence: Synthetic oligonucleotide
cucuguugaauguauggag

SEQ ID NO: 1195457 - RNA, 19 nt, Artificial Sequence
  Description of Artificial Sequence: Synthetic oligonucleotide
uuugucuagugccuguaga

SEQ ID NO: 1195458 - RNA, 19 nt, Artificial Sequence
  Description of Artificial Sequence: Synthetic oligonucleotide
auucuaaaaggcccucuuc

SEQ ID NO: 1195459 - RNA, 19 nt, Artificial Sequence
  Description of Artificial Sequence: Synthetic oligonucleotide
acaagcuuaaagucaugag

SEQ ID NO: 1195460 - RNA, 19 nt, Artificial Sequence
  Description of Artificial Sequence: Synthetic oligonucleotide
cuacaagugucucauaguc

SEQ ID NO: 1195461 - RNA, 19 nt, Artificial Sequence
  Description of Artificial Sequence: Synthetic oligonucleotide
aagucaugagcaucaccuc

SEQ ID NO: 1195462 - RNA, 19 nt, Artificial Sequence
  Description of Artificial Sequence: Synthetic oligonucleotide
aauuuggcccaggaucagc

SEQ ID NO: 1195463 - RNA, 19 nt, Artificial Sequence
  Description of Artificial Sequence: Synthetic oligonucleotide
caagacaucggauauuuca

SEQ ID NO: 1195464 - RNA, 19 nt, Artificial Sequence
  Description of Artificial Sequence: Synthetic oligonucleotide
uuguaaaauaauagccuaa

SEQ ID NO: 1195465 - RNA, 19 nt, Artificial Sequence
  Description of Artificial Sequence: Synthetic oligonucleotide
auccucuagauuuaaauuu

SEQ ID NO: 1195466 - RNA, 19 nt, Artificial Sequence
  Description of Artificial Sequence: Synthetic oligonucleotide
auaaaugguuauacuggcc

SEQ ID NO: 1195467 - RNA, 19 nt, Artificial Sequence
  Description of Artificial Sequence: Synthetic oligonucleotide
ucaucacucuuauuagaag

SEQ ID NO: 1195468 - RNA, 19 nt, Artificial Sequence
  Description of Artificial Sequence: Synthetic oligonucleotide
ucugauucuauguuuugau

SEQ ID NO: 1195469 - RNA, 19 nt, Artificial Sequence
  Description of Artificial Sequence: Synthetic oligonucleotide
aaggauguauucacacuac

SEQ ID NO: 1195470 - RNA, 19 nt, Artificial Sequence
  Description of Artificial Sequence: Synthetic oligonucleotide
cucuagauuuaaauuuggc

SEQ ID NO: 1195471 - RNA, 19 nt, Artificial Sequence
  Description of Artificial Sequence: Synthetic oligonucleotide
uaaagucaugagcaucacc

SEQ ID NO: 1195472 - RNA, 19 nt, Artificial Sequence
  Description of Artificial Sequence: Synthetic oligonucleotide
ucaauugugugcacaucug

SEQ ID NO: 1195473 - RNA, 19 nt, Artificial Sequence
  Description of Artificial Sequence: Synthetic oligonucleotide
gacugcagugacaugaaag

SEQ ID NO: 1195474 - RNA, 19 nt, Artificial Sequence
  Description of Artificial Sequence: Synthetic oligonucleotide
ugcuugagcacccugcagu

SEQ ID NO: 1195475 - RNA, 19 nt, Artificial Sequence
  Description of Artificial Sequence: Synthetic oligonucleotide
uuagucagaaggcgugaag

SEQ ID NO: 1195476 - RNA, 19 nt, Artificial Sequence
  Description of Artificial Sequence: Synthetic oligonucleotide
ucuaaaaggcccucuucca

SEQ ID NO: 1195477 - RNA, 19 nt, Artificial Sequence
  Description of Artificial Sequence: Synthetic oligonucleotide
agagucuucuaccauggca

SEQ ID NO: 1195478 - RNA, 19 nt, Artificial Sequence
  Description of Artificial Sequence: Synthetic oligonucleotide
cuguugaauguauggagag

SEQ ID NO: 1195479 - RNA, 19 nt, Artificial Sequence
  Description of Artificial Sequence: Synthetic oligonucleotide
cauuaaaacuucccaggag

SEQ ID NO: 1195480 - RNA, 19 nt, Artificial Sequence
  Description of Artificial Sequence: Synthetic oligonucleotide
uucacacuaaucacuucug

SEQ ID NO: 1195481 - RNA, 19 nt, Artificial Sequence
  Description of Artificial Sequence: Synthetic oligonucleotide
aacugauauccucuaccug

SEQ ID NO: 1195482 - RNA, 19 nt, Artificial Sequence
  Description of Artificial Sequence: Synthetic oligonucleotide
uuugcaagcuauuuucuuu

SEQ ID NO: 1195483 - RNA, 19 nt, Artificial Sequence
  Description of Artificial Sequence: Synthetic oligonucleotide
aagauugaaaucacaugca

SEQ ID NO: 1195484 - RNA, 19 nt, Artificial Sequence
  Description of Artificial Sequence: Synthetic oligonucleotide
uauccucuagauuuaaauu

SEQ ID NO: 1195485 - RNA, 19 nt, Artificial Sequence
  Description of Artificial Sequence: Synthetic oligonucleotide
guugaauguauggagaguc

SEQ ID NO: 1195486 - RNA, 19 nt, Artificial Sequence
  Description of Artificial Sequence: Synthetic oligonucleotide
acuuacugaaaguuuguaa

SEQ ID NO: 1195487 - RNA, 19 nt, Artificial Sequence
  Description of Artificial Sequence: Synthetic oligonucleotide
guauggagagucuucuacc

SEQ ID NO: 1195488 - RNA, 19 nt, Artificial Sequence
  Description of Artificial Sequence: Synthetic oligonucleotide
aucaccucaggaucugcac

SEQ ID NO: 1195489 - RNA, 19 nt, Artificial Sequence
  Description of Artificial Sequence: Synthetic oligonucleotide
uguaucuucccacacucuu

SEQ ID NO: 1195490 - RNA, 19 nt, Artificial Sequence
  Description of Artificial Sequence: Synthetic oligonucleotide
uaaaaggcccucuuccaac

SEQ ID NO: 1195491 - RNA, 19 nt, Artificial Sequence
  Description of Artificial Sequence: Synthetic oligonucleotide
agauugaaaucacaugcau

SEQ ID NO: 1195492 - RNA, 19 nt, Artificial Sequence
  Description of Artificial Sequence: Synthetic oligonucleotide
caucacucuuauuagaaga

SEQ ID NO: 1195493 - RNA, 19 nt, Artificial Sequence
  Description of Artificial Sequence: Synthetic oligonucleotide
aaaugguuauacuggccau

SEQ ID NO: 1195494 - RNA, 19 nt, Artificial Sequence
  Description of Artificial Sequence: Synthetic oligonucleotide
acacuaaucacuucugguu

SEQ ID NO: 1195495 - RNA, 19 nt, Artificial Sequence
  Description of Artificial Sequence: Synthetic oligonucleotide
ucaaccaaagggucacuug

SEQ ID NO: 1195496 - RNA, 19 nt, Artificial Sequence
  Description of Artificial Sequence: Synthetic oligonucleotide
uccacgagcuacaaguguc

SEQ ID NO: 1195497 - RNA, 19 nt, Artificial Sequence
  Description of Artificial Sequence: Synthetic oligonucleotide
auagucguuagcagccucc

SEQ ID NO: 1195498 - RNA, 19 nt, Artificial Sequence
  Description of Artificial Sequence: Synthetic oligonucleotide
agucaugagcaucaccuca

SEQ ID NO: 1195499 - RNA, 19 nt, Artificial Sequence
  Description of Artificial Sequence: Synthetic oligonucleotide
guaggauuagucagaaggc

SEQ ID NO: 1195500 - RNA, 19 nt, Artificial Sequence
  Description of Artificial Sequence: Synthetic oligonucleotide
guaaaucauuaaaacuucc

SEQ ID NO: 1195501 - RNA, 19 nt, Artificial Sequence
  Description of Artificial Sequence: Synthetic oligonucleotide
gaauugaaggauguauuca

SEQ ID NO: 1195502 - RNA, 19 nt, Artificial Sequence
  Description of Artificial Sequence: Synthetic oligonucleotide
gggaaaagaaccuugcaga

SEQ ID NO: 1195503 - RNA, 19 nt, Artificial Sequence
  Description of Artificial Sequence: Synthetic oligonucleotide
ucuagugccuguagagucu

SEQ ID NO: 1195504 - RNA, 19 nt, Artificial Sequence
  Description of Artificial Sequence: Synthetic oligonucleotide
ugacaaagguucaggggca

SEQ ID NO: 1195505 - RNA, 19 nt, Artificial Sequence
  Description of Artificial Sequence: Synthetic oligonucleotide
uugcaagcuauuuucuuuc

SEQ ID NO: 1195506 - RNA, 19 nt, Artificial Sequence
  Description of Artificial Sequence: Synthetic oligonucleotide
uugaauguauggagagucu

SEQ ID NO: 1195507 - RNA, 19 nt, Artificial Sequence
  Description of Artificial Sequence: Synthetic oligonucleotide
ccuggaauuagcugcaggg

SEQ ID NO: 1195508 - RNA, 19 nt, Artificial Sequence
  Description of Artificial Sequence: Synthetic oligonucleotide
guugagaaggaaaugaaua

SEQ ID NO: 1195509 - RNA, 19 nt, Artificial Sequence
  Description of Artificial Sequence: Synthetic oligonucleotide
augaccucgagcacucucc

SEQ ID NO: 1195510 - RNA, 19 nt, Artificial Sequence
  Description of Artificial Sequence: Synthetic oligonucleotide
cuaaaacuacauugaucag

SEQ ID NO: 1195511 - RNA, 19 nt, Artificial Sequence
  Description of Artificial Sequence: Synthetic oligonucleotide
caagguauugagcuuucug

SEQ ID NO: 1195512 - RNA, 19 nt, Artificial Sequence
  Description of Artificial Sequence: Synthetic oligonucleotide
gaaaagaaccuugcagaug

SEQ ID NO: 1195513 - RNA, 19 nt, Artificial Sequence
  Description of Artificial Sequence: Synthetic oligonucleotide
gagacuuccuagaugccag

SEQ ID NO: 1195514 - RNA, 19 nt, Artificial Sequence
  Description of Artificial Sequence: Synthetic oligonucleotide
ugaaugaccucgagcacuc

SEQ ID NO: 1195515 - RNA, 19 nt, Artificial Sequence
  Description of Artificial Sequence: Synthetic oligonucleotide
uucauuugcugugggacug

SEQ ID NO: 1195516 - RNA, 19 nt, Artificial Sequence
  Description of Artificial Sequence: Synthetic oligonucleotide
agauuaagugcugacucug

SEQ ID NO: 1195517 - RNA, 19 nt, Artificial Sequence
  Description of Artificial Sequence: Synthetic oligonucleotide
acucaacaagguauugagc

SEQ ID NO: 1195518 - RNA, 19 nt, Artificial Sequence
  Description of Artificial Sequence: Synthetic oligonucleotide
aggaucagccuugauggac

SEQ ID NO: 1195519 - RNA, 19 nt, Artificial Sequence
  Description of Artificial Sequence: Synthetic oligonucleotide
uaaaugaacuugugccaga

SEQ ID NO: 1195520 - RNA, 19 nt, Artificial Sequence
  Description of Artificial Sequence: Synthetic oligonucleotide
uacauucagucucauuuua

SEQ ID NO: 1195521 - RNA, 19 nt, Artificial Sequence
  Description of Artificial Sequence: Synthetic oligonucleotide
aauugugugcacaucugau

SEQ ID NO: 1195522 - RNA, 19 nt, Artificial Sequence
  Description of Artificial Sequence: Synthetic oligonucleotide
ucacggaugagaacugaaa

SEQ ID NO: 1195523 - RNA, 19 nt, Artificial Sequence
  Description of Artificial Sequence: Synthetic oligonucleotide
aagacaucggauauuucaa

SEQ ID NO: 1195524 - RNA, 19 nt, Artificial Sequence
  Description of Artificial Sequence: Synthetic oligonucleotide
augcugacaagacaucgga

SEQ ID NO: 1195525 - RNA, 19 nt, Artificial Sequence
  Description of Artificial Sequence: Synthetic oligonucleotide
uaaccaggcucugaagucc

SEQ ID NO: 1195526 - RNA, 19 nt, Artificial Sequence
  Description of Artificial Sequence: Synthetic oligonucleotide
uacugaaaguuuguaaaau

SEQ ID NO: 1195527 - RNA, 19 nt, Artificial Sequence
  Description of Artificial Sequence: Synthetic oligonucleotide
agguauugagcuuucugaa

SEQ ID NO: 1195528 - RNA, 19 nt, Artificial Sequence
  Description of Artificial Sequence: Synthetic oligonucleotide
gguucaggggcacagggag

SEQ ID NO: 1195529 - RNA, 19 nt, Artificial Sequence
  Description of Artificial Sequence: Synthetic oligonucleotide
gguuauacuggccauuuga

SEQ ID NO: 1195530 - RNA, 19 nt, Artificial Sequence
  Description of Artificial Sequence: Synthetic oligonucleotide
cuaaccaggcucugaaguc

SEQ ID NO: 1195531 - RNA, 19 nt, Artificial Sequence
  Description of Artificial Sequence: Synthetic oligonucleotide
agggucacuugacaaaggu

SEQ ID NO: 1195532 - RNA, 19 nt, Artificial Sequence
  Description of Artificial Sequence: Synthetic oligonucleotide
aaguccucaacuguuguua

SEQ ID NO: 1195533 - RNA, 19 nt, Artificial Sequence
  Description of Artificial Sequence: Synthetic oligonucleotide
uggggaaaagaaccuugca

SEQ ID NO: 1195534 - RNA, 19 nt, Artificial Sequence
  Description of Artificial Sequence: Synthetic oligonucleotide
uccuguaucuucccacacu

SEQ ID NO: 1195535 - RNA, 19 nt, Artificial Sequence
  Description of Artificial Sequence: Synthetic oligonucleotide
cugagaggauccuucuagc

SEQ ID NO: 1195536 - RNA, 19 nt, Artificial Sequence
  Description of Artificial Sequence: Synthetic oligonucleotide
agugacaugaaagcacacu

SEQ ID NO: 1195537 - RNA, 19 nt, Artificial Sequence
  Description of Artificial Sequence: Synthetic oligonucleotide
ucugaaugaccucgagcac

SEQ ID NO: 1195538 - RNA, 19 nt, Artificial Sequence
  Description of Artificial Sequence: Synthetic oligonucleotide
guguagguaaaucauuaaa

SEQ ID NO: 1195539 - RNA, 19 nt, Artificial Sequence
  Description of Artificial Sequence: Synthetic oligonucleotide
cacuaccagguaauuuugg

SEQ ID NO: 1195540 - RNA, 19 nt, Artificial Sequence
  Description of Artificial Sequence: Synthetic oligonucleotide
cuuccaugucgucuaaaac

SEQ ID NO: 1195541 - RNA, 19 nt, Artificial Sequence
  Description of Artificial Sequence: Synthetic oligonucleotide
gaacuugugccagaaggac

SEQ ID NO: 1195542 - RNA, 19 nt, Artificial Sequence
  Description of Artificial Sequence: Synthetic oligonucleotide
agacugaucauaaaugguu

SEQ ID NO: 1195543 - RNA, 19 nt, Artificial Sequence
  Description of Artificial Sequence: Synthetic oligonucleotide
aggagaagauugaaaucac

SEQ ID NO: 1195544 - RNA, 19 nt, Artificial Sequence
  Description of Artificial Sequence: Synthetic oligonucleotide
gaacugauauccucuaccu

SEQ ID NO: 1195545 - RNA, 19 nt, Artificial Sequence
  Description of Artificial Sequence: Synthetic oligonucleotide
aacaagguauugagcuuuc

SEQ ID NO: 1195546 - RNA, 19 nt, Artificial Sequence
  Description of Artificial Sequence: Synthetic oligonucleotide
ucaagccuuuccuccaugu

SEQ ID NO: 1195547 - RNA, 19 nt, Artificial Sequence
  Description of Artificial Sequence: Synthetic oligonucleotide
ugcuuuaacuaagcaguug

SEQ ID NO: 1195548 - RNA, 19 nt, Artificial Sequence
  Description of Artificial Sequence: Synthetic oligonucleotide
accuggguaggauuaguca

SEQ ID NO: 1195549 - RNA, 19 nt, Artificial Sequence
  Description of Artificial Sequence: Synthetic oligonucleotide
uucacggaugagaacugaa

SEQ ID NO: 1195550 - RNA, 19 nt, Artificial Sequence
  Description of Artificial Sequence: Synthetic oligonucleotide
caugucgucuaaaacuaca

SEQ ID NO: 1195551 - RNA, 19 nt, Artificial Sequence
  Description of Artificial Sequence: Synthetic oligonucleotide
uaggggaugcugacaagac

SEQ ID NO: 1195552 - RNA, 19 nt, Artificial Sequence
  Description of Artificial Sequence: Synthetic oligonucleotide
agauuuaaauuuggcccag

SEQ ID NO: 1195553 - RNA, 19 nt, Artificial Sequence
  Description of Artificial Sequence: Synthetic oligonucleotide
uguugaauguauggagagu

SEQ ID NO: 1195554 - RNA, 19 nt, Artificial Sequence
  Description of Artificial Sequence: Synthetic oligonucleotide
agaagaauccaaacugaga

SEQ ID NO: 1195555 - RNA, 19 nt, Artificial Sequence
  Description of Artificial Sequence: Synthetic oligonucleotide
agagacuuccuagaugcca

SEQ ID NO: 1195556 - RNA, 19 nt, Artificial Sequence
  Description of Artificial Sequence: Synthetic oligonucleotide
cuucuagcuuugcuucugg

SEQ ID NO: 1195557 - RNA, 19 nt, Artificial Sequence
  Description of Artificial Sequence: Synthetic oligonucleotide
ggcuuugcaagcuauuuuc

SEQ ID NO: 1195558 - RNA, 19 nt, Artificial Sequence
  Description of Artificial Sequence: Synthetic oligonucleotide
acacuaaccaggcucugaa

SEQ ID NO: 1195559 - RNA, 19 nt, Artificial Sequence
  Description of Artificial Sequence: Synthetic oligonucleotide
ugccagaaggaccuuuaaa

SEQ ID NO: 1195560 - RNA, 19 nt, Artificial Sequence
  Description of Artificial Sequence: Synthetic oligonucleotide
ucaacaagguauugagcuu

SEQ ID NO: 1195561 - RNA, 19 nt, Artificial Sequence
  Description of Artificial Sequence: Synthetic oligonucleotide
ccagaaggaccuuuaaaag

SEQ ID NO: 1195562 - RNA, 19 nt, Artificial Sequence
  Description of Artificial Sequence: Synthetic oligonucleotide
agucuucuaccauggcaag

SEQ ID NO: 1195563 - RNA, 19 nt, Artificial Sequence
  Description of Artificial Sequence: Synthetic oligonucleotide
cuggaauuagcugcagggc

SEQ ID NO: 1195564 - RNA, 19 nt, Artificial Sequence
  Description of Artificial Sequence: Synthetic oligonucleotide
agauggauuggcaucauuu

SEQ ID NO: 1195565 - RNA, 19 nt, Artificial Sequence
  Description of Artificial Sequence: Synthetic oligonucleotide
gugcacaucugauucuaug

SEQ ID NO: 1195566 - RNA, 19 nt, Artificial Sequence
  Description of Artificial Sequence: Synthetic oligonucleotide
ggaugcugacaagacaucg

SEQ ID NO: 1195567 - RNA, 19 nt, Artificial Sequence
  Description of Artificial Sequence: Synthetic oligonucleotide
gcuaaaugaacuugugcca

SEQ ID NO: 1195568 - RNA, 19 nt, Artificial Sequence
  Description of Artificial Sequence: Synthetic oligonucleotide
cuuugucuagugccuguag

SEQ ID NO: 1195569 - RNA, 19 nt, Artificial Sequence
  Description of Artificial Sequence: Synthetic oligonucleotide
ugcacucuuuaugucaagu

SEQ ID NO: 1195570 - RNA, 19 nt, Artificial Sequence
  Description of Artificial Sequence: Synthetic oligonucleotide
ugaauguauggagagucuu

SEQ ID NO: 1195571 - RNA, 19 nt, Artificial Sequence
  Description of Artificial Sequence: Synthetic oligonucleotide
gauugaaaucacaugcaua

SEQ ID NO: 1195572 - RNA, 19 nt, Artificial Sequence
  Description of Artificial Sequence: Synthetic oligonucleotide
uggacuguguagguaaauc

SEQ ID NO: 1195573 - RNA, 19 nt, Artificial Sequence
  Description of Artificial Sequence: Synthetic oligonucleotide
aagugucucauagucguua

SEQ ID NO: 1195574 - RNA, 19 nt, Artificial Sequence
  Description of Artificial Sequence: Synthetic oligonucleotide
aaaacuugcuggagagacu

SEQ ID NO: 1195575 - RNA, 19 nt, Artificial Sequence
  Description of Artificial Sequence: Synthetic oligonucleotide
acauucagucucauuuuag

SEQ ID NO: 1195576 - RNA, 19 nt, Artificial Sequence
  Description of Artificial Sequence: Synthetic oligonucleotide
ucggggcucacucucugca

SEQ ID NO: 1195577 - RNA, 19 nt, Artificial Sequence
  Description of Artificial Sequence: Synthetic oligonucleotide
uccauuguauuuugagauu

SEQ ID NO: 1195578 - RNA, 19 nt, Artificial Sequence
  Description of Artificial Sequence: Synthetic oligonucleotide
uguucaaugcaggaccuuu

SEQ ID NO: 1195579 - RNA, 19 nt, Artificial Sequence
  Description of Artificial Sequence: Synthetic oligonucleotide
cuuuaugucaagugcuuua

SEQ ID NO: 1195580 - RNA, 19 nt, Artificial Sequence
  Description of Artificial Sequence: Synthetic oligonucleotide
cugaacaaaaccucuacau

SEQ ID NO: 1195581 - RNA, 19 nt, Artificial Sequence
  Description of Artificial Sequence: Synthetic oligonucleotide
aguugcuuauacaagcuua

SEQ ID NO: 1195582 - RNA, 19 nt, Artificial Sequence
  Description of Artificial Sequence: Synthetic oligonucleotide
ugucuagugccuguagagu

SEQ ID NO: 1195583 - RNA, 19 nt, Artificial Sequence
  Description of Artificial Sequence: Synthetic oligonucleotide
uuuucacacuaaucacuuc

SEQ ID NO: 1195584 - RNA, 19 nt, Artificial Sequence
  Description of Artificial Sequence: Synthetic oligonucleotide
gaauaugcuuugagccagg

SEQ ID NO: 1195585 - RNA, 19 nt, Artificial Sequence
  Description of Artificial Sequence: Synthetic oligonucleotide
aaacuacauugaucagaga

SEQ ID NO: 1195586 - RNA, 19 nt, Artificial Sequence
  Description of Artificial Sequence: Synthetic oligonucleotide
uauccucuaccuggguagg

SEQ ID NO: 1195587 - RNA, 19 nt, Artificial Sequence
  Description of Artificial Sequence: Synthetic oligonucleotide
ugcaagcuauuuucuuucu

SEQ ID NO: 1195588 - RNA, 19 nt, Artificial Sequence
  Description of Artificial Sequence: Synthetic oligonucleotide
gguauugagcuuucugaac

SEQ ID NO: 1195589 - RNA, 19 nt, Artificial Sequence
  Description of Artificial Sequence: Synthetic oligonucleotide
agacaucggauauuucaau

SEQ ID NO: 1195590 - RNA, 19 nt, Artificial Sequence
  Description of Artificial Sequence: Synthetic oligonucleotide
agcacacuauccucuagau

SEQ ID NO: 1195591 - RNA, 19 nt, Artificial Sequence
  Description of Artificial Sequence: Synthetic oligonucleotide
acaugcauacugugguggu

SEQ ID NO: 1195592 - RNA, 19 nt, Artificial Sequence
  Description of Artificial Sequence: Synthetic oligonucleotide
ggagagaugcuaaaugaac

SEQ ID NO: 1195593 - RNA, 19 nt, Artificial Sequence
  Description of Artificial Sequence: Synthetic oligonucleotide
uaauagccuaaagggaaaa

SEQ ID NO: 1195594 - RNA, 19 nt, Artificial Sequence
  Description of Artificial Sequence: Synthetic oligonucleotide
cucuuauuagaagaaucca

SEQ ID NO: 1195595 - RNA, 19 nt, Artificial Sequence
  Description of Artificial Sequence: Synthetic oligonucleotide
aggauuagucagaaggcgu

SEQ ID NO: 1195596 - RNA, 19 nt, Artificial Sequence
  Description of Artificial Sequence: Synthetic oligonucleotide
agucguuagcagccuccac

SEQ ID NO: 1195597 - RNA, 19 nt, Artificial Sequence
  Description of Artificial Sequence: Synthetic oligonucleotide
cucgcuugcuugagcaccc

SEQ ID NO: 1195598 - RNA, 19 nt, Artificial Sequence
  Description of Artificial Sequence: Synthetic oligonucleotide
cuggagagacuuugucuag

SEQ ID NO: 1195599 - RNA, 19 nt, Artificial Sequence
  Description of Artificial Sequence: Synthetic oligonucleotide
uuaaagucaugagcaucac

SEQ ID NO: 1195600 - RNA, 19 nt, Artificial Sequence
  Description of Artificial Sequence: Synthetic oligonucleotide
ucacucuuauuagaagaau

SEQ ID NO: 1195601 - RNA, 19 nt, Artificial Sequence
  Description of Artificial Sequence: Synthetic oligonucleotide
ccucuagauuuaaauuugg

SEQ ID NO: 1195602 - RNA, 19 nt, Artificial Sequence
  Description of Artificial Sequence: Synthetic oligonucleotide
ucugaacucucuguugaau

SEQ ID NO: 1195603 - RNA, 19 nt, Artificial Sequence
  Description of Artificial Sequence: Synthetic oligonucleotide
aucggauauuucaauugug

SEQ ID NO: 1195604 - RNA, 19 nt, Artificial Sequence
  Description of Artificial Sequence: Synthetic oligonucleotide
gagguucaaccaaaggguc

SEQ ID NO: 1195605 - RNA, 19 nt, Artificial Sequence
  Description of Artificial Sequence: Synthetic oligonucleotide
cacggaugagaacugaaaa

SEQ ID NO: 1195606 - RNA, 19 nt, Artificial Sequence
  Description of Artificial Sequence: Synthetic oligonucleotide
ugcugacaagacaucggau

SEQ ID NO: 1195607 - RNA, 19 nt, Artificial Sequence
  Description of Artificial Sequence: Synthetic oligonucleotide
ggauuagucagaaggcgug

SEQ ID NO: 1195608 - RNA, 19 nt, Artificial Sequence
  Description of Artificial Sequence: Synthetic oligonucleotide
ggagagacuuugucuagug

SEQ ID NO: 1195609 - RNA, 19 nt, Artificial Sequence
  Description of Artificial Sequence: Synthetic oligonucleotide
gcacucuuuaugucaagug

SEQ ID NO: 1195610 - RNA, 19 nt, Artificial Sequence
  Description of Artificial Sequence: Synthetic oligonucleotide
ugaccucgagcacucuccu

SEQ ID NO: 1195611 - RNA, 19 nt, Artificial Sequence
  Description of Artificial Sequence: Synthetic oligonucleotide
cuaagcaguugagagccuc

SEQ ID NO: 1195612 - RNA, 19 nt, Artificial Sequence
  Description of Artificial Sequence: Synthetic oligonucleotide
aagugcugacucugcccug

SEQ ID NO: 1195613 - RNA, 19 nt, Artificial Sequence
  Description of Artificial Sequence: Synthetic oligonucleotide
auucacacuaccagguaau

SEQ ID NO: 1195614 - RNA, 19 nt, Artificial Sequence
  Description of Artificial Sequence: Synthetic oligonucleotide
gaaagcacacuauccucua

SEQ ID NO: 1195615 - RNA, 19 nt, Artificial Sequence
  Description of Artificial Sequence: Synthetic oligonucleotide
cacuaaccaggcucugaag

SEQ ID NO: 1195616 - RNA, 19 nt, Artificial Sequence
  Description of Artificial Sequence: Synthetic oligonucleotide
cuaaaaggcccucuuccaa

SEQ ID NO: 1195617 - RNA, 19 nt, Artificial Sequence
  Description of Artificial Sequence: Synthetic oligonucleotide
gguuuguucaaugcaggac

SEQ ID NO: 1195618 - RNA, 19 nt, Artificial Sequence
  Description of Artificial Sequence: Synthetic oligonucleotide
aguccucaacuguuguuaa

SEQ ID NO: 1195619 - RNA, 19 nt, Artificial Sequence
  Description of Artificial Sequence: Synthetic oligonucleotide
uaaaacuucccaggagguu

SEQ ID NO: 1195620 - RNA, 19 nt, Artificial Sequence
  Description of Artificial Sequence: Synthetic oligonucleotide
cuaggggaugcugacaaga

SEQ ID NO: 1195621 - RNA, 19 nt, Artificial Sequence
  Description of Artificial Sequence: Synthetic oligonucleotide
guccucaacuguuguuaag

SEQ ID NO: 1195622 - RNA, 19 nt, Artificial Sequence
  Description of Artificial Sequence: Synthetic oligonucleotide
acacuaccagguaauuuug

SEQ ID NO: 1195623 - RNA, 19 nt, Artificial Sequence
  Description of Artificial Sequence: Synthetic oligonucleotide
agugcacuaggggaugcug

SEQ ID NO: 1195624 - RNA, 19 nt, Artificial Sequence
  Description of Artificial Sequence: Synthetic oligonucleotide
gcuuguuuccugaagccug

SEQ ID NO: 1195625 - RNA, 19 nt, Artificial Sequence
  Description of Artificial Sequence: Synthetic oligonucleotide
gcugacaagacaucggaua

SEQ ID NO: 1195626 - RNA, 19 nt, Artificial Sequence
  Description of Artificial Sequence: Synthetic oligonucleotide
acgcuauggcuucaucacu

SEQ ID NO: 1195627 - RNA, 19 nt, Artificial Sequence
  Description of Artificial Sequence: Synthetic oligonucleotide
ggauguauucacacuacca

SEQ ID NO: 1195628 - RNA, 19 nt, Artificial Sequence
  Description of Artificial Sequence: Synthetic oligonucleotide
gauucuaaaaggcccucuu

SEQ ID NO: 1195629 - RNA, 19 nt, Artificial Sequence
  Description of Artificial Sequence: Synthetic oligonucleotide
cauagucguuagcagccuc

SEQ ID NO: 1195630 - RNA, 19 nt, Artificial Sequence
  Description of Artificial Sequence: Synthetic oligonucleotide
ucauagucguuagcagccu

SEQ ID NO: 1195631 - RNA, 19 nt, Artificial Sequence
  Description of Artificial Sequence: Synthetic oligonucleotide
ggggagguucaaccaaagg

SEQ ID NO: 1195632 - RNA, 19 nt, Artificial Sequence
  Description of Artificial Sequence: Synthetic oligonucleotide
gacaagacaucggauauuu

SEQ ID NO: 1195633 - RNA, 19 nt, Artificial Sequence
  Description of Artificial Sequence: Synthetic oligonucleotide
uugcuuauacaagcuuaaa

SEQ ID NO: 1195634 - RNA, 19 nt, Artificial Sequence
  Description of Artificial Sequence: Synthetic oligonucleotide
augguuauacuggccauuu

SEQ ID NO: 1195635 - RNA, 19 nt, Artificial Sequence
  Description of Artificial Sequence: Synthetic oligonucleotide
cacacuaaucacuucuggu

SEQ ID NO: 1195636 - RNA, 19 nt, Artificial Sequence
  Description of Artificial Sequence: Synthetic oligonucleotide
caucggauauuucaauugu

SEQ ID NO: 1195637 - RNA, 19 nt, Artificial Sequence
  Description of Artificial Sequence: Synthetic oligonucleotide
auuagucagaaggcgugaa

SEQ ID NO: 1195638 - RNA, 19 nt, Artificial Sequence
  Description of Artificial Sequence: Synthetic oligonucleotide
augcuuugagccaggccuc

SEQ ID NO: 1195639 - RNA, 19 nt, Artificial Sequence
  Description of Artificial Sequence: Synthetic oligonucleotide
gacacacuaaccaggcucu

SEQ ID NO: 1195640 - RNA, 19 nt, Artificial Sequence
  Description of Artificial Sequence: Synthetic oligonucleotide
uugauggacuguguaggua

SEQ ID NO: 1195641 - RNA, 19 nt, Artificial Sequence
  Description of Artificial Sequence: Synthetic oligonucleotide
gugucucauagucguuagc

SEQ ID NO: 1195642 - RNA, 19 nt, Artificial Sequence
  Description of Artificial Sequence: Synthetic oligonucleotide
gccauuugagaacugauau

SEQ ID NO: 1195643 - RNA, 19 nt, Artificial Sequence
  Description of Artificial Sequence: Synthetic oligonucleotide
ggagguucaaccaaagggu

SEQ ID NO: 1195644 - RNA, 19 nt, Artificial Sequence
  Description of Artificial Sequence: Synthetic oligonucleotide
acaagacaucggauauuuc

SEQ ID NO: 1195645 - RNA, 19 nt, Artificial Sequence
  Description of Artificial Sequence: Synthetic oligonucleotide
agguucaaccaaaggguca

SEQ ID NO: 1195646 - RNA, 19 nt, Artificial Sequence
  Description of Artificial Sequence: Synthetic oligonucleotide
caugcauacugugguggug

SEQ ID NO: 1195647 - RNA, 19 nt, Artificial Sequence
  Description of Artificial Sequence: Synthetic oligonucleotide
aaccaggcucugaaguccu

SEQ ID NO: 1195648 - RNA, 19 nt, Artificial Sequence
  Description of Artificial Sequence: Synthetic oligonucleotide
caugagcaucaccucagga

SEQ ID NO: 1195649 - RNA, 19 nt, Artificial Sequence
  Description of Artificial Sequence: Synthetic oligonucleotide
agccuugauggacugugua

SEQ ID NO: 1195650 - RNA, 19 nt, Artificial Sequence
  Description of Artificial Sequence: Synthetic oligonucleotide
gggaguugaaacaugaaau

SEQ ID NO: 1195651 - RNA, 19 nt, Artificial Sequence
  Description of Artificial Sequence: Synthetic oligonucleotide
agacuuccuagaugccaga

SEQ ID NO: 1195652 - RNA, 19 nt, Artificial Sequence
  Description of Artificial Sequence: Synthetic oligonucleotide
cagugacaugaaagcacac

SEQ ID NO: 1195653 - RNA, 19 nt, Artificial Sequence
  Description of Artificial Sequence: Synthetic oligonucleotide
gcuugagcacccugcagug

SEQ ID NO: 1195654 - RNA, 19 nt, Artificial Sequence
  Description of Artificial Sequence: Synthetic oligonucleotide
gauccuggggagguucaac

SEQ ID NO: 1195655 - RNA, 19 nt, Artificial Sequence
  Description of Artificial Sequence: Synthetic oligonucleotide
guucaaugcaggaccuuuc

SEQ ID NO: 1195656 - RNA, 19 nt, Artificial Sequence
  Description of Artificial Sequence: Synthetic oligonucleotide
uccucuaccuggguaggau

SEQ ID NO: 1195657 - RNA, 19 nt, Artificial Sequence
  Description of Artificial Sequence: Synthetic oligonucleotide
accucuacauucagucuca

SEQ ID NO: 1195658 - RNA, 19 nt, Artificial Sequence
  Description of Artificial Sequence: Synthetic oligonucleotide
aaagaaccuugcagaugga

SEQ ID NO: 1195659 - RNA, 19 nt, Artificial Sequence
  Description of Artificial Sequence: Synthetic oligonucleotide
cugacaagacaucggauau

SEQ ID NO: 1195660 - RNA, 19 nt, Artificial Sequence
  Description of Artificial Sequence: Synthetic oligonucleotide
agggcuuugcaagcuauuu

SEQ ID NO: 1195661 - RNA, 19 nt, Artificial Sequence
  Description of Artificial Sequence: Synthetic oligonucleotide
cagacucaacaagguauug

SEQ ID NO: 1195662 - RNA, 19 nt, Artificial Sequence
  Description of Artificial Sequence: Synthetic oligonucleotide
uacugugguggugauucua

SEQ ID NO: 1195663 - RNA, 19 nt, Artificial Sequence
  Description of Artificial Sequence: Synthetic oligonucleotide
cugcagacugaucauaaau

SEQ ID NO: 1195664 - RNA, 19 nt, Artificial Sequence
  Description of Artificial Sequence: Synthetic oligonucleotide
uggggccucgcuugcuuga

SEQ ID NO: 1195665 - RNA, 19 nt, Artificial Sequence
  Description of Artificial Sequence: Synthetic oligonucleotide
uucacacuaccagguaauu

SEQ ID NO: 1195666 - RNA, 19 nt, Artificial Sequence
  Description of Artificial Sequence: Synthetic oligonucleotide
ggguuuguucaaugcagga

SEQ ID NO: 1195667 - RNA, 19 nt, Artificial Sequence
  Description of Artificial Sequence: Synthetic oligonucleotide
acaagguauugagcuuucu

SEQ ID NO: 1195668 - RNA, 19 nt, Artificial Sequence
  Description of Artificial Sequence: Synthetic oligonucleotide
uugcccaggugaugcuugu

SEQ ID NO: 1195669 - RNA, 19 nt, Artificial Sequence
  Description of Artificial Sequence: Synthetic oligonucleotide
cugaaugaccucgagcacu

SEQ ID NO: 1195670 - RNA, 19 nt, Artificial Sequence
  Description of Artificial Sequence: Synthetic oligonucleotide
cugagauuaagugcugacu

SEQ ID NO: 1195671 - RNA, 19 nt, Artificial Sequence
  Description of Artificial Sequence: Synthetic oligonucleotide
acuauccucuagauuuaaa

SEQ ID NO: 1195672 - RNA, 19 nt, Artificial Sequence
  Description of Artificial Sequence: Synthetic oligonucleotide
acaaagguucaggggcaca

SEQ ID NO: 1195673 - RNA, 19 nt, Artificial Sequence
  Description of Artificial Sequence: Synthetic oligonucleotide
ccaaagggucacuugacaa

SEQ ID NO: 1195674 - RNA, 19 nt, Artificial Sequence
  Description of Artificial Sequence: Synthetic oligonucleotide
gauggacuguguagguaaa

SEQ ID NO: 1195675 - RNA, 19 nt, Artificial Sequence
  Description of Artificial Sequence: Synthetic oligonucleotide
agucuuccaggagaagauu

SEQ ID NO: 1195676 - RNA, 19 nt, Artificial Sequence
  Description of Artificial Sequence: Synthetic oligonucleotide
ugugcacgcuauggcuuca

SEQ ID NO: 1195677 - RNA, 19 nt, Artificial Sequence
  Description of Artificial Sequence: Synthetic oligonucleotide
ggugauucuaaaaggcccu

SEQ ID NO: 1195678 - RNA, 19 nt, Artificial Sequence
  Description of Artificial Sequence: Synthetic oligonucleotide
cauugaucagagacuuccu

SEQ ID NO: 1195679 - RNA, 19 nt, Artificial Sequence
  Description of Artificial Sequence: Synthetic oligonucleotide
ggccucgcuugcuugagca

SEQ ID NO: 1195680 - RNA, 19 nt, Artificial Sequence
  Description of Artificial Sequence: Synthetic oligonucleotide
ccucgcuugcuugagcacc

SEQ ID NO: 1195681 - RNA, 19 nt, Artificial Sequence
  Description of Artificial Sequence: Synthetic oligonucleotide
cugauucuauguuuugauu

SEQ ID NO: 1195682 - RNA, 19 nt, Artificial Sequence
  Description of Artificial Sequence: Synthetic oligonucleotide
ggcugggguuuguucaaug

SEQ ID NO: 1195683 - RNA, 19 nt, Artificial Sequence
  Description of Artificial Sequence: Synthetic oligonucleotide
auggacuguguagguaaau

SEQ ID NO: 1195684 - RNA, 19 nt, Artificial Sequence
  Description of Artificial Sequence: Synthetic oligonucleotide
gaccucgagcacucuccuc

SEQ ID NO: 1195685 - RNA, 19 nt, Artificial Sequence
  Description of Artificial Sequence: Synthetic oligonucleotide
uuguucaaugcaggaccuu

SEQ ID NO: 1195686 - RNA, 19 nt, Artificial Sequence
  Description of Artificial Sequence: Synthetic oligonucleotide
ggguaggauuagucagaag

SEQ ID NO: 1195687 - RNA, 19 nt, Artificial Sequence
  Description of Artificial Sequence: Synthetic oligonucleotide
cacacuaaccaggcucuga

SEQ ID NO: 1195688 - RNA, 19 nt, Artificial Sequence
  Description of Artificial Sequence: Synthetic oligonucleotide
cacgagcuacaagugucuc

SEQ ID NO: 1195689 - RNA, 19 nt, Artificial Sequence
  Description of Artificial Sequence: Synthetic oligonucleotide
cagaaggcgugaagcuuga

SEQ ID NO: 1195690 - RNA, 19 nt, Artificial Sequence
  Description of Artificial Sequence: Synthetic oligonucleotide
caacaagguauugagcuuu

SEQ ID NO: 1195691 - RNA, 19 nt, Artificial Sequence
  Description of Artificial Sequence: Synthetic oligonucleotide
acacacuaaccaggcucug

SEQ ID NO: 1195692 - RNA, 19 nt, Artificial Sequence
  Description of Artificial Sequence: Synthetic oligonucleotide
acacuauccucuagauuua

SEQ ID NO: 1195693 - RNA, 19 nt, Artificial Sequence
  Description of Artificial Sequence: Synthetic oligonucleotide
aaguaggcucaggcacagu

SEQ ID NO: 1195694 - RNA, 19 nt, Artificial Sequence
  Description of Artificial Sequence: Synthetic oligonucleotide
caggaucagccuugaugga

SEQ ID NO: 1195695 - RNA, 19 nt, Artificial Sequence
  Description of Artificial Sequence: Synthetic oligonucleotide
acuaagcaguugagagccu

SEQ ID NO: 1195696 - RNA, 19 nt, Artificial Sequence
  Description of Artificial Sequence: Synthetic oligonucleotide
gcugacucugcccuggaau

SEQ ID NO: 1195697 - RNA, 19 nt, Artificial Sequence
  Description of Artificial Sequence: Synthetic oligonucleotide
ugagagccuccuguaucuu

SEQ ID NO: 1195698 - RNA, 19 nt, Artificial Sequence
  Description of Artificial Sequence: Synthetic oligonucleotide
ggccauuugagaacugaua

SEQ ID NO: 1195699 - RNA, 19 nt, Artificial Sequence
  Description of Artificial Sequence: Synthetic oligonucleotide
cucgagcacucuccuccuc

SEQ ID NO: 1195700 - RNA, 19 nt, Artificial Sequence
  Description of Artificial Sequence: Synthetic oligonucleotide
ccagagaucuccuggaauu

SEQ ID NO: 1195701 - RNA, 19 nt, Artificial Sequence
  Description of Artificial Sequence: Synthetic oligonucleotide
gggaugcugacaagacauc

SEQ ID NO: 1195702 - RNA, 19 nt, Artificial Sequence
  Description of Artificial Sequence: Synthetic oligonucleotide
gucucauuuuagacacacu

SEQ ID NO: 1195703 - RNA, 19 nt, Artificial Sequence
  Description of Artificial Sequence: Synthetic oligonucleotide
cagucaagcugcugggcuu

SEQ ID NO: 1195704 - RNA, 19 nt, Artificial Sequence
  Description of Artificial Sequence: Synthetic oligonucleotide
caucaagccuuuccuccau

SEQ ID NO: 1195705 - RNA, 19 nt, Artificial Sequence
  Description of Artificial Sequence: Synthetic oligonucleotide
gccucgcuugcuugagcac

SEQ ID NO: 1195706 - RNA, 19 nt, Artificial Sequence
  Description of Artificial Sequence: Synthetic oligonucleotide
gugcuuuaacuaagcaguu

SEQ ID NO: 1195707 - RNA, 19 nt, Artificial Sequence
  Description of Artificial Sequence: Synthetic oligonucleotide
gccagagaucuccuggaau

SEQ ID NO: 1195708 - RNA, 19 nt, Artificial Sequence
  Description of Artificial Sequence: Synthetic oligonucleotide
gggccucgcuugcuugagc

SEQ ID NO: 1195709 - RNA, 19 nt, Artificial Sequence
  Description of Artificial Sequence: Synthetic oligonucleotide
gggcuuugcaagcuauuuu

SEQ ID NO: 1195710 - RNA, 19 nt, Artificial Sequence
  Description of Artificial Sequence: Synthetic oligonucleotide
ggggccucgcuugcuugag

SEQ ID NO: 1195711 - RNA, 19 nt, Artificial Sequence
  Description of Artificial Sequence: Synthetic oligonucleotide
caagugucucauagucguu

SEQ ID NO: 1195712 - RNA, 19 nt, Artificial Sequence
  Description of Artificial Sequence: Synthetic oligonucleotide
gagcacccugcagugcacu

SEQ ID NO: 1195713 - RNA, 19 nt, Artificial Sequence
  Description of Artificial Sequence: Synthetic oligonucleotide
gcacuaggggaugcugaca

SEQ ID NO: 1195714 - RNA, 19 nt, Artificial Sequence
  Description of Artificial Sequence: Synthetic oligonucleotide
gaaugaccucgagcacucu

SEQ ID NO: 1195715 - RNA, 19 nt, Artificial Sequence
  Description of Artificial Sequence: Synthetic oligonucleotide
gcacacuauccucuagauu

SEQ ID NO: 1195716 - RNA, 19 nt, Artificial Sequence
  Description of Artificial Sequence: Synthetic oligonucleotide
cuagugccuguagagucuu

SEQ ID NO: 1195717 - RNA, 19 nt, Artificial Sequence
  Description of Artificial Sequence: Synthetic oligonucleotide
ccacgagcuacaagugucu

SEQ ID NO: 1195718 - RNA, 19 nt, Artificial Sequence
  Description of Artificial Sequence: Synthetic oligonucleotide
cgucuaaaacuacauugau

SEQ ID NO: 1195719 - RNA, 19 nt, Artificial Sequence
  Description of Artificial Sequence: Synthetic oligonucleotide
gcccuggaauuagcugcag

SEQ ID NO: 1195720 - RNA, 19 nt, Artificial Sequence
  Description of Artificial Sequence: Synthetic oligonucleotide
cagggcuuugcaagcuauu

SEQ ID NO: 1195721 - RNA, 19 nt, Artificial Sequence
  Description of Artificial Sequence: Synthetic oligonucleotide
cgagcuacaagugucucau

SEQ ID NO: 1195722 - RNA, 19 nt, Artificial Sequence
  Description of Artificial Sequence: Synthetic oligonucleotide
cccaggugaugcuuguaau

SEQ ID NO: 1195723 - RNA, 19 nt, Artificial Sequence
  Description of Artificial Sequence: Synthetic oligonucleotide
ggauccuggggagguucaa

SEQ ID NO: 1195724 - RNA, 19 nt, Artificial Sequence
  Description of Artificial Sequence: Synthetic oligonucleotide
gugcacgcuauggcuucau

SEQ ID NO: 1195725 - RNA, 19 nt, Artificial Sequence
  Description of Artificial Sequence: Synthetic oligonucleotide
gcagauggauuggcaucau

SEQ ID NO: 1195726 - RNA, 19 nt, Artificial Sequence
  Description of Artificial Sequence: Synthetic oligonucleotide
aaaauuucagcuuugagcc

SEQ ID NO: 1195727 - RNA, 19 nt, Artificial Sequence
  Description of Artificial Sequence: Synthetic oligonucleotide
gauacacuagcauagaacc

SEQ ID NO: 1195728 - RNA, 19 nt, Artificial Sequence
  Description of Artificial Sequence: Synthetic oligonucleotide
aacaccuugaguccacugc

SEQ ID NO: 1195729 - RNA, 19 nt, Artificial Sequence
  Description of Artificial Sequence: Synthetic oligonucleotide
gguaaagaaauacaggugg

SEQ ID NO: 1195730 - RNA, 19 nt, Artificial Sequence
  Description of Artificial Sequence: Synthetic oligonucleotide
gagaucaacaccuugaguc

SEQ ID NO: 1195731 - RNA, 19 nt, Artificial Sequence
  Description of Artificial Sequence: Synthetic oligonucleotide
gauuguaccaccuucauaa

SEQ ID NO: 1195732 - RNA, 19 nt, Artificial Sequence
  Description of Artificial Sequence: Synthetic oligonucleotide
uagaaguuuauugauaucc

SEQ ID NO: 1195733 - RNA, 19 nt, Artificial Sequence
  Description of Artificial Sequence: Synthetic oligonucleotide
uagagagucaucaacauuc

SEQ ID NO: 1195734 - RNA, 19 nt, Artificial Sequence
  Description of Artificial Sequence: Synthetic oligonucleotide
acugauagacaaucggucc

SEQ ID NO: 1195735 - RNA, 19 nt, Artificial Sequence
  Description of Artificial Sequence: Synthetic oligonucleotide
aucaacauucaacugacuc

SEQ ID NO: 1195736 - RNA, 19 nt, Artificial Sequence
  Description of Artificial Sequence: Synthetic oligonucleotide
ugaacaaacaccaacggua

SEQ ID NO: 1195737 - RNA, 19 nt, Artificial Sequence
  Description of Artificial Sequence: Synthetic oligonucleotide
uguaagaggaccuuaaaau

SEQ ID NO: 1195738 - RNA, 19 nt, Artificial Sequence
  Description of Artificial Sequence: Synthetic oligonucleotide
auggugacuccucagaggc

SEQ ID NO: 1195739 - RNA, 19 nt, Artificial Sequence
  Description of Artificial Sequence: Synthetic oligonucleotide
aagaugcuucuauuuaugg

SEQ ID NO: 1195740 - RNA, 19 nt, Artificial Sequence
  Description of Artificial Sequence: Synthetic oligonucleotide
gaugcuucuauuuaugguc

SEQ ID NO: 1195741 - RNA, 19 nt, Artificial Sequence
  Description of Artificial Sequence: Synthetic oligonucleotide
uacaguagaaguuuauuga

SEQ ID NO: 1195742 - RNA, 19 nt, Artificial Sequence
  Description of Artificial Sequence: Synthetic oligonucleotide
cuauuuauggucuugaaaa

SEQ ID NO: 1195743 - RNA, 19 nt, Artificial Sequence
  Description of Artificial Sequence: Synthetic oligonucleotide
uguaccaccuucauaaaac

SEQ ID NO: 1195744 - RNA, 19 nt, Artificial Sequence
  Description of Artificial Sequence: Synthetic oligonucleotide
uuugcagggaaccagcuac

SEQ ID NO: 1195745 - RNA, 19 nt, Artificial Sequence
  Description of Artificial Sequence: Synthetic oligonucleotide
gaugcauagagcuugcuca

SEQ ID NO: 1195746 - RNA, 19 nt, Artificial Sequence
  Description of Artificial Sequence: Synthetic oligonucleotide
gagaaaacgggauucuucc

SEQ ID NO: 1195747 - RNA, 19 nt, Artificial Sequence
  Description of Artificial Sequence: Synthetic oligonucleotide
aauguguccucuaacaucu

SEQ ID NO: 1195748 - RNA, 19 nt, Artificial Sequence
  Description of Artificial Sequence: Synthetic oligonucleotide
aguagaaguuuauugauau

SEQ ID NO: 1195749 - RNA, 19 nt, Artificial Sequence
  Description of Artificial Sequence: Synthetic oligonucleotide
agcggcauuuuacacauac

SEQ ID NO: 1195750 - RNA, 19 nt, Artificial Sequence
  Description of Artificial Sequence: Synthetic oligonucleotide
aaggcaaguacgaaaacag

SEQ ID NO: 1195751 - RNA, 19 nt, Artificial Sequence
  Description of Artificial Sequence: Synthetic oligonucleotide
ucuuauuugccugucaaca

SEQ ID NO: 1195752 - RNA, 19 nt, Artificial Sequence
  Description of Artificial Sequence: Synthetic oligonucleotide
aacgguaaagaaauacagg

SEQ ID NO: 1195753 - RNA, 19 nt, Artificial Sequence
  Description of Artificial Sequence: Synthetic oligonucleotide
gauaucucuuauuugccug

SEQ ID NO: 1195754 - RNA, 19 nt, Artificial Sequence
  Description of Artificial Sequence: Synthetic oligonucleotide
gugacauuuacaaugagac

SEQ ID NO: 1195755 - RNA, 19 nt, Artificial Sequence
  Description of Artificial Sequence: Synthetic oligonucleotide
ugacaacugcaucagagug

SEQ ID NO: 1195756 - RNA, 19 nt, Artificial Sequence
  Description of Artificial Sequence: Synthetic oligonucleotide
uuuggaugcauagagcuug

SEQ ID NO: 1195757 - RNA, 19 nt, Artificial Sequence
  Description of Artificial Sequence: Synthetic oligonucleotide
agaacccucuccaaaaugc

SEQ ID NO: 1195758 - RNA, 19 nt, Artificial Sequence
  Description of Artificial Sequence: Synthetic oligonucleotide
gaaaacgggauucuucccc

SEQ ID NO: 1195759 - RNA, 19 nt, Artificial Sequence
  Description of Artificial Sequence: Synthetic oligonucleotide
uucaugugcgcuuuggaug

SEQ ID NO: 1195760 - RNA, 19 nt, Artificial Sequence
  Description of Artificial Sequence: Synthetic oligonucleotide
aaguacgaaaacaggugcc

SEQ ID NO: 1195761 - RNA, 19 nt, Artificial Sequence
  Description of Artificial Sequence: Synthetic oligonucleotide
cacuauaucaucauuuuca

SEQ ID NO: 1195762 - RNA, 19 nt, Artificial Sequence
  Description of Artificial Sequence: Synthetic oligonucleotide
acaacugcaucagaguggc

SEQ ID NO: 1195763 - RNA, 19 nt, Artificial Sequence
  Description of Artificial Sequence: Synthetic oligonucleotide
acugucaacaaugagagaa

SEQ ID NO: 1195764 - RNA, 19 nt, Artificial Sequence
  Description of Artificial Sequence: Synthetic oligonucleotide
uuaagcggcauuuuacaca

SEQ ID NO: 1195765 - RNA, 19 nt, Artificial Sequence
  Description of Artificial Sequence: Synthetic oligonucleotide
aguacgaaaacaggugccc

SEQ ID NO: 1195766 - RNA, 19 nt, Artificial Sequence
  Description of Artificial Sequence: Synthetic oligonucleotide
aacgggauucuuccccucc

SEQ ID NO: 1195767 - RNA, 19 nt, Artificial Sequence
  Description of Artificial Sequence: Synthetic oligonucleotide
cauacacaccaguagagag

SEQ ID NO: 1195768 - RNA, 19 nt, Artificial Sequence
  Description of Artificial Sequence: Synthetic oligonucleotide
agcuggacuccucuuagcc

SEQ ID NO: 1195769 - RNA, 19 nt, Artificial Sequence
  Description of Artificial Sequence: Synthetic oligonucleotide
aaucgguccaaaauaaugu

SEQ ID NO: 1195770 - RNA, 19 nt, Artificial Sequence
  Description of Artificial Sequence: Synthetic oligonucleotide
aagaaagaugcuucuauuu

SEQ ID NO: 1195771 - RNA, 19 nt, Artificial Sequence
  Description of Artificial Sequence: Synthetic oligonucleotide
aggagaauaggauaaaaua

SEQ ID NO: 1195772 - RNA, 19 nt, Artificial Sequence
  Description of Artificial Sequence: Synthetic oligonucleotide
ugauauccacuuaagcggc

SEQ ID NO: 1195773 - RNA, 19 nt, Artificial Sequence
  Description of Artificial Sequence: Synthetic oligonucleotide
cacacagacauccuuuugg

SEQ ID NO: 1195774 - RNA, 19 nt, Artificial Sequence
  Description of Artificial Sequence: Synthetic oligonucleotide
caaugcuucacaacagagg

SEQ ID NO: 1195775 - RNA, 19 nt, Artificial Sequence
  Description of Artificial Sequence: Synthetic oligonucleotide
agauacacuagcauagaac

SEQ ID NO: 1195776 - RNA, 19 nt, Artificial Sequence
  Description of Artificial Sequence: Synthetic oligonucleotide
ucgguuacuuugcugggcg

SEQ ID NO: 1195777 - RNA, 19 nt, Artificial Sequence
  Description of Artificial Sequence: Synthetic oligonucleotide
caaguacgaaaacaggugc

SEQ ID NO: 1195778 - RNA, 19 nt, Artificial Sequence
  Description of Artificial Sequence: Synthetic oligonucleotide
uagacaaucgguccaaaau

SEQ ID NO: 1195779 - RNA, 19 nt, Artificial Sequence
  Description of Artificial Sequence: Synthetic oligonucleotide
aagggcgucgguuacuuug

SEQ ID NO: 1195780 - RNA, 19 nt, Artificial Sequence
  Description of Artificial Sequence: Synthetic oligonucleotide
ucauccaugcucucaaaug

SEQ ID NO: 1195781 - RNA, 19 nt, Artificial Sequence
  Description of Artificial Sequence: Synthetic oligonucleotide
accaacgguaaagaaauac

SEQ ID NO: 1195782 - RNA, 19 nt, Artificial Sequence
  Description of Artificial Sequence: Synthetic oligonucleotide
gagaccaagagcuacagua

SEQ ID NO: 1195783 - RNA, 19 nt, Artificial Sequence
  Description of Artificial Sequence: Synthetic oligonucleotide
caaaauaauguaagaggac

SEQ ID NO: 1195784 - RNA, 19 nt, Artificial Sequence
  Description of Artificial Sequence: Synthetic oligonucleotide
uccuuaaaaccucugcaga

SEQ ID NO: 1195785 - RNA, 19 nt, Artificial Sequence
  Description of Artificial Sequence: Synthetic oligonucleotide
gcaugugacauuuacaaug

SEQ ID NO: 1195786 - RNA, 19 nt, Artificial Sequence
  Description of Artificial Sequence: Synthetic oligonucleotide
uccaaacagccccaugacg

SEQ ID NO: 1195787 - RNA, 19 nt, Artificial Sequence
  Description of Artificial Sequence: Synthetic oligonucleotide
ucaugugcgcuuuggaugc

SEQ ID NO: 1195788 - RNA, 19 nt, Artificial Sequence
  Description of Artificial Sequence: Synthetic oligonucleotide
caaucgguccaaaauaaug

SEQ ID NO: 1195789 - RNA, 19 nt, Artificial Sequence
  Description of Artificial Sequence: Synthetic oligonucleotide
uucugugcucuuuugcagg

SEQ ID NO: 1195790 - RNA, 19 nt, Artificial Sequence
  Description of Artificial Sequence: Synthetic oligonucleotide
uacugauagacaaucgguc

SEQ ID NO: 1195791 - RNA, 19 nt, Artificial Sequence
  Description of Artificial Sequence: Synthetic oligonucleotide
guccaaaauaauguaagag

SEQ ID NO: 1195792 - RNA, 19 nt, Artificial Sequence
  Description of Artificial Sequence: Synthetic oligonucleotide
aguucaaggccacuauauc

SEQ ID NO: 1195793 - RNA, 19 nt, Artificial Sequence
  Description of Artificial Sequence: Synthetic oligonucleotide
acugcaucagaguggcccc

SEQ ID NO: 1195794 - RNA, 19 nt, Artificial Sequence
  Description of Artificial Sequence: Synthetic oligonucleotide
acuagcauagaacccucuc

SEQ ID NO: 1195795 - RNA, 19 nt, Artificial Sequence
  Description of Artificial Sequence: Synthetic oligonucleotide
uggauaucucuuauuugcc

SEQ ID NO: 1195796 - RNA, 19 nt, Artificial Sequence
  Description of Artificial Sequence: Synthetic oligonucleotide
cuagcauagaacccucucc

SEQ ID NO: 1195797 - RNA, 19 nt, Artificial Sequence
  Description of Artificial Sequence: Synthetic oligonucleotide
aaaacgggauucuuccccu

SEQ ID NO: 1195798 - RNA, 19 nt, Artificial Sequence
  Description of Artificial Sequence: Synthetic oligonucleotide
uacacuagcauagaacccu

SEQ ID NO: 1195799 - RNA, 19 nt, Artificial Sequence
  Description of Artificial Sequence: Synthetic oligonucleotide
uaauguaagaggaccuuaa

SEQ ID NO: 1195800 - RNA, 19 nt, Artificial Sequence
  Description of Artificial Sequence: Synthetic oligonucleotide
aaccagcuacucuuaggac

SEQ ID NO: 1195801 - RNA, 19 nt, Artificial Sequence
  Description of Artificial Sequence: Synthetic oligonucleotide
uucaaggccacuauaucau

SEQ ID NO: 1195802 - RNA, 19 nt, Artificial Sequence
  Description of Artificial Sequence: Synthetic oligonucleotide
aaaaccugucuguagugau

SEQ ID NO: 1195803 - RNA, 19 nt, Artificial Sequence
  Description of Artificial Sequence: Synthetic oligonucleotide
uuugagccaacugucaaca

SEQ ID NO: 1195804 - RNA, 19 nt, Artificial Sequence
  Description of Artificial Sequence: Synthetic oligonucleotide
acaggaaaauggugacucc

SEQ ID NO: 1195805 - RNA, 19 nt, Artificial Sequence
  Description of Artificial Sequence: Synthetic oligonucleotide
aaagaggauucugucgauc

SEQ ID NO: 1195806 - RNA, 19 nt, Artificial Sequence
  Description of Artificial Sequence: Synthetic oligonucleotide
uacaggaaaauggugacuc

SEQ ID NO: 1195807 - RNA, 19 nt, Artificial Sequence
  Description of Artificial Sequence: Synthetic oligonucleotide
agaauaggauaaaauacug

SEQ ID NO: 1195808 - RNA, 19 nt, Artificial Sequence
  Description of Artificial Sequence: Synthetic oligonucleotide
uucagguuaaacagaugac

SEQ ID NO: 1195809 - RNA, 19 nt, Artificial Sequence
  Description of Artificial Sequence: Synthetic oligonucleotide
uaagcggcauuuuacacau

SEQ ID NO: 1195810 - RNA, 19 nt, Artificial Sequence
  Description of Artificial Sequence: Synthetic oligonucleotide
cacaagacucugcauagcc

SEQ ID NO: 1195811 - RNA, 19 nt, Artificial Sequence
  Description of Artificial Sequence: Synthetic oligonucleotide
aagauacacuagcauagaa

SEQ ID NO: 1195812 - RNA, 19 nt, Artificial Sequence
  Description of Artificial Sequence: Synthetic oligonucleotide
uagccuuuccgacuucccg

SEQ ID NO: 1195813 - RNA, 19 nt, Artificial Sequence
  Description of Artificial Sequence: Synthetic oligonucleotide
uuugcugggcgcuuugccc

SEQ ID NO: 1195814 - RNA, 19 nt, Artificial Sequence
  Description of Artificial Sequence: Synthetic oligonucleotide
accguuuuacuuucucuuc

SEQ ID NO: 1195815 - RNA, 19 nt, Artificial Sequence
  Description of Artificial Sequence: Synthetic oligonucleotide
guucaaggccacuauauca

SEQ ID NO: 1195816 - RNA, 19 nt, Artificial Sequence
  Description of Artificial Sequence: Synthetic oligonucleotide
ucggaguguggccagucgg

SEQ ID NO: 1195817 - RNA, 19 nt, Artificial Sequence
  Description of Artificial Sequence: Synthetic oligonucleotide
agaagcaggguuuuauuaa

SEQ ID NO: 1195818 - RNA, 19 nt, Artificial Sequence
  Description of Artificial Sequence: Synthetic oligonucleotide
auguaagaggaccuuaaaa

SEQ ID NO: 1195819 - RNA, 19 nt, Artificial Sequence
  Description of Artificial Sequence: Synthetic oligonucleotide
agacaaucgguccaaaaua

SEQ ID NO: 1195820 - RNA, 19 nt, Artificial Sequence
  Description of Artificial Sequence: Synthetic oligonucleotide
ucaugagaaaacgggauuc

SEQ ID NO: 1195821 - RNA, 19 nt, Artificial Sequence
  Description of Artificial Sequence: Synthetic oligonucleotide
uucagcuuugagccaacug

SEQ ID NO: 1195822 - RNA, 19 nt, Artificial Sequence
  Description of Artificial Sequence: Synthetic oligonucleotide
auuuauggucuugaaaaga

SEQ ID NO: 1195823 - RNA, 19 nt, Artificial Sequence
  Description of Artificial Sequence: Synthetic oligonucleotide
caacacugagacaucuggg

SEQ ID NO: 1195824 - RNA, 19 nt, Artificial Sequence
  Description of Artificial Sequence: Synthetic oligonucleotide
cacuuaagcggcauuuuac

SEQ ID NO: 1195825 - RNA, 19 nt, Artificial Sequence
  Description of Artificial Sequence: Synthetic oligonucleotide
uucacagaccguuuuacuu

SEQ ID NO: 1195826 - RNA, 19 nt, Artificial Sequence
  Description of Artificial Sequence: Synthetic oligonucleotide
gaaggcaaguacgaaaaca

SEQ ID NO: 1195827 - RNA, 19 nt, Artificial Sequence
  Description of Artificial Sequence: Synthetic oligonucleotide
gagaauaggauaaaauacu

SEQ ID NO: 1195828 - RNA, 19 nt, Artificial Sequence
  Description of Artificial Sequence: Synthetic oligonucleotide
acucucauuuccuuucuga

SEQ ID NO: 1195829 - RNA, 19 nt, Artificial Sequence
  Description of Artificial Sequence: Synthetic oligonucleotide
ucuccaaaaugcaaugcuu

SEQ ID NO: 1195830 - RNA, 19 nt, Artificial Sequence
  Description of Artificial Sequence: Synthetic oligonucleotide
ucgguccaaaauaauguaa

SEQ ID NO: 1195831 - RNA, 19 nt, Artificial Sequence
  Description of Artificial Sequence: Synthetic oligonucleotide
auucugucgaucuccauuu

SEQ ID NO: 1195832 - RNA, 19 nt, Artificial Sequence
  Description of Artificial Sequence: Synthetic oligonucleotide
guucccugcgcccaggcag

SEQ ID NO: 1195833 - RNA, 19 nt, Artificial Sequence
  Description of Artificial Sequence: Synthetic oligonucleotide
cauugaccagcucuuuggg

SEQ ID NO: 1195834 - RNA, 19 nt, Artificial Sequence
  Description of Artificial Sequence: Synthetic oligonucleotide
gugaagauacacuagcaua

SEQ ID NO: 1195835 - RNA, 19 nt, Artificial Sequence
  Description of Artificial Sequence: Synthetic oligonucleotide
auacugauagacaaucggu

SEQ ID NO: 1195836 - RNA, 19 nt, Artificial Sequence
  Description of Artificial Sequence: Synthetic oligonucleotide
uccucuuagccuuuccgac

SEQ ID NO: 1195837 - RNA, 19 nt, Artificial Sequence
  Description of Artificial Sequence: Synthetic oligonucleotide
ugacucuucucagaacugc

SEQ ID NO: 1195838 - RNA, 19 nt, Artificial Sequence
  Description of Artificial Sequence: Synthetic oligonucleotide
cugucgaucuccauuucug

SEQ ID NO: 1195839 - RNA, 19 nt, Artificial Sequence
  Description of Artificial Sequence: Synthetic oligonucleotide
ucacagaccguuuuacuuu

SEQ ID NO: 1195840 - RNA, 19 nt, Artificial Sequence
  Description of Artificial Sequence: Synthetic oligonucleotide
uucggaguguggccagucg

SEQ ID NO: 1195841 - RNA, 19 nt, Artificial Sequence
  Description of Artificial Sequence: Synthetic oligonucleotide
cacaacagagguguagugc

SEQ ID NO: 1195842 - RNA, 19 nt, Artificial Sequence
  Description of Artificial Sequence: Synthetic oligonucleotide
gguguagugcaagagauac

SEQ ID NO: 1195843 - RNA, 19 nt, Artificial Sequence
  Description of Artificial Sequence: Synthetic oligonucleotide
aaacgggauucuuccccuc

SEQ ID NO: 1195844 - RNA, 19 nt, Artificial Sequence
  Description of Artificial Sequence: Synthetic oligonucleotide
aacaauccuuaaaaccucu

SEQ ID NO: 1195845 - RNA, 19 nt, Artificial Sequence
  Description of Artificial Sequence: Synthetic oligonucleotide
cugcugugauuucaaagag

SEQ ID NO: 1195846 - RNA, 19 nt, Artificial Sequence
  Description of Artificial Sequence: Synthetic oligonucleotide
ccaacugucaacaaugaga

SEQ ID NO: 1195847 - RNA, 19 nt, Artificial Sequence
  Description of Artificial Sequence: Synthetic oligonucleotide
agaccguuuuacuuucucu

SEQ ID NO: 1195848 - RNA, 19 nt, Artificial Sequence
  Description of Artificial Sequence: Synthetic oligonucleotide
ucuaugauuccagccuuca

SEQ ID NO: 1195849 - RNA, 19 nt, Artificial Sequence
  Description of Artificial Sequence: Synthetic oligonucleotide
uuagccuuuccgacuuccc

SEQ ID NO: 1195850 - RNA, 19 nt, Artificial Sequence
  Description of Artificial Sequence: Synthetic oligonucleotide
agagcuacaguagaaguuu

SEQ ID NO: 1195851 - RNA, 19 nt, Artificial Sequence
  Description of Artificial Sequence: Synthetic oligonucleotide
ucacaacagagguguagug

SEQ ID NO: 1195852 - RNA, 19 nt, Artificial Sequence
  Description of Artificial Sequence: Synthetic oligonucleotide
guagugaucaggaccagca

SEQ ID NO: 1195853 - RNA, 19 nt, Artificial Sequence
  Description of Artificial Sequence: Synthetic oligonucleotide
caaugaccacucauugacc

SEQ ID NO: 1195854 - RNA, 19 nt, Artificial Sequence
  Description of Artificial Sequence: Synthetic oligonucleotide
cagguuaaacagaugacaa

SEQ ID NO: 1195855 - RNA, 19 nt, Artificial Sequence
  Description of Artificial Sequence: Synthetic oligonucleotide
cacugcaugugacauuuac

SEQ ID NO: 1195856 - RNA, 19 nt, Artificial Sequence
  Description of Artificial Sequence: Synthetic oligonucleotide
ugccugucaacaacucuca

SEQ ID NO: 1195857 - RNA, 19 nt, Artificial Sequence
  Description of Artificial Sequence: Synthetic oligonucleotide
auagccuucaucacuucug

SEQ ID NO: 1195858 - RNA, 19 nt, Artificial Sequence
  Description of Artificial Sequence: Synthetic oligonucleotide
ggcacuuccucuuuccaag

SEQ ID NO: 1195859 - RNA, 19 nt, Artificial Sequence
  Description of Artificial Sequence: Synthetic oligonucleotide
ugaguucaaggccacuaua

SEQ ID NO: 1195860 - RNA, 19 nt, Artificial Sequence
  Description of Artificial Sequence: Synthetic oligonucleotide
uucuauuuauggucuugaa

SEQ ID NO: 1195861 - RNA, 19 nt, Artificial Sequence
  Description of Artificial Sequence: Synthetic oligonucleotide
cucuuauuugccugucaac

SEQ ID NO: 1195862 - RNA, 19 nt, Artificial Sequence
  Description of Artificial Sequence: Synthetic oligonucleotide
cuacucuuaggaccgcaag

SEQ ID NO: 1195863 - RNA, 19 nt, Artificial Sequence
  Description of Artificial Sequence: Synthetic oligonucleotide
aagagcuacaguagaaguu

SEQ ID NO: 1195864 - RNA, 19 nt, Artificial Sequence
  Description of Artificial Sequence: Synthetic oligonucleotide
aacuggguggcccuagcuu

SEQ ID NO: 1195865 - RNA, 19 nt, Artificial Sequence
  Description of Artificial Sequence: Synthetic oligonucleotide
caaugagaccaagagcuac

SEQ ID NO: 1195866 - RNA, 19 nt, Artificial Sequence
  Description of Artificial Sequence: Synthetic oligonucleotide
cacagacauccuuuuggcc

SEQ ID NO: 1195867 - RNA, 19 nt, Artificial Sequence
  Description of Artificial Sequence: Synthetic oligonucleotide
ggugacuccucagaggccg

SEQ ID NO: 1195868 - RNA, 19 nt, Artificial Sequence
  Description of Artificial Sequence: Synthetic oligonucleotide
acaccuagaggagggcacc

SEQ ID NO: 1195869 - RNA, 19 nt, Artificial Sequence
  Description of Artificial Sequence: Synthetic oligonucleotide
gacaaucgguccaaaauaa

SEQ ID NO: 1195870 - RNA, 19 nt, Artificial Sequence
  Description of Artificial Sequence: Synthetic oligonucleotide
aggaccgcaagcugguucu

SEQ ID NO: 1195871 - RNA, 19 nt, Artificial Sequence
  Description of Artificial Sequence: Synthetic oligonucleotide
caaacagccccaugacgag

SEQ ID NO: 1195872 - RNA, 19 nt, Artificial Sequence
  Description of Artificial Sequence: Synthetic oligonucleotide
uuggaugcauagagcuugc

SEQ ID NO: 1195873 - RNA, 19 nt, Artificial Sequence
  Description of Artificial Sequence: Synthetic oligonucleotide
agaccaagagcuacaguag

SEQ ID NO: 1195874 - RNA, 19 nt, Artificial Sequence
  Description of Artificial Sequence: Synthetic oligonucleotide
auagacaaucgguccaaaa

SEQ ID NO: 1195875 - RNA, 19 nt, Artificial Sequence
  Description of Artificial Sequence: Synthetic oligonucleotide
aggguuuuauuaaaaguaa

SEQ ID NO: 1195876 - RNA, 19 nt, Artificial Sequence
  Description of Artificial Sequence: Synthetic oligonucleotide
cuuugcugggcgcuuugcc

SEQ ID NO: 1195877 - RNA, 19 nt, Artificial Sequence
  Description of Artificial Sequence: Synthetic oligonucleotide
agaugaggccccaacuggg

SEQ ID NO: 1195878 - RNA, 19 nt, Artificial Sequence
  Description of Artificial Sequence: Synthetic oligonucleotide
uccgacuucccguucccug

SEQ ID NO: 1195879 - RNA, 19 nt, Artificial Sequence
  Description of Artificial Sequence: Synthetic oligonucleotide
cuugaguccacugcaugug

SEQ ID NO: 1195880 - RNA, 19 nt, Artificial Sequence
  Description of Artificial Sequence: Synthetic oligonucleotide
cuuccucuuuccaaggcca

SEQ ID NO: 1195881 - RNA, 19 nt, Artificial Sequence
  Description of Artificial Sequence: Synthetic oligonucleotide
ugcaugugacauuuacaau

SEQ ID NO: 1195882 - RNA, 19 nt, Artificial Sequence
  Description of Artificial Sequence: Synthetic oligonucleotide
cugauagacaaucggucca

SEQ ID NO: 1195883 - RNA, 19 nt, Artificial Sequence
  Description of Artificial Sequence: Synthetic oligonucleotide
cuuauuugccugucaacaa

SEQ ID NO: 1195884 - RNA, 19 nt, Artificial Sequence
  Description of Artificial Sequence: Synthetic oligonucleotide
gacugcauggccucuaggu

SEQ ID NO: 1195885 - RNA, 19 nt, Artificial Sequence
  Description of Artificial Sequence: Synthetic oligonucleotide
cuuagccuuuccgacuucc

SEQ ID NO: 1195886 - RNA, 19 nt, Artificial Sequence
  Description of Artificial Sequence: Synthetic oligonucleotide
aacagccccaugacgagcu

SEQ ID NO: 1195887 - RNA, 19 nt, Artificial Sequence
  Description of Artificial Sequence: Synthetic oligonucleotide
guaccaccuucauaaaaca

SEQ ID NO: 1195888 - RNA, 19 nt, Artificial Sequence
  Description of Artificial Sequence: Synthetic oligonucleotide
guagaaguuuauugauauc

SEQ ID NO: 1195889 - RNA, 19 nt, Artificial Sequence
  Description of Artificial Sequence: Synthetic oligonucleotide
gcaaguacgaaaacaggug

SEQ ID NO: 1195890 - RNA, 19 nt, Artificial Sequence
  Description of Artificial Sequence: Synthetic oligonucleotide
ugacgagcuggacuccucu

SEQ ID NO: 1195891 - RNA, 19 nt, Artificial Sequence
  Description of Artificial Sequence: Synthetic oligonucleotide
uaggaccgcaagcugguuc

SEQ ID NO: 1195892 - RNA, 19 nt, Artificial Sequence
  Description of Artificial Sequence: Synthetic oligonucleotide
ugauagacaaucgguccaa

SEQ ID NO: 1195893 - RNA, 19 nt, Artificial Sequence
  Description of Artificial Sequence: Synthetic oligonucleotide
cacaccuagaggagggcac

SEQ ID NO: 1195894 - RNA, 19 nt, Artificial Sequence
  Description of Artificial Sequence: Synthetic oligonucleotide
aggcaaguacgaaaacagg

SEQ ID NO: 1195895 - RNA, 19 nt, Artificial Sequence
  Description of Artificial Sequence: Synthetic oligonucleotide
agcagagaggucaugaguu

SEQ ID NO: 1195896 - RNA, 19 nt, Artificial Sequence
  Description of Artificial Sequence: Synthetic oligonucleotide
guaagaggaccuuaaaauu

SEQ ID NO: 1195897 - RNA, 19 nt, Artificial Sequence
  Description of Artificial Sequence: Synthetic oligonucleotide
uggcccuagcuucggagug

SEQ ID NO: 1195898 - RNA, 19 nt, Artificial Sequence
  Description of Artificial Sequence: Synthetic oligonucleotide
gaagauacacuagcauaga

SEQ ID NO: 1195899 - RNA, 19 nt, Artificial Sequence
  Description of Artificial Sequence: Synthetic oligonucleotide
auacacaccaguagagagu

SEQ ID NO: 1195900 - RNA, 19 nt, Artificial Sequence
  Description of Artificial Sequence: Synthetic oligonucleotide
gugcgcuuuggaugcauag

SEQ ID NO: 1195901 - RNA, 19 nt, Artificial Sequence
  Description of Artificial Sequence: Synthetic oligonucleotide
cacagaccguuuuacuuuc

SEQ ID NO: 1195902 - RNA, 19 nt, Artificial Sequence
  Description of Artificial Sequence: Synthetic oligonucleotide
ugcaucuuucacagaccgu

SEQ ID NO: 1195903 - RNA, 19 nt, Artificial Sequence
  Description of Artificial Sequence: Synthetic oligonucleotide
agggcgucgguuacuuugc

SEQ ID NO: 1195904 - RNA, 19 nt, Artificial Sequence
  Description of Artificial Sequence: Synthetic oligonucleotide
ugcgcuuuggaugcauaga

SEQ ID NO: 1195905 - RNA, 19 nt, Artificial Sequence
  Description of Artificial Sequence: Synthetic oligonucleotide
ccaaacagccccaugacga

SEQ ID NO: 1195906 - RNA, 19 nt, Artificial Sequence
  Description of Artificial Sequence: Synthetic oligonucleotide
gaaaacaauccaguuuaua

SEQ ID NO: 1195907 - RNA, 19 nt, Artificial Sequence
  Description of Artificial Sequence: Synthetic oligonucleotide
cuucuauuuauggucuuga

SEQ ID NO: 1195908 - RNA, 19 nt, Artificial Sequence
  Description of Artificial Sequence: Synthetic oligonucleotide
ccaaggccaacacugagac

SEQ ID NO: 1195909 - RNA, 19 nt, Artificial Sequence
  Description of Artificial Sequence: Synthetic oligonucleotide
cacugagacaucugggaga

SEQ ID NO: 1195910 - RNA, 19 nt, Artificial Sequence
  Description of Artificial Sequence: Synthetic oligonucleotide
gaguccacugcaugugaca

SEQ ID NO: 1195911 - RNA, 19 nt, Artificial Sequence
  Description of Artificial Sequence: Synthetic oligonucleotide
gucacgggcagccgccugg

SEQ ID NO: 1195912 - RNA, 19 nt, Artificial Sequence
  Description of Artificial Sequence: Synthetic oligonucleotide
ugcccacaccuagaggagg

SEQ ID NO: 1195913 - RNA, 19 nt, Artificial Sequence
  Description of Artificial Sequence: Synthetic oligonucleotide
aucaacaccuugaguccac

SEQ ID NO: 1195914 - RNA, 19 nt, Artificial Sequence
  Description of Artificial Sequence: Synthetic oligonucleotide
acaggagaauaggauaaaa

SEQ ID NO: 1195915 - RNA, 19 nt, Artificial Sequence
  Description of Artificial Sequence: Synthetic oligonucleotide
cugcugagcucccauguuc

SEQ ID NO: 1195916 - RNA, 19 nt, Artificial Sequence
  Description of Artificial Sequence: Synthetic oligonucleotide
cucuuaggaccgcaagcug

SEQ ID NO: 1195917 - RNA, 19 nt, Artificial Sequence
  Description of Artificial Sequence: Synthetic oligonucleotide
ggaugcauagagcuugcuc

SEQ ID NO: 1195918 - RNA, 19 nt, Artificial Sequence
  Description of Artificial Sequence: Synthetic oligonucleotide
cuccucuuagccuuuccga

SEQ ID NO: 1195919 - RNA, 19 nt, Artificial Sequence
  Description of Artificial Sequence: Synthetic oligonucleotide
caagagcuacaguagaagu

SEQ ID NO: 1195920 - RNA, 19 nt, Artificial Sequence
  Description of Artificial Sequence: Synthetic oligonucleotide
acacuagcauagaacccuc

SEQ ID NO: 1195921 - RNA, 19 nt, Artificial Sequence
  Description of Artificial Sequence: Synthetic oligonucleotide
auuguaccaccuucauaaa

SEQ ID NO: 1195922 - RNA, 19 nt, Artificial Sequence
  Description of Artificial Sequence: Synthetic oligonucleotide
accaguagagagucaucaa

SEQ ID NO: 1195923 - RNA, 19 nt, Artificial Sequence
  Description of Artificial Sequence: Synthetic oligonucleotide
caccaguagagagucauca

SEQ ID NO: 1195924 - RNA, 19 nt, Artificial Sequence
  Description of Artificial Sequence: Synthetic oligonucleotide
cucuaugauuccagccuuc

SEQ ID NO: 1195925 - RNA, 19 nt, Artificial Sequence
  Description of Artificial Sequence: Synthetic oligonucleotide
ccaacgguaaagaaauaca

SEQ ID NO: 1195926 - RNA, 19 nt, Artificial Sequence
  Description of Artificial Sequence: Synthetic oligonucleotide
gaccguuuuacuuucucuu

SEQ ID NO: 1195927 - RNA, 19 nt, Artificial Sequence
  Description of Artificial Sequence: Synthetic oligonucleotide
caugagcacagaguucaug

SEQ ID NO: 1195928 - RNA, 19 nt, Artificial Sequence
  Description of Artificial Sequence: Synthetic oligonucleotide
auggcacuuccucuuucca

SEQ ID NO: 1195929 - RNA, 19 nt, Artificial Sequence
  Description of Artificial Sequence: Synthetic oligonucleotide
uggcgauggcacuuccucu

SEQ ID NO: 1195930 - RNA, 19 nt, Artificial Sequence
  Description of Artificial Sequence: Synthetic oligonucleotide
aguccacugcaugugacau

SEQ ID NO: 1195931 - RNA, 19 nt, Artificial Sequence
  Description of Artificial Sequence: Synthetic oligonucleotide
aacccucuccaaaaugcaa

SEQ ID NO: 1195932 - RNA, 19 nt, Artificial Sequence
  Description of Artificial Sequence: Synthetic oligonucleotide
acgaaaacaggugcccaga

SEQ ID NO: 1195933 - RNA, 19 nt, Artificial Sequence
  Description of Artificial Sequence: Synthetic oligonucleotide
auuucagcuuugagccaac

SEQ ID NO: 1195934 - RNA, 19 nt, Artificial Sequence
  Description of Artificial Sequence: Synthetic oligonucleotide
cagaccguuuuacuuucuc

SEQ ID NO: 1195935 - RNA, 19 nt, Artificial Sequence
  Description of Artificial Sequence: Synthetic oligonucleotide
caaaaccugucuguaguga

SEQ ID NO: 1195936 - RNA, 19 nt, Artificial Sequence
  Description of Artificial Sequence: Synthetic oligonucleotide
caggucacgggcagccgcc

SEQ ID NO: 1195937 - RNA, 19 nt, Artificial Sequence
  Description of Artificial Sequence: Synthetic oligonucleotide
ccuagcuucggaguguggc

SEQ ID NO: 1195938 - RNA, 19 nt, Artificial Sequence
  Description of Artificial Sequence: Synthetic oligonucleotide
ugggcgcuuugcccaaggc

SEQ ID NO: 1195939 - RNA, 19 nt, Artificial Sequence
  Description of Artificial Sequence: Synthetic oligonucleotide
guucaugugcgcuuuggau

SEQ ID NO: 1195940 - RNA, 19 nt, Artificial Sequence
  Description of Artificial Sequence: Synthetic oligonucleotide
uucugucgaucuccauuuc

SEQ ID NO: 1195941 - RNA, 19 nt, Artificial Sequence
  Description of Artificial Sequence: Synthetic oligonucleotide
ggcgcuuugcccaaggcuc

SEQ ID NO: 1195942 - RNA, 19 nt, Artificial Sequence
  Description of Artificial Sequence: Synthetic oligonucleotide
auauccacuuaagcggcau

SEQ ID NO: 1195943 - RNA, 19 nt, Artificial Sequence
  Description of Artificial Sequence: Synthetic oligonucleotide
gccagucgggacugcaugg

SEQ ID NO: 1195944 - RNA, 19 nt, Artificial Sequence
  Description of Artificial Sequence: Synthetic oligonucleotide
gucgguuacuuugcugggc

SEQ ID NO: 1195945 - RNA, 19 nt, Artificial Sequence
  Description of Artificial Sequence: Synthetic oligonucleotide
ggcaaguacgaaaacaggu

SEQ ID NO: 1195946 - RNA, 19 nt, Artificial Sequence
  Description of Artificial Sequence: Synthetic oligonucleotide
acgagcuggacuccucuua

SEQ ID NO: 1195947 - RNA, 19 nt, Artificial Sequence
  Description of Artificial Sequence: Synthetic oligonucleotide
gugaucaggaccagcagcu

SEQ ID NO: 1195948 - RNA, 19 nt, Artificial Sequence
  Description of Artificial Sequence: Synthetic oligonucleotide
ugcucucaaauguguccuc

SEQ ID NO: 1195949 - RNA, 19 nt, Artificial Sequence
  Description of Artificial Sequence: Synthetic oligonucleotide
uuucagcuuugagccaacu

SEQ ID NO: 1195950 - RNA, 19 nt, Artificial Sequence
  Description of Artificial Sequence: Synthetic oligonucleotide
uugaccugaucaucuccuu

SEQ ID NO: 1195951 - RNA, 19 nt, Artificial Sequence
  Description of Artificial Sequence: Synthetic oligonucleotide
ucaacaccuugaguccacu

SEQ ID NO: 1195952 - RNA, 19 nt, Artificial Sequence
  Description of Artificial Sequence: Synthetic oligonucleotide
uugagccaacugucaacaa

SEQ ID NO: 1195953 - RNA, 19 nt, Artificial Sequence
  Description of Artificial Sequence: Synthetic oligonucleotide
acaccaguagagagucauc

SEQ ID NO: 1195954 - RNA, 19 nt, Artificial Sequence
  Description of Artificial Sequence: Synthetic oligonucleotide
gauauccacuuaagcggca

SEQ ID NO: 1195955 - RNA, 19 nt, Artificial Sequence
  Description of Artificial Sequence: Synthetic oligonucleotide
caagacucugcauagccuu

SEQ ID NO: 1195956 - RNA, 19 nt, Artificial Sequence
  Description of Artificial Sequence: Synthetic oligonucleotide
uccucuuuccaaggccaac

SEQ ID NO: 1195957 - RNA, 19 nt, Artificial Sequence
  Description of Artificial Sequence: Synthetic oligonucleotide
acaaucgguccaaaauaau

SEQ ID NO: 1195958 - RNA, 19 nt, Artificial Sequence
  Description of Artificial Sequence: Synthetic oligonucleotide
ggauaucucuuauuugccu

SEQ ID NO: 1195959 - RNA, 19 nt, Artificial Sequence
  Description of Artificial Sequence: Synthetic oligonucleotide
uccacuuaagcggcauuuu

SEQ ID NO: 1195960 - RNA, 19 nt, Artificial Sequence
  Description of Artificial Sequence: Synthetic oligonucleotide
cuuaggaccgcaagcuggu

SEQ ID NO: 1195961 - RNA, 19 nt, Artificial Sequence
  Description of Artificial Sequence: Synthetic oligonucleotide
caagaaagaugcuucuauu

SEQ ID NO: 1195962 - RNA, 19 nt, Artificial Sequence
  Description of Artificial Sequence: Synthetic oligonucleotide
caggaagggcgucgguuac

SEQ ID NO: 1195963 - RNA, 19 nt, Artificial Sequence
  Description of Artificial Sequence: Synthetic oligonucleotide
cugggcgcuuugcccaagg

SEQ ID NO: 1195964 - RNA, 19 nt, Artificial Sequence
  Description of Artificial Sequence: Synthetic oligonucleotide
ccacuauaucaucauuuuc

SEQ ID NO: 1195965 - RNA, 19 nt, Artificial Sequence
  Description of Artificial Sequence: Synthetic oligonucleotide
gcauagaacccucuccaaa

SEQ ID NO: 1195966 - RNA, 19 nt, Artificial Sequence
  Description of Artificial Sequence: Synthetic oligonucleotide
gucgggacugcauggccuc

SEQ ID NO: 1195967 - RNA, 19 nt, Artificial Sequence
  Description of Artificial Sequence: Synthetic oligonucleotide
agccaacugucaacaauga

SEQ ID NO: 1195968 - RNA, 19 nt, Artificial Sequence
  Description of Artificial Sequence: Synthetic oligonucleotide
aggccacuauaucaucauu

SEQ ID NO: 1195969 - RNA, 19 nt, Artificial Sequence
  Description of Artificial Sequence: Synthetic oligonucleotide
gauagacaaucgguccaaa

SEQ ID NO: 1195970 - RNA, 19 nt, Artificial Sequence
  Description of Artificial Sequence: Synthetic oligonucleotide
gaaccacacagacauccuu

SEQ ID NO: 1195971 - RNA, 19 nt, Artificial Sequence
  Description of Artificial Sequence: Synthetic oligonucleotide
caucgcuccugaagguuca

SEQ ID NO: 1195972 - RNA, 19 nt, Artificial Sequence
  Description of Artificial Sequence: Synthetic oligonucleotide
agcuacaguagaaguuuau

SEQ ID NO: 1195973 - RNA, 19 nt, Artificial Sequence
  Description of Artificial Sequence: Synthetic oligonucleotide
guagagagucaucaacauu

SEQ ID NO: 1195974 - RNA, 19 nt, Artificial Sequence
  Description of Artificial Sequence: Synthetic oligonucleotide
ggccagucgggacugcaug

SEQ ID NO: 1195975 - RNA, 19 nt, Artificial Sequence
  Description of Artificial Sequence: Synthetic oligonucleotide
uggguggcccuagcuucgg

SEQ ID NO: 1195976 - RNA, 19 nt, Artificial Sequence
  Description of Artificial Sequence: Synthetic oligonucleotide
ccgacuucccguucccugc

SEQ ID NO: 1195977 - RNA, 19 nt, Artificial Sequence
  Description of Artificial Sequence: Synthetic oligonucleotide
gccgugcccacaccuagag

SEQ ID NO: 1195978 - RNA, 19 nt, Artificial Sequence
  Description of Artificial Sequence: Synthetic oligonucleotide
gaggaccuuaaaauugaau

SEQ ID NO: 1195979 - RNA, 19 nt, Artificial Sequence
  Description of Artificial Sequence: Synthetic oligonucleotide
ggcgucgguuacuuugcug

SEQ ID NO: 1195980 - RNA, 19 nt, Artificial Sequence
  Description of Artificial Sequence: Synthetic oligonucleotide
ccaucgcuccugaagguuc

SEQ ID NO: 1195981 - RNA, 19 nt, Artificial Sequence
  Description of Artificial Sequence: Synthetic oligonucleotide
caggaaaauggugacuccu

SEQ ID NO: 1195982 - RNA, 19 nt, Artificial Sequence
  Description of Artificial Sequence: Synthetic oligonucleotide
ccccaaaaccugucuguag

SEQ ID NO: 1195983 - RNA, 19 nt, Artificial Sequence
  Description of Artificial Sequence: Synthetic oligonucleotide
guguagugcaagagauaca

SEQ ID NO: 1195984 - RNA, 19 nt, Artificial Sequence
  Description of Artificial Sequence: Synthetic oligonucleotide
caacagagguguagugcaa

SEQ ID NO: 1195985 - RNA, 19 nt, Artificial Sequence
  Description of Artificial Sequence: Synthetic oligonucleotide
cuucggaguguggccaguc

SEQ ID NO: 1195986 - RNA, 19 nt, Artificial Sequence
  Description of Artificial Sequence: Synthetic oligonucleotide
gaugaggccccaacugggu

SEQ ID NO: 1195987 - RNA, 19 nt, Artificial Sequence
  Description of Artificial Sequence: Synthetic oligonucleotide
cggaguguggccagucggg

SEQ ID NO: 1195988 - RNA, 19 nt, Artificial Sequence
  Description of Artificial Sequence: Synthetic oligonucleotide
ggcucaggaagggcgucgg

SEQ ID NO: 1195989 - RNA, 19 nt, Artificial Sequence
  Description of Artificial Sequence: Synthetic oligonucleotide
cacaccaguagagagucau

SEQ ID NO: 1195990 - RNA, 19 nt, Artificial Sequence
  Description of Artificial Sequence: Synthetic oligonucleotide
gaccgcaagcugguucuuc

SEQ ID NO: 1195991 - RNA, 19 nt, Artificial Sequence
  Description of Artificial Sequence: Synthetic oligonucleotide
aggaagggcgucgguuacu

SEQ ID NO: 1195992 - RNA, 19 nt, Artificial Sequence
  Description of Artificial Sequence: Synthetic oligonucleotide
guggcccuagcuucggagu

SEQ ID NO: 1195993 - RNA, 19 nt, Artificial Sequence
  Description of Artificial Sequence: Synthetic oligonucleotide
ugcugggcgcuuugcccaa

SEQ ID NO: 1195994 - RNA, 19 nt, Artificial Sequence
  Description of Artificial Sequence: Synthetic oligonucleotide
cgucgguuacuuugcuggg

SEQ ID NO: 1195995 - RNA, 19 nt, Artificial Sequence
  Description of Artificial Sequence: Synthetic oligonucleotide
acagaccguuuuacuuucu

SEQ ID NO: 1195996 - RNA, 19 nt, Artificial Sequence
  Description of Artificial Sequence: Synthetic oligonucleotide
cagaggccgugcccacacc

SEQ ID NO: 1195997 - RNA, 19 nt, Artificial Sequence
  Description of Artificial Sequence: Synthetic oligonucleotide
uuaggaccgcaagcugguu

SEQ ID NO: 1195998 - RNA, 19 nt, Artificial Sequence
  Description of Artificial Sequence: Synthetic oligonucleotide
caacaacucucauuuccuu

SEQ ID NO: 1195999 - RNA, 19 nt, Artificial Sequence
  Description of Artificial Sequence: Synthetic oligonucleotide
caucaacauucaacugacu

SEQ ID NO: 1196000 - RNA, 19 nt, Artificial Sequence
  Description of Artificial Sequence: Synthetic oligonucleotide
gguuacuuugcugggcgcu

SEQ ID NO: 1196001 - RNA, 19 nt, Artificial Sequence
  Description of Artificial Sequence: Synthetic oligonucleotide
augugcgcuuuggaugcau

SEQ ID NO: 1196002 - RNA, 19 nt, Artificial Sequence
  Description of Artificial Sequence: Synthetic oligonucleotide
ggccccaacuggguggccc

SEQ ID NO: 1196003 - RNA, 19 nt, Artificial Sequence
  Description of Artificial Sequence: Synthetic oligonucleotide
cagaguacuucagguuaaa

SEQ ID NO: 1196004 - RNA, 19 nt, Artificial Sequence
  Description of Artificial Sequence: Synthetic oligonucleotide
ccaacuggguggcccuagc

SEQ ID NO: 1196005 - RNA, 19 nt, Artificial Sequence
  Description of Artificial Sequence: Synthetic oligonucleotide
ggaggcuucuccuggguuu

SEQ ID NO: 1196006 - RNA, 19 nt, Artificial Sequence
  Description of Artificial Sequence: Synthetic oligonucleotide
cacuagcauagaacccucu

SEQ ID NO: 1196007 - RNA, 19 nt, Artificial Sequence
  Description of Artificial Sequence: Synthetic oligonucleotide
cagcuacucuuaggaccgc

SEQ ID NO: 1196008 - RNA, 19 nt, Artificial Sequence
  Description of Artificial Sequence: Synthetic oligonucleotide
gggcgcuuugcccaaggcu

SEQ ID NO: 1196009 - RNA, 19 nt, Artificial Sequence
  Description of Artificial Sequence: Synthetic oligonucleotide
gacgagcuggacuccucuu

SEQ ID NO: 1196010 - RNA, 19 nt, Artificial Sequence
  Description of Artificial Sequence: Synthetic oligonucleotide
ccacuuaagcggcauuuua

SEQ ID NO: 1196011 - RNA, 19 nt, Artificial Sequence
  Description of Artificial Sequence: Synthetic oligonucleotide
caacuggguggcccuagcu

SEQ ID NO: 1196012 - RNA, 19 nt, Artificial Sequence
  Description of Artificial Sequence: Synthetic oligonucleotide
caccuagaggagggcacca

SEQ ID NO: 1196013 - RNA, 19 nt, Artificial Sequence
  Description of Artificial Sequence: Synthetic oligonucleotide
caugacgagcuggacuccu

SEQ ID NO: 1196014 - RNA, 19 nt, Artificial Sequence
  Description of Artificial Sequence: Synthetic oligonucleotide
caccaacgguaaagaaaua

SEQ ID NO: 1196015 - RNA, 19 nt, Artificial Sequence
  Description of Artificial Sequence: Synthetic oligonucleotide
gaggccgugcccacaccua

SEQ ID NO: 1196016 - RNA, 19 nt, Artificial Sequence
  Description of Artificial Sequence: Synthetic oligonucleotide
ccgugcccacaccuagagg

SEQ ID NO: 1196017 - RNA, 19 nt, Artificial Sequence
  Description of Artificial Sequence: Synthetic oligonucleotide
cgggauucuuccccucccc

SEQ ID NO: 1196018 - RNA, 19 nt, Artificial Sequence
  Description of Artificial Sequence: Synthetic oligonucleotide
gcccuagcuucggagugug

SEQ ID NO: 1196019 - RNA, 19 nt, Artificial Sequence
  Description of Artificial Sequence: Synthetic oligonucleotide
cgguuacuuugcugggcgc

SEQ ID NO: 1196020 - RNA, 19 nt, Artificial Sequence
  Description of Artificial Sequence: Synthetic oligonucleotide
ccucuuagccuuuccgacu

SEQ ID NO: 1196021 - RNA, 19 nt, Artificial Sequence
  Description of Artificial Sequence: Synthetic oligonucleotide
cccuagcuucggagugugg

SEQ ID NO: 1196022 - RNA, 19 nt, Artificial Sequence
  Description of Artificial Sequence: Synthetic oligonucleotide
ccaugacgagcuggacucc

SEQ ID NO: 1196023 - RNA, 19 nt, Artificial Sequence
  Description of Artificial Sequence: Synthetic oligonucleotide
gccuggcgauggcacuucc

SEQ ID NO: 1196024 - RNA, 19 nt, Artificial Sequence
  Description of Artificial Sequence: Synthetic oligonucleotide
cccacaccuagaggagggc

SEQ ID NO: 1196025 - RNA, 19 nt, Artificial Sequence
  Description of Artificial Sequence: Synthetic oligonucleotide
caugugcgcuuuggaugca

SEQ ID NO: 1196026 - RNA, 19 nt, Artificial Sequence
  Description of Artificial Sequence: Synthetic oligonucleotide
ccuuuccgacuucccguuc

SEQ ID NO: 1196027 - RNA, 19 nt, Artificial Sequence
  Description of Artificial Sequence: Synthetic oligonucleotide
cugagacaucugggagauc

SEQ ID NO: 1196028 - RNA, 19 nt, Artificial Sequence
  Description of Artificial Sequence: Synthetic oligonucleotide
aagcggcauuuuacacaua

SEQ ID NO: 1196029 - RNA, 19 nt, Artificial Sequence
  Description of Artificial Sequence: Synthetic oligonucleotide
cccaacuggguggcccuag

SEQ ID NO: 1196030 - RNA, 19 nt, Artificial Sequence
  Description of Artificial Sequence: Synthetic oligonucleotide
gaagggcgucgguuacuuu

SEQ ID NO: 1196031 - RNA, 19 nt, Artificial Sequence
  Description of Artificial Sequence: Synthetic oligonucleotide
ccguucccugcgcccaggc

SEQ ID NO: 1196032 - RNA, 19 nt, Artificial Sequence
  Description of Artificial Sequence: Synthetic oligonucleotide
ccccaagaaagaugcuucu

SEQ ID NO: 1196033 - RNA, 19 nt, Artificial Sequence
  Description of Artificial Sequence: Synthetic oligonucleotide
ccucuaugauuccagccuu

SEQ ID NO: 1196034 - RNA, 19 nt, Artificial Sequence
  Description of Artificial Sequence: Synthetic oligonucleotide
caccagagaugaggcccca

SEQ ID NO: 1196035 - RNA, 19 nt, Artificial Sequence
  Description of Artificial Sequence: Synthetic oligonucleotide
ggaagggcgucgguuacuu

SEQ ID NO: 1196036 - RNA, 19 nt, Artificial Sequence
  Description of Artificial Sequence: Synthetic oligonucleotide
ggauucugucgaucuccau

SEQ ID NO: 1196037 - RNA, 19 nt, Artificial Sequence
  Description of Artificial Sequence: Synthetic oligonucleotide
gccuuuccgacuucccguu

SEQ ID NO: 1196038 - RNA, 19 nt, Artificial Sequence
  Description of Artificial Sequence: Synthetic oligonucleotide
gcugggcgcuuugcccaag

SEQ ID NO: 1196039 - RNA, 19 nt, Artificial Sequence
  Description of Artificial Sequence: Synthetic oligonucleotide
ggccgugcccacaccuaga

SEQ ID NO: 1196040 - RNA, 19 nt, Artificial Sequence
  Description of Artificial Sequence: Synthetic oligonucleotide
cccaaggcuccugcuguga

SEQ ID NO: 1196041 - RNA, 19 nt, Artificial Sequence
  Description of Artificial Sequence: Synthetic oligonucleotide
cccguucccugcgcccagg

SEQ ID NO: 1196042 - RNA, 19 nt, Artificial Sequence
  Description of Artificial Sequence: Synthetic oligonucleotide
ggcccuagcuucggagugu

SEQ ID NO: 1196043 - RNA, 19 nt, Artificial Sequence
  Description of Artificial Sequence: Synthetic oligonucleotide
gccugucaacaacucucau

SEQ ID NO: 1196044 - RNA, 19 nt, Artificial Sequence
  Description of Artificial Sequence: Synthetic oligonucleotide
ccuggcgauggcacuuccu

SEQ ID NO: 1196045 - RNA, 19 nt, Artificial Sequence
  Description of Artificial Sequence: Synthetic oligonucleotide
gccaucgcuccugaagguu

SEQ ID NO: 1196046 - RNA, 19 nt, Artificial Sequence
  Description of Artificial Sequence: Synthetic oligonucleotide
gggcgucgguuacuuugcu

SEQ ID NO: 1196047 - RNA, 19 nt, Artificial Sequence
  Description of Artificial Sequence: Synthetic oligonucleotide
gcgauggcacuuccucuuu

SEQ ID NO: 1196048 - RNA, 19 nt, Artificial Sequence
  Description of Artificial Sequence: Synthetic oligonucleotide
cguucccugcgcccaggca

SEQ ID NO: 1196049 - RNA, 19 nt, Artificial Sequence
  Description of Artificial Sequence: Synthetic oligonucleotide
gcuucggaguguggccagu

SEQ ID NO: 1196050 - RNA, 19 nt, Artificial Sequence
  Description of Artificial Sequence: Synthetic oligonucleotide
ccgcaagcugguucuucau

SEQ ID NO: 1196051 - RNA, 19 nt, Artificial Sequence
  Description of Artificial Sequence: Synthetic oligonucleotide
ggaccgcaagcugguucuu

SEQ ID NO: 1196052 - RNA, 19 nt, Artificial Sequence
  Description of Artificial Sequence: Synthetic oligonucleotide
ccccaacuggguggcccua

SEQ ID NO: 1196053 - RNA, 19 nt, Artificial Sequence
  Description of Artificial Sequence: Synthetic oligonucleotide
aauucauuuagcuuagcug

SEQ ID NO: 1196054 - RNA, 19 nt, Artificial Sequence
  Description of Artificial Sequence: Synthetic oligonucleotide
agauaugucaacuucgggg

SEQ ID NO: 1196055 - RNA, 19 nt, Artificial Sequence
  Description of Artificial Sequence: Synthetic oligonucleotide
ugauguucaauucauuuag

SEQ ID NO: 1196056 - RNA, 19 nt, Artificial Sequence
  Description of Artificial Sequence: Synthetic oligonucleotide
uggcuauuaaucuucaggg

SEQ ID NO: 1196057 - RNA, 19 nt, Artificial Sequence
  Description of Artificial Sequence: Synthetic oligonucleotide
auccacucgaaucacagcc

SEQ ID NO: 1196058 - RNA, 19 nt, Artificial Sequence
  Description of Artificial Sequence: Synthetic oligonucleotide
guuagguacaggcauaugg

SEQ ID NO: 1196059 - RNA, 19 nt, Artificial Sequence
  Description of Artificial Sequence: Synthetic oligonucleotide
auuuugugacaucaaagac

SEQ ID NO: 1196060 - RNA, 19 nt, Artificial Sequence
  Description of Artificial Sequence: Synthetic oligonucleotide
aacgaugaucaugauaggc

SEQ ID NO: 1196061 - RNA, 19 nt, Artificial Sequence
  Description of Artificial Sequence: Synthetic oligonucleotide
uguauauccgugaugacuc

SEQ ID NO: 1196062 - RNA, 19 nt, Artificial Sequence
  Description of Artificial Sequence: Synthetic oligonucleotide
cauuucauaugccaggagg

SEQ ID NO: 1196063 - RNA, 19 nt, Artificial Sequence
  Description of Artificial Sequence: Synthetic oligonucleotide
auaaucgccacgcccaggc

SEQ ID NO: 1196064 - RNA, 19 nt, Artificial Sequence
  Description of Artificial Sequence: Synthetic oligonucleotide
auagaugccccauaggcag

SEQ ID NO: 1196065 - RNA, 19 nt, Artificial Sequence
  Description of Artificial Sequence: Synthetic oligonucleotide
aggugcuccuacuauaugc

SEQ ID NO: 1196066 - RNA, 19 nt, Artificial Sequence
  Description of Artificial Sequence: Synthetic oligonucleotide
agagaagccuuuguaaucc

SEQ ID NO: 1196067 - RNA, 19 nt, Artificial Sequence
  Description of Artificial Sequence: Synthetic oligonucleotide
cucgaaacagacaugggcc

SEQ ID NO: 1196068 - RNA, 19 nt, Artificial Sequence
  Description of Artificial Sequence: Synthetic oligonucleotide
aaggaguuugcguaguucu

SEQ ID NO: 1196069 - RNA, 19 nt, Artificial Sequence
  Description of Artificial Sequence: Synthetic oligonucleotide
ucuaucgcuuuacaaauga

SEQ ID NO: 1196070 - RNA, 19 nt, Artificial Sequence
  Description of Artificial Sequence: Synthetic oligonucleotide
ucuauagacacauccacuc

SEQ ID NO: 1196071 - RNA, 19 nt, Artificial Sequence
  Description of Artificial Sequence: Synthetic oligonucleotide
uuccgggugaagaaaauag

SEQ ID NO: 1196072 - RNA, 19 nt, Artificial Sequence
  Description of Artificial Sequence: Synthetic oligonucleotide
uacuauaugcaagcgauag

SEQ ID NO: 1196073 - RNA, 19 nt, Artificial Sequence
  Description of Artificial Sequence: Synthetic oligonucleotide
auuuagcuuagcuggcacc

SEQ ID NO: 1196074 - RNA, 19 nt, Artificial Sequence
  Description of Artificial Sequence: Synthetic oligonucleotide
uauagacacauccacucga

SEQ ID NO: 1196075 - RNA, 19 nt, Artificial Sequence
  Description of Artificial Sequence: Synthetic oligonucleotide
gaccuuacucauuucagag

SEQ ID NO: 1196076 - RNA, 19 nt, Artificial Sequence
  Description of Artificial Sequence: Synthetic oligonucleotide
acgaugaucaugauaggcc

SEQ ID NO: 1196077 - RNA, 19 nt, Artificial Sequence
  Description of Artificial Sequence: Synthetic oligonucleotide
uacaguugccccaucauga

SEQ ID NO: 1196078 - RNA, 19 nt, Artificial Sequence
  Description of Artificial Sequence: Synthetic oligonucleotide
uuagguacaggcauauggu

SEQ ID NO: 1196079 - RNA, 19 nt, Artificial Sequence
  Description of Artificial Sequence: Synthetic oligonucleotide
ugguguauauccgugauga

SEQ ID NO: 1196080 - RNA, 19 nt, Artificial Sequence
  Description of Artificial Sequence: Synthetic oligonucleotide
gaccguucauuucauaugc

SEQ ID NO: 1196081 - RNA, 19 nt, Artificial Sequence
  Description of Artificial Sequence: Synthetic oligonucleotide
agcgauagguuucuggguc

SEQ ID NO: 1196082 - RNA, 19 nt, Artificial Sequence
  Description of Artificial Sequence: Synthetic oligonucleotide
ucauaugccaggaggaccu

SEQ ID NO: 1196083 - RNA, 19 nt, Artificial Sequence
  Description of Artificial Sequence: Synthetic oligonucleotide
cuguuagcaguucaggagg

SEQ ID NO: 1196084 - RNA, 19 nt, Artificial Sequence
  Description of Artificial Sequence: Synthetic oligonucleotide
uucaacugccauaaucgcc

SEQ ID NO: 1196085 - RNA, 19 nt, Artificial Sequence
  Description of Artificial Sequence: Synthetic oligonucleotide
accuuacucauuucagagc

SEQ ID NO: 1196086 - RNA, 19 nt, Artificial Sequence
  Description of Artificial Sequence: Synthetic oligonucleotide
guaaugaggguuaaggaug

SEQ ID NO: 1196087 - RNA, 19 nt, Artificial Sequence
  Description of Artificial Sequence: Synthetic oligonucleotide
auuaguuuugauggucccc

SEQ ID NO: 1196088 - RNA, 19 nt, Artificial Sequence
  Description of Artificial Sequence: Synthetic oligonucleotide
uugggaaacuuauacaaau

SEQ ID NO: 1196089 - RNA, 19 nt, Artificial Sequence
  Description of Artificial Sequence: Synthetic oligonucleotide
cuauuaaucuucagggcug

SEQ ID NO: 1196090 - RNA, 19 nt, Artificial Sequence
  Description of Artificial Sequence: Synthetic oligonucleotide
auuucagagcgccgguugc

SEQ ID NO: 1196091 - RNA, 19 nt, Artificial Sequence
  Description of Artificial Sequence: Synthetic oligonucleotide
ugacuggauagguaguucc

SEQ ID NO: 1196092 - RNA, 19 nt, Artificial Sequence
  Description of Artificial Sequence: Synthetic oligonucleotide
guaacugucaucuaucgcu

SEQ ID NO: 1196093 - RNA, 19 nt, Artificial Sequence
  Description of Artificial Sequence: Synthetic oligonucleotide
uaugcaagcgauagguuuc

SEQ ID NO: 1196094 - RNA, 19 nt, Artificial Sequence
  Description of Artificial Sequence: Synthetic oligonucleotide
ucuuugguguauauccgug

SEQ ID NO: 1196095 - RNA, 19 nt, Artificial Sequence
  Description of Artificial Sequence: Synthetic oligonucleotide
ucugugauagcugacugga

SEQ ID NO: 1196096 - RNA, 19 nt, Artificial Sequence
  Description of Artificial Sequence: Synthetic oligonucleotide
uguaacugucaucuaucgc

SEQ ID NO: 1196097 - RNA, 19 nt, Artificial Sequence
  Description of Artificial Sequence: Synthetic oligonucleotide
gugaacagcauagagggcc

SEQ ID NO: 1196098 - RNA, 19 nt, Artificial Sequence
  Description of Artificial Sequence: Synthetic oligonucleotide
uagaucgaagucuaccgug

SEQ ID NO: 1196099 - RNA, 19 nt, Artificial Sequence
  Description of Artificial Sequence: Synthetic oligonucleotide
acucgaaucacagcccugc

SEQ ID NO: 1196100 - RNA, 19 nt, Artificial Sequence
  Description of Artificial Sequence: Synthetic oligonucleotide
augacggacaggaucaucg

SEQ ID NO: 1196101 - RNA, 19 nt, Artificial Sequence
  Description of Artificial Sequence: Synthetic oligonucleotide
gauaugucaacuucggggu

SEQ ID NO: 1196102 - RNA, 19 nt, Artificial Sequence
  Description of Artificial Sequence: Synthetic oligonucleotide
uuacucauuucagagcgcc

SEQ ID NO: 1196103 - RNA, 19 nt, Artificial Sequence
  Description of Artificial Sequence: Synthetic oligonucleotide
aucgcuuuacaaaugaugu

SEQ ID NO: 1196104 - RNA, 19 nt, Artificial Sequence
  Description of Artificial Sequence: Synthetic oligonucleotide
uuucaacugccauaaucgc

SEQ ID NO: 1196105 - RNA, 19 nt, Artificial Sequence
  Description of Artificial Sequence: Synthetic oligonucleotide
gaguuugcguaguucuugg

SEQ ID NO: 1196106 - RNA, 19 nt, Artificial Sequence
  Description of Artificial Sequence: Synthetic oligonucleotide
uauuaaucuucagggcugg

SEQ ID NO: 1196107 - RNA, 19 nt, Artificial Sequence
  Description of Artificial Sequence: Synthetic oligonucleotide
gagauaugucaacuucggg

SEQ ID NO: 1196108 - RNA, 19 nt, Artificial Sequence
  Description of Artificial Sequence: Synthetic oligonucleotide
gcuagaucgaagucuaccg

SEQ ID NO: 1196109 - RNA, 19 nt, Artificial Sequence
  Description of Artificial Sequence: Synthetic oligonucleotide
ucaacuucgggguucaguu

SEQ ID NO: 1196110 - RNA, 19 nt, Artificial Sequence
  Description of Artificial Sequence: Synthetic oligonucleotide
gaguuaucagaaaagguga

SEQ ID NO: 1196111 - RNA, 19 nt, Artificial Sequence
  Description of Artificial Sequence: Synthetic oligonucleotide
guuaguccaccaucuauag

SEQ ID NO: 1196112 - RNA, 19 nt, Artificial Sequence
  Description of Artificial Sequence: Synthetic oligonucleotide
uccuacuauaugcaagcga

SEQ ID NO: 1196113 - RNA, 19 nt, Artificial Sequence
  Description of Artificial Sequence: Synthetic oligonucleotide
ugaccguucauuucauaug

SEQ ID NO: 1196114 - RNA, 19 nt, Artificial Sequence
  Description of Artificial Sequence: Synthetic oligonucleotide
guaacucacggacaugagc

SEQ ID NO: 1196115 - RNA, 19 nt, Artificial Sequence
  Description of Artificial Sequence: Synthetic oligonucleotide
auaugcaagcgauagguuu

SEQ ID NO: 1196116 - RNA, 19 nt, Artificial Sequence
  Description of Artificial Sequence: Synthetic oligonucleotide
acaggcauaugguuccggg

SEQ ID NO: 1196117 - RNA, 19 nt, Artificial Sequence
  Description of Artificial Sequence: Synthetic oligonucleotide
auaggguuuggugugaugu

SEQ ID NO: 1196118 - RNA, 19 nt, Artificial Sequence
  Description of Artificial Sequence: Synthetic oligonucleotide
uuugcguaguucuugggua

SEQ ID NO: 1196119 - RNA, 19 nt, Artificial Sequence
  Description of Artificial Sequence: Synthetic oligonucleotide
uuguaaucccgccucugcc

SEQ ID NO: 1196120 - RNA, 19 nt, Artificial Sequence
  Description of Artificial Sequence: Synthetic oligonucleotide
uuugguguauauccgugau

SEQ ID NO: 1196121 - RNA, 19 nt, Artificial Sequence
  Description of Artificial Sequence: Synthetic oligonucleotide
ugaccuuacucauuucaga

SEQ ID NO: 1196122 - RNA, 19 nt, Artificial Sequence
  Description of Artificial Sequence: Synthetic oligonucleotide
ugccauaaucgccacgccc

SEQ ID NO: 1196123 - RNA, 19 nt, Artificial Sequence
  Description of Artificial Sequence: Synthetic oligonucleotide
ugcacaaauuuugugacau

SEQ ID NO: 1196124 - RNA, 19 nt, Artificial Sequence
  Description of Artificial Sequence: Synthetic oligonucleotide
aucggcauaagggucagag

SEQ ID NO: 1196125 - RNA, 19 nt, Artificial Sequence
  Description of Artificial Sequence: Synthetic oligonucleotide
cuagaguuacccagacucc

SEQ ID NO: 1196126 - RNA, 19 nt, Artificial Sequence
  Description of Artificial Sequence: Synthetic oligonucleotide
gaggguuaaggauggguug

SEQ ID NO: 1196127 - RNA, 19 nt, Artificial Sequence
  Description of Artificial Sequence: Synthetic oligonucleotide
cauuaguuuugaugguccc

SEQ ID NO: 1196128 - RNA, 19 nt, Artificial Sequence
  Description of Artificial Sequence: Synthetic oligonucleotide
uucauaugccaggaggacc

SEQ ID NO: 1196129 - RNA, 19 nt, Artificial Sequence
  Description of Artificial Sequence: Synthetic oligonucleotide
aaucgccacgcccaggccu

SEQ ID NO: 1196130 - RNA, 19 nt, Artificial Sequence
  Description of Artificial Sequence: Synthetic oligonucleotide
ucuccugacucuacaguug

SEQ ID NO: 1196131 - RNA, 19 nt, Artificial Sequence
  Description of Artificial Sequence: Synthetic oligonucleotide
ugggaaacuuauacaaauc

SEQ ID NO: 1196132 - RNA, 19 nt, Artificial Sequence
  Description of Artificial Sequence: Synthetic oligonucleotide
aagucuaccgugucccagu

SEQ ID NO: 1196133 - RNA, 19 nt, Artificial Sequence
  Description of Artificial Sequence: Synthetic oligonucleotide
cacucguacagggaaaccg

SEQ ID NO: 1196134 - RNA, 19 nt, Artificial Sequence
  Description of Artificial Sequence: Synthetic oligonucleotide
uaguugcacaaauuuugug

SEQ ID NO: 1196135 - RNA, 19 nt, Artificial Sequence
  Description of Artificial Sequence: Synthetic oligonucleotide
ucgaagguuccagaugggg

SEQ ID NO: 1196136 - RNA, 19 nt, Artificial Sequence
  Description of Artificial Sequence: Synthetic oligonucleotide
cacgauguggacauggaca

SEQ ID NO: 1196137 - RNA, 19 nt, Artificial Sequence
  Description of Artificial Sequence: Synthetic oligonucleotide
cagccaguaacucacggac

SEQ ID NO: 1196138 - RNA, 19 nt, Artificial Sequence
  Description of Artificial Sequence: Synthetic oligonucleotide
acugagucggugaccagcc

SEQ ID NO: 1196139 - RNA, 19 nt, Artificial Sequence
  Description of Artificial Sequence: Synthetic oligonucleotide
uacucauuucagagcgccg

SEQ ID NO: 1196140 - RNA, 19 nt, Artificial Sequence
  Description of Artificial Sequence: Synthetic oligonucleotide
uguuagcaguucaggagga

SEQ ID NO: 1196141 - RNA, 19 nt, Artificial Sequence
  Description of Artificial Sequence: Synthetic oligonucleotide
uuacccagacuccauuuuc

SEQ ID NO: 1196142 - RNA, 19 nt, Artificial Sequence
  Description of Artificial Sequence: Synthetic oligonucleotide
agccccucgaaacagacau

SEQ ID NO: 1196143 - RNA, 19 nt, Artificial Sequence
  Description of Artificial Sequence: Synthetic oligonucleotide
ugcaacgaugaucaugaua

SEQ ID NO: 1196144 - RNA, 19 nt, Artificial Sequence
  Description of Artificial Sequence: Synthetic oligonucleotide
aggguuaaggauggguugg

SEQ ID NO: 1196145 - RNA, 19 nt, Artificial Sequence
  Description of Artificial Sequence: Synthetic oligonucleotide
aagcgauagguuucugggu

SEQ ID NO: 1196146 - RNA, 19 nt, Artificial Sequence
  Description of Artificial Sequence: Synthetic oligonucleotide
cuggaugacggacaggauc

SEQ ID NO: 1196147 - RNA, 19 nt, Artificial Sequence
  Description of Artificial Sequence: Synthetic oligonucleotide
ucgaaacagacaugggccu

SEQ ID NO: 1196148 - RNA, 19 nt, Artificial Sequence
  Description of Artificial Sequence: Synthetic oligonucleotide
agagucgugccccagccca

SEQ ID NO: 1196149 - RNA, 19 nt, Artificial Sequence
  Description of Artificial Sequence: Synthetic oligonucleotide
uguggacauggacacggug

SEQ ID NO: 1196150 - RNA, 19 nt, Artificial Sequence
  Description of Artificial Sequence: Synthetic oligonucleotide
ugacggacaggaucaucgg

SEQ ID NO: 1196151 - RNA, 19 nt, Artificial Sequence
  Description of Artificial Sequence: Synthetic oligonucleotide
gaguccagccccucgaaac

SEQ ID NO: 1196152 - RNA, 19 nt, Artificial Sequence
  Description of Artificial Sequence: Synthetic oligonucleotide
cagcgugccgugcugaugg

SEQ ID NO: 1196153 - RNA, 19 nt, Artificial Sequence
  Description of Artificial Sequence: Synthetic oligonucleotide
cuggguccagguuagguac

SEQ ID NO: 1196154 - RNA, 19 nt, Artificial Sequence
  Description of Artificial Sequence: Synthetic oligonucleotide
cugacucuacaguugcccc

SEQ ID NO: 1196155 - RNA, 19 nt, Artificial Sequence
  Description of Artificial Sequence: Synthetic oligonucleotide
ucggcauaagggucagagg

SEQ ID NO: 1196156 - RNA, 19 nt, Artificial Sequence
  Description of Artificial Sequence: Synthetic oligonucleotide
gagguucugugauagcuga

SEQ ID NO: 1196157 - RNA, 19 nt, Artificial Sequence
  Description of Artificial Sequence: Synthetic oligonucleotide
aguuccccgaucuuauacu

SEQ ID NO: 1196158 - RNA, 19 nt, Artificial Sequence
  Description of Artificial Sequence: Synthetic oligonucleotide
auagguuucuggguccagg

SEQ ID NO: 1196159 - RNA, 19 nt, Artificial Sequence
  Description of Artificial Sequence: Synthetic oligonucleotide
gggcuaacacaucacagag

SEQ ID NO: 1196160 - RNA, 19 nt, Artificial Sequence
  Description of Artificial Sequence: Synthetic oligonucleotide
uagaguuacccagacucca

SEQ ID NO: 1196161 - RNA, 19 nt, Artificial Sequence
  Description of Artificial Sequence: Synthetic oligonucleotide
cuacaguugccccaucaug

SEQ ID NO: 1196162 - RNA, 19 nt, Artificial Sequence
  Description of Artificial Sequence: Synthetic oligonucleotide
uuaguccaccaucuauaga

SEQ ID NO: 1196163 - RNA, 19 nt, Artificial Sequence
  Description of Artificial Sequence: Synthetic oligonucleotide
uuucauaugccaggaggac

SEQ ID NO: 1196164 - RNA, 19 nt, Artificial Sequence
  Description of Artificial Sequence: Synthetic oligonucleotide
ucguacagggaaaccgaug

SEQ ID NO: 1196165 - RNA, 19 nt, Artificial Sequence
  Description of Artificial Sequence: Synthetic oligonucleotide
gcuccuacuauaugcaagc

SEQ ID NO: 1196166 - RNA, 19 nt, Artificial Sequence
  Description of Artificial Sequence: Synthetic oligonucleotide
gauagguaguuccugaauu

SEQ ID NO: 1196167 - RNA, 19 nt, Artificial Sequence
  Description of Artificial Sequence: Synthetic oligonucleotide
ccgggugaagaaaauaggg

SEQ ID NO: 1196168 - RNA, 19 nt, Artificial Sequence
  Description of Artificial Sequence: Synthetic oligonucleotide
gggagauaugucaacuucg

SEQ ID NO: 1196169 - RNA, 19 nt, Artificial Sequence
  Description of Artificial Sequence: Synthetic oligonucleotide
aacucacggacaugagccu

SEQ ID NO: 1196170 - RNA, 19 nt, Artificial Sequence
  Description of Artificial Sequence: Synthetic oligonucleotide
cauuuagcuuagcuggcac

SEQ ID NO: 1196171 - RNA, 19 nt, Artificial Sequence
  Description of Artificial Sequence: Synthetic oligonucleotide
acauccacucgaaucacag

SEQ ID NO: 1196172 - RNA, 19 nt, Artificial Sequence
  Description of Artificial Sequence: Synthetic oligonucleotide
aguugccccaucaugaggu

SEQ ID NO: 1196173 - RNA, 19 nt, Artificial Sequence
  Description of Artificial Sequence: Synthetic oligonucleotide
uggcacgauguggacaugg

SEQ ID NO: 1196174 - RNA, 19 nt, Artificial Sequence
  Description of Artificial Sequence: Synthetic oligonucleotide
cucacggacaugagccugg

SEQ ID NO: 1196175 - RNA, 19 nt, Artificial Sequence
  Description of Artificial Sequence: Synthetic oligonucleotide
gauccauggcccgagccag

SEQ ID NO: 1196176 - RNA, 19 nt, Artificial Sequence
  Description of Artificial Sequence: Synthetic oligonucleotide
uauccgugaugacuccuga

SEQ ID NO: 1196177 - RNA, 19 nt, Artificial Sequence
  Description of Artificial Sequence: Synthetic oligonucleotide
caucacagagucgugcccc

SEQ ID NO: 1196178 - RNA, 19 nt, Artificial Sequence
  Description of Artificial Sequence: Synthetic oligonucleotide
guaaucccgccucugccag

SEQ ID NO: 1196179 - RNA, 19 nt, Artificial Sequence
  Description of Artificial Sequence: Synthetic oligonucleotide
auaugguuccgggugaaga

SEQ ID NO: 1196180 - RNA, 19 nt, Artificial Sequence
  Description of Artificial Sequence: Synthetic oligonucleotide
auggcgcuagaucgaaguc

SEQ ID NO: 1196181 - RNA, 19 nt, Artificial Sequence
  Description of Artificial Sequence: Synthetic oligonucleotide
uucgggguucaguuccccg

SEQ ID NO: 1196182 - RNA, 19 nt, Artificial Sequence
  Description of Artificial Sequence: Synthetic oligonucleotide
agguuaguccaccaucuau

SEQ ID NO: 1196183 - RNA, 19 nt, Artificial Sequence
  Description of Artificial Sequence: Synthetic oligonucleotide
ccucgaaacagacaugggc

SEQ ID NO: 1196184 - RNA, 19 nt, Artificial Sequence
  Description of Artificial Sequence: Synthetic oligonucleotide
acaggguuaugacccaaga

SEQ ID NO: 1196185 - RNA, 19 nt, Artificial Sequence
  Description of Artificial Sequence: Synthetic oligonucleotide
uugcguaguucuuggguac

SEQ ID NO: 1196186 - RNA, 19 nt, Artificial Sequence
  Description of Artificial Sequence: Synthetic oligonucleotide
gaagucuaccgugucccag

SEQ ID NO: 1196187 - RNA, 19 nt, Artificial Sequence
  Description of Artificial Sequence: Synthetic oligonucleotide
gauggcgcuagaucgaagu

SEQ ID NO: 1196188 - RNA, 19 nt, Artificial Sequence
  Description of Artificial Sequence: Synthetic oligonucleotide
cuccgcauuaaagggacgc

SEQ ID NO: 1196189 - RNA, 19 nt, Artificial Sequence
  Description of Artificial Sequence: Synthetic oligonucleotide
augagccugguugugaaca

SEQ ID NO: 1196190 - RNA, 19 nt, Artificial Sequence
  Description of Artificial Sequence: Synthetic oligonucleotide
ccugcaacgaugaucauga

SEQ ID NO: 1196191 - RNA, 19 nt, Artificial Sequence
  Description of Artificial Sequence: Synthetic oligonucleotide
cagccauuugacguggcgg

SEQ ID NO: 1196192 - RNA, 19 nt, Artificial Sequence
  Description of Artificial Sequence: Synthetic oligonucleotide
gucaucuaucgcuuuacaa

SEQ ID NO: 1196193 - RNA, 19 nt, Artificial Sequence
  Description of Artificial Sequence: Synthetic oligonucleotide
agucuaccgugucccaguc

SEQ ID NO: 1196194 - RNA, 19 nt, Artificial Sequence
  Description of Artificial Sequence: Synthetic oligonucleotide
uuccccgaucuuauacuca

SEQ ID NO: 1196195 - RNA, 19 nt, Artificial Sequence
  Description of Artificial Sequence: Synthetic oligonucleotide
cuuugguguauauccguga

SEQ ID NO: 1196196 - RNA, 19 nt, Artificial Sequence
  Description of Artificial Sequence: Synthetic oligonucleotide
cauccacucgaaucacagc

SEQ ID NO: 1196197 - RNA, 19 nt, Artificial Sequence
  Description of Artificial Sequence: Synthetic oligonucleotide
uggcgcuagaucgaagucu

SEQ ID NO: 1196198 - RNA, 19 nt, Artificial Sequence
  Description of Artificial Sequence: Synthetic oligonucleotide
ugaucaugauaggccagca

SEQ ID NO: 1196199 - RNA, 19 nt, Artificial Sequence
  Description of Artificial Sequence: Synthetic oligonucleotide
uauauccgugaugacuccu

SEQ ID NO: 1196200 - RNA, 19 nt, Artificial Sequence
  Description of Artificial Sequence: Synthetic oligonucleotide
accguucauuucauaugcc

SEQ ID NO: 1196201 - RNA, 19 nt, Artificial Sequence
  Description of Artificial Sequence: Synthetic oligonucleotide
gaaacagacaugggccuca

SEQ ID NO: 1196202 - RNA, 19 nt, Artificial Sequence
  Description of Artificial Sequence: Synthetic oligonucleotide
auuugacguggcggcaccc

SEQ ID NO: 1196203 - RNA, 19 nt, Artificial Sequence
  Description of Artificial Sequence: Synthetic oligonucleotide
aaucauccaaggacaggga

SEQ ID NO: 1196204 - RNA, 19 nt, Artificial Sequence
  Description of Artificial Sequence: Synthetic oligonucleotide
cagagugacagugaccuca

SEQ ID NO: 1196205 - RNA, 19 nt, Artificial Sequence
  Description of Artificial Sequence: Synthetic oligonucleotide
acggacaggaucaucggca

SEQ ID NO: 1196206 - RNA, 19 nt, Artificial Sequence
  Description of Artificial Sequence: Synthetic oligonucleotide
acaugagccugguugugaa

SEQ ID NO: 1196207 - RNA, 19 nt, Artificial Sequence
  Description of Artificial Sequence: Synthetic oligonucleotide
agccuuuguaaucccgccu

SEQ ID NO: 1196208 - RNA, 19 nt, Artificial Sequence
  Description of Artificial Sequence: Synthetic oligonucleotide
guuccccgaucuuauacuc

SEQ ID NO: 1196209 - RNA, 19 nt, Artificial Sequence
  Description of Artificial Sequence: Synthetic oligonucleotide
gcauuaguuuugauggucc

SEQ ID NO: 1196210 - RNA, 19 nt, Artificial Sequence
  Description of Artificial Sequence: Synthetic oligonucleotide
aaacagacaugggccucag

SEQ ID NO: 1196211 - RNA, 19 nt, Artificial Sequence
  Description of Artificial Sequence: Synthetic oligonucleotide
aggcguugcugagaacgcc

SEQ ID NO: 1196212 - RNA, 19 nt, Artificial Sequence
  Description of Artificial Sequence: Synthetic oligonucleotide
uggugugauguaguuuucu

SEQ ID NO: 1196213 - RNA, 19 nt, Artificial Sequence
  Description of Artificial Sequence: Synthetic oligonucleotide
cguucauuucauaugccag

SEQ ID NO: 1196214 - RNA, 19 nt, Artificial Sequence
  Description of Artificial Sequence: Synthetic oligonucleotide
ugacugugacuuuccucug

SEQ ID NO: 1196215 - RNA, 19 nt, Artificial Sequence
  Description of Artificial Sequence: Synthetic oligonucleotide
auauccgugaugacuccug

SEQ ID NO: 1196216 - RNA, 19 nt, Artificial Sequence
  Description of Artificial Sequence: Synthetic oligonucleotide
gaggcugaccguucauuuc

SEQ ID NO: 1196217 - RNA, 19 nt, Artificial Sequence
  Description of Artificial Sequence: Synthetic oligonucleotide
cucccacuagcucagccuc

SEQ ID NO: 1196218 - RNA, 19 nt, Artificial Sequence
  Description of Artificial Sequence: Synthetic oligonucleotide
cuccuacuauaugcaagcg

SEQ ID NO: 1196219 - RNA, 19 nt, Artificial Sequence
  Description of Artificial Sequence: Synthetic oligonucleotide
uugacguggcggcacccac

SEQ ID NO: 1196220 - RNA, 19 nt, Artificial Sequence
  Description of Artificial Sequence: Synthetic oligonucleotide
auugauggcgcuagaucga

SEQ ID NO: 1196221 - RNA, 19 nt, Artificial Sequence
  Description of Artificial Sequence: Synthetic oligonucleotide
uaaucgccacgcccaggcc

SEQ ID NO: 1196222 - RNA, 19 nt, Artificial Sequence
  Description of Artificial Sequence: Synthetic oligonucleotide
uuugacguggcggcaccca

SEQ ID NO: 1196223 - RNA, 19 nt, Artificial Sequence
  Description of Artificial Sequence: Synthetic oligonucleotide
uuagcuuagcuggcaccug

SEQ ID NO: 1196224 - RNA, 19 nt, Artificial Sequence
  Description of Artificial Sequence: Synthetic oligonucleotide
agggacgcuggcuauuaau

SEQ ID NO: 1196225 - RNA, 19 nt, Artificial Sequence
  Description of Artificial Sequence: Synthetic oligonucleotide
aguaacucacggacaugag

SEQ ID NO: 1196226 - RNA, 19 nt, Artificial Sequence
  Description of Artificial Sequence: Synthetic oligonucleotide
uugcugagaacgccucgaa

SEQ ID NO: 1196227 - RNA, 19 nt, Artificial Sequence
  Description of Artificial Sequence: Synthetic oligonucleotide
caugguaaugaggguuaag

SEQ ID NO: 1196228 - RNA, 19 nt, Artificial Sequence
  Description of Artificial Sequence: Synthetic oligonucleotide
cgcauuaaagggacgcugg

SEQ ID NO: 1196229 - RNA, 19 nt, Artificial Sequence
  Description of Artificial Sequence: Synthetic oligonucleotide
gacguggcggcacccacca

SEQ ID NO: 1196230 - RNA, 19 nt, Artificial Sequence
  Description of Artificial Sequence: Synthetic oligonucleotide
ccguuccaugcuuucaugg

SEQ ID NO: 1196231 - RNA, 19 nt, Artificial Sequence
  Description of Artificial Sequence: Synthetic oligonucleotide
cucgaaucacagcccugcc

SEQ ID NO: 1196232 - RNA, 19 nt, Artificial Sequence
  Description of Artificial Sequence: Synthetic oligonucleotide
uccgcauuaaagggacgcu

SEQ ID NO: 1196233 - RNA, 19 nt, Artificial Sequence
  Description of Artificial Sequence: Synthetic oligonucleotide
agauggagagaagccuuug

SEQ ID NO: 1196234 - RNA, 19 nt, Artificial Sequence
  Description of Artificial Sequence: Synthetic oligonucleotide
agcgacugaccuccaggug

SEQ ID NO: 1196235 - RNA, 19 nt, Artificial Sequence
  Description of Artificial Sequence: Synthetic oligonucleotide
ccccucgaaacagacaugg

SEQ ID NO: 1196236 - RNA, 19 nt, Artificial Sequence
  Description of Artificial Sequence: Synthetic oligonucleotide
uuggcuccguuccaugcuu

SEQ ID NO: 1196237 - RNA, 19 nt, Artificial Sequence
  Description of Artificial Sequence: Synthetic oligonucleotide
gcauuaaagggacgcuggc

SEQ ID NO: 1196238 - RNA, 19 nt, Artificial Sequence
  Description of Artificial Sequence: Synthetic oligonucleotide
acucacggacaugagccug

SEQ ID NO: 1196239 - RNA, 19 nt, Artificial Sequence
  Description of Artificial Sequence: Synthetic oligonucleotide
uugauggcgcuagaucgaa

SEQ ID NO: 1196240 - RNA, 19 nt, Artificial Sequence
  Description of Artificial Sequence: Synthetic oligonucleotide
cuguguucuugaguuauca

SEQ ID NO: 1196241 - RNA, 19 nt, Artificial Sequence
  Description of Artificial Sequence: Synthetic oligonucleotide
cauaaucgccacgcccagg

SEQ ID NO: 1196242 - RNA, 19 nt, Artificial Sequence
  Description of Artificial Sequence: Synthetic oligonucleotide
ugcguaguucuuggguaca

SEQ ID NO: 1196243 - RNA, 19 nt, Artificial Sequence
  Description of Artificial Sequence: Synthetic oligonucleotide
caugagccugguugugaac

SEQ ID NO: 1196244 - RNA, 19 nt, Artificial Sequence
  Description of Artificial Sequence: Synthetic oligonucleotide
cauggcacgauguggacau

SEQ ID NO: 1196245 - RNA, 19 nt, Artificial Sequence
  Description of Artificial Sequence: Synthetic oligonucleotide
ccuacuauaugcaagcgau

SEQ ID NO: 1196246 - RNA, 19 nt, Artificial Sequence
  Description of Artificial Sequence: Synthetic oligonucleotide
gauggguuggaaaggaguu

SEQ ID NO: 1196247 - RNA, 19 nt, Artificial Sequence
  Description of Artificial Sequence: Synthetic oligonucleotide
gccuuuguaaucccgccuc

SEQ ID NO: 1196248 - RNA, 19 nt, Artificial Sequence
  Description of Artificial Sequence: Synthetic oligonucleotide
agcgugccgugcugauggc

SEQ ID NO: 1196249 - RNA, 19 nt, Artificial Sequence
  Description of Artificial Sequence: Synthetic oligonucleotide
agcgccgguugccagcaca

SEQ ID NO: 1196250 - RNA, 19 nt, Artificial Sequence
  Description of Artificial Sequence: Synthetic oligonucleotide
gacacggugccaggcguug

SEQ ID NO: 1196251 - RNA, 19 nt, Artificial Sequence
  Description of Artificial Sequence: Synthetic oligonucleotide
agguuagguacaggcauau

SEQ ID NO: 1196252 - RNA, 19 nt, Artificial Sequence
  Description of Artificial Sequence: Synthetic oligonucleotide
ggauccauggcccgagcca

SEQ ID NO: 1196253 - RNA, 19 nt, Artificial Sequence
  Description of Artificial Sequence: Synthetic oligonucleotide
cacccaccacaccagggac

SEQ ID NO: 1196254 - RNA, 19 nt, Artificial Sequence
  Description of Artificial Sequence: Synthetic oligonucleotide
gccagagggauagaugccc

SEQ ID NO: 1196255 - RNA, 19 nt, Artificial Sequence
  Description of Artificial Sequence: Synthetic oligonucleotide
agagggauagaugccccau

SEQ ID NO: 1196256 - RNA, 19 nt, Artificial Sequence
  Description of Artificial Sequence: Synthetic oligonucleotide
cauaugguuccgggugaag

SEQ ID NO: 1196257 - RNA, 19 nt, Artificial Sequence
  Description of Artificial Sequence: Synthetic oligonucleotide
cccauaggcagucccagug

SEQ ID NO: 1196258 - RNA, 19 nt, Artificial Sequence
  Description of Artificial Sequence: Synthetic oligonucleotide
gguuaguccaccaucuaua

SEQ ID NO: 1196259 - RNA, 19 nt, Artificial Sequence
  Description of Artificial Sequence: Synthetic oligonucleotide
uccugaauugauggcgcua

SEQ ID NO: 1196260 - RNA, 19 nt, Artificial Sequence
  Description of Artificial Sequence: Synthetic oligonucleotide
gccauaaucgccacgccca

SEQ ID NO: 1196261 - RNA, 19 nt, Artificial Sequence
  Description of Artificial Sequence: Synthetic oligonucleotide
gccagguuaguccaccauc

SEQ ID NO: 1196262 - RNA, 19 nt, Artificial Sequence
  Description of Artificial Sequence: Synthetic oligonucleotide
augcaagcgauagguuucu

SEQ ID NO: 1196263 - RNA, 19 nt, Artificial Sequence
  Description of Artificial Sequence: Synthetic oligonucleotide
ggugcuccuacuauaugca

SEQ ID NO: 1196264 - RNA, 19 nt, Artificial Sequence
  Description of Artificial Sequence: Synthetic oligonucleotide
gcgauagguuucugggucc

SEQ ID NO: 1196265 - RNA, 19 nt, Artificial Sequence
  Description of Artificial Sequence: Synthetic oligonucleotide
aagggacgcuggcuauuaa

SEQ ID NO: 1196266 - RNA, 19 nt, Artificial Sequence
  Description of Artificial Sequence: Synthetic oligonucleotide
cuagaucgaagucuaccgu

SEQ ID NO: 1196267 - RNA, 19 nt, Artificial Sequence
  Description of Artificial Sequence: Synthetic oligonucleotide
gcuuggcuccguuccaugc

SEQ ID NO: 1196268 - RNA, 19 nt, Artificial Sequence
  Description of Artificial Sequence: Synthetic oligonucleotide
cugccauaaucgccacgcc

SEQ ID NO: 1196269 - RNA, 19 nt, Artificial Sequence
  Description of Artificial Sequence: Synthetic oligonucleotide
cacucgaaucacagcccug

SEQ ID NO: 1196270 - RNA, 19 nt, Artificial Sequence
  Description of Artificial Sequence: Synthetic oligonucleotide
ccucacguccucuuuggug

SEQ ID NO: 1196271 - RNA, 19 nt, Artificial Sequence
  Description of Artificial Sequence: Synthetic oligonucleotide
gacgcuggcuauuaaucuu

SEQ ID NO: 1196272 - RNA, 19 nt, Artificial Sequence
  Description of Artificial Sequence: Synthetic oligonucleotide
agggaccaccacucguaca

SEQ ID NO: 1196273 - RNA, 19 nt, Artificial Sequence
  Description of Artificial Sequence: Synthetic oligonucleotide
uggucacgaggcagaggcu

SEQ ID NO: 1196274 - RNA, 19 nt, Artificial Sequence
  Description of Artificial Sequence: Synthetic oligonucleotide
cuacuauaugcaagcgaua

SEQ ID NO: 1196275 - RNA, 19 nt, Artificial Sequence
  Description of Artificial Sequence: Synthetic oligonucleotide
caggugcuccuacuauaug

SEQ ID NO: 1196276 - RNA, 19 nt, Artificial Sequence
  Description of Artificial Sequence: Synthetic oligonucleotide
ccguucauuucauaugcca

SEQ ID NO: 1196277 - RNA, 19 nt, Artificial Sequence
  Description of Artificial Sequence: Synthetic oligonucleotide
gggacgcuggcuauuaauc

SEQ ID NO: 1196278 - RNA, 19 nt, Artificial Sequence
  Description of Artificial Sequence: Synthetic oligonucleotide
gucuaccgugucccagucc

SEQ ID NO: 1196279 - RNA, 19 nt, Artificial Sequence
  Description of Artificial Sequence: Synthetic oligonucleotide
gucggugaccagccugggc

SEQ ID NO: 1196280 - RNA, 19 nt, Artificial Sequence
  Description of Artificial Sequence: Synthetic oligonucleotide
caaggccuagcaggguccc

SEQ ID NO: 1196281 - RNA, 19 nt, Artificial Sequence
  Description of Artificial Sequence: Synthetic oligonucleotide
cugagaacgccucgaaggu

SEQ ID NO: 1196282 - RNA, 19 nt, Artificial Sequence
  Description of Artificial Sequence: Synthetic oligonucleotide
agaguuacccagacuccau

SEQ ID NO: 1196283 - RNA, 19 nt, Artificial Sequence
  Description of Artificial Sequence: Synthetic oligonucleotide
ggcuccgcauuaaagggac

SEQ ID NO: 1196284 - RNA, 19 nt, Artificial Sequence
  Description of Artificial Sequence: Synthetic oligonucleotide
aggccuagcagggucccca

SEQ ID NO: 1196285 - RNA, 19 nt, Artificial Sequence
  Description of Artificial Sequence: Synthetic oligonucleotide
gcacgauguggacauggac

SEQ ID NO: 1196286 - RNA, 19 nt, Artificial Sequence
  Description of Artificial Sequence: Synthetic oligonucleotide
acgccucgaagguuccaga

SEQ ID NO: 1196287 - RNA, 19 nt, Artificial Sequence
  Description of Artificial Sequence: Synthetic oligonucleotide
uaaucccgccucugccagu

SEQ ID NO: 1196288 - RNA, 19 nt, Artificial Sequence
  Description of Artificial Sequence: Synthetic oligonucleotide
cauuaaagggacgcuggcu

SEQ ID NO: 1196289 - RNA, 19 nt, Artificial Sequence
  Description of Artificial Sequence: Synthetic oligonucleotide
gacaugggccucaguuuca

SEQ ID NO: 1196290 - RNA, 19 nt, Artificial Sequence
  Description of Artificial Sequence: Synthetic oligonucleotide
ucacgaggcagaggcugac

SEQ ID NO: 1196291 - RNA, 19 nt, Artificial Sequence
  Description of Artificial Sequence: Synthetic oligonucleotide
agagcgccgguugccagca

SEQ ID NO: 1196292 - RNA, 19 nt, Artificial Sequence
  Description of Artificial Sequence: Synthetic oligonucleotide
ugcaagcgauagguuucug

SEQ ID NO: 1196293 - RNA, 19 nt, Artificial Sequence
  Description of Artificial Sequence: Synthetic oligonucleotide
cuucgggguucaguucccc

SEQ ID NO: 1196294 - RNA, 19 nt, Artificial Sequence
  Description of Artificial Sequence: Synthetic oligonucleotide
cuaccgugucccaguccac

SEQ ID NO: 1196295 - RNA, 19 nt, Artificial Sequence
  Description of Artificial Sequence: Synthetic oligonucleotide
gugcuccuacuauaugcaa

SEQ ID NO: 1196296 - RNA, 19 nt, Artificial Sequence
  Description of Artificial Sequence: Synthetic oligonucleotide
guuacccagacuccauuuu

SEQ ID NO: 1196297 - RNA, 19 nt, Artificial Sequence
  Description of Artificial Sequence: Synthetic oligonucleotide
uugugacaucaaagaccuc

SEQ ID NO: 1196298 - RNA, 19 nt, Artificial Sequence
  Description of Artificial Sequence: Synthetic oligonucleotide
cacgaggcagaggcugacc

SEQ ID NO: 1196299 - RNA, 19 nt, Artificial Sequence
  Description of Artificial Sequence: Synthetic oligonucleotide
cuggauguaguugcacaaa

SEQ ID NO: 1196300 - RNA, 19 nt, Artificial Sequence
  Description of Artificial Sequence: Synthetic oligonucleotide
cugaauugauggcgcuaga

SEQ ID NO: 1196301 - RNA, 19 nt, Artificial Sequence
  Description of Artificial Sequence: Synthetic oligonucleotide
ggacgcuggcuauuaaucu

SEQ ID NO: 1196302 - RNA, 19 nt, Artificial Sequence
  Description of Artificial Sequence: Synthetic oligonucleotide
gcacaaauuuugugacauc

SEQ ID NO: 1196303 - RNA, 19 nt, Artificial Sequence
  Description of Artificial Sequence: Synthetic oligonucleotide
gcccgagccagagggauag

SEQ ID NO: 1196304 - RNA, 19 nt, Artificial Sequence
  Description of Artificial Sequence: Synthetic oligonucleotide
ggugggagauaugucaacu

SEQ ID NO: 1196305 - RNA, 19 nt, Artificial Sequence
  Description of Artificial Sequence: Synthetic oligonucleotide
ccgugaugacuccugagca

SEQ ID NO: 1196306 - RNA, 19 nt, Artificial Sequence
  Description of Artificial Sequence: Synthetic oligonucleotide
cccucgaaacagacauggg

SEQ ID NO: 1196307 - RNA, 19 nt, Artificial Sequence
  Description of Artificial Sequence: Synthetic oligonucleotide
ccauaaucgccacgcccag

SEQ ID NO: 1196308 - RNA, 19 nt, Artificial Sequence
  Description of Artificial Sequence: Synthetic oligonucleotide
cuuggcuccguuccaugcu

SEQ ID NO: 1196309 - RNA, 19 nt, Artificial Sequence
  Description of Artificial Sequence: Synthetic oligonucleotide
ugucaacuucgggguucag

SEQ ID NO: 1196310 - RNA, 19 nt, Artificial Sequence
  Description of Artificial Sequence: Synthetic oligonucleotide
aggaguuugcguaguucuu

SEQ ID NO: 1196311 - RNA, 19 nt, Artificial Sequence
  Description of Artificial Sequence: Synthetic oligonucleotide
gugggagauaugucaacuu

SEQ ID NO: 1196312 - RNA, 19 nt, Artificial Sequence
  Description of Artificial Sequence: Synthetic oligonucleotide
uggcuccguuccaugcuuu

SEQ ID NO: 1196313 - RNA, 19 nt, Artificial Sequence
  Description of Artificial Sequence: Synthetic oligonucleotide
ccgcauuaaagggacgcug

SEQ ID NO: 1196314 - RNA, 19 nt, Artificial Sequence
  Description of Artificial Sequence: Synthetic oligonucleotide
ccgaucuuauacucagcca

SEQ ID NO: 1196315 - RNA, 19 nt, Artificial Sequence
  Description of Artificial Sequence: Synthetic oligonucleotide
caggcauaugguuccgggu

SEQ ID NO: 1196316 - RNA, 19 nt, Artificial Sequence
  Description of Artificial Sequence: Synthetic oligonucleotide
gguuagguacaggcauaug

SEQ ID NO: 1196317 - RNA, 19 nt, Artificial Sequence
  Description of Artificial Sequence: Synthetic oligonucleotide
gucaccucuccugacucua

SEQ ID NO: 1196318 - RNA, 19 nt, Artificial Sequence
  Description of Artificial Sequence: Synthetic oligonucleotide
ccagguuaguccaccaucu

SEQ ID NO: 1196319 - RNA, 19 nt, Artificial Sequence
  Description of Artificial Sequence: Synthetic oligonucleotide
gcguaguucuuggguacag

SEQ ID NO: 1196320 - RNA, 19 nt, Artificial Sequence
  Description of Artificial Sequence: Synthetic oligonucleotide
ccauuugacguggcggcac

SEQ ID NO: 1196321 - RNA, 19 nt, Artificial Sequence
  Description of Artificial Sequence: Synthetic oligonucleotide
ggcgcuagaucgaagucua

SEQ ID NO: 1196322 - RNA, 19 nt, Artificial Sequence
  Description of Artificial Sequence: Synthetic oligonucleotide
acguggcggcacccaccac

SEQ ID NO: 1196323 - RNA, 19 nt, Artificial Sequence
  Description of Artificial Sequence: Synthetic oligonucleotide
cucguacagggaaaccgau

SEQ ID NO: 1196324 - RNA, 19 nt, Artificial Sequence
  Description of Artificial Sequence: Synthetic oligonucleotide
cgugccgugcugauggcuc

SEQ ID NO: 1196325 - RNA, 19 nt, Artificial Sequence
  Description of Artificial Sequence: Synthetic oligonucleotide
gaacgccucgaagguucca

SEQ ID NO: 1196326 - RNA, 19 nt, Artificial Sequence
  Description of Artificial Sequence: Synthetic oligonucleotide
cagguuaguccaccaucua

SEQ ID NO: 1196327 - RNA, 19 nt, Artificial Sequence
  Description of Artificial Sequence: Synthetic oligonucleotide
gguugccagcacacugcag

SEQ ID NO: 1196328 - RNA, 19 nt, Artificial Sequence
  Description of Artificial Sequence: Synthetic oligonucleotide
ggguuaaggauggguugga

SEQ ID NO: 1196329 - RNA, 19 nt, Artificial Sequence
  Description of Artificial Sequence: Synthetic oligonucleotide
gcuccgcauuaaagggacg

SEQ ID NO: 1196330 - RNA, 19 nt, Artificial Sequence
  Description of Artificial Sequence: Synthetic oligonucleotide
ggcacgauguggacaugga

SEQ ID NO: 1196331 - RNA, 19 nt, Artificial Sequence
  Description of Artificial Sequence: Synthetic oligonucleotide
ccacucguacagggaaacc

SEQ ID NO: 1196332 - RNA, 19 nt, Artificial Sequence
  Description of Artificial Sequence: Synthetic oligonucleotide
auggcacgauguggacaug

SEQ ID NO: 1196333 - RNA, 19 nt, Artificial Sequence
  Description of Artificial Sequence: Synthetic oligonucleotide
ccaguaacucacggacaug

SEQ ID NO: 1196334 - RNA, 19 nt, Artificial Sequence
  Description of Artificial Sequence: Synthetic oligonucleotide
ggcguugcugagaacgccu

SEQ ID NO: 1196335 - RNA, 19 nt, Artificial Sequence
  Description of Artificial Sequence: Synthetic oligonucleotide
cgaaacagacaugggccuc

SEQ ID NO: 1196336 - RNA, 19 nt, Artificial Sequence
  Description of Artificial Sequence: Synthetic oligonucleotide
gccuagcaggguccccaug

SEQ ID NO: 1196337 - RNA, 19 nt, Artificial Sequence
  Description of Artificial Sequence: Synthetic oligonucleotide
cacggugccaggcguugcu

SEQ ID NO: 1196338 - RNA, 19 nt, Artificial Sequence
  Description of Artificial Sequence: Synthetic oligonucleotide
gccauuugacguggcggca

SEQ ID NO: 1196339 - RNA, 19 nt, Artificial Sequence
  Description of Artificial Sequence: Synthetic oligonucleotide
ccacucgaaucacagcccu

SEQ ID NO: 1196340 - RNA, 19 nt, Artificial Sequence
  Description of Artificial Sequence: Synthetic oligonucleotide
gcgccgguugccagcacac

SEQ ID NO: 1196341 - RNA, 19 nt, Artificial Sequence
  Description of Artificial Sequence: Synthetic oligonucleotide
gccuagaguuacccagacu

SEQ ID NO: 1196342 - RNA, 19 nt, Artificial Sequence
  Description of Artificial Sequence: Synthetic oligonucleotide
gagcgccgguugccagcac

SEQ ID NO: 1196343 - RNA, 19 nt, Artificial Sequence
  Description of Artificial Sequence: Synthetic oligonucleotide
gccccucgaaacagacaug

SEQ ID NO: 1196344 - RNA, 19 nt, Artificial Sequence
  Description of Artificial Sequence: Synthetic oligonucleotide
cugagucggugaccagccu

SEQ ID NO: 1196345 - RNA, 19 nt, Artificial Sequence
  Description of Artificial Sequence: Synthetic oligonucleotide
ccuuuguaaucccgccucu

SEQ ID NO: 1196346 - RNA, 19 nt, Artificial Sequence
  Description of Artificial Sequence: Synthetic oligonucleotide
ccagcgugccgugcugaug

SEQ ID NO: 1196347 - RNA, 19 nt, Artificial Sequence
  Description of Artificial Sequence: Synthetic oligonucleotide
caucggcauaagggucaga

SEQ ID NO: 1196348 - RNA, 19 nt, Artificial Sequence
  Description of Artificial Sequence: Synthetic oligonucleotide
gguuccgggugaagaaaau

SEQ ID NO: 1196349 - RNA, 19 nt, Artificial Sequence
  Description of Artificial Sequence: Synthetic oligonucleotide
cgaagucuaccguguccca

SEQ ID NO: 1196350 - RNA, 19 nt, Artificial Sequence
  Description of Artificial Sequence: Synthetic oligonucleotide
cgauagguuucugggucca

SEQ ID NO: 1196351 - RNA, 19 nt, Artificial Sequence
  Description of Artificial Sequence: Synthetic oligonucleotide
gcgcuagaucgaagucuac

SEQ ID NO: 1196352 - RNA, 19 nt, Artificial Sequence
  Description of Artificial Sequence: Synthetic oligonucleotide
ccaugguaaugaggguuaa

SEQ ID NO: 1196353 - RNA, 19 nt, Artificial Sequence
  Description of Artificial Sequence: Synthetic oligonucleotide
cugcaacgaugaucaugau

SEQ ID NO: 1196354 - RNA, 19 nt, Artificial Sequence
  Description of Artificial Sequence: Synthetic oligonucleotide
gcccagcgugccgugcuga

SEQ ID NO: 1196355 - RNA, 19 nt, Artificial Sequence
  Description of Artificial Sequence: Synthetic oligonucleotide
ccgcuccaugcauagcccu

SEQ ID NO: 1196356 - RNA, 19 nt, Artificial Sequence
  Description of Artificial Sequence: Synthetic oligonucleotide
ggcugaccguucauuucau

SEQ ID NO: 1196357 - RNA, 19 nt, Artificial Sequence
  Description of Artificial Sequence: Synthetic oligonucleotide
ggccuagcaggguccccau

SEQ ID NO: 1196358 - RNA, 19 nt, Artificial Sequence
  Description of Artificial Sequence: Synthetic oligonucleotide
ggcccgagccagagggaua

SEQ ID NO: 1196359 - RNA, 19 nt, Artificial Sequence
  Description of Artificial Sequence: Synthetic oligonucleotide
ggccuccaaggugggagau

SEQ ID NO: 1196360 - RNA, 19 nt, Artificial Sequence
  Description of Artificial Sequence: Synthetic oligonucleotide
ggacacggugccaggcguu

SEQ ID NO: 1196361 - RNA, 19 nt, Artificial Sequence
  Description of Artificial Sequence: Synthetic oligonucleotide
gcgugccgugcugauggcu

SEQ ID NO: 1196362 - RNA, 19 nt, Artificial Sequence
  Description of Artificial Sequence: Synthetic oligonucleotide
cccucacguccucuuuggu

SEQ ID NO: 1196363 - RNA, 19 nt, Artificial Sequence
  Description of Artificial Sequence: Synthetic oligonucleotide
ggccuuccugggacauugu

SEQ ID NO: 1196364 - RNA, 19 nt, Artificial Sequence
  Description of Artificial Sequence: Synthetic oligonucleotide
cgcuccaugcauagcccuu

SEQ ID NO: 1196365 - RNA, 19 nt, Artificial Sequence
  Description of Artificial Sequence: Synthetic oligonucleotide
cccgagccagagggauaga

SEQ ID NO: 1196366 - RNA, 19 nt, Artificial Sequence
  Description of Artificial Sequence: Synthetic oligonucleotide
cgccgguugccagcacacu

SEQ ID NO: 1196367 - RNA, 19 nt, Artificial Sequence
  Description of Artificial Sequence: Synthetic oligonucleotide
auuuauguaagccugugcc

SEQ ID NO: 1196368 - RNA, 19 nt, Artificial Sequence
  Description of Artificial Sequence: Synthetic oligonucleotide
aguuaauuacuuuaauucc

SEQ ID NO: 1196369 - RNA, 19 nt, Artificial Sequence
  Description of Artificial Sequence: Synthetic oligonucleotide
aauaacguggaacaucugg

SEQ ID NO: 1196370 - RNA, 19 nt, Artificial Sequence
  Description of Artificial Sequence: Synthetic oligonucleotide
agaagucuaauuuuaaaac

SEQ ID NO: 1196371 - RNA, 19 nt, Artificial Sequence
  Description of Artificial Sequence: Synthetic oligonucleotide
auaagaaucuuagaaagcc

SEQ ID NO: 1196372 - RNA, 19 nt, Artificial Sequence
  Description of Artificial Sequence: Synthetic oligonucleotide
aaguaguucaccuuaucac

SEQ ID NO: 1196373 - RNA, 19 nt, Artificial Sequence
  Description of Artificial Sequence: Synthetic oligonucleotide
aagacaaauagcuucaacu

SEQ ID NO: 1196374 - RNA, 19 nt, Artificial Sequence
  Description of Artificial Sequence: Synthetic oligonucleotide
uuaucaucgguacagauca

SEQ ID NO: 1196375 - RNA, 19 nt, Artificial Sequence
  Description of Artificial Sequence: Synthetic oligonucleotide
uguaccagaauccaaagug

SEQ ID NO: 1196376 - RNA, 19 nt, Artificial Sequence
  Description of Artificial Sequence: Synthetic oligonucleotide
aagaucuuuucacugaguc

SEQ ID NO: 1196377 - RNA, 19 nt, Artificial Sequence
  Description of Artificial Sequence: Synthetic oligonucleotide
acuugaaagaguuaaagga

SEQ ID NO: 1196378 - RNA, 19 nt, Artificial Sequence
  Description of Artificial Sequence: Synthetic oligonucleotide
ucuuuugugaccauuagaa

SEQ ID NO: 1196379 - RNA, 19 nt, Artificial Sequence
  Description of Artificial Sequence: Synthetic oligonucleotide
uuugaagucaaacaaaguu

SEQ ID NO: 1196380 - RNA, 19 nt, Artificial Sequence
  Description of Artificial Sequence: Synthetic oligonucleotide
agauauaagaaucuuagaa

SEQ ID NO: 1196381 - RNA, 19 nt, Artificial Sequence
  Description of Artificial Sequence: Synthetic oligonucleotide
aacuuuaagauguggcuuc

SEQ ID NO: 1196382 - RNA, 19 nt, Artificial Sequence
  Description of Artificial Sequence: Synthetic oligonucleotide
ucuugagaaagguaugucg

SEQ ID NO: 1196383 - RNA, 19 nt, Artificial Sequence
  Description of Artificial Sequence: Synthetic oligonucleotide
ggauucauaagacagaucc

SEQ ID NO: 1196384 - RNA, 19 nt, Artificial Sequence
  Description of Artificial Sequence: Synthetic oligonucleotide
aagauauuaugagaagggc

SEQ ID NO: 1196385 - RNA, 19 nt, Artificial Sequence
  Description of Artificial Sequence: Synthetic oligonucleotide
uacaacauauaaucgaaag

SEQ ID NO: 1196386 - RNA, 19 nt, Artificial Sequence
  Description of Artificial Sequence: Synthetic oligonucleotide
uuggcuacaacauauaauc

SEQ ID NO: 1196387 - RNA, 19 nt, Artificial Sequence
  Description of Artificial Sequence: Synthetic oligonucleotide
aaagaguuaaaggaaguag

SEQ ID NO: 1196388 - RNA, 19 nt, Artificial Sequence
  Description of Artificial Sequence: Synthetic oligonucleotide
uauaaucgaaaguaguuca

SEQ ID NO: 1196389 - RNA, 19 nt, Artificial Sequence
  Description of Artificial Sequence: Synthetic oligonucleotide
uuaaugacaucuuuuguga

SEQ ID NO: 1196390 - RNA, 19 nt, Artificial Sequence
  Description of Artificial Sequence: Synthetic oligonucleotide
auucaagugggcaugaagc

SEQ ID NO: 1196391 - RNA, 19 nt, Artificial Sequence
  Description of Artificial Sequence: Synthetic oligonucleotide
aagaaucuuagaaagccac

SEQ ID NO: 1196392 - RNA, 19 nt, Artificial Sequence
  Description of Artificial Sequence: Synthetic oligonucleotide
ugcaaauucuuuaaugaca

SEQ ID NO: 1196393 - RNA, 19 nt, Artificial Sequence
  Description of Artificial Sequence: Synthetic oligonucleotide
gauauaagaaucuuagaaa

SEQ ID NO: 1196394 - RNA, 19 nt, Artificial Sequence
  Description of Artificial Sequence: Synthetic oligonucleotide
agauguaacugauggauuc

SEQ ID NO: 1196395 - RNA, 19 nt, Artificial Sequence
  Description of Artificial Sequence: Synthetic oligonucleotide
aagucuaauuuuaaaacag

SEQ ID NO: 1196396 - RNA, 19 nt, Artificial Sequence
  Description of Artificial Sequence: Synthetic oligonucleotide
uuaagauguggcuucuugg

SEQ ID NO: 1196397 - RNA, 19 nt, Artificial Sequence
  Description of Artificial Sequence: Synthetic oligonucleotide
uauaagaaucuuagaaagc

SEQ ID NO: 1196398 - RNA, 19 nt, Artificial Sequence
  Description of Artificial Sequence: Synthetic oligonucleotide
cauccuuuuaauaggaggc

SEQ ID NO: 1196399 - RNA, 19 nt, Artificial Sequence
  Description of Artificial Sequence: Synthetic oligonucleotide
uuaugagaagggcaaagcc

SEQ ID NO: 1196400 - RNA, 19 nt, Artificial Sequence
  Description of Artificial Sequence: Synthetic oligonucleotide
ugaucaugaacuuuaagau

SEQ ID NO: 1196401 - RNA, 19 nt, Artificial Sequence
  Description of Artificial Sequence: Synthetic oligonucleotide
uuuugugaccauuagaaua

SEQ ID NO: 1196402 - RNA, 19 nt, Artificial Sequence
  Description of Artificial Sequence: Synthetic oligonucleotide
aaauaccuaacaucaauau

SEQ ID NO: 1196403 - RNA, 19 nt, Artificial Sequence
  Description of Artificial Sequence: Synthetic oligonucleotide
uuaagucagaguuucugag

SEQ ID NO: 1196404 - RNA, 19 nt, Artificial Sequence
  Description of Artificial Sequence: Synthetic oligonucleotide
ugcaacgccaacuucaggc

SEQ ID NO: 1196405 - RNA, 19 nt, Artificial Sequence
  Description of Artificial Sequence: Synthetic oligonucleotide
aaugguuucggugugaaau

SEQ ID NO: 1196406 - RNA, 19 nt, Artificial Sequence
  Description of Artificial Sequence: Synthetic oligonucleotide
uuugugaccauuagaauau

SEQ ID NO: 1196407 - RNA, 19 nt, Artificial Sequence
  Description of Artificial Sequence: Synthetic oligonucleotide
aaucgaaaguaguucaccu

SEQ ID NO: 1196408 - RNA, 19 nt, Artificial Sequence
  Description of Artificial Sequence: Synthetic oligonucleotide
ucuggaaacauucuucuaa

SEQ ID NO: 1196409 - RNA, 19 nt, Artificial Sequence
  Description of Artificial Sequence: Synthetic oligonucleotide
uuagaauauccucagcacu

SEQ ID NO: 1196410 - RNA, 19 nt, Artificial Sequence
  Description of Artificial Sequence: Synthetic oligonucleotide
auauaaucgaaaguaguuc

SEQ ID NO: 1196411 - RNA, 19 nt, Artificial Sequence
  Description of Artificial Sequence: Synthetic oligonucleotide
gugaucaugaacuuuaaga

SEQ ID NO: 1196412 - RNA, 19 nt, Artificial Sequence
  Description of Artificial Sequence: Synthetic oligonucleotide
acuuuaauucccuuuauau

SEQ ID NO: 1196413 - RNA, 19 nt, Artificial Sequence
  Description of Artificial Sequence: Synthetic oligonucleotide
caucaaauaccuaacauca

SEQ ID NO: 1196414 - RNA, 19 nt, Artificial Sequence
  Description of Artificial Sequence: Synthetic oligonucleotide
ugaacuuuaagauguggcu

SEQ ID NO: 1196415 - RNA, 19 nt, Artificial Sequence
  Description of Artificial Sequence: Synthetic oligonucleotide
aaaacauagaggucuuccu

SEQ ID NO: 1196416 - RNA, 19 nt, Artificial Sequence
  Description of Artificial Sequence: Synthetic oligonucleotide
agcacuaguaguaagcugg

SEQ ID NO: 1196417 - RNA, 19 nt, Artificial Sequence
  Description of Artificial Sequence: Synthetic oligonucleotide
uagucuugagaaauaauac

SEQ ID NO: 1196418 - RNA, 19 nt, Artificial Sequence
  Description of Artificial Sequence: Synthetic oligonucleotide
uaauacuugaaagaguuaa

SEQ ID NO: 1196419 - RNA, 19 nt, Artificial Sequence
  Description of Artificial Sequence: Synthetic oligonucleotide
ucaaauaccuaacaucaau

SEQ ID NO: 1196420 - RNA, 19 nt, Artificial Sequence
  Description of Artificial Sequence: Synthetic oligonucleotide
acuaguaguaagcugguga

SEQ ID NO: 1196421 - RNA, 19 nt, Artificial Sequence
  Description of Artificial Sequence: Synthetic oligonucleotide
uggugaauaacguggaaca

SEQ ID NO: 1196422 - RNA, 19 nt, Artificial Sequence
  Description of Artificial Sequence: Synthetic oligonucleotide
ucugauuaaagguaacaaa

SEQ ID NO: 1196423 - RNA, 19 nt, Artificial Sequence
  Description of Artificial Sequence: Synthetic oligonucleotide
ugaaaugugaccuggcauc

SEQ ID NO: 1196424 - RNA, 19 nt, Artificial Sequence
  Description of Artificial Sequence: Synthetic oligonucleotide
aaguauggauuccacauaa

SEQ ID NO: 1196425 - RNA, 19 nt, Artificial Sequence
  Description of Artificial Sequence: Synthetic oligonucleotide
caauaucuaaguuuucuug

SEQ ID NO: 1196426 - RNA, 19 nt, Artificial Sequence
  Description of Artificial Sequence: Synthetic oligonucleotide
uuauuguuuggcgaaagug

SEQ ID NO: 1196427 - RNA, 19 nt, Artificial Sequence
  Description of Artificial Sequence: Synthetic oligonucleotide
ugaccuggcaucaauaguc

SEQ ID NO: 1196428 - RNA, 19 nt, Artificial Sequence
  Description of Artificial Sequence: Synthetic oligonucleotide
uguuuuaugccuucaagua

SEQ ID NO: 1196429 - RNA, 19 nt, Artificial Sequence
  Description of Artificial Sequence: Synthetic oligonucleotide
uucuucgucauuccaguag

SEQ ID NO: 1196430 - RNA, 19 nt, Artificial Sequence
  Description of Artificial Sequence: Synthetic oligonucleotide
aguaguucaccuuaucaca

SEQ ID NO: 1196431 - RNA, 19 nt, Artificial Sequence
  Description of Artificial Sequence: Synthetic oligonucleotide
ugucacuagagucaccuga

SEQ ID NO: 1196432 - RNA, 19 nt, Artificial Sequence
  Description of Artificial Sequence: Synthetic oligonucleotide
ucagaagcgaagauguaac

SEQ ID NO: 1196433 - RNA, 19 nt, Artificial Sequence
  Description of Artificial Sequence: Synthetic oligonucleotide
aagaguuaaaggaaguaga

SEQ ID NO: 1196434 - RNA, 19 nt, Artificial Sequence
  Description of Artificial Sequence: Synthetic oligonucleotide
uucguuaaacugaaguuaa

SEQ ID NO: 1196435 - RNA, 19 nt, Artificial Sequence
  Description of Artificial Sequence: Synthetic oligonucleotide
agaaggaagaucuuggcua

SEQ ID NO: 1196436 - RNA, 19 nt, Artificial Sequence
  Description of Artificial Sequence: Synthetic oligonucleotide
uuuaugccuucaaguaugg

SEQ ID NO: 1196437 - RNA, 19 nt, Artificial Sequence
  Description of Artificial Sequence: Synthetic oligonucleotide
aaagucugucuuccauggc

SEQ ID NO: 1196438 - RNA, 19 nt, Artificial Sequence
  Description of Artificial Sequence: Synthetic oligonucleotide
uggauuccacauaaaaucu

SEQ ID NO: 1196439 - RNA, 19 nt, Artificial Sequence
  Description of Artificial Sequence: Synthetic oligonucleotide
caugguauauguauuuaug

SEQ ID NO: 1196440 - RNA, 19 nt, Artificial Sequence
  Description of Artificial Sequence: Synthetic oligonucleotide
ggagauauaagaaucuuag

SEQ ID NO: 1196441 - RNA, 19 nt, Artificial Sequence
  Description of Artificial Sequence: Synthetic oligonucleotide
gcgaagauguaacugaugg

SEQ ID NO: 1196442 - RNA, 19 nt, Artificial Sequence
  Description of Artificial Sequence: Synthetic oligonucleotide
cauuagaauauccucagca

SEQ ID NO: 1196443 - RNA, 19 nt, Artificial Sequence
  Description of Artificial Sequence: Synthetic oligonucleotide
ucaucgguacagaucacag

SEQ ID NO: 1196444 - RNA, 19 nt, Artificial Sequence
  Description of Artificial Sequence: Synthetic oligonucleotide
caugguauuggaacuaaug

SEQ ID NO: 1196445 - RNA, 19 nt, Artificial Sequence
  Description of Artificial Sequence: Synthetic oligonucleotide
gauauuaugagaagggcaa

SEQ ID NO: 1196446 - RNA, 19 nt, Artificial Sequence
  Description of Artificial Sequence: Synthetic oligonucleotide
aucgguacagaucacagaa

SEQ ID NO: 1196447 - RNA, 19 nt, Artificial Sequence
  Description of Artificial Sequence: Synthetic oligonucleotide
ugugaccuggcaucaauag

SEQ ID NO: 1196448 - RNA, 19 nt, Artificial Sequence
  Description of Artificial Sequence: Synthetic oligonucleotide
ugugaaaugugaccuggca

SEQ ID NO: 1196449 - RNA, 19 nt, Artificial Sequence
  Description of Artificial Sequence: Synthetic oligonucleotide
aguaagcuggugaauaacg

SEQ ID NO: 1196450 - RNA, 19 nt, Artificial Sequence
  Description of Artificial Sequence: Synthetic oligonucleotide
aauccugucaggaagcaga

SEQ ID NO: 1196451 - RNA, 19 nt, Artificial Sequence
  Description of Artificial Sequence: Synthetic oligonucleotide
aaauaauacuugaaagagu

SEQ ID NO: 1196452 - RNA, 19 nt, Artificial Sequence
  Description of Artificial Sequence: Synthetic oligonucleotide
gacaacuagacacccacac

SEQ ID NO: 1196453 - RNA, 19 nt, Artificial Sequence
  Description of Artificial Sequence: Synthetic oligonucleotide
auauucuugagaaagguau

SEQ ID NO: 1196454 - RNA, 19 nt, Artificial Sequence
  Description of Artificial Sequence: Synthetic oligonucleotide
uggcuacaacauauaaucg

SEQ ID NO: 1196455 - RNA, 19 nt, Artificial Sequence
  Description of Artificial Sequence: Synthetic oligonucleotide
aaagccagauucuagccuu

SEQ ID NO: 1196456 - RNA, 19 nt, Artificial Sequence
  Description of Artificial Sequence: Synthetic oligonucleotide
caagugggcaugaagcucc

SEQ ID NO: 1196457 - RNA, 19 nt, Artificial Sequence
  Description of Artificial Sequence: Synthetic oligonucleotide
uguugccucacaaaaucca

SEQ ID NO: 1196458 - RNA, 19 nt, Artificial Sequence
  Description of Artificial Sequence: Synthetic oligonucleotide
ugagauggggucaaauuaa

SEQ ID NO: 1196459 - RNA, 19 nt, Artificial Sequence
  Description of Artificial Sequence: Synthetic oligonucleotide
uaagcuggugaauaacgug

SEQ ID NO: 1196460 - RNA, 19 nt, Artificial Sequence
  Description of Artificial Sequence: Synthetic oligonucleotide
uuuauguaagccugugccu

SEQ ID NO: 1196461 - RNA, 19 nt, Artificial Sequence
  Description of Artificial Sequence: Synthetic oligonucleotide
cuuaucaucgguacagauc

SEQ ID NO: 1196462 - RNA, 19 nt, Artificial Sequence
  Description of Artificial Sequence: Synthetic oligonucleotide
ucuucaugguauuggaacu

SEQ ID NO: 1196463 - RNA, 19 nt, Artificial Sequence
  Description of Artificial Sequence: Synthetic oligonucleotide
ugugaucaugaacuuuaag

SEQ ID NO: 1196464 - RNA, 19 nt, Artificial Sequence
  Description of Artificial Sequence: Synthetic oligonucleotide
uagaauauccucagcacua

SEQ ID NO: 1196465 - RNA, 19 nt, Artificial Sequence
  Description of Artificial Sequence: Synthetic oligonucleotide
uguauuuauguaagccugu

SEQ ID NO: 1196466 - RNA, 19 nt, Artificial Sequence
  Description of Artificial Sequence: Synthetic oligonucleotide
ucgaaaguaguucaccuua

SEQ ID NO: 1196467 - RNA, 19 nt, Artificial Sequence
  Description of Artificial Sequence: Synthetic oligonucleotide
agagucaccugacaacuag

SEQ ID NO: 1196468 - RNA, 19 nt, Artificial Sequence
  Description of Artificial Sequence: Synthetic oligonucleotide
agagguauccgguguugcc

SEQ ID NO: 1196469 - RNA, 19 nt, Artificial Sequence
  Description of Artificial Sequence: Synthetic oligonucleotide
ugaggaaugucccggugcc

SEQ ID NO: 1196470 - RNA, 19 nt, Artificial Sequence
  Description of Artificial Sequence: Synthetic oligonucleotide
uuuauuguuuggcgaaagu

SEQ ID NO: 1196471 - RNA, 19 nt, Artificial Sequence
  Description of Artificial Sequence: Synthetic oligonucleotide
uuacucuuggcuuggacaa

SEQ ID NO: 1196472 - RNA, 19 nt, Artificial Sequence
  Description of Artificial Sequence: Synthetic oligonucleotide
caaugcuguaccagaaucc

SEQ ID NO: 1196473 - RNA, 19 nt, Artificial Sequence
  Description of Artificial Sequence: Synthetic oligonucleotide
agacaaauagcuucaacuu

SEQ ID NO: 1196474 - RNA, 19 nt, Artificial Sequence
  Description of Artificial Sequence: Synthetic oligonucleotide
cuuuuaauaggaggcaaag

SEQ ID NO: 1196475 - RNA, 19 nt, Artificial Sequence
  Description of Artificial Sequence: Synthetic oligonucleotide
aaauagaagucuaauuuua

SEQ ID NO: 1196476 - RNA, 19 nt, Artificial Sequence
  Description of Artificial Sequence: Synthetic oligonucleotide
guaacugauggauucauaa

SEQ ID NO: 1196477 - RNA, 19 nt, Artificial Sequence
  Description of Artificial Sequence: Synthetic oligonucleotide
cacacaaaugguuucggug

SEQ ID NO: 1196478 - RNA, 19 nt, Artificial Sequence
  Description of Artificial Sequence: Synthetic oligonucleotide
aagaugcaacgccaacuuc

SEQ ID NO: 1196479 - RNA, 19 nt, Artificial Sequence
  Description of Artificial Sequence: Synthetic oligonucleotide
ggacaauacacuuaaguca

SEQ ID NO: 1196480 - RNA, 19 nt, Artificial Sequence
  Description of Artificial Sequence: Synthetic oligonucleotide
ugaccauuagaauauccuc

SEQ ID NO: 1196481 - RNA, 19 nt, Artificial Sequence
  Description of Artificial Sequence: Synthetic oligonucleotide
cuugacaccaucaucugca

SEQ ID NO: 1196482 - RNA, 19 nt, Artificial Sequence
  Description of Artificial Sequence: Synthetic oligonucleotide
gagguuauaggagauauaa

SEQ ID NO: 1196483 - RNA, 19 nt, Artificial Sequence
  Description of Artificial Sequence: Synthetic oligonucleotide
uuuuauuguuuggcgaaag

SEQ ID NO: 1196484 - RNA, 19 nt, Artificial Sequence
  Description of Artificial Sequence: Synthetic oligonucleotide
uaaucgaaaguaguucacc

SEQ ID NO: 1196485 - RNA, 19 nt, Artificial Sequence
  Description of Artificial Sequence: Synthetic oligonucleotide
ugguauauguauuuaugua

SEQ ID NO: 1196486 - RNA, 19 nt, Artificial Sequence
  Description of Artificial Sequence: Synthetic oligonucleotide
uuugagucagcaauucuuu

SEQ ID NO: 1196487 - RNA, 19 nt, Artificial Sequence
  Description of Artificial Sequence: Synthetic oligonucleotide
uggacuuucuucagauugc

SEQ ID NO: 1196488 - RNA, 19 nt, Artificial Sequence
  Description of Artificial Sequence: Synthetic oligonucleotide
ugcuguaccagaauccaaa

SEQ ID NO: 1196489 - RNA, 19 nt, Artificial Sequence
  Description of Artificial Sequence: Synthetic oligonucleotide
aaagugaugcuggucauaa

SEQ ID NO: 1196490 - RNA, 19 nt, Artificial Sequence
  Description of Artificial Sequence: Synthetic oligonucleotide
aaucuuagaaagccacaau

SEQ ID NO: 1196491 - RNA, 19 nt, Artificial Sequence
  Description of Artificial Sequence: Synthetic oligonucleotide
agaucacagaaggaugagc

SEQ ID NO: 1196492 - RNA, 19 nt, Artificial Sequence
  Description of Artificial Sequence: Synthetic oligonucleotide
auagucuugagaaauaaua

SEQ ID NO: 1196493 - RNA, 19 nt, Artificial Sequence
  Description of Artificial Sequence: Synthetic oligonucleotide
auguauuuauguaagccug

SEQ ID NO: 1196494 - RNA, 19 nt, Artificial Sequence
  Description of Artificial Sequence: Synthetic oligonucleotide
cugacaacuagacacccac

SEQ ID NO: 1196495 - RNA, 19 nt, Artificial Sequence
  Description of Artificial Sequence: Synthetic oligonucleotide
aaagcuaaauagaagucua

SEQ ID NO: 1196496 - RNA, 19 nt, Artificial Sequence
  Description of Artificial Sequence: Synthetic oligonucleotide
acaaugcuaccauuacuag

SEQ ID NO: 1196497 - RNA, 19 nt, Artificial Sequence
  Description of Artificial Sequence: Synthetic oligonucleotide
uucugauuaaagguaacaa

SEQ ID NO: 1196498 - RNA, 19 nt, Artificial Sequence
  Description of Artificial Sequence: Synthetic oligonucleotide
uuaucacaguuuaacacuu

SEQ ID NO: 1196499 - RNA, 19 nt, Artificial Sequence
  Description of Artificial Sequence: Synthetic oligonucleotide
agauauuaugagaagggca

SEQ ID NO: 1196500 - RNA, 19 nt, Artificial Sequence
  Description of Artificial Sequence: Synthetic oligonucleotide
cugaagauauuaugagaag

SEQ ID NO: 1196501 - RNA, 19 nt, Artificial Sequence
  Description of Artificial Sequence: Synthetic oligonucleotide
ucauaagagggaaccgucu

SEQ ID NO: 1196502 - RNA, 19 nt, Artificial Sequence
  Description of Artificial Sequence: Synthetic oligonucleotide
auaaucgaaaguaguucac

SEQ ID NO: 1196503 - RNA, 19 nt, Artificial Sequence
  Description of Artificial Sequence: Synthetic oligonucleotide
uguuuggcgaaaguggcca

SEQ ID NO: 1196504 - RNA, 19 nt, Artificial Sequence
  Description of Artificial Sequence: Synthetic oligonucleotide
acuuaagucagaguuucug

SEQ ID NO: 1196505 - RNA, 19 nt, Artificial Sequence
  Description of Artificial Sequence: Synthetic oligonucleotide
gaagacaaauagcuucaac

SEQ ID NO: 1196506 - RNA, 19 nt, Artificial Sequence
  Description of Artificial Sequence: Synthetic oligonucleotide
aagaggcuccaagaagucg

SEQ ID NO: 1196507 - RNA, 19 nt, Artificial Sequence
  Description of Artificial Sequence: Synthetic oligonucleotide
cauucaagugggcaugaag

SEQ ID NO: 1196508 - RNA, 19 nt, Artificial Sequence
  Description of Artificial Sequence: Synthetic oligonucleotide
uuaaaggaaguagaaggau

SEQ ID NO: 1196509 - RNA, 19 nt, Artificial Sequence
  Description of Artificial Sequence: Synthetic oligonucleotide
cuuacucuuggcuuggaca

SEQ ID NO: 1196510 - RNA, 19 nt, Artificial Sequence
  Description of Artificial Sequence: Synthetic oligonucleotide
ucggugugaaaugugaccu

SEQ ID NO: 1196511 - RNA, 19 nt, Artificial Sequence
  Description of Artificial Sequence: Synthetic oligonucleotide
gaccauuagaauauccuca

SEQ ID NO: 1196512 - RNA, 19 nt, Artificial Sequence
  Description of Artificial Sequence: Synthetic oligonucleotide
gauucauaagacagauccc

SEQ ID NO: 1196513 - RNA, 19 nt, Artificial Sequence
  Description of Artificial Sequence: Synthetic oligonucleotide
accgucuggcuuuugaugu

SEQ ID NO: 1196514 - RNA, 19 nt, Artificial Sequence
  Description of Artificial Sequence: Synthetic oligonucleotide
aaaguggccaugguauaug

SEQ ID NO: 1196515 - RNA, 19 nt, Artificial Sequence
  Description of Artificial Sequence: Synthetic oligonucleotide
guuauaggagauauaagaa

SEQ ID NO: 1196516 - RNA, 19 nt, Artificial Sequence
  Description of Artificial Sequence: Synthetic oligonucleotide
cuuaagucagaguuucuga

SEQ ID NO: 1196517 - RNA, 19 nt, Artificial Sequence
  Description of Artificial Sequence: Synthetic oligonucleotide
ugaguccugguacugugga

SEQ ID NO: 1196518 - RNA, 19 nt, Artificial Sequence
  Description of Artificial Sequence: Synthetic oligonucleotide
uuggcaauuccauguaaaa

SEQ ID NO: 1196519 - RNA, 19 nt, Artificial Sequence
  Description of Artificial Sequence: Synthetic oligonucleotide
gagauauaagaaucuuaga

SEQ ID NO: 1196520 - RNA, 19 nt, Artificial Sequence
  Description of Artificial Sequence: Synthetic oligonucleotide
uaagagggaaccgucuggc

SEQ ID NO: 1196521 - RNA, 19 nt, Artificial Sequence
  Description of Artificial Sequence: Synthetic oligonucleotide
uaccauuacuagaaagauc

SEQ ID NO: 1196522 - RNA, 19 nt, Artificial Sequence
  Description of Artificial Sequence: Synthetic oligonucleotide
cauaagagggaaccgucug

SEQ ID NO: 1196523 - RNA, 19 nt, Artificial Sequence
  Description of Artificial Sequence: Synthetic oligonucleotide
cacaaugcuaccauuacua

SEQ ID NO: 1196524 - RNA, 19 nt, Artificial Sequence
  Description of Artificial Sequence: Synthetic oligonucleotide
acccuuaucaucgguacag

SEQ ID NO: 1196525 - RNA, 19 nt, Artificial Sequence
  Description of Artificial Sequence: Synthetic oligonucleotide
uuguuuggcgaaaguggcc

SEQ ID NO: 1196526 - RNA, 19 nt, Artificial Sequence
  Description of Artificial Sequence: Synthetic oligonucleotide
gaaucuuagaaagccacaa

SEQ ID NO: 1196527 - RNA, 19 nt, Artificial Sequence
  Description of Artificial Sequence: Synthetic oligonucleotide
auaucuaaguuuucuuguu

SEQ ID NO: 1196528 - RNA, 19 nt, Artificial Sequence
  Description of Artificial Sequence: Synthetic oligonucleotide
caccuuaucacaguuuaac

SEQ ID NO: 1196529 - RNA, 19 nt, Artificial Sequence
  Description of Artificial Sequence: Synthetic oligonucleotide
caacuagacacccacacaa

SEQ ID NO: 1196530 - RNA, 19 nt, Artificial Sequence
  Description of Artificial Sequence: Synthetic oligonucleotide
aaguggccaugguauaugu

SEQ ID NO: 1196531 - RNA, 19 nt, Artificial Sequence
  Description of Artificial Sequence: Synthetic oligonucleotide
uaccagaauccaaagugau

SEQ ID NO: 1196532 - RNA, 19 nt, Artificial Sequence
  Description of Artificial Sequence: Synthetic oligonucleotide
ucuuuucacugaguccugg

SEQ ID NO: 1196533 - RNA, 19 nt, Artificial Sequence
  Description of Artificial Sequence: Synthetic oligonucleotide
cacuuuugggcuucaggag

SEQ ID NO: 1196534 - RNA, 19 nt, Artificial Sequence
  Description of Artificial Sequence: Synthetic oligonucleotide
ucgguacagaucacagaag

SEQ ID NO: 1196535 - RNA, 19 nt, Artificial Sequence
  Description of Artificial Sequence: Synthetic oligonucleotide
aauagucuugagaaauaau

SEQ ID NO: 1196536 - RNA, 19 nt, Artificial Sequence
  Description of Artificial Sequence: Synthetic oligonucleotide
auaacguggaacaucugga

SEQ ID NO: 1196537 - RNA, 19 nt, Artificial Sequence
  Description of Artificial Sequence: Synthetic oligonucleotide
aguaguaagcuggugaaua

SEQ ID NO: 1196538 - RNA, 19 nt, Artificial Sequence
  Description of Artificial Sequence: Synthetic oligonucleotide
gaugcaacgccaacuucag

SEQ ID NO: 1196539 - RNA, 19 nt, Artificial Sequence
  Description of Artificial Sequence: Synthetic oligonucleotide
agaaagguaugucgcaaaa

SEQ ID NO: 1196540 - RNA, 19 nt, Artificial Sequence
  Description of Artificial Sequence: Synthetic oligonucleotide
cuggugaauaacguggaac

SEQ ID NO: 1196541 - RNA, 19 nt, Artificial Sequence
  Description of Artificial Sequence: Synthetic oligonucleotide
uucuacaaagaaagcuaaa

SEQ ID NO: 1196542 - RNA, 19 nt, Artificial Sequence
  Description of Artificial Sequence: Synthetic oligonucleotide
aguuugagucagcaauucu

SEQ ID NO: 1196543 - RNA, 19 nt, Artificial Sequence
  Description of Artificial Sequence: Synthetic oligonucleotide
cuuucccuugucaaucaug

SEQ ID NO: 1196544 - RNA, 19 nt, Artificial Sequence
  Description of Artificial Sequence: Synthetic oligonucleotide
gauggauucauaagacaga

SEQ ID NO: 1196545 - RNA, 19 nt, Artificial Sequence
  Description of Artificial Sequence: Synthetic oligonucleotide
acaacuagacacccacaca

SEQ ID NO: 1196546 - RNA, 19 nt, Artificial Sequence
  Description of Artificial Sequence: Synthetic oligonucleotide
uuuaugucuuucucaguuu

SEQ ID NO: 1196547 - RNA, 19 nt, Artificial Sequence
  Description of Artificial Sequence: Synthetic oligonucleotide
gaaaguaguucaccuuauc

SEQ ID NO: 1196548 - RNA, 19 nt, Artificial Sequence
  Description of Artificial Sequence: Synthetic oligonucleotide
cacucuuacucuuggcuug

SEQ ID NO: 1196549 - RNA, 19 nt, Artificial Sequence
  Description of Artificial Sequence: Synthetic oligonucleotide
guacuugacaccaucaucu

SEQ ID NO: 1196550 - RNA, 19 nt, Artificial Sequence
  Description of Artificial Sequence: Synthetic oligonucleotide
ggcuacaacauauaaucga

SEQ ID NO: 1196551 - RNA, 19 nt, Artificial Sequence
  Description of Artificial Sequence: Synthetic oligonucleotide
uggcuauuaauuucuucau

SEQ ID NO: 1196552 - RNA, 19 nt, Artificial Sequence
  Description of Artificial Sequence: Synthetic oligonucleotide
accugacaacuagacaccc

SEQ ID NO: 1196553 - RNA, 19 nt, Artificial Sequence
  Description of Artificial Sequence: Synthetic oligonucleotide
agguauccgguguugccuc

SEQ ID NO: 1196554 - RNA, 19 nt, Artificial Sequence
  Description of Artificial Sequence: Synthetic oligonucleotide
aaacacccuuaucaucggu

SEQ ID NO: 1196555 - RNA, 19 nt, Artificial Sequence
  Description of Artificial Sequence: Synthetic oligonucleotide
agaauauccucagcacuag

SEQ ID NO: 1196556 - RNA, 19 nt, Artificial Sequence
  Description of Artificial Sequence: Synthetic oligonucleotide
cuaguaguaagcuggugaa

SEQ ID NO: 1196557 - RNA, 19 nt, Artificial Sequence
  Description of Artificial Sequence: Synthetic oligonucleotide
uaccuaacaucaauaucua

SEQ ID NO: 1196558 - RNA, 19 nt, Artificial Sequence
  Description of Artificial Sequence: Synthetic oligonucleotide
uaagccugugccugugggc

SEQ ID NO: 1196559 - RNA, 19 nt, Artificial Sequence
  Description of Artificial Sequence: Synthetic oligonucleotide
agaguuaaaggaaguagaa

SEQ ID NO: 1196560 - RNA, 19 nt, Artificial Sequence
  Description of Artificial Sequence: Synthetic oligonucleotide
ggugugaaaugugaccugg

SEQ ID NO: 1196561 - RNA, 19 nt, Artificial Sequence
  Description of Artificial Sequence: Synthetic oligonucleotide
ugcaagaugcaacgccaac

SEQ ID NO: 1196562 - RNA, 19 nt, Artificial Sequence
  Description of Artificial Sequence: Synthetic oligonucleotide
uguaacugauggauucaua

SEQ ID NO: 1196563 - RNA, 19 nt, Artificial Sequence
  Description of Artificial Sequence: Synthetic oligonucleotide
uucucaguucagaucuggu

SEQ ID NO: 1196564 - RNA, 19 nt, Artificial Sequence
  Description of Artificial Sequence: Synthetic oligonucleotide
uauguaagccugugccugu

SEQ ID NO: 1196565 - RNA, 19 nt, Artificial Sequence
  Description of Artificial Sequence: Synthetic oligonucleotide
auucuagccuugucacuag

SEQ ID NO: 1196566 - RNA, 19 nt, Artificial Sequence
  Description of Artificial Sequence: Synthetic oligonucleotide
augagcaaugcuguaccag

SEQ ID NO: 1196567 - RNA, 19 nt, Artificial Sequence
  Description of Artificial Sequence: Synthetic oligonucleotide
guuucugagguccuggacu

SEQ ID NO: 1196568 - RNA, 19 nt, Artificial Sequence
  Description of Artificial Sequence: Synthetic oligonucleotide
ugacaacuagacacccaca

SEQ ID NO: 1196569 - RNA, 19 nt, Artificial Sequence
  Description of Artificial Sequence: Synthetic oligonucleotide
ucacuagagucaccugaca

SEQ ID NO: 1196570 - RNA, 19 nt, Artificial Sequence
  Description of Artificial Sequence: Synthetic oligonucleotide
ggaguugaggaaugucccg

SEQ ID NO: 1196571 - RNA, 19 nt, Artificial Sequence
  Description of Artificial Sequence: Synthetic oligonucleotide
cucaguuugagucagcaau

SEQ ID NO: 1196572 - RNA, 19 nt, Artificial Sequence
  Description of Artificial Sequence: Synthetic oligonucleotide
cuagaaagaucuuuucacu

SEQ ID NO: 1196573 - RNA, 19 nt, Artificial Sequence
  Description of Artificial Sequence: Synthetic oligonucleotide
gaaaugugaccuggcauca

SEQ ID NO: 1196574 - RNA, 19 nt, Artificial Sequence
  Description of Artificial Sequence: Synthetic oligonucleotide
ggcuauuaauuucuucaug

SEQ ID NO: 1196575 - RNA, 19 nt, Artificial Sequence
  Description of Artificial Sequence: Synthetic oligonucleotide
ucaagugggcaugaagcuc

SEQ ID NO: 1196576 - RNA, 19 nt, Artificial Sequence
  Description of Artificial Sequence: Synthetic oligonucleotide
ggcuucaggagauuccacc

SEQ ID NO: 1196577 - RNA, 19 nt, Artificial Sequence
  Description of Artificial Sequence: Synthetic oligonucleotide
agaucuuggcuacaacaua

SEQ ID NO: 1196578 - RNA, 19 nt, Artificial Sequence
  Description of Artificial Sequence: Synthetic oligonucleotide
aucgaaaguaguucaccuu

SEQ ID NO: 1196579 - RNA, 19 nt, Artificial Sequence
  Description of Artificial Sequence: Synthetic oligonucleotide
guuucggugugaaauguga

SEQ ID NO: 1196580 - RNA, 19 nt, Artificial Sequence
  Description of Artificial Sequence: Synthetic oligonucleotide
aaaugguuucggugugaaa

SEQ ID NO: 1196581 - RNA, 19 nt, Artificial Sequence
  Description of Artificial Sequence: Synthetic oligonucleotide
uuggaacuaauggagccau

SEQ ID NO: 1196582 - RNA, 19 nt, Artificial Sequence
  Description of Artificial Sequence: Synthetic oligonucleotide
cugugggccaucaccuggg

SEQ ID NO: 1196583 - RNA, 19 nt, Artificial Sequence
  Description of Artificial Sequence: Synthetic oligonucleotide
uaguucaccuuaucacagu

SEQ ID NO: 1196584 - RNA, 19 nt, Artificial Sequence
  Description of Artificial Sequence: Synthetic oligonucleotide
cuaauggagccauucaagu

SEQ ID NO: 1196585 - RNA, 19 nt, Artificial Sequence
  Description of Artificial Sequence: Synthetic oligonucleotide
aagauguaacugauggauu

SEQ ID NO: 1196586 - RNA, 19 nt, Artificial Sequence
  Description of Artificial Sequence: Synthetic oligonucleotide
agguuauaggagauauaag

SEQ ID NO: 1196587 - RNA, 19 nt, Artificial Sequence
  Description of Artificial Sequence: Synthetic oligonucleotide
gaugagcaaugcuguacca

SEQ ID NO: 1196588 - RNA, 19 nt, Artificial Sequence
  Description of Artificial Sequence: Synthetic oligonucleotide
ugagguuauaggagauaua

SEQ ID NO: 1196589 - RNA, 19 nt, Artificial Sequence
  Description of Artificial Sequence: Synthetic oligonucleotide
cauggucaugugaucauga

SEQ ID NO: 1196590 - RNA, 19 nt, Artificial Sequence
  Description of Artificial Sequence: Synthetic oligonucleotide
cacaaaugguuucggugug

SEQ ID NO: 1196591 - RNA, 19 nt, Artificial Sequence
  Description of Artificial Sequence: Synthetic oligonucleotide
cauagaggucuuccugaag

SEQ ID NO: 1196592 - RNA, 19 nt, Artificial Sequence
  Description of Artificial Sequence: Synthetic oligonucleotide
uucaugguauuggaacuaa

SEQ ID NO: 1196593 - RNA, 19 nt, Artificial Sequence
  Description of Artificial Sequence: Synthetic oligonucleotide
aucaucgguacagaucaca

SEQ ID NO: 1196594 - RNA, 19 nt, Artificial Sequence
  Description of Artificial Sequence: Synthetic oligonucleotide
uggauucauaagacagauc

SEQ ID NO: 1196595 - RNA, 19 nt, Artificial Sequence
  Description of Artificial Sequence: Synthetic oligonucleotide
agaaucuuagaaagccaca

SEQ ID NO: 1196596 - RNA, 19 nt, Artificial Sequence
  Description of Artificial Sequence: Synthetic oligonucleotide
aucauggucaugugaucau

SEQ ID NO: 1196597 - RNA, 19 nt, Artificial Sequence
  Description of Artificial Sequence: Synthetic oligonucleotide
auccuuuuaauaggaggca

SEQ ID NO: 1196598 - RNA, 19 nt, Artificial Sequence
  Description of Artificial Sequence: Synthetic oligonucleotide
cuggaaucucugcaagaug

SEQ ID NO: 1196599 - RNA, 19 nt, Artificial Sequence
  Description of Artificial Sequence: Synthetic oligonucleotide
aacgccaacuucaggccug

SEQ ID NO: 1196600 - RNA, 19 nt, Artificial Sequence
  Description of Artificial Sequence: Synthetic oligonucleotide
ucaugguauuggaacuaau

SEQ ID NO: 1196601 - RNA, 19 nt, Artificial Sequence
  Description of Artificial Sequence: Synthetic oligonucleotide
uggcuuggacaauacacuu

SEQ ID NO: 1196602 - RNA, 19 nt, Artificial Sequence
  Description of Artificial Sequence: Synthetic oligonucleotide
aacacccuuaucaucggua

SEQ ID NO: 1196603 - RNA, 19 nt, Artificial Sequence
  Description of Artificial Sequence: Synthetic oligonucleotide
acauagaggucuuccugaa

SEQ ID NO: 1196604 - RNA, 19 nt, Artificial Sequence
  Description of Artificial Sequence: Synthetic oligonucleotide
agaagucggccaccucuuc

SEQ ID NO: 1196605 - RNA, 19 nt, Artificial Sequence
  Description of Artificial Sequence: Synthetic oligonucleotide
aucacagaaggaugagcaa

SEQ ID NO: 1196606 - RNA, 19 nt, Artificial Sequence
  Description of Artificial Sequence: Synthetic oligonucleotide
uuucucaguuugagucagc

SEQ ID NO: 1196607 - RNA, 19 nt, Artificial Sequence
  Description of Artificial Sequence: Synthetic oligonucleotide
acucuuacucuuggcuugg

SEQ ID NO: 1196608 - RNA, 19 nt, Artificial Sequence
  Description of Artificial Sequence: Synthetic oligonucleotide
uucuagccuugucacuaga

SEQ ID NO: 1196609 - RNA, 19 nt, Artificial Sequence
  Description of Artificial Sequence: Synthetic oligonucleotide
ucaccuuaucacaguuuaa

SEQ ID NO: 1196610 - RNA, 19 nt, Artificial Sequence
  Description of Artificial Sequence: Synthetic oligonucleotide
guuuuaugccuucaaguau

SEQ ID NO: 1196611 - RNA, 19 nt, Artificial Sequence
  Description of Artificial Sequence: Synthetic oligonucleotide
cgguacagaucacagaagg

SEQ ID NO: 1196612 - RNA, 19 nt, Artificial Sequence
  Description of Artificial Sequence: Synthetic oligonucleotide
cuauuaauuucuucauggu

SEQ ID NO: 1196613 - RNA, 19 nt, Artificial Sequence
  Description of Artificial Sequence: Synthetic oligonucleotide
ucguuaaacugaaguuaau

SEQ ID NO: 1196614 - RNA, 19 nt, Artificial Sequence
  Description of Artificial Sequence: Synthetic oligonucleotide
ugguuucggugugaaaugu

SEQ ID NO: 1196615 - RNA, 19 nt, Artificial Sequence
  Description of Artificial Sequence: Synthetic oligonucleotide
agcaaugcuguaccagaau

SEQ ID NO: 1196616 - RNA, 19 nt, Artificial Sequence
  Description of Artificial Sequence: Synthetic oligonucleotide
ccuggcaucaauagucuug

SEQ ID NO: 1196617 - RNA, 19 nt, Artificial Sequence
  Description of Artificial Sequence: Synthetic oligonucleotide
gcuuuugauguuugaaguc

SEQ ID NO: 1196618 - RNA, 19 nt, Artificial Sequence
  Description of Artificial Sequence: Synthetic oligonucleotide
gucauaagagggaaccguc

SEQ ID NO: 1196619 - RNA, 19 nt, Artificial Sequence
  Description of Artificial Sequence: Synthetic oligonucleotide
uccggggaguugaggaaug

SEQ ID NO: 1196620 - RNA, 19 nt, Artificial Sequence
  Description of Artificial Sequence: Synthetic oligonucleotide
ggaacuaauggagccauuc

SEQ ID NO: 1196621 - RNA, 19 nt, Artificial Sequence
  Description of Artificial Sequence: Synthetic oligonucleotide
uugucacuagagucaccug

SEQ ID NO: 1196622 - RNA, 19 nt, Artificial Sequence
  Description of Artificial Sequence: Synthetic oligonucleotide
gucacuagagucaccugac

SEQ ID NO: 1196623 - RNA, 19 nt, Artificial Sequence
  Description of Artificial Sequence: Synthetic oligonucleotide
uugagucagcaauucuuuu

SEQ ID NO: 1196624 - RNA, 19 nt, Artificial Sequence
  Description of Artificial Sequence: Synthetic oligonucleotide
aagcgaagauguaacugau

SEQ ID NO: 1196625 - RNA, 19 nt, Artificial Sequence
  Description of Artificial Sequence: Synthetic oligonucleotide
guguugccucacaaaaucc

SEQ ID NO: 1196626 - RNA, 19 nt, Artificial Sequence
  Description of Artificial Sequence: Synthetic oligonucleotide
aggaaugucccggugccca

SEQ ID NO: 1196627 - RNA, 19 nt, Artificial Sequence
  Description of Artificial Sequence: Synthetic oligonucleotide
gcccaauccugucaggaag

SEQ ID NO: 1196628 - RNA, 19 nt, Artificial Sequence
  Description of Artificial Sequence: Synthetic oligonucleotide
accuaacaucaauaucuaa

SEQ ID NO: 1196629 - RNA, 19 nt, Artificial Sequence
  Description of Artificial Sequence: Synthetic oligonucleotide
cuugucacuagagucaccu

SEQ ID NO: 1196630 - RNA, 19 nt, Artificial Sequence
  Description of Artificial Sequence: Synthetic oligonucleotide
agccauucaagugggcaug

SEQ ID NO: 1196631 - RNA, 19 nt, Artificial Sequence
  Description of Artificial Sequence: Synthetic oligonucleotide
uauccgguguugccucaca

SEQ ID NO: 1196632 - RNA, 19 nt, Artificial Sequence
  Description of Artificial Sequence: Synthetic oligonucleotide
aacuagacacccacacaaa

SEQ ID NO: 1196633 - RNA, 19 nt, Artificial Sequence
  Description of Artificial Sequence: Synthetic oligonucleotide
ggcuuuugauguuugaagu

SEQ ID NO: 1196634 - RNA, 19 nt, Artificial Sequence
  Description of Artificial Sequence: Synthetic oligonucleotide
agggauccucccuccgggg

SEQ ID NO: 1196635 - RNA, 19 nt, Artificial Sequence
  Description of Artificial Sequence: Synthetic oligonucleotide
gacccagggauccucccuc

SEQ ID NO: 1196636 - RNA, 19 nt, Artificial Sequence
  Description of Artificial Sequence: Synthetic oligonucleotide
ccagauucuagccuuguca

SEQ ID NO: 1196637 - RNA, 19 nt, Artificial Sequence
  Description of Artificial Sequence: Synthetic oligonucleotide
uaucaucgguacagaucac

SEQ ID NO: 1196638 - RNA, 19 nt, Artificial Sequence
  Description of Artificial Sequence: Synthetic oligonucleotide
ugucagaagcgaagaugua

SEQ ID NO: 1196639 - RNA, 19 nt, Artificial Sequence
  Description of Artificial Sequence: Synthetic oligonucleotide
ugcccaauccugucaggaa

SEQ ID NO: 1196640 - RNA, 19 nt, Artificial Sequence
  Description of Artificial Sequence: Synthetic oligonucleotide
uguggcuucuuggcuauua

SEQ ID NO: 1196641 - RNA, 19 nt, Artificial Sequence
  Description of Artificial Sequence: Synthetic oligonucleotide
caguuugagucagcaauuc

SEQ ID NO: 1196642 - RNA, 19 nt, Artificial Sequence
  Description of Artificial Sequence: Synthetic oligonucleotide
cuagagucaccugacaacu

SEQ ID NO: 1196643 - RNA, 19 nt, Artificial Sequence
  Description of Artificial Sequence: Synthetic oligonucleotide
gugaaaugugaccuggcau

SEQ ID NO: 1196644 - RNA, 19 nt, Artificial Sequence
  Description of Artificial Sequence: Synthetic oligonucleotide
uuaugccuucaaguaugga

SEQ ID NO: 1196645 - RNA, 19 nt, Artificial Sequence
  Description of Artificial Sequence: Synthetic oligonucleotide
cacccacacaaaugguuuc

SEQ ID NO: 1196646 - RNA, 19 nt, Artificial Sequence
  Description of Artificial Sequence: Synthetic oligonucleotide
acaaaugguuucgguguga

SEQ ID NO: 1196647 - RNA, 19 nt, Artificial Sequence
  Description of Artificial Sequence: Synthetic oligonucleotide
aagaagucggccaccucuu

SEQ ID NO: 1196648 - RNA, 19 nt, Artificial Sequence
  Description of Artificial Sequence: Synthetic oligonucleotide
uucccuugucaaucauggu

SEQ ID NO: 1196649 - RNA, 19 nt, Artificial Sequence
  Description of Artificial Sequence: Synthetic oligonucleotide
gaauaacguggaacaucug

SEQ ID NO: 1196650 - RNA, 19 nt, Artificial Sequence
  Description of Artificial Sequence: Synthetic oligonucleotide
aguucagaucugguauugu

SEQ ID NO: 1196651 - RNA, 19 nt, Artificial Sequence
  Description of Artificial Sequence: Synthetic oligonucleotide
gcuaaauagaagucuaauu

SEQ ID NO: 1196652 - RNA, 19 nt, Artificial Sequence
  Description of Artificial Sequence: Synthetic oligonucleotide
uggcaucaauagucuugag

SEQ ID NO: 1196653 - RNA, 19 nt, Artificial Sequence
  Description of Artificial Sequence: Synthetic oligonucleotide
cccaauccugucaggaagc

SEQ ID NO: 1196654 - RNA, 19 nt, Artificial Sequence
  Description of Artificial Sequence: Synthetic oligonucleotide
uaguaguaagcuggugaau

SEQ ID NO: 1196655 - RNA, 19 nt, Artificial Sequence
  Description of Artificial Sequence: Synthetic oligonucleotide
ggauucugauuaaagguaa

SEQ ID NO: 1196656 - RNA, 19 nt, Artificial Sequence
  Description of Artificial Sequence: Synthetic oligonucleotide
aucaaauaccuaacaucaa

SEQ ID NO: 1196657 - RNA, 19 nt, Artificial Sequence
  Description of Artificial Sequence: Synthetic oligonucleotide
cauuccaguagcacuuucu

SEQ ID NO: 1196658 - RNA, 19 nt, Artificial Sequence
  Description of Artificial Sequence: Synthetic oligonucleotide
caauccugucaggaagcag

SEQ ID NO: 1196659 - RNA, 19 nt, Artificial Sequence
  Description of Artificial Sequence: Synthetic oligonucleotide
caaguauggauuccacaua

SEQ ID NO: 1196660 - RNA, 19 nt, Artificial Sequence
  Description of Artificial Sequence: Synthetic oligonucleotide
agcgaagauguaacugaug

SEQ ID NO: 1196661 - RNA, 19 nt, Artificial Sequence
  Description of Artificial Sequence: Synthetic oligonucleotide
acacccacacaaaugguuu

SEQ ID NO: 1196662 - RNA, 19 nt, Artificial Sequence
  Description of Artificial Sequence: Synthetic oligonucleotide
ugugccugugggccaucac

SEQ ID NO: 1196663 - RNA, 19 nt, Artificial Sequence
  Description of Artificial Sequence: Synthetic oligonucleotide
ucccggugcccaauccugu

SEQ ID NO: 1196664 - RNA, 19 nt, Artificial Sequence
  Description of Artificial Sequence: Synthetic oligonucleotide
gugugaaaugugaccuggc

SEQ ID NO: 1196665 - RNA, 19 nt, Artificial Sequence
  Description of Artificial Sequence: Synthetic oligonucleotide
uggagccauucaagugggc

SEQ ID NO: 1196666 - RNA, 19 nt, Artificial Sequence
  Description of Artificial Sequence: Synthetic oligonucleotide
acgccaacuucaggccugc

SEQ ID NO: 1196667 - RNA, 19 nt, Artificial Sequence
  Description of Artificial Sequence: Synthetic oligonucleotide
gaauauccucagcacuagu

SEQ ID NO: 1196668 - RNA, 19 nt, Artificial Sequence
  Description of Artificial Sequence: Synthetic oligonucleotide
ggagccauucaagugggca

SEQ ID NO: 1196669 - RNA, 19 nt, Artificial Sequence
  Description of Artificial Sequence: Synthetic oligonucleotide
cuaccauuacuagaaagau

SEQ ID NO: 1196670 - RNA, 19 nt, Artificial Sequence
  Description of Artificial Sequence: Synthetic oligonucleotide
agauggggucaaauuaaau

SEQ ID NO: 1196671 - RNA, 19 nt, Artificial Sequence
  Description of Artificial Sequence: Synthetic oligonucleotide
gauguggcuucuuggcuau

SEQ ID NO: 1196672 - RNA, 19 nt, Artificial Sequence
  Description of Artificial Sequence: Synthetic oligonucleotide
gagguauccgguguugccu

SEQ ID NO: 1196673 - RNA, 19 nt, Artificial Sequence
  Description of Artificial Sequence: Synthetic oligonucleotide
gaggaaugucccggugccc

SEQ ID NO: 1196674 - RNA, 19 nt, Artificial Sequence
  Description of Artificial Sequence: Synthetic oligonucleotide
gaaaguggccaugguauau

SEQ ID NO: 1196675 - RNA, 19 nt, Artificial Sequence
  Description of Artificial Sequence: Synthetic oligonucleotide
gaaccgucuggcuuuugau

SEQ ID NO: 1196676 - RNA, 19 nt, Artificial Sequence
  Description of Artificial Sequence: Synthetic oligonucleotide
caagaugcaacgccaacuu

SEQ ID NO: 1196677 - RNA, 19 nt, Artificial Sequence
  Description of Artificial Sequence: Synthetic oligonucleotide
gagggaaccgucuggcuuu

SEQ ID NO: 1196678 - RNA, 19 nt, Artificial Sequence
  Description of Artificial Sequence: Synthetic oligonucleotide
aguauggauuccacauaaa

SEQ ID NO: 1196679 - RNA, 19 nt, Artificial Sequence
  Description of Artificial Sequence: Synthetic oligonucleotide
uggcgaaaguggccauggu

SEQ ID NO: 1196680 - RNA, 19 nt, Artificial Sequence
  Description of Artificial Sequence: Synthetic oligonucleotide
uggaacuaauggagccauu

SEQ ID NO: 1196681 - RNA, 19 nt, Artificial Sequence
  Description of Artificial Sequence: Synthetic oligonucleotide
cacuaguaguaagcuggug

SEQ ID NO: 1196682 - RNA, 19 nt, Artificial Sequence
  Description of Artificial Sequence: Synthetic oligonucleotide
caaaugguuucggugugaa

SEQ ID NO: 1196683 - RNA, 19 nt, Artificial Sequence
  Description of Artificial Sequence: Synthetic oligonucleotide
gugcccaauccugucagga

SEQ ID NO: 1196684 - RNA, 19 nt, Artificial Sequence
  Description of Artificial Sequence: Synthetic oligonucleotide
uccugguacuguggaaguc

SEQ ID NO: 1196685 - RNA, 19 nt, Artificial Sequence
  Description of Artificial Sequence: Synthetic oligonucleotide
cuucaugguauuggaacua

SEQ ID NO: 1196686 - RNA, 19 nt, Artificial Sequence
  Description of Artificial Sequence: Synthetic oligonucleotide
aucuuuucacugaguccug

SEQ ID NO: 1196687 - RNA, 19 nt, Artificial Sequence
  Description of Artificial Sequence: Synthetic oligonucleotide
gugaccuggcaucaauagu

SEQ ID NO: 1196688 - RNA, 19 nt, Artificial Sequence
  Description of Artificial Sequence: Synthetic oligonucleotide
ccagggauccucccuccgg

SEQ ID NO: 1196689 - RNA, 19 nt, Artificial Sequence
  Description of Artificial Sequence: Synthetic oligonucleotide
guuuaacacuuuugggcuu

SEQ ID NO: 1196690 - RNA, 19 nt, Artificial Sequence
  Description of Artificial Sequence: Synthetic oligonucleotide
augugaucaugaacuuuaa

SEQ ID NO: 1196691 - RNA, 19 nt, Artificial Sequence
  Description of Artificial Sequence: Synthetic oligonucleotide
aagugggcaugaagcucca

SEQ ID NO: 1196692 - RNA, 19 nt, Artificial Sequence
  Description of Artificial Sequence: Synthetic oligonucleotide
acauucuucuaaaguccuu

SEQ ID NO: 1196693 - RNA, 19 nt, Artificial Sequence
  Description of Artificial Sequence: Synthetic oligonucleotide
caugagguuauaggagaua

SEQ ID NO: 1196694 - RNA, 19 nt, Artificial Sequence
  Description of Artificial Sequence: Synthetic oligonucleotide
gaccuggcaucaauagucu

SEQ ID NO: 1196695 - RNA, 19 nt, Artificial Sequence
  Description of Artificial Sequence: Synthetic oligonucleotide
agccagauucuagccuugu

SEQ ID NO: 1196696 - RNA, 19 nt, Artificial Sequence
  Description of Artificial Sequence: Synthetic oligonucleotide
augugaccuggcaucaaua

SEQ ID NO: 1196697 - RNA, 19 nt, Artificial Sequence
  Description of Artificial Sequence: Synthetic oligonucleotide
gcaagaugcaacgccaacu

SEQ ID NO: 1196698 - RNA, 19 nt, Artificial Sequence
  Description of Artificial Sequence: Synthetic oligonucleotide
gucaugugaucaugaacuu

SEQ ID NO: 1196699 - RNA, 19 nt, Artificial Sequence
  Description of Artificial Sequence: Synthetic oligonucleotide
guauccgguguugccucac

SEQ ID NO: 1196700 - RNA, 19 nt, Artificial Sequence
  Description of Artificial Sequence: Synthetic oligonucleotide
guccugguacuguggaagu

SEQ ID NO: 1196701 - RNA, 19 nt, Artificial Sequence
  Description of Artificial Sequence: Synthetic oligonucleotide
ccgguguugccucacaaaa

SEQ ID NO: 1196702 - RNA, 19 nt, Artificial Sequence
  Description of Artificial Sequence: Synthetic oligonucleotide
augcuguaccagaauccaa

SEQ ID NO: 1196703 - RNA, 19 nt, Artificial Sequence
  Description of Artificial Sequence: Synthetic oligonucleotide
gccuucaaguauggauucc

SEQ ID NO: 1196704 - RNA, 19 nt, Artificial Sequence
  Description of Artificial Sequence: Synthetic oligonucleotide
cucccuccggggaguugag

SEQ ID NO: 1196705 - RNA, 19 nt, Artificial Sequence
  Description of Artificial Sequence: Synthetic oligonucleotide
gcuggucauaagagggaac

SEQ ID NO: 1196706 - RNA, 19 nt, Artificial Sequence
  Description of Artificial Sequence: Synthetic oligonucleotide
caacgccaacuucaggccu

SEQ ID NO: 1196707 - RNA, 19 nt, Artificial Sequence
  Description of Artificial Sequence: Synthetic oligonucleotide
gggauccucccuccgggga

SEQ ID NO: 1196708 - RNA, 19 nt, Artificial Sequence
  Description of Artificial Sequence: Synthetic oligonucleotide
ccugggcaugagguuauag

SEQ ID NO: 1196709 - RNA, 19 nt, Artificial Sequence
  Description of Artificial Sequence: Synthetic oligonucleotide
gcuggugaauaacguggaa

SEQ ID NO: 1196710 - RNA, 19 nt, Artificial Sequence
  Description of Artificial Sequence: Synthetic oligonucleotide
cacuuaagucagaguuucu

SEQ ID NO: 1196711 - RNA, 19 nt, Artificial Sequence
  Description of Artificial Sequence: Synthetic oligonucleotide
ccaugguauauguauuuau

SEQ ID NO: 1196712 - RNA, 19 nt, Artificial Sequence
  Description of Artificial Sequence: Synthetic oligonucleotide
caguagcacuuucuucucu

SEQ ID NO: 1196713 - RNA, 19 nt, Artificial Sequence
  Description of Artificial Sequence: Synthetic oligonucleotide
ggcuuggacaauacacuua

SEQ ID NO: 1196714 - RNA, 19 nt, Artificial Sequence
  Description of Artificial Sequence: Synthetic oligonucleotide
ggccaugguauauguauuu

SEQ ID NO: 1196715 - RNA, 19 nt, Artificial Sequence
  Description of Artificial Sequence: Synthetic oligonucleotide
ggugaauaacguggaacau

SEQ ID NO: 1196716 - RNA, 19 nt, Artificial Sequence
  Description of Artificial Sequence: Synthetic oligonucleotide
gccaugguauauguauuua

SEQ ID NO: 1196717 - RNA, 19 nt, Artificial Sequence
  Description of Artificial Sequence: Synthetic oligonucleotide
guuuggcgaaaguggccau

SEQ ID NO: 1196718 - RNA, 19 nt, Artificial Sequence
  Description of Artificial Sequence: Synthetic oligonucleotide
cggugugaaaugugaccug

SEQ ID NO: 1196719 - RNA, 19 nt, Artificial Sequence
  Description of Artificial Sequence: Synthetic oligonucleotide
gccauucaagugggcauga

SEQ ID NO: 1196720 - RNA, 19 nt, Artificial Sequence
  Description of Artificial Sequence: Synthetic oligonucleotide
ccacaaugcuaccauuacu

SEQ ID NO: 1196721 - RNA, 19 nt, Artificial Sequence
  Description of Artificial Sequence: Synthetic oligonucleotide
ccuuaucaucgguacagau

SEQ ID NO: 1196722 - RNA, 19 nt, Artificial Sequence
  Description of Artificial Sequence: Synthetic oligonucleotide
gaaugucccggugcccaau

SEQ ID NO: 1196723 - RNA, 19 nt, Artificial Sequence
  Description of Artificial Sequence: Synthetic oligonucleotide
ccaagaagucggccaccuc

SEQ ID NO: 1196724 - RNA, 19 nt, Artificial Sequence
  Description of Artificial Sequence: Synthetic oligonucleotide
cguuaaacugaaguuaauu

SEQ ID NO: 1196725 - RNA, 19 nt, Artificial Sequence
  Description of Artificial Sequence: Synthetic oligonucleotide
agggaaccgucuggcuuuu

SEQ ID NO: 1196726 - RNA, 19 nt, Artificial Sequence
  Description of Artificial Sequence: Synthetic oligonucleotide
caccugggcaugagguuau

SEQ ID NO: 1196727 - RNA, 19 nt, Artificial Sequence
  Description of Artificial Sequence: Synthetic oligonucleotide
ccucccuccggggaguuga

SEQ ID NO: 1196728 - RNA, 19 nt, Artificial Sequence
  Description of Artificial Sequence: Synthetic oligonucleotide
cuccggggaguugaggaau

SEQ ID NO: 1196729 - RNA, 19 nt, Artificial Sequence
  Description of Artificial Sequence: Synthetic oligonucleotide
cgaaaguggccaugguaua

SEQ ID NO: 1196730 - RNA, 19 nt, Artificial Sequence
  Description of Artificial Sequence: Synthetic oligonucleotide
ccuccggggaguugaggaa

SEQ ID NO: 1196731 - RNA, 19 nt, Artificial Sequence
  Description of Artificial Sequence: Synthetic oligonucleotide
cgaaaguaguucaccuuau

SEQ ID NO: 1196732 - RNA, 19 nt, Artificial Sequence
  Description of Artificial Sequence: Synthetic oligonucleotide
auccucccuccggggaguu

SEQ ID NO: 1196733 - RNA, 19 nt, Artificial Sequence
  Description of Artificial Sequence: Synthetic oligonucleotide
ccuugucaaucauggucau

SEQ ID NO: 1196734 - RNA, 19 nt, Artificial Sequence
  Description of Artificial Sequence: Synthetic oligonucleotide
cgguguugccucacaaaau

SEQ ID NO: 1196735 - RNA, 19 nt, Artificial Sequence
  Description of Artificial Sequence: Synthetic oligonucleotide
ccggggaguugaggaaugu

SEQ ID NO: 1196736 - RNA, 19 nt, Artificial Sequence
  Description of Artificial Sequence: Synthetic oligonucleotide
cgccaacuucaggccugcu

SEQ ID NO: 1196737 - RNA, 19 nt, Artificial Sequence
  Description of Artificial Sequence: Synthetic oligonucleotide
aaacacuugcucugaaugg

SEQ ID NO: 1196738 - RNA, 19 nt, Artificial Sequence
  Description of Artificial Sequence: Synthetic oligonucleotide
acauauguguguugcagcc

SEQ ID NO: 1196739 - RNA, 19 nt, Artificial Sequence
  Description of Artificial Sequence: Synthetic oligonucleotide
ucgguuguaacugaaaucc

SEQ ID NO: 1196740 - RNA, 19 nt, Artificial Sequence
  Description of Artificial Sequence: Synthetic oligonucleotide
uuuaaugccaugcaaggau

SEQ ID NO: 1196741 - RNA, 19 nt, Artificial Sequence
  Description of Artificial Sequence: Synthetic oligonucleotide
uccuuuaaugccaugcaag

SEQ ID NO: 1196742 - RNA, 19 nt, Artificial Sequence
  Description of Artificial Sequence: Synthetic oligonucleotide
guaagccucagucacacgg

SEQ ID NO: 1196743 - RNA, 19 nt, Artificial Sequence
  Description of Artificial Sequence: Synthetic oligonucleotide
agcacguuguaauggaagc

SEQ ID NO: 1196744 - RNA, 19 nt, Artificial Sequence
  Description of Artificial Sequence: Synthetic oligonucleotide
aauguuuggccuucaaagu

SEQ ID NO: 1196745 - RNA, 19 nt, Artificial Sequence
  Description of Artificial Sequence: Synthetic oligonucleotide
gagacauaggcaugcaggg

SEQ ID NO: 1196746 - RNA, 19 nt, Artificial Sequence
  Description of Artificial Sequence: Synthetic oligonucleotide
uggauaguuuauuugguug

SEQ ID NO: 1196747 - RNA, 19 nt, Artificial Sequence
  Description of Artificial Sequence: Synthetic oligonucleotide
caaaucucagacagcagcg

SEQ ID NO: 1196748 - RNA, 19 nt, Artificial Sequence
  Description of Artificial Sequence: Synthetic oligonucleotide
ucugaauggacgcuacuca

SEQ ID NO: 1196749 - RNA, 19 nt, Artificial Sequence
  Description of Artificial Sequence: Synthetic oligonucleotide
gaauggacgcuacucagag

SEQ ID NO: 1196750 - RNA, 19 nt, Artificial Sequence
  Description of Artificial Sequence: Synthetic oligonucleotide
cagucauucgugcacaucc

SEQ ID NO: 1196751 - RNA, 19 nt, Artificial Sequence
  Description of Artificial Sequence: Synthetic oligonucleotide
ggugcaaugggccaaggcg

SEQ ID NO: 1196752 - RNA, 19 nt, Artificial Sequence
  Description of Artificial Sequence: Synthetic oligonucleotide
agagaagaugcuaauggcg

SEQ ID NO: 1196753 - RNA, 19 nt, Artificial Sequence
  Description of Artificial Sequence: Synthetic oligonucleotide
ucgaagacggucugaaaag

SEQ ID NO: 1196754 - RNA, 19 nt, Artificial Sequence
  Description of Artificial Sequence: Synthetic oligonucleotide
gaagcaucaccucaaucgc

SEQ ID NO: 1196755 - RNA, 19 nt, Artificial Sequence
  Description of Artificial Sequence: Synthetic oligonucleotide
aggagcguugguuacauug

SEQ ID NO: 1196756 - RNA, 19 nt, Artificial Sequence
  Description of Artificial Sequence: Synthetic oligonucleotide
ggauaguuuauuugguugg

SEQ ID NO: 1196757 - RNA, 19 nt, Artificial Sequence
  Description of Artificial Sequence: Synthetic oligonucleotide
cuugaugacacugcggcgg

SEQ ID NO: 1196758 - RNA, 19 nt, Artificial Sequence
  Description of Artificial Sequence: Synthetic oligonucleotide
ugguccugcacauugggcc

SEQ ID NO: 1196759 - RNA, 19 nt, Artificial Sequence
  Description of Artificial Sequence: Synthetic oligonucleotide
uguuuggccuucaaagucu

SEQ ID NO: 1196760 - RNA, 19 nt, Artificial Sequence
  Description of Artificial Sequence: Synthetic oligonucleotide
cucaaucaugcccaguugc

SEQ ID NO: 1196761 - RNA, 19 nt, Artificial Sequence
  Description of Artificial Sequence: Synthetic oligonucleotide
aaaucucagacagcagcgg

SEQ ID NO: 1196762 - RNA, 19 nt, Artificial Sequence
  Description of Artificial Sequence: Synthetic oligonucleotide
auuugcgaagccgacacuc

SEQ ID NO: 1196763 - RNA, 19 nt, Artificial Sequence
  Description of Artificial Sequence: Synthetic oligonucleotide
gacggucugaaaaggagcg

SEQ ID NO: 1196764 - RNA, 19 nt, Artificial Sequence
  Description of Artificial Sequence: Synthetic oligonucleotide
uuuuccgcuuuuguggacg

SEQ ID NO: 1196765 - RNA, 19 nt, Artificial Sequence
  Description of Artificial Sequence: Synthetic oligonucleotide
aaggacaucucuuccugga

SEQ ID NO: 1196766 - RNA, 19 nt, Artificial Sequence
  Description of Artificial Sequence: Synthetic oligonucleotide
gaggacacgaggaagaaca

SEQ ID NO: 1196767 - RNA, 19 nt, Artificial Sequence
  Description of Artificial Sequence: Synthetic oligonucleotide
aagcgcaaacacuugcucu

SEQ ID NO: 1196768 - RNA, 19 nt, Artificial Sequence
  Description of Artificial Sequence: Synthetic oligonucleotide
uugguugggucaauaaggu

SEQ ID NO: 1196769 - RNA, 19 nt, Artificial Sequence
  Description of Artificial Sequence: Synthetic oligonucleotide
cagcaaggcgaucugaucc

SEQ ID NO: 1196770 - RNA, 19 nt, Artificial Sequence
  Description of Artificial Sequence: Synthetic oligonucleotide
aaucccuugcagcccucgc

SEQ ID NO: 1196771 - RNA, 19 nt, Artificial Sequence
  Description of Artificial Sequence: Synthetic oligonucleotide
cagucuguaagccucaguc

SEQ ID NO: 1196772 - RNA, 19 nt, Artificial Sequence
  Description of Artificial Sequence: Synthetic oligonucleotide
ucucgguuguaacugaaau

SEQ ID NO: 1196773 - RNA, 19 nt, Artificial Sequence
  Description of Artificial Sequence: Synthetic oligonucleotide
uccgugggaacaucagucg

SEQ ID NO: 1196774 - RNA, 19 nt, Artificial Sequence
  Description of Artificial Sequence: Synthetic oligonucleotide
ucaaucaugcccaguugcu

SEQ ID NO: 1196775 - RNA, 19 nt, Artificial Sequence
  Description of Artificial Sequence: Synthetic oligonucleotide
uaccaagacacuguccggg

SEQ ID NO: 1196776 - RNA, 19 nt, Artificial Sequence
  Description of Artificial Sequence: Synthetic oligonucleotide
cucuguagguucuggaaag

SEQ ID NO: 1196777 - RNA, 19 nt, Artificial Sequence
  Description of Artificial Sequence: Synthetic oligonucleotide
guggacgaagcucuguagg

SEQ ID NO: 1196778 - RNA, 19 nt, Artificial Sequence
  Description of Artificial Sequence: Synthetic oligonucleotide
gacacgaggaagaacaguc

SEQ ID NO: 1196779 - RNA, 19 nt, Artificial Sequence
  Description of Artificial Sequence: Synthetic oligonucleotide
aacauagcgugcucccuug

SEQ ID NO: 1196780 - RNA, 19 nt, Artificial Sequence
  Description of Artificial Sequence: Synthetic oligonucleotide
acaucagucggucgugggg

SEQ ID NO: 1196781 - RNA, 19 nt, Artificial Sequence
  Description of Artificial Sequence: Synthetic oligonucleotide
aguccggaggcucaccaac

SEQ ID NO: 1196782 - RNA, 19 nt, Artificial Sequence
  Description of Artificial Sequence: Synthetic oligonucleotide
aacacuugcucugaaugga

SEQ ID NO: 1196783 - RNA, 19 nt, Artificial Sequence
  Description of Artificial Sequence: Synthetic oligonucleotide
ugaauggacgcuacucaga

SEQ ID NO: 1196784 - RNA, 19 nt, Artificial Sequence
  Description of Artificial Sequence: Synthetic oligonucleotide
cacauauguguguugcagc

SEQ ID NO: 1196785 - RNA, 19 nt, Artificial Sequence
  Description of Artificial Sequence: Synthetic oligonucleotide
agacggucugaaaaggagc

SEQ ID NO: 1196786 - RNA, 19 nt, Artificial Sequence
  Description of Artificial Sequence: Synthetic oligonucleotide
aagcgaaucuguucuucug

SEQ ID NO: 1196787 - RNA, 19 nt, Artificial Sequence
  Description of Artificial Sequence: Synthetic oligonucleotide
gaaaaggagcguugguuac

SEQ ID NO: 1196788 - RNA, 19 nt, Artificial Sequence
  Description of Artificial Sequence: Synthetic oligonucleotide
gucaauaaggucuucagau

SEQ ID NO: 1196789 - RNA, 19 nt, Artificial Sequence
  Description of Artificial Sequence: Synthetic oligonucleotide
uagcgugcucccuugauga

SEQ ID NO: 1196790 - RNA, 19 nt, Artificial Sequence
  Description of Artificial Sequence: Synthetic oligonucleotide
uuugcgaagccgacacucc

SEQ ID NO: 1196791 - RNA, 19 nt, Artificial Sequence
  Description of Artificial Sequence: Synthetic oligonucleotide
agcgcaaacacuugcucug

SEQ ID NO: 1196792 - RNA, 19 nt, Artificial Sequence
  Description of Artificial Sequence: Synthetic oligonucleotide
acacuccuggcauuuccgc

SEQ ID NO: 1196793 - RNA, 19 nt, Artificial Sequence
  Description of Artificial Sequence: Synthetic oligonucleotide
acauucguagguccccaac

SEQ ID NO: 1196794 - RNA, 19 nt, Artificial Sequence
  Description of Artificial Sequence: Synthetic oligonucleotide
cugaauggacgcuacucag

SEQ ID NO: 1196795 - RNA, 19 nt, Artificial Sequence
  Description of Artificial Sequence: Synthetic oligonucleotide
ugcacauugggccggucug

SEQ ID NO: 1196796 - RNA, 19 nt, Artificial Sequence
  Description of Artificial Sequence: Synthetic oligonucleotide
gagaagaugcuaauggcga

SEQ ID NO: 1196797 - RNA, 19 nt, Artificial Sequence
  Description of Artificial Sequence: Synthetic oligonucleotide
augccaugcaaggaucucc

SEQ ID NO: 1196798 - RNA, 19 nt, Artificial Sequence
  Description of Artificial Sequence: Synthetic oligonucleotide
augcuaauggcgaugagca

SEQ ID NO: 1196799 - RNA, 19 nt, Artificial Sequence
  Description of Artificial Sequence: Synthetic oligonucleotide
auucguagguccccaacug

SEQ ID NO: 1196800 - RNA, 19 nt, Artificial Sequence
  Description of Artificial Sequence: Synthetic oligonucleotide
aguugcucugggcugagcu

SEQ ID NO: 1196801 - RNA, 19 nt, Artificial Sequence
  Description of Artificial Sequence: Synthetic oligonucleotide
ugcuucuucccugaggaug

SEQ ID NO: 1196802 - RNA, 19 nt, Artificial Sequence
  Description of Artificial Sequence: Synthetic oligonucleotide
ucucaaucaugcccaguug

SEQ ID NO: 1196803 - RNA, 19 nt, Artificial Sequence
  Description of Artificial Sequence: Synthetic oligonucleotide
uguggacgaagcucuguag

SEQ ID NO: 1196804 - RNA, 19 nt, Artificial Sequence
  Description of Artificial Sequence: Synthetic oligonucleotide
aaggcgugacucgaagacg

SEQ ID NO: 1196805 - RNA, 19 nt, Artificial Sequence
  Description of Artificial Sequence: Synthetic oligonucleotide
agaggucuucagcaaggcg

SEQ ID NO: 1196806 - RNA, 19 nt, Artificial Sequence
  Description of Artificial Sequence: Synthetic oligonucleotide
auuuccgccgcauguaggu

SEQ ID NO: 1196807 - RNA, 19 nt, Artificial Sequence
  Description of Artificial Sequence: Synthetic oligonucleotide
caaggcgugacucgaagac

SEQ ID NO: 1196808 - RNA, 19 nt, Artificial Sequence
  Description of Artificial Sequence: Synthetic oligonucleotide
aucugauccucccugcuga

SEQ ID NO: 1196809 - RNA, 19 nt, Artificial Sequence
  Description of Artificial Sequence: Synthetic oligonucleotide
aagucugcuccaccucuag

SEQ ID NO: 1196810 - RNA, 19 nt, Artificial Sequence
  Description of Artificial Sequence: Synthetic oligonucleotide
acugcggcggaagaauccc

SEQ ID NO: 1196811 - RNA, 19 nt, Artificial Sequence
  Description of Artificial Sequence: Synthetic oligonucleotide
aauaaggucuucagauggu

SEQ ID NO: 1196812 - RNA, 19 nt, Artificial Sequence
  Description of Artificial Sequence: Synthetic oligonucleotide
agcaaacucagcaucguug

SEQ ID NO: 1196813 - RNA, 19 nt, Artificial Sequence
  Description of Artificial Sequence: Synthetic oligonucleotide
auagcgugcucccuugaug

SEQ ID NO: 1196814 - RNA, 19 nt, Artificial Sequence
  Description of Artificial Sequence: Synthetic oligonucleotide
auccgugggaacaucaguc

SEQ ID NO: 1196815 - RNA, 19 nt, Artificial Sequence
  Description of Artificial Sequence: Synthetic oligonucleotide
aaagucuucucgguuguaa

SEQ ID NO: 1196816 - RNA, 19 nt, Artificial Sequence
  Description of Artificial Sequence: Synthetic oligonucleotide
gacgaagcucuguagguuc

SEQ ID NO: 1196817 - RNA, 19 nt, Artificial Sequence
  Description of Artificial Sequence: Synthetic oligonucleotide
gaacucaaagaugggguug

SEQ ID NO: 1196818 - RNA, 19 nt, Artificial Sequence
  Description of Artificial Sequence: Synthetic oligonucleotide
aaagcaaacucagcaucgu

SEQ ID NO: 1196819 - RNA, 19 nt, Artificial Sequence
  Description of Artificial Sequence: Synthetic oligonucleotide
agacauaggcaugcagggc

SEQ ID NO: 1196820 - RNA, 19 nt, Artificial Sequence
  Description of Artificial Sequence: Synthetic oligonucleotide
agucuguaagccucaguca

SEQ ID NO: 1196821 - RNA, 19 nt, Artificial Sequence
  Description of Artificial Sequence: Synthetic oligonucleotide
gaagaugcuaauggcgaug

SEQ ID NO: 1196822 - RNA, 19 nt, Artificial Sequence
  Description of Artificial Sequence: Synthetic oligonucleotide
aacacccaaccccuugacu

SEQ ID NO: 1196823 - RNA, 19 nt, Artificial Sequence
  Description of Artificial Sequence: Synthetic oligonucleotide
uccgcuuuuguggacgaag

SEQ ID NO: 1196824 - RNA, 19 nt, Artificial Sequence
  Description of Artificial Sequence: Synthetic oligonucleotide
ucaguaaagugggcaaagc

SEQ ID NO: 1196825 - RNA, 19 nt, Artificial Sequence
  Description of Artificial Sequence: Synthetic oligonucleotide
uggacgaagcucuguaggu

SEQ ID NO: 1196826 - RNA, 19 nt, Artificial Sequence
  Description of Artificial Sequence: Synthetic oligonucleotide
cagcacguuguaauggaag

SEQ ID NO: 1196827 - RNA, 19 nt, Artificial Sequence
  Description of Artificial Sequence: Synthetic oligonucleotide
agucacacggggcccaaag

SEQ ID NO: 1196828 - RNA, 19 nt, Artificial Sequence
  Description of Artificial Sequence: Synthetic oligonucleotide
gaagccgacacuccuggca

SEQ ID NO: 1196829 - RNA, 19 nt, Artificial Sequence
  Description of Artificial Sequence: Synthetic oligonucleotide
uggacauuaccaagacacu

SEQ ID NO: 1196830 - RNA, 19 nt, Artificial Sequence
  Description of Artificial Sequence: Synthetic oligonucleotide
gacaagacacacuccucac

SEQ ID NO: 1196831 - RNA, 19 nt, Artificial Sequence
  Description of Artificial Sequence: Synthetic oligonucleotide
cucgguuguaacugaaauc

SEQ ID NO: 1196832 - RNA, 19 nt, Artificial Sequence
  Description of Artificial Sequence: Synthetic oligonucleotide
ucauucgugcacaucccaa

SEQ ID NO: 1196833 - RNA, 19 nt, Artificial Sequence
  Description of Artificial Sequence: Synthetic oligonucleotide
aaaaggagcguugguuaca

SEQ ID NO: 1196834 - RNA, 19 nt, Artificial Sequence
  Description of Artificial Sequence: Synthetic oligonucleotide
uggucucuugcaucuuggg

SEQ ID NO: 1196835 - RNA, 19 nt, Artificial Sequence
  Description of Artificial Sequence: Synthetic oligonucleotide
cacuccucacgcaugcccg

SEQ ID NO: 1196836 - RNA, 19 nt, Artificial Sequence
  Description of Artificial Sequence: Synthetic oligonucleotide
gaugcagcuauugcuuccc

SEQ ID NO: 1196837 - RNA, 19 nt, Artificial Sequence
  Description of Artificial Sequence: Synthetic oligonucleotide
gucugaaaaggagcguugg

SEQ ID NO: 1196838 - RNA, 19 nt, Artificial Sequence
  Description of Artificial Sequence: Synthetic oligonucleotide
ucuaggaagcagucuguaa

SEQ ID NO: 1196839 - RNA, 19 nt, Artificial Sequence
  Description of Artificial Sequence: Synthetic oligonucleotide
aagccgacacuccuggcau

SEQ ID NO: 1196840 - RNA, 19 nt, Artificial Sequence
  Description of Artificial Sequence: Synthetic oligonucleotide
ugggccaaggcgugacucg

SEQ ID NO: 1196841 - RNA, 19 nt, Artificial Sequence
  Description of Artificial Sequence: Synthetic oligonucleotide
gacacgauggccagcucag

SEQ ID NO: 1196842 - RNA, 19 nt, Artificial Sequence
  Description of Artificial Sequence: Synthetic oligonucleotide
agucauucgugcacauccc

SEQ ID NO: 1196843 - RNA, 19 nt, Artificial Sequence
  Description of Artificial Sequence: Synthetic oligonucleotide
acgcaugcccgccuggagg

SEQ ID NO: 1196844 - RNA, 19 nt, Artificial Sequence
  Description of Artificial Sequence: Synthetic oligonucleotide
cucgaagacggucugaaaa

SEQ ID NO: 1196845 - RNA, 19 nt, Artificial Sequence
  Description of Artificial Sequence: Synthetic oligonucleotide
uggcgaugagcaaagcaaa

SEQ ID NO: 1196846 - RNA, 19 nt, Artificial Sequence
  Description of Artificial Sequence: Synthetic oligonucleotide
ucuucucgguuguaacuga

SEQ ID NO: 1196847 - RNA, 19 nt, Artificial Sequence
  Description of Artificial Sequence: Synthetic oligonucleotide
cucaguaaagugggcaaag

SEQ ID NO: 1196848 - RNA, 19 nt, Artificial Sequence
  Description of Artificial Sequence: Synthetic oligonucleotide
aggcgugacucgaagacgg

SEQ ID NO: 1196849 - RNA, 19 nt, Artificial Sequence
  Description of Artificial Sequence: Synthetic oligonucleotide
cauuuccgccgcauguagg

SEQ ID NO: 1196850 - RNA, 19 nt, Artificial Sequence
  Description of Artificial Sequence: Synthetic oligonucleotide
gcguugguuacauugcugc

SEQ ID NO: 1196851 - RNA, 19 nt, Artificial Sequence
  Description of Artificial Sequence: Synthetic oligonucleotide
aaaggagcguugguuacau

SEQ ID NO: 1196852 - RNA, 19 nt, Artificial Sequence
  Description of Artificial Sequence: Synthetic oligonucleotide
agcaucguugagcugcagu

SEQ ID NO: 1196853 - RNA, 19 nt, Artificial Sequence
  Description of Artificial Sequence: Synthetic oligonucleotide
ugggaacaucagucggucg

SEQ ID NO: 1196854 - RNA, 19 nt, Artificial Sequence
  Description of Artificial Sequence: Synthetic oligonucleotide
auugggccggucugcagag

SEQ ID NO: 1196855 - RNA, 19 nt, Artificial Sequence
  Description of Artificial Sequence: Synthetic oligonucleotide
acuguccgggcccucgagg

SEQ ID NO: 1196856 - RNA, 19 nt, Artificial Sequence
  Description of Artificial Sequence: Synthetic oligonucleotide
agcucagcacguuguaaug

SEQ ID NO: 1196857 - RNA, 19 nt, Artificial Sequence
  Description of Artificial Sequence: Synthetic oligonucleotide
gaacaucagucggucgugg

SEQ ID NO: 1196858 - RNA, 19 nt, Artificial Sequence
  Description of Artificial Sequence: Synthetic oligonucleotide
agcaaggcgaucugauccu

SEQ ID NO: 1196859 - RNA, 19 nt, Artificial Sequence
  Description of Artificial Sequence: Synthetic oligonucleotide
uguaagccucagucacacg

SEQ ID NO: 1196860 - RNA, 19 nt, Artificial Sequence
  Description of Artificial Sequence: Synthetic oligonucleotide
agccagaggcuuugucccc

SEQ ID NO: 1196861 - RNA, 19 nt, Artificial Sequence
  Description of Artificial Sequence: Synthetic oligonucleotide
ggacauuaccaagacacug

SEQ ID NO: 1196862 - RNA, 19 nt, Artificial Sequence
  Description of Artificial Sequence: Synthetic oligonucleotide
ggcuucccggcucugaggg

SEQ ID NO: 1196863 - RNA, 19 nt, Artificial Sequence
  Description of Artificial Sequence: Synthetic oligonucleotide
cucugaauggacgcuacuc

SEQ ID NO: 1196864 - RNA, 19 nt, Artificial Sequence
  Description of Artificial Sequence: Synthetic oligonucleotide
auucgugcacaucccaaau

SEQ ID NO: 1196865 - RNA, 19 nt, Artificial Sequence
  Description of Artificial Sequence: Synthetic oligonucleotide
uugcgaagccgacacuccu

SEQ ID NO: 1196866 - RNA, 19 nt, Artificial Sequence
  Description of Artificial Sequence: Synthetic oligonucleotide
ucagcacguuguaauggaa

SEQ ID NO: 1196867 - RNA, 19 nt, Artificial Sequence
  Description of Artificial Sequence: Synthetic oligonucleotide
ucaagcgaaucuguucuuc

SEQ ID NO: 1196868 - RNA, 19 nt, Artificial Sequence
  Description of Artificial Sequence: Synthetic oligonucleotide
aggacaaacagcaggccgu

SEQ ID NO: 1196869 - RNA, 19 nt, Artificial Sequence
  Description of Artificial Sequence: Synthetic oligonucleotide
gcauuugcgaagccgacac

SEQ ID NO: 1196870 - RNA, 19 nt, Artificial Sequence
  Description of Artificial Sequence: Synthetic oligonucleotide
gcaaacauagcgugcuccc

SEQ ID NO: 1196871 - RNA, 19 nt, Artificial Sequence
  Description of Artificial Sequence: Synthetic oligonucleotide
auggugcacauucguaggu

SEQ ID NO: 1196872 - RNA, 19 nt, Artificial Sequence
  Description of Artificial Sequence: Synthetic oligonucleotide
ucugauccucccugcugag

SEQ ID NO: 1196873 - RNA, 19 nt, Artificial Sequence
  Description of Artificial Sequence: Synthetic oligonucleotide
agaguccggaggcucacca

SEQ ID NO: 1196874 - RNA, 19 nt, Artificial Sequence
  Description of Artificial Sequence: Synthetic oligonucleotide
gaagacggucugaaaagga

SEQ ID NO: 1196875 - RNA, 19 nt, Artificial Sequence
  Description of Artificial Sequence: Synthetic oligonucleotide
ucagcaucguugagcugca

SEQ ID NO: 1196876 - RNA, 19 nt, Artificial Sequence
  Description of Artificial Sequence: Synthetic oligonucleotide
uuuguccugcaggcgaagc

SEQ ID NO: 1196877 - RNA, 19 nt, Artificial Sequence
  Description of Artificial Sequence: Synthetic oligonucleotide
aaugggccaaggcgugacu

SEQ ID NO: 1196878 - RNA, 19 nt, Artificial Sequence
  Description of Artificial Sequence: Synthetic oligonucleotide
aggucucugcccugggaag

SEQ ID NO: 1196879 - RNA, 19 nt, Artificial Sequence
  Description of Artificial Sequence: Synthetic oligonucleotide
uuccgccgcauguaggugu

SEQ ID NO: 1196880 - RNA, 19 nt, Artificial Sequence
  Description of Artificial Sequence: Synthetic oligonucleotide
guagguguccauggggcag

SEQ ID NO: 1196881 - RNA, 19 nt, Artificial Sequence
  Description of Artificial Sequence: Synthetic oligonucleotide
acucagaguccggaggcuc

SEQ ID NO: 1196882 - RNA, 19 nt, Artificial Sequence
  Description of Artificial Sequence: Synthetic oligonucleotide
cacugcggcggaagaaucc

SEQ ID NO: 1196883 - RNA, 19 nt, Artificial Sequence
  Description of Artificial Sequence: Synthetic oligonucleotide
uuuguggacgaagcucugu

SEQ ID NO: 1196884 - RNA, 19 nt, Artificial Sequence
  Description of Artificial Sequence: Synthetic oligonucleotide
uuuccgcuuuuguggacga

SEQ ID NO: 1196885 - RNA, 19 nt, Artificial Sequence
  Description of Artificial Sequence: Synthetic oligonucleotide
cacguuguaauggaagcca

SEQ ID NO: 1196886 - RNA, 19 nt, Artificial Sequence
  Description of Artificial Sequence: Synthetic oligonucleotide
uuauuugguugggucaaua

SEQ ID NO: 1196887 - RNA, 19 nt, Artificial Sequence
  Description of Artificial Sequence: Synthetic oligonucleotide
gucucuugcaucuuggguu

SEQ ID NO: 1196888 - RNA, 19 nt, Artificial Sequence
  Description of Artificial Sequence: Synthetic oligonucleotide
cucagcacguuguaaugga

SEQ ID NO: 1196889 - RNA, 19 nt, Artificial Sequence
  Description of Artificial Sequence: Synthetic oligonucleotide
ucaggugcaaugggccaag

SEQ ID NO: 1196890 - RNA, 19 nt, Artificial Sequence
  Description of Artificial Sequence: Synthetic oligonucleotide
gguuacauugcugcugggc

SEQ ID NO: 1196891 - RNA, 19 nt, Artificial Sequence
  Description of Artificial Sequence: Synthetic oligonucleotide
aggguuguaccuccgugau

SEQ ID NO: 1196892 - RNA, 19 nt, Artificial Sequence
  Description of Artificial Sequence: Synthetic oligonucleotide
augggccaaggcgugacuc

SEQ ID NO: 1196893 - RNA, 19 nt, Artificial Sequence
  Description of Artificial Sequence: Synthetic oligonucleotide
ggucaauaaggucuucaga

SEQ ID NO: 1196894 - RNA, 19 nt, Artificial Sequence
  Description of Artificial Sequence: Synthetic oligonucleotide
ugggccggucugcagagaa

SEQ ID NO: 1196895 - RNA, 19 nt, Artificial Sequence
  Description of Artificial Sequence: Synthetic oligonucleotide
agcgugcucccuugaugac

SEQ ID NO: 1196896 - RNA, 19 nt, Artificial Sequence
  Description of Artificial Sequence: Synthetic oligonucleotide
ggcucaccaacuucauuag

SEQ ID NO: 1196897 - RNA, 19 nt, Artificial Sequence
  Description of Artificial Sequence: Synthetic oligonucleotide
gguuguaccuccgugaugu

SEQ ID NO: 1196898 - RNA, 19 nt, Artificial Sequence
  Description of Artificial Sequence: Synthetic oligonucleotide
ggcgaucugauccucccug

SEQ ID NO: 1196899 - RNA, 19 nt, Artificial Sequence
  Description of Artificial Sequence: Synthetic oligonucleotide
ggcaaacauagcgugcucc

SEQ ID NO: 1196900 - RNA, 19 nt, Artificial Sequence
  Description of Artificial Sequence: Synthetic oligonucleotide
gacgcuacucagaguccgg

SEQ ID NO: 1196901 - RNA, 19 nt, Artificial Sequence
  Description of Artificial Sequence: Synthetic oligonucleotide
gucacacggggcccaaagc

SEQ ID NO: 1196902 - RNA, 19 nt, Artificial Sequence
  Description of Artificial Sequence: Synthetic oligonucleotide
caaucgcagaggucuucag

SEQ ID NO: 1196903 - RNA, 19 nt, Artificial Sequence
  Description of Artificial Sequence: Synthetic oligonucleotide
gucauucgugcacauccca

SEQ ID NO: 1196904 - RNA, 19 nt, Artificial Sequence
  Description of Artificial Sequence: Synthetic oligonucleotide
cucgaggcggacagcgggc

SEQ ID NO: 1196905 - RNA, 19 nt, Artificial Sequence
  Description of Artificial Sequence: Synthetic oligonucleotide
cauugggccggucugcaga

SEQ ID NO: 1196906 - RNA, 19 nt, Artificial Sequence
  Description of Artificial Sequence: Synthetic oligonucleotide
caaucaugcccaguugcuc

SEQ ID NO: 1196907 - RNA, 19 nt, Artificial Sequence
  Description of Artificial Sequence: Synthetic oligonucleotide
ggacgcuacucagaguccg

SEQ ID NO: 1196908 - RNA, 19 nt, Artificial Sequence
  Description of Artificial Sequence: Synthetic oligonucleotide
cauucgugcacaucccaaa

SEQ ID NO: 1196909 - RNA, 19 nt, Artificial Sequence
  Description of Artificial Sequence: Synthetic oligonucleotide
ggagcguugguuacauugc

SEQ ID NO: 1196910 - RNA, 19 nt, Artificial Sequence
  Description of Artificial Sequence: Synthetic oligonucleotide
gcccucgcagcucagcacg

SEQ ID NO: 1196911 - RNA, 19 nt, Artificial Sequence
  Description of Artificial Sequence: Synthetic oligonucleotide
ugcuaauggcgaugagcaa

SEQ ID NO: 1196912 - RNA, 19 nt, Artificial Sequence
  Description of Artificial Sequence: Synthetic oligonucleotide
ccacauauguguguugcag

SEQ ID NO: 1196913 - RNA, 19 nt, Artificial Sequence
  Description of Artificial Sequence: Synthetic oligonucleotide
acauugggccggucugcag

SEQ ID NO: 1196914 - RNA, 19 nt, Artificial Sequence
  Description of Artificial Sequence: Synthetic oligonucleotide
ccucagagcacuuccagca

SEQ ID NO: 1196915 - RNA, 19 nt, Artificial Sequence
  Description of Artificial Sequence: Synthetic oligonucleotide
gcuauugcuucccuggucu

SEQ ID NO: 1196916 - RNA, 19 nt, Artificial Sequence
  Description of Artificial Sequence: Synthetic oligonucleotide
cuauugcuucccuggucuc

SEQ ID NO: 1196917 - RNA, 19 nt, Artificial Sequence
  Description of Artificial Sequence: Synthetic oligonucleotide
gcuaauggcgaugagcaaa

SEQ ID NO: 1196918 - RNA, 19 nt, Artificial Sequence
  Description of Artificial Sequence: Synthetic oligonucleotide
cuccguugcagagucagga

SEQ ID NO: 1196919 - RNA, 19 nt, Artificial Sequence
  Description of Artificial Sequence: Synthetic oligonucleotide
ugcggcggaagaaucccuu

SEQ ID NO: 1196920 - RNA, 19 nt, Artificial Sequence
  Description of Artificial Sequence: Synthetic oligonucleotide
aggcauuugcgaagccgac

SEQ ID NO: 1196921 - RNA, 19 nt, Artificial Sequence
  Description of Artificial Sequence: Synthetic oligonucleotide
uggcaaacauagcgugcuc

SEQ ID NO: 1196922 - RNA, 19 nt, Artificial Sequence
  Description of Artificial Sequence: Synthetic oligonucleotide
aggcgaagcgcaaacacuu

SEQ ID NO: 1196923 - RNA, 19 nt, Artificial Sequence
  Description of Artificial Sequence: Synthetic oligonucleotide
ugcaggcgaagcgcaaaca

SEQ ID NO: 1196924 - RNA, 19 nt, Artificial Sequence
  Description of Artificial Sequence: Synthetic oligonucleotide
ucgcagaggucuucagcaa

SEQ ID NO: 1196925 - RNA, 19 nt, Artificial Sequence
  Description of Artificial Sequence: Synthetic oligonucleotide
uaauggcgaugagcaaagc

SEQ ID NO: 1196926 - RNA, 19 nt, Artificial Sequence
  Description of Artificial Sequence: Synthetic oligonucleotide
cugcaggcgaagcgcaaac

SEQ ID NO: 1196927 - RNA, 19 nt, Artificial Sequence
  Description of Artificial Sequence: Synthetic oligonucleotide
acacugcggcggaagaauc

SEQ ID NO: 1196928 - RNA, 19 nt, Artificial Sequence
  Description of Artificial Sequence: Synthetic oligonucleotide
cacggggcccaaagcacag

SEQ ID NO: 1196929 - RNA, 19 nt, Artificial Sequence
  Description of Artificial Sequence: Synthetic oligonucleotide
gaggcuuuguccccacaua

SEQ ID NO: 1196930 - RNA, 19 nt, Artificial Sequence
  Description of Artificial Sequence: Synthetic oligonucleotide
cauucguagguccccaacu

SEQ ID NO: 1196931 - RNA, 19 nt, Artificial Sequence
  Description of Artificial Sequence: Synthetic oligonucleotide
aggaauguuuggccuucaa

SEQ ID NO: 1196932 - RNA, 19 nt, Artificial Sequence
  Description of Artificial Sequence: Synthetic oligonucleotide
uuuccgccgcauguaggug

SEQ ID NO: 1196933 - RNA, 19 nt, Artificial Sequence
  Description of Artificial Sequence: Synthetic oligonucleotide
ucuugccgcuucaguuucu

SEQ ID NO: 1196934 - RNA, 19 nt, Artificial Sequence
  Description of Artificial Sequence: Synthetic oligonucleotide
gugggaacaucagucgguc

SEQ ID NO: 1196935 - RNA, 19 nt, Artificial Sequence
  Description of Artificial Sequence: Synthetic oligonucleotide
caaugggccaaggcgugac

SEQ ID NO: 1196936 - RNA, 19 nt, Artificial Sequence
  Description of Artificial Sequence: Synthetic oligonucleotide
uugcucugaauggacgcua

SEQ ID NO: 1196937 - RNA, 19 nt, Artificial Sequence
  Description of Artificial Sequence: Synthetic oligonucleotide
guaccuccgugaugucucc

SEQ ID NO: 1196938 - RNA, 19 nt, Artificial Sequence
  Description of Artificial Sequence: Synthetic oligonucleotide
gugcacauucguagguccc

SEQ ID NO: 1196939 - RNA, 19 nt, Artificial Sequence
  Description of Artificial Sequence: Synthetic oligonucleotide
acauagcgugcucccuuga

SEQ ID NO: 1196940 - RNA, 19 nt, Artificial Sequence
  Description of Artificial Sequence: Synthetic oligonucleotide
cucgcucccaggguuguac

SEQ ID NO: 1196941 - RNA, 19 nt, Artificial Sequence
  Description of Artificial Sequence: Synthetic oligonucleotide
ugacucgaagacggucuga

SEQ ID NO: 1196942 - RNA, 19 nt, Artificial Sequence
  Description of Artificial Sequence: Synthetic oligonucleotide
uccggaggcucaccaacuu

SEQ ID NO: 1196943 - RNA, 19 nt, Artificial Sequence
  Description of Artificial Sequence: Synthetic oligonucleotide
ggucugaaaaggagcguug

SEQ ID NO: 1196944 - RNA, 19 nt, Artificial Sequence
  Description of Artificial Sequence: Synthetic oligonucleotide
ccgcuuuuguggacgaagc

SEQ ID NO: 1196945 - RNA, 19 nt, Artificial Sequence
  Description of Artificial Sequence: Synthetic oligonucleotide
uccgccgcauguagguguc

SEQ ID NO: 1196946 - RNA, 19 nt, Artificial Sequence
  Description of Artificial Sequence: Synthetic oligonucleotide
ggccguggagucuccagcc

SEQ ID NO: 1196947 - RNA, 19 nt, Artificial Sequence
  Description of Artificial Sequence: Synthetic oligonucleotide
cagggccuccacauaugug

SEQ ID NO: 1196948 - RNA, 19 nt, Artificial Sequence
  Description of Artificial Sequence: Synthetic oligonucleotide
gccaaggcgugacucgaag

SEQ ID NO: 1196949 - RNA, 19 nt, Artificial Sequence
  Description of Artificial Sequence: Synthetic oligonucleotide
caagcgaaucuguucuucu

SEQ ID NO: 1196950 - RNA, 19 nt, Artificial Sequence
  Description of Artificial Sequence: Synthetic oligonucleotide
cccaaagcacagaggacac

SEQ ID NO: 1196951 - RNA, 19 nt, Artificial Sequence
  Description of Artificial Sequence: Synthetic oligonucleotide
ccgugggaacaucagucgg

SEQ ID NO: 1196952 - RNA, 19 nt, Artificial Sequence
  Description of Artificial Sequence: Synthetic oligonucleotide
cugauccucccugcugagc

SEQ ID NO: 1196953 - RNA, 19 nt, Artificial Sequence
  Description of Artificial Sequence: Synthetic oligonucleotide
acuccguugcagagucagg

SEQ ID NO: 1196954 - RNA, 19 nt, Artificial Sequence
  Description of Artificial Sequence: Synthetic oligonucleotide
guaauggaagccagaggcu

SEQ ID NO: 1196955 - RNA, 19 nt, Artificial Sequence
  Description of Artificial Sequence: Synthetic oligonucleotide
cucaaucgcagaggucuuc

SEQ ID NO: 1196956 - RNA, 19 nt, Artificial Sequence
  Description of Artificial Sequence: Synthetic oligonucleotide
cgaagacggucugaaaagg

SEQ ID NO: 1196957 - RNA, 19 nt, Artificial Sequence
  Description of Artificial Sequence: Synthetic oligonucleotide
ucugagggucaggugcaau

SEQ ID NO: 1196958 - RNA, 19 nt, Artificial Sequence
  Description of Artificial Sequence: Synthetic oligonucleotide
ccacaacuccguugcagag

SEQ ID NO: 1196959 - RNA, 19 nt, Artificial Sequence
  Description of Artificial Sequence: Synthetic oligonucleotide
acgaggaagaacagucauu

SEQ ID NO: 1196960 - RNA, 19 nt, Artificial Sequence
  Description of Artificial Sequence: Synthetic oligonucleotide
acgaagcucuguagguucu

SEQ ID NO: 1196961 - RNA, 19 nt, Artificial Sequence
  Description of Artificial Sequence: Synthetic oligonucleotide
agccacaaggacaucucuu

SEQ ID NO: 1196962 - RNA, 19 nt, Artificial Sequence
  Description of Artificial Sequence: Synthetic oligonucleotide
gggcccucgaggcggacag

SEQ ID NO: 1196963 - RNA, 19 nt, Artificial Sequence
  Description of Artificial Sequence: Synthetic oligonucleotide
aaggagcguugguuacauu

SEQ ID NO: 1196964 - RNA, 19 nt, Artificial Sequence
  Description of Artificial Sequence: Synthetic oligonucleotide
acgcuacucagaguccgga

SEQ ID NO: 1196965 - RNA, 19 nt, Artificial Sequence
  Description of Artificial Sequence: Synthetic oligonucleotide
ggacaaacagcaggccgug

SEQ ID NO: 1196966 - RNA, 19 nt, Artificial Sequence
  Description of Artificial Sequence: Synthetic oligonucleotide
acggucugaaaaggagcgu

SEQ ID NO: 1196967 - RNA, 19 nt, Artificial Sequence
  Description of Artificial Sequence: Synthetic oligonucleotide
caccucaaucgcagagguc

SEQ ID NO: 1196968 - RNA, 19 nt, Artificial Sequence
  Description of Artificial Sequence: Synthetic oligonucleotide
cacgaggaagaacagucau

SEQ ID NO: 1196969 - RNA, 19 nt, Artificial Sequence
  Description of Artificial Sequence: Synthetic oligonucleotide
cacgauggccagcucagua

SEQ ID NO: 1196970 - RNA, 19 nt, Artificial Sequence
  Description of Artificial Sequence: Synthetic oligonucleotide
ugccuuccacaacuccguu

SEQ ID NO: 1196971 - RNA, 19 nt, Artificial Sequence
  Description of Artificial Sequence: Synthetic oligonucleotide
cagcucagcacguuguaau

SEQ ID NO: 1196972 - RNA, 19 nt, Artificial Sequence
  Description of Artificial Sequence: Synthetic oligonucleotide
cacuguccgggcccucgag

SEQ ID NO: 1196973 - RNA, 19 nt, Artificial Sequence
  Description of Artificial Sequence: Synthetic oligonucleotide
gggcuucccggcucugagg

SEQ ID NO: 1196974 - RNA, 19 nt, Artificial Sequence
  Description of Artificial Sequence: Synthetic oligonucleotide
cccuggacauuaccaagac

SEQ ID NO: 1196975 - RNA, 19 nt, Artificial Sequence
  Description of Artificial Sequence: Synthetic oligonucleotide
cauccgugggaacaucagu

SEQ ID NO: 1196976 - RNA, 19 nt, Artificial Sequence
  Description of Artificial Sequence: Synthetic oligonucleotide
ggguuguaccuccgugaug

SEQ ID NO: 1196977 - RNA, 19 nt, Artificial Sequence
  Description of Artificial Sequence: Synthetic oligonucleotide
gcaucguugagcugcaguu

SEQ ID NO: 1196978 - RNA, 19 nt, Artificial Sequence
  Description of Artificial Sequence: Synthetic oligonucleotide
ggccggucugcagagaaga

SEQ ID NO: 1196979 - RNA, 19 nt, Artificial Sequence
  Description of Artificial Sequence: Synthetic oligonucleotide
ccaaagcacagaggacacg

SEQ ID NO: 1196980 - RNA, 19 nt, Artificial Sequence
  Description of Artificial Sequence: Synthetic oligonucleotide
ggcauuugcgaagccgaca

SEQ ID NO: 1196981 - RNA, 19 nt, Artificial Sequence
  Description of Artificial Sequence: Synthetic oligonucleotide
gguuguaacugaaauccuu

SEQ ID NO: 1196982 - RNA, 19 nt, Artificial Sequence
  Description of Artificial Sequence: Synthetic oligonucleotide
cuugcucugaauggacgcu

SEQ ID NO: 1196983 - RNA, 19 nt, Artificial Sequence
  Description of Artificial Sequence: Synthetic oligonucleotide
cgacacuccuggcauuucc

SEQ ID NO: 1196984 - RNA, 19 nt, Artificial Sequence
  Description of Artificial Sequence: Synthetic oligonucleotide
ugaugacacugcggcggaa

SEQ ID NO: 1196985 - RNA, 19 nt, Artificial Sequence
  Description of Artificial Sequence: Synthetic oligonucleotide
ucagucacacggggcccaa

SEQ ID NO: 1196986 - RNA, 19 nt, Artificial Sequence
  Description of Artificial Sequence: Synthetic oligonucleotide
ccggucugcagagaagaug

SEQ ID NO: 1196987 - RNA, 19 nt, Artificial Sequence
  Description of Artificial Sequence: Synthetic oligonucleotide
cacauugggccggucugca

SEQ ID NO: 1196988 - RNA, 19 nt, Artificial Sequence
  Description of Artificial Sequence: Synthetic oligonucleotide
cagaguccggaggcucacc

SEQ ID NO: 1196989 - RNA, 19 nt, Artificial Sequence
  Description of Artificial Sequence: Synthetic oligonucleotide
ggcgaagcgcaaacacuug

SEQ ID NO: 1196990 - RNA, 19 nt, Artificial Sequence
  Description of Artificial Sequence: Synthetic oligonucleotide
cugcacauugggccggucu

SEQ ID NO: 1196991 - RNA, 19 nt, Artificial Sequence
  Description of Artificial Sequence: Synthetic oligonucleotide
cuuccacaacuccguugca

SEQ ID NO: 1196992 - RNA, 19 nt, Artificial Sequence
  Description of Artificial Sequence: Synthetic oligonucleotide
cacauucguagguccccaa

SEQ ID NO: 1196993 - RNA, 19 nt, Artificial Sequence
  Description of Artificial Sequence: Synthetic oligonucleotide
ccguggagucuccagccac

SEQ ID NO: 1196994 - RNA, 19 nt, Artificial Sequence
  Description of Artificial Sequence: Synthetic oligonucleotide
gggccuccacauaugugug

SEQ ID NO: 1196995 - RNA, 19 nt, Artificial Sequence
  Description of Artificial Sequence: Synthetic oligonucleotide
uccgggcccucgaggcgga

SEQ ID NO: 1196996 - RNA, 19 nt, Artificial Sequence
  Description of Artificial Sequence: Synthetic oligonucleotide
uuccgcuuuuguggacgaa

SEQ ID NO: 1196997 - RNA, 19 nt, Artificial Sequence
  Description of Artificial Sequence: Synthetic oligonucleotide
ccaaggcgugacucgaaga

SEQ ID NO: 1196998 - RNA, 19 nt, Artificial Sequence
  Description of Artificial Sequence: Synthetic oligonucleotide
gguguccauggggcagugg

SEQ ID NO: 1196999 - RNA, 19 nt, Artificial Sequence
  Description of Artificial Sequence: Synthetic oligonucleotide
cauagcgugcucccuugau

SEQ ID NO: 1197000 - RNA, 19 nt, Artificial Sequence
  Description of Artificial Sequence: Synthetic oligonucleotide
cgcuacucagaguccggag

SEQ ID NO: 1197001 - RNA, 19 nt, Artificial Sequence
  Description of Artificial Sequence: Synthetic oligonucleotide
ggaucuccuucacccagcu

SEQ ID NO: 1197002 - RNA, 19 nt, Artificial Sequence
  Description of Artificial Sequence: Synthetic oligonucleotide
cgugcacaucccaaaucuc

SEQ ID NO: 1197003 - RNA, 19 nt, Artificial Sequence
  Description of Artificial Sequence: Synthetic oligonucleotide
agccgacacuccuggcauu

SEQ ID NO: 1197004 - RNA, 19 nt, Artificial Sequence
  Description of Artificial Sequence: Synthetic oligonucleotide
cccugcuuuggcaaagucu

SEQ ID NO: 1197005 - RNA, 19 nt, Artificial Sequence
  Description of Artificial Sequence: Synthetic oligonucleotide
cagacacgauggccagcuc

SEQ ID NO: 1197006 - RNA, 19 nt, Artificial Sequence
  Description of Artificial Sequence: Synthetic oligonucleotide
ggcauuuccgccgcaugua

SEQ ID NO: 1197007 - RNA, 19 nt, Artificial Sequence
  Description of Artificial Sequence: Synthetic oligonucleotide
gcacauucguaggucccca

SEQ ID NO: 1197008 - RNA, 19 nt, Artificial Sequence
  Description of Artificial Sequence: Synthetic oligonucleotide
gcgugacucgaagacgguc

SEQ ID NO: 1197009 - RNA, 19 nt, Artificial Sequence
  Description of Artificial Sequence: Synthetic oligonucleotide
ccggaggcucaccaacuuc

SEQ ID NO: 1197010 - RNA, 19 nt, Artificial Sequence
  Description of Artificial Sequence: Synthetic oligonucleotide
cgugacucgaagacggucu

SEQ ID NO: 1197011 - RNA, 19 nt, Artificial Sequence
  Description of Artificial Sequence: Synthetic oligonucleotide
caacuccguugcagaguca

SEQ ID NO: 1197012 - RNA, 19 nt, Artificial Sequence
  Description of Artificial Sequence: Synthetic oligonucleotide
cccucgaggcggacagcgg

SEQ ID NO: 1197013 - RNA, 19 nt, Artificial Sequence
  Description of Artificial Sequence: Synthetic oligonucleotide
cagcaucguugagcugcag

SEQ ID NO: 1197014 - RNA, 19 nt, Artificial Sequence
  Description of Artificial Sequence: Synthetic oligonucleotide
gggccaaggcgugacucga

SEQ ID NO: 1197015 - RNA, 19 nt, Artificial Sequence
  Description of Artificial Sequence: Synthetic oligonucleotide
gggccggucugcagagaag

SEQ ID NO: 1197016 - RNA, 19 nt, Artificial Sequence
  Description of Artificial Sequence: Synthetic oligonucleotide
gcgcaaacacuugcucuga

SEQ ID NO: 1197017 - RNA, 19 nt, Artificial Sequence
  Description of Artificial Sequence: Synthetic oligonucleotide
cgaagccgacacuccuggc

SEQ ID NO: 1197018 - RNA, 19 nt, Artificial Sequence
  Description of Artificial Sequence: Synthetic oligonucleotide
ggccuccacauaugugugu

SEQ ID NO: 1197019 - RNA, 19 nt, Artificial Sequence
  Description of Artificial Sequence: Synthetic oligonucleotide
cgugggaacaucagucggu

SEQ ID NO: 1197020 - RNA, 19 nt, Artificial Sequence
  Description of Artificial Sequence: Synthetic oligonucleotide
ggacgaagcucuguagguu

SEQ ID NO: 1197021 - RNA, 19 nt, Artificial Sequence
  Description of Artificial Sequence: Synthetic oligonucleotide
ugcccgccuggaggcauuu

SEQ ID NO: 1197022 - RNA, 19 nt, Artificial Sequence
  Description of Artificial Sequence: Synthetic oligonucleotide
cgccuggaggcauuugcga

SEQ ID NO: 1197023 - RNA, 19 nt, Artificial Sequence
  Description of Artificial Sequence: Synthetic oligonucleotide
gucgggcuucccggcucug

SEQ ID NO: 1197024 - RNA, 19 nt, Artificial Sequence
  Description of Artificial Sequence: Synthetic oligonucleotide
ccugcaggcgaagcgcaaa

SEQ ID NO: 1197025 - RNA, 19 nt, Artificial Sequence
  Description of Artificial Sequence: Synthetic oligonucleotide
cucucgcucccaggguugu

SEQ ID NO: 1197026 - RNA, 19 nt, Artificial Sequence
  Description of Artificial Sequence: Synthetic oligonucleotide
cgaggcggacagcgggcag

SEQ ID NO: 1197027 - RNA, 19 nt, Artificial Sequence
  Description of Artificial Sequence: Synthetic oligonucleotide
ccagaagcaucaccucaau

SEQ ID NO: 1197028 - RNA, 19 nt, Artificial Sequence
  Description of Artificial Sequence: Synthetic oligonucleotide
augcccgccuggaggcauu

SEQ ID NO: 1197029 - RNA, 19 nt, Artificial Sequence
  Description of Artificial Sequence: Synthetic oligonucleotide
ggccaaggcgugacucgaa

SEQ ID NO: 1197030 - RNA, 19 nt, Artificial Sequence
  Description of Artificial Sequence: Synthetic oligonucleotide
gccgcauguagguguccau

SEQ ID NO: 1197031 - RNA, 19 nt, Artificial Sequence
  Description of Artificial Sequence: Synthetic oligonucleotide
ccgacacuccuggcauuuc

SEQ ID NO: 1197032 - RNA, 19 nt, Artificial Sequence
  Description of Artificial Sequence: Synthetic oligonucleotide
gccgacacuccuggcauuu

SEQ ID NO: 1197033 - RNA, 19 nt, Artificial Sequence
  Description of Artificial Sequence: Synthetic oligonucleotide
gcuucccggcucugagggu

SEQ ID NO: 1197034 - RNA, 19 nt, Artificial Sequence
  Description of Artificial Sequence: Synthetic oligonucleotide
ggcgugacucgaagacggu

SEQ ID NO: 1197035 - RNA, 19 nt, Artificial Sequence
  Description of Artificial Sequence: Synthetic oligonucleotide
ccucaaucgcagaggucuu

SEQ ID NO: 1197036 - RNA, 19 nt, Artificial Sequence
  Description of Artificial Sequence: Synthetic oligonucleotide
ccugcacauugggccgguc

SEQ ID NO: 1197037 - RNA, 19 nt, Artificial Sequence
  Description of Artificial Sequence: Synthetic oligonucleotide
gcccgccuggaggcauuug

SEQ ID NO: 1197038 - RNA, 19 nt, Artificial Sequence
  Description of Artificial Sequence: Synthetic oligonucleotide
gccggucugcagagaagau

SEQ ID NO: 1197039 - RNA, 19 nt, Artificial Sequence
  Description of Artificial Sequence: Synthetic oligonucleotide
cguugagcugcaguucauu

SEQ ID NO: 1197040 - RNA, 19 nt, Artificial Sequence
  Description of Artificial Sequence: Synthetic oligonucleotide
cccagcucucaggaauguu

SEQ ID NO: 1197041 - RNA, 19 nt, Artificial Sequence
  Description of Artificial Sequence: Synthetic oligonucleotide
cgggcccucgaggcggaca

SEQ ID NO: 1197042 - RNA, 19 nt, Artificial Sequence
  Description of Artificial Sequence: Synthetic oligonucleotide
ccgggcccucgaggcggac

SEQ ID NO: 1197043 - RNA, 19 nt, Artificial Sequence
  Description of Artificial Sequence: Synthetic oligonucleotide
ugauuuaaaucucugaagg

SEQ ID NO: 1197044 - RNA, 19 nt, Artificial Sequence
  Description of Artificial Sequence: Synthetic oligonucleotide
uugaaaauauuuuaguccg

SEQ ID NO: 1197045 - RNA, 19 nt, Artificial Sequence
  Description of Artificial Sequence: Synthetic oligonucleotide
aaagcaugcaugcugaccg

SEQ ID NO: 1197046 - RNA, 19 nt, Artificial Sequence
  Description of Artificial Sequence: Synthetic oligonucleotide
acuguuacuauugacaugc

SEQ ID NO: 1197047 - RNA, 19 nt, Artificial Sequence
  Description of Artificial Sequence: Synthetic oligonucleotide
uuuugcaccagaaauaagc

SEQ ID NO: 1197048 - RNA, 19 nt, Artificial Sequence
  Description of Artificial Sequence: Synthetic oligonucleotide
aaggagaucuguuugaugu

SEQ ID NO: 1197049 - RNA, 19 nt, Artificial Sequence
  Description of Artificial Sequence: Synthetic oligonucleotide
acuauugacaugccaagcc

SEQ ID NO: 1197050 - RNA, 19 nt, Artificial Sequence
  Description of Artificial Sequence: Synthetic oligonucleotide
uuuugauagcguuugauug

SEQ ID NO: 1197051 - RNA, 19 nt, Artificial Sequence
  Description of Artificial Sequence: Synthetic oligonucleotide
ggaguuauaauucugcacg

SEQ ID NO: 1197052 - RNA, 19 nt, Artificial Sequence
  Description of Artificial Sequence: Synthetic oligonucleotide
uuuucaaugaacuggagua

SEQ ID NO: 1197053 - RNA, 19 nt, Artificial Sequence
  Description of Artificial Sequence: Synthetic oligonucleotide
uuaguuuaggguccgaggc

SEQ ID NO: 1197054 - RNA, 19 nt, Artificial Sequence
  Description of Artificial Sequence: Synthetic oligonucleotide
uguucuaacaauguaaaac

SEQ ID NO: 1197055 - RNA, 19 nt, Artificial Sequence
  Description of Artificial Sequence: Synthetic oligonucleotide
caugcuaaaagcaugaaca

SEQ ID NO: 1197056 - RNA, 19 nt, Artificial Sequence
  Description of Artificial Sequence: Synthetic oligonucleotide
uugauugauaacuuuaggu

SEQ ID NO: 1197057 - RNA, 19 nt, Artificial Sequence
  Description of Artificial Sequence: Synthetic oligonucleotide
aauccacucaaagagucgc

SEQ ID NO: 1197058 - RNA, 19 nt, Artificial Sequence
  Description of Artificial Sequence: Synthetic oligonucleotide
uccuuuuggauuaaguuca

SEQ ID NO: 1197059 - RNA, 19 nt, Artificial Sequence
  Description of Artificial Sequence: Synthetic oligonucleotide
aaauaaagcaucaaacacu

SEQ ID NO: 1197060 - RNA, 19 nt, Artificial Sequence
  Description of Artificial Sequence: Synthetic oligonucleotide
uuauaauucugcacgauaa

SEQ ID NO: 1197061 - RNA, 19 nt, Artificial Sequence
  Description of Artificial Sequence: Synthetic oligonucleotide
auaauucugcacgauaacc

SEQ ID NO: 1197062 - RNA, 19 nt, Artificial Sequence
  Description of Artificial Sequence: Synthetic oligonucleotide
uuugcaagaugcuugauaa

SEQ ID NO: 1197063 - RNA, 19 nt, Artificial Sequence
  Description of Artificial Sequence: Synthetic oligonucleotide
uuuaaaucucugaaggaga

SEQ ID NO: 1197064 - RNA, 19 nt, Artificial Sequence
  Description of Artificial Sequence: Synthetic oligonucleotide
ucuaacaauguaaaacugu

SEQ ID NO: 1197065 - RNA, 19 nt, Artificial Sequence
  Description of Artificial Sequence: Synthetic oligonucleotide
cuagucuaaaacacaaggg

SEQ ID NO: 1197066 - RNA, 19 nt, Artificial Sequence
  Description of Artificial Sequence: Synthetic oligonucleotide
aaaauccacucaaagaguc

SEQ ID NO: 1197067 - RNA, 19 nt, Artificial Sequence
  Description of Artificial Sequence: Synthetic oligonucleotide
aggccauauaaucugauuc

SEQ ID NO: 1197068 - RNA, 19 nt, Artificial Sequence
  Description of Artificial Sequence: Synthetic oligonucleotide
ugcacuguuacuauugaca

SEQ ID NO: 1197069 - RNA, 19 nt, Artificial Sequence
  Description of Artificial Sequence: Synthetic oligonucleotide
gauugauaacuuuagguuc

SEQ ID NO: 1197070 - RNA, 19 nt, Artificial Sequence
  Description of Artificial Sequence: Synthetic oligonucleotide
aaaagcaugcaugcugacc

SEQ ID NO: 1197071 - RNA, 19 nt, Artificial Sequence
  Description of Artificial Sequence: Synthetic oligonucleotide
aauagagguguuaaaauga

SEQ ID NO: 1197072 - RNA, 19 nt, Artificial Sequence
  Description of Artificial Sequence: Synthetic oligonucleotide
auauuuuaguccgaaaguc

SEQ ID NO: 1197073 - RNA, 19 nt, Artificial Sequence
  Description of Artificial Sequence: Synthetic oligonucleotide
gacaaaagcaugcaugcug

SEQ ID NO: 1197074 - RNA, 19 nt, Artificial Sequence
  Description of Artificial Sequence: Synthetic oligonucleotide
ucugauucauuuucaauga

SEQ ID NO: 1197075 - RNA, 19 nt, Artificial Sequence
  Description of Artificial Sequence: Synthetic oligonucleotide
aacgaaggcucccagcccg

SEQ ID NO: 1197076 - RNA, 19 nt, Artificial Sequence
  Description of Artificial Sequence: Synthetic oligonucleotide
ugauugauaacuuuagguu

SEQ ID NO: 1197077 - RNA, 19 nt, Artificial Sequence
  Description of Artificial Sequence: Synthetic oligonucleotide
uccauuaagucuccuagug

SEQ ID NO: 1197078 - RNA, 19 nt, Artificial Sequence
  Description of Artificial Sequence: Synthetic oligonucleotide
agaguauguaggcuggaac

SEQ ID NO: 1197079 - RNA, 19 nt, Artificial Sequence
  Description of Artificial Sequence: Synthetic oligonucleotide
ucuguaaggccauauaauc

SEQ ID NO: 1197080 - RNA, 19 nt, Artificial Sequence
  Description of Artificial Sequence: Synthetic oligonucleotide
auaagccucauuuucucuc

SEQ ID NO: 1197081 - RNA, 19 nt, Artificial Sequence
  Description of Artificial Sequence: Synthetic oligonucleotide
cacagaguaaccauaugcc

SEQ ID NO: 1197082 - RNA, 19 nt, Artificial Sequence
  Description of Artificial Sequence: Synthetic oligonucleotide
uucuguguaacgaaggcuc

SEQ ID NO: 1197083 - RNA, 19 nt, Artificial Sequence
  Description of Artificial Sequence: Synthetic oligonucleotide
accgguacaagugagagag

SEQ ID NO: 1197084 - RNA, 19 nt, Artificial Sequence
  Description of Artificial Sequence: Synthetic oligonucleotide
aaucccuccacgucugcac

SEQ ID NO: 1197085 - RNA, 19 nt, Artificial Sequence
  Description of Artificial Sequence: Synthetic oligonucleotide
cacuucaaagccaaucugg

SEQ ID NO: 1197086 - RNA, 19 nt, Artificial Sequence
  Description of Artificial Sequence: Synthetic oligonucleotide
caauagagguguuaaaaug

SEQ ID NO: 1197087 - RNA, 19 nt, Artificial Sequence
  Description of Artificial Sequence: Synthetic oligonucleotide
cagcugaugggcaagaacc

SEQ ID NO: 1197088 - RNA, 19 nt, Artificial Sequence
  Description of Artificial Sequence: Synthetic oligonucleotide
gaccaaguuagcaauagag

SEQ ID NO: 1197089 - RNA, 19 nt, Artificial Sequence
  Description of Artificial Sequence: Synthetic oligonucleotide
ugcaagaugcuugauaagc

SEQ ID NO: 1197090 - RNA, 19 nt, Artificial Sequence
  Description of Artificial Sequence: Synthetic oligonucleotide
caagauggaguuauaauuc

SEQ ID NO: 1197091 - RNA, 19 nt, Artificial Sequence
  Description of Artificial Sequence: Synthetic oligonucleotide
uuugauagcguuugauuga

SEQ ID NO: 1197092 - RNA, 19 nt, Artificial Sequence
  Description of Artificial Sequence: Synthetic oligonucleotide
uuacuauugacaugccaag

SEQ ID NO: 1197093 - RNA, 19 nt, Artificial Sequence
  Description of Artificial Sequence: Synthetic oligonucleotide
ugcuugauaagccucauuu

SEQ ID NO: 1197094 - RNA, 19 nt, Artificial Sequence
  Description of Artificial Sequence: Synthetic oligonucleotide
uuuccacaugcuaaaagca

SEQ ID NO: 1197095 - RNA, 19 nt, Artificial Sequence
  Description of Artificial Sequence: Synthetic oligonucleotide
uaaccauaugcccaguugu

SEQ ID NO: 1197096 - RNA, 19 nt, Artificial Sequence
  Description of Artificial Sequence: Synthetic oligonucleotide
ucucucuuagagcagaguc

SEQ ID NO: 1197097 - RNA, 19 nt, Artificial Sequence
  Description of Artificial Sequence: Synthetic oligonucleotide
ugcacgauaaccucaccag

SEQ ID NO: 1197098 - RNA, 19 nt, Artificial Sequence
  Description of Artificial Sequence: Synthetic oligonucleotide
aaguggcuucacuaagagc

SEQ ID NO: 1197099 - RNA, 19 nt, Artificial Sequence
  Description of Artificial Sequence: Synthetic oligonucleotide
ugcgguagugagaugagcc

SEQ ID NO: 1197100 - RNA, 19 nt, Artificial Sequence
  Description of Artificial Sequence: Synthetic oligonucleotide
cuuaguuuaggguccgagg

SEQ ID NO: 1197101 - RNA, 19 nt, Artificial Sequence
  Description of Artificial Sequence: Synthetic oligonucleotide
gauggaguuauaauucugc

SEQ ID NO: 1197102 - RNA, 19 nt, Artificial Sequence
  Description of Artificial Sequence: Synthetic oligonucleotide
uuuggauuaaguucauuau

SEQ ID NO: 1197103 - RNA, 19 nt, Artificial Sequence
  Description of Artificial Sequence: Synthetic oligonucleotide
ugucucaaaugcuugagaa

SEQ ID NO: 1197104 - RNA, 19 nt, Artificial Sequence
  Description of Artificial Sequence: Synthetic oligonucleotide
guaacgaaggcucccagcc

SEQ ID NO: 1197105 - RNA, 19 nt, Artificial Sequence
  Description of Artificial Sequence: Synthetic oligonucleotide
agaugagccguccucagag

SEQ ID NO: 1197106 - RNA, 19 nt, Artificial Sequence
  Description of Artificial Sequence: Synthetic oligonucleotide
uugauaagccucauuuucu

SEQ ID NO: 1197107 - RNA, 19 nt, Artificial Sequence
  Description of Artificial Sequence: Synthetic oligonucleotide
agcaugaacaggcuccaac

SEQ ID NO: 1197108 - RNA, 19 nt, Artificial Sequence
  Description of Artificial Sequence: Synthetic oligonucleotide
ugaacgugcuguaugccag

SEQ ID NO: 1197109 - RNA, 19 nt, Artificial Sequence
  Description of Artificial Sequence: Synthetic oligonucleotide
agagguguuaaaaugaaga

SEQ ID NO: 1197110 - RNA, 19 nt, Artificial Sequence
  Description of Artificial Sequence: Synthetic oligonucleotide
uccacaugcuaaaagcaug

SEQ ID NO: 1197111 - RNA, 19 nt, Artificial Sequence
  Description of Artificial Sequence: Synthetic oligonucleotide
ucuuagagcagaguccagg

SEQ ID NO: 1197112 - RNA, 19 nt, Artificial Sequence
  Description of Artificial Sequence: Synthetic oligonucleotide
uuguggacagacauuuugc

SEQ ID NO: 1197113 - RNA, 19 nt, Artificial Sequence
  Description of Artificial Sequence: Synthetic oligonucleotide
uagcguuugauugauaacu

SEQ ID NO: 1197114 - RNA, 19 nt, Artificial Sequence
  Description of Artificial Sequence: Synthetic oligonucleotide
uccauuccaaaucuugugu

SEQ ID NO: 1197115 - RNA, 19 nt, Artificial Sequence
  Description of Artificial Sequence: Synthetic oligonucleotide
uauaauucugcacgauaac

SEQ ID NO: 1197116 - RNA, 19 nt, Artificial Sequence
  Description of Artificial Sequence: Synthetic oligonucleotide
uaggccuagucuaaaacac

SEQ ID NO: 1197117 - RNA, 19 nt, Artificial Sequence
  Description of Artificial Sequence: Synthetic oligonucleotide
auagcguuugauugauaac

SEQ ID NO: 1197118 - RNA, 19 nt, Artificial Sequence
  Description of Artificial Sequence: Synthetic oligonucleotide
ugcuaaaagcaugaacagg

SEQ ID NO: 1197119 - RNA, 19 nt, Artificial Sequence
  Description of Artificial Sequence: Synthetic oligonucleotide
agcaaacauauuccaugcc

SEQ ID NO: 1197120 - RNA, 19 nt, Artificial Sequence
  Description of Artificial Sequence: Synthetic oligonucleotide
caaguuagcaauagaggug

SEQ ID NO: 1197121 - RNA, 19 nt, Artificial Sequence
  Description of Artificial Sequence: Synthetic oligonucleotide
uuuccaucggccagacugg

SEQ ID NO: 1197122 - RNA, 19 nt, Artificial Sequence
  Description of Artificial Sequence: Synthetic oligonucleotide
uguuacuauugacaugcca

SEQ ID NO: 1197123 - RNA, 19 nt, Artificial Sequence
  Description of Artificial Sequence: Synthetic oligonucleotide
auugagugucccuaaauaa

SEQ ID NO: 1197124 - RNA, 19 nt, Artificial Sequence
  Description of Artificial Sequence: Synthetic oligonucleotide
uguggacagacauuuugcc

SEQ ID NO: 1197125 - RNA, 19 nt, Artificial Sequence
  Description of Artificial Sequence: Synthetic oligonucleotide
aguccgaaaguccugugag

SEQ ID NO: 1197126 - RNA, 19 nt, Artificial Sequence
  Description of Artificial Sequence: Synthetic oligonucleotide
gauuuaaaucucugaagga

SEQ ID NO: 1197127 - RNA, 19 nt, Artificial Sequence
  Description of Artificial Sequence: Synthetic oligonucleotide
ccuagucuaaaacacaagg

SEQ ID NO: 1197128 - RNA, 19 nt, Artificial Sequence
  Description of Artificial Sequence: Synthetic oligonucleotide
uuaaauucaggguggggaa

SEQ ID NO: 1197129 - RNA, 19 nt, Artificial Sequence
  Description of Artificial Sequence: Synthetic oligonucleotide
gaguauguaggcuggaaca

SEQ ID NO: 1197130 - RNA, 19 nt, Artificial Sequence
  Description of Artificial Sequence: Synthetic oligonucleotide
augcuaaaagcaugaacag

SEQ ID NO: 1197131 - RNA, 19 nt, Artificial Sequence
  Description of Artificial Sequence: Synthetic oligonucleotide
uuagcaauagagguguuaa

SEQ ID NO: 1197132 - RNA, 19 nt, Artificial Sequence
  Description of Artificial Sequence: Synthetic oligonucleotide
cuuguggacagacauuuug

SEQ ID NO: 1197133 - RNA, 19 nt, Artificial Sequence
  Description of Artificial Sequence: Synthetic oligonucleotide
uauguaggcuggaacacgu

SEQ ID NO: 1197134 - RNA, 19 nt, Artificial Sequence
  Description of Artificial Sequence: Synthetic oligonucleotide
auuaaguucauuauagauu

SEQ ID NO: 1197135 - RNA, 19 nt, Artificial Sequence
  Description of Artificial Sequence: Synthetic oligonucleotide
gauuaaguucauuauagau

SEQ ID NO: 1197136 - RNA, 19 nt, Artificial Sequence
  Description of Artificial Sequence: Synthetic oligonucleotide
ugugggauguuacggacac

SEQ ID NO: 1197137 - RNA, 19 nt, Artificial Sequence
  Description of Artificial Sequence: Synthetic oligonucleotide
uccucuuaguuuagggucc

SEQ ID NO: 1197138 - RNA, 19 nt, Artificial Sequence
  Description of Artificial Sequence: Synthetic oligonucleotide
ugaagaccgguacaaguga

SEQ ID NO: 1197139 - RNA, 19 nt, Artificial Sequence
  Description of Artificial Sequence: Synthetic oligonucleotide
uauugacaugccaagccac

SEQ ID NO: 1197140 - RNA, 19 nt, Artificial Sequence
  Description of Artificial Sequence: Synthetic oligonucleotide
cucucuuagagcagagucc

SEQ ID NO: 1197141 - RNA, 19 nt, Artificial Sequence
  Description of Artificial Sequence: Synthetic oligonucleotide
uggaguuauaauucugcac

SEQ ID NO: 1197142 - RNA, 19 nt, Artificial Sequence
  Description of Artificial Sequence: Synthetic oligonucleotide
cuucgguccaugcacagag

SEQ ID NO: 1197143 - RNA, 19 nt, Artificial Sequence
  Description of Artificial Sequence: Synthetic oligonucleotide
accguaacuggccacaacu

SEQ ID NO: 1197144 - RNA, 19 nt, Artificial Sequence
  Description of Artificial Sequence: Synthetic oligonucleotide
ucaaaugcuugagaaggcc

SEQ ID NO: 1197145 - RNA, 19 nt, Artificial Sequence
  Description of Artificial Sequence: Synthetic oligonucleotide
agauucuucaugcuucggu

SEQ ID NO: 1197146 - RNA, 19 nt, Artificial Sequence
  Description of Artificial Sequence: Synthetic oligonucleotide
aaauccacucaaagagucg

SEQ ID NO: 1197147 - RNA, 19 nt, Artificial Sequence
  Description of Artificial Sequence: Synthetic oligonucleotide
acgauaaccucaccaguuc

SEQ ID NO: 1197148 - RNA, 19 nt, Artificial Sequence
  Description of Artificial Sequence: Synthetic oligonucleotide
agccauacucauuaugaug

SEQ ID NO: 1197149 - RNA, 19 nt, Artificial Sequence
  Description of Artificial Sequence: Synthetic oligonucleotide
ugucucugacaaaagcaug

SEQ ID NO: 1197150 - RNA, 19 nt, Artificial Sequence
  Description of Artificial Sequence: Synthetic oligonucleotide
uuuuaguccgaaaguccug

SEQ ID NO: 1197151 - RNA, 19 nt, Artificial Sequence
  Description of Artificial Sequence: Synthetic oligonucleotide
auuauagauucuucaugcu

SEQ ID NO: 1197152 - RNA, 19 nt, Artificial Sequence
  Description of Artificial Sequence: Synthetic oligonucleotide
uguucaucuguuuggcaca

SEQ ID NO: 1197153 - RNA, 19 nt, Artificial Sequence
  Description of Artificial Sequence: Synthetic oligonucleotide
guuacuauugacaugccaa

SEQ ID NO: 1197154 - RNA, 19 nt, Artificial Sequence
  Description of Artificial Sequence: Synthetic oligonucleotide
cucagaguauguaggcugg

SEQ ID NO: 1197155 - RNA, 19 nt, Artificial Sequence
  Description of Artificial Sequence: Synthetic oligonucleotide
auacucauuaugaugaaaa

SEQ ID NO: 1197156 - RNA, 19 nt, Artificial Sequence
  Description of Artificial Sequence: Synthetic oligonucleotide
guaaccauaugcccaguug

SEQ ID NO: 1197157 - RNA, 19 nt, Artificial Sequence
  Description of Artificial Sequence: Synthetic oligonucleotide
ugggucuuuaaaucccucc

SEQ ID NO: 1197158 - RNA, 19 nt, Artificial Sequence
  Description of Artificial Sequence: Synthetic oligonucleotide
uguaacgaaggcucccagc

SEQ ID NO: 1197159 - RNA, 19 nt, Artificial Sequence
  Description of Artificial Sequence: Synthetic oligonucleotide
gauguuacggacacccagc

SEQ ID NO: 1197160 - RNA, 19 nt, Artificial Sequence
  Description of Artificial Sequence: Synthetic oligonucleotide
agagagucaagauggaguu

SEQ ID NO: 1197161 - RNA, 19 nt, Artificial Sequence
  Description of Artificial Sequence: Synthetic oligonucleotide
ucuuaguuuaggguccgag

SEQ ID NO: 1197162 - RNA, 19 nt, Artificial Sequence
  Description of Artificial Sequence: Synthetic oligonucleotide
gaaaggaggccgcaccugc

SEQ ID NO: 1197163 - RNA, 19 nt, Artificial Sequence
  Description of Artificial Sequence: Synthetic oligonucleotide
cggagaaugaccaaguuag

SEQ ID NO: 1197164 - RNA, 19 nt, Artificial Sequence
  Description of Artificial Sequence: Synthetic oligonucleotide
auuuuaguccgaaaguccu

SEQ ID NO: 1197165 - RNA, 19 nt, Artificial Sequence
  Description of Artificial Sequence: Synthetic oligonucleotide
acaagcuaggccuagucua

SEQ ID NO: 1197166 - RNA, 19 nt, Artificial Sequence
  Description of Artificial Sequence: Synthetic oligonucleotide
agacccuugucucugacaa

SEQ ID NO: 1197167 - RNA, 19 nt, Artificial Sequence
  Description of Artificial Sequence: Synthetic oligonucleotide
ugauaagccucauuuucuc

SEQ ID NO: 1197168 - RNA, 19 nt, Artificial Sequence
  Description of Artificial Sequence: Synthetic oligonucleotide
auggaguuauaauucugca

SEQ ID NO: 1197169 - RNA, 19 nt, Artificial Sequence
  Description of Artificial Sequence: Synthetic oligonucleotide
cuuguaacuucuguguaac

SEQ ID NO: 1197170 - RNA, 19 nt, Artificial Sequence
  Description of Artificial Sequence: Synthetic oligonucleotide
cauauaaucugauucauuu

SEQ ID NO: 1197171 - RNA, 19 nt, Artificial Sequence
  Description of Artificial Sequence: Synthetic oligonucleotide
uuguaacuucuguguaacg

SEQ ID NO: 1197172 - RNA, 19 nt, Artificial Sequence
  Description of Artificial Sequence: Synthetic oligonucleotide
uuuaguccgaaaguccugu

SEQ ID NO: 1197173 - RNA, 19 nt, Artificial Sequence
  Description of Artificial Sequence: Synthetic oligonucleotide
agcaauagagguguuaaaa

SEQ ID NO: 1197174 - RNA, 19 nt, Artificial Sequence
  Description of Artificial Sequence: Synthetic oligonucleotide
uuucaaugaacuggaguac

SEQ ID NO: 1197175 - RNA, 19 nt, Artificial Sequence
  Description of Artificial Sequence: Synthetic oligonucleotide
gucucugacaaaagcaugc

SEQ ID NO: 1197176 - RNA, 19 nt, Artificial Sequence
  Description of Artificial Sequence: Synthetic oligonucleotide
uucaaugaacuggaguacu

SEQ ID NO: 1197177 - RNA, 19 nt, Artificial Sequence
  Description of Artificial Sequence: Synthetic oligonucleotide
gucaacaagaacagcccgg

SEQ ID NO: 1197178 - RNA, 19 nt, Artificial Sequence
  Description of Artificial Sequence: Synthetic oligonucleotide
cucagaacucuugauguag

SEQ ID NO: 1197179 - RNA, 19 nt, Artificial Sequence
  Description of Artificial Sequence: Synthetic oligonucleotide
uccgaaaguccugugaggu

SEQ ID NO: 1197180 - RNA, 19 nt, Artificial Sequence
  Description of Artificial Sequence: Synthetic oligonucleotide
gcuccauuaagucuccuag

SEQ ID NO: 1197181 - RNA, 19 nt, Artificial Sequence
  Description of Artificial Sequence: Synthetic oligonucleotide
agagucaagauggaguuau

SEQ ID NO: 1197182 - RNA, 19 nt, Artificial Sequence
  Description of Artificial Sequence: Synthetic oligonucleotide
aauguaggcuuuggaagca

SEQ ID NO: 1197183 - RNA, 19 nt, Artificial Sequence
  Description of Artificial Sequence: Synthetic oligonucleotide
cuaggccuagucuaaaaca

SEQ ID NO: 1197184 - RNA, 19 nt, Artificial Sequence
  Description of Artificial Sequence: Synthetic oligonucleotide
auauaaucugauucauuuu

SEQ ID NO: 1197185 - RNA, 19 nt, Artificial Sequence
  Description of Artificial Sequence: Synthetic oligonucleotide
gaaggagaucuguuugaug

SEQ ID NO: 1197186 - RNA, 19 nt, Artificial Sequence
  Description of Artificial Sequence: Synthetic oligonucleotide
ugaccguauuuccaucggc

SEQ ID NO: 1197187 - RNA, 19 nt, Artificial Sequence
  Description of Artificial Sequence: Synthetic oligonucleotide
cagaguaaccauaugccca

SEQ ID NO: 1197188 - RNA, 19 nt, Artificial Sequence
  Description of Artificial Sequence: Synthetic oligonucleotide
gggaauggaugacugacag

SEQ ID NO: 1197189 - RNA, 19 nt, Artificial Sequence
  Description of Artificial Sequence: Synthetic oligonucleotide
gauaaccucaccaguucug

SEQ ID NO: 1197190 - RNA, 19 nt, Artificial Sequence
  Description of Artificial Sequence: Synthetic oligonucleotide
gucaaguggcuucacuaag

SEQ ID NO: 1197191 - RNA, 19 nt, Artificial Sequence
  Description of Artificial Sequence: Synthetic oligonucleotide
agugagagagagucaagau

SEQ ID NO: 1197192 - RNA, 19 nt, Artificial Sequence
  Description of Artificial Sequence: Synthetic oligonucleotide
uggccagcuuuugauagcg

SEQ ID NO: 1197193 - RNA, 19 nt, Artificial Sequence
  Description of Artificial Sequence: Synthetic oligonucleotide
gagacagggucucguagcc

SEQ ID NO: 1197194 - RNA, 19 nt, Artificial Sequence
  Description of Artificial Sequence: Synthetic oligonucleotide
uuaggguccgaggcuaccg

SEQ ID NO: 1197195 - RNA, 19 nt, Artificial Sequence
  Description of Artificial Sequence: Synthetic oligonucleotide
uaguuuaggguccgaggcu

SEQ ID NO: 1197196 - RNA, 19 nt, Artificial Sequence
  Description of Artificial Sequence: Synthetic oligonucleotide
uacuauugacaugccaagc

SEQ ID NO: 1197197 - RNA, 19 nt, Artificial Sequence
  Description of Artificial Sequence: Synthetic oligonucleotide
gaccguauuuccaucggcc

SEQ ID NO: 1197198 - RNA, 19 nt, Artificial Sequence
  Description of Artificial Sequence: Synthetic oligonucleotide
gaggagggcaucugaagac

SEQ ID NO: 1197199 - RNA, 19 nt, Artificial Sequence
  Description of Artificial Sequence: Synthetic oligonucleotide
aaggccauauaaucugauu

SEQ ID NO: 1197200 - RNA, 19 nt, Artificial Sequence
  Description of Artificial Sequence: Synthetic oligonucleotide
ugcuguaugccagaaaguu

SEQ ID NO: 1197201 - RNA, 19 nt, Artificial Sequence
  Description of Artificial Sequence: Synthetic oligonucleotide
ugaccaaguuagcaauaga

SEQ ID NO: 1197202 - RNA, 19 nt, Artificial Sequence
  Description of Artificial Sequence: Synthetic oligonucleotide
agaccgguacaagugagag

SEQ ID NO: 1197203 - RNA, 19 nt, Artificial Sequence
  Description of Artificial Sequence: Synthetic oligonucleotide
uaguggaucccugcgguag

SEQ ID NO: 1197204 - RNA, 19 nt, Artificial Sequence
  Description of Artificial Sequence: Synthetic oligonucleotide
guauguaggcuggaacacg

SEQ ID NO: 1197205 - RNA, 19 nt, Artificial Sequence
  Description of Artificial Sequence: Synthetic oligonucleotide
cuguaugccagaaaguucu

SEQ ID NO: 1197206 - RNA, 19 nt, Artificial Sequence
  Description of Artificial Sequence: Synthetic oligonucleotide
ggauguuacggacacccag

SEQ ID NO: 1197207 - RNA, 19 nt, Artificial Sequence
  Description of Artificial Sequence: Synthetic oligonucleotide
caugccuugcccacgagca

SEQ ID NO: 1197208 - RNA, 19 nt, Artificial Sequence
  Description of Artificial Sequence: Synthetic oligonucleotide
uugcaagaugcuugauaag

SEQ ID NO: 1197209 - RNA, 19 nt, Artificial Sequence
  Description of Artificial Sequence: Synthetic oligonucleotide
cuauugacaugccaagcca

SEQ ID NO: 1197210 - RNA, 19 nt, Artificial Sequence
  Description of Artificial Sequence: Synthetic oligonucleotide
uaacgaaggcucccagccc

SEQ ID NO: 1197211 - RNA, 19 nt, Artificial Sequence
  Description of Artificial Sequence: Synthetic oligonucleotide
gaagaccgguacaagugag

SEQ ID NO: 1197212 - RNA, 19 nt, Artificial Sequence
  Description of Artificial Sequence: Synthetic oligonucleotide
uggggaacuaaaugcucca

SEQ ID NO: 1197213 - RNA, 19 nt, Artificial Sequence
  Description of Artificial Sequence: Synthetic oligonucleotide
gaacuaaaugcuccauuaa

SEQ ID NO: 1197214 - RNA, 19 nt, Artificial Sequence
  Description of Artificial Sequence: Synthetic oligonucleotide
uaaguucauuauagauucu

SEQ ID NO: 1197215 - RNA, 19 nt, Artificial Sequence
  Description of Artificial Sequence: Synthetic oligonucleotide
uccuuguggacagacauuu

SEQ ID NO: 1197216 - RNA, 19 nt, Artificial Sequence
  Description of Artificial Sequence: Synthetic oligonucleotide
ugcacagaguaaccauaug

SEQ ID NO: 1197217 - RNA, 19 nt, Artificial Sequence
  Description of Artificial Sequence: Synthetic oligonucleotide
cacgagcaugucaaguggc

SEQ ID NO: 1197218 - RNA, 19 nt, Artificial Sequence
  Description of Artificial Sequence: Synthetic oligonucleotide
gaaugaccaaguuagcaau

SEQ ID NO: 1197219 - RNA, 19 nt, Artificial Sequence
  Description of Artificial Sequence: Synthetic oligonucleotide
ugaccuccacugugcaugg

SEQ ID NO: 1197220 - RNA, 19 nt, Artificial Sequence
  Description of Artificial Sequence: Synthetic oligonucleotide
acauugagugucccuaaau

SEQ ID NO: 1197221 - RNA, 19 nt, Artificial Sequence
  Description of Artificial Sequence: Synthetic oligonucleotide
caaaugcuugagaaggcca

SEQ ID NO: 1197222 - RNA, 19 nt, Artificial Sequence
  Description of Artificial Sequence: Synthetic oligonucleotide
cacgugaccuccacugugc

SEQ ID NO: 1197223 - RNA, 19 nt, Artificial Sequence
  Description of Artificial Sequence: Synthetic oligonucleotide
accguauuuccaucggcca

SEQ ID NO: 1197224 - RNA, 19 nt, Artificial Sequence
  Description of Artificial Sequence: Synthetic oligonucleotide
gcugaccguauuuccaucg

SEQ ID NO: 1197225 - RNA, 19 nt, Artificial Sequence
  Description of Artificial Sequence: Synthetic oligonucleotide
acggagaaugaccaaguua

SEQ ID NO: 1197226 - RNA, 19 nt, Artificial Sequence
  Description of Artificial Sequence: Synthetic oligonucleotide
ugggcaagaaccugauuua

SEQ ID NO: 1197227 - RNA, 19 nt, Artificial Sequence
  Description of Artificial Sequence: Synthetic oligonucleotide
acacgugaccuccacugug

SEQ ID NO: 1197228 - RNA, 19 nt, Artificial Sequence
  Description of Artificial Sequence: Synthetic oligonucleotide
uuguguacugaugaaugua

SEQ ID NO: 1197229 - RNA, 19 nt, Artificial Sequence
  Description of Artificial Sequence: Synthetic oligonucleotide
guccgaaaguccugugagg

SEQ ID NO: 1197230 - RNA, 19 nt, Artificial Sequence
  Description of Artificial Sequence: Synthetic oligonucleotide
auguuacggacacccagca

SEQ ID NO: 1197231 - RNA, 19 nt, Artificial Sequence
  Description of Artificial Sequence: Synthetic oligonucleotide
cugaccguauuuccaucgg

SEQ ID NO: 1197232 - RNA, 19 nt, Artificial Sequence
  Description of Artificial Sequence: Synthetic oligonucleotide
ucgguccaugcacagagua

SEQ ID NO: 1197233 - RNA, 19 nt, Artificial Sequence
  Description of Artificial Sequence: Synthetic oligonucleotide
ccagucgauaccuucuucc

SEQ ID NO: 1197234 - RNA, 19 nt, Artificial Sequence
  Description of Artificial Sequence: Synthetic oligonucleotide
uuacggacacccagcauuu

SEQ ID NO: 1197235 - RNA, 19 nt, Artificial Sequence
  Description of Artificial Sequence: Synthetic oligonucleotide
gcuauugcuaaccagggcu

SEQ ID NO: 1197236 - RNA, 19 nt, Artificial Sequence
  Description of Artificial Sequence: Synthetic oligonucleotide
cugcacgucuuucccacgg

SEQ ID NO: 1197237 - RNA, 19 nt, Artificial Sequence
  Description of Artificial Sequence: Synthetic oligonucleotide
ggccauauaaucugauuca

SEQ ID NO: 1197238 - RNA, 19 nt, Artificial Sequence
  Description of Artificial Sequence: Synthetic oligonucleotide
cauugagugucccuaaaua

SEQ ID NO: 1197239 - RNA, 19 nt, Artificial Sequence
  Description of Artificial Sequence: Synthetic oligonucleotide
caugcugaccguauuucca

SEQ ID NO: 1197240 - RNA, 19 nt, Artificial Sequence
  Description of Artificial Sequence: Synthetic oligonucleotide
uugauagcguuugauugau

SEQ ID NO: 1197241 - RNA, 19 nt, Artificial Sequence
  Description of Artificial Sequence: Synthetic oligonucleotide
ccauuaagucuccuagugg

SEQ ID NO: 1197242 - RNA, 19 nt, Artificial Sequence
  Description of Artificial Sequence: Synthetic oligonucleotide
uuaguccgaaaguccugug

SEQ ID NO: 1197243 - RNA, 19 nt, Artificial Sequence
  Description of Artificial Sequence: Synthetic oligonucleotide
guuacggacacccagcauu

SEQ ID NO: 1197244 - RNA, 19 nt, Artificial Sequence
  Description of Artificial Sequence: Synthetic oligonucleotide
agauggaguuauaauucug

SEQ ID NO: 1197245 - RNA, 19 nt, Artificial Sequence
  Description of Artificial Sequence: Synthetic oligonucleotide
ugcuaaccagggcugcaga

SEQ ID NO: 1197246 - RNA, 19 nt, Artificial Sequence
  Description of Artificial Sequence: Synthetic oligonucleotide
ugaugggcaagaaccugau

SEQ ID NO: 1197247 - RNA, 19 nt, Artificial Sequence
  Description of Artificial Sequence: Synthetic oligonucleotide
cuuugcaagaugcuugaua

SEQ ID NO: 1197248 - RNA, 19 nt, Artificial Sequence
  Description of Artificial Sequence: Synthetic oligonucleotide
agaugcuugauaagccuca

SEQ ID NO: 1197249 - RNA, 19 nt, Artificial Sequence
  Description of Artificial Sequence: Synthetic oligonucleotide
cacuguuacuauugacaug

SEQ ID NO: 1197250 - RNA, 19 nt, Artificial Sequence
  Description of Artificial Sequence: Synthetic oligonucleotide
aguaaccauaugcccaguu

SEQ ID NO: 1197251 - RNA, 19 nt, Artificial Sequence
  Description of Artificial Sequence: Synthetic oligonucleotide
ugcauggcucaauuuugaa

SEQ ID NO: 1197252 - RNA, 19 nt, Artificial Sequence
  Description of Artificial Sequence: Synthetic oligonucleotide
augcugaccguauuuccau

SEQ ID NO: 1197253 - RNA, 19 nt, Artificial Sequence
  Description of Artificial Sequence: Synthetic oligonucleotide
agucgauaccuucuuccau

SEQ ID NO: 1197254 - RNA, 19 nt, Artificial Sequence
  Description of Artificial Sequence: Synthetic oligonucleotide
caugaacaggcuccaacca

SEQ ID NO: 1197255 - RNA, 19 nt, Artificial Sequence
  Description of Artificial Sequence: Synthetic oligonucleotide
gauaagccucauuuucucu

SEQ ID NO: 1197256 - RNA, 19 nt, Artificial Sequence
  Description of Artificial Sequence: Synthetic oligonucleotide
ugagccguccucagaguau

SEQ ID NO: 1197257 - RNA, 19 nt, Artificial Sequence
  Description of Artificial Sequence: Synthetic oligonucleotide
cuacuuccaggaugcuggg

SEQ ID NO: 1197258 - RNA, 19 nt, Artificial Sequence
  Description of Artificial Sequence: Synthetic oligonucleotide
guacugaugaauguaggcu

SEQ ID NO: 1197259 - RNA, 19 nt, Artificial Sequence
  Description of Artificial Sequence: Synthetic oligonucleotide
ugcuucgguccaugcacag

SEQ ID NO: 1197260 - RNA, 19 nt, Artificial Sequence
  Description of Artificial Sequence: Synthetic oligonucleotide
gaucacacgugaccuccac

SEQ ID NO: 1197261 - RNA, 19 nt, Artificial Sequence
  Description of Artificial Sequence: Synthetic oligonucleotide
gcaagaugcuugauaagcc

SEQ ID NO: 1197262 - RNA, 19 nt, Artificial Sequence
  Description of Artificial Sequence: Synthetic oligonucleotide
gcgguagugagaugagccg

SEQ ID NO: 1197263 - RNA, 19 nt, Artificial Sequence
  Description of Artificial Sequence: Synthetic oligonucleotide
uagcaauagagguguuaaa

SEQ ID NO: 1197264 - RNA, 19 nt, Artificial Sequence
  Description of Artificial Sequence: Synthetic oligonucleotide
cagaaauaagcaucugucu

SEQ ID NO: 1197265 - RNA, 19 nt, Artificial Sequence
  Description of Artificial Sequence: Synthetic oligonucleotide
uguaugccagaaaguucuc

SEQ ID NO: 1197266 - RNA, 19 nt, Artificial Sequence
  Description of Artificial Sequence: Synthetic oligonucleotide
gcaaacauauuccaugccu

SEQ ID NO: 1197267 - RNA, 19 nt, Artificial Sequence
  Description of Artificial Sequence: Synthetic oligonucleotide
aagaccgguacaagugaga

SEQ ID NO: 1197268 - RNA, 19 nt, Artificial Sequence
  Description of Artificial Sequence: Synthetic oligonucleotide
gguccaugcacagaguaac

SEQ ID NO: 1197269 - RNA, 19 nt, Artificial Sequence
  Description of Artificial Sequence: Synthetic oligonucleotide
guaggcuuuggaagcaaac

SEQ ID NO: 1197270 - RNA, 19 nt, Artificial Sequence
  Description of Artificial Sequence: Synthetic oligonucleotide
acgucugcacucugcacgu

SEQ ID NO: 1197271 - RNA, 19 nt, Artificial Sequence
  Description of Artificial Sequence: Synthetic oligonucleotide
aucccugcgguagugagau

SEQ ID NO: 1197272 - RNA, 19 nt, Artificial Sequence
  Description of Artificial Sequence: Synthetic oligonucleotide
gucaagauggaguuauaau

SEQ ID NO: 1197273 - RNA, 19 nt, Artificial Sequence
  Description of Artificial Sequence: Synthetic oligonucleotide
ccaaguuagcaauagaggu

SEQ ID NO: 1197274 - RNA, 19 nt, Artificial Sequence
  Description of Artificial Sequence: Synthetic oligonucleotide
gcuaggccuagucuaaaac

SEQ ID NO: 1197275 - RNA, 19 nt, Artificial Sequence
  Description of Artificial Sequence: Synthetic oligonucleotide
ggaaguguagagagcuggg

SEQ ID NO: 1197276 - RNA, 19 nt, Artificial Sequence
  Description of Artificial Sequence: Synthetic oligonucleotide
ucgauaccuucuuccauuu

SEQ ID NO: 1197277 - RNA, 19 nt, Artificial Sequence
  Description of Artificial Sequence: Synthetic oligonucleotide
auucugcacgauaaccuca

SEQ ID NO: 1197278 - RNA, 19 nt, Artificial Sequence
  Description of Artificial Sequence: Synthetic oligonucleotide
uccacucaaagagucgcau

SEQ ID NO: 1197279 - RNA, 19 nt, Artificial Sequence
  Description of Artificial Sequence: Synthetic oligonucleotide
guguaacgaaggcucccag

SEQ ID NO: 1197280 - RNA, 19 nt, Artificial Sequence
  Description of Artificial Sequence: Synthetic oligonucleotide
gucccuaaauaaagcauca

SEQ ID NO: 1197281 - RNA, 19 nt, Artificial Sequence
  Description of Artificial Sequence: Synthetic oligonucleotide
cuguuacuauugacaugcc

SEQ ID NO: 1197282 - RNA, 19 nt, Artificial Sequence
  Description of Artificial Sequence: Synthetic oligonucleotide
ucuguuuggcacagaucuu

SEQ ID NO: 1197283 - RNA, 19 nt, Artificial Sequence
  Description of Artificial Sequence: Synthetic oligonucleotide
aguuuaggguccgaggcua

SEQ ID NO: 1197284 - RNA, 19 nt, Artificial Sequence
  Description of Artificial Sequence: Synthetic oligonucleotide
cuguguaacgaaggcuccc

SEQ ID NO: 1197285 - RNA, 19 nt, Artificial Sequence
  Description of Artificial Sequence: Synthetic oligonucleotide
uccaucggccagacuggcc

SEQ ID NO: 1197286 - RNA, 19 nt, Artificial Sequence
  Description of Artificial Sequence: Synthetic oligonucleotide
aucugaagaccgguacaag

SEQ ID NO: 1197287 - RNA, 19 nt, Artificial Sequence
  Description of Artificial Sequence: Synthetic oligonucleotide
agcaugucaaguggcuuca

SEQ ID NO: 1197288 - RNA, 19 nt, Artificial Sequence
  Description of Artificial Sequence: Synthetic oligonucleotide
ggaauggaugacugacagc

SEQ ID NO: 1197289 - RNA, 19 nt, Artificial Sequence
  Description of Artificial Sequence: Synthetic oligonucleotide
gagccguccucagaguaug

SEQ ID NO: 1197290 - RNA, 19 nt, Artificial Sequence
  Description of Artificial Sequence: Synthetic oligonucleotide
uaggguccgaggcuaccgu

SEQ ID NO: 1197291 - RNA, 19 nt, Artificial Sequence
  Description of Artificial Sequence: Synthetic oligonucleotide
augagccguccucagagua

SEQ ID NO: 1197292 - RNA, 19 nt, Artificial Sequence
  Description of Artificial Sequence: Synthetic oligonucleotide
uucucucuuagagcagagu

SEQ ID NO: 1197293 - RNA, 19 nt, Artificial Sequence
  Description of Artificial Sequence: Synthetic oligonucleotide
cuuguguacugaugaaugu

SEQ ID NO: 1197294 - RNA, 19 nt, Artificial Sequence
  Description of Artificial Sequence: Synthetic oligonucleotide
gaaccugauuuaaaucucu

SEQ ID NO: 1197295 - RNA, 19 nt, Artificial Sequence
  Description of Artificial Sequence: Synthetic oligonucleotide
cagucgauaccuucuucca

SEQ ID NO: 1197296 - RNA, 19 nt, Artificial Sequence
  Description of Artificial Sequence: Synthetic oligonucleotide
uaccguaacuggccacaac

SEQ ID NO: 1197297 - RNA, 19 nt, Artificial Sequence
  Description of Artificial Sequence: Synthetic oligonucleotide
cuaaaagcaugaacaggcu

SEQ ID NO: 1197298 - RNA, 19 nt, Artificial Sequence
  Description of Artificial Sequence: Synthetic oligonucleotide
ggaucccugcgguagugag

SEQ ID NO: 1197299 - RNA, 19 nt, Artificial Sequence
  Description of Artificial Sequence: Synthetic oligonucleotide
gagaugagccguccucaga

SEQ ID NO: 1197300 - RNA, 19 nt, Artificial Sequence
  Description of Artificial Sequence: Synthetic oligonucleotide
agcuaggccuagucuaaaa

SEQ ID NO: 1197301 - RNA, 19 nt, Artificial Sequence
  Description of Artificial Sequence: Synthetic oligonucleotide
ugcugggaucacacgugac

SEQ ID NO: 1197302 - RNA, 19 nt, Artificial Sequence
  Description of Artificial Sequence: Synthetic oligonucleotide
acggacacccagcauuuua

SEQ ID NO: 1197303 - RNA, 19 nt, Artificial Sequence
  Description of Artificial Sequence: Synthetic oligonucleotide
ccacgagcaugucaagugg

SEQ ID NO: 1197304 - RNA, 19 nt, Artificial Sequence
  Description of Artificial Sequence: Synthetic oligonucleotide
gaacgugcuguaugccaga

SEQ ID NO: 1197305 - RNA, 19 nt, Artificial Sequence
  Description of Artificial Sequence: Synthetic oligonucleotide
caagcuaggccuagucuaa

SEQ ID NO: 1197306 - RNA, 19 nt, Artificial Sequence
  Description of Artificial Sequence: Synthetic oligonucleotide
cccacgagcaugucaagug

SEQ ID NO: 1197307 - RNA, 19 nt, Artificial Sequence
  Description of Artificial Sequence: Synthetic oligonucleotide
ugcugaccguauuuccauc

SEQ ID NO: 1197308 - RNA, 19 nt, Artificial Sequence
  Description of Artificial Sequence: Synthetic oligonucleotide
gaccgguacaagugagaga

SEQ ID NO: 1197309 - RNA, 19 nt, Artificial Sequence
  Description of Artificial Sequence: Synthetic oligonucleotide
guuagcaauagagguguua

SEQ ID NO: 1197310 - RNA, 19 nt, Artificial Sequence
  Description of Artificial Sequence: Synthetic oligonucleotide
aacgugcuguaugccagaa

SEQ ID NO: 1197311 - RNA, 19 nt, Artificial Sequence
  Description of Artificial Sequence: Synthetic oligonucleotide
augcacagaguaaccauau

SEQ ID NO: 1197312 - RNA, 19 nt, Artificial Sequence
  Description of Artificial Sequence: Synthetic oligonucleotide
ugggaucacacgugaccuc

SEQ ID NO: 1197313 - RNA, 19 nt, Artificial Sequence
  Description of Artificial Sequence: Synthetic oligonucleotide
ugccagucgauaccuucuu

SEQ ID NO: 1197314 - RNA, 19 nt, Artificial Sequence
  Description of Artificial Sequence: Synthetic oligonucleotide
cugggucuuuaaaucccuc

SEQ ID NO: 1197315 - RNA, 19 nt, Artificial Sequence
  Description of Artificial Sequence: Synthetic oligonucleotide
aggcuaccguaacuggcca

SEQ ID NO: 1197316 - RNA, 19 nt, Artificial Sequence
  Description of Artificial Sequence: Synthetic oligonucleotide
gguuccaugucaacaagaa

SEQ ID NO: 1197317 - RNA, 19 nt, Artificial Sequence
  Description of Artificial Sequence: Synthetic oligonucleotide
gcaauagagguguuaaaau

SEQ ID NO: 1197318 - RNA, 19 nt, Artificial Sequence
  Description of Artificial Sequence: Synthetic oligonucleotide
ugauagcguuugauugaua

SEQ ID NO: 1197319 - RNA, 19 nt, Artificial Sequence
  Description of Artificial Sequence: Synthetic oligonucleotide
aauucaggguggggaacua

SEQ ID NO: 1197320 - RNA, 19 nt, Artificial Sequence
  Description of Artificial Sequence: Synthetic oligonucleotide
guccaugcacagaguaacc

SEQ ID NO: 1197321 - RNA, 19 nt, Artificial Sequence
  Description of Artificial Sequence: Synthetic oligonucleotide
cugugggauguuacggaca

SEQ ID NO: 1197322 - RNA, 19 nt, Artificial Sequence
  Description of Artificial Sequence: Synthetic oligonucleotide
gaaguguagagagcugggu

SEQ ID NO: 1197323 - RNA, 19 nt, Artificial Sequence
  Description of Artificial Sequence: Synthetic oligonucleotide
agcguuugauugauaacuu

SEQ ID NO: 1197324 - RNA, 19 nt, Artificial Sequence
  Description of Artificial Sequence: Synthetic oligonucleotide
gucgauaccuucuuccauu

SEQ ID NO: 1197325 - RNA, 19 nt, Artificial Sequence
  Description of Artificial Sequence: Synthetic oligonucleotide
uuccaucggccagacuggc

SEQ ID NO: 1197326 - RNA, 19 nt, Artificial Sequence
  Description of Artificial Sequence: Synthetic oligonucleotide
uccaugccuugcccacgag

SEQ ID NO: 1197327 - RNA, 19 nt, Artificial Sequence
  Description of Artificial Sequence: Synthetic oligonucleotide
cacucaaagagucgcauuu

SEQ ID NO: 1197328 - RNA, 19 nt, Artificial Sequence
  Description of Artificial Sequence: Synthetic oligonucleotide
ggaugacugacagcucucc

SEQ ID NO: 1197329 - RNA, 19 nt, Artificial Sequence
  Description of Artificial Sequence: Synthetic oligonucleotide
ccacaugcuaaaagcauga

SEQ ID NO: 1197330 - RNA, 19 nt, Artificial Sequence
  Description of Artificial Sequence: Synthetic oligonucleotide
acgugaccuccacugugca

SEQ ID NO: 1197331 - RNA, 19 nt, Artificial Sequence
  Description of Artificial Sequence: Synthetic oligonucleotide
gggguuuuccacaugcuaa

SEQ ID NO: 1197332 - RNA, 19 nt, Artificial Sequence
  Description of Artificial Sequence: Synthetic oligonucleotide
caucggccagacuggccag

SEQ ID NO: 1197333 - RNA, 19 nt, Artificial Sequence
  Description of Artificial Sequence: Synthetic oligonucleotide
ccguauuuccaucggccag

SEQ ID NO: 1197334 - RNA, 19 nt, Artificial Sequence
  Description of Artificial Sequence: Synthetic oligonucleotide
gugcauggcucaauuuuga

SEQ ID NO: 1197335 - RNA, 19 nt, Artificial Sequence
  Description of Artificial Sequence: Synthetic oligonucleotide
ccaaguugcacuguuacua

SEQ ID NO: 1197336 - RNA, 19 nt, Artificial Sequence
  Description of Artificial Sequence: Synthetic oligonucleotide
cacgauaaccucaccaguu

SEQ ID NO: 1197337 - RNA, 19 nt, Artificial Sequence
  Description of Artificial Sequence: Synthetic oligonucleotide
uggaucccugcgguaguga

SEQ ID NO: 1197338 - RNA, 19 nt, Artificial Sequence
  Description of Artificial Sequence: Synthetic oligonucleotide
gaucccugcgguagugaga

SEQ ID NO: 1197339 - RNA, 19 nt, Artificial Sequence
  Description of Artificial Sequence: Synthetic oligonucleotide
augcuugauaagccucauu

SEQ ID NO: 1197340 - RNA, 19 nt, Artificial Sequence
  Description of Artificial Sequence: Synthetic oligonucleotide
gcuguaugccagaaaguuc

SEQ ID NO: 1197341 - RNA, 19 nt, Artificial Sequence
  Description of Artificial Sequence: Synthetic oligonucleotide
cguuugauugauaacuuua

SEQ ID NO: 1197342 - RNA, 19 nt, Artificial Sequence
  Description of Artificial Sequence: Synthetic oligonucleotide
agucuccuaguggaucccu

SEQ ID NO: 1197343 - RNA, 19 nt, Artificial Sequence
  Description of Artificial Sequence: Synthetic oligonucleotide
ucuucaugcuucgguccau

SEQ ID NO: 1197344 - RNA, 19 nt, Artificial Sequence
  Description of Artificial Sequence: Synthetic oligonucleotide
cuccacugugcauggcuca

SEQ ID NO: 1197345 - RNA, 19 nt, Artificial Sequence
  Description of Artificial Sequence: Synthetic oligonucleotide
ggccuagucuaaaacacaa

SEQ ID NO: 1197346 - RNA, 19 nt, Artificial Sequence
  Description of Artificial Sequence: Synthetic oligonucleotide
cgaggcuaccguaacuggc

SEQ ID NO: 1197347 - RNA, 19 nt, Artificial Sequence
  Description of Artificial Sequence: Synthetic oligonucleotide
cagacccuugucucugaca

SEQ ID NO: 1197348 - RNA, 19 nt, Artificial Sequence
  Description of Artificial Sequence: Synthetic oligonucleotide
ggcucaauuuugaaaauau

SEQ ID NO: 1197349 - RNA, 19 nt, Artificial Sequence
  Description of Artificial Sequence: Synthetic oligonucleotide
ccaugccuugcccacgagc

SEQ ID NO: 1197350 - RNA, 19 nt, Artificial Sequence
  Description of Artificial Sequence: Synthetic oligonucleotide
gccuagucuaaaacacaag

SEQ ID NO: 1197351 - RNA, 19 nt, Artificial Sequence
  Description of Artificial Sequence: Synthetic oligonucleotide
gaugagccguccucagagu

SEQ ID NO: 1197352 - RNA, 19 nt, Artificial Sequence
  Description of Artificial Sequence: Synthetic oligonucleotide
gguagugagaugagccguc

SEQ ID NO: 1197353 - RNA, 19 nt, Artificial Sequence
  Description of Artificial Sequence: Synthetic oligonucleotide
auccacucaaagagucgca

SEQ ID NO: 1197354 - RNA, 19 nt, Artificial Sequence
  Description of Artificial Sequence: Synthetic oligonucleotide
gguggggaacuaaaugcuc

SEQ ID NO: 1197355 - RNA, 19 nt, Artificial Sequence
  Description of Artificial Sequence: Synthetic oligonucleotide
ccaucggccagacuggcca

SEQ ID NO: 1197356 - RNA, 19 nt, Artificial Sequence
  Description of Artificial Sequence: Synthetic oligonucleotide
ucggccagacuggccagcu

SEQ ID NO: 1197357 - RNA, 19 nt, Artificial Sequence
  Description of Artificial Sequence: Synthetic oligonucleotide
acgugcuguaugccagaaa

SEQ ID NO: 1197358 - RNA, 19 nt, Artificial Sequence
  Description of Artificial Sequence: Synthetic oligonucleotide
gcuaccguaacuggccaca

SEQ ID NO: 1197359 - RNA, 19 nt, Artificial Sequence
  Description of Artificial Sequence: Synthetic oligonucleotide
guggaucccugcgguagug

SEQ ID NO: 1197360 - RNA, 19 nt, Artificial Sequence
  Description of Artificial Sequence: Synthetic oligonucleotide
ccugcgguagugagaugag

SEQ ID NO: 1197361 - RNA, 19 nt, Artificial Sequence
  Description of Artificial Sequence: Synthetic oligonucleotide
cugccagucgauaccuucu

SEQ ID NO: 1197362 - RNA, 19 nt, Artificial Sequence
  Description of Artificial Sequence: Synthetic oligonucleotide
gagagucaagauggaguua

SEQ ID NO: 1197363 - RNA, 19 nt, Artificial Sequence
  Description of Artificial Sequence: Synthetic oligonucleotide
gguccgaggcuaccguaac

SEQ ID NO: 1197364 - RNA, 19 nt, Artificial Sequence
  Description of Artificial Sequence: Synthetic oligonucleotide
aggguccgaggcuaccgua

SEQ ID NO: 1197365 - RNA, 19 nt, Artificial Sequence
  Description of Artificial Sequence: Synthetic oligonucleotide
cagaguauguaggcuggaa

SEQ ID NO: 1197366 - RNA, 19 nt, Artificial Sequence
  Description of Artificial Sequence: Synthetic oligonucleotide
gacccuugucucugacaaa

SEQ ID NO: 1197367 - RNA, 19 nt, Artificial Sequence
  Description of Artificial Sequence: Synthetic oligonucleotide
guagagagcugggucuuua

SEQ ID NO: 1197368 - RNA, 19 nt, Artificial Sequence
  Description of Artificial Sequence: Synthetic oligonucleotide
ccgaaaguccugugaggug

SEQ ID NO: 1197369 - RNA, 19 nt, Artificial Sequence
  Description of Artificial Sequence: Synthetic oligonucleotide
ccucuuaguuuaggguccg

SEQ ID NO: 1197370 - RNA, 19 nt, Artificial Sequence
  Description of Artificial Sequence: Synthetic oligonucleotide
aggccgcaccugccagucg

SEQ ID NO: 1197371 - RNA, 19 nt, Artificial Sequence
  Description of Artificial Sequence: Synthetic oligonucleotide
guguuaaaaugaagauccu

SEQ ID NO: 1197372 - RNA, 19 nt, Artificial Sequence
  Description of Artificial Sequence: Synthetic oligonucleotide
auccuuguggacagacauu

SEQ ID NO: 1197373 - RNA, 19 nt, Artificial Sequence
  Description of Artificial Sequence: Synthetic oligonucleotide
cuaguggaucccugcggua

SEQ ID NO: 1197374 - RNA, 19 nt, Artificial Sequence
  Description of Artificial Sequence: Synthetic oligonucleotide
gaugcuugauaagccucau

SEQ ID NO: 1197375 - RNA, 19 nt, Artificial Sequence
  Description of Artificial Sequence: Synthetic oligonucleotide
cuuuggaagcaaacauauu

SEQ ID NO: 1197376 - RNA, 19 nt, Artificial Sequence
  Description of Artificial Sequence: Synthetic oligonucleotide
cagccauacucauuaugau

SEQ ID NO: 1197377 - RNA, 19 nt, Artificial Sequence
  Description of Artificial Sequence: Synthetic oligonucleotide
cgcaccugccagucgauac

SEQ ID NO: 1197378 - RNA, 19 nt, Artificial Sequence
  Description of Artificial Sequence: Synthetic oligonucleotide
ggcuaccguaacuggccac

SEQ ID NO: 1197379 - RNA, 19 nt, Artificial Sequence
  Description of Artificial Sequence: Synthetic oligonucleotide
ccuccuuuuggauuaaguu

SEQ ID NO: 1197380 - RNA, 19 nt, Artificial Sequence
  Description of Artificial Sequence: Synthetic oligonucleotide
cccugcgguagugagauga

SEQ ID NO: 1197381 - RNA, 19 nt, Artificial Sequence
  Description of Artificial Sequence: Synthetic oligonucleotide
gugggauguuacggacacc

SEQ ID NO: 1197382 - RNA, 19 nt, Artificial Sequence
  Description of Artificial Sequence: Synthetic oligonucleotide
gguuuuccacaugcuaaaa

SEQ ID NO: 1197383 - RNA, 19 nt, Artificial Sequence
  Description of Artificial Sequence: Synthetic oligonucleotide
gggaacuaaaugcuccauu

SEQ ID NO: 1197384 - RNA, 19 nt, Artificial Sequence
  Description of Artificial Sequence: Synthetic oligonucleotide
ggggaacauugaguguccc

SEQ ID NO: 1197385 - RNA, 19 nt, Artificial Sequence
  Description of Artificial Sequence: Synthetic oligonucleotide
gggaacauugagugucccu

SEQ ID NO: 1197386 - RNA, 19 nt, Artificial Sequence
  Description of Artificial Sequence: Synthetic oligonucleotide
gcacgauaaccucaccagu

SEQ ID NO: 1197387 - RNA, 19 nt, Artificial Sequence
  Description of Artificial Sequence: Synthetic oligonucleotide
ccuccauuccaaaucuugu

SEQ ID NO: 1197388 - RNA, 19 nt, Artificial Sequence
  Description of Artificial Sequence: Synthetic oligonucleotide
cagguuggcucagaacucu

SEQ ID NO: 1197389 - RNA, 19 nt, Artificial Sequence
  Description of Artificial Sequence: Synthetic oligonucleotide
ggguggggaacuaaaugcu

SEQ ID NO: 1197390 - RNA, 19 nt, Artificial Sequence
  Description of Artificial Sequence: Synthetic oligonucleotide
aguuagcaauagagguguu

SEQ ID NO: 1197391 - RNA, 19 nt, Artificial Sequence
  Description of Artificial Sequence: Synthetic oligonucleotide
gccauauaaucugauucau

SEQ ID NO: 1197392 - RNA, 19 nt, Artificial Sequence
  Description of Artificial Sequence: Synthetic oligonucleotide
ccuaguggaucccugcggu

SEQ ID NO: 1197393 - RNA, 19 nt, Artificial Sequence
  Description of Artificial Sequence: Synthetic oligonucleotide
cacacgugaccuccacugu

SEQ ID NO: 1197394 - RNA, 19 nt, Artificial Sequence
  Description of Artificial Sequence: Synthetic oligonucleotide
cuaccguaacuggccacaa

SEQ ID NO: 1197395 - RNA, 19 nt, Artificial Sequence
  Description of Artificial Sequence: Synthetic oligonucleotide
guccgaggcuaccguaacu

SEQ ID NO: 1197396 - RNA, 19 nt, Artificial Sequence
  Description of Artificial Sequence: Synthetic oligonucleotide
cacugugcauggcucaauu

SEQ ID NO: 1197397 - RNA, 19 nt, Artificial Sequence
  Description of Artificial Sequence: Synthetic oligonucleotide
auguaggcuggaacacguu

SEQ ID NO: 1197398 - RNA, 19 nt, Artificial Sequence
  Description of Artificial Sequence: Synthetic oligonucleotide
ccagacccuugucucugac

SEQ ID NO: 1197399 - RNA, 19 nt, Artificial Sequence
  Description of Artificial Sequence: Synthetic oligonucleotide
agguuggcucagaacucuu

SEQ ID NO: 1197400 - RNA, 19 nt, Artificial Sequence
  Description of Artificial Sequence: Synthetic oligonucleotide
cucuuaguuuaggguccga

SEQ ID NO: 1197401 - RNA, 19 nt, Artificial Sequence
  Description of Artificial Sequence: Synthetic oligonucleotide
cacggagaaugaccaaguu

SEQ ID NO: 1197402 - RNA, 19 nt, Artificial Sequence
  Description of Artificial Sequence: Synthetic oligonucleotide
gcuucacuaagagcuggcu

SEQ ID NO: 1197403 - RNA, 19 nt, Artificial Sequence
  Description of Artificial Sequence: Synthetic oligonucleotide
ccgggcaacuggaacucca

SEQ ID NO: 1197404 - RNA, 19 nt, Artificial Sequence
  Description of Artificial Sequence: Synthetic oligonucleotide
gcuucgguccaugcacaga

SEQ ID NO: 1197405 - RNA, 19 nt, Artificial Sequence
  Description of Artificial Sequence: Synthetic oligonucleotide
caguucuguaaggccauau

SEQ ID NO: 1197406 - RNA, 19 nt, Artificial Sequence
  Description of Artificial Sequence: Synthetic oligonucleotide
caccugccagucgauaccu

SEQ ID NO: 1197407 - RNA, 19 nt, Artificial Sequence
  Description of Artificial Sequence: Synthetic oligonucleotide
ggguccgaggcuaccguaa

SEQ ID NO: 1197408 - RNA, 19 nt, Artificial Sequence
  Description of Artificial Sequence: Synthetic oligonucleotide
ccacggagaaugaccaagu

SEQ ID NO: 1197409 - RNA, 19 nt, Artificial Sequence
  Description of Artificial Sequence: Synthetic oligonucleotide
cucguagcccagguuggcu

SEQ ID NO: 1197410 - RNA, 19 nt, Artificial Sequence
  Description of Artificial Sequence: Synthetic oligonucleotide
gccaggugaacgugcugua

SEQ ID NO: 1197411 - RNA, 19 nt, Artificial Sequence
  Description of Artificial Sequence: Synthetic oligonucleotide
gcccgggcaacuggaacuc

SEQ ID NO: 1197412 - RNA, 19 nt, Artificial Sequence
  Description of Artificial Sequence: Synthetic oligonucleotide
cgauaaccucaccaguucu

SEQ ID NO: 1197413 - RNA, 19 nt, Artificial Sequence
  Description of Artificial Sequence: Synthetic oligonucleotide
cgggguuuuccacaugcua

SEQ ID NO: 1197414 - RNA, 19 nt, Artificial Sequence
  Description of Artificial Sequence: Synthetic oligonucleotide
ggggaacuaaaugcuccau

SEQ ID NO: 1197415 - RNA, 19 nt, Artificial Sequence
  Description of Artificial Sequence: Synthetic oligonucleotide
gcccacgagcaugucaagu

SEQ ID NO: 1197416 - RNA, 19 nt, Artificial Sequence
  Description of Artificial Sequence: Synthetic oligonucleotide
cccgggcaacuggaacucc

SEQ ID NO: 1197417 - RNA, 19 nt, Artificial Sequence
  Description of Artificial Sequence: Synthetic oligonucleotide
ccgguacaagugagagaga

SEQ ID NO: 1197418 - RNA, 19 nt, Artificial Sequence
  Description of Artificial Sequence: Synthetic oligonucleotide
ccacucaaagagucgcauu

SEQ ID NO: 1197419 - RNA, 19 nt, Artificial Sequence
  Description of Artificial Sequence: Synthetic oligonucleotide
cccagacccuugucucuga

SEQ ID NO: 1197420 - RNA, 19 nt, Artificial Sequence
  Description of Artificial Sequence: Synthetic oligonucleotide
ccgcaccugccagucgaua

SEQ ID NO: 1197421 - RNA, 19 nt, Artificial Sequence
  Description of Artificial Sequence: Synthetic oligonucleotide
gccgcaccugccagucgau

SEQ ID NO: 1197422 - RNA, 19 nt, Artificial Sequence
  Description of Artificial Sequence: Synthetic oligonucleotide
aauaucuucaaucagggcg

SEQ ID NO: 1197423 - RNA, 19 nt, Artificial Sequence
  Description of Artificial Sequence: Synthetic oligonucleotide
gaagauaccauguugauag

SEQ ID NO: 1197424 - RNA, 19 nt, Artificial Sequence
  Description of Artificial Sequence: Synthetic oligonucleotide
cacagaauaaagaagaugg

SEQ ID NO: 1197425 - RNA, 19 nt, Artificial Sequence
  Description of Artificial Sequence: Synthetic oligonucleotide
auaauaauugguuccaccc

SEQ ID NO: 1197426 - RNA, 19 nt, Artificial Sequence
  Description of Artificial Sequence: Synthetic oligonucleotide
aauacuugcaagcuccugg

SEQ ID NO: 1197427 - RNA, 19 nt, Artificial Sequence
  Description of Artificial Sequence: Synthetic oligonucleotide
cuuuguacuauauugagag

SEQ ID NO: 1197428 - RNA, 19 nt, Artificial Sequence
  Description of Artificial Sequence: Synthetic oligonucleotide
  modified_base (17)..(17): a, c, u, g, unknown or other
gaauaaagaagaugggngg

SEQ ID NO: 1197429 - RNA, 19 nt, Artificial Sequence
  Description of Artificial Sequence: Synthetic oligonucleotide
uuaguuacuuguuucagag

SEQ ID NO: 1197430 - RNA, 19 nt, Artificial Sequence
  Description of Artificial Sequence: Synthetic oligonucleotide
gacucaauauaauaauugg

SEQ ID NO: 1197431 - RNA, 19 nt, Artificial Sequence
  Description of Artificial Sequence: Synthetic oligonucleotide
aucauuaccagacacaaca

SEQ ID NO: 1197432 - RNA, 19 nt, Artificial Sequence
  Description of Artificial Sequence: Synthetic oligonucleotide
uuaaaggauacacugaauc

SEQ ID NO: 1197433 - RNA, 19 nt, Artificial Sequence
  Description of Artificial Sequence: Synthetic oligonucleotide
acaauaggaauuuugucuc

SEQ ID NO: 1197434 - RNA, 19 nt, Artificial Sequence
  Description of Artificial Sequence: Synthetic oligonucleotide
uuauacggcaucuucauug

SEQ ID NO: 1197435 - RNA, 19 nt, Artificial Sequence
  Description of Artificial Sequence: Synthetic oligonucleotide
guuguuaaaguccaccacg

SEQ ID NO: 1197436 - RNA, 19 nt, Artificial Sequence
  Description of Artificial Sequence: Synthetic oligonucleotide
gaugaagaaauucacugug

SEQ ID NO: 1197437 - RNA, 19 nt, Artificial Sequence
  Description of Artificial Sequence: Synthetic oligonucleotide
uuaaaguccaccacggugu

SEQ ID NO: 1197438 - RNA, 19 nt, Artificial Sequence
  Description of Artificial Sequence: Synthetic oligonucleotide
aacugcaucauuaccagac

SEQ ID NO: 1197439 - RNA, 19 nt, Artificial Sequence
  Description of Artificial Sequence: Synthetic oligonucleotide
aggcaugucucucaaaccc

SEQ ID NO: 1197440 - RNA, 19 nt, Artificial Sequence
  Description of Artificial Sequence: Synthetic oligonucleotide
aacuacuuugguuucuuag

SEQ ID NO: 1197441 - RNA, 19 nt, Artificial Sequence
  Description of Artificial Sequence: Synthetic oligonucleotide
agucuuaagauuguagcgc

SEQ ID NO: 1197442 - RNA, 19 nt, Artificial Sequence
  Description of Artificial Sequence: Synthetic oligonucleotide
aacccaucgguuuugcuuc

SEQ ID NO: 1197443 - RNA, 19 nt, Artificial Sequence
  Description of Artificial Sequence: Synthetic oligonucleotide
uauaauaauugguuccacc

SEQ ID NO: 1197444 - RNA, 19 nt, Artificial Sequence
  Description of Artificial Sequence: Synthetic oligonucleotide
auucacaagaacuuuccag

SEQ ID NO: 1197445 - RNA, 19 nt, Artificial Sequence
  Description of Artificial Sequence: Synthetic oligonucleotide
ucugcaaaggccacuaggc

SEQ ID NO: 1197446 - RNA, 19 nt, Artificial Sequence
  Description of Artificial Sequence: Synthetic oligonucleotide
aaucgguuuuaacccaucg

SEQ ID NO: 1197447 - RNA, 19 nt, Artificial Sequence
  Description of Artificial Sequence: Synthetic oligonucleotide
uuguacuauauugagagca

SEQ ID NO: 1197448 - RNA, 19 nt, Artificial Sequence
  Description of Artificial Sequence: Synthetic oligonucleotide
uuugcuuccgggcauaccu

SEQ ID NO: 1197449 - RNA, 19 nt, Artificial Sequence
  Description of Artificial Sequence: Synthetic oligonucleotide
agaccaaccacuccccucc

SEQ ID NO: 1197450 - RNA, 19 nt, Artificial Sequence
  Description of Artificial Sequence: Synthetic oligonucleotide
auugguuccacccacgaca

SEQ ID NO: 1197451 - RNA, 19 nt, Artificial Sequence
  Description of Artificial Sequence: Synthetic oligonucleotide
aagauuguagcgccuauga

SEQ ID NO: 1197452 - RNA, 19 nt, Artificial Sequence
  Description of Artificial Sequence: Synthetic oligonucleotide
ucgugaaauuccuugaagc

SEQ ID NO: 1197453 - RNA, 19 nt, Artificial Sequence
  Description of Artificial Sequence: Synthetic oligonucleotide
ucuaauagggcaugggaga

SEQ ID NO: 1197454 - RNA, 19 nt, Artificial Sequence
  Description of Artificial Sequence: Synthetic oligonucleotide
uguacuauauugagagcag

SEQ ID NO: 1197455 - RNA, 19 nt, Artificial Sequence
  Description of Artificial Sequence: Synthetic oligonucleotide
aggaauuuugucucgagca

SEQ ID NO: 1197456 - RNA, 19 nt, Artificial Sequence
  Description of Artificial Sequence: Synthetic oligonucleotide
ucgguuuuaacccaucggu

SEQ ID NO: 1197457 - RNA, 19 nt, Artificial Sequence
  Description of Artificial Sequence: Synthetic oligonucleotide
ucauuauacggcaucuuca

SEQ ID NO: 1197458 - RNA, 19 nt, Artificial Sequence
  Description of Artificial Sequence: Synthetic oligonucleotide
uacuauauugagagcaggc

SEQ ID NO: 1197459 - RNA, 19 nt, Artificial Sequence
  Description of Artificial Sequence: Synthetic oligonucleotide
guuuauggaguucauggcc

SEQ ID NO: 1197460 - RNA, 19 nt, Artificial Sequence
  Description of Artificial Sequence: Synthetic oligonucleotide
auacuugcaagcuccuggc

SEQ ID NO: 1197461 - RNA, 19 nt, Artificial Sequence
  Description of Artificial Sequence: Synthetic oligonucleotide
uuaccagacacaacaacca

SEQ ID NO: 1197462 - RNA, 19 nt, Artificial Sequence
  Description of Artificial Sequence: Synthetic oligonucleotide
cucagcuucauuauacggc

SEQ ID NO: 1197463 - RNA, 19 nt, Artificial Sequence
  Description of Artificial Sequence: Synthetic oligonucleotide
guuaaaguccaccacggug

SEQ ID NO: 1197464 - RNA, 19 nt, Artificial Sequence
  Description of Artificial Sequence: Synthetic oligonucleotide
uugacuggaagauaccaug

SEQ ID NO: 1197465 - RNA, 19 nt, Artificial Sequence
  Description of Artificial Sequence: Synthetic oligonucleotide
aucgguuuugcuuccgggc

SEQ ID NO: 1197466 - RNA, 19 nt, Artificial Sequence
  Description of Artificial Sequence: Synthetic oligonucleotide
gauaccauguugauagucc

SEQ ID NO: 1197467 - RNA, 19 nt, Artificial Sequence
  Description of Artificial Sequence: Synthetic oligonucleotide
uauacggcaucuucauugg

SEQ ID NO: 1197468 - RNA, 19 nt, Artificial Sequence
  Description of Artificial Sequence: Synthetic oligonucleotide
ucagugaucagguacucgu

SEQ ID NO: 1197469 - RNA, 19 nt, Artificial Sequence
  Description of Artificial Sequence: Synthetic oligonucleotide
uuugcguuugucguguggg

SEQ ID NO: 1197470 - RNA, 19 nt, Artificial Sequence
  Description of Artificial Sequence: Synthetic oligonucleotide
uucauuauacggcaucuuc

SEQ ID NO: 1197471 - RNA, 19 nt, Artificial Sequence
  Description of Artificial Sequence: Synthetic oligonucleotide
uccucaaguagaaaaugug

SEQ ID NO: 1197472 - RNA, 19 nt, Artificial Sequence
  Description of Artificial Sequence: Synthetic oligonucleotide
uuuaagguucaaaggaaaa

SEQ ID NO: 1197473 - RNA, 19 nt, Artificial Sequence
  Description of Artificial Sequence: Synthetic oligonucleotide
uggauuuuauaugugcugc

SEQ ID NO: 1197474 - RNA, 19 nt, Artificial Sequence
  Description of Artificial Sequence: Synthetic oligonucleotide
gauuguagcgccuaugaaa

SEQ ID NO: 1197475 - RNA, 19 nt, Artificial Sequence
  Description of Artificial Sequence: Synthetic oligonucleotide
gaagccaauugacuggaag

SEQ ID NO: 1197476 - RNA, 19 nt, Artificial Sequence
  Description of Artificial Sequence: Synthetic oligonucleotide
uacggcaucuucauuggag

SEQ ID NO: 1197477 - RNA, 19 nt, Artificial Sequence
  Description of Artificial Sequence: Synthetic oligonucleotide
auuguagcgccuaugaaag

SEQ ID NO: 1197478 - RNA, 19 nt, Artificial Sequence
  Description of Artificial Sequence: Synthetic oligonucleotide
auacacugaaucuugguau

SEQ ID NO: 1197479 - RNA, 19 nt, Artificial Sequence
  Description of Artificial Sequence: Synthetic oligonucleotide
cuuccaagccauauacugg

SEQ ID NO: 1197480 - RNA, 19 nt, Artificial Sequence
  Description of Artificial Sequence: Synthetic oligonucleotide
uuuuauaugugcugcccac

SEQ ID NO: 1197481 - RNA, 19 nt, Artificial Sequence
  Description of Artificial Sequence: Synthetic oligonucleotide
caagcguucaucuagaacu

SEQ ID NO: 1197482 - RNA, 19 nt, Artificial Sequence
  Description of Artificial Sequence: Synthetic oligonucleotide
uguuguuaaaguccaccac

SEQ ID NO: 1197483 - RNA, 19 nt, Artificial Sequence
  Description of Artificial Sequence: Synthetic oligonucleotide
aucgguuuuaacccaucgg

SEQ ID NO: 1197484 - RNA, 19 nt, Artificial Sequence
  Description of Artificial Sequence: Synthetic oligonucleotide
gauccggucacaaagguca

SEQ ID NO: 1197485 - RNA, 19 nt, Artificial Sequence
  Description of Artificial Sequence: Synthetic oligonucleotide
gauuuuauaugugcugccc

SEQ ID NO: 1197486 - RNA, 19 nt, Artificial Sequence
  Description of Artificial Sequence: Synthetic oligonucleotide
  modified_base (15)..(15): a, c, u, g, unknown or other
auaaagaagaugggngggg

SEQ ID NO: 1197487 - RNA, 19 nt, Artificial Sequence
  Description of Artificial Sequence: Synthetic oligonucleotide
agucuaauagggcauggga

SEQ ID NO: 1197488 - RNA, 19 nt, Artificial Sequence
  Description of Artificial Sequence: Synthetic oligonucleotide
cuauauugagagcaggcuc

SEQ ID NO: 1197489 - RNA, 19 nt, Artificial Sequence
  Description of Artificial Sequence: Synthetic oligonucleotide
auaccucuuaguuacuugu

SEQ ID NO: 1197490 - RNA, 19 nt, Artificial Sequence
  Description of Artificial Sequence: Synthetic oligonucleotide
cauuucuggguccaccugg

SEQ ID NO: 1197491 - RNA, 19 nt, Artificial Sequence
  Description of Artificial Sequence: Synthetic oligonucleotide
augucucucaaacccuggc

SEQ ID NO: 1197492 - RNA, 19 nt, Artificial Sequence
  Description of Artificial Sequence: Synthetic oligonucleotide
gaugauccggucacaaagg

SEQ ID NO: 1197493 - RNA, 19 nt, Artificial Sequence
  Description of Artificial Sequence: Synthetic oligonucleotide
aagacuucagucauuuaca

SEQ ID NO: 1197494 - RNA, 19 nt, Artificial Sequence
  Description of Artificial Sequence: Synthetic oligonucleotide
accauguugauaguccugg

SEQ ID NO: 1197495 - RNA, 19 nt, Artificial Sequence
  Description of Artificial Sequence: Synthetic oligonucleotide
guacucgugaaauuccuug

SEQ ID NO: 1197496 - RNA, 19 nt, Artificial Sequence
  Description of Artificial Sequence: Synthetic oligonucleotide
gucuuaagauuguagcgcc

SEQ ID NO: 1197497 - RNA, 19 nt, Artificial Sequence
  Description of Artificial Sequence: Synthetic oligonucleotide
uauucacaagaacuuucca

SEQ ID NO: 1197498 - RNA, 19 nt, Artificial Sequence
  Description of Artificial Sequence: Synthetic oligonucleotide
ugucucucaaacccuggcc

SEQ ID NO: 1197499 - RNA, 19 nt, Artificial Sequence
  Description of Artificial Sequence: Synthetic oligonucleotide
ucuuaguuacuuguuucag

SEQ ID NO: 1197500 - RNA, 19 nt, Artificial Sequence
  Description of Artificial Sequence: Synthetic oligonucleotide
agucuggggaacuacuuug

SEQ ID NO: 1197501 - RNA, 19 nt, Artificial Sequence
  Description of Artificial Sequence: Synthetic oligonucleotide
ccguuuauggaguucaugg

SEQ ID NO: 1197502 - RNA, 19 nt, Artificial Sequence
  Description of Artificial Sequence: Synthetic oligonucleotide
uuuguacuauauugagagc

SEQ ID NO: 1197503 - RNA, 19 nt, Artificial Sequence
  Description of Artificial Sequence: Synthetic oligonucleotide
auauaauaauugguuccac

SEQ ID NO: 1197504 - RNA, 19 nt, Artificial Sequence
  Description of Artificial Sequence: Synthetic oligonucleotide
aauaggaauuuugucucga

SEQ ID NO: 1197505 - RNA, 19 nt, Artificial Sequence
  Description of Artificial Sequence: Synthetic oligonucleotide
uggcuauuuucugaaacag

SEQ ID NO: 1197506 - RNA, 19 nt, Artificial Sequence
  Description of Artificial Sequence: Synthetic oligonucleotide
cacgacaauaggaauuuug

SEQ ID NO: 1197507 - RNA, 19 nt, Artificial Sequence
  Description of Artificial Sequence: Synthetic oligonucleotide
ugugccucuuucuaaaaua

SEQ ID NO: 1197508 - RNA, 19 nt, Artificial Sequence
  Description of Artificial Sequence: Synthetic oligonucleotide
uuuaaaggauacacugaau

SEQ ID NO: 1197509 - RNA, 19 nt, Artificial Sequence
  Description of Artificial Sequence: Synthetic oligonucleotide
gucuaauagggcaugggag

SEQ ID NO: 1197510 - RNA, 19 nt, Artificial Sequence
  Description of Artificial Sequence: Synthetic oligonucleotide
caauaggaauuuugucucg

SEQ ID NO: 1197511 - RNA, 19 nt, Artificial Sequence
  Description of Artificial Sequence: Synthetic oligonucleotide
ugacuggaagauaccaugu

SEQ ID NO: 1197512 - RNA, 19 nt, Artificial Sequence
  Description of Artificial Sequence: Synthetic oligonucleotide
cuuuuaaaggauacacuga

SEQ ID NO: 1197513 - RNA, 19 nt, Artificial Sequence
  Description of Artificial Sequence: Synthetic oligonucleotide
uacuuugguuucuuagggc

SEQ ID NO: 1197514 - RNA, 19 nt, Artificial Sequence
  Description of Artificial Sequence: Synthetic oligonucleotide
guuacuagucucuggugug

SEQ ID NO: 1197515 - RNA, 19 nt, Artificial Sequence
  Description of Artificial Sequence: Synthetic oligonucleotide
uccccaaugaugauccggu

SEQ ID NO: 1197516 - RNA, 19 nt, Artificial Sequence
  Description of Artificial Sequence: Synthetic oligonucleotide
ccaauugacuggaagauac

SEQ ID NO: 1197517 - RNA, 19 nt, Artificial Sequence
  Description of Artificial Sequence: Synthetic oligonucleotide
ugcaagugagauuuggauu

SEQ ID NO: 1197518 - RNA, 19 nt, Artificial Sequence
  Description of Artificial Sequence: Synthetic oligonucleotide
aaaagauccucaaguagaa

SEQ ID NO: 1197519 - RNA, 19 nt, Artificial Sequence
  Description of Artificial Sequence: Synthetic oligonucleotide
cuggaagauaccauguuga

SEQ ID NO: 1197520 - RNA, 19 nt, Artificial Sequence
  Description of Artificial Sequence: Synthetic oligonucleotide
gauccucaaguagaaaaug

SEQ ID NO: 1197521 - RNA, 19 nt, Artificial Sequence
  Description of Artificial Sequence: Synthetic oligonucleotide
cauuaccagacacaacaac

SEQ ID NO: 1197522 - RNA, 19 nt, Artificial Sequence
  Description of Artificial Sequence: Synthetic oligonucleotide
uacucgugaaauuccuuga

SEQ ID NO: 1197523 - RNA, 19 nt, Artificial Sequence
  Description of Artificial Sequence: Synthetic oligonucleotide
ugugccuuacaagacuuca

SEQ ID NO: 1197524 - RNA, 19 nt, Artificial Sequence
  Description of Artificial Sequence: Synthetic oligonucleotide
auaccauguugauaguccu

SEQ ID NO: 1197525 - RNA, 19 nt, Artificial Sequence
  Description of Artificial Sequence: Synthetic oligonucleotide
aaugaugauccggucacaa

SEQ ID NO: 1197526 - RNA, 19 nt, Artificial Sequence
  Description of Artificial Sequence: Synthetic oligonucleotide
uuaaguuccgggucacagu

SEQ ID NO: 1197527 - RNA, 19 nt, Artificial Sequence
  Description of Artificial Sequence: Synthetic oligonucleotide
cucgugaaauuccuugaag

SEQ ID NO: 1197528 - RNA, 19 nt, Artificial Sequence
  Description of Artificial Sequence: Synthetic oligonucleotide
uguagcgccuaugaaaguc

SEQ ID NO: 1197529 - RNA, 19 nt, Artificial Sequence
  Description of Artificial Sequence: Synthetic oligonucleotide
gaggaugcauggguuaggg

SEQ ID NO: 1197530 - RNA, 19 nt, Artificial Sequence
  Description of Artificial Sequence: Synthetic oligonucleotide
gaaucuugguauucaccac

SEQ ID NO: 1197531 - RNA, 19 nt, Artificial Sequence
  Description of Artificial Sequence: Synthetic oligonucleotide
aauuuugucucgagcaaaa

SEQ ID NO: 1197532 - RNA, 19 nt, Artificial Sequence
  Description of Artificial Sequence: Synthetic oligonucleotide
gaugaaacuuuguacuaua

SEQ ID NO: 1197533 - RNA, 19 nt, Artificial Sequence
  Description of Artificial Sequence: Synthetic oligonucleotide
cagaacuccugacugugcc

SEQ ID NO: 1197534 - RNA, 19 nt, Artificial Sequence
  Description of Artificial Sequence: Synthetic oligonucleotide
guacuauauugagagcagg

SEQ ID NO: 1197535 - RNA, 19 nt, Artificial Sequence
  Description of Artificial Sequence: Synthetic oligonucleotide
uuagggaacuugagagggc

SEQ ID NO: 1197536 - RNA, 19 nt, Artificial Sequence
  Description of Artificial Sequence: Synthetic oligonucleotide
uaggcaugucucucaaacc

SEQ ID NO: 1197537 - RNA, 19 nt, Artificial Sequence
  Description of Artificial Sequence: Synthetic oligonucleotide
augggagaccaaccacucc

SEQ ID NO: 1197538 - RNA, 19 nt, Artificial Sequence
  Description of Artificial Sequence: Synthetic oligonucleotide
cauaccucuuaguuacuug

SEQ ID NO: 1197539 - RNA, 19 nt, Artificial Sequence
  Description of Artificial Sequence: Synthetic oligonucleotide
ucagucuaauagggcaugg

SEQ ID NO: 1197540 - RNA, 19 nt, Artificial Sequence
  Description of Artificial Sequence: Synthetic oligonucleotide
uggugcaagugagauuugg

SEQ ID NO: 1197541 - RNA, 19 nt, Artificial Sequence
  Description of Artificial Sequence: Synthetic oligonucleotide
acgacaauaggaauuuugu

SEQ ID NO: 1197542 - RNA, 19 nt, Artificial Sequence
  Description of Artificial Sequence: Synthetic oligonucleotide
aagcguucaucuagaacuc

SEQ ID NO: 1197543 - RNA, 19 nt, Artificial Sequence
  Description of Artificial Sequence: Synthetic oligonucleotide
ucuggaagcgagauauuuu

SEQ ID NO: 1197544 - RNA, 19 nt, Artificial Sequence
  Description of Artificial Sequence: Synthetic oligonucleotide
cuuaguuacuuguuucaga

SEQ ID NO: 1197545 - RNA, 19 nt, Artificial Sequence
  Description of Artificial Sequence: Synthetic oligonucleotide
guugacgaugaagaaauuc

SEQ ID NO: 1197546 - RNA, 19 nt, Artificial Sequence
  Description of Artificial Sequence: Synthetic oligonucleotide
ggcuuagccguuuauggag

SEQ ID NO: 1197547 - RNA, 19 nt, Artificial Sequence
  Description of Artificial Sequence: Synthetic oligonucleotide
uaagauuguagcgccuaug

SEQ ID NO: 1197548 - RNA, 19 nt, Artificial Sequence
  Description of Artificial Sequence: Synthetic oligonucleotide
caauugacuggaagauacc

SEQ ID NO: 1197549 - RNA, 19 nt, Artificial Sequence
  Description of Artificial Sequence: Synthetic oligonucleotide
uguugauaguccuggcuau

SEQ ID NO: 1197550 - RNA, 19 nt, Artificial Sequence
  Description of Artificial Sequence: Synthetic oligonucleotide
gggcauaccucuuaguuac

SEQ ID NO: 1197551 - RNA, 19 nt, Artificial Sequence
  Description of Artificial Sequence: Synthetic oligonucleotide
uaguuacuuguuucagagc

SEQ ID NO: 1197552 - RNA, 19 nt, Artificial Sequence
  Description of Artificial Sequence: Synthetic oligonucleotide
ucuuaagauuguagcgccu

SEQ ID NO: 1197553 - RNA, 19 nt, Artificial Sequence
  Description of Artificial Sequence: Synthetic oligonucleotide
ugagagggccuccgagugg

SEQ ID NO: 1197554 - RNA, 19 nt, Artificial Sequence
  Description of Artificial Sequence: Synthetic oligonucleotide
uuaagauuguagcgccuau

SEQ ID NO: 1197555 - RNA, 19 nt, Artificial Sequence
  Description of Artificial Sequence: Synthetic oligonucleotide
caucgguuuugcuuccggg

SEQ ID NO: 1197556 - RNA, 19 nt, Artificial Sequence
  Description of Artificial Sequence: Synthetic oligonucleotide
aaaucgguuuuaacccauc

SEQ ID NO: 1197557 - RNA, 19 nt, Artificial Sequence
  Description of Artificial Sequence: Synthetic oligonucleotide
ugaucagguacucgugaaa

SEQ ID NO: 1197558 - RNA, 19 nt, Artificial Sequence
  Description of Artificial Sequence: Synthetic oligonucleotide
uuacuuguuucagagccuc

SEQ ID NO: 1197559 - RNA, 19 nt, Artificial Sequence
  Description of Artificial Sequence: Synthetic oligonucleotide
uuuauaugugcugcccacu

SEQ ID NO: 1197560 - RNA, 19 nt, Artificial Sequence
  Description of Artificial Sequence: Synthetic oligonucleotide
uagccguuuauggaguuca

SEQ ID NO: 1197561 - RNA, 19 nt, Artificial Sequence
  Description of Artificial Sequence: Synthetic oligonucleotide
uuugucguguggguguagc

SEQ ID NO: 1197562 - RNA, 19 nt, Artificial Sequence
  Description of Artificial Sequence: Synthetic oligonucleotide
ugacugugccuuacaagac

SEQ ID NO: 1197563 - RNA, 19 nt, Artificial Sequence
  Description of Artificial Sequence: Synthetic oligonucleotide
ugcuuuccggucaaccacu

SEQ ID NO: 1197564 - RNA, 19 nt, Artificial Sequence
  Description of Artificial Sequence: Synthetic oligonucleotide
cuaugaaagucucucagcu

SEQ ID NO: 1197565 - RNA, 19 nt, Artificial Sequence
  Description of Artificial Sequence: Synthetic oligonucleotide
caugucucucaaacccugg

SEQ ID NO: 1197566 - RNA, 19 nt, Artificial Sequence
  Description of Artificial Sequence: Synthetic oligonucleotide
gugaaauuccuugaagcca

SEQ ID NO: 1197567 - RNA, 19 nt, Artificial Sequence
  Description of Artificial Sequence: Synthetic oligonucleotide
guggguguagcuuggcagc

SEQ ID NO: 1197568 - RNA, 19 nt, Artificial Sequence
  Description of Artificial Sequence: Synthetic oligonucleotide
gucguguggguguagcuug

SEQ ID NO: 1197569 - RNA, 19 nt, Artificial Sequence
  Description of Artificial Sequence: Synthetic oligonucleotide
aaccacuuucccggugccc

SEQ ID NO: 1197570 - RNA, 19 nt, Artificial Sequence
  Description of Artificial Sequence: Synthetic oligonucleotide
uuacuagucucuggugugc

SEQ ID NO: 1197571 - RNA, 19 nt, Artificial Sequence
  Description of Artificial Sequence: Synthetic oligonucleotide
cuggcuauuuucugaaaca

SEQ ID NO: 1197572 - RNA, 19 nt, Artificial Sequence
  Description of Artificial Sequence: Synthetic oligonucleotide
cuucaaucagggcgguugc

SEQ ID NO: 1197573 - RNA, 19 nt, Artificial Sequence
  Description of Artificial Sequence: Synthetic oligonucleotide
uacuuccaagccauauacu

SEQ ID NO: 1197574 - RNA, 19 nt, Artificial Sequence
  Description of Artificial Sequence: Synthetic oligonucleotide
cuuugcguuugucgugugg

SEQ ID NO: 1197575 - RNA, 19 nt, Artificial Sequence
  Description of Artificial Sequence: Synthetic oligonucleotide
uguagcuuggcagccauuu

SEQ ID NO: 1197576 - RNA, 19 nt, Artificial Sequence
  Description of Artificial Sequence: Synthetic oligonucleotide
cuaauagggcaugggagac

SEQ ID NO: 1197577 - RNA, 19 nt, Artificial Sequence
  Description of Artificial Sequence: Synthetic oligonucleotide
agggcgguugcucuguugu

SEQ ID NO: 1197578 - RNA, 19 nt, Artificial Sequence
  Description of Artificial Sequence: Synthetic oligonucleotide
ggauuuuauaugugcugcc

SEQ ID NO: 1197579 - RNA, 19 nt, Artificial Sequence
  Description of Artificial Sequence: Synthetic oligonucleotide
acugcaucauuaccagaca

SEQ ID NO: 1197580 - RNA, 19 nt, Artificial Sequence
  Description of Artificial Sequence: Synthetic oligonucleotide
augauccggucacaaaggu

SEQ ID NO: 1197581 - RNA, 19 nt, Artificial Sequence
  Description of Artificial Sequence: Synthetic oligonucleotide
agcuccuggccacuuugcg

SEQ ID NO: 1197582 - RNA, 19 nt, Artificial Sequence
  Description of Artificial Sequence: Synthetic oligonucleotide
uggaagauaccauguugau

SEQ ID NO: 1197583 - RNA, 19 nt, Artificial Sequence
  Description of Artificial Sequence: Synthetic oligonucleotide
ugauccggucacaaagguc

SEQ ID NO: 1197584 - RNA, 19 nt, Artificial Sequence
  Description of Artificial Sequence: Synthetic oligonucleotide
gccuaugaaagucucucag

SEQ ID NO: 1197585 - RNA, 19 nt, Artificial Sequence
  Description of Artificial Sequence: Synthetic oligonucleotide
agccucaauaccuuucuuu

SEQ ID NO: 1197586 - RNA, 19 nt, Artificial Sequence
  Description of Artificial Sequence: Synthetic oligonucleotide
ucuuauccaagcguucauc

SEQ ID NO: 1197587 - RNA, 19 nt, Artificial Sequence
  Description of Artificial Sequence: Synthetic oligonucleotide
gccuuccucagucuaauag

SEQ ID NO: 1197588 - RNA, 19 nt, Artificial Sequence
  Description of Artificial Sequence: Synthetic oligonucleotide
uuccgggcauaccucuuag

SEQ ID NO: 1197589 - RNA, 19 nt, Artificial Sequence
  Description of Artificial Sequence: Synthetic oligonucleotide
uccgaguggaccaccgccu

SEQ ID NO: 1197590 - RNA, 19 nt, Artificial Sequence
  Description of Artificial Sequence: Synthetic oligonucleotide
gaacuugagagggccuccg

SEQ ID NO: 1197591 - RNA, 19 nt, Artificial Sequence
  Description of Artificial Sequence: Synthetic oligonucleotide
guuggugcaagugagauuu

SEQ ID NO: 1197592 - RNA, 19 nt, Artificial Sequence
  Description of Artificial Sequence: Synthetic oligonucleotide
ucguguggguguagcuugg

SEQ ID NO: 1197593 - RNA, 19 nt, Artificial Sequence
  Description of Artificial Sequence: Synthetic oligonucleotide
uccugacugugccuuacaa

SEQ ID NO: 1197594 - RNA, 19 nt, Artificial Sequence
  Description of Artificial Sequence: Synthetic oligonucleotide
caugggagaccaaccacuc

SEQ ID NO: 1197595 - RNA, 19 nt, Artificial Sequence
  Description of Artificial Sequence: Synthetic oligonucleotide
ugccucuuucuaaaauaaa

SEQ ID NO: 1197596 - RNA, 19 nt, Artificial Sequence
  Description of Artificial Sequence: Synthetic oligonucleotide
aucuccuggggccugguau

SEQ ID NO: 1197597 - RNA, 19 nt, Artificial Sequence
  Description of Artificial Sequence: Synthetic oligonucleotide
uggugugcauuuucccuca

SEQ ID NO: 1197598 - RNA, 19 nt, Artificial Sequence
  Description of Artificial Sequence: Synthetic oligonucleotide
accucuuaguuacuuguuu

SEQ ID NO: 1197599 - RNA, 19 nt, Artificial Sequence
  Description of Artificial Sequence: Synthetic oligonucleotide
guuccacccacgacaauag

SEQ ID NO: 1197600 - RNA, 19 nt, Artificial Sequence
  Description of Artificial Sequence: Synthetic oligonucleotide
ugauaguccuggcuauuuu

SEQ ID NO: 1197601 - RNA, 19 nt, Artificial Sequence
  Description of Artificial Sequence: Synthetic oligonucleotide
ucaaucagggcgguugcuc

SEQ ID NO: 1197602 - RNA, 19 nt, Artificial Sequence
  Description of Artificial Sequence: Synthetic oligonucleotide
accaaccacuccccucccc

SEQ ID NO: 1197603 - RNA, 19 nt, Artificial Sequence
  Description of Artificial Sequence: Synthetic oligonucleotide
uaauagggcaugggagacc

SEQ ID NO: 1197604 - RNA, 19 nt, Artificial Sequence
  Description of Artificial Sequence: Synthetic oligonucleotide
gacagcaucugaguccaac

SEQ ID NO: 1197605 - RNA, 19 nt, Artificial Sequence
  Description of Artificial Sequence: Synthetic oligonucleotide
ggcuguagguuugugaccc

SEQ ID NO: 1197606 - RNA, 19 nt, Artificial Sequence
  Description of Artificial Sequence: Synthetic oligonucleotide
uucuggguccaccuggcuu

SEQ ID NO: 1197607 - RNA, 19 nt, Artificial Sequence
  Description of Artificial Sequence: Synthetic oligonucleotide
uccggucaaccacuuuccc

SEQ ID NO: 1197608 - RNA, 19 nt, Artificial Sequence
  Description of Artificial Sequence: Synthetic oligonucleotide
caucauuaccagacacaac

SEQ ID NO: 1197609 - RNA, 19 nt, Artificial Sequence
  Description of Artificial Sequence: Synthetic oligonucleotide
aggauacacugaaucuugg

SEQ ID NO: 1197610 - RNA, 19 nt, Artificial Sequence
  Description of Artificial Sequence: Synthetic oligonucleotide
aagcaucuggaagcgagau

SEQ ID NO: 1197611 - RNA, 19 nt, Artificial Sequence
  Description of Artificial Sequence: Synthetic oligonucleotide
uuauggaguucauggccau

SEQ ID NO: 1197612 - RNA, 19 nt, Artificial Sequence
  Description of Artificial Sequence: Synthetic oligonucleotide
agccaauugacuggaagau

SEQ ID NO: 1197613 - RNA, 19 nt, Artificial Sequence
  Description of Artificial Sequence: Synthetic oligonucleotide
cagucuaauagggcauggg

SEQ ID NO: 1197614 - RNA, 19 nt, Artificial Sequence
  Description of Artificial Sequence: Synthetic oligonucleotide
acccaucgguuuugcuucc

SEQ ID NO: 1197615 - RNA, 19 nt, Artificial Sequence
  Description of Artificial Sequence: Synthetic oligonucleotide
cucagugaucagguacucg

SEQ ID NO: 1197616 - RNA, 19 nt, Artificial Sequence
  Description of Artificial Sequence: Synthetic oligonucleotide
gugagauuuggauuuuaua

SEQ ID NO: 1197617 - RNA, 19 nt, Artificial Sequence
  Description of Artificial Sequence: Synthetic oligonucleotide
gagaccaaccacuccccuc

SEQ ID NO: 1197618 - RNA, 19 nt, Artificial Sequence
  Description of Artificial Sequence: Synthetic oligonucleotide
agaggaugcauggguuagg

SEQ ID NO: 1197619 - RNA, 19 nt, Artificial Sequence
  Description of Artificial Sequence: Synthetic oligonucleotide
gacuccucccacuuugaaa

SEQ ID NO: 1197620 - RNA, 19 nt, Artificial Sequence
  Description of Artificial Sequence: Synthetic oligonucleotide
caaacccuggccuucagcu

SEQ ID NO: 1197621 - RNA, 19 nt, Artificial Sequence
  Description of Artificial Sequence: Synthetic oligonucleotide
uccuagacuuucucuccac

SEQ ID NO: 1197622 - RNA, 19 nt, Artificial Sequence
  Description of Artificial Sequence: Synthetic oligonucleotide
caucuagaacucucugguc

SEQ ID NO: 1197623 - RNA, 19 nt, Artificial Sequence
  Description of Artificial Sequence: Synthetic oligonucleotide
gacccuggaugaaacuuug

SEQ ID NO: 1197624 - RNA, 19 nt, Artificial Sequence
  Description of Artificial Sequence: Synthetic oligonucleotide
cucucuuauccaagcguuc

SEQ ID NO: 1197625 - RNA, 19 nt, Artificial Sequence
  Description of Artificial Sequence: Synthetic oligonucleotide
ucuugguauucaccacgaa

SEQ ID NO: 1197626 - RNA, 19 nt, Artificial Sequence
  Description of Artificial Sequence: Synthetic oligonucleotide
uguggugacuucucuuguu

SEQ ID NO: 1197627 - RNA, 19 nt, Artificial Sequence
  Description of Artificial Sequence: Synthetic oligonucleotide
acauguggugacuucucuu

SEQ ID NO: 1197628 - RNA, 19 nt, Artificial Sequence
  Description of Artificial Sequence: Synthetic oligonucleotide
cagugaucagguacucgug

SEQ ID NO: 1197629 - RNA, 19 nt, Artificial Sequence
  Description of Artificial Sequence: Synthetic oligonucleotide
cagaggaugcauggguuag

SEQ ID NO: 1197630 - RNA, 19 nt, Artificial Sequence
  Description of Artificial Sequence: Synthetic oligonucleotide
uuacaagacuucagucauu

SEQ ID NO: 1197631 - RNA, 19 nt, Artificial Sequence
  Description of Artificial Sequence: Synthetic oligonucleotide
acuccugacugugccuuac

SEQ ID NO: 1197632 - RNA, 19 nt, Artificial Sequence
  Description of Artificial Sequence: Synthetic oligonucleotide
agugagauuuggauuuuau

SEQ ID NO: 1197633 - RNA, 19 nt, Artificial Sequence
  Description of Artificial Sequence: Synthetic oligonucleotide
ucugugccucuuucuaaaa

SEQ ID NO: 1197634 - RNA, 19 nt, Artificial Sequence
  Description of Artificial Sequence: Synthetic oligonucleotide
cucccacuuugaaacauca

SEQ ID NO: 1197635 - RNA, 19 nt, Artificial Sequence
  Description of Artificial Sequence: Synthetic oligonucleotide
gacugugccuuacaagacu

SEQ ID NO: 1197636 - RNA, 19 nt, Artificial Sequence
  Description of Artificial Sequence: Synthetic oligonucleotide
cucagucuaauagggcaug

SEQ ID NO: 1197637 - RNA, 19 nt, Artificial Sequence
  Description of Artificial Sequence: Synthetic oligonucleotide
guagguuugugacccugga

SEQ ID NO: 1197638 - RNA, 19 nt, Artificial Sequence
  Description of Artificial Sequence: Synthetic oligonucleotide
ccucuuaguuacuuguuuc

SEQ ID NO: 1197639 - RNA, 19 nt, Artificial Sequence
  Description of Artificial Sequence: Synthetic oligonucleotide
gguuacuagucucuggugu

SEQ ID NO: 1197640 - RNA, 19 nt, Artificial Sequence
  Description of Artificial Sequence: Synthetic oligonucleotide
uacuagucucuggugugca

SEQ ID NO: 1197641 - RNA, 19 nt, Artificial Sequence
  Description of Artificial Sequence: Synthetic oligonucleotide
uugcguuugucgugugggu

SEQ ID NO: 1197642 - RNA, 19 nt, Artificial Sequence
  Description of Artificial Sequence: Synthetic oligonucleotide
ggaauuuugucucgagcaa

SEQ ID NO: 1197643 - RNA, 19 nt, Artificial Sequence
  Description of Artificial Sequence: Synthetic oligonucleotide
aucuugguauucaccacga

SEQ ID NO: 1197644 - RNA, 19 nt, Artificial Sequence
  Description of Artificial Sequence: Synthetic oligonucleotide
ucucaaacccuggccuuca

SEQ ID NO: 1197645 - RNA, 19 nt, Artificial Sequence
  Description of Artificial Sequence: Synthetic oligonucleotide
gaucagguacucgugaaau

SEQ ID NO: 1197646 - RNA, 19 nt, Artificial Sequence
  Description of Artificial Sequence: Synthetic oligonucleotide
cauuauacggcaucuucau

SEQ ID NO: 1197647 - RNA, 19 nt, Artificial Sequence
  Description of Artificial Sequence: Synthetic oligonucleotide
gugccuuacaagacuucag

SEQ ID NO: 1197648 - RNA, 19 nt, Artificial Sequence
  Description of Artificial Sequence: Synthetic oligonucleotide
cugguuacuagucucuggu

SEQ ID NO: 1197649 - RNA, 19 nt, Artificial Sequence
  Description of Artificial Sequence: Synthetic oligonucleotide
aguuggugcaagugagauu

SEQ ID NO: 1197650 - RNA, 19 nt, Artificial Sequence
  Description of Artificial Sequence: Synthetic oligonucleotide
ugucguguggguguagcuu

SEQ ID NO: 1197651 - RNA, 19 nt, Artificial Sequence
  Description of Artificial Sequence: Synthetic oligonucleotide
cguuuauggaguucauggc

SEQ ID NO: 1197652 - RNA, 19 nt, Artificial Sequence
  Description of Artificial Sequence: Synthetic oligonucleotide
uagcgccuaugaaagucuc

SEQ ID NO: 1197653 - RNA, 19 nt, Artificial Sequence
  Description of Artificial Sequence: Synthetic oligonucleotide
auauugagagcaggcucca

SEQ ID NO: 1197654 - RNA, 19 nt, Artificial Sequence
  Description of Artificial Sequence: Synthetic oligonucleotide
cuuaagauuguagcgccua

SEQ ID NO: 1197655 - RNA, 19 nt, Artificial Sequence
  Description of Artificial Sequence: Synthetic oligonucleotide
gugcaagugagauuuggau

SEQ ID NO: 1197656 - RNA, 19 nt, Artificial Sequence
  Description of Artificial Sequence: Synthetic oligonucleotide
uguugacgaugaagaaauu

SEQ ID NO: 1197657 - RNA, 19 nt, Artificial Sequence
  Description of Artificial Sequence: Synthetic oligonucleotide
ggugacuucucuuguucuc

SEQ ID NO: 1197658 - RNA, 19 nt, Artificial Sequence
  Description of Artificial Sequence: Synthetic oligonucleotide
ccggucaaccacuuucccg

SEQ ID NO: 1197659 - RNA, 19 nt, Artificial Sequence
  Description of Artificial Sequence: Synthetic oligonucleotide
ucauguggugcuggcacau

SEQ ID NO: 1197660 - RNA, 19 nt, Artificial Sequence
  Description of Artificial Sequence: Synthetic oligonucleotide
aggaugcauggguuaggga

SEQ ID NO: 1197661 - RNA, 19 nt, Artificial Sequence
  Description of Artificial Sequence: Synthetic oligonucleotide
caaccacuuucccggugcc

SEQ ID NO: 1197662 - RNA, 19 nt, Artificial Sequence
  Description of Artificial Sequence: Synthetic oligonucleotide
uguuuccacugcagaccac

SEQ ID NO: 1197663 - RNA, 19 nt, Artificial Sequence
  Description of Artificial Sequence: Synthetic oligonucleotide
auacggcaucuucauugga

SEQ ID NO: 1197664 - RNA, 19 nt, Artificial Sequence
  Description of Artificial Sequence: Synthetic oligonucleotide
gcaucauuaccagacacaa

SEQ ID NO: 1197665 - RNA, 19 nt, Artificial Sequence
  Description of Artificial Sequence: Synthetic oligonucleotide
cucuguuguuaaaguccac

SEQ ID NO: 1197666 - RNA, 19 nt, Artificial Sequence
  Description of Artificial Sequence: Synthetic oligonucleotide
guuuuaacccaucgguuuu

SEQ ID NO: 1197667 - RNA, 19 nt, Artificial Sequence
  Description of Artificial Sequence: Synthetic oligonucleotide
cuguagguuugugacccug

SEQ ID NO: 1197668 - RNA, 19 nt, Artificial Sequence
  Description of Artificial Sequence: Synthetic oligonucleotide
agcugguuacuagucucug

SEQ ID NO: 1197669 - RNA, 19 nt, Artificial Sequence
  Description of Artificial Sequence: Synthetic oligonucleotide
aaaggccacuaggcauguc

SEQ ID NO: 1197670 - RNA, 19 nt, Artificial Sequence
  Description of Artificial Sequence: Synthetic oligonucleotide
agcagagacucaauauaau

SEQ ID NO: 1197671 - RNA, 19 nt, Artificial Sequence
  Description of Artificial Sequence: Synthetic oligonucleotide
gguuuuaacccaucgguuu

SEQ ID NO: 1197672 - RNA, 19 nt, Artificial Sequence
  Description of Artificial Sequence: Synthetic oligonucleotide
acugugccuuacaagacuu

SEQ ID NO: 1197673 - RNA, 19 nt, Artificial Sequence
  Description of Artificial Sequence: Synthetic oligonucleotide
ggcaugggagaccaaccac

SEQ ID NO: 1197674 - RNA, 19 nt, Artificial Sequence
  Description of Artificial Sequence: Synthetic oligonucleotide
gcaucugaguccaacuuuc

SEQ ID NO: 1197675 - RNA, 19 nt, Artificial Sequence
  Description of Artificial Sequence: Synthetic oligonucleotide
uauggaguucauggccauc

SEQ ID NO: 1197676 - RNA, 19 nt, Artificial Sequence
  Description of Artificial Sequence: Synthetic oligonucleotide
ccacucucuuauccaagcg

SEQ ID NO: 1197677 - RNA, 19 nt, Artificial Sequence
  Description of Artificial Sequence: Synthetic oligonucleotide
aacuccugacugugccuua

SEQ ID NO: 1197678 - RNA, 19 nt, Artificial Sequence
  Description of Artificial Sequence: Synthetic oligonucleotide
cacucucuuauccaagcgu

SEQ ID NO: 1197679 - RNA, 19 nt, Artificial Sequence
  Description of Artificial Sequence: Synthetic oligonucleotide
uccgggcauaccucuuagu

SEQ ID NO: 1197680 - RNA, 19 nt, Artificial Sequence
  Description of Artificial Sequence: Synthetic oligonucleotide
acccugaacugcaucauua

SEQ ID NO: 1197681 - RNA, 19 nt, Artificial Sequence
  Description of Artificial Sequence: Synthetic oligonucleotide
ccaagcguucaucuagaac

SEQ ID NO: 1197682 - RNA, 19 nt, Artificial Sequence
  Description of Artificial Sequence: Synthetic oligonucleotide
cuccuagacuuucucucca

SEQ ID NO: 1197683 - RNA, 19 nt, Artificial Sequence
  Description of Artificial Sequence: Synthetic oligonucleotide
acuuugcguuugucgugug

SEQ ID NO: 1197684 - RNA, 19 nt, Artificial Sequence
  Description of Artificial Sequence: Synthetic oligonucleotide
gagggccuccgaguggacc

SEQ ID NO: 1197685 - RNA, 19 nt, Artificial Sequence
  Description of Artificial Sequence: Synthetic oligonucleotide
uaaaaccuuuaagguucaa

SEQ ID NO: 1197686 - RNA, 19 nt, Artificial Sequence
  Description of Artificial Sequence: Synthetic oligonucleotide
gcucuguuguuaaagucca

SEQ ID NO: 1197687 - RNA, 19 nt, Artificial Sequence
  Description of Artificial Sequence: Synthetic oligonucleotide
cugggaccaggucugcuca

SEQ ID NO: 1197688 - RNA, 19 nt, Artificial Sequence
  Description of Artificial Sequence: Synthetic oligonucleotide
cgacaauaggaauuuuguc

SEQ ID NO: 1197689 - RNA, 19 nt, Artificial Sequence
  Description of Artificial Sequence: Synthetic oligonucleotide
gccacuuugcguuugucgu

SEQ ID NO: 1197690 - RNA, 19 nt, Artificial Sequence
  Description of Artificial Sequence: Synthetic oligonucleotide
agcguucaucuagaacucu

SEQ ID NO: 1197691 - RNA, 19 nt, Artificial Sequence
  Description of Artificial Sequence: Synthetic oligonucleotide
gaccaaccacuccccuccc

SEQ ID NO: 1197692 - RNA, 19 nt, Artificial Sequence
  Description of Artificial Sequence: Synthetic oligonucleotide
ggugcaagugagauuugga

SEQ ID NO: 1197693 - RNA, 19 nt, Artificial Sequence
  Description of Artificial Sequence: Synthetic oligonucleotide
gcaugucucucaaacccug

SEQ ID NO: 1197694 - RNA, 19 nt, Artificial Sequence
  Description of Artificial Sequence: Synthetic oligonucleotide
gacuuccccuccuuaaguu

SEQ ID NO: 1197695 - RNA, 19 nt, Artificial Sequence
  Description of Artificial Sequence: Synthetic oligonucleotide
caaucagggcgguugcucu

SEQ ID NO: 1197696 - RNA, 19 nt, Artificial Sequence
  Description of Artificial Sequence: Synthetic oligonucleotide
gccugguauucacaagaac

SEQ ID NO: 1197697 - RNA, 19 nt, Artificial Sequence
  Description of Artificial Sequence: Synthetic oligonucleotide
gggcaugggagaccaacca

SEQ ID NO: 1197698 - RNA, 19 nt, Artificial Sequence
  Description of Artificial Sequence: Synthetic oligonucleotide
guuacuuguuucagagccu

SEQ ID NO: 1197699 - RNA, 19 nt, Artificial Sequence
  Description of Artificial Sequence: Synthetic oligonucleotide
ggaagauaccauguugaua

SEQ ID NO: 1197700 - RNA, 19 nt, Artificial Sequence
  Description of Artificial Sequence: Synthetic oligonucleotide
agaguccggcagcaagcau

SEQ ID NO: 1197701 - RNA, 19 nt, Artificial Sequence
  Description of Artificial Sequence: Synthetic oligonucleotide
caaccacuccccuccccuc

SEQ ID NO: 1197702 - RNA, 19 nt, Artificial Sequence
  Description of Artificial Sequence: Synthetic oligonucleotide
ccaucgguuuugcuuccgg

SEQ ID NO: 1197703 - RNA, 19 nt, Artificial Sequence
  Description of Artificial Sequence: Synthetic oligonucleotide
ccacccacgacaauaggaa

SEQ ID NO: 1197704 - RNA, 19 nt, Artificial Sequence
  Description of Artificial Sequence: Synthetic oligonucleotide
ccuggcuuagccguuuaug

SEQ ID NO: 1197705 - RNA, 19 nt, Artificial Sequence
  Description of Artificial Sequence: Synthetic oligonucleotide
gcgccuaugaaagucucuc

SEQ ID NO: 1197706 - RNA, 19 nt, Artificial Sequence
  Description of Artificial Sequence: Synthetic oligonucleotide
guagcgccuaugaaagucu

SEQ ID NO: 1197707 - RNA, 19 nt, Artificial Sequence
  Description of Artificial Sequence: Synthetic oligonucleotide
guuuugcuuccgggcauac

SEQ ID NO: 1197708 - RNA, 19 nt, Artificial Sequence
  Description of Artificial Sequence: Synthetic oligonucleotide
guuugucguguggguguag

SEQ ID NO: 1197709 - RNA, 19 nt, Artificial Sequence
  Description of Artificial Sequence: Synthetic oligonucleotide
ucccggugcccaucuccug

SEQ ID NO: 1197710 - RNA, 19 nt, Artificial Sequence
  Description of Artificial Sequence: Synthetic oligonucleotide
agcgccuaugaaagucucu

SEQ ID NO: 1197711 - RNA, 19 nt, Artificial Sequence
  Description of Artificial Sequence: Synthetic oligonucleotide
gggaacuugagagggccuc

SEQ ID NO: 1197712 - RNA, 19 nt, Artificial Sequence
  Description of Artificial Sequence: Synthetic oligonucleotide
cacacauguggugacuucu

SEQ ID NO: 1197713 - RNA, 19 nt, Artificial Sequence
  Description of Artificial Sequence: Synthetic oligonucleotide
ugggaccaggucugcucaa

SEQ ID NO: 1197714 - RNA, 19 nt, Artificial Sequence
  Description of Artificial Sequence: Synthetic oligonucleotide
cacgguguagcugcucaca

SEQ ID NO: 1197715 - RNA, 19 nt, Artificial Sequence
  Description of Artificial Sequence: Synthetic oligonucleotide
cccacccugaacugcauca

SEQ ID NO: 1197716 - RNA, 19 nt, Artificial Sequence
  Description of Artificial Sequence: Synthetic oligonucleotide
cagggcgguugcucuguug

SEQ ID NO: 1197717 - RNA, 19 nt, Artificial Sequence
  Description of Artificial Sequence: Synthetic oligonucleotide
gaacuccugacugugccuu

SEQ ID NO: 1197718 - RNA, 19 nt, Artificial Sequence
  Description of Artificial Sequence: Synthetic oligonucleotide
cacuaggcaugucucucaa

SEQ ID NO: 1197719 - RNA, 19 nt, Artificial Sequence
  Description of Artificial Sequence: Synthetic oligonucleotide
accuggcuuagccguuuau

SEQ ID NO: 1197720 - RNA, 19 nt, Artificial Sequence
  Description of Artificial Sequence: Synthetic oligonucleotide
cagacuccucccacuuuga

SEQ ID NO: 1197721 - RNA, 19 nt, Artificial Sequence
  Description of Artificial Sequence: Synthetic oligonucleotide
cuuguuucagagccucaau

SEQ ID NO: 1197722 - RNA, 19 nt, Artificial Sequence
  Description of Artificial Sequence: Synthetic oligonucleotide
gggagaccaaccacucccc

SEQ ID NO: 1197723 - RNA, 19 nt, Artificial Sequence
  Description of Artificial Sequence: Synthetic oligonucleotide
ggugugcauuuucccucag

SEQ ID NO: 1197724 - RNA, 19 nt, Artificial Sequence
  Description of Artificial Sequence: Synthetic oligonucleotide
ggggaguucugccaagccu

SEQ ID NO: 1197725 - RNA, 19 nt, Artificial Sequence
  Description of Artificial Sequence: Synthetic oligonucleotide
agggaacuugagagggccu

SEQ ID NO: 1197726 - RNA, 19 nt, Artificial Sequence
  Description of Artificial Sequence: Synthetic oligonucleotide
cuuccgggcauaccucuua

SEQ ID NO: 1197727 - RNA, 19 nt, Artificial Sequence
  Description of Artificial Sequence: Synthetic oligonucleotide
ggaugaaacuuuguacuau

SEQ ID NO: 1197728 - RNA, 19 nt, Artificial Sequence
  Description of Artificial Sequence: Synthetic oligonucleotide
caaugaugauccggucaca

SEQ ID NO: 1197729 - RNA, 19 nt, Artificial Sequence
  Description of Artificial Sequence: Synthetic oligonucleotide
ccauuucuggguccaccug

SEQ ID NO: 1197730 - RNA, 19 nt, Artificial Sequence
  Description of Artificial Sequence: Synthetic oligonucleotide
caucugaguccaacuuucu

SEQ ID NO: 1197731 - RNA, 19 nt, Artificial Sequence
  Description of Artificial Sequence: Synthetic oligonucleotide
cacuuugcguuugucgugu

SEQ ID NO: 1197732 - RNA, 19 nt, Artificial Sequence
  Description of Artificial Sequence: Synthetic oligonucleotide
ccuagacuuucucuccaca

SEQ ID NO: 1197733 - RNA, 19 nt, Artificial Sequence
  Description of Artificial Sequence: Synthetic oligonucleotide
ugguuccacccacgacaau

SEQ ID NO: 1197734 - RNA, 19 nt, Artificial Sequence
  Description of Artificial Sequence: Synthetic oligonucleotide
ucagggcgguugcucuguu

SEQ ID NO: 1197735 - RNA, 19 nt, Artificial Sequence
  Description of Artificial Sequence: Synthetic oligonucleotide
gcgguugcucuguuguuaa

SEQ ID NO: 1197736 - RNA, 19 nt, Artificial Sequence
  Description of Artificial Sequence: Synthetic oligonucleotide
ccggugcccaucuccuggg

SEQ ID NO: 1197737 - RNA, 19 nt, Artificial Sequence
  Description of Artificial Sequence: Synthetic oligonucleotide
gcguuugucgugugggugu

SEQ ID NO: 1197738 - RNA, 19 nt, Artificial Sequence
  Description of Artificial Sequence: Synthetic oligonucleotide
agagggccuccgaguggac

SEQ ID NO: 1197739 - RNA, 19 nt, Artificial Sequence
  Description of Artificial Sequence: Synthetic oligonucleotide
cuuagccguuuauggaguu

SEQ ID NO: 1197740 - RNA, 19 nt, Artificial Sequence
  Description of Artificial Sequence: Synthetic oligonucleotide
cuagucucuggugugcauu

SEQ ID NO: 1197741 - RNA, 19 nt, Artificial Sequence
  Description of Artificial Sequence: Synthetic oligonucleotide
aucuucaaucagggcgguu

SEQ ID NO: 1197742 - RNA, 19 nt, Artificial Sequence
  Description of Artificial Sequence: Synthetic oligonucleotide
gccaauugacuggaagaua

SEQ ID NO: 1197743 - RNA, 19 nt, Artificial Sequence
  Description of Artificial Sequence: Synthetic oligonucleotide
gagccucaauaccuuucuu

SEQ ID NO: 1197744 - RNA, 19 nt, Artificial Sequence
  Description of Artificial Sequence: Synthetic oligonucleotide
ggcaugucucucaaacccu

SEQ ID NO: 1197745 - RNA, 19 nt, Artificial Sequence
  Description of Artificial Sequence: Synthetic oligonucleotide
cacccacgacaauaggaau

SEQ ID NO: 1197746 - RNA, 19 nt, Artificial Sequence
  Description of Artificial Sequence: Synthetic oligonucleotide
cuucauuauacggcaucuu

SEQ ID NO: 1197747 - RNA, 19 nt, Artificial Sequence
  Description of Artificial Sequence: Synthetic oligonucleotide
ccuccgaguggaccaccgc

SEQ ID NO: 1197748 - RNA, 19 nt, Artificial Sequence
  Description of Artificial Sequence: Synthetic oligonucleotide
ggccugguauucacaagaa

SEQ ID NO: 1197749 - RNA, 19 nt, Artificial Sequence
  Description of Artificial Sequence: Synthetic oligonucleotide
agccguuuauggaguucau

SEQ ID NO: 1197750 - RNA, 19 nt, Artificial Sequence
  Description of Artificial Sequence: Synthetic oligonucleotide
gcuuagccguuuauggagu

SEQ ID NO: 1197751 - RNA, 19 nt, Artificial Sequence
  Description of Artificial Sequence: Synthetic oligonucleotide
ccccaaugaugauccgguc

SEQ ID NO: 1197752 - RNA, 19 nt, Artificial Sequence
  Description of Artificial Sequence: Synthetic oligonucleotide
cguucaucuagaacucucu

SEQ ID NO: 1197753 - RNA, 19 nt, Artificial Sequence
  Description of Artificial Sequence: Synthetic oligonucleotide
ccacucccgguccccaaug

SEQ ID NO: 1197754 - RNA, 19 nt, Artificial Sequence
  Description of Artificial Sequence: Synthetic oligonucleotide
ggagaccaaccacuccccu

SEQ ID NO: 1197755 - RNA, 19 nt, Artificial Sequence
  Description of Artificial Sequence: Synthetic oligonucleotide
cuugcugcacuggggacuu

SEQ ID NO: 1197756 - RNA, 19 nt, Artificial Sequence
  Description of Artificial Sequence: Synthetic oligonucleotide
cuccccuccuagacuuucu

SEQ ID NO: 1197757 - RNA, 19 nt, Artificial Sequence
  Description of Artificial Sequence: Synthetic oligonucleotide
cgggcauaccucuuaguua

SEQ ID NO: 1197758 - RNA, 19 nt, Artificial Sequence
  Description of Artificial Sequence: Synthetic oligonucleotide
ccaaccacuccccuccccu

SEQ ID NO: 1197759 - RNA, 19 nt, Artificial Sequence
  Description of Artificial Sequence: Synthetic oligonucleotide
ggguguagcuuggcagcca

SEQ ID NO: 1197760 - RNA, 19 nt, Artificial Sequence
  Description of Artificial Sequence: Synthetic oligonucleotide
cgccuaugaaagucucuca

SEQ ID NO: 1197761 - RNA, 19 nt, Artificial Sequence
  Description of Artificial Sequence: Synthetic oligonucleotide
ccgggcauaccucuuaguu

SEQ ID NO: 1197762 - RNA, 19 nt, Artificial Sequence
  Description of Artificial Sequence: Synthetic oligonucleotide
gguacucgugaaauuccuu

SEQ ID NO: 1197763 - RNA, 19 nt, Artificial Sequence
  Description of Artificial Sequence: Synthetic oligonucleotide
gcauaccucuuaguuacuu

SEQ ID NO: 1197764 - RNA, 19 nt, Artificial Sequence
  Description of Artificial Sequence: Synthetic oligonucleotide
caccuggcuuagccguuua

SEQ ID NO: 1197765 - RNA, 19 nt, Artificial Sequence
  Description of Artificial Sequence: Synthetic oligonucleotide
cccacgacaauaggaauuu

SEQ ID NO: 1197766 - RNA, 19 nt, Artificial Sequence
  Description of Artificial Sequence: Synthetic oligonucleotide
ggccuccgaguggaccacc

SEQ ID NO: 1197767 - RNA, 19 nt, Artificial Sequence
  Description of Artificial Sequence: Synthetic oligonucleotide
cgaguggaccaccgccuuc

SEQ ID NO: 1197768 - RNA, 19 nt, Artificial Sequence
  Description of Artificial Sequence: Synthetic oligonucleotide
gcuguagguuugugacccu

SEQ ID NO: 1197769 - RNA, 19 nt, Artificial Sequence
  Description of Artificial Sequence: Synthetic oligonucleotide
ggaguggcuguagguuugu

SEQ ID NO: 1197770 - RNA, 19 nt, Artificial Sequence
  Description of Artificial Sequence: Synthetic oligonucleotide
cgguuuuaacccaucgguu

SEQ ID NO: 1197771 - RNA, 19 nt, Artificial Sequence
  Description of Artificial Sequence: Synthetic oligonucleotide
ggcauaccucuuaguuacu

SEQ ID NO: 1197772 - RNA, 19 nt, Artificial Sequence
  Description of Artificial Sequence: Synthetic oligonucleotide
gggcgguugcucuguuguu

SEQ ID NO: 1197773 - RNA, 19 nt, Artificial Sequence
  Description of Artificial Sequence: Synthetic oligonucleotide
gcuuuccggucaaccacuu

SEQ ID NO: 1197774 - RNA, 19 nt, Artificial Sequence
  Description of Artificial Sequence: Synthetic oligonucleotide
cguuugucgugugggugua

SEQ ID NO: 1197775 - RNA, 19 nt, Artificial Sequence
  Description of Artificial Sequence: Synthetic oligonucleotide
ccgaguggaccaccgccuu

SEQ ID NO: 1197776 - RNA, 19 nt, Artificial Sequence
  Description of Artificial Sequence: Synthetic oligonucleotide
ccacuccccuccccuccua

SEQ ID NO: 1197777 - RNA, 19 nt, Artificial Sequence
  Description of Artificial Sequence: Synthetic oligonucleotide
ccacgacaauaggaauuuu

SEQ ID NO: 1197778 - RNA, 19 nt, Artificial Sequence
  Description of Artificial Sequence: Synthetic oligonucleotide
ccaccuggcuuagccguuu

SEQ ID NO: 1197779 - RNA, 19 nt, Artificial Sequence
  Description of Artificial Sequence: Synthetic oligonucleotide
aaauuugaauaacagcaac

SEQ ID NO: 1197780 - RNA, 19 nt, Artificial Sequence
  Description of Artificial Sequence: Synthetic oligonucleotide
uccuuauuaagucaggagg

SEQ ID NO: 1197781 - RNA, 19 nt, Artificial Sequence
  Description of Artificial Sequence: Synthetic oligonucleotide
aauaaccuuuucaauagcc

SEQ ID NO: 1197782 - RNA, 19 nt, Artificial Sequence
  Description of Artificial Sequence: Synthetic oligonucleotide
agaaauuugaauaacagca

SEQ ID NO: 1197783 - RNA, 19 nt, Artificial Sequence
  Description of Artificial Sequence: Synthetic oligonucleotide
caaacuacagaaacaaugg

SEQ ID NO: 1197784 - RNA, 19 nt, Artificial Sequence
  Description of Artificial Sequence: Synthetic oligonucleotide
cuaaauuacaagaaauuug

SEQ ID NO: 1197785 - RNA, 19 nt, Artificial Sequence
  Description of Artificial Sequence: Synthetic oligonucleotide
aauuuuaaggagggaaggc

SEQ ID NO: 1197786 - RNA, 19 nt, Artificial Sequence
  Description of Artificial Sequence: Synthetic oligonucleotide
uuacacaggagcaaucagg

SEQ ID NO: 1197787 - RNA, 19 nt, Artificial Sequence
  Description of Artificial Sequence: Synthetic oligonucleotide
ucaacugcuacacaacugc

SEQ ID NO: 1197788 - RNA, 19 nt, Artificial Sequence
  Description of Artificial Sequence: Synthetic oligonucleotide
uuagaauuguauuugguaa

SEQ ID NO: 1197789 - RNA, 19 nt, Artificial Sequence
  Description of Artificial Sequence: Synthetic oligonucleotide
auuacaccaacuuucguag

SEQ ID NO: 1197790 - RNA, 19 nt, Artificial Sequence
  Description of Artificial Sequence: Synthetic oligonucleotide
acugcuacacaacugcgcc

SEQ ID NO: 1197791 - RNA, 19 nt, Artificial Sequence
  Description of Artificial Sequence: Synthetic oligonucleotide
aauuacaccaacuuucgua

SEQ ID NO: 1197792 - RNA, 19 nt, Artificial Sequence
  Description of Artificial Sequence: Synthetic oligonucleotide
cagauuaucauuuagaccu

SEQ ID NO: 1197793 - RNA, 19 nt, Artificial Sequence
  Description of Artificial Sequence: Synthetic oligonucleotide
ucugaagucgcucaccuca

SEQ ID NO: 1197794 - RNA, 19 nt, Artificial Sequence
  Description of Artificial Sequence: Synthetic oligonucleotide
uucuuaagaggacaccgcg

SEQ ID NO: 1197795 - RNA, 19 nt, Artificial Sequence
  Description of Artificial Sequence: Synthetic oligonucleotide
augguuauaguacagaaua

SEQ ID NO: 1197796 - RNA, 19 nt, Artificial Sequence
  Description of Artificial Sequence: Synthetic oligonucleotide
aaguccucuguuaagcugc

SEQ ID NO: 1197797 - RNA, 19 nt, Artificial Sequence
  Description of Artificial Sequence: Synthetic oligonucleotide
aauuagguuaccaaucugu

SEQ ID NO: 1197798 - RNA, 19 nt, Artificial Sequence
  Description of Artificial Sequence: Synthetic oligonucleotide
uuuaccucaaauauccaau

SEQ ID NO: 1197799 - RNA, 19 nt, Artificial Sequence
  Description of Artificial Sequence: Synthetic oligonucleotide
aacacgccaccuuaacagc

SEQ ID NO: 1197800 - RNA, 19 nt, Artificial Sequence
  Description of Artificial Sequence: Synthetic oligonucleotide
aagagauuagaauuguauu

SEQ ID NO: 1197801 - RNA, 19 nt, Artificial Sequence
  Description of Artificial Sequence: Synthetic oligonucleotide
ucgaagacgcgccucagcg

SEQ ID NO: 1197802 - RNA, 19 nt, Artificial Sequence
  Description of Artificial Sequence: Synthetic oligonucleotide
uccauuaucuauauugcaa

SEQ ID NO: 1197803 - RNA, 19 nt, Artificial Sequence
  Description of Artificial Sequence: Synthetic oligonucleotide
uuaacagcuaaccagcauu

SEQ ID NO: 1197804 - RNA, 19 nt, Artificial Sequence
  Description of Artificial Sequence: Synthetic oligonucleotide
uuuauacaaauuuggguuc

SEQ ID NO: 1197805 - RNA, 19 nt, Artificial Sequence
  Description of Artificial Sequence: Synthetic oligonucleotide
caauguugagucaaucugc

SEQ ID NO: 1197806 - RNA, 19 nt, Artificial Sequence
  Description of Artificial Sequence: Synthetic oligonucleotide
uacauaagagaagagauua

SEQ ID NO: 1197807 - RNA, 19 nt, Artificial Sequence
  Description of Artificial Sequence: Synthetic oligonucleotide
acaaauuagguuaccaauc

SEQ ID NO: 1197808 - RNA, 19 nt, Artificial Sequence
  Description of Artificial Sequence: Synthetic oligonucleotide
cuuaagaggacaccgcgcc

SEQ ID NO: 1197809 - RNA, 19 nt, Artificial Sequence
  Description of Artificial Sequence: Synthetic oligonucleotide
agagauuagaauuguauuu

SEQ ID NO: 1197810 - RNA, 19 nt, Artificial Sequence
  Description of Artificial Sequence: Synthetic oligonucleotide
ugaaaucugaagucgcuca

SEQ ID NO: 1197811 - RNA, 19 nt, Artificial Sequence
  Description of Artificial Sequence: Synthetic oligonucleotide
aaauuagguuaccaaucug

SEQ ID NO: 1197812 - RNA, 19 nt, Artificial Sequence
  Description of Artificial Sequence: Synthetic oligonucleotide
aaaguccucuguuaagcug

SEQ ID NO: 1197813 - RNA, 19 nt, Artificial Sequence
  Description of Artificial Sequence: Synthetic oligonucleotide
caacacgccaccuuaacag

SEQ ID NO: 1197814 - RNA, 19 nt, Artificial Sequence
  Description of Artificial Sequence: Synthetic oligonucleotide
accucacuaaauuacaaga

SEQ ID NO: 1197815 - RNA, 19 nt, Artificial Sequence
  Description of Artificial Sequence: Synthetic oligonucleotide
uuaagcugcuugucgaucc

SEQ ID NO: 1197816 - RNA, 19 nt, Artificial Sequence
  Description of Artificial Sequence: Synthetic oligonucleotide
uuuaggcuguguguaaugg

SEQ ID NO: 1197817 - RNA, 19 nt, Artificial Sequence
  Description of Artificial Sequence: Synthetic oligonucleotide
accuuaacagcuaaccagc

SEQ ID NO: 1197818 - RNA, 19 nt, Artificial Sequence
  Description of Artificial Sequence: Synthetic oligonucleotide
uuaauaaacuggacagcca

SEQ ID NO: 1197819 - RNA, 19 nt, Artificial Sequence
  Description of Artificial Sequence: Synthetic oligonucleotide
uuacucaacugcuacacaa

SEQ ID NO: 1197820 - RNA, 19 nt, Artificial Sequence
  Description of Artificial Sequence: Synthetic oligonucleotide
uuucuuaagaggacaccgc

SEQ ID NO: 1197821 - RNA, 19 nt, Artificial Sequence
  Description of Artificial Sequence: Synthetic oligonucleotide
auguacacgucgccgacgc

SEQ ID NO: 1197822 - RNA, 19 nt, Artificial Sequence
  Description of Artificial Sequence: Synthetic oligonucleotide
uauuaagucaggaggccac

SEQ ID NO: 1197823 - RNA, 19 nt, Artificial Sequence
  Description of Artificial Sequence: Synthetic oligonucleotide
aaguuugccaccugaggca

SEQ ID NO: 1197824 - RNA, 19 nt, Artificial Sequence
  Description of Artificial Sequence: Synthetic oligonucleotide
acgacuuggacuuggaccu

SEQ ID NO: 1197825 - RNA, 19 nt, Artificial Sequence
  Description of Artificial Sequence: Synthetic oligonucleotide
augaaauuuuaccucaaau

SEQ ID NO: 1197826 - RNA, 19 nt, Artificial Sequence
  Description of Artificial Sequence: Synthetic oligonucleotide
gaggccacaaauuagguua

SEQ ID NO: 1197827 - RNA, 19 nt, Artificial Sequence
  Description of Artificial Sequence: Synthetic oligonucleotide
aaguuagacaaauguuaca

SEQ ID NO: 1197828 - RNA, 19 nt, Artificial Sequence
  Description of Artificial Sequence: Synthetic oligonucleotide
uauugcaaggcccggguga

SEQ ID NO: 1197829 - RNA, 19 nt, Artificial Sequence
  Description of Artificial Sequence: Synthetic oligonucleotide
uuuggguucagauuaucau

SEQ ID NO: 1197830 - RNA, 19 nt, Artificial Sequence
  Description of Artificial Sequence: Synthetic oligonucleotide
ucuuaagaggacaccgcgc

SEQ ID NO: 1197831 - RNA, 19 nt, Artificial Sequence
  Description of Artificial Sequence: Synthetic oligonucleotide
gaagguaaauaacauauau

SEQ ID NO: 1197832 - RNA, 19 nt, Artificial Sequence
  Description of Artificial Sequence: Synthetic oligonucleotide
uagaauuguauuugguaaa

SEQ ID NO: 1197833 - RNA, 19 nt, Artificial Sequence
  Description of Artificial Sequence: Synthetic oligonucleotide
aucuauauugcaaggcccg

SEQ ID NO: 1197834 - RNA, 19 nt, Artificial Sequence
  Description of Artificial Sequence: Synthetic oligonucleotide
cagcuaaccagcauuacuc

SEQ ID NO: 1197835 - RNA, 19 nt, Artificial Sequence
  Description of Artificial Sequence: Synthetic oligonucleotide
aauguugagucaaucugcu

SEQ ID NO: 1197836 - RNA, 19 nt, Artificial Sequence
  Description of Artificial Sequence: Synthetic oligonucleotide
uaacuaccaagaaaacacu

SEQ ID NO: 1197837 - RNA, 19 nt, Artificial Sequence
  Description of Artificial Sequence: Synthetic oligonucleotide
cacuuuaaucaaacuacag

SEQ ID NO: 1197838 - RNA, 19 nt, Artificial Sequence
  Description of Artificial Sequence: Synthetic oligonucleotide
uccaccuugagggagguca

SEQ ID NO: 1197839 - RNA, 19 nt, Artificial Sequence
  Description of Artificial Sequence: Synthetic oligonucleotide
auuuuaaggagggaaggca

SEQ ID NO: 1197840 - RNA, 19 nt, Artificial Sequence
  Description of Artificial Sequence: Synthetic oligonucleotide
gaagacgcgccucagcgug

SEQ ID NO: 1197841 - RNA, 19 nt, Artificial Sequence
  Description of Artificial Sequence: Synthetic oligonucleotide
aacaaugguuauaguacag

SEQ ID NO: 1197842 - RNA, 19 nt, Artificial Sequence
  Description of Artificial Sequence: Synthetic oligonucleotide
aaauuacaccaacuuucgu

SEQ ID NO: 1197843 - RNA, 19 nt, Artificial Sequence
  Description of Artificial Sequence: Synthetic oligonucleotide
uggacuuggaccuccgcgc

SEQ ID NO: 1197844 - RNA, 19 nt, Artificial Sequence
  Description of Artificial Sequence: Synthetic oligonucleotide
uggguucagauuaucauuu

SEQ ID NO: 1197845 - RNA, 19 nt, Artificial Sequence
  Description of Artificial Sequence: Synthetic oligonucleotide
uguaauggcugcaaacguu

SEQ ID NO: 1197846 - RNA, 19 nt, Artificial Sequence
  Description of Artificial Sequence: Synthetic oligonucleotide
uuaccucaaauauccaauc

SEQ ID NO: 1197847 - RNA, 19 nt, Artificial Sequence
  Description of Artificial Sequence: Synthetic oligonucleotide
auauccaauccaauaauga

SEQ ID NO: 1197848 - RNA, 19 nt, Artificial Sequence
  Description of Artificial Sequence: Synthetic oligonucleotide
gcaauguugagucaaucug

SEQ ID NO: 1197849 - RNA, 19 nt, Artificial Sequence
  Description of Artificial Sequence: Synthetic oligonucleotide
uguaugcuccauuaucuau

SEQ ID NO: 1197850 - RNA, 19 nt, Artificial Sequence
  Description of Artificial Sequence: Synthetic oligonucleotide
aaugguuauaguacagaau

SEQ ID NO: 1197851 - RNA, 19 nt, Artificial Sequence
  Description of Artificial Sequence: Synthetic oligonucleotide
agcgugucgggcgaggugc

SEQ ID NO: 1197852 - RNA, 19 nt, Artificial Sequence
  Description of Artificial Sequence: Synthetic oligonucleotide
ucuauauugcaaggcccgg

SEQ ID NO: 1197853 - RNA, 19 nt, Artificial Sequence
  Description of Artificial Sequence: Synthetic oligonucleotide
ugguguagcggucccgcgg

SEQ ID NO: 1197854 - RNA, 19 nt, Artificial Sequence
  Description of Artificial Sequence: Synthetic oligonucleotide
gacgcggccguacuucucg

SEQ ID NO: 1197855 - RNA, 19 nt, Artificial Sequence
  Description of Artificial Sequence: Synthetic oligonucleotide
gaaauuugaauaacagcaa

SEQ ID NO: 1197856 - RNA, 19 nt, Artificial Sequence
  Description of Artificial Sequence: Synthetic oligonucleotide
uuacaccaacuuucguagg

SEQ ID NO: 1197857 - RNA, 19 nt, Artificial Sequence
  Description of Artificial Sequence: Synthetic oligonucleotide
uaacagcuaaccagcauua

SEQ ID NO: 1197858 - RNA, 19 nt, Artificial Sequence
  Description of Artificial Sequence: Synthetic oligonucleotide
uuaaggagggaaggcaaug

SEQ ID NO: 1197859 - RNA, 19 nt, Artificial Sequence
  Description of Artificial Sequence: Synthetic oligonucleotide
ugcacgacaaggcaucuuu

SEQ ID NO: 1197860 - RNA, 19 nt, Artificial Sequence
  Description of Artificial Sequence: Synthetic oligonucleotide
uuggguucagauuaucauu

SEQ ID NO: 1197861 - RNA, 19 nt, Artificial Sequence
  Description of Artificial Sequence: Synthetic oligonucleotide
ggugcgguaggucagguug

SEQ ID NO: 1197862 - RNA, 19 nt, Artificial Sequence
  Description of Artificial Sequence: Synthetic oligonucleotide
uuucugcacgacaaggcau

SEQ ID NO: 1197863 - RNA, 19 nt, Artificial Sequence
  Description of Artificial Sequence: Synthetic oligonucleotide
gacaaggcaucuuuacaca

SEQ ID NO: 1197864 - RNA, 19 nt, Artificial Sequence
  Description of Artificial Sequence: Synthetic oligonucleotide
ugguuauaguacagaauau

SEQ ID NO: 1197865 - RNA, 19 nt, Artificial Sequence
  Description of Artificial Sequence: Synthetic oligonucleotide
uucugcacgacaaggcauc

SEQ ID NO: 1197866 - RNA, 19 nt, Artificial Sequence
  Description of Artificial Sequence: Synthetic oligonucleotide
ggucaugcccuccacgucg

SEQ ID NO: 1197867 - RNA, 19 nt, Artificial Sequence
  Description of Artificial Sequence: Synthetic oligonucleotide
ucgagcgggaucuggagac

SEQ ID NO: 1197868 - RNA, 19 nt, Artificial Sequence
  Description of Artificial Sequence: Synthetic oligonucleotide
augugcucacuguaugcuc

SEQ ID NO: 1197869 - RNA, 19 nt, Artificial Sequence
  Description of Artificial Sequence: Synthetic oligonucleotide
auaaccuuuucaauagcca

SEQ ID NO: 1197870 - RNA, 19 nt, Artificial Sequence
  Description of Artificial Sequence: Synthetic oligonucleotide
uaugcuccauuaucuauau

SEQ ID NO: 1197871 - RNA, 19 nt, Artificial Sequence
  Description of Artificial Sequence: Synthetic oligonucleotide
acggacgacgacuuggacu

SEQ ID NO: 1197872 - RNA, 19 nt, Artificial Sequence
  Description of Artificial Sequence: Synthetic oligonucleotide
uggaccuccgcgcggaucu

SEQ ID NO: 1197873 - RNA, 19 nt, Artificial Sequence
  Description of Artificial Sequence: Synthetic oligonucleotide
cuugucguggaagcggacg

SEQ ID NO: 1197874 - RNA, 19 nt, Artificial Sequence
  Description of Artificial Sequence: Synthetic oligonucleotide
gaagagauuagaauuguau

SEQ ID NO: 1197875 - RNA, 19 nt, Artificial Sequence
  Description of Artificial Sequence: Synthetic oligonucleotide
auuuaucaucagcuagaug

SEQ ID NO: 1197876 - RNA, 19 nt, Artificial Sequence
  Description of Artificial Sequence: Synthetic oligonucleotide
ugcuugucgauccaucauu

SEQ ID NO: 1197877 - RNA, 19 nt, Artificial Sequence
  Description of Artificial Sequence: Synthetic oligonucleotide
cuuggagcggcuguagcgg

SEQ ID NO: 1197878 - RNA, 19 nt, Artificial Sequence
  Description of Artificial Sequence: Synthetic oligonucleotide
uguagcgggaucggcuucg

SEQ ID NO: 1197879 - RNA, 19 nt, Artificial Sequence
  Description of Artificial Sequence: Synthetic oligonucleotide
cuauauugcaaggcccggg

SEQ ID NO: 1197880 - RNA, 19 nt, Artificial Sequence
  Description of Artificial Sequence: Synthetic oligonucleotide
guacacgucgccgacgcgg

SEQ ID NO: 1197881 - RNA, 19 nt, Artificial Sequence
  Description of Artificial Sequence: Synthetic oligonucleotide
uggaccgauggacugaguu

SEQ ID NO: 1197882 - RNA, 19 nt, Artificial Sequence
  Description of Artificial Sequence: Synthetic oligonucleotide
cauuuagaccugaagguaa

SEQ ID NO: 1197883 - RNA, 19 nt, Artificial Sequence
  Description of Artificial Sequence: Synthetic oligonucleotide
auaaacuggacagccauuu

SEQ ID NO: 1197884 - RNA, 19 nt, Artificial Sequence
  Description of Artificial Sequence: Synthetic oligonucleotide
guguguaauggcugcaaac

SEQ ID NO: 1197885 - RNA, 19 nt, Artificial Sequence
  Description of Artificial Sequence: Synthetic oligonucleotide
cacgacaaggcaucuuuac

SEQ ID NO: 1197886 - RNA, 19 nt, Artificial Sequence
  Description of Artificial Sequence: Synthetic oligonucleotide
agcgggaucggcuucggga

SEQ ID NO: 1197887 - RNA, 19 nt, Artificial Sequence
  Description of Artificial Sequence: Synthetic oligonucleotide
gaagccgcgggacuccuug

SEQ ID NO: 1197888 - RNA, 19 nt, Artificial Sequence
  Description of Artificial Sequence: Synthetic oligonucleotide
uuagaccugaagguaaaua

SEQ ID NO: 1197889 - RNA, 19 nt, Artificial Sequence
  Description of Artificial Sequence: Synthetic oligonucleotide
agcuaaccagcauuacuca

SEQ ID NO: 1197890 - RNA, 19 nt, Artificial Sequence
  Description of Artificial Sequence: Synthetic oligonucleotide
acucugcacugcaacacgc

SEQ ID NO: 1197891 - RNA, 19 nt, Artificial Sequence
  Description of Artificial Sequence: Synthetic oligonucleotide
acugcaacacgccaccuua

SEQ ID NO: 1197892 - RNA, 19 nt, Artificial Sequence
  Description of Artificial Sequence: Synthetic oligonucleotide
cuggaucucgaccuggauc

SEQ ID NO: 1197893 - RNA, 19 nt, Artificial Sequence
  Description of Artificial Sequence: Synthetic oligonucleotide
ucuucgagcgcgaccggga

SEQ ID NO: 1197894 - RNA, 19 nt, Artificial Sequence
  Description of Artificial Sequence: Synthetic oligonucleotide
uuaagaggacaccgcgccu

SEQ ID NO: 1197895 - RNA, 19 nt, Artificial Sequence
  Description of Artificial Sequence: Synthetic oligonucleotide
gauguacacgucgccgacg

SEQ ID NO: 1197896 - RNA, 19 nt, Artificial Sequence
  Description of Artificial Sequence: Synthetic oligonucleotide
gaccgauggacugaguuuc

SEQ ID NO: 1197897 - RNA, 19 nt, Artificial Sequence
  Description of Artificial Sequence: Synthetic oligonucleotide
cuaccaagaaaacacuuua

SEQ ID NO: 1197898 - RNA, 19 nt, Artificial Sequence
  Description of Artificial Sequence: Synthetic oligonucleotide
aguugucaggcauuuuaau

SEQ ID NO: 1197899 - RNA, 19 nt, Artificial Sequence
  Description of Artificial Sequence: Synthetic oligonucleotide
aacuaccaagaaaacacuu

SEQ ID NO: 1197900 - RNA, 19 nt, Artificial Sequence
  Description of Artificial Sequence: Synthetic oligonucleotide
gaucucgaccuggaucugg

SEQ ID NO: 1197901 - RNA, 19 nt, Artificial Sequence
  Description of Artificial Sequence: Synthetic oligonucleotide
gacgacgacuuggacuugg

SEQ ID NO: 1197902 - RNA, 19 nt, Artificial Sequence
  Description of Artificial Sequence: Synthetic oligonucleotide
uuggagcggcuguagcggg

SEQ ID NO: 1197903 - RNA, 19 nt, Artificial Sequence
  Description of Artificial Sequence: Synthetic oligonucleotide
caaauuagguuaccaaucu

SEQ ID NO: 1197904 - RNA, 19 nt, Artificial Sequence
  Description of Artificial Sequence: Synthetic oligonucleotide
cuguuaagcugcuugucga

SEQ ID NO: 1197905 - RNA, 19 nt, Artificial Sequence
  Description of Artificial Sequence: Synthetic oligonucleotide
ggcucuucgagcgcgaccg

SEQ ID NO: 1197906 - RNA, 19 nt, Artificial Sequence
  Description of Artificial Sequence: Synthetic oligonucleotide
agcacucugcacugcaaca

SEQ ID NO: 1197907 - RNA, 19 nt, Artificial Sequence
  Description of Artificial Sequence: Synthetic oligonucleotide
ucgcucaccucacuaaauu

SEQ ID NO: 1197908 - RNA, 19 nt, Artificial Sequence
  Description of Artificial Sequence: Synthetic oligonucleotide
gguguagcggucccgcggg

SEQ ID NO: 1197909 - RNA, 19 nt, Artificial Sequence
  Description of Artificial Sequence: Synthetic oligonucleotide
uguacacgucgccgacgcg

SEQ ID NO: 1197910 - RNA, 19 nt, Artificial Sequence
  Description of Artificial Sequence: Synthetic oligonucleotide
cucgaccuggaucuggauc

SEQ ID NO: 1197911 - RNA, 19 nt, Artificial Sequence
  Description of Artificial Sequence: Synthetic oligonucleotide
auguugagucaaucugcug

SEQ ID NO: 1197912 - RNA, 19 nt, Artificial Sequence
  Description of Artificial Sequence: Synthetic oligonucleotide
aaauuuggguucagauuau

SEQ ID NO: 1197913 - RNA, 19 nt, Artificial Sequence
  Description of Artificial Sequence: Synthetic oligonucleotide
ugcuacacaacugcgccua

SEQ ID NO: 1197914 - RNA, 19 nt, Artificial Sequence
  Description of Artificial Sequence: Synthetic oligonucleotide
auuagguuaccaaucuguu

SEQ ID NO: 1197915 - RNA, 19 nt, Artificial Sequence
  Description of Artificial Sequence: Synthetic oligonucleotide
cguuuccuuauuaagucag

SEQ ID NO: 1197916 - RNA, 19 nt, Artificial Sequence
  Description of Artificial Sequence: Synthetic oligonucleotide
gacuuggaccuccgcgcgg

SEQ ID NO: 1197917 - RNA, 19 nt, Artificial Sequence
  Description of Artificial Sequence: Synthetic oligonucleotide
gcuccauuaucuauauugc

SEQ ID NO: 1197918 - RNA, 19 nt, Artificial Sequence
  Description of Artificial Sequence: Synthetic oligonucleotide
aagccgcgggacuccuugg

SEQ ID NO: 1197919 - RNA, 19 nt, Artificial Sequence
  Description of Artificial Sequence: Synthetic oligonucleotide
agccaagcacucugcacug

SEQ ID NO: 1197920 - RNA, 19 nt, Artificial Sequence
  Description of Artificial Sequence: Synthetic oligonucleotide
gaagucgcucaccucacua

SEQ ID NO: 1197921 - RNA, 19 nt, Artificial Sequence
  Description of Artificial Sequence: Synthetic oligonucleotide
aggcaauguugagucaauc

SEQ ID NO: 1197922 - RNA, 19 nt, Artificial Sequence
  Description of Artificial Sequence: Synthetic oligonucleotide
guuaccaaucuguuuaauu

SEQ ID NO: 1197923 - RNA, 19 nt, Artificial Sequence
  Description of Artificial Sequence: Synthetic oligonucleotide
gugagcgcgaccgcgugcg

SEQ ID NO: 1197924 - RNA, 19 nt, Artificial Sequence
  Description of Artificial Sequence: Synthetic oligonucleotide
ugaagucgcucaccucacu

SEQ ID NO: 1197925 - RNA, 19 nt, Artificial Sequence
  Description of Artificial Sequence: Synthetic oligonucleotide
agauuaucauuuagaccug

SEQ ID NO: 1197926 - RNA, 19 nt, Artificial Sequence
  Description of Artificial Sequence: Synthetic oligonucleotide
agucgcucaccucacuaaa

SEQ ID NO: 1197927 - RNA, 19 nt, Artificial Sequence
  Description of Artificial Sequence: Synthetic oligonucleotide
uuugccaccugaggcagau

SEQ ID NO: 1197928 - RNA, 19 nt, Artificial Sequence
  Description of Artificial Sequence: Synthetic oligonucleotide
aacugcgccuagugcacaa

SEQ ID NO: 1197929 - RNA, 19 nt, Artificial Sequence
  Description of Artificial Sequence: Synthetic oligonucleotide
uggagacggacgacgacuu

SEQ ID NO: 1197930 - RNA, 19 nt, Artificial Sequence
  Description of Artificial Sequence: Synthetic oligonucleotide
cugaagucgcucaccucac

SEQ ID NO: 1197931 - RNA, 19 nt, Artificial Sequence
  Description of Artificial Sequence: Synthetic oligonucleotide
uuuagaccugaagguaaau

SEQ ID NO: 1197932 - RNA, 19 nt, Artificial Sequence
  Description of Artificial Sequence: Synthetic oligonucleotide
ucgggcgaggugcgguagg

SEQ ID NO: 1197933 - RNA, 19 nt, Artificial Sequence
  Description of Artificial Sequence: Synthetic oligonucleotide
cucgaagacgcgccucagc

SEQ ID NO: 1197934 - RNA, 19 nt, Artificial Sequence
  Description of Artificial Sequence: Synthetic oligonucleotide
ugcgggaccgagacuugga

SEQ ID NO: 1197935 - RNA, 19 nt, Artificial Sequence
  Description of Artificial Sequence: Synthetic oligonucleotide
guagcgcgccaucugcacc

SEQ ID NO: 1197936 - RNA, 19 nt, Artificial Sequence
  Description of Artificial Sequence: Synthetic oligonucleotide
auuuagaccugaagguaaa

SEQ ID NO: 1197937 - RNA, 19 nt, Artificial Sequence
  Description of Artificial Sequence: Synthetic oligonucleotide
agggaggucaugcccucca

SEQ ID NO: 1197938 - RNA, 19 nt, Artificial Sequence
  Description of Artificial Sequence: Synthetic oligonucleotide
aggcagauuaaaacaagua

SEQ ID NO: 1197939 - RNA, 19 nt, Artificial Sequence
  Description of Artificial Sequence: Synthetic oligonucleotide
ggacuuggaccuccgcgcg

SEQ ID NO: 1197940 - RNA, 19 nt, Artificial Sequence
  Description of Artificial Sequence: Synthetic oligonucleotide
guuaagcugcuugucgauc

SEQ ID NO: 1197941 - RNA, 19 nt, Artificial Sequence
  Description of Artificial Sequence: Synthetic oligonucleotide
agcuuuaggcuguguguaa

SEQ ID NO: 1197942 - RNA, 19 nt, Artificial Sequence
  Description of Artificial Sequence: Synthetic oligonucleotide
guaccugcggggcggcggg

SEQ ID NO: 1197943 - RNA, 19 nt, Artificial Sequence
  Description of Artificial Sequence: Synthetic oligonucleotide
gucguggaagcggacgaag

SEQ ID NO: 1197944 - RNA, 19 nt, Artificial Sequence
  Description of Artificial Sequence: Synthetic oligonucleotide
gcucaccucacuaaauuac

SEQ ID NO: 1197945 - RNA, 19 nt, Artificial Sequence
  Description of Artificial Sequence: Synthetic oligonucleotide
gcgaccgggacuuggauuc

SEQ ID NO: 1197946 - RNA, 19 nt, Artificial Sequence
  Description of Artificial Sequence: Synthetic oligonucleotide
ucgauccaucauuuucuua

SEQ ID NO: 1197947 - RNA, 19 nt, Artificial Sequence
  Description of Artificial Sequence: Synthetic oligonucleotide
aaggcaauguugagucaau

SEQ ID NO: 1197948 - RNA, 19 nt, Artificial Sequence
  Description of Artificial Sequence: Synthetic oligonucleotide
guagcggucccgcgggaug

SEQ ID NO: 1197949 - RNA, 19 nt, Artificial Sequence
  Description of Artificial Sequence: Synthetic oligonucleotide
gaccgagacuuggagcggc

SEQ ID NO: 1197950 - RNA, 19 nt, Artificial Sequence
  Description of Artificial Sequence: Synthetic oligonucleotide
cucuucgagcgcgaccggg

SEQ ID NO: 1197951 - RNA, 19 nt, Artificial Sequence
  Description of Artificial Sequence: Synthetic oligonucleotide
guguaauggcugcaaacgu

SEQ ID NO: 1197952 - RNA, 19 nt, Artificial Sequence
  Description of Artificial Sequence: Synthetic oligonucleotide
caucagcuagaugugcuca

SEQ ID NO: 1197953 - RNA, 19 nt, Artificial Sequence
  Description of Artificial Sequence: Synthetic oligonucleotide
agaagagauuagaauugua

SEQ ID NO: 1197954 - RNA, 19 nt, Artificial Sequence
  Description of Artificial Sequence: Synthetic oligonucleotide
gucgcgcuugucguggaag

SEQ ID NO: 1197955 - RNA, 19 nt, Artificial Sequence
  Description of Artificial Sequence: Synthetic oligonucleotide
cuucgagcgcgaccgggac

SEQ ID NO: 1197956 - RNA, 19 nt, Artificial Sequence
  Description of Artificial Sequence: Synthetic oligonucleotide
ucugcacgacaaggcaucu

SEQ ID NO: 1197957 - RNA, 19 nt, Artificial Sequence
  Description of Artificial Sequence: Synthetic oligonucleotide
gugcgagucgggcgggcgg

SEQ ID NO: 1197958 - RNA, 19 nt, Artificial Sequence
  Description of Artificial Sequence: Synthetic oligonucleotide
ccucacuaaauuacaagaa

SEQ ID NO: 1197959 - RNA, 19 nt, Artificial Sequence
  Description of Artificial Sequence: Synthetic oligonucleotide
gcguccguagccuccgccg

SEQ ID NO: 1197960 - RNA, 19 nt, Artificial Sequence
  Description of Artificial Sequence: Synthetic oligonucleotide
cuucgggagcgggagcggg

SEQ ID NO: 1197961 - RNA, 19 nt, Artificial Sequence
  Description of Artificial Sequence: Synthetic oligonucleotide
cggacgaaggcgaagccgc

SEQ ID NO: 1197962 - RNA, 19 nt, Artificial Sequence
  Description of Artificial Sequence: Synthetic oligonucleotide
acacgccaccuuaacagcu

SEQ ID NO: 1197963 - RNA, 19 nt, Artificial Sequence
  Description of Artificial Sequence: Synthetic oligonucleotide
guagccuccgccgccguac

SEQ ID NO: 1197964 - RNA, 19 nt, Artificial Sequence
  Description of Artificial Sequence: Synthetic oligonucleotide
cugccgagcggcccggggc

SEQ ID NO: 1197965 - RNA, 19 nt, Artificial Sequence
  Description of Artificial Sequence: Synthetic oligonucleotide
gcaacacgccaccuuaaca

SEQ ID NO: 1197966 - RNA, 19 nt, Artificial Sequence
  Description of Artificial Sequence: Synthetic oligonucleotide
ggacaccgcgccuucuucc

SEQ ID NO: 1197967 - RNA, 19 nt, Artificial Sequence
  Description of Artificial Sequence: Synthetic oligonucleotide
uccgcgcggaucuggacuu

SEQ ID NO: 1197968 - RNA, 19 nt, Artificial Sequence
  Description of Artificial Sequence: Synthetic oligonucleotide
cuguaugcuccauuaucua

SEQ ID NO: 1197969 - RNA, 19 nt, Artificial Sequence
  Description of Artificial Sequence: Synthetic oligonucleotide
gcuagaugugcucacugua

SEQ ID NO: 1197970 - RNA, 19 nt, Artificial Sequence
  Description of Artificial Sequence: Synthetic oligonucleotide
ggauguacacgucgccgac

SEQ ID NO: 1197971 - RNA, 19 nt, Artificial Sequence
  Description of Artificial Sequence: Synthetic oligonucleotide
ucgcggccguccagcacgg

SEQ ID NO: 1197972 - RNA, 19 nt, Artificial Sequence
  Description of Artificial Sequence: Synthetic oligonucleotide
gagcgcgaccgcgugcggg

SEQ ID NO: 1197973 - RNA, 19 nt, Artificial Sequence
  Description of Artificial Sequence: Synthetic oligonucleotide
guaauggcugcaaacguuu

SEQ ID NO: 1197974 - RNA, 19 nt, Artificial Sequence
  Description of Artificial Sequence: Synthetic oligonucleotide
aucucgagcgggaucugga

SEQ ID NO: 1197975 - RNA, 19 nt, Artificial Sequence
  Description of Artificial Sequence: Synthetic oligonucleotide
ugcgagucgggcgggcggc

SEQ ID NO: 1197976 - RNA, 19 nt, Artificial Sequence
  Description of Artificial Sequence: Synthetic oligonucleotide
ggcacauaaaaugaaguuu

SEQ ID NO: 1197977 - RNA, 19 nt, Artificial Sequence
  Description of Artificial Sequence: Synthetic oligonucleotide
gcggccguacuucucgaag

SEQ ID NO: 1197978 - RNA, 19 nt, Artificial Sequence
  Description of Artificial Sequence: Synthetic oligonucleotide
gguuauaguacagaauauu

SEQ ID NO: 1197979 - RNA, 19 nt, Artificial Sequence
  Description of Artificial Sequence: Synthetic oligonucleotide
gagcgcgaccgggacuugg

SEQ ID NO: 1197980 - RNA, 19 nt, Artificial Sequence
  Description of Artificial Sequence: Synthetic oligonucleotide
gcggacgaaggcgaagccg

SEQ ID NO: 1197981 - RNA, 19 nt, Artificial Sequence
  Description of Artificial Sequence: Synthetic oligonucleotide
gaccuccgcgcggaucugg

SEQ ID NO: 1197982 - RNA, 19 nt, Artificial Sequence
  Description of Artificial Sequence: Synthetic oligonucleotide
ugucguggaagcggacgaa

SEQ ID NO: 1197983 - RNA, 19 nt, Artificial Sequence
  Description of Artificial Sequence: Synthetic oligonucleotide
ggccguacuucucgaagac

SEQ ID NO: 1197984 - RNA, 19 nt, Artificial Sequence
  Description of Artificial Sequence: Synthetic oligonucleotide
cuuaacagcuaaccagcau

SEQ ID NO: 1197985 - RNA, 19 nt, Artificial Sequence
  Description of Artificial Sequence: Synthetic oligonucleotide
acgccaccuuaacagcuaa

SEQ ID NO: 1197986 - RNA, 19 nt, Artificial Sequence
  Description of Artificial Sequence: Synthetic oligonucleotide
gaccgggacuuggauuccc

SEQ ID NO: 1197987 - RNA, 19 nt, Artificial Sequence
  Description of Artificial Sequence: Synthetic oligonucleotide
cucagcgugucgggcgagg

SEQ ID NO: 1197988 - RNA, 19 nt, Artificial Sequence
  Description of Artificial Sequence: Synthetic oligonucleotide
ggucccgcgggauguacac

SEQ ID NO: 1197989 - RNA, 19 nt, Artificial Sequence
  Description of Artificial Sequence: Synthetic oligonucleotide
gacaccgcgccuucuuccu

SEQ ID NO: 1197990 - RNA, 19 nt, Artificial Sequence
  Description of Artificial Sequence: Synthetic oligonucleotide
gcgggaccgagacuuggag

SEQ ID NO: 1197991 - RNA, 19 nt, Artificial Sequence
  Description of Artificial Sequence: Synthetic oligonucleotide
ggcgucgcgcuugucgugg

SEQ ID NO: 1197992 - RNA, 19 nt, Artificial Sequence
  Description of Artificial Sequence: Synthetic oligonucleotide
gccguacuucucgaagacg

SEQ ID NO: 1197993 - RNA, 19 nt, Artificial Sequence
  Description of Artificial Sequence: Synthetic oligonucleotide
caagcacucugcacugcaa

SEQ ID NO: 1197994 - RNA, 19 nt, Artificial Sequence
  Description of Artificial Sequence: Synthetic oligonucleotide
guagcgggaucggcuucgg

SEQ ID NO: 1197995 - RNA, 19 nt, Artificial Sequence
  Description of Artificial Sequence: Synthetic oligonucleotide
cuggagacggacgacgacu

SEQ ID NO: 1197996 - RNA, 19 nt, Artificial Sequence
  Description of Artificial Sequence: Synthetic oligonucleotide
ccaccuuaacagcuaacca

SEQ ID NO: 1197997 - RNA, 19 nt, Artificial Sequence
  Description of Artificial Sequence: Synthetic oligonucleotide
cuguagcgggaucggcuuc

SEQ ID NO: 1197998 - RNA, 19 nt, Artificial Sequence
  Description of Artificial Sequence: Synthetic oligonucleotide
uccucggcgucgcgcuugu

SEQ ID NO: 1197999 - RNA, 19 nt, Artificial Sequence
  Description of Artificial Sequence: Synthetic oligonucleotide
aagacgcgccucagcgugu

SEQ ID NO: 1198000 - RNA, 19 nt, Artificial Sequence
  Description of Artificial Sequence: Synthetic oligonucleotide
gaccgcgugcgggaccgag

SEQ ID NO: 1198001 - RNA, 19 nt, Artificial Sequence
  Description of Artificial Sequence: Synthetic oligonucleotide
gcuacacaacugcgccuag

SEQ ID NO: 1198002 - RNA, 19 nt, Artificial Sequence
  Description of Artificial Sequence: Synthetic oligonucleotide
cagcgugucgggcgaggug

SEQ ID NO: 1198003 - RNA, 19 nt, Artificial Sequence
  Description of Artificial Sequence: Synthetic oligonucleotide
gcgggauguacacgucgcc

SEQ ID NO: 1198004 - RNA, 19 nt, Artificial Sequence
  Description of Artificial Sequence: Synthetic oligonucleotide
uuggaccuccgcgcggauc

SEQ ID NO: 1198005 - RNA, 19 nt, Artificial Sequence
  Description of Artificial Sequence: Synthetic oligonucleotide
cugcgccuagugcacaaaa

SEQ ID NO: 1198006 - RNA, 19 nt, Artificial Sequence
  Description of Artificial Sequence: Synthetic oligonucleotide
gcggccguccagcacggcc

SEQ ID NO: 1198007 - RNA, 19 nt, Artificial Sequence
  Description of Artificial Sequence: Synthetic oligonucleotide
cacgccaccuuaacagcua

SEQ ID NO: 1198008 - RNA, 19 nt, Artificial Sequence
  Description of Artificial Sequence: Synthetic oligonucleotide
cgggauguacacgucgccg

SEQ ID NO: 1198009 - RNA, 19 nt, Artificial Sequence
  Description of Artificial Sequence: Synthetic oligonucleotide
ggaccgagacuuggagcgg

SEQ ID NO: 1198010 - RNA, 19 nt, Artificial Sequence
  Description of Artificial Sequence: Synthetic oligonucleotide
ggugcgagucgggcgggcg

SEQ ID NO: 1198011 - RNA, 19 nt, Artificial Sequence
  Description of Artificial Sequence: Synthetic oligonucleotide
augcuccauuaucuauauu

SEQ ID NO: 1198012 - RNA, 19 nt, Artificial Sequence
  Description of Artificial Sequence: Synthetic oligonucleotide
cgcgggauguacacgucgc

SEQ ID NO: 1198013 - RNA, 19 nt, Artificial Sequence
  Description of Artificial Sequence: Synthetic oligonucleotide
gggcggccguagcucaugg

SEQ ID NO: 1198014 - RNA, 19 nt, Artificial Sequence
  Description of Artificial Sequence: Synthetic oligonucleotide
cugcaacacgccaccuuaa

SEQ ID NO: 1198015 - RNA, 19 nt, Artificial Sequence
  Description of Artificial Sequence: Synthetic oligonucleotide
ggcguccguagccuccgcc

SEQ ID NO: 1198016 - RNA, 19 nt, Artificial Sequence
  Description of Artificial Sequence: Synthetic oligonucleotide
accgauggacugaguuucu

SEQ ID NO: 1198017 - RNA, 19 nt, Artificial Sequence
  Description of Artificial Sequence: Synthetic oligonucleotide
gucgggcgaggugcgguag

SEQ ID NO: 1198018 - RNA, 19 nt, Artificial Sequence
  Description of Artificial Sequence: Synthetic oligonucleotide
accgggacuuggauucccu

SEQ ID NO: 1198019 - RNA, 19 nt, Artificial Sequence
  Description of Artificial Sequence: Synthetic oligonucleotide
cuccgcgcggaucuggacu

SEQ ID NO: 1198020 - RNA, 19 nt, Artificial Sequence
  Description of Artificial Sequence: Synthetic oligonucleotide
ggguucagauuaucauuua

SEQ ID NO: 1198021 - RNA, 19 nt, Artificial Sequence
  Description of Artificial Sequence: Synthetic oligonucleotide
acgcggccguacuucucga

SEQ ID NO: 1198022 - RNA, 19 nt, Artificial Sequence
  Description of Artificial Sequence: Synthetic oligonucleotide
gcccgggugacuggaagug

SEQ ID NO: 1198023 - RNA, 19 nt, Artificial Sequence
  Description of Artificial Sequence: Synthetic oligonucleotide
ggccguagcgcgccaucug

SEQ ID NO: 1198024 - RNA, 19 nt, Artificial Sequence
  Description of Artificial Sequence: Synthetic oligonucleotide
ggaggccacaaauuagguu

SEQ ID NO: 1198025 - RNA, 19 nt, Artificial Sequence
  Description of Artificial Sequence: Synthetic oligonucleotide
agcgggaucuggagacgga

SEQ ID NO: 1198026 - RNA, 19 nt, Artificial Sequence
  Description of Artificial Sequence: Synthetic oligonucleotide
cuugucgauccaucauuuu

SEQ ID NO: 1198027 - RNA, 19 nt, Artificial Sequence
  Description of Artificial Sequence: Synthetic oligonucleotide
acugcgccuagugcacaaa

SEQ ID NO: 1198028 - RNA, 19 nt, Artificial Sequence
  Description of Artificial Sequence: Synthetic oligonucleotide
gccgcgggacuccuuggug

SEQ ID NO: 1198029 - RNA, 19 nt, Artificial Sequence
  Description of Artificial Sequence: Synthetic oligonucleotide
cugcuacacaacugcgccu

SEQ ID NO: 1198030 - RNA, 19 nt, Artificial Sequence
  Description of Artificial Sequence: Synthetic oligonucleotide
gucgccgacgcggccguac

SEQ ID NO: 1198031 - RNA, 19 nt, Artificial Sequence
  Description of Artificial Sequence: Synthetic oligonucleotide
gccccggcggcuguggugc

SEQ ID NO: 1198032 - RNA, 19 nt, Artificial Sequence
  Description of Artificial Sequence: Synthetic oligonucleotide
gcggcuguagcgggaucgg

SEQ ID NO: 1198033 - RNA, 19 nt, Artificial Sequence
  Description of Artificial Sequence: Synthetic oligonucleotide
gcucuucgagcgcgaccgg

SEQ ID NO: 1198034 - RNA, 19 nt, Artificial Sequence
  Description of Artificial Sequence: Synthetic oligonucleotide
guggagcgugagcgcgacc

SEQ ID NO: 1198035 - RNA, 19 nt, Artificial Sequence
  Description of Artificial Sequence: Synthetic oligonucleotide
cugcuugucgauccaucau

SEQ ID NO: 1198036 - RNA, 19 nt, Artificial Sequence
  Description of Artificial Sequence: Synthetic oligonucleotide
ccgcgugcgggaccgagac

SEQ ID NO: 1198037 - RNA, 19 nt, Artificial Sequence
  Description of Artificial Sequence: Synthetic oligonucleotide
cguagcgcgccaucugcac

SEQ ID NO: 1198038 - RNA, 19 nt, Artificial Sequence
  Description of Artificial Sequence: Synthetic oligonucleotide
cuccggcguccguagccuc

SEQ ID NO: 1198039 - RNA, 19 nt, Artificial Sequence
  Description of Artificial Sequence: Synthetic oligonucleotide
ggcgaagccgcgggacucc

SEQ ID NO: 1198040 - RNA, 19 nt, Artificial Sequence
  Description of Artificial Sequence: Synthetic oligonucleotide
gcagcucgcggccguccag

SEQ ID NO: 1198041 - RNA, 19 nt, Artificial Sequence
  Description of Artificial Sequence: Synthetic oligonucleotide
gcugacagcuuuaggcugu

SEQ ID NO: 1198042 - RNA, 19 nt, Artificial Sequence
  Description of Artificial Sequence: Synthetic oligonucleotide
ggcggccguagcucauggc

SEQ ID NO: 1198043 - RNA, 19 nt, Artificial Sequence
  Description of Artificial Sequence: Synthetic oligonucleotide
gcuucgggagcgggagcgg

SEQ ID NO: 1198044 - RNA, 19 nt, Artificial Sequence
  Description of Artificial Sequence: Synthetic oligonucleotide
accuccgcgcggaucugga

SEQ ID NO: 1198045 - RNA, 19 nt, Artificial Sequence
  Description of Artificial Sequence: Synthetic oligonucleotide
gccgccguaccugcggggc

SEQ ID NO: 1198046 - RNA, 19 nt, Artificial Sequence
  Description of Artificial Sequence: Synthetic oligonucleotide
ggcggcuguggugcgaguc

SEQ ID NO: 1198047 - RNA, 19 nt, Artificial Sequence
  Description of Artificial Sequence: Synthetic oligonucleotide
gcuguagcgggaucggcuu

SEQ ID NO: 1198048 - RNA, 19 nt, Artificial Sequence
  Description of Artificial Sequence: Synthetic oligonucleotide
cguccguagccuccgccgc

SEQ ID NO: 1198049 - RNA, 19 nt, Artificial Sequence
  Description of Artificial Sequence: Synthetic oligonucleotide
cuacacaacugcgccuagu

SEQ ID NO: 1198050 - RNA, 19 nt, Artificial Sequence
  Description of Artificial Sequence: Synthetic oligonucleotide
gccucagcgugucgggcga

SEQ ID NO: 1198051 - RNA, 19 nt, Artificial Sequence
  Description of Artificial Sequence: Synthetic oligonucleotide
ccgauggacugaguuucug

SEQ ID NO: 1198052 - RNA, 19 nt, Artificial Sequence
  Description of Artificial Sequence: Synthetic oligonucleotide
gccaagcacucugcacugc

SEQ ID NO: 1198053 - RNA, 19 nt, Artificial Sequence
  Description of Artificial Sequence: Synthetic oligonucleotide
cugcaaacguuuccuuauu

SEQ ID NO: 1198054 - RNA, 19 nt, Artificial Sequence
  Description of Artificial Sequence: Synthetic oligonucleotide
accgcgugcgggaccgaga

SEQ ID NO: 1198055 - RNA, 19 nt, Artificial Sequence
  Description of Artificial Sequence: Synthetic oligonucleotide
gucgcucaccucacuaaau

SEQ ID NO: 1198056 - RNA, 19 nt, Artificial Sequence
  Description of Artificial Sequence: Synthetic oligonucleotide
ccgggacuuggauucccuc

SEQ ID NO: 1198057 - RNA, 19 nt, Artificial Sequence
  Description of Artificial Sequence: Synthetic oligonucleotide
guguagcggucccgcggga

SEQ ID NO: 1198058 - RNA, 19 nt, Artificial Sequence
  Description of Artificial Sequence: Synthetic oligonucleotide
gccgacgcggccguacuuc

SEQ ID NO: 1198059 - RNA, 19 nt, Artificial Sequence
  Description of Artificial Sequence: Synthetic oligonucleotide
ggacucuuccauggaccga

SEQ ID NO: 1198060 - RNA, 19 nt, Artificial Sequence
  Description of Artificial Sequence: Synthetic oligonucleotide
ccaccugaggcagauuaaa

SEQ ID NO: 1198061 - RNA, 19 nt, Artificial Sequence
  Description of Artificial Sequence: Synthetic oligonucleotide
ggccccggcggcuguggug

SEQ ID NO: 1198062 - RNA, 19 nt, Artificial Sequence
  Description of Artificial Sequence: Synthetic oligonucleotide
cgaggugcgguaggucagg

SEQ ID NO: 1198063 - RNA, 19 nt, Artificial Sequence
  Description of Artificial Sequence: Synthetic oligonucleotide
auggaccgauggacugagu

SEQ ID NO: 1198064 - RNA, 19 nt, Artificial Sequence
  Description of Artificial Sequence: Synthetic oligonucleotide
gcgggacuccuugguguag

SEQ ID NO: 1198065 - RNA, 19 nt, Artificial Sequence
  Description of Artificial Sequence: Synthetic oligonucleotide
cgugagcgcgaccgcgugc

SEQ ID NO: 1198066 - RNA, 19 nt, Artificial Sequence
  Description of Artificial Sequence: Synthetic oligonucleotide
ccggcguccguagccuccg

SEQ ID NO: 1198067 - RNA, 19 nt, Artificial Sequence
  Description of Artificial Sequence: Synthetic oligonucleotide
ccgccguaccugcggggcg

SEQ ID NO: 1198068 - RNA, 19 nt, Artificial Sequence
  Description of Artificial Sequence: Synthetic oligonucleotide
cgcucaccucacuaaauua

SEQ ID NO: 1198069 - RNA, 19 nt, Artificial Sequence
  Description of Artificial Sequence: Synthetic oligonucleotide
ggcccgggugacuggaagu

SEQ ID NO: 1198070 - RNA, 19 nt, Artificial Sequence
  Description of Artificial Sequence: Synthetic oligonucleotide
ccuccgcgcggaucuggac

SEQ ID NO: 1198071 - RNA, 19 nt, Artificial Sequence
  Description of Artificial Sequence: Synthetic oligonucleotide
gcacgacaaggcaucuuua

SEQ ID NO: 1198072 - RNA, 19 nt, Artificial Sequence
  Description of Artificial Sequence: Synthetic oligonucleotide
cgggaucggcuucgggagc

SEQ ID NO: 1198073 - RNA, 19 nt, Artificial Sequence
  Description of Artificial Sequence: Synthetic oligonucleotide
ccggcggcuguggugcgag

SEQ ID NO: 1198074 - RNA, 19 nt, Artificial Sequence
  Description of Artificial Sequence: Synthetic oligonucleotide
cgcgcggaucuggacuugg

SEQ ID NO: 1198075 - RNA, 19 nt, Artificial Sequence
  Description of Artificial Sequence: Synthetic oligonucleotide
cgccguaccugcggggcgg

SEQ ID NO: 1198076 - RNA, 19 nt, Artificial Sequence
  Description of Artificial Sequence: Synthetic oligonucleotide
gcggccguagcgcgccauc

SEQ ID NO: 1198077 - RNA, 19 nt, Artificial Sequence
  Description of Artificial Sequence: Synthetic oligonucleotide
cgcgccaucugcacccgca

SEQ ID NO: 1198078 - RNA, 19 nt, Artificial Sequence
  Description of Artificial Sequence: Synthetic oligonucleotide
cgugcgggaccgagacuug

SEQ ID NO: 1198079 - RNA, 19 nt, Artificial Sequence
  Description of Artificial Sequence: Synthetic oligonucleotide
agucgggcgggcggccgua

SEQ ID NO: 1198080 - RNA, 19 nt, Artificial Sequence
  Description of Artificial Sequence: Synthetic oligonucleotide
ccgcgccuucuuccucugg

SEQ ID NO: 1198081 - RNA, 19 nt, Artificial Sequence
  Description of Artificial Sequence: Synthetic oligonucleotide
gccccguccauggcgucca

SEQ ID NO: 1198082 - RNA, 19 nt, Artificial Sequence
  Description of Artificial Sequence: Synthetic oligonucleotide
ccgcgggacuccuuggugu

SEQ ID NO: 1198083 - RNA, 19 nt, Artificial Sequence
  Description of Artificial Sequence: Synthetic oligonucleotide
ggaccuccgcgcggaucug

SEQ ID NO: 1198084 - RNA, 19 nt, Artificial Sequence
  Description of Artificial Sequence: Synthetic oligonucleotide
ggagcggcuguagcgggau

SEQ ID NO: 1198085 - RNA, 19 nt, Artificial Sequence
  Description of Artificial Sequence: Synthetic oligonucleotide
gccguaccugcggggcggc

SEQ ID NO: 1198086 - RNA, 19 nt, Artificial Sequence
  Description of Artificial Sequence: Synthetic oligonucleotide
gcgucgcgcuugucgugga

SEQ ID NO: 1198087 - RNA, 19 nt, Artificial Sequence
  Description of Artificial Sequence: Synthetic oligonucleotide
gcgagucgggcgggcggcc

SEQ ID NO: 1198088 - RNA, 19 nt, Artificial Sequence
  Description of Artificial Sequence: Synthetic oligonucleotide
cgggcggccguagcgcgcc

SEQ ID NO: 1198089 - RNA, 19 nt, Artificial Sequence
  Description of Artificial Sequence: Synthetic oligonucleotide
cgcgaccgcgugcgggacc

SEQ ID NO: 1198090 - RNA, 19 nt, Artificial Sequence
  Description of Artificial Sequence: Synthetic oligonucleotide
cgaagacgcgccucagcgu

SEQ ID NO: 1198091 - RNA, 19 nt, Artificial Sequence
  Description of Artificial Sequence: Synthetic oligonucleotide
cugcacgacaaggcaucuu

SEQ ID NO: 1198092 - RNA, 19 nt, Artificial Sequence
  Description of Artificial Sequence: Synthetic oligonucleotide
cgacgcggccguacuucuc

SEQ ID NO: 1198093 - RNA, 19 nt, Artificial Sequence
  Description of Artificial Sequence: Synthetic oligonucleotide
ccguaccugcggggcggcg

SEQ ID NO: 1198094 - RNA, 19 nt, Artificial Sequence
  Description of Artificial Sequence: Synthetic oligonucleotide
cggucccgcgggauguaca

SEQ ID NO: 1198095 - RNA, 19 nt, Artificial Sequence
  Description of Artificial Sequence: Synthetic oligonucleotide
ccgacgcggccguacuucu

SEQ ID NO: 1198096 - RNA, 19 nt, Artificial Sequence
  Description of Artificial Sequence: Synthetic oligonucleotide
ccgcgcggaucuggacuug

SEQ ID NO: 1198097 - RNA, 19 nt, Artificial Sequence
  Description of Artificial Sequence: Synthetic oligonucleotide
cgcgaccgggacuuggauu

SEQ ID NO: 1198098 - RNA, 19 nt, Artificial Sequence
  Description of Artificial Sequence: Synthetic oligonucleotide
gcgaagccgcgggacuccu

SEQ ID NO: 1198099 - RNA, 19 nt, Artificial Sequence
  Description of Artificial Sequence: Synthetic oligonucleotide
cggcguccguagccuccgc

SEQ ID NO: 1198100 - RNA, 19 nt, Artificial Sequence
  Description of Artificial Sequence: Synthetic oligonucleotide
gggcggccguagcgcgcca

SEQ ID NO: 1198101 - RNA, 19 nt, Artificial Sequence
  Description of Artificial Sequence: Synthetic oligonucleotide
cgucgcgcuugucguggaa

SEQ ID NO: 1198102 - RNA, 19 nt, Artificial Sequence
  Description of Artificial Sequence: Synthetic oligonucleotide
cguagccuccgccgccgua

SEQ ID NO: 1198103 - RNA, 19 nt, Artificial Sequence
  Description of Artificial Sequence: Synthetic oligonucleotide
cccggcggcuguggugcga

SEQ ID NO: 1198104 - RNA, 19 nt, Artificial Sequence
  Description of Artificial Sequence: Synthetic oligonucleotide
cggccguagcgcgccaucu

SEQ ID NO: 1198105 - RNA, 19 nt, Artificial Sequence
  Description of Artificial Sequence: Synthetic oligonucleotide
ccguagccuccgccgccgu

SEQ ID NO: 1198106 - RNA, 19 nt, Artificial Sequence
  Description of Artificial Sequence: Synthetic oligonucleotide
cgcgugcgggaccgagacu

SEQ ID NO: 1198107 - RNA, 19 nt, Artificial Sequence
  Description of Artificial Sequence: Synthetic oligonucleotide
ccgagcggcccggggcccu

SEQ ID NO: 1198108 - RNA, 19 nt, Artificial Sequence
  Description of Artificial Sequence: Synthetic oligonucleotide
cgccgacgcggccguacuu

SEQ ID NO: 1198109 - RNA, 19 nt, Artificial Sequence
  Description of Artificial Sequence: Synthetic oligonucleotide
cgaccgcgugcgggaccga

SEQ ID NO: 1198110 - RNA, 19 nt, Artificial Sequence
  Description of Artificial Sequence: Synthetic oligonucleotide
cgucgccgacgcggccgua

SEQ ID NO: 1198111 - RNA, 19 nt, Artificial Sequence
  Description of Artificial Sequence: Synthetic oligonucleotide
uguaauaagaauaagugca

SEQ ID NO: 1198112 - RNA, 19 nt, Artificial Sequence
  Description of Artificial Sequence: Synthetic oligonucleotide
gaugcaaucauauauggag

SEQ ID NO: 1198113 - RNA, 19 nt, Artificial Sequence
  Description of Artificial Sequence: Synthetic oligonucleotide
uauagagccaguuaaagcc

SEQ ID NO: 1198114 - RNA, 19 nt, Artificial Sequence
  Description of Artificial Sequence: Synthetic oligonucleotide
aaaucagcccaguagaacg

SEQ ID NO: 1198115 - RNA, 19 nt, Artificial Sequence
  Description of Artificial Sequence: Synthetic oligonucleotide
auagguaugauccaaaaug

SEQ ID NO: 1198116 - RNA, 19 nt, Artificial Sequence
  Description of Artificial Sequence: Synthetic oligonucleotide
caucuuauagguaugaucc

SEQ ID NO: 1198117 - RNA, 19 nt, Artificial Sequence
  Description of Artificial Sequence: Synthetic oligonucleotide
gaauaagugcauuucaagg

SEQ ID NO: 1198118 - RNA, 19 nt, Artificial Sequence
  Description of Artificial Sequence: Synthetic oligonucleotide
uguaauugugccaagaccu

SEQ ID NO: 1198119 - RNA, 19 nt, Artificial Sequence
  Description of Artificial Sequence: Synthetic oligonucleotide
uuuuauaagccuaagguaa

SEQ ID NO: 1198120 - RNA, 19 nt, Artificial Sequence
  Description of Artificial Sequence: Synthetic oligonucleotide
uaucuauguaauaaguggg

SEQ ID NO: 1198121 - RNA, 19 nt, Artificial Sequence
  Description of Artificial Sequence: Synthetic oligonucleotide
aucaguuucaaccgcaugc

SEQ ID NO: 1198122 - RNA, 19 nt, Artificial Sequence
  Description of Artificial Sequence: Synthetic oligonucleotide
aguuuuauaagccuaaggu

SEQ ID NO: 1198123 - RNA, 19 nt, Artificial Sequence
  Description of Artificial Sequence: Synthetic oligonucleotide
aauuuauagagccaguuaa

SEQ ID NO: 1198124 - RNA, 19 nt, Artificial Sequence
  Description of Artificial Sequence: Synthetic oligonucleotide
guaucuauguaauaagugg

SEQ ID NO: 1198125 - RNA, 19 nt, Artificial Sequence
  Description of Artificial Sequence: Synthetic oligonucleotide
aagaugcuagaauggagcc

SEQ ID NO: 1198126 - RNA, 19 nt, Artificial Sequence
  Description of Artificial Sequence: Synthetic oligonucleotide
uuuugaugcaaucauauau

SEQ ID NO: 1198127 - RNA, 19 nt, Artificial Sequence
  Description of Artificial Sequence: Synthetic oligonucleotide
uagguaugauccaaaaugg

SEQ ID NO: 1198128 - RNA, 19 nt, Artificial Sequence
  Description of Artificial Sequence: Synthetic oligonucleotide
aaagcucucuauuuaaucu

SEQ ID NO: 1198129 - RNA, 19 nt, Artificial Sequence
  Description of Artificial Sequence: Synthetic oligonucleotide
ucagauuugacaugcaucu

SEQ ID NO: 1198130 - RNA, 19 nt, Artificial Sequence
  Description of Artificial Sequence: Synthetic oligonucleotide
aggaaugagcucuauauuc

SEQ ID NO: 1198131 - RNA, 19 nt, Artificial Sequence
  Description of Artificial Sequence: Synthetic oligonucleotide
auguaauugugccaagacc

SEQ ID NO: 1198132 - RNA, 19 nt, Artificial Sequence
  Description of Artificial Sequence: Synthetic oligonucleotide
aaagcuacagacgugaggu

SEQ ID NO: 1198133 - RNA, 19 nt, Artificial Sequence
  Description of Artificial Sequence: Synthetic oligonucleotide
uguauaugauccaauguca

SEQ ID NO: 1198134 - RNA, 19 nt, Artificial Sequence
  Description of Artificial Sequence: Synthetic oligonucleotide
uguucgaacaucaacucug

SEQ ID NO: 1198135 - RNA, 19 nt, Artificial Sequence
  Description of Artificial Sequence: Synthetic oligonucleotide
ucuauauucauuuccugga

SEQ ID NO: 1198136 - RNA, 19 nt, Artificial Sequence
  Description of Artificial Sequence: Synthetic oligonucleotide
aauaagaauaagugcauuu

SEQ ID NO: 1198137 - RNA, 19 nt, Artificial Sequence
  Description of Artificial Sequence: Synthetic oligonucleotide
gaaagguacccaaagaugc

SEQ ID NO: 1198138 - RNA, 19 nt, Artificial Sequence
  Description of Artificial Sequence: Synthetic oligonucleotide
aacaugacugacucccagc

SEQ ID NO: 1198139 - RNA, 19 nt, Artificial Sequence
  Description of Artificial Sequence: Synthetic oligonucleotide
uccaaaauggccuggaaac

SEQ ID NO: 1198140 - RNA, 19 nt, Artificial Sequence
  Description of Artificial Sequence: Synthetic oligonucleotide
ugaaaauccuggaugacac

SEQ ID NO: 1198141 - RNA, 19 nt, Artificial Sequence
  Description of Artificial Sequence: Synthetic oligonucleotide
acuuguucgucguaggugg

SEQ ID NO: 1198142 - RNA, 19 nt, Artificial Sequence
  Description of Artificial Sequence: Synthetic oligonucleotide
uguugaaagguacccaaag

SEQ ID NO: 1198143 - RNA, 19 nt, Artificial Sequence
  Description of Artificial Sequence: Synthetic oligonucleotide
cuguaauaagaauaagugc

SEQ ID NO: 1198144 - RNA, 19 nt, Artificial Sequence
  Description of Artificial Sequence: Synthetic oligonucleotide
ucuauuuaaucugucagug

SEQ ID NO: 1198145 - RNA, 19 nt, Artificial Sequence
  Description of Artificial Sequence: Synthetic oligonucleotide
cauauauggaggaaugagc

SEQ ID NO: 1198146 - RNA, 19 nt, Artificial Sequence
  Description of Artificial Sequence: Synthetic oligonucleotide
ugaaagguacccaaagaug

SEQ ID NO: 1198147 - RNA, 19 nt, Artificial Sequence
  Description of Artificial Sequence: Synthetic oligonucleotide
gaaacucuguauuagcgug

SEQ ID NO: 1198148 - RNA, 19 nt, Artificial Sequence
  Description of Artificial Sequence: Synthetic oligonucleotide
uauauucauuuccuggaag

SEQ ID NO: 1198149 - RNA, 19 nt, Artificial Sequence
  Description of Artificial Sequence: Synthetic oligonucleotide
auucguaguggacaguugg

SEQ ID NO: 1198150 - RNA, 19 nt, Artificial Sequence
  Description of Artificial Sequence: Synthetic oligonucleotide
ucaaccgcaugcuuggugg

SEQ ID NO: 1198151 - RNA, 19 nt, Artificial Sequence
  Description of Artificial Sequence: Synthetic oligonucleotide
aaaaucagcccaguagaac

SEQ ID NO: 1198152 - RNA, 19 nt, Artificial Sequence
  Description of Artificial Sequence: Synthetic oligonucleotide
uuuauagagccaguuaaag

SEQ ID NO: 1198153 - RNA, 19 nt, Artificial Sequence
  Description of Artificial Sequence: Synthetic oligonucleotide
aguagaacgaccauuagca

SEQ ID NO: 1198154 - RNA, 19 nt, Artificial Sequence
  Description of Artificial Sequence: Synthetic oligonucleotide
aacaccauaccaauagccg

SEQ ID NO: 1198155 - RNA, 19 nt, Artificial Sequence
  Description of Artificial Sequence: Synthetic oligonucleotide
uugaaagguacccaaagau

SEQ ID NO: 1198156 - RNA, 19 nt, Artificial Sequence
  Description of Artificial Sequence: Synthetic oligonucleotide
guuguuugcaaucaguuuc

SEQ ID NO: 1198157 - RNA, 19 nt, Artificial Sequence
  Description of Artificial Sequence: Synthetic oligonucleotide
aagggcgccaacuucaucu

SEQ ID NO: 1198158 - RNA, 19 nt, Artificial Sequence
  Description of Artificial Sequence: Synthetic oligonucleotide
auaagaauaagugcauuuc

SEQ ID NO: 1198159 - RNA, 19 nt, Artificial Sequence
  Description of Artificial Sequence: Synthetic oligonucleotide
uguugaaggacauagccau

SEQ ID NO: 1198160 - RNA, 19 nt, Artificial Sequence
  Description of Artificial Sequence: Synthetic oligonucleotide
ucauauauggaggaaugag

SEQ ID NO: 1198161 - RNA, 19 nt, Artificial Sequence
  Description of Artificial Sequence: Synthetic oligonucleotide
aauuuaaguggacauugaa

SEQ ID NO: 1198162 - RNA, 19 nt, Artificial Sequence
  Description of Artificial Sequence: Synthetic oligonucleotide
ugacaugcaucuuauaggu

SEQ ID NO: 1198163 - RNA, 19 nt, Artificial Sequence
  Description of Artificial Sequence: Synthetic oligonucleotide
ugcauuucaaggaaagcac

SEQ ID NO: 1198164 - RNA, 19 nt, Artificial Sequence
  Description of Artificial Sequence: Synthetic oligonucleotide
cuauguaauaagugggacc

SEQ ID NO: 1198165 - RNA, 19 nt, Artificial Sequence
  Description of Artificial Sequence: Synthetic oligonucleotide
cuguauaugauccaauguc

SEQ ID NO: 1198166 - RNA, 19 nt, Artificial Sequence
  Description of Artificial Sequence: Synthetic oligonucleotide
agugggaccacccuguuug

SEQ ID NO: 1198167 - RNA, 19 nt, Artificial Sequence
  Description of Artificial Sequence: Synthetic oligonucleotide
uggaaauccacaucuguug

SEQ ID NO: 1198168 - RNA, 19 nt, Artificial Sequence
  Description of Artificial Sequence: Synthetic oligonucleotide
acgaccauuagcaaaugcc

SEQ ID NO: 1198169 - RNA, 19 nt, Artificial Sequence
  Description of Artificial Sequence: Synthetic oligonucleotide
uugaaggacauagccaucg

SEQ ID NO: 1198170 - RNA, 19 nt, Artificial Sequence
  Description of Artificial Sequence: Synthetic oligonucleotide
aauggccuggaaacuaucc

SEQ ID NO: 1198171 - RNA, 19 nt, Artificial Sequence
  Description of Artificial Sequence: Synthetic oligonucleotide
uugguaucuauguaauaag

SEQ ID NO: 1198172 - RNA, 19 nt, Artificial Sequence
  Description of Artificial Sequence: Synthetic oligonucleotide
uuuggaaauccacaucugu

SEQ ID NO: 1198173 - RNA, 19 nt, Artificial Sequence
  Description of Artificial Sequence: Synthetic oligonucleotide
auuguguucccagauaauc

SEQ ID NO: 1198174 - RNA, 19 nt, Artificial Sequence
  Description of Artificial Sequence: Synthetic oligonucleotide
aguaacuuuuacuagucaa

SEQ ID NO: 1198175 - RNA, 19 nt, Artificial Sequence
  Description of Artificial Sequence: Synthetic oligonucleotide
aguguucgaacaucaacuc

SEQ ID NO: 1198176 - RNA, 19 nt, Artificial Sequence
  Description of Artificial Sequence: Synthetic oligonucleotide
ccuguaauaagaauaagug

SEQ ID NO: 1198177 - RNA, 19 nt, Artificial Sequence
  Description of Artificial Sequence: Synthetic oligonucleotide
guuucaaccgcaugcuugg

SEQ ID NO: 1198178 - RNA, 19 nt, Artificial Sequence
  Description of Artificial Sequence: Synthetic oligonucleotide
acaugcaucuuauagguau

SEQ ID NO: 1198179 - RNA, 19 nt, Artificial Sequence
  Description of Artificial Sequence: Synthetic oligonucleotide
uaaguggacauugaaauau

SEQ ID NO: 1198180 - RNA, 19 nt, Artificial Sequence
  Description of Artificial Sequence: Synthetic oligonucleotide
agagaaaauagacauucau

SEQ ID NO: 1198181 - RNA, 19 nt, Artificial Sequence
  Description of Artificial Sequence: Synthetic oligonucleotide
gacacaauugcacauguaa

SEQ ID NO: 1198182 - RNA, 19 nt, Artificial Sequence
  Description of Artificial Sequence: Synthetic oligonucleotide
uccaccaacccacccaagg

SEQ ID NO: 1198183 - RNA, 19 nt, Artificial Sequence
  Description of Artificial Sequence: Synthetic oligonucleotide
agagccuucccgaacagcc

SEQ ID NO: 1198184 - RNA, 19 nt, Artificial Sequence
  Description of Artificial Sequence: Synthetic oligonucleotide
ugguaucuauguaauaagu

SEQ ID NO: 1198185 - RNA, 19 nt, Artificial Sequence
  Description of Artificial Sequence: Synthetic oligonucleotide
cugaguguacuaaagcuac

SEQ ID NO: 1198186 - RNA, 19 nt, Artificial Sequence
  Description of Artificial Sequence: Synthetic oligonucleotide
aguccucaccagcauaacc

SEQ ID NO: 1198187 - RNA, 19 nt, Artificial Sequence
  Description of Artificial Sequence: Synthetic oligonucleotide
ucuguauuagcguguuucc

SEQ ID NO: 1198188 - RNA, 19 nt, Artificial Sequence
  Description of Artificial Sequence: Synthetic oligonucleotide
uggucugaugucaauguca

SEQ ID NO: 1198189 - RNA, 19 nt, Artificial Sequence
  Description of Artificial Sequence: Synthetic oligonucleotide
uguauuagcguguuuccuc

SEQ ID NO: 1198190 - RNA, 19 nt, Artificial Sequence
  Description of Artificial Sequence: Synthetic oligonucleotide
aaugccgucaaaacugcag

SEQ ID NO: 1198191 - RNA, 19 nt, Artificial Sequence
  Description of Artificial Sequence: Synthetic oligonucleotide
cuggaugacacaauugcac

SEQ ID NO: 1198192 - RNA, 19 nt, Artificial Sequence
  Description of Artificial Sequence: Synthetic oligonucleotide
uuuauaagccuaagguaaa

SEQ ID NO: 1198193 - RNA, 19 nt, Artificial Sequence
  Description of Artificial Sequence: Synthetic oligonucleotide
accauuggggaauucguag

SEQ ID NO: 1198194 - RNA, 19 nt, Artificial Sequence
  Description of Artificial Sequence: Synthetic oligonucleotide
uggaagggucaaauaaucc

SEQ ID NO: 1198195 - RNA, 19 nt, Artificial Sequence
  Description of Artificial Sequence: Synthetic oligonucleotide
aaaauccuggaugacacaa

SEQ ID NO: 1198196 - RNA, 19 nt, Artificial Sequence
  Description of Artificial Sequence: Synthetic oligonucleotide
cauaccaauagccgugggg

SEQ ID NO: 1198197 - RNA, 19 nt, Artificial Sequence
  Description of Artificial Sequence: Synthetic oligonucleotide
ucuguugaaagguacccaa

SEQ ID NO: 1198198 - RNA, 19 nt, Artificial Sequence
  Description of Artificial Sequence: Synthetic oligonucleotide
auauggaggaaugagcucu

SEQ ID NO: 1198199 - RNA, 19 nt, Artificial Sequence
  Description of Artificial Sequence: Synthetic oligonucleotide
uauagguaugauccaaaau

SEQ ID NO: 1198200 - RNA, 19 nt, Artificial Sequence
  Description of Artificial Sequence: Synthetic oligonucleotide
uggaugacacaauugcaca

SEQ ID NO: 1198201 - RNA, 19 nt, Artificial Sequence
  Description of Artificial Sequence: Synthetic oligonucleotide
uuccugaguguacuaaagc

SEQ ID NO: 1198202 - RNA, 19 nt, Artificial Sequence
  Description of Artificial Sequence: Synthetic oligonucleotide
auaagugcauuucaaggaa

SEQ ID NO: 1198203 - RNA, 19 nt, Artificial Sequence
  Description of Artificial Sequence: Synthetic oligonucleotide
aacacuugucgugacaaca

SEQ ID NO: 1198204 - RNA, 19 nt, Artificial Sequence
  Description of Artificial Sequence: Synthetic oligonucleotide
ugagaaagcucucuauuua

SEQ ID NO: 1198205 - RNA, 19 nt, Artificial Sequence
  Description of Artificial Sequence: Synthetic oligonucleotide
cugacaugagaacaggaug

SEQ ID NO: 1198206 - RNA, 19 nt, Artificial Sequence
  Description of Artificial Sequence: Synthetic oligonucleotide
aaucaguuucaaccgcaug

SEQ ID NO: 1198207 - RNA, 19 nt, Artificial Sequence
  Description of Artificial Sequence: Synthetic oligonucleotide
auaugauccaaugucaaaa

SEQ ID NO: 1198208 - RNA, 19 nt, Artificial Sequence
  Description of Artificial Sequence: Synthetic oligonucleotide
ucccuuuacauuggaaggg

SEQ ID NO: 1198209 - RNA, 19 nt, Artificial Sequence
  Description of Artificial Sequence: Synthetic oligonucleotide
cauuccaacacuugucgug

SEQ ID NO: 1198210 - RNA, 19 nt, Artificial Sequence
  Description of Artificial Sequence: Synthetic oligonucleotide
guuuuauaagccuaaggua

SEQ ID NO: 1198211 - RNA, 19 nt, Artificial Sequence
  Description of Artificial Sequence: Synthetic oligonucleotide
uaaccauuggggaauucgu

SEQ ID NO: 1198212 - RNA, 19 nt, Artificial Sequence
  Description of Artificial Sequence: Synthetic oligonucleotide
caguagaacgaccauuagc

SEQ ID NO: 1198213 - RNA, 19 nt, Artificial Sequence
  Description of Artificial Sequence: Synthetic oligonucleotide
guaguguucgaacaucaac

SEQ ID NO: 1198214 - RNA, 19 nt, Artificial Sequence
  Description of Artificial Sequence: Synthetic oligonucleotide
uguuccacggugcuucuga

SEQ ID NO: 1198215 - RNA, 19 nt, Artificial Sequence
  Description of Artificial Sequence: Synthetic oligonucleotide
uucaaggacauuuccuuuc

SEQ ID NO: 1198216 - RNA, 19 nt, Artificial Sequence
  Description of Artificial Sequence: Synthetic oligonucleotide
uauaugauccaaugucaaa

SEQ ID NO: 1198217 - RNA, 19 nt, Artificial Sequence
  Description of Artificial Sequence: Synthetic oligonucleotide
auaccaauagccgugggga

SEQ ID NO: 1198218 - RNA, 19 nt, Artificial Sequence
  Description of Artificial Sequence: Synthetic oligonucleotide
agauuugacaugcaucuua

SEQ ID NO: 1198219 - RNA, 19 nt, Artificial Sequence
  Description of Artificial Sequence: Synthetic oligonucleotide
acccuucaaggacauuucc

SEQ ID NO: 1198220 - RNA, 19 nt, Artificial Sequence
  Description of Artificial Sequence: Synthetic oligonucleotide
aagaaugcagggaugcugu

SEQ ID NO: 1198221 - RNA, 19 nt, Artificial Sequence
  Description of Artificial Sequence: Synthetic oligonucleotide
gguaugauccaaaauggcc

SEQ ID NO: 1198222 - RNA, 19 nt, Artificial Sequence
  Description of Artificial Sequence: Synthetic oligonucleotide
cauuggaagggucaaauaa

SEQ ID NO: 1198223 - RNA, 19 nt, Artificial Sequence
  Description of Artificial Sequence: Synthetic oligonucleotide
agguaugauccaaaauggc

SEQ ID NO: 1198224 - RNA, 19 nt, Artificial Sequence
  Description of Artificial Sequence: Synthetic oligonucleotide
gaccuuguaaccuggggca

SEQ ID NO: 1198225 - RNA, 19 nt, Artificial Sequence
  Description of Artificial Sequence: Synthetic oligonucleotide
cucuguauuagcguguuuc

SEQ ID NO: 1198226 - RNA, 19 nt, Artificial Sequence
  Description of Artificial Sequence: Synthetic oligonucleotide
acagacgugaggugauggg

SEQ ID NO: 1198227 - RNA, 19 nt, Artificial Sequence
  Description of Artificial Sequence: Synthetic oligonucleotide
uucguaguggacaguuggc

SEQ ID NO: 1198228 - RNA, 19 nt, Artificial Sequence
  Description of Artificial Sequence: Synthetic oligonucleotide
ucuuauagguaugauccaa

SEQ ID NO: 1198229 - RNA, 19 nt, Artificial Sequence
  Description of Artificial Sequence: Synthetic oligonucleotide
caaaugccgucaaaacugc

SEQ ID NO: 1198230 - RNA, 19 nt, Artificial Sequence
  Description of Artificial Sequence: Synthetic oligonucleotide
uucugacaugagaacagga

SEQ ID NO: 1198231 - RNA, 19 nt, Artificial Sequence
  Description of Artificial Sequence: Synthetic oligonucleotide
acaccauaccaauagccgu

SEQ ID NO: 1198232 - RNA, 19 nt, Artificial Sequence
  Description of Artificial Sequence: Synthetic oligonucleotide
cuacacacugcuucccucc

SEQ ID NO: 1198233 - RNA, 19 nt, Artificial Sequence
  Description of Artificial Sequence: Synthetic oligonucleotide
ucguggacuggaauugcag

SEQ ID NO: 1198234 - RNA, 19 nt, Artificial Sequence
  Description of Artificial Sequence: Synthetic oligonucleotide
uggugcuuccaucaucucu

SEQ ID NO: 1198235 - RNA, 19 nt, Artificial Sequence
  Description of Artificial Sequence: Synthetic oligonucleotide
aaauuuaaguggacauuga

SEQ ID NO: 1198236 - RNA, 19 nt, Artificial Sequence
  Description of Artificial Sequence: Synthetic oligonucleotide
auuuaaguggacauugaaa

SEQ ID NO: 1198237 - RNA, 19 nt, Artificial Sequence
  Description of Artificial Sequence: Synthetic oligonucleotide
uacuuacugaaagaaaaua

SEQ ID NO: 1198238 - RNA, 19 nt, Artificial Sequence
  Description of Artificial Sequence: Synthetic oligonucleotide
ugacugacucccagcauug

SEQ ID NO: 1198239 - RNA, 19 nt, Artificial Sequence
  Description of Artificial Sequence: Synthetic oligonucleotide
uguaaccuggggcaauuuc

SEQ ID NO: 1198240 - RNA, 19 nt, Artificial Sequence
  Description of Artificial Sequence: Synthetic oligonucleotide
uacuaaagcuacagacgug

SEQ ID NO: 1198241 - RNA, 19 nt, Artificial Sequence
  Description of Artificial Sequence: Synthetic oligonucleotide
gguaucuauguaauaagug

SEQ ID NO: 1198242 - RNA, 19 nt, Artificial Sequence
  Description of Artificial Sequence: Synthetic oligonucleotide
aguuucaaccgcaugcuug

SEQ ID NO: 1198243 - RNA, 19 nt, Artificial Sequence
  Description of Artificial Sequence: Synthetic oligonucleotide
auuggggaauucguagugg

SEQ ID NO: 1198244 - RNA, 19 nt, Artificial Sequence
  Description of Artificial Sequence: Synthetic oligonucleotide
uauauggaggaaugagcuc

SEQ ID NO: 1198245 - RNA, 19 nt, Artificial Sequence
  Description of Artificial Sequence: Synthetic oligonucleotide
guggacuggaauugcagug

SEQ ID NO: 1198246 - RNA, 19 nt, Artificial Sequence
  Description of Artificial Sequence: Synthetic oligonucleotide
guaauaagugggaccaccc

SEQ ID NO: 1198247 - RNA, 19 nt, Artificial Sequence
  Description of Artificial Sequence: Synthetic oligonucleotide
aacugaaccuccgcuccac

SEQ ID NO: 1198248 - RNA, 19 nt, Artificial Sequence
  Description of Artificial Sequence: Synthetic oligonucleotide
auaaccagcccucacugua

SEQ ID NO: 1198249 - RNA, 19 nt, Artificial Sequence
  Description of Artificial Sequence: Synthetic oligonucleotide
agaacgaccauuagcaaau

SEQ ID NO: 1198250 - RNA, 19 nt, Artificial Sequence
  Description of Artificial Sequence: Synthetic oligonucleotide
gacaguuggcaucugcgca

SEQ ID NO: 1198251 - RNA, 19 nt, Artificial Sequence
  Description of Artificial Sequence: Synthetic oligonucleotide
uacauuggaagggucaaau

SEQ ID NO: 1198252 - RNA, 19 nt, Artificial Sequence
  Description of Artificial Sequence: Synthetic oligonucleotide
uggaaacuaucccagucuu

SEQ ID NO: 1198253 - RNA, 19 nt, Artificial Sequence
  Description of Artificial Sequence: Synthetic oligonucleotide
augacugacucccagcauu

SEQ ID NO: 1198254 - RNA, 19 nt, Artificial Sequence
  Description of Artificial Sequence: Synthetic oligonucleotide
cuguccaaaaucagcccag

SEQ ID NO: 1198255 - RNA, 19 nt, Artificial Sequence
  Description of Artificial Sequence: Synthetic oligonucleotide
gaagaguucucugcacugc

SEQ ID NO: 1198256 - RNA, 19 nt, Artificial Sequence
  Description of Artificial Sequence: Synthetic oligonucleotide
auuagcguguuuccuccug

SEQ ID NO: 1198257 - RNA, 19 nt, Artificial Sequence
  Description of Artificial Sequence: Synthetic oligonucleotide
auagagaccuggucugaug

SEQ ID NO: 1198258 - RNA, 19 nt, Artificial Sequence
  Description of Artificial Sequence: Synthetic oligonucleotide
uucuacacacugcuucccu

SEQ ID NO: 1198259 - RNA, 19 nt, Artificial Sequence
  Description of Artificial Sequence: Synthetic oligonucleotide
acauucuacaaaagauguc

SEQ ID NO: 1198260 - RNA, 19 nt, Artificial Sequence
  Description of Artificial Sequence: Synthetic oligonucleotide
uccuccugcuacaaucaca

SEQ ID NO: 1198261 - RNA, 19 nt, Artificial Sequence
  Description of Artificial Sequence: Synthetic oligonucleotide
caugcaucuuauagguaug

SEQ ID NO: 1198262 - RNA, 19 nt, Artificial Sequence
  Description of Artificial Sequence: Synthetic oligonucleotide
ucguguuguuugcaaucag

SEQ ID NO: 1198263 - RNA, 19 nt, Artificial Sequence
  Description of Artificial Sequence: Synthetic oligonucleotide
uguaguguucgaacaucaa

SEQ ID NO: 1198264 - RNA, 19 nt, Artificial Sequence
  Description of Artificial Sequence: Synthetic oligonucleotide
ugcuacaaucacacugcca

SEQ ID NO: 1198265 - RNA, 19 nt, Artificial Sequence
  Description of Artificial Sequence: Synthetic oligonucleotide
aaguggacauugaaauaug

SEQ ID NO: 1198266 - RNA, 19 nt, Artificial Sequence
  Description of Artificial Sequence: Synthetic oligonucleotide
agcucuauauucauuuccu

SEQ ID NO: 1198267 - RNA, 19 nt, Artificial Sequence
  Description of Artificial Sequence: Synthetic oligonucleotide
cuaaagcuacagacgugag

SEQ ID NO: 1198268 - RNA, 19 nt, Artificial Sequence
  Description of Artificial Sequence: Synthetic oligonucleotide
uaauaagaauaagugcauu

SEQ ID NO: 1198269 - RNA, 19 nt, Artificial Sequence
  Description of Artificial Sequence: Synthetic oligonucleotide
aaguacuuacugaaagaaa

SEQ ID NO: 1198270 - RNA, 19 nt, Artificial Sequence
  Description of Artificial Sequence: Synthetic oligonucleotide
gggaauucguaguggacag

SEQ ID NO: 1198271 - RNA, 19 nt, Artificial Sequence
  Description of Artificial Sequence: Synthetic oligonucleotide
uccaacacuugucgugaca

SEQ ID NO: 1198272 - RNA, 19 nt, Artificial Sequence
  Description of Artificial Sequence: Synthetic oligonucleotide
auuggaagggucaaauaau

SEQ ID NO: 1198273 - RNA, 19 nt, Artificial Sequence
  Description of Artificial Sequence: Synthetic oligonucleotide
ucacuguauaugauccaau

SEQ ID NO: 1198274 - RNA, 19 nt, Artificial Sequence
  Description of Artificial Sequence: Synthetic oligonucleotide
uuuuagccgcucugcacca

SEQ ID NO: 1198275 - RNA, 19 nt, Artificial Sequence
  Description of Artificial Sequence: Synthetic oligonucleotide
cuuacugaaagaaaauauu

SEQ ID NO: 1198276 - RNA, 19 nt, Artificial Sequence
  Description of Artificial Sequence: Synthetic oligonucleotide
guaugauccaaaauggccu

SEQ ID NO: 1198277 - RNA, 19 nt, Artificial Sequence
  Description of Artificial Sequence: Synthetic oligonucleotide
uuauaagccuaagguaaaa

SEQ ID NO: 1198278 - RNA, 19 nt, Artificial Sequence
  Description of Artificial Sequence: Synthetic oligonucleotide
ucguaguggacaguuggca

SEQ ID NO: 1198279 - RNA, 19 nt, Artificial Sequence
  Description of Artificial Sequence: Synthetic oligonucleotide
aaacucuguauuagcgugu

SEQ ID NO: 1198280 - RNA, 19 nt, Artificial Sequence
  Description of Artificial Sequence: Synthetic oligonucleotide
aauucguaguggacaguug

SEQ ID NO: 1198281 - RNA, 19 nt, Artificial Sequence
  Description of Artificial Sequence: Synthetic oligonucleotide
cuauuuaaucugucaguga

SEQ ID NO: 1198282 - RNA, 19 nt, Artificial Sequence
  Description of Artificial Sequence: Synthetic oligonucleotide
guaguggacaguuggcauc

SEQ ID NO: 1198283 - RNA, 19 nt, Artificial Sequence
  Description of Artificial Sequence: Synthetic oligonucleotide
accagcauaaccagcccuc

SEQ ID NO: 1198284 - RNA, 19 nt, Artificial Sequence
  Description of Artificial Sequence: Synthetic oligonucleotide
gagccuccgauccaugaac

SEQ ID NO: 1198285 - RNA, 19 nt, Artificial Sequence
  Description of Artificial Sequence: Synthetic oligonucleotide
agccucuuuugaugcaauc

SEQ ID NO: 1198286 - RNA, 19 nt, Artificial Sequence
  Description of Artificial Sequence: Synthetic oligonucleotide
aucauauauggaggaauga

SEQ ID NO: 1198287 - RNA, 19 nt, Artificial Sequence
  Description of Artificial Sequence: Synthetic oligonucleotide
cgaccauuagcaaaugccg

SEQ ID NO: 1198288 - RNA, 19 nt, Artificial Sequence
  Description of Artificial Sequence: Synthetic oligonucleotide
gacauagccaucguggacu

SEQ ID NO: 1198289 - RNA, 19 nt, Artificial Sequence
  Description of Artificial Sequence: Synthetic oligonucleotide
aaacuaucccagucuucaa

SEQ ID NO: 1198290 - RNA, 19 nt, Artificial Sequence
  Description of Artificial Sequence: Synthetic oligonucleotide
ggcauugguaucuauguaa

SEQ ID NO: 1198291 - RNA, 19 nt, Artificial Sequence
  Description of Artificial Sequence: Synthetic oligonucleotide
cuuugucaccaucuauuuc

SEQ ID NO: 1198292 - RNA, 19 nt, Artificial Sequence
  Description of Artificial Sequence: Synthetic oligonucleotide
acuugucgugacaacauga

SEQ ID NO: 1198293 - RNA, 19 nt, Artificial Sequence
  Description of Artificial Sequence: Synthetic oligonucleotide
ugcgcagccacuuguucgu

SEQ ID NO: 1198294 - RNA, 19 nt, Artificial Sequence
  Description of Artificial Sequence: Synthetic oligonucleotide
gucgugacaacaugacuga

SEQ ID NO: 1198295 - RNA, 19 nt, Artificial Sequence
  Description of Artificial Sequence: Synthetic oligonucleotide
gaaaauccuggaugacaca

SEQ ID NO: 1198296 - RNA, 19 nt, Artificial Sequence
  Description of Artificial Sequence: Synthetic oligonucleotide
auuuauagagccaguuaaa

SEQ ID NO: 1198297 - RNA, 19 nt, Artificial Sequence
  Description of Artificial Sequence: Synthetic oligonucleotide
auauuccuguuuggaaauc

SEQ ID NO: 1198298 - RNA, 19 nt, Artificial Sequence
  Description of Artificial Sequence: Synthetic oligonucleotide
accauaccaauagccgugg

SEQ ID NO: 1198299 - RNA, 19 nt, Artificial Sequence
  Description of Artificial Sequence: Synthetic oligonucleotide
agcuacagacgugagguga

SEQ ID NO: 1198300 - RNA, 19 nt, Artificial Sequence
  Description of Artificial Sequence: Synthetic oligonucleotide
cuguaguguucgaacauca

SEQ ID NO: 1198301 - RNA, 19 nt, Artificial Sequence
  Description of Artificial Sequence: Synthetic oligonucleotide
uggggaauucguaguggac

SEQ ID NO: 1198302 - RNA, 19 nt, Artificial Sequence
  Description of Artificial Sequence: Synthetic oligonucleotide
uguucucccuggguacucg

SEQ ID NO: 1198303 - RNA, 19 nt, Artificial Sequence
  Description of Artificial Sequence: Synthetic oligonucleotide
uguucccagauaaucccuu

SEQ ID NO: 1198304 - RNA, 19 nt, Artificial Sequence
  Description of Artificial Sequence: Synthetic oligonucleotide
gccaguuaaagccuuaaaa

SEQ ID NO: 1198305 - RNA, 19 nt, Artificial Sequence
  Description of Artificial Sequence: Synthetic oligonucleotide
ugccaagaccuuguaaccu

SEQ ID NO: 1198306 - RNA, 19 nt, Artificial Sequence
  Description of Artificial Sequence: Synthetic oligonucleotide
ugccuguaauaagaauaag

SEQ ID NO: 1198307 - RNA, 19 nt, Artificial Sequence
  Description of Artificial Sequence: Synthetic oligonucleotide
ucguagguggagucugaca

SEQ ID NO: 1198308 - RNA, 19 nt, Artificial Sequence
  Description of Artificial Sequence: Synthetic oligonucleotide
cagacgugaggugaugggc

SEQ ID NO: 1198309 - RNA, 19 nt, Artificial Sequence
  Description of Artificial Sequence: Synthetic oligonucleotide
acaugagaacaggaugcag

SEQ ID NO: 1198310 - RNA, 19 nt, Artificial Sequence
  Description of Artificial Sequence: Synthetic oligonucleotide
ggaagggucaaauaauccu

SEQ ID NO: 1198311 - RNA, 19 nt, Artificial Sequence
  Description of Artificial Sequence: Synthetic oligonucleotide
ggaggaaugagcucuauau

SEQ ID NO: 1198312 - RNA, 19 nt, Artificial Sequence
  Description of Artificial Sequence: Synthetic oligonucleotide
uguucgucguagguggagu

SEQ ID NO: 1198313 - RNA, 19 nt, Artificial Sequence
  Description of Artificial Sequence: Synthetic oligonucleotide
augccuguaauaagaauaa

SEQ ID NO: 1198314 - RNA, 19 nt, Artificial Sequence
  Description of Artificial Sequence: Synthetic oligonucleotide
cacuuguucgucguaggug

SEQ ID NO: 1198315 - RNA, 19 nt, Artificial Sequence
  Description of Artificial Sequence: Synthetic oligonucleotide
aucagcccaguagaacgac

SEQ ID NO: 1198316 - RNA, 19 nt, Artificial Sequence
  Description of Artificial Sequence: Synthetic oligonucleotide
auguaauaagugggaccac

SEQ ID NO: 1198317 - RNA, 19 nt, Artificial Sequence
  Description of Artificial Sequence: Synthetic oligonucleotide
uuguucgucguagguggag

SEQ ID NO: 1198318 - RNA, 19 nt, Artificial Sequence
  Description of Artificial Sequence: Synthetic oligonucleotide
ugccuuugucaccaucuau

SEQ ID NO: 1198319 - RNA, 19 nt, Artificial Sequence
  Description of Artificial Sequence: Synthetic oligonucleotide
cguagguggagucugacac

SEQ ID NO: 1198320 - RNA, 19 nt, Artificial Sequence
  Description of Artificial Sequence: Synthetic oligonucleotide
uggaggaaugagcucuaua

SEQ ID NO: 1198321 - RNA, 19 nt, Artificial Sequence
  Description of Artificial Sequence: Synthetic oligonucleotide
ucggagggcauugguaucu

SEQ ID NO: 1198322 - RNA, 19 nt, Artificial Sequence
  Description of Artificial Sequence: Synthetic oligonucleotide
ucgucguagguggagucug

SEQ ID NO: 1198323 - RNA, 19 nt, Artificial Sequence
  Description of Artificial Sequence: Synthetic oligonucleotide
ucugcgcagccacuuguuc

SEQ ID NO: 1198324 - RNA, 19 nt, Artificial Sequence
  Description of Artificial Sequence: Synthetic oligonucleotide
agccacuuguucgucguag

SEQ ID NO: 1198325 - RNA, 19 nt, Artificial Sequence
  Description of Artificial Sequence: Synthetic oligonucleotide
aucuguugaaagguaccca

SEQ ID NO: 1198326 - RNA, 19 nt, Artificial Sequence
  Description of Artificial Sequence: Synthetic oligonucleotide
accuggucugaugucaaug

SEQ ID NO: 1198327 - RNA, 19 nt, Artificial Sequence
  Description of Artificial Sequence: Synthetic oligonucleotide
aacucuguauuagcguguu

SEQ ID NO: 1198328 - RNA, 19 nt, Artificial Sequence
  Description of Artificial Sequence: Synthetic oligonucleotide
acauuggaagggucaaaua

SEQ ID NO: 1198329 - RNA, 19 nt, Artificial Sequence
  Description of Artificial Sequence: Synthetic oligonucleotide
cacuugucgugacaacaug

SEQ ID NO: 1198330 - RNA, 19 nt, Artificial Sequence
  Description of Artificial Sequence: Synthetic oligonucleotide
agaugcuagaauggagccu

SEQ ID NO: 1198331 - RNA, 19 nt, Artificial Sequence
  Description of Artificial Sequence: Synthetic oligonucleotide
ggacauugaaauaugcaaa

SEQ ID NO: 1198332 - RNA, 19 nt, Artificial Sequence
  Description of Artificial Sequence: Synthetic oligonucleotide
aaucaaccuuggggcaguc

SEQ ID NO: 1198333 - RNA, 19 nt, Artificial Sequence
  Description of Artificial Sequence: Synthetic oligonucleotide
aggggauuucacaaugccu

SEQ ID NO: 1198334 - RNA, 19 nt, Artificial Sequence
  Description of Artificial Sequence: Synthetic oligonucleotide
uucucccuggguacucgga

SEQ ID NO: 1198335 - RNA, 19 nt, Artificial Sequence
  Description of Artificial Sequence: Synthetic oligonucleotide
augcaucuuauagguauga

SEQ ID NO: 1198336 - RNA, 19 nt, Artificial Sequence
  Description of Artificial Sequence: Synthetic oligonucleotide
gcucuauauucauuuccug

SEQ ID NO: 1198337 - RNA, 19 nt, Artificial Sequence
  Description of Artificial Sequence: Synthetic oligonucleotide
uugccuuugucaccaucua

SEQ ID NO: 1198338 - RNA, 19 nt, Artificial Sequence
  Description of Artificial Sequence: Synthetic oligonucleotide
gccaagaccuuguaaccug

SEQ ID NO: 1198339 - RNA, 19 nt, Artificial Sequence
  Description of Artificial Sequence: Synthetic oligonucleotide
uucgucguagguggagucu

SEQ ID NO: 1198340 - RNA, 19 nt, Artificial Sequence
  Description of Artificial Sequence: Synthetic oligonucleotide
aaccauuggggaauucgua

SEQ ID NO: 1198341 - RNA, 19 nt, Artificial Sequence
  Description of Artificial Sequence: Synthetic oligonucleotide
gauuugacaugcaucuuau

SEQ ID NO: 1198342 - RNA, 19 nt, Artificial Sequence
  Description of Artificial Sequence: Synthetic oligonucleotide
uccgauccaugaacugaac

SEQ ID NO: 1198343 - RNA, 19 nt, Artificial Sequence
  Description of Artificial Sequence: Synthetic oligonucleotide
ugcaucuuauagguaugau

SEQ ID NO: 1198344 - RNA, 19 nt, Artificial Sequence
  Description of Artificial Sequence: Synthetic oligonucleotide
ugacucccagcauuguguu

SEQ ID NO: 1198345 - RNA, 19 nt, Artificial Sequence
  Description of Artificial Sequence: Synthetic oligonucleotide
caacacuugucgugacaac

SEQ ID NO: 1198346 - RNA, 19 nt, Artificial Sequence
  Description of Artificial Sequence: Synthetic oligonucleotide
uuacauuggaagggucaaa

SEQ ID NO: 1198347 - RNA, 19 nt, Artificial Sequence
  Description of Artificial Sequence: Synthetic oligonucleotide
gguggagucugacaccuga

SEQ ID NO: 1198348 - RNA, 19 nt, Artificial Sequence
  Description of Artificial Sequence: Synthetic oligonucleotide
ccaagaccuuguaaccugg

SEQ ID NO: 1198349 - RNA, 19 nt, Artificial Sequence
  Description of Artificial Sequence: Synthetic oligonucleotide
uagcguguuuccuccugcu

SEQ ID NO: 1198350 - RNA, 19 nt, Artificial Sequence
  Description of Artificial Sequence: Synthetic oligonucleotide
augcagggaugcuguagug

SEQ ID NO: 1198351 - RNA, 19 nt, Artificial Sequence
  Description of Artificial Sequence: Synthetic oligonucleotide
uggggcaauuucucuuuuc

SEQ ID NO: 1198352 - RNA, 19 nt, Artificial Sequence
  Description of Artificial Sequence: Synthetic oligonucleotide
ggaguuuucugagaaagcu

SEQ ID NO: 1198353 - RNA, 19 nt, Artificial Sequence
  Description of Artificial Sequence: Synthetic oligonucleotide
cagcccucacuguauauga

SEQ ID NO: 1198354 - RNA, 19 nt, Artificial Sequence
  Description of Artificial Sequence: Synthetic oligonucleotide
aaaugccgucaaaacugca

SEQ ID NO: 1198355 - RNA, 19 nt, Artificial Sequence
  Description of Artificial Sequence: Synthetic oligonucleotide
guuguaaccauuggggaau

SEQ ID NO: 1198356 - RNA, 19 nt, Artificial Sequence
  Description of Artificial Sequence: Synthetic oligonucleotide
guaaccuggggcaauuucu

SEQ ID NO: 1198357 - RNA, 19 nt, Artificial Sequence
  Description of Artificial Sequence: Synthetic oligonucleotide
cucacuguauaugauccaa

SEQ ID NO: 1198358 - RNA, 19 nt, Artificial Sequence
  Description of Artificial Sequence: Synthetic oligonucleotide
gcguguuuccuccugcuac

SEQ ID NO: 1198359 - RNA, 19 nt, Artificial Sequence
  Description of Artificial Sequence: Synthetic oligonucleotide
cauauuccuguuuggaaau

SEQ ID NO: 1198360 - RNA, 19 nt, Artificial Sequence
  Description of Artificial Sequence: Synthetic oligonucleotide
gaacugaaccuccgcucca

SEQ ID NO: 1198361 - RNA, 19 nt, Artificial Sequence
  Description of Artificial Sequence: Synthetic oligonucleotide
guagaacgaccauuagcaa

SEQ ID NO: 1198362 - RNA, 19 nt, Artificial Sequence
  Description of Artificial Sequence: Synthetic oligonucleotide
gaauucguaguggacaguu

SEQ ID NO: 1198363 - RNA, 19 nt, Artificial Sequence
  Description of Artificial Sequence: Synthetic oligonucleotide
ggggaauucguaguggaca

SEQ ID NO: 1198364 - RNA, 19 nt, Artificial Sequence
  Description of Artificial Sequence: Synthetic oligonucleotide
guaacuccaccaacccacc

SEQ ID NO: 1198365 - RNA, 19 nt, Artificial Sequence
  Description of Artificial Sequence: Synthetic oligonucleotide
caucguggacuggaauugc

SEQ ID NO: 1198366 - RNA, 19 nt, Artificial Sequence
  Description of Artificial Sequence: Synthetic oligonucleotide
aaccagcccucacuguaua

SEQ ID NO: 1198367 - RNA, 19 nt, Artificial Sequence
  Description of Artificial Sequence: Synthetic oligonucleotide
auccuggaugacacaauug

SEQ ID NO: 1198368 - RNA, 19 nt, Artificial Sequence
  Description of Artificial Sequence: Synthetic oligonucleotide
agucuucaaccauuccauu

SEQ ID NO: 1198369 - RNA, 19 nt, Artificial Sequence
  Description of Artificial Sequence: Synthetic oligonucleotide
cuccgauccaugaacugaa

SEQ ID NO: 1198370 - RNA, 19 nt, Artificial Sequence
  Description of Artificial Sequence: Synthetic oligonucleotide
ugccgucaaaacugcaguu

SEQ ID NO: 1198371 - RNA, 19 nt, Artificial Sequence
  Description of Artificial Sequence: Synthetic oligonucleotide
gaaccuccgcuccaccguc

SEQ ID NO: 1198372 - RNA, 19 nt, Artificial Sequence
  Description of Artificial Sequence: Synthetic oligonucleotide
ccgauccaugaacugaacc

SEQ ID NO: 1198373 - RNA, 19 nt, Artificial Sequence
  Description of Artificial Sequence: Synthetic oligonucleotide
cguggggaaaucaaccuug

SEQ ID NO: 1198374 - RNA, 19 nt, Artificial Sequence
  Description of Artificial Sequence: Synthetic oligonucleotide
guacccaaagaugcuagaa

SEQ ID NO: 1198375 - RNA, 19 nt, Artificial Sequence
  Description of Artificial Sequence: Synthetic oligonucleotide
cacggugcuucugacauga

SEQ ID NO: 1198376 - RNA, 19 nt, Artificial Sequence
  Description of Artificial Sequence: Synthetic oligonucleotide
gacccuucaaggacauuuc

SEQ ID NO: 1198377 - RNA, 19 nt, Artificial Sequence
  Description of Artificial Sequence: Synthetic oligonucleotide
guucgucguagguggaguc

SEQ ID NO: 1198378 - RNA, 19 nt, Artificial Sequence
  Description of Artificial Sequence: Synthetic oligonucleotide
acacuugucgugacaacau

SEQ ID NO: 1198379 - RNA, 19 nt, Artificial Sequence
  Description of Artificial Sequence: Synthetic oligonucleotide
gagagcuggaaaguacuua

SEQ ID NO: 1198380 - RNA, 19 nt, Artificial Sequence
  Description of Artificial Sequence: Synthetic oligonucleotide
uuccaacacuugucgugac

SEQ ID NO: 1198381 - RNA, 19 nt, Artificial Sequence
  Description of Artificial Sequence: Synthetic oligonucleotide
uccuuucuacacacugcuu

SEQ ID NO: 1198382 - RNA, 19 nt, Artificial Sequence
  Description of Artificial Sequence: Synthetic oligonucleotide
gaacgaccauuagcaaaug

SEQ ID NO: 1198383 - RNA, 19 nt, Artificial Sequence
  Description of Artificial Sequence: Synthetic oligonucleotide
auugugccaagaccuugua

SEQ ID NO: 1198384 - RNA, 19 nt, Artificial Sequence
  Description of Artificial Sequence: Synthetic oligonucleotide
caaucauauauggaggaau

SEQ ID NO: 1198385 - RNA, 19 nt, Artificial Sequence
  Description of Artificial Sequence: Synthetic oligonucleotide
ggaaagcacaaacucauuu

SEQ ID NO: 1198386 - RNA, 19 nt, Artificial Sequence
  Description of Artificial Sequence: Synthetic oligonucleotide
auguucucccuggguacuc

SEQ ID NO: 1198387 - RNA, 19 nt, Artificial Sequence
  Description of Artificial Sequence: Synthetic oligonucleotide
caggcuggcuucagauuug

SEQ ID NO: 1198388 - RNA, 19 nt, Artificial Sequence
  Description of Artificial Sequence: Synthetic oligonucleotide
gaccauuagcaaaugccgu

SEQ ID NO: 1198389 - RNA, 19 nt, Artificial Sequence
  Description of Artificial Sequence: Synthetic oligonucleotide
cugagaaagcucucuauuu

SEQ ID NO: 1198390 - RNA, 19 nt, Artificial Sequence
  Description of Artificial Sequence: Synthetic oligonucleotide
cuguugaaagguacccaaa

SEQ ID NO: 1198391 - RNA, 19 nt, Artificial Sequence
  Description of Artificial Sequence: Synthetic oligonucleotide
cacccuguuugccuuuguc

SEQ ID NO: 1198392 - RNA, 19 nt, Artificial Sequence
  Description of Artificial Sequence: Synthetic oligonucleotide
ucgugacaacaugacugac

SEQ ID NO: 1198393 - RNA, 19 nt, Artificial Sequence
  Description of Artificial Sequence: Synthetic oligonucleotide
cuucagauuugacaugcau

SEQ ID NO: 1198394 - RNA, 19 nt, Artificial Sequence
  Description of Artificial Sequence: Synthetic oligonucleotide
guuccacggugcuucugac

SEQ ID NO: 1198395 - RNA, 19 nt, Artificial Sequence
  Description of Artificial Sequence: Synthetic oligonucleotide
cagcauaaccagcccucac

SEQ ID NO: 1198396 - RNA, 19 nt, Artificial Sequence
  Description of Artificial Sequence: Synthetic oligonucleotide
cucggagggcauugguauc

SEQ ID NO: 1198397 - RNA, 19 nt, Artificial Sequence
  Description of Artificial Sequence: Synthetic oligonucleotide
agccaucguggacuggaau

SEQ ID NO: 1198398 - RNA, 19 nt, Artificial Sequence
  Description of Artificial Sequence: Synthetic oligonucleotide
gcaaucaguuucaaccgca

SEQ ID NO: 1198399 - RNA, 19 nt, Artificial Sequence
  Description of Artificial Sequence: Synthetic oligonucleotide
aucguggacuggaauugca

SEQ ID NO: 1198400 - RNA, 19 nt, Artificial Sequence
  Description of Artificial Sequence: Synthetic oligonucleotide
gacucccagcauuguguuc

SEQ ID NO: 1198401 - RNA, 19 nt, Artificial Sequence
  Description of Artificial Sequence: Synthetic oligonucleotide
ccaugaacugaaccuccgc

SEQ ID NO: 1198402 - RNA, 19 nt, Artificial Sequence
  Description of Artificial Sequence: Synthetic oligonucleotide
acgugaggugaugggcagg

SEQ ID NO: 1198403 - RNA, 19 nt, Artificial Sequence
  Description of Artificial Sequence: Synthetic oligonucleotide
acaacaugacugacuccca

SEQ ID NO: 1198404 - RNA, 19 nt, Artificial Sequence
  Description of Artificial Sequence: Synthetic oligonucleotide
agaaugcagggaugcugua

SEQ ID NO: 1198405 - RNA, 19 nt, Artificial Sequence
  Description of Artificial Sequence: Synthetic oligonucleotide
accgcaugcuugguggagu

SEQ ID NO: 1198406 - RNA, 19 nt, Artificial Sequence
  Description of Artificial Sequence: Synthetic oligonucleotide
gcccucacuguauaugauc

SEQ ID NO: 1198407 - RNA, 19 nt, Artificial Sequence
  Description of Artificial Sequence: Synthetic oligonucleotide
agcguguuuccuccugcua

SEQ ID NO: 1198408 - RNA, 19 nt, Artificial Sequence
  Description of Artificial Sequence: Synthetic oligonucleotide
ccaucguggacuggaauug

SEQ ID NO: 1198409 - RNA, 19 nt, Artificial Sequence
  Description of Artificial Sequence: Synthetic oligonucleotide
agcccaguagaacgaccau

SEQ ID NO: 1198410 - RNA, 19 nt, Artificial Sequence
  Description of Artificial Sequence: Synthetic oligonucleotide
agccuccgauccaugaacu

SEQ ID NO: 1198411 - RNA, 19 nt, Artificial Sequence
  Description of Artificial Sequence: Synthetic oligonucleotide
gugggaccacccuguuugc

SEQ ID NO: 1198412 - RNA, 19 nt, Artificial Sequence
  Description of Artificial Sequence: Synthetic oligonucleotide
ggagagccuucccgaacag

SEQ ID NO: 1198413 - RNA, 19 nt, Artificial Sequence
  Description of Artificial Sequence: Synthetic oligonucleotide
cccaguagaacgaccauua

SEQ ID NO: 1198414 - RNA, 19 nt, Artificial Sequence
  Description of Artificial Sequence: Synthetic oligonucleotide
ccaguagaacgaccauuag

SEQ ID NO: 1198415 - RNA, 19 nt, Artificial Sequence
  Description of Artificial Sequence: Synthetic oligonucleotide
gucguagguggagucugac

SEQ ID NO: 1198416 - RNA, 19 nt, Artificial Sequence
  Description of Artificial Sequence: Synthetic oligonucleotide
ccucaccagcauaaccagc

SEQ ID NO: 1198417 - RNA, 19 nt, Artificial Sequence
  Description of Artificial Sequence: Synthetic oligonucleotide
uuguaaccauuggggaauu

SEQ ID NO: 1198418 - RNA, 19 nt, Artificial Sequence
  Description of Artificial Sequence: Synthetic oligonucleotide
gacaugcaucuuauaggua

SEQ ID NO: 1198419 - RNA, 19 nt, Artificial Sequence
  Description of Artificial Sequence: Synthetic oligonucleotide
cuccaccaacccacccaag

SEQ ID NO: 1198420 - RNA, 19 nt, Artificial Sequence
  Description of Artificial Sequence: Synthetic oligonucleotide
ggaugacacaauugcacau

SEQ ID NO: 1198421 - RNA, 19 nt, Artificial Sequence
  Description of Artificial Sequence: Synthetic oligonucleotide
acucuguauuagcguguuu

SEQ ID NO: 1198422 - RNA, 19 nt, Artificial Sequence
  Description of Artificial Sequence: Synthetic oligonucleotide
caaucaguuucaaccgcau

SEQ ID NO: 1198423 - RNA, 19 nt, Artificial Sequence
  Description of Artificial Sequence: Synthetic oligonucleotide
cauaaccagcccucacugu

SEQ ID NO: 1198424 - RNA, 19 nt, Artificial Sequence
  Description of Artificial Sequence: Synthetic oligonucleotide
aggaaagcacaaacucauu

SEQ ID NO: 1198425 - RNA, 19 nt, Artificial Sequence
  Description of Artificial Sequence: Synthetic oligonucleotide
uaggacggguagugauuuu

SEQ ID NO: 1198426 - RNA, 19 nt, Artificial Sequence
  Description of Artificial Sequence: Synthetic oligonucleotide
caaccgcaugcuuggugga

SEQ ID NO: 1198427 - RNA, 19 nt, Artificial Sequence
  Description of Artificial Sequence: Synthetic oligonucleotide
ggacccuucaaggacauuu

SEQ ID NO: 1198428 - RNA, 19 nt, Artificial Sequence
  Description of Artificial Sequence: Synthetic oligonucleotide
gcaucugcgcagccacuug

SEQ ID NO: 1198429 - RNA, 19 nt, Artificial Sequence
  Description of Artificial Sequence: Synthetic oligonucleotide
agaccuggucugaugucaa

SEQ ID NO: 1198430 - RNA, 19 nt, Artificial Sequence
  Description of Artificial Sequence: Synthetic oligonucleotide
ggagccuccgauccaugaa

SEQ ID NO: 1198431 - RNA, 19 nt, Artificial Sequence
  Description of Artificial Sequence: Synthetic oligonucleotide
gccuccgauccaugaacug

SEQ ID NO: 1198432 - RNA, 19 nt, Artificial Sequence
  Description of Artificial Sequence: Synthetic oligonucleotide
caccaaaaucacaguugua

SEQ ID NO: 1198433 - RNA, 19 nt, Artificial Sequence
  Description of Artificial Sequence: Synthetic oligonucleotide
ggguacucggagggcauug

SEQ ID NO: 1198434 - RNA, 19 nt, Artificial Sequence
  Description of Artificial Sequence: Synthetic oligonucleotide
ccauaccaauagccguggg

SEQ ID NO: 1198435 - RNA, 19 nt, Artificial Sequence
  Description of Artificial Sequence: Synthetic oligonucleotide
guacucggagggcauuggu

SEQ ID NO: 1198436 - RNA, 19 nt, Artificial Sequence
  Description of Artificial Sequence: Synthetic oligonucleotide
caucugcgcagccacuugu

SEQ ID NO: 1198437 - RNA, 19 nt, Artificial Sequence
  Description of Artificial Sequence: Synthetic oligonucleotide
uccgcuccaccgucguguu

SEQ ID NO: 1198438 - RNA, 19 nt, Artificial Sequence
  Description of Artificial Sequence: Synthetic oligonucleotide
gcgccaacuucaucuccgc

SEQ ID NO: 1198439 - RNA, 19 nt, Artificial Sequence
  Description of Artificial Sequence: Synthetic oligonucleotide
acaagggcgccaacuucau

SEQ ID NO: 1198440 - RNA, 19 nt, Artificial Sequence
  Description of Artificial Sequence: Synthetic oligonucleotide
gggcgccaacuucaucucc

SEQ ID NO: 1198441 - RNA, 19 nt, Artificial Sequence
  Description of Artificial Sequence: Synthetic oligonucleotide
gggaccacccuguuugccu

SEQ ID NO: 1198442 - RNA, 19 nt, Artificial Sequence
  Description of Artificial Sequence: Synthetic oligonucleotide
ccaccaacccacccaagga

SEQ ID NO: 1198443 - RNA, 19 nt, Artificial Sequence
  Description of Artificial Sequence: Synthetic oligonucleotide
agagccaguuaaagccuua

SEQ ID NO: 1198444 - RNA, 19 nt, Artificial Sequence
  Description of Artificial Sequence: Synthetic oligonucleotide
gcauugguaucuauguaau

SEQ ID NO: 1198445 - RNA, 19 nt, Artificial Sequence
  Description of Artificial Sequence: Synthetic oligonucleotide
ccuccgauccaugaacuga

SEQ ID NO: 1198446 - RNA, 19 nt, Artificial Sequence
  Description of Artificial Sequence: Synthetic oligonucleotide
cuaggacggguagugauuu

SEQ ID NO: 1198447 - RNA, 19 nt, Artificial Sequence
  Description of Artificial Sequence: Synthetic oligonucleotide
guucccagauaaucccuuu

SEQ ID NO: 1198448 - RNA, 19 nt, Artificial Sequence
  Description of Artificial Sequence: Synthetic oligonucleotide
gcucucuauuuaaucuguc

SEQ ID NO: 1198449 - RNA, 19 nt, Artificial Sequence
  Description of Artificial Sequence: Synthetic oligonucleotide
cagcauuguguucccagau

SEQ ID NO: 1198450 - RNA, 19 nt, Artificial Sequence
  Description of Artificial Sequence: Synthetic oligonucleotide
uggguacucggagggcauu

SEQ ID NO: 1198451 - RNA, 19 nt, Artificial Sequence
  Description of Artificial Sequence: Synthetic oligonucleotide
gccguggggaaaucaaccu

SEQ ID NO: 1198452 - RNA, 19 nt, Artificial Sequence
  Description of Artificial Sequence: Synthetic oligonucleotide
agcccucacuguauaugau

SEQ ID NO: 1198453 - RNA, 19 nt, Artificial Sequence
  Description of Artificial Sequence: Synthetic oligonucleotide
guguuccacggugcuucug

SEQ ID NO: 1198454 - RNA, 19 nt, Artificial Sequence
  Description of Artificial Sequence: Synthetic oligonucleotide
aucugcgcagccacuuguu

SEQ ID NO: 1198455 - RNA, 19 nt, Artificial Sequence
  Description of Artificial Sequence: Synthetic oligonucleotide
ccucacuguauaugaucca

SEQ ID NO: 1198456 - RNA, 19 nt, Artificial Sequence
  Description of Artificial Sequence: Synthetic oligonucleotide
cauguucucccuggguacu

SEQ ID NO: 1198457 - RNA, 19 nt, Artificial Sequence
  Description of Artificial Sequence: Synthetic oligonucleotide
ccauuggggaauucguagu

SEQ ID NO: 1198458 - RNA, 19 nt, Artificial Sequence
  Description of Artificial Sequence: Synthetic oligonucleotide
cauagagaccuggucugau

SEQ ID NO: 1198459 - RNA, 19 nt, Artificial Sequence
  Description of Artificial Sequence: Synthetic oligonucleotide
gacugacucccagcauugu

SEQ ID NO: 1198460 - RNA, 19 nt, Artificial Sequence
  Description of Artificial Sequence: Synthetic oligonucleotide
cccgaacagccucuuuuga

SEQ ID NO: 1198461 - RNA, 19 nt, Artificial Sequence
  Description of Artificial Sequence: Synthetic oligonucleotide
cgccaacuucaucuccgcc

SEQ ID NO: 1198462 - RNA, 19 nt, Artificial Sequence
  Description of Artificial Sequence: Synthetic oligonucleotide
cguggacuggaauugcagu

SEQ ID NO: 1198463 - RNA, 19 nt, Artificial Sequence
  Description of Artificial Sequence: Synthetic oligonucleotide
gcuacagacgugaggugau

SEQ ID NO: 1198464 - RNA, 19 nt, Artificial Sequence
  Description of Artificial Sequence: Synthetic oligonucleotide
gccgucaaaacugcaguuu

SEQ ID NO: 1198465 - RNA, 19 nt, Artificial Sequence
  Description of Artificial Sequence: Synthetic oligonucleotide
ccauagagaccuggucuga

SEQ ID NO: 1198466 - RNA, 19 nt, Artificial Sequence
  Description of Artificial Sequence: Synthetic oligonucleotide
cuccugcuacaaucacacu

SEQ ID NO: 1198467 - RNA, 19 nt, Artificial Sequence
  Description of Artificial Sequence: Synthetic oligonucleotide
ccgucaaaacugcaguuuu

SEQ ID NO: 1198468 - RNA, 19 nt, Artificial Sequence
  Description of Artificial Sequence: Synthetic oligonucleotide
ggaccacccuguuugccuu

SEQ ID NO: 1198469 - RNA, 19 nt, Artificial Sequence
  Description of Artificial Sequence: Synthetic oligonucleotide
ccacuuguucgucguaggu

SEQ ID NO: 1198470 - RNA, 19 nt, Artificial Sequence
  Description of Artificial Sequence: Synthetic oligonucleotide
cagccacuuguucgucgua

SEQ ID NO: 1198471 - RNA, 19 nt, Artificial Sequence
  Description of Artificial Sequence: Synthetic oligonucleotide
cuggggcaauuucucuuuu

SEQ ID NO: 1198472 - RNA, 19 nt, Artificial Sequence
  Description of Artificial Sequence: Synthetic oligonucleotide
gcccaguagaacgaccauu

SEQ ID NO: 1198473 - RNA, 19 nt, Artificial Sequence
  Description of Artificial Sequence: Synthetic oligonucleotide
ccgucguguuguuugcaau

SEQ ID NO: 1198474 - RNA, 19 nt, Artificial Sequence
  Description of Artificial Sequence: Synthetic oligonucleotide
ccguggggaaaucaaccuu

SEQ ID NO: 1198475 - RNA, 19 nt, Artificial Sequence
  Description of Artificial Sequence: Synthetic oligonucleotide
ccuuguaaccuggggcaau

SEQ ID NO: 1198476 - RNA, 19 nt, Artificial Sequence
  Description of Artificial Sequence: Synthetic oligonucleotide
ccgcaugcuugguggaguu

SEQ ID NO: 1198477 - RNA, 19 nt, Artificial Sequence
  Description of Artificial Sequence: Synthetic oligonucleotide
cuccaccgucguguuguuu

SEQ ID NO: 1198478 - RNA, 19 nt, Artificial Sequence
  Description of Artificial Sequence: Synthetic oligonucleotide
gcuccaccgucguguuguu

SEQ ID NO: 1198479 - RNA, 19 nt, Artificial Sequence
  Description of Artificial Sequence: Synthetic oligonucleotide
aaaauagaggacuaacugg

SEQ ID NO: 1198480 - RNA, 19 nt, Artificial Sequence
  Description of Artificial Sequence: Synthetic oligonucleotide
gaugauauggugcugaggg

SEQ ID NO: 1198481 - RNA, 19 nt, Artificial Sequence
  Description of Artificial Sequence: Synthetic oligonucleotide
uguacuguaaaauaaccgg

SEQ ID NO: 1198482 - RNA, 19 nt, Artificial Sequence
  Description of Artificial Sequence: Synthetic oligonucleotide
uguaccauaaauaggacag

SEQ ID NO: 1198483 - RNA, 19 nt, Artificial Sequence
  Description of Artificial Sequence: Synthetic oligonucleotide
uuauaauaggcaaacauga

SEQ ID NO: 1198484 - RNA, 19 nt, Artificial Sequence
  Description of Artificial Sequence: Synthetic oligonucleotide
gaugagaggaaauauaggc

SEQ ID NO: 1198485 - RNA, 19 nt, Artificial Sequence
  Description of Artificial Sequence: Synthetic oligonucleotide
aaggauggugcauagagag

SEQ ID NO: 1198486 - RNA, 19 nt, Artificial Sequence
  Description of Artificial Sequence: Synthetic oligonucleotide
ugcacuguaccauaaauag

SEQ ID NO: 1198487 - RNA, 19 nt, Artificial Sequence
  Description of Artificial Sequence: Synthetic oligonucleotide
acaacgaugacuguggugg

SEQ ID NO: 1198488 - RNA, 19 nt, Artificial Sequence
  Description of Artificial Sequence: Synthetic oligonucleotide
aaaucgguagaucucagcu

SEQ ID NO: 1198489 - RNA, 19 nt, Artificial Sequence
  Description of Artificial Sequence: Synthetic oligonucleotide
auaggcacugguaagaugc

SEQ ID NO: 1198490 - RNA, 19 nt, Artificial Sequence
  Description of Artificial Sequence: Synthetic oligonucleotide
aacaugaccaaaccaauga

SEQ ID NO: 1198491 - RNA, 19 nt, Artificial Sequence
  Description of Artificial Sequence: Synthetic oligonucleotide
uccuggacaacauagguag

SEQ ID NO: 1198492 - RNA, 19 nt, Artificial Sequence
  Description of Artificial Sequence: Synthetic oligonucleotide
cuucgggaaagcaugaugg

SEQ ID NO: 1198493 - RNA, 19 nt, Artificial Sequence
  Description of Artificial Sequence: Synthetic oligonucleotide
caaaauagaggacuaacug

SEQ ID NO: 1198494 - RNA, 19 nt, Artificial Sequence
  Description of Artificial Sequence: Synthetic oligonucleotide
acuguaaaauaaccggugg

SEQ ID NO: 1198495 - RNA, 19 nt, Artificial Sequence
  Description of Artificial Sequence: Synthetic oligonucleotide
cacgauggcgccaagaggg

SEQ ID NO: 1198496 - RNA, 19 nt, Artificial Sequence
  Description of Artificial Sequence: Synthetic oligonucleotide
aucgguagaucucagcugg

SEQ ID NO: 1198497 - RNA, 19 nt, Artificial Sequence
  Description of Artificial Sequence: Synthetic oligonucleotide
gugaauugaaugcagauga

SEQ ID NO: 1198498 - RNA, 19 nt, Artificial Sequence
  Description of Artificial Sequence: Synthetic oligonucleotide
uuuggaacacaucugucca

SEQ ID NO: 1198499 - RNA, 19 nt, Artificial Sequence
  Description of Artificial Sequence: Synthetic oligonucleotide
aaauagaggacuaacuggu

SEQ ID NO: 1198500 - RNA, 19 nt, Artificial Sequence
  Description of Artificial Sequence: Synthetic oligonucleotide
aauugaaugcagaugauau

SEQ ID NO: 1198501 - RNA, 19 nt, Artificial Sequence
  Description of Artificial Sequence: Synthetic oligonucleotide
cuguacuguaaaauaaccg

SEQ ID NO: 1198502 - RNA, 19 nt, Artificial Sequence
  Description of Artificial Sequence: Synthetic oligonucleotide
agucacugcauugagggcc

SEQ ID NO: 1198503 - RNA, 19 nt, Artificial Sequence
  Description of Artificial Sequence: Synthetic oligonucleotide
ggaaauauaggccauuccc

SEQ ID NO: 1198504 - RNA, 19 nt, Artificial Sequence
  Description of Artificial Sequence: Synthetic oligonucleotide
auugaagcgaagcuccagg

SEQ ID NO: 1198505 - RNA, 19 nt, Artificial Sequence
  Description of Artificial Sequence: Synthetic oligonucleotide
caugaccaaaccaaugagg

SEQ ID NO: 1198506 - RNA, 19 nt, Artificial Sequence
  Description of Artificial Sequence: Synthetic oligonucleotide
accauuggagcauucuggc

SEQ ID NO: 1198507 - RNA, 19 nt, Artificial Sequence
  Description of Artificial Sequence: Synthetic oligonucleotide
agggccagaacugacagcc

SEQ ID NO: 1198508 - RNA, 19 nt, Artificial Sequence
  Description of Artificial Sequence: Synthetic oligonucleotide
uacuguaaaauaaccggug

SEQ ID NO: 1198509 - RNA, 19 nt, Artificial Sequence
  Description of Artificial Sequence: Synthetic oligonucleotide
ugagcagggaucaggagcc

SEQ ID NO: 1198510 - RNA, 19 nt, Artificial Sequence
  Description of Artificial Sequence: Synthetic oligonucleotide
cauagguaggacugcaugg

SEQ ID NO: 1198511 - RNA, 19 nt, Artificial Sequence
  Description of Artificial Sequence: Synthetic oligonucleotide
aagacugggaugaagacgu

SEQ ID NO: 1198512 - RNA, 19 nt, Artificial Sequence
  Description of Artificial Sequence: Synthetic oligonucleotide
augaccaaaccaaugaggg

SEQ ID NO: 1198513 - RNA, 19 nt, Artificial Sequence
  Description of Artificial Sequence: Synthetic oligonucleotide
guuuggaacacaucugucc

SEQ ID NO: 1198514 - RNA, 19 nt, Artificial Sequence
  Description of Artificial Sequence: Synthetic oligonucleotide
aggaaauauaggccauucc

SEQ ID NO: 1198515 - RNA, 19 nt, Artificial Sequence
  Description of Artificial Sequence: Synthetic oligonucleotide
gacguguagugacucaucg

SEQ ID NO: 1198516 - RNA, 19 nt, Artificial Sequence
  Description of Artificial Sequence: Synthetic oligonucleotide
guagaucaccaucugaaag

SEQ ID NO: 1198517 - RNA, 19 nt, Artificial Sequence
  Description of Artificial Sequence: Synthetic oligonucleotide
gaagcgaagcuccagguac

SEQ ID NO: 1198518 - RNA, 19 nt, Artificial Sequence
  Description of Artificial Sequence: Synthetic oligonucleotide
uauaauaggcaaacaugac

SEQ ID NO: 1198519 - RNA, 19 nt, Artificial Sequence
  Description of Artificial Sequence: Synthetic oligonucleotide
gaaccaauaacuggguucc

SEQ ID NO: 1198520 - RNA, 19 nt, Artificial Sequence
  Description of Artificial Sequence: Synthetic oligonucleotide
caacaaagagcccaggcag

SEQ ID NO: 1198521 - RNA, 19 nt, Artificial Sequence
  Description of Artificial Sequence: Synthetic oligonucleotide
caucauaggucacagggag

SEQ ID NO: 1198522 - RNA, 19 nt, Artificial Sequence
  Description of Artificial Sequence: Synthetic oligonucleotide
ugugcuaggucaugcaacc

SEQ ID NO: 1198523 - RNA, 19 nt, Artificial Sequence
  Description of Artificial Sequence: Synthetic oligonucleotide
aaucgguagaucucagcug

SEQ ID NO: 1198524 - RNA, 19 nt, Artificial Sequence
  Description of Artificial Sequence: Synthetic oligonucleotide
auagguaggacugcauggc

SEQ ID NO: 1198525 - RNA, 19 nt, Artificial Sequence
  Description of Artificial Sequence: Synthetic oligonucleotide
acacaggauaaauggugcc

SEQ ID NO: 1198526 - RNA, 19 nt, Artificial Sequence
  Description of Artificial Sequence: Synthetic oligonucleotide
gagggauccacugaagagg

SEQ ID NO: 1198527 - RNA, 19 nt, Artificial Sequence
  Description of Artificial Sequence: Synthetic oligonucleotide
ugagggauccacugaagag

SEQ ID NO: 1198528 - RNA, 19 nt, Artificial Sequence
  Description of Artificial Sequence: Synthetic oligonucleotide
ugcuuuauugaagcgaagc

SEQ ID NO: 1198529 - RNA, 19 nt, Artificial Sequence
  Description of Artificial Sequence: Synthetic oligonucleotide
aggcaaacaugaccaaacc

SEQ ID NO: 1198530 - RNA, 19 nt, Artificial Sequence
  Description of Artificial Sequence: Synthetic oligonucleotide
aacaaagagcccaggcagc

SEQ ID NO: 1198531 - RNA, 19 nt, Artificial Sequence
  Description of Artificial Sequence: Synthetic oligonucleotide
gaaggcagcccauuuucgg

SEQ ID NO: 1198532 - RNA, 19 nt, Artificial Sequence
  Description of Artificial Sequence: Synthetic oligonucleotide
ggcaaaucagcccauaggc

SEQ ID NO: 1198533 - RNA, 19 nt, Artificial Sequence
  Description of Artificial Sequence: Synthetic oligonucleotide
uuucggucagcucagggaa

SEQ ID NO: 1198534 - RNA, 19 nt, Artificial Sequence
  Description of Artificial Sequence: Synthetic oligonucleotide
auugaaugcagaugauaug

SEQ ID NO: 1198535 - RNA, 19 nt, Artificial Sequence
  Description of Artificial Sequence: Synthetic oligonucleotide
aggcaaaucagcccauagg

SEQ ID NO: 1198536 - RNA, 19 nt, Artificial Sequence
  Description of Artificial Sequence: Synthetic oligonucleotide
auaaauaggacagggagua

SEQ ID NO: 1198537 - RNA, 19 nt, Artificial Sequence
  Description of Artificial Sequence: Synthetic oligonucleotide
cuguaaaauaaccgguggc

SEQ ID NO: 1198538 - RNA, 19 nt, Artificial Sequence
  Description of Artificial Sequence: Synthetic oligonucleotide
auaagggcaggagugagag

SEQ ID NO: 1198539 - RNA, 19 nt, Artificial Sequence
  Description of Artificial Sequence: Synthetic oligonucleotide
aacaggcccacgauggcgc

SEQ ID NO: 1198540 - RNA, 19 nt, Artificial Sequence
  Description of Artificial Sequence: Synthetic oligonucleotide
acaugaccaaaccaaugag

SEQ ID NO: 1198541 - RNA, 19 nt, Artificial Sequence
  Description of Artificial Sequence: Synthetic oligonucleotide
uguagugacucaucgcugu

SEQ ID NO: 1198542 - RNA, 19 nt, Artificial Sequence
  Description of Artificial Sequence: Synthetic oligonucleotide
acauagguaggacugcaug

SEQ ID NO: 1198543 - RNA, 19 nt, Artificial Sequence
  Description of Artificial Sequence: Synthetic oligonucleotide
caggauaagggcaggagug

SEQ ID NO: 1198544 - RNA, 19 nt, Artificial Sequence
  Description of Artificial Sequence: Synthetic oligonucleotide
cacuaugcucccaaugccg

SEQ ID NO: 1198545 - RNA, 19 nt, Artificial Sequence
  Description of Artificial Sequence: Synthetic oligonucleotide
agugaauugaaugcagaug

SEQ ID NO: 1198546 - RNA, 19 nt, Artificial Sequence
  Description of Artificial Sequence: Synthetic oligonucleotide
gauguugcagacgaucccc

SEQ ID NO: 1198547 - RNA, 19 nt, Artificial Sequence
  Description of Artificial Sequence: Synthetic oligonucleotide
ugugguggaauugugugca

SEQ ID NO: 1198548 - RNA, 19 nt, Artificial Sequence
  Description of Artificial Sequence: Synthetic oligonucleotide
uugaguccccaucauaggu

SEQ ID NO: 1198549 - RNA, 19 nt, Artificial Sequence
  Description of Artificial Sequence: Synthetic oligonucleotide
aaccgcugcaguccugugg

SEQ ID NO: 1198550 - RNA, 19 nt, Artificial Sequence
  Description of Artificial Sequence: Synthetic oligonucleotide
aaaauaaccgguggcugcu

SEQ ID NO: 1198551 - RNA, 19 nt, Artificial Sequence
  Description of Artificial Sequence: Synthetic oligonucleotide
acaggauaaauggugccgg

SEQ ID NO: 1198552 - RNA, 19 nt, Artificial Sequence
  Description of Artificial Sequence: Synthetic oligonucleotide
caugcagagggccacuugc

SEQ ID NO: 1198553 - RNA, 19 nt, Artificial Sequence
  Description of Artificial Sequence: Synthetic oligonucleotide
agcuggacccguuaauggg

SEQ ID NO: 1198554 - RNA, 19 nt, Artificial Sequence
  Description of Artificial Sequence: Synthetic oligonucleotide
acaacauagguaggacugc

SEQ ID NO: 1198555 - RNA, 19 nt, Artificial Sequence
  Description of Artificial Sequence: Synthetic oligonucleotide
aaacaugaccaaaccaaug

SEQ ID NO: 1198556 - RNA, 19 nt, Artificial Sequence
  Description of Artificial Sequence: Synthetic oligonucleotide
auauggugcugagggaucc

SEQ ID NO: 1198557 - RNA, 19 nt, Artificial Sequence
  Description of Artificial Sequence: Synthetic oligonucleotide
auaaauggugccgggguuc

SEQ ID NO: 1198558 - RNA, 19 nt, Artificial Sequence
  Description of Artificial Sequence: Synthetic oligonucleotide
ggacuaacuggucaggugc

SEQ ID NO: 1198559 - RNA, 19 nt, Artificial Sequence
  Description of Artificial Sequence: Synthetic oligonucleotide
uguguagauguugcagacg

SEQ ID NO: 1198560 - RNA, 19 nt, Artificial Sequence
  Description of Artificial Sequence: Synthetic oligonucleotide
ucgcuguacuguaaaauaa

SEQ ID NO: 1198561 - RNA, 19 nt, Artificial Sequence
  Description of Artificial Sequence: Synthetic oligonucleotide
cuugaguccccaucauagg

SEQ ID NO: 1198562 - RNA, 19 nt, Artificial Sequence
  Description of Artificial Sequence: Synthetic oligonucleotide
aacucccauguagaucacc

SEQ ID NO: 1198563 - RNA, 19 nt, Artificial Sequence
  Description of Artificial Sequence: Synthetic oligonucleotide
guaggagcaucccaggaac

SEQ ID NO: 1198564 - RNA, 19 nt, Artificial Sequence
  Description of Artificial Sequence: Synthetic oligonucleotide
aauaaccgguggcugcugu

SEQ ID NO: 1198565 - RNA, 19 nt, Artificial Sequence
  Description of Artificial Sequence: Synthetic oligonucleotide
cacaggauaaauggugccg

SEQ ID NO: 1198566 - RNA, 19 nt, Artificial Sequence
  Description of Artificial Sequence: Synthetic oligonucleotide
aauaggcaaacaugaccaa

SEQ ID NO: 1198567 - RNA, 19 nt, Artificial Sequence
  Description of Artificial Sequence: Synthetic oligonucleotide
uguagaucaccaucugaaa

SEQ ID NO: 1198568 - RNA, 19 nt, Artificial Sequence
  Description of Artificial Sequence: Synthetic oligonucleotide
uaggcaaaggcaaggcuuc

SEQ ID NO: 1198569 - RNA, 19 nt, Artificial Sequence
  Description of Artificial Sequence: Synthetic oligonucleotide
agaaagccauggugagucc

SEQ ID NO: 1198570 - RNA, 19 nt, Artificial Sequence
  Description of Artificial Sequence: Synthetic oligonucleotide
aucgcuguacuguaaaaua

SEQ ID NO: 1198571 - RNA, 19 nt, Artificial Sequence
  Description of Artificial Sequence: Synthetic oligonucleotide
agaagacguguagugacuc

SEQ ID NO: 1198572 - RNA, 19 nt, Artificial Sequence
  Description of Artificial Sequence: Synthetic oligonucleotide
agugacucaucgcuguacu

SEQ ID NO: 1198573 - RNA, 19 nt, Artificial Sequence
  Description of Artificial Sequence: Synthetic oligonucleotide
ugacucaucgcuguacugu

SEQ ID NO: 1198574 - RNA, 19 nt, Artificial Sequence
  Description of Artificial Sequence: Synthetic oligonucleotide
ggaaccaauaacuggguuc

SEQ ID NO: 1198575 - RNA, 19 nt, Artificial Sequence
  Description of Artificial Sequence: Synthetic oligonucleotide
agggaaccaggguugaaug

SEQ ID NO: 1198576 - RNA, 19 nt, Artificial Sequence
  Description of Artificial Sequence: Synthetic oligonucleotide
cuucagaagguccaugaca

SEQ ID NO: 1198577 - RNA, 19 nt, Artificial Sequence
  Description of Artificial Sequence: Synthetic oligonucleotide
aguaggagcaucccaggaa

SEQ ID NO: 1198578 - RNA, 19 nt, Artificial Sequence
  Description of Artificial Sequence: Synthetic oligonucleotide
guuccaaaucgguagaucu

SEQ ID NO: 1198579 - RNA, 19 nt, Artificial Sequence
  Description of Artificial Sequence: Synthetic oligonucleotide
uauugaagcgaagcuccag

SEQ ID NO: 1198580 - RNA, 19 nt, Artificial Sequence
  Description of Artificial Sequence: Synthetic oligonucleotide
caagaggguuggcacaagg

SEQ ID NO: 1198581 - RNA, 19 nt, Artificial Sequence
  Description of Artificial Sequence: Synthetic oligonucleotide
uggugaguccagucaacag

SEQ ID NO: 1198582 - RNA, 19 nt, Artificial Sequence
  Description of Artificial Sequence: Synthetic oligonucleotide
ccaaugccgauccagaaag

SEQ ID NO: 1198583 - RNA, 19 nt, Artificial Sequence
  Description of Artificial Sequence: Synthetic oligonucleotide
caugaccaguguuuggaac

SEQ ID NO: 1198584 - RNA, 19 nt, Artificial Sequence
  Description of Artificial Sequence: Synthetic oligonucleotide
aggguuggcacaaggaaag

SEQ ID NO: 1198585 - RNA, 19 nt, Artificial Sequence
  Description of Artificial Sequence: Synthetic oligonucleotide
gugaguccagucaacaggc

SEQ ID NO: 1198586 - RNA, 19 nt, Artificial Sequence
  Description of Artificial Sequence: Synthetic oligonucleotide
ugaauugaaugcagaugau

SEQ ID NO: 1198587 - RNA, 19 nt, Artificial Sequence
  Description of Artificial Sequence: Synthetic oligonucleotide
auuucuuauaauaggcaaa

SEQ ID NO: 1198588 - RNA, 19 nt, Artificial Sequence
  Description of Artificial Sequence: Synthetic oligonucleotide
cugugguggaauugugugc

SEQ ID NO: 1198589 - RNA, 19 nt, Artificial Sequence
  Description of Artificial Sequence: Synthetic oligonucleotide
gcuaccgcugacuggaagg

SEQ ID NO: 1198590 - RNA, 19 nt, Artificial Sequence
  Description of Artificial Sequence: Synthetic oligonucleotide
aggauaaauggugccgggg

SEQ ID NO: 1198591 - RNA, 19 nt, Artificial Sequence
  Description of Artificial Sequence: Synthetic oligonucleotide
guagauguugcagacgauc

SEQ ID NO: 1198592 - RNA, 19 nt, Artificial Sequence
  Description of Artificial Sequence: Synthetic oligonucleotide
guuucggucagcucaggga

SEQ ID NO: 1198593 - RNA, 19 nt, Artificial Sequence
  Description of Artificial Sequence: Synthetic oligonucleotide
auaaccaccagcugcccua

SEQ ID NO: 1198594 - RNA, 19 nt, Artificial Sequence
  Description of Artificial Sequence: Synthetic oligonucleotide
uugagggccaaggauggug

SEQ ID NO: 1198595 - RNA, 19 nt, Artificial Sequence
  Description of Artificial Sequence: Synthetic oligonucleotide
aaagcaugauggcccgggu

SEQ ID NO: 1198596 - RNA, 19 nt, Artificial Sequence
  Description of Artificial Sequence: Synthetic oligonucleotide
agcaacucccauguagauc

SEQ ID NO: 1198597 - RNA, 19 nt, Artificial Sequence
  Description of Artificial Sequence: Synthetic oligonucleotide
gacaccacggcagaacuca

SEQ ID NO: 1198598 - RNA, 19 nt, Artificial Sequence
  Description of Artificial Sequence: Synthetic oligonucleotide
ugcagaagacguguaguga

SEQ ID NO: 1198599 - RNA, 19 nt, Artificial Sequence
  Description of Artificial Sequence: Synthetic oligonucleotide
agaugauauggugcugagg

SEQ ID NO: 1198600 - RNA, 19 nt, Artificial Sequence
  Description of Artificial Sequence: Synthetic oligonucleotide
uucuuauaauaggcaaaca

SEQ ID NO: 1198601 - RNA, 19 nt, Artificial Sequence
  Description of Artificial Sequence: Synthetic oligonucleotide
aagacguguagugacucau

SEQ ID NO: 1198602 - RNA, 19 nt, Artificial Sequence
  Description of Artificial Sequence: Synthetic oligonucleotide
gacgguugccagugaauug

SEQ ID NO: 1198603 - RNA, 19 nt, Artificial Sequence
  Description of Artificial Sequence: Synthetic oligonucleotide
agcaugauggcccggguuu

SEQ ID NO: 1198604 - RNA, 19 nt, Artificial Sequence
  Description of Artificial Sequence: Synthetic oligonucleotide
ucaugcaacccgcccuugc

SEQ ID NO: 1198605 - RNA, 19 nt, Artificial Sequence
  Description of Artificial Sequence: Synthetic oligonucleotide
auaaccgguggcugcuguc

SEQ ID NO: 1198606 - RNA, 19 nt, Artificial Sequence
  Description of Artificial Sequence: Synthetic oligonucleotide
acugcuuuauugaagcgaa

SEQ ID NO: 1198607 - RNA, 19 nt, Artificial Sequence
  Description of Artificial Sequence: Synthetic oligonucleotide
accaggguugaaugagguc

SEQ ID NO: 1198608 - RNA, 19 nt, Artificial Sequence
  Description of Artificial Sequence: Synthetic oligonucleotide
ugccagugaauugaaugca

SEQ ID NO: 1198609 - RNA, 19 nt, Artificial Sequence
  Description of Artificial Sequence: Synthetic oligonucleotide
caggauaaauggugccggg

SEQ ID NO: 1198610 - RNA, 19 nt, Artificial Sequence
  Description of Artificial Sequence: Synthetic oligonucleotide
ugcugauaaccaccagcug

SEQ ID NO: 1198611 - RNA, 19 nt, Artificial Sequence
  Description of Artificial Sequence: Synthetic oligonucleotide
gguggaauugugugcacug

SEQ ID NO: 1198612 - RNA, 19 nt, Artificial Sequence
  Description of Artificial Sequence: Synthetic oligonucleotide
gguccaugacaaaauagag

SEQ ID NO: 1198613 - RNA, 19 nt, Artificial Sequence
  Description of Artificial Sequence: Synthetic oligonucleotide
aggagccccagaaaguagg

SEQ ID NO: 1198614 - RNA, 19 nt, Artificial Sequence
  Description of Artificial Sequence: Synthetic oligonucleotide
gaauugaaugcagaugaua

SEQ ID NO: 1198615 - RNA, 19 nt, Artificial Sequence
  Description of Artificial Sequence: Synthetic oligonucleotide
acggcagaacucauccugc

SEQ ID NO: 1198616 - RNA, 19 nt, Artificial Sequence
  Description of Artificial Sequence: Synthetic oligonucleotide
gauggcgccaagaggguug

SEQ ID NO: 1198617 - RNA, 19 nt, Artificial Sequence
  Description of Artificial Sequence: Synthetic oligonucleotide
guugugugcuaggucaugc

SEQ ID NO: 1198618 - RNA, 19 nt, Artificial Sequence
  Description of Artificial Sequence: Synthetic oligonucleotide
cauaaauaggacagggagu

SEQ ID NO: 1198619 - RNA, 19 nt, Artificial Sequence
  Description of Artificial Sequence: Synthetic oligonucleotide
cugacaaucaggcccacaa

SEQ ID NO: 1198620 - RNA, 19 nt, Artificial Sequence
  Description of Artificial Sequence: Synthetic oligonucleotide
aggucaugcaacccgcccu

SEQ ID NO: 1198621 - RNA, 19 nt, Artificial Sequence
  Description of Artificial Sequence: Synthetic oligonucleotide
acagugauacaggaaggca

SEQ ID NO: 1198622 - RNA, 19 nt, Artificial Sequence
  Description of Artificial Sequence: Synthetic oligonucleotide
gcaaacaugaccaaaccaa

SEQ ID NO: 1198623 - RNA, 19 nt, Artificial Sequence
  Description of Artificial Sequence: Synthetic oligonucleotide
gcagaagacguguagugac

SEQ ID NO: 1198624 - RNA, 19 nt, Artificial Sequence
  Description of Artificial Sequence: Synthetic oligonucleotide
uggacaacauagguaggac

SEQ ID NO: 1198625 - RNA, 19 nt, Artificial Sequence
  Description of Artificial Sequence: Synthetic oligonucleotide
aaggagcuggacccguuaa

SEQ ID NO: 1198626 - RNA, 19 nt, Artificial Sequence
  Description of Artificial Sequence: Synthetic oligonucleotide
aggauggugcauagagagc

SEQ ID NO: 1198627 - RNA, 19 nt, Artificial Sequence
  Description of Artificial Sequence: Synthetic oligonucleotide
aagaugcaggcgguagaag

SEQ ID NO: 1198628 - RNA, 19 nt, Artificial Sequence
  Description of Artificial Sequence: Synthetic oligonucleotide
ggauggugcauagagagca

SEQ ID NO: 1198629 - RNA, 19 nt, Artificial Sequence
  Description of Artificial Sequence: Synthetic oligonucleotide
cagacuugaguccccauca

SEQ ID NO: 1198630 - RNA, 19 nt, Artificial Sequence
  Description of Artificial Sequence: Synthetic oligonucleotide
auugugugcacuguaccau

SEQ ID NO: 1198631 - RNA, 19 nt, Artificial Sequence
  Description of Artificial Sequence: Synthetic oligonucleotide
caggcaaaucagcccauag

SEQ ID NO: 1198632 - RNA, 19 nt, Artificial Sequence
  Description of Artificial Sequence: Synthetic oligonucleotide
uaaccgguggcugcugucc

SEQ ID NO: 1198633 - RNA, 19 nt, Artificial Sequence
  Description of Artificial Sequence: Synthetic oligonucleotide
uagaucucagcuggugccc

SEQ ID NO: 1198634 - RNA, 19 nt, Artificial Sequence
  Description of Artificial Sequence: Synthetic oligonucleotide
ugcaacccgcccuugcaga

SEQ ID NO: 1198635 - RNA, 19 nt, Artificial Sequence
  Description of Artificial Sequence: Synthetic oligonucleotide
ugacaaaauagaggacuaa

SEQ ID NO: 1198636 - RNA, 19 nt, Artificial Sequence
  Description of Artificial Sequence: Synthetic oligonucleotide
uaaauggugccgggguuca

SEQ ID NO: 1198637 - RNA, 19 nt, Artificial Sequence
  Description of Artificial Sequence: Synthetic oligonucleotide
augcaacccgcccuugcag

SEQ ID NO: 1198638 - RNA, 19 nt, Artificial Sequence
  Description of Artificial Sequence: Synthetic oligonucleotide
guaagaugcaggcgguaga

SEQ ID NO: 1198639 - RNA, 19 nt, Artificial Sequence
  Description of Artificial Sequence: Synthetic oligonucleotide
uccgcacugcuuuauugaa

SEQ ID NO: 1198640 - RNA, 19 nt, Artificial Sequence
  Description of Artificial Sequence: Synthetic oligonucleotide
gaagacguguagugacuca

SEQ ID NO: 1198641 - RNA, 19 nt, Artificial Sequence
  Description of Artificial Sequence: Synthetic oligonucleotide
gguaagaugcaggcgguag

SEQ ID NO: 1198642 - RNA, 19 nt, Artificial Sequence
  Description of Artificial Sequence: Synthetic oligonucleotide
gguggacagacuugagucc

SEQ ID NO: 1198643 - RNA, 19 nt, Artificial Sequence
  Description of Artificial Sequence: Synthetic oligonucleotide
ucaucgcuguacuguaaaa

SEQ ID NO: 1198644 - RNA, 19 nt, Artificial Sequence
  Description of Artificial Sequence: Synthetic oligonucleotide
cuggacccguuaaugggag

SEQ ID NO: 1198645 - RNA, 19 nt, Artificial Sequence
  Description of Artificial Sequence: Synthetic oligonucleotide
cuaggucaugcaacccgcc

SEQ ID NO: 1198646 - RNA, 19 nt, Artificial Sequence
  Description of Artificial Sequence: Synthetic oligonucleotide
acaaucaggcccacaacga

SEQ ID NO: 1198647 - RNA, 19 nt, Artificial Sequence
  Description of Artificial Sequence: Synthetic oligonucleotide
auggugacgguugccagug

SEQ ID NO: 1198648 - RNA, 19 nt, Artificial Sequence
  Description of Artificial Sequence: Synthetic oligonucleotide
ggacccguuaaugggaggg

SEQ ID NO: 1198649 - RNA, 19 nt, Artificial Sequence
  Description of Artificial Sequence: Synthetic oligonucleotide
aucauaggucacagggagg

SEQ ID NO: 1198650 - RNA, 19 nt, Artificial Sequence
  Description of Artificial Sequence: Synthetic oligonucleotide
cauggugaguccagucaac

SEQ ID NO: 1198651 - RNA, 19 nt, Artificial Sequence
  Description of Artificial Sequence: Synthetic oligonucleotide
agggccacuugcugauaac

SEQ ID NO: 1198652 - RNA, 19 nt, Artificial Sequence
  Description of Artificial Sequence: Synthetic oligonucleotide
agcccauuuucggucugcc

SEQ ID NO: 1198653 - RNA, 19 nt, Artificial Sequence
  Description of Artificial Sequence: Synthetic oligonucleotide
uggacagacuugagucccc

SEQ ID NO: 1198654 - RNA, 19 nt, Artificial Sequence
  Description of Artificial Sequence: Synthetic oligonucleotide
ggaccauuggagcauucug

SEQ ID NO: 1198655 - RNA, 19 nt, Artificial Sequence
  Description of Artificial Sequence: Synthetic oligonucleotide
agggaguagaaccgcugca

SEQ ID NO: 1198656 - RNA, 19 nt, Artificial Sequence
  Description of Artificial Sequence: Synthetic oligonucleotide
uuuuccagcaaagccgcuu

SEQ ID NO: 1198657 - RNA, 19 nt, Artificial Sequence
  Description of Artificial Sequence: Synthetic oligonucleotide
uccccgguaagcagacuga

SEQ ID NO: 1198658 - RNA, 19 nt, Artificial Sequence
  Description of Artificial Sequence: Synthetic oligonucleotide
gguuucggucagcucaggg

SEQ ID NO: 1198659 - RNA, 19 nt, Artificial Sequence
  Description of Artificial Sequence: Synthetic oligonucleotide
aaauaaccgguggcugcug

SEQ ID NO: 1198660 - RNA, 19 nt, Artificial Sequence
  Description of Artificial Sequence: Synthetic oligonucleotide
ugacgguugccagugaauu

SEQ ID NO: 1198661 - RNA, 19 nt, Artificial Sequence
  Description of Artificial Sequence: Synthetic oligonucleotide
accauaaauaggacaggga

SEQ ID NO: 1198662 - RNA, 19 nt, Artificial Sequence
  Description of Artificial Sequence: Synthetic oligonucleotide
gauggcccggguuucgguc

SEQ ID NO: 1198663 - RNA, 19 nt, Artificial Sequence
  Description of Artificial Sequence: Synthetic oligonucleotide
gacccguuaaugggagggg

SEQ ID NO: 1198664 - RNA, 19 nt, Artificial Sequence
  Description of Artificial Sequence: Synthetic oligonucleotide
cauuccccgguaagcagac

SEQ ID NO: 1198665 - RNA, 19 nt, Artificial Sequence
  Description of Artificial Sequence: Synthetic oligonucleotide
gcagacgauccccagggcc

SEQ ID NO: 1198666 - RNA, 19 nt, Artificial Sequence
  Description of Artificial Sequence: Synthetic oligonucleotide
caaugccgauccagaaagc

SEQ ID NO: 1198667 - RNA, 19 nt, Artificial Sequence
  Description of Artificial Sequence: Synthetic oligonucleotide
uggacccguuaaugggagg

SEQ ID NO: 1198668 - RNA, 19 nt, Artificial Sequence
  Description of Artificial Sequence: Synthetic oligonucleotide
acauccccaagcagaagag

SEQ ID NO: 1198669 - RNA, 19 nt, Artificial Sequence
  Description of Artificial Sequence: Synthetic oligonucleotide
guacuguaaaauaaccggu

SEQ ID NO: 1198670 - RNA, 19 nt, Artificial Sequence
  Description of Artificial Sequence: Synthetic oligonucleotide
caaugagggagcucaugca

SEQ ID NO: 1198671 - RNA, 19 nt, Artificial Sequence
  Description of Artificial Sequence: Synthetic oligonucleotide
gcuucgggaaagcaugaug

SEQ ID NO: 1198672 - RNA, 19 nt, Artificial Sequence
  Description of Artificial Sequence: Synthetic oligonucleotide
cuggacaacauagguagga

SEQ ID NO: 1198673 - RNA, 19 nt, Artificial Sequence
  Description of Artificial Sequence: Synthetic oligonucleotide
acuaugcucccaaugccga

SEQ ID NO: 1198674 - RNA, 19 nt, Artificial Sequence
  Description of Artificial Sequence: Synthetic oligonucleotide
ugggcuuggacuggguggu

SEQ ID NO: 1198675 - RNA, 19 nt, Artificial Sequence
  Description of Artificial Sequence: Synthetic oligonucleotide
ggaauugugugcacuguac

SEQ ID NO: 1198676 - RNA, 19 nt, Artificial Sequence
  Description of Artificial Sequence: Synthetic oligonucleotide
gugugcuaggucaugcaac

SEQ ID NO: 1198677 - RNA, 19 nt, Artificial Sequence
  Description of Artificial Sequence: Synthetic oligonucleotide
auuuucggucugccagcag

SEQ ID NO: 1198678 - RNA, 19 nt, Artificial Sequence
  Description of Artificial Sequence: Synthetic oligonucleotide
aaccgguggcugcuguccu

SEQ ID NO: 1198679 - RNA, 19 nt, Artificial Sequence
  Description of Artificial Sequence: Synthetic oligonucleotide
cugcuuuauugaagcgaag

SEQ ID NO: 1198680 - RNA, 19 nt, Artificial Sequence
  Description of Artificial Sequence: Synthetic oligonucleotide
cucauaguguauuucuuau

SEQ ID NO: 1198681 - RNA, 19 nt, Artificial Sequence
  Description of Artificial Sequence: Synthetic oligonucleotide
gacucaucgcuguacugua

SEQ ID NO: 1198682 - RNA, 19 nt, Artificial Sequence
  Description of Artificial Sequence: Synthetic oligonucleotide
cagucacugcauugagggc

SEQ ID NO: 1198683 - RNA, 19 nt, Artificial Sequence
  Description of Artificial Sequence: Synthetic oligonucleotide
agcauucuggcuguggcuu

SEQ ID NO: 1198684 - RNA, 19 nt, Artificial Sequence
  Description of Artificial Sequence: Synthetic oligonucleotide
ugcagacgauccccagggc

SEQ ID NO: 1198685 - RNA, 19 nt, Artificial Sequence
  Description of Artificial Sequence: Synthetic oligonucleotide
agacguguagugacucauc

SEQ ID NO: 1198686 - RNA, 19 nt, Artificial Sequence
  Description of Artificial Sequence: Synthetic oligonucleotide
guguagugacucaucgcug

SEQ ID NO: 1198687 - RNA, 19 nt, Artificial Sequence
  Description of Artificial Sequence: Synthetic oligonucleotide
caaacaugaccaaaccaau

SEQ ID NO: 1198688 - RNA, 19 nt, Artificial Sequence
  Description of Artificial Sequence: Synthetic oligonucleotide
gcuuuauugaagcgaagcu

SEQ ID NO: 1198689 - RNA, 19 nt, Artificial Sequence
  Description of Artificial Sequence: Synthetic oligonucleotide
acuaacuggucaggugcug

SEQ ID NO: 1198690 - RNA, 19 nt, Artificial Sequence
  Description of Artificial Sequence: Synthetic oligonucleotide
gauaaccaccagcugcccu

SEQ ID NO: 1198691 - RNA, 19 nt, Artificial Sequence
  Description of Artificial Sequence: Synthetic oligonucleotide
auggcccggguuucgguca

SEQ ID NO: 1198692 - RNA, 19 nt, Artificial Sequence
  Description of Artificial Sequence: Synthetic oligonucleotide
gaacauccccaagcagaag

SEQ ID NO: 1198693 - RNA, 19 nt, Artificial Sequence
  Description of Artificial Sequence: Synthetic oligonucleotide
agacuugaguccccaucau

SEQ ID NO: 1198694 - RNA, 19 nt, Artificial Sequence
  Description of Artificial Sequence: Synthetic oligonucleotide
ggauaaauggugccggggu

SEQ ID NO: 1198695 - RNA, 19 nt, Artificial Sequence
  Description of Artificial Sequence: Synthetic oligonucleotide
augccgauccagaaagcca

SEQ ID NO: 1198696 - RNA, 19 nt, Artificial Sequence
  Description of Artificial Sequence: Synthetic oligonucleotide
cucccaaugccgauccaga

SEQ ID NO: 1198697 - RNA, 19 nt, Artificial Sequence
  Description of Artificial Sequence: Synthetic oligonucleotide
ggagugagaggagcuuugg

SEQ ID NO: 1198698 - RNA, 19 nt, Artificial Sequence
  Description of Artificial Sequence: Synthetic oligonucleotide
caugcaacccgcccuugca

SEQ ID NO: 1198699 - RNA, 19 nt, Artificial Sequence
  Description of Artificial Sequence: Synthetic oligonucleotide
augaagacgugagcaggga

SEQ ID NO: 1198700 - RNA, 19 nt, Artificial Sequence
  Description of Artificial Sequence: Synthetic oligonucleotide
ucgguagaucucagcuggu

SEQ ID NO: 1198701 - RNA, 19 nt, Artificial Sequence
  Description of Artificial Sequence: Synthetic oligonucleotide
gagggccacuugcugauaa

SEQ ID NO: 1198702 - RNA, 19 nt, Artificial Sequence
  Description of Artificial Sequence: Synthetic oligonucleotide
agcuuuggcaacacaggau

SEQ ID NO: 1198703 - RNA, 19 nt, Artificial Sequence
  Description of Artificial Sequence: Synthetic oligonucleotide
auggcgccaagaggguugg

SEQ ID NO: 1198704 - RNA, 19 nt, Artificial Sequence
  Description of Artificial Sequence: Synthetic oligonucleotide
augcaggcgguagaagacu

SEQ ID NO: 1198705 - RNA, 19 nt, Artificial Sequence
  Description of Artificial Sequence: Synthetic oligonucleotide
caacauagguaggacugca

SEQ ID NO: 1198706 - RNA, 19 nt, Artificial Sequence
  Description of Artificial Sequence: Synthetic oligonucleotide
aggauggcuaccgcugacu

SEQ ID NO: 1198707 - RNA, 19 nt, Artificial Sequence
  Description of Artificial Sequence: Synthetic oligonucleotide
gcuaggucaugcaacccgc

SEQ ID NO: 1198708 - RNA, 19 nt, Artificial Sequence
  Description of Artificial Sequence: Synthetic oligonucleotide
gaaggagcuggacccguua

SEQ ID NO: 1198709 - RNA, 19 nt, Artificial Sequence
  Description of Artificial Sequence: Synthetic oligonucleotide
gcgguagaagacugggaug

SEQ ID NO: 1198710 - RNA, 19 nt, Artificial Sequence
  Description of Artificial Sequence: Synthetic oligonucleotide
ccgguaagcagacugacaa

SEQ ID NO: 1198711 - RNA, 19 nt, Artificial Sequence
  Description of Artificial Sequence: Synthetic oligonucleotide
agcugcccuaggaacauga

SEQ ID NO: 1198712 - RNA, 19 nt, Artificial Sequence
  Description of Artificial Sequence: Synthetic oligonucleotide
cgcuguacuguaaaauaac

SEQ ID NO: 1198713 - RNA, 19 nt, Artificial Sequence
  Description of Artificial Sequence: Synthetic oligonucleotide
ccaagcagaagagucccag

SEQ ID NO: 1198714 - RNA, 19 nt, Artificial Sequence
  Description of Artificial Sequence: Synthetic oligonucleotide
cagugaauugaaugcagau

SEQ ID NO: 1198715 - RNA, 19 nt, Artificial Sequence
  Description of Artificial Sequence: Synthetic oligonucleotide
cauaggcaaaggcaaggcu

SEQ ID NO: 1198716 - RNA, 19 nt, Artificial Sequence
  Description of Artificial Sequence: Synthetic oligonucleotide
ccggguuucggucagcuca

SEQ ID NO: 1198717 - RNA, 19 nt, Artificial Sequence
  Description of Artificial Sequence: Synthetic oligonucleotide
gcucccaaugccgauccag

SEQ ID NO: 1198718 - RNA, 19 nt, Artificial Sequence
  Description of Artificial Sequence: Synthetic oligonucleotide
ggacaacauagguaggacu

SEQ ID NO: 1198719 - RNA, 19 nt, Artificial Sequence
  Description of Artificial Sequence: Synthetic oligonucleotide
gaaccgcugcaguccugug

SEQ ID NO: 1198720 - RNA, 19 nt, Artificial Sequence
  Description of Artificial Sequence: Synthetic oligonucleotide
ggcgguagaagacugggau

SEQ ID NO: 1198721 - RNA, 19 nt, Artificial Sequence
  Description of Artificial Sequence: Synthetic oligonucleotide
gggaaccaggguugaauga

SEQ ID NO: 1198722 - RNA, 19 nt, Artificial Sequence
  Description of Artificial Sequence: Synthetic oligonucleotide
ccacgauggcgccaagagg

SEQ ID NO: 1198723 - RNA, 19 nt, Artificial Sequence
  Description of Artificial Sequence: Synthetic oligonucleotide
guagaaccgcugcaguccu

SEQ ID NO: 1198724 - RNA, 19 nt, Artificial Sequence
  Description of Artificial Sequence: Synthetic oligonucleotide
ccagugaauugaaugcaga

SEQ ID NO: 1198725 - RNA, 19 nt, Artificial Sequence
  Description of Artificial Sequence: Synthetic oligonucleotide
gcucagggaaccaggguug

SEQ ID NO: 1198726 - RNA, 19 nt, Artificial Sequence
  Description of Artificial Sequence: Synthetic oligonucleotide
cauuuucggucugccagca

SEQ ID NO: 1198727 - RNA, 19 nt, Artificial Sequence
  Description of Artificial Sequence: Synthetic oligonucleotide
ccuccaaccaugccaaaga

SEQ ID NO: 1198728 - RNA, 19 nt, Artificial Sequence
  Description of Artificial Sequence: Synthetic oligonucleotide
ggcuaccgcugacuggaag

SEQ ID NO: 1198729 - RNA, 19 nt, Artificial Sequence
  Description of Artificial Sequence: Synthetic oligonucleotide
ggucagguugcuggacagg

SEQ ID NO: 1198730 - RNA, 19 nt, Artificial Sequence
  Description of Artificial Sequence: Synthetic oligonucleotide
gccuucagcccacccagug

SEQ ID NO: 1198731 - RNA, 19 nt, Artificial Sequence
  Description of Artificial Sequence: Synthetic oligonucleotide
cagaucaaauccagucacu

SEQ ID NO: 1198732 - RNA, 19 nt, Artificial Sequence
  Description of Artificial Sequence: Synthetic oligonucleotide
ggugacgguugccagugaa

SEQ ID NO: 1198733 - RNA, 19 nt, Artificial Sequence
  Description of Artificial Sequence: Synthetic oligonucleotide
cagaagacguguagugacu

SEQ ID NO: 1198734 - RNA, 19 nt, Artificial Sequence
  Description of Artificial Sequence: Synthetic oligonucleotide
agggacagugauacaggaa

SEQ ID NO: 1198735 - RNA, 19 nt, Artificial Sequence
  Description of Artificial Sequence: Synthetic oligonucleotide
cccguuaaugggaggggac

SEQ ID NO: 1198736 - RNA, 19 nt, Artificial Sequence
  Description of Artificial Sequence: Synthetic oligonucleotide
ggacagggaguagaaccgc

SEQ ID NO: 1198737 - RNA, 19 nt, Artificial Sequence
  Description of Artificial Sequence: Synthetic oligonucleotide
ugguaagaugcaggcggua

SEQ ID NO: 1198738 - RNA, 19 nt, Artificial Sequence
  Description of Artificial Sequence: Synthetic oligonucleotide
guagugacucaucgcugua

SEQ ID NO: 1198739 - RNA, 19 nt, Artificial Sequence
  Description of Artificial Sequence: Synthetic oligonucleotide
uggugacgguugccaguga

SEQ ID NO: 1198740 - RNA, 19 nt, Artificial Sequence
  Description of Artificial Sequence: Synthetic oligonucleotide
ccccaagcagaagaguccc

SEQ ID NO: 1198741 - RNA, 19 nt, Artificial Sequence
  Description of Artificial Sequence: Synthetic oligonucleotide
ccaggguugaaugaggucu

SEQ ID NO: 1198742 - RNA, 19 nt, Artificial Sequence
  Description of Artificial Sequence: Synthetic oligonucleotide
cugcucacuaugcucccaa

SEQ ID NO: 1198743 - RNA, 19 nt, Artificial Sequence
  Description of Artificial Sequence: Synthetic oligonucleotide
guggcccuccaaccaugcc

SEQ ID NO: 1198744 - RNA, 19 nt, Artificial Sequence
  Description of Artificial Sequence: Synthetic oligonucleotide
gguccggccccgcauuccc

SEQ ID NO: 1198745 - RNA, 19 nt, Artificial Sequence
  Description of Artificial Sequence: Synthetic oligonucleotide
caacucccauguagaucac

SEQ ID NO: 1198746 - RNA, 19 nt, Artificial Sequence
  Description of Artificial Sequence: Synthetic oligonucleotide
gacagggaguagaaccgcu

SEQ ID NO: 1198747 - RNA, 19 nt, Artificial Sequence
  Description of Artificial Sequence: Synthetic oligonucleotide
gagcaacucccauguagau

SEQ ID NO: 1198748 - RNA, 19 nt, Artificial Sequence
  Description of Artificial Sequence: Synthetic oligonucleotide
caacccgcccuugcagaag

SEQ ID NO: 1198749 - RNA, 19 nt, Artificial Sequence
  Description of Artificial Sequence: Synthetic oligonucleotide
ggaucaggagccccagaaa

SEQ ID NO: 1198750 - RNA, 19 nt, Artificial Sequence
  Description of Artificial Sequence: Synthetic oligonucleotide
caucgcuguacuguaaaau

SEQ ID NO: 1198751 - RNA, 19 nt, Artificial Sequence
  Description of Artificial Sequence: Synthetic oligonucleotide
caggaaccaauaacugggu

SEQ ID NO: 1198752 - RNA, 19 nt, Artificial Sequence
  Description of Artificial Sequence: Synthetic oligonucleotide
gcuggacccguuaauggga

SEQ ID NO: 1198753 - RNA, 19 nt, Artificial Sequence
  Description of Artificial Sequence: Synthetic oligonucleotide
ggaguagaaccgcugcagu

SEQ ID NO: 1198754 - RNA, 19 nt, Artificial Sequence
  Description of Artificial Sequence: Synthetic oligonucleotide
gaccaguguuuggaacaca

SEQ ID NO: 1198755 - RNA, 19 nt, Artificial Sequence
  Description of Artificial Sequence: Synthetic oligonucleotide
caaucaggcccacaacgau

SEQ ID NO: 1198756 - RNA, 19 nt, Artificial Sequence
  Description of Artificial Sequence: Synthetic oligonucleotide
aggauccgcacugcuuuau

SEQ ID NO: 1198757 - RNA, 19 nt, Artificial Sequence
  Description of Artificial Sequence: Synthetic oligonucleotide
ggcgccaagaggguuggca

SEQ ID NO: 1198758 - RNA, 19 nt, Artificial Sequence
  Description of Artificial Sequence: Synthetic oligonucleotide
agacgugagcagggaucag

SEQ ID NO: 1198759 - RNA, 19 nt, Artificial Sequence
  Description of Artificial Sequence: Synthetic oligonucleotide
gcauuccccgguaagcaga

SEQ ID NO: 1198760 - RNA, 19 nt, Artificial Sequence
  Description of Artificial Sequence: Synthetic oligonucleotide
cccgcauuccccgguaagc

SEQ ID NO: 1198761 - RNA, 19 nt, Artificial Sequence
  Description of Artificial Sequence: Synthetic oligonucleotide
agcccacccagugcugugu

SEQ ID NO: 1198762 - RNA, 19 nt, Artificial Sequence
  Description of Artificial Sequence: Synthetic oligonucleotide
gcuuggacuggguggugga

SEQ ID NO: 1198763 - RNA, 19 nt, Artificial Sequence
  Description of Artificial Sequence: Synthetic oligonucleotide
gucaugcaacccgcccuug

SEQ ID NO: 1198764 - RNA, 19 nt, Artificial Sequence
  Description of Artificial Sequence: Synthetic oligonucleotide
ggggcucauaguguauuuc

SEQ ID NO: 1198765 - RNA, 19 nt, Artificial Sequence
  Description of Artificial Sequence: Synthetic oligonucleotide
acgauggcgccaagagggu

SEQ ID NO: 1198766 - RNA, 19 nt, Artificial Sequence
  Description of Artificial Sequence: Synthetic oligonucleotide
caaauccagucacugcauu

SEQ ID NO: 1198767 - RNA, 19 nt, Artificial Sequence
  Description of Artificial Sequence: Synthetic oligonucleotide
cuccaaccaugccaaagau

SEQ ID NO: 1198768 - RNA, 19 nt, Artificial Sequence
  Description of Artificial Sequence: Synthetic oligonucleotide
acgauccccagggccagaa

SEQ ID NO: 1198769 - RNA, 19 nt, Artificial Sequence
  Description of Artificial Sequence: Synthetic oligonucleotide
gucccagcaguggcccucc

SEQ ID NO: 1198770 - RNA, 19 nt, Artificial Sequence
  Description of Artificial Sequence: Synthetic oligonucleotide
uggcuaccgcugacuggaa

SEQ ID NO: 1198771 - RNA, 19 nt, Artificial Sequence
  Description of Artificial Sequence: Synthetic oligonucleotide
cgcauuccccgguaagcag

SEQ ID NO: 1198772 - RNA, 19 nt, Artificial Sequence
  Description of Artificial Sequence: Synthetic oligonucleotide
uggggaccauuggagcauu

SEQ ID NO: 1198773 - RNA, 19 nt, Artificial Sequence
  Description of Artificial Sequence: Synthetic oligonucleotide
ccgcugacuggaagguggc

SEQ ID NO: 1198774 - RNA, 19 nt, Artificial Sequence
  Description of Artificial Sequence: Synthetic oligonucleotide
aggcccacgauggcgccaa

SEQ ID NO: 1198775 - RNA, 19 nt, Artificial Sequence
  Description of Artificial Sequence: Synthetic oligonucleotide
gcuaggccauccucagcca

SEQ ID NO: 1198776 - RNA, 19 nt, Artificial Sequence
  Description of Artificial Sequence: Synthetic oligonucleotide
cuaccgcugacuggaaggu

SEQ ID NO: 1198777 - RNA, 19 nt, Artificial Sequence
  Description of Artificial Sequence: Synthetic oligonucleotide
cuggagcacugaucccaga

SEQ ID NO: 1198778 - RNA, 19 nt, Artificial Sequence
  Description of Artificial Sequence: Synthetic oligonucleotide
ggcccuccaaccaugccaa

SEQ ID NO: 1198779 - RNA, 19 nt, Artificial Sequence
  Description of Artificial Sequence: Synthetic oligonucleotide
cuaggccauccucagccau

SEQ ID NO: 1198780 - RNA, 19 nt, Artificial Sequence
  Description of Artificial Sequence: Synthetic oligonucleotide
ccguuaaugggaggggaca

SEQ ID NO: 1198781 - RNA, 19 nt, Artificial Sequence
  Description of Artificial Sequence: Synthetic oligonucleotide
caggguugaaugaggucuu

SEQ ID NO: 1198782 - RNA, 19 nt, Artificial Sequence
  Description of Artificial Sequence: Synthetic oligonucleotide
cuaugcucccaaugccgau

SEQ ID NO: 1198783 - RNA, 19 nt, Artificial Sequence
  Description of Artificial Sequence: Synthetic oligonucleotide
gcagcccauuuucggucug

SEQ ID NO: 1198784 - RNA, 19 nt, Artificial Sequence
  Description of Artificial Sequence: Synthetic oligonucleotide
gcaacccgcccuugcagaa

SEQ ID NO: 1198785 - RNA, 19 nt, Artificial Sequence
  Description of Artificial Sequence: Synthetic oligonucleotide
cuuuuccagcaaagccgcu

SEQ ID NO: 1198786 - RNA, 19 nt, Artificial Sequence
  Description of Artificial Sequence: Synthetic oligonucleotide
ggguuucggucagcucagg

SEQ ID NO: 1198787 - RNA, 19 nt, Artificial Sequence
  Description of Artificial Sequence: Synthetic oligonucleotide
caggauccgcacugcuuua

SEQ ID NO: 1198788 - RNA, 19 nt, Artificial Sequence
  Description of Artificial Sequence: Synthetic oligonucleotide
gugacgguugccagugaau

SEQ ID NO: 1198789 - RNA, 19 nt, Artificial Sequence
  Description of Artificial Sequence: Synthetic oligonucleotide
gguagaagacugggaugaa

SEQ ID NO: 1198790 - RNA, 19 nt, Artificial Sequence
  Description of Artificial Sequence: Synthetic oligonucleotide
cccgguaagcagacugaca

SEQ ID NO: 1198791 - RNA, 19 nt, Artificial Sequence
  Description of Artificial Sequence: Synthetic oligonucleotide
ccccgcauuccccgguaag

SEQ ID NO: 1198792 - RNA, 19 nt, Artificial Sequence
  Description of Artificial Sequence: Synthetic oligonucleotide
ggucaugcaacccgcccuu

SEQ ID NO: 1198793 - RNA, 19 nt, Artificial Sequence
  Description of Artificial Sequence: Synthetic oligonucleotide
ccccgguaagcagacugac

SEQ ID NO: 1198794 - RNA, 19 nt, Artificial Sequence
  Description of Artificial Sequence: Synthetic oligonucleotide
guccggccccgcauucccc

SEQ ID NO: 1198795 - RNA, 19 nt, Artificial Sequence
  Description of Artificial Sequence: Synthetic oligonucleotide
guucaggguccggccccgc

SEQ ID NO: 1198796 - RNA, 19 nt, Artificial Sequence
  Description of Artificial Sequence: Synthetic oligonucleotide
gacgauccccagggccaga

SEQ ID NO: 1198797 - RNA, 19 nt, Artificial Sequence
  Description of Artificial Sequence: Synthetic oligonucleotide
aagccgcuucuggcaggau

SEQ ID NO: 1198798 - RNA, 19 nt, Artificial Sequence
  Description of Artificial Sequence: Synthetic oligonucleotide
ccgcauuccccgguaagca

SEQ ID NO: 1198799 - RNA, 19 nt, Artificial Sequence
  Description of Artificial Sequence: Synthetic oligonucleotide
ccauuggagcauucuggcu

SEQ ID NO: 1198800 - RNA, 19 nt, Artificial Sequence
  Description of Artificial Sequence: Synthetic oligonucleotide
uggcgccaagaggguuggc

SEQ ID NO: 1198801 - RNA, 19 nt, Artificial Sequence
  Description of Artificial Sequence: Synthetic oligonucleotide
ggguccggccccgcauucc

SEQ ID NO: 1198802 - RNA, 19 nt, Artificial Sequence
  Description of Artificial Sequence: Synthetic oligonucleotide
ggauccgcacugcuuuauu

SEQ ID NO: 1198803 - RNA, 19 nt, Artificial Sequence
  Description of Artificial Sequence: Synthetic oligonucleotide
cccggguuucggucagcuc

SEQ ID NO: 1198804 - RNA, 19 nt, Artificial Sequence
  Description of Artificial Sequence: Synthetic oligonucleotide
ccgcuucuggcaggauaag

SEQ ID NO: 1198805 - RNA, 19 nt, Artificial Sequence
  Description of Artificial Sequence: Synthetic oligonucleotide
cccuugcagaagacgugua

SEQ ID NO: 1198806 - RNA, 19 nt, Artificial Sequence
  Description of Artificial Sequence: Synthetic oligonucleotide
ggccccgcauuccccggua

SEQ ID NO: 1198807 - RNA, 19 nt, Artificial Sequence
  Description of Artificial Sequence: Synthetic oligonucleotide
cgguugccagugaauugaa

SEQ ID NO: 1198808 - RNA, 19 nt, Artificial Sequence
  Description of Artificial Sequence: Synthetic oligonucleotide
gccccgcauuccccgguaa

SEQ ID NO: 1198809 - RNA, 19 nt, Artificial Sequence
  Description of Artificial Sequence: Synthetic oligonucleotide
gcccggguuucggucagcu

SEQ ID NO: 1198810 - RNA, 19 nt, Artificial Sequence
  Description of Artificial Sequence: Synthetic oligonucleotide
cgguaagcagacugacaau

SEQ ID NO: 1198811 - RNA, 19 nt, Artificial Sequence
  Description of Artificial Sequence: Synthetic oligonucleotide
ggccauccucagccauccu

SEQ ID NO: 1198812 - RNA, 19 nt, Artificial Sequence
  Description of Artificial Sequence: Synthetic oligonucleotide
cgauggcgccaagaggguu

SEQ ID NO: 1198813 - RNA, 19 nt, Artificial Sequence
  Description of Artificial Sequence: Synthetic oligonucleotide
uuuagcaagaccaggaagg

SEQ ID NO: 1198814 - RNA, 19 nt, Artificial Sequence
  Description of Artificial Sequence: Synthetic oligonucleotide
uggaauucggacuagauag

SEQ ID NO: 1198815 - RNA, 19 nt, Artificial Sequence
  Description of Artificial Sequence: Synthetic oligonucleotide
ucguuguugaacaugagcg

SEQ ID NO: 1198816 - RNA, 19 nt, Artificial Sequence
  Description of Artificial Sequence: Synthetic oligonucleotide
auucggacuagauagaggg

SEQ ID NO: 1198817 - RNA, 19 nt, Artificial Sequence
  Description of Artificial Sequence: Synthetic oligonucleotide
uuuaauagucucaguaagg

SEQ ID NO: 1198818 - RNA, 19 nt, Artificial Sequence
  Description of Artificial Sequence: Synthetic oligonucleotide
cuuggugagauucugagcc

SEQ ID NO: 1198819 - RNA, 19 nt, Artificial Sequence
  Description of Artificial Sequence: Synthetic oligonucleotide
agaaaguugacacaggccu

SEQ ID NO: 1198820 - RNA, 19 nt, Artificial Sequence
  Description of Artificial Sequence: Synthetic oligonucleotide
aagaccacagcuucuuugg

SEQ ID NO: 1198821 - RNA, 19 nt, Artificial Sequence
  Description of Artificial Sequence: Synthetic oligonucleotide
aacuggacccauauaagcc

SEQ ID NO: 1198822 - RNA, 19 nt, Artificial Sequence
  Description of Artificial Sequence: Synthetic oligonucleotide
uuaauagucucaguaaggc

SEQ ID NO: 1198823 - RNA, 19 nt, Artificial Sequence
  Description of Artificial Sequence: Synthetic oligonucleotide
acuggacccauauaagccc

SEQ ID NO: 1198824 - RNA, 19 nt, Artificial Sequence
  Description of Artificial Sequence: Synthetic oligonucleotide
aacaugagcgcauuccucu

SEQ ID NO: 1198825 - RNA, 19 nt, Artificial Sequence
  Description of Artificial Sequence: Synthetic oligonucleotide
uguacauguacuuuagcaa

SEQ ID NO: 1198826 - RNA, 19 nt, Artificial Sequence
  Description of Artificial Sequence: Synthetic oligonucleotide
ugggauagcaacacacagg

SEQ ID NO: 1198827 - RNA, 19 nt, Artificial Sequence
  Description of Artificial Sequence: Synthetic oligonucleotide
aagacauacuugugggcgg

SEQ ID NO: 1198828 - RNA, 19 nt, Artificial Sequence
  Description of Artificial Sequence: Synthetic oligonucleotide
uucacagaacccuucagac

SEQ ID NO: 1198829 - RNA, 19 nt, Artificial Sequence
  Description of Artificial Sequence: Synthetic oligonucleotide
agccaagacauacuugugg

SEQ ID NO: 1198830 - RNA, 19 nt, Artificial Sequence
  Description of Artificial Sequence: Synthetic oligonucleotide
gaacuggacccauauaagc

SEQ ID NO: 1198831 - RNA, 19 nt, Artificial Sequence
  Description of Artificial Sequence: Synthetic oligonucleotide
caagacauacuugugggcg

SEQ ID NO: 1198832 - RNA, 19 nt, Artificial Sequence
  Description of Artificial Sequence: Synthetic oligonucleotide
uagaagacggaacugccga

SEQ ID NO: 1198833 - RNA, 19 nt, Artificial Sequence
  Description of Artificial Sequence: Synthetic oligonucleotide
aaacagucggcucugggau

SEQ ID NO: 1198834 - RNA, 19 nt, Artificial Sequence
  Description of Artificial Sequence: Synthetic oligonucleotide
uggauuucugacuugacuu

SEQ ID NO: 1198835 - RNA, 19 nt, Artificial Sequence
  Description of Artificial Sequence: Synthetic oligonucleotide
aagccuuuaauagucucag

SEQ ID NO: 1198836 - RNA, 19 nt, Artificial Sequence
  Description of Artificial Sequence: Synthetic oligonucleotide
ugaacaugagcgcauuccu

SEQ ID NO: 1198837 - RNA, 19 nt, Artificial Sequence
  Description of Artificial Sequence: Synthetic oligonucleotide
ugacuugacuuccgcaagg

SEQ ID NO: 1198838 - RNA, 19 nt, Artificial Sequence
  Description of Artificial Sequence: Synthetic oligonucleotide
uaaggcaggcacaauguac

SEQ ID NO: 1198839 - RNA, 19 nt, Artificial Sequence
  Description of Artificial Sequence: Synthetic oligonucleotide
uacuucgguaggcagaaga

SEQ ID NO: 1198840 - RNA, 19 nt, Artificial Sequence
  Description of Artificial Sequence: Synthetic oligonucleotide
cuucacgcuguauucagcc

SEQ ID NO: 1198841 - RNA, 19 nt, Artificial Sequence
  Description of Artificial Sequence: Synthetic oligonucleotide
uagacuccaacggaggagg

SEQ ID NO: 1198842 - RNA, 19 nt, Artificial Sequence
  Description of Artificial Sequence: Synthetic oligonucleotide
cugccggucaauuucacag

SEQ ID NO: 1198843 - RNA, 19 nt, Artificial Sequence
  Description of Artificial Sequence: Synthetic oligonucleotide
uuguugugaggggugaucg

SEQ ID NO: 1198844 - RNA, 19 nt, Artificial Sequence
  Description of Artificial Sequence: Synthetic oligonucleotide
uggaccacuaccccucagg

SEQ ID NO: 1198845 - RNA, 19 nt, Artificial Sequence
  Description of Artificial Sequence: Synthetic oligonucleotide
uggguagacuccaacggag

SEQ ID NO: 1198846 - RNA, 19 nt, Artificial Sequence
  Description of Artificial Sequence: Synthetic oligonucleotide
uugaacaugagcgcauucc

SEQ ID NO: 1198847 - RNA, 19 nt, Artificial Sequence
  Description of Artificial Sequence: Synthetic oligonucleotide
cauagaagacggaacugcc

SEQ ID NO: 1198848 - RNA, 19 nt, Artificial Sequence
  Description of Artificial Sequence: Synthetic oligonucleotide
agccguuugaguucaaucu

SEQ ID NO: 1198849 - RNA, 19 nt, Artificial Sequence
  Description of Artificial Sequence: Synthetic oligonucleotide
uggacgucggccaucagcu

SEQ ID NO: 1198850 - RNA, 19 nt, Artificial Sequence
  Description of Artificial Sequence: Synthetic oligonucleotide
cuguauucagccuucccag

SEQ ID NO: 1198851 - RNA, 19 nt, Artificial Sequence
  Description of Artificial Sequence: Synthetic oligonucleotide
aauucggacuagauagagg

SEQ ID NO: 1198852 - RNA, 19 nt, Artificial Sequence
  Description of Artificial Sequence: Synthetic oligonucleotide
aagacggaacugccgacag

SEQ ID NO: 1198853 - RNA, 19 nt, Artificial Sequence
  Description of Artificial Sequence: Synthetic oligonucleotide
uaauagucucaguaaggca

SEQ ID NO: 1198854 - RNA, 19 nt, Artificial Sequence
  Description of Artificial Sequence: Synthetic oligonucleotide
aucucaucgcuguacaugu

SEQ ID NO: 1198855 - RNA, 19 nt, Artificial Sequence
  Description of Artificial Sequence: Synthetic oligonucleotide
caggauaucugacugagca

SEQ ID NO: 1198856 - RNA, 19 nt, Artificial Sequence
  Description of Artificial Sequence: Synthetic oligonucleotide
ucuagugacauaguuggaa

SEQ ID NO: 1198857 - RNA, 19 nt, Artificial Sequence
  Description of Artificial Sequence: Synthetic oligonucleotide
gucccauugguacuguccg

SEQ ID NO: 1198858 - RNA, 19 nt, Artificial Sequence
  Description of Artificial Sequence: Synthetic oligonucleotide
cucgacgucgggaaugugg

SEQ ID NO: 1198859 - RNA, 19 nt, Artificial Sequence
  Description of Artificial Sequence: Synthetic oligonucleotide
cugaaacaaacuuggugag

SEQ ID NO: 1198860 - RNA, 19 nt, Artificial Sequence
  Description of Artificial Sequence: Synthetic oligonucleotide
augaacacccuucugucca

SEQ ID NO: 1198861 - RNA, 19 nt, Artificial Sequence
  Description of Artificial Sequence: Synthetic oligonucleotide
auaguuggaauucggacua

SEQ ID NO: 1198862 - RNA, 19 nt, Artificial Sequence
  Description of Artificial Sequence: Synthetic oligonucleotide
uguacuucuuagcagcaua

SEQ ID NO: 1198863 - RNA, 19 nt, Artificial Sequence
  Description of Artificial Sequence: Synthetic oligonucleotide
aguucugcggccaucuucg

SEQ ID NO: 1198864 - RNA, 19 nt, Artificial Sequence
  Description of Artificial Sequence: Synthetic oligonucleotide
auuccucucgcgcagcguc

SEQ ID NO: 1198865 - RNA, 19 nt, Artificial Sequence
  Description of Artificial Sequence: Synthetic oligonucleotide
ggauaucugacugagcagg

SEQ ID NO: 1198866 - RNA, 19 nt, Artificial Sequence
  Description of Artificial Sequence: Synthetic oligonucleotide
gacggaacugccgacagcc

SEQ ID NO: 1198867 - RNA, 19 nt, Artificial Sequence
  Description of Artificial Sequence: Synthetic oligonucleotide
uuccgcaagguccccauag

SEQ ID NO: 1198868 - RNA, 19 nt, Artificial Sequence
  Description of Artificial Sequence: Synthetic oligonucleotide
gaauucggacuagauagag

SEQ ID NO: 1198869 - RNA, 19 nt, Artificial Sequence
  Description of Artificial Sequence: Synthetic oligonucleotide
acugguuacuucgguaggc

SEQ ID NO: 1198870 - RNA, 19 nt, Artificial Sequence
  Description of Artificial Sequence: Synthetic oligonucleotide
ucaaaccagacugggaaug

SEQ ID NO: 1198871 - RNA, 19 nt, Artificial Sequence
  Description of Artificial Sequence: Synthetic oligonucleotide
cucugggauagcaacacac

SEQ ID NO: 1198872 - RNA, 19 nt, Artificial Sequence
  Description of Artificial Sequence: Synthetic oligonucleotide
cuccacggcacuuacuggg

SEQ ID NO: 1198873 - RNA, 19 nt, Artificial Sequence
  Description of Artificial Sequence: Synthetic oligonucleotide
aaaggccgaccuuccugcc

SEQ ID NO: 1198874 - RNA, 19 nt, Artificial Sequence
  Description of Artificial Sequence: Synthetic oligonucleotide
augagcgcauuccucucgc

SEQ ID NO: 1198875 - RNA, 19 nt, Artificial Sequence
  Description of Artificial Sequence: Synthetic oligonucleotide
ucacagaacccuucagacc

SEQ ID NO: 1198876 - RNA, 19 nt, Artificial Sequence
  Description of Artificial Sequence: Synthetic oligonucleotide
ucagcccaguucaggaccg

SEQ ID NO: 1198877 - RNA, 19 nt, Artificial Sequence
  Description of Artificial Sequence: Synthetic oligonucleotide
ucggacuagauagagggcu

SEQ ID NO: 1198878 - RNA, 19 nt, Artificial Sequence
  Description of Artificial Sequence: Synthetic oligonucleotide
aggcuccucaaacagucgg

SEQ ID NO: 1198879 - RNA, 19 nt, Artificial Sequence
  Description of Artificial Sequence: Synthetic oligonucleotide
ucgacgucgggaaugugga

SEQ ID NO: 1198880 - RNA, 19 nt, Artificial Sequence
  Description of Artificial Sequence: Synthetic oligonucleotide
gacugagcaggaccguugg

SEQ ID NO: 1198881 - RNA, 19 nt, Artificial Sequence
  Description of Artificial Sequence: Synthetic oligonucleotide
gccaagacauacuuguggg

SEQ ID NO: 1198882 - RNA, 19 nt, Artificial Sequence
  Description of Artificial Sequence: Synthetic oligonucleotide
cagaacuggacccauauaa

SEQ ID NO: 1198883 - RNA, 19 nt, Artificial Sequence
  Description of Artificial Sequence: Synthetic oligonucleotide
uguagaagguauccugcuc

SEQ ID NO: 1198884 - RNA, 19 nt, Artificial Sequence
  Description of Artificial Sequence: Synthetic oligonucleotide
uguaccagaggaagauacu

SEQ ID NO: 1198885 - RNA, 19 nt, Artificial Sequence
  Description of Artificial Sequence: Synthetic oligonucleotide
agaagacggaacugccgac

SEQ ID NO: 1198886 - RNA, 19 nt, Artificial Sequence
  Description of Artificial Sequence: Synthetic oligonucleotide
uaccccucaggcauagaag

SEQ ID NO: 1198887 - RNA, 19 nt, Artificial Sequence
  Description of Artificial Sequence: Synthetic oligonucleotide
aaggcccuuccucuugguc

SEQ ID NO: 1198888 - RNA, 19 nt, Artificial Sequence
  Description of Artificial Sequence: Synthetic oligonucleotide
gaaucuguccacccuggac

SEQ ID NO: 1198889 - RNA, 19 nt, Artificial Sequence
  Description of Artificial Sequence: Synthetic oligonucleotide
auagaagacggaacugccg

SEQ ID NO: 1198890 - RNA, 19 nt, Artificial Sequence
  Description of Artificial Sequence: Synthetic oligonucleotide
aggauaucugacugagcag

SEQ ID NO: 1198891 - RNA, 19 nt, Artificial Sequence
  Description of Artificial Sequence: Synthetic oligonucleotide
cacuccacggcacuuacug

SEQ ID NO: 1198892 - RNA, 19 nt, Artificial Sequence
  Description of Artificial Sequence: Synthetic oligonucleotide
uguugugaggggugaucgg

SEQ ID NO: 1198893 - RNA, 19 nt, Artificial Sequence
  Description of Artificial Sequence: Synthetic oligonucleotide
uauucagccuucccagaac

SEQ ID NO: 1198894 - RNA, 19 nt, Artificial Sequence
  Description of Artificial Sequence: Synthetic oligonucleotide
gucaggauaucugacugag

SEQ ID NO: 1198895 - RNA, 19 nt, Artificial Sequence
  Description of Artificial Sequence: Synthetic oligonucleotide
cauagaacauggcauagaa

SEQ ID NO: 1198896 - RNA, 19 nt, Artificial Sequence
  Description of Artificial Sequence: Synthetic oligonucleotide
cacgaugaaguggacgucg

SEQ ID NO: 1198897 - RNA, 19 nt, Artificial Sequence
  Description of Artificial Sequence: Synthetic oligonucleotide
aguucaaucuucacgcugu

SEQ ID NO: 1198898 - RNA, 19 nt, Artificial Sequence
  Description of Artificial Sequence: Synthetic oligonucleotide
ucgggaauguggauuucug

SEQ ID NO: 1198899 - RNA, 19 nt, Artificial Sequence
  Description of Artificial Sequence: Synthetic oligonucleotide
cauguacuuuagcaagacc

SEQ ID NO: 1198900 - RNA, 19 nt, Artificial Sequence
  Description of Artificial Sequence: Synthetic oligonucleotide
guaccagaggaagauacug

SEQ ID NO: 1198901 - RNA, 19 nt, Artificial Sequence
  Description of Artificial Sequence: Synthetic oligonucleotide
aucuguccacccuggacuc

SEQ ID NO: 1198902 - RNA, 19 nt, Artificial Sequence
  Description of Artificial Sequence: Synthetic oligonucleotide
agaacuggacccauauaag

SEQ ID NO: 1198903 - RNA, 19 nt, Artificial Sequence
  Description of Artificial Sequence: Synthetic oligonucleotide
cacaaugaucuccaagguc

SEQ ID NO: 1198904 - RNA, 19 nt, Artificial Sequence
  Description of Artificial Sequence: Synthetic oligonucleotide
agcaggaccguuggcaaac

SEQ ID NO: 1198905 - RNA, 19 nt, Artificial Sequence
  Description of Artificial Sequence: Synthetic oligonucleotide
ugccguguaccagaggaag

SEQ ID NO: 1198906 - RNA, 19 nt, Artificial Sequence
  Description of Artificial Sequence: Synthetic oligonucleotide
guuguugucgggugcgggc

SEQ ID NO: 1198907 - RNA, 19 nt, Artificial Sequence
  Description of Artificial Sequence: Synthetic oligonucleotide
uucggacuagauagagggc

SEQ ID NO: 1198908 - RNA, 19 nt, Artificial Sequence
  Description of Artificial Sequence: Synthetic oligonucleotide
ggaaugugcugcuggagcc

SEQ ID NO: 1198909 - RNA, 19 nt, Artificial Sequence
  Description of Artificial Sequence: Synthetic oligonucleotide
acaugccucuuguugugag

SEQ ID NO: 1198910 - RNA, 19 nt, Artificial Sequence
  Description of Artificial Sequence: Synthetic oligonucleotide
uagccguuugaguucaauc

SEQ ID NO: 1198911 - RNA, 19 nt, Artificial Sequence
  Description of Artificial Sequence: Synthetic oligonucleotide
uuguugaacaugagcgcau

SEQ ID NO: 1198912 - RNA, 19 nt, Artificial Sequence
  Description of Artificial Sequence: Synthetic oligonucleotide
ucuaccugcacagggugcu

SEQ ID NO: 1198913 - RNA, 19 nt, Artificial Sequence
  Description of Artificial Sequence: Synthetic oligonucleotide
guagaagguauccugcucu

SEQ ID NO: 1198914 - RNA, 19 nt, Artificial Sequence
  Description of Artificial Sequence: Synthetic oligonucleotide
auacuugugggcgggcacg

SEQ ID NO: 1198915 - RNA, 19 nt, Artificial Sequence
  Description of Artificial Sequence: Synthetic oligonucleotide
caaacagucggcucuggga

SEQ ID NO: 1198916 - RNA, 19 nt, Artificial Sequence
  Description of Artificial Sequence: Synthetic oligonucleotide
caugccucuuguugugagg

SEQ ID NO: 1198917 - RNA, 19 nt, Artificial Sequence
  Description of Artificial Sequence: Synthetic oligonucleotide
guugugaggggugaucggc

SEQ ID NO: 1198918 - RNA, 19 nt, Artificial Sequence
  Description of Artificial Sequence: Synthetic oligonucleotide
cugacuugacuuccgcaag

SEQ ID NO: 1198919 - RNA, 19 nt, Artificial Sequence
  Description of Artificial Sequence: Synthetic oligonucleotide
agcaaugaacacccuucug

SEQ ID NO: 1198920 - RNA, 19 nt, Artificial Sequence
  Description of Artificial Sequence: Synthetic oligonucleotide
guggacgucggccaucagc

SEQ ID NO: 1198921 - RNA, 19 nt, Artificial Sequence
  Description of Artificial Sequence: Synthetic oligonucleotide
gguaguguaagccaagccu

SEQ ID NO: 1198922 - RNA, 19 nt, Artificial Sequence
  Description of Artificial Sequence: Synthetic oligonucleotide
agacggaacugccgacagc

SEQ ID NO: 1198923 - RNA, 19 nt, Artificial Sequence
  Description of Artificial Sequence: Synthetic oligonucleotide
ccaguuggggcucucaggg

SEQ ID NO: 1198924 - RNA, 19 nt, Artificial Sequence
  Description of Artificial Sequence: Synthetic oligonucleotide
ucccaagacaugccucuug

SEQ ID NO: 1198925 - RNA, 19 nt, Artificial Sequence
  Description of Artificial Sequence: Synthetic oligonucleotide
cuucgcuccggccggagcc

SEQ ID NO: 1198926 - RNA, 19 nt, Artificial Sequence
  Description of Artificial Sequence: Synthetic oligonucleotide
ugaguucaaucuucacgcu

SEQ ID NO: 1198927 - RNA, 19 nt, Artificial Sequence
  Description of Artificial Sequence: Synthetic oligonucleotide
ugaucggcaggcccugucu

SEQ ID NO: 1198928 - RNA, 19 nt, Artificial Sequence
  Description of Artificial Sequence: Synthetic oligonucleotide
gcacuuacuggguagacuc

SEQ ID NO: 1198929 - RNA, 19 nt, Artificial Sequence
  Description of Artificial Sequence: Synthetic oligonucleotide
agacaugccucuuguugug

SEQ ID NO: 1198930 - RNA, 19 nt, Artificial Sequence
  Description of Artificial Sequence: Synthetic oligonucleotide
cagaguggcgaguacugug

SEQ ID NO: 1198931 - RNA, 19 nt, Artificial Sequence
  Description of Artificial Sequence: Synthetic oligonucleotide
guagacuccaacggaggag

SEQ ID NO: 1198932 - RNA, 19 nt, Artificial Sequence
  Description of Artificial Sequence: Synthetic oligonucleotide
gccaucuucgcuccggccg

SEQ ID NO: 1198933 - RNA, 19 nt, Artificial Sequence
  Description of Artificial Sequence: Synthetic oligonucleotide
aacugccgacagccaagac

SEQ ID NO: 1198934 - RNA, 19 nt, Artificial Sequence
  Description of Artificial Sequence: Synthetic oligonucleotide
aguccacuuggaccacuac

SEQ ID NO: 1198935 - RNA, 19 nt, Artificial Sequence
  Description of Artificial Sequence: Synthetic oligonucleotide
gaacccuucagaccucaga

SEQ ID NO: 1198936 - RNA, 19 nt, Artificial Sequence
  Description of Artificial Sequence: Synthetic oligonucleotide
ucgcuguacauguacuuua

SEQ ID NO: 1198937 - RNA, 19 nt, Artificial Sequence
  Description of Artificial Sequence: Synthetic oligonucleotide
gaccauuccuagccguuug

SEQ ID NO: 1198938 - RNA, 19 nt, Artificial Sequence
  Description of Artificial Sequence: Synthetic oligonucleotide
cacuguacuuccgucauuc

SEQ ID NO: 1198939 - RNA, 19 nt, Artificial Sequence
  Description of Artificial Sequence: Synthetic oligonucleotide
gggaaugugcugcuggagc

SEQ ID NO: 1198940 - RNA, 19 nt, Artificial Sequence
  Description of Artificial Sequence: Synthetic oligonucleotide
gacccauauaagcccaguc

SEQ ID NO: 1198941 - RNA, 19 nt, Artificial Sequence
  Description of Artificial Sequence: Synthetic oligonucleotide
uuggcuaaggcaggcacaa

SEQ ID NO: 1198942 - RNA, 19 nt, Artificial Sequence
  Description of Artificial Sequence: Synthetic oligonucleotide
uuggugagauucugagcca

SEQ ID NO: 1198943 - RNA, 19 nt, Artificial Sequence
  Description of Artificial Sequence: Synthetic oligonucleotide
agcucguuguugaacauga

SEQ ID NO: 1198944 - RNA, 19 nt, Artificial Sequence
  Description of Artificial Sequence: Synthetic oligonucleotide
ucugccggucaauuucaca

SEQ ID NO: 1198945 - RNA, 19 nt, Artificial Sequence
  Description of Artificial Sequence: Synthetic oligonucleotide
ggcaaacuccucuagugac

SEQ ID NO: 1198946 - RNA, 19 nt, Artificial Sequence
  Description of Artificial Sequence: Synthetic oligonucleotide
cacugguuacuucgguagg

SEQ ID NO: 1198947 - RNA, 19 nt, Artificial Sequence
  Description of Artificial Sequence: Synthetic oligonucleotide
auguggauuucugacuuga

SEQ ID NO: 1198948 - RNA, 19 nt, Artificial Sequence
  Description of Artificial Sequence: Synthetic oligonucleotide
caaugaucuccaaggucug

SEQ ID NO: 1198949 - RNA, 19 nt, Artificial Sequence
  Description of Artificial Sequence: Synthetic oligonucleotide
cuugugggcgggcacgcgc

SEQ ID NO: 1198950 - RNA, 19 nt, Artificial Sequence
  Description of Artificial Sequence: Synthetic oligonucleotide
cacggcacuuacuggguag

SEQ ID NO: 1198951 - RNA, 19 nt, Artificial Sequence
  Description of Artificial Sequence: Synthetic oligonucleotide
cauacuugugggcgggcac

SEQ ID NO: 1198952 - RNA, 19 nt, Artificial Sequence
  Description of Artificial Sequence: Synthetic oligonucleotide
cacuuacuggguagacucc

SEQ ID NO: 1198953 - RNA, 19 nt, Artificial Sequence
  Description of Artificial Sequence: Synthetic oligonucleotide
cauugguacuguccgagga

SEQ ID NO: 1198954 - RNA, 19 nt, Artificial Sequence
  Description of Artificial Sequence: Synthetic oligonucleotide
acagucggcucugggauag

SEQ ID NO: 1198955 - RNA, 19 nt, Artificial Sequence
  Description of Artificial Sequence: Synthetic oligonucleotide
uccacugguuacuucggua

SEQ ID NO: 1198956 - RNA, 19 nt, Artificial Sequence
  Description of Artificial Sequence: Synthetic oligonucleotide
gcugccguguaccagagga

SEQ ID NO: 1198957 - RNA, 19 nt, Artificial Sequence
  Description of Artificial Sequence: Synthetic oligonucleotide
guggcgaguacugugucug

SEQ ID NO: 1198958 - RNA, 19 nt, Artificial Sequence
  Description of Artificial Sequence: Synthetic oligonucleotide
uugugggcgggcacgcgcc

SEQ ID NO: 1198959 - RNA, 19 nt, Artificial Sequence
  Description of Artificial Sequence: Synthetic oligonucleotide
uggacccauauaagcccag

SEQ ID NO: 1198960 - RNA, 19 nt, Artificial Sequence
  Description of Artificial Sequence: Synthetic oligonucleotide
uccgcaagguccccauaga

SEQ ID NO: 1198961 - RNA, 19 nt, Artificial Sequence
  Description of Artificial Sequence: Synthetic oligonucleotide
cucuaccugcacagggugc

SEQ ID NO: 1198962 - RNA, 19 nt, Artificial Sequence
  Description of Artificial Sequence: Synthetic oligonucleotide
ugcacuccacggcacuuac

SEQ ID NO: 1198963 - RNA, 19 nt, Artificial Sequence
  Description of Artificial Sequence: Synthetic oligonucleotide
aguggcgaguacugugucu

SEQ ID NO: 1198964 - RNA, 19 nt, Artificial Sequence
  Description of Artificial Sequence: Synthetic oligonucleotide
aaguggacgucggccauca

SEQ ID NO: 1198965 - RNA, 19 nt, Artificial Sequence
  Description of Artificial Sequence: Synthetic oligonucleotide
gcggguacaguucugcggc

SEQ ID NO: 1198966 - RNA, 19 nt, Artificial Sequence
  Description of Artificial Sequence: Synthetic oligonucleotide
cauacagaguggcgaguac

SEQ ID NO: 1198967 - RNA, 19 nt, Artificial Sequence
  Description of Artificial Sequence: Synthetic oligonucleotide
ggcggguacaguucugcgg

SEQ ID NO: 1198968 - RNA, 19 nt, Artificial Sequence
  Description of Artificial Sequence: Synthetic oligonucleotide
ugaaguggacgucggccau

SEQ ID NO: 1198969 - RNA, 19 nt, Artificial Sequence
  Description of Artificial Sequence: Synthetic oligonucleotide
aaggucugccggucaauuu

SEQ ID NO: 1198970 - RNA, 19 nt, Artificial Sequence
  Description of Artificial Sequence: Synthetic oligonucleotide
guuacuucgguaggcagaa

SEQ ID NO: 1198971 - RNA, 19 nt, Artificial Sequence
  Description of Artificial Sequence: Synthetic oligonucleotide
gaagacggaacugccgaca

SEQ ID NO: 1198972 - RNA, 19 nt, Artificial Sequence
  Description of Artificial Sequence: Synthetic oligonucleotide
gcaaugaacacccuucugu

SEQ ID NO: 1198973 - RNA, 19 nt, Artificial Sequence
  Description of Artificial Sequence: Synthetic oligonucleotide
cagacuugggcugguagug

SEQ ID NO: 1198974 - RNA, 19 nt, Artificial Sequence
  Description of Artificial Sequence: Synthetic oligonucleotide
uccacggcacuuacugggu

SEQ ID NO: 1198975 - RNA, 19 nt, Artificial Sequence
  Description of Artificial Sequence: Synthetic oligonucleotide
gguguugagggccucccug

SEQ ID NO: 1198976 - RNA, 19 nt, Artificial Sequence
  Description of Artificial Sequence: Synthetic oligonucleotide
agucucaguaaggcaguag

SEQ ID NO: 1198977 - RNA, 19 nt, Artificial Sequence
  Description of Artificial Sequence: Synthetic oligonucleotide
uuguuguugucgggugcgg

SEQ ID NO: 1198978 - RNA, 19 nt, Artificial Sequence
  Description of Artificial Sequence: Synthetic oligonucleotide
aggguuguuguugucgggu

SEQ ID NO: 1198979 - RNA, 19 nt, Artificial Sequence
  Description of Artificial Sequence: Synthetic oligonucleotide
gaacaugagcgcauuccuc

SEQ ID NO: 1198980 - RNA, 19 nt, Artificial Sequence
  Description of Artificial Sequence: Synthetic oligonucleotide
ucucgcgcagcgucgggug

SEQ ID NO: 1198981 - RNA, 19 nt, Artificial Sequence
  Description of Artificial Sequence: Synthetic oligonucleotide
ggugcucaaaccagacugg

SEQ ID NO: 1198982 - RNA, 19 nt, Artificial Sequence
  Description of Artificial Sequence: Synthetic oligonucleotide
ugaacacccuucuguccac

SEQ ID NO: 1198983 - RNA, 19 nt, Artificial Sequence
  Description of Artificial Sequence: Synthetic oligonucleotide
agaguggcgaguacugugu

SEQ ID NO: 1198984 - RNA, 19 nt, Artificial Sequence
  Description of Artificial Sequence: Synthetic oligonucleotide
caguucugcggccaucuuc

SEQ ID NO: 1198985 - RNA, 19 nt, Artificial Sequence
  Description of Artificial Sequence: Synthetic oligonucleotide
aagauacugugggucuccu

SEQ ID NO: 1198986 - RNA, 19 nt, Artificial Sequence
  Description of Artificial Sequence: Synthetic oligonucleotide
ggaccacuaccccucaggc

SEQ ID NO: 1198987 - RNA, 19 nt, Artificial Sequence
  Description of Artificial Sequence: Synthetic oligonucleotide
ugggcgggcacgcgccugg

SEQ ID NO: 1198988 - RNA, 19 nt, Artificial Sequence
  Description of Artificial Sequence: Synthetic oligonucleotide
cagggugcucaaaccagac

SEQ ID NO: 1198989 - RNA, 19 nt, Artificial Sequence
  Description of Artificial Sequence: Synthetic oligonucleotide
acgaugaaguggacgucgg

SEQ ID NO: 1198990 - RNA, 19 nt, Artificial Sequence
  Description of Artificial Sequence: Synthetic oligonucleotide
gugaggggugaucggcagg

SEQ ID NO: 1198991 - RNA, 19 nt, Artificial Sequence
  Description of Artificial Sequence: Synthetic oligonucleotide
gcaaaggccgaccuuccug

SEQ ID NO: 1198992 - RNA, 19 nt, Artificial Sequence
  Description of Artificial Sequence: Synthetic oligonucleotide
agggugcucaaaccagacu

SEQ ID NO: 1198993 - RNA, 19 nt, Artificial Sequence
  Description of Artificial Sequence: Synthetic oligonucleotide
accauuccuagccguuuga

SEQ ID NO: 1198994 - RNA, 19 nt, Artificial Sequence
  Description of Artificial Sequence: Synthetic oligonucleotide
aguuggaauucggacuaga

SEQ ID NO: 1198995 - RNA, 19 nt, Artificial Sequence
  Description of Artificial Sequence: Synthetic oligonucleotide
aacagucggcucugggaua

SEQ ID NO: 1198996 - RNA, 19 nt, Artificial Sequence
  Description of Artificial Sequence: Synthetic oligonucleotide
acgucgggaauguggauuu

SEQ ID NO: 1198997 - RNA, 19 nt, Artificial Sequence
  Description of Artificial Sequence: Synthetic oligonucleotide
aggccgaccuuccugccca

SEQ ID NO: 1198998 - RNA, 19 nt, Artificial Sequence
  Description of Artificial Sequence: Synthetic oligonucleotide
cacgcuguauucagccuuc

SEQ ID NO: 1198999 - RNA, 19 nt, Artificial Sequence
  Description of Artificial Sequence: Synthetic oligonucleotide
ccauauaagcccaguccag

SEQ ID NO: 1199000 - RNA, 19 nt, Artificial Sequence
  Description of Artificial Sequence: Synthetic oligonucleotide
caggguuguuguugucggg

SEQ ID NO: 1199001 - RNA, 19 nt, Artificial Sequence
  Description of Artificial Sequence: Synthetic oligonucleotide
caggcuccucaaacagucg

SEQ ID NO: 1199002 - RNA, 19 nt, Artificial Sequence
  Description of Artificial Sequence: Synthetic oligonucleotide
caucagcucguuguugaac

SEQ ID NO: 1199003 - RNA, 19 nt, Artificial Sequence
  Description of Artificial Sequence: Synthetic oligonucleotide
cuggguagacuccaacgga

SEQ ID NO: 1199004 - RNA, 19 nt, Artificial Sequence
  Description of Artificial Sequence: Synthetic oligonucleotide
cuaccccucaggcauagaa

SEQ ID NO: 1199005 - RNA, 19 nt, Artificial Sequence
  Description of Artificial Sequence: Synthetic oligonucleotide
gaccacuaccccucaggca

SEQ ID NO: 1199006 - RNA, 19 nt, Artificial Sequence
  Description of Artificial Sequence: Synthetic oligonucleotide
cugccgacagccaagacau

SEQ ID NO: 1199007 - RNA, 19 nt, Artificial Sequence
  Description of Artificial Sequence: Synthetic oligonucleotide
uggcaguguagaagguauc

SEQ ID NO: 1199008 - RNA, 19 nt, Artificial Sequence
  Description of Artificial Sequence: Synthetic oligonucleotide
cuagugacauaguuggaau

SEQ ID NO: 1199009 - RNA, 19 nt, Artificial Sequence
  Description of Artificial Sequence: Synthetic oligonucleotide
ccaagacauacuugugggc

SEQ ID NO: 1199010 - RNA, 19 nt, Artificial Sequence
  Description of Artificial Sequence: Synthetic oligonucleotide
gucacagcgcccacgguac

SEQ ID NO: 1199011 - RNA, 19 nt, Artificial Sequence
  Description of Artificial Sequence: Synthetic oligonucleotide
cccauauaagcccagucca

SEQ ID NO: 1199012 - RNA, 19 nt, Artificial Sequence
  Description of Artificial Sequence: Synthetic oligonucleotide
ucccauugguacuguccga

SEQ ID NO: 1199013 - RNA, 19 nt, Artificial Sequence
  Description of Artificial Sequence: Synthetic oligonucleotide
ugggugcggaggcaccggc

SEQ ID NO: 1199014 - RNA, 19 nt, Artificial Sequence
  Description of Artificial Sequence: Synthetic oligonucleotide
cuggacccauauaagccca

SEQ ID NO: 1199015 - RNA, 19 nt, Artificial Sequence
  Description of Artificial Sequence: Synthetic oligonucleotide
gguagacuccaacggagga

SEQ ID NO: 1199016 - RNA, 19 nt, Artificial Sequence
  Description of Artificial Sequence: Synthetic oligonucleotide
uggcugccguguaccagag

SEQ ID NO: 1199017 - RNA, 19 nt, Artificial Sequence
  Description of Artificial Sequence: Synthetic oligonucleotide
acauacuugugggcgggca

SEQ ID NO: 1199018 - RNA, 19 nt, Artificial Sequence
  Description of Artificial Sequence: Synthetic oligonucleotide
aucgcuguacauguacuuu

SEQ ID NO: 1199019 - RNA, 19 nt, Artificial Sequence
  Description of Artificial Sequence: Synthetic oligonucleotide
ugcaggcucgacgucggga

SEQ ID NO: 1199020 - RNA, 19 nt, Artificial Sequence
  Description of Artificial Sequence: Synthetic oligonucleotide
uucgcuccggccggagccg

SEQ ID NO: 1199021 - RNA, 19 nt, Artificial Sequence
  Description of Artificial Sequence: Synthetic oligonucleotide
ggaacugccgacagccaag

SEQ ID NO: 1199022 - RNA, 19 nt, Artificial Sequence
  Description of Artificial Sequence: Synthetic oligonucleotide
guguaagccaagccuuuaa

SEQ ID NO: 1199023 - RNA, 19 nt, Artificial Sequence
  Description of Artificial Sequence: Synthetic oligonucleotide
gucggguggaaggacugcc

SEQ ID NO: 1199024 - RNA, 19 nt, Artificial Sequence
  Description of Artificial Sequence: Synthetic oligonucleotide
aggcaguaggcaguguccu

SEQ ID NO: 1199025 - RNA, 19 nt, Artificial Sequence
  Description of Artificial Sequence: Synthetic oligonucleotide
ggguagacuccaacggagg

SEQ ID NO: 1199026 - RNA, 19 nt, Artificial Sequence
  Description of Artificial Sequence: Synthetic oligonucleotide
ucugacugagcaggaccgu

SEQ ID NO: 1199027 - RNA, 19 nt, Artificial Sequence
  Description of Artificial Sequence: Synthetic oligonucleotide
uggcgaguacugugucugc

SEQ ID NO: 1199028 - RNA, 19 nt, Artificial Sequence
  Description of Artificial Sequence: Synthetic oligonucleotide
acgcuguauucagccuucc

SEQ ID NO: 1199029 - RNA, 19 nt, Artificial Sequence
  Description of Artificial Sequence: Synthetic oligonucleotide
ccaaggucaggauaucuga

SEQ ID NO: 1199030 - RNA, 19 nt, Artificial Sequence
  Description of Artificial Sequence: Synthetic oligonucleotide
aggcuugucuccagaaagu

SEQ ID NO: 1199031 - RNA, 19 nt, Artificial Sequence
  Description of Artificial Sequence: Synthetic oligonucleotide
gaguggcgaguacuguguc

SEQ ID NO: 1199032 - RNA, 19 nt, Artificial Sequence
  Description of Artificial Sequence: Synthetic oligonucleotide
guaguguaagccaagccuu

SEQ ID NO: 1199033 - RNA, 19 nt, Artificial Sequence
  Description of Artificial Sequence: Synthetic oligonucleotide
ggguuguuguugucgggug

SEQ ID NO: 1199034 - RNA, 19 nt, Artificial Sequence
  Description of Artificial Sequence: Synthetic oligonucleotide
ccguuugaguucaaucuuc

SEQ ID NO: 1199035 - RNA, 19 nt, Artificial Sequence
  Description of Artificial Sequence: Synthetic oligonucleotide
cagcucguuguugaacaug

SEQ ID NO: 1199036 - RNA, 19 nt, Artificial Sequence
  Description of Artificial Sequence: Synthetic oligonucleotide
gacauacuugugggcgggc

SEQ ID NO: 1199037 - RNA, 19 nt, Artificial Sequence
  Description of Artificial Sequence: Synthetic oligonucleotide
cauuccuagccguuugagu

SEQ ID NO: 1199038 - RNA, 19 nt, Artificial Sequence
  Description of Artificial Sequence: Synthetic oligonucleotide
ccauugguacuguccgagg

SEQ ID NO: 1199039 - RNA, 19 nt, Artificial Sequence
  Description of Artificial Sequence: Synthetic oligonucleotide
gccgacagccaagacauac

SEQ ID NO: 1199040 - RNA, 19 nt, Artificial Sequence
  Description of Artificial Sequence: Synthetic oligonucleotide
aggcucgacgucgggaaug

SEQ ID NO: 1199041 - RNA, 19 nt, Artificial Sequence
  Description of Artificial Sequence: Synthetic oligonucleotide
aguguaagccaagccuuua

SEQ ID NO: 1199042 - RNA, 19 nt, Artificial Sequence
  Description of Artificial Sequence: Synthetic oligonucleotide
cugguuacuucgguaggca

SEQ ID NO: 1199043 - RNA, 19 nt, Artificial Sequence
  Description of Artificial Sequence: Synthetic oligonucleotide
uuacuucgguaggcagaag

SEQ ID NO: 1199044 - RNA, 19 nt, Artificial Sequence
  Description of Artificial Sequence: Synthetic oligonucleotide
aaguccacuuggaccacua

SEQ ID NO: 1199045 - RNA, 19 nt, Artificial Sequence
  Description of Artificial Sequence: Synthetic oligonucleotide
gaccgccucaaagaccaca

SEQ ID NO: 1199046 - RNA, 19 nt, Artificial Sequence
  Description of Artificial Sequence: Synthetic oligonucleotide
cucgcgcagcgucgggugg

SEQ ID NO: 1199047 - RNA, 19 nt, Artificial Sequence
  Description of Artificial Sequence: Synthetic oligonucleotide
acgguaccuccacugguua

SEQ ID NO: 1199048 - RNA, 19 nt, Artificial Sequence
  Description of Artificial Sequence: Synthetic oligonucleotide
ccaucuucgcuccggccgg

SEQ ID NO: 1199049 - RNA, 19 nt, Artificial Sequence
  Description of Artificial Sequence: Synthetic oligonucleotide
guauccugcucuaccugca

SEQ ID NO: 1199050 - RNA, 19 nt, Artificial Sequence
  Description of Artificial Sequence: Synthetic oligonucleotide
gaaguggacgucggccauc

SEQ ID NO: 1199051 - RNA, 19 nt, Artificial Sequence
  Description of Artificial Sequence: Synthetic oligonucleotide
cuguccgaggagcacugga

SEQ ID NO: 1199052 - RNA, 19 nt, Artificial Sequence
  Description of Artificial Sequence: Synthetic oligonucleotide
ggaggagccugguggcaag

SEQ ID NO: 1199053 - RNA, 19 nt, Artificial Sequence
  Description of Artificial Sequence: Synthetic oligonucleotide
ccaggaccauuccuagccg

SEQ ID NO: 1199054 - RNA, 19 nt, Artificial Sequence
  Description of Artificial Sequence: Synthetic oligonucleotide
gggcggguacaguucugcg

SEQ ID NO: 1199055 - RNA, 19 nt, Artificial Sequence
  Description of Artificial Sequence: Synthetic oligonucleotide
acggcacuuacuggguaga

SEQ ID NO: 1199056 - RNA, 19 nt, Artificial Sequence
  Description of Artificial Sequence: Synthetic oligonucleotide
ccucuuguugugaggggug

SEQ ID NO: 1199057 - RNA, 19 nt, Artificial Sequence
  Description of Artificial Sequence: Synthetic oligonucleotide
acuugugggcgggcacgcg

SEQ ID NO: 1199058 - RNA, 19 nt, Artificial Sequence
  Description of Artificial Sequence: Synthetic oligonucleotide
ggaauucggacuagauaga

SEQ ID NO: 1199059 - RNA, 19 nt, Artificial Sequence
  Description of Artificial Sequence: Synthetic oligonucleotide
cacuaccccucaggcauag

SEQ ID NO: 1199060 - RNA, 19 nt, Artificial Sequence
  Description of Artificial Sequence: Synthetic oligonucleotide
ugugggcgggcacgcgccu

SEQ ID NO: 1199061 - RNA, 19 nt, Artificial Sequence
  Description of Artificial Sequence: Synthetic oligonucleotide
agcgucggguggaaggacu

SEQ ID NO: 1199062 - RNA, 19 nt, Artificial Sequence
  Description of Artificial Sequence: Synthetic oligonucleotide
cccacgguaccuccacugg

SEQ ID NO: 1199063 - RNA, 19 nt, Artificial Sequence
  Description of Artificial Sequence: Synthetic oligonucleotide
ccgaccuuccugcccacgg

SEQ ID NO: 1199064 - RNA, 19 nt, Artificial Sequence
  Description of Artificial Sequence: Synthetic oligonucleotide
gugaucggcaggcccuguc

SEQ ID NO: 1199065 - RNA, 19 nt, Artificial Sequence
  Description of Artificial Sequence: Synthetic oligonucleotide
cucuuguugugagggguga

SEQ ID NO: 1199066 - RNA, 19 nt, Artificial Sequence
  Description of Artificial Sequence: Synthetic oligonucleotide
gcccacgguaccuccacug

SEQ ID NO: 1199067 - RNA, 19 nt, Artificial Sequence
  Description of Artificial Sequence: Synthetic oligonucleotide
uagucucaguaaggcagua

SEQ ID NO: 1199068 - RNA, 19 nt, Artificial Sequence
  Description of Artificial Sequence: Synthetic oligonucleotide
gacgucgggaauguggauu

SEQ ID NO: 1199069 - RNA, 19 nt, Artificial Sequence
  Description of Artificial Sequence: Synthetic oligonucleotide
aggaggagccugguggcaa

SEQ ID NO: 1199070 - RNA, 19 nt, Artificial Sequence
  Description of Artificial Sequence: Synthetic oligonucleotide
gagcaggaccguuggcaaa

SEQ ID NO: 1199071 - RNA, 19 nt, Artificial Sequence
  Description of Artificial Sequence: Synthetic oligonucleotide
guucugcggccaucuucgc

SEQ ID NO: 1199072 - RNA, 19 nt, Artificial Sequence
  Description of Artificial Sequence: Synthetic oligonucleotide
ggaagauacugugggucuc

SEQ ID NO: 1199073 - RNA, 19 nt, Artificial Sequence
  Description of Artificial Sequence: Synthetic oligonucleotide
caggaccguuggcaaacuc

SEQ ID NO: 1199074 - RNA, 19 nt, Artificial Sequence
  Description of Artificial Sequence: Synthetic oligonucleotide
cuucgguaggcagaagacu

SEQ ID NO: 1199075 - RNA, 19 nt, Artificial Sequence
  Description of Artificial Sequence: Synthetic oligonucleotide
guacuguccgaggagcacu

SEQ ID NO: 1199076 - RNA, 19 nt, Artificial Sequence
  Description of Artificial Sequence: Synthetic oligonucleotide
ugucgggugcgggcggcgc

SEQ ID NO: 1199077 - RNA, 19 nt, Artificial Sequence
  Description of Artificial Sequence: Synthetic oligonucleotide
gugggugcggaggcaccgg

SEQ ID NO: 1199078 - RNA, 19 nt, Artificial Sequence
  Description of Artificial Sequence: Synthetic oligonucleotide
ggcaaggguggcagugggg

SEQ ID NO: 1199079 - RNA, 19 nt, Artificial Sequence
  Description of Artificial Sequence: Synthetic oligonucleotide
aguggacgucggccaucag

SEQ ID NO: 1199080 - RNA, 19 nt, Artificial Sequence
  Description of Artificial Sequence: Synthetic oligonucleotide
cagcgcccacgguaccucc

SEQ ID NO: 1199081 - RNA, 19 nt, Artificial Sequence
  Description of Artificial Sequence: Synthetic oligonucleotide
gccgcguugcuguuggcga

SEQ ID NO: 1199082 - RNA, 19 nt, Artificial Sequence
  Description of Artificial Sequence: Synthetic oligonucleotide
gacuuccgcaaggucccca

SEQ ID NO: 1199083 - RNA, 19 nt, Artificial Sequence
  Description of Artificial Sequence: Synthetic oligonucleotide
ggaaucuguccacccugga

SEQ ID NO: 1199084 - RNA, 19 nt, Artificial Sequence
  Description of Artificial Sequence: Synthetic oligonucleotide
ccggucaauuucacagaac

SEQ ID NO: 1199085 - RNA, 19 nt, Artificial Sequence
  Description of Artificial Sequence: Synthetic oligonucleotide
aggaccauuccuagccguu

SEQ ID NO: 1199086 - RNA, 19 nt, Artificial Sequence
  Description of Artificial Sequence: Synthetic oligonucleotide
gucgggaauguggauuucu

SEQ ID NO: 1199087 - RNA, 19 nt, Artificial Sequence
  Description of Artificial Sequence: Synthetic oligonucleotide
guacaguucugcggccauc

SEQ ID NO: 1199088 - RNA, 19 nt, Artificial Sequence
  Description of Artificial Sequence: Synthetic oligonucleotide
gaccguuggcaaacuccuc

SEQ ID NO: 1199089 - RNA, 19 nt, Artificial Sequence
  Description of Artificial Sequence: Synthetic oligonucleotide
cagaacccuucagaccuca

SEQ ID NO: 1199090 - RNA, 19 nt, Artificial Sequence
  Description of Artificial Sequence: Synthetic oligonucleotide
caucgcuguacauguacuu

SEQ ID NO: 1199091 - RNA, 19 nt, Artificial Sequence
  Description of Artificial Sequence: Synthetic oligonucleotide
aucuucgcuccggccggag

SEQ ID NO: 1199092 - RNA, 19 nt, Artificial Sequence
  Description of Artificial Sequence: Synthetic oligonucleotide
cugccguguaccagaggaa

SEQ ID NO: 1199093 - RNA, 19 nt, Artificial Sequence
  Description of Artificial Sequence: Synthetic oligonucleotide
ggaccguuggcaaacuccu

SEQ ID NO: 1199094 - RNA, 19 nt, Artificial Sequence
  Description of Artificial Sequence: Synthetic oligonucleotide
caggaccauuccuagccgu

SEQ ID NO: 1199095 - RNA, 19 nt, Artificial Sequence
  Description of Artificial Sequence: Synthetic oligonucleotide
agacuccaacggaggagga

SEQ ID NO: 1199096 - RNA, 19 nt, Artificial Sequence
  Description of Artificial Sequence: Synthetic oligonucleotide
gaugucgguggcagugggu

SEQ ID NO: 1199097 - RNA, 19 nt, Artificial Sequence
  Description of Artificial Sequence: Synthetic oligonucleotide
caagguccccauagaacau

SEQ ID NO: 1199098 - RNA, 19 nt, Artificial Sequence
  Description of Artificial Sequence: Synthetic oligonucleotide
caaucucaucgcuguacau

SEQ ID NO: 1199099 - RNA, 19 nt, Artificial Sequence
  Description of Artificial Sequence: Synthetic oligonucleotide
cgaugucgguggcaguggg

SEQ ID NO: 1199100 - RNA, 19 nt, Artificial Sequence
  Description of Artificial Sequence: Synthetic oligonucleotide
cgaguacugugucugccuc

SEQ ID NO: 1199101 - RNA, 19 nt, Artificial Sequence
  Description of Artificial Sequence: Synthetic oligonucleotide
ccccauagaacauggcaua

SEQ ID NO: 1199102 - RNA, 19 nt, Artificial Sequence
  Description of Artificial Sequence: Synthetic oligonucleotide
cuaccugcacagggugcuc

SEQ ID NO: 1199103 - RNA, 19 nt, Artificial Sequence
  Description of Artificial Sequence: Synthetic oligonucleotide
cacgguaccuccacugguu

SEQ ID NO: 1199104 - RNA, 19 nt, Artificial Sequence
  Description of Artificial Sequence: Synthetic oligonucleotide
gcucugggauagcaacaca

SEQ ID NO: 1199105 - RNA, 19 nt, Artificial Sequence
  Description of Artificial Sequence: Synthetic oligonucleotide
ccauagaacauggcauaga

SEQ ID NO: 1199106 - RNA, 19 nt, Artificial Sequence
  Description of Artificial Sequence: Synthetic oligonucleotide
ggcaccggcgggcggguac

SEQ ID NO: 1199107 - RNA, 19 nt, Artificial Sequence
  Description of Artificial Sequence: Synthetic oligonucleotide
cuucccagcagcgcugggu

SEQ ID NO: 1199108 - RNA, 19 nt, Artificial Sequence
  Description of Artificial Sequence: Synthetic oligonucleotide
gcacgcgccuggcugcccc

SEQ ID NO: 1199109 - RNA, 19 nt, Artificial Sequence
  Description of Artificial Sequence: Synthetic oligonucleotide
cgcuguauucagccuuccc

SEQ ID NO: 1199110 - RNA, 19 nt, Artificial Sequence
  Description of Artificial Sequence: Synthetic oligonucleotide
gaacacccuucuguccacu

SEQ ID NO: 1199111 - RNA, 19 nt, Artificial Sequence
  Description of Artificial Sequence: Synthetic oligonucleotide
ggcacuuacuggguagacu

SEQ ID NO: 1199112 - RNA, 19 nt, Artificial Sequence
  Description of Artificial Sequence: Synthetic oligonucleotide
ucgcuccggccggagccgc

SEQ ID NO: 1199113 - RNA, 19 nt, Artificial Sequence
  Description of Artificial Sequence: Synthetic oligonucleotide
cagcccaguucaggaccgc

SEQ ID NO: 1199114 - RNA, 19 nt, Artificial Sequence
  Description of Artificial Sequence: Synthetic oligonucleotide
ggacuagauagagggcucu

SEQ ID NO: 1199115 - RNA, 19 nt, Artificial Sequence
  Description of Artificial Sequence: Synthetic oligonucleotide
gcgucggguggaaggacug

SEQ ID NO: 1199116 - RNA, 19 nt, Artificial Sequence
  Description of Artificial Sequence: Synthetic oligonucleotide
acuaccccucaggcauaga

SEQ ID NO: 1199117 - RNA, 19 nt, Artificial Sequence
  Description of Artificial Sequence: Synthetic oligonucleotide
agcgcccacgguaccucca

SEQ ID NO: 1199118 - RNA, 19 nt, Artificial Sequence
  Description of Artificial Sequence: Synthetic oligonucleotide
cccaagacaugccucuugu

SEQ ID NO: 1199119 - RNA, 19 nt, Artificial Sequence
  Description of Artificial Sequence: Synthetic oligonucleotide
gguacaguucugcggccau

SEQ ID NO: 1199120 - RNA, 19 nt, Artificial Sequence
  Description of Artificial Sequence: Synthetic oligonucleotide
gggugaucggcaggcccug

SEQ ID NO: 1199121 - RNA, 19 nt, Artificial Sequence
  Description of Artificial Sequence: Synthetic oligonucleotide
cuagccguuugaguucaau

SEQ ID NO: 1199122 - RNA, 19 nt, Artificial Sequence
  Description of Artificial Sequence: Synthetic oligonucleotide
ccgcaagguccccauagaa

SEQ ID NO: 1199123 - RNA, 19 nt, Artificial Sequence
  Description of Artificial Sequence: Synthetic oligonucleotide
ggacgucggccaucagcuc

SEQ ID NO: 1199124 - RNA, 19 nt, Artificial Sequence
  Description of Artificial Sequence: Synthetic oligonucleotide
gcgcccacgguaccuccac

SEQ ID NO: 1199125 - RNA, 19 nt, Artificial Sequence
  Description of Artificial Sequence: Synthetic oligonucleotide
ccugugcaucaaugacuuc

SEQ ID NO: 1199126 - RNA, 19 nt, Artificial Sequence
  Description of Artificial Sequence: Synthetic oligonucleotide
gugggcgggcacgcgccug

SEQ ID NO: 1199127 - RNA, 19 nt, Artificial Sequence
  Description of Artificial Sequence: Synthetic oligonucleotide
gaggagccugguggcaagu

SEQ ID NO: 1199128 - RNA, 19 nt, Artificial Sequence
  Description of Artificial Sequence: Synthetic oligonucleotide
gcggcgcgggcaagggugg

SEQ ID NO: 1199129 - RNA, 19 nt, Artificial Sequence
  Description of Artificial Sequence: Synthetic oligonucleotide
ggcgggcggguacaguucu

SEQ ID NO: 1199130 - RNA, 19 nt, Artificial Sequence
  Description of Artificial Sequence: Synthetic oligonucleotide
ggcuugucuccagaaaguu

SEQ ID NO: 1199131 - RNA, 19 nt, Artificial Sequence
  Description of Artificial Sequence: Synthetic oligonucleotide
cgggcggguacaguucugc

SEQ ID NO: 1199132 - RNA, 19 nt, Artificial Sequence
  Description of Artificial Sequence: Synthetic oligonucleotide
cugacugagcaggaccguu

SEQ ID NO: 1199133 - RNA, 19 nt, Artificial Sequence
  Description of Artificial Sequence: Synthetic oligonucleotide
ccgacagccaagacauacu

SEQ ID NO: 1199134 - RNA, 19 nt, Artificial Sequence
  Description of Artificial Sequence: Synthetic oligonucleotide
ccagaacuggacccauaua

SEQ ID NO: 1199135 - RNA, 19 nt, Artificial Sequence
  Description of Artificial Sequence: Synthetic oligonucleotide
ccucucgcgcagcgucggg

SEQ ID NO: 1199136 - RNA, 19 nt, Artificial Sequence
  Description of Artificial Sequence: Synthetic oligonucleotide
ggacccauauaagcccagu

SEQ ID NO: 1199137 - RNA, 19 nt, Artificial Sequence
  Description of Artificial Sequence: Synthetic oligonucleotide
cccuucuguccacugcaaa

SEQ ID NO: 1199138 - RNA, 19 nt, Artificial Sequence
  Description of Artificial Sequence: Synthetic oligonucleotide
accggcgggcggguacagu

SEQ ID NO: 1199139 - RNA, 19 nt, Artificial Sequence
  Description of Artificial Sequence: Synthetic oligonucleotide
ggacugccaguuggggcuc

SEQ ID NO: 1199140 - RNA, 19 nt, Artificial Sequence
  Description of Artificial Sequence: Synthetic oligonucleotide
caucuucgcuccggccgga

SEQ ID NO: 1199141 - RNA, 19 nt, Artificial Sequence
  Description of Artificial Sequence: Synthetic oligonucleotide
cggaacugccgacagccaa

SEQ ID NO: 1199142 - RNA, 19 nt, Artificial Sequence
  Description of Artificial Sequence: Synthetic oligonucleotide
gugcgggcggcgcgggcaa

SEQ ID NO: 1199143 - RNA, 19 nt, Artificial Sequence
  Description of Artificial Sequence: Synthetic oligonucleotide
cucucgcgcagcgucgggu

SEQ ID NO: 1199144 - RNA, 19 nt, Artificial Sequence
  Description of Artificial Sequence: Synthetic oligonucleotide
caccggcgggcggguacag

SEQ ID NO: 1199145 - RNA, 19 nt, Artificial Sequence
  Description of Artificial Sequence: Synthetic oligonucleotide
ggcucgacgucgggaaugu

SEQ ID NO: 1199146 - RNA, 19 nt, Artificial Sequence
  Description of Artificial Sequence: Synthetic oligonucleotide
cgucggguggaaggacugc

SEQ ID NO: 1199147 - RNA, 19 nt, Artificial Sequence
  Description of Artificial Sequence: Synthetic oligonucleotide
gcgcccgccgcguugcugu

SEQ ID NO: 1199148 - RNA, 19 nt, Artificial Sequence
  Description of Artificial Sequence: Synthetic oligonucleotide
ggaccauuccuagccguuu

SEQ ID NO: 1199149 - RNA, 19 nt, Artificial Sequence
  Description of Artificial Sequence: Synthetic oligonucleotide
gcgcggcgggcagcaaagg

SEQ ID NO: 1199150 - RNA, 19 nt, Artificial Sequence
  Description of Artificial Sequence: Synthetic oligonucleotide
ccacgguaccuccacuggu

SEQ ID NO: 1199151 - RNA, 19 nt, Artificial Sequence
  Description of Artificial Sequence: Synthetic oligonucleotide
ggccgaccuuccugcccac

SEQ ID NO: 1199152 - RNA, 19 nt, Artificial Sequence
  Description of Artificial Sequence: Synthetic oligonucleotide
gcucgacgucgggaaugug

SEQ ID NO: 1199153 - RNA, 19 nt, Artificial Sequence
  Description of Artificial Sequence: Synthetic oligonucleotide
cggcacuuacuggguagac

SEQ ID NO: 1199154 - RNA, 19 nt, Artificial Sequence
  Description of Artificial Sequence: Synthetic oligonucleotide
ccacggcacuuacugggua

SEQ ID NO: 1199155 - RNA, 19 nt, Artificial Sequence
  Description of Artificial Sequence: Synthetic oligonucleotide
gaggcaccggcgggcgggu

SEQ ID NO: 1199156 - RNA, 19 nt, Artificial Sequence
  Description of Artificial Sequence: Synthetic oligonucleotide
guccagcaaugaacacccu

SEQ ID NO: 1199157 - RNA, 19 nt, Artificial Sequence
  Description of Artificial Sequence: Synthetic oligonucleotide
gcgggcggguacaguucug

SEQ ID NO: 1199158 - RNA, 19 nt, Artificial Sequence
  Description of Artificial Sequence: Synthetic oligonucleotide
ccaagacaugccucuuguu

SEQ ID NO: 1199159 - RNA, 19 nt, Artificial Sequence
  Description of Artificial Sequence: Synthetic oligonucleotide
cggcgggcggguacaguuc

SEQ ID NO: 1199160 - RNA, 19 nt, Artificial Sequence
  Description of Artificial Sequence: Synthetic oligonucleotide
cguguaccagaggaagaua

SEQ ID NO: 1199161 - RNA, 19 nt, Artificial Sequence
  Description of Artificial Sequence: Synthetic oligonucleotide
ggaccgccucaaagaccac

SEQ ID NO: 1199162 - RNA, 19 nt, Artificial Sequence
  Description of Artificial Sequence: Synthetic oligonucleotide
gcaggaccguuggcaaacu

SEQ ID NO: 1199163 - RNA, 19 nt, Artificial Sequence
  Description of Artificial Sequence: Synthetic oligonucleotide
ggcgggcagcaaaggccga

SEQ ID NO: 1199164 - RNA, 19 nt, Artificial Sequence
  Description of Artificial Sequence: Synthetic oligonucleotide
ggugaucggcaggcccugu

SEQ ID NO: 1199165 - RNA, 19 nt, Artificial Sequence
  Description of Artificial Sequence: Synthetic oligonucleotide
cgucgggaauguggauuuc

SEQ ID NO: 1199166 - RNA, 19 nt, Artificial Sequence
  Description of Artificial Sequence: Synthetic oligonucleotide
ggccaccuuuccacacugu

SEQ ID NO: 1199167 - RNA, 19 nt, Artificial Sequence
  Description of Artificial Sequence: Synthetic oligonucleotide
ccuagccguuugaguucaa

SEQ ID NO: 1199168 - RNA, 19 nt, Artificial Sequence
  Description of Artificial Sequence: Synthetic oligonucleotide
ccaaggucugccggucaau

SEQ ID NO: 1199169 - RNA, 19 nt, Artificial Sequence
  Description of Artificial Sequence: Synthetic oligonucleotide
cgcgcccgccgcguugcug

SEQ ID NO: 1199170 - RNA, 19 nt, Artificial Sequence
  Description of Artificial Sequence: Synthetic oligonucleotide
cgacgucgggaauguggau

SEQ ID NO: 1199171 - RNA, 19 nt, Artificial Sequence
  Description of Artificial Sequence: Synthetic oligonucleotide
cgcccacgguaccuccacu

SEQ ID NO: 1199172 - RNA, 19 nt, Artificial Sequence
  Description of Artificial Sequence: Synthetic oligonucleotide
cgcgcagcgucggguggaa

SEQ ID NO: 1199173 - RNA, 19 nt, Artificial Sequence
  Description of Artificial Sequence: Synthetic oligonucleotide
aacaauuccauucuagacc

SEQ ID NO: 1199174 - RNA, 19 nt, Artificial Sequence
  Description of Artificial Sequence: Synthetic oligonucleotide
aauagauaugaauacaauc

SEQ ID NO: 1199175 - RNA, 19 nt, Artificial Sequence
  Description of Artificial Sequence: Synthetic oligonucleotide
uuauuaaugucaaagaccc

SEQ ID NO: 1199176 - RNA, 19 nt, Artificial Sequence
  Description of Artificial Sequence: Synthetic oligonucleotide
uuuuaagugaacauuaacc

SEQ ID NO: 1199177 - RNA, 19 nt, Artificial Sequence
  Description of Artificial Sequence: Synthetic oligonucleotide
aaacuuucggcauuaaaac

SEQ ID NO: 1199178 - RNA, 19 nt, Artificial Sequence
  Description of Artificial Sequence: Synthetic oligonucleotide
aaaucgugugaauagaagg

SEQ ID NO: 1199179 - RNA, 19 nt, Artificial Sequence
  Description of Artificial Sequence: Synthetic oligonucleotide
uguaauaugaccuugugau

SEQ ID NO: 1199180 - RNA, 19 nt, Artificial Sequence
  Description of Artificial Sequence: Synthetic oligonucleotide
ugaccuagaaaucaaaugc

SEQ ID NO: 1199181 - RNA, 19 nt, Artificial Sequence
  Description of Artificial Sequence: Synthetic oligonucleotide
aauacaauucagcucguag

SEQ ID NO: 1199182 - RNA, 19 nt, Artificial Sequence
  Description of Artificial Sequence: Synthetic oligonucleotide
acaaauagcaaacuuucgg

SEQ ID NO: 1199183 - RNA, 19 nt, Artificial Sequence
  Description of Artificial Sequence: Synthetic oligonucleotide
aguccuauaauauuaaaca

SEQ ID NO: 1199184 - RNA, 19 nt, Artificial Sequence
  Description of Artificial Sequence: Synthetic oligonucleotide
aaaaguuuagaagucagug

SEQ ID NO: 1199185 - RNA, 19 nt, Artificial Sequence
  Description of Artificial Sequence: Synthetic oligonucleotide
aaccuaacuacacaaacug

SEQ ID NO: 1199186 - RNA, 19 nt, Artificial Sequence
  Description of Artificial Sequence: Synthetic oligonucleotide
cauuaaggcaaacaaaucc

SEQ ID NO: 1199187 - RNA, 19 nt, Artificial Sequence
  Description of Artificial Sequence: Synthetic oligonucleotide
guagaauuuaugcaaaugc

SEQ ID NO: 1199188 - RNA, 19 nt, Artificial Sequence
  Description of Artificial Sequence: Synthetic oligonucleotide
uuagaaaucgugugaauag

SEQ ID NO: 1199189 - RNA, 19 nt, Artificial Sequence
  Description of Artificial Sequence: Synthetic oligonucleotide
aaaugcauuagacuucaag

SEQ ID NO: 1199190 - RNA, 19 nt, Artificial Sequence
  Description of Artificial Sequence: Synthetic oligonucleotide
uaaacauuagguaaccaca

SEQ ID NO: 1199191 - RNA, 19 nt, Artificial Sequence
  Description of Artificial Sequence: Synthetic oligonucleotide
uguuuaauacaauucagcu

SEQ ID NO: 1199192 - RNA, 19 nt, Artificial Sequence
  Description of Artificial Sequence: Synthetic oligonucleotide
ucauacacuaguaaagccc

SEQ ID NO: 1199193 - RNA, 19 nt, Artificial Sequence
  Description of Artificial Sequence: Synthetic oligonucleotide
agcuuggcaaaucacaccc

SEQ ID NO: 1199194 - RNA, 19 nt, Artificial Sequence
  Description of Artificial Sequence: Synthetic oligonucleotide
uuugcuguguuaauaaaug

SEQ ID NO: 1199195 - RNA, 19 nt, Artificial Sequence
  Description of Artificial Sequence: Synthetic oligonucleotide
auuaaaacaggcuaacaca

SEQ ID NO: 1199196 - RNA, 19 nt, Artificial Sequence
  Description of Artificial Sequence: Synthetic oligonucleotide
uuuaguaauacacaagcuu

SEQ ID NO: 1199197 - RNA, 19 nt, Artificial Sequence
  Description of Artificial Sequence: Synthetic oligonucleotide
gaaaagaugaacaugcuca

SEQ ID NO: 1199198 - RNA, 19 nt, Artificial Sequence
  Description of Artificial Sequence: Synthetic oligonucleotide
uuuguaguguuuaauacaa

SEQ ID NO: 1199199 - RNA, 19 nt, Artificial Sequence
  Description of Artificial Sequence: Synthetic oligonucleotide
auaaagccauuucagauag

SEQ ID NO: 1199200 - RNA, 19 nt, Artificial Sequence
  Description of Artificial Sequence: Synthetic oligonucleotide
uuaguaauacacaagcuua

SEQ ID NO: 1199201 - RNA, 19 nt, Artificial Sequence
  Description of Artificial Sequence: Synthetic oligonucleotide
aaggauaaaaccaccacag

SEQ ID NO: 1199202 - RNA, 19 nt, Artificial Sequence
  Description of Artificial Sequence: Synthetic oligonucleotide
aacaguacucauuaaggca

SEQ ID NO: 1199203 - RNA, 19 nt, Artificial Sequence
  Description of Artificial Sequence: Synthetic oligonucleotide
aaggauuaaagucuccugu

SEQ ID NO: 1199204 - RNA, 19 nt, Artificial Sequence
  Description of Artificial Sequence: Synthetic oligonucleotide
aucauacacuaguaaagcc

SEQ ID NO: 1199205 - RNA, 19 nt, Artificial Sequence
  Description of Artificial Sequence: Synthetic oligonucleotide
uaagaagggacucaacagc

SEQ ID NO: 1199206 - RNA, 19 nt, Artificial Sequence
  Description of Artificial Sequence: Synthetic oligonucleotide
aaauuguggacaaauagca

SEQ ID NO: 1199207 - RNA, 19 nt, Artificial Sequence
  Description of Artificial Sequence: Synthetic oligonucleotide
caaaucacacccaagcagg

SEQ ID NO: 1199208 - RNA, 19 nt, Artificial Sequence
  Description of Artificial Sequence: Synthetic oligonucleotide
aacuguaugaggacagucc

SEQ ID NO: 1199209 - RNA, 19 nt, Artificial Sequence
  Description of Artificial Sequence: Synthetic oligonucleotide
uuauagauagguugcacug

SEQ ID NO: 1199210 - RNA, 19 nt, Artificial Sequence
  Description of Artificial Sequence: Synthetic oligonucleotide
agauagguugcacugaaag

SEQ ID NO: 1199211 - RNA, 19 nt, Artificial Sequence
  Description of Artificial Sequence: Synthetic oligonucleotide
aaauagcaaacuuucggca

SEQ ID NO: 1199212 - RNA, 19 nt, Artificial Sequence
  Description of Artificial Sequence: Synthetic oligonucleotide
aaucgugugaauagaaggg

SEQ ID NO: 1199213 - RNA, 19 nt, Artificial Sequence
  Description of Artificial Sequence: Synthetic oligonucleotide
caaauagcaaacuuucggc

SEQ ID NO: 1199214 - RNA, 19 nt, Artificial Sequence
  Description of Artificial Sequence: Synthetic oligonucleotide
aucauauccccucagaaca

SEQ ID NO: 1199215 - RNA, 19 nt, Artificial Sequence
  Description of Artificial Sequence: Synthetic oligonucleotide
gaaauuguggacaaauagc

SEQ ID NO: 1199216 - RNA, 19 nt, Artificial Sequence
  Description of Artificial Sequence: Synthetic oligonucleotide
ucuaagggaagauuaaagu

SEQ ID NO: 1199217 - RNA, 19 nt, Artificial Sequence
  Description of Artificial Sequence: Synthetic oligonucleotide
uuaaaacaggcuaacacau

SEQ ID NO: 1199218 - RNA, 19 nt, Artificial Sequence
  Description of Artificial Sequence: Synthetic oligonucleotide
aaaguggcauggcaugccc

SEQ ID NO: 1199219 - RNA, 19 nt, Artificial Sequence
  Description of Artificial Sequence: Synthetic oligonucleotide
ugcaaauagauaugaauac

SEQ ID NO: 1199220 - RNA, 19 nt, Artificial Sequence
  Description of Artificial Sequence: Synthetic oligonucleotide
uuaugcaaaugcauuagac

SEQ ID NO: 1199221 - RNA, 19 nt, Artificial Sequence
  Description of Artificial Sequence: Synthetic oligonucleotide
uaugcaaaugcauuagacu

SEQ ID NO: 1199222 - RNA, 19 nt, Artificial Sequence
  Description of Artificial Sequence: Synthetic oligonucleotide
cauacacuaguaaagcccc

SEQ ID NO: 1199223 - RNA, 19 nt, Artificial Sequence
  Description of Artificial Sequence: Synthetic oligonucleotide
uuccauucuagaccaaggg

SEQ ID NO: 1199224 - RNA, 19 nt, Artificial Sequence
  Description of Artificial Sequence: Synthetic oligonucleotide
auuauagauagguugcacu

SEQ ID NO: 1199225 - RNA, 19 nt, Artificial Sequence
  Description of Artificial Sequence: Synthetic oligonucleotide
cuugugauagaacgaaagg

SEQ ID NO: 1199226 - RNA, 19 nt, Artificial Sequence
  Description of Artificial Sequence: Synthetic oligonucleotide
uuugccucauuauuaaugu

SEQ ID NO: 1199227 - RNA, 19 nt, Artificial Sequence
  Description of Artificial Sequence: Synthetic oligonucleotide
auuaaaguggcauggcaug

SEQ ID NO: 1199228 - RNA, 19 nt, Artificial Sequence
  Description of Artificial Sequence: Synthetic oligonucleotide
ucaauugaccuagaaauca

SEQ ID NO: 1199229 - RNA, 19 nt, Artificial Sequence
  Description of Artificial Sequence: Synthetic oligonucleotide
aaagguauacaagaaucug

SEQ ID NO: 1199230 - RNA, 19 nt, Artificial Sequence
  Description of Artificial Sequence: Synthetic oligonucleotide
cuaagaagggacucaacag

SEQ ID NO: 1199231 - RNA, 19 nt, Artificial Sequence
  Description of Artificial Sequence: Synthetic oligonucleotide
aagauuaaaguggcauggc

SEQ ID NO: 1199232 - RNA, 19 nt, Artificial Sequence
  Description of Artificial Sequence: Synthetic oligonucleotide
uagugacaagaaaagauga

SEQ ID NO: 1199233 - RNA, 19 nt, Artificial Sequence
  Description of Artificial Sequence: Synthetic oligonucleotide
auaguuucaugucucagcu

SEQ ID NO: 1199234 - RNA, 19 nt, Artificial Sequence
  Description of Artificial Sequence: Synthetic oligonucleotide
auuagguaaccacaggugu

SEQ ID NO: 1199235 - RNA, 19 nt, Artificial Sequence
  Description of Artificial Sequence: Synthetic oligonucleotide
aauagcaaacuuucggcau

SEQ ID NO: 1199236 - RNA, 19 nt, Artificial Sequence
  Description of Artificial Sequence: Synthetic oligonucleotide
cugagcacgaggaaggagg

SEQ ID NO: 1199237 - RNA, 19 nt, Artificial Sequence
  Description of Artificial Sequence: Synthetic oligonucleotide
cagcuagccgcuaagaagg

SEQ ID NO: 1199238 - RNA, 19 nt, Artificial Sequence
  Description of Artificial Sequence: Synthetic oligonucleotide
uucagcucguaguuaaggg

SEQ ID NO: 1199239 - RNA, 19 nt, Artificial Sequence
  Description of Artificial Sequence: Synthetic oligonucleotide
aauuuuacacagucacugu

SEQ ID NO: 1199240 - RNA, 19 nt, Artificial Sequence
  Description of Artificial Sequence: Synthetic oligonucleotide
augaugaccauauuggaau

SEQ ID NO: 1199241 - RNA, 19 nt, Artificial Sequence
  Description of Artificial Sequence: Synthetic oligonucleotide
ucuccuagauucuaaguca

SEQ ID NO: 1199242 - RNA, 19 nt, Artificial Sequence
  Description of Artificial Sequence: Synthetic oligonucleotide
ugauaaauacagaauucaa

SEQ ID NO: 1199243 - RNA, 19 nt, Artificial Sequence
  Description of Artificial Sequence: Synthetic oligonucleotide
auaaaaccaccacagugag

SEQ ID NO: 1199244 - RNA, 19 nt, Artificial Sequence
  Description of Artificial Sequence: Synthetic oligonucleotide
acauuagguaaccacaggu

SEQ ID NO: 1199245 - RNA, 19 nt, Artificial Sequence
  Description of Artificial Sequence: Synthetic oligonucleotide
uaguuaagggcacaagaca

SEQ ID NO: 1199246 - RNA, 19 nt, Artificial Sequence
  Description of Artificial Sequence: Synthetic oligonucleotide
aacuuucggcauuaaaaca

SEQ ID NO: 1199247 - RNA, 19 nt, Artificial Sequence
  Description of Artificial Sequence: Synthetic oligonucleotide
ucggcauuaaaacaggcua

SEQ ID NO: 1199248 - RNA, 19 nt, Artificial Sequence
  Description of Artificial Sequence: Synthetic oligonucleotide
guugucaagugguugaaug

SEQ ID NO: 1199249 - RNA, 19 nt, Artificial Sequence
  Description of Artificial Sequence: Synthetic oligonucleotide
gaaaggauaaaaccaccac

SEQ ID NO: 1199250 - RNA, 19 nt, Artificial Sequence
  Description of Artificial Sequence: Synthetic oligonucleotide
auacaauucagcucguagu

SEQ ID NO: 1199251 - RNA, 19 nt, Artificial Sequence
  Description of Artificial Sequence: Synthetic oligonucleotide
augcauuagacuucaagcu

SEQ ID NO: 1199252 - RNA, 19 nt, Artificial Sequence
  Description of Artificial Sequence: Synthetic oligonucleotide
gauuaaagucuccugugac

SEQ ID NO: 1199253 - RNA, 19 nt, Artificial Sequence
  Description of Artificial Sequence: Synthetic oligonucleotide
cauauuggaauuggaaugc

SEQ ID NO: 1199254 - RNA, 19 nt, Artificial Sequence
  Description of Artificial Sequence: Synthetic oligonucleotide
uuuacacagucacuguaca

SEQ ID NO: 1199255 - RNA, 19 nt, Artificial Sequence
  Description of Artificial Sequence: Synthetic oligonucleotide
gauaugaauacaaucucca

SEQ ID NO: 1199256 - RNA, 19 nt, Artificial Sequence
  Description of Artificial Sequence: Synthetic oligonucleotide
aaacuguaugaggacaguc

SEQ ID NO: 1199257 - RNA, 19 nt, Artificial Sequence
  Description of Artificial Sequence: Synthetic oligonucleotide
uaaccagguugucaagugg

SEQ ID NO: 1199258 - RNA, 19 nt, Artificial Sequence
  Description of Artificial Sequence: Synthetic oligonucleotide
uauauccuugaaaauugac

SEQ ID NO: 1199259 - RNA, 19 nt, Artificial Sequence
  Description of Artificial Sequence: Synthetic oligonucleotide
ccuuuaguaauacacaagc

SEQ ID NO: 1199260 - RNA, 19 nt, Artificial Sequence
  Description of Artificial Sequence: Synthetic oligonucleotide
ugcucauuaacgaugucaa

SEQ ID NO: 1199261 - RNA, 19 nt, Artificial Sequence
  Description of Artificial Sequence: Synthetic oligonucleotide
cucagaacagacaguaggc

SEQ ID NO: 1199262 - RNA, 19 nt, Artificial Sequence
  Description of Artificial Sequence: Synthetic oligonucleotide
aaucacaucaauugaccua

SEQ ID NO: 1199263 - RNA, 19 nt, Artificial Sequence
  Description of Artificial Sequence: Synthetic oligonucleotide
acuuucggcauuaaaacag

SEQ ID NO: 1199264 - RNA, 19 nt, Artificial Sequence
  Description of Artificial Sequence: Synthetic oligonucleotide
auccccucagaacagacag

SEQ ID NO: 1199265 - RNA, 19 nt, Artificial Sequence
  Description of Artificial Sequence: Synthetic oligonucleotide
uggaauuggaaugcugacg

SEQ ID NO: 1199266 - RNA, 19 nt, Artificial Sequence
  Description of Artificial Sequence: Synthetic oligonucleotide
ucagauaguuucaugucuc

SEQ ID NO: 1199267 - RNA, 19 nt, Artificial Sequence
  Description of Artificial Sequence: Synthetic oligonucleotide
uugaaagauuauagauagg

SEQ ID NO: 1199268 - RNA, 19 nt, Artificial Sequence
  Description of Artificial Sequence: Synthetic oligonucleotide
aauacucaccaugacuuug

SEQ ID NO: 1199269 - RNA, 19 nt, Artificial Sequence
  Description of Artificial Sequence: Synthetic oligonucleotide
aaauauacuuagaaaucgu

SEQ ID NO: 1199270 - RNA, 19 nt, Artificial Sequence
  Description of Artificial Sequence: Synthetic oligonucleotide
agaaucugaaggauuaaag

SEQ ID NO: 1199271 - RNA, 19 nt, Artificial Sequence
  Description of Artificial Sequence: Synthetic oligonucleotide
aaacgacuaaagcuuuucu

SEQ ID NO: 1199272 - RNA, 19 nt, Artificial Sequence
  Description of Artificial Sequence: Synthetic oligonucleotide
aagguauacaagaaucuga

SEQ ID NO: 1199273 - RNA, 19 nt, Artificial Sequence
  Description of Artificial Sequence: Synthetic oligonucleotide
cauuagguaaccacaggug

SEQ ID NO: 1199274 - RNA, 19 nt, Artificial Sequence
  Description of Artificial Sequence: Synthetic oligonucleotide
auuaaggcaaacaaauccu

SEQ ID NO: 1199275 - RNA, 19 nt, Artificial Sequence
  Description of Artificial Sequence: Synthetic oligonucleotide
aacgacuaaagcuuuucua

SEQ ID NO: 1199276 - RNA, 19 nt, Artificial Sequence
  Description of Artificial Sequence: Synthetic oligonucleotide
ucagcucguaguuaagggc

SEQ ID NO: 1199277 - RNA, 19 nt, Artificial Sequence
  Description of Artificial Sequence: Synthetic oligonucleotide
aguuuagaagucagugucc

SEQ ID NO: 1199278 - RNA, 19 nt, Artificial Sequence
  Description of Artificial Sequence: Synthetic oligonucleotide
gaaaucgugugaauagaag

SEQ ID NO: 1199279 - RNA, 19 nt, Artificial Sequence
  Description of Artificial Sequence: Synthetic oligonucleotide
gugacauaaagccauuuca

SEQ ID NO: 1199280 - RNA, 19 nt, Artificial Sequence
  Description of Artificial Sequence: Synthetic oligonucleotide
aauaugaccuugugauaga

SEQ ID NO: 1199281 - RNA, 19 nt, Artificial Sequence
  Description of Artificial Sequence: Synthetic oligonucleotide
uuauauccuugaaaauuga

SEQ ID NO: 1199282 - RNA, 19 nt, Artificial Sequence
  Description of Artificial Sequence: Synthetic oligonucleotide
aaaccuaacuacacaaacu

SEQ ID NO: 1199283 - RNA, 19 nt, Artificial Sequence
  Description of Artificial Sequence: Synthetic oligonucleotide
uuccuaacaaugcuucugu

SEQ ID NO: 1199284 - RNA, 19 nt, Artificial Sequence
  Description of Artificial Sequence: Synthetic oligonucleotide
guaacaauuccauucuaga

SEQ ID NO: 1199285 - RNA, 19 nt, Artificial Sequence
  Description of Artificial Sequence: Synthetic oligonucleotide
aaaauuuuacacagucacu

SEQ ID NO: 1199286 - RNA, 19 nt, Artificial Sequence
  Description of Artificial Sequence: Synthetic oligonucleotide
gacaaauagcaaacuuucg

SEQ ID NO: 1199287 - RNA, 19 nt, Artificial Sequence
  Description of Artificial Sequence: Synthetic oligonucleotide
acuguaugaggacaguccu

SEQ ID NO: 1199288 - RNA, 19 nt, Artificial Sequence
  Description of Artificial Sequence: Synthetic oligonucleotide
ugaaggauuaaagucuccu

SEQ ID NO: 1199289 - RNA, 19 nt, Artificial Sequence
  Description of Artificial Sequence: Synthetic oligonucleotide
uacaauucagcucguaguu

SEQ ID NO: 1199290 - RNA, 19 nt, Artificial Sequence
  Description of Artificial Sequence: Synthetic oligonucleotide
auauccuugaaaauugaca

SEQ ID NO: 1199291 - RNA, 19 nt, Artificial Sequence
  Description of Artificial Sequence: Synthetic oligonucleotide
guguuuaauacaauucagc

SEQ ID NO: 1199292 - RNA, 19 nt, Artificial Sequence
  Description of Artificial Sequence: Synthetic oligonucleotide
acuagugacaagaaaagau

SEQ ID NO: 1199293 - RNA, 19 nt, Artificial Sequence
  Description of Artificial Sequence: Synthetic oligonucleotide
auuugccucauuauuaaug

SEQ ID NO: 1199294 - RNA, 19 nt, Artificial Sequence
  Description of Artificial Sequence: Synthetic oligonucleotide
uucggcauuaaaacaggcu

SEQ ID NO: 1199295 - RNA, 19 nt, Artificial Sequence
  Description of Artificial Sequence: Synthetic oligonucleotide
ugaagcggucucaagaaau

SEQ ID NO: 1199296 - RNA, 19 nt, Artificial Sequence
  Description of Artificial Sequence: Synthetic oligonucleotide
ucaaagaccccuucuugga

SEQ ID NO: 1199297 - RNA, 19 nt, Artificial Sequence
  Description of Artificial Sequence: Synthetic oligonucleotide
auuggaauuggaaugcuga

SEQ ID NO: 1199298 - RNA, 19 nt, Artificial Sequence
  Description of Artificial Sequence: Synthetic oligonucleotide
cuagccgcuaagaagggac

SEQ ID NO: 1199299 - RNA, 19 nt, Artificial Sequence
  Description of Artificial Sequence: Synthetic oligonucleotide
gauagguugcacugaaaga

SEQ ID NO: 1199300 - RNA, 19 nt, Artificial Sequence
  Description of Artificial Sequence: Synthetic oligonucleotide
aaauagauaugaauacaau

SEQ ID NO: 1199301 - RNA, 19 nt, Artificial Sequence
  Description of Artificial Sequence: Synthetic oligonucleotide
augaccauauuggaauugg

SEQ ID NO: 1199302 - RNA, 19 nt, Artificial Sequence
  Description of Artificial Sequence: Synthetic oligonucleotide
ugggaaaccuaacuacaca

SEQ ID NO: 1199303 - RNA, 19 nt, Artificial Sequence
  Description of Artificial Sequence: Synthetic oligonucleotide
uguccaagcaauuccuaac

SEQ ID NO: 1199304 - RNA, 19 nt, Artificial Sequence
  Description of Artificial Sequence: Synthetic oligonucleotide
ugucaagugguugaaugug

SEQ ID NO: 1199305 - RNA, 19 nt, Artificial Sequence
  Description of Artificial Sequence: Synthetic oligonucleotide
uugggaaaccuaacuacac

SEQ ID NO: 1199306 - RNA, 19 nt, Artificial Sequence
  Description of Artificial Sequence: Synthetic oligonucleotide
aagaagggacucaacagca

SEQ ID NO: 1199307 - RNA, 19 nt, Artificial Sequence
  Description of Artificial Sequence: Synthetic oligonucleotide
uaguaauacacaagcuuau

SEQ ID NO: 1199308 - RNA, 19 nt, Artificial Sequence
  Description of Artificial Sequence: Synthetic oligonucleotide
agugcgugguuccacuggg

SEQ ID NO: 1199309 - RNA, 19 nt, Artificial Sequence
  Description of Artificial Sequence: Synthetic oligonucleotide
ugcauugguagcagcgugc

SEQ ID NO: 1199310 - RNA, 19 nt, Artificial Sequence
  Description of Artificial Sequence: Synthetic oligonucleotide
uacaagaaucugaaggauu

SEQ ID NO: 1199311 - RNA, 19 nt, Artificial Sequence
  Description of Artificial Sequence: Synthetic oligonucleotide
guaguuaagggcacaagac

SEQ ID NO: 1199312 - RNA, 19 nt, Artificial Sequence
  Description of Artificial Sequence: Synthetic oligonucleotide
gacuuuguaguguuuaaua

SEQ ID NO: 1199313 - RNA, 19 nt, Artificial Sequence
  Description of Artificial Sequence: Synthetic oligonucleotide
gugacaagaaaagaugaac

SEQ ID NO: 1199314 - RNA, 19 nt, Artificial Sequence
  Description of Artificial Sequence: Synthetic oligonucleotide
aucaauugaccuagaaauc

SEQ ID NO: 1199315 - RNA, 19 nt, Artificial Sequence
  Description of Artificial Sequence: Synthetic oligonucleotide
uguaugaggacaguccuau

SEQ ID NO: 1199316 - RNA, 19 nt, Artificial Sequence
  Description of Artificial Sequence: Synthetic oligonucleotide
auaagcaugaugaccauau

SEQ ID NO: 1199317 - RNA, 19 nt, Artificial Sequence
  Description of Artificial Sequence: Synthetic oligonucleotide
aauccuucugugaagcggu

SEQ ID NO: 1199318 - RNA, 19 nt, Artificial Sequence
  Description of Artificial Sequence: Synthetic oligonucleotide
auucagcucguaguuaagg

SEQ ID NO: 1199319 - RNA, 19 nt, Artificial Sequence
  Description of Artificial Sequence: Synthetic oligonucleotide
agaauuuaugcaaaugcau

SEQ ID NO: 1199320 - RNA, 19 nt, Artificial Sequence
  Description of Artificial Sequence: Synthetic oligonucleotide
uaguguugggauuucugcu

SEQ ID NO: 1199321 - RNA, 19 nt, Artificial Sequence
  Description of Artificial Sequence: Synthetic oligonucleotide
gauuauagauagguugcac

SEQ ID NO: 1199322 - RNA, 19 nt, Artificial Sequence
  Description of Artificial Sequence: Synthetic oligonucleotide
uucaagcuuggcaaaucac

SEQ ID NO: 1199323 - RNA, 19 nt, Artificial Sequence
  Description of Artificial Sequence: Synthetic oligonucleotide
ggcuaacacauacacagcc

SEQ ID NO: 1199324 - RNA, 19 nt, Artificial Sequence
  Description of Artificial Sequence: Synthetic oligonucleotide
cuaaccagguugucaagug

SEQ ID NO: 1199325 - RNA, 19 nt, Artificial Sequence
  Description of Artificial Sequence: Synthetic oligonucleotide
auagauagguugcacugaa

SEQ ID NO: 1199326 - RNA, 19 nt, Artificial Sequence
  Description of Artificial Sequence: Synthetic oligonucleotide
ugguagauuuauuuucauc

SEQ ID NO: 1199327 - RNA, 19 nt, Artificial Sequence
  Description of Artificial Sequence: Synthetic oligonucleotide
guaggcuuaccauauuuga

SEQ ID NO: 1199328 - RNA, 19 nt, Artificial Sequence
  Description of Artificial Sequence: Synthetic oligonucleotide
uugcauugguagcagcgug

SEQ ID NO: 1199329 - RNA, 19 nt, Artificial Sequence
  Description of Artificial Sequence: Synthetic oligonucleotide
gucucaagaaauuguggac

SEQ ID NO: 1199330 - RNA, 19 nt, Artificial Sequence
  Description of Artificial Sequence: Synthetic oligonucleotide
agauaaguccaugcucucg

SEQ ID NO: 1199331 - RNA, 19 nt, Artificial Sequence
  Description of Artificial Sequence: Synthetic oligonucleotide
agucucuuaguguugggau

SEQ ID NO: 1199332 - RNA, 19 nt, Artificial Sequence
  Description of Artificial Sequence: Synthetic oligonucleotide
auuccuaacaaugcuucug

SEQ ID NO: 1199333 - RNA, 19 nt, Artificial Sequence
  Description of Artificial Sequence: Synthetic oligonucleotide
caguguagaauuuaugcaa

SEQ ID NO: 1199334 - RNA, 19 nt, Artificial Sequence
  Description of Artificial Sequence: Synthetic oligonucleotide
ccucagaacagacaguagg

SEQ ID NO: 1199335 - RNA, 19 nt, Artificial Sequence
  Description of Artificial Sequence: Synthetic oligonucleotide
uagaaaucgugugaauaga

SEQ ID NO: 1199336 - RNA, 19 nt, Artificial Sequence
  Description of Artificial Sequence: Synthetic oligonucleotide
uuggcaaaucacacccaag

SEQ ID NO: 1199337 - RNA, 19 nt, Artificial Sequence
  Description of Artificial Sequence: Synthetic oligonucleotide
uagguaaccacagguguug

SEQ ID NO: 1199338 - RNA, 19 nt, Artificial Sequence
  Description of Artificial Sequence: Synthetic oligonucleotide
auaugaauacaaucuccaa

SEQ ID NO: 1199339 - RNA, 19 nt, Artificial Sequence
  Description of Artificial Sequence: Synthetic oligonucleotide
agaaaggauaaaaccacca

SEQ ID NO: 1199340 - RNA, 19 nt, Artificial Sequence
  Description of Artificial Sequence: Synthetic oligonucleotide
uaaacgacuaaagcuuuuc

SEQ ID NO: 1199341 - RNA, 19 nt, Artificial Sequence
  Description of Artificial Sequence: Synthetic oligonucleotide
aagcagguuauuaaacuau

SEQ ID NO: 1199342 - RNA, 19 nt, Artificial Sequence
  Description of Artificial Sequence: Synthetic oligonucleotide
gcuaagaagggacucaaca

SEQ ID NO: 1199343 - RNA, 19 nt, Artificial Sequence
  Description of Artificial Sequence: Synthetic oligonucleotide
cuucuaaccagguugucaa

SEQ ID NO: 1199344 - RNA, 19 nt, Artificial Sequence
  Description of Artificial Sequence: Synthetic oligonucleotide
acuacacaaacugauuuaa

SEQ ID NO: 1199345 - RNA, 19 nt, Artificial Sequence
  Description of Artificial Sequence: Synthetic oligonucleotide
ugaccauauuggaauugga

SEQ ID NO: 1199346 - RNA, 19 nt, Artificial Sequence
  Description of Artificial Sequence: Synthetic oligonucleotide
gagugcgugguuccacugg

SEQ ID NO: 1199347 - RNA, 19 nt, Artificial Sequence
  Description of Artificial Sequence: Synthetic oligonucleotide
ugcgugguuccacugggca

SEQ ID NO: 1199348 - RNA, 19 nt, Artificial Sequence
  Description of Artificial Sequence: Synthetic oligonucleotide
ggcuuaccauauuugaaag

SEQ ID NO: 1199349 - RNA, 19 nt, Artificial Sequence
  Description of Artificial Sequence: Synthetic oligonucleotide
caaauccuucugugaagcg

SEQ ID NO: 1199350 - RNA, 19 nt, Artificial Sequence
  Description of Artificial Sequence: Synthetic oligonucleotide
ucaugucucagcugagcac

SEQ ID NO: 1199351 - RNA, 19 nt, Artificial Sequence
  Description of Artificial Sequence: Synthetic oligonucleotide
accauuuauucaaagguau

SEQ ID NO: 1199352 - RNA, 19 nt, Artificial Sequence
  Description of Artificial Sequence: Synthetic oligonucleotide
cugcuguccgccuugguug

SEQ ID NO: 1199353 - RNA, 19 nt, Artificial Sequence
  Description of Artificial Sequence: Synthetic oligonucleotide
cuccuagauucuaagucac

SEQ ID NO: 1199354 - RNA, 19 nt, Artificial Sequence
  Description of Artificial Sequence: Synthetic oligonucleotide
ccuugugauagaacgaaag

SEQ ID NO: 1199355 - RNA, 19 nt, Artificial Sequence
  Description of Artificial Sequence: Synthetic oligonucleotide
uccaagcaauuccuaacaa

SEQ ID NO: 1199356 - RNA, 19 nt, Artificial Sequence
  Description of Artificial Sequence: Synthetic oligonucleotide
uuacccaacaguacucauu

SEQ ID NO: 1199357 - RNA, 19 nt, Artificial Sequence
  Description of Artificial Sequence: Synthetic oligonucleotide
uaaaguggcauggcaugcc

SEQ ID NO: 1199358 - RNA, 19 nt, Artificial Sequence
  Description of Artificial Sequence: Synthetic oligonucleotide
aguaggcuuaccauauuug

SEQ ID NO: 1199359 - RNA, 19 nt, Artificial Sequence
  Description of Artificial Sequence: Synthetic oligonucleotide
uuaauacaauucagcucgu

SEQ ID NO: 1199360 - RNA, 19 nt, Artificial Sequence
  Description of Artificial Sequence: Synthetic oligonucleotide
aauugaccuagaaaucaaa

SEQ ID NO: 1199361 - RNA, 19 nt, Artificial Sequence
  Description of Artificial Sequence: Synthetic oligonucleotide
aauuguggacaaauagcaa

SEQ ID NO: 1199362 - RNA, 19 nt, Artificial Sequence
  Description of Artificial Sequence: Synthetic oligonucleotide
gcagcuagccgcuaagaag

SEQ ID NO: 1199363 - RNA, 19 nt, Artificial Sequence
  Description of Artificial Sequence: Synthetic oligonucleotide
agacaguaggcuuaccaua

SEQ ID NO: 1199364 - RNA, 19 nt, Artificial Sequence
  Description of Artificial Sequence: Synthetic oligonucleotide
aagcggucucaagaaauug

SEQ ID NO: 1199365 - RNA, 19 nt, Artificial Sequence
  Description of Artificial Sequence: Synthetic oligonucleotide
aguacucauuaaggcaaac

SEQ ID NO: 1199366 - RNA, 19 nt, Artificial Sequence
  Description of Artificial Sequence: Synthetic oligonucleotide
ugguugaaugugucucucc

SEQ ID NO: 1199367 - RNA, 19 nt, Artificial Sequence
  Description of Artificial Sequence: Synthetic oligonucleotide
agguauacaagaaucugaa

SEQ ID NO: 1199368 - RNA, 19 nt, Artificial Sequence
  Description of Artificial Sequence: Synthetic oligonucleotide
agaugaacaugcucauuaa

SEQ ID NO: 1199369 - RNA, 19 nt, Artificial Sequence
  Description of Artificial Sequence: Synthetic oligonucleotide
auuagacuucaagcuuggc

SEQ ID NO: 1199370 - RNA, 19 nt, Artificial Sequence
  Description of Artificial Sequence: Synthetic oligonucleotide
guccaagcaauuccuaaca

SEQ ID NO: 1199371 - RNA, 19 nt, Artificial Sequence
  Description of Artificial Sequence: Synthetic oligonucleotide
cuguaauaugaccuuguga

SEQ ID NO: 1199372 - RNA, 19 nt, Artificial Sequence
  Description of Artificial Sequence: Synthetic oligonucleotide
accaccacagugaguaaac

SEQ ID NO: 1199373 - RNA, 19 nt, Artificial Sequence
  Description of Artificial Sequence: Synthetic oligonucleotide
auagcaaacuuucggcauu

SEQ ID NO: 1199374 - RNA, 19 nt, Artificial Sequence
  Description of Artificial Sequence: Synthetic oligonucleotide
caauucagcucguaguuaa

SEQ ID NO: 1199375 - RNA, 19 nt, Artificial Sequence
  Description of Artificial Sequence: Synthetic oligonucleotide
uucuaaccagguugucaag

SEQ ID NO: 1199376 - RNA, 19 nt, Artificial Sequence
  Description of Artificial Sequence: Synthetic oligonucleotide
cuucuguagcuucaagcuc

SEQ ID NO: 1199377 - RNA, 19 nt, Artificial Sequence
  Description of Artificial Sequence: Synthetic oligonucleotide
aagaccccuucuuggauuu

SEQ ID NO: 1199378 - RNA, 19 nt, Artificial Sequence
  Description of Artificial Sequence: Synthetic oligonucleotide
agauuauagauagguugca

SEQ ID NO: 1199379 - RNA, 19 nt, Artificial Sequence
  Description of Artificial Sequence: Synthetic oligonucleotide
gaguaaacgacuaaagcuu

SEQ ID NO: 1199380 - RNA, 19 nt, Artificial Sequence
  Description of Artificial Sequence: Synthetic oligonucleotide
aucgugugaauagaaggga

SEQ ID NO: 1199381 - RNA, 19 nt, Artificial Sequence
  Description of Artificial Sequence: Synthetic oligonucleotide
cuuuauauccuugaaaauu

SEQ ID NO: 1199382 - RNA, 19 nt, Artificial Sequence
  Description of Artificial Sequence: Synthetic oligonucleotide
guaaccacagguguuggga

SEQ ID NO: 1199383 - RNA, 19 nt, Artificial Sequence
  Description of Artificial Sequence: Synthetic oligonucleotide
ugugucucuccuuguaaua

SEQ ID NO: 1199384 - RNA, 19 nt, Artificial Sequence
  Description of Artificial Sequence: Synthetic oligonucleotide
aaacaggcuaacacauaca

SEQ ID NO: 1199385 - RNA, 19 nt, Artificial Sequence
  Description of Artificial Sequence: Synthetic oligonucleotide
ccaauuuuaaugccauuug

SEQ ID NO: 1199386 - RNA, 19 nt, Artificial Sequence
  Description of Artificial Sequence: Synthetic oligonucleotide
gaccauauuggaauuggaa

SEQ ID NO: 1199387 - RNA, 19 nt, Artificial Sequence
  Description of Artificial Sequence: Synthetic oligonucleotide
cagcucguaguuaagggca

SEQ ID NO: 1199388 - RNA, 19 nt, Artificial Sequence
  Description of Artificial Sequence: Synthetic oligonucleotide
uaacacauacacagccuuu

SEQ ID NO: 1199389 - RNA, 19 nt, Artificial Sequence
  Description of Artificial Sequence: Synthetic oligonucleotide
auauccccucagaacagac

SEQ ID NO: 1199390 - RNA, 19 nt, Artificial Sequence
  Description of Artificial Sequence: Synthetic oligonucleotide
ugucucuccuuguaauauc

SEQ ID NO: 1199391 - RNA, 19 nt, Artificial Sequence
  Description of Artificial Sequence: Synthetic oligonucleotide
cuucaagcuuggcaaauca

SEQ ID NO: 1199392 - RNA, 19 nt, Artificial Sequence
  Description of Artificial Sequence: Synthetic oligonucleotide
uccuagauucuaagucacu

SEQ ID NO: 1199393 - RNA, 19 nt, Artificial Sequence
  Description of Artificial Sequence: Synthetic oligonucleotide
aguguagaauuuaugcaaa

SEQ ID NO: 1199394 - RNA, 19 nt, Artificial Sequence
  Description of Artificial Sequence: Synthetic oligonucleotide
uuuacccaacaguacucau

SEQ ID NO: 1199395 - RNA, 19 nt, Artificial Sequence
  Description of Artificial Sequence: Synthetic oligonucleotide
augacuuuguaguguuuaa

SEQ ID NO: 1199396 - RNA, 19 nt, Artificial Sequence
  Description of Artificial Sequence: Synthetic oligonucleotide
auacaagaaucugaaggau

SEQ ID NO: 1199397 - RNA, 19 nt, Artificial Sequence
  Description of Artificial Sequence: Synthetic oligonucleotide
aaaucacacccaagcaggu

SEQ ID NO: 1199398 - RNA, 19 nt, Artificial Sequence
  Description of Artificial Sequence: Synthetic oligonucleotide
caaacuguccugcaugaaa

SEQ ID NO: 1199399 - RNA, 19 nt, Artificial Sequence
  Description of Artificial Sequence: Synthetic oligonucleotide
aucaaggcugacaaacugu

SEQ ID NO: 1199400 - RNA, 19 nt, Artificial Sequence
  Description of Artificial Sequence: Synthetic oligonucleotide
caagcuccggacaguguag

SEQ ID NO: 1199401 - RNA, 19 nt, Artificial Sequence
  Description of Artificial Sequence: Synthetic oligonucleotide
cuccuuguaauaucauaca

SEQ ID NO: 1199402 - RNA, 19 nt, Artificial Sequence
  Description of Artificial Sequence: Synthetic oligonucleotide
caagcagguuauuaaacua

SEQ ID NO: 1199403 - RNA, 19 nt, Artificial Sequence
  Description of Artificial Sequence: Synthetic oligonucleotide
agaaaucgugugaauagaa

SEQ ID NO: 1199404 - RNA, 19 nt, Artificial Sequence
  Description of Artificial Sequence: Synthetic oligonucleotide
ugacuuuguaguguuuaau

SEQ ID NO: 1199405 - RNA, 19 nt, Artificial Sequence
  Description of Artificial Sequence: Synthetic oligonucleotide
cuuuaguaauacacaagcu

SEQ ID NO: 1199406 - RNA, 19 nt, Artificial Sequence
  Description of Artificial Sequence: Synthetic oligonucleotide
ugggcagcuagccgcuaag

SEQ ID NO: 1199407 - RNA, 19 nt, Artificial Sequence
  Description of Artificial Sequence: Synthetic oligonucleotide
gcauuagacuucaagcuug

SEQ ID NO: 1199408 - RNA, 19 nt, Artificial Sequence
  Description of Artificial Sequence: Synthetic oligonucleotide
uuguaguguuuaauacaau

SEQ ID NO: 1199409 - RNA, 19 nt, Artificial Sequence
  Description of Artificial Sequence: Synthetic oligonucleotide
gggauuucugcuuccgccc

SEQ ID NO: 1199410 - RNA, 19 nt, Artificial Sequence
  Description of Artificial Sequence: Synthetic oligonucleotide
ucguaguuaagggcacaag

SEQ ID NO: 1199411 - RNA, 19 nt, Artificial Sequence
  Description of Artificial Sequence: Synthetic oligonucleotide
gggaaaccuaacuacacaa

SEQ ID NO: 1199412 - RNA, 19 nt, Artificial Sequence
  Description of Artificial Sequence: Synthetic oligonucleotide
gaccuugugauagaacgaa

SEQ ID NO: 1199413 - RNA, 19 nt, Artificial Sequence
  Description of Artificial Sequence: Synthetic oligonucleotide
agugacaagaaaagaugaa

SEQ ID NO: 1199414 - RNA, 19 nt, Artificial Sequence
  Description of Artificial Sequence: Synthetic oligonucleotide
uucuuggacuagugacaag

SEQ ID NO: 1199415 - RNA, 19 nt, Artificial Sequence
  Description of Artificial Sequence: Synthetic oligonucleotide
ugcguugcauugguagcag

SEQ ID NO: 1199416 - RNA, 19 nt, Artificial Sequence
  Description of Artificial Sequence: Synthetic oligonucleotide
gcgugcguugcauugguag

SEQ ID NO: 1199417 - RNA, 19 nt, Artificial Sequence
  Description of Artificial Sequence: Synthetic oligonucleotide
uagauagguugcacugaaa

SEQ ID NO: 1199418 - RNA, 19 nt, Artificial Sequence
  Description of Artificial Sequence: Synthetic oligonucleotide
aguaauacacaagcuuauu

SEQ ID NO: 1199419 - RNA, 19 nt, Artificial Sequence
  Description of Artificial Sequence: Synthetic oligonucleotide
guaauaugaccuugugaua

SEQ ID NO: 1199420 - RNA, 19 nt, Artificial Sequence
  Description of Artificial Sequence: Synthetic oligonucleotide
uagccgcuaagaagggacu

SEQ ID NO: 1199421 - RNA, 19 nt, Artificial Sequence
  Description of Artificial Sequence: Synthetic oligonucleotide
gacaguccuauaauauuaa

SEQ ID NO: 1199422 - RNA, 19 nt, Artificial Sequence
  Description of Artificial Sequence: Synthetic oligonucleotide
auacucaccaugacuuugu

SEQ ID NO: 1199423 - RNA, 19 nt, Artificial Sequence
  Description of Artificial Sequence: Synthetic oligonucleotide
aguaaacgacuaaagcuuu

SEQ ID NO: 1199424 - RNA, 19 nt, Artificial Sequence
  Description of Artificial Sequence: Synthetic oligonucleotide
gaacaugcucauuaacgau

SEQ ID NO: 1199425 - RNA, 19 nt, Artificial Sequence
  Description of Artificial Sequence: Synthetic oligonucleotide
ucacacccaagcagguuau

SEQ ID NO: 1199426 - RNA, 19 nt, Artificial Sequence
  Description of Artificial Sequence: Synthetic oligonucleotide
gaacagacaguaggcuuac

SEQ ID NO: 1199427 - RNA, 19 nt, Artificial Sequence
  Description of Artificial Sequence: Synthetic oligonucleotide
caccucuguaauaugaccu

SEQ ID NO: 1199428 - RNA, 19 nt, Artificial Sequence
  Description of Artificial Sequence: Synthetic oligonucleotide
ucucgugcaaaagcuucac

SEQ ID NO: 1199429 - RNA, 19 nt, Artificial Sequence
  Description of Artificial Sequence: Synthetic oligonucleotide
agcggucucaagaaauugu

SEQ ID NO: 1199430 - RNA, 19 nt, Artificial Sequence
  Description of Artificial Sequence: Synthetic oligonucleotide
gucaguguccaagcaauuc

SEQ ID NO: 1199431 - RNA, 19 nt, Artificial Sequence
  Description of Artificial Sequence: Synthetic oligonucleotide
auugugucuaagggaagau

SEQ ID NO: 1199432 - RNA, 19 nt, Artificial Sequence
  Description of Artificial Sequence: Synthetic oligonucleotide
agacuucaagcuuggcaaa

SEQ ID NO: 1199433 - RNA, 19 nt, Artificial Sequence
  Description of Artificial Sequence: Synthetic oligonucleotide
agcucguaguuaagggcac

SEQ ID NO: 1199434 - RNA, 19 nt, Artificial Sequence
  Description of Artificial Sequence: Synthetic oligonucleotide
cacagugaguaaacgacua

SEQ ID NO: 1199435 - RNA, 19 nt, Artificial Sequence
  Description of Artificial Sequence: Synthetic oligonucleotide
ggcauuaaaacaggcuaac

SEQ ID NO: 1199436 - RNA, 19 nt, Artificial Sequence
  Description of Artificial Sequence: Synthetic oligonucleotide
accuaacuacacaaacuga

SEQ ID NO: 1199437 - RNA, 19 nt, Artificial Sequence
  Description of Artificial Sequence: Synthetic oligonucleotide
agccgcuaagaagggacuc

SEQ ID NO: 1199438 - RNA, 19 nt, Artificial Sequence
  Description of Artificial Sequence: Synthetic oligonucleotide
aaucacacccaagcagguu

SEQ ID NO: 1199439 - RNA, 19 nt, Artificial Sequence
  Description of Artificial Sequence: Synthetic oligonucleotide
uugugucuaagggaagauu

SEQ ID NO: 1199440 - RNA, 19 nt, Artificial Sequence
  Description of Artificial Sequence: Synthetic oligonucleotide
guuucaugucucagcugag

SEQ ID NO: 1199441 - RNA, 19 nt, Artificial Sequence
  Description of Artificial Sequence: Synthetic oligonucleotide
aagcuccggacaguguaga

SEQ ID NO: 1199442 - RNA, 19 nt, Artificial Sequence
  Description of Artificial Sequence: Synthetic oligonucleotide
cacccaagcagguuauuaa

SEQ ID NO: 1199443 - RNA, 19 nt, Artificial Sequence
  Description of Artificial Sequence: Synthetic oligonucleotide
cucucgugcaaaagcuuca

SEQ ID NO: 1199444 - RNA, 19 nt, Artificial Sequence
  Description of Artificial Sequence: Synthetic oligonucleotide
caucuucuaaccagguugu

SEQ ID NO: 1199445 - RNA, 19 nt, Artificial Sequence
  Description of Artificial Sequence: Synthetic oligonucleotide
cuccugugacauaaagcca

SEQ ID NO: 1199446 - RNA, 19 nt, Artificial Sequence
  Description of Artificial Sequence: Synthetic oligonucleotide
gguguugggaaaccuaacu

SEQ ID NO: 1199447 - RNA, 19 nt, Artificial Sequence
  Description of Artificial Sequence: Synthetic oligonucleotide
gacaguaggcuuaccauau

SEQ ID NO: 1199448 - RNA, 19 nt, Artificial Sequence
  Description of Artificial Sequence: Synthetic oligonucleotide
cagugaguaaacgacuaaa

SEQ ID NO: 1199449 - RNA, 19 nt, Artificial Sequence
  Description of Artificial Sequence: Synthetic oligonucleotide
aucuucuaaccagguuguc

SEQ ID NO: 1199450 - RNA, 19 nt, Artificial Sequence
  Description of Artificial Sequence: Synthetic oligonucleotide
uccccucagaacagacagu

SEQ ID NO: 1199451 - RNA, 19 nt, Artificial Sequence
  Description of Artificial Sequence: Synthetic oligonucleotide
gcuuaccauauuugaaaga

SEQ ID NO: 1199452 - RNA, 19 nt, Artificial Sequence
  Description of Artificial Sequence: Synthetic oligonucleotide
uacucacucuuggagucuc

SEQ ID NO: 1199453 - RNA, 19 nt, Artificial Sequence
  Description of Artificial Sequence: Synthetic oligonucleotide
gaauagaagggaacauuau

SEQ ID NO: 1199454 - RNA, 19 nt, Artificial Sequence
  Description of Artificial Sequence: Synthetic oligonucleotide
agcagguuauuaaacuaua

SEQ ID NO: 1199455 - RNA, 19 nt, Artificial Sequence
  Description of Artificial Sequence: Synthetic oligonucleotide
acaauucagcucguaguua

SEQ ID NO: 1199456 - RNA, 19 nt, Artificial Sequence
  Description of Artificial Sequence: Synthetic oligonucleotide
aaguggcauggcaugcccu

SEQ ID NO: 1199457 - RNA, 19 nt, Artificial Sequence
  Description of Artificial Sequence: Synthetic oligonucleotide
cgugugaauagaagggaac

SEQ ID NO: 1199458 - RNA, 19 nt, Artificial Sequence
  Description of Artificial Sequence: Synthetic oligonucleotide
agguugcacugaaagaaaa

SEQ ID NO: 1199459 - RNA, 19 nt, Artificial Sequence
  Description of Artificial Sequence: Synthetic oligonucleotide
cguaguuaagggcacaaga

SEQ ID NO: 1199460 - RNA, 19 nt, Artificial Sequence
  Description of Artificial Sequence: Synthetic oligonucleotide
uugguugccugcgugcguu

SEQ ID NO: 1199461 - RNA, 19 nt, Artificial Sequence
  Description of Artificial Sequence: Synthetic oligonucleotide
gcggucucaagaaauugug

SEQ ID NO: 1199462 - RNA, 19 nt, Artificial Sequence
  Description of Artificial Sequence: Synthetic oligonucleotide
acacccaagcagguuauua

SEQ ID NO: 1199463 - RNA, 19 nt, Artificial Sequence
  Description of Artificial Sequence: Synthetic oligonucleotide
uccggacaguguagaauuu

SEQ ID NO: 1199464 - RNA, 19 nt, Artificial Sequence
  Description of Artificial Sequence: Synthetic oligonucleotide
gugcguugcauugguagca

SEQ ID NO: 1199465 - RNA, 19 nt, Artificial Sequence
  Description of Artificial Sequence: Synthetic oligonucleotide
gcaugcccucuccaugugg

SEQ ID NO: 1199466 - RNA, 19 nt, Artificial Sequence
  Description of Artificial Sequence: Synthetic oligonucleotide
caacauuggaagcagucuu

SEQ ID NO: 1199467 - RNA, 19 nt, Artificial Sequence
  Description of Artificial Sequence: Synthetic oligonucleotide
cggucucaagaaauugugg

SEQ ID NO: 1199468 - RNA, 19 nt, Artificial Sequence
  Description of Artificial Sequence: Synthetic oligonucleotide
acuguacaucaaggcugac

SEQ ID NO: 1199469 - RNA, 19 nt, Artificial Sequence
  Description of Artificial Sequence: Synthetic oligonucleotide
acaguaggcuuaccauauu

SEQ ID NO: 1199470 - RNA, 19 nt, Artificial Sequence
  Description of Artificial Sequence: Synthetic oligonucleotide
gugaagcggucucaagaaa

SEQ ID NO: 1199471 - RNA, 19 nt, Artificial Sequence
  Description of Artificial Sequence: Synthetic oligonucleotide
gggaagauuaaaguggcau

SEQ ID NO: 1199472 - RNA, 19 nt, Artificial Sequence
  Description of Artificial Sequence: Synthetic oligonucleotide
acagguguugggaaaccua

SEQ ID NO: 1199473 - RNA, 19 nt, Artificial Sequence
  Description of Artificial Sequence: Synthetic oligonucleotide
gugguugaaugugucucuc

SEQ ID NO: 1199474 - RNA, 19 nt, Artificial Sequence
  Description of Artificial Sequence: Synthetic oligonucleotide
cuccggacaguguagaauu

SEQ ID NO: 1199475 - RNA, 19 nt, Artificial Sequence
  Description of Artificial Sequence: Synthetic oligonucleotide
gcauuaaaacaggcuaaca

SEQ ID NO: 1199476 - RNA, 19 nt, Artificial Sequence
  Description of Artificial Sequence: Synthetic oligonucleotide
cagaacagacaguaggcuu

SEQ ID NO: 1199477 - RNA, 19 nt, Artificial Sequence
  Description of Artificial Sequence: Synthetic oligonucleotide
cagaaguuuccaugaagau

SEQ ID NO: 1199478 - RNA, 19 nt, Artificial Sequence
  Description of Artificial Sequence: Synthetic oligonucleotide
ugguugccugcgugcguug

SEQ ID NO: 1199479 - RNA, 19 nt, Artificial Sequence
  Description of Artificial Sequence: Synthetic oligonucleotide
guuccacugggcagcuagc

SEQ ID NO: 1199480 - RNA, 19 nt, Artificial Sequence
  Description of Artificial Sequence: Synthetic oligonucleotide
agcuccggacaguguagaa

SEQ ID NO: 1199481 - RNA, 19 nt, Artificial Sequence
  Description of Artificial Sequence: Synthetic oligonucleotide
gccugcgugcguugcauug

SEQ ID NO: 1199482 - RNA, 19 nt, Artificial Sequence
  Description of Artificial Sequence: Synthetic oligonucleotide
agguugucaagugguugaa

SEQ ID NO: 1199483 - RNA, 19 nt, Artificial Sequence
  Description of Artificial Sequence: Synthetic oligonucleotide
uugccugcgugcguugcau

SEQ ID NO: 1199484 - RNA, 19 nt, Artificial Sequence
  Description of Artificial Sequence: Synthetic oligonucleotide
ggcagcuagccgcuaagaa

SEQ ID NO: 1199485 - RNA, 19 nt, Artificial Sequence
  Description of Artificial Sequence: Synthetic oligonucleotide
guugaaugugucucuccuu

SEQ ID NO: 1199486 - RNA, 19 nt, Artificial Sequence
  Description of Artificial Sequence: Synthetic oligonucleotide
gaagcggucucaagaaauu

SEQ ID NO: 1199487 - RNA, 19 nt, Artificial Sequence
  Description of Artificial Sequence: Synthetic oligonucleotide
agcugagcacgaggaagga

SEQ ID NO: 1199488 - RNA, 19 nt, Artificial Sequence
  Description of Artificial Sequence: Synthetic oligonucleotide
ugcgugcguugcauuggua

SEQ ID NO: 1199489 - RNA, 19 nt, Artificial Sequence
  Description of Artificial Sequence: Synthetic oligonucleotide
caguaggcuuaccauauuu

SEQ ID NO: 1199490 - RNA, 19 nt, Artificial Sequence
  Description of Artificial Sequence: Synthetic oligonucleotide
gugucucuccuuguaauau

SEQ ID NO: 1199491 - RNA, 19 nt, Artificial Sequence
  Description of Artificial Sequence: Synthetic oligonucleotide
ccaucugguagauuuauuu

SEQ ID NO: 1199492 - RNA, 19 nt, Artificial Sequence
  Description of Artificial Sequence: Synthetic oligonucleotide
cuguagcuucaagcuccgg

SEQ ID NO: 1199493 - RNA, 19 nt, Artificial Sequence
  Description of Artificial Sequence: Synthetic oligonucleotide
cauggcaugcccucuccau

SEQ ID NO: 1199494 - RNA, 19 nt, Artificial Sequence
  Description of Artificial Sequence: Synthetic oligonucleotide
cugguagauuuauuuucau

SEQ ID NO: 1199495 - RNA, 19 nt, Artificial Sequence
  Description of Artificial Sequence: Synthetic oligonucleotide
uuccgcccuucccacccau

SEQ ID NO: 1199496 - RNA, 19 nt, Artificial Sequence
  Description of Artificial Sequence: Synthetic oligonucleotide
ccugcgugcguugcauugg

SEQ ID NO: 1199497 - RNA, 19 nt, Artificial Sequence
  Description of Artificial Sequence: Synthetic oligonucleotide
caaagaccccuucuuggau

SEQ ID NO: 1199498 - RNA, 19 nt, Artificial Sequence
  Description of Artificial Sequence: Synthetic oligonucleotide
ggaccaauuuuaaugccau

SEQ ID NO: 1199499 - RNA, 19 nt, Artificial Sequence
  Description of Artificial Sequence: Synthetic oligonucleotide
accagguugucaagugguu

SEQ ID NO: 1199500 - RNA, 19 nt, Artificial Sequence
  Description of Artificial Sequence: Synthetic oligonucleotide
gcucauuaacgaugucaaa

SEQ ID NO: 1199501 - RNA, 19 nt, Artificial Sequence
  Description of Artificial Sequence: Synthetic oligonucleotide
gcguugcauugguagcagc

SEQ ID NO: 1199502 - RNA, 19 nt, Artificial Sequence
  Description of Artificial Sequence: Synthetic oligonucleotide
agcaaacuuucggcauuaa

SEQ ID NO: 1199503 - RNA, 19 nt, Artificial Sequence
  Description of Artificial Sequence: Synthetic oligonucleotide
gugcgugguuccacugggc

SEQ ID NO: 1199504 - RNA, 19 nt, Artificial Sequence
  Description of Artificial Sequence: Synthetic oligonucleotide
caaacuguaugaggacagu

SEQ ID NO: 1199505 - RNA, 19 nt, Artificial Sequence
  Description of Artificial Sequence: Synthetic oligonucleotide
caaaugcauuagacuucaa

SEQ ID NO: 1199506 - RNA, 19 nt, Artificial Sequence
  Description of Artificial Sequence: Synthetic oligonucleotide
agcgugcugaggaccaauu

SEQ ID NO: 1199507 - RNA, 19 nt, Artificial Sequence
  Description of Artificial Sequence: Synthetic oligonucleotide
ggauuucugcuuccgcccu

SEQ ID NO: 1199508 - RNA, 19 nt, Artificial Sequence
  Description of Artificial Sequence: Synthetic oligonucleotide
ggcaugcccucuccaugug

SEQ ID NO: 1199509 - RNA, 19 nt, Artificial Sequence
  Description of Artificial Sequence: Synthetic oligonucleotide
ccaagcaauuccuaacaau

SEQ ID NO: 1199510 - RNA, 19 nt, Artificial Sequence
  Description of Artificial Sequence: Synthetic oligonucleotide
guaaacgacuaaagcuuuu

SEQ ID NO: 1199511 - RNA, 19 nt, Artificial Sequence
  Description of Artificial Sequence: Synthetic oligonucleotide
ggaaugcugacgggcaucu

SEQ ID NO: 1199512 - RNA, 19 nt, Artificial Sequence
  Description of Artificial Sequence: Synthetic oligonucleotide
gccgcuaagaagggacuca

SEQ ID NO: 1199513 - RNA, 19 nt, Artificial Sequence
  Description of Artificial Sequence: Synthetic oligonucleotide
gcagguuauuaaacuauau

SEQ ID NO: 1199514 - RNA, 19 nt, Artificial Sequence
  Description of Artificial Sequence: Synthetic oligonucleotide
guacucacucuuggagucu

SEQ ID NO: 1199515 - RNA, 19 nt, Artificial Sequence
  Description of Artificial Sequence: Synthetic oligonucleotide
ccuagauucuaagucacuu

SEQ ID NO: 1199516 - RNA, 19 nt, Artificial Sequence
  Description of Artificial Sequence: Synthetic oligonucleotide
cuugguugccugcgugcgu

SEQ ID NO: 1199517 - RNA, 19 nt, Artificial Sequence
  Description of Artificial Sequence: Synthetic oligonucleotide
cgacuaaagcuuuucuacu

SEQ ID NO: 1199518 - RNA, 19 nt, Artificial Sequence
  Description of Artificial Sequence: Synthetic oligonucleotide
cgcuaagaagggacucaac

SEQ ID NO: 1199519 - RNA, 19 nt, Artificial Sequence
  Description of Artificial Sequence: Synthetic oligonucleotide
gcuagccgcuaagaaggga

SEQ ID NO: 1199520 - RNA, 19 nt, Artificial Sequence
  Description of Artificial Sequence: Synthetic oligonucleotide
cugcgugcguugcauuggu

SEQ ID NO: 1199521 - RNA, 19 nt, Artificial Sequence
  Description of Artificial Sequence: Synthetic oligonucleotide
cuuccgcccuucccaccca

SEQ ID NO: 1199522 - RNA, 19 nt, Artificial Sequence
  Description of Artificial Sequence: Synthetic oligonucleotide
gcucguaguuaagggcaca

SEQ ID NO: 1199523 - RNA, 19 nt, Artificial Sequence
  Description of Artificial Sequence: Synthetic oligonucleotide
guggcauggcaugcccucu

SEQ ID NO: 1199524 - RNA, 19 nt, Artificial Sequence
  Description of Artificial Sequence: Synthetic oligonucleotide
gcuccggacaguguagaau

SEQ ID NO: 1199525 - RNA, 19 nt, Artificial Sequence
  Description of Artificial Sequence: Synthetic oligonucleotide
gguugucaagugguugaau

SEQ ID NO: 1199526 - RNA, 19 nt, Artificial Sequence
  Description of Artificial Sequence: Synthetic oligonucleotide
agaccccuucuuggauuuu

SEQ ID NO: 1199527 - RNA, 19 nt, Artificial Sequence
  Description of Artificial Sequence: Synthetic oligonucleotide
ugguuccacugggcagcua

SEQ ID NO: 1199528 - RNA, 19 nt, Artificial Sequence
  Description of Artificial Sequence: Synthetic oligonucleotide
cggacaguguagaauuuau

SEQ ID NO: 1199529 - RNA, 19 nt, Artificial Sequence
  Description of Artificial Sequence: Synthetic oligonucleotide
ccggacaguguagaauuua

SEQ ID NO: 1199530 - RNA, 19 nt, Artificial Sequence
  Description of Artificial Sequence: Synthetic oligonucleotide
ccgcuaagaagggacucaa

SEQ ID NO: 1199531 - RNA, 19 nt, Artificial Sequence
  Description of Artificial Sequence: Synthetic oligonucleotide
gcuguccgccuugguugcc

SEQ ID NO: 1199532 - RNA, 19 nt, Artificial Sequence
  Description of Artificial Sequence: Synthetic oligonucleotide
cccgcugcaccucuguaau

SEQ ID NO: 1199533 - RNA, 19 nt, Artificial Sequence
  Description of Artificial Sequence: Synthetic oligonucleotide
gcgugcugaggaccaauuu

SEQ ID NO: 1199534 - RNA, 19 nt, Artificial Sequence
  Description of Artificial Sequence: Synthetic oligonucleotide
gcagcgugcugaggaccaa

SEQ ID NO: 1199535 - RNA, 19 nt, Artificial Sequence
  Description of Artificial Sequence: Synthetic oligonucleotide
cacacccaagcagguuauu

SEQ ID NO: 1199536 - RNA, 19 nt, Artificial Sequence
  Description of Artificial Sequence: Synthetic oligonucleotide
ccgccuugguugccugcgu

SEQ ID NO: 1199537 - RNA, 19 nt, Artificial Sequence
  Description of Artificial Sequence: Synthetic oligonucleotide
aagaucguaguucagcugc

SEQ ID NO: 1199538 - RNA, 19 nt, Artificial Sequence
  Description of Artificial Sequence: Synthetic oligonucleotide
guugaagucgaucaggugg

SEQ ID NO: 1199539 - RNA, 19 nt, Artificial Sequence
  Description of Artificial Sequence: Synthetic oligonucleotide
aggaacggaauguacaucc

SEQ ID NO: 1199540 - RNA, 19 nt, Artificial Sequence
  Description of Artificial Sequence: Synthetic oligonucleotide
uuuuccgaggacauuaagg

SEQ ID NO: 1199541 - RNA, 19 nt, Artificial Sequence
  Description of Artificial Sequence: Synthetic oligonucleotide
uuugaggaacucuacuucg

SEQ ID NO: 1199542 - RNA, 19 nt, Artificial Sequence
  Description of Artificial Sequence: Synthetic oligonucleotide
aaugguggucaccaucagc

SEQ ID NO: 1199543 - RNA, 19 nt, Artificial Sequence
  Description of Artificial Sequence: Synthetic oligonucleotide
aaugacggcgcccuccagc

SEQ ID NO: 1199544 - RNA, 19 nt, Artificial Sequence
  Description of Artificial Sequence: Synthetic oligonucleotide
gauguuaaggauccucagg

SEQ ID NO: 1199545 - RNA, 19 nt, Artificial Sequence
  Description of Artificial Sequence: Synthetic oligonucleotide
uuuccgaggacauuaagga

SEQ ID NO: 1199546 - RNA, 19 nt, Artificial Sequence
  Description of Artificial Sequence: Synthetic oligonucleotide
aguacgaguaggcuuugcc

SEQ ID NO: 1199547 - RNA, 19 nt, Artificial Sequence
  Description of Artificial Sequence: Synthetic oligonucleotide
cauuaaggaguacagcugg

SEQ ID NO: 1199548 - RNA, 19 nt, Artificial Sequence
  Description of Artificial Sequence: Synthetic oligonucleotide
uaauggguauucuugacga

SEQ ID NO: 1199549 - RNA, 19 nt, Artificial Sequence
  Description of Artificial Sequence: Synthetic oligonucleotide
aagucgaucagguggaagu

SEQ ID NO: 1199550 - RNA, 19 nt, Artificial Sequence
  Description of Artificial Sequence: Synthetic oligonucleotide
aagaaguggaaccggaagu

SEQ ID NO: 1199551 - RNA, 19 nt, Artificial Sequence
  Description of Artificial Sequence: Synthetic oligonucleotide
ugacgaaccagacaggcac

SEQ ID NO: 1199552 - RNA, 19 nt, Artificial Sequence
  Description of Artificial Sequence: Synthetic oligonucleotide
ugucuugcgaagaucguag

SEQ ID NO: 1199553 - RNA, 19 nt, Artificial Sequence
  Description of Artificial Sequence: Synthetic oligonucleotide
guaauggguauucuugacg

SEQ ID NO: 1199554 - RNA, 19 nt, Artificial Sequence
  Description of Artificial Sequence: Synthetic oligonucleotide
guuugucuugcgaagaucg

SEQ ID NO: 1199555 - RNA, 19 nt, Artificial Sequence
  Description of Artificial Sequence: Synthetic oligonucleotide
uccgaggacauuaaggagu

SEQ ID NO: 1199556 - RNA, 19 nt, Artificial Sequence
  Description of Artificial Sequence: Synthetic oligonucleotide
aguaauggguauucuugac

SEQ ID NO: 1199557 - RNA, 19 nt, Artificial Sequence
  Description of Artificial Sequence: Synthetic oligonucleotide
uaagauguccuguugggac

SEQ ID NO: 1199558 - RNA, 19 nt, Artificial Sequence
  Description of Artificial Sequence: Synthetic oligonucleotide
agcucaaacagaaugcugg

SEQ ID NO: 1199559 - RNA, 19 nt, Artificial Sequence
  Description of Artificial Sequence: Synthetic oligonucleotide
agcacguuggagcaaagag

SEQ ID NO: 1199560 - RNA, 19 nt, Artificial Sequence
  Description of Artificial Sequence: Synthetic oligonucleotide
ucuacuucguugcggauga

SEQ ID NO: 1199561 - RNA, 19 nt, Artificial Sequence
  Description of Artificial Sequence: Synthetic oligonucleotide
aacucuacuucguugcgga

SEQ ID NO: 1199562 - RNA, 19 nt, Artificial Sequence
  Description of Artificial Sequence: Synthetic oligonucleotide
uguagugcacgaacaaggc

SEQ ID NO: 1199563 - RNA, 19 nt, Artificial Sequence
  Description of Artificial Sequence: Synthetic oligonucleotide
gauuucgacaguaagaugu

SEQ ID NO: 1199564 - RNA, 19 nt, Artificial Sequence
  Description of Artificial Sequence: Synthetic oligonucleotide
agcugguagacaaugacgg

SEQ ID NO: 1199565 - RNA, 19 nt, Artificial Sequence
  Description of Artificial Sequence: Synthetic oligonucleotide
uguuaaggauccucagggg

SEQ ID NO: 1199566 - RNA, 19 nt, Artificial Sequence
  Description of Artificial Sequence: Synthetic oligonucleotide
uugauguagugcacgaaca

SEQ ID NO: 1199567 - RNA, 19 nt, Artificial Sequence
  Description of Artificial Sequence: Synthetic oligonucleotide
uggguauucuugacgaacc

SEQ ID NO: 1199568 - RNA, 19 nt, Artificial Sequence
  Description of Artificial Sequence: Synthetic oligonucleotide
acuucguugcggaugaggc

SEQ ID NO: 1199569 - RNA, 19 nt, Artificial Sequence
  Description of Artificial Sequence: Synthetic oligonucleotide
aaggcauaguaguugcuga

SEQ ID NO: 1199570 - RNA, 19 nt, Artificial Sequence
  Description of Artificial Sequence: Synthetic oligonucleotide
uucgagaacgaacacuggu

SEQ ID NO: 1199571 - RNA, 19 nt, Artificial Sequence
  Description of Artificial Sequence: Synthetic oligonucleotide
uagugcacgaacaaggcua

SEQ ID NO: 1199572 - RNA, 19 nt, Artificial Sequence
  Description of Artificial Sequence: Synthetic oligonucleotide
ucccaaacggauagcagag

SEQ ID NO: 1199573 - RNA, 19 nt, Artificial Sequence
  Description of Artificial Sequence: Synthetic oligonucleotide
uacgaguaggcuuugccca

SEQ ID NO: 1199574 - RNA, 19 nt, Artificial Sequence
  Description of Artificial Sequence: Synthetic oligonucleotide
aaggaguacagcugguaga

SEQ ID NO: 1199575 - RNA, 19 nt, Artificial Sequence
  Description of Artificial Sequence: Synthetic oligonucleotide
uauucuugacgaaccagac

SEQ ID NO: 1199576 - RNA, 19 nt, Artificial Sequence
  Description of Artificial Sequence: Synthetic oligonucleotide
aagugggagacgucagagg

SEQ ID NO: 1199577 - RNA, 19 nt, Artificial Sequence
  Description of Artificial Sequence: Synthetic oligonucleotide
gauggacccaaugaagcgg

SEQ ID NO: 1199578 - RNA, 19 nt, Artificial Sequence
  Description of Artificial Sequence: Synthetic oligonucleotide
acgauggacccaaugaagc

SEQ ID NO: 1199579 - RNA, 19 nt, Artificial Sequence
  Description of Artificial Sequence: Synthetic oligonucleotide
uucgacaguaagauguccu

SEQ ID NO: 1199580 - RNA, 19 nt, Artificial Sequence
  Description of Artificial Sequence: Synthetic oligonucleotide
acgaacaaggcuaugagcu

SEQ ID NO: 1199581 - RNA, 19 nt, Artificial Sequence
  Description of Artificial Sequence: Synthetic oligonucleotide
uggauuucgacaguaagau

SEQ ID NO: 1199582 - RNA, 19 nt, Artificial Sequence
  Description of Artificial Sequence: Synthetic oligonucleotide
ugguagacaaugacggcgc

SEQ ID NO: 1199583 - RNA, 19 nt, Artificial Sequence
  Description of Artificial Sequence: Synthetic oligonucleotide
cugguagacaaugacggcg

SEQ ID NO: 1199584 - RNA, 19 nt, Artificial Sequence
  Description of Artificial Sequence: Synthetic oligonucleotide
guaguaggcgcucagcaug

SEQ ID NO: 1199585 - RNA, 19 nt, Artificial Sequence
  Description of Artificial Sequence: Synthetic oligonucleotide
auggguauucuugacgaac

SEQ ID NO: 1199586 - RNA, 19 nt, Artificial Sequence
  Description of Artificial Sequence: Synthetic oligonucleotide
aggaguagguccugaagag

SEQ ID NO: 1199587 - RNA, 19 nt, Artificial Sequence
  Description of Artificial Sequence: Synthetic oligonucleotide
aacauuguaguggcccacg

SEQ ID NO: 1199588 - RNA, 19 nt, Artificial Sequence
  Description of Artificial Sequence: Synthetic oligonucleotide
uguugggaccucuucgucc

SEQ ID NO: 1199589 - RNA, 19 nt, Artificial Sequence
  Description of Artificial Sequence: Synthetic oligonucleotide
aaugaagcggcggcccagc

SEQ ID NO: 1199590 - RNA, 19 nt, Artificial Sequence
  Description of Artificial Sequence: Synthetic oligonucleotide
ugagcaucgcccuggagcu

SEQ ID NO: 1199591 - RNA, 19 nt, Artificial Sequence
  Description of Artificial Sequence: Synthetic oligonucleotide
aaacagaaugcuggccugg

SEQ ID NO: 1199592 - RNA, 19 nt, Artificial Sequence
  Description of Artificial Sequence: Synthetic oligonucleotide
ucgagaacgaacacugguc

SEQ ID NO: 1199593 - RNA, 19 nt, Artificial Sequence
  Description of Artificial Sequence: Synthetic oligonucleotide
cagcugguagacaaugacg

SEQ ID NO: 1199594 - RNA, 19 nt, Artificial Sequence
  Description of Artificial Sequence: Synthetic oligonucleotide
cauggcgcugacaagcacc

SEQ ID NO: 1199595 - RNA, 19 nt, Artificial Sequence
  Description of Artificial Sequence: Synthetic oligonucleotide
aaguagucccgacuccuug

SEQ ID NO: 1199596 - RNA, 19 nt, Artificial Sequence
  Description of Artificial Sequence: Synthetic oligonucleotide
cuugacgaaccagacaggc

SEQ ID NO: 1199597 - RNA, 19 nt, Artificial Sequence
  Description of Artificial Sequence: Synthetic oligonucleotide
uggaaguauggccuccacc

SEQ ID NO: 1199598 - RNA, 19 nt, Artificial Sequence
  Description of Artificial Sequence: Synthetic oligonucleotide
acaugcauucuucugucca

SEQ ID NO: 1199599 - RNA, 19 nt, Artificial Sequence
  Description of Artificial Sequence: Synthetic oligonucleotide
aucguaguucagcugcagg

SEQ ID NO: 1199600 - RNA, 19 nt, Artificial Sequence
  Description of Artificial Sequence: Synthetic oligonucleotide
uugcgaagaucguaguuca

SEQ ID NO: 1199601 - RNA, 19 nt, Artificial Sequence
  Description of Artificial Sequence: Synthetic oligonucleotide
guacgaguaggcuuugccc

SEQ ID NO: 1199602 - RNA, 19 nt, Artificial Sequence
  Description of Artificial Sequence: Synthetic oligonucleotide
ucuugacgaaccagacagg

SEQ ID NO: 1199603 - RNA, 19 nt, Artificial Sequence
  Description of Artificial Sequence: Synthetic oligonucleotide
ugauguagugcacgaacaa

SEQ ID NO: 1199604 - RNA, 19 nt, Artificial Sequence
  Description of Artificial Sequence: Synthetic oligonucleotide
ugcuguguugagcaucgcc

SEQ ID NO: 1199605 - RNA, 19 nt, Artificial Sequence
  Description of Artificial Sequence: Synthetic oligonucleotide
uguacaucccaaacggaua

SEQ ID NO: 1199606 - RNA, 19 nt, Artificial Sequence
  Description of Artificial Sequence: Synthetic oligonucleotide
ucgacaguaagauguccug

SEQ ID NO: 1199607 - RNA, 19 nt, Artificial Sequence
  Description of Artificial Sequence: Synthetic oligonucleotide
cuugcgaagaucguaguuc

SEQ ID NO: 1199608 - RNA, 19 nt, Artificial Sequence
  Description of Artificial Sequence: Synthetic oligonucleotide
uuccacgucucccgcaggg

SEQ ID NO: 1199609 - RNA, 19 nt, Artificial Sequence
  Description of Artificial Sequence: Synthetic oligonucleotide
agaacggugaagcggguga

SEQ ID NO: 1199610 - RNA, 19 nt, Artificial Sequence
  Description of Artificial Sequence: Synthetic oligonucleotide
gauagcagaggaacaggag

SEQ ID NO: 1199611 - RNA, 19 nt, Artificial Sequence
  Description of Artificial Sequence: Synthetic oligonucleotide
gaagaucguaguucagcug

SEQ ID NO: 1199612 - RNA, 19 nt, Artificial Sequence
  Description of Artificial Sequence: Synthetic oligonucleotide
ugcacgaacaaggcuauga

SEQ ID NO: 1199613 - RNA, 19 nt, Artificial Sequence
  Description of Artificial Sequence: Synthetic oligonucleotide
cacgauggacccaaugaag

SEQ ID NO: 1199614 - RNA, 19 nt, Artificial Sequence
  Description of Artificial Sequence: Synthetic oligonucleotide
cacgaacaaggcuaugagc

SEQ ID NO: 1199615 - RNA, 19 nt, Artificial Sequence
  Description of Artificial Sequence: Synthetic oligonucleotide
ggcacaacugucugggugg

SEQ ID NO: 1199616 - RNA, 19 nt, Artificial Sequence
  Description of Artificial Sequence: Synthetic oligonucleotide
uccugguucgagaacgaac

SEQ ID NO: 1199617 - RNA, 19 nt, Artificial Sequence
  Description of Artificial Sequence: Synthetic oligonucleotide
aggacauuaaggaguacag

SEQ ID NO: 1199618 - RNA, 19 nt, Artificial Sequence
  Description of Artificial Sequence: Synthetic oligonucleotide
uacuucguugcggaugagg

SEQ ID NO: 1199619 - RNA, 19 nt, Artificial Sequence
  Description of Artificial Sequence: Synthetic oligonucleotide
uagacaaugacggcgcccu

SEQ ID NO: 1199620 - RNA, 19 nt, Artificial Sequence
  Description of Artificial Sequence: Synthetic oligonucleotide
agaaguggaaccggaagug

SEQ ID NO: 1199621 - RNA, 19 nt, Artificial Sequence
  Description of Artificial Sequence: Synthetic oligonucleotide
gauggagcgaaagagggaa

SEQ ID NO: 1199622 - RNA, 19 nt, Artificial Sequence
  Description of Artificial Sequence: Synthetic oligonucleotide
aacagcaggauggagcgaa

SEQ ID NO: 1199623 - RNA, 19 nt, Artificial Sequence
  Description of Artificial Sequence: Synthetic oligonucleotide
gacccaaugaagcggcggc

SEQ ID NO: 1199624 - RNA, 19 nt, Artificial Sequence
  Description of Artificial Sequence: Synthetic oligonucleotide
ucaugcgccaguugaaguc

SEQ ID NO: 1199625 - RNA, 19 nt, Artificial Sequence
  Description of Artificial Sequence: Synthetic oligonucleotide
gaacucuacuucguugcgg

SEQ ID NO: 1199626 - RNA, 19 nt, Artificial Sequence
  Description of Artificial Sequence: Synthetic oligonucleotide
gaacgaacacuggucacag

SEQ ID NO: 1199627 - RNA, 19 nt, Artificial Sequence
  Description of Artificial Sequence: Synthetic oligonucleotide
agaagccuccuucacgaug

SEQ ID NO: 1199628 - RNA, 19 nt, Artificial Sequence
  Description of Artificial Sequence: Synthetic oligonucleotide
gaaguauggccuccaccag

SEQ ID NO: 1199629 - RNA, 19 nt, Artificial Sequence
  Description of Artificial Sequence: Synthetic oligonucleotide
uggcccacggcuuuguaga

SEQ ID NO: 1199630 - RNA, 19 nt, Artificial Sequence
  Description of Artificial Sequence: Synthetic oligonucleotide
auucuugacgaaccagaca

SEQ ID NO: 1199631 - RNA, 19 nt, Artificial Sequence
  Description of Artificial Sequence: Synthetic oligonucleotide
gaagcggcggcccagcaca

SEQ ID NO: 1199632 - RNA, 19 nt, Artificial Sequence
  Description of Artificial Sequence: Synthetic oligonucleotide
cacagaguggauuucgaca

SEQ ID NO: 1199633 - RNA, 19 nt, Artificial Sequence
  Description of Artificial Sequence: Synthetic oligonucleotide
guauucuugacgaaccaga

SEQ ID NO: 1199634 - RNA, 19 nt, Artificial Sequence
  Description of Artificial Sequence: Synthetic oligonucleotide
aagagcucgcaggaccaac

SEQ ID NO: 1199635 - RNA, 19 nt, Artificial Sequence
  Description of Artificial Sequence: Synthetic oligonucleotide
caacacaacccaacagccc

SEQ ID NO: 1199636 - RNA, 19 nt, Artificial Sequence
  Description of Artificial Sequence: Synthetic oligonucleotide
uugacgaaccagacaggca

SEQ ID NO: 1199637 - RNA, 19 nt, Artificial Sequence
  Description of Artificial Sequence: Synthetic oligonucleotide
gaacggaauguacauccca

SEQ ID NO: 1199638 - RNA, 19 nt, Artificial Sequence
  Description of Artificial Sequence: Synthetic oligonucleotide
uuugucuugcgaagaucgu

SEQ ID NO: 1199639 - RNA, 19 nt, Artificial Sequence
  Description of Artificial Sequence: Synthetic oligonucleotide
aauggguauucuugacgaa

SEQ ID NO: 1199640 - RNA, 19 nt, Artificial Sequence
  Description of Artificial Sequence: Synthetic oligonucleotide
acggauagcagaggaacag

SEQ ID NO: 1199641 - RNA, 19 nt, Artificial Sequence
  Description of Artificial Sequence: Synthetic oligonucleotide
aauguacaucccaaacgga

SEQ ID NO: 1199642 - RNA, 19 nt, Artificial Sequence
  Description of Artificial Sequence: Synthetic oligonucleotide
aggcacgaaggccacguag

SEQ ID NO: 1199643 - RNA, 19 nt, Artificial Sequence
  Description of Artificial Sequence: Synthetic oligonucleotide
aguauggccuccaccagag

SEQ ID NO: 1199644 - RNA, 19 nt, Artificial Sequence
  Description of Artificial Sequence: Synthetic oligonucleotide
aacggaauguacaucccaa

SEQ ID NO: 1199645 - RNA, 19 nt, Artificial Sequence
  Description of Artificial Sequence: Synthetic oligonucleotide
ccaacacaacccaacagcc

SEQ ID NO: 1199646 - RNA, 19 nt, Artificial Sequence
  Description of Artificial Sequence: Synthetic oligonucleotide
aacgcuugucauaguaaug

SEQ ID NO: 1199647 - RNA, 19 nt, Artificial Sequence
  Description of Artificial Sequence: Synthetic oligonucleotide
uuucgacaguaagaugucc

SEQ ID NO: 1199648 - RNA, 19 nt, Artificial Sequence
  Description of Artificial Sequence: Synthetic oligonucleotide
gguggguaccaccaaacug

SEQ ID NO: 1199649 - RNA, 19 nt, Artificial Sequence
  Description of Artificial Sequence: Synthetic oligonucleotide
aaccggaagugggagacgu

SEQ ID NO: 1199650 - RNA, 19 nt, Artificial Sequence
  Description of Artificial Sequence: Synthetic oligonucleotide
ucuugcgaagaucguaguu

SEQ ID NO: 1199651 - RNA, 19 nt, Artificial Sequence
  Description of Artificial Sequence: Synthetic oligonucleotide
aggauguuaaggauccuca

SEQ ID NO: 1199652 - RNA, 19 nt, Artificial Sequence
  Description of Artificial Sequence: Synthetic oligonucleotide
gagaacgaacacuggucac

SEQ ID NO: 1199653 - RNA, 19 nt, Artificial Sequence
  Description of Artificial Sequence: Synthetic oligonucleotide
cacguuggagcaaagagcu

SEQ ID NO: 1199654 - RNA, 19 nt, Artificial Sequence
  Description of Artificial Sequence: Synthetic oligonucleotide
cuuuuccgaggacauuaag

SEQ ID NO: 1199655 - RNA, 19 nt, Artificial Sequence
  Description of Artificial Sequence: Synthetic oligonucleotide
gacaaugacggcgcccucc

SEQ ID NO: 1199656 - RNA, 19 nt, Artificial Sequence
  Description of Artificial Sequence: Synthetic oligonucleotide
ugguucgagaacgaacacu

SEQ ID NO: 1199657 - RNA, 19 nt, Artificial Sequence
  Description of Artificial Sequence: Synthetic oligonucleotide
ugaggaacucuacuucguu

SEQ ID NO: 1199658 - RNA, 19 nt, Artificial Sequence
  Description of Artificial Sequence: Synthetic oligonucleotide
ugccacuuuuccgaggaca

SEQ ID NO: 1199659 - RNA, 19 nt, Artificial Sequence
  Description of Artificial Sequence: Synthetic oligonucleotide
aacggugaagcgggugagg

SEQ ID NO: 1199660 - RNA, 19 nt, Artificial Sequence
  Description of Artificial Sequence: Synthetic oligonucleotide
guggauuucgacaguaaga

SEQ ID NO: 1199661 - RNA, 19 nt, Artificial Sequence
  Description of Artificial Sequence: Synthetic oligonucleotide
aacggauagcagaggaaca

SEQ ID NO: 1199662 - RNA, 19 nt, Artificial Sequence
  Description of Artificial Sequence: Synthetic oligonucleotide
gaagucgaucagguggaag

SEQ ID NO: 1199663 - RNA, 19 nt, Artificial Sequence
  Description of Artificial Sequence: Synthetic oligonucleotide
ugaggaucacagaggugcu

SEQ ID NO: 1199664 - RNA, 19 nt, Artificial Sequence
  Description of Artificial Sequence: Synthetic oligonucleotide
uggagcgaaagagggaaac

SEQ ID NO: 1199665 - RNA, 19 nt, Artificial Sequence
  Description of Artificial Sequence: Synthetic oligonucleotide
agaggugcugauggacacc

SEQ ID NO: 1199666 - RNA, 19 nt, Artificial Sequence
  Description of Artificial Sequence: Synthetic oligonucleotide
auguacaucccaaacggau

SEQ ID NO: 1199667 - RNA, 19 nt, Artificial Sequence
  Description of Artificial Sequence: Synthetic oligonucleotide
ggaccaacgcuugucauag

SEQ ID NO: 1199668 - RNA, 19 nt, Artificial Sequence
  Description of Artificial Sequence: Synthetic oligonucleotide
caugcgccaguugaagucc

SEQ ID NO: 1199669 - RNA, 19 nt, Artificial Sequence
  Description of Artificial Sequence: Synthetic oligonucleotide
acgaguaggcuuugcccag

SEQ ID NO: 1199670 - RNA, 19 nt, Artificial Sequence
  Description of Artificial Sequence: Synthetic oligonucleotide
guugccgugagaacgguga

SEQ ID NO: 1199671 - RNA, 19 nt, Artificial Sequence
  Description of Artificial Sequence: Synthetic oligonucleotide
ggcgcugacaagcaccucc

SEQ ID NO: 1199672 - RNA, 19 nt, Artificial Sequence
  Description of Artificial Sequence: Synthetic oligonucleotide
ugcgaagaucguaguucag

SEQ ID NO: 1199673 - RNA, 19 nt, Artificial Sequence
  Description of Artificial Sequence: Synthetic oligonucleotide
ucaccaucagcaaguugaa

SEQ ID NO: 1199674 - RNA, 19 nt, Artificial Sequence
  Description of Artificial Sequence: Synthetic oligonucleotide
acaaugacggcgcccucca

SEQ ID NO: 1199675 - RNA, 19 nt, Artificial Sequence
  Description of Artificial Sequence: Synthetic oligonucleotide
gacgaaccagacaggcacg

SEQ ID NO: 1199676 - RNA, 19 nt, Artificial Sequence
  Description of Artificial Sequence: Synthetic oligonucleotide
aguucagggagguguggga

SEQ ID NO: 1199677 - RNA, 19 nt, Artificial Sequence
  Description of Artificial Sequence: Synthetic oligonucleotide
augacggcgcccuccagca

SEQ ID NO: 1199678 - RNA, 19 nt, Artificial Sequence
  Description of Artificial Sequence: Synthetic oligonucleotide
gaugagggccagggaaacg

SEQ ID NO: 1199679 - RNA, 19 nt, Artificial Sequence
  Description of Artificial Sequence: Synthetic oligonucleotide
ucguugcggaugaggcugg

SEQ ID NO: 1199680 - RNA, 19 nt, Artificial Sequence
  Description of Artificial Sequence: Synthetic oligonucleotide
cacugacugcuucucgggg

SEQ ID NO: 1199681 - RNA, 19 nt, Artificial Sequence
  Description of Artificial Sequence: Synthetic oligonucleotide
ugucauaguaauggguauu

SEQ ID NO: 1199682 - RNA, 19 nt, Artificial Sequence
  Description of Artificial Sequence: Synthetic oligonucleotide
aacagaaugcuggccugga

SEQ ID NO: 1199683 - RNA, 19 nt, Artificial Sequence
  Description of Artificial Sequence: Synthetic oligonucleotide
gcaaguugaagucgaucag

SEQ ID NO: 1199684 - RNA, 19 nt, Artificial Sequence
  Description of Artificial Sequence: Synthetic oligonucleotide
uguagacgcucuugcugug

SEQ ID NO: 1199685 - RNA, 19 nt, Artificial Sequence
  Description of Artificial Sequence: Synthetic oligonucleotide
guagucccgacuccuugcc

SEQ ID NO: 1199686 - RNA, 19 nt, Artificial Sequence
  Description of Artificial Sequence: Synthetic oligonucleotide
acccaaugaagcggcggcc

SEQ ID NO: 1199687 - RNA, 19 nt, Artificial Sequence
  Description of Artificial Sequence: Synthetic oligonucleotide
cagaggugcugauggacac

SEQ ID NO: 1199688 - RNA, 19 nt, Artificial Sequence
  Description of Artificial Sequence: Synthetic oligonucleotide
uguaguggcccacggcuuu

SEQ ID NO: 1199689 - RNA, 19 nt, Artificial Sequence
  Description of Artificial Sequence: Synthetic oligonucleotide
gccuguugccgugagaacg

SEQ ID NO: 1199690 - RNA, 19 nt, Artificial Sequence
  Description of Artificial Sequence: Synthetic oligonucleotide
uucucggggccccauggaa

SEQ ID NO: 1199691 - RNA, 19 nt, Artificial Sequence
  Description of Artificial Sequence: Synthetic oligonucleotide
uggacccaaugaagcggcg

SEQ ID NO: 1199692 - RNA, 19 nt, Artificial Sequence
  Description of Artificial Sequence: Synthetic oligonucleotide
uguugagcaucgcccugga

SEQ ID NO: 1199693 - RNA, 19 nt, Artificial Sequence
  Description of Artificial Sequence: Synthetic oligonucleotide
cuuaugcagcaggucacag

SEQ ID NO: 1199694 - RNA, 19 nt, Artificial Sequence
  Description of Artificial Sequence: Synthetic oligonucleotide
gaucguaguucagcugcag

SEQ ID NO: 1199695 - RNA, 19 nt, Artificial Sequence
  Description of Artificial Sequence: Synthetic oligonucleotide
uugucuugcgaagaucgua

SEQ ID NO: 1199696 - RNA, 19 nt, Artificial Sequence
  Description of Artificial Sequence: Synthetic oligonucleotide
gaagcaggugcugcaugag

SEQ ID NO: 1199697 - RNA, 19 nt, Artificial Sequence
  Description of Artificial Sequence: Synthetic oligonucleotide
ugaagcggcggcccagcac

SEQ ID NO: 1199698 - RNA, 19 nt, Artificial Sequence
  Description of Artificial Sequence: Synthetic oligonucleotide
aucgcccuggagcucagga

SEQ ID NO: 1199699 - RNA, 19 nt, Artificial Sequence
  Description of Artificial Sequence: Synthetic oligonucleotide
gagcucgcaggaccaacgc

SEQ ID NO: 1199700 - RNA, 19 nt, Artificial Sequence
  Description of Artificial Sequence: Synthetic oligonucleotide
guagacaaugacggcgccc

SEQ ID NO: 1199701 - RNA, 19 nt, Artificial Sequence
  Description of Artificial Sequence: Synthetic oligonucleotide
ccugguucgagaacgaaca

SEQ ID NO: 1199702 - RNA, 19 nt, Artificial Sequence
  Description of Artificial Sequence: Synthetic oligonucleotide
acggaauguacaucccaaa

SEQ ID NO: 1199703 - RNA, 19 nt, Artificial Sequence
  Description of Artificial Sequence: Synthetic oligonucleotide
caugaggaucacagaggug

SEQ ID NO: 1199704 - RNA, 19 nt, Artificial Sequence
  Description of Artificial Sequence: Synthetic oligonucleotide
gaagauccuggcucacaga

SEQ ID NO: 1199705 - RNA, 19 nt, Artificial Sequence
  Description of Artificial Sequence: Synthetic oligonucleotide
uggaaccggaagugggaga

SEQ ID NO: 1199706 - RNA, 19 nt, Artificial Sequence
  Description of Artificial Sequence: Synthetic oligonucleotide
agguuugucuugcgaagau

SEQ ID NO: 1199707 - RNA, 19 nt, Artificial Sequence
  Description of Artificial Sequence: Synthetic oligonucleotide
gaacggugaagcgggugag

SEQ ID NO: 1199708 - RNA, 19 nt, Artificial Sequence
  Description of Artificial Sequence: Synthetic oligonucleotide
ucagcaaguugaagucgau

SEQ ID NO: 1199709 - RNA, 19 nt, Artificial Sequence
  Description of Artificial Sequence: Synthetic oligonucleotide
aggaccaacgcuugucaua

SEQ ID NO: 1199710 - RNA, 19 nt, Artificial Sequence
  Description of Artificial Sequence: Synthetic oligonucleotide
ugugccagagcugguccug

SEQ ID NO: 1199711 - RNA, 19 nt, Artificial Sequence
  Description of Artificial Sequence: Synthetic oligonucleotide
gagguuugucuugcgaaga

SEQ ID NO: 1199712 - RNA, 19 nt, Artificial Sequence
  Description of Artificial Sequence: Synthetic oligonucleotide
ccuuuugccagcagccuag

SEQ ID NO: 1199713 - RNA, 19 nt, Artificial Sequence
  Description of Artificial Sequence: Synthetic oligonucleotide
guucgagaacgaacacugg

SEQ ID NO: 1199714 - RNA, 19 nt, Artificial Sequence
  Description of Artificial Sequence: Synthetic oligonucleotide
cucgcaggaccaacgcuug

SEQ ID NO: 1199715 - RNA, 19 nt, Artificial Sequence
  Description of Artificial Sequence: Synthetic oligonucleotide
gagcgaaagagggaaaccu

SEQ ID NO: 1199716 - RNA, 19 nt, Artificial Sequence
  Description of Artificial Sequence: Synthetic oligonucleotide
guggaaccggaagugggag

SEQ ID NO: 1199717 - RNA, 19 nt, Artificial Sequence
  Description of Artificial Sequence: Synthetic oligonucleotide
gccgugagaacggugaagc

SEQ ID NO: 1199718 - RNA, 19 nt, Artificial Sequence
  Description of Artificial Sequence: Synthetic oligonucleotide
ugcagcacguuggagcaaa

SEQ ID NO: 1199719 - RNA, 19 nt, Artificial Sequence
  Description of Artificial Sequence: Synthetic oligonucleotide
acaggcacgaaggccacgu

SEQ ID NO: 1199720 - RNA, 19 nt, Artificial Sequence
  Description of Artificial Sequence: Synthetic oligonucleotide
ugccgugagaacggugaag

SEQ ID NO: 1199721 - RNA, 19 nt, Artificial Sequence
  Description of Artificial Sequence: Synthetic oligonucleotide
gcacguuggagcaaagagc

SEQ ID NO: 1199722 - RNA, 19 nt, Artificial Sequence
  Description of Artificial Sequence: Synthetic oligonucleotide
ggauuucgacaguaagaug

SEQ ID NO: 1199723 - RNA, 19 nt, Artificial Sequence
  Description of Artificial Sequence: Synthetic oligonucleotide
aguggaaccggaaguggga

SEQ ID NO: 1199724 - RNA, 19 nt, Artificial Sequence
  Description of Artificial Sequence: Synthetic oligonucleotide
ugccgagugugcugcuucc

SEQ ID NO: 1199725 - RNA, 19 nt, Artificial Sequence
  Description of Artificial Sequence: Synthetic oligonucleotide
agaguggauuucgacagua

SEQ ID NO: 1199726 - RNA, 19 nt, Artificial Sequence
  Description of Artificial Sequence: Synthetic oligonucleotide
gagaacggugaagcgggug

SEQ ID NO: 1199727 - RNA, 19 nt, Artificial Sequence
  Description of Artificial Sequence: Synthetic oligonucleotide
gcgaagaucguaguucagc

SEQ ID NO: 1199728 - RNA, 19 nt, Artificial Sequence
  Description of Artificial Sequence: Synthetic oligonucleotide
gguaccaccaaacugucuu

SEQ ID NO: 1199729 - RNA, 19 nt, Artificial Sequence
  Description of Artificial Sequence: Synthetic oligonucleotide
agcucgcaggaccaacgcu

SEQ ID NO: 1199730 - RNA, 19 nt, Artificial Sequence
  Description of Artificial Sequence: Synthetic oligonucleotide
ggaaccggaagugggagac

SEQ ID NO: 1199731 - RNA, 19 nt, Artificial Sequence
  Description of Artificial Sequence: Synthetic oligonucleotide
gaaccggaagugggagacg

SEQ ID NO: 1199732 - RNA, 19 nt, Artificial Sequence
  Description of Artificial Sequence: Synthetic oligonucleotide
cgaaagagggaaaccuucc

SEQ ID NO: 1199733 - RNA, 19 nt, Artificial Sequence
  Description of Artificial Sequence: Synthetic oligonucleotide
caaugguggucaccaucag

SEQ ID NO: 1199734 - RNA, 19 nt, Artificial Sequence
  Description of Artificial Sequence: Synthetic oligonucleotide
guugggaccucuucguccu

SEQ ID NO: 1199735 - RNA, 19 nt, Artificial Sequence
  Description of Artificial Sequence: Synthetic oligonucleotide
cugguucgagaacgaacac

SEQ ID NO: 1199736 - RNA, 19 nt, Artificial Sequence
  Description of Artificial Sequence: Synthetic oligonucleotide
agcugguccugguucgaga

SEQ ID NO: 1199737 - RNA, 19 nt, Artificial Sequence
  Description of Artificial Sequence: Synthetic oligonucleotide
ugagaacggugaagcgggu

SEQ ID NO: 1199738 - RNA, 19 nt, Artificial Sequence
  Description of Artificial Sequence: Synthetic oligonucleotide
gcugacaagcaccuccuuc

SEQ ID NO: 1199739 - RNA, 19 nt, Artificial Sequence
  Description of Artificial Sequence: Synthetic oligonucleotide
caacugucuggguggccag

SEQ ID NO: 1199740 - RNA, 19 nt, Artificial Sequence
  Description of Artificial Sequence: Synthetic oligonucleotide
aguagguccugaagaggug

SEQ ID NO: 1199741 - RNA, 19 nt, Artificial Sequence
  Description of Artificial Sequence: Synthetic oligonucleotide
gaacuggcugaguacgagu

SEQ ID NO: 1199742 - RNA, 19 nt, Artificial Sequence
  Description of Artificial Sequence: Synthetic oligonucleotide
gucccgacuccuugccagg

SEQ ID NO: 1199743 - RNA, 19 nt, Artificial Sequence
  Description of Artificial Sequence: Synthetic oligonucleotide
ggagacgucagaggggaug

SEQ ID NO: 1199744 - RNA, 19 nt, Artificial Sequence
  Description of Artificial Sequence: Synthetic oligonucleotide
cagaaugcuggccuggacu

SEQ ID NO: 1199745 - RNA, 19 nt, Artificial Sequence
  Description of Artificial Sequence: Synthetic oligonucleotide
agacaaugacggcgcccuc

SEQ ID NO: 1199746 - RNA, 19 nt, Artificial Sequence
  Description of Artificial Sequence: Synthetic oligonucleotide
agcaucgcccuggagcuca

SEQ ID NO: 1199747 - RNA, 19 nt, Artificial Sequence
  Description of Artificial Sequence: Synthetic oligonucleotide
aacggucuggugccacuuu

SEQ ID NO: 1199748 - RNA, 19 nt, Artificial Sequence
  Description of Artificial Sequence: Synthetic oligonucleotide
cgauggacccaaugaagcg

SEQ ID NO: 1199749 - RNA, 19 nt, Artificial Sequence
  Description of Artificial Sequence: Synthetic oligonucleotide
cacguaguaggcgcucagc

SEQ ID NO: 1199750 - RNA, 19 nt, Artificial Sequence
  Description of Artificial Sequence: Synthetic oligonucleotide
cugaguacgaguaggcuuu

SEQ ID NO: 1199751 - RNA, 19 nt, Artificial Sequence
  Description of Artificial Sequence: Synthetic oligonucleotide
ggaacuggcugaguacgag

SEQ ID NO: 1199752 - RNA, 19 nt, Artificial Sequence
  Description of Artificial Sequence: Synthetic oligonucleotide
uugccgugagaacggugaa

SEQ ID NO: 1199753 - RNA, 19 nt, Artificial Sequence
  Description of Artificial Sequence: Synthetic oligonucleotide
ggagcgaaagagggaaacc

SEQ ID NO: 1199754 - RNA, 19 nt, Artificial Sequence
  Description of Artificial Sequence: Synthetic oligonucleotide
gagggcgggugugagggug

SEQ ID NO: 1199755 - RNA, 19 nt, Artificial Sequence
  Description of Artificial Sequence: Synthetic oligonucleotide
guagacgcucuugcugugc

SEQ ID NO: 1199756 - RNA, 19 nt, Artificial Sequence
  Description of Artificial Sequence: Synthetic oligonucleotide
guagugcacgaacaaggcu

SEQ ID NO: 1199757 - RNA, 19 nt, Artificial Sequence
  Description of Artificial Sequence: Synthetic oligonucleotide
aaacggucuggugccacuu

SEQ ID NO: 1199758 - RNA, 19 nt, Artificial Sequence
  Description of Artificial Sequence: Synthetic oligonucleotide
caaugaagcggcggcccag

SEQ ID NO: 1199759 - RNA, 19 nt, Artificial Sequence
  Description of Artificial Sequence: Synthetic oligonucleotide
cacggcuuuguagacgcuc

SEQ ID NO: 1199760 - RNA, 19 nt, Artificial Sequence
  Description of Artificial Sequence: Synthetic oligonucleotide
agggccagggaaacggucu

SEQ ID NO: 1199761 - RNA, 19 nt, Artificial Sequence
  Description of Artificial Sequence: Synthetic oligonucleotide
ugaguacgaguaggcuuug

SEQ ID NO: 1199762 - RNA, 19 nt, Artificial Sequence
  Description of Artificial Sequence: Synthetic oligonucleotide
ggacccaaugaagcggcgg

SEQ ID NO: 1199763 - RNA, 19 nt, Artificial Sequence
  Description of Artificial Sequence: Synthetic oligonucleotide
acggcuuuguagacgcucu

SEQ ID NO: 1199764 - RNA, 19 nt, Artificial Sequence
  Description of Artificial Sequence: Synthetic oligonucleotide
cuguugggaccucuucguc

SEQ ID NO: 1199765 - RNA, 19 nt, Artificial Sequence
  Description of Artificial Sequence: Synthetic oligonucleotide
agugcacgaacaaggcuau

SEQ ID NO: 1199766 - RNA, 19 nt, Artificial Sequence
  Description of Artificial Sequence: Synthetic oligonucleotide
uuggagcaaagagcugggu

SEQ ID NO: 1199767 - RNA, 19 nt, Artificial Sequence
  Description of Artificial Sequence: Synthetic oligonucleotide
gguagacaaugacggcgcc

SEQ ID NO: 1199768 - RNA, 19 nt, Artificial Sequence
  Description of Artificial Sequence: Synthetic oligonucleotide
acgaaccagacaggcacga

SEQ ID NO: 1199769 - RNA, 19 nt, Artificial Sequence
  Description of Artificial Sequence: Synthetic oligonucleotide
aggcgcucagcauggcgcu

SEQ ID NO: 1199770 - RNA, 19 nt, Artificial Sequence
  Description of Artificial Sequence: Synthetic oligonucleotide
cuucuguccacgggugcug

SEQ ID NO: 1199771 - RNA, 19 nt, Artificial Sequence
  Description of Artificial Sequence: Synthetic oligonucleotide
aguacagcugguagacaau

SEQ ID NO: 1199772 - RNA, 19 nt, Artificial Sequence
  Description of Artificial Sequence: Synthetic oligonucleotide
gaguacgaguaggcuuugc

SEQ ID NO: 1199773 - RNA, 19 nt, Artificial Sequence
  Description of Artificial Sequence: Synthetic oligonucleotide
agcgaaagagggaaaccuu

SEQ ID NO: 1199774 - RNA, 19 nt, Artificial Sequence
  Description of Artificial Sequence: Synthetic oligonucleotide
gacaggcacgaaggccacg

SEQ ID NO: 1199775 - RNA, 19 nt, Artificial Sequence
  Description of Artificial Sequence: Synthetic oligonucleotide
caggaacggaauguacauc

SEQ ID NO: 1199776 - RNA, 19 nt, Artificial Sequence
  Description of Artificial Sequence: Synthetic oligonucleotide
uggaugcuguguugagcau

SEQ ID NO: 1199777 - RNA, 19 nt, Artificial Sequence
  Description of Artificial Sequence: Synthetic oligonucleotide
ggaacggaauguacauccc

SEQ ID NO: 1199778 - RNA, 19 nt, Artificial Sequence
  Description of Artificial Sequence: Synthetic oligonucleotide
acggucuggugccacuuuu

SEQ ID NO: 1199779 - RNA, 19 nt, Artificial Sequence
  Description of Artificial Sequence: Synthetic oligonucleotide
gcgaaagagggaaaccuuc

SEQ ID NO: 1199780 - RNA, 19 nt, Artificial Sequence
  Description of Artificial Sequence: Synthetic oligonucleotide
gaaacggucuggugccacu

SEQ ID NO: 1199781 - RNA, 19 nt, Artificial Sequence
  Description of Artificial Sequence: Synthetic oligonucleotide
agucgaucagguggaaguu

SEQ ID NO: 1199782 - RNA, 19 nt, Artificial Sequence
  Description of Artificial Sequence: Synthetic oligonucleotide
cacgucucccgcaggguca

SEQ ID NO: 1199783 - RNA, 19 nt, Artificial Sequence
  Description of Artificial Sequence: Synthetic oligonucleotide
ggguauucuugacgaacca

SEQ ID NO: 1199784 - RNA, 19 nt, Artificial Sequence
  Description of Artificial Sequence: Synthetic oligonucleotide
gcaggaccaacgcuuguca

SEQ ID NO: 1199785 - RNA, 19 nt, Artificial Sequence
  Description of Artificial Sequence: Synthetic oligonucleotide
ucuccgcucgccgccgcag

SEQ ID NO: 1199786 - RNA, 19 nt, Artificial Sequence
  Description of Artificial Sequence: Synthetic oligonucleotide
ugacggcgcccuccagcag

SEQ ID NO: 1199787 - RNA, 19 nt, Artificial Sequence
  Description of Artificial Sequence: Synthetic oligonucleotide
gaguggauuucgacaguaa

SEQ ID NO: 1199788 - RNA, 19 nt, Artificial Sequence
  Description of Artificial Sequence: Synthetic oligonucleotide
ucgcaggaccaacgcuugu

SEQ ID NO: 1199789 - RNA, 19 nt, Artificial Sequence
  Description of Artificial Sequence: Synthetic oligonucleotide
ucccgacuccuugccaggc

SEQ ID NO: 1199790 - RNA, 19 nt, Artificial Sequence
  Description of Artificial Sequence: Synthetic oligonucleotide
acucuacuucguugcggau

SEQ ID NO: 1199791 - RNA, 19 nt, Artificial Sequence
  Description of Artificial Sequence: Synthetic oligonucleotide
agcauggcgcugacaagca

SEQ ID NO: 1199792 - RNA, 19 nt, Artificial Sequence
  Description of Artificial Sequence: Synthetic oligonucleotide
acgucagaggggauggcaa

SEQ ID NO: 1199793 - RNA, 19 nt, Artificial Sequence
  Description of Artificial Sequence: Synthetic oligonucleotide
augaagcggcggcccagca

SEQ ID NO: 1199794 - RNA, 19 nt, Artificial Sequence
  Description of Artificial Sequence: Synthetic oligonucleotide
agcgggugaggaacagcag

SEQ ID NO: 1199795 - RNA, 19 nt, Artificial Sequence
  Description of Artificial Sequence: Synthetic oligonucleotide
cgagaacgaacacugguca

SEQ ID NO: 1199796 - RNA, 19 nt, Artificial Sequence
  Description of Artificial Sequence: Synthetic oligonucleotide
ugcgccaguugaaguccau

SEQ ID NO: 1199797 - RNA, 19 nt, Artificial Sequence
  Description of Artificial Sequence: Synthetic oligonucleotide
acaaggcuaugagcuggca

SEQ ID NO: 1199798 - RNA, 19 nt, Artificial Sequence
  Description of Artificial Sequence: Synthetic oligonucleotide
cuccugcgggcaauauguc

SEQ ID NO: 1199799 - RNA, 19 nt, Artificial Sequence
  Description of Artificial Sequence: Synthetic oligonucleotide
ugggugggcauggcuucug

SEQ ID NO: 1199800 - RNA, 19 nt, Artificial Sequence
  Description of Artificial Sequence: Synthetic oligonucleotide
gcugaguacgaguaggcuu

SEQ ID NO: 1199801 - RNA, 19 nt, Artificial Sequence
  Description of Artificial Sequence: Synthetic oligonucleotide
ccgugagaacggugaagcg

SEQ ID NO: 1199802 - RNA, 19 nt, Artificial Sequence
  Description of Artificial Sequence: Synthetic oligonucleotide
agaggauguuaaggauccu

SEQ ID NO: 1199803 - RNA, 19 nt, Artificial Sequence
  Description of Artificial Sequence: Synthetic oligonucleotide
gcuccugcgggcaauaugu

SEQ ID NO: 1199804 - RNA, 19 nt, Artificial Sequence
  Description of Artificial Sequence: Synthetic oligonucleotide
agggcgggugugagggugg

SEQ ID NO: 1199805 - RNA, 19 nt, Artificial Sequence
  Description of Artificial Sequence: Synthetic oligonucleotide
cuucguugcggaugaggcu

SEQ ID NO: 1199806 - RNA, 19 nt, Artificial Sequence
  Description of Artificial Sequence: Synthetic oligonucleotide
acgucucccgcagggucag

SEQ ID NO: 1199807 - RNA, 19 nt, Artificial Sequence
  Description of Artificial Sequence: Synthetic oligonucleotide
caaugacggcgcccuccag

SEQ ID NO: 1199808 - RNA, 19 nt, Artificial Sequence
  Description of Artificial Sequence: Synthetic oligonucleotide
gcaggaacggaauguacau

SEQ ID NO: 1199809 - RNA, 19 nt, Artificial Sequence
  Description of Artificial Sequence: Synthetic oligonucleotide
cacaacugucuggguggcc

SEQ ID NO: 1199810 - RNA, 19 nt, Artificial Sequence
  Description of Artificial Sequence: Synthetic oligonucleotide
agagcugguccugguucga

SEQ ID NO: 1199811 - RNA, 19 nt, Artificial Sequence
  Description of Artificial Sequence: Synthetic oligonucleotide
gaagagcucgcaggaccaa

SEQ ID NO: 1199812 - RNA, 19 nt, Artificial Sequence
  Description of Artificial Sequence: Synthetic oligonucleotide
gucuugcgaagaucguagu

SEQ ID NO: 1199813 - RNA, 19 nt, Artificial Sequence
  Description of Artificial Sequence: Synthetic oligonucleotide
uaguggcccacggcuuugu

SEQ ID NO: 1199814 - RNA, 19 nt, Artificial Sequence
  Description of Artificial Sequence: Synthetic oligonucleotide
ggggccacaugcauucuuc

SEQ ID NO: 1199815 - RNA, 19 nt, Artificial Sequence
  Description of Artificial Sequence: Synthetic oligonucleotide
agacgcucuugcugugcuu

SEQ ID NO: 1199816 - RNA, 19 nt, Artificial Sequence
  Description of Artificial Sequence: Synthetic oligonucleotide
ggauggagcgaaagaggga

SEQ ID NO: 1199817 - RNA, 19 nt, Artificial Sequence
  Description of Artificial Sequence: Synthetic oligonucleotide
acguuggagcaaagagcug

SEQ ID NO: 1199818 - RNA, 19 nt, Artificial Sequence
  Description of Artificial Sequence: Synthetic oligonucleotide
cuccgcucgccgccgcagc

SEQ ID NO: 1199819 - RNA, 19 nt, Artificial Sequence
  Description of Artificial Sequence: Synthetic oligonucleotide
ggaaacggucuggugccac

SEQ ID NO: 1199820 - RNA, 19 nt, Artificial Sequence
  Description of Artificial Sequence: Synthetic oligonucleotide
gcacuggaaguauggccuc

SEQ ID NO: 1199821 - RNA, 19 nt, Artificial Sequence
  Description of Artificial Sequence: Synthetic oligonucleotide
ggacuggcagcucugggau

SEQ ID NO: 1199822 - RNA, 19 nt, Artificial Sequence
  Description of Artificial Sequence: Synthetic oligonucleotide
ugcccaguaccaggcgguc

SEQ ID NO: 1199823 - RNA, 19 nt, Artificial Sequence
  Description of Artificial Sequence: Synthetic oligonucleotide
gugccacuuuuccgaggac

SEQ ID NO: 1199824 - RNA, 19 nt, Artificial Sequence
  Description of Artificial Sequence: Synthetic oligonucleotide
gcccacggcuuuguagacg

SEQ ID NO: 1199825 - RNA, 19 nt, Artificial Sequence
  Description of Artificial Sequence: Synthetic oligonucleotide
auggagcgaaagagggaaa

SEQ ID NO: 1199826 - RNA, 19 nt, Artificial Sequence
  Description of Artificial Sequence: Synthetic oligonucleotide
gcggucccggagcagcuug

SEQ ID NO: 1199827 - RNA, 19 nt, Artificial Sequence
  Description of Artificial Sequence: Synthetic oligonucleotide
cgaagaucguaguucagcu

SEQ ID NO: 1199828 - RNA, 19 nt, Artificial Sequence
  Description of Artificial Sequence: Synthetic oligonucleotide
aguggcccacggcuuugua

SEQ ID NO: 1199829 - RNA, 19 nt, Artificial Sequence
  Description of Artificial Sequence: Synthetic oligonucleotide
ccggaagugggagacguca

SEQ ID NO: 1199830 - RNA, 19 nt, Artificial Sequence
  Description of Artificial Sequence: Synthetic oligonucleotide
augcgccaguugaagucca

SEQ ID NO: 1199831 - RNA, 19 nt, Artificial Sequence
  Description of Artificial Sequence: Synthetic oligonucleotide
gcggaugaggcugggugac

SEQ ID NO: 1199832 - RNA, 19 nt, Artificial Sequence
  Description of Artificial Sequence: Synthetic oligonucleotide
ccacgucucccgcaggguc

SEQ ID NO: 1199833 - RNA, 19 nt, Artificial Sequence
  Description of Artificial Sequence: Synthetic oligonucleotide
cuacuucguugcggaugag

SEQ ID NO: 1199834 - RNA, 19 nt, Artificial Sequence
  Description of Artificial Sequence: Synthetic oligonucleotide
ccgaggacauuaaggagua

SEQ ID NO: 1199835 - RNA, 19 nt, Artificial Sequence
  Description of Artificial Sequence: Synthetic oligonucleotide
gugcacgaacaaggcuaug

SEQ ID NO: 1199836 - RNA, 19 nt, Artificial Sequence
  Description of Artificial Sequence: Synthetic oligonucleotide
guccugguucgagaacgaa

SEQ ID NO: 1199837 - RNA, 19 nt, Artificial Sequence
  Description of Artificial Sequence: Synthetic oligonucleotide
gccaguugaaguccauuuu

SEQ ID NO: 1199838 - RNA, 19 nt, Artificial Sequence
  Description of Artificial Sequence: Synthetic oligonucleotide
ccuuaugcagcaggucaca

SEQ ID NO: 1199839 - RNA, 19 nt, Artificial Sequence
  Description of Artificial Sequence: Synthetic oligonucleotide
gguccugguucgagaacga

SEQ ID NO: 1199840 - RNA, 19 nt, Artificial Sequence
  Description of Artificial Sequence: Synthetic oligonucleotide
ccgcagggucagcaaguag

SEQ ID NO: 1199841 - RNA, 19 nt, Artificial Sequence
  Description of Artificial Sequence: Synthetic oligonucleotide
ccccgaagauccuggcuca

SEQ ID NO: 1199842 - RNA, 19 nt, Artificial Sequence
  Description of Artificial Sequence: Synthetic oligonucleotide
gaccaacgcuugucauagu

SEQ ID NO: 1199843 - RNA, 19 nt, Artificial Sequence
  Description of Artificial Sequence: Synthetic oligonucleotide
gccacuuuuccgaggacau

SEQ ID NO: 1199844 - RNA, 19 nt, Artificial Sequence
  Description of Artificial Sequence: Synthetic oligonucleotide
ggcugaguacgaguaggcu

SEQ ID NO: 1199845 - RNA, 19 nt, Artificial Sequence
  Description of Artificial Sequence: Synthetic oligonucleotide
ggaccggcacagacuccag

SEQ ID NO: 1199846 - RNA, 19 nt, Artificial Sequence
  Description of Artificial Sequence: Synthetic oligonucleotide
ggccuggacuggcagcucu

SEQ ID NO: 1199847 - RNA, 19 nt, Artificial Sequence
  Description of Artificial Sequence: Synthetic oligonucleotide
caacagcccuuggccagga

SEQ ID NO: 1199848 - RNA, 19 nt, Artificial Sequence
  Description of Artificial Sequence: Synthetic oligonucleotide
uggcgcugacaagcaccuc

SEQ ID NO: 1199849 - RNA, 19 nt, Artificial Sequence
  Description of Artificial Sequence: Synthetic oligonucleotide
cucuccgcucgccgccgca

SEQ ID NO: 1199850 - RNA, 19 nt, Artificial Sequence
  Description of Artificial Sequence: Synthetic oligonucleotide
cuccagccuguugccguga

SEQ ID NO: 1199851 - RNA, 19 nt, Artificial Sequence
  Description of Artificial Sequence: Synthetic oligonucleotide
cagcacgcccuggggccac

SEQ ID NO: 1199852 - RNA, 19 nt, Artificial Sequence
  Description of Artificial Sequence: Synthetic oligonucleotide
agcggcggcccagcacaau

SEQ ID NO: 1199853 - RNA, 19 nt, Artificial Sequence
  Description of Artificial Sequence: Synthetic oligonucleotide
agcacgcccuggggccaca

SEQ ID NO: 1199854 - RNA, 19 nt, Artificial Sequence
  Description of Artificial Sequence: Synthetic oligonucleotide
gcgcugacaagcaccuccu

SEQ ID NO: 1199855 - RNA, 19 nt, Artificial Sequence
  Description of Artificial Sequence: Synthetic oligonucleotide
ccuugccaggccacugacu

SEQ ID NO: 1199856 - RNA, 19 nt, Artificial Sequence
  Description of Artificial Sequence: Synthetic oligonucleotide
cgaggacauuaaggaguac

SEQ ID NO: 1199857 - RNA, 19 nt, Artificial Sequence
  Description of Artificial Sequence: Synthetic oligonucleotide
ggagggcgggugugagggu

SEQ ID NO: 1199858 - RNA, 19 nt, Artificial Sequence
  Description of Artificial Sequence: Synthetic oligonucleotide
cagcuccugcgggcaauau

SEQ ID NO: 1199859 - RNA, 19 nt, Artificial Sequence
  Description of Artificial Sequence: Synthetic oligonucleotide
gggccccauggaagccaca

SEQ ID NO: 1199860 - RNA, 19 nt, Artificial Sequence
  Description of Artificial Sequence: Synthetic oligonucleotide
ggcgggugugagggugggu

SEQ ID NO: 1199861 - RNA, 19 nt, Artificial Sequence
  Description of Artificial Sequence: Synthetic oligonucleotide
ccacggcuuuguagacgcu

SEQ ID NO: 1199862 - RNA, 19 nt, Artificial Sequence
  Description of Artificial Sequence: Synthetic oligonucleotide
gcacgcccuggggccacau

SEQ ID NO: 1199863 - RNA, 19 nt, Artificial Sequence
  Description of Artificial Sequence: Synthetic oligonucleotide
aagaauguguauuaagggc

SEQ ID NO: 1199864 - RNA, 19 nt, Artificial Sequence
  Description of Artificial Sequence: Synthetic oligonucleotide
aauuacuccuuauggaugc

SEQ ID NO: 1199865 - RNA, 19 nt, Artificial Sequence
  Description of Artificial Sequence: Synthetic oligonucleotide
ucuauauaaacuuuucagg

SEQ ID NO: 1199866 - RNA, 19 nt, Artificial Sequence
  Description of Artificial Sequence: Synthetic oligonucleotide
aauuauuucgaucagugga

SEQ ID NO: 1199867 - RNA, 19 nt, Artificial Sequence
  Description of Artificial Sequence: Synthetic oligonucleotide
uuaauuagaaaauuacucc

SEQ ID NO: 1199868 - RNA, 19 nt, Artificial Sequence
  Description of Artificial Sequence: Synthetic oligonucleotide
auugaaauuauuucgauca

SEQ ID NO: 1199869 - RNA, 19 nt, Artificial Sequence
  Description of Artificial Sequence: Synthetic oligonucleotide
aguacaagcauugagacac

SEQ ID NO: 1199870 - RNA, 19 nt, Artificial Sequence
  Description of Artificial Sequence: Synthetic oligonucleotide
cauagaaucgauuaugugc

SEQ ID NO: 1199871 - RNA, 19 nt, Artificial Sequence
  Description of Artificial Sequence: Synthetic oligonucleotide
aaugaaacacccgagagag

SEQ ID NO: 1199872 - RNA, 19 nt, Artificial Sequence
  Description of Artificial Sequence: Synthetic oligonucleotide
uuuguuugaaaguuugugg

SEQ ID NO: 1199873 - RNA, 19 nt, Artificial Sequence
  Description of Artificial Sequence: Synthetic oligonucleotide
ugucuuuucaccaaucuug

SEQ ID NO: 1199874 - RNA, 19 nt, Artificial Sequence
  Description of Artificial Sequence: Synthetic oligonucleotide
auuaagaagggauccagac

SEQ ID NO: 1199875 - RNA, 19 nt, Artificial Sequence
  Description of Artificial Sequence: Synthetic oligonucleotide
aaaagauguuuguagcacg

SEQ ID NO: 1199876 - RNA, 19 nt, Artificial Sequence
  Description of Artificial Sequence: Synthetic oligonucleotide
uuguuugaaaguuuguggg

SEQ ID NO: 1199877 - RNA, 19 nt, Artificial Sequence
  Description of Artificial Sequence: Synthetic oligonucleotide
uuuaguuacauuguaagca

SEQ ID NO: 1199878 - RNA, 19 nt, Artificial Sequence
  Description of Artificial Sequence: Synthetic oligonucleotide
aaaauuacuccuuauggau

SEQ ID NO: 1199879 - RNA, 19 nt, Artificial Sequence
  Description of Artificial Sequence: Synthetic oligonucleotide
uaagcauagacucuggcca

SEQ ID NO: 1199880 - RNA, 19 nt, Artificial Sequence
  Description of Artificial Sequence: Synthetic oligonucleotide
augaugaaaagacauguuc

SEQ ID NO: 1199881 - RNA, 19 nt, Artificial Sequence
  Description of Artificial Sequence: Synthetic oligonucleotide
aguuugaugaugaaaagac

SEQ ID NO: 1199882 - RNA, 19 nt, Artificial Sequence
  Description of Artificial Sequence: Synthetic oligonucleotide
uguauuaagggcuggaugu

SEQ ID NO: 1199883 - RNA, 19 nt, Artificial Sequence
  Description of Artificial Sequence: Synthetic oligonucleotide
  modified_base (5)..(5): a, c, u, g, unknown or other
aauunuuaugugagcagcc

SEQ ID NO: 1199884 - RNA, 19 nt, Artificial Sequence
  Description of Artificial Sequence: Synthetic oligonucleotide
ugcucuaaaauauauggug

SEQ ID NO: 1199885 - RNA, 19 nt, Artificial Sequence
  Description of Artificial Sequence: Synthetic oligonucleotide
uaagaagggauccagacaa

SEQ ID NO: 1199886 - RNA, 19 nt, Artificial Sequence
  Description of Artificial Sequence: Synthetic oligonucleotide
uucuuuggcacuaaaaccu

SEQ ID NO: 1199887 - RNA, 19 nt, Artificial Sequence
  Description of Artificial Sequence: Synthetic oligonucleotide
agccauaucucacagacuc

SEQ ID NO: 1199888 - RNA, 19 nt, Artificial Sequence
  Description of Artificial Sequence: Synthetic oligonucleotide
  modified_base (7)..(7): a, c, u, g, unknown or other
ugaauunuuaugugagcag

SEQ ID NO: 1199889 - RNA, 19 nt, Artificial Sequence
  Description of Artificial Sequence: Synthetic oligonucleotide
ucgauuaugugcaacauaa

SEQ ID NO: 1199890 - RNA, 19 nt, Artificial Sequence
  Description of Artificial Sequence: Synthetic oligonucleotide
uuauggaugcuucauuuag

SEQ ID NO: 1199891 - RNA, 19 nt, Artificial Sequence
  Description of Artificial Sequence: Synthetic oligonucleotide
uggauuguaggaaugaaac

SEQ ID NO: 1199892 - RNA, 19 nt, Artificial Sequence
  Description of Artificial Sequence: Synthetic oligonucleotide
ugaucauauggauuguagg

SEQ ID NO: 1199893 - RNA, 19 nt, Artificial Sequence
  Description of Artificial Sequence: Synthetic oligonucleotide
uaguuuugcaguaaguaca

SEQ ID NO: 1199894 - RNA, 19 nt, Artificial Sequence
  Description of Artificial Sequence: Synthetic oligonucleotide
aaaagcauagacucugggu

SEQ ID NO: 1199895 - RNA, 19 nt, Artificial Sequence
  Description of Artificial Sequence: Synthetic oligonucleotide
gaaauuauuucgaucagug

SEQ ID NO: 1199896 - RNA, 19 nt, Artificial Sequence
  Description of Artificial Sequence: Synthetic oligonucleotide
aaaacaaaacaaaacaaaa

SEQ ID NO: 1199897 - RNA, 19 nt, Artificial Sequence
  Description of Artificial Sequence: Synthetic oligonucleotide
uuacauuguaagcauagac

SEQ ID NO: 1199898 - RNA, 19 nt, Artificial Sequence
  Description of Artificial Sequence: Synthetic oligonucleotide
uccaaguucccaaaauagg

SEQ ID NO: 1199899 - RNA, 19 nt, Artificial Sequence
  Description of Artificial Sequence: Synthetic oligonucleotide
uucuaaaaugcuaggaaga

SEQ ID NO: 1199900 - RNA, 19 nt, Artificial Sequence
  Description of Artificial Sequence: Synthetic oligonucleotide
accuuuaauuguuuccucc

SEQ ID NO: 1199901 - RNA, 19 nt, Artificial Sequence
  Description of Artificial Sequence: Synthetic oligonucleotide
aguggauucuuccugaucu

SEQ ID NO: 1199902 - RNA, 19 nt, Artificial Sequence
  Description of Artificial Sequence: Synthetic oligonucleotide
  modified_base (4)..(4): a, c, u, g, unknown or other
auunuuaugugagcagccc

SEQ ID NO: 1199903 - RNA, 19 nt, Artificial Sequence
  Description of Artificial Sequence: Synthetic oligonucleotide
cucaaugugagacagggug

SEQ ID NO: 1199904 - RNA, 19 nt, Artificial Sequence
  Description of Artificial Sequence: Synthetic oligonucleotide
uuaguuuugcaguaaguac

SEQ ID NO: 1199905 - RNA, 19 nt, Artificial Sequence
  Description of Artificial Sequence: Synthetic oligonucleotide
cuauauaaacuuuucagga

SEQ ID NO: 1199906 - RNA, 19 nt, Artificial Sequence
  Description of Artificial Sequence: Synthetic oligonucleotide
  modified_base (3)..(3): a, c, u, g, unknown or other
uunuuaugugagcagcccc

SEQ ID NO: 1199907 - RNA, 19 nt, Artificial Sequence
  Description of Artificial Sequence: Synthetic oligonucleotide
gaucauauggauuguagga

SEQ ID NO: 1199908 - RNA, 19 nt, Artificial Sequence
  Description of Artificial Sequence: Synthetic oligonucleotide
uguuuaguuuugcaguaag

SEQ ID NO: 1199909 - RNA, 19 nt, Artificial Sequence
  Description of Artificial Sequence: Synthetic oligonucleotide
cucuaaaauauaugguggg

SEQ ID NO: 1199910 - RNA, 19 nt, Artificial Sequence
  Description of Artificial Sequence: Synthetic oligonucleotide
uuugguguccaauacuggc

SEQ ID NO: 1199911 - RNA, 19 nt, Artificial Sequence
  Description of Artificial Sequence: Synthetic oligonucleotide
  modified_base (6)..(6): a, c, u, g, unknown or other
gaauunuuaugugagcagc

SEQ ID NO: 1199912 - RNA, 19 nt, Artificial Sequence
  Description of Artificial Sequence: Synthetic oligonucleotide
uucaucaaugggauaacug

SEQ ID NO: 1199913 - RNA, 19 nt, Artificial Sequence
  Description of Artificial Sequence: Synthetic oligonucleotide
uuaaguggcagacuugggu

SEQ ID NO: 1199914 - RNA, 19 nt, Artificial Sequence
  Description of Artificial Sequence: Synthetic oligonucleotide
aaugggauaacuggccagg

SEQ ID NO: 1199915 - RNA, 19 nt, Artificial Sequence
  Description of Artificial Sequence: Synthetic oligonucleotide
uucguauccaaauuuucug

SEQ ID NO: 1199916 - RNA, 19 nt, Artificial Sequence
  Description of Artificial Sequence: Synthetic oligonucleotide
aacuuguucggaugagcac

SEQ ID NO: 1199917 - RNA, 19 nt, Artificial Sequence
  Description of Artificial Sequence: Synthetic oligonucleotide
  modified_base (2)..(2): a, c, u, g, unknown or other
unuuaugugagcagcccca

SEQ ID NO: 1199918 - RNA, 19 nt, Artificial Sequence
  Description of Artificial Sequence: Synthetic oligonucleotide
agauguuuguagcacgggg

SEQ ID NO: 1199919 - RNA, 19 nt, Artificial Sequence
  Description of Artificial Sequence: Synthetic oligonucleotide
  modified_base (10)..(10): a, c, u, g, unknown or other
aucugaauunuuaugugag

SEQ ID NO: 1199920 - RNA, 19 nt, Artificial Sequence
  Description of Artificial Sequence: Synthetic oligonucleotide
uguaggaaugaaacacccg

SEQ ID NO: 1199921 - RNA, 19 nt, Artificial Sequence
  Description of Artificial Sequence: Synthetic oligonucleotide
ugaugaugaaaagacaugu

SEQ ID NO: 1199922 - RNA, 19 nt, Artificial Sequence
  Description of Artificial Sequence: Synthetic oligonucleotide
uuguaggaaugaaacaccc

SEQ ID NO: 1199923 - RNA, 19 nt, Artificial Sequence
  Description of Artificial Sequence: Synthetic oligonucleotide
uugaugaugaaaagacaug

SEQ ID NO: 1199924 - RNA, 19 nt, Artificial Sequence
  Description of Artificial Sequence: Synthetic oligonucleotide
ugagaacugguguaguugc

SEQ ID NO: 1199925 - RNA, 19 nt, Artificial Sequence
  Description of Artificial Sequence: Synthetic oligonucleotide
  modified_base (4)..(4): a, c, u, g, unknown or other
aaanaacaaacaaaacaaa

SEQ ID NO: 1199926 - RNA, 19 nt, Artificial Sequence
  Description of Artificial Sequence: Synthetic oligonucleotide
  modified_base (9)..(9): a, c, u, g, unknown or other
ucugaauunuuaugugagc

SEQ ID NO: 1199927 - RNA, 19 nt, Artificial Sequence
  Description of Artificial Sequence: Synthetic oligonucleotide
ucaaacccgacacuucucc

SEQ ID NO: 1199928 - RNA, 19 nt, Artificial Sequence
  Description of Artificial Sequence: Synthetic oligonucleotide
ugauucauaaaugucuacu

SEQ ID NO: 1199929 - RNA, 19 nt, Artificial Sequence
  Description of Artificial Sequence: Synthetic oligonucleotide
auagaaucgauuaugugca

SEQ ID NO: 1199930 - RNA, 19 nt, Artificial Sequence
  Description of Artificial Sequence: Synthetic oligonucleotide
guaagcauagacucuggcc

SEQ ID NO: 1199931 - RNA, 19 nt, Artificial Sequence
  Description of Artificial Sequence: Synthetic oligonucleotide
gauugaaauuauuucgauc

SEQ ID NO: 1199932 - RNA, 19 nt, Artificial Sequence
  Description of Artificial Sequence: Synthetic oligonucleotide
uuaguuacauuguaagcau

SEQ ID NO: 1199933 - RNA, 19 nt, Artificial Sequence
  Description of Artificial Sequence: Synthetic oligonucleotide
aaaauauaugguggguuug

SEQ ID NO: 1199934 - RNA, 19 nt, Artificial Sequence
  Description of Artificial Sequence: Synthetic oligonucleotide
uaugugucugguaacuugu

SEQ ID NO: 1199935 - RNA, 19 nt, Artificial Sequence
  Description of Artificial Sequence: Synthetic oligonucleotide
aguccuuuaaguggcagac

SEQ ID NO: 1199936 - RNA, 19 nt, Artificial Sequence
  Description of Artificial Sequence: Synthetic oligonucleotide
gaaucgauuaugugcaaca

SEQ ID NO: 1199937 - RNA, 19 nt, Artificial Sequence
  Description of Artificial Sequence: Synthetic oligonucleotide
guaggaaugaaacacccga

SEQ ID NO: 1199938 - RNA, 19 nt, Artificial Sequence
  Description of Artificial Sequence: Synthetic oligonucleotide
uuugaaaguuugugggugc

SEQ ID NO: 1199939 - RNA, 19 nt, Artificial Sequence
  Description of Artificial Sequence: Synthetic oligonucleotide
aaauuacuccuuauggaug

SEQ ID NO: 1199940 - RNA, 19 nt, Artificial Sequence
  Description of Artificial Sequence: Synthetic oligonucleotide
auagguuucuauauaaacu

SEQ ID NO: 1199941 - RNA, 19 nt, Artificial Sequence
  Description of Artificial Sequence: Synthetic oligonucleotide
aucaaugggauaacuggcc

SEQ ID NO: 1199942 - RNA, 19 nt, Artificial Sequence
  Description of Artificial Sequence: Synthetic oligonucleotide
guuugugggugcuacaggc

SEQ ID NO: 1199943 - RNA, 19 nt, Artificial Sequence
  Description of Artificial Sequence: Synthetic oligonucleotide
aagcauagacucuggguug

SEQ ID NO: 1199944 - RNA, 19 nt, Artificial Sequence
  Description of Artificial Sequence: Synthetic oligonucleotide
agaucuuuuguccuuugcu

SEQ ID NO: 1199945 - RNA, 19 nt, Artificial Sequence
  Description of Artificial Sequence: Synthetic oligonucleotide
aaguucccaaaauagguuu

SEQ ID NO: 1199946 - RNA, 19 nt, Artificial Sequence
  Description of Artificial Sequence: Synthetic oligonucleotide
uguucggaugagcacacug

SEQ ID NO: 1199947 - RNA, 19 nt, Artificial Sequence
  Description of Artificial Sequence: Synthetic oligonucleotide
agugaccuuuaauuguuuc

SEQ ID NO: 1199948 - RNA, 19 nt, Artificial Sequence
  Description of Artificial Sequence: Synthetic oligonucleotide
uaggaaugaaacacccgag

SEQ ID NO: 1199949 - RNA, 19 nt, Artificial Sequence
  Description of Artificial Sequence: Synthetic oligonucleotide
ugucaaacccgacacuucu

SEQ ID NO: 1199950 - RNA, 19 nt, Artificial Sequence
  Description of Artificial Sequence: Synthetic oligonucleotide
auagacucuggguugguug

SEQ ID NO: 1199951 - RNA, 19 nt, Artificial Sequence
  Description of Artificial Sequence: Synthetic oligonucleotide
uacuucaaccauuuucccc

SEQ ID NO: 1199952 - RNA, 19 nt, Artificial Sequence
  Description of Artificial Sequence: Synthetic oligonucleotide
agaauguguauuaagggcu

SEQ ID NO: 1199953 - RNA, 19 nt, Artificial Sequence
  Description of Artificial Sequence: Synthetic oligonucleotide
cuugaaaagacugcuuggc

SEQ ID NO: 1199954 - RNA, 19 nt, Artificial Sequence
  Description of Artificial Sequence: Synthetic oligonucleotide
cacuaaaaccugcucauag

SEQ ID NO: 1199955 - RNA, 19 nt, Artificial Sequence
  Description of Artificial Sequence: Synthetic oligonucleotide
ugaaacacccgagagagau

SEQ ID NO: 1199956 - RNA, 19 nt, Artificial Sequence
  Description of Artificial Sequence: Synthetic oligonucleotide
uguaagcauagacucuggc

SEQ ID NO: 1199957 - RNA, 19 nt, Artificial Sequence
  Description of Artificial Sequence: Synthetic oligonucleotide
uuuaaguggcagacuuggg

SEQ ID NO: 1199958 - RNA, 19 nt, Artificial Sequence
  Description of Artificial Sequence: Synthetic oligonucleotide
aaguuugugggugcuacag

SEQ ID NO: 1199959 - RNA, 19 nt, Artificial Sequence
  Description of Artificial Sequence: Synthetic oligonucleotide
gguucuuuggcacuaaaac

SEQ ID NO: 1199960 - RNA, 19 nt, Artificial Sequence
  Description of Artificial Sequence: Synthetic oligonucleotide
agacuuggguccaaguucc

SEQ ID NO: 1199961 - RNA, 19 nt, Artificial Sequence
  Description of Artificial Sequence: Synthetic oligonucleotide
aaugcacagucauguuggg

SEQ ID NO: 1199962 - RNA, 19 nt, Artificial Sequence
  Description of Artificial Sequence: Synthetic oligonucleotide
acuuguugucuuuucacca

SEQ ID NO: 1199963 - RNA, 19 nt, Artificial Sequence
  Description of Artificial Sequence: Synthetic oligonucleotide
aggaaucacugccaccagc

SEQ ID NO: 1199964 - RNA, 19 nt, Artificial Sequence
  Description of Artificial Sequence: Synthetic oligonucleotide
aaauauaugguggguuugu

SEQ ID NO: 1199965 - RNA, 19 nt, Artificial Sequence
  Description of Artificial Sequence: Synthetic oligonucleotide
agcaugaccaguucagaug

SEQ ID NO: 1199966 - RNA, 19 nt, Artificial Sequence
  Description of Artificial Sequence: Synthetic oligonucleotide
uugaaaagacugcuuggcu

SEQ ID NO: 1199967 - RNA, 19 nt, Artificial Sequence
  Description of Artificial Sequence: Synthetic oligonucleotide
uguuugaaaguuugugggu

SEQ ID NO: 1199968 - RNA, 19 nt, Artificial Sequence
  Description of Artificial Sequence: Synthetic oligonucleotide
uaaguggcagacuuggguc

SEQ ID NO: 1199969 - RNA, 19 nt, Artificial Sequence
  Description of Artificial Sequence: Synthetic oligonucleotide
uuuggcacuaaaaccugcu

SEQ ID NO: 1199970 - RNA, 19 nt, Artificial Sequence
  Description of Artificial Sequence: Synthetic oligonucleotide
ucuaaaauauauggugggu

SEQ ID NO: 1199971 - RNA, 19 nt, Artificial Sequence
  Description of Artificial Sequence: Synthetic oligonucleotide
guaguugcuuccccaaagg

SEQ ID NO: 1199972 - RNA, 19 nt, Artificial Sequence
  Description of Artificial Sequence: Synthetic oligonucleotide
aauguguauuaagggcugg

SEQ ID NO: 1199973 - RNA, 19 nt, Artificial Sequence
  Description of Artificial Sequence: Synthetic oligonucleotide
aaacccgacacuucucccu

SEQ ID NO: 1199974 - RNA, 19 nt, Artificial Sequence
  Description of Artificial Sequence: Synthetic oligonucleotide
cuacccacaaugcacaguc

SEQ ID NO: 1199975 - RNA, 19 nt, Artificial Sequence
  Description of Artificial Sequence: Synthetic oligonucleotide
uguaugccuggaauagugc

SEQ ID NO: 1199976 - RNA, 19 nt, Artificial Sequence
  Description of Artificial Sequence: Synthetic oligonucleotide
gugaccuuuaauuguuucc

SEQ ID NO: 1199977 - RNA, 19 nt, Artificial Sequence
  Description of Artificial Sequence: Synthetic oligonucleotide
uggaguaugccgagucacg

SEQ ID NO: 1199978 - RNA, 19 nt, Artificial Sequence
  Description of Artificial Sequence: Synthetic oligonucleotide
auauaugguggguuuguca

SEQ ID NO: 1199979 - RNA, 19 nt, Artificial Sequence
  Description of Artificial Sequence: Synthetic oligonucleotide
ggaaugaaacacccgagag

SEQ ID NO: 1199980 - RNA, 19 nt, Artificial Sequence
  Description of Artificial Sequence: Synthetic oligonucleotide
ucguauccaaauuuucugu

SEQ ID NO: 1199981 - RNA, 19 nt, Artificial Sequence
  Description of Artificial Sequence: Synthetic oligonucleotide
uauggaugcuucauuuagu

SEQ ID NO: 1199982 - RNA, 19 nt, Artificial Sequence
  Description of Artificial Sequence: Synthetic oligonucleotide
cuaugugucugguaacuug

SEQ ID NO: 1199983 - RNA, 19 nt, Artificial Sequence
  Description of Artificial Sequence: Synthetic oligonucleotide
uguucguauccaaauuuuc

SEQ ID NO: 1199984 - RNA, 19 nt, Artificial Sequence
  Description of Artificial Sequence: Synthetic oligonucleotide
guuugaaaguuugugggug

SEQ ID NO: 1199985 - RNA, 19 nt, Artificial Sequence
  Description of Artificial Sequence: Synthetic oligonucleotide
ggcauguuuaguuuugcag

SEQ ID NO: 1199986 - RNA, 19 nt, Artificial Sequence
  Description of Artificial Sequence: Synthetic oligonucleotide
uaugccgagucacgcagag

SEQ ID NO: 1199987 - RNA, 19 nt, Artificial Sequence
  Description of Artificial Sequence: Synthetic oligonucleotide
uugagaacugguguaguug

SEQ ID NO: 1199988 - RNA, 19 nt, Artificial Sequence
  Description of Artificial Sequence: Synthetic oligonucleotide
aaauccagucuugcucccc

SEQ ID NO: 1199989 - RNA, 19 nt, Artificial Sequence
  Description of Artificial Sequence: Synthetic oligonucleotide
ugauugaaauuauuucgau

SEQ ID NO: 1199990 - RNA, 19 nt, Artificial Sequence
  Description of Artificial Sequence: Synthetic oligonucleotide
gauucuucuguuacuagca

SEQ ID NO: 1199991 - RNA, 19 nt, Artificial Sequence
  Description of Artificial Sequence: Synthetic oligonucleotide
agaaucgauuaugugcaac

SEQ ID NO: 1199992 - RNA, 19 nt, Artificial Sequence
  Description of Artificial Sequence: Synthetic oligonucleotide
cauauggauuguaggaaug

SEQ ID NO: 1199993 - RNA, 19 nt, Artificial Sequence
  Description of Artificial Sequence: Synthetic oligonucleotide
uugguguccaauacuggcu

SEQ ID NO: 1199994 - RNA, 19 nt, Artificial Sequence
  Description of Artificial Sequence: Synthetic oligonucleotide
uggcguguagauuuuggug

SEQ ID NO: 1199995 - RNA, 19 nt, Artificial Sequence
  Description of Artificial Sequence: Synthetic oligonucleotide
cuguaugccuggaauagug

SEQ ID NO: 1199996 - RNA, 19 nt, Artificial Sequence
  Description of Artificial Sequence: Synthetic oligonucleotide
aguuugugggugcuacagg

SEQ ID NO: 1199997 - RNA, 19 nt, Artificial Sequence
  Description of Artificial Sequence: Synthetic oligonucleotide
guccaaguucccaaaauag

SEQ ID NO: 1199998 - RNA, 19 nt, Artificial Sequence
  Description of Artificial Sequence: Synthetic oligonucleotide
ucugguaacuuguucggau

SEQ ID NO: 1199999 - RNA, 19 nt, Artificial Sequence
  Description of Artificial Sequence: Synthetic oligonucleotide
  modified_base (8)..(8): a, c, u, g, unknown or other
cugaauunuuaugugagca

SEQ ID NO: 1200000 - RNA, 19 nt, Artificial Sequence
  Description of Artificial Sequence: Synthetic oligonucleotide
auugagacaccccguguug

SEQ ID NO: 1200001 - RNA, 19 nt, Artificial Sequence
  Description of Artificial Sequence: Synthetic oligonucleotide
gauggcguguagauuuugg

SEQ ID NO: 1200002 - RNA, 19 nt, Artificial Sequence
  Description of Artificial Sequence: Synthetic oligonucleotide
uccccaugaauucaggguu

SEQ ID NO: 1200003 - RNA, 19 nt, Artificial Sequence
  Description of Artificial Sequence: Synthetic oligonucleotide
gaguuugaugaugaaaaga

SEQ ID NO: 1200004 - RNA, 19 nt, Artificial Sequence
  Description of Artificial Sequence: Synthetic oligonucleotide
acuuguucggaugagcaca

SEQ ID NO: 1200005 - RNA, 19 nt, Artificial Sequence
  Description of Artificial Sequence: Synthetic oligonucleotide
agcauugagacaccccgug

SEQ ID NO: 1200006 - RNA, 19 nt, Artificial Sequence
  Description of Artificial Sequence: Synthetic oligonucleotide
gucagaugauuuccaaacc

SEQ ID NO: 1200007 - RNA, 19 nt, Artificial Sequence
  Description of Artificial Sequence: Synthetic oligonucleotide
ugugucugguaacuuguuc

SEQ ID NO: 1200008 - RNA, 19 nt, Artificial Sequence
  Description of Artificial Sequence: Synthetic oligonucleotide
gugaucauauggauuguag

SEQ ID NO: 1200009 - RNA, 19 nt, Artificial Sequence
  Description of Artificial Sequence: Synthetic oligonucleotide
gaauguguauuaagggcug

SEQ ID NO: 1200010 - RNA, 19 nt, Artificial Sequence
  Description of Artificial Sequence: Synthetic oligonucleotide
  modified_base (18)..(18): a, c, u, g, unknown or other
aauucuccaucugaauunu

SEQ ID NO: 1200011 - RNA, 19 nt, Artificial Sequence
  Description of Artificial Sequence: Synthetic oligonucleotide
auuucgaucaguggauucu

SEQ ID NO: 1200012 - RNA, 19 nt, Artificial Sequence
  Description of Artificial Sequence: Synthetic oligonucleotide
cagacuuggguccaaguuc

SEQ ID NO: 1200013 - RNA, 19 nt, Artificial Sequence
  Description of Artificial Sequence: Synthetic oligonucleotide
auuauuucgaucaguggau

SEQ ID NO: 1200014 - RNA, 19 nt, Artificial Sequence
  Description of Artificial Sequence: Synthetic oligonucleotide
cuaaaaccugcucauagaa

SEQ ID NO: 1200015 - RNA, 19 nt, Artificial Sequence
  Description of Artificial Sequence: Synthetic oligonucleotide
acaagcauugagacacccc

SEQ ID NO: 1200016 - RNA, 19 nt, Artificial Sequence
  Description of Artificial Sequence: Synthetic oligonucleotide
ucuggaguaugccgaguca

SEQ ID NO: 1200017 - RNA, 19 nt, Artificial Sequence
  Description of Artificial Sequence: Synthetic oligonucleotide
uacuccuuauggaugcuuc

SEQ ID NO: 1200018 - RNA, 19 nt, Artificial Sequence
  Description of Artificial Sequence: Synthetic oligonucleotide
uaguugcuuccccaaaggu

SEQ ID NO: 1200019 - RNA, 19 nt, Artificial Sequence
  Description of Artificial Sequence: Synthetic oligonucleotide
agcacacugucagaggcgg

SEQ ID NO: 1200020 - RNA, 19 nt, Artificial Sequence
  Description of Artificial Sequence: Synthetic oligonucleotide
uagacucuggguugguugu

SEQ ID NO: 1200021 - RNA, 19 nt, Artificial Sequence
  Description of Artificial Sequence: Synthetic oligonucleotide
ccucacauuuucuaaaaug

SEQ ID NO: 1200022 - RNA, 19 nt, Artificial Sequence
  Description of Artificial Sequence: Synthetic oligonucleotide
aaucgauuaugugcaacau

SEQ ID NO: 1200023 - RNA, 19 nt, Artificial Sequence
  Description of Artificial Sequence: Synthetic oligonucleotide
agcacuuguugucuuuuca

SEQ ID NO: 1200024 - RNA, 19 nt, Artificial Sequence
  Description of Artificial Sequence: Synthetic oligonucleotide
agcacaauucuggaguaug

SEQ ID NO: 1200025 - RNA, 19 nt, Artificial Sequence
  Description of Artificial Sequence: Synthetic oligonucleotide
auauggauuguaggaauga

SEQ ID NO: 1200026 - RNA, 19 nt, Artificial Sequence
  Description of Artificial Sequence: Synthetic oligonucleotide
ugguaaauccagucuugcu

SEQ ID NO: 1200027 - RNA, 19 nt, Artificial Sequence
  Description of Artificial Sequence: Synthetic oligonucleotide
aacacagccugaagaaugu

SEQ ID NO: 1200028 - RNA, 19 nt, Artificial Sequence
  Description of Artificial Sequence: Synthetic oligonucleotide
cugggaugugaagaaaagc

SEQ ID NO: 1200029 - RNA, 19 nt, Artificial Sequence
  Description of Artificial Sequence: Synthetic oligonucleotide
auuccuuugucaaacccga

SEQ ID NO: 1200030 - RNA, 19 nt, Artificial Sequence
  Description of Artificial Sequence: Synthetic oligonucleotide
cuugcugauggauggcgug

SEQ ID NO: 1200031 - RNA, 19 nt, Artificial Sequence
  Description of Artificial Sequence: Synthetic oligonucleotide
uaaauccagucuugcuccc

SEQ ID NO: 1200032 - RNA, 19 nt, Artificial Sequence
  Description of Artificial Sequence: Synthetic oligonucleotide
gauuuugguguccaauacu

SEQ ID NO: 1200033 - RNA, 19 nt, Artificial Sequence
  Description of Artificial Sequence: Synthetic oligonucleotide
aguucccaaaauagguuuc

SEQ ID NO: 1200034 - RNA, 19 nt, Artificial Sequence
  Description of Artificial Sequence: Synthetic oligonucleotide
uggauuccucacauuuucu

SEQ ID NO: 1200035 - RNA, 19 nt, Artificial Sequence
  Description of Artificial Sequence: Synthetic oligonucleotide
aaaagacugcuuggcucuc

SEQ ID NO: 1200036 - RNA, 19 nt, Artificial Sequence
  Description of Artificial Sequence: Synthetic oligonucleotide
cuuguucggaugagcacac

SEQ ID NO: 1200037 - RNA, 19 nt, Artificial Sequence
  Description of Artificial Sequence: Synthetic oligonucleotide
gcuuccauaggaguguggg

SEQ ID NO: 1200038 - RNA, 19 nt, Artificial Sequence
  Description of Artificial Sequence: Synthetic oligonucleotide
cagacucccucuugaaaag

SEQ ID NO: 1200039 - RNA, 19 nt, Artificial Sequence
  Description of Artificial Sequence: Synthetic oligonucleotide
auggcguguagauuuuggu

SEQ ID NO: 1200040 - RNA, 19 nt, Artificial Sequence
  Description of Artificial Sequence: Synthetic oligonucleotide
uuaugugagcagccccaug

SEQ ID NO: 1200041 - RNA, 19 nt, Artificial Sequence
  Description of Artificial Sequence: Synthetic oligonucleotide
uguguauuaagggcuggau

SEQ ID NO: 1200042 - RNA, 19 nt, Artificial Sequence
  Description of Artificial Sequence: Synthetic oligonucleotide
uccaauucuccaucugaau

SEQ ID NO: 1200043 - RNA, 19 nt, Artificial Sequence
  Description of Artificial Sequence: Synthetic oligonucleotide
ucuggccagaaaugcaaaa

SEQ ID NO: 1200044 - RNA, 19 nt, Artificial Sequence
  Description of Artificial Sequence: Synthetic oligonucleotide
uucagaugacugccucuug

SEQ ID NO: 1200045 - RNA, 19 nt, Artificial Sequence
  Description of Artificial Sequence: Synthetic oligonucleotide
uugucaaacccgacacuuc

SEQ ID NO: 1200046 - RNA, 19 nt, Artificial Sequence
  Description of Artificial Sequence: Synthetic oligonucleotide
gugggugcuacaggcaugg

SEQ ID NO: 1200047 - RNA, 19 nt, Artificial Sequence
  Description of Artificial Sequence: Synthetic oligonucleotide
cuccagaugcucuaaaaua

SEQ ID NO: 1200048 - RNA, 19 nt, Artificial Sequence
  Description of Artificial Sequence: Synthetic oligonucleotide
aucgauuaugugcaacaua

SEQ ID NO: 1200049 - RNA, 19 nt, Artificial Sequence
  Description of Artificial Sequence: Synthetic oligonucleotide
uuuucacuaugugucuggu

SEQ ID NO: 1200050 - RNA, 19 nt, Artificial Sequence
  Description of Artificial Sequence: Synthetic oligonucleotide
guuugaugaugaaaagaca

SEQ ID NO: 1200051 - RNA, 19 nt, Artificial Sequence
  Description of Artificial Sequence: Synthetic oligonucleotide
acccacaaugcacagucau

SEQ ID NO: 1200052 - RNA, 19 nt, Artificial Sequence
  Description of Artificial Sequence: Synthetic oligonucleotide
uaguuacauuguaagcaua

SEQ ID NO: 1200053 - RNA, 19 nt, Artificial Sequence
  Description of Artificial Sequence: Synthetic oligonucleotide
ucguccacuuuccuccaga

SEQ ID NO: 1200054 - RNA, 19 nt, Artificial Sequence
  Description of Artificial Sequence: Synthetic oligonucleotide
caaacccgacacuucuccc

SEQ ID NO: 1200055 - RNA, 19 nt, Artificial Sequence
  Description of Artificial Sequence: Synthetic oligonucleotide
gaccuuuaauuguuuccuc

SEQ ID NO: 1200056 - RNA, 19 nt, Artificial Sequence
  Description of Artificial Sequence: Synthetic oligonucleotide
acuccuuauggaugcuuca

SEQ ID NO: 1200057 - RNA, 19 nt, Artificial Sequence
  Description of Artificial Sequence: Synthetic oligonucleotide
agaggcggacugcacuggg

SEQ ID NO: 1200058 - RNA, 19 nt, Artificial Sequence
  Description of Artificial Sequence: Synthetic oligonucleotide
cuggauguucuuccacacc

SEQ ID NO: 1200059 - RNA, 19 nt, Artificial Sequence
  Description of Artificial Sequence: Synthetic oligonucleotide
aaccugcucauagaaucga

SEQ ID NO: 1200060 - RNA, 19 nt, Artificial Sequence
  Description of Artificial Sequence: Synthetic oligonucleotide
agaugauuuccaaaccuau

SEQ ID NO: 1200061 - RNA, 19 nt, Artificial Sequence
  Description of Artificial Sequence: Synthetic oligonucleotide
cucauagaaucgauuaugu

SEQ ID NO: 1200062 - RNA, 19 nt, Artificial Sequence
  Description of Artificial Sequence: Synthetic oligonucleotide
cugccaccagcuuccauag

SEQ ID NO: 1200063 - RNA, 19 nt, Artificial Sequence
  Description of Artificial Sequence: Synthetic oligonucleotide
augcucuaaaauauauggu

SEQ ID NO: 1200064 - RNA, 19 nt, Artificial Sequence
  Description of Artificial Sequence: Synthetic oligonucleotide
agccucauuaagaagggau

SEQ ID NO: 1200065 - RNA, 19 nt, Artificial Sequence
  Description of Artificial Sequence: Synthetic oligonucleotide
gagagagaucuuuuguccu

SEQ ID NO: 1200066 - RNA, 19 nt, Artificial Sequence
  Description of Artificial Sequence: Synthetic oligonucleotide
uccaauacuggcuguccuu

SEQ ID NO: 1200067 - RNA, 19 nt, Artificial Sequence
  Description of Artificial Sequence: Synthetic oligonucleotide
cuggaguaugccgagucac

SEQ ID NO: 1200068 - RNA, 19 nt, Artificial Sequence
  Description of Artificial Sequence: Synthetic oligonucleotide
ggauuguaggaaugaaaca

SEQ ID NO: 1200069 - RNA, 19 nt, Artificial Sequence
  Description of Artificial Sequence: Synthetic oligonucleotide
ugucaugcccagccucagc

SEQ ID NO: 1200070 - RNA, 19 nt, Artificial Sequence
  Description of Artificial Sequence: Synthetic oligonucleotide
ucuguaugccuggaauagu

SEQ ID NO: 1200071 - RNA, 19 nt, Artificial Sequence
  Description of Artificial Sequence: Synthetic oligonucleotide
augaccaguucagaugacu

SEQ ID NO: 1200072 - RNA, 19 nt, Artificial Sequence
  Description of Artificial Sequence: Synthetic oligonucleotide
uggaugcuucauuuaguua

SEQ ID NO: 1200073 - RNA, 19 nt, Artificial Sequence
  Description of Artificial Sequence: Synthetic oligonucleotide
aacccgacacuucucccuu

SEQ ID NO: 1200074 - RNA, 19 nt, Artificial Sequence
  Description of Artificial Sequence: Synthetic oligonucleotide
ggugagccucauuaagaag

SEQ ID NO: 1200075 - RNA, 19 nt, Artificial Sequence
  Description of Artificial Sequence: Synthetic oligonucleotide
uguuuguagcacggggacu

SEQ ID NO: 1200076 - RNA, 19 nt, Artificial Sequence
  Description of Artificial Sequence: Synthetic oligonucleotide
gcauguuuaguuuugcagu

SEQ ID NO: 1200077 - RNA, 19 nt, Artificial Sequence
  Description of Artificial Sequence: Synthetic oligonucleotide
gaguaugccgagucacgca

SEQ ID NO: 1200078 - RNA, 19 nt, Artificial Sequence
  Description of Artificial Sequence: Synthetic oligonucleotide
guuacauuguaagcauaga

SEQ ID NO: 1200079 - RNA, 19 nt, Artificial Sequence
  Description of Artificial Sequence: Synthetic oligonucleotide
ugacugccucuugagaacu

SEQ ID NO: 1200080 - RNA, 19 nt, Artificial Sequence
  Description of Artificial Sequence: Synthetic oligonucleotide
uggcucucucuacaaguuc

SEQ ID NO: 1200081 - RNA, 19 nt, Artificial Sequence
  Description of Artificial Sequence: Synthetic oligonucleotide
ccauaucucacagacuccc

SEQ ID NO: 1200082 - RNA, 19 nt, Artificial Sequence
  Description of Artificial Sequence: Synthetic oligonucleotide
gagucacgcagaguugcag

SEQ ID NO: 1200083 - RNA, 19 nt, Artificial Sequence
  Description of Artificial Sequence: Synthetic oligonucleotide
cacacugucagaggcggac

SEQ ID NO: 1200084 - RNA, 19 nt, Artificial Sequence
  Description of Artificial Sequence: Synthetic oligonucleotide
uuauuucgaucaguggauu

SEQ ID NO: 1200085 - RNA, 19 nt, Artificial Sequence
  Description of Artificial Sequence: Synthetic oligonucleotide
guaugccuggaauagugcu

SEQ ID NO: 1200086 - RNA, 19 nt, Artificial Sequence
  Description of Artificial Sequence: Synthetic oligonucleotide
aaagacugcuuggcucucu

SEQ ID NO: 1200087 - RNA, 19 nt, Artificial Sequence
  Description of Artificial Sequence: Synthetic oligonucleotide
ggcguguagauuuuggugu

SEQ ID NO: 1200088 - RNA, 19 nt, Artificial Sequence
  Description of Artificial Sequence: Synthetic oligonucleotide
cuuggcucucucuacaagu

SEQ ID NO: 1200089 - RNA, 19 nt, Artificial Sequence
  Description of Artificial Sequence: Synthetic oligonucleotide
agcuacccacaaugcacag

SEQ ID NO: 1200090 - RNA, 19 nt, Artificial Sequence
  Description of Artificial Sequence: Synthetic oligonucleotide
agggugagccucauuaaga

SEQ ID NO: 1200091 - RNA, 19 nt, Artificial Sequence
  Description of Artificial Sequence: Synthetic oligonucleotide
guucguauccaaauuuucu

SEQ ID NO: 1200092 - RNA, 19 nt, Artificial Sequence
  Description of Artificial Sequence: Synthetic oligonucleotide
uuccugaucuuugguaaau

SEQ ID NO: 1200093 - RNA, 19 nt, Artificial Sequence
  Description of Artificial Sequence: Synthetic oligonucleotide
acagggugagccucauuaa

SEQ ID NO: 1200094 - RNA, 19 nt, Artificial Sequence
  Description of Artificial Sequence: Synthetic oligonucleotide
gcucagcucaaugugagac

SEQ ID NO: 1200095 - RNA, 19 nt, Artificial Sequence
  Description of Artificial Sequence: Synthetic oligonucleotide
uuucaccaaucuugugauc

SEQ ID NO: 1200096 - RNA, 19 nt, Artificial Sequence
  Description of Artificial Sequence: Synthetic oligonucleotide
uagaaucgauuaugugcaa

SEQ ID NO: 1200097 - RNA, 19 nt, Artificial Sequence
  Description of Artificial Sequence: Synthetic oligonucleotide
agccugaagaauguguauu

SEQ ID NO: 1200098 - RNA, 19 nt, Artificial Sequence
  Description of Artificial Sequence: Synthetic oligonucleotide
guugcagcacaggugucug

SEQ ID NO: 1200099 - RNA, 19 nt, Artificial Sequence
  Description of Artificial Sequence: Synthetic oligonucleotide
cucagcucaaugugagaca

SEQ ID NO: 1200100 - RNA, 19 nt, Artificial Sequence
  Description of Artificial Sequence: Synthetic oligonucleotide
auguguauuaagggcugga

SEQ ID NO: 1200101 - RNA, 19 nt, Artificial Sequence
  Description of Artificial Sequence: Synthetic oligonucleotide
accccguguugauugaaau

SEQ ID NO: 1200102 - RNA, 19 nt, Artificial Sequence
  Description of Artificial Sequence: Synthetic oligonucleotide
guauccaaauuuucuguau

SEQ ID NO: 1200103 - RNA, 19 nt, Artificial Sequence
  Description of Artificial Sequence: Synthetic oligonucleotide
ugggauaacuggccagguu

SEQ ID NO: 1200104 - RNA, 19 nt, Artificial Sequence
  Description of Artificial Sequence: Synthetic oligonucleotide
uuucgaucaguggauucuu

SEQ ID NO: 1200105 - RNA, 19 nt, Artificial Sequence
  Description of Artificial Sequence: Synthetic oligonucleotide
aggaacacaugugcuguga

SEQ ID NO: 1200106 - RNA, 19 nt, Artificial Sequence
  Description of Artificial Sequence: Synthetic oligonucleotide
uacccacaaugcacaguca

SEQ ID NO: 1200107 - RNA, 19 nt, Artificial Sequence
  Description of Artificial Sequence: Synthetic oligonucleotide
cucauuaagaagggaucca

SEQ ID NO: 1200108 - RNA, 19 nt, Artificial Sequence
  Description of Artificial Sequence: Synthetic oligonucleotide
acagucauguugggacauc

SEQ ID NO: 1200109 - RNA, 19 nt, Artificial Sequence
  Description of Artificial Sequence: Synthetic oligonucleotide
uccugaucuuugguaaauc

SEQ ID NO: 1200110 - RNA, 19 nt, Artificial Sequence
  Description of Artificial Sequence: Synthetic oligonucleotide
cagcuacccacaaugcaca

SEQ ID NO: 1200111 - RNA, 19 nt, Artificial Sequence
  Description of Artificial Sequence: Synthetic oligonucleotide
ggaguaugccgagucacgc

SEQ ID NO: 1200112 - RNA, 19 nt, Artificial Sequence
  Description of Artificial Sequence: Synthetic oligonucleotide
cauuguaagcauagacucu

SEQ ID NO: 1200113 - RNA, 19 nt, Artificial Sequence
  Description of Artificial Sequence: Synthetic oligonucleotide
cauguucguauccaaauuu

SEQ ID NO: 1200114 - RNA, 19 nt, Artificial Sequence
  Description of Artificial Sequence: Synthetic oligonucleotide
auguucguauccaaauuuu

SEQ ID NO: 1200115 - RNA, 19 nt, Artificial Sequence
  Description of Artificial Sequence: Synthetic oligonucleotide
ucucacugagugaccuuua

SEQ ID NO: 1200116 - RNA, 19 nt, Artificial Sequence
  Description of Artificial Sequence: Synthetic oligonucleotide
uugugaucauauggauugu

SEQ ID NO: 1200117 - RNA, 19 nt, Artificial Sequence
  Description of Artificial Sequence: Synthetic oligonucleotide
gguaacuuguucggaugag

SEQ ID NO: 1200118 - RNA, 19 nt, Artificial Sequence
  Description of Artificial Sequence: Synthetic oligonucleotide
agaacugguguaguugcuu

SEQ ID NO: 1200119 - RNA, 19 nt, Artificial Sequence
  Description of Artificial Sequence: Synthetic oligonucleotide
caauacuggcuguccuuuc

SEQ ID NO: 1200120 - RNA, 19 nt, Artificial Sequence
  Description of Artificial Sequence: Synthetic oligonucleotide
ccgagagagaucuuuuguc

SEQ ID NO: 1200121 - RNA, 19 nt, Artificial Sequence
  Description of Artificial Sequence: Synthetic oligonucleotide
guguugauugaaauuauuu

SEQ ID NO: 1200122 - RNA, 19 nt, Artificial Sequence
  Description of Artificial Sequence: Synthetic oligonucleotide
gcuaggaagaguccuuuaa

SEQ ID NO: 1200123 - RNA, 19 nt, Artificial Sequence
  Description of Artificial Sequence: Synthetic oligonucleotide
ugaaaguuugugggugcua

SEQ ID NO: 1200124 - RNA, 19 nt, Artificial Sequence
  Description of Artificial Sequence: Synthetic oligonucleotide
uccagugucuucgcugguc

SEQ ID NO: 1200125 - RNA, 19 nt, Artificial Sequence
  Description of Artificial Sequence: Synthetic oligonucleotide
gccuaggagucucacugag

SEQ ID NO: 1200126 - RNA, 19 nt, Artificial Sequence
  Description of Artificial Sequence: Synthetic oligonucleotide
gugccaaugucucugccgu

SEQ ID NO: 1200127 - RNA, 19 nt, Artificial Sequence
  Description of Artificial Sequence: Synthetic oligonucleotide
ugcuaggaagaguccuuua

SEQ ID NO: 1200128 - RNA, 19 nt, Artificial Sequence
  Description of Artificial Sequence: Synthetic oligonucleotide
cagaugcucuaaaauauau

SEQ ID NO: 1200129 - RNA, 19 nt, Artificial Sequence
  Description of Artificial Sequence: Synthetic oligonucleotide
caggaacacaugugcugug

SEQ ID NO: 1200130 - RNA, 19 nt, Artificial Sequence
  Description of Artificial Sequence: Synthetic oligonucleotide
cuacaggcauggauuccuc

SEQ ID NO: 1200131 - RNA, 19 nt, Artificial Sequence
  Description of Artificial Sequence: Synthetic oligonucleotide
caguggauucuuccugauc

SEQ ID NO: 1200132 - RNA, 19 nt, Artificial Sequence
  Description of Artificial Sequence: Synthetic oligonucleotide
uuacuccuuauggaugcuu

SEQ ID NO: 1200133 - RNA, 19 nt, Artificial Sequence
  Description of Artificial Sequence: Synthetic oligonucleotide
uacuagcacuuguugucuu

SEQ ID NO: 1200134 - RNA, 19 nt, Artificial Sequence
  Description of Artificial Sequence: Synthetic oligonucleotide
gccaaugucucugccguag

SEQ ID NO: 1200135 - RNA, 19 nt, Artificial Sequence
  Description of Artificial Sequence: Synthetic oligonucleotide
cacgcagaguugcagcaca

SEQ ID NO: 1200136 - RNA, 19 nt, Artificial Sequence
  Description of Artificial Sequence: Synthetic oligonucleotide
ucacgcagaguugcagcac

SEQ ID NO: 1200137 - RNA, 19 nt, Artificial Sequence
  Description of Artificial Sequence: Synthetic oligonucleotide
guuuaguuuugcaguaagu

SEQ ID NO: 1200138 - RNA, 19 nt, Artificial Sequence
  Description of Artificial Sequence: Synthetic oligonucleotide
cacggggacuccaaacaca

SEQ ID NO: 1200139 - RNA, 19 nt, Artificial Sequence
  Description of Artificial Sequence: Synthetic oligonucleotide
gaaacacccgagagagauc

SEQ ID NO: 1200140 - RNA, 19 nt, Artificial Sequence
  Description of Artificial Sequence: Synthetic oligonucleotide
guagauuuugguguccaau

SEQ ID NO: 1200141 - RNA, 19 nt, Artificial Sequence
  Description of Artificial Sequence: Synthetic oligonucleotide
gggugagccucauuaagaa

SEQ ID NO: 1200142 - RNA, 19 nt, Artificial Sequence
  Description of Artificial Sequence: Synthetic oligonucleotide
auuacuccuuauggaugcu

SEQ ID NO: 1200143 - RNA, 19 nt, Artificial Sequence
  Description of Artificial Sequence: Synthetic oligonucleotide
uucuggccuaggagucuca

SEQ ID NO: 1200144 - RNA, 19 nt, Artificial Sequence
  Description of Artificial Sequence: Synthetic oligonucleotide
gacugcacugggaugugaa

SEQ ID NO: 1200145 - RNA, 19 nt, Artificial Sequence
  Description of Artificial Sequence: Synthetic oligonucleotide
gcuuggcucucucuacaag

SEQ ID NO: 1200146 - RNA, 19 nt, Artificial Sequence
  Description of Artificial Sequence: Synthetic oligonucleotide
agacucccucuugaaaaga

SEQ ID NO: 1200147 - RNA, 19 nt, Artificial Sequence
  Description of Artificial Sequence: Synthetic oligonucleotide
acacccgagagagaucuuu

SEQ ID NO: 1200148 - RNA, 19 nt, Artificial Sequence
  Description of Artificial Sequence: Synthetic oligonucleotide
agccccauguucguaucca

SEQ ID NO: 1200149 - RNA, 19 nt, Artificial Sequence
  Description of Artificial Sequence: Synthetic oligonucleotide
uuguagcacggggacucca

SEQ ID NO: 1200150 - RNA, 19 nt, Artificial Sequence
  Description of Artificial Sequence: Synthetic oligonucleotide
gucagccauaucucacaga

SEQ ID NO: 1200151 - RNA, 19 nt, Artificial Sequence
  Description of Artificial Sequence: Synthetic oligonucleotide
augcacagucauguuggga

SEQ ID NO: 1200152 - RNA, 19 nt, Artificial Sequence
  Description of Artificial Sequence: Synthetic oligonucleotide
gagucucacugagugaccu

SEQ ID NO: 1200153 - RNA, 19 nt, Artificial Sequence
  Description of Artificial Sequence: Synthetic oligonucleotide
gccucauuaagaagggauc

SEQ ID NO: 1200154 - RNA, 19 nt, Artificial Sequence
  Description of Artificial Sequence: Synthetic oligonucleotide
ggcacuaaaaccugcucau

SEQ ID NO: 1200155 - RNA, 19 nt, Artificial Sequence
  Description of Artificial Sequence: Synthetic oligonucleotide
aggguucuuuggcacuaaa

SEQ ID NO: 1200156 - RNA, 19 nt, Artificial Sequence
  Description of Artificial Sequence: Synthetic oligonucleotide
cccacaaugcacagucaug

SEQ ID NO: 1200157 - RNA, 19 nt, Artificial Sequence
  Description of Artificial Sequence: Synthetic oligonucleotide
guucggaugagcacacugu

SEQ ID NO: 1200158 - RNA, 19 nt, Artificial Sequence
  Description of Artificial Sequence: Synthetic oligonucleotide
cucucucuacaaguucauc

SEQ ID NO: 1200159 - RNA, 19 nt, Artificial Sequence
  Description of Artificial Sequence: Synthetic oligonucleotide
agcuuccauaggagugugg

SEQ ID NO: 1200160 - RNA, 19 nt, Artificial Sequence
  Description of Artificial Sequence: Synthetic oligonucleotide
ggaaucacugccaccagcu

SEQ ID NO: 1200161 - RNA, 19 nt, Artificial Sequence
  Description of Artificial Sequence: Synthetic oligonucleotide
gacaccccguguugauuga

SEQ ID NO: 1200162 - RNA, 19 nt, Artificial Sequence
  Description of Artificial Sequence: Synthetic oligonucleotide
cucacugagugaccuuuaa

SEQ ID NO: 1200163 - RNA, 19 nt, Artificial Sequence
  Description of Artificial Sequence: Synthetic oligonucleotide
uucgcuggucagccauauc

SEQ ID NO: 1200164 - RNA, 19 nt, Artificial Sequence
  Description of Artificial Sequence: Synthetic oligonucleotide
uugcuuccccaaagguuuu

SEQ ID NO: 1200165 - RNA, 19 nt, Artificial Sequence
  Description of Artificial Sequence: Synthetic oligonucleotide
cauugagacaccccguguu

SEQ ID NO: 1200166 - RNA, 19 nt, Artificial Sequence
  Description of Artificial Sequence: Synthetic oligonucleotide
ccgagucacgcagaguugc

SEQ ID NO: 1200167 - RNA, 19 nt, Artificial Sequence
  Description of Artificial Sequence: Synthetic oligonucleotide
cauggcucccuccaggaau

SEQ ID NO: 1200168 - RNA, 19 nt, Artificial Sequence
  Description of Artificial Sequence: Synthetic oligonucleotide
augcuaggaagaguccuuu

SEQ ID NO: 1200169 - RNA, 19 nt, Artificial Sequence
  Description of Artificial Sequence: Synthetic oligonucleotide
ggugcuacaggcauggauu

SEQ ID NO: 1200170 - RNA, 19 nt, Artificial Sequence
  Description of Artificial Sequence: Synthetic oligonucleotide
guucaucaaugggauaacu

SEQ ID NO: 1200171 - RNA, 19 nt, Artificial Sequence
  Description of Artificial Sequence: Synthetic oligonucleotide
gucaaacccgacacuucuc

SEQ ID NO: 1200172 - RNA, 19 nt, Artificial Sequence
  Description of Artificial Sequence: Synthetic oligonucleotide
gacuuggguccaaguuccc

SEQ ID NO: 1200173 - RNA, 19 nt, Artificial Sequence
  Description of Artificial Sequence: Synthetic oligonucleotide
gucugguaacuuguucgga

SEQ ID NO: 1200174 - RNA, 19 nt, Artificial Sequence
  Description of Artificial Sequence: Synthetic oligonucleotide
gcguguagauuuugguguc

SEQ ID NO: 1200175 - RNA, 19 nt, Artificial Sequence
  Description of Artificial Sequence: Synthetic oligonucleotide
caguaaguacaagcauuga

SEQ ID NO: 1200176 - RNA, 19 nt, Artificial Sequence
  Description of Artificial Sequence: Synthetic oligonucleotide
cccgacacuucucccuugg

SEQ ID NO: 1200177 - RNA, 19 nt, Artificial Sequence
  Description of Artificial Sequence: Synthetic oligonucleotide
acgcagaguugcagcacag

SEQ ID NO: 1200178 - RNA, 19 nt, Artificial Sequence
  Description of Artificial Sequence: Synthetic oligonucleotide
gucuucgcuggucagccau

SEQ ID NO: 1200179 - RNA, 19 nt, Artificial Sequence
  Description of Artificial Sequence: Synthetic oligonucleotide
cagcaugaccaguucagau

SEQ ID NO: 1200180 - RNA, 19 nt, Artificial Sequence
  Description of Artificial Sequence: Synthetic oligonucleotide
uuguucggaugagcacacu

SEQ ID NO: 1200181 - RNA, 19 nt, Artificial Sequence
  Description of Artificial Sequence: Synthetic oligonucleotide
ugccaaugucucugccgua

SEQ ID NO: 1200182 - RNA, 19 nt, Artificial Sequence
  Description of Artificial Sequence: Synthetic oligonucleotide
accugcucauagaaucgau

SEQ ID NO: 1200183 - RNA, 19 nt, Artificial Sequence
  Description of Artificial Sequence: Synthetic oligonucleotide
cuggguugguuguaggauu

SEQ ID NO: 1200184 - RNA, 19 nt, Artificial Sequence
  Description of Artificial Sequence: Synthetic oligonucleotide
ccccaugaauucaggguuc

SEQ ID NO: 1200185 - RNA, 19 nt, Artificial Sequence
  Description of Artificial Sequence: Synthetic oligonucleotide
gaggcggacugcacuggga

SEQ ID NO: 1200186 - RNA, 19 nt, Artificial Sequence
  Description of Artificial Sequence: Synthetic oligonucleotide
ccagacaaggcagcaugac

SEQ ID NO: 1200187 - RNA, 19 nt, Artificial Sequence
  Description of Artificial Sequence: Synthetic oligonucleotide
ggguucuuuggcacuaaaa

SEQ ID NO: 1200188 - RNA, 19 nt, Artificial Sequence
  Description of Artificial Sequence: Synthetic oligonucleotide
gauccagacaaggcagcau

SEQ ID NO: 1200189 - RNA, 19 nt, Artificial Sequence
  Description of Artificial Sequence: Synthetic oligonucleotide
caccccguguugauugaaa

SEQ ID NO: 1200190 - RNA, 19 nt, Artificial Sequence
  Description of Artificial Sequence: Synthetic oligonucleotide
gagaacugguguaguugcu

SEQ ID NO: 1200191 - RNA, 19 nt, Artificial Sequence
  Description of Artificial Sequence: Synthetic oligonucleotide
ccuuauggaugcuucauuu

SEQ ID NO: 1200192 - RNA, 19 nt, Artificial Sequence
  Description of Artificial Sequence: Synthetic oligonucleotide
guaugccgagucacgcaga

SEQ ID NO: 1200193 - RNA, 19 nt, Artificial Sequence
  Description of Artificial Sequence: Synthetic oligonucleotide
ggauggcguguagauuuug

SEQ ID NO: 1200194 - RNA, 19 nt, Artificial Sequence
  Description of Artificial Sequence: Synthetic oligonucleotide
cguauccaaauuuucugua

SEQ ID NO: 1200195 - RNA, 19 nt, Artificial Sequence
  Description of Artificial Sequence: Synthetic oligonucleotide
guauuaagggcuggauguu

SEQ ID NO: 1200196 - RNA, 19 nt, Artificial Sequence
  Description of Artificial Sequence: Synthetic oligonucleotide
ccccaaccgcuuuccauug

SEQ ID NO: 1200197 - RNA, 19 nt, Artificial Sequence
  Description of Artificial Sequence: Synthetic oligonucleotide
acaccccguguugauugaa

SEQ ID NO: 1200198 - RNA, 19 nt, Artificial Sequence
  Description of Artificial Sequence: Synthetic oligonucleotide
cccauguucguauccaaau

SEQ ID NO: 1200199 - RNA, 19 nt, Artificial Sequence
  Description of Artificial Sequence: Synthetic oligonucleotide
cuccuuauggaugcuucau

SEQ ID NO: 1200200 - RNA, 19 nt, Artificial Sequence
  Description of Artificial Sequence: Synthetic oligonucleotide
aacacccgagagagaucuu

SEQ ID NO: 1200201 - RNA, 19 nt, Artificial Sequence
  Description of Artificial Sequence: Synthetic oligonucleotide
ugggugcuacaggcaugga

SEQ ID NO: 1200202 - RNA, 19 nt, Artificial Sequence
  Description of Artificial Sequence: Synthetic oligonucleotide
gcagccccauguucguauc

SEQ ID NO: 1200203 - RNA, 19 nt, Artificial Sequence
  Description of Artificial Sequence: Synthetic oligonucleotide
guccuuuaaguggcagacu

SEQ ID NO: 1200204 - RNA, 19 nt, Artificial Sequence
  Description of Artificial Sequence: Synthetic oligonucleotide
ccgacacuucucccuuggc

SEQ ID NO: 1200205 - RNA, 19 nt, Artificial Sequence
  Description of Artificial Sequence: Synthetic oligonucleotide
cacccgagagagaucuuuu

SEQ ID NO: 1200206 - RNA, 19 nt, Artificial Sequence
  Description of Artificial Sequence: Synthetic oligonucleotide
gagacaccccguguugauu

SEQ ID NO: 1200207 - RNA, 19 nt, Artificial Sequence
  Description of Artificial Sequence: Synthetic oligonucleotide
cgauuaugugcaacauaaa

SEQ ID NO: 1200208 - RNA, 19 nt, Artificial Sequence
  Description of Artificial Sequence: Synthetic oligonucleotide
ccccauguucguauccaaa

SEQ ID NO: 1200209 - RNA, 19 nt, Artificial Sequence
  Description of Artificial Sequence: Synthetic oligonucleotide
gcugugauuugaggucaaa

SEQ ID NO: 1200210 - RNA, 19 nt, Artificial Sequence
  Description of Artificial Sequence: Synthetic oligonucleotide
ccauguucguauccaaauu

SEQ ID NO: 1200211 - RNA, 19 nt, Artificial Sequence
  Description of Artificial Sequence: Synthetic oligonucleotide
gcuacccacaaugcacagu

SEQ ID NO: 1200212 - RNA, 19 nt, Artificial Sequence
  Description of Artificial Sequence: Synthetic oligonucleotide
ccucuugaaaagacugcuu

SEQ ID NO: 1200213 - RNA, 19 nt, Artificial Sequence
  Description of Artificial Sequence: Synthetic oligonucleotide
ccguguugauugaaauuau

SEQ ID NO: 1200214 - RNA, 19 nt, Artificial Sequence
  Description of Artificial Sequence: Synthetic oligonucleotide
cguguugauugaaauuauu

SEQ ID NO: 1200215 - RNA, 19 nt, Artificial Sequence
  Description of Artificial Sequence: Synthetic oligonucleotide
cgagucacgcagaguugca

SEQ ID NO: 1200216 - RNA, 19 nt, Artificial Sequence
  Description of Artificial Sequence: Synthetic oligonucleotide
cagcacaauucuggaguau

SEQ ID NO: 1200217 - RNA, 19 nt, Artificial Sequence
  Description of Artificial Sequence: Synthetic oligonucleotide
gggacaucugcagcacaau

SEQ ID NO: 1200218 - RNA, 19 nt, Artificial Sequence
  Description of Artificial Sequence: Synthetic oligonucleotide
cccaugaauucaggguucu

SEQ ID NO: 1200219 - RNA, 19 nt, Artificial Sequence
  Description of Artificial Sequence: Synthetic oligonucleotide
ccccguguugauugaaauu

SEQ ID NO: 1200220 - RNA, 19 nt, Artificial Sequence
  Description of Artificial Sequence: Synthetic oligonucleotide
gccguaggcuccagugucu

SEQ ID NO: 1200221 - RNA, 19 nt, Artificial Sequence
  Description of Artificial Sequence: Synthetic oligonucleotide
aaacuuaccaacuagaaug

SEQ ID NO: 1200222 - RNA, 19 nt, Artificial Sequence
  Description of Artificial Sequence: Synthetic oligonucleotide
aaugcuauaccuuuaauau

SEQ ID NO: 1200223 - RNA, 19 nt, Artificial Sequence
  Description of Artificial Sequence: Synthetic oligonucleotide
uuuguuaccaaucuuggcc

SEQ ID NO: 1200224 - RNA, 19 nt, Artificial Sequence
  Description of Artificial Sequence: Synthetic oligonucleotide
aaagguaauaaacuuacca

SEQ ID NO: 1200225 - RNA, 19 nt, Artificial Sequence
  Description of Artificial Sequence: Synthetic oligonucleotide
uccgauuucaucaagaacu

SEQ ID NO: 1200226 - RNA, 19 nt, Artificial Sequence
  Description of Artificial Sequence: Synthetic oligonucleotide
auagacgugacuuuugagc

SEQ ID NO: 1200227 - RNA, 19 nt, Artificial Sequence
  Description of Artificial Sequence: Synthetic oligonucleotide
ucaaguauugucauaguag

SEQ ID NO: 1200228 - RNA, 19 nt, Artificial Sequence
  Description of Artificial Sequence: Synthetic oligonucleotide
uuuauuacaucguccacgg

SEQ ID NO: 1200229 - RNA, 19 nt, Artificial Sequence
  Description of Artificial Sequence: Synthetic oligonucleotide
ugcuauuuaaggcaggugc

SEQ ID NO: 1200230 - RNA, 19 nt, Artificial Sequence
  Description of Artificial Sequence: Synthetic oligonucleotide
uuaauuucuaauuccagcu

SEQ ID NO: 1200231 - RNA, 19 nt, Artificial Sequence
  Description of Artificial Sequence: Synthetic oligonucleotide
ucuaagucaaguauuguca

SEQ ID NO: 1200232 - RNA, 19 nt, Artificial Sequence
  Description of Artificial Sequence: Synthetic oligonucleotide
aauaauuuggcagcugcac

SEQ ID NO: 1200233 - RNA, 19 nt, Artificial Sequence
  Description of Artificial Sequence: Synthetic oligonucleotide
augugauuaauucagcguc

SEQ ID NO: 1200234 - RNA, 19 nt, Artificial Sequence
  Description of Artificial Sequence: Synthetic oligonucleotide
aauucgcuuacuuuagaag

SEQ ID NO: 1200235 - RNA, 19 nt, Artificial Sequence
  Description of Artificial Sequence: Synthetic oligonucleotide
aaugugauuaauucagcgu

SEQ ID NO: 1200236 - RNA, 19 nt, Artificial Sequence
  Description of Artificial Sequence: Synthetic oligonucleotide
agcuuuacaacacagcuug

SEQ ID NO: 1200237 - RNA, 19 nt, Artificial Sequence
  Description of Artificial Sequence: Synthetic oligonucleotide
aagguaauaaacuuaccaa

SEQ ID NO: 1200238 - RNA, 19 nt, Artificial Sequence
  Description of Artificial Sequence: Synthetic oligonucleotide
uuuacaagucucuuuaagu

SEQ ID NO: 1200239 - RNA, 19 nt, Artificial Sequence
  Description of Artificial Sequence: Synthetic oligonucleotide
aaaacaaaacaaaacaaaa

SEQ ID NO: 1200240 - RNA, 19 nt, Artificial Sequence
  Description of Artificial Sequence: Synthetic oligonucleotide
uuagaacacaccccgaccc

SEQ ID NO: 1200241 - RNA, 19 nt, Artificial Sequence
  Description of Artificial Sequence: Synthetic oligonucleotide
uauuacaucguccacgguc

SEQ ID NO: 1200242 - RNA, 19 nt, Artificial Sequence
  Description of Artificial Sequence: Synthetic oligonucleotide
gcuaauuauauccacuucg

SEQ ID NO: 1200243 - RNA, 19 nt, Artificial Sequence
  Description of Artificial Sequence: Synthetic oligonucleotide
gauuauagcccucugugug

SEQ ID NO: 1200244 - RNA, 19 nt, Artificial Sequence
  Description of Artificial Sequence: Synthetic oligonucleotide
uuuagaggauuuaaugugu

SEQ ID NO: 1200245 - RNA, 19 nt, Artificial Sequence
  Description of Artificial Sequence: Synthetic oligonucleotide
uuaaagagggacgccaugg

SEQ ID NO: 1200246 - RNA, 19 nt, Artificial Sequence
  Description of Artificial Sequence: Synthetic oligonucleotide
cuuuauuacaucguccacg

SEQ ID NO: 1200247 - RNA, 19 nt, Artificial Sequence
  Description of Artificial Sequence: Synthetic oligonucleotide
aauaaacuuaccaacuaga

SEQ ID NO: 1200248 - RNA, 19 nt, Artificial Sequence
  Description of Artificial Sequence: Synthetic oligonucleotide
ugcuauaccuuuaauauuu

SEQ ID NO: 1200249 - RNA, 19 nt, Artificial Sequence
  Description of Artificial Sequence: Synthetic oligonucleotide
auucgcuuacuuuagaagu

SEQ ID NO: 1200250 - RNA, 19 nt, Artificial Sequence
  Description of Artificial Sequence: Synthetic oligonucleotide
agcugcuuagcuaaaaccc

SEQ ID NO: 1200251 - RNA, 19 nt, Artificial Sequence
  Description of Artificial Sequence: Synthetic oligonucleotide
accaacuagaauguucucc

SEQ ID NO: 1200252 - RNA, 19 nt, Artificial Sequence
  Description of Artificial Sequence: Synthetic oligonucleotide
uuuagaacacaccccgacc

SEQ ID NO: 1200253 - RNA, 19 nt, Artificial Sequence
  Description of Artificial Sequence: Synthetic oligonucleotide
uuuacaacacagcuugggu

SEQ ID NO: 1200254 - RNA, 19 nt, Artificial Sequence
  Description of Artificial Sequence: Synthetic oligonucleotide
uaaugcuauaccuuuaaua

SEQ ID NO: 1200255 - RNA, 19 nt, Artificial Sequence
  Description of Artificial Sequence: Synthetic oligonucleotide
ucggucucugauuauagcc

SEQ ID NO: 1200256 - RNA, 19 nt, Artificial Sequence
  Description of Artificial Sequence: Synthetic oligonucleotide
ucauuacuauaaaauguga

SEQ ID NO: 1200257 - RNA, 19 nt, Artificial Sequence
  Description of Artificial Sequence: Synthetic oligonucleotide
aaauucgcuuacuuuagaa

SEQ ID NO: 1200258 - RNA, 19 nt, Artificial Sequence
  Description of Artificial Sequence: Synthetic oligonucleotide
aagucucaguucuuggaag

SEQ ID NO: 1200259 - RNA, 19 nt, Artificial Sequence
  Description of Artificial Sequence: Synthetic oligonucleotide
cuaaguuauaauucauaug

SEQ ID NO: 1200260 - RNA, 19 nt, Artificial Sequence
  Description of Artificial Sequence: Synthetic oligonucleotide
uacaagucucuuuaaguug

SEQ ID NO: 1200261 - RNA, 19 nt, Artificial Sequence
  Description of Artificial Sequence: Synthetic oligonucleotide
uaaacuuaccaacuagaau

SEQ ID NO: 1200262 - RNA, 19 nt, Artificial Sequence
  Description of Artificial Sequence: Synthetic oligonucleotide
aaaagcucaugacaguuuu

SEQ ID NO: 1200263 - RNA, 19 nt, Artificial Sequence
  Description of Artificial Sequence: Synthetic oligonucleotide
agaagucuaagucaaguau

SEQ ID NO: 1200264 - RNA, 19 nt, Artificial Sequence
  Description of Artificial Sequence: Synthetic oligonucleotide
uuggugaucuaaucuaccc

SEQ ID NO: 1200265 - RNA, 19 nt, Artificial Sequence
  Description of Artificial Sequence: Synthetic oligonucleotide
auaagcuuuacaacacagc

SEQ ID NO: 1200266 - RNA, 19 nt, Artificial Sequence
  Description of Artificial Sequence: Synthetic oligonucleotide
gacgguaagcuucuggcag

SEQ ID NO: 1200267 - RNA, 19 nt, Artificial Sequence
  Description of Artificial Sequence: Synthetic oligonucleotide
uagacgugacuuuugagcu

SEQ ID NO: 1200268 - RNA, 19 nt, Artificial Sequence
  Description of Artificial Sequence: Synthetic oligonucleotide
aauucagcgucuucuuucu

SEQ ID NO: 1200269 - RNA, 19 nt, Artificial Sequence
  Description of Artificial Sequence: Synthetic oligonucleotide
ugagcuuacugcaaaaguu

SEQ ID NO: 1200270 - RNA, 19 nt, Artificial Sequence
  Description of Artificial Sequence: Synthetic oligonucleotide
ccuaaugacauuuaacaag

SEQ ID NO: 1200271 - RNA, 19 nt, Artificial Sequence
  Description of Artificial Sequence: Synthetic oligonucleotide
agaugguagccuuugaggu

SEQ ID NO: 1200272 - RNA, 19 nt, Artificial Sequence
  Description of Artificial Sequence: Synthetic oligonucleotide
uuacaagucucuuuaaguu

SEQ ID NO: 1200273 - RNA, 19 nt, Artificial Sequence
  Description of Artificial Sequence: Synthetic oligonucleotide
cuuaccaacuagaauguuc

SEQ ID NO: 1200274 - RNA, 19 nt, Artificial Sequence
  Description of Artificial Sequence: Synthetic oligonucleotide
auauguuugugcuauuuaa

SEQ ID NO: 1200275 - RNA, 19 nt, Artificial Sequence
  Description of Artificial Sequence: Synthetic oligonucleotide
uccacuucgcuuuuauaag

SEQ ID NO: 1200276 - RNA, 19 nt, Artificial Sequence
  Description of Artificial Sequence: Synthetic oligonucleotide
uuguuaccaaucuuggcca

SEQ ID NO: 1200277 - RNA, 19 nt, Artificial Sequence
  Description of Artificial Sequence: Synthetic oligonucleotide
auggagaaagucucaguuc

SEQ ID NO: 1200278 - RNA, 19 nt, Artificial Sequence
  Description of Artificial Sequence: Synthetic oligonucleotide
uuggguaacuguucgaagu

SEQ ID NO: 1200279 - RNA, 19 nt, Artificial Sequence
  Description of Artificial Sequence: Synthetic oligonucleotide
auucauauggagaaagucu

SEQ ID NO: 1200280 - RNA, 19 nt, Artificial Sequence
  Description of Artificial Sequence: Synthetic oligonucleotide
gcuuuuauaagcuuuacaa

SEQ ID NO: 1200281 - RNA, 19 nt, Artificial Sequence
  Description of Artificial Sequence: Synthetic oligonucleotide
agagauuucaauuccgauu

SEQ ID NO: 1200282 - RNA, 19 nt, Artificial Sequence
  Description of Artificial Sequence: Synthetic oligonucleotide
aaggacggcgccugggugg

SEQ ID NO: 1200283 - RNA, 19 nt, Artificial Sequence
  Description of Artificial Sequence: Synthetic oligonucleotide
ugugauuaauucagcgucu

SEQ ID NO: 1200284 - RNA, 19 nt, Artificial Sequence
  Description of Artificial Sequence: Synthetic oligonucleotide
uuuaagacagauguuuaaa

SEQ ID NO: 1200285 - RNA, 19 nt, Artificial Sequence
  Description of Artificial Sequence: Synthetic oligonucleotide
uggugaucuaaucuacccc

SEQ ID NO: 1200286 - RNA, 19 nt, Artificial Sequence
  Description of Artificial Sequence: Synthetic oligonucleotide
uuuagaagucuaagucaag

SEQ ID NO: 1200287 - RNA, 19 nt, Artificial Sequence
  Description of Artificial Sequence: Synthetic oligonucleotide
aagucuaagucaaguauug

SEQ ID NO: 1200288 - RNA, 19 nt, Artificial Sequence
  Description of Artificial Sequence: Synthetic oligonucleotide
cagugguagacauugcacc

SEQ ID NO: 1200289 - RNA, 19 nt, Artificial Sequence
  Description of Artificial Sequence: Synthetic oligonucleotide
aaaauucgcuuacuuuaga

SEQ ID NO: 1200290 - RNA, 19 nt, Artificial Sequence
  Description of Artificial Sequence: Synthetic oligonucleotide
cuuuacaacacagcuuggg

SEQ ID NO: 1200291 - RNA, 19 nt, Artificial Sequence
  Description of Artificial Sequence: Synthetic oligonucleotide
uuugagcuuacugcaaaag

SEQ ID NO: 1200292 - RNA, 19 nt, Artificial Sequence
  Description of Artificial Sequence: Synthetic oligonucleotide
cagacgguaagcuucuggc

SEQ ID NO: 1200293 - RNA, 19 nt, Artificial Sequence
  Description of Artificial Sequence: Synthetic oligonucleotide
aacuagaauguucucccaa

SEQ ID NO: 1200294 - RNA, 19 nt, Artificial Sequence
  Description of Artificial Sequence: Synthetic oligonucleotide
uguucgaagucucaauuuu

SEQ ID NO: 1200295 - RNA, 19 nt, Artificial Sequence
  Description of Artificial Sequence: Synthetic oligonucleotide
ucuguuuccguagauggac

SEQ ID NO: 1200296 - RNA, 19 nt, Artificial Sequence
  Description of Artificial Sequence: Synthetic oligonucleotide
aacacagacuaaguuauaa

SEQ ID NO: 1200297 - RNA, 19 nt, Artificial Sequence
  Description of Artificial Sequence: Synthetic oligonucleotide
ugccaguuaaaauaauuua

SEQ ID NO: 1200298 - RNA, 19 nt, Artificial Sequence
  Description of Artificial Sequence: Synthetic oligonucleotide
uugaguugccguucaaucu

SEQ ID NO: 1200299 - RNA, 19 nt, Artificial Sequence
  Description of Artificial Sequence: Synthetic oligonucleotide
gucuaagucaaguauuguc

SEQ ID NO: 1200300 - RNA, 19 nt, Artificial Sequence
  Description of Artificial Sequence: Synthetic oligonucleotide
uucgaagucucaauuuuau

SEQ ID NO: 1200301 - RNA, 19 nt, Artificial Sequence
  Description of Artificial Sequence: Synthetic oligonucleotide
aaggacggcgagaaggacg

SEQ ID NO: 1200302 - RNA, 19 nt, Artificial Sequence
  Description of Artificial Sequence: Synthetic oligonucleotide
agcuaaaacccugcaagcg

SEQ ID NO: 1200303 - RNA, 19 nt, Artificial Sequence
  Description of Artificial Sequence: Synthetic oligonucleotide
uagcuaaaacccugcaagc

SEQ ID NO: 1200304 - RNA, 19 nt, Artificial Sequence
  Description of Artificial Sequence: Synthetic oligonucleotide
acggucuucuucuuaaaga

SEQ ID NO: 1200305 - RNA, 19 nt, Artificial Sequence
  Description of Artificial Sequence: Synthetic oligonucleotide
ugguagacauugcaccugc

SEQ ID NO: 1200306 - RNA, 19 nt, Artificial Sequence
  Description of Artificial Sequence: Synthetic oligonucleotide
uucgcuuacuuuagaaguc

SEQ ID NO: 1200307 - RNA, 19 nt, Artificial Sequence
  Description of Artificial Sequence: Synthetic oligonucleotide
aagagggacgccaugguga

SEQ ID NO: 1200308 - RNA, 19 nt, Artificial Sequence
  Description of Artificial Sequence: Synthetic oligonucleotide
cuaaaacccugcaagcguc

SEQ ID NO: 1200309 - RNA, 19 nt, Artificial Sequence
  Description of Artificial Sequence: Synthetic oligonucleotide
agccgaaggcgcuuuggcc

SEQ ID NO: 1200310 - RNA, 19 nt, Artificial Sequence
  Description of Artificial Sequence: Synthetic oligonucleotide
aacuuaccaacuagaaugu

SEQ ID NO: 1200311 - RNA, 19 nt, Artificial Sequence
  Description of Artificial Sequence: Synthetic oligonucleotide
aucucuaugccaugcagaa

SEQ ID NO: 1200312 - RNA, 19 nt, Artificial Sequence
  Description of Artificial Sequence: Synthetic oligonucleotide
acuaucaacaaaggacaag

SEQ ID NO: 1200313 - RNA, 19 nt, Artificial Sequence
  Description of Artificial Sequence: Synthetic oligonucleotide
auuuagaagaauggcuuca

SEQ ID NO: 1200314 - RNA, 19 nt, Artificial Sequence
  Description of Artificial Sequence: Synthetic oligonucleotide
acauagacgugacuuuuga

SEQ ID NO: 1200315 - RNA, 19 nt, Artificial Sequence
  Description of Artificial Sequence: Synthetic oligonucleotide
uucgcuuuuauaagcuuua

SEQ ID NO: 1200316 - RNA, 19 nt, Artificial Sequence
  Description of Artificial Sequence: Synthetic oligonucleotide
aguccuaacguaacuauca

SEQ ID NO: 1200317 - RNA, 19 nt, Artificial Sequence
  Description of Artificial Sequence: Synthetic oligonucleotide
aacuguucgaagucucaau

SEQ ID NO: 1200318 - RNA, 19 nt, Artificial Sequence
  Description of Artificial Sequence: Synthetic oligonucleotide
ggacaagcaacagauacag

SEQ ID NO: 1200319 - RNA, 19 nt, Artificial Sequence
  Description of Artificial Sequence: Synthetic oligonucleotide
uagaagucuaagucaagua

SEQ ID NO: 1200320 - RNA, 19 nt, Artificial Sequence
  Description of Artificial Sequence: Synthetic oligonucleotide
auuacaucguccacggucu

SEQ ID NO: 1200321 - RNA, 19 nt, Artificial Sequence
  Description of Artificial Sequence: Synthetic oligonucleotide
acuagaauguucucccaaa

SEQ ID NO: 1200322 - RNA, 19 nt, Artificial Sequence
  Description of Artificial Sequence: Synthetic oligonucleotide
auuccgauuucaucaagaa

SEQ ID NO: 1200323 - RNA, 19 nt, Artificial Sequence
  Description of Artificial Sequence: Synthetic oligonucleotide
agaaagaacucaguuugca

SEQ ID NO: 1200324 - RNA, 19 nt, Artificial Sequence
  Description of Artificial Sequence: Synthetic oligonucleotide
guaauaaacuuaccaacua

SEQ ID NO: 1200325 - RNA, 19 nt, Artificial Sequence
  Description of Artificial Sequence: Synthetic oligonucleotide
cuuggguaacuguucgaag

SEQ ID NO: 1200326 - RNA, 19 nt, Artificial Sequence
  Description of Artificial Sequence: Synthetic oligonucleotide
acuguucgaagucucaauu

SEQ ID NO: 1200327 - RNA, 19 nt, Artificial Sequence
  Description of Artificial Sequence: Synthetic oligonucleotide
uuaccaaucuuggccaucu

SEQ ID NO: 1200328 - RNA, 19 nt, Artificial Sequence
  Description of Artificial Sequence: Synthetic oligonucleotide
auaaacuuaccaacuagaa

SEQ ID NO: 1200329 - RNA, 19 nt, Artificial Sequence
  Description of Artificial Sequence: Synthetic oligonucleotide
cauagacgugacuuuugag

SEQ ID NO: 1200330 - RNA, 19 nt, Artificial Sequence
  Description of Artificial Sequence: Synthetic oligonucleotide
cugcaagcgucuuuguuac

SEQ ID NO: 1200331 - RNA, 19 nt, Artificial Sequence
  Description of Artificial Sequence: Synthetic oligonucleotide
auauggagaaagucucagu

SEQ ID NO: 1200332 - RNA, 19 nt, Artificial Sequence
  Description of Artificial Sequence: Synthetic oligonucleotide
ugucuuugcagugguagac

SEQ ID NO: 1200333 - RNA, 19 nt, Artificial Sequence
  Description of Artificial Sequence: Synthetic oligonucleotide
aaaggacggcgagaaggac

SEQ ID NO: 1200334 - RNA, 19 nt, Artificial Sequence
  Description of Artificial Sequence: Synthetic oligonucleotide
cuaaguaaugacaucucua

SEQ ID NO: 1200335 - RNA, 19 nt, Artificial Sequence
  Description of Artificial Sequence: Synthetic oligonucleotide
uguaguccuaacguaacua

SEQ ID NO: 1200336 - RNA, 19 nt, Artificial Sequence
  Description of Artificial Sequence: Synthetic oligonucleotide
uuacugcaaaaguucuugu

SEQ ID NO: 1200337 - RNA, 19 nt, Artificial Sequence
  Description of Artificial Sequence: Synthetic oligonucleotide
ucuuugcagugguagacau

SEQ ID NO: 1200338 - RNA, 19 nt, Artificial Sequence
  Description of Artificial Sequence: Synthetic oligonucleotide
gguucuguuccuuuauuac

SEQ ID NO: 1200339 - RNA, 19 nt, Artificial Sequence
  Description of Artificial Sequence: Synthetic oligonucleotide
uaguccuaacguaacuauc

SEQ ID NO: 1200340 - RNA, 19 nt, Artificial Sequence
  Description of Artificial Sequence: Synthetic oligonucleotide
uuuagaagaauggcuucaa

SEQ ID NO: 1200341 - RNA, 19 nt, Artificial Sequence
  Description of Artificial Sequence: Synthetic oligonucleotide
ugauuaauucagcgucuuc

SEQ ID NO: 1200342 - RNA, 19 nt, Artificial Sequence
  Description of Artificial Sequence: Synthetic oligonucleotide
ucucgggacacgagcugcg

SEQ ID NO: 1200343 - RNA, 19 nt, Artificial Sequence
  Description of Artificial Sequence: Synthetic oligonucleotide
agagggacgccauggugag

SEQ ID NO: 1200344 - RNA, 19 nt, Artificial Sequence
  Description of Artificial Sequence: Synthetic oligonucleotide
uggacaagcugcuuagcua

SEQ ID NO: 1200345 - RNA, 19 nt, Artificial Sequence
  Description of Artificial Sequence: Synthetic oligonucleotide
cacacguauggcuugguga

SEQ ID NO: 1200346 - RNA, 19 nt, Artificial Sequence
  Description of Artificial Sequence: Synthetic oligonucleotide
uguuuccguagauggacaa

SEQ ID NO: 1200347 - RNA, 19 nt, Artificial Sequence
  Description of Artificial Sequence: Synthetic oligonucleotide
aucaagggugucauugauc

SEQ ID NO: 1200348 - RNA, 19 nt, Artificial Sequence
  Description of Artificial Sequence: Synthetic oligonucleotide
gucaaguauugucauagua

SEQ ID NO: 1200349 - RNA, 19 nt, Artificial Sequence
  Description of Artificial Sequence: Synthetic oligonucleotide
uuccguagauggacaagcu

SEQ ID NO: 1200350 - RNA, 19 nt, Artificial Sequence
  Description of Artificial Sequence: Synthetic oligonucleotide
cuaacguaacuaucaacaa

SEQ ID NO: 1200351 - RNA, 19 nt, Artificial Sequence
  Description of Artificial Sequence: Synthetic oligonucleotide
agcugcgacaggcguggcc

SEQ ID NO: 1200352 - RNA, 19 nt, Artificial Sequence
  Description of Artificial Sequence: Synthetic oligonucleotide
cucggucucugauuauagc

SEQ ID NO: 1200353 - RNA, 19 nt, Artificial Sequence
  Description of Artificial Sequence: Synthetic oligonucleotide
gacauagacgugacuuuug

SEQ ID NO: 1200354 - RNA, 19 nt, Artificial Sequence
  Description of Artificial Sequence: Synthetic oligonucleotide
agacgguaagcuucuggca

SEQ ID NO: 1200355 - RNA, 19 nt, Artificial Sequence
  Description of Artificial Sequence: Synthetic oligonucleotide
acguaacuaucaacaaagg

SEQ ID NO: 1200356 - RNA, 19 nt, Artificial Sequence
  Description of Artificial Sequence: Synthetic oligonucleotide
aacacaccccgacccuaag

SEQ ID NO: 1200357 - RNA, 19 nt, Artificial Sequence
  Description of Artificial Sequence: Synthetic oligonucleotide
caucucuaugccaugcaga

SEQ ID NO: 1200358 - RNA, 19 nt, Artificial Sequence
  Description of Artificial Sequence: Synthetic oligonucleotide
augcuauaccuuuaauauu

SEQ ID NO: 1200359 - RNA, 19 nt, Artificial Sequence
  Description of Artificial Sequence: Synthetic oligonucleotide
ugugcacaauauguuugug

SEQ ID NO: 1200360 - RNA, 19 nt, Artificial Sequence
  Description of Artificial Sequence: Synthetic oligonucleotide
auggugagcgggcgcgccc

SEQ ID NO: 1200361 - RNA, 19 nt, Artificial Sequence
  Description of Artificial Sequence: Synthetic oligonucleotide
gaacucugauuucagugua

SEQ ID NO: 1200362 - RNA, 19 nt, Artificial Sequence
  Description of Artificial Sequence: Synthetic oligonucleotide
uaacuguucgaagucucaa

SEQ ID NO: 1200363 - RNA, 19 nt, Artificial Sequence
  Description of Artificial Sequence: Synthetic oligonucleotide
agaaggacggcgccugggu

SEQ ID NO: 1200364 - RNA, 19 nt, Artificial Sequence
  Description of Artificial Sequence: Synthetic oligonucleotide
caauuccgauuucaucaag

SEQ ID NO: 1200365 - RNA, 19 nt, Artificial Sequence
  Description of Artificial Sequence: Synthetic oligonucleotide
aagcgucuuuguuaccaau

SEQ ID NO: 1200366 - RNA, 19 nt, Artificial Sequence
  Description of Artificial Sequence: Synthetic oligonucleotide
gcuauuuaaggcaggugcc

SEQ ID NO: 1200367 - RNA, 19 nt, Artificial Sequence
  Description of Artificial Sequence: Synthetic oligonucleotide
aagcuuuacaacacagcuu

SEQ ID NO: 1200368 - RNA, 19 nt, Artificial Sequence
  Description of Artificial Sequence: Synthetic oligonucleotide
acguauggcuuggugaucu

SEQ ID NO: 1200369 - RNA, 19 nt, Artificial Sequence
  Description of Artificial Sequence: Synthetic oligonucleotide
cuuuugagcuuacugcaaa

SEQ ID NO: 1200370 - RNA, 19 nt, Artificial Sequence
  Description of Artificial Sequence: Synthetic oligonucleotide
cuucuuaaagagggacgcc

SEQ ID NO: 1200371 - RNA, 19 nt, Artificial Sequence
  Description of Artificial Sequence: Synthetic oligonucleotide
acaucguccacggucuucu

SEQ ID NO: 1200372 - RNA, 19 nt, Artificial Sequence
  Description of Artificial Sequence: Synthetic oligonucleotide
gaaggacggcgccugggug

SEQ ID NO: 1200373 - RNA, 19 nt, Artificial Sequence
  Description of Artificial Sequence: Synthetic oligonucleotide
acggcgagaaggacggcgc

SEQ ID NO: 1200374 - RNA, 19 nt, Artificial Sequence
  Description of Artificial Sequence: Synthetic oligonucleotide
uuauuacaucguccacggu

SEQ ID NO: 1200375 - RNA, 19 nt, Artificial Sequence
  Description of Artificial Sequence: Synthetic oligonucleotide
ggacaagcugcuuagcuaa

SEQ ID NO: 1200376 - RNA, 19 nt, Artificial Sequence
  Description of Artificial Sequence: Synthetic oligonucleotide
aaguauugucauaguagua

SEQ ID NO: 1200377 - RNA, 19 nt, Artificial Sequence
  Description of Artificial Sequence: Synthetic oligonucleotide
aagugugguuucauuacua

SEQ ID NO: 1200378 - RNA, 19 nt, Artificial Sequence
  Description of Artificial Sequence: Synthetic oligonucleotide
gcagacgguaagcuucugg

SEQ ID NO: 1200379 - RNA, 19 nt, Artificial Sequence
  Description of Artificial Sequence: Synthetic oligonucleotide
gagaaggacggcgccuggg

SEQ ID NO: 1200380 - RNA, 19 nt, Artificial Sequence
  Description of Artificial Sequence: Synthetic oligonucleotide
guuuccguagauggacaag

SEQ ID NO: 1200381 - RNA, 19 nt, Artificial Sequence
  Description of Artificial Sequence: Synthetic oligonucleotide
gugccuaaugacauuuaac

SEQ ID NO: 1200382 - RNA, 19 nt, Artificial Sequence
  Description of Artificial Sequence: Synthetic oligonucleotide
gaagucuaagucaaguauu

SEQ ID NO: 1200383 - RNA, 19 nt, Artificial Sequence
  Description of Artificial Sequence: Synthetic oligonucleotide
aaacccugcaagcgucuuu

SEQ ID NO: 1200384 - RNA, 19 nt, Artificial Sequence
  Description of Artificial Sequence: Synthetic oligonucleotide
auucaaaauucaacacaga

SEQ ID NO: 1200385 - RNA, 19 nt, Artificial Sequence
  Description of Artificial Sequence: Synthetic oligonucleotide
uuauauccacuucgcuuuu

SEQ ID NO: 1200386 - RNA, 19 nt, Artificial Sequence
  Description of Artificial Sequence: Synthetic oligonucleotide
ccacuucgcuuuuauaagc

SEQ ID NO: 1200387 - RNA, 19 nt, Artificial Sequence
  Description of Artificial Sequence: Synthetic oligonucleotide
uguuaccaaucuuggccau

SEQ ID NO: 1200388 - RNA, 19 nt, Artificial Sequence
  Description of Artificial Sequence: Synthetic oligonucleotide
gauggacaagcugcuuagc

SEQ ID NO: 1200389 - RNA, 19 nt, Artificial Sequence
  Description of Artificial Sequence: Synthetic oligonucleotide
cucgggaaaggacggcgag

SEQ ID NO: 1200390 - RNA, 19 nt, Artificial Sequence
  Description of Artificial Sequence: Synthetic oligonucleotide
agucuaagucaaguauugu

SEQ ID NO: 1200391 - RNA, 19 nt, Artificial Sequence
  Description of Artificial Sequence: Synthetic oligonucleotide
auugcaccugccaucuuca

SEQ ID NO: 1200392 - RNA, 19 nt, Artificial Sequence
  Description of Artificial Sequence: Synthetic oligonucleotide
ugacugcuugcauugucuu

SEQ ID NO: 1200393 - RNA, 19 nt, Artificial Sequence
  Description of Artificial Sequence: Synthetic oligonucleotide
cugcuugcauugucuuugc

SEQ ID NO: 1200394 - RNA, 19 nt, Artificial Sequence
  Description of Artificial Sequence: Synthetic oligonucleotide
ucucgguucuguuccuuua

SEQ ID NO: 1200395 - RNA, 19 nt, Artificial Sequence
  Description of Artificial Sequence: Synthetic oligonucleotide
guaguccuaacguaacuau

SEQ ID NO: 1200396 - RNA, 19 nt, Artificial Sequence
  Description of Artificial Sequence: Synthetic oligonucleotide
cuaagucaaguauugucau

SEQ ID NO: 1200397 - RNA, 19 nt, Artificial Sequence
  Description of Artificial Sequence: Synthetic oligonucleotide
gacgugacuuuugagcuua

SEQ ID NO: 1200398 - RNA, 19 nt, Artificial Sequence
  Description of Artificial Sequence: Synthetic oligonucleotide
ucgcuuuuauaagcuuuac

SEQ ID NO: 1200399 - RNA, 19 nt, Artificial Sequence
  Description of Artificial Sequence: Synthetic oligonucleotide
ucgggacacgagcugcgac

SEQ ID NO: 1200400 - RNA, 19 nt, Artificial Sequence
  Description of Artificial Sequence: Synthetic oligonucleotide
aggauuuaauguguuuauu

SEQ ID NO: 1200401 - RNA, 19 nt, Artificial Sequence
  Description of Artificial Sequence: Synthetic oligonucleotide
gugguagacauugcaccug

SEQ ID NO: 1200402 - RNA, 19 nt, Artificial Sequence
  Description of Artificial Sequence: Synthetic oligonucleotide
acacaccccgacccuaagu

SEQ ID NO: 1200403 - RNA, 19 nt, Artificial Sequence
  Description of Artificial Sequence: Synthetic oligonucleotide
agcuuggguaacuguucga

SEQ ID NO: 1200404 - RNA, 19 nt, Artificial Sequence
  Description of Artificial Sequence: Synthetic oligonucleotide
gccuaaugacauuuaacaa

SEQ ID NO: 1200405 - RNA, 19 nt, Artificial Sequence
  Description of Artificial Sequence: Synthetic oligonucleotide
uaccaacuagaauguucuc

SEQ ID NO: 1200406 - RNA, 19 nt, Artificial Sequence
  Description of Artificial Sequence: Synthetic oligonucleotide
uggugagcgggcgcgcccg

SEQ ID NO: 1200407 - RNA, 19 nt, Artificial Sequence
  Description of Artificial Sequence: Synthetic oligonucleotide
ugcucggucucugauuaua

SEQ ID NO: 1200408 - RNA, 19 nt, Artificial Sequence
  Description of Artificial Sequence: Synthetic oligonucleotide
guggacauagacgugacuu

SEQ ID NO: 1200409 - RNA, 19 nt, Artificial Sequence
  Description of Artificial Sequence: Synthetic oligonucleotide
ccuguaguccuaacguaac

SEQ ID NO: 1200410 - RNA, 19 nt, Artificial Sequence
  Description of Artificial Sequence: Synthetic oligonucleotide
ucgggaaaggacggcgaga

SEQ ID NO: 1200411 - RNA, 19 nt, Artificial Sequence
  Description of Artificial Sequence: Synthetic oligonucleotide
gcugcgacaggcguggccc

SEQ ID NO: 1200412 - RNA, 19 nt, Artificial Sequence
  Description of Artificial Sequence: Synthetic oligonucleotide
cuuguugacugcuugcauu

SEQ ID NO: 1200413 - RNA, 19 nt, Artificial Sequence
  Description of Artificial Sequence: Synthetic oligonucleotide
uguugacugcuugcauugu

SEQ ID NO: 1200414 - RNA, 19 nt, Artificial Sequence
  Description of Artificial Sequence: Synthetic oligonucleotide
ggugccuaaugacauuuaa

SEQ ID NO: 1200415 - RNA, 19 nt, Artificial Sequence
  Description of Artificial Sequence: Synthetic oligonucleotide
gccgaaggcgcuuuggcca

SEQ ID NO: 1200416 - RNA, 19 nt, Artificial Sequence
  Description of Artificial Sequence: Synthetic oligonucleotide
cugccuguaguccuaacgu

SEQ ID NO: 1200417 - RNA, 19 nt, Artificial Sequence
  Description of Artificial Sequence: Synthetic oligonucleotide
gugcuauuuaaggcaggug

SEQ ID NO: 1200418 - RNA, 19 nt, Artificial Sequence
  Description of Artificial Sequence: Synthetic oligonucleotide
ugcaagcgucuuuguuacc

SEQ ID NO: 1200419 - RNA, 19 nt, Artificial Sequence
  Description of Artificial Sequence: Synthetic oligonucleotide
gcagugguagacauugcac

SEQ ID NO: 1200420 - RNA, 19 nt, Artificial Sequence
  Description of Artificial Sequence: Synthetic oligonucleotide
gcuaaaacccugcaagcgu

SEQ ID NO: 1200421 - RNA, 19 nt, Artificial Sequence
  Description of Artificial Sequence: Synthetic oligonucleotide
ucccgcgaacgcgucgugg

SEQ ID NO: 1200422 - RNA, 19 nt, Artificial Sequence
  Description of Artificial Sequence: Synthetic oligonucleotide
gcaagcgucuuuguuacca

SEQ ID NO: 1200423 - RNA, 19 nt, Artificial Sequence
  Description of Artificial Sequence: Synthetic oligonucleotide
cacaccccgacccuaagua

SEQ ID NO: 1200424 - RNA, 19 nt, Artificial Sequence
  Description of Artificial Sequence: Synthetic oligonucleotide
cacuucgcuuuuauaagcu

SEQ ID NO: 1200425 - RNA, 19 nt, Artificial Sequence
  Description of Artificial Sequence: Synthetic oligonucleotide
acaccccgacccuaaguaa

SEQ ID NO: 1200426 - RNA, 19 nt, Artificial Sequence
  Description of Artificial Sequence: Synthetic oligonucleotide
uacaucguccacggucuuc

SEQ ID NO: 1200427 - RNA, 19 nt, Artificial Sequence
  Description of Artificial Sequence: Synthetic oligonucleotide
ccguucaaucucuucauca

SEQ ID NO: 1200428 - RNA, 19 nt, Artificial Sequence
  Description of Artificial Sequence: Synthetic oligonucleotide
guucgaagucucaauuuua

SEQ ID NO: 1200429 - RNA, 19 nt, Artificial Sequence
  Description of Artificial Sequence: Synthetic oligonucleotide
uccggccgggcucucggga

SEQ ID NO: 1200430 - RNA, 19 nt, Artificial Sequence
  Description of Artificial Sequence: Synthetic oligonucleotide
guuaccaaucuuggccauc

SEQ ID NO: 1200431 - RNA, 19 nt, Artificial Sequence
  Description of Artificial Sequence: Synthetic oligonucleotide
aggacggcgccuggguggg

SEQ ID NO: 1200432 - RNA, 19 nt, Artificial Sequence
  Description of Artificial Sequence: Synthetic oligonucleotide
gccauggugagcgggcgcg

SEQ ID NO: 1200433 - RNA, 19 nt, Artificial Sequence
  Description of Artificial Sequence: Synthetic oligonucleotide
ccgacccuaaguaaugaca

SEQ ID NO: 1200434 - RNA, 19 nt, Artificial Sequence
  Description of Artificial Sequence: Synthetic oligonucleotide
gcugcucggucucugauua

SEQ ID NO: 1200435 - RNA, 19 nt, Artificial Sequence
  Description of Artificial Sequence: Synthetic oligonucleotide
cucggcccgguucgguccg

SEQ ID NO: 1200436 - RNA, 19 nt, Artificial Sequence
  Description of Artificial Sequence: Synthetic oligonucleotide
cccuaaguaaugacaucuc

SEQ ID NO: 1200437 - RNA, 19 nt, Artificial Sequence
  Description of Artificial Sequence: Synthetic oligonucleotide
cccgcgaacgcgucguggg

SEQ ID NO: 1200438 - RNA, 19 nt, Artificial Sequence
  Description of Artificial Sequence: Synthetic oligonucleotide
caagcgucuuuguuaccaa

SEQ ID NO: 1200439 - RNA, 19 nt, Artificial Sequence
  Description of Artificial Sequence: Synthetic oligonucleotide
gcucggucucugauuauag

SEQ ID NO: 1200440 - RNA, 19 nt, Artificial Sequence
  Description of Artificial Sequence: Synthetic oligonucleotide
uuacaucguccacggucuu

SEQ ID NO: 1200441 - RNA, 19 nt, Artificial Sequence
  Description of Artificial Sequence: Synthetic oligonucleotide
cugcgacaggcguggcccg

SEQ ID NO: 1200442 - RNA, 19 nt, Artificial Sequence
  Description of Artificial Sequence: Synthetic oligonucleotide
cucuuuaaguuggugccua

SEQ ID NO: 1200443 - RNA, 19 nt, Artificial Sequence
  Description of Artificial Sequence: Synthetic oligonucleotide
guguggacauagacgugac

SEQ ID NO: 1200444 - RNA, 19 nt, Artificial Sequence
  Description of Artificial Sequence: Synthetic oligonucleotide
gcacacguauggcuuggug

SEQ ID NO: 1200445 - RNA, 19 nt, Artificial Sequence
  Description of Artificial Sequence: Synthetic oligonucleotide
gcuuuacaacacagcuugg

SEQ ID NO: 1200446 - RNA, 19 nt, Artificial Sequence
  Description of Artificial Sequence: Synthetic oligonucleotide
gcccgguucgguccggccg

SEQ ID NO: 1200447 - RNA, 19 nt, Artificial Sequence
  Description of Artificial Sequence: Synthetic oligonucleotide
accccgacccuaaguaaug

SEQ ID NO: 1200448 - RNA, 19 nt, Artificial Sequence
  Description of Artificial Sequence: Synthetic oligonucleotide
ggcgaggcucccgcgaacg

SEQ ID NO: 1200449 - RNA, 19 nt, Artificial Sequence
  Description of Artificial Sequence: Synthetic oligonucleotide
uucgguccggccgggcucu

SEQ ID NO: 1200450 - RNA, 19 nt, Artificial Sequence
  Description of Artificial Sequence: Synthetic oligonucleotide
acuuaccaacuagaauguu

SEQ ID NO: 1200451 - RNA, 19 nt, Artificial Sequence
  Description of Artificial Sequence: Synthetic oligonucleotide
gaacacaccccgacccuaa

SEQ ID NO: 1200452 - RNA, 19 nt, Artificial Sequence
  Description of Artificial Sequence: Synthetic oligonucleotide
aggcagacgguaagcuucu

SEQ ID NO: 1200453 - RNA, 19 nt, Artificial Sequence
  Description of Artificial Sequence: Synthetic oligonucleotide
cuguaguccuaacguaacu

SEQ ID NO: 1200454 - RNA, 19 nt, Artificial Sequence
  Description of Artificial Sequence: Synthetic oligonucleotide
ccuaaguaaugacaucucu

SEQ ID NO: 1200455 - RNA, 19 nt, Artificial Sequence
  Description of Artificial Sequence: Synthetic oligonucleotide
gguaagcuucuggcagccg

SEQ ID NO: 1200456 - RNA, 19 nt, Artificial Sequence
  Description of Artificial Sequence: Synthetic oligonucleotide
gcgcuuuggccaucuuucc

SEQ ID NO: 1200457 - RNA, 19 nt, Artificial Sequence
  Description of Artificial Sequence: Synthetic oligonucleotide
acgugacuuuugagcuuac

SEQ ID NO: 1200458 - RNA, 19 nt, Artificial Sequence
  Description of Artificial Sequence: Synthetic oligonucleotide
gccuguaguccuaacguaa

SEQ ID NO: 1200459 - RNA, 19 nt, Artificial Sequence
  Description of Artificial Sequence: Synthetic oligonucleotide
caacacagacuaaguuaua

SEQ ID NO: 1200460 - RNA, 19 nt, Artificial Sequence
  Description of Artificial Sequence: Synthetic oligonucleotide
gacaggcguggcccggcga

SEQ ID NO: 1200461 - RNA, 19 nt, Artificial Sequence
  Description of Artificial Sequence: Synthetic oligonucleotide
gcugcuuagcuaaaacccu

SEQ ID NO: 1200462 - RNA, 19 nt, Artificial Sequence
  Description of Artificial Sequence: Synthetic oligonucleotide
gcucggcccgguucggucc

SEQ ID NO: 1200463 - RNA, 19 nt, Artificial Sequence
  Description of Artificial Sequence: Synthetic oligonucleotide
cccgguucgguccggccgg

SEQ ID NO: 1200464 - RNA, 19 nt, Artificial Sequence
  Description of Artificial Sequence: Synthetic oligonucleotide
guccggccgggcucucggg

SEQ ID NO: 1200465 - RNA, 19 nt, Artificial Sequence
  Description of Artificial Sequence: Synthetic oligonucleotide
gugauuaauucagcgucuu

SEQ ID NO: 1200466 - RNA, 19 nt, Artificial Sequence
  Description of Artificial Sequence: Synthetic oligonucleotide
ggcucccgcgaacgcgucg

SEQ ID NO: 1200467 - RNA, 19 nt, Artificial Sequence
  Description of Artificial Sequence: Synthetic oligonucleotide
gcuucaauuuagaggauuu

SEQ ID NO: 1200468 - RNA, 19 nt, Artificial Sequence
  Description of Artificial Sequence: Synthetic oligonucleotide
gaggcucccgcgaacgcgu

SEQ ID NO: 1200469 - RNA, 19 nt, Artificial Sequence
  Description of Artificial Sequence: Synthetic oligonucleotide
caccccgacccuaaguaau

SEQ ID NO: 1200470 - RNA, 19 nt, Artificial Sequence
  Description of Artificial Sequence: Synthetic oligonucleotide
gaacgcgucgugggcgcuc

SEQ ID NO: 1200471 - RNA, 19 nt, Artificial Sequence
  Description of Artificial Sequence: Synthetic oligonucleotide
agguggaggcagacgguaa

SEQ ID NO: 1200472 - RNA, 19 nt, Artificial Sequence
  Description of Artificial Sequence: Synthetic oligonucleotide
uggcccggcgaggcucccg

SEQ ID NO: 1200473 - RNA, 19 nt, Artificial Sequence
  Description of Artificial Sequence: Synthetic oligonucleotide
acauugcaccugccaucuu

SEQ ID NO: 1200474 - RNA, 19 nt, Artificial Sequence
  Description of Artificial Sequence: Synthetic oligonucleotide
gcucgcagcggcggaggcg

SEQ ID NO: 1200475 - RNA, 19 nt, Artificial Sequence
  Description of Artificial Sequence: Synthetic oligonucleotide
ggugagcgggcgcgcccgg

SEQ ID NO: 1200476 - RNA, 19 nt, Artificial Sequence
  Description of Artificial Sequence: Synthetic oligonucleotide
ggacauagacgugacuuuu

SEQ ID NO: 1200477 - RNA, 19 nt, Artificial Sequence
  Description of Artificial Sequence: Synthetic oligonucleotide
cgacccuaaguaaugacau

SEQ ID NO: 1200478 - RNA, 19 nt, Artificial Sequence
  Description of Artificial Sequence: Synthetic oligonucleotide
cgcgaacgcgucgugggcg

SEQ ID NO: 1200479 - RNA, 19 nt, Artificial Sequence
  Description of Artificial Sequence: Synthetic oligonucleotide
ggcuucaauuuagaggauu

SEQ ID NO: 1200480 - RNA, 19 nt, Artificial Sequence
  Description of Artificial Sequence: Synthetic oligonucleotide
cucgggacacgagcugcga

SEQ ID NO: 1200481 - RNA, 19 nt, Artificial Sequence
  Description of Artificial Sequence: Synthetic oligonucleotide
cucccgcgaacgcgucgug

SEQ ID NO: 1200482 - RNA, 19 nt, Artificial Sequence
  Description of Artificial Sequence: Synthetic oligonucleotide
ggaggcagacgguaagcuu

SEQ ID NO: 1200483 - RNA, 19 nt, Artificial Sequence
  Description of Artificial Sequence: Synthetic oligonucleotide
gcgaggcucccgcgaacgc

SEQ ID NO: 1200484 - RNA, 19 nt, Artificial Sequence
  Description of Artificial Sequence: Synthetic oligonucleotide
aggcucccgcgaacgcguc

SEQ ID NO: 1200485 - RNA, 19 nt, Artificial Sequence
  Description of Artificial Sequence: Synthetic oligonucleotide
ccgcgaacgcgucgugggc

SEQ ID NO: 1200486 - RNA, 19 nt, Artificial Sequence
  Description of Artificial Sequence: Synthetic oligonucleotide
ggcccgguucgguccggcc

SEQ ID NO: 1200487 - RNA, 19 nt, Artificial Sequence
  Description of Artificial Sequence: Synthetic oligonucleotide
cgggaaaggacggcgagaa

SEQ ID NO: 1200488 - RNA, 19 nt, Artificial Sequence
  Description of Artificial Sequence: Synthetic oligonucleotide
cguggcccggcgaggcucc

SEQ ID NO: 1200489 - RNA, 19 nt, Artificial Sequence
  Description of Artificial Sequence: Synthetic oligonucleotide
ggcagacgguaagcuucug

SEQ ID NO: 1200490 - RNA, 19 nt, Artificial Sequence
  Description of Artificial Sequence: Synthetic oligonucleotide
gcgacaggcguggcccggc

SEQ ID NO: 1200491 - RNA, 19 nt, Artificial Sequence
  Description of Artificial Sequence: Synthetic oligonucleotide
cggcgagaaggacggcgcc

SEQ ID NO: 1200492 - RNA, 19 nt, Artificial Sequence
  Description of Artificial Sequence: Synthetic oligonucleotide
ggcgagaaggacggcgccu

SEQ ID NO: 1200493 - RNA, 19 nt, Artificial Sequence
  Description of Artificial Sequence: Synthetic oligonucleotide
cgacaggcguggcccggcg

SEQ ID NO: 1200494 - RNA, 19 nt, Artificial Sequence
  Description of Artificial Sequence: Synthetic oligonucleotide
gcucccgcgaacgcgucgu

SEQ ID NO: 1200495 - RNA, 19 nt, Artificial Sequence
  Description of Artificial Sequence: Synthetic oligonucleotide
ccucgcagcucucgguucu

SEQ ID NO: 1200496 - RNA, 19 nt, Artificial Sequence
  Description of Artificial Sequence: Synthetic oligonucleotide
ggacggcgagaaggacggc

SEQ ID NO: 1200497 - RNA, 19 nt, Artificial Sequence
  Description of Artificial Sequence: Synthetic oligonucleotide
cugcucggucucugauuau

SEQ ID NO: 1200498 - RNA, 19 nt, Artificial Sequence
  Description of Artificial Sequence: Synthetic oligonucleotide
cccggcgaggcucccgcga

SEQ ID NO: 1200499 - RNA, 19 nt, Artificial Sequence
  Description of Artificial Sequence: Synthetic oligonucleotide
guggcccggcgaggcuccc

SEQ ID NO: 1200500 - RNA, 19 nt, Artificial Sequence
  Description of Artificial Sequence: Synthetic oligonucleotide
cggcucgcagcggcggagg

SEQ ID NO: 1200501 - RNA, 19 nt, Artificial Sequence
  Description of Artificial Sequence: Synthetic oligonucleotide
ccgguucgguccggccggg

SEQ ID NO: 1200502 - RNA, 19 nt, Artificial Sequence
  Description of Artificial Sequence: Synthetic oligonucleotide
ccggccgggcucucgggaa

SEQ ID NO: 1200503 - RNA, 19 nt, Artificial Sequence
  Description of Artificial Sequence: Synthetic oligonucleotide
ccggcgaggcucccgcgaa

SEQ ID NO: 1200504 - RNA, 19 nt, Artificial Sequence
  Description of Artificial Sequence: Synthetic oligonucleotide
ccgaaggcgcuuuggccau

SEQ ID NO: 1200505 - RNA, 19 nt, Artificial Sequence
  Description of Artificial Sequence: Synthetic oligonucleotide
gggcgcgcccgggcggccc

SEQ ID NO: 1200506 - RNA, 19 nt, Artificial Sequence
  Description of Artificial Sequence: Synthetic oligonucleotide
cgugacuuuugagcuuacu

SEQ ID NO: 1200507 - RNA, 19 nt, Artificial Sequence
  Description of Artificial Sequence: Synthetic oligonucleotide
cagcucggcccgguucggu

SEQ ID NO: 1200508 - RNA, 19 nt, Artificial Sequence
  Description of Artificial Sequence: Synthetic oligonucleotide
cgguccggccgggcucucg

SEQ ID NO: 1200509 - RNA, 19 nt, Artificial Sequence
  Description of Artificial Sequence: Synthetic oligonucleotide
cgguucgguccggccgggc

SEQ ID NO: 1200510 - RNA, 19 nt, Artificial Sequence
  Description of Artificial Sequence: Synthetic oligonucleotide
cggcccgguucgguccggc

SEQ ID NO: 1200511 - RNA, 19 nt, Artificial Sequence
  Description of Artificial Sequence: Synthetic oligonucleotide
gcgcccgggcggcccagcu

SEQ ID NO: 1200512 - RNA, 19 nt, Artificial Sequence
  Description of Artificial Sequence: Synthetic oligonucleotide
gauguuuucgagcacacgg

SEQ ID NO: 1200513 - RNA, 19 nt, Artificial Sequence
  Description of Artificial Sequence: Synthetic oligonucleotide
ugcaauggcauuaggaagg

SEQ ID NO: 1200514 - RNA, 19 nt, Artificial Sequence
  Description of Artificial Sequence: Synthetic oligonucleotide
gaugcugucacccaggcug

SEQ ID NO: 1200515 - RNA, 19 nt, Artificial Sequence
  Description of Artificial Sequence: Synthetic oligonucleotide
agggaugucucuuucaccc

SEQ ID NO: 1200516 - RNA, 19 nt, Artificial Sequence
  Description of Artificial Sequence: Synthetic oligonucleotide
uaauccacuguuuacggcg

SEQ ID NO: 1200517 - RNA, 19 nt, Artificial Sequence
  Description of Artificial Sequence: Synthetic oligonucleotide
aauguuguugccgucuagc

SEQ ID NO: 1200518 - RNA, 19 nt, Artificial Sequence
  Description of Artificial Sequence: Synthetic oligonucleotide
aauagaugcugucacccag

SEQ ID NO: 1200519 - RNA, 19 nt, Artificial Sequence
  Description of Artificial Sequence: Synthetic oligonucleotide
acgaagucuuuguagaugg

SEQ ID NO: 1200520 - RNA, 19 nt, Artificial Sequence
  Description of Artificial Sequence: Synthetic oligonucleotide
auaccuauaaagaagguug

SEQ ID NO: 1200521 - RNA, 19 nt, Artificial Sequence
  Description of Artificial Sequence: Synthetic oligonucleotide
uguaggucucuacagaaga

SEQ ID NO: 1200522 - RNA, 19 nt, Artificial Sequence
  Description of Artificial Sequence: Synthetic oligonucleotide
cagguagaaauccacacgg

SEQ ID NO: 1200523 - RNA, 19 nt, Artificial Sequence
  Description of Artificial Sequence: Synthetic oligonucleotide
uugagccccacauaggagg

SEQ ID NO: 1200524 - RNA, 19 nt, Artificial Sequence
  Description of Artificial Sequence: Synthetic oligonucleotide
caggauguagauucgaccc

SEQ ID NO: 1200525 - RNA, 19 nt, Artificial Sequence
  Description of Artificial Sequence: Synthetic oligonucleotide
uaccuauaaagaagguugg

SEQ ID NO: 1200526 - RNA, 19 nt, Artificial Sequence
  Description of Artificial Sequence: Synthetic oligonucleotide
ucuaccuccuucuggaaag

SEQ ID NO: 1200527 - RNA, 19 nt, Artificial Sequence
  Description of Artificial Sequence: Synthetic oligonucleotide
uguuaugguaguguaaggc

SEQ ID NO: 1200528 - RNA, 19 nt, Artificial Sequence
  Description of Artificial Sequence: Synthetic oligonucleotide
agauaugcaccucacgcuc

SEQ ID NO: 1200529 - RNA, 19 nt, Artificial Sequence
  Description of Artificial Sequence: Synthetic oligonucleotide
uuaugguaguguaaggccu

SEQ ID NO: 1200530 - RNA, 19 nt, Artificial Sequence
  Description of Artificial Sequence: Synthetic oligonucleotide
uuggugucuagguagcagg

SEQ ID NO: 1200531 - RNA, 19 nt, Artificial Sequence
  Description of Artificial Sequence: Synthetic oligonucleotide
uacacgaagucuuuguaga

SEQ ID NO: 1200532 - RNA, 19 nt, Artificial Sequence
  Description of Artificial Sequence: Synthetic oligonucleotide
aagcggauguuuucgagca

SEQ ID NO: 1200533 - RNA, 19 nt, Artificial Sequence
  Description of Artificial Sequence: Synthetic oligonucleotide
cucacuguuggcuugcagc

SEQ ID NO: 1200534 - RNA, 19 nt, Artificial Sequence
  Description of Artificial Sequence: Synthetic oligonucleotide
uguaucuggccacugcuca

SEQ ID NO: 1200535 - RNA, 19 nt, Artificial Sequence
  Description of Artificial Sequence: Synthetic oligonucleotide
uuuucgagcacacggcaga

SEQ ID NO: 1200536 - RNA, 19 nt, Artificial Sequence
  Description of Artificial Sequence: Synthetic oligonucleotide
auaggagguaccaaccagc

SEQ ID NO: 1200537 - RNA, 19 nt, Artificial Sequence
  Description of Artificial Sequence: Synthetic oligonucleotide
accuuaauccacuguuuac

SEQ ID NO: 1200538 - RNA, 19 nt, Artificial Sequence
  Description of Artificial Sequence: Synthetic oligonucleotide
uggcaagccagccacauaa

SEQ ID NO: 1200539 - RNA, 19 nt, Artificial Sequence
  Description of Artificial Sequence: Synthetic oligonucleotide
uuccaagaagcccucgcag

SEQ ID NO: 1200540 - RNA, 19 nt, Artificial Sequence
  Description of Artificial Sequence: Synthetic oligonucleotide
guacacgaagucuuuguag

SEQ ID NO: 1200541 - RNA, 19 nt, Artificial Sequence
  Description of Artificial Sequence: Synthetic oligonucleotide
guacgggccaaucugguag

SEQ ID NO: 1200542 - RNA, 19 nt, Artificial Sequence
  Description of Artificial Sequence: Synthetic oligonucleotide
uccacugauugcacugugg

SEQ ID NO: 1200543 - RNA, 19 nt, Artificial Sequence
  Description of Artificial Sequence: Synthetic oligonucleotide
uagucaauguuguugccgu

SEQ ID NO: 1200544 - RNA, 19 nt, Artificial Sequence
  Description of Artificial Sequence: Synthetic oligonucleotide
guagucaauguuguugccg

SEQ ID NO: 1200545 - RNA, 19 nt, Artificial Sequence
  Description of Artificial Sequence: Synthetic oligonucleotide
uuaauccacuguuuacggc

SEQ ID NO: 1200546 - RNA, 19 nt, Artificial Sequence
  Description of Artificial Sequence: Synthetic oligonucleotide
gcagauaugcaccucacgc

SEQ ID NO: 1200547 - RNA, 19 nt, Artificial Sequence
  Description of Artificial Sequence: Synthetic oligonucleotide
cacacggcagauaugcacc

SEQ ID NO: 1200548 - RNA, 19 nt, Artificial Sequence
  Description of Artificial Sequence: Synthetic oligonucleotide
ugcgguacgggccaaucug

SEQ ID NO: 1200549 - RNA, 19 nt, Artificial Sequence
  Description of Artificial Sequence: Synthetic oligonucleotide
auguagauucgacccugcc

SEQ ID NO: 1200550 - RNA, 19 nt, Artificial Sequence
  Description of Artificial Sequence: Synthetic oligonucleotide
ucuuccuagccuuggguug

SEQ ID NO: 1200551 - RNA, 19 nt, Artificial Sequence
  Description of Artificial Sequence: Synthetic oligonucleotide
guaguguaaggccucuucc

SEQ ID NO: 1200552 - RNA, 19 nt, Artificial Sequence
  Description of Artificial Sequence: Synthetic oligonucleotide
guagaaauccacacggcgc

SEQ ID NO: 1200553 - RNA, 19 nt, Artificial Sequence
  Description of Artificial Sequence: Synthetic oligonucleotide
cugcaauggcauuaggaag

SEQ ID NO: 1200554 - RNA, 19 nt, Artificial Sequence
  Description of Artificial Sequence: Synthetic oligonucleotide
ucgagcacacggcagauau

SEQ ID NO: 1200555 - RNA, 19 nt, Artificial Sequence
  Description of Artificial Sequence: Synthetic oligonucleotide
gaccucaccgcccacgaag

SEQ ID NO: 1200556 - RNA, 19 nt, Artificial Sequence
  Description of Artificial Sequence: Synthetic oligonucleotide
aaucugucgaugaaggcau

SEQ ID NO: 1200557 - RNA, 19 nt, Artificial Sequence
  Description of Artificial Sequence: Synthetic oligonucleotide
auguuuucgagcacacggc

SEQ ID NO: 1200558 - RNA, 19 nt, Artificial Sequence
  Description of Artificial Sequence: Synthetic oligonucleotide
cacacgaguccacugauug

SEQ ID NO: 1200559 - RNA, 19 nt, Artificial Sequence
  Description of Artificial Sequence: Synthetic oligonucleotide
cauaggagguaccaaccag

SEQ ID NO: 1200560 - RNA, 19 nt, Artificial Sequence
  Description of Artificial Sequence: Synthetic oligonucleotide
uaguguaaggccucuucca

SEQ ID NO: 1200561 - RNA, 19 nt, Artificial Sequence
  Description of Artificial Sequence: Synthetic oligonucleotide
cauaggugaaccuuggcaa

SEQ ID NO: 1200562 - RNA, 19 nt, Artificial Sequence
  Description of Artificial Sequence: Synthetic oligonucleotide
acacgaguccacugauugc

SEQ ID NO: 1200563 - RNA, 19 nt, Artificial Sequence
  Description of Artificial Sequence: Synthetic oligonucleotide
acagagacggucugcagga

SEQ ID NO: 1200564 - RNA, 19 nt, Artificial Sequence
  Description of Artificial Sequence: Synthetic oligonucleotide
uccguugucucuugagaag

SEQ ID NO: 1200565 - RNA, 19 nt, Artificial Sequence
  Description of Artificial Sequence: Synthetic oligonucleotide
cagagcgcagcacuguucg

SEQ ID NO: 1200566 - RNA, 19 nt, Artificial Sequence
  Description of Artificial Sequence: Synthetic oligonucleotide
uggaauagaugcugucacc

SEQ ID NO: 1200567 - RNA, 19 nt, Artificial Sequence
  Description of Artificial Sequence: Synthetic oligonucleotide
acagcaacgcagugguagg

SEQ ID NO: 1200568 - RNA, 19 nt, Artificial Sequence
  Description of Artificial Sequence: Synthetic oligonucleotide
aauccacuguuuacggcgg

SEQ ID NO: 1200569 - RNA, 19 nt, Artificial Sequence
  Description of Artificial Sequence: Synthetic oligonucleotide
acgaagagcaagcacuccu

SEQ ID NO: 1200570 - RNA, 19 nt, Artificial Sequence
  Description of Artificial Sequence: Synthetic oligonucleotide
ucucguuccggccaccaac

SEQ ID NO: 1200571 - RNA, 19 nt, Artificial Sequence
  Description of Artificial Sequence: Synthetic oligonucleotide
agguauagguaguuguccu

SEQ ID NO: 1200572 - RNA, 19 nt, Artificial Sequence
  Description of Artificial Sequence: Synthetic oligonucleotide
cuagccuuggguugagggc

SEQ ID NO: 1200573 - RNA, 19 nt, Artificial Sequence
  Description of Artificial Sequence: Synthetic oligonucleotide
caugucuucaauggaggcc

SEQ ID NO: 1200574 - RNA, 19 nt, Artificial Sequence
  Description of Artificial Sequence: Synthetic oligonucleotide
agguccggaccccugcucc

SEQ ID NO: 1200575 - RNA, 19 nt, Artificial Sequence
  Description of Artificial Sequence: Synthetic oligonucleotide
ucuccucccacacauccgu

SEQ ID NO: 1200576 - RNA, 19 nt, Artificial Sequence
  Description of Artificial Sequence: Synthetic oligonucleotide
uaggagguaccaaccagcu

SEQ ID NO: 1200577 - RNA, 19 nt, Artificial Sequence
  Description of Artificial Sequence: Synthetic oligonucleotide
aggacagugugcugaagug

SEQ ID NO: 1200578 - RNA, 19 nt, Artificial Sequence
  Description of Artificial Sequence: Synthetic oligonucleotide
gaaauccacacggcgcugg

SEQ ID NO: 1200579 - RNA, 19 nt, Artificial Sequence
  Description of Artificial Sequence: Synthetic oligonucleotide
auucgacccugccacacag

SEQ ID NO: 1200580 - RNA, 19 nt, Artificial Sequence
  Description of Artificial Sequence: Synthetic oligonucleotide
ucauaccuauaaagaaggu

SEQ ID NO: 1200581 - RNA, 19 nt, Artificial Sequence
  Description of Artificial Sequence: Synthetic oligonucleotide
cauggaugccaccuuaauc

SEQ ID NO: 1200582 - RNA, 19 nt, Artificial Sequence
  Description of Artificial Sequence: Synthetic oligonucleotide
ggaauagaugcugucaccc

SEQ ID NO: 1200583 - RNA, 19 nt, Artificial Sequence
  Description of Artificial Sequence: Synthetic oligonucleotide
uagacgcacagcuucugca

SEQ ID NO: 1200584 - RNA, 19 nt, Artificial Sequence
  Description of Artificial Sequence: Synthetic oligonucleotide
cuguuaugguaguguaagg

SEQ ID NO: 1200585 - RNA, 19 nt, Artificial Sequence
  Description of Artificial Sequence: Synthetic oligonucleotide
acagccuugagccccacau

SEQ ID NO: 1200586 - RNA, 19 nt, Artificial Sequence
  Description of Artificial Sequence: Synthetic oligonucleotide
acugaccucgguccuggcg

SEQ ID NO: 1200587 - RNA, 19 nt, Artificial Sequence
  Description of Artificial Sequence: Synthetic oligonucleotide
ccuuaauccacuguuuacg

SEQ ID NO: 1200588 - RNA, 19 nt, Artificial Sequence
  Description of Artificial Sequence: Synthetic oligonucleotide
cagguauagguaguugucc

SEQ ID NO: 1200589 - RNA, 19 nt, Artificial Sequence
  Description of Artificial Sequence: Synthetic oligonucleotide
aggucauauucccacuugu

SEQ ID NO: 1200590 - RNA, 19 nt, Artificial Sequence
  Description of Artificial Sequence: Synthetic oligonucleotide
acugcucagguagacgcac

SEQ ID NO: 1200591 - RNA, 19 nt, Artificial Sequence
  Description of Artificial Sequence: Synthetic oligonucleotide
aguguaaggccucuuccaa

SEQ ID NO: 1200592 - RNA, 19 nt, Artificial Sequence
  Description of Artificial Sequence: Synthetic oligonucleotide
agaaguccaccacugucca

SEQ ID NO: 1200593 - RNA, 19 nt, Artificial Sequence
  Description of Artificial Sequence: Synthetic oligonucleotide
aacgcagugguaggcuccg

SEQ ID NO: 1200594 - RNA, 19 nt, Artificial Sequence
  Description of Artificial Sequence: Synthetic oligonucleotide
ugccacacgaguccacuga

SEQ ID NO: 1200595 - RNA, 19 nt, Artificial Sequence
  Description of Artificial Sequence: Synthetic oligonucleotide
cuguaggucucuacagaag

SEQ ID NO: 1200596 - RNA, 19 nt, Artificial Sequence
  Description of Artificial Sequence: Synthetic oligonucleotide
aagguccggaccccugcuc

SEQ ID NO: 1200597 - RNA, 19 nt, Artificial Sequence
  Description of Artificial Sequence: Synthetic oligonucleotide
agauucgacccugccacac

SEQ ID NO: 1200598 - RNA, 19 nt, Artificial Sequence
  Description of Artificial Sequence: Synthetic oligonucleotide
accugcacggcccuggaga

SEQ ID NO: 1200599 - RNA, 19 nt, Artificial Sequence
  Description of Artificial Sequence: Synthetic oligonucleotide
uucuuccuagccuuggguu

SEQ ID NO: 1200600 - RNA, 19 nt, Artificial Sequence
  Description of Artificial Sequence: Synthetic oligonucleotide
cuucacacgcuggagcagg

SEQ ID NO: 1200601 - RNA, 19 nt, Artificial Sequence
  Description of Artificial Sequence: Synthetic oligonucleotide
uguuuccaggauguaguca

SEQ ID NO: 1200602 - RNA, 19 nt, Artificial Sequence
  Description of Artificial Sequence: Synthetic oligonucleotide
aggauguagauucgacccu

SEQ ID NO: 1200603 - RNA, 19 nt, Artificial Sequence
  Description of Artificial Sequence: Synthetic oligonucleotide
uauagguaguuguccucac

SEQ ID NO: 1200604 - RNA, 19 nt, Artificial Sequence
  Description of Artificial Sequence: Synthetic oligonucleotide
acggcagauaugcaccuca

SEQ ID NO: 1200605 - RNA, 19 nt, Artificial Sequence
  Description of Artificial Sequence: Synthetic oligonucleotide
caauggaauagaugcuguc

SEQ ID NO: 1200606 - RNA, 19 nt, Artificial Sequence
  Description of Artificial Sequence: Synthetic oligonucleotide
ucacugaccucgguccugg

SEQ ID NO: 1200607 - RNA, 19 nt, Artificial Sequence
  Description of Artificial Sequence: Synthetic oligonucleotide
gucggcuucauggucauac

SEQ ID NO: 1200608 - RNA, 19 nt, Artificial Sequence
  Description of Artificial Sequence: Synthetic oligonucleotide
cacugauugcacugugggc

SEQ ID NO: 1200609 - RNA, 19 nt, Artificial Sequence
  Description of Artificial Sequence: Synthetic oligonucleotide
acgcccgacucacuguugg

SEQ ID NO: 1200610 - RNA, 19 nt, Artificial Sequence
  Description of Artificial Sequence: Synthetic oligonucleotide
uggugucuagguagcaggu

SEQ ID NO: 1200611 - RNA, 19 nt, Artificial Sequence
  Description of Artificial Sequence: Synthetic oligonucleotide
agguaguuguccucacuca

SEQ ID NO: 1200612 - RNA, 19 nt, Artificial Sequence
  Description of Artificial Sequence: Synthetic oligonucleotide
cuuggugucuagguagcag

SEQ ID NO: 1200613 - RNA, 19 nt, Artificial Sequence
  Description of Artificial Sequence: Synthetic oligonucleotide
uagcaggugucaucgcuca

SEQ ID NO: 1200614 - RNA, 19 nt, Artificial Sequence
  Description of Artificial Sequence: Synthetic oligonucleotide
aaauccacacggcgcuggu

SEQ ID NO: 1200615 - RNA, 19 nt, Artificial Sequence
  Description of Artificial Sequence: Synthetic oligonucleotide
cuggaaagccucacgcaug

SEQ ID NO: 1200616 - RNA, 19 nt, Artificial Sequence
  Description of Artificial Sequence: Synthetic oligonucleotide
cagggcuccauucucguuc

SEQ ID NO: 1200617 - RNA, 19 nt, Artificial Sequence
  Description of Artificial Sequence: Synthetic oligonucleotide
ucggagaccucaccgccca

SEQ ID NO: 1200618 - RNA, 19 nt, Artificial Sequence
  Description of Artificial Sequence: Synthetic oligonucleotide
guagacgcacagcuucugc

SEQ ID NO: 1200619 - RNA, 19 nt, Artificial Sequence
  Description of Artificial Sequence: Synthetic oligonucleotide
caaagcgcuccauggacuc

SEQ ID NO: 1200620 - RNA, 19 nt, Artificial Sequence
  Description of Artificial Sequence: Synthetic oligonucleotide
cucuacagaagacagggcu

SEQ ID NO: 1200621 - RNA, 19 nt, Artificial Sequence
  Description of Artificial Sequence: Synthetic oligonucleotide
cagugguaggcuccggcgg

SEQ ID NO: 1200622 - RNA, 19 nt, Artificial Sequence
  Description of Artificial Sequence: Synthetic oligonucleotide
agacaaaucugucgaugaa

SEQ ID NO: 1200623 - RNA, 19 nt, Artificial Sequence
  Description of Artificial Sequence: Synthetic oligonucleotide
auaugcaccucacgcucug

SEQ ID NO: 1200624 - RNA, 19 nt, Artificial Sequence
  Description of Artificial Sequence: Synthetic oligonucleotide
gugaaccuuggcaagccag

SEQ ID NO: 1200625 - RNA, 19 nt, Artificial Sequence
  Description of Artificial Sequence: Synthetic oligonucleotide
guucgcuucgucugcagga

SEQ ID NO: 1200626 - RNA, 19 nt, Artificial Sequence
  Description of Artificial Sequence: Synthetic oligonucleotide
ccacugauugcacuguggg

SEQ ID NO: 1200627 - RNA, 19 nt, Artificial Sequence
  Description of Artificial Sequence: Synthetic oligonucleotide
ccaggauguagauucgacc

SEQ ID NO: 1200628 - RNA, 19 nt, Artificial Sequence
  Description of Artificial Sequence: Synthetic oligonucleotide
aggagguaccaaccagcuc

SEQ ID NO: 1200629 - RNA, 19 nt, Artificial Sequence
  Description of Artificial Sequence: Synthetic oligonucleotide
ccuagccuuggguugaggg

SEQ ID NO: 1200630 - RNA, 19 nt, Artificial Sequence
  Description of Artificial Sequence: Synthetic oligonucleotide
agucaggugugaaggacag

SEQ ID NO: 1200631 - RNA, 19 nt, Artificial Sequence
  Description of Artificial Sequence: Synthetic oligonucleotide
cacgaagucuuuguagaug

SEQ ID NO: 1200632 - RNA, 19 nt, Artificial Sequence
  Description of Artificial Sequence: Synthetic oligonucleotide
gguaguuguccucacucac

SEQ ID NO: 1200633 - RNA, 19 nt, Artificial Sequence
  Description of Artificial Sequence: Synthetic oligonucleotide
uguuggcuugcagcagugg

SEQ ID NO: 1200634 - RNA, 19 nt, Artificial Sequence
  Description of Artificial Sequence: Synthetic oligonucleotide
ccacugcucagguagacgc

SEQ ID NO: 1200635 - RNA, 19 nt, Artificial Sequence
  Description of Artificial Sequence: Synthetic oligonucleotide
gauguagauucgacccugc

SEQ ID NO: 1200636 - RNA, 19 nt, Artificial Sequence
  Description of Artificial Sequence: Synthetic oligonucleotide
uguagucaugggccguuuc

SEQ ID NO: 1200637 - RNA, 19 nt, Artificial Sequence
  Description of Artificial Sequence: Synthetic oligonucleotide
cuccauucucguuccggcc

SEQ ID NO: 1200638 - RNA, 19 nt, Artificial Sequence
  Description of Artificial Sequence: Synthetic oligonucleotide
uccaggaguuggucuuggg

SEQ ID NO: 1200639 - RNA, 19 nt, Artificial Sequence
  Description of Artificial Sequence: Synthetic oligonucleotide
cugauugcacugugggcug

SEQ ID NO: 1200640 - RNA, 19 nt, Artificial Sequence
  Description of Artificial Sequence: Synthetic oligonucleotide
cacacgcuggagcaggaug

SEQ ID NO: 1200641 - RNA, 19 nt, Artificial Sequence
  Description of Artificial Sequence: Synthetic oligonucleotide
gcugacacgccugcaaugg

SEQ ID NO: 1200642 - RNA, 19 nt, Artificial Sequence
  Description of Artificial Sequence: Synthetic oligonucleotide
guugucucuugagaagcug

SEQ ID NO: 1200643 - RNA, 19 nt, Artificial Sequence
  Description of Artificial Sequence: Synthetic oligonucleotide
uuaggaagguccggacccc

SEQ ID NO: 1200644 - RNA, 19 nt, Artificial Sequence
  Description of Artificial Sequence: Synthetic oligonucleotide
ggcagauaugcaccucacg

SEQ ID NO: 1200645 - RNA, 19 nt, Artificial Sequence
  Description of Artificial Sequence: Synthetic oligonucleotide
acacggcgcugguucaugg

SEQ ID NO: 1200646 - RNA, 19 nt, Artificial Sequence
  Description of Artificial Sequence: Synthetic oligonucleotide
ugugcuguaucuggccacu

SEQ ID NO: 1200647 - RNA, 19 nt, Artificial Sequence
  Description of Artificial Sequence: Synthetic oligonucleotide
gguaguguaaggccucuuc

SEQ ID NO: 1200648 - RNA, 19 nt, Artificial Sequence
  Description of Artificial Sequence: Synthetic oligonucleotide
acacgaagucuuuguagau

SEQ ID NO: 1200649 - RNA, 19 nt, Artificial Sequence
  Description of Artificial Sequence: Synthetic oligonucleotide
gguucuugcgguacgggcc

SEQ ID NO: 1200650 - RNA, 19 nt, Artificial Sequence
  Description of Artificial Sequence: Synthetic oligonucleotide
agguuggaggcugcauccc

SEQ ID NO: 1200651 - RNA, 19 nt, Artificial Sequence
  Description of Artificial Sequence: Synthetic oligonucleotide
gcagugguaggcuccggcg

SEQ ID NO: 1200652 - RNA, 19 nt, Artificial Sequence
  Description of Artificial Sequence: Synthetic oligonucleotide
acucacuguuggcuugcag

SEQ ID NO: 1200653 - RNA, 19 nt, Artificial Sequence
  Description of Artificial Sequence: Synthetic oligonucleotide
uaccaaccagcucuaccuc

SEQ ID NO: 1200654 - RNA, 19 nt, Artificial Sequence
  Description of Artificial Sequence: Synthetic oligonucleotide
cuguuuccaggauguaguc

SEQ ID NO: 1200655 - RNA, 19 nt, Artificial Sequence
  Description of Artificial Sequence: Synthetic oligonucleotide
cuuccaagaagcccucgca

SEQ ID NO: 1200656 - RNA, 19 nt, Artificial Sequence
  Description of Artificial Sequence: Synthetic oligonucleotide
ccagacaccgcucggagac

SEQ ID NO: 1200657 - RNA, 19 nt, Artificial Sequence
  Description of Artificial Sequence: Synthetic oligonucleotide
cacgaguccacugauugca

SEQ ID NO: 1200658 - RNA, 19 nt, Artificial Sequence
  Description of Artificial Sequence: Synthetic oligonucleotide
cucaccgcccacgaagagc

SEQ ID NO: 1200659 - RNA, 19 nt, Artificial Sequence
  Description of Artificial Sequence: Synthetic oligonucleotide
uccagaucugcagcaggug

SEQ ID NO: 1200660 - RNA, 19 nt, Artificial Sequence
  Description of Artificial Sequence: Synthetic oligonucleotide
cucgcagcagaaguccacc

SEQ ID NO: 1200661 - RNA, 19 nt, Artificial Sequence
  Description of Artificial Sequence: Synthetic oligonucleotide
caccucacgcucuggcugc

SEQ ID NO: 1200662 - RNA, 19 nt, Artificial Sequence
  Description of Artificial Sequence: Synthetic oligonucleotide
gauucgacccugccacaca

SEQ ID NO: 1200663 - RNA, 19 nt, Artificial Sequence
  Description of Artificial Sequence: Synthetic oligonucleotide
cucggagaccucaccgccc

SEQ ID NO: 1200664 - RNA, 19 nt, Artificial Sequence
  Description of Artificial Sequence: Synthetic oligonucleotide
acacggcagauaugcaccu

SEQ ID NO: 1200665 - RNA, 19 nt, Artificial Sequence
  Description of Artificial Sequence: Synthetic oligonucleotide
ggggucauaccuauaaaga

SEQ ID NO: 1200666 - RNA, 19 nt, Artificial Sequence
  Description of Artificial Sequence: Synthetic oligonucleotide
gugucuagguagcaggugu

SEQ ID NO: 1200667 - RNA, 19 nt, Artificial Sequence
  Description of Artificial Sequence: Synthetic oligonucleotide
uccagacaccgcucggaga

SEQ ID NO: 1200668 - RNA, 19 nt, Artificial Sequence
  Description of Artificial Sequence: Synthetic oligonucleotide
uucgcuucgucugcaggac

SEQ ID NO: 1200669 - RNA, 19 nt, Artificial Sequence
  Description of Artificial Sequence: Synthetic oligonucleotide
ucggcuucauggucauaca

SEQ ID NO: 1200670 - RNA, 19 nt, Artificial Sequence
  Description of Artificial Sequence: Synthetic oligonucleotide
aggcuguagauggaggcca

SEQ ID NO: 1200671 - RNA, 19 nt, Artificial Sequence
  Description of Artificial Sequence: Synthetic oligonucleotide
acucgcagcagaaguccac

SEQ ID NO: 1200672 - RNA, 19 nt, Artificial Sequence
  Description of Artificial Sequence: Synthetic oligonucleotide
cuccguugucucuugagaa

SEQ ID NO: 1200673 - RNA, 19 nt, Artificial Sequence
  Description of Artificial Sequence: Synthetic oligonucleotide
uucgacccugccacacagc

SEQ ID NO: 1200674 - RNA, 19 nt, Artificial Sequence
  Description of Artificial Sequence: Synthetic oligonucleotide
ccacacauccguccggugg

SEQ ID NO: 1200675 - RNA, 19 nt, Artificial Sequence
  Description of Artificial Sequence: Synthetic oligonucleotide
uacgggccaaucugguagu

SEQ ID NO: 1200676 - RNA, 19 nt, Artificial Sequence
  Description of Artificial Sequence: Synthetic oligonucleotide
ggcgcugguucauggaugc

SEQ ID NO: 1200677 - RNA, 19 nt, Artificial Sequence
  Description of Artificial Sequence: Synthetic oligonucleotide
gguauagguaguuguccuc

SEQ ID NO: 1200678 - RNA, 19 nt, Artificial Sequence
  Description of Artificial Sequence: Synthetic oligonucleotide
ggauguagauucgacccug

SEQ ID NO: 1200679 - RNA, 19 nt, Artificial Sequence
  Description of Artificial Sequence: Synthetic oligonucleotide
cacccaggauguagauucg

SEQ ID NO: 1200680 - RNA, 19 nt, Artificial Sequence
  Description of Artificial Sequence: Synthetic oligonucleotide
gcuccauucucguuccggc

SEQ ID NO: 1200681 - RNA, 19 nt, Artificial Sequence
  Description of Artificial Sequence: Synthetic oligonucleotide
gagaccucaccgcccacga

SEQ ID NO: 1200682 - RNA, 19 nt, Artificial Sequence
  Description of Artificial Sequence: Synthetic oligonucleotide
auggccauaggugaaccuu

SEQ ID NO: 1200683 - RNA, 19 nt, Artificial Sequence
  Description of Artificial Sequence: Synthetic oligonucleotide
ucguuccggccaccaacag

SEQ ID NO: 1200684 - RNA, 19 nt, Artificial Sequence
  Description of Artificial Sequence: Synthetic oligonucleotide
ggaggccagguagaaaucc

SEQ ID NO: 1200685 - RNA, 19 nt, Artificial Sequence
  Description of Artificial Sequence: Synthetic oligonucleotide
guucauggaugccaccuua

SEQ ID NO: 1200686 - RNA, 19 nt, Artificial Sequence
  Description of Artificial Sequence: Synthetic oligonucleotide
ggucauauucccacuugug

SEQ ID NO: 1200687 - RNA, 19 nt, Artificial Sequence
  Description of Artificial Sequence: Synthetic oligonucleotide
ucuuggugucuagguagca

SEQ ID NO: 1200688 - RNA, 19 nt, Artificial Sequence
  Description of Artificial Sequence: Synthetic oligonucleotide
gugcgcuguuuccaggaug

SEQ ID NO: 1200689 - RNA, 19 nt, Artificial Sequence
  Description of Artificial Sequence: Synthetic oligonucleotide
guagcaggugucaucgcuc

SEQ ID NO: 1200690 - RNA, 19 nt, Artificial Sequence
  Description of Artificial Sequence: Synthetic oligonucleotide
guagucaugggccguuucu

SEQ ID NO: 1200691 - RNA, 19 nt, Artificial Sequence
  Description of Artificial Sequence: Synthetic oligonucleotide
cugacacgccugcaauggc

SEQ ID NO: 1200692 - RNA, 19 nt, Artificial Sequence
  Description of Artificial Sequence: Synthetic oligonucleotide
cuguuggcuugcagcagug

SEQ ID NO: 1200693 - RNA, 19 nt, Artificial Sequence
  Description of Artificial Sequence: Synthetic oligonucleotide
agccucgugcuguagucau

SEQ ID NO: 1200694 - RNA, 19 nt, Artificial Sequence
  Description of Artificial Sequence: Synthetic oligonucleotide
gcuguaggucucuacagaa

SEQ ID NO: 1200695 - RNA, 19 nt, Artificial Sequence
  Description of Artificial Sequence: Synthetic oligonucleotide
agcaacgcagugguaggcu

SEQ ID NO: 1200696 - RNA, 19 nt, Artificial Sequence
  Description of Artificial Sequence: Synthetic oligonucleotide
ucgcuucgucugcaggaca

SEQ ID NO: 1200697 - RNA, 19 nt, Artificial Sequence
  Description of Artificial Sequence: Synthetic oligonucleotide
cagauaugcaccucacgcu

SEQ ID NO: 1200698 - RNA, 19 nt, Artificial Sequence
  Description of Artificial Sequence: Synthetic oligonucleotide
agaugcugucacccaggcu

SEQ ID NO: 1200699 - RNA, 19 nt, Artificial Sequence
  Description of Artificial Sequence: Synthetic oligonucleotide
acggcgcugguucauggau

SEQ ID NO: 1200700 - RNA, 19 nt, Artificial Sequence
  Description of Artificial Sequence: Synthetic oligonucleotide
uccacacggcgcugguuca

SEQ ID NO: 1200701 - RNA, 19 nt, Artificial Sequence
  Description of Artificial Sequence: Synthetic oligonucleotide
guccgguggucauagcaca

SEQ ID NO: 1200702 - RNA, 19 nt, Artificial Sequence
  Description of Artificial Sequence: Synthetic oligonucleotide
caggugcgcuguuuccagg

SEQ ID NO: 1200703 - RNA, 19 nt, Artificial Sequence
  Description of Artificial Sequence: Synthetic oligonucleotide
agcaggugcgcuguuucca

SEQ ID NO: 1200704 - RNA, 19 nt, Artificial Sequence
  Description of Artificial Sequence: Synthetic oligonucleotide
aggcugacacgccugcaau

SEQ ID NO: 1200705 - RNA, 19 nt, Artificial Sequence
  Description of Artificial Sequence: Synthetic oligonucleotide
cucgugcuguagucauggg

SEQ ID NO: 1200706 - RNA, 19 nt, Artificial Sequence
  Description of Artificial Sequence: Synthetic oligonucleotide
ccucgugcuguagucaugg

SEQ ID NO: 1200707 - RNA, 19 nt, Artificial Sequence
  Description of Artificial Sequence: Synthetic oligonucleotide
cagcaggugcgcuguuucc

SEQ ID NO: 1200708 - RNA, 19 nt, Artificial Sequence
  Description of Artificial Sequence: Synthetic oligonucleotide
ggauguuuucgagcacacg

SEQ ID NO: 1200709 - RNA, 19 nt, Artificial Sequence
  Description of Artificial Sequence: Synthetic oligonucleotide
agccucacgcaugcccagc

SEQ ID NO: 1200710 - RNA, 19 nt, Artificial Sequence
  Description of Artificial Sequence: Synthetic oligonucleotide
cacgaagagcaagcacucc

SEQ ID NO: 1200711 - RNA, 19 nt, Artificial Sequence
  Description of Artificial Sequence: Synthetic oligonucleotide
cagguucuugcgguacggg

SEQ ID NO: 1200712 - RNA, 19 nt, Artificial Sequence
  Description of Artificial Sequence: Synthetic oligonucleotide
ggggcuguaggucucuaca

SEQ ID NO: 1200713 - RNA, 19 nt, Artificial Sequence
  Description of Artificial Sequence: Synthetic oligonucleotide
accgcccacgaagagcaag

SEQ ID NO: 1200714 - RNA, 19 nt, Artificial Sequence
  Description of Artificial Sequence: Synthetic oligonucleotide
cauaaguccaggaguuggu

SEQ ID NO: 1200715 - RNA, 19 nt, Artificial Sequence
  Description of Artificial Sequence: Synthetic oligonucleotide
ucccacacauccguccggu

SEQ ID NO: 1200716 - RNA, 19 nt, Artificial Sequence
  Description of Artificial Sequence: Synthetic oligonucleotide
uuucgagcacacggcagau

SEQ ID NO: 1200717 - RNA, 19 nt, Artificial Sequence
  Description of Artificial Sequence: Synthetic oligonucleotide
cauaccuauaaagaagguu

SEQ ID NO: 1200718 - RNA, 19 nt, Artificial Sequence
  Description of Artificial Sequence: Synthetic oligonucleotide
gcauuaggaagguccggac

SEQ ID NO: 1200719 - RNA, 19 nt, Artificial Sequence
  Description of Artificial Sequence: Synthetic oligonucleotide
ccguugucucuugagaagc

SEQ ID NO: 1200720 - RNA, 19 nt, Artificial Sequence
  Description of Artificial Sequence: Synthetic oligonucleotide
gagacggucugcaggaagu

SEQ ID NO: 1200721 - RNA, 19 nt, Artificial Sequence
  Description of Artificial Sequence: Synthetic oligonucleotide
uggagaaggccgugcucuc

SEQ ID NO: 1200722 - RNA, 19 nt, Artificial Sequence
  Description of Artificial Sequence: Synthetic oligonucleotide
agacaccgcucggagaccu

SEQ ID NO: 1200723 - RNA, 19 nt, Artificial Sequence
  Description of Artificial Sequence: Synthetic oligonucleotide
gcaggugcgcuguuuccag

SEQ ID NO: 1200724 - RNA, 19 nt, Artificial Sequence
  Description of Artificial Sequence: Synthetic oligonucleotide
uccggaccccugcuccacc

SEQ ID NO: 1200725 - RNA, 19 nt, Artificial Sequence
  Description of Artificial Sequence: Synthetic oligonucleotide
caucgcucagcuccagaca

SEQ ID NO: 1200726 - RNA, 19 nt, Artificial Sequence
  Description of Artificial Sequence: Synthetic oligonucleotide
acauccguccgguggucau

SEQ ID NO: 1200727 - RNA, 19 nt, Artificial Sequence
  Description of Artificial Sequence: Synthetic oligonucleotide
acuguucgcuucgucugca

SEQ ID NO: 1200728 - RNA, 19 nt, Artificial Sequence
  Description of Artificial Sequence: Synthetic oligonucleotide
acgccugcaauggcauuag

SEQ ID NO: 1200729 - RNA, 19 nt, Artificial Sequence
  Description of Artificial Sequence: Synthetic oligonucleotide
cuuccuagccuuggguuga

SEQ ID NO: 1200730 - RNA, 19 nt, Artificial Sequence
  Description of Artificial Sequence: Synthetic oligonucleotide
cagcaacgcagugguaggc

SEQ ID NO: 1200731 - RNA, 19 nt, Artificial Sequence
  Description of Artificial Sequence: Synthetic oligonucleotide
agcgcagcacuguucgcuu

SEQ ID NO: 1200732 - RNA, 19 nt, Artificial Sequence
  Description of Artificial Sequence: Synthetic oligonucleotide
uccuagccuuggguugagg

SEQ ID NO: 1200733 - RNA, 19 nt, Artificial Sequence
  Description of Artificial Sequence: Synthetic oligonucleotide
gauaugcaccucacgcucu

SEQ ID NO: 1200734 - RNA, 19 nt, Artificial Sequence
  Description of Artificial Sequence: Synthetic oligonucleotide
ggcugacacgccugcaaug

SEQ ID NO: 1200735 - RNA, 19 nt, Artificial Sequence
  Description of Artificial Sequence: Synthetic oligonucleotide
ccucccacacauccguccg

SEQ ID NO: 1200736 - RNA, 19 nt, Artificial Sequence
  Description of Artificial Sequence: Synthetic oligonucleotide
auucucguuccggccacca

SEQ ID NO: 1200737 - RNA, 19 nt, Artificial Sequence
  Description of Artificial Sequence: Synthetic oligonucleotide
gguagcaggugucaucgcu

SEQ ID NO: 1200738 - RNA, 19 nt, Artificial Sequence
  Description of Artificial Sequence: Synthetic oligonucleotide
cuugcgguacgggccaauc

SEQ ID NO: 1200739 - RNA, 19 nt, Artificial Sequence
  Description of Artificial Sequence: Synthetic oligonucleotide
ggugucuagguagcaggug

SEQ ID NO: 1200740 - RNA, 19 nt, Artificial Sequence
  Description of Artificial Sequence: Synthetic oligonucleotide
uggugccacacgaguccac

SEQ ID NO: 1200741 - RNA, 19 nt, Artificial Sequence
  Description of Artificial Sequence: Synthetic oligonucleotide
gcuguuuccaggauguagu

SEQ ID NO: 1200742 - RNA, 19 nt, Artificial Sequence
  Description of Artificial Sequence: Synthetic oligonucleotide
acaccgcucggagaccuca

SEQ ID NO: 1200743 - RNA, 19 nt, Artificial Sequence
  Description of Artificial Sequence: Synthetic oligonucleotide
gccguuucuccucccacac

SEQ ID NO: 1200744 - RNA, 19 nt, Artificial Sequence
  Description of Artificial Sequence: Synthetic oligonucleotide
ccgagauguacacgaaguc

SEQ ID NO: 1200745 - RNA, 19 nt, Artificial Sequence
  Description of Artificial Sequence: Synthetic oligonucleotide
aauccacacggcgcugguu

SEQ ID NO: 1200746 - RNA, 19 nt, Artificial Sequence
  Description of Artificial Sequence: Synthetic oligonucleotide
cucacgcucuggcugcuga

SEQ ID NO: 1200747 - RNA, 19 nt, Artificial Sequence
  Description of Artificial Sequence: Synthetic oligonucleotide
acacauccguccggugguc

SEQ ID NO: 1200748 - RNA, 19 nt, Artificial Sequence
  Description of Artificial Sequence: Synthetic oligonucleotide
uuccuagccuuggguugag

SEQ ID NO: 1200749 - RNA, 19 nt, Artificial Sequence
  Description of Artificial Sequence: Synthetic oligonucleotide
gucaucgcucagcuccaga

SEQ ID NO: 1200750 - RNA, 19 nt, Artificial Sequence
  Description of Artificial Sequence: Synthetic oligonucleotide
gcgguacgggccaaucugg

SEQ ID NO: 1200751 - RNA, 19 nt, Artificial Sequence
  Description of Artificial Sequence: Synthetic oligonucleotide
cacugcucagguagacgca

SEQ ID NO: 1200752 - RNA, 19 nt, Artificial Sequence
  Description of Artificial Sequence: Synthetic oligonucleotide
gcaacgcagugguaggcuc

SEQ ID NO: 1200753 - RNA, 19 nt, Artificial Sequence
  Description of Artificial Sequence: Synthetic oligonucleotide
uuccggccaccaacagcca

SEQ ID NO: 1200754 - RNA, 19 nt, Artificial Sequence
  Description of Artificial Sequence: Synthetic oligonucleotide
caggcugacacgccugcaa

SEQ ID NO: 1200755 - RNA, 19 nt, Artificial Sequence
  Description of Artificial Sequence: Synthetic oligonucleotide
gcuccggcgggcuggcagg

SEQ ID NO: 1200756 - RNA, 19 nt, Artificial Sequence
  Description of Artificial Sequence: Synthetic oligonucleotide
gguagacgcacagcuucug

SEQ ID NO: 1200757 - RNA, 19 nt, Artificial Sequence
  Description of Artificial Sequence: Synthetic oligonucleotide
cacacauccguccgguggu

SEQ ID NO: 1200758 - RNA, 19 nt, Artificial Sequence
  Description of Artificial Sequence: Synthetic oligonucleotide
acgggccaaucugguaguc

SEQ ID NO: 1200759 - RNA, 19 nt, Artificial Sequence
  Description of Artificial Sequence: Synthetic oligonucleotide
caggugucaucgcucagcu

SEQ ID NO: 1200760 - RNA, 19 nt, Artificial Sequence
  Description of Artificial Sequence: Synthetic oligonucleotide
guaggccuccacacccagc

SEQ ID NO: 1200761 - RNA, 19 nt, Artificial Sequence
  Description of Artificial Sequence: Synthetic oligonucleotide
cguccgguggucauagcac

SEQ ID NO: 1200762 - RNA, 19 nt, Artificial Sequence
  Description of Artificial Sequence: Synthetic oligonucleotide
cgcuucgucugcaggacag

SEQ ID NO: 1200763 - RNA, 19 nt, Artificial Sequence
  Description of Artificial Sequence: Synthetic oligonucleotide
gcauggccauaggugaacc

SEQ ID NO: 1200764 - RNA, 19 nt, Artificial Sequence
  Description of Artificial Sequence: Synthetic oligonucleotide
uucgagcacacggcagaua

SEQ ID NO: 1200765 - RNA, 19 nt, Artificial Sequence
  Description of Artificial Sequence: Synthetic oligonucleotide
ccccgagauguacacgaag

SEQ ID NO: 1200766 - RNA, 19 nt, Artificial Sequence
  Description of Artificial Sequence: Synthetic oligonucleotide
cacgcccgacucacuguug

SEQ ID NO: 1200767 - RNA, 19 nt, Artificial Sequence
  Description of Artificial Sequence: Synthetic oligonucleotide
accucgguccuggcgcuug

SEQ ID NO: 1200768 - RNA, 19 nt, Artificial Sequence
  Description of Artificial Sequence: Synthetic oligonucleotide
cagcgugaacauggaguug

SEQ ID NO: 1200769 - RNA, 19 nt, Artificial Sequence
  Description of Artificial Sequence: Synthetic oligonucleotide
cacgccugcaauggcauua

SEQ ID NO: 1200770 - RNA, 19 nt, Artificial Sequence
  Description of Artificial Sequence: Synthetic oligonucleotide
cacacggcgcugguucaug

SEQ ID NO: 1200771 - RNA, 19 nt, Artificial Sequence
  Description of Artificial Sequence: Synthetic oligonucleotide
aggaagguccggaccccug

SEQ ID NO: 1200772 - RNA, 19 nt, Artificial Sequence
  Description of Artificial Sequence: Synthetic oligonucleotide
cagacaccgcucggagacc

SEQ ID NO: 1200773 - RNA, 19 nt, Artificial Sequence
  Description of Artificial Sequence: Synthetic oligonucleotide
caccgcucggagaccucac

SEQ ID NO: 1200774 - RNA, 19 nt, Artificial Sequence
  Description of Artificial Sequence: Synthetic oligonucleotide
agaccucaccgcccacgaa

SEQ ID NO: 1200775 - RNA, 19 nt, Artificial Sequence
  Description of Artificial Sequence: Synthetic oligonucleotide
agcacacggcagauaugca

SEQ ID NO: 1200776 - RNA, 19 nt, Artificial Sequence
  Description of Artificial Sequence: Synthetic oligonucleotide
ugguaggcuccggcgggcu

SEQ ID NO: 1200777 - RNA, 19 nt, Artificial Sequence
  Description of Artificial Sequence: Synthetic oligonucleotide
ccgacucacuguuggcuug

SEQ ID NO: 1200778 - RNA, 19 nt, Artificial Sequence
  Description of Artificial Sequence: Synthetic oligonucleotide
uccguccgguggucauagc

SEQ ID NO: 1200779 - RNA, 19 nt, Artificial Sequence
  Description of Artificial Sequence: Synthetic oligonucleotide
cauggccauaggugaaccu

SEQ ID NO: 1200780 - RNA, 19 nt, Artificial Sequence
  Description of Artificial Sequence: Synthetic oligonucleotide
ccauucucguuccggccac

SEQ ID NO: 1200781 - RNA, 19 nt, Artificial Sequence
  Description of Artificial Sequence: Synthetic oligonucleotide
gggccaaucugguagucau

SEQ ID NO: 1200782 - RNA, 19 nt, Artificial Sequence
  Description of Artificial Sequence: Synthetic oligonucleotide
cauacaccugcacggcccu

SEQ ID NO: 1200783 - RNA, 19 nt, Artificial Sequence
  Description of Artificial Sequence: Synthetic oligonucleotide
cacggcgcugguucaugga

SEQ ID NO: 1200784 - RNA, 19 nt, Artificial Sequence
  Description of Artificial Sequence: Synthetic oligonucleotide
gacucacuguuggcuugca

SEQ ID NO: 1200785 - RNA, 19 nt, Artificial Sequence
  Description of Artificial Sequence: Synthetic oligonucleotide
gugcuguaucuggccacug

SEQ ID NO: 1200786 - RNA, 19 nt, Artificial Sequence
  Description of Artificial Sequence: Synthetic oligonucleotide
acacgccugcaauggcauu

SEQ ID NO: 1200787 - RNA, 19 nt, Artificial Sequence
  Description of Artificial Sequence: Synthetic oligonucleotide
gcccagcgugaacauggag

SEQ ID NO: 1200788 - RNA, 19 nt, Artificial Sequence
  Description of Artificial Sequence: Synthetic oligonucleotide
cacggcagauaugcaccuc

SEQ ID NO: 1200789 - RNA, 19 nt, Artificial Sequence
  Description of Artificial Sequence: Synthetic oligonucleotide
cugcacggcccuggagaag

SEQ ID NO: 1200790 - RNA, 19 nt, Artificial Sequence
  Description of Artificial Sequence: Synthetic oligonucleotide
ggaaagccucacgcaugcc

SEQ ID NO: 1200791 - RNA, 19 nt, Artificial Sequence
  Description of Artificial Sequence: Synthetic oligonucleotide
caccugucggcuucauggu

SEQ ID NO: 1200792 - RNA, 19 nt, Artificial Sequence
  Description of Artificial Sequence: Synthetic oligonucleotide
cagccucgugcuguaguca

SEQ ID NO: 1200793 - RNA, 19 nt, Artificial Sequence
  Description of Artificial Sequence: Synthetic oligonucleotide
ggucauagcacagcagguu

SEQ ID NO: 1200794 - RNA, 19 nt, Artificial Sequence
  Description of Artificial Sequence: Synthetic oligonucleotide
ccagcgugaacauggaguu

SEQ ID NO: 1200795 - RNA, 19 nt, Artificial Sequence
  Description of Artificial Sequence: Synthetic oligonucleotide
gaguuggucuuggggcugu

SEQ ID NO: 1200796 - RNA, 19 nt, Artificial Sequence
  Description of Artificial Sequence: Synthetic oligonucleotide
cacauccguccggugguca

SEQ ID NO: 1200797 - RNA, 19 nt, Artificial Sequence
  Description of Artificial Sequence: Synthetic oligonucleotide
cagccuugagccccacaua

SEQ ID NO: 1200798 - RNA, 19 nt, Artificial Sequence
  Description of Artificial Sequence: Synthetic oligonucleotide
caugcugugccagccucgu

SEQ ID NO: 1200799 - RNA, 19 nt, Artificial Sequence
  Description of Artificial Sequence: Synthetic oligonucleotide
guccggaccccugcuccac

SEQ ID NO: 1200800 - RNA, 19 nt, Artificial Sequence
  Description of Artificial Sequence: Synthetic oligonucleotide
gguccggaccccugcucca

SEQ ID NO: 1200801 - RNA, 19 nt, Artificial Sequence
  Description of Artificial Sequence: Synthetic oligonucleotide
gacaccgcucggagaccuc

SEQ ID NO: 1200802 - RNA, 19 nt, Artificial Sequence
  Description of Artificial Sequence: Synthetic oligonucleotide
ccuuggguugagggcacac

SEQ ID NO: 1200803 - RNA, 19 nt, Artificial Sequence
  Description of Artificial Sequence: Synthetic oligonucleotide
cucagagcgcagcacuguu

SEQ ID NO: 1200804 - RNA, 19 nt, Artificial Sequence
  Description of Artificial Sequence: Synthetic oligonucleotide
gccgugcucucccagcugu

SEQ ID NO: 1200805 - RNA, 19 nt, Artificial Sequence
  Description of Artificial Sequence: Synthetic oligonucleotide
cgcaugcccagcgugaaca

SEQ ID NO: 1200806 - RNA, 19 nt, Artificial Sequence
  Description of Artificial Sequence: Synthetic oligonucleotide
ggcgcuuguccuugcuucu

SEQ ID NO: 1200807 - RNA, 19 nt, Artificial Sequence
  Description of Artificial Sequence: Synthetic oligonucleotide
ccucaccgcccacgaagag

SEQ ID NO: 1200808 - RNA, 19 nt, Artificial Sequence
  Description of Artificial Sequence: Synthetic oligonucleotide
cgugcucucccagcuguag

SEQ ID NO: 1200809 - RNA, 19 nt, Artificial Sequence
  Description of Artificial Sequence: Synthetic oligonucleotide
cggcgcugguucauggaug

SEQ ID NO: 1200810 - RNA, 19 nt, Artificial Sequence
  Description of Artificial Sequence: Synthetic oligonucleotide
cgacucacuguuggcuugc

SEQ ID NO: 1200811 - RNA, 19 nt, Artificial Sequence
  Description of Artificial Sequence: Synthetic oligonucleotide
cgcugguucauggaugcca

SEQ ID NO: 1200812 - RNA, 19 nt, Artificial Sequence
  Description of Artificial Sequence: Synthetic oligonucleotide
ugucggcuucauggucaua

SEQ ID NO: 1200813 - RNA, 19 nt, Artificial Sequence
  Description of Artificial Sequence: Synthetic oligonucleotide
cccacacauccguccggug

SEQ ID NO: 1200814 - RNA, 19 nt, Artificial Sequence
  Description of Artificial Sequence: Synthetic oligonucleotide
gccacacgaguccacugau

SEQ ID NO: 1200815 - RNA, 19 nt, Artificial Sequence
  Description of Artificial Sequence: Synthetic oligonucleotide
cauccguccgguggucaua

SEQ ID NO: 1200816 - RNA, 19 nt, Artificial Sequence
  Description of Artificial Sequence: Synthetic oligonucleotide
ggugcgcuguuuccaggau

SEQ ID NO: 1200817 - RNA, 19 nt, Artificial Sequence
  Description of Artificial Sequence: Synthetic oligonucleotide
gcccgacucacuguuggcu

SEQ ID NO: 1200818 - RNA, 19 nt, Artificial Sequence
  Description of Artificial Sequence: Synthetic oligonucleotide
gcgcuuguccuugcuucuc

SEQ ID NO: 1200819 - RNA, 19 nt, Artificial Sequence
  Description of Artificial Sequence: Synthetic oligonucleotide
ccguuucuccucccacaca

SEQ ID NO: 1200820 - RNA, 19 nt, Artificial Sequence
  Description of Artificial Sequence: Synthetic oligonucleotide
gcgcugguucauggaugcc

SEQ ID NO: 1200821 - RNA, 19 nt, Artificial Sequence
  Description of Artificial Sequence: Synthetic oligonucleotide
cgaguccacugauugcacu

SEQ ID NO: 1200822 - RNA, 19 nt, Artificial Sequence
  Description of Artificial Sequence: Synthetic oligonucleotide
gcccucgcaguuggccuca

SEQ ID NO: 1200823 - RNA, 19 nt, Artificial Sequence
  Description of Artificial Sequence: Synthetic oligonucleotide
caccgcccacgaagagcaa

SEQ ID NO: 1200824 - RNA, 19 nt, Artificial Sequence
  Description of Artificial Sequence: Synthetic oligonucleotide
cuguagucaugggccguuu

SEQ ID NO: 1200825 - RNA, 19 nt, Artificial Sequence
  Description of Artificial Sequence: Synthetic oligonucleotide
cgggccaaucugguaguca

SEQ ID NO: 1200826 - RNA, 19 nt, Artificial Sequence
  Description of Artificial Sequence: Synthetic oligonucleotide
cggaccccugcuccaccug

SEQ ID NO: 1200827 - RNA, 19 nt, Artificial Sequence
  Description of Artificial Sequence: Synthetic oligonucleotide
ccuggcgcuuguccuugcu

SEQ ID NO: 1200828 - RNA, 19 nt, Artificial Sequence
  Description of Artificial Sequence: Synthetic oligonucleotide
cggagaccucaccgcccac

SEQ ID NO: 1200829 - RNA, 19 nt, Artificial Sequence
  Description of Artificial Sequence: Synthetic oligonucleotide
gaccucgguccuggcgcuu

SEQ ID NO: 1200830 - RNA, 19 nt, Artificial Sequence
  Description of Artificial Sequence: Synthetic oligonucleotide
gcgcuguuuccaggaugua

SEQ ID NO: 1200831 - RNA, 19 nt, Artificial Sequence
  Description of Artificial Sequence: Synthetic oligonucleotide
ccggcgggcuggcagggau

SEQ ID NO: 1200832 - RNA, 19 nt, Artificial Sequence
  Description of Artificial Sequence: Synthetic oligonucleotide
ccucgguccuggcgcuugu

SEQ ID NO: 1200833 - RNA, 19 nt, Artificial Sequence
  Description of Artificial Sequence: Synthetic oligonucleotide
ccacacggcgcugguucau

SEQ ID NO: 1200834 - RNA, 19 nt, Artificial Sequence
  Description of Artificial Sequence: Synthetic oligonucleotide
uuaaguacaaggcuggugg

SEQ ID NO: 1200835 - RNA, 19 nt, Artificial Sequence
  Description of Artificial Sequence: Synthetic oligonucleotide
ucuaaguucagauucaucc

SEQ ID NO: 1200836 - RNA, 19 nt, Artificial Sequence
  Description of Artificial Sequence: Synthetic oligonucleotide
gaaguugucgcacaggucg

SEQ ID NO: 1200837 - RNA, 19 nt, Artificial Sequence
  Description of Artificial Sequence: Synthetic oligonucleotide
aaggaaaaguagaagaacg

SEQ ID NO: 1200838 - RNA, 19 nt, Artificial Sequence
  Description of Artificial Sequence: Synthetic oligonucleotide
agaagaacgucagagaagg

SEQ ID NO: 1200839 - RNA, 19 nt, Artificial Sequence
  Description of Artificial Sequence: Synthetic oligonucleotide
aaccggaguaccuggaugg

SEQ ID NO: 1200840 - RNA, 19 nt, Artificial Sequence
  Description of Artificial Sequence: Synthetic oligonucleotide
uuuuaagacuuuaucauua

SEQ ID NO: 1200841 - RNA, 19 nt, Artificial Sequence
  Description of Artificial Sequence: Synthetic oligonucleotide
ugaacgauccgucuccggg

SEQ ID NO: 1200842 - RNA, 19 nt, Artificial Sequence
  Description of Artificial Sequence: Synthetic oligonucleotide
aggguugaaagaugcaccc

SEQ ID NO: 1200843 - RNA, 19 nt, Artificial Sequence
  Description of Artificial Sequence: Synthetic oligonucleotide
uccucauggucucugaucc

SEQ ID NO: 1200844 - RNA, 19 nt, Artificial Sequence
  Description of Artificial Sequence: Synthetic oligonucleotide
cuaaguucagauucauccc

SEQ ID NO: 1200845 - RNA, 19 nt, Artificial Sequence
  Description of Artificial Sequence: Synthetic oligonucleotide
uagacccugacccaguucu

SEQ ID NO: 1200846 - RNA, 19 nt, Artificial Sequence
  Description of Artificial Sequence: Synthetic oligonucleotide
gauccuggcguccugacug

SEQ ID NO: 1200847 - RNA, 19 nt, Artificial Sequence
  Description of Artificial Sequence: Synthetic oligonucleotide
ggaccaguuaaguacaagg

SEQ ID NO: 1200848 - RNA, 19 nt, Artificial Sequence
  Description of Artificial Sequence: Synthetic oligonucleotide
aggucuaugggcaucuugc

SEQ ID NO: 1200849 - RNA, 19 nt, Artificial Sequence
  Description of Artificial Sequence: Synthetic oligonucleotide
uguacagacccacuguccu

SEQ ID NO: 1200850 - RNA, 19 nt, Artificial Sequence
  Description of Artificial Sequence: Synthetic oligonucleotide
auagguaaugccacucucc

SEQ ID NO: 1200851 - RNA, 19 nt, Artificial Sequence
  Description of Artificial Sequence: Synthetic oligonucleotide
cucuccuaaacuuuggauc

SEQ ID NO: 1200852 - RNA, 19 nt, Artificial Sequence
  Description of Artificial Sequence: Synthetic oligonucleotide
caguucucagcucaggucc

SEQ ID NO: 1200853 - RNA, 19 nt, Artificial Sequence
  Description of Artificial Sequence: Synthetic oligonucleotide
cuuccuuucgaccccagcc

SEQ ID NO: 1200854 - RNA, 19 nt, Artificial Sequence
  Description of Artificial Sequence: Synthetic oligonucleotide
caguuaaguacaaggcugg

SEQ ID NO: 1200855 - RNA, 19 nt, Artificial Sequence
  Description of Artificial Sequence: Synthetic oligonucleotide
aguagaagaacgucagaga

SEQ ID NO: 1200856 - RNA, 19 nt, Artificial Sequence
  Description of Artificial Sequence: Synthetic oligonucleotide
uggucucugauccaugugu

SEQ ID NO: 1200857 - RNA, 19 nt, Artificial Sequence
  Description of Artificial Sequence: Synthetic oligonucleotide
uuuaagacuuuaucauuaa

SEQ ID NO: 1200858 - RNA, 19 nt, Artificial Sequence
  Description of Artificial Sequence: Synthetic oligonucleotide
agggguuguccauagaugu

SEQ ID NO: 1200859 - RNA, 19 nt, Artificial Sequence
  Description of Artificial Sequence: Synthetic oligonucleotide
agauucauccccauugauc

SEQ ID NO: 1200860 - RNA, 19 nt, Artificial Sequence
  Description of Artificial Sequence: Synthetic oligonucleotide
guagaagaacgucagagaa

SEQ ID NO: 1200861 - RNA, 19 nt, Artificial Sequence
  Description of Artificial Sequence: Synthetic oligonucleotide
uauagguaaugccacucuc

SEQ ID NO: 1200862 - RNA, 19 nt, Artificial Sequence
  Description of Artificial Sequence: Synthetic oligonucleotide
ugggcaaaggggaggacag

SEQ ID NO: 1200863 - RNA, 19 nt, Artificial Sequence
  Description of Artificial Sequence: Synthetic oligonucleotide
ugacccaguucucagcuca

SEQ ID NO: 1200864 - RNA, 19 nt, Artificial Sequence
  Description of Artificial Sequence: Synthetic oligonucleotide
cucgagguacugaaggugc

SEQ ID NO: 1200865 - RNA, 19 nt, Artificial Sequence
  Description of Artificial Sequence: Synthetic oligonucleotide
uccuuggucacuugaguug

SEQ ID NO: 1200866 - RNA, 19 nt, Artificial Sequence
  Description of Artificial Sequence: Synthetic oligonucleotide
ugucacuuguggcugaguc

SEQ ID NO: 1200867 - RNA, 19 nt, Artificial Sequence
  Description of Artificial Sequence: Synthetic oligonucleotide
aaugcccggguaguggcgc

SEQ ID NO: 1200868 - RNA, 19 nt, Artificial Sequence
  Description of Artificial Sequence: Synthetic oligonucleotide
gaccaguuaaguacaaggc

SEQ ID NO: 1200869 - RNA, 19 nt, Artificial Sequence
  Description of Artificial Sequence: Synthetic oligonucleotide
uguguagccugccaugggu

SEQ ID NO: 1200870 - RNA, 19 nt, Artificial Sequence
  Description of Artificial Sequence: Synthetic oligonucleotide
uccugacugucacuugugg

SEQ ID NO: 1200871 - RNA, 19 nt, Artificial Sequence
  Description of Artificial Sequence: Synthetic oligonucleotide
agauuggggccccagccac

SEQ ID NO: 1200872 - RNA, 19 nt, Artificial Sequence
  Description of Artificial Sequence: Synthetic oligonucleotide
ucaggguugaaagaugcac

SEQ ID NO: 1200873 - RNA, 19 nt, Artificial Sequence
  Description of Artificial Sequence: Synthetic oligonucleotide
ucucugucccagauugggg

SEQ ID NO: 1200874 - RNA, 19 nt, Artificial Sequence
  Description of Artificial Sequence: Synthetic oligonucleotide
uuccuugaccauccuagcc

SEQ ID NO: 1200875 - RNA, 19 nt, Artificial Sequence
  Description of Artificial Sequence: Synthetic oligonucleotide
ucaaagaccagggccaaga

SEQ ID NO: 1200876 - RNA, 19 nt, Artificial Sequence
  Description of Artificial Sequence: Synthetic oligonucleotide
aucaugggcugaacgaucc

SEQ ID NO: 1200877 - RNA, 19 nt, Artificial Sequence
  Description of Artificial Sequence: Synthetic oligonucleotide
uggaggacucuccuaaacu

SEQ ID NO: 1200878 - RNA, 19 nt, Artificial Sequence
  Description of Artificial Sequence: Synthetic oligonucleotide
guagcggugacagaaguug

SEQ ID NO: 1200879 - RNA, 19 nt, Artificial Sequence
  Description of Artificial Sequence: Synthetic oligonucleotide
guggucacagucuggaggc

SEQ ID NO: 1200880 - RNA, 19 nt, Artificial Sequence
  Description of Artificial Sequence: Synthetic oligonucleotide
gucuuugcccuugagaggc

SEQ ID NO: 1200881 - RNA, 19 nt, Artificial Sequence
  Description of Artificial Sequence: Synthetic oligonucleotide
ugauccauguguuguucug

SEQ ID NO: 1200882 - RNA, 19 nt, Artificial Sequence
  Description of Artificial Sequence: Synthetic oligonucleotide
cuugaggcaggugauguag

SEQ ID NO: 1200883 - RNA, 19 nt, Artificial Sequence
  Description of Artificial Sequence: Synthetic oligonucleotide
ucccgauccucaaucacca

SEQ ID NO: 1200884 - RNA, 19 nt, Artificial Sequence
  Description of Artificial Sequence: Synthetic oligonucleotide
gaguuguccccacucuggg

SEQ ID NO: 1200885 - RNA, 19 nt, Artificial Sequence
  Description of Artificial Sequence: Synthetic oligonucleotide
ucuauagguaaugccacuc

SEQ ID NO: 1200886 - RNA, 19 nt, Artificial Sequence
  Description of Artificial Sequence: Synthetic oligonucleotide
uuccuuucgaccccagccu

SEQ ID NO: 1200887 - RNA, 19 nt, Artificial Sequence
  Description of Artificial Sequence: Synthetic oligonucleotide
ugacccuccuuccuugacc

SEQ ID NO: 1200888 - RNA, 19 nt, Artificial Sequence
  Description of Artificial Sequence: Synthetic oligonucleotide
gguugaaagaugcacccug

SEQ ID NO: 1200889 - RNA, 19 nt, Artificial Sequence
  Description of Artificial Sequence: Synthetic oligonucleotide
aguggcgcagcucaucaug

SEQ ID NO: 1200890 - RNA, 19 nt, Artificial Sequence
  Description of Artificial Sequence: Synthetic oligonucleotide
ccaguuaaguacaaggcug

SEQ ID NO: 1200891 - RNA, 19 nt, Artificial Sequence
  Description of Artificial Sequence: Synthetic oligonucleotide
accgucccgauccucaauc

SEQ ID NO: 1200892 - RNA, 19 nt, Artificial Sequence
  Description of Artificial Sequence: Synthetic oligonucleotide
ggagguaggcguugaaugg

SEQ ID NO: 1200893 - RNA, 19 nt, Artificial Sequence
  Description of Artificial Sequence: Synthetic oligonucleotide
uguguuguucuggucuggg

SEQ ID NO: 1200894 - RNA, 19 nt, Artificial Sequence
  Description of Artificial Sequence: Synthetic oligonucleotide
gaacgauccgucuccgggc

SEQ ID NO: 1200895 - RNA, 19 nt, Artificial Sequence
  Description of Artificial Sequence: Synthetic oligonucleotide
uaaggccuuccuuucgacc

SEQ ID NO: 1200896 - RNA, 19 nt, Artificial Sequence
  Description of Artificial Sequence: Synthetic oligonucleotide
ucgaccccagccucuauag

SEQ ID NO: 1200897 - RNA, 19 nt, Artificial Sequence
  Description of Artificial Sequence: Synthetic oligonucleotide
auguacagacccacugucc

SEQ ID NO: 1200898 - RNA, 19 nt, Artificial Sequence
  Description of Artificial Sequence: Synthetic oligonucleotide
gaaccggaguaccuggaug

SEQ ID NO: 1200899 - RNA, 19 nt, Artificial Sequence
  Description of Artificial Sequence: Synthetic oligonucleotide
cugaucgcggccgagggcg

SEQ ID NO: 1200900 - RNA, 19 nt, Artificial Sequence
  Description of Artificial Sequence: Synthetic oligonucleotide
aguacaaggcuggugguca

SEQ ID NO: 1200901 - RNA, 19 nt, Artificial Sequence
  Description of Artificial Sequence: Synthetic oligonucleotide
aacgauccgucuccgggca

SEQ ID NO: 1200902 - RNA, 19 nt, Artificial Sequence
  Description of Artificial Sequence: Synthetic oligonucleotide
cauguguuguucuggucug

SEQ ID NO: 1200903 - RNA, 19 nt, Artificial Sequence
  Description of Artificial Sequence: Synthetic oligonucleotide
cagcucacacuucucaaag

SEQ ID NO: 1200904 - RNA, 19 nt, Artificial Sequence
  Description of Artificial Sequence: Synthetic oligonucleotide
gugcgagagaugcugaaac

SEQ ID NO: 1200905 - RNA, 19 nt, Artificial Sequence
  Description of Artificial Sequence: Synthetic oligonucleotide
ugcgagagaugcugaaaca

SEQ ID NO: 1200906 - RNA, 19 nt, Artificial Sequence
  Description of Artificial Sequence: Synthetic oligonucleotide
guuaaguacaaggcuggug

SEQ ID NO: 1200907 - RNA, 19 nt, Artificial Sequence
  Description of Artificial Sequence: Synthetic oligonucleotide
acucuccuaaacuuuggau

SEQ ID NO: 1200908 - RNA, 19 nt, Artificial Sequence
  Description of Artificial Sequence: Synthetic oligonucleotide
guggaaccggaguaccugg

SEQ ID NO: 1200909 - RNA, 19 nt, Artificial Sequence
  Description of Artificial Sequence: Synthetic oligonucleotide
gucuaugggcaucuugccc

SEQ ID NO: 1200910 - RNA, 19 nt, Artificial Sequence
  Description of Artificial Sequence: Synthetic oligonucleotide
ugggcucgggcgcucacgg

SEQ ID NO: 1200911 - RNA, 19 nt, Artificial Sequence
  Description of Artificial Sequence: Synthetic oligonucleotide
ucaugggcugaacgauccg

SEQ ID NO: 1200912 - RNA, 19 nt, Artificial Sequence
  Description of Artificial Sequence: Synthetic oligonucleotide
ugacagaaguugucgcaca

SEQ ID NO: 1200913 - RNA, 19 nt, Artificial Sequence
  Description of Artificial Sequence: Synthetic oligonucleotide
caguuguugaccugcagga

SEQ ID NO: 1200914 - RNA, 19 nt, Artificial Sequence
  Description of Artificial Sequence: Synthetic oligonucleotide
gauguagcggugacagaag

SEQ ID NO: 1200915 - RNA, 19 nt, Artificial Sequence
  Description of Artificial Sequence: Synthetic oligonucleotide
ggaggcuuugucuuugccc

SEQ ID NO: 1200916 - RNA, 19 nt, Artificial Sequence
  Description of Artificial Sequence: Synthetic oligonucleotide
agggguacgggugcgagag

SEQ ID NO: 1200917 - RNA, 19 nt, Artificial Sequence
  Description of Artificial Sequence: Synthetic oligonucleotide
agggugugcucugcaaugc

SEQ ID NO: 1200918 - RNA, 19 nt, Artificial Sequence
  Description of Artificial Sequence: Synthetic oligonucleotide
guacgggugcgagagaugc

SEQ ID NO: 1200919 - RNA, 19 nt, Artificial Sequence
  Description of Artificial Sequence: Synthetic oligonucleotide
gaccauccuagcccaaccc

SEQ ID NO: 1200920 - RNA, 19 nt, Artificial Sequence
  Description of Artificial Sequence: Synthetic oligonucleotide
cuuguguccagcccgucuc

SEQ ID NO: 1200921 - RNA, 19 nt, Artificial Sequence
  Description of Artificial Sequence: Synthetic oligonucleotide
guaggcguugaauggggug

SEQ ID NO: 1200922 - RNA, 19 nt, Artificial Sequence
  Description of Artificial Sequence: Synthetic oligonucleotide
gaaggugcugccucugaga

SEQ ID NO: 1200923 - RNA, 19 nt, Artificial Sequence
  Description of Artificial Sequence: Synthetic oligonucleotide
ugggcgagcauguggccag

SEQ ID NO: 1200924 - RNA, 19 nt, Artificial Sequence
  Description of Artificial Sequence: Synthetic oligonucleotide
aggcuaaggccuuccuuuc

SEQ ID NO: 1200925 - RNA, 19 nt, Artificial Sequence
  Description of Artificial Sequence: Synthetic oligonucleotide
ugacugucacuuguggcug

SEQ ID NO: 1200926 - RNA, 19 nt, Artificial Sequence
  Description of Artificial Sequence: Synthetic oligonucleotide
agucuggaggcuaaggccu

SEQ ID NO: 1200927 - RNA, 19 nt, Artificial Sequence
  Description of Artificial Sequence: Synthetic oligonucleotide
cuccgagcggccgagaccc

SEQ ID NO: 1200928 - RNA, 19 nt, Artificial Sequence
  Description of Artificial Sequence: Synthetic oligonucleotide
agacccgcugaucgcggcc

SEQ ID NO: 1200929 - RNA, 19 nt, Artificial Sequence
  Description of Artificial Sequence: Synthetic oligonucleotide
gcucacacuucucaaagac

SEQ ID NO: 1200930 - RNA, 19 nt, Artificial Sequence
  Description of Artificial Sequence: Synthetic oligonucleotide
ucauggucucugauccaug

SEQ ID NO: 1200931 - RNA, 19 nt, Artificial Sequence
  Description of Artificial Sequence: Synthetic oligonucleotide
gggcucgagguacugaagg

SEQ ID NO: 1200932 - RNA, 19 nt, Artificial Sequence
  Description of Artificial Sequence: Synthetic oligonucleotide
uccacuggauggacccggg

SEQ ID NO: 1200933 - RNA, 19 nt, Artificial Sequence
  Description of Artificial Sequence: Synthetic oligonucleotide
uucuuguuccgccggcgcu

SEQ ID NO: 1200934 - RNA, 19 nt, Artificial Sequence
  Description of Artificial Sequence: Synthetic oligonucleotide
uccuaaacuuuggauccug

SEQ ID NO: 1200935 - RNA, 19 nt, Artificial Sequence
  Description of Artificial Sequence: Synthetic oligonucleotide
ggaaaaguagaagaacguc

SEQ ID NO: 1200936 - RNA, 19 nt, Artificial Sequence
  Description of Artificial Sequence: Synthetic oligonucleotide
uccggguugggcgagcaug

SEQ ID NO: 1200937 - RNA, 19 nt, Artificial Sequence
  Description of Artificial Sequence: Synthetic oligonucleotide
ucuccgagcggccgagacc

SEQ ID NO: 1200938 - RNA, 19 nt, Artificial Sequence
  Description of Artificial Sequence: Synthetic oligonucleotide
ugucgcacaggucguggac

SEQ ID NO: 1200939 - RNA, 19 nt, Artificial Sequence
  Description of Artificial Sequence: Synthetic oligonucleotide
cuucuuguuccgccggcgc

SEQ ID NO: 1200940 - RNA, 19 nt, Artificial Sequence
  Description of Artificial Sequence: Synthetic oligonucleotide
cagcucaucaugccuccgg

SEQ ID NO: 1200941 - RNA, 19 nt, Artificial Sequence
  Description of Artificial Sequence: Synthetic oligonucleotide
cucagcucagguccugggc

SEQ ID NO: 1200942 - RNA, 19 nt, Artificial Sequence
  Description of Artificial Sequence: Synthetic oligonucleotide
aguggggaccaguuaagua

SEQ ID NO: 1200943 - RNA, 19 nt, Artificial Sequence
  Description of Artificial Sequence: Synthetic oligonucleotide
ucugauccauguguuguuc

SEQ ID NO: 1200944 - RNA, 19 nt, Artificial Sequence
  Description of Artificial Sequence: Synthetic oligonucleotide
ccucaggguugaaagaugc

SEQ ID NO: 1200945 - RNA, 19 nt, Artificial Sequence
  Description of Artificial Sequence: Synthetic oligonucleotide
guugucgcacaggucgugg

SEQ ID NO: 1200946 - RNA, 19 nt, Artificial Sequence
  Description of Artificial Sequence: Synthetic oligonucleotide
ucgagguacugaaggugcu

SEQ ID NO: 1200947 - RNA, 19 nt, Artificial Sequence
  Description of Artificial Sequence: Synthetic oligonucleotide
uagcggugacagaaguugu

SEQ ID NO: 1200948 - RNA, 19 nt, Artificial Sequence
  Description of Artificial Sequence: Synthetic oligonucleotide
cacgugggcucuugggucc

SEQ ID NO: 1200949 - RNA, 19 nt, Artificial Sequence
  Description of Artificial Sequence: Synthetic oligonucleotide
gucccgauccucaaucacc

SEQ ID NO: 1200950 - RNA, 19 nt, Artificial Sequence
  Description of Artificial Sequence: Synthetic oligonucleotide
ggccgcguaguccucaagg

SEQ ID NO: 1200951 - RNA, 19 nt, Artificial Sequence
  Description of Artificial Sequence: Synthetic oligonucleotide
cugucgcuguccaagccug

SEQ ID NO: 1200952 - RNA, 19 nt, Artificial Sequence
  Description of Artificial Sequence: Synthetic oligonucleotide
ggccgagacccgcugaucg

SEQ ID NO: 1200953 - RNA, 19 nt, Artificial Sequence
  Description of Artificial Sequence: Synthetic oligonucleotide
cuaaggccuuccuuucgac

SEQ ID NO: 1200954 - RNA, 19 nt, Artificial Sequence
  Description of Artificial Sequence: Synthetic oligonucleotide
auggucucugauccaugug

SEQ ID NO: 1200955 - RNA, 19 nt, Artificial Sequence
  Description of Artificial Sequence: Synthetic oligonucleotide
gucucugauccauguguug

SEQ ID NO: 1200956 - RNA, 19 nt, Artificial Sequence
  Description of Artificial Sequence: Synthetic oligonucleotide
uccuuucgaccccagccuc

SEQ ID NO: 1200957 - RNA, 19 nt, Artificial Sequence
  Description of Artificial Sequence: Synthetic oligonucleotide
guggaggacucuccuaaac

SEQ ID NO: 1200958 - RNA, 19 nt, Artificial Sequence
  Description of Artificial Sequence: Synthetic oligonucleotide
gaggcuaaggccuuccuuu

SEQ ID NO: 1200959 - RNA, 19 nt, Artificial Sequence
  Description of Artificial Sequence: Synthetic oligonucleotide
ccucuauagguaaugccac

SEQ ID NO: 1200960 - RNA, 19 nt, Artificial Sequence
  Description of Artificial Sequence: Synthetic oligonucleotide
uggaaccggaguaccugga

SEQ ID NO: 1200961 - RNA, 19 nt, Artificial Sequence
  Description of Artificial Sequence: Synthetic oligonucleotide
ugagggguacgggugcgag

SEQ ID NO: 1200962 - RNA, 19 nt, Artificial Sequence
  Description of Artificial Sequence: Synthetic oligonucleotide
ggcugaacgauccgucucc

SEQ ID NO: 1200963 - RNA, 19 nt, Artificial Sequence
  Description of Artificial Sequence: Synthetic oligonucleotide
uccccgagguccccgccgg

SEQ ID NO: 1200964 - RNA, 19 nt, Artificial Sequence
  Description of Artificial Sequence: Synthetic oligonucleotide
acgggugcgagagaugcug

SEQ ID NO: 1200965 - RNA, 19 nt, Artificial Sequence
  Description of Artificial Sequence: Synthetic oligonucleotide
agguaggcguugaaugggg

SEQ ID NO: 1200966 - RNA, 19 nt, Artificial Sequence
  Description of Artificial Sequence: Synthetic oligonucleotide
uguagacccugacccaguu

SEQ ID NO: 1200967 - RNA, 19 nt, Artificial Sequence
  Description of Artificial Sequence: Synthetic oligonucleotide
uucgaccccagccucuaua

SEQ ID NO: 1200968 - RNA, 19 nt, Artificial Sequence
  Description of Artificial Sequence: Synthetic oligonucleotide
gguugggcgagcauguggc

SEQ ID NO: 1200969 - RNA, 19 nt, Artificial Sequence
  Description of Artificial Sequence: Synthetic oligonucleotide
cugcaggauggugagcccg

SEQ ID NO: 1200970 - RNA, 19 nt, Artificial Sequence
  Description of Artificial Sequence: Synthetic oligonucleotide
augggcugaacgauccguc

SEQ ID NO: 1200971 - RNA, 19 nt, Artificial Sequence
  Description of Artificial Sequence: Synthetic oligonucleotide
acccugacccaguucucag

SEQ ID NO: 1200972 - RNA, 19 nt, Artificial Sequence
  Description of Artificial Sequence: Synthetic oligonucleotide
cgcguaguccucaaggucc

SEQ ID NO: 1200973 - RNA, 19 nt, Artificial Sequence
  Description of Artificial Sequence: Synthetic oligonucleotide
ccgauccucaaucaccagg

SEQ ID NO: 1200974 - RNA, 19 nt, Artificial Sequence
  Description of Artificial Sequence: Synthetic oligonucleotide
uccuggugacccuccuucc

SEQ ID NO: 1200975 - RNA, 19 nt, Artificial Sequence
  Description of Artificial Sequence: Synthetic oligonucleotide
cugaacgauccgucuccgg

SEQ ID NO: 1200976 - RNA, 19 nt, Artificial Sequence
  Description of Artificial Sequence: Synthetic oligonucleotide
uugaccauccuagcccaac

SEQ ID NO: 1200977 - RNA, 19 nt, Artificial Sequence
  Description of Artificial Sequence: Synthetic oligonucleotide
ucgcacaggucguggaccu

SEQ ID NO: 1200978 - RNA, 19 nt, Artificial Sequence
  Description of Artificial Sequence: Synthetic oligonucleotide
gucguggaccuucuccagc

SEQ ID NO: 1200979 - RNA, 19 nt, Artificial Sequence
  Description of Artificial Sequence: Synthetic oligonucleotide
guagccugccauggguugg

SEQ ID NO: 1200980 - RNA, 19 nt, Artificial Sequence
  Description of Artificial Sequence: Synthetic oligonucleotide
caugccuccgggccauggg

SEQ ID NO: 1200981 - RNA, 19 nt, Artificial Sequence
  Description of Artificial Sequence: Synthetic oligonucleotide
agcccgucuccuuggucac

SEQ ID NO: 1200982 - RNA, 19 nt, Artificial Sequence
  Description of Artificial Sequence: Synthetic oligonucleotide
cucaugauguugguggcca

SEQ ID NO: 1200983 - RNA, 19 nt, Artificial Sequence
  Description of Artificial Sequence: Synthetic oligonucleotide
caggucuaugggcaucuug

SEQ ID NO: 1200984 - RNA, 19 nt, Artificial Sequence
  Description of Artificial Sequence: Synthetic oligonucleotide
uugucgcacaggucgugga

SEQ ID NO: 1200985 - RNA, 19 nt, Artificial Sequence
  Description of Artificial Sequence: Synthetic oligonucleotide
ugcgccagcuguuucuuuu

SEQ ID NO: 1200986 - RNA, 19 nt, Artificial Sequence
  Description of Artificial Sequence: Synthetic oligonucleotide
aggggcucgagguacugaa

SEQ ID NO: 1200987 - RNA, 19 nt, Artificial Sequence
  Description of Artificial Sequence: Synthetic oligonucleotide
caaugcccggguaguggcg

SEQ ID NO: 1200988 - RNA, 19 nt, Artificial Sequence
  Description of Artificial Sequence: Synthetic oligonucleotide
agcggugacagaaguuguc

SEQ ID NO: 1200989 - RNA, 19 nt, Artificial Sequence
  Description of Artificial Sequence: Synthetic oligonucleotide
aagagggguuguccauaga

SEQ ID NO: 1200990 - RNA, 19 nt, Artificial Sequence
  Description of Artificial Sequence: Synthetic oligonucleotide
ggucuaugggcaucuugcc

SEQ ID NO: 1200991 - RNA, 19 nt, Artificial Sequence
  Description of Artificial Sequence: Synthetic oligonucleotide
uugggcgagcauguggcca

SEQ ID NO: 1200992 - RNA, 19 nt, Artificial Sequence
  Description of Artificial Sequence: Synthetic oligonucleotide
ucuuugcccuugagaggcc

SEQ ID NO: 1200993 - RNA, 19 nt, Artificial Sequence
  Description of Artificial Sequence: Synthetic oligonucleotide
auugauccuggcguccuga

SEQ ID NO: 1200994 - RNA, 19 nt, Artificial Sequence
  Description of Artificial Sequence: Synthetic oligonucleotide
ggguugggcgagcaugugg

SEQ ID NO: 1200995 - RNA, 19 nt, Artificial Sequence
  Description of Artificial Sequence: Synthetic oligonucleotide
cagcccgucuccuugguca

SEQ ID NO: 1200996 - RNA, 19 nt, Artificial Sequence
  Description of Artificial Sequence: Synthetic oligonucleotide
gcggugacagaaguugucg

SEQ ID NO: 1200997 - RNA, 19 nt, Artificial Sequence
  Description of Artificial Sequence: Synthetic oligonucleotide
cuguccugggcucgggcgc

SEQ ID NO: 1200998 - RNA, 19 nt, Artificial Sequence
  Description of Artificial Sequence: Synthetic oligonucleotide
ccagauuggggccccagcc

SEQ ID NO: 1200999 - RNA, 19 nt, Artificial Sequence
  Description of Artificial Sequence: Synthetic oligonucleotide
ucaugccuccgggccaugg

SEQ ID NO: 1201000 - RNA, 19 nt, Artificial Sequence
  Description of Artificial Sequence: Synthetic oligonucleotide
gacccgcugaucgcggccg

SEQ ID NO: 1201001 - RNA, 19 nt, Artificial Sequence
  Description of Artificial Sequence: Synthetic oligonucleotide
gaguaccuggauggccugg

SEQ ID NO: 1201002 - RNA, 19 nt, Artificial Sequence
  Description of Artificial Sequence: Synthetic oligonucleotide
auguguuguucuggucugg

SEQ ID NO: 1201003 - RNA, 19 nt, Artificial Sequence
  Description of Artificial Sequence: Synthetic oligonucleotide
gaccaucagguuguccagc

SEQ ID NO: 1201004 - RNA, 19 nt, Artificial Sequence
  Description of Artificial Sequence: Synthetic oligonucleotide
cuuugcccuugagaggccc

SEQ ID NO: 1201005 - RNA, 19 nt, Artificial Sequence
  Description of Artificial Sequence: Synthetic oligonucleotide
ugaucgcggccgagggcgg

SEQ ID NO: 1201006 - RNA, 19 nt, Artificial Sequence
  Description of Artificial Sequence: Synthetic oligonucleotide
cagccucuauagguaaugc

SEQ ID NO: 1201007 - RNA, 19 nt, Artificial Sequence
  Description of Artificial Sequence: Synthetic oligonucleotide
ggcuaaggccuuccuuucg

SEQ ID NO: 1201008 - RNA, 19 nt, Artificial Sequence
  Description of Artificial Sequence: Synthetic oligonucleotide
ucuuguuccgccggcgcuc

SEQ ID NO: 1201009 - RNA, 19 nt, Artificial Sequence
  Description of Artificial Sequence: Synthetic oligonucleotide
aaguugucgcacaggucgu

SEQ ID NO: 1201010 - RNA, 19 nt, Artificial Sequence
  Description of Artificial Sequence: Synthetic oligonucleotide
agguccccgagguccccgc

SEQ ID NO: 1201011 - RNA, 19 nt, Artificial Sequence
  Description of Artificial Sequence: Synthetic oligonucleotide
ugggagaggccacgcuugu

SEQ ID NO: 1201012 - RNA, 19 nt, Artificial Sequence
  Description of Artificial Sequence: Synthetic oligonucleotide
aagaagggugcaggaccug

SEQ ID NO: 1201013 - RNA, 19 nt, Artificial Sequence
  Description of Artificial Sequence: Synthetic oligonucleotide
caggugauguagcggugac

SEQ ID NO: 1201014 - RNA, 19 nt, Artificial Sequence
  Description of Artificial Sequence: Synthetic oligonucleotide
uggcgcagcucaucaugcc

SEQ ID NO: 1201015 - RNA, 19 nt, Artificial Sequence
  Description of Artificial Sequence: Synthetic oligonucleotide
uggaggcuaaggccuuccu

SEQ ID NO: 1201016 - RNA, 19 nt, Artificial Sequence
  Description of Artificial Sequence: Synthetic oligonucleotide
uguuccgccggcgcuccag

SEQ ID NO: 1201017 - RNA, 19 nt, Artificial Sequence
  Description of Artificial Sequence: Synthetic oligonucleotide
acccgggguccccaaaugu

SEQ ID NO: 1201018 - RNA, 19 nt, Artificial Sequence
  Description of Artificial Sequence: Synthetic oligonucleotide
gagcauguggccagcucac

SEQ ID NO: 1201019 - RNA, 19 nt, Artificial Sequence
  Description of Artificial Sequence: Synthetic oligonucleotide
cuauagguaaugccacucu

SEQ ID NO: 1201020 - RNA, 19 nt, Artificial Sequence
  Description of Artificial Sequence: Synthetic oligonucleotide
gguggaaccggaguaccug

SEQ ID NO: 1201021 - RNA, 19 nt, Artificial Sequence
  Description of Artificial Sequence: Synthetic oligonucleotide
guugggcgagcauguggcc

SEQ ID NO: 1201022 - RNA, 19 nt, Artificial Sequence
  Description of Artificial Sequence: Synthetic oligonucleotide
guggcgcagcucaucaugc

SEQ ID NO: 1201023 - RNA, 19 nt, Artificial Sequence
  Description of Artificial Sequence: Synthetic oligonucleotide
ccaagagcgggaagagggg

SEQ ID NO: 1201024 - RNA, 19 nt, Artificial Sequence
  Description of Artificial Sequence: Synthetic oligonucleotide
aggcguugaaugggguggg

SEQ ID NO: 1201025 - RNA, 19 nt, Artificial Sequence
  Description of Artificial Sequence: Synthetic oligonucleotide
guacagacccacuguccuc

SEQ ID NO: 1201026 - RNA, 19 nt, Artificial Sequence
  Description of Artificial Sequence: Synthetic oligonucleotide
cauagggcccaggggcucg

SEQ ID NO: 1201027 - RNA, 19 nt, Artificial Sequence
  Description of Artificial Sequence: Synthetic oligonucleotide
gagacccgcugaucgcggc

SEQ ID NO: 1201028 - RNA, 19 nt, Artificial Sequence
  Description of Artificial Sequence: Synthetic oligonucleotide
guccagcccgucuccuugg

SEQ ID NO: 1201029 - RNA, 19 nt, Artificial Sequence
  Description of Artificial Sequence: Synthetic oligonucleotide
ucaucgcggcgggaggucc

SEQ ID NO: 1201030 - RNA, 19 nt, Artificial Sequence
  Description of Artificial Sequence: Synthetic oligonucleotide
aaccaguuguugaccugca

SEQ ID NO: 1201031 - RNA, 19 nt, Artificial Sequence
  Description of Artificial Sequence: Synthetic oligonucleotide
ugcaggaccuggaggcuuu

SEQ ID NO: 1201032 - RNA, 19 nt, Artificial Sequence
  Description of Artificial Sequence: Synthetic oligonucleotide
gcucuuggguccccaagcc

SEQ ID NO: 1201033 - RNA, 19 nt, Artificial Sequence
  Description of Artificial Sequence: Synthetic oligonucleotide
ccacucuccuucuaaguuc

SEQ ID NO: 1201034 - RNA, 19 nt, Artificial Sequence
  Description of Artificial Sequence: Synthetic oligonucleotide
ucacagucuggaggcuaag

SEQ ID NO: 1201035 - RNA, 19 nt, Artificial Sequence
  Description of Artificial Sequence: Synthetic oligonucleotide
uacgggugcgagagaugcu

SEQ ID NO: 1201036 - RNA, 19 nt, Artificial Sequence
  Description of Artificial Sequence: Synthetic oligonucleotide
guccccgagguccccgccg

SEQ ID NO: 1201037 - RNA, 19 nt, Artificial Sequence
  Description of Artificial Sequence: Synthetic oligonucleotide
ugagcccgguguccugcgc

SEQ ID NO: 1201038 - RNA, 19 nt, Artificial Sequence
  Description of Artificial Sequence: Synthetic oligonucleotide
gacccugacccaguucuca

SEQ ID NO: 1201039 - RNA, 19 nt, Artificial Sequence
  Description of Artificial Sequence: Synthetic oligonucleotide
cugucccagauuggggccc

SEQ ID NO: 1201040 - RNA, 19 nt, Artificial Sequence
  Description of Artificial Sequence: Synthetic oligonucleotide
aagaugcacccugcccugu

SEQ ID NO: 1201041 - RNA, 19 nt, Artificial Sequence
  Description of Artificial Sequence: Synthetic oligonucleotide
auuggggccccagccacca

SEQ ID NO: 1201042 - RNA, 19 nt, Artificial Sequence
  Description of Artificial Sequence: Synthetic oligonucleotide
cugggcaaaggggaggaca

SEQ ID NO: 1201043 - RNA, 19 nt, Artificial Sequence
  Description of Artificial Sequence: Synthetic oligonucleotide
cauugauccuggcguccug

SEQ ID NO: 1201044 - RNA, 19 nt, Artificial Sequence
  Description of Artificial Sequence: Synthetic oligonucleotide
gucacuuguggcugagucu

SEQ ID NO: 1201045 - RNA, 19 nt, Artificial Sequence
  Description of Artificial Sequence: Synthetic oligonucleotide
aagagcgggaagagggguu

SEQ ID NO: 1201046 - RNA, 19 nt, Artificial Sequence
  Description of Artificial Sequence: Synthetic oligonucleotide
aguugucgcacaggucgug

SEQ ID NO: 1201047 - RNA, 19 nt, Artificial Sequence
  Description of Artificial Sequence: Synthetic oligonucleotide
gcuaaggccuuccuuucga

SEQ ID NO: 1201048 - RNA, 19 nt, Artificial Sequence
  Description of Artificial Sequence: Synthetic oligonucleotide
cuuguuccgccggcgcucc

SEQ ID NO: 1201049 - RNA, 19 nt, Artificial Sequence
  Description of Artificial Sequence: Synthetic oligonucleotide
gauuggggccccagccacc

SEQ ID NO: 1201050 - RNA, 19 nt, Artificial Sequence
  Description of Artificial Sequence: Synthetic oligonucleotide
uuggcccucaggguugaaa

SEQ ID NO: 1201051 - RNA, 19 nt, Artificial Sequence
  Description of Artificial Sequence: Synthetic oligonucleotide
cccaaauguacagacccac

SEQ ID NO: 1201052 - RNA, 19 nt, Artificial Sequence
  Description of Artificial Sequence: Synthetic oligonucleotide
guagacccugacccaguuc

SEQ ID NO: 1201053 - RNA, 19 nt, Artificial Sequence
  Description of Artificial Sequence: Synthetic oligonucleotide
agguaaugccacucuccuu

SEQ ID NO: 1201054 - RNA, 19 nt, Artificial Sequence
  Description of Artificial Sequence: Synthetic oligonucleotide
gucuccgagcggccgagac

SEQ ID NO: 1201055 - RNA, 19 nt, Artificial Sequence
  Description of Artificial Sequence: Synthetic oligonucleotide
uggggcaggaggccgcgua

SEQ ID NO: 1201056 - RNA, 19 nt, Artificial Sequence
  Description of Artificial Sequence: Synthetic oligonucleotide
gcauguggccagcucacac

SEQ ID NO: 1201057 - RNA, 19 nt, Artificial Sequence
  Description of Artificial Sequence: Synthetic oligonucleotide
gcucgagguacugaaggug

SEQ ID NO: 1201058 - RNA, 19 nt, Artificial Sequence
  Description of Artificial Sequence: Synthetic oligonucleotide
ugucccagauuggggcccc

SEQ ID NO: 1201059 - RNA, 19 nt, Artificial Sequence
  Description of Artificial Sequence: Synthetic oligonucleotide
aucgcggcgggaggucccc

SEQ ID NO: 1201060 - RNA, 19 nt, Artificial Sequence
  Description of Artificial Sequence: Synthetic oligonucleotide
ggucguggaccuucuccag

SEQ ID NO: 1201061 - RNA, 19 nt, Artificial Sequence
  Description of Artificial Sequence: Synthetic oligonucleotide
cauguggccagcucacacu

SEQ ID NO: 1201062 - RNA, 19 nt, Artificial Sequence
  Description of Artificial Sequence: Synthetic oligonucleotide
caucgcggcgggagguccc

SEQ ID NO: 1201063 - RNA, 19 nt, Artificial Sequence
  Description of Artificial Sequence: Synthetic oligonucleotide
gcucuucugagggguacgg

SEQ ID NO: 1201064 - RNA, 19 nt, Artificial Sequence
  Description of Artificial Sequence: Synthetic oligonucleotide
cugacccaguucucagcuc

SEQ ID NO: 1201065 - RNA, 19 nt, Artificial Sequence
  Description of Artificial Sequence: Synthetic oligonucleotide
acgugggcucuuggguccc

SEQ ID NO: 1201066 - RNA, 19 nt, Artificial Sequence
  Description of Artificial Sequence: Synthetic oligonucleotide
gagggguacgggugcgaga

SEQ ID NO: 1201067 - RNA, 19 nt, Artificial Sequence
  Description of Artificial Sequence: Synthetic oligonucleotide
cauccuagcccaaccccaa

SEQ ID NO: 1201068 - RNA, 19 nt, Artificial Sequence
  Description of Artificial Sequence: Synthetic oligonucleotide
gcccgcagaacugggagag

SEQ ID NO: 1201069 - RNA, 19 nt, Artificial Sequence
  Description of Artificial Sequence: Synthetic oligonucleotide
gcugaacgauccgucuccg

SEQ ID NO: 1201070 - RNA, 19 nt, Artificial Sequence
  Description of Artificial Sequence: Synthetic oligonucleotide
agcccgguguccugcgcca

SEQ ID NO: 1201071 - RNA, 19 nt, Artificial Sequence
  Description of Artificial Sequence: Synthetic oligonucleotide
cagggucuccgagcggccg

SEQ ID NO: 1201072 - RNA, 19 nt, Artificial Sequence
  Description of Artificial Sequence: Synthetic oligonucleotide
gcguugaauggggugggag

SEQ ID NO: 1201073 - RNA, 19 nt, Artificial Sequence
  Description of Artificial Sequence: Synthetic oligonucleotide
ggaggacucuccuaaacuu

SEQ ID NO: 1201074 - RNA, 19 nt, Artificial Sequence
  Description of Artificial Sequence: Synthetic oligonucleotide
agacccugacccaguucuc

SEQ ID NO: 1201075 - RNA, 19 nt, Artificial Sequence
  Description of Artificial Sequence: Synthetic oligonucleotide
uaguggcgcagcucaucau

SEQ ID NO: 1201076 - RNA, 19 nt, Artificial Sequence
  Description of Artificial Sequence: Synthetic oligonucleotide
ccgcagaacugggagaggc

SEQ ID NO: 1201077 - RNA, 19 nt, Artificial Sequence
  Description of Artificial Sequence: Synthetic oligonucleotide
uguugaccugcaggauggu

SEQ ID NO: 1201078 - RNA, 19 nt, Artificial Sequence
  Description of Artificial Sequence: Synthetic oligonucleotide
cacuggauggacccggggu

SEQ ID NO: 1201079 - RNA, 19 nt, Artificial Sequence
  Description of Artificial Sequence: Synthetic oligonucleotide
gugauguagcggugacaga

SEQ ID NO: 1201080 - RNA, 19 nt, Artificial Sequence
  Description of Artificial Sequence: Synthetic oligonucleotide
uccgagcggccgagacccg

SEQ ID NO: 1201081 - RNA, 19 nt, Artificial Sequence
  Description of Artificial Sequence: Synthetic oligonucleotide
cugggcucgggcgcucacg

SEQ ID NO: 1201082 - RNA, 19 nt, Artificial Sequence
  Description of Artificial Sequence: Synthetic oligonucleotide
uguccugcgccagcuguuu

SEQ ID NO: 1201083 - RNA, 19 nt, Artificial Sequence
  Description of Artificial Sequence: Synthetic oligonucleotide
uccccgccgggugccaggg

SEQ ID NO: 1201084 - RNA, 19 nt, Artificial Sequence
  Description of Artificial Sequence: Synthetic oligonucleotide
auccuagcccaaccccaau

SEQ ID NO: 1201085 - RNA, 19 nt, Artificial Sequence
  Description of Artificial Sequence: Synthetic oligonucleotide
gucacagucuggaggcuaa

SEQ ID NO: 1201086 - RNA, 19 nt, Artificial Sequence
  Description of Artificial Sequence: Synthetic oligonucleotide
ggugugggccauagggccc

SEQ ID NO: 1201087 - RNA, 19 nt, Artificial Sequence
  Description of Artificial Sequence: Synthetic oligonucleotide
cuccuuggucacuugaguu

SEQ ID NO: 1201088 - RNA, 19 nt, Artificial Sequence
  Description of Artificial Sequence: Synthetic oligonucleotide
ccagccucuauagguaaug

SEQ ID NO: 1201089 - RNA, 19 nt, Artificial Sequence
  Description of Artificial Sequence: Synthetic oligonucleotide
gggcugaacgauccgucuc

SEQ ID NO: 1201090 - RNA, 19 nt, Artificial Sequence
  Description of Artificial Sequence: Synthetic oligonucleotide
gauggacccggggucccca

SEQ ID NO: 1201091 - RNA, 19 nt, Artificial Sequence
  Description of Artificial Sequence: Synthetic oligonucleotide
cccuugagaggcccucacg

SEQ ID NO: 1201092 - RNA, 19 nt, Artificial Sequence
  Description of Artificial Sequence: Synthetic oligonucleotide
gcagguggaaccggaguac

SEQ ID NO: 1201093 - RNA, 19 nt, Artificial Sequence
  Description of Artificial Sequence: Synthetic oligonucleotide
ccauggguuggcccucagg

SEQ ID NO: 1201094 - RNA, 19 nt, Artificial Sequence
  Description of Artificial Sequence: Synthetic oligonucleotide
agcggccgagacccgcuga

SEQ ID NO: 1201095 - RNA, 19 nt, Artificial Sequence
  Description of Artificial Sequence: Synthetic oligonucleotide
gagcggccgagacccgcug

SEQ ID NO: 1201096 - RNA, 19 nt, Artificial Sequence
  Description of Artificial Sequence: Synthetic oligonucleotide
aggccgcguaguccucaag

SEQ ID NO: 1201097 - RNA, 19 nt, Artificial Sequence
  Description of Artificial Sequence: Synthetic oligonucleotide
uggcguccugacugucacu

SEQ ID NO: 1201098 - RNA, 19 nt, Artificial Sequence
  Description of Artificial Sequence: Synthetic oligonucleotide
uggacccgggguccccaaa

SEQ ID NO: 1201099 - RNA, 19 nt, Artificial Sequence
  Description of Artificial Sequence: Synthetic oligonucleotide
ugcccggguaguggcgcag

SEQ ID NO: 1201100 - RNA, 19 nt, Artificial Sequence
  Description of Artificial Sequence: Synthetic oligonucleotide
guccccgccgggugccagg

SEQ ID NO: 1201101 - RNA, 19 nt, Artificial Sequence
  Description of Artificial Sequence: Synthetic oligonucleotide
ggagcuuuggaggcaaagu

SEQ ID NO: 1201102 - RNA, 19 nt, Artificial Sequence
  Description of Artificial Sequence: Synthetic oligonucleotide
ccgagacccgcugaucgcg

SEQ ID NO: 1201103 - RNA, 19 nt, Artificial Sequence
  Description of Artificial Sequence: Synthetic oligonucleotide
cccugacccaguucucagc

SEQ ID NO: 1201104 - RNA, 19 nt, Artificial Sequence
  Description of Artificial Sequence: Synthetic oligonucleotide
gcugaucgcggccgagggc

SEQ ID NO: 1201105 - RNA, 19 nt, Artificial Sequence
  Description of Artificial Sequence: Synthetic oligonucleotide
agcccaaccccaaucccuu

SEQ ID NO: 1201106 - RNA, 19 nt, Artificial Sequence
  Description of Artificial Sequence: Synthetic oligonucleotide
caugggcugaacgauccgu

SEQ ID NO: 1201107 - RNA, 19 nt, Artificial Sequence
  Description of Artificial Sequence: Synthetic oligonucleotide
uuccgccggcgcuccaggu

SEQ ID NO: 1201108 - RNA, 19 nt, Artificial Sequence
  Description of Artificial Sequence: Synthetic oligonucleotide
gccgagacccgcugaucgc

SEQ ID NO: 1201109 - RNA, 19 nt, Artificial Sequence
  Description of Artificial Sequence: Synthetic oligonucleotide
accccagccucuauaggua

SEQ ID NO: 1201110 - RNA, 19 nt, Artificial Sequence
  Description of Artificial Sequence: Synthetic oligonucleotide
gcugucgcuguccaagccu

SEQ ID NO: 1201111 - RNA, 19 nt, Artificial Sequence
  Description of Artificial Sequence: Synthetic oligonucleotide
caugggccggcgccgccug

SEQ ID NO: 1201112 - RNA, 19 nt, Artificial Sequence
  Description of Artificial Sequence: Synthetic oligonucleotide
gguacugaaggugcugccu

SEQ ID NO: 1201113 - RNA, 19 nt, Artificial Sequence
  Description of Artificial Sequence: Synthetic oligonucleotide
gcaggugauguagcgguga

SEQ ID NO: 1201114 - RNA, 19 nt, Artificial Sequence
  Description of Artificial Sequence: Synthetic oligonucleotide
ugccauggguuggcccuca

SEQ ID NO: 1201115 - RNA, 19 nt, Artificial Sequence
  Description of Artificial Sequence: Synthetic oligonucleotide
ggucggugugggccauagg

SEQ ID NO: 1201116 - RNA, 19 nt, Artificial Sequence
  Description of Artificial Sequence: Synthetic oligonucleotide
cucauggucucugauccau

SEQ ID NO: 1201117 - RNA, 19 nt, Artificial Sequence
  Description of Artificial Sequence: Synthetic oligonucleotide
ccacgcuuguguccagccc

SEQ ID NO: 1201118 - RNA, 19 nt, Artificial Sequence
  Description of Artificial Sequence: Synthetic oligonucleotide
augcccggguaguggcgca

SEQ ID NO: 1201119 - RNA, 19 nt, Artificial Sequence
  Description of Artificial Sequence: Synthetic oligonucleotide
ggcccucaggguugaaaga

SEQ ID NO: 1201120 - RNA, 19 nt, Artificial Sequence
  Description of Artificial Sequence: Synthetic oligonucleotide
gguacgggugcgagagaug

SEQ ID NO: 1201121 - RNA, 19 nt, Artificial Sequence
  Description of Artificial Sequence: Synthetic oligonucleotide
ggugcgagagaugcugaaa

SEQ ID NO: 1201122 - RNA, 19 nt, Artificial Sequence
  Description of Artificial Sequence: Synthetic oligonucleotide
cucaucgcggcgggagguc

SEQ ID NO: 1201123 - RNA, 19 nt, Artificial Sequence
  Description of Artificial Sequence: Synthetic oligonucleotide
gaggccgcguaguccucaa

SEQ ID NO: 1201124 - RNA, 19 nt, Artificial Sequence
  Description of Artificial Sequence: Synthetic oligonucleotide
ggcaggaggccgcguaguc

SEQ ID NO: 1201125 - RNA, 19 nt, Artificial Sequence
  Description of Artificial Sequence: Synthetic oligonucleotide
ccgcguaguccucaagguc

SEQ ID NO: 1201126 - RNA, 19 nt, Artificial Sequence
  Description of Artificial Sequence: Synthetic oligonucleotide
gggguuguccauagauguc

SEQ ID NO: 1201127 - RNA, 19 nt, Artificial Sequence
  Description of Artificial Sequence: Synthetic oligonucleotide
acgcuuguguccagcccgu

SEQ ID NO: 1201128 - RNA, 19 nt, Artificial Sequence
  Description of Artificial Sequence: Synthetic oligonucleotide
ccacuggauggacccgggg

SEQ ID NO: 1201129 - RNA, 19 nt, Artificial Sequence
  Description of Artificial Sequence: Synthetic oligonucleotide
cucuuggguccccaagccu

SEQ ID NO: 1201130 - RNA, 19 nt, Artificial Sequence
  Description of Artificial Sequence: Synthetic oligonucleotide
agccaccgucccgauccuc

SEQ ID NO: 1201131 - RNA, 19 nt, Artificial Sequence
  Description of Artificial Sequence: Synthetic oligonucleotide
ggcucgagguacugaaggu

SEQ ID NO: 1201132 - RNA, 19 nt, Artificial Sequence
  Description of Artificial Sequence: Synthetic oligonucleotide
gauccgucuccgggcauua

SEQ ID NO: 1201133 - RNA, 19 nt, Artificial Sequence
  Description of Artificial Sequence: Synthetic oligonucleotide
ggcgcagcucaucaugccu

SEQ ID NO: 1201134 - RNA, 19 nt, Artificial Sequence
  Description of Artificial Sequence: Synthetic oligonucleotide
cggguaguggcgcagcuca

SEQ ID NO: 1201135 - RNA, 19 nt, Artificial Sequence
  Description of Artificial Sequence: Synthetic oligonucleotide
gccacucuccuucuaaguu

SEQ ID NO: 1201136 - RNA, 19 nt, Artificial Sequence
  Description of Artificial Sequence: Synthetic oligonucleotide
uuguuccgccggcgcucca

SEQ ID NO: 1201137 - RNA, 19 nt, Artificial Sequence
  Description of Artificial Sequence: Synthetic oligonucleotide
ggggcucgagguacugaag

SEQ ID NO: 1201138 - RNA, 19 nt, Artificial Sequence
  Description of Artificial Sequence: Synthetic oligonucleotide
ggcagggugugcucugcaa

SEQ ID NO: 1201139 - RNA, 19 nt, Artificial Sequence
  Description of Artificial Sequence: Synthetic oligonucleotide
cugugcgguuggacugguc

SEQ ID NO: 1201140 - RNA, 19 nt, Artificial Sequence
  Description of Artificial Sequence: Synthetic oligonucleotide
ggccacuuuggggaagauc

SEQ ID NO: 1201141 - RNA, 19 nt, Artificial Sequence
  Description of Artificial Sequence: Synthetic oligonucleotide
gcgcagcucaucaugccuc

SEQ ID NO: 1201142 - RNA, 19 nt, Artificial Sequence
  Description of Artificial Sequence: Synthetic oligonucleotide
cuguagacccugacccagu

SEQ ID NO: 1201143 - RNA, 19 nt, Artificial Sequence
  Description of Artificial Sequence: Synthetic oligonucleotide
auggacccgggguccccaa

SEQ ID NO: 1201144 - RNA, 19 nt, Artificial Sequence
  Description of Artificial Sequence: Synthetic oligonucleotide
ccugccauggguuggcccu

SEQ ID NO: 1201145 - RNA, 19 nt, Artificial Sequence
  Description of Artificial Sequence: Synthetic oligonucleotide
ccaaauguacagacccacu

SEQ ID NO: 1201146 - RNA, 19 nt, Artificial Sequence
  Description of Artificial Sequence: Synthetic oligonucleotide
gggugcgagagaugcugaa

SEQ ID NO: 1201147 - RNA, 19 nt, Artificial Sequence
  Description of Artificial Sequence: Synthetic oligonucleotide
gcgagcauguggccagcuc

SEQ ID NO: 1201148 - RNA, 19 nt, Artificial Sequence
  Description of Artificial Sequence: Synthetic oligonucleotide
ccucgcccgcagaacuggg

SEQ ID NO: 1201149 - RNA, 19 nt, Artificial Sequence
  Description of Artificial Sequence: Synthetic oligonucleotide
gcguccugacugucacuug

SEQ ID NO: 1201150 - RNA, 19 nt, Artificial Sequence
  Description of Artificial Sequence: Synthetic oligonucleotide
acccgcugaucgcggccga

SEQ ID NO: 1201151 - RNA, 19 nt, Artificial Sequence
  Description of Artificial Sequence: Synthetic oligonucleotide
ucgcggcgggagguccccg

SEQ ID NO: 1201152 - RNA, 19 nt, Artificial Sequence
  Description of Artificial Sequence: Synthetic oligonucleotide
cgucccgauccucaaucac

SEQ ID NO: 1201153 - RNA, 19 nt, Artificial Sequence
  Description of Artificial Sequence: Synthetic oligonucleotide
cugccauggguuggcccuc

SEQ ID NO: 1201154 - RNA, 19 nt, Artificial Sequence
  Description of Artificial Sequence: Synthetic oligonucleotide
gccccagggagguaggcgu

SEQ ID NO: 1201155 - RNA, 19 nt, Artificial Sequence
  Description of Artificial Sequence: Synthetic oligonucleotide
aggaggccgcguaguccuc

SEQ ID NO: 1201156 - RNA, 19 nt, Artificial Sequence
  Description of Artificial Sequence: Synthetic oligonucleotide
ggucacagucuggaggcua

SEQ ID NO: 1201157 - RNA, 19 nt, Artificial Sequence
  Description of Artificial Sequence: Synthetic oligonucleotide
ggaaccggaguaccuggau

SEQ ID NO: 1201158 - RNA, 19 nt, Artificial Sequence
  Description of Artificial Sequence: Synthetic oligonucleotide
cccucacgugggcucuugg

SEQ ID NO: 1201159 - RNA, 19 nt, Artificial Sequence
  Description of Artificial Sequence: Synthetic oligonucleotide
ggaggcuaaggccuuccuu

SEQ ID NO: 1201160 - RNA, 19 nt, Artificial Sequence
  Description of Artificial Sequence: Synthetic oligonucleotide
ccuccacuggauggacccg

SEQ ID NO: 1201161 - RNA, 19 nt, Artificial Sequence
  Description of Artificial Sequence: Synthetic oligonucleotide
ccgucuccgggcauuaaua

SEQ ID NO: 1201162 - RNA, 19 nt, Artificial Sequence
  Description of Artificial Sequence: Synthetic oligonucleotide
cgagguacugaaggugcug

SEQ ID NO: 1201163 - RNA, 19 nt, Artificial Sequence
  Description of Artificial Sequence: Synthetic oligonucleotide
cgaccccagccucuauagg

SEQ ID NO: 1201164 - RNA, 19 nt, Artificial Sequence
  Description of Artificial Sequence: Synthetic oligonucleotide
gggagaggccacgcuugug

SEQ ID NO: 1201165 - RNA, 19 nt, Artificial Sequence
  Description of Artificial Sequence: Synthetic oligonucleotide
caguggggaccaguuaagu

SEQ ID NO: 1201166 - RNA, 19 nt, Artificial Sequence
  Description of Artificial Sequence: Synthetic oligonucleotide
ccgcugaucgcggccgagg

SEQ ID NO: 1201167 - RNA, 19 nt, Artificial Sequence
  Description of Artificial Sequence: Synthetic oligonucleotide
cugagggguacgggugcga

SEQ ID NO: 1201168 - RNA, 19 nt, Artificial Sequence
  Description of Artificial Sequence: Synthetic oligonucleotide
guguagccugccauggguu

SEQ ID NO: 1201169 - RNA, 19 nt, Artificial Sequence
  Description of Artificial Sequence: Synthetic oligonucleotide
ggauggacccggggucccc

SEQ ID NO: 1201170 - RNA, 19 nt, Artificial Sequence
  Description of Artificial Sequence: Synthetic oligonucleotide
gccggcgccgccuguccug

SEQ ID NO: 1201171 - RNA, 19 nt, Artificial Sequence
  Description of Artificial Sequence: Synthetic oligonucleotide
ggguacgggugcgagagau

SEQ ID NO: 1201172 - RNA, 19 nt, Artificial Sequence
  Description of Artificial Sequence: Synthetic oligonucleotide
cagggagguaggcguugaa

SEQ ID NO: 1201173 - RNA, 19 nt, Artificial Sequence
  Description of Artificial Sequence: Synthetic oligonucleotide
gcccucaggguugaaagau

SEQ ID NO: 1201174 - RNA, 19 nt, Artificial Sequence
  Description of Artificial Sequence: Synthetic oligonucleotide
ggcguccugacugucacuu

SEQ ID NO: 1201175 - RNA, 19 nt, Artificial Sequence
  Description of Artificial Sequence: Synthetic oligonucleotide
ggaggccgcguaguccuca

SEQ ID NO: 1201176 - RNA, 19 nt, Artificial Sequence
  Description of Artificial Sequence: Synthetic oligonucleotide
gccauggguuggcccucag

SEQ ID NO: 1201177 - RNA, 19 nt, Artificial Sequence
  Description of Artificial Sequence: Synthetic oligonucleotide
ccucauggucucugaucca

SEQ ID NO: 1201178 - RNA, 19 nt, Artificial Sequence
  Description of Artificial Sequence: Synthetic oligonucleotide
cgagguccccgccgggugc

SEQ ID NO: 1201179 - RNA, 19 nt, Artificial Sequence
  Description of Artificial Sequence: Synthetic oligonucleotide
cgucuccuuggucacuuga

SEQ ID NO: 1201180 - RNA, 19 nt, Artificial Sequence
  Description of Artificial Sequence: Synthetic oligonucleotide
ccgucccgauccucaauca

SEQ ID NO: 1201181 - RNA, 19 nt, Artificial Sequence
  Description of Artificial Sequence: Synthetic oligonucleotide
cccgggguccccaaaugua

SEQ ID NO: 1201182 - RNA, 19 nt, Artificial Sequence
  Description of Artificial Sequence: Synthetic oligonucleotide
ccuugaggcaggugaugua

SEQ ID NO: 1201183 - RNA, 19 nt, Artificial Sequence
  Description of Artificial Sequence: Synthetic oligonucleotide
gguuggcccucaggguuga

SEQ ID NO: 1201184 - RNA, 19 nt, Artificial Sequence
  Description of Artificial Sequence: Synthetic oligonucleotide
gggcaaaggggaggacaga

SEQ ID NO: 1201185 - RNA, 19 nt, Artificial Sequence
  Description of Artificial Sequence: Synthetic oligonucleotide
ggacccgggguccccaaau

SEQ ID NO: 1201186 - RNA, 19 nt, Artificial Sequence
  Description of Artificial Sequence: Synthetic oligonucleotide
ccagcccgucuccuugguc

SEQ ID NO: 1201187 - RNA, 19 nt, Artificial Sequence
  Description of Artificial Sequence: Synthetic oligonucleotide
ggcguugaaugggguggga

SEQ ID NO: 1201188 - RNA, 19 nt, Artificial Sequence
  Description of Artificial Sequence: Synthetic oligonucleotide
ccgagcggccgagacccgc

SEQ ID NO: 1201189 - RNA, 19 nt, Artificial Sequence
  Description of Artificial Sequence: Synthetic oligonucleotide
ccgucuccuuggucacuug

SEQ ID NO: 1201190 - RNA, 19 nt, Artificial Sequence
  Description of Artificial Sequence: Synthetic oligonucleotide
ccuuucgaccccagccucu

SEQ ID NO: 1201191 - RNA, 19 nt, Artificial Sequence
  Description of Artificial Sequence: Synthetic oligonucleotide
gccauagggcccaggggcu

SEQ ID NO: 1201192 - RNA, 19 nt, Artificial Sequence
  Description of Artificial Sequence: Synthetic oligonucleotide
gguccccgccgggugccag

SEQ ID NO: 1201193 - RNA, 19 nt, Artificial Sequence
  Description of Artificial Sequence: Synthetic oligonucleotide
ccuggugacccuccuuccu

SEQ ID NO: 1201194 - RNA, 19 nt, Artificial Sequence
  Description of Artificial Sequence: Synthetic oligonucleotide
gcccggguaguggcgcagc

SEQ ID NO: 1201195 - RNA, 19 nt, Artificial Sequence
  Description of Artificial Sequence: Synthetic oligonucleotide
gggguacgggugcgagaga

SEQ ID NO: 1201196 - RNA, 19 nt, Artificial Sequence
  Description of Artificial Sequence: Synthetic oligonucleotide
gcucugcaaugcccgggua

SEQ ID NO: 1201197 - RNA, 19 nt, Artificial Sequence
  Description of Artificial Sequence: Synthetic oligonucleotide
ccggguugggcgagcaugu

SEQ ID NO: 1201198 - RNA, 19 nt, Artificial Sequence
  Description of Artificial Sequence: Synthetic oligonucleotide
ccggguaguggcgcagcuc

SEQ ID NO: 1201199 - RNA, 19 nt, Artificial Sequence
  Description of Artificial Sequence: Synthetic oligonucleotide
gggcgagcauguggccagc

SEQ ID NO: 1201200 - RNA, 19 nt, Artificial Sequence
  Description of Artificial Sequence: Synthetic oligonucleotide
gcccucacgugggcucuug

SEQ ID NO: 1201201 - RNA, 19 nt, Artificial Sequence
  Description of Artificial Sequence: Synthetic oligonucleotide
guguccugcgccagcuguu

SEQ ID NO: 1201202 - RNA, 19 nt, Artificial Sequence
  Description of Artificial Sequence: Synthetic oligonucleotide
gcuccggguugggcgagca

SEQ ID NO: 1201203 - RNA, 19 nt, Artificial Sequence
  Description of Artificial Sequence: Synthetic oligonucleotide
gaggucggugugggccaua

SEQ ID NO: 1201204 - RNA, 19 nt, Artificial Sequence
  Description of Artificial Sequence: Synthetic oligonucleotide
gucccagauuggggcccca

SEQ ID NO: 1201205 - RNA, 19 nt, Artificial Sequence
  Description of Artificial Sequence: Synthetic oligonucleotide
cguccucgcccgcagaacu

SEQ ID NO: 1201206 - RNA, 19 nt, Artificial Sequence
  Description of Artificial Sequence: Synthetic oligonucleotide
cgggugcgagagaugcuga

SEQ ID NO: 1201207 - RNA, 19 nt, Artificial Sequence
  Description of Artificial Sequence: Synthetic oligonucleotide
caccgucccgauccucaau

SEQ ID NO: 1201208 - RNA, 19 nt, Artificial Sequence
  Description of Artificial Sequence: Synthetic oligonucleotide
cccgcugaucgcggccgag

SEQ ID NO: 1201209 - RNA, 19 nt, Artificial Sequence
  Description of Artificial Sequence: Synthetic oligonucleotide
gcggccgagacccgcugau

SEQ ID NO: 1201210 - RNA, 19 nt, Artificial Sequence
  Description of Artificial Sequence: Synthetic oligonucleotide
gccgggugccagggucucc

SEQ ID NO: 1201211 - RNA, 19 nt, Artificial Sequence
  Description of Artificial Sequence: Synthetic oligonucleotide
ggucuccgagcggccgaga

SEQ ID NO: 1201212 - RNA, 19 nt, Artificial Sequence
  Description of Artificial Sequence: Synthetic oligonucleotide
gcuuggggcuggggagguc

SEQ ID NO: 1201213 - RNA, 19 nt, Artificial Sequence
  Description of Artificial Sequence: Synthetic oligonucleotide
cagccaccgucccgauccu

SEQ ID NO: 1201214 - RNA, 19 nt, Artificial Sequence
  Description of Artificial Sequence: Synthetic oligonucleotide
cccagccucuauagguaau

SEQ ID NO: 1201215 - RNA, 19 nt, Artificial Sequence
  Description of Artificial Sequence: Synthetic oligonucleotide
cuccggguugggcgagcau

SEQ ID NO: 1201216 - RNA, 19 nt, Artificial Sequence
  Description of Artificial Sequence: Synthetic oligonucleotide
ggggcucaucgcggcggga

SEQ ID NO: 1201217 - RNA, 19 nt, Artificial Sequence
  Description of Artificial Sequence: Synthetic oligonucleotide
cccuucucugucccagauu

SEQ ID NO: 1201218 - RNA, 19 nt, Artificial Sequence
  Description of Artificial Sequence: Synthetic oligonucleotide
ggccggcgccgccuguccu

SEQ ID NO: 1201219 - RNA, 19 nt, Artificial Sequence
  Description of Artificial Sequence: Synthetic oligonucleotide
cccggguaguggcgcagcu

SEQ ID NO: 1201220 - RNA, 19 nt, Artificial Sequence
  Description of Artificial Sequence: Synthetic oligonucleotide
ccgccgggugccagggucu

SEQ ID NO: 1201221 - RNA, 19 nt, Artificial Sequence
  Description of Artificial Sequence: Synthetic oligonucleotide
ggaggucggugugggccau

SEQ ID NO: 1201222 - RNA, 19 nt, Artificial Sequence
  Description of Artificial Sequence: Synthetic oligonucleotide
cgagcggccgagacccgcu

SEQ ID NO: 1201223 - RNA, 19 nt, Artificial Sequence
  Description of Artificial Sequence: Synthetic oligonucleotide
ccaugggccggcgccgccu

SEQ ID NO: 1201224 - RNA, 19 nt, Artificial Sequence
  Description of Artificial Sequence: Synthetic oligonucleotide
ccugugcgguuggacuggu

SEQ ID NO: 1201225 - RNA, 19 nt, Artificial Sequence
  Description of Artificial Sequence: Synthetic oligonucleotide
cgccgggugccagggucuc

SEQ ID NO: 1201226 - RNA, 19 nt, Artificial Sequence
  Description of Artificial Sequence: Synthetic oligonucleotide
gggccccagccaccaucuu

SEQ ID NO: 1201227 - RNA, 19 nt, Artificial Sequence
  Description of Artificial Sequence: Synthetic oligonucleotide
cgcacaggucguggaccuu

SEQ ID NO: 1201228 - RNA, 19 nt, Artificial Sequence
  Description of Artificial Sequence: Synthetic oligonucleotide
gacaaaguuaccuaaaggc

SEQ ID NO: 1201229 - RNA, 19 nt, Artificial Sequence
  Description of Artificial Sequence: Synthetic oligonucleotide
aauagguuugcuuuuaaga

SEQ ID NO: 1201230 - RNA, 19 nt, Artificial Sequence
  Description of Artificial Sequence: Synthetic oligonucleotide
aacaaaucugggcaaagac

SEQ ID NO: 1201231 - RNA, 19 nt, Artificial Sequence
  Description of Artificial Sequence: Synthetic oligonucleotide
aaaccuuucugguaaagag

SEQ ID NO: 1201232 - RNA, 19 nt, Artificial Sequence
  Description of Artificial Sequence: Synthetic oligonucleotide
cauuccucgacuuugaggc

SEQ ID NO: 1201233 - RNA, 19 nt, Artificial Sequence
  Description of Artificial Sequence: Synthetic oligonucleotide
uuaauuacucagaacaaga

SEQ ID NO: 1201234 - RNA, 19 nt, Artificial Sequence
  Description of Artificial Sequence: Synthetic oligonucleotide
uuuuaugaagagaauaggu

SEQ ID NO: 1201235 - RNA, 19 nt, Artificial Sequence
  Description of Artificial Sequence: Synthetic oligonucleotide
ucugucaugacuaagguuu

SEQ ID NO: 1201236 - RNA, 19 nt, Artificial Sequence
  Description of Artificial Sequence: Synthetic oligonucleotide
uuauccacggacaucacag

SEQ ID NO: 1201237 - RNA, 19 nt, Artificial Sequence
  Description of Artificial Sequence: Synthetic oligonucleotide
ucagaacaagacaagauca

SEQ ID NO: 1201238 - RNA, 19 nt, Artificial Sequence
  Description of Artificial Sequence: Synthetic oligonucleotide
augacuaagguuuucuaac

SEQ ID NO: 1201239 - RNA, 19 nt, Artificial Sequence
  Description of Artificial Sequence: Synthetic oligonucleotide
uuuugaacacaauuccugg

SEQ ID NO: 1201240 - RNA, 19 nt, Artificial Sequence
  Description of Artificial Sequence: Synthetic oligonucleotide
acagcuguuagugaaaccc

SEQ ID NO: 1201241 - RNA, 19 nt, Artificial Sequence
  Description of Artificial Sequence: Synthetic oligonucleotide
uuuucuaacaucucuuggc

SEQ ID NO: 1201242 - RNA, 19 nt, Artificial Sequence
  Description of Artificial Sequence: Synthetic oligonucleotide
aaagagagguacgugacac

SEQ ID NO: 1201243 - RNA, 19 nt, Artificial Sequence
  Description of Artificial Sequence: Synthetic oligonucleotide
aauuacucagaacaagaca

SEQ ID NO: 1201244 - RNA, 19 nt, Artificial Sequence
  Description of Artificial Sequence: Synthetic oligonucleotide
guuagugaaacccaagcag

SEQ ID NO: 1201245 - RNA, 19 nt, Artificial Sequence
  Description of Artificial Sequence: Synthetic oligonucleotide
uuaccuaaaggcaaacaag

SEQ ID NO: 1201246 - RNA, 19 nt, Artificial Sequence
  Description of Artificial Sequence: Synthetic oligonucleotide
aaguacaacaugaucuugc

SEQ ID NO: 1201247 - RNA, 19 nt, Artificial Sequence
  Description of Artificial Sequence: Synthetic oligonucleotide
uaaaccugaucacaaauga

SEQ ID NO: 1201248 - RNA, 19 nt, Artificial Sequence
  Description of Artificial Sequence: Synthetic oligonucleotide
uaugaagagaauagguuug

SEQ ID NO: 1201249 - RNA, 19 nt, Artificial Sequence
  Description of Artificial Sequence: Synthetic oligonucleotide
uuucuaacaucucuuggcc

SEQ ID NO: 1201250 - RNA, 19 nt, Artificial Sequence
  Description of Artificial Sequence: Synthetic oligonucleotide
uuugcuuuuaagaauucaa

SEQ ID NO: 1201251 - RNA, 19 nt, Artificial Sequence
  Description of Artificial Sequence: Synthetic oligonucleotide
uuuaugaagagaauagguu

SEQ ID NO: 1201252 - RNA, 19 nt, Artificial Sequence
  Description of Artificial Sequence: Synthetic oligonucleotide
uuuuguagcagucugcaau

SEQ ID NO: 1201253 - RNA, 19 nt, Artificial Sequence
  Description of Artificial Sequence: Synthetic oligonucleotide
uccugguuaccucagacag

SEQ ID NO: 1201254 - RNA, 19 nt, Artificial Sequence
  Description of Artificial Sequence: Synthetic oligonucleotide
ugcuucaugacuagagggg

SEQ ID NO: 1201255 - RNA, 19 nt, Artificial Sequence
  Description of Artificial Sequence: Synthetic oligonucleotide
aaagcuauuuuggacagca

SEQ ID NO: 1201256 - RNA, 19 nt, Artificial Sequence
  Description of Artificial Sequence: Synthetic oligonucleotide
ucugguaaagagagguacg

SEQ ID NO: 1201257 - RNA, 19 nt, Artificial Sequence
  Description of Artificial Sequence: Synthetic oligonucleotide
guuagcaaagcuauuuugg

SEQ ID NO: 1201258 - RNA, 19 nt, Artificial Sequence
  Description of Artificial Sequence: Synthetic oligonucleotide
uguuagugaaacccaagca

SEQ ID NO: 1201259 - RNA, 19 nt, Artificial Sequence
  Description of Artificial Sequence: Synthetic oligonucleotide
acuaagguuuucuaacauc

SEQ ID NO: 1201260 - RNA, 19 nt, Artificial Sequence
  Description of Artificial Sequence: Synthetic oligonucleotide
auuuuauccacggacauca

SEQ ID NO: 1201261 - RNA, 19 nt, Artificial Sequence
  Description of Artificial Sequence: Synthetic oligonucleotide
acaaaucugggcaaagacc

SEQ ID NO: 1201262 - RNA, 19 nt, Artificial Sequence
  Description of Artificial Sequence: Synthetic oligonucleotide
gugaugaccacgaugaucc

SEQ ID NO: 1201263 - RNA, 19 nt, Artificial Sequence
  Description of Artificial Sequence: Synthetic oligonucleotide
ucgaagucggaagacaugg

SEQ ID NO: 1201264 - RNA, 19 nt, Artificial Sequence
  Description of Artificial Sequence: Synthetic oligonucleotide
uaauuacucagaacaagac

SEQ ID NO: 1201265 - RNA, 19 nt, Artificial Sequence
  Description of Artificial Sequence: Synthetic oligonucleotide
aaaagugugguagagguuu

SEQ ID NO: 1201266 - RNA, 19 nt, Artificial Sequence
  Description of Artificial Sequence: Synthetic oligonucleotide
uucgcaacaucccugucag

SEQ ID NO: 1201267 - RNA, 19 nt, Artificial Sequence
  Description of Artificial Sequence: Synthetic oligonucleotide
uguuagcaaagcuauuuug

SEQ ID NO: 1201268 - RNA, 19 nt, Artificial Sequence
  Description of Artificial Sequence: Synthetic oligonucleotide
augaacucauuuugaacac

SEQ ID NO: 1201269 - RNA, 19 nt, Artificial Sequence
  Description of Artificial Sequence: Synthetic oligonucleotide
uccgcgaugaccuuuccag

SEQ ID NO: 1201270 - RNA, 19 nt, Artificial Sequence
  Description of Artificial Sequence: Synthetic oligonucleotide
ucuaacaucucuuggccga

SEQ ID NO: 1201271 - RNA, 19 nt, Artificial Sequence
  Description of Artificial Sequence: Synthetic oligonucleotide
aguacagaccuguaaaagu

SEQ ID NO: 1201272 - RNA, 19 nt, Artificial Sequence
  Description of Artificial Sequence: Synthetic oligonucleotide
uacuucgucacuguaggcg

SEQ ID NO: 1201273 - RNA, 19 nt, Artificial Sequence
  Description of Artificial Sequence: Synthetic oligonucleotide
uggcauuuuauccacggac

SEQ ID NO: 1201274 - RNA, 19 nt, Artificial Sequence
  Description of Artificial Sequence: Synthetic oligonucleotide
ucauucuuugaaaggaggu

SEQ ID NO: 1201275 - RNA, 19 nt, Artificial Sequence
  Description of Artificial Sequence: Synthetic oligonucleotide
gauccgugaccuuuuaaag

SEQ ID NO: 1201276 - RNA, 19 nt, Artificial Sequence
  Description of Artificial Sequence: Synthetic oligonucleotide
acugcuaucugguacccag

SEQ ID NO: 1201277 - RNA, 19 nt, Artificial Sequence
  Description of Artificial Sequence: Synthetic oligonucleotide
acaagaucacuguuuauca

SEQ ID NO: 1201278 - RNA, 19 nt, Artificial Sequence
  Description of Artificial Sequence: Synthetic oligonucleotide
caaaucugggcaaagacca

SEQ ID NO: 1201279 - RNA, 19 nt, Artificial Sequence
  Description of Artificial Sequence: Synthetic oligonucleotide
gagacagagggucacucgg

SEQ ID NO: 1201280 - RNA, 19 nt, Artificial Sequence
  Description of Artificial Sequence: Synthetic oligonucleotide
uguacauuccucgacuuug

SEQ ID NO: 1201281 - RNA, 19 nt, Artificial Sequence
  Description of Artificial Sequence: Synthetic oligonucleotide
gguuaccucagacagaaag

SEQ ID NO: 1201282 - RNA, 19 nt, Artificial Sequence
  Description of Artificial Sequence: Synthetic oligonucleotide
ucuuaauuacucagaacaa

SEQ ID NO: 1201283 - RNA, 19 nt, Artificial Sequence
  Description of Artificial Sequence: Synthetic oligonucleotide
ugccuaugaagucuuaaga

SEQ ID NO: 1201284 - RNA, 19 nt, Artificial Sequence
  Description of Artificial Sequence: Synthetic oligonucleotide
aacccaagcaguucuuuug

SEQ ID NO: 1201285 - RNA, 19 nt, Artificial Sequence
  Description of Artificial Sequence: Synthetic oligonucleotide
agaaugauucaugugacca

SEQ ID NO: 1201286 - RNA, 19 nt, Artificial Sequence
  Description of Artificial Sequence: Synthetic oligonucleotide
uugucuuaauuacucagaa

SEQ ID NO: 1201287 - RNA, 19 nt, Artificial Sequence
  Description of Artificial Sequence: Synthetic oligonucleotide
gaauagguuugcuuuuaag

SEQ ID NO: 1201288 - RNA, 19 nt, Artificial Sequence
  Description of Artificial Sequence: Synthetic oligonucleotide
uuggacagcagacaaaguu

SEQ ID NO: 1201289 - RNA, 19 nt, Artificial Sequence
  Description of Artificial Sequence: Synthetic oligonucleotide
gaugcaucaauguccuuug

SEQ ID NO: 1201290 - RNA, 19 nt, Artificial Sequence
  Description of Artificial Sequence: Synthetic oligonucleotide
uucuaacaucucuuggccg

SEQ ID NO: 1201291 - RNA, 19 nt, Artificial Sequence
  Description of Artificial Sequence: Synthetic oligonucleotide
auuuugaacacaauuccug

SEQ ID NO: 1201292 - RNA, 19 nt, Artificial Sequence
  Description of Artificial Sequence: Synthetic oligonucleotide
acauuccucgacuuugagg

SEQ ID NO: 1201293 - RNA, 19 nt, Artificial Sequence
  Description of Artificial Sequence: Synthetic oligonucleotide
cuguuagugaaacccaagc

SEQ ID NO: 1201294 - RNA, 19 nt, Artificial Sequence
  Description of Artificial Sequence: Synthetic oligonucleotide
agaauucaaagcuuccagu

SEQ ID NO: 1201295 - RNA, 19 nt, Artificial Sequence
  Description of Artificial Sequence: Synthetic oligonucleotide
agagagguacgugacacac

SEQ ID NO: 1201296 - RNA, 19 nt, Artificial Sequence
  Description of Artificial Sequence: Synthetic oligonucleotide
cugucagcacacaagaaug

SEQ ID NO: 1201297 - RNA, 19 nt, Artificial Sequence
  Description of Artificial Sequence: Synthetic oligonucleotide
aggcaaacaagcauucacc

SEQ ID NO: 1201298 - RNA, 19 nt, Artificial Sequence
  Description of Artificial Sequence: Synthetic oligonucleotide
uccgugaccuuuuaaaguc

SEQ ID NO: 1201299 - RNA, 19 nt, Artificial Sequence
  Description of Artificial Sequence: Synthetic oligonucleotide
uuuauccacggacaucaca

SEQ ID NO: 1201300 - RNA, 19 nt, Artificial Sequence
  Description of Artificial Sequence: Synthetic oligonucleotide
guuaccuaaaggcaaacaa

SEQ ID NO: 1201301 - RNA, 19 nt, Artificial Sequence
  Description of Artificial Sequence: Synthetic oligonucleotide
aaaaccuuucugguaaaga

SEQ ID NO: 1201302 - RNA, 19 nt, Artificial Sequence
  Description of Artificial Sequence: Synthetic oligonucleotide
augaagagaauagguuugc

SEQ ID NO: 1201303 - RNA, 19 nt, Artificial Sequence
  Description of Artificial Sequence: Synthetic oligonucleotide
aggggaaaugaccucaucu

SEQ ID NO: 1201304 - RNA, 19 nt, Artificial Sequence
  Description of Artificial Sequence: Synthetic oligonucleotide
cucugaaggaaaccaaccc

SEQ ID NO: 1201305 - RNA, 19 nt, Artificial Sequence
  Description of Artificial Sequence: Synthetic oligonucleotide
uacagaccuguaaaagugc

SEQ ID NO: 1201306 - RNA, 19 nt, Artificial Sequence
  Description of Artificial Sequence: Synthetic oligonucleotide
uuggcaaccauuugcuucu

SEQ ID NO: 1201307 - RNA, 19 nt, Artificial Sequence
  Description of Artificial Sequence: Synthetic oligonucleotide
acuguaggcgauccgugac

SEQ ID NO: 1201308 - RNA, 19 nt, Artificial Sequence
  Description of Artificial Sequence: Synthetic oligonucleotide
uucugguaaagagagguac

SEQ ID NO: 1201309 - RNA, 19 nt, Artificial Sequence
  Description of Artificial Sequence: Synthetic oligonucleotide
uaguacagaccuguaaaag

SEQ ID NO: 1201310 - RNA, 19 nt, Artificial Sequence
  Description of Artificial Sequence: Synthetic oligonucleotide
uuugaacacaauuccuggu

SEQ ID NO: 1201311 - RNA, 19 nt, Artificial Sequence
  Description of Artificial Sequence: Synthetic oligonucleotide
cacacaagaaugauucaug

SEQ ID NO: 1201312 - RNA, 19 nt, Artificial Sequence
  Description of Artificial Sequence: Synthetic oligonucleotide
agucugcaauucuucauuc

SEQ ID NO: 1201313 - RNA, 19 nt, Artificial Sequence
  Description of Artificial Sequence: Synthetic oligonucleotide
ugggcaacuuuuaaaccug

SEQ ID NO: 1201314 - RNA, 19 nt, Artificial Sequence
  Description of Artificial Sequence: Synthetic oligonucleotide
ucugcucaagcaauucucu

SEQ ID NO: 1201315 - RNA, 19 nt, Artificial Sequence
  Description of Artificial Sequence: Synthetic oligonucleotide
agaucacuguuuaucaagg

SEQ ID NO: 1201316 - RNA, 19 nt, Artificial Sequence
  Description of Artificial Sequence: Synthetic oligonucleotide
accuuucugguaaagagag

SEQ ID NO: 1201317 - RNA, 19 nt, Artificial Sequence
  Description of Artificial Sequence: Synthetic oligonucleotide
ugugacggagucaucgugu

SEQ ID NO: 1201318 - RNA, 19 nt, Artificial Sequence
  Description of Artificial Sequence: Synthetic oligonucleotide
uuuuccccaaguuugcauc

SEQ ID NO: 1201319 - RNA, 19 nt, Artificial Sequence
  Description of Artificial Sequence: Synthetic oligonucleotide
aagucggaagacauggcag

SEQ ID NO: 1201320 - RNA, 19 nt, Artificial Sequence
  Description of Artificial Sequence: Synthetic oligonucleotide
acaauuccugguuaccuca

SEQ ID NO: 1201321 - RNA, 19 nt, Artificial Sequence
  Description of Artificial Sequence: Synthetic oligonucleotide
ugcgaaguccugcucguag

SEQ ID NO: 1201322 - RNA, 19 nt, Artificial Sequence
  Description of Artificial Sequence: Synthetic oligonucleotide
guacagaccuguaaaagug

SEQ ID NO: 1201323 - RNA, 19 nt, Artificial Sequence
  Description of Artificial Sequence: Synthetic oligonucleotide
ugcuguacauuccucgacu

SEQ ID NO: 1201324 - RNA, 19 nt, Artificial Sequence
  Description of Artificial Sequence: Synthetic oligonucleotide
uagccuucgaagucggaag

SEQ ID NO: 1201325 - RNA, 19 nt, Artificial Sequence
  Description of Artificial Sequence: Synthetic oligonucleotide
guuggcaaccauuugcuuc

SEQ ID NO: 1201326 - RNA, 19 nt, Artificial Sequence
  Description of Artificial Sequence: Synthetic oligonucleotide
uagcaaagcuauuuuggac

SEQ ID NO: 1201327 - RNA, 19 nt, Artificial Sequence
  Description of Artificial Sequence: Synthetic oligonucleotide
aaaccaacccacaugcaga

SEQ ID NO: 1201328 - RNA, 19 nt, Artificial Sequence
  Description of Artificial Sequence: Synthetic oligonucleotide
ugucagcacacaagaauga

SEQ ID NO: 1201329 - RNA, 19 nt, Artificial Sequence
  Description of Artificial Sequence: Synthetic oligonucleotide
ugaacacaauuccugguua

SEQ ID NO: 1201330 - RNA, 19 nt, Artificial Sequence
  Description of Artificial Sequence: Synthetic oligonucleotide
gacuagaggggaaaugacc

SEQ ID NO: 1201331 - RNA, 19 nt, Artificial Sequence
  Description of Artificial Sequence: Synthetic oligonucleotide
aaguuaccuaaaggcaaac

SEQ ID NO: 1201332 - RNA, 19 nt, Artificial Sequence
  Description of Artificial Sequence: Synthetic oligonucleotide
gacagagggucacucgggg

SEQ ID NO: 1201333 - RNA, 19 nt, Artificial Sequence
  Description of Artificial Sequence: Synthetic oligonucleotide
gacauggcagcucggaaac

SEQ ID NO: 1201334 - RNA, 19 nt, Artificial Sequence
  Description of Artificial Sequence: Synthetic oligonucleotide
acuagaggggaaaugaccu

SEQ ID NO: 1201335 - RNA, 19 nt, Artificial Sequence
  Description of Artificial Sequence: Synthetic oligonucleotide
ugucuuaauuacucagaac

SEQ ID NO: 1201336 - RNA, 19 nt, Artificial Sequence
  Description of Artificial Sequence: Synthetic oligonucleotide
gguuuuggaugauucuucg

SEQ ID NO: 1201337 - RNA, 19 nt, Artificial Sequence
  Description of Artificial Sequence: Synthetic oligonucleotide
gugguagagguuugaaugc

SEQ ID NO: 1201338 - RNA, 19 nt, Artificial Sequence
  Description of Artificial Sequence: Synthetic oligonucleotide
aacccacaugcagacaggg

SEQ ID NO: 1201339 - RNA, 19 nt, Artificial Sequence
  Description of Artificial Sequence: Synthetic oligonucleotide
aaaccgugaccccaggcau

SEQ ID NO: 1201340 - RNA, 19 nt, Artificial Sequence
  Description of Artificial Sequence: Synthetic oligonucleotide
agagagaaccgaggcaagc

SEQ ID NO: 1201341 - RNA, 19 nt, Artificial Sequence
  Description of Artificial Sequence: Synthetic oligonucleotide
agggagagcagaugcauca

SEQ ID NO: 1201342 - RNA, 19 nt, Artificial Sequence
  Description of Artificial Sequence: Synthetic oligonucleotide
ucugguacccagccucuag

SEQ ID NO: 1201343 - RNA, 19 nt, Artificial Sequence
  Description of Artificial Sequence: Synthetic oligonucleotide
ucuaccguggaugugcccu

SEQ ID NO: 1201344 - RNA, 19 nt, Artificial Sequence
  Description of Artificial Sequence: Synthetic oligonucleotide
gaaugcagagagaaccgag

SEQ ID NO: 1201345 - RNA, 19 nt, Artificial Sequence
  Description of Artificial Sequence: Synthetic oligonucleotide
ucucggacuuccaaaucca

SEQ ID NO: 1201346 - RNA, 19 nt, Artificial Sequence
  Description of Artificial Sequence: Synthetic oligonucleotide
ucuugcuuguagcuucgca

SEQ ID NO: 1201347 - RNA, 19 nt, Artificial Sequence
  Description of Artificial Sequence: Synthetic oligonucleotide
gugccuaugaagucuuaag

SEQ ID NO: 1201348 - RNA, 19 nt, Artificial Sequence
  Description of Artificial Sequence: Synthetic oligonucleotide
ugaaaggagguuagugguc

SEQ ID NO: 1201349 - RNA, 19 nt, Artificial Sequence
  Description of Artificial Sequence: Synthetic oligonucleotide
agugagcacugcgaagucc

SEQ ID NO: 1201350 - RNA, 19 nt, Artificial Sequence
  Description of Artificial Sequence: Synthetic oligonucleotide
acuucgucacuguaggcga

SEQ ID NO: 1201351 - RNA, 19 nt, Artificial Sequence
  Description of Artificial Sequence: Synthetic oligonucleotide
auccgugaccuuuuaaagu

SEQ ID NO: 1201352 - RNA, 19 nt, Artificial Sequence
  Description of Artificial Sequence: Synthetic oligonucleotide
cacaagaaugauucaugug

SEQ ID NO: 1201353 - RNA, 19 nt, Artificial Sequence
  Description of Artificial Sequence: Synthetic oligonucleotide
aaaguuaccuaaaggcaaa

SEQ ID NO: 1201354 - RNA, 19 nt, Artificial Sequence
  Description of Artificial Sequence: Synthetic oligonucleotide
ucuagucuccgcgaugacc

SEQ ID NO: 1201355 - RNA, 19 nt, Artificial Sequence
  Description of Artificial Sequence: Synthetic oligonucleotide
acuguuuaucaagggagag

SEQ ID NO: 1201356 - RNA, 19 nt, Artificial Sequence
  Description of Artificial Sequence: Synthetic oligonucleotide
gaugauccccaggaugacg

SEQ ID NO: 1201357 - RNA, 19 nt, Artificial Sequence
  Description of Artificial Sequence: Synthetic oligonucleotide
uuccucgacuuugaggcgg

SEQ ID NO: 1201358 - RNA, 19 nt, Artificial Sequence
  Description of Artificial Sequence: Synthetic oligonucleotide
aucugcucaagcaauucuc

SEQ ID NO: 1201359 - RNA, 19 nt, Artificial Sequence
  Description of Artificial Sequence: Synthetic oligonucleotide
uagaggggaaaugaccuca

SEQ ID NO: 1201360 - RNA, 19 nt, Artificial Sequence
  Description of Artificial Sequence: Synthetic oligonucleotide
aggaagaauguuagcaaag

SEQ ID NO: 1201361 - RNA, 19 nt, Artificial Sequence
  Description of Artificial Sequence: Synthetic oligonucleotide
ucaaaccgugaccccaggc

SEQ ID NO: 1201362 - RNA, 19 nt, Artificial Sequence
  Description of Artificial Sequence: Synthetic oligonucleotide
cauaugugugugugugggg

SEQ ID NO: 1201363 - RNA, 19 nt, Artificial Sequence
  Description of Artificial Sequence: Synthetic oligonucleotide
uucuucgcaacaucccugu

SEQ ID NO: 1201364 - RNA, 19 nt, Artificial Sequence
  Description of Artificial Sequence: Synthetic oligonucleotide
ugaccuuuuaaagucuguc

SEQ ID NO: 1201365 - RNA, 19 nt, Artificial Sequence
  Description of Artificial Sequence: Synthetic oligonucleotide
uucucaucgggagggagcc

SEQ ID NO: 1201366 - RNA, 19 nt, Artificial Sequence
  Description of Artificial Sequence: Synthetic oligonucleotide
auucuuugaaaggagguua

SEQ ID NO: 1201367 - RNA, 19 nt, Artificial Sequence
  Description of Artificial Sequence: Synthetic oligonucleotide
cuguuuaucaagggagagc

SEQ ID NO: 1201368 - RNA, 19 nt, Artificial Sequence
  Description of Artificial Sequence: Synthetic oligonucleotide
uugaggcgggauuucucgg

SEQ ID NO: 1201369 - RNA, 19 nt, Artificial Sequence
  Description of Artificial Sequence: Synthetic oligonucleotide
aacaucucuuggccgauuu

SEQ ID NO: 1201370 - RNA, 19 nt, Artificial Sequence
  Description of Artificial Sequence: Synthetic oligonucleotide
aagagagguacgugacaca

SEQ ID NO: 1201371 - RNA, 19 nt, Artificial Sequence
  Description of Artificial Sequence: Synthetic oligonucleotide
cucguagccuucgaagucg

SEQ ID NO: 1201372 - RNA, 19 nt, Artificial Sequence
  Description of Artificial Sequence: Synthetic oligonucleotide
guaaagagagguacgugac

SEQ ID NO: 1201373 - RNA, 19 nt, Artificial Sequence
  Description of Artificial Sequence: Synthetic oligonucleotide
ucuuggccgauuugcucgg

SEQ ID NO: 1201374 - RNA, 19 nt, Artificial Sequence
  Description of Artificial Sequence: Synthetic oligonucleotide
agacauggcagcucggaaa

SEQ ID NO: 1201375 - RNA, 19 nt, Artificial Sequence
  Description of Artificial Sequence: Synthetic oligonucleotide
ucgacuuugaggcgggauu

SEQ ID NO: 1201376 - RNA, 19 nt, Artificial Sequence
  Description of Artificial Sequence: Synthetic oligonucleotide
gugugugugugugugugcg

SEQ ID NO: 1201377 - RNA, 19 nt, Artificial Sequence
  Description of Artificial Sequence: Synthetic oligonucleotide
ucggucuccacugcuaucu

SEQ ID NO: 1201378 - RNA, 19 nt, Artificial Sequence
  Description of Artificial Sequence: Synthetic oligonucleotide
caaggaagaauguuagcaa

SEQ ID NO: 1201379 - RNA, 19 nt, Artificial Sequence
  Description of Artificial Sequence: Synthetic oligonucleotide
gaagaguggugagggagag

SEQ ID NO: 1201380 - RNA, 19 nt, Artificial Sequence
  Description of Artificial Sequence: Synthetic oligonucleotide
agagaauagguuugcuuuu

SEQ ID NO: 1201381 - RNA, 19 nt, Artificial Sequence
  Description of Artificial Sequence: Synthetic oligonucleotide
ugaacucauuuugaacaca

SEQ ID NO: 1201382 - RNA, 19 nt, Artificial Sequence
  Description of Artificial Sequence: Synthetic oligonucleotide
ugaaugcagagagaaccga

SEQ ID NO: 1201383 - RNA, 19 nt, Artificial Sequence
  Description of Artificial Sequence: Synthetic oligonucleotide
ggaagaauguuagcaaagc

SEQ ID NO: 1201384 - RNA, 19 nt, Artificial Sequence
  Description of Artificial Sequence: Synthetic oligonucleotide
aggcaaggaagaauguuag

SEQ ID NO: 1201385 - RNA, 19 nt, Artificial Sequence
  Description of Artificial Sequence: Synthetic oligonucleotide
gagguuaguggucugauuu

SEQ ID NO: 1201386 - RNA, 19 nt, Artificial Sequence
  Description of Artificial Sequence: Synthetic oligonucleotide
ucggacuuccaaauccauc

SEQ ID NO: 1201387 - RNA, 19 nt, Artificial Sequence
  Description of Artificial Sequence: Synthetic oligonucleotide
auuccguacuucgucacug

SEQ ID NO: 1201388 - RNA, 19 nt, Artificial Sequence
  Description of Artificial Sequence: Synthetic oligonucleotide
uacagcuguuagugaaacc

SEQ ID NO: 1201389 - RNA, 19 nt, Artificial Sequence
  Description of Artificial Sequence: Synthetic oligonucleotide
caucugucucccgaagucg

SEQ ID NO: 1201390 - RNA, 19 nt, Artificial Sequence
  Description of Artificial Sequence: Synthetic oligonucleotide
ugugugugugugugugugc

SEQ ID NO: 1201391 - RNA, 19 nt, Artificial Sequence
  Description of Artificial Sequence: Synthetic oligonucleotide
cuaaaggcaaacaagcauu

SEQ ID NO: 1201392 - RNA, 19 nt, Artificial Sequence
  Description of Artificial Sequence: Synthetic oligonucleotide
gcauauguguguguguggg

SEQ ID NO: 1201393 - RNA, 19 nt, Artificial Sequence
  Description of Artificial Sequence: Synthetic oligonucleotide
auuccucgacuuugaggcg

SEQ ID NO: 1201394 - RNA, 19 nt, Artificial Sequence
  Description of Artificial Sequence: Synthetic oligonucleotide
agcacugcgaaguccugcu

SEQ ID NO: 1201395 - RNA, 19 nt, Artificial Sequence
  Description of Artificial Sequence: Synthetic oligonucleotide
ucauuccguacuucgucac

SEQ ID NO: 1201396 - RNA, 19 nt, Artificial Sequence
  Description of Artificial Sequence: Synthetic oligonucleotide
uccucgacuuugaggcggg

SEQ ID NO: 1201397 - RNA, 19 nt, Artificial Sequence
  Description of Artificial Sequence: Synthetic oligonucleotide
guuaccucagacagaaaga

SEQ ID NO: 1201398 - RNA, 19 nt, Artificial Sequence
  Description of Artificial Sequence: Synthetic oligonucleotide
uucaugacuagaggggaaa

SEQ ID NO: 1201399 - RNA, 19 nt, Artificial Sequence
  Description of Artificial Sequence: Synthetic oligonucleotide
caaccauuugcuucuucuc

SEQ ID NO: 1201400 - RNA, 19 nt, Artificial Sequence
  Description of Artificial Sequence: Synthetic oligonucleotide
uuucucggacuuccaaauc

SEQ ID NO: 1201401 - RNA, 19 nt, Artificial Sequence
  Description of Artificial Sequence: Synthetic oligonucleotide
gcucaagcaauucucuggc

SEQ ID NO: 1201402 - RNA, 19 nt, Artificial Sequence
  Description of Artificial Sequence: Synthetic oligonucleotide
accgugaccccaggcaugc

SEQ ID NO: 1201403 - RNA, 19 nt, Artificial Sequence
  Description of Artificial Sequence: Synthetic oligonucleotide
gcaacuuuuaaaccugauc

SEQ ID NO: 1201404 - RNA, 19 nt, Artificial Sequence
  Description of Artificial Sequence: Synthetic oligonucleotide
caaaccgugaccccaggca

SEQ ID NO: 1201405 - RNA, 19 nt, Artificial Sequence
  Description of Artificial Sequence: Synthetic oligonucleotide
ugaccuuuccagccucuac

SEQ ID NO: 1201406 - RNA, 19 nt, Artificial Sequence
  Description of Artificial Sequence: Synthetic oligonucleotide
agcacaggugguuagcauu

SEQ ID NO: 1201407 - RNA, 19 nt, Artificial Sequence
  Description of Artificial Sequence: Synthetic oligonucleotide
cucggaaacggccggccgg

SEQ ID NO: 1201408 - RNA, 19 nt, Artificial Sequence
  Description of Artificial Sequence: Synthetic oligonucleotide
guacccagccucuagucuc

SEQ ID NO: 1201409 - RNA, 19 nt, Artificial Sequence
  Description of Artificial Sequence: Synthetic oligonucleotide
ugguagagguuugaaugca

SEQ ID NO: 1201410 - RNA, 19 nt, Artificial Sequence
  Description of Artificial Sequence: Synthetic oligonucleotide
ucguucacgugcucguugu

SEQ ID NO: 1201411 - RNA, 19 nt, Artificial Sequence
  Description of Artificial Sequence: Synthetic oligonucleotide
guugcuguacauuccucga

SEQ ID NO: 1201412 - RNA, 19 nt, Artificial Sequence
  Description of Artificial Sequence: Synthetic oligonucleotide
cuucgcaacaucccuguca

SEQ ID NO: 1201413 - RNA, 19 nt, Artificial Sequence
  Description of Artificial Sequence: Synthetic oligonucleotide
ccaagcaguucuuuuguag

SEQ ID NO: 1201414 - RNA, 19 nt, Artificial Sequence
  Description of Artificial Sequence: Synthetic oligonucleotide
caauuccugguuaccucag

SEQ ID NO: 1201415 - RNA, 19 nt, Artificial Sequence
  Description of Artificial Sequence: Synthetic oligonucleotide
agaauagguuugcuuuuaa

SEQ ID NO: 1201416 - RNA, 19 nt, Artificial Sequence
  Description of Artificial Sequence: Synthetic oligonucleotide
agcauucaccuucaccuau

SEQ ID NO: 1201417 - RNA, 19 nt, Artificial Sequence
  Description of Artificial Sequence: Synthetic oligonucleotide
cuguaggcgauccgugacc

SEQ ID NO: 1201418 - RNA, 19 nt, Artificial Sequence
  Description of Artificial Sequence: Synthetic oligonucleotide
aagcauucaccuucaccua

SEQ ID NO: 1201419 - RNA, 19 nt, Artificial Sequence
  Description of Artificial Sequence: Synthetic oligonucleotide
caugacuagaggggaaaug

SEQ ID NO: 1201420 - RNA, 19 nt, Artificial Sequence
  Description of Artificial Sequence: Synthetic oligonucleotide
agaccuguaaaagugccua

SEQ ID NO: 1201421 - RNA, 19 nt, Artificial Sequence
  Description of Artificial Sequence: Synthetic oligonucleotide
gaagacauggcagcucgga

SEQ ID NO: 1201422 - RNA, 19 nt, Artificial Sequence
  Description of Artificial Sequence: Synthetic oligonucleotide
accuguaaaagugccuaug

SEQ ID NO: 1201423 - RNA, 19 nt, Artificial Sequence
  Description of Artificial Sequence: Synthetic oligonucleotide
gucacucggggccugucag

SEQ ID NO: 1201424 - RNA, 19 nt, Artificial Sequence
  Description of Artificial Sequence: Synthetic oligonucleotide
ugugugugugugcgcauau

SEQ ID NO: 1201425 - RNA, 19 nt, Artificial Sequence
  Description of Artificial Sequence: Synthetic oligonucleotide
ugugugugugugugugcgc

SEQ ID NO: 1201426 - RNA, 19 nt, Artificial Sequence
  Description of Artificial Sequence: Synthetic oligonucleotide
uggccgauuugcucggucu

SEQ ID NO: 1201427 - RNA, 19 nt, Artificial Sequence
  Description of Artificial Sequence: Synthetic oligonucleotide
uuuuauccacggacaucac

SEQ ID NO: 1201428 - RNA, 19 nt, Artificial Sequence
  Description of Artificial Sequence: Synthetic oligonucleotide
cucauuccguacuucguca

SEQ ID NO: 1201429 - RNA, 19 nt, Artificial Sequence
  Description of Artificial Sequence: Synthetic oligonucleotide
auccacggacaucacagaa

SEQ ID NO: 1201430 - RNA, 19 nt, Artificial Sequence
  Description of Artificial Sequence: Synthetic oligonucleotide
cuagaggggaaaugaccuc

SEQ ID NO: 1201431 - RNA, 19 nt, Artificial Sequence
  Description of Artificial Sequence: Synthetic oligonucleotide
gaaaggagguuaguggucu

SEQ ID NO: 1201432 - RNA, 19 nt, Artificial Sequence
  Description of Artificial Sequence: Synthetic oligonucleotide
acgagcacaggugguuagc

SEQ ID NO: 1201433 - RNA, 19 nt, Artificial Sequence
  Description of Artificial Sequence: Synthetic oligonucleotide
cugcucaagcaauucucug

SEQ ID NO: 1201434 - RNA, 19 nt, Artificial Sequence
  Description of Artificial Sequence: Synthetic oligonucleotide
ugugugugugugugugugu

SEQ ID NO: 1201435 - RNA, 19 nt, Artificial Sequence
  Description of Artificial Sequence: Synthetic oligonucleotide
cacuguuuaucaagggaga

SEQ ID NO: 1201436 - RNA, 19 nt, Artificial Sequence
  Description of Artificial Sequence: Synthetic oligonucleotide
agcacacaagaaugauuca

SEQ ID NO: 1201437 - RNA, 19 nt, Artificial Sequence
  Description of Artificial Sequence: Synthetic oligonucleotide
cuauuuuggacagcagaca

SEQ ID NO: 1201438 - RNA, 19 nt, Artificial Sequence
  Description of Artificial Sequence: Synthetic oligonucleotide
caaguacaacaugaucuug

SEQ ID NO: 1201439 - RNA, 19 nt, Artificial Sequence
  Description of Artificial Sequence: Synthetic oligonucleotide
acaucucuuggccgauuug

SEQ ID NO: 1201440 - RNA, 19 nt, Artificial Sequence
  Description of Artificial Sequence: Synthetic oligonucleotide
cugguuaccucagacagaa

SEQ ID NO: 1201441 - RNA, 19 nt, Artificial Sequence
  Description of Artificial Sequence: Synthetic oligonucleotide
agccuucgaagucggaaga

SEQ ID NO: 1201442 - RNA, 19 nt, Artificial Sequence
  Description of Artificial Sequence: Synthetic oligonucleotide
cucguuguaucuuuucucu

SEQ ID NO: 1201443 - RNA, 19 nt, Artificial Sequence
  Description of Artificial Sequence: Synthetic oligonucleotide
uucgcauucuguugcugua

SEQ ID NO: 1201444 - RNA, 19 nt, Artificial Sequence
  Description of Artificial Sequence: Synthetic oligonucleotide
accuaaaggcaaacaagca

SEQ ID NO: 1201445 - RNA, 19 nt, Artificial Sequence
  Description of Artificial Sequence: Synthetic oligonucleotide
gugugugugugugugugug

SEQ ID NO: 1201446 - RNA, 19 nt, Artificial Sequence
  Description of Artificial Sequence: Synthetic oligonucleotide
gucguucacgugcucguug

SEQ ID NO: 1201447 - RNA, 19 nt, Artificial Sequence
  Description of Artificial Sequence: Synthetic oligonucleotide
gucaucguguccucucuca

SEQ ID NO: 1201448 - RNA, 19 nt, Artificial Sequence
  Description of Artificial Sequence: Synthetic oligonucleotide
agugugugugugugugugu

SEQ ID NO: 1201449 - RNA, 19 nt, Artificial Sequence
  Description of Artificial Sequence: Synthetic oligonucleotide
gagccgagggacccuggag

SEQ ID NO: 1201450 - RNA, 19 nt, Artificial Sequence
  Description of Artificial Sequence: Synthetic oligonucleotide
cuguaaaagugccuaugaa

SEQ ID NO: 1201451 - RNA, 19 nt, Artificial Sequence
  Description of Artificial Sequence: Synthetic oligonucleotide
gaggcgggauuucucggac

SEQ ID NO: 1201452 - RNA, 19 nt, Artificial Sequence
  Description of Artificial Sequence: Synthetic oligonucleotide
cuugcuuguagcuucgcau

SEQ ID NO: 1201453 - RNA, 19 nt, Artificial Sequence
  Description of Artificial Sequence: Synthetic oligonucleotide
acguuggcaaccauuugcu

SEQ ID NO: 1201454 - RNA, 19 nt, Artificial Sequence
  Description of Artificial Sequence: Synthetic oligonucleotide
gacggagucaucguguccu

SEQ ID NO: 1201455 - RNA, 19 nt, Artificial Sequence
  Description of Artificial Sequence: Synthetic oligonucleotide
aggacucgggaaaggcgcc

SEQ ID NO: 1201456 - RNA, 19 nt, Artificial Sequence
  Description of Artificial Sequence: Synthetic oligonucleotide
gacucgggaaaggcgcccg

SEQ ID NO: 1201457 - RNA, 19 nt, Artificial Sequence
  Description of Artificial Sequence: Synthetic oligonucleotide
ugagcacugcgaaguccug

SEQ ID NO: 1201458 - RNA, 19 nt, Artificial Sequence
  Description of Artificial Sequence: Synthetic oligonucleotide
gagagacagagggucacuc

SEQ ID NO: 1201459 - RNA, 19 nt, Artificial Sequence
  Description of Artificial Sequence: Synthetic oligonucleotide
aagugugguagagguuuga

SEQ ID NO: 1201460 - RNA, 19 nt, Artificial Sequence
  Description of Artificial Sequence: Synthetic oligonucleotide
agguuaguggucugauuuu

SEQ ID NO: 1201461 - RNA, 19 nt, Artificial Sequence
  Description of Artificial Sequence: Synthetic oligonucleotide
aguuugcaucugucucccg

SEQ ID NO: 1201462 - RNA, 19 nt, Artificial Sequence
  Description of Artificial Sequence: Synthetic oligonucleotide
uuccguacuucgucacugu

SEQ ID NO: 1201463 - RNA, 19 nt, Artificial Sequence
  Description of Artificial Sequence: Synthetic oligonucleotide
ccugaucacaaaugaacuc

SEQ ID NO: 1201464 - RNA, 19 nt, Artificial Sequence
  Description of Artificial Sequence: Synthetic oligonucleotide
cacgagcacaggugguuag

SEQ ID NO: 1201465 - RNA, 19 nt, Artificial Sequence
  Description of Artificial Sequence: Synthetic oligonucleotide
gacuaagguuuucuaacau

SEQ ID NO: 1201466 - RNA, 19 nt, Artificial Sequence
  Description of Artificial Sequence: Synthetic oligonucleotide
cguguccucucucaaaccg

SEQ ID NO: 1201467 - RNA, 19 nt, Artificial Sequence
  Description of Artificial Sequence: Synthetic oligonucleotide
guacuucgucacuguaggc

SEQ ID NO: 1201468 - RNA, 19 nt, Artificial Sequence
  Description of Artificial Sequence: Synthetic oligonucleotide
agaaccgaggcaagcuuug

SEQ ID NO: 1201469 - RNA, 19 nt, Artificial Sequence
  Description of Artificial Sequence: Synthetic oligonucleotide
gauuugcucggucuccacu

SEQ ID NO: 1201470 - RNA, 19 nt, Artificial Sequence
  Description of Artificial Sequence: Synthetic oligonucleotide
gacagggacagagauauuu

SEQ ID NO: 1201471 - RNA, 19 nt, Artificial Sequence
  Description of Artificial Sequence: Synthetic oligonucleotide
ggcauuuuauccacggaca

SEQ ID NO: 1201472 - RNA, 19 nt, Artificial Sequence
  Description of Artificial Sequence: Synthetic oligonucleotide
agugccuaugaagucuuaa

SEQ ID NO: 1201473 - RNA, 19 nt, Artificial Sequence
  Description of Artificial Sequence: Synthetic oligonucleotide
gguagagguuugaaugcag

SEQ ID NO: 1201474 - RNA, 19 nt, Artificial Sequence
  Description of Artificial Sequence: Synthetic oligonucleotide
ucaugacuagaggggaaau

SEQ ID NO: 1201475 - RNA, 19 nt, Artificial Sequence
  Description of Artificial Sequence: Synthetic oligonucleotide
guagccuucgaagucggaa

SEQ ID NO: 1201476 - RNA, 19 nt, Artificial Sequence
  Description of Artificial Sequence: Synthetic oligonucleotide
uccguacuucgucacugua

SEQ ID NO: 1201477 - RNA, 19 nt, Artificial Sequence
  Description of Artificial Sequence: Synthetic oligonucleotide
cucaaaccgugaccccagg

SEQ ID NO: 1201478 - RNA, 19 nt, Artificial Sequence
  Description of Artificial Sequence: Synthetic oligonucleotide
cagcuguuagugaaaccca

SEQ ID NO: 1201479 - RNA, 19 nt, Artificial Sequence
  Description of Artificial Sequence: Synthetic oligonucleotide
acggagucaucguguccuc

SEQ ID NO: 1201480 - RNA, 19 nt, Artificial Sequence
  Description of Artificial Sequence: Synthetic oligonucleotide
gugacggagucaucguguc

SEQ ID NO: 1201481 - RNA, 19 nt, Artificial Sequence
  Description of Artificial Sequence: Synthetic oligonucleotide
gagaauagguuugcuuuua

SEQ ID NO: 1201482 - RNA, 19 nt, Artificial Sequence
  Description of Artificial Sequence: Synthetic oligonucleotide
agugugguagagguuugaa

SEQ ID NO: 1201483 - RNA, 19 nt, Artificial Sequence
  Description of Artificial Sequence: Synthetic oligonucleotide
aaccgugaccccaggcaug

SEQ ID NO: 1201484 - RNA, 19 nt, Artificial Sequence
  Description of Artificial Sequence: Synthetic oligonucleotide
uuggccgauuugcucgguc

SEQ ID NO: 1201485 - RNA, 19 nt, Artificial Sequence
  Description of Artificial Sequence: Synthetic oligonucleotide
aagauaguacagaccugua

SEQ ID NO: 1201486 - RNA, 19 nt, Artificial Sequence
  Description of Artificial Sequence: Synthetic oligonucleotide
agcuuccaguuacauuuaa

SEQ ID NO: 1201487 - RNA, 19 nt, Artificial Sequence
  Description of Artificial Sequence: Synthetic oligonucleotide
gaaccgaggcaagcuuugc

SEQ ID NO: 1201488 - RNA, 19 nt, Artificial Sequence
  Description of Artificial Sequence: Synthetic oligonucleotide
ugugaccauuuugucuuaa

SEQ ID NO: 1201489 - RNA, 19 nt, Artificial Sequence
  Description of Artificial Sequence: Synthetic oligonucleotide
cucucaaaccgugacccca

SEQ ID NO: 1201490 - RNA, 19 nt, Artificial Sequence
  Description of Artificial Sequence: Synthetic oligonucleotide
agcuucgcauucuguugcu

SEQ ID NO: 1201491 - RNA, 19 nt, Artificial Sequence
  Description of Artificial Sequence: Synthetic oligonucleotide
gugugugugugugugcgca

SEQ ID NO: 1201492 - RNA, 19 nt, Artificial Sequence
  Description of Artificial Sequence: Synthetic oligonucleotide
ucggaaacggccggccgga

SEQ ID NO: 1201493 - RNA, 19 nt, Artificial Sequence
  Description of Artificial Sequence: Synthetic oligonucleotide
gcuguuagugaaacccaag

SEQ ID NO: 1201494 - RNA, 19 nt, Artificial Sequence
  Description of Artificial Sequence: Synthetic oligonucleotide
ucuucgcaacaucccuguc

SEQ ID NO: 1201495 - RNA, 19 nt, Artificial Sequence
  Description of Artificial Sequence: Synthetic oligonucleotide
gcaggacucgggaaaggcg

SEQ ID NO: 1201496 - RNA, 19 nt, Artificial Sequence
  Description of Artificial Sequence: Synthetic oligonucleotide
ugugugugugugugcgcau

SEQ ID NO: 1201497 - RNA, 19 nt, Artificial Sequence
  Description of Artificial Sequence: Synthetic oligonucleotide
gguacgugacacacagaag

SEQ ID NO: 1201498 - RNA, 19 nt, Artificial Sequence
  Description of Artificial Sequence: Synthetic oligonucleotide
aaacggccggccggagccg

SEQ ID NO: 1201499 - RNA, 19 nt, Artificial Sequence
  Description of Artificial Sequence: Synthetic oligonucleotide
acucggggccugucagcac

SEQ ID NO: 1201500 - RNA, 19 nt, Artificial Sequence
  Description of Artificial Sequence: Synthetic oligonucleotide
cuucgaagucggaagacau

SEQ ID NO: 1201501 - RNA, 19 nt, Artificial Sequence
  Description of Artificial Sequence: Synthetic oligonucleotide
ugaccacgaugauccccag

SEQ ID NO: 1201502 - RNA, 19 nt, Artificial Sequence
  Description of Artificial Sequence: Synthetic oligonucleotide
cuucgcauucuguugcugu

SEQ ID NO: 1201503 - RNA, 19 nt, Artificial Sequence
  Description of Artificial Sequence: Synthetic oligonucleotide
agcuguuagugaaacccaa

SEQ ID NO: 1201504 - RNA, 19 nt, Artificial Sequence
  Description of Artificial Sequence: Synthetic oligonucleotide
cacuguaggcgauccguga

SEQ ID NO: 1201505 - RNA, 19 nt, Artificial Sequence
  Description of Artificial Sequence: Synthetic oligonucleotide
uccacgagcacaggugguu

SEQ ID NO: 1201506 - RNA, 19 nt, Artificial Sequence
  Description of Artificial Sequence: Synthetic oligonucleotide
ucucaucgggagggagccg

SEQ ID NO: 1201507 - RNA, 19 nt, Artificial Sequence
  Description of Artificial Sequence: Synthetic oligonucleotide
gcgcauaugugugugugug

SEQ ID NO: 1201508 - RNA, 19 nt, Artificial Sequence
  Description of Artificial Sequence: Synthetic oligonucleotide
cagcagacaaaguuaccua

SEQ ID NO: 1201509 - RNA, 19 nt, Artificial Sequence
  Description of Artificial Sequence: Synthetic oligonucleotide
acgugcucguuguaucuuu

SEQ ID NO: 1201510 - RNA, 19 nt, Artificial Sequence
  Description of Artificial Sequence: Synthetic oligonucleotide
ucuccgcgaugaccuuucc

SEQ ID NO: 1201511 - RNA, 19 nt, Artificial Sequence
  Description of Artificial Sequence: Synthetic oligonucleotide
guacauuccucgacuuuga

SEQ ID NO: 1201512 - RNA, 19 nt, Artificial Sequence
  Description of Artificial Sequence: Synthetic oligonucleotide
ccucucucaaaccgugacc

SEQ ID NO: 1201513 - RNA, 19 nt, Artificial Sequence
  Description of Artificial Sequence: Synthetic oligonucleotide
accguggaugugcccucuc

SEQ ID NO: 1201514 - RNA, 19 nt, Artificial Sequence
  Description of Artificial Sequence: Synthetic oligonucleotide
agcucauuccguacuucgu

SEQ ID NO: 1201515 - RNA, 19 nt, Artificial Sequence
  Description of Artificial Sequence: Synthetic oligonucleotide
cuaccguggaugugcccuc

SEQ ID NO: 1201516 - RNA, 19 nt, Artificial Sequence
  Description of Artificial Sequence: Synthetic oligonucleotide
cauucaccuucaccuauaa

SEQ ID NO: 1201517 - RNA, 19 nt, Artificial Sequence
  Description of Artificial Sequence: Synthetic oligonucleotide
gcuucaugacuagagggga

SEQ ID NO: 1201518 - RNA, 19 nt, Artificial Sequence
  Description of Artificial Sequence: Synthetic oligonucleotide
cugucucccgaagucguuc

SEQ ID NO: 1201519 - RNA, 19 nt, Artificial Sequence
  Description of Artificial Sequence: Synthetic oligonucleotide
agccucuagucuccgcgau

SEQ ID NO: 1201520 - RNA, 19 nt, Artificial Sequence
  Description of Artificial Sequence: Synthetic oligonucleotide
ucgguucuccgaggaauuc

SEQ ID NO: 1201521 - RNA, 19 nt, Artificial Sequence
  Description of Artificial Sequence: Synthetic oligonucleotide
gaugugcccucucgguucu

SEQ ID NO: 1201522 - RNA, 19 nt, Artificial Sequence
  Description of Artificial Sequence: Synthetic oligonucleotide
gugugguagagguuugaau

SEQ ID NO: 1201523 - RNA, 19 nt, Artificial Sequence
  Description of Artificial Sequence: Synthetic oligonucleotide
ucggggccugucagcacac

SEQ ID NO: 1201524 - RNA, 19 nt, Artificial Sequence
  Description of Artificial Sequence: Synthetic oligonucleotide
gggccugucagcacacaag

SEQ ID NO: 1201525 - RNA, 19 nt, Artificial Sequence
  Description of Artificial Sequence: Synthetic oligonucleotide
ccacggacaucacagaaaa

SEQ ID NO: 1201526 - RNA, 19 nt, Artificial Sequence
  Description of Artificial Sequence: Synthetic oligonucleotide
aagcuuccaguuacauuua

SEQ ID NO: 1201527 - RNA, 19 nt, Artificial Sequence
  Description of Artificial Sequence: Synthetic oligonucleotide
gcucguagccuucgaaguc

SEQ ID NO: 1201528 - RNA, 19 nt, Artificial Sequence
  Description of Artificial Sequence: Synthetic oligonucleotide
gcucggaaacggccggccg

SEQ ID NO: 1201529 - RNA, 19 nt, Artificial Sequence
  Description of Artificial Sequence: Synthetic oligonucleotide
cagugagcacugcgaaguc

SEQ ID NO: 1201530 - RNA, 19 nt, Artificial Sequence
  Description of Artificial Sequence: Synthetic oligonucleotide
cucggucuccacugcuauc

SEQ ID NO: 1201531 - RNA, 19 nt, Artificial Sequence
  Description of Artificial Sequence: Synthetic oligonucleotide
gcccucucgguucuccgag

SEQ ID NO: 1201532 - RNA, 19 nt, Artificial Sequence
  Description of Artificial Sequence: Synthetic oligonucleotide
ggaggaugcgguuuuggau

SEQ ID NO: 1201533 - RNA, 19 nt, Artificial Sequence
  Description of Artificial Sequence: Synthetic oligonucleotide
ugguuaccucagacagaaa

SEQ ID NO: 1201534 - RNA, 19 nt, Artificial Sequence
  Description of Artificial Sequence: Synthetic oligonucleotide
ggaagacauggcagcucgg

SEQ ID NO: 1201535 - RNA, 19 nt, Artificial Sequence
  Description of Artificial Sequence: Synthetic oligonucleotide
cgcauaugugugugugugg

SEQ ID NO: 1201536 - RNA, 19 nt, Artificial Sequence
  Description of Artificial Sequence: Synthetic oligonucleotide
gaccuguaaaagugccuau

SEQ ID NO: 1201537 - RNA, 19 nt, Artificial Sequence
  Description of Artificial Sequence: Synthetic oligonucleotide
cucuagucuccgcgaugac

SEQ ID NO: 1201538 - RNA, 19 nt, Artificial Sequence
  Description of Artificial Sequence: Synthetic oligonucleotide
ccguggaugugcccucucg

SEQ ID NO: 1201539 - RNA, 19 nt, Artificial Sequence
  Description of Artificial Sequence: Synthetic oligonucleotide
cgauccgugaccuuuuaaa

SEQ ID NO: 1201540 - RNA, 19 nt, Artificial Sequence
  Description of Artificial Sequence: Synthetic oligonucleotide
gucuccgcgaugaccuuuc

SEQ ID NO: 1201541 - RNA, 19 nt, Artificial Sequence
  Description of Artificial Sequence: Synthetic oligonucleotide
gguacccagccucuagucu

SEQ ID NO: 1201542 - RNA, 19 nt, Artificial Sequence
  Description of Artificial Sequence: Synthetic oligonucleotide
cacucggggccugucagca

SEQ ID NO: 1201543 - RNA, 19 nt, Artificial Sequence
  Description of Artificial Sequence: Synthetic oligonucleotide
uaccguggaugugcccucu

SEQ ID NO: 1201544 - RNA, 19 nt, Artificial Sequence
  Description of Artificial Sequence: Synthetic oligonucleotide
agggagccgagggacccug

SEQ ID NO: 1201545 - RNA, 19 nt, Artificial Sequence
  Description of Artificial Sequence: Synthetic oligonucleotide
cuccgcgaugaccuuucca

SEQ ID NO: 1201546 - RNA, 19 nt, Artificial Sequence
  Description of Artificial Sequence: Synthetic oligonucleotide
gccgauuugcucggucucc

SEQ ID NO: 1201547 - RNA, 19 nt, Artificial Sequence
  Description of Artificial Sequence: Synthetic oligonucleotide
acccacaugcagacaggga

SEQ ID NO: 1201548 - RNA, 19 nt, Artificial Sequence
  Description of Artificial Sequence: Synthetic oligonucleotide
ccauuuugucuuaauuacu

SEQ ID NO: 1201549 - RNA, 19 nt, Artificial Sequence
  Description of Artificial Sequence: Synthetic oligonucleotide
ccgcgaugaccuuuccagc

SEQ ID NO: 1201550 - RNA, 19 nt, Artificial Sequence
  Description of Artificial Sequence: Synthetic oligonucleotide
cucugucaugacuaagguu

SEQ ID NO: 1201551 - RNA, 19 nt, Artificial Sequence
  Description of Artificial Sequence: Synthetic oligonucleotide
ggccgauuugcucggucuc

SEQ ID NO: 1201552 - RNA, 19 nt, Artificial Sequence
  Description of Artificial Sequence: Synthetic oligonucleotide
gaugcgguuuuggaugauu

SEQ ID NO: 1201553 - RNA, 19 nt, Artificial Sequence
  Description of Artificial Sequence: Synthetic oligonucleotide
cgaagucggaagacauggc

SEQ ID NO: 1201554 - RNA, 19 nt, Artificial Sequence
  Description of Artificial Sequence: Synthetic oligonucleotide
agucuccgcgaugaccuuu

SEQ ID NO: 1201555 - RNA, 19 nt, Artificial Sequence
  Description of Artificial Sequence: Synthetic oligonucleotide
cauuccguacuucgucacu

SEQ ID NO: 1201556 - RNA, 19 nt, Artificial Sequence
  Description of Artificial Sequence: Synthetic oligonucleotide
gccucuagucuccgcgaug

SEQ ID NO: 1201557 - RNA, 19 nt, Artificial Sequence
  Description of Artificial Sequence: Synthetic oligonucleotide
gagguacgugacacacaga

SEQ ID NO: 1201558 - RNA, 19 nt, Artificial Sequence
  Description of Artificial Sequence: Synthetic oligonucleotide
ccccaaguuugcaucuguc

SEQ ID NO: 1201559 - RNA, 19 nt, Artificial Sequence
  Description of Artificial Sequence: Synthetic oligonucleotide
aagugccuaugaagucuua

SEQ ID NO: 1201560 - RNA, 19 nt, Artificial Sequence
  Description of Artificial Sequence: Synthetic oligonucleotide
uagucuccgcgaugaccuu

SEQ ID NO: 1201561 - RNA, 19 nt, Artificial Sequence
  Description of Artificial Sequence: Synthetic oligonucleotide
cguuguaucuuuucucugu

SEQ ID NO: 1201562 - RNA, 19 nt, Artificial Sequence
  Description of Artificial Sequence: Synthetic oligonucleotide
gugugugugugugcgcaua

SEQ ID NO: 1201563 - RNA, 19 nt, Artificial Sequence
  Description of Artificial Sequence: Synthetic oligonucleotide
gcuucgcauucuguugcug

SEQ ID NO: 1201564 - RNA, 19 nt, Artificial Sequence
  Description of Artificial Sequence: Synthetic oligonucleotide
caagcuguuucuccacguu

SEQ ID NO: 1201565 - RNA, 19 nt, Artificial Sequence
  Description of Artificial Sequence: Synthetic oligonucleotide
gggcaacuuuuaaaccuga

SEQ ID NO: 1201566 - RNA, 19 nt, Artificial Sequence
  Description of Artificial Sequence: Synthetic oligonucleotide
cccucucgguucuccgagg

SEQ ID NO: 1201567 - RNA, 19 nt, Artificial Sequence
  Description of Artificial Sequence: Synthetic oligonucleotide
accucaucuugggcaacuu

SEQ ID NO: 1201568 - RNA, 19 nt, Artificial Sequence
  Description of Artificial Sequence: Synthetic oligonucleotide
gggacacaccaaguacaac

SEQ ID NO: 1201569 - RNA, 19 nt, Artificial Sequence
  Description of Artificial Sequence: Synthetic oligonucleotide
cuccacguuggcaaccauu

SEQ ID NO: 1201570 - RNA, 19 nt, Artificial Sequence
  Description of Artificial Sequence: Synthetic oligonucleotide
gggcaggacucgggaaagg

SEQ ID NO: 1201571 - RNA, 19 nt, Artificial Sequence
  Description of Artificial Sequence: Synthetic oligonucleotide
ggggccugucagcacacaa

SEQ ID NO: 1201572 - RNA, 19 nt, Artificial Sequence
  Description of Artificial Sequence: Synthetic oligonucleotide
cgguucuccgaggaauucc

SEQ ID NO: 1201573 - RNA, 19 nt, Artificial Sequence
  Description of Artificial Sequence: Synthetic oligonucleotide
cggggucuagcucagggca

SEQ ID NO: 1201574 - RNA, 19 nt, Artificial Sequence
  Description of Artificial Sequence: Synthetic oligonucleotide
cucggacuuccaaauccau

SEQ ID NO: 1201575 - RNA, 19 nt, Artificial Sequence
  Description of Artificial Sequence: Synthetic oligonucleotide
cuguacauuccucgacuuu

SEQ ID NO: 1201576 - RNA, 19 nt, Artificial Sequence
  Description of Artificial Sequence: Synthetic oligonucleotide
ccacugcuaucugguaccc

SEQ ID NO: 1201577 - RNA, 19 nt, Artificial Sequence
  Description of Artificial Sequence: Synthetic oligonucleotide
cacugcuaucugguaccca

SEQ ID NO: 1201578 - RNA, 19 nt, Artificial Sequence
  Description of Artificial Sequence: Synthetic oligonucleotide
ccucucgguucuccgagga

SEQ ID NO: 1201579 - RNA, 19 nt, Artificial Sequence
  Description of Artificial Sequence: Synthetic oligonucleotide
gcgguuuuggaugauucuu

SEQ ID NO: 1201580 - RNA, 19 nt, Artificial Sequence
  Description of Artificial Sequence: Synthetic oligonucleotide
agccggggucuagcucagg

SEQ ID NO: 1201581 - RNA, 19 nt, Artificial Sequence
  Description of Artificial Sequence: Synthetic oligonucleotide
gcgauccgugaccuuuuaa

SEQ ID NO: 1201582 - RNA, 19 nt, Artificial Sequence
  Description of Artificial Sequence: Synthetic oligonucleotide
ccugcucguagccuucgaa

SEQ ID NO: 1201583 - RNA, 19 nt, Artificial Sequence
  Description of Artificial Sequence: Synthetic oligonucleotide
aggcgauccgugaccuuuu

SEQ ID NO: 1201584 - RNA, 19 nt, Artificial Sequence
  Description of Artificial Sequence: Synthetic oligonucleotide
uggcaaccauuugcuucuu

SEQ ID NO: 1201585 - RNA, 19 nt, Artificial Sequence
  Description of Artificial Sequence: Synthetic oligonucleotide
ggagguuaguggucugauu

SEQ ID NO: 1201586 - RNA, 19 nt, Artificial Sequence
  Description of Artificial Sequence: Synthetic oligonucleotide
cucgacuuugaggcgggau

SEQ ID NO: 1201587 - RNA, 19 nt, Artificial Sequence
  Description of Artificial Sequence: Synthetic oligonucleotide
gggagccgagggacccugg

SEQ ID NO: 1201588 - RNA, 19 nt, Artificial Sequence
  Description of Artificial Sequence: Synthetic oligonucleotide
ccgaagucguucacgugcu

SEQ ID NO: 1201589 - RNA, 19 nt, Artificial Sequence
  Description of Artificial Sequence: Synthetic oligonucleotide
gcucggucuccacugcuau

SEQ ID NO: 1201590 - RNA, 19 nt, Artificial Sequence
  Description of Artificial Sequence: Synthetic oligonucleotide
ccgauuugcucggucucca

SEQ ID NO: 1201591 - RNA, 19 nt, Artificial Sequence
  Description of Artificial Sequence: Synthetic oligonucleotide
ccgucaggauggugaugac

SEQ ID NO: 1201592 - RNA, 19 nt, Artificial Sequence
  Description of Artificial Sequence: Synthetic oligonucleotide
cgagggacccuggagaucu

SEQ ID NO: 1201593 - RNA, 19 nt, Artificial Sequence
  Description of Artificial Sequence: Synthetic oligonucleotide
ggcgauccgugaccuuuua

SEQ ID NO: 1201594 - RNA, 19 nt, Artificial Sequence
  Description of Artificial Sequence: Synthetic oligonucleotide
gccugucagcacacaagaa

SEQ ID NO: 1201595 - RNA, 19 nt, Artificial Sequence
  Description of Artificial Sequence: Synthetic oligonucleotide
ccgugaccuuuuaaagucu

SEQ ID NO: 1201596 - RNA, 19 nt, Artificial Sequence
  Description of Artificial Sequence: Synthetic oligonucleotide
cugcgaaguccugcucgua

SEQ ID NO: 1201597 - RNA, 19 nt, Artificial Sequence
  Description of Artificial Sequence: Synthetic oligonucleotide
cacgugcucguuguaucuu

SEQ ID NO: 1201598 - RNA, 19 nt, Artificial Sequence
  Description of Artificial Sequence: Synthetic oligonucleotide
ccgagggacccuggagauc

SEQ ID NO: 1201599 - RNA, 19 nt, Artificial Sequence
  Description of Artificial Sequence: Synthetic oligonucleotide
gggucacucggggccuguc

SEQ ID NO: 1201600 - RNA, 19 nt, Artificial Sequence
  Description of Artificial Sequence: Synthetic oligonucleotide
ccacgagcacaggugguua

SEQ ID NO: 1201601 - RNA, 19 nt, Artificial Sequence
  Description of Artificial Sequence: Synthetic oligonucleotide
ccucaucuugggcaacuuu

SEQ ID NO: 1201602 - RNA, 19 nt, Artificial Sequence
  Description of Artificial Sequence: Synthetic oligonucleotide
cuuggccgauuugcucggu

SEQ ID NO: 1201603 - RNA, 19 nt, Artificial Sequence
  Description of Artificial Sequence: Synthetic oligonucleotide
ggccggagccggggucuag

SEQ ID NO: 1201604 - RNA, 19 nt, Artificial Sequence
  Description of Artificial Sequence: Synthetic oligonucleotide
cauccccuagaagcucauu

SEQ ID NO: 1201605 - RNA, 19 nt, Artificial Sequence
  Description of Artificial Sequence: Synthetic oligonucleotide
cgugcucguuguaucuuuu

SEQ ID NO: 1201606 - RNA, 19 nt, Artificial Sequence
  Description of Artificial Sequence: Synthetic oligonucleotide
cguuggcaaccauuugcuu

SEQ ID NO: 1201607 - RNA, 19 nt, Artificial Sequence
  Description of Artificial Sequence: Synthetic oligonucleotide
ccucgacuuugaggcggga

SEQ ID NO: 1201608 - RNA, 19 nt, Artificial Sequence
  Description of Artificial Sequence: Synthetic oligonucleotide
cggccggagccggggucua

SEQ ID NO: 1201609 - RNA, 19 nt, Artificial Sequence
  Description of Artificial Sequence: Synthetic oligonucleotide
aauaccaccauucagguga

SEQ ID NO: 1201610 - RNA, 19 nt, Artificial Sequence
  Description of Artificial Sequence: Synthetic oligonucleotide
ucaaaaguuucuuagagcc

SEQ ID NO: 1201611 - RNA, 19 nt, Artificial Sequence
  Description of Artificial Sequence: Synthetic oligonucleotide
aacacacacacacauacac

SEQ ID NO: 1201612 - RNA, 19 nt, Artificial Sequence
  Description of Artificial Sequence: Synthetic oligonucleotide
caaaauaccaccauucagg

SEQ ID NO: 1201613 - RNA, 19 nt, Artificial Sequence
  Description of Artificial Sequence: Synthetic oligonucleotide
guuagaaacacacacacac

SEQ ID NO: 1201614 - RNA, 19 nt, Artificial Sequence
  Description of Artificial Sequence: Synthetic oligonucleotide
aagacagaaacacgagacc

SEQ ID NO: 1201615 - RNA, 19 nt, Artificial Sequence
  Description of Artificial Sequence: Synthetic oligonucleotide
aacagcucaauguugagca

SEQ ID NO: 1201616 - RNA, 19 nt, Artificial Sequence
  Description of Artificial Sequence: Synthetic oligonucleotide
ucaauguugagcaggaaug

SEQ ID NO: 1201617 - RNA, 19 nt, Artificial Sequence
  Description of Artificial Sequence: Synthetic oligonucleotide
acuauuaaauaccucuuuc

SEQ ID NO: 1201618 - RNA, 19 nt, Artificial Sequence
  Description of Artificial Sequence: Synthetic oligonucleotide
aaauaccucuuucccaccc

SEQ ID NO: 1201619 - RNA, 19 nt, Artificial Sequence
  Description of Artificial Sequence: Synthetic oligonucleotide
gaaacacacacacacauac

SEQ ID NO: 1201620 - RNA, 19 nt, Artificial Sequence
  Description of Artificial Sequence: Synthetic oligonucleotide
uuaaauaccucuuucccac

SEQ ID NO: 1201621 - RNA, 19 nt, Artificial Sequence
  Description of Artificial Sequence: Synthetic oligonucleotide
auaugcaccuccuuggugg

SEQ ID NO: 1201622 - RNA, 19 nt, Artificial Sequence
  Description of Artificial Sequence: Synthetic oligonucleotide
uuguuagaaacacacacac

SEQ ID NO: 1201623 - RNA, 19 nt, Artificial Sequence
  Description of Artificial Sequence: Synthetic oligonucleotide
auugcguucuaucuccucc

SEQ ID NO: 1201624 - RNA, 19 nt, Artificial Sequence
  Description of Artificial Sequence: Synthetic oligonucleotide
auaccagaaggccaugucc

SEQ ID NO: 1201625 - RNA, 19 nt, Artificial Sequence
  Description of Artificial Sequence: Synthetic oligonucleotide
uuacauggcauaaauuccc

SEQ ID NO: 1201626 - RNA, 19 nt, Artificial Sequence
  Description of Artificial Sequence: Synthetic oligonucleotide
cuuauugcguucuaucucc

SEQ ID NO: 1201627 - RNA, 19 nt, Artificial Sequence
  Description of Artificial Sequence: Synthetic oligonucleotide
uuucuuagagccccaagag

SEQ ID NO: 1201628 - RNA, 19 nt, Artificial Sequence
  Description of Artificial Sequence: Synthetic oligonucleotide
aaaauaccaccauucaggu

SEQ ID NO: 1201629 - RNA, 19 nt, Artificial Sequence
  Description of Artificial Sequence: Synthetic oligonucleotide
agacccaacaucuuugcac

SEQ ID NO: 1201630 - RNA, 19 nt, Artificial Sequence
  Description of Artificial Sequence: Synthetic oligonucleotide
acugauaucaacauggcca

SEQ ID NO: 1201631 - RNA, 19 nt, Artificial Sequence
  Description of Artificial Sequence: Synthetic oligonucleotide
aguagagcggggcauagac

SEQ ID NO: 1201632 - RNA, 19 nt, Artificial Sequence
  Description of Artificial Sequence: Synthetic oligonucleotide
uccaaagccgaguagaugu

SEQ ID NO: 1201633 - RNA, 19 nt, Artificial Sequence
  Description of Artificial Sequence: Synthetic oligonucleotide
aagauucucuccuacagaa

SEQ ID NO: 1201634 - RNA, 19 nt, Artificial Sequence
  Description of Artificial Sequence: Synthetic oligonucleotide
uguagagucuugcaccagg

SEQ ID NO: 1201635 - RNA, 19 nt, Artificial Sequence
  Description of Artificial Sequence: Synthetic oligonucleotide
guagaugugguacaaggag

SEQ ID NO: 1201636 - RNA, 19 nt, Artificial Sequence
  Description of Artificial Sequence: Synthetic oligonucleotide
auugcagagagagaggagg

SEQ ID NO: 1201637 - RNA, 19 nt, Artificial Sequence
  Description of Artificial Sequence: Synthetic oligonucleotide
ugugcuugaccucaggugu

SEQ ID NO: 1201638 - RNA, 19 nt, Artificial Sequence
  Description of Artificial Sequence: Synthetic oligonucleotide
aagcuaagagucaggaccc

SEQ ID NO: 1201639 - RNA, 19 nt, Artificial Sequence
  Description of Artificial Sequence: Synthetic oligonucleotide
uugucuacggaaacucugg

SEQ ID NO: 1201640 - RNA, 19 nt, Artificial Sequence
  Description of Artificial Sequence: Synthetic oligonucleotide
uggauaugcaccuccuugg

SEQ ID NO: 1201641 - RNA, 19 nt, Artificial Sequence
  Description of Artificial Sequence: Synthetic oligonucleotide
gcacauuugcuuuacaugg

SEQ ID NO: 1201642 - RNA, 19 nt, Artificial Sequence
  Description of Artificial Sequence: Synthetic oligonucleotide
uuacaacuauuaaauaccu

SEQ ID NO: 1201643 - RNA, 19 nt, Artificial Sequence
  Description of Artificial Sequence: Synthetic oligonucleotide
gguuacaacuauuaaauac

SEQ ID NO: 1201644 - RNA, 19 nt, Artificial Sequence
  Description of Artificial Sequence: Synthetic oligonucleotide
uagaaacacacacacacau

SEQ ID NO: 1201645 - RNA, 19 nt, Artificial Sequence
  Description of Artificial Sequence: Synthetic oligonucleotide
cauaaauucccacugccac

SEQ ID NO: 1201646 - RNA, 19 nt, Artificial Sequence
  Description of Artificial Sequence: Synthetic oligonucleotide
guucauucgagcacgauag

SEQ ID NO: 1201647 - RNA, 19 nt, Artificial Sequence
  Description of Artificial Sequence: Synthetic oligonucleotide
caaaguucaggucacuggc

SEQ ID NO: 1201648 - RNA, 19 nt, Artificial Sequence
  Description of Artificial Sequence: Synthetic oligonucleotide
gucacggccaguuaacacg

SEQ ID NO: 1201649 - RNA, 19 nt, Artificial Sequence
  Description of Artificial Sequence: Synthetic oligonucleotide
auacacaacaaaauaccac

SEQ ID NO: 1201650 - RNA, 19 nt, Artificial Sequence
  Description of Artificial Sequence: Synthetic oligonucleotide
ucaaagguugucuacggaa

SEQ ID NO: 1201651 - RNA, 19 nt, Artificial Sequence
  Description of Artificial Sequence: Synthetic oligonucleotide
cuaugcucgauauggcucg

SEQ ID NO: 1201652 - RNA, 19 nt, Artificial Sequence
  Description of Artificial Sequence: Synthetic oligonucleotide
cauucgagcacgauagagc

SEQ ID NO: 1201653 - RNA, 19 nt, Artificial Sequence
  Description of Artificial Sequence: Synthetic oligonucleotide
aaaguuggagaccaagguu

SEQ ID NO: 1201654 - RNA, 19 nt, Artificial Sequence
  Description of Artificial Sequence: Synthetic oligonucleotide
ucagaaagcuaagagucag

SEQ ID NO: 1201655 - RNA, 19 nt, Artificial Sequence
  Description of Artificial Sequence: Synthetic oligonucleotide
agcacauuugcuuuacaug

SEQ ID NO: 1201656 - RNA, 19 nt, Artificial Sequence
  Description of Artificial Sequence: Synthetic oligonucleotide
agccucaaaaguuucuuag

SEQ ID NO: 1201657 - RNA, 19 nt, Artificial Sequence
  Description of Artificial Sequence: Synthetic oligonucleotide
cagaggaaaacagucacgg

SEQ ID NO: 1201658 - RNA, 19 nt, Artificial Sequence
  Description of Artificial Sequence: Synthetic oligonucleotide
uuagaaacacacacacaca

SEQ ID NO: 1201659 - RNA, 19 nt, Artificial Sequence
  Description of Artificial Sequence: Synthetic oligonucleotide
uccucauaaacucagcauu

SEQ ID NO: 1201660 - RNA, 19 nt, Artificial Sequence
  Description of Artificial Sequence: Synthetic oligonucleotide
auucgagcacgauagagcu

SEQ ID NO: 1201661 - RNA, 19 nt, Artificial Sequence
  Description of Artificial Sequence: Synthetic oligonucleotide
ugacuguuagauaauguua

SEQ ID NO: 1201662 - RNA, 19 nt, Artificial Sequence
  Description of Artificial Sequence: Synthetic oligonucleotide
cucgauauggcucggcucc

SEQ ID NO: 1201663 - RNA, 19 nt, Artificial Sequence
  Description of Artificial Sequence: Synthetic oligonucleotide
agcacgauagagcuguuug

SEQ ID NO: 1201664 - RNA, 19 nt, Artificial Sequence
  Description of Artificial Sequence: Synthetic oligonucleotide
cucaggaugagugagcccc

SEQ ID NO: 1201665 - RNA, 19 nt, Artificial Sequence
  Description of Artificial Sequence: Synthetic oligonucleotide
auccuugugguccuguguc

SEQ ID NO: 1201666 - RNA, 19 nt, Artificial Sequence
  Description of Artificial Sequence: Synthetic oligonucleotide
ucacggccaguuaacacgg

SEQ ID NO: 1201667 - RNA, 19 nt, Artificial Sequence
  Description of Artificial Sequence: Synthetic oligonucleotide
uccaucaccggacugggcu

SEQ ID NO: 1201668 - RNA, 19 nt, Artificial Sequence
  Description of Artificial Sequence: Synthetic oligonucleotide
agaggaaaacagucacggc

SEQ ID NO: 1201669 - RNA, 19 nt, Artificial Sequence
  Description of Artificial Sequence: Synthetic oligonucleotide
uguucauucgagcacgaua

SEQ ID NO: 1201670 - RNA, 19 nt, Artificial Sequence
  Description of Artificial Sequence: Synthetic oligonucleotide
aacggguguacgugugggc

SEQ ID NO: 1201671 - RNA, 19 nt, Artificial Sequence
  Description of Artificial Sequence: Synthetic oligonucleotide
accagcuuaaagccuuccc

SEQ ID NO: 1201672 - RNA, 19 nt, Artificial Sequence
  Description of Artificial Sequence: Synthetic oligonucleotide
uaauguuauuuauuauuuc

SEQ ID NO: 1201673 - RNA, 19 nt, Artificial Sequence
  Description of Artificial Sequence: Synthetic oligonucleotide
acggaugccaaacaaacaa

SEQ ID NO: 1201674 - RNA, 19 nt, Artificial Sequence
  Description of Artificial Sequence: Synthetic oligonucleotide
aacagucacggccaguuaa

SEQ ID NO: 1201675 - RNA, 19 nt, Artificial Sequence
  Description of Artificial Sequence: Synthetic oligonucleotide
acucaaagguugucuacgg

SEQ ID NO: 1201676 - RNA, 19 nt, Artificial Sequence
  Description of Artificial Sequence: Synthetic oligonucleotide
uuaacacggaugccaaaca

SEQ ID NO: 1201677 - RNA, 19 nt, Artificial Sequence
  Description of Artificial Sequence: Synthetic oligonucleotide
aggaaugcagucuuagccu

SEQ ID NO: 1201678 - RNA, 19 nt, Artificial Sequence
  Description of Artificial Sequence: Synthetic oligonucleotide
uucuuagagccccaagaga

SEQ ID NO: 1201679 - RNA, 19 nt, Artificial Sequence
  Description of Artificial Sequence: Synthetic oligonucleotide
ucauucgagcacgauagag

SEQ ID NO: 1201680 - RNA, 19 nt, Artificial Sequence
  Description of Artificial Sequence: Synthetic oligonucleotide
gaguguucauucgagcacg

SEQ ID NO: 1201681 - RNA, 19 nt, Artificial Sequence
  Description of Artificial Sequence: Synthetic oligonucleotide
caaaaguuucuuagagccc

SEQ ID NO: 1201682 - RNA, 19 nt, Artificial Sequence
  Description of Artificial Sequence: Synthetic oligonucleotide
acgauagagcuguuugaac

SEQ ID NO: 1201683 - RNA, 19 nt, Artificial Sequence
  Description of Artificial Sequence: Synthetic oligonucleotide
ucacauagugcuguguggc

SEQ ID NO: 1201684 - RNA, 19 nt, Artificial Sequence
  Description of Artificial Sequence: Synthetic oligonucleotide
aaguuccucauaaacucag

SEQ ID NO: 1201685 - RNA, 19 nt, Artificial Sequence
  Description of Artificial Sequence: Synthetic oligonucleotide
caagguuacaacuauuaaa

SEQ ID NO: 1201686 - RNA, 19 nt, Artificial Sequence
  Description of Artificial Sequence: Synthetic oligonucleotide
gcuguuugaacuugguggg

SEQ ID NO: 1201687 - RNA, 19 nt, Artificial Sequence
  Description of Artificial Sequence: Synthetic oligonucleotide
auaaauucccacugccacu

SEQ ID NO: 1201688 - RNA, 19 nt, Artificial Sequence
  Description of Artificial Sequence: Synthetic oligonucleotide
aaaagacagcccaacuuug

SEQ ID NO: 1201689 - RNA, 19 nt, Artificial Sequence
  Description of Artificial Sequence: Synthetic oligonucleotide
agucacggccaguuaacac

SEQ ID NO: 1201690 - RNA, 19 nt, Artificial Sequence
  Description of Artificial Sequence: Synthetic oligonucleotide
cuacggaaacucuggaggc

SEQ ID NO: 1201691 - RNA, 19 nt, Artificial Sequence
  Description of Artificial Sequence: Synthetic oligonucleotide
uguguaagggaugaucuuc

SEQ ID NO: 1201692 - RNA, 19 nt, Artificial Sequence
  Description of Artificial Sequence: Synthetic oligonucleotide
uaucaacauggccaugaca

SEQ ID NO: 1201693 - RNA, 19 nt, Artificial Sequence
  Description of Artificial Sequence: Synthetic oligonucleotide
ucgagcacgauagagcugu

SEQ ID NO: 1201694 - RNA, 19 nt, Artificial Sequence
  Description of Artificial Sequence: Synthetic oligonucleotide
uucggugcaguuccucagg

SEQ ID NO: 1201695 - RNA, 19 nt, Artificial Sequence
  Description of Artificial Sequence: Synthetic oligonucleotide
aauaccucuuucccaccca

SEQ ID NO: 1201696 - RNA, 19 nt, Artificial Sequence
  Description of Artificial Sequence: Synthetic oligonucleotide
ugucucugcagguguagag

SEQ ID NO: 1201697 - RNA, 19 nt, Artificial Sequence
  Description of Artificial Sequence: Synthetic oligonucleotide
agauaauguuauuuauuau

SEQ ID NO: 1201698 - RNA, 19 nt, Artificial Sequence
  Description of Artificial Sequence: Synthetic oligonucleotide
gugucaagcaucucccucc

SEQ ID NO: 1201699 - RNA, 19 nt, Artificial Sequence
  Description of Artificial Sequence: Synthetic oligonucleotide
aauguugagcaggaaugca

SEQ ID NO: 1201700 - RNA, 19 nt, Artificial Sequence
  Description of Artificial Sequence: Synthetic oligonucleotide
gacccaacaucuuugcaca

SEQ ID NO: 1201701 - RNA, 19 nt, Artificial Sequence
  Description of Artificial Sequence: Synthetic oligonucleotide
guuaacacggaugccaaac

SEQ ID NO: 1201702 - RNA, 19 nt, Artificial Sequence
  Description of Artificial Sequence: Synthetic oligonucleotide
ugugucaagcaucucccuc

SEQ ID NO: 1201703 - RNA, 19 nt, Artificial Sequence
  Description of Artificial Sequence: Synthetic oligonucleotide
caagcaucucccuccauug

SEQ ID NO: 1201704 - RNA, 19 nt, Artificial Sequence
  Description of Artificial Sequence: Synthetic oligonucleotide
uaacacggaugccaaacaa

SEQ ID NO: 1201705 - RNA, 19 nt, Artificial Sequence
  Description of Artificial Sequence: Synthetic oligonucleotide
cacucaaagguugucuacg

SEQ ID NO: 1201706 - RNA, 19 nt, Artificial Sequence
  Description of Artificial Sequence: Synthetic oligonucleotide
agccgaguagaugugguac

SEQ ID NO: 1201707 - RNA, 19 nt, Artificial Sequence
  Description of Artificial Sequence: Synthetic oligonucleotide
uggauagaguucacagccc

SEQ ID NO: 1201708 - RNA, 19 nt, Artificial Sequence
  Description of Artificial Sequence: Synthetic oligonucleotide
uacaacuauuaaauaccuc

SEQ ID NO: 1201709 - RNA, 19 nt, Artificial Sequence
  Description of Artificial Sequence: Synthetic oligonucleotide
uguggugggcguuccauca

SEQ ID NO: 1201710 - RNA, 19 nt, Artificial Sequence
  Description of Artificial Sequence: Synthetic oligonucleotide
aacucagcauucucugccu

SEQ ID NO: 1201711 - RNA, 19 nt, Artificial Sequence
  Description of Artificial Sequence: Synthetic oligonucleotide
gauaugcaccuccuuggug

SEQ ID NO: 1201712 - RNA, 19 nt, Artificial Sequence
  Description of Artificial Sequence: Synthetic oligonucleotide
uuccucauaaacucagcau

SEQ ID NO: 1201713 - RNA, 19 nt, Artificial Sequence
  Description of Artificial Sequence: Synthetic oligonucleotide
uggcauaaauucccacugc

SEQ ID NO: 1201714 - RNA, 19 nt, Artificial Sequence
  Description of Artificial Sequence: Synthetic oligonucleotide
uuucggugcaguuccucag

SEQ ID NO: 1201715 - RNA, 19 nt, Artificial Sequence
  Description of Artificial Sequence: Synthetic oligonucleotide
uuagagccccaagagaaga

SEQ ID NO: 1201716 - RNA, 19 nt, Artificial Sequence
  Description of Artificial Sequence: Synthetic oligonucleotide
gguuuuggggcucuacagg

SEQ ID NO: 1201717 - RNA, 19 nt, Artificial Sequence
  Description of Artificial Sequence: Synthetic oligonucleotide
aguuucuuagagccccaag

SEQ ID NO: 1201718 - RNA, 19 nt, Artificial Sequence
  Description of Artificial Sequence: Synthetic oligonucleotide
aggcaagauucucuccuac

SEQ ID NO: 1201719 - RNA, 19 nt, Artificial Sequence
  Description of Artificial Sequence: Synthetic oligonucleotide
ucggugcaguuccucaggg

SEQ ID NO: 1201720 - RNA, 19 nt, Artificial Sequence
  Description of Artificial Sequence: Synthetic oligonucleotide
cauagugcuguguggccgg

SEQ ID NO: 1201721 - RNA, 19 nt, Artificial Sequence
  Description of Artificial Sequence: Synthetic oligonucleotide
cacauuugcuuuacauggc

SEQ ID NO: 1201722 - RNA, 19 nt, Artificial Sequence
  Description of Artificial Sequence: Synthetic oligonucleotide
uguguggccgguguguaag

SEQ ID NO: 1201723 - RNA, 19 nt, Artificial Sequence
  Description of Artificial Sequence: Synthetic oligonucleotide
caggcuaccaggccgcugg

SEQ ID NO: 1201724 - RNA, 19 nt, Artificial Sequence
  Description of Artificial Sequence: Synthetic oligonucleotide
cacugauaucaacauggcc

SEQ ID NO: 1201725 - RNA, 19 nt, Artificial Sequence
  Description of Artificial Sequence: Synthetic oligonucleotide
uacgugugggccaccagca

SEQ ID NO: 1201726 - RNA, 19 nt, Artificial Sequence
  Description of Artificial Sequence: Synthetic oligonucleotide
cacacacacacauacacaa

SEQ ID NO: 1201727 - RNA, 19 nt, Artificial Sequence
  Description of Artificial Sequence: Synthetic oligonucleotide
agagucuugcaccaggcua

SEQ ID NO: 1201728 - RNA, 19 nt, Artificial Sequence
  Description of Artificial Sequence: Synthetic oligonucleotide
aggucacccagguaacggg

SEQ ID NO: 1201729 - RNA, 19 nt, Artificial Sequence
  Description of Artificial Sequence: Synthetic oligonucleotide
uaacggguguacguguggg

SEQ ID NO: 1201730 - RNA, 19 nt, Artificial Sequence
  Description of Artificial Sequence: Synthetic oligonucleotide
gaaggcccuucauggauag

SEQ ID NO: 1201731 - RNA, 19 nt, Artificial Sequence
  Description of Artificial Sequence: Synthetic oligonucleotide
uguuugaacuugguggggu

SEQ ID NO: 1201732 - RNA, 19 nt, Artificial Sequence
  Description of Artificial Sequence: Synthetic oligonucleotide
ggcauaaauucccacugcc

SEQ ID NO: 1201733 - RNA, 19 nt, Artificial Sequence
  Description of Artificial Sequence: Synthetic oligonucleotide
cuuagagccccaagagaag

SEQ ID NO: 1201734 - RNA, 19 nt, Artificial Sequence
  Description of Artificial Sequence: Synthetic oligonucleotide
cagaaagcuaagagucagg

SEQ ID NO: 1201735 - RNA, 19 nt, Artificial Sequence
  Description of Artificial Sequence: Synthetic oligonucleotide
aggugucaucuccagagug

SEQ ID NO: 1201736 - RNA, 19 nt, Artificial Sequence
  Description of Artificial Sequence: Synthetic oligonucleotide
auucaggugagaugcggga

SEQ ID NO: 1201737 - RNA, 19 nt, Artificial Sequence
  Description of Artificial Sequence: Synthetic oligonucleotide
uaaauaccucuuucccacc

SEQ ID NO: 1201738 - RNA, 19 nt, Artificial Sequence
  Description of Artificial Sequence: Synthetic oligonucleotide
ccucaaaaguuucuuagag

SEQ ID NO: 1201739 - RNA, 19 nt, Artificial Sequence
  Description of Artificial Sequence: Synthetic oligonucleotide
aggcccuucauggauagag

SEQ ID NO: 1201740 - RNA, 19 nt, Artificial Sequence
  Description of Artificial Sequence: Synthetic oligonucleotide
ucaggugagaugcgggaaa

SEQ ID NO: 1201741 - RNA, 19 nt, Artificial Sequence
  Description of Artificial Sequence: Synthetic oligonucleotide
uuagugacuguuagauaau

SEQ ID NO: 1201742 - RNA, 19 nt, Artificial Sequence
  Description of Artificial Sequence: Synthetic oligonucleotide
guugucuacggaaacucug

SEQ ID NO: 1201743 - RNA, 19 nt, Artificial Sequence
  Description of Artificial Sequence: Synthetic oligonucleotide
ugggcguuccaucaccgga

SEQ ID NO: 1201744 - RNA, 19 nt, Artificial Sequence
  Description of Artificial Sequence: Synthetic oligonucleotide
gcuagugcugaucuggggc

SEQ ID NO: 1201745 - RNA, 19 nt, Artificial Sequence
  Description of Artificial Sequence: Synthetic oligonucleotide
cagaguguucauucgagca

SEQ ID NO: 1201746 - RNA, 19 nt, Artificial Sequence
  Description of Artificial Sequence: Synthetic oligonucleotide
cacacaaaaguuggagacc

SEQ ID NO: 1201747 - RNA, 19 nt, Artificial Sequence
  Description of Artificial Sequence: Synthetic oligonucleotide
ugcucgauauggcucggcu

SEQ ID NO: 1201748 - RNA, 19 nt, Artificial Sequence
  Description of Artificial Sequence: Synthetic oligonucleotide
aaagacagcccaacuuugu

SEQ ID NO: 1201749 - RNA, 19 nt, Artificial Sequence
  Description of Artificial Sequence: Synthetic oligonucleotide
guaacggguguacgugugg

SEQ ID NO: 1201750 - RNA, 19 nt, Artificial Sequence
  Description of Artificial Sequence: Synthetic oligonucleotide
cuuaaagccuucccugguc

SEQ ID NO: 1201751 - RNA, 19 nt, Artificial Sequence
  Description of Artificial Sequence: Synthetic oligonucleotide
gaacuuggugggguugucg

SEQ ID NO: 1201752 - RNA, 19 nt, Artificial Sequence
  Description of Artificial Sequence: Synthetic oligonucleotide
uucuguccgcuuuaggcuc

SEQ ID NO: 1201753 - RNA, 19 nt, Artificial Sequence
  Description of Artificial Sequence: Synthetic oligonucleotide
agaccaagguuacaacuau

SEQ ID NO: 1201754 - RNA, 19 nt, Artificial Sequence
  Description of Artificial Sequence: Synthetic oligonucleotide
ugcuacuucaggccauggu

SEQ ID NO: 1201755 - RNA, 19 nt, Artificial Sequence
  Description of Artificial Sequence: Synthetic oligonucleotide
uggguucugcuuauugcgu

SEQ ID NO: 1201756 - RNA, 19 nt, Artificial Sequence
  Description of Artificial Sequence: Synthetic oligonucleotide
aaagccgaguagauguggu

SEQ ID NO: 1201757 - RNA, 19 nt, Artificial Sequence
  Description of Artificial Sequence: Synthetic oligonucleotide
gaggcuacuggcgacugug

SEQ ID NO: 1201758 - RNA, 19 nt, Artificial Sequence
  Description of Artificial Sequence: Synthetic oligonucleotide
aacacggaugccaaacaaa

SEQ ID NO: 1201759 - RNA, 19 nt, Artificial Sequence
  Description of Artificial Sequence: Synthetic oligonucleotide
gauauggcucggcuccggc

SEQ ID NO: 1201760 - RNA, 19 nt, Artificial Sequence
  Description of Artificial Sequence: Synthetic oligonucleotide
aaacacacacacacauaca

SEQ ID NO: 1201761 - RNA, 19 nt, Artificial Sequence
  Description of Artificial Sequence: Synthetic oligonucleotide
uagagucuugcaccaggcu

SEQ ID NO: 1201762 - RNA, 19 nt, Artificial Sequence
  Description of Artificial Sequence: Synthetic oligonucleotide
aauucccacugccacuguu

SEQ ID NO: 1201763 - RNA, 19 nt, Artificial Sequence
  Description of Artificial Sequence: Synthetic oligonucleotide
uuauugcguucuaucuccu

SEQ ID NO: 1201764 - RNA, 19 nt, Artificial Sequence
  Description of Artificial Sequence: Synthetic oligonucleotide
acagucacggccaguuaac

SEQ ID NO: 1201765 - RNA, 19 nt, Artificial Sequence
  Description of Artificial Sequence: Synthetic oligonucleotide
ugguacaaggaggccauca

SEQ ID NO: 1201766 - RNA, 19 nt, Artificial Sequence
  Description of Artificial Sequence: Synthetic oligonucleotide
ugcagguguagagucuugc

SEQ ID NO: 1201767 - RNA, 19 nt, Artificial Sequence
  Description of Artificial Sequence: Synthetic oligonucleotide
uggugggcguuccaucacc

SEQ ID NO: 1201768 - RNA, 19 nt, Artificial Sequence
  Description of Artificial Sequence: Synthetic oligonucleotide
ccggcuaugcucgauaugg

SEQ ID NO: 1201769 - RNA, 19 nt, Artificial Sequence
  Description of Artificial Sequence: Synthetic oligonucleotide
cauaccagaaggccauguc

SEQ ID NO: 1201770 - RNA, 19 nt, Artificial Sequence
  Description of Artificial Sequence: Synthetic oligonucleotide
uuuaggcucccggcuaugc

SEQ ID NO: 1201771 - RNA, 19 nt, Artificial Sequence
  Description of Artificial Sequence: Synthetic oligonucleotide
ucuguccgcuuuaggcucc

SEQ ID NO: 1201772 - RNA, 19 nt, Artificial Sequence
  Description of Artificial Sequence: Synthetic oligonucleotide
cagggcagccuuucggugc

SEQ ID NO: 1201773 - RNA, 19 nt, Artificial Sequence
  Description of Artificial Sequence: Synthetic oligonucleotide
uucauucgagcacgauaga

SEQ ID NO: 1201774 - RNA, 19 nt, Artificial Sequence
  Description of Artificial Sequence: Synthetic oligonucleotide
gagucaggacccaucggag

SEQ ID NO: 1201775 - RNA, 19 nt, Artificial Sequence
  Description of Artificial Sequence: Synthetic oligonucleotide
uguggccgguguguaaggg

SEQ ID NO: 1201776 - RNA, 19 nt, Artificial Sequence
  Description of Artificial Sequence: Synthetic oligonucleotide
gcucacauagugcugugug

SEQ ID NO: 1201777 - RNA, 19 nt, Artificial Sequence
  Description of Artificial Sequence: Synthetic oligonucleotide
uggccgguguguaagggau

SEQ ID NO: 1201778 - RNA, 19 nt, Artificial Sequence
  Description of Artificial Sequence: Synthetic oligonucleotide
gucaggacccaucggagga

SEQ ID NO: 1201779 - RNA, 19 nt, Artificial Sequence
  Description of Artificial Sequence: Synthetic oligonucleotide
gacaaguccuugggcaugc

SEQ ID NO: 1201780 - RNA, 19 nt, Artificial Sequence
  Description of Artificial Sequence: Synthetic oligonucleotide
gagcuagugcugaucuggg

SEQ ID NO: 1201781 - RNA, 19 nt, Artificial Sequence
  Description of Artificial Sequence: Synthetic oligonucleotide
acacacacacauacacaac

SEQ ID NO: 1201782 - RNA, 19 nt, Artificial Sequence
  Description of Artificial Sequence: Synthetic oligonucleotide
guagagucuugcaccaggc

SEQ ID NO: 1201783 - RNA, 19 nt, Artificial Sequence
  Description of Artificial Sequence: Synthetic oligonucleotide
ggcucuacaggaguugggg

SEQ ID NO: 1201784 - RNA, 19 nt, Artificial Sequence
  Description of Artificial Sequence: Synthetic oligonucleotide
accucauggagguggcuca

SEQ ID NO: 1201785 - RNA, 19 nt, Artificial Sequence
  Description of Artificial Sequence: Synthetic oligonucleotide
ugucacccugugcuugacc

SEQ ID NO: 1201786 - RNA, 19 nt, Artificial Sequence
  Description of Artificial Sequence: Synthetic oligonucleotide
accaagguuacaacuauua

SEQ ID NO: 1201787 - RNA, 19 nt, Artificial Sequence
  Description of Artificial Sequence: Synthetic oligonucleotide
gagaccaagguuacaacua

SEQ ID NO: 1201788 - RNA, 19 nt, Artificial Sequence
  Description of Artificial Sequence: Synthetic oligonucleotide
ucucccuccauugcagaga

SEQ ID NO: 1201789 - RNA, 19 nt, Artificial Sequence
  Description of Artificial Sequence: Synthetic oligonucleotide
agguaacggguguacgugu

SEQ ID NO: 1201790 - RNA, 19 nt, Artificial Sequence
  Description of Artificial Sequence: Synthetic oligonucleotide
ggugccugggaugagcuag

SEQ ID NO: 1201791 - RNA, 19 nt, Artificial Sequence
  Description of Artificial Sequence: Synthetic oligonucleotide
gugacuguuagauaauguu

SEQ ID NO: 1201792 - RNA, 19 nt, Artificial Sequence
  Description of Artificial Sequence: Synthetic oligonucleotide
aaaguuucuuagagcccca

SEQ ID NO: 1201793 - RNA, 19 nt, Artificial Sequence
  Description of Artificial Sequence: Synthetic oligonucleotide
guugucgauguuggggaag

SEQ ID NO: 1201794 - RNA, 19 nt, Artificial Sequence
  Description of Artificial Sequence: Synthetic oligonucleotide
uauugcguucuaucuccuc

SEQ ID NO: 1201795 - RNA, 19 nt, Artificial Sequence
  Description of Artificial Sequence: Synthetic oligonucleotide
gggaccauaccagaaggcc

SEQ ID NO: 1201796 - RNA, 19 nt, Artificial Sequence
  Description of Artificial Sequence: Synthetic oligonucleotide
auaugcuuuuggugaggga

SEQ ID NO: 1201797 - RNA, 19 nt, Artificial Sequence
  Description of Artificial Sequence: Synthetic oligonucleotide
caaaagacagcccaacuuu

SEQ ID NO: 1201798 - RNA, 19 nt, Artificial Sequence
  Description of Artificial Sequence: Synthetic oligonucleotide
ggugcaguuccucagggaa

SEQ ID NO: 1201799 - RNA, 19 nt, Artificial Sequence
  Description of Artificial Sequence: Synthetic oligonucleotide
acgagacccaacaucuuug

SEQ ID NO: 1201800 - RNA, 19 nt, Artificial Sequence
  Description of Artificial Sequence: Synthetic oligonucleotide
augagcuagugcugaucug

SEQ ID NO: 1201801 - RNA, 19 nt, Artificial Sequence
  Description of Artificial Sequence: Synthetic oligonucleotide
ugagugagccccaccucau

SEQ ID NO: 1201802 - RNA, 19 nt, Artificial Sequence
  Description of Artificial Sequence: Synthetic oligonucleotide
gguacaaggaggccaucac

SEQ ID NO: 1201803 - RNA, 19 nt, Artificial Sequence
  Description of Artificial Sequence: Synthetic oligonucleotide
ggaaugcagucuuagccuc

SEQ ID NO: 1201804 - RNA, 19 nt, Artificial Sequence
  Description of Artificial Sequence: Synthetic oligonucleotide
gucuaggagccucaaaagu

SEQ ID NO: 1201805 - RNA, 19 nt, Artificial Sequence
  Description of Artificial Sequence: Synthetic oligonucleotide
uaugcucgauauggcucgg

SEQ ID NO: 1201806 - RNA, 19 nt, Artificial Sequence
  Description of Artificial Sequence: Synthetic oligonucleotide
uacggaaacucuggaggcu

SEQ ID NO: 1201807 - RNA, 19 nt, Artificial Sequence
  Description of Artificial Sequence: Synthetic oligonucleotide
gcuacuggcgacugugagc

SEQ ID NO: 1201808 - RNA, 19 nt, Artificial Sequence
  Description of Artificial Sequence: Synthetic oligonucleotide
aaacagucacggccaguua

SEQ ID NO: 1201809 - RNA, 19 nt, Artificial Sequence
  Description of Artificial Sequence: Synthetic oligonucleotide
cuguuugaacuuggugggg

SEQ ID NO: 1201810 - RNA, 19 nt, Artificial Sequence
  Description of Artificial Sequence: Synthetic oligonucleotide
uucaggugagaugcgggaa

SEQ ID NO: 1201811 - RNA, 19 nt, Artificial Sequence
  Description of Artificial Sequence: Synthetic oligonucleotide
ucgauauggcucggcuccg

SEQ ID NO: 1201812 - RNA, 19 nt, Artificial Sequence
  Description of Artificial Sequence: Synthetic oligonucleotide
acacacacacacauacaca

SEQ ID NO: 1201813 - RNA, 19 nt, Artificial Sequence
  Description of Artificial Sequence: Synthetic oligonucleotide
ggguugucgauguugggga

SEQ ID NO: 1201814 - RNA, 19 nt, Artificial Sequence
  Description of Artificial Sequence: Synthetic oligonucleotide
caccaggcuaccaggccgc

SEQ ID NO: 1201815 - RNA, 19 nt, Artificial Sequence
  Description of Artificial Sequence: Synthetic oligonucleotide
aguuaacacggaugccaaa

SEQ ID NO: 1201816 - RNA, 19 nt, Artificial Sequence
  Description of Artificial Sequence: Synthetic oligonucleotide
ugugaggggcucugauccu

SEQ ID NO: 1201817 - RNA, 19 nt, Artificial Sequence
  Description of Artificial Sequence: Synthetic oligonucleotide
ggugagaugcgggaaauaa

SEQ ID NO: 1201818 - RNA, 19 nt, Artificial Sequence
  Description of Artificial Sequence: Synthetic oligonucleotide
acggccaguuaacacggau

SEQ ID NO: 1201819 - RNA, 19 nt, Artificial Sequence
  Description of Artificial Sequence: Synthetic oligonucleotide
gagugagccccaccucaug

SEQ ID NO: 1201820 - RNA, 19 nt, Artificial Sequence
  Description of Artificial Sequence: Synthetic oligonucleotide
gagaaggcccuucauggau

SEQ ID NO: 1201821 - RNA, 19 nt, Artificial Sequence
  Description of Artificial Sequence: Synthetic oligonucleotide
caugguuuuggggcucuac

SEQ ID NO: 1201822 - RNA, 19 nt, Artificial Sequence
  Description of Artificial Sequence: Synthetic oligonucleotide
aaguuucuuagagccccaa

SEQ ID NO: 1201823 - RNA, 19 nt, Artificial Sequence
  Description of Artificial Sequence: Synthetic oligonucleotide
augcugucgggcuguggug

SEQ ID NO: 1201824 - RNA, 19 nt, Artificial Sequence
  Description of Artificial Sequence: Synthetic oligonucleotide
uggcgagggcccuccaucu

SEQ ID NO: 1201825 - RNA, 19 nt, Artificial Sequence
  Description of Artificial Sequence: Synthetic oligonucleotide
gugggcguuccaucaccgg

SEQ ID NO: 1201826 - RNA, 19 nt, Artificial Sequence
  Description of Artificial Sequence: Synthetic oligonucleotide
cucaaagguugucuacgga

SEQ ID NO: 1201827 - RNA, 19 nt, Artificial Sequence
  Description of Artificial Sequence: Synthetic oligonucleotide
cacggaugccaaacaaaca

SEQ ID NO: 1201828 - RNA, 19 nt, Artificial Sequence
  Description of Artificial Sequence: Synthetic oligonucleotide
caguuaacacggaugccaa

SEQ ID NO: 1201829 - RNA, 19 nt, Artificial Sequence
  Description of Artificial Sequence: Synthetic oligonucleotide
ggauaugcuuuuggugagg

SEQ ID NO: 1201830 - RNA, 19 nt, Artificial Sequence
  Description of Artificial Sequence: Synthetic oligonucleotide
caucaccggacugggcugg

SEQ ID NO: 1201831 - RNA, 19 nt, Artificial Sequence
  Description of Artificial Sequence: Synthetic oligonucleotide
uguugccaucagaaagcua

SEQ ID NO: 1201832 - RNA, 19 nt, Artificial Sequence
  Description of Artificial Sequence: Synthetic oligonucleotide
ccugggaugagcuagugcu

SEQ ID NO: 1201833 - RNA, 19 nt, Artificial Sequence
  Description of Artificial Sequence: Synthetic oligonucleotide
augcucgauauggcucggc

SEQ ID NO: 1201834 - RNA, 19 nt, Artificial Sequence
  Description of Artificial Sequence: Synthetic oligonucleotide
gcucuacaggaguuggggc

SEQ ID NO: 1201835 - RNA, 19 nt, Artificial Sequence
  Description of Artificial Sequence: Synthetic oligonucleotide
cacgauagagcuguuugaa

SEQ ID NO: 1201836 - RNA, 19 nt, Artificial Sequence
  Description of Artificial Sequence: Synthetic oligonucleotide
guguggccgguguguaagg

SEQ ID NO: 1201837 - RNA, 19 nt, Artificial Sequence
  Description of Artificial Sequence: Synthetic oligonucleotide
agaaacacacacacacaua

SEQ ID NO: 1201838 - RNA, 19 nt, Artificial Sequence
  Description of Artificial Sequence: Synthetic oligonucleotide
caugcugucgggcuguggu

SEQ ID NO: 1201839 - RNA, 19 nt, Artificial Sequence
  Description of Artificial Sequence: Synthetic oligonucleotide
accauucaggugagaugcg

SEQ ID NO: 1201840 - RNA, 19 nt, Artificial Sequence
  Description of Artificial Sequence: Synthetic oligonucleotide
ggacccaucggaggagugg

SEQ ID NO: 1201841 - RNA, 19 nt, Artificial Sequence
  Description of Artificial Sequence: Synthetic oligonucleotide
caacuauuaaauaccucuu

SEQ ID NO: 1201842 - RNA, 19 nt, Artificial Sequence
  Description of Artificial Sequence: Synthetic oligonucleotide
ucccggcuaugcucgauau

SEQ ID NO: 1201843 - RNA, 19 nt, Artificial Sequence
  Description of Artificial Sequence: Synthetic oligonucleotide
cuguggugggcguuccauc

SEQ ID NO: 1201844 - RNA, 19 nt, Artificial Sequence
  Description of Artificial Sequence: Synthetic oligonucleotide
cccaccccucaaaagacag

SEQ ID NO: 1201845 - RNA, 19 nt, Artificial Sequence
  Description of Artificial Sequence: Synthetic oligonucleotide
gcauaaauucccacugcca

SEQ ID NO: 1201846 - RNA, 19 nt, Artificial Sequence
  Description of Artificial Sequence: Synthetic oligonucleotide
ccaucagaaagcuaagagu

SEQ ID NO: 1201847 - RNA, 19 nt, Artificial Sequence
  Description of Artificial Sequence: Synthetic oligonucleotide
uggaggcuacuggcgacug

SEQ ID NO: 1201848 - RNA, 19 nt, Artificial Sequence
  Description of Artificial Sequence: Synthetic oligonucleotide
gguaacggguguacgugug

SEQ ID NO: 1201849 - RNA, 19 nt, Artificial Sequence
  Description of Artificial Sequence: Synthetic oligonucleotide
acagcccaacuuuguuaga

SEQ ID NO: 1201850 - RNA, 19 nt, Artificial Sequence
  Description of Artificial Sequence: Synthetic oligonucleotide
ggugggcguuccaucaccg

SEQ ID NO: 1201851 - RNA, 19 nt, Artificial Sequence
  Description of Artificial Sequence: Synthetic oligonucleotide
cauucucugccuggauaug

SEQ ID NO: 1201852 - RNA, 19 nt, Artificial Sequence
  Description of Artificial Sequence: Synthetic oligonucleotide
acggaaacucuggaggcua

SEQ ID NO: 1201853 - RNA, 19 nt, Artificial Sequence
  Description of Artificial Sequence: Synthetic oligonucleotide
guggccgguguguaaggga

SEQ ID NO: 1201854 - RNA, 19 nt, Artificial Sequence
  Description of Artificial Sequence: Synthetic oligonucleotide
cuacuucaggccaugguuu

SEQ ID NO: 1201855 - RNA, 19 nt, Artificial Sequence
  Description of Artificial Sequence: Synthetic oligonucleotide
gcuaccaggccgcuggcga

SEQ ID NO: 1201856 - RNA, 19 nt, Artificial Sequence
  Description of Artificial Sequence: Synthetic oligonucleotide
gcacgauagagcuguuuga

SEQ ID NO: 1201857 - RNA, 19 nt, Artificial Sequence
  Description of Artificial Sequence: Synthetic oligonucleotide
gcuacuucaggccaugguu

SEQ ID NO: 1201858 - RNA, 19 nt, Artificial Sequence
  Description of Artificial Sequence: Synthetic oligonucleotide
ucugauccuugugguccug

SEQ ID NO: 1201859 - RNA, 19 nt, Artificial Sequence
  Description of Artificial Sequence: Synthetic oligonucleotide
aucaccggacugggcuggc

SEQ ID NO: 1201860 - RNA, 19 nt, Artificial Sequence
  Description of Artificial Sequence: Synthetic oligonucleotide
cugcagguguagagucuug

SEQ ID NO: 1201861 - RNA, 19 nt, Artificial Sequence
  Description of Artificial Sequence: Synthetic oligonucleotide
aguguucauucgagcacga

SEQ ID NO: 1201862 - RNA, 19 nt, Artificial Sequence
  Description of Artificial Sequence: Synthetic oligonucleotide
cuagcacauuugcuuuaca

SEQ ID NO: 1201863 - RNA, 19 nt, Artificial Sequence
  Description of Artificial Sequence: Synthetic oligonucleotide
agaaggcccuucauggaua

SEQ ID NO: 1201864 - RNA, 19 nt, Artificial Sequence
  Description of Artificial Sequence: Synthetic oligonucleotide
caucucccuccauugcaga

SEQ ID NO: 1201865 - RNA, 19 nt, Artificial Sequence
  Description of Artificial Sequence: Synthetic oligonucleotide
cugcuacuucaggccaugg

SEQ ID NO: 1201866 - RNA, 19 nt, Artificial Sequence
  Description of Artificial Sequence: Synthetic oligonucleotide
ggcauagacuggguucugc

SEQ ID NO: 1201867 - RNA, 19 nt, Artificial Sequence
  Description of Artificial Sequence: Synthetic oligonucleotide
cagcccaacuuuguuagaa

SEQ ID NO: 1201868 - RNA, 19 nt, Artificial Sequence
  Description of Artificial Sequence: Synthetic oligonucleotide
gcuagcacauuugcuuuac

SEQ ID NO: 1201869 - RNA, 19 nt, Artificial Sequence
  Description of Artificial Sequence: Synthetic oligonucleotide
caccggacugggcuggcuc

SEQ ID NO: 1201870 - RNA, 19 nt, Artificial Sequence
  Description of Artificial Sequence: Synthetic oligonucleotide
ggggcuagcacauuugcuu

SEQ ID NO: 1201871 - RNA, 19 nt, Artificial Sequence
  Description of Artificial Sequence: Synthetic oligonucleotide
cucaccagagcugggcaga

SEQ ID NO: 1201872 - RNA, 19 nt, Artificial Sequence
  Description of Artificial Sequence: Synthetic oligonucleotide
ugucgauguuggggaaggu

SEQ ID NO: 1201873 - RNA, 19 nt, Artificial Sequence
  Description of Artificial Sequence: Synthetic oligonucleotide
guggcucacauagugcugu

SEQ ID NO: 1201874 - RNA, 19 nt, Artificial Sequence
  Description of Artificial Sequence: Synthetic oligonucleotide
gcucgauauggcucggcuc

SEQ ID NO: 1201875 - RNA, 19 nt, Artificial Sequence
  Description of Artificial Sequence: Synthetic oligonucleotide
gccgaguagaugugguaca

SEQ ID NO: 1201876 - RNA, 19 nt, Artificial Sequence
  Description of Artificial Sequence: Synthetic oligonucleotide
cuuuaggcucccggcuaug

SEQ ID NO: 1201877 - RNA, 19 nt, Artificial Sequence
  Description of Artificial Sequence: Synthetic oligonucleotide
ggcuaugcucgauauggcu

SEQ ID NO: 1201878 - RNA, 19 nt, Artificial Sequence
  Description of Artificial Sequence: Synthetic oligonucleotide
agcuaagagucaggaccca

SEQ ID NO: 1201879 - RNA, 19 nt, Artificial Sequence
  Description of Artificial Sequence: Synthetic oligonucleotide
gacccaucggaggaguggu

SEQ ID NO: 1201880 - RNA, 19 nt, Artificial Sequence
  Description of Artificial Sequence: Synthetic oligonucleotide
gccaugacaccagaggaaa

SEQ ID NO: 1201881 - RNA, 19 nt, Artificial Sequence
  Description of Artificial Sequence: Synthetic oligonucleotide
ccaagguuacaacuauuaa

SEQ ID NO: 1201882 - RNA, 19 nt, Artificial Sequence
  Description of Artificial Sequence: Synthetic oligonucleotide
uguccgcuuuaggcucccg

SEQ ID NO: 1201883 - RNA, 19 nt, Artificial Sequence
  Description of Artificial Sequence: Synthetic oligonucleotide
cacaaaaguuggagaccaa

SEQ ID NO: 1201884 - RNA, 19 nt, Artificial Sequence
  Description of Artificial Sequence: Synthetic oligonucleotide
ggcucugauccuugugguc

SEQ ID NO: 1201885 - RNA, 19 nt, Artificial Sequence
  Description of Artificial Sequence: Synthetic oligonucleotide
gguggcucacauagugcug

SEQ ID NO: 1201886 - RNA, 19 nt, Artificial Sequence
  Description of Artificial Sequence: Synthetic oligonucleotide
ggauaugcaccuccuuggu

SEQ ID NO: 1201887 - RNA, 19 nt, Artificial Sequence
  Description of Artificial Sequence: Synthetic oligonucleotide
cacgagacccaacaucuuu

SEQ ID NO: 1201888 - RNA, 19 nt, Artificial Sequence
  Description of Artificial Sequence: Synthetic oligonucleotide
cggggcauagacuggguuc

SEQ ID NO: 1201889 - RNA, 19 nt, Artificial Sequence
  Description of Artificial Sequence: Synthetic oligonucleotide
gggcucuacaggaguuggg

SEQ ID NO: 1201890 - RNA, 19 nt, Artificial Sequence
  Description of Artificial Sequence: Synthetic oligonucleotide
uggugccugggaugagcua

SEQ ID NO: 1201891 - RNA, 19 nt, Artificial Sequence
  Description of Artificial Sequence: Synthetic oligonucleotide
uagugcugaucuggggcuu

SEQ ID NO: 1201892 - RNA, 19 nt, Artificial Sequence
  Description of Artificial Sequence: Synthetic oligonucleotide
guguacgugugggccacca

SEQ ID NO: 1201893 - RNA, 19 nt, Artificial Sequence
  Description of Artificial Sequence: Synthetic oligonucleotide
guguguaagggaugaucuu

SEQ ID NO: 1201894 - RNA, 19 nt, Artificial Sequence
  Description of Artificial Sequence: Synthetic oligonucleotide
cagucacggccaguuaaca

SEQ ID NO: 1201895 - RNA, 19 nt, Artificial Sequence
  Description of Artificial Sequence: Synthetic oligonucleotide
gcuccggcaggcuccacuc

SEQ ID NO: 1201896 - RNA, 19 nt, Artificial Sequence
  Description of Artificial Sequence: Synthetic oligonucleotide
auagugcuguguggccggu

SEQ ID NO: 1201897 - RNA, 19 nt, Artificial Sequence
  Description of Artificial Sequence: Synthetic oligonucleotide
gugagaugcgggaaauaau

SEQ ID NO: 1201898 - RNA, 19 nt, Artificial Sequence
  Description of Artificial Sequence: Synthetic oligonucleotide
gguugucgauguuggggaa

SEQ ID NO: 1201899 - RNA, 19 nt, Artificial Sequence
  Description of Artificial Sequence: Synthetic oligonucleotide
gccgguguguaagggauga

SEQ ID NO: 1201900 - RNA, 19 nt, Artificial Sequence
  Description of Artificial Sequence: Synthetic oligonucleotide
guagagcggggcauagacu

SEQ ID NO: 1201901 - RNA, 19 nt, Artificial Sequence
  Description of Artificial Sequence: Synthetic oligonucleotide
ucaccggacugggcuggcu

SEQ ID NO: 1201902 - RNA, 19 nt, Artificial Sequence
  Description of Artificial Sequence: Synthetic oligonucleotide
ggccaugacaccagaggaa

SEQ ID NO: 1201903 - RNA, 19 nt, Artificial Sequence
  Description of Artificial Sequence: Synthetic oligonucleotide
cuguccgcuuuaggcuccc

SEQ ID NO: 1201904 - RNA, 19 nt, Artificial Sequence
  Description of Artificial Sequence: Synthetic oligonucleotide
aggugagaugcgggaaaua

SEQ ID NO: 1201905 - RNA, 19 nt, Artificial Sequence
  Description of Artificial Sequence: Synthetic oligonucleotide
cuccaucugugaggggcuc

SEQ ID NO: 1201906 - RNA, 19 nt, Artificial Sequence
  Description of Artificial Sequence: Synthetic oligonucleotide
ggcuagcacauuugcuuua

SEQ ID NO: 1201907 - RNA, 19 nt, Artificial Sequence
  Description of Artificial Sequence: Synthetic oligonucleotide
uaccaccauucaggugaga

SEQ ID NO: 1201908 - RNA, 19 nt, Artificial Sequence
  Description of Artificial Sequence: Synthetic oligonucleotide
cgguguguaagggaugauc

SEQ ID NO: 1201909 - RNA, 19 nt, Artificial Sequence
  Description of Artificial Sequence: Synthetic oligonucleotide
gguugucuacggaaacucu

SEQ ID NO: 1201910 - RNA, 19 nt, Artificial Sequence
  Description of Artificial Sequence: Synthetic oligonucleotide
cucccggcuaugcucgaua

SEQ ID NO: 1201911 - RNA, 19 nt, Artificial Sequence
  Description of Artificial Sequence: Synthetic oligonucleotide
ggcgagggcccuccaucug

SEQ ID NO: 1201912 - RNA, 19 nt, Artificial Sequence
  Description of Artificial Sequence: Synthetic oligonucleotide
cgaguagaugugguacaag

SEQ ID NO: 1201913 - RNA, 19 nt, Artificial Sequence
  Description of Artificial Sequence: Synthetic oligonucleotide
cggcuaugcucgauauggc

SEQ ID NO: 1201914 - RNA, 19 nt, Artificial Sequence
  Description of Artificial Sequence: Synthetic oligonucleotide
acacgagacccaacaucuu

SEQ ID NO: 1201915 - RNA, 19 nt, Artificial Sequence
  Description of Artificial Sequence: Synthetic oligonucleotide
cugagaggucacccaggua

SEQ ID NO: 1201916 - RNA, 19 nt, Artificial Sequence
  Description of Artificial Sequence: Synthetic oligonucleotide
aggcugguucuguccgcuu

SEQ ID NO: 1201917 - RNA, 19 nt, Artificial Sequence
  Description of Artificial Sequence: Synthetic oligonucleotide
caggcuccacucaaagguu

SEQ ID NO: 1201918 - RNA, 19 nt, Artificial Sequence
  Description of Artificial Sequence: Synthetic oligonucleotide
aggggucuaggagccucaa

SEQ ID NO: 1201919 - RNA, 19 nt, Artificial Sequence
  Description of Artificial Sequence: Synthetic oligonucleotide
gucuugcaccaggcuacca

SEQ ID NO: 1201920 - RNA, 19 nt, Artificial Sequence
  Description of Artificial Sequence: Synthetic oligonucleotide
ccuccauugcagagagaga

SEQ ID NO: 1201921 - RNA, 19 nt, Artificial Sequence
  Description of Artificial Sequence: Synthetic oligonucleotide
accaggcuaccaggccgcu

SEQ ID NO: 1201922 - RNA, 19 nt, Artificial Sequence
  Description of Artificial Sequence: Synthetic oligonucleotide
ggucacccagguaacgggu

SEQ ID NO: 1201923 - RNA, 19 nt, Artificial Sequence
  Description of Artificial Sequence: Synthetic oligonucleotide
cccggcuaugcucgauaug

SEQ ID NO: 1201924 - RNA, 19 nt, Artificial Sequence
  Description of Artificial Sequence: Synthetic oligonucleotide
gagcacgauagagcuguuu

SEQ ID NO: 1201925 - RNA, 19 nt, Artificial Sequence
  Description of Artificial Sequence: Synthetic oligonucleotide
gcuuuaggcucccggcuau

SEQ ID NO: 1201926 - RNA, 19 nt, Artificial Sequence
  Description of Artificial Sequence: Synthetic oligonucleotide
ucgggcuguggugggcguu

SEQ ID NO: 1201927 - RNA, 19 nt, Artificial Sequence
  Description of Artificial Sequence: Synthetic oligonucleotide
ccaugacaccagaggaaaa

SEQ ID NO: 1201928 - RNA, 19 nt, Artificial Sequence
  Description of Artificial Sequence: Synthetic oligonucleotide
ggggucuaggagccucaaa

SEQ ID NO: 1201929 - RNA, 19 nt, Artificial Sequence
  Description of Artificial Sequence: Synthetic oligonucleotide
ggaugucucugcaggugua

SEQ ID NO: 1201930 - RNA, 19 nt, Artificial Sequence
  Description of Artificial Sequence: Synthetic oligonucleotide
gcgagggcccuccaucugu

SEQ ID NO: 1201931 - RNA, 19 nt, Artificial Sequence
  Description of Artificial Sequence: Synthetic oligonucleotide
cgauauggcucggcuccgg

SEQ ID NO: 1201932 - RNA, 19 nt, Artificial Sequence
  Description of Artificial Sequence: Synthetic oligonucleotide
ccucauggagguggcucac

SEQ ID NO: 1201933 - RNA, 19 nt, Artificial Sequence
  Description of Artificial Sequence: Synthetic oligonucleotide
guguucauucgagcacgau

SEQ ID NO: 1201934 - RNA, 19 nt, Artificial Sequence
  Description of Artificial Sequence: Synthetic oligonucleotide
gguguacgugugggccacc

SEQ ID NO: 1201935 - RNA, 19 nt, Artificial Sequence
  Description of Artificial Sequence: Synthetic oligonucleotide
ccgaguagaugugguacaa

SEQ ID NO: 1201936 - RNA, 19 nt, Artificial Sequence
  Description of Artificial Sequence: Synthetic oligonucleotide
gcuaagagucaggacccau

SEQ ID NO: 1201937 - RNA, 19 nt, Artificial Sequence
  Description of Artificial Sequence: Synthetic oligonucleotide
caggacccaucggaggagu

SEQ ID NO: 1201938 - RNA, 19 nt, Artificial Sequence
  Description of Artificial Sequence: Synthetic oligonucleotide
gucaagcaucucccuccau

SEQ ID NO: 1201939 - RNA, 19 nt, Artificial Sequence
  Description of Artificial Sequence: Synthetic oligonucleotide
gcccuccaucugugagggg

SEQ ID NO: 1201940 - RNA, 19 nt, Artificial Sequence
  Description of Artificial Sequence: Synthetic oligonucleotide
ggaggcuacuggcgacugu

SEQ ID NO: 1201941 - RNA, 19 nt, Artificial Sequence
  Description of Artificial Sequence: Synthetic oligonucleotide
cccaacaucuuugcacacu

SEQ ID NO: 1201942 - RNA, 19 nt, Artificial Sequence
  Description of Artificial Sequence: Synthetic oligonucleotide
uucugccaguggggaccau

SEQ ID NO: 1201943 - RNA, 19 nt, Artificial Sequence
  Description of Artificial Sequence: Synthetic oligonucleotide
ccaggcuaccaggccgcug

SEQ ID NO: 1201944 - RNA, 19 nt, Artificial Sequence
  Description of Artificial Sequence: Synthetic oligonucleotide
cgcuuuaggcucccggcua

SEQ ID NO: 1201945 - RNA, 19 nt, Artificial Sequence
  Description of Artificial Sequence: Synthetic oligonucleotide
gcggggcauagacuggguu

SEQ ID NO: 1201946 - RNA, 19 nt, Artificial Sequence
  Description of Artificial Sequence: Synthetic oligonucleotide
ccggcaggcuccacucaaa

SEQ ID NO: 1201947 - RNA, 19 nt, Artificial Sequence
  Description of Artificial Sequence: Synthetic oligonucleotide
gccccaccucauggaggug

SEQ ID NO: 1201948 - RNA, 19 nt, Artificial Sequence
  Description of Artificial Sequence: Synthetic oligonucleotide
ccaccucauggagguggcu

SEQ ID NO: 1201949 - RNA, 19 nt, Artificial Sequence
  Description of Artificial Sequence: Synthetic oligonucleotide
cgcuggcgagggcccucca

SEQ ID NO: 1201950 - RNA, 19 nt, Artificial Sequence
  Description of Artificial Sequence: Synthetic oligonucleotide
cgagcacgauagagcuguu

SEQ ID NO: 1201951 - RNA, 19 nt, Artificial Sequence
  Description of Artificial Sequence: Synthetic oligonucleotide
uuuaccauacaguacugcg

SEQ ID NO: 1201952 - RNA, 19 nt, Artificial Sequence
  Description of Artificial Sequence: Synthetic oligonucleotide
gagaacuaaacacaugagg

SEQ ID NO: 1201953 - RNA, 19 nt, Artificial Sequence
  Description of Artificial Sequence: Synthetic oligonucleotide
ugcuaaaggagccacugcg

SEQ ID NO: 1201954 - RNA, 19 nt, Artificial Sequence
  Description of Artificial Sequence: Synthetic oligonucleotide
aguuauuuaacugcuuggc

SEQ ID NO: 1201955 - RNA, 19 nt, Artificial Sequence
  Description of Artificial Sequence: Synthetic oligonucleotide
ucguuuaccauacaguacu

SEQ ID NO: 1201956 - RNA, 19 nt, Artificial Sequence
  Description of Artificial Sequence: Synthetic oligonucleotide
agugcuagcgucuucuagg

SEQ ID NO: 1201957 - RNA, 19 nt, Artificial Sequence
  Description of Artificial Sequence: Synthetic oligonucleotide
ucuggagccauacucagca

SEQ ID NO: 1201958 - RNA, 19 nt, Artificial Sequence
  Description of Artificial Sequence: Synthetic oligonucleotide
ucguacuugaccacguccg

SEQ ID NO: 1201959 - RNA, 19 nt, Artificial Sequence
  Description of Artificial Sequence: Synthetic oligonucleotide
uguuuacgugaccucaugg

SEQ ID NO: 1201960 - RNA, 19 nt, Artificial Sequence
  Description of Artificial Sequence: Synthetic oligonucleotide
aaggccaaguuauuuaacu

SEQ ID NO: 1201961 - RNA, 19 nt, Artificial Sequence
  Description of Artificial Sequence: Synthetic oligonucleotide
uccaaaagaagucccgucc

SEQ ID NO: 1201962 - RNA, 19 nt, Artificial Sequence
  Description of Artificial Sequence: Synthetic oligonucleotide
cuuguuucagauaacagga

SEQ ID NO: 1201963 - RNA, 19 nt, Artificial Sequence
  Description of Artificial Sequence: Synthetic oligonucleotide
guaguaauacuccaccucc

SEQ ID NO: 1201964 - RNA, 19 nt, Artificial Sequence
  Description of Artificial Sequence: Synthetic oligonucleotide
uguacagcguuucugcuug

SEQ ID NO: 1201965 - RNA, 19 nt, Artificial Sequence
  Description of Artificial Sequence: Synthetic oligonucleotide
ugugacaguaggacuaucc

SEQ ID NO: 1201966 - RNA, 19 nt, Artificial Sequence
  Description of Artificial Sequence: Synthetic oligonucleotide
agaacuaaacacaugagga

SEQ ID NO: 1201967 - RNA, 19 nt, Artificial Sequence
  Description of Artificial Sequence: Synthetic oligonucleotide
uuuacgugaccucauggca

SEQ ID NO: 1201968 - RNA, 19 nt, Artificial Sequence
  Description of Artificial Sequence: Synthetic oligonucleotide
aguacugcgagguuguuga

SEQ ID NO: 1201969 - RNA, 19 nt, Artificial Sequence
  Description of Artificial Sequence: Synthetic oligonucleotide
uauuuaacugcuuggcuac

SEQ ID NO: 1201970 - RNA, 19 nt, Artificial Sequence
  Description of Artificial Sequence: Synthetic oligonucleotide
agaaccaaacucccguucg

SEQ ID NO: 1201971 - RNA, 19 nt, Artificial Sequence
  Description of Artificial Sequence: Synthetic oligonucleotide
ucuaauggaagcccggagu

SEQ ID NO: 1201972 - RNA, 19 nt, Artificial Sequence
  Description of Artificial Sequence: Synthetic oligonucleotide
gcuuuaaagauccagugcc

SEQ ID NO: 1201973 - RNA, 19 nt, Artificial Sequence
  Description of Artificial Sequence: Synthetic oligonucleotide
ucucuguuugugaacagug

SEQ ID NO: 1201974 - RNA, 19 nt, Artificial Sequence
  Description of Artificial Sequence: Synthetic oligonucleotide
cuuugucugguaaaucucc

SEQ ID NO: 1201975 - RNA, 19 nt, Artificial Sequence
  Description of Artificial Sequence: Synthetic oligonucleotide
aacacaugaggagugccac

SEQ ID NO: 1201976 - RNA, 19 nt, Artificial Sequence
  Description of Artificial Sequence: Synthetic oligonucleotide
aagauccagugccaucccc

SEQ ID NO: 1201977 - RNA, 19 nt, Artificial Sequence
  Description of Artificial Sequence: Synthetic oligonucleotide
cuuccaaugucucugcagc

SEQ ID NO: 1201978 - RNA, 19 nt, Artificial Sequence
  Description of Artificial Sequence: Synthetic oligonucleotide
uuacgugaccucauggcag

SEQ ID NO: 1201979 - RNA, 19 nt, Artificial Sequence
  Description of Artificial Sequence: Synthetic oligonucleotide
uucgucuuggccacauugg

SEQ ID NO: 1201980 - RNA, 19 nt, Artificial Sequence
  Description of Artificial Sequence: Synthetic oligonucleotide
acugcgagguuguugagag

SEQ ID NO: 1201981 - RNA, 19 nt, Artificial Sequence
  Description of Artificial Sequence: Synthetic oligonucleotide
ucgguaaagugcuccaagg

SEQ ID NO: 1201982 - RNA, 19 nt, Artificial Sequence
  Description of Artificial Sequence: Synthetic oligonucleotide
ucuguuugugaacaguguc

SEQ ID NO: 1201983 - RNA, 19 nt, Artificial Sequence
  Description of Artificial Sequence: Synthetic oligonucleotide
uaacugcuuggcuacaucc

SEQ ID NO: 1201984 - RNA, 19 nt, Artificial Sequence
  Description of Artificial Sequence: Synthetic oligonucleotide
agugucaagacccuguuua

SEQ ID NO: 1201985 - RNA, 19 nt, Artificial Sequence
  Description of Artificial Sequence: Synthetic oligonucleotide
auggccggaagucuucucc

SEQ ID NO: 1201986 - RNA, 19 nt, Artificial Sequence
  Description of Artificial Sequence: Synthetic oligonucleotide
aguaauacuccaccuccuc

SEQ ID NO: 1201987 - RNA, 19 nt, Artificial Sequence
  Description of Artificial Sequence: Synthetic oligonucleotide
cagagaacuaaacacauga

SEQ ID NO: 1201988 - RNA, 19 nt, Artificial Sequence
  Description of Artificial Sequence: Synthetic oligonucleotide
uuugcuaaaggagccacug

SEQ ID NO: 1201989 - RNA, 19 nt, Artificial Sequence
  Description of Artificial Sequence: Synthetic oligonucleotide
auuagugugugcuccgcag

SEQ ID NO: 1201990 - RNA, 19 nt, Artificial Sequence
  Description of Artificial Sequence: Synthetic oligonucleotide
aaaagaagucccgucccuc

SEQ ID NO: 1201991 - RNA, 19 nt, Artificial Sequence
  Description of Artificial Sequence: Synthetic oligonucleotide
guuuacgugaccucauggc

SEQ ID NO: 1201992 - RNA, 19 nt, Artificial Sequence
  Description of Artificial Sequence: Synthetic oligonucleotide
ugcgcuuuaaagauccagu

SEQ ID NO: 1201993 - RNA, 19 nt, Artificial Sequence
  Description of Artificial Sequence: Synthetic oligonucleotide
aauggaagcccggaguuug

SEQ ID NO: 1201994 - RNA, 19 nt, Artificial Sequence
  Description of Artificial Sequence: Synthetic oligonucleotide
ugcgucuaauggaagcccg

SEQ ID NO: 1201995 - RNA, 19 nt, Artificial Sequence
  Description of Artificial Sequence: Synthetic oligonucleotide
ucgucuuggccacauuggg

SEQ ID NO: 1201996 - RNA, 19 nt, Artificial Sequence
  Description of Artificial Sequence: Synthetic oligonucleotide
gagaguugcugccaccgcg

SEQ ID NO: 1201997 - RNA, 19 nt, Artificial Sequence
  Description of Artificial Sequence: Synthetic oligonucleotide
ucuacgcucauacucacuu

SEQ ID NO: 1201998 - RNA, 19 nt, Artificial Sequence
  Description of Artificial Sequence: Synthetic oligonucleotide
cacugcgcuuuaaagaucc

SEQ ID NO: 1201999 - RNA, 19 nt, Artificial Sequence
  Description of Artificial Sequence: Synthetic oligonucleotide
uuccacucuacgcucauac

SEQ ID NO: 1202000 - RNA, 19 nt, Artificial Sequence
  Description of Artificial Sequence: Synthetic oligonucleotide
ucucucuaaucuccaaggc

SEQ ID NO: 1202001 - RNA, 19 nt, Artificial Sequence
  Description of Artificial Sequence: Synthetic oligonucleotide
ucaguuagugcuagcgucu

SEQ ID NO: 1202002 - RNA, 19 nt, Artificial Sequence
  Description of Artificial Sequence: Synthetic oligonucleotide
ugaucccuguacaccaggg

SEQ ID NO: 1202003 - RNA, 19 nt, Artificial Sequence
  Description of Artificial Sequence: Synthetic oligonucleotide
accacguccgaguggagac

SEQ ID NO: 1202004 - RNA, 19 nt, Artificial Sequence
  Description of Artificial Sequence: Synthetic oligonucleotide
ugucucugcagcuucaaau

SEQ ID NO: 1202005 - RNA, 19 nt, Artificial Sequence
  Description of Artificial Sequence: Synthetic oligonucleotide
ucccucguuuaccauacag

SEQ ID NO: 1202006 - RNA, 19 nt, Artificial Sequence
  Description of Artificial Sequence: Synthetic oligonucleotide
agaagucccgucccucugc

SEQ ID NO: 1202007 - RNA, 19 nt, Artificial Sequence
  Description of Artificial Sequence: Synthetic oligonucleotide
aguaaggccaaguuauuua

SEQ ID NO: 1202008 - RNA, 19 nt, Artificial Sequence
  Description of Artificial Sequence: Synthetic oligonucleotide
cucuccaaaagaagucccg

SEQ ID NO: 1202009 - RNA, 19 nt, Artificial Sequence
  Description of Artificial Sequence: Synthetic oligonucleotide
uuguucugaucccuguaca

SEQ ID NO: 1202010 - RNA, 19 nt, Artificial Sequence
  Description of Artificial Sequence: Synthetic oligonucleotide
aacugcuuggcuacauccg

SEQ ID NO: 1202011 - RNA, 19 nt, Artificial Sequence
  Description of Artificial Sequence: Synthetic oligonucleotide
uacaguacugcgagguugu

SEQ ID NO: 1202012 - RNA, 19 nt, Artificial Sequence
  Description of Artificial Sequence: Synthetic oligonucleotide
aggucaguuagugcuagcg

SEQ ID NO: 1202013 - RNA, 19 nt, Artificial Sequence
  Description of Artificial Sequence: Synthetic oligonucleotide
uguucugaucccuguacac

SEQ ID NO: 1202014 - RNA, 19 nt, Artificial Sequence
  Description of Artificial Sequence: Synthetic oligonucleotide
ugugcuccgcagcacgagg

SEQ ID NO: 1202015 - RNA, 19 nt, Artificial Sequence
  Description of Artificial Sequence: Synthetic oligonucleotide
cauacucacuuccuccccg

SEQ ID NO: 1202016 - RNA, 19 nt, Artificial Sequence
  Description of Artificial Sequence: Synthetic oligonucleotide
uauuagugugugcuccgca

SEQ ID NO: 1202017 - RNA, 19 nt, Artificial Sequence
  Description of Artificial Sequence: Synthetic oligonucleotide
acucuccaaaagaaguccc

SEQ ID NO: 1202018 - RNA, 19 nt, Artificial Sequence
  Description of Artificial Sequence: Synthetic oligonucleotide
gucaguuagugcuagcguc

SEQ ID NO: 1202019 - RNA, 19 nt, Artificial Sequence
  Description of Artificial Sequence: Synthetic oligonucleotide
gacuaaguuagcacugggc

SEQ ID NO: 1202020 - RNA, 19 nt, Artificial Sequence
  Description of Artificial Sequence: Synthetic oligonucleotide
uguuugugaacagugucaa

SEQ ID NO: 1202021 - RNA, 19 nt, Artificial Sequence
  Description of Artificial Sequence: Synthetic oligonucleotide
uagugcuagcgucuucuag

SEQ ID NO: 1202022 - RNA, 19 nt, Artificial Sequence
  Description of Artificial Sequence: Synthetic oligonucleotide
cuaguggugugguuauuag

SEQ ID NO: 1202023 - RNA, 19 nt, Artificial Sequence
  Description of Artificial Sequence: Synthetic oligonucleotide
augguguuuagagcaggcc

SEQ ID NO: 1202024 - RNA, 19 nt, Artificial Sequence
  Description of Artificial Sequence: Synthetic oligonucleotide
uuaaagauccagugccauc

SEQ ID NO: 1202025 - RNA, 19 nt, Artificial Sequence
  Description of Artificial Sequence: Synthetic oligonucleotide
uugaccacguccgagugga

SEQ ID NO: 1202026 - RNA, 19 nt, Artificial Sequence
  Description of Artificial Sequence: Synthetic oligonucleotide
ugcuuguuugaacuucccu

SEQ ID NO: 1202027 - RNA, 19 nt, Artificial Sequence
  Description of Artificial Sequence: Synthetic oligonucleotide
ugucccgugcacuuccucc

SEQ ID NO: 1202028 - RNA, 19 nt, Artificial Sequence
  Description of Artificial Sequence: Synthetic oligonucleotide
uuuaaagauccagugccau

SEQ ID NO: 1202029 - RNA, 19 nt, Artificial Sequence
  Description of Artificial Sequence: Synthetic oligonucleotide
caugguguuuagagcaggc

SEQ ID NO: 1202030 - RNA, 19 nt, Artificial Sequence
  Description of Artificial Sequence: Synthetic oligonucleotide
ucguuuacacagcggcucc

SEQ ID NO: 1202031 - RNA, 19 nt, Artificial Sequence
  Description of Artificial Sequence: Synthetic oligonucleotide
ucacggauagccagggcgu

SEQ ID NO: 1202032 - RNA, 19 nt, Artificial Sequence
  Description of Artificial Sequence: Synthetic oligonucleotide
acucuacgcucauacucac

SEQ ID NO: 1202033 - RNA, 19 nt, Artificial Sequence
  Description of Artificial Sequence: Synthetic oligonucleotide
cucguuuaccauacaguac

SEQ ID NO: 1202034 - RNA, 19 nt, Artificial Sequence
  Description of Artificial Sequence: Synthetic oligonucleotide
uaaggccaaguuauuuaac

SEQ ID NO: 1202035 - RNA, 19 nt, Artificial Sequence
  Description of Artificial Sequence: Synthetic oligonucleotide
aaacacaugaggagugcca

SEQ ID NO: 1202036 - RNA, 19 nt, Artificial Sequence
  Description of Artificial Sequence: Synthetic oligonucleotide
uuuacacagcggcuccgcc

SEQ ID NO: 1202037 - RNA, 19 nt, Artificial Sequence
  Description of Artificial Sequence: Synthetic oligonucleotide
uaguaauacuccaccuccu

SEQ ID NO: 1202038 - RNA, 19 nt, Artificial Sequence
  Description of Artificial Sequence: Synthetic oligonucleotide
gucgguaaagugcuccaag

SEQ ID NO: 1202039 - RNA, 19 nt, Artificial Sequence
  Description of Artificial Sequence: Synthetic oligonucleotide
gucagggccacucucguac

SEQ ID NO: 1202040 - RNA, 19 nt, Artificial Sequence
  Description of Artificial Sequence: Synthetic oligonucleotide
uagugugugcuccgcagca

SEQ ID NO: 1202041 - RNA, 19 nt, Artificial Sequence
  Description of Artificial Sequence: Synthetic oligonucleotide
gagccacugcgcuuuaaag

SEQ ID NO: 1202042 - RNA, 19 nt, Artificial Sequence
  Description of Artificial Sequence: Synthetic oligonucleotide
uuaacugcuuggcuacauc

SEQ ID NO: 1202043 - RNA, 19 nt, Artificial Sequence
  Description of Artificial Sequence: Synthetic oligonucleotide
ucccuuguuucagauaaca

SEQ ID NO: 1202044 - RNA, 19 nt, Artificial Sequence
  Description of Artificial Sequence: Synthetic oligonucleotide
cuucccucguuuaccauac

SEQ ID NO: 1202045 - RNA, 19 nt, Artificial Sequence
  Description of Artificial Sequence: Synthetic oligonucleotide
aagacccuguuuacgugac

SEQ ID NO: 1202046 - RNA, 19 nt, Artificial Sequence
  Description of Artificial Sequence: Synthetic oligonucleotide
uaggacuauccacuuugca

SEQ ID NO: 1202047 - RNA, 19 nt, Artificial Sequence
  Description of Artificial Sequence: Synthetic oligonucleotide
uuguacuucccucguuuac

SEQ ID NO: 1202048 - RNA, 19 nt, Artificial Sequence
  Description of Artificial Sequence: Synthetic oligonucleotide
ggcucguuuacacagcggc

SEQ ID NO: 1202049 - RNA, 19 nt, Artificial Sequence
  Description of Artificial Sequence: Synthetic oligonucleotide
uacgugaccucauggcagc

SEQ ID NO: 1202050 - RNA, 19 nt, Artificial Sequence
  Description of Artificial Sequence: Synthetic oligonucleotide
cuguuugugaacaguguca

SEQ ID NO: 1202051 - RNA, 19 nt, Artificial Sequence
  Description of Artificial Sequence: Synthetic oligonucleotide
gcuagcgucuucuaggcug

SEQ ID NO: 1202052 - RNA, 19 nt, Artificial Sequence
  Description of Artificial Sequence: Synthetic oligonucleotide
uaaucuccaaggcucguuu

SEQ ID NO: 1202053 - RNA, 19 nt, Artificial Sequence
  Description of Artificial Sequence: Synthetic oligonucleotide
cucacugcugcgucuaaug

SEQ ID NO: 1202054 - RNA, 19 nt, Artificial Sequence
  Description of Artificial Sequence: Synthetic oligonucleotide
cuccaaaacccuccuagug

SEQ ID NO: 1202055 - RNA, 19 nt, Artificial Sequence
  Description of Artificial Sequence: Synthetic oligonucleotide
cuagcgucuucuaggcugc

SEQ ID NO: 1202056 - RNA, 19 nt, Artificial Sequence
  Description of Artificial Sequence: Synthetic oligonucleotide
agccagauguguccuguuc

SEQ ID NO: 1202057 - RNA, 19 nt, Artificial Sequence
  Description of Artificial Sequence: Synthetic oligonucleotide
agagaacuaaacacaugag

SEQ ID NO: 1202058 - RNA, 19 nt, Artificial Sequence
  Description of Artificial Sequence: Synthetic oligonucleotide
agauccagugccauccccg

SEQ ID NO: 1202059 - RNA, 19 nt, Artificial Sequence
  Description of Artificial Sequence: Synthetic oligonucleotide
caaacucccguucgugugc

SEQ ID NO: 1202060 - RNA, 19 nt, Artificial Sequence
  Description of Artificial Sequence: Synthetic oligonucleotide
cagauuggcugcaucuuug

SEQ ID NO: 1202061 - RNA, 19 nt, Artificial Sequence
  Description of Artificial Sequence: Synthetic oligonucleotide
cuuuaaagauccagugcca

SEQ ID NO: 1202062 - RNA, 19 nt, Artificial Sequence
  Description of Artificial Sequence: Synthetic oligonucleotide
gaggagugccacaggacgg

SEQ ID NO: 1202063 - RNA, 19 nt, Artificial Sequence
  Description of Artificial Sequence: Synthetic oligonucleotide
ugcgagguuguugagaguu

SEQ ID NO: 1202064 - RNA, 19 nt, Artificial Sequence
  Description of Artificial Sequence: Synthetic oligonucleotide
gguaguaauacuccaccuc

SEQ ID NO: 1202065 - RNA, 19 nt, Artificial Sequence
  Description of Artificial Sequence: Synthetic oligonucleotide
uuauuagugugugcuccgc

SEQ ID NO: 1202066 - RNA, 19 nt, Artificial Sequence
  Description of Artificial Sequence: Synthetic oligonucleotide
gucuaauggaagcccggag

SEQ ID NO: 1202067 - RNA, 19 nt, Artificial Sequence
  Description of Artificial Sequence: Synthetic oligonucleotide
ggcuacauccggaugaucc

SEQ ID NO: 1202068 - RNA, 19 nt, Artificial Sequence
  Description of Artificial Sequence: Synthetic oligonucleotide
ucaggucaguuagugcuag

SEQ ID NO: 1202069 - RNA, 19 nt, Artificial Sequence
  Description of Artificial Sequence: Synthetic oligonucleotide
ccaaggcucguuuacacag

SEQ ID NO: 1202070 - RNA, 19 nt, Artificial Sequence
  Description of Artificial Sequence: Synthetic oligonucleotide
aggucaccgaccuuacuga

SEQ ID NO: 1202071 - RNA, 19 nt, Artificial Sequence
  Description of Artificial Sequence: Synthetic oligonucleotide
uaguggugugguuauuagu

SEQ ID NO: 1202072 - RNA, 19 nt, Artificial Sequence
  Description of Artificial Sequence: Synthetic oligonucleotide
accgaccuuacugagugag

SEQ ID NO: 1202073 - RNA, 19 nt, Artificial Sequence
  Description of Artificial Sequence: Synthetic oligonucleotide
gaccuuacugagugagagc

SEQ ID NO: 1202074 - RNA, 19 nt, Artificial Sequence
  Description of Artificial Sequence: Synthetic oligonucleotide
uccaaggcucguuuacaca

SEQ ID NO: 1202075 - RNA, 19 nt, Artificial Sequence
  Description of Artificial Sequence: Synthetic oligonucleotide
ucggguccuagcuuugucu

SEQ ID NO: 1202076 - RNA, 19 nt, Artificial Sequence
  Description of Artificial Sequence: Synthetic oligonucleotide
uccggaugauccuuuccca

SEQ ID NO: 1202077 - RNA, 19 nt, Artificial Sequence
  Description of Artificial Sequence: Synthetic oligonucleotide
gugacaguaggacuaucca

SEQ ID NO: 1202078 - RNA, 19 nt, Artificial Sequence
  Description of Artificial Sequence: Synthetic oligonucleotide
agguuguugagaguugcug

SEQ ID NO: 1202079 - RNA, 19 nt, Artificial Sequence
  Description of Artificial Sequence: Synthetic oligonucleotide
uccccguuccacucuacgc

SEQ ID NO: 1202080 - RNA, 19 nt, Artificial Sequence
  Description of Artificial Sequence: Synthetic oligonucleotide
ccugccgucgguaaagugc

SEQ ID NO: 1202081 - RNA, 19 nt, Artificial Sequence
  Description of Artificial Sequence: Synthetic oligonucleotide
uaaaucuccagggcccucu

SEQ ID NO: 1202082 - RNA, 19 nt, Artificial Sequence
  Description of Artificial Sequence: Synthetic oligonucleotide
gcucauacucacuuccucc

SEQ ID NO: 1202083 - RNA, 19 nt, Artificial Sequence
  Description of Artificial Sequence: Synthetic oligonucleotide
uuccgcgugcauccaaaug

SEQ ID NO: 1202084 - RNA, 19 nt, Artificial Sequence
  Description of Artificial Sequence: Synthetic oligonucleotide
cuugaccacguccgagugg

SEQ ID NO: 1202085 - RNA, 19 nt, Artificial Sequence
  Description of Artificial Sequence: Synthetic oligonucleotide
cacucuacgcucauacuca

SEQ ID NO: 1202086 - RNA, 19 nt, Artificial Sequence
  Description of Artificial Sequence: Synthetic oligonucleotide
agacccuguuuacgugacc

SEQ ID NO: 1202087 - RNA, 19 nt, Artificial Sequence
  Description of Artificial Sequence: Synthetic oligonucleotide
cucguuuacacagcggcuc

SEQ ID NO: 1202088 - RNA, 19 nt, Artificial Sequence
  Description of Artificial Sequence: Synthetic oligonucleotide
ugguuauuagugugugcuc

SEQ ID NO: 1202089 - RNA, 19 nt, Artificial Sequence
  Description of Artificial Sequence: Synthetic oligonucleotide
gugcuagcgucuucuaggc

SEQ ID NO: 1202090 - RNA, 19 nt, Artificial Sequence
  Description of Artificial Sequence: Synthetic oligonucleotide
acauccggaugauccuuuc

SEQ ID NO: 1202091 - RNA, 19 nt, Artificial Sequence
  Description of Artificial Sequence: Synthetic oligonucleotide
agaguugcugccaccgcgg

SEQ ID NO: 1202092 - RNA, 19 nt, Artificial Sequence
  Description of Artificial Sequence: Synthetic oligonucleotide
ggaguuugcuaaaggagcc

SEQ ID NO: 1202093 - RNA, 19 nt, Artificial Sequence
  Description of Artificial Sequence: Synthetic oligonucleotide
cugaucccuguacaccagg

SEQ ID NO: 1202094 - RNA, 19 nt, Artificial Sequence
  Description of Artificial Sequence: Synthetic oligonucleotide
ucuuccgcgugcauccaaa

SEQ ID NO: 1202095 - RNA, 19 nt, Artificial Sequence
  Description of Artificial Sequence: Synthetic oligonucleotide
caaggcucguuuacacagc

SEQ ID NO: 1202096 - RNA, 19 nt, Artificial Sequence
  Description of Artificial Sequence: Synthetic oligonucleotide
uuguacagcguuucugcuu

SEQ ID NO: 1202097 - RNA, 19 nt, Artificial Sequence
  Description of Artificial Sequence: Synthetic oligonucleotide
ugugugcuccgcagcacga

SEQ ID NO: 1202098 - RNA, 19 nt, Artificial Sequence
  Description of Artificial Sequence: Synthetic oligonucleotide
ggacuaaguuagcacuggg

SEQ ID NO: 1202099 - RNA, 19 nt, Artificial Sequence
  Description of Artificial Sequence: Synthetic oligonucleotide
caagacccuguuuacguga

SEQ ID NO: 1202100 - RNA, 19 nt, Artificial Sequence
  Description of Artificial Sequence: Synthetic oligonucleotide
cggaguuugcuaaaggagc

SEQ ID NO: 1202101 - RNA, 19 nt, Artificial Sequence
  Description of Artificial Sequence: Synthetic oligonucleotide
uucgugugcacgggugagg

SEQ ID NO: 1202102 - RNA, 19 nt, Artificial Sequence
  Description of Artificial Sequence: Synthetic oligonucleotide
gucaagacccuguuuacgu

SEQ ID NO: 1202103 - RNA, 19 nt, Artificial Sequence
  Description of Artificial Sequence: Synthetic oligonucleotide
acugcugcgucuaauggaa

SEQ ID NO: 1202104 - RNA, 19 nt, Artificial Sequence
  Description of Artificial Sequence: Synthetic oligonucleotide
agcaugguggccacaucgg

SEQ ID NO: 1202105 - RNA, 19 nt, Artificial Sequence
  Description of Artificial Sequence: Synthetic oligonucleotide
ccggaguuugcuaaaggag

SEQ ID NO: 1202106 - RNA, 19 nt, Artificial Sequence
  Description of Artificial Sequence: Synthetic oligonucleotide
gcgcuuuaaagauccagug

SEQ ID NO: 1202107 - RNA, 19 nt, Artificial Sequence
  Description of Artificial Sequence: Synthetic oligonucleotide
guacuucccucguuuacca

SEQ ID NO: 1202108 - RNA, 19 nt, Artificial Sequence
  Description of Artificial Sequence: Synthetic oligonucleotide
acccuguuuacgugaccuc

SEQ ID NO: 1202109 - RNA, 19 nt, Artificial Sequence
  Description of Artificial Sequence: Synthetic oligonucleotide
acucccguucgugugcacg

SEQ ID NO: 1202110 - RNA, 19 nt, Artificial Sequence
  Description of Artificial Sequence: Synthetic oligonucleotide
uacugcgagguuguugaga

SEQ ID NO: 1202111 - RNA, 19 nt, Artificial Sequence
  Description of Artificial Sequence: Synthetic oligonucleotide
guguuuagagcaggccagg

SEQ ID NO: 1202112 - RNA, 19 nt, Artificial Sequence
  Description of Artificial Sequence: Synthetic oligonucleotide
cugcgcuuuaaagauccag

SEQ ID NO: 1202113 - RNA, 19 nt, Artificial Sequence
  Description of Artificial Sequence: Synthetic oligonucleotide
caccguacucuccaaaaga

SEQ ID NO: 1202114 - RNA, 19 nt, Artificial Sequence
  Description of Artificial Sequence: Synthetic oligonucleotide
cagaaccaaacucccguuc

SEQ ID NO: 1202115 - RNA, 19 nt, Artificial Sequence
  Description of Artificial Sequence: Synthetic oligonucleotide
cuguuuacgugaccucaug

SEQ ID NO: 1202116 - RNA, 19 nt, Artificial Sequence
  Description of Artificial Sequence: Synthetic oligonucleotide
ucaucggguccuagcuuug

SEQ ID NO: 1202117 - RNA, 19 nt, Artificial Sequence
  Description of Artificial Sequence: Synthetic oligonucleotide
uccacucuacgcucauacu

SEQ ID NO: 1202118 - RNA, 19 nt, Artificial Sequence
  Description of Artificial Sequence: Synthetic oligonucleotide
uggccggaagucuucucca

SEQ ID NO: 1202119 - RNA, 19 nt, Artificial Sequence
  Description of Artificial Sequence: Synthetic oligonucleotide
cugcugucguuuuccacac

SEQ ID NO: 1202120 - RNA, 19 nt, Artificial Sequence
  Description of Artificial Sequence: Synthetic oligonucleotide
aaugucucugcagcuucaa

SEQ ID NO: 1202121 - RNA, 19 nt, Artificial Sequence
  Description of Artificial Sequence: Synthetic oligonucleotide
guacuugaccacguccgag

SEQ ID NO: 1202122 - RNA, 19 nt, Artificial Sequence
  Description of Artificial Sequence: Synthetic oligonucleotide
ucgugugcacgggugagga

SEQ ID NO: 1202123 - RNA, 19 nt, Artificial Sequence
  Description of Artificial Sequence: Synthetic oligonucleotide
gugugguuauuagugugug

SEQ ID NO: 1202124 - RNA, 19 nt, Artificial Sequence
  Description of Artificial Sequence: Synthetic oligonucleotide
accgcggggugaucucugc

SEQ ID NO: 1202125 - RNA, 19 nt, Artificial Sequence
  Description of Artificial Sequence: Synthetic oligonucleotide
uacauccggaugauccuuu

SEQ ID NO: 1202126 - RNA, 19 nt, Artificial Sequence
  Description of Artificial Sequence: Synthetic oligonucleotide
aacucccguucgugugcac

SEQ ID NO: 1202127 - RNA, 19 nt, Artificial Sequence
  Description of Artificial Sequence: Synthetic oligonucleotide
guuuacacagcggcuccgc

SEQ ID NO: 1202128 - RNA, 19 nt, Artificial Sequence
  Description of Artificial Sequence: Synthetic oligonucleotide
ggcuuuguaccagccaccg

SEQ ID NO: 1202129 - RNA, 19 nt, Artificial Sequence
  Description of Artificial Sequence: Synthetic oligonucleotide
agcucuggagccauacuca

SEQ ID NO: 1202130 - RNA, 19 nt, Artificial Sequence
  Description of Artificial Sequence: Synthetic oligonucleotide
cuccgcagcacgagggcag

SEQ ID NO: 1202131 - RNA, 19 nt, Artificial Sequence
  Description of Artificial Sequence: Synthetic oligonucleotide
uacugagugagagcugcuc

SEQ ID NO: 1202132 - RNA, 19 nt, Artificial Sequence
  Description of Artificial Sequence: Synthetic oligonucleotide
uucagcacuucagccacuc

SEQ ID NO: 1202133 - RNA, 19 nt, Artificial Sequence
  Description of Artificial Sequence: Synthetic oligonucleotide
cucguaacgccccugugaa

SEQ ID NO: 1202134 - RNA, 19 nt, Artificial Sequence
  Description of Artificial Sequence: Synthetic oligonucleotide
gggacuaaguuagcacugg

SEQ ID NO: 1202135 - RNA, 19 nt, Artificial Sequence
  Description of Artificial Sequence: Synthetic oligonucleotide
acagcguuucugcuuguuu

SEQ ID NO: 1202136 - RNA, 19 nt, Artificial Sequence
  Description of Artificial Sequence: Synthetic oligonucleotide
gcucaggucaguuagugcu

SEQ ID NO: 1202137 - RNA, 19 nt, Artificial Sequence
  Description of Artificial Sequence: Synthetic oligonucleotide
ccacucuacgcucauacuc

SEQ ID NO: 1202138 - RNA, 19 nt, Artificial Sequence
  Description of Artificial Sequence: Synthetic oligonucleotide
agguuguggagcgugcgca

SEQ ID NO: 1202139 - RNA, 19 nt, Artificial Sequence
  Description of Artificial Sequence: Synthetic oligonucleotide
guaggacuauccacuuugc

SEQ ID NO: 1202140 - RNA, 19 nt, Artificial Sequence
  Description of Artificial Sequence: Synthetic oligonucleotide
uccucggcucacugucccg

SEQ ID NO: 1202141 - RNA, 19 nt, Artificial Sequence
  Description of Artificial Sequence: Synthetic oligonucleotide
ucguaacgccccugugaag

SEQ ID NO: 1202142 - RNA, 19 nt, Artificial Sequence
  Description of Artificial Sequence: Synthetic oligonucleotide
cuacgcucauacucacuuc

SEQ ID NO: 1202143 - RNA, 19 nt, Artificial Sequence
  Description of Artificial Sequence: Synthetic oligonucleotide
cucucuaaucuccaaggcu

SEQ ID NO: 1202144 - RNA, 19 nt, Artificial Sequence
  Description of Artificial Sequence: Synthetic oligonucleotide
cuaaaggagccacugcgcu

SEQ ID NO: 1202145 - RNA, 19 nt, Artificial Sequence
  Description of Artificial Sequence: Synthetic oligonucleotide
uuagugcuagcgucuucua

SEQ ID NO: 1202146 - RNA, 19 nt, Artificial Sequence
  Description of Artificial Sequence: Synthetic oligonucleotide
uuuccccugccgucgguaa

SEQ ID NO: 1202147 - RNA, 19 nt, Artificial Sequence
  Description of Artificial Sequence: Synthetic oligonucleotide
ugcuagcgucuucuaggcu

SEQ ID NO: 1202148 - RNA, 19 nt, Artificial Sequence
  Description of Artificial Sequence: Synthetic oligonucleotide
cgcuuuaaagauccagugc

SEQ ID NO: 1202149 - RNA, 19 nt, Artificial Sequence
  Description of Artificial Sequence: Synthetic oligonucleotide
cccuuguuucagauaacag

SEQ ID NO: 1202150 - RNA, 19 nt, Artificial Sequence
  Description of Artificial Sequence: Synthetic oligonucleotide
cguaacgccccugugaagc

SEQ ID NO: 1202151 - RNA, 19 nt, Artificial Sequence
  Description of Artificial Sequence: Synthetic oligonucleotide
guucgugugcacgggugag

SEQ ID NO: 1202152 - RNA, 19 nt, Artificial Sequence
  Description of Artificial Sequence: Synthetic oligonucleotide
cacucucguacuugaccac

SEQ ID NO: 1202153 - RNA, 19 nt, Artificial Sequence
  Description of Artificial Sequence: Synthetic oligonucleotide
gcugucguuuuccacacaa

SEQ ID NO: 1202154 - RNA, 19 nt, Artificial Sequence
  Description of Artificial Sequence: Synthetic oligonucleotide
agcgugcgcagccgugccg

SEQ ID NO: 1202155 - RNA, 19 nt, Artificial Sequence
  Description of Artificial Sequence: Synthetic oligonucleotide
ggguccuagcuuugucugg

SEQ ID NO: 1202156 - RNA, 19 nt, Artificial Sequence
  Description of Artificial Sequence: Synthetic oligonucleotide
uggcacaguaaggccaagu

SEQ ID NO: 1202157 - RNA, 19 nt, Artificial Sequence
  Description of Artificial Sequence: Synthetic oligonucleotide
caguacugcgagguuguug

SEQ ID NO: 1202158 - RNA, 19 nt, Artificial Sequence
  Description of Artificial Sequence: Synthetic oligonucleotide
uagcuuugucugguaaauc

SEQ ID NO: 1202159 - RNA, 19 nt, Artificial Sequence
  Description of Artificial Sequence: Synthetic oligonucleotide
cgaguggagacucucccgg

SEQ ID NO: 1202160 - RNA, 19 nt, Artificial Sequence
  Description of Artificial Sequence: Synthetic oligonucleotide
aagcccggaguuugcuaaa

SEQ ID NO: 1202161 - RNA, 19 nt, Artificial Sequence
  Description of Artificial Sequence: Synthetic oligonucleotide
ggucaccgaccuuacugag

SEQ ID NO: 1202162 - RNA, 19 nt, Artificial Sequence
  Description of Artificial Sequence: Synthetic oligonucleotide
ucauggccggaagucuucu

SEQ ID NO: 1202163 - RNA, 19 nt, Artificial Sequence
  Description of Artificial Sequence: Synthetic oligonucleotide
gguuguggagcgugcgcag

SEQ ID NO: 1202164 - RNA, 19 nt, Artificial Sequence
  Description of Artificial Sequence: Synthetic oligonucleotide
gguaaagugcuccaagguu

SEQ ID NO: 1202165 - RNA, 19 nt, Artificial Sequence
  Description of Artificial Sequence: Synthetic oligonucleotide
uuggcuacauccggaugau

SEQ ID NO: 1202166 - RNA, 19 nt, Artificial Sequence
  Description of Artificial Sequence: Synthetic oligonucleotide
cuggagccauacucagcag

SEQ ID NO: 1202167 - RNA, 19 nt, Artificial Sequence
  Description of Artificial Sequence: Synthetic oligonucleotide
ccguacucuccaaaagaag

SEQ ID NO: 1202168 - RNA, 19 nt, Artificial Sequence
  Description of Artificial Sequence: Synthetic oligonucleotide
cuuguacuucccucguuua

SEQ ID NO: 1202169 - RNA, 19 nt, Artificial Sequence
  Description of Artificial Sequence: Synthetic oligonucleotide
gaaccaaacucccguucgu

SEQ ID NO: 1202170 - RNA, 19 nt, Artificial Sequence
  Description of Artificial Sequence: Synthetic oligonucleotide
gccggaagucuucuccagg

SEQ ID NO: 1202171 - RNA, 19 nt, Artificial Sequence
  Description of Artificial Sequence: Synthetic oligonucleotide
ccucguuuaccauacagua

SEQ ID NO: 1202172 - RNA, 19 nt, Artificial Sequence
  Description of Artificial Sequence: Synthetic oligonucleotide
guaacgccccugugaagca

SEQ ID NO: 1202173 - RNA, 19 nt, Artificial Sequence
  Description of Artificial Sequence: Synthetic oligonucleotide
gcgucguugagcagauugg

SEQ ID NO: 1202174 - RNA, 19 nt, Artificial Sequence
  Description of Artificial Sequence: Synthetic oligonucleotide
ggggacuaaguuagcacug
